(19) United States
(12) Patent Application Publication
(10) Pub. No.: US 2024/0100185 A1
(43) Pub. Date: Mar. 28, 2024

(54) COMPOSITIONS AND METHODS FOR THE TARGETING OF PTBP1

(71) Applicant: Scribe Therapeutics Inc., Alameda, CA (US)

(72) Inventors: Susan TOM, Alameda, CA (US); Oleh KRUPA, Oakland, CA (US); Benjamin OAKES, El Cerrito, CA (US); Sean HIGGINS, Alameda, CA (US); Sarah DENNY, San Francisco, CA (US); Brett T. STAAHL, Tiburon, CA (US); Isabel COLIN, Oakland, CA (US); Maroof ADIL, Davis, CA (US)

(21) Appl. No.: 18/255,182

(22) PCT Filed: Dec. 2, 2021
(86) PCT No.: PCT/US2021/061667

§ 371 Date: May 31, 2023

Related U.S. Application Data
(60) Provisional application No. 63/120,879, filed on Dec. 3, 2020.

(51) Int. Cl. A61K 48/00; A61P 25/16; C12N 9/22; C12N 15/113; C12N 15/90

(52) U.S. Cl. CPC A61K 48/005; A61P 25/16; C12N 9/22; C12N 15/113; C12N 15/907; C12N 2310/20; C12N 2800/80

(57) ABSTRACT

Provided herein are Class 2 Type V CRISPR systems comprising CRISPR-Cas polypeptides, (e.g., CasX:gRNA systems comprising CasX polypeptides), guide nucleic acids (gRNA), and optionally donor template nucleic acids, useful in the modification of a PTBP1 gene. The systems are also useful in methods for reprogramming certain eukaryotic cells into functional neurons by the knocking down or knocking out the PTBP1 gene in those cells. Also provided are methods of using such systems in methods of treatment of a subject with a PTBP1-related disease.

### CROSS-REFERENCE TO RELATED APPLICATIONS

[0001] This application claims priority to U.S. provisional patent application No. 63/120,879, filed on Dec. 3, 2020, the contents of which are incorporated by reference in their entirety herein.

### INCORPORATION BY REFERENCE OF SEQUENCE LISTING

[0002] This application contains a Sequence Listing which has been submitted in ASCII format via EFS-WEB and is hereby incorporated by reference in its entirety. Said ASCII copy, created on Dec. 1, 2021 is named SCRB_029_SeqList_ST25.txt and is 11.8 MB in size.

### BACKGROUND

[0003] Polypyrimidine tract-binding protein, also known as PTB or hnRNP I, is a group of three RNA-binding proteins that play a role in the regulation of alternative splicing events, but are also involved in alternative 3′ end processing, mRNA stability and RNA localization (Keppetipola N., et al. Neuronal regulation of pre-mRNA splicing by polypyrimidine tract binding proteins, PTBP1 and PTBP2. Crit Rev Biochem Mol Biol 47:360 (2012)). Genes whose alternative splicing are known to be regulated by PTB include α-TM, β-TM, α-actinin, c-src, γ-2 GABAA, CLCB, NMDA, FGFR-1 and -2, fibronectin, CASP-2, tau, and CT/CGRP (Wollerton, M C, et al. Autoregulation of Polypyrimidine Tract Binding Protein by Alternative Splicing Leading to Nonsense-Mediated Decay. Molecular Cell 13(1):91 (2004)). PTBP1 and its brain-specific homologue polypyrimidine tract-binding protein 2 (PTBP2, also known as nPTB) regulate neural precursor cell differentiation. In the mammalian fetal brain, PTBP1 and PTBP2 are expressed at high levels and then both transcripts decrease in the mature adult brain where staining patterns become mutually exclusive: PTBP1 in glial cells and PTBP2 mostly in neurons (Cheung, H C, et al. Splicing factors PTBP1 and PTBP2 promote proliferation and migration of glioma cell lines. Brain 132:2277 (2009)). In neurons, the loss of PTBP1 is accompanied by the up-regulation of the homologous protein PTBP2 (Boutz P L, et al. A post-transcriptional regulatory switch in polypyrimidine tract-binding proteins reprograms alternative splicing in developing neurons. Genes & Development 21:1636 (2007)). Studies have shown that depleting PTBP1 mRNA in astrocytes can convert these cells to functional neurons and that such a treatment can be applied to the substantia nigra of mice models of Parkinson's disease in order to convert astrocytes to dopaminergic neurons that innervate into and repopulate endogenous neural circuits, restoring motor function in these mice (Qian, H., et al. Reversing a model of Parkinson's disease with in situ converted nigral neurons. Nature 582:550 (2020)). The ability to convert astrocytes or other cells in the glial lineage into neurons would have utility in the treatment or prevention of multiple neurological diseases or the amelioration of neuronal injury due to trauma or other causes.

[0004] Increased expression of PTBP1 has been observed in a number of cancers, such as ovarian tumors, glioblastomas, bladder cancer, colon cancer and breast cancer (Li, X, et al. PTBP1 promotes tumorigenesis by regulating apoptosis and cell cycle in colon cancer. Cancer 105(12):1193 (2018); Bielli, P, et al. The Splicing Factor PTBP1 Promotes Expression of Oncogenic Splice Variants and Predicts Poor Prognosis in Patients with Non-muscle-Invasive Bladder Cancer. Clin Cancer Res; 24(21):5422 (2018)). PTBP1 is involved in almost all steps of mRNA regulation including alternative splicing metabolism during tumorigenesis due to its RNA-binding activity (Wang, Z, et al. High expression of PTBP1 promote invasion of colorectal cancer by alternative splicing of cortactin. Oncotarget. 8:36185 (2017)). Glioma is the most common type of malignant primary brain tumor, with high recurrence and lethality rates. The treatment and prognosis of severely ill patients with glioma have shown no significant improvements despite advances in surgery, radiation therapy, and chemotherapy. Genetic-based mechanisms to control gliomagenesis include the alternative expression of core genes (signal transducer and activator of transcription 3 [STAT3], as well as RNA-binding proteins (RBPs), which can bind to single- or double-stranded RNAs, also participate in regulating gliomagenesis (Uren P J, et al. RNA-Binding Protein Musashi1 Is a Central Regulator of Adhesion Pathways in Glioblastoma. Mol. Cell. Biol. 35: 2965 (2015)). Natural antisense transcripts (NATs) are a class of RNA molecules that are complementary to their paired RNA transcripts. It was found that PTB-AS, a novel natural antisense transcript (NAT) transcribed from the reverse strand of the PTBP1 gene, partially overlaps with the 3′ UTR of the PTBP1 mRNA and that its knockdown significantly inhibited glioma proliferation (in vitro and in vivo) and migration (Zhu, L., et al. PTB-AS, a Novel Natural Antisense Transcript, Promotes Glioma Progression by Improving PTBP1 mRNA Stability with SND1. Mol Ther. 27(9):P1621 (2019)). PTBP1 is aberrantly overexpressed in glioma and knock-down of this factor slowed cell proliferation (Cheung, H C, et al. Splicing factors PTBP1 and PTBP2 promote proliferation and migration of glioma cell lines. Brain 132:2277 (2009)). Thus, it represents a target for genetic editing.

[0005] The advent of CRISPR/Cas systems and the programmable nature of these minimal systems has facilitated their use as a versatile technology for genomic manipulation and engineering. Particular CRISPR proteins are particularly well suited for such manipulation. For example CasX, has compact size and ease of delivery, and the nucleotide sequence encoding the protein is relatively short; an advantage for its incorporation into viral and other vectors for delivery into a cell.

[0006] There remains a critical need for developing treatments for neurologic diseases and cancers using such technologies. Provided herein are compositions and methods for targeting PTBP1 to the address the same.

### SUMMARY

[0007] The present disclosure provides compositions comprising modified Class 2, Type V CRISPR proteins and guide nucleic acids used in the editing of PTBP1 gene target nucleic acid sequences. The Class 2, Type V CRISPR proteins and guide nucleic acids can be modified for passive entry into target cells. The Class 2, Type V CRISPR proteins and guide nucleic acids are useful in a variety of methods for target nucleic acid modification of PTBP1-related diseases, which methods are also provided.

[0008] In one aspect, the present disclosure relates to systems of CasX proteins and guide ribonucleic acids (CasX:gRNA system) and methods used to knock-down or knock-out a PTBP1 gene in order to reduce or eliminate expression of the PTBP1 gene product in subjects having a PTBP1-related disease. In some embodiments, the compositions and methods have utility in subjects having a neurologic disease or injury such as, but not limited to Parkinson's disease, Huntington's disease, Alzheimer's, amyotrophic lateral sclerosis (ALS), traumatic brain injury, and traumatic spinal cord injury. In other embodiments, the compositions and methods have utility in subjects having a cancer in which PTBP1 is overexpressed.

[0009] In some embodiments, the CasX:gRNA system gRNA is a gRNA, or a chimera of RNA and DNA, and may be a single-molecule gRNA or a dual-molecule gRNA. In other embodiments, the CasX:gRNA system gRNA has a targeting sequence complementary to a target nucleic acid sequence within the PTBP1 gene or that comprises a sequence having at least about 50%, at least about 60%, at least about 70%, at least about 80%, at least about 85%, at least about 90%, or at least about 95%, or 100% sequence identity to a sequence selected from the group consisting of SEQ ID NOS: 492-2100 and 2286-43569, wherein the targeting sequence comprises 15 to 30 consecutive nucleotides. In other embodiments, the targeting sequence of the gRNA consists of 20 nucleotides. In other embodiments, the targeting sequence consists of 19 nucleotides. In other embodiments, the targeting sequence consists of 18 nucleotides. In other embodiments, the targeting sequence consists of 17 nucleotides. In other embodiments, the targeting sequence consists of 16 nucleotides. In other embodiments, the targeting sequence consists of 15 nucleotides.

[0010] In some embodiments, the gRNA has a scaffold comprising a sequence selected from the group consisting of SEQ ID NOS: 4-16, or a sequence having at least about 50%, at least about 60%, at least about 70%, at least about 80%, at least about 90%, at least about 95%, at least about 96%, at least about 97%, at least about 98%, or at least about 99% sequence identity thereto. In other embodiments, the CasX:gRNA system gRNA has a scaffold comprising a sequence selected from the group consisting of SEQ ID NOS: 2101-2285, 43571-43661 and 44045, or a sequence having at least about 50%, at least about 60%, at least about 70%, at least about 80%, at least about 90%, at least about 95%, at least about 96%, at least about 97%, at least about 98%, at least about 99% sequence identity thereto. In other embodiments, the CasX:gRNA system gRNA has a scaffold comprising a sequence selected from the group consisting of SEQ ID NOS: 2238-2285, 43571-43661, 44045 and 44047, or a sequence having at least about 50%, at least about 60%, at least about 70%, at least about 80%, at least about 90%, at least about 95%, at least about 96%, at least about 97%, at least about 98%, at least about 99% sequence identity thereto. In other embodiments, the CasX:gRNA system gRNA has a scaffold comprising a sequence selected from the group consisting of SEQ ID NOS: 2238-2285, 43571-43661, 44045 and 44047, or a sequence having at least about 50%, at least about 60%, at least about 70%, at least about 80%, at least about 90%, at least about 95%, at least about 96%, at least about 97%, at least about 98%, at least about 99% sequence identity thereto.

[0011] In some embodiments, the CasX:gRNA systems comprise a CasX variant sequence of SEQ ID NOS: 36-99, 101-148 or 43662-43907, or a sequence having at least about 50%, at least about 60%, at least about 70%, at least about 80%, or at least about 90%, or at least about 95%, or at least about 96%, or at least about 97%, or at least about 98%, or at least about 99% sequence identity thereto. In some embodiments, the CasX:gRNA systems comprise a CasX variant sequence of SEQ ID NOS: 59, 72-99, 101-148, or 43662-43907, or a sequence having at least about 50%, at least about 60%, at least about 70%, at least about 80%, or at least about 90%, or at least about 95%, or at least about 96%, or at least about 97%, or at least about 98%, or at least about 99% sequence identity thereto. In some embodiments, the CasX:gRNA systems comprise a CasX variant sequence of SEQ ID NOS: 132-148 or 43662-43907, or a sequence having at least about 50%, at least about 60%, at least about 70%, at least about 80%, or at least about 90%, or at least about 95%, or at least about 96%, or at least about 97%, or at least about 98%, or at least about 99% sequence identity thereto. In these embodiments, a CasX variant exhibits one or more improved characteristics relative to a reference CasX protein, for example a reference protein of SEQ ID NO:1, SEQ ID NO:2 or SEQ ID NO:3, or to the variant from which it was derived; e.g., CasX 491 or CasX 515. In some embodiments, the CasX protein has binding affinity for a protospacer adjacent motif (PAM) sequence selected from the group consisting of TTC, ATC, GTC, and CTC. In some embodiments, the CasX protein has binding affinity for the PAM sequence that is at least 1.5-fold greater compared to the binding affinity of any one of the CasX proteins of SEQ ID NOS: 1-3 for the PAM sequences selected from the group consisting of TTC, ATC, GTC, and CTC.

[0012] In some embodiments of the CasX:gRNA system, the CasX molecule and the gRNA molecule are associated together in a ribonuclear protein complex (RNP). In a particular embodiment, the RNP comprising the CasX variant and the gRNA variant exhibits greater editing efficiency and/or binding of a target DNA sequence when any one of the PAM sequences TTC, ATC, GTC, or CTC is located 1 nucleotide 5′ to the non-target strand sequence having identity with the targeting sequence of the gRNA in a cellular assay system compared to the editing efficiency and/or binding of an RNP comprising a reference CasX protein and a reference gRNA in a comparable assay system. In a particular embodiment of the foregoing, the target DNA sequence is a sequence of the PTBP1 gene.

[0013] In some embodiments, the CasX:gRNA system further comprises a donor template comprising a nucleic acid comprising at least a portion of a PTBP1 gene, wherein the PTBP1 gene portion is selected from the group consisting of a PTBP1 exon, a PTBP1 intron, a PTBP1 intron-exon junction, a PTBP1 regulatory element, or combinations thereof, wherein the donor template is used to knock down or knock out the PTBP1 gene. In some cases the donor sequence is a single-stranded DNA template or a single stranded RNA template. In other cases, the donor template is a double-stranded DNA template.

[0014] In other embodiments, the disclosure relates to nucleic acids encoding the CasX:gRNA systems of any of the embodiments described herein, as well as vectors comprising the nucleic acids. In some embodiments, the vector is selected from the group consisting of a retroviral vector, a lentiviral vector, an adenoviral vector, an adeno-associated viral (AAV) vector, a herpes simplex virus (HSV) vector, a plasmid, a minicircle, a nanoplasmid, and an RNA vector. In other embodiments, the vector is a CasX delivery particle (XDP) comprising an RNP of a CasX and gRNA of any of the embodiments described herein and, optionally, a donor template nucleic acid.

[0015] In other embodiments, the disclosure provides a method of modifying a PTBP1 target nucleic acid sequence of a cell, wherein said method comprises introducing into the cell: a) CasX:gRNA system of any of the embodiments disclosed herein; b) the nucleic acid of any of the embodiments disclosed herein; c) the vector of any of the embodiments disclosed herein; d) the XDP of any of the embodiments disclosed herein; or e) a combination of the foregoing. In some embodiments of the method, the modifying comprises introducing an insertion, deletion, substitution, duplication, or inversion of one or more nucleotides in the PTBP1 target nucleic acid sequence as compared to the wild-type sequence. In some cases, the method further comprises contacting the target nucleic acid with a donor template nucleic acid of any of the embodiments disclosed herein wherein the donor template is inserted into the break sites of the target nucleic acid introduced by the CasX nuclease. In some embodiments of the method, the donor template comprises a nucleic acid comprising at least a portion of a PTBP1 gene but with one or more mutations for knocking out or knocking down the PTBP1 gene. In some cases, the modifying of the target nucleic acid sequence occurs in vitro or ex vivo. In some cases, the modifying of the target nucleic acid sequence occurs in vivo. In some embodiments, the cell is a eukaryotic cell selected from the group consisting of a rodent cell, a mouse cell, a rat cell, a primate cell, and a non-human primate cell. In some embodiments, the cell is a human cell. In some embodiments, the cell is a selected from the group consisting of a microglial cells, astrocytes, oligodendrocytes, and fibroblasts, wherein the cells are reprogrammed into functional neurons. In some embodiments, the cell is an autologous cell derived from a subject with a neurologic disease or injury. In other embodiments, the cell is allogenic, but of the same species as the subject to be treated. In other embodiments, the cell is a cancer cell wherein the cancer is selected from the group consisting of ovarian cancer, glioblastoma, bladder cancer, colon cancer and breast cancer.

[0016] In other embodiments, the disclosure provides methods of modifying a target nucleic acid sequence of the PTBP1 gene wherein the target cells are contacted using vectors encoding the CasX protein and one or more gRNAs comprising a targeting sequence complementary to the PTBP1 gene, and optionally further comprises a donor template, wherein the PTBP1 gene is knocked down or knocked out. In some cases, the vector is an Adeno-Associated Viral (AAV) vector selected from AAV1, AAV2, AAV3, AAV4, AAV5, AAV6, AAV7, AAV8, AAV9, AAV10, AAV11, AAV12, AAV-Rh74, AAVRh10, or a hybrid, a derivative or variant thereof. In other cases, the vector is a lentiviral vector. In other embodiments, the disclosure provides methods wherein the target cells are contacted using a vector wherein the vector is a virus-like particle (XDP) comprising an RNP of a CasX and gRNA of any of the embodiments described herein and, optionally, a donor template nucleic acid. In some embodiments of the method, the vector is administered to a subject at a therapeutically effective dose. The subject can be a mouse, rat, pig, non-human primate, or a human. The dose can be administered by a route of administration selected from intraparenchymal, intravenous, intra-arterial, intracerebroventricular, intracisternal, intrathecal, intracranial, lumbar, intraperitoneal, or combinations thereof.

[0017] In some embodiments, the disclosure provides populations of cells modified by the methods of any of the embodiments described herein, wherein the cells have been modified such that at least 70%, at least 75%, at least 80%, at least 85%, at least 90%, or at least 95% of the modified cells do not express a detectable level of PTBP1 protein. In other embodiments, the disclosure provides populations of cells modified by the methods of any of the embodiments described herein, wherein the cells have been modified such that the expression of PTBP1 protein is reduced by at least 70%, at least 75%, at least 80%, at least 85%, at least 90%, or at least 95% compared to cells where the PTBP1 gene has not been modified. In some cases, the population of cells is modified in vitro or ex vivo. In some embodiments, the cells are selected from the group consisting of microglial cells, astrocytes, oligodendrocytes, and fibroblasts, and the modification results in the reprogramming of the cells into functional neurons. The cells have utility in the treatment of neurologic diseases or injury and can be administered to a subject using a therapeutically-effective dose. In some cases, the population of modified cells are autologous with respect to the subject to be administered the cells. In other cases, the population of cells are allogeneic with respect to the subject to be administered the cells. In some cases, when administered to the subject, the cells or their progeny persist in the subject for at least one month, two month, three months, four months, five months, six months, seven months, eight months, nine months, ten months, eleven months, twelve months, thirteen months, fourteen month, fifteen months, sixteen months, seventeen months, eighteen months, nineteen months, twenty months, twenty-one months, twenty-two months, twenty-three months, two years, three years, four years, or five years after administration of the modified cells to the subject.

[0018] In other embodiments, the disclosure provides a method of treating a PTBP1-related disease in a subject in need thereof, comprising modifying a gene encoding PTBP1 gene in a cell of the subject, the modifying comprising contacting said cell with: a) CasX:gRNA system of any of the embodiments disclosed herein; b) the nucleic acid of any of the embodiments disclosed herein; c) the vector of any of the embodiments disclosed herein; d) the XDP of any of the embodiments disclosed herein; or e) a combination of the foregoing wherein the PTBP1 gene is knocked down or knocked out. In some embodiments, the PTBP1-related disease is a neurologic disease or neurologic injury selected from the group consisting of Parkinson's disease, Huntington's disease, Alzheimer's, amyotrophic lateral sclerosis (ALS), traumatic brain injury, and traumatic spinal cord injury. In other embodiments, the PTBP1-related disease is a cancer selected from the group consisting of ovarian cancer, glioblastoma, bladder cancer, colon cancer and breast cancer. In some cases, the methods of treating a subject with a PTBP1-related disease result in improvement in at least one clinically-relevant parameter. In other cases, the methods of treating a subject with a PTBP1-related disease result in improvement in at least two clinically-relevant parameters.

[0019] In other embodiments, the disclosure provides use of the CasX:gRNA systems, nucleic acids, vectors or XDP described herein for treating a PTBP1-related disease in a subject in need thereof. In some embodiments, the use comprises modifying a gene encoding PTBP1 gene in a cell of the subject, the modifying comprising contacting said cell with: a) CasX:gRNA system of any of the embodiments disclosed herein; b) the nucleic acid of any of the embodiments disclosed herein; c) the vector of any of the embodiments disclosed herein; d) the XDP of any of the embodiments disclosed herein; or e) a combination of the foregoing wherein the PTBP1 gene is knocked down or knocked out.

### INCORPORATION BY REFERENCE

[0020] All publications, patents, and patent applications mentioned in this specification are herein incorporated by reference to the same extent as if each individual publication, patent, or patent application was specifically and individually indicated to be incorporated by reference. The contents of U.S. provisional application 63/208,855 filed on Jun. 9, 2021, and U.S. provisional application 63/120,879, filed on Dec. 3, 2020, both applications which disclose CasX variants and gRNA variants, are hereby incorporated by reference in their entireties. The contents of international application publications WO 2020/247882, published Dec. 10, 2020, WO 2020/247883, published Dec. 10, 2020, and WO 2021/113772, published Jun. 10, 2021 are hereby incorporated by reference in their entireties.

### BRIEF DESCRIPTION OF THE DRAWINGS

[0021] The novel features of the disclosure are set forth with particularity in the appended claims. A better understanding of the features and advantages of the present disclosure will be obtained by reference to the following detailed description that sets forth illustrative embodiments, in which the principles of the disclosure are utilized, and the accompanying drawings of which:

[0022] FIG. 1 is a graph of the results of an assay for the quantification of active fractions of RNP formed by sgRNA174 and the CasX variants 119, 457, 488 and 491, as described in Example 8. “2” refers to the reference CasX protein of SEQ ID NO: 2, and sequences corresponding to sgRNA174 and the CasX variants are provided in Tables 3 and 4, respectively. Equimolar amounts of RNP and target were co-incubated and the amount of cleaved target was determined at the indicated timepoints. Mean and standard deviation of three independent replicates are shown for each timepoint. The biphasic fit of the combined replicates is shown.

[0023] FIG. 2 shows the quantification of active fractions of RNP formed by CasX2 (reference CasX protein of SEQ ID NO:2) and the modified sgRNAs, as described in Example 8. Equimolar amounts of RNP and target were co-incubated and the amount of cleaved target was determined at the indicated timepoints. Mean and standard deviation of three independent replicates are shown for each timepoint. The biphasic fit of the combined replicates is shown.

[0024] FIG. 3 shows the quantification of active fractions of RNP formed by CasX 491 and the modified sgRNAs under guide-limiting conditions, as described in Example 8. Equimolar amounts of RNP and target were co-incubated and the amount of cleaved target was determined at the indicated timepoints. The biphasic fit of the data is shown.

[0025] FIG. 4 shows the quantification of cleavage rates of RNP formed by sgRNA174 and the CasX variants, as described in Example 8. Target DNA was incubated with a 20-fold excess of the indicated RNP and the amount of cleaved target was determined at the indicated time points. Mean and standard deviation of three independent replicates are shown for each timepoint, except for 488 and 491 where a single replicate is shown. The monophasic fit of the combined replicates is shown.

[0026] FIG. 5 shows the quantification of cleavage rates of RNP formed by CasX2 and the sgRNA variants, as described in Example 8. Target DNA was incubated with a 20-fold excess of the indicated RNP and the amount of cleaved target was determined at the indicated time points. Mean and standard deviation of three independent replicates are shown for each timepoint. The monophasic fit of the combined replicates is shown.

[0027] FIG. 6 shows the quantification of initial velocities of RNP formed by CasX2 and the sgRNA variants, as described in Example 8. The first two time-points of the previous cleavage experiment were fit with a linear model to determine the initial cleavage velocity.

[0028] FIG. 7 shows the quantification of cleavage rates of RNP formed by CasX491 and the sgRNA variants, as described in Example 8. Target DNA was incubated with a 20-fold excess of the indicated RNP at 10° C. and the amount of cleaved target was determined at the indicated time points. The monophasic fit of the timepoints is shown.

[0029] FIG. 8 shows the quantification of competent fractions of RNP of CasX variant 515 and 526 complexed with gRNA variant 174 compared to RNP of reference CasX 2 complexed with gRNA 2 using equimolar amounts of indicated RNP and a complementary target, as described in Example 8. The biphasic fit for each time course or set of combined replicates is shown.

[0030] FIG. 9 shows the quantification of cleavage rates of RNP of CasX variant 515 and 526 complexed with gRNA variant 174 compared to RNP of reference CasX 2 complexed with gRNA 2 using with a 20-fold excess of the indicated RNP, as described in Example 8.

[0031] FIG. 10A shows the quantification of cleavage rates of CasX variants on TTC PAM, as described in Example 5. Target DNA substrates with identical spacers and the indicated PAM sequence were incubated with a 20-fold excess of the indicated RNP at 37° C. and the amount of cleaved target was determined at the indicated time points. Monophasic fit of a single replicate is shown.

[0032] FIG. 10B shows the quantification of cleavage rates of CasX variants on CTC PAM, as described in Example 5. Target DNA substrates with identical spacers and the indicated PAM sequence were incubated with a 20-fold excess of the indicated RNP at 37° C. and the amount of cleaved target was determined at the indicated time points. Monophasic fit of a single replicate is shown.

[0033] FIG. 10C shows the quantification of cleavage rates of CasX variants on GTC PAM, as described in Example 5. Target DNA substrates with identical spacers and the indicated PAM sequence were incubated with a 20-fold excess of the indicated RNP at 37° C. and the amount of cleaved target was determined at the indicated time points. Monophasic fit of a single replicate is shown.

[0034] FIG. 10D shows the quantification of cleavage rates of CasX variants on ATC PAM, as described in Example 5. Target DNA substrates with identical spacers and the indicated PAM sequence were incubated with a 20-fold excess of the indicated RNP at 37° C. and the amount of cleaved target was determined at the indicated time points. Monophasic fit of a single replicate is shown.

[0035] FIG. 11A shows the quantification of cleavage rates of RNP of CasX variant 491 and guide 174 on NTC PAMs, as described in Example 5. Timepoints were taken over the course of 10 minutes and the fraction cleaved was graphed for each target and timepoint, but only the first two minutes of the time course are shown for clarity.

[0036] FIG. 11B shows the quantification of cleavage rates of RNP of CasX variant 491 and guide 174 on NTT PAMs, as described in Example 5. Timepoints were taken over the course of 10 minutes and the fraction cleaved was graphed for each target and timepoint.

[0037] FIG. 12A shows the quantification of cleavage by RNP formed by sgRNA174 and the CasX variants 515 using spacer lengths of 18, 19, or 20 nucleotides, as described in Example 9. Target DNA was incubated with a 20-fold excess of the indicated RNP and the amount of cleaved target was determined at the indicated time points. Mean and standard deviation of three independent replicates are shown for each timepoint. The monophasic fit of the combined replicates is shown.

[0038] FIG. 12B shows the quantification of cleavage by RNP formed by sgRNA174 and the CasX variant 526 using spacer lengths of 18, 19, or 20 nucleotides, as described in Example 9. Target DNA was incubated with a 20-fold excess of the indicated RNP and the amount of cleaved target was determined at the indicated time points. Mean and standard deviation of three independent replicates are shown for each timepoint. The monophasic fit of the combined replicates is shown.

[0039] FIG. 13 is a schematic showing an example of CasX protein and scaffold DNA sequence for packaging in adeno-associated virus (AAV). The DNA segment between the AAV inverted terminal repeats (ITRs), comprised of a CasX-encoding DNA and its promoter, and scaffold-encoding DNA and its promoter gets packaged within an AAV capsid during AAV production.

[0040] FIG. 14 shows the results of an editing assay comparing gRNA scaffolds 229-237 to scaffold 174 in mouse neural progenitor cells (mNPC) isolated from the Ai9-tdtomato transgenic mice, as described in Example 12. Cells were nucleofected with the indicated doses of p59 plasmids encoding CasX 491, the scaffold, and spacer 11.30 (5′ AAGGGGCUCCGCACCACGCC 3′, SEQ ID NO: 44037) targeting mRHO. Editing at the mRHO locus was assessed 5 days post-transfection by NGS, and show that editing with constructs with scaffolds 230, 231, 234 and 235 demonstrated greater editing compared to constructs with scaffold 174 at both doses.

[0041] FIG. 15 shows the results of an editing assay comparing gRNA scaffolds 229-237 to scaffold 174 in mNPC cells, as described in Example 12. Cells were nucleofected with the indicated doses of p59 plasmids encoding CasX 491, the scaffold, and spacer 12.7 (5′ CUGCAUUCUAGUUGUGGUUU 3′, SEQ ID NO: 44038) targeting repeat elements preventing expression of the tdTomato fluorescent protein. Editing was assessed 5 days post-transfection by FACS, to quantify the fraction of tdTomato positive cells. Cells nucleofected with scaffolds 231-235 displayed approximately 35% greater editing compared to constructs with scaffold 174 at the high dose, and approximately 25% greater editing at the low dose.

[0042] FIG. 16A shows the results of an editing assay comparing gRNA scaffolds 235 to scaffold 174 in ARPE-19 mNPC cells, as described in Example 12. Cells were nucleofected with 1000 ng of AAV-cis plasmids expressing CasX protein 491 and guide variants 174 or 235 with spacer 11.1 targeting the exogenous RHO-GFP locus (5′ AAGGGGCUGCGUACCACACC 3′, SEQ ID NO: 44039) or guide variant 235 with a non-targeting control spacer. Frequency of GFP-cells was assessed by FACS 5 days post-transfection as a readout of indel-induced knock-down of WT RHO-GFP fusion protein. Frequency of RFP-cells was also measured as to assess off target cleavage. Spacer 11.1 harbors 1-bp mismatch to exogenous P23H-RHO. Data (n=3) are presented as mean±SEM.

[0043] FIG. 16B shows editing results of cells nucleofected with p590.4910.235.11.1 compared relative to benchmark p59.491.174.11.1 (set to a value of 1.0) in cells nucleofected with 1000 ng of plasmid, with editing improved 3-fold with the 235 gRNA scaffold compared to the 174 gRNA scaffold, as described in Example 12.

[0044] FIG. 17A shows the results of AAV-mediated editing assays comparing gRNA scaffold 235 to scaffold 174 and guide 11.30 at the endogenous mouse Rho exon 1 locus in mNPCs, as described in Example 12. FIG. 17A shows the results of editing assays in mNPCs at a 3.0e+5 AAV vg/cell MOI.

[0045] FIG. 17B shows the editing results as fold-change in editing levels for scaffold 235 relative to guide 174 (set to 1.0) with spacer 11.30 in cells infected at a 5.0e+5 MOI, as described in Example 12.

[0046] FIG. 18 depicts a schematic of the relative locations in the mouse PTBP1 gene that spacers 28.1-28.12 target, as described in Example 14. Locations targeted by spacers are indicated by black bars.

[0047] FIG. 19 shows the quantification of average percent editing measured as indel rate detected by NGS at the mouse PTBP1 locus generated by the indicated spacer, as described in Example 14.

[0048] FIG. 20 is a bar chart illustrating average editing rates by type of mutation generated (insertion, deletion, or both insertion and deletion) by an individual spacer, as described in Example 14.

[0049] FIG. 21 is a bar chart showing average percent editing measured as indel rate generated by the indicated spacer detected by NGS at the mouse PTBP1 locus at the indicated range of MOIs, as described in Example 14.

[0050] FIG. 22 is a schematic showing the molecular organization of the AAV construct used to encode, package, and deliver CasX:gNA systems, as described in Example 15.

[0051] FIG. 23 depicts the results of an editing assay measured as indel rate detected by NGS at the mouse PTBP1 locus for the indicated AAV-CasX (XAAV) dual-guide systems (28.10-12.7 and NT-12.7) transduced into mouse astrocytes in a series of three-fold dilution of MOI, as described in Example 15.

[0052] FIG. 24 illustrates the quantification of tdTomato+ astrocytes detected by flow cytometry four days post-transduction of the indicated XAAV dual-guide systems into primary mouse astrocytes, as described in Example 15.

[0053] FIG. 25A shows western blot quantification of PTBP1 levels at the indicated time points in mouse astrocytes treated with XDP-NT or XDP-PTBP1, as described in Example 16. The ratio of PTBP1 level over total protein was normalized to NT control in the graph.

[0054] FIG. 25B shows western blot quantification of PTBP1 levels quantified at Day 5, 12, and 21 of treatment, as described in Example 16. The ratio of PTBP1 level over total protein was normalized to NT control in the graph.

[0055] FIG. 26A shows western blot quantification of nPTB levels at the indicated time points in mouse astrocytes treated with XDP-NT or XDP-PTBP1, as described in Example 16. The ratio of nPTB level over total protein level was normalized to NT control in the graph.

[0056] FIG. 26B is a bar graph for nPTB levels quantified at Day 5, 12, and 21 of treatment, as described in Example 16. The ratio of nPTB level over total protein level was normalized to NT control in the graph.

[0057] FIG. 27 shows quantification of percent editing measured as indel rate detected by NGS at the PTBP1 locus in cultured mouse astrocytes that were untreated or treated with XDPs containing spacer targeting either PTBP1 or tdTomato (NT control), as described in Example 17. Editing levels at the PTBP1 locus were assessed at Day 5, 12, and 21 post-XDP treatment. Data are presented as mean±SEM for n=2 replicates.

[0058] FIG. 28 is a bar graph showing the quantification of mouse astrocytes stained for the neuronal marker MAP2 at Day 28 post-XDP treatment for the indicated experimental conditions, as described in Example 17. Data are presented as percent of total cells (quantified by DAPI staining) expressing MAP2. Data are mean±SEM for n=2 replicates (*p<0.05, **p<0.01).

[0059] FIG. 29A illustrates the quantification of NeuN+/tdTomato+ cells at 3 weeks and 12 weeks post-infection with dual-guide XAAVs harboring either the PTBP1-tdTomato or non-targeting (NT)-tdTomato spacer combination. Data points are presented as a fraction of total tdTomato+ edited cells, as described in Example 18. Data are presented as mean±SEM, with n=2 animals per experimental group (**p<0.01, ***p<0.001).

[0060] FIG. 29B illustrates the quantification of Sox9+/tdTomato+ cells at 3 weeks and 12 weeks post-infection with dual-guide XAAVs harboring either the PTBP1-tdTomato or non-targeting (NT)-tdTomato spacer combination. Data points are presented as a fraction of total tdTomato+ edited cells, as described in Example 18. Data are presented as mean±SEM, with n=2 animals per experimental group (**p<0.01, ***p<0.001).

[0061] FIG. 30 shows the quantification of average percent editing measured as indel rate generated by the indicated spacer, as detected by NGS at the rat PTBP1 locus, as described in Example 19.

[0062] FIG. 31A compares the editing activity for engineered CasX nucleases 491, 668, 672, and 676 at the mouse PTBP1 locus when delivered in vitro via XDPs at various doses, as described in Example 20.

[0063] FIG. 31B compares the editing activity for engineered CasX nucleases 491, 668, 672, and 676 at the mouse (FIG. 31A) or rat (FIG. 31B) PTBP1 locus when delivered in vitro via XDPs at various doses, as described in Example 20.

[0064] FIG. 32 shows the quantification of average percent editing measured as indel rate generated with the indicated spacer detected by NGS at the human PTBP1 locus, as described in Example 21.

[0065] FIG. 33A shows the quantification of percent editing of the human PTBP1 locus measured as indel rate detected by NGS at the PTBP1 locus generated using the two human PTBP1 spacers 30.17 and 30.19 and non-targeting spacer (NT) across the various MOIs, as described in Example 22.

[0066] FIG. 33B shows correlation plots between editing events at the human PTBP1 locus and RNA expression of PTBP1 for PTBP1 generated using spacers 30.17 and 30.19 in vitro, as described in Example 22. The expression levels were normalized relative to expressions from samples treated with the non-targeting control.

[0067] FIG. 33C show correlation plots between editing events at the human PTBP1 locus and RNA expression of nPTB for PTBP1 generated using spacers 30.17 and 30.19 in vitro, as described in Example 22. The expression levels were normalized relative to expressions from samples treated with the non-targeting control.

[0068] FIG. 34A is a representative image of XDP in vivo editing efficiency in a brain section at three weeks post-XDP injection into the substantia nigra, marked by tdTomato fluorescent reporter expression, and biodistribution in the mouse midbrain as described in Example 23.

[0069] FIG. 34B shows the fraction of total cells that were edited, based on quantification of tdTomato expression in the brain sections, as described in Example 23. Data are mean±SD for 40 tissue sections across two animals.

[0070] FIG. 34C is the quantification of cellular tropism of the XDP quantified by the estimated fraction of all cells or tdTomato+ edited cells within the mouse substantia nigra that were marked NeuN+(neuron) or Sox9+(astrocyte), as described in Example 23. Data are mean±SD for 40 tissue sections across two animals.

### DETAILED DESCRIPTION

[0071] While exemplary embodiments have been shown and described herein, it will be obvious to those skilled in the art that such embodiments are provided by way of example only. Numerous variations, changes, and substitutions will now occur to those skilled in the art without departing from the inventions claimed herein. It should be understood that various alternatives to the embodiments described herein may be employed in practicing the embodiments of the disclosure. It is intended that the claims define the scope of the invention and that methods and structures within the scope of these claims and their equivalents be covered thereby.

[0072] Unless otherwise defined, all technical and scientific terms used herein have the same meaning as commonly understood by one of ordinary skill in the art to which this invention belongs. Although methods and materials similar or equivalent to those described herein can be used in the practice or testing of the present embodiments, suitable methods and materials are described below. In case of conflict, the patent specification, including definitions, will control. In addition, the materials, methods, and examples are illustrative only and not intended to be limiting. Numerous variations, changes, and substitutions will now occur to those skilled in the art without departing from the invention.

### Definitions

[0073] The terms “polynucleotide” and “nucleic acid,” used interchangeably herein, refer to a polymeric form of nucleotides of any length, either ribonucleotides or deoxyribonucleotides. Thus, terms “polynucleotide” and “nucleic acid” encompass single-stranded DNA; double-stranded DNA; multi-stranded DNA; single-stranded RNA; double-stranded RNA; multi-stranded RNA; genomic DNA; cDNA; DNA-RNA hybrids; and a polymer comprising purine and pyrimidine bases or other natural, chemically or biochemically modified, non-natural, or derivatized nucleotide bases.

[0074] “Hybridizable” or “complementary” are used interchangeably to mean that a nucleic acid (e.g., RNA, DNA) comprises a sequence of nucleotides that enables it to non-covalently bind, i.e., form Watson-Crick base pairs and/or G/U base pairs, “anneal”, or “hybridize,” to another nucleic acid in a sequence-specific, antiparallel, manner (i.e., a nucleic acid specifically binds to a complementary nucleic acid) under the appropriate in vitro and/or in vivo conditions of temperature and solution ionic strength. It is understood that the sequence of a polynucleotide need not be 100% complementary to that of its target nucleic acid sequence to be specifically hybridizable; it can have at least about 70%, at least about 80%, or at least about 90%, or at least about 95% sequence identity and still hybridize to the target nucleic acid sequence. Moreover, a polynucleotide may hybridize over one or more segments such that intervening or adjacent segments are not involved in the hybridization event (e.g., a loop structure or hairpin structure, a ‘bulge’, ‘bubble’ and the like).

[0075] A “gene,” for the purposes of the present disclosure, includes a DNA region encoding a gene product (e.g., a protein, RNA), as well as all DNA regions which regulate the production of the gene product, whether or not such regulatory sequences are adjacent to coding and/or transcribed sequences. Accordingly, a gene may include accessory element sequences including, but not necessarily limited to, promoter sequences, terminators, translational regulatory sequences such as ribosome binding sites and internal ribosome entry sites, enhancers, silencers, insulators, boundary elements, replication origins, matrix attachment sites and locus control regions. Coding sequences encode a gene product upon transcription or transcription and translation; the coding sequences of the disclosure may comprise fragments and need not contain a full-length open reading frame. A gene can include both the strand that is transcribed as well as the complementary strand containing the anticodons.

[0076] The term “downstream” refers to a nucleotide sequence that is located 3′ to a reference nucleotide sequence. In certain embodiments, downstream nucleotide sequences relate to sequences that follow the starting point of transcription. For example, the translation initiation codon of a gene is located downstream of the start site of transcription.

[0077] The term “upstream” refers to a nucleotide sequence that is located 5′ to a reference nucleotide sequence. In certain embodiments, upstream nucleotide sequences relate to sequences that are located on the 5′ side of a coding region or starting point of transcription. For example, most promoters are located upstream of the start site of transcription.

[0078] The term “adjacent to” with respect to polynucleotide or amino acid sequences refers to sequences that are next to, or adjoining each other in a polynucleotide or polypeptide. The skilled artisan will appreciate that two sequences can be considered to be adjacent to each other and still encompass a limited amount of intervening sequence, e.g., 1, 2, 3, 4, 5, 6, 7, 8, 9 or 10 nucleotides or amino acids.

[0079] The term “accessory element” is used interchangeably herein with the term “accessory sequence,” and is intended to include, inter alia, polyadenylation signals (poly(A) signal), enhancer elements, introns, posttranscriptional regulatory elements (PTREs), nuclear localization signals (NLS), deaminases, DNA glycosylase inhibitors, additional promoters, factors that stimulate CRISPR-mediated homology-directed repair (e.g. in cis or in trans), activators or repressors of transcription, self-cleaving sequences, and fusion domains, for example a fusion domain fused to a CRISPR protein. It will be understood that the choice of the appropriate accessory element or elements will depend on the encoded component to be expressed (e.g., protein or RNA) or whether the nucleic acid comprises multiple components that require different polymerases or are not intended to be expressed as a fusion protein.

[0080] The term “promoter” refers to a DNA sequence that contains a transcription start site and additional sequences to facilitate polymerase binding and transcription. Exemplary eukaryotic promoters include elements such as a TATA box, and/or B recognition element (BRE) and assists or promotes the transcription and expression of an associated transcribable polynucleotide sequence and/or gene (or transgene). A promoter can be synthetically produced or can be derived from a known or naturally occurring promoter sequence or another promoter sequence. A promoter can be proximal or distal to the gene to be transcribed. A promoter can also include a chimeric promoter comprising a combination of two or more heterologous sequences to confer certain properties. A promoter of the present disclosure can include variants of promoter sequences that are similar in composition, but not identical to, other promoter sequence(s) known or provided herein. A promoter can be classified according to criteria relating to the pattern of expression of an associated coding or transcribable sequence or gene operably linked to the promoter, such as constitutive, developmental, tissue-specific, inducible, etc. A promoter can also be classified according to its strength. As used in the context of a promoter, “strength” refers to the rate of transcription of the gene controlled by the promoter. A “strong” promoter means the rate of transcription is high, while a “weak” promoter means the rate of transcription is relatively low.

[0081] A promoter of the disclosure can be a Polymerase II (Pol II) promoter. Polymerase II transcribes all protein coding and many non-coding genes. A representative Pol II promoter includes a core promoter, which is a sequence of about 100 base pairs surrounding the transcription start site, and serves as a binding platform for the Pol II polymerase and associated general transcription factors. The promoter may contain one or more core promoter elements such as the TATA box, BRE, Initiator (INR), motif ten element (MTE), downstream core promoter element (DPE), downstream core element (DCE), although core promoters lacking these elements are known in the art.

[0082] A promoter of the disclosure can be a Polymerase III (Pol III) promoter. Pol III transcribes DNA to synthesize small ribosomal RNAs such as the 5S rRNA, tRNAs, and other small RNAs. Representative Pol III promoters use internal control sequences (sequences within the transcribed section of the gene) to support transcription, although upstream elements such as the TATA box are also sometimes used. All Pol III promoters are envisaged as within the scope of the instant disclosure.

[0083] The term “enhancer” refers to regulatory DNA sequences that, when bound by specific proteins called transcription factors, regulate the expression of an associated gene. Enhancers may be located in the intron of the gene, or 5′ or 3′ of the coding sequence of the gene. Enhancers may be proximal to the gene (i.e., within a few tens or hundreds of base pairs (bp) of the promoter), or may be located distal to the gene (i.e., thousands of bp, hundreds of thousands of bp, or even millions of bp away from the promoter). A single gene may be regulated by more than one enhancer, all of which are envisaged as within the scope of the instant disclosure.

[0084] As used herein, a “post-transcriptional regulatory element (PRE),” such as a hepatitis PRE, refers to a DNA sequence that, when transcribed creates a tertiary structure capable of exhibiting post-transcriptional activity to enhance or promote expression of an associated gene operably linked thereto.

[0085] As used herein, a “post-transcriptional regulatory element (PTRE),” such as a hepatitis PTRE, refers to a DNA sequence that, when transcribed creates a tertiary structure capable of exhibiting post-transcriptional activity to enhance or promote expression of an associated gene operably linked thereto.

[0086] “Recombinant,” as used herein, means that a particular nucleic acid (DNA or RNA) is the product of various combinations of cloning, restriction, and/or ligation steps resulting in a construct having a structural coding or non-coding sequence distinguishable from endogenous nucleic acids found in natural systems. Generally, DNA sequences encoding the structural coding sequence can be assembled from cDNA fragments and short oligonucleotide linkers, or from a series of synthetic oligonucleotides, to provide a synthetic nucleic acid which is capable of being expressed from a recombinant transcriptional unit contained in a cell or in a cell-free transcription and translation system. Such sequences can be provided in the form of an open reading frame uninterrupted by internal non-translated sequences, or introns, which are typically present in eukaryotic genes. Genomic DNA comprising the relevant sequences can also be used in the formation of a recombinant gene or transcriptional unit. Sequences of non-translated DNA may be present 5′ or 3′ from the open reading frame, where such sequences do not interfere with manipulation or expression of the coding regions, and may indeed act to modulate production of a desired product by various mechanisms (see “enhancers” and “promoters”, above).

[0087] The term “recombinant polynucleotide” or “recombinant nucleic acid” refers to one which is not naturally occurring, e.g., is made by the artificial combination of two otherwise separated segments of sequence through human intervention. This artificial combination is often accomplished by either chemical synthesis means, or by the artificial manipulation of isolated segments of nucleic acids, e.g., by genetic engineering techniques. Such is usually done to replace a codon with a redundant codon encoding the same or a conservative amino acid, while typically introducing or removing a sequence recognition site. Alternatively, it is performed to join together nucleic acid segments of desired functions to generate a desired combination of functions. This artificial combination is often accomplished by either chemical synthesis means, or by the artificial manipulation of isolated segments of nucleic acids, e.g., by genetic engineering techniques.

[0088] Similarly, the term “recombinant polypeptide” or “recombinant protein” refers to a polypeptide or protein which is not naturally occurring, e.g., is made by the artificial combination of two otherwise separated segments of amino sequence through human intervention. Thus, e.g., a protein that comprises a heterologous amino acid sequence is recombinant.

[0089] As used herein, the term “contacting” means establishing a physical connection between two or more entities. For example, contacting a target nucleic acid with a guide nucleic acid means that the target nucleic acid and the guide nucleic acid are made to share a physical connection; e.g., can hybridize if the sequences share sequence similarity.

[0090] “Dissociation constant”, or “K_{d}”, are used interchangeably and mean the affinity between a ligand “L” and a protein “P”; i.e., how tightly a ligand binds to a particular protein. It can be calculated using the formula K_{d}=[L][P]/[LP], where [P], [L] and [LP] represent molar concentrations of the protein, ligand and complex, respectively.

[0091] The disclosure provides systems and methods useful for editing a target nucleic acid sequence. As used herein “editing” is used interchangeably with “modifying” and includes but is not limited to cleaving, nicking, deleting, knocking in, knocking out, and the like.

[0092] By “cleavage” it is meant the breakage of the covalent backbone of a target nucleic acid molecule (e.g., RNA, DNA). Cleavage can be initiated by a variety of methods including, but not limited to, enzymatic or chemical hydrolysis of a phosphodiester bond. Both single-stranded cleavage and double-stranded cleavage are possible, and double-stranded cleavage can occur as a result of two distinct single-stranded cleavage events.

[0093] The term “knock-out” refers to the elimination of a gene or the expression of a gene. For example, a gene can be knocked out by either a deletion or an addition of a nucleotide sequence that leads to a disruption of the reading frame. As another example, a gene may be knocked out by replacing a part of the gene with an irrelevant sequence. The term “knock-down” as used herein refers to reduction in the expression of a gene or its gene product(s). As a result of a gene knock-down, the protein activity or function may be attenuated or the protein levels may be reduced or eliminated.

[0094] As used herein, “homology-directed repair” (HDR) refers to the form of DNA repair that takes place during repair of double-strand breaks in cells. This process requires nucleotide sequence homology, and uses a donor template to repair or knock-out a target DNA, and leads to the transfer of genetic information from the donor to the target. Homology-directed repair can result in an alteration of the sequence of the target sequence by insertion, deletion, or mutation if the donor template differs from the target DNA sequence and part or all of the sequence of the donor template is incorporated into the target DNA.

[0095] As used herein, “non-homologous end joining” (NHEJ) refers to the repair of double-strand breaks in DNA by direct ligation of the break ends to one another without the need for a homologous template (in contrast to homology-directed repair, which requires a homologous sequence to guide repair). NHEJ often results in the loss (deletion) of nucleotide sequence near the site of the double-strand break.

[0096] As used herein “micro-homology mediated end joining” (MMEJ) refers to a mutagenic DSB repair mechanism, which always associates with deletions flanking the break sites without the need for a homologous template (in contrast to homology-directed repair, which requires a homologous sequence to guide repair). MMEJ often results in the loss (deletion) of nucleotide sequence near the site of the double-strand break. A polynucleotide or polypeptide has a certain percent “sequence similarity” or “sequence identity” to another polynucleotide or polypeptide, meaning that, when aligned, that percentage of bases or amino acids are the same, and in the same relative position, when comparing the two sequences. Sequence similarity (sometimes referred to as percent similarity, percent identity, or homology) can be determined in a number of different manners. To determine sequence similarity, sequences can be aligned using the methods and computer programs that are known in the art, including BLAST, available over the world wide web at ncbi.nlm.nih.gov/BLAST. Percent complementarity between particular stretches of nucleic acid sequences within nucleic acids can be determined using any convenient method. Example methods include BLAST programs (basic local alignment search tools) and PowerBLAST programs (Altschul et al., J. Mol. Biol., 1990, 215, 403-410; Zhang and Madden, Genome Res., 1997, 7, 649-656) or by using the Gap program (Wisconsin Sequence Analysis Package, Version 8 for Unix, Genetics Computer Group, University Research Park, Madison Wis.), e.g., using default settings, which uses the algorithm of Smith and Waterman (Adv. Appl. Math., 1981, 2, 482-489).

[0097] The terms “polypeptide,” and “protein” are used interchangeably herein, and refer to a polymeric form of amino acids of any length, which can include coded and non-coded amino acids, chemically or biochemically modified or derivatized amino acids, and polypeptides having modified peptide backbones. The term includes fusion proteins, including, but not limited to, fusion proteins with a heterologous amino acid sequence.

[0098] A “vector” or “expression vector” is a replicon, such as plasmid, phage, virus, virus-like particle or cosmid, to which another DNA segment, i.e., an “insert”, may be attached so as to bring about the replication or expression of the attached segment in a cell.

[0099] The term “naturally-occurring” or “unmodified” or “wild type” as used herein as applied to a nucleic acid, a polypeptide, a cell, or an organism, refers to a nucleic acid, polypeptide, cell, or organism that is found in nature.

[0100] As used herein, a “mutation” refers to an insertion, deletion, substitution, duplication, or inversion of one or more amino acids or nucleotides as compared to a wild-type or reference amino acid sequence or to a wild-type or reference nucleotide sequence.

[0101] As used herein the term “isolated” is meant to describe a polynucleotide, a polypeptide, or a cell that is in an environment different from that in which the polynucleotide, the polypeptide, or the cell naturally occurs. An isolated genetically modified host cell may be present in a mixed population of genetically modified host cells.

[0102] A “host cell,” as used herein, denotes a eukaryotic cell, a prokaryotic cell, or a cell from a multicellular organism (e.g., in a cell line), which eukaryotic or prokaryotic cells are used as recipients for a nucleic acid (e.g., an expression vector), and include the progeny of the original cell which has been genetically modified by the nucleic acid. It is understood that the progeny of a single cell may not necessarily be completely identical in morphology or in genomic or total DNA complement as the original parent, due to natural, accidental, or deliberate mutation. A “recombinant host cell” (also referred to as a “genetically modified host cell”) is a host cell into which has been introduced a heterologous nucleic acid, e.g., an expression vector.

[0103] The term “tropism” ″ as used herein refers to preferential entry of the virus like particle (XDP, sometimes also referred to herein as XDP) into certain cell or tissue type(s) and/or preferential interaction with the cell surface that facilitates entry into certain cell or tissue types, optionally and preferably followed by expression (e.g., transcription and, optionally, translation) of sequences carried by the XDP into the cell.

[0104] The terms “pseudotype” or “pseudotyping” as used herein, refers to viral envelope proteins that have been substituted with those of another virus possessing preferable characteristics. For example, HIV can be pseudotyped with vesicular stomatitis virus G-protein (VSV-G) envelope proteins (amongst others, described herein, below), which allows HIV to infect a wider range of cells because HIV envelope proteins target the virus mainly to CD4+ presenting cells.

[0105] The term “tropism factor” as used herein refers to components integrated into the surface of an XDP that provides tropism for a certain cell or tissue type. Non-limiting examples of tropism factors include glycoproteins, antibody fragments (e.g., scFv, nanobodies, linear antibodies, etc.), receptors and ligands to target cell markers.

[0106] A “target cell marker” refers to a molecule expressed by a target cell including but not limited to cell-surface receptors, cytokine receptors, antigens, tumor-associated antigens, glycoproteins, oligonucleotides, enzymatic substrates, antigenic determinants, or binding sites that may be present in the on the surface of a target tissue or cell that may serve as ligands for an antibody fragment or glycoprotein tropism factor.

[0107] The term “conservative amino acid substitution” refers to the interchangeability in proteins of amino acid residues having similar side chains. For example, a group of amino acids having aliphatic side chains consists of glycine, alanine, valine, leucine, and isoleucine; a group of amino acids having aliphatic-hydroxyl side chains consists of serine and threonine; a group of amino acids having amide-containing side chains consists of asparagine and glutamine; a group of amino acids having aromatic side chains consists of phenylalanine, tyrosine, and tryptophan; a group of amino acids having basic side chains consists of lysine, arginine, and histidine; and a group of amino acids having sulfur-containing side chains consists of cysteine and methionine. Exemplary conservative amino acid substitution groups are: valine-leucine-isoleucine, phenylalanine-tyrosine, lysine-arginine, alanine-valine, and asparagine-glutamine.

[0108] The term “antibody,” as used herein, encompasses various antibody structures, including but not limited to monoclonal antibodies, polyclonal antibodies, multispecific antibodies (e.g., bispecific antibodies), nanobodies, single domain antibodies such as VHH antibodies, and antibody fragments so long as they exhibit the desired antigen-binding activity or immunological activity. Antibodies represent a large family of molecules that include several types of molecules, such as IgD, IgG, IgA, IgM and IgE.

[0109] An “antibody fragment” refers to a molecule other than an intact antibody that comprises a portion of an intact antibody and that binds the antigen to which the intact antibody binds. Examples of antibody fragments include but are not limited to Fv, Fab, Fab′, Fab′-SH, F(ab′)2, diabodies, single chain diabodies, linear antibodies, a single domain antibody, a single domain camelid antibody, single-chain variable fragment (scFv) antibody molecules, and multispecific antibodies formed from antibody fragments.

[0110] As used herein, “treatment” or “treating,” are used interchangeably herein and refer to an approach for obtaining beneficial or desired results, including but not limited to a therapeutic benefit and/or a prophylactic benefit. By therapeutic benefit is meant eradication or amelioration of the underlying disorder or disease being treated. A therapeutic benefit can also be achieved with the eradication or amelioration of one or more of the symptoms or an improvement in one or more clinical parameters associated with the underlying disease such that an improvement is observed in the subject, notwithstanding that the subject may still be afflicted with the underlying disorder.

[0111] The terms “therapeutically effective amount” and “therapeutically effective dose”, as used herein, refer to an amount of a drug or a biologic, alone or as a part of a composition, that is capable of having any detectable, beneficial effect on any symptom, aspect, measured parameter or characteristics of a disease state or condition when administered in one or repeated doses to a subject such as a human or an experimental animal. Such effect need not be absolute to be beneficial.

[0112] As used herein, “administering” means a method of giving a dosage of a compound (e.g., a composition of the disclosure) or a composition (e.g., a pharmaceutical composition) to a subject.

[0113] A “subject” is a mammal. Mammals include, but are not limited to, domesticated animals, non-human primates, humans, dogs, rabbits, mice, rats and other rodents.

[0114] All publications, patents, and patent applications mentioned in this specification are herein incorporated by reference to the same extent as if each individual publication, patent, or patent application was specifically and individually indicated to be incorporated by reference.

### a. General Methods

[0115] The practice of the present invention employs, unless otherwise indicated, conventional techniques of immunology, biochemistry, chemistry, molecular biology, microbiology, cell biology, genomics and recombinant DNA, which can be found in such standard textbooks as Molecular Cloning: A Laboratory Manual, 3rd Ed. (Sambrook et al., Harbor Laboratory Press 2001); Short Protocols in Molecular Biology, 4th Ed. (Ausubel et al. eds., John Wiley & Sons 1999); Protein Methods (Bollag et al., John Wiley & Sons 1996); Nonviral Vectors for Gene Therapy (Wagner et al. eds., Academic Press 1999); Viral Vectors (Kaplift & Loewy eds., Academic Press 1995); Immunology Methods Manual (I. Lefkovits ed., Academic Press 1997); and Cell and Tissue Culture: Laboratory Procedures in Biotechnology (Doyle & Griffiths, John Wiley & Sons 1998), the disclosures of which are incorporated herein by reference.

[0116] Where a range of values is provided, it is understood that endpoints are included and that each intervening value, to the tenth of the unit of the lower limit unless the context clearly dictates otherwise, between the upper and lower limit of that range and any other stated or intervening value in that stated range, is encompassed. The upper and lower limits of these smaller ranges may independently be included in the smaller ranges, and are also encompassed, subject to any specifically excluded limit in the stated range. Where the stated range includes one or both of the limits, ranges excluding either or both of those included limits are also included.

[0117] Unless defined otherwise, all technical and scientific terms used herein have the same meaning as commonly understood by one of ordinary skill in the art to which this invention belongs. All publications mentioned herein are incorporated herein by reference to disclose and describe the methods and/or materials in connection with which the publications are cited.

[0118] It must be noted that as used herein and in the appended claims, the singular forms “a,” “an,” and “the” include plural referents unless the context clearly dictates otherwise.

[0119] It will be appreciated that certain features of the disclosure, which are, for clarity, described in the context of separate embodiments, may also be provided in combination in a single embodiment. In other cases, various features of the disclosure, which are, for brevity, described in the context of a single embodiment, may also be provided separately or in any suitable sub-combination. It is intended that all combinations of the embodiments pertaining to the disclosure are specifically embraced by the present disclosure and are disclosed herein just as if each and every combination was individually and explicitly disclosed. In addition, all sub-combinations of the various embodiments and elements thereof are also specifically embraced by the present disclosure and are disclosed herein just as if each and every such sub-combination was individually and explicitly disclosed herein.

### b. Systems for Genetic Editing of PTBP1 Genes

[0120] In a first aspect, the present disclosure provides systems comprising a Class 2, Type V CRISPR nuclease protein and one or more guide nucleic acids (gRNA), as well as nucleic acids encoding the CRISPR nuclease proteins and gRNA, for use in modifying or editing a PTBP1 gene (referred to herein as the “target nucleic acid”).

[0121] As used herein, a “system,” such as the systems comprising a CRISPR nuclease protein and one or more gRNAs the disclosure, as well as nucleic acids encoding the CRISPR nuclease proteins and gRNA and vectors comprising the nucleic acids or CRISPR nuclease protein and one or more gRNAs the disclosure, is used interchangeably with term “composition.”

[0122] The PTBP1 gene encodes polypyrimidine tract-binding protein 1, a protein that plays a role in the regulation of alternative splicing events, but is also involved in alternative 3′ end processing, mRNA stability and RNA localization (Keppetipola N., et al. Neuronal regulation of pre-mRNA splicing by polypyrimidine tract binding proteins, PTBP1 and PTBP2. Crit Rev Biochem Mol Biol 47:360 (2012)). The human PTBP1 gene (HGNC:9583) encodes a protein of 531 amino acids having the sequence MDGIVPDIAVGTKRGSDELFSTCVTNGPFIMSSNSASAANGNDSKKFKGDSRSAGVPSRVIHIR KLPIDVTEGEVISLGLPFGKVTNLLMLKGKNQAFIEMNTEEAANTMVNYYTSVTPVLRGQPIYI QFSNHKELKTDSSPNQARAQAALQAVNSVQSGNLALAASAAAVDAGMAMAGQSPVLRIIVENLF YPVTLDVLHQIFSKFGTVLKIITFTKNNQFQALLQYADPVSAQHAKLSLDGQNIYNACCTLRID FSKLTSLNVKYNNDKSRDYTRPDLPSGDSQPSLDQTMAAAFGLSVPNVHGALAPLAIPSAAAAA AAAGRIAIPGLAGAGNSVLLVSNLNPERVTPQSLFILFGVYGDVQRVKILFNKKENALVQMADG NQAQLAMSHLNGHKLHGKPIRITLSKHQNVQLPREGQEDQGLTKDYGNSPLHRFKKPGSKNFQN IFPPSATLHLSNIPPSVSEEDLKVLFSSNGGVVKGFKFFQKDRKMALIQMGSVEEAVQALIDLH NHDLGENHHLRVSFSKSTI (SEQ ID NO:100). The human PTBP1 gene is defined as the sequence that spans chr19:797,075-812,327 (GRCh38/hg38), comprising 15,253 base-pairs in size on the short arm of chromosome 19 and has 16 exons; however the PTBP1 protein results from skipping of exon 9. Alternative splicing of PTB1 exon 2 to 10 has also been observed, leading to a functionally different protein (Wollerton, M C, et al. Autoregulation of Polypyrimidine Tract Binding Protein by Alternative Splicing Leading to Nonsense-Mediated Decay. Molecular Cell 13(1):91 (2004)).

[0123] In some embodiments, the disclosure provides systems specifically designed to modify the PTBP1 gene in eukaryotic cells. Generally, any portion of the PTBP1 target nucleic acid can be targeted using the programmable compositions and methods provided herein. In some embodiments, the portion of the PTBP1 gene to be modified is selected from the group consisting of a PTBP1 intron, a PTBP1 exon, a PTBP1 intron-exon junction, a PTBP1 regulatory element, and an intergenic region, or the modification is deletion or mutation of one or more exons.

[0124] In some embodiments, the CRISPR nuclease is a Class 2, Type V nuclease. In some embodiments, the Class 2, Type V nuclease is selected from the group consisting of Cas12a, Cas12b, Cas12c, Cas12d (CasY), Cas12j, Cas12k, C2c4, C2c8, C2c5, C2c10, C2c9, CasZ, and CasX. In some embodiments, the disclosure provides systems comprising one or more CasX proteins and one or more guide nucleic acids (gRNA) as a CasX:gRNA system. In some embodiments, the disclosure provides systems comprising one or more CasX variant proteins and one or more guide nucleic acids (gRNA) as a CasX:gRNA system designed to target and edit specific locations in the target nucleic acid sequence. In other embodiments, the CasX:gRNA systems of the disclosure comprise one or more CasX variant proteins, one or more guide nucleic acids (gRNA) and one or more donor template nucleic acids comprising a nucleic acid encoding a portion of a PTBP1 gene. Each of these components and their use in the editing of the PTBP1 gene is described herein, below

[0125] In some embodiments, the disclosure provides gene editing pairs of a CasX variant and a gRNA of any of the embodiments described herein that are capable of being bound together prior to their use for gene editing and, thus, are “pre-complexed” as a ribonuclear protein complex (RNP). The use of a pre-complexed RNP confers advantages in the delivery of the system components to a cell or target nucleic acid sequence for editing of the target nucleic acid sequence.

[0126] In some embodiments, the functional RNP can be delivered ex vivo to a cell by electrophoresis or by chemical means. In other embodiments, the functional RNP can be delivered either ex vivo or in vivo by a vector in their functional form. The gRNA can provide target specificity to the complex by including a targeting sequence (or “spacer”) having a nucleotide sequence that is complementary to a sequence of the target nucleic acid sequence while the CasX protein of the pre-complexed CasX:gRNA provides the site-specific activity such as cleavage or nicking of the target sequence that is guided to a target site (e.g., stabilized at a target site) within a target nucleic acid sequence by virtue of its association with the gRNA. The CasX proteins and gRNA components of the CasX:gRNA systems and their sequences, features and functions are described more fully, below.

[0127] In some cases, the CasX:gRNA systems have utility in the treatment of a subject having a neurologic disease, such as Parkinson's disease, Huntington's disease, Alzheimer's, amyotrophic lateral sclerosis (ALS), traumatic brain injury, traumatic spinal cord injury. In other cases, the CasX:gRNA systems have utility in the treatment of a subject having certain cancers, such as ovarian tumors, glioblastomas, colon cancer and breast cancer. Each of the components of the CasX:gRNA systems and their use in the editing of the target nucleic acids in cells is described more fully, below.

### c. Guide Nucleic Acids of the Systems for Genetic Editing

[0128] In another aspect, the disclosure relates to specifically-designed guide ribonucleic acids (gRNA) comprising a targeting sequence complementary to (and are therefore able to hybridize with) a target nucleic acid sequence of a PTBP1 gene that have utility in genome editing of the PTBP1 target nucleic acid in a cell. It is envisioned that in some embodiments, multiple gRNAs are delivered in the systems for the modification of a target nucleic acid. For example, a pair of gRNAs with targeting sequences to different or overlapping regions of the target nucleic acid sequence can be used in order to bind and cleave at two different or overlapping sites within the gene, which is then edited by non-homologous end joining (NHEJ), homology-directed repair (HDR), homology-independent targeted integration (HITI), micro-homology mediated end joining (MMEJ), single strand annealing (SSA) or base excision repair (BER). For example, when an editing event designed to delete one or more exons of the PTBP1 gene is desired, a pair of gRNAs can be used in order to bind and cleave at two different sites 5′ and 3′ of the targeted exon(s) within the PTBP1 gene. In the context of nucleic acids, cleavage refers to the breakage of the covalent backbone of a nucleic acid molecule; either DNA or RNA, by the nuclease. Both single-stranded cleavage and double-stranded cleavage are possible, and double-stranded cleavage can occur as a result of two distinct single-stranded cleavage events. In some embodiments, small indels introduced by the CasX:gRNA systems of the embodiments described herein and cellular repair systems can disrupt the protein reading frame of the PTBP1 gene. In some embodiments, the disclosure provides gRNAs utilized in the CasX:gRNA systems that have utility in genome editing a PTBP1 gene in a eukaryotic cell. The present disclosure provides specifically-designed gRNAs wherein the targeting sequence (or spacer, described more fully, below) of the gRNA is complementary to (and are therefore able to hybridize with) target nucleic acid sequences when used as a component of the gene editing CasX:gRNA systems. Representative, but non-limiting examples of targeting sequences to the PTBP1 target nucleic acid that can be utilized in the gRNA of the embodiments are selected from the group consisting of SEQ ID NOS: 492-2100 and 2286-43569. In some embodiments, the gRNA is a ribonucleic acid molecule (“gRNA”); and in other embodiments, the gRNA is a chimera, and comprises both DNA and RNA. As used herein, the term gRNA covers naturally-occurring molecules, as well as sequence variants.

### d. Reference gRNA and gRNA Variants

[0129] As used herein, a “reference gRNA” refers to a CRISPR guide nucleic acid comprising a wild-type sequence of a naturally-occurring gRNA. In some embodiments, a reference gRNA of the disclosure may be subjected to one or more mutagenesis methods, such as the mutagenesis methods described herein, which may include Deep Mutational Evolution (DME), deep mutational scanning (DMS), error prone PCR, cassette mutagenesis, random mutagenesis, staggered extension PCR, gene shuffling, or domain swapping, in order to generate one or more gRNA variants with enhanced or varied properties relative to the reference gRNA. gRNA variants also include variants comprising one or more exogenous sequences, for example fused to either the 5′ or 3′ end, or inserted internally. The activity of reference gRNAs may be used as a benchmark against which the activity of gRNA variants are compared, thereby measuring improvements in function or other characteristics of the gRNA variants. In other embodiments, a reference gRNA may be subjected to one or more deliberate, specifically-targeted mutations in order to produce a gRNA variant, for example a rationally designed variant. Exemplary reference gRNA sequences are provided in Table 2, and include the reference scaffold sequences of SEQ ID NO: 4 and SEQ ID NO: 5.

[0130] The gRNAs of the disclosure comprise two segments: a targeting sequence and a protein-binding segment. The targeting segment of a gRNA includes a nucleotide sequence (referred to interchangeably as a guide sequence, a spacer, a targeter, or a targeting sequence) that is complementary to (and therefore hybridizes with) a specific sequence (a target site) within the target nucleic acid sequence (e.g., a target ssRNA, a target ssDNA, a strand of a double stranded target DNA, etc.), described more fully below. The targeting sequence of a gRNA is capable of binding to a target nucleic acid sequence, including a coding sequence, a complement of a coding sequence, a non-coding sequence, and to regulatory elements. The protein-binding segment (or “activator” or “protein-binding sequence”) interacts with (e.g., binds to) a CasX variant protein as a complex, forming an RNP (described more fully, below). The protein-binding segment is alternatively referred to herein as a “scaffold”, which is comprised of several regions, described more fully, below.

[0131] In the case of a dual guide RNA (dgRNA), the targeter and the activator portions each have a duplex-forming segment, where the duplex forming segment of the targeter and the duplex-forming segment of the activator have complementarity with one another and hybridize to one another to form a double stranded duplex (dsRNA duplex for a gRNA). When the gRNA is a gRNA, the term “targeter” or “targeter RNA” is used herein to refer to a crRNA-like molecule (crRNA: “CRISPR RNA”) of a CasX dual guide RNA (and therefore of a CasX single guide RNA when the “activator” and the “targeter” are linked together; e.g., by intervening nucleotides). The crRNA has a 5′ region that anneals with the tracrRNA followed by the nucleotides of the targeting sequence. Thus, for example, a guide RNA (dgRNA or sgRNA) comprises a guide sequence and a duplex-forming segment of a crRNA, which can also be referred to as a crRNA repeat. A corresponding tracrRNA-like molecule (activator) also comprises a duplex-forming stretch of nucleotides that forms the other half of the dsRNA duplex of the protein-binding segment of the guide RNA. Thus, a targeter and an activator, as a corresponding pair, hybridize to form a dual guide NA, referred to herein as a “dual guide NA”, a “dual-molecule gRNA”, a “dgRNA”, a “double-molecule guide NA”, or a “two-molecule guide NA”. Site-specific binding and/or cleavage of a target nucleic acid sequence (e.g., genomic DNA) by the CasX variant protein can occur at one or more locations (e.g., a sequence of a target nucleic acid) determined by base-pairing complementarity between the targeting sequence of the gRNA and the target nucleic acid sequence. Thus, for example, and as described more fully, below, the gRNA variants of the disclosure have targeting sequences complementarity to and therefore can hybridize with the target nucleic acid that is adjacent to a sequence complementary to a TC PAM motif or a PAM sequence, such as ATC, CTC, GTC, or TTC. Because the targeting sequence of a guide sequence hybridizes with a sequence of a target nucleic acid sequence, a targeter can be modified by a user to hybridize with a specific target nucleic acid sequence, so long as the location of the PAM sequence is considered. Thus, in some cases, the sequence of a targeter may be a non-naturally occurring sequence. In other cases, the sequence of a targeter may be a naturally-occurring sequence, derived from the gene to be edited. In other embodiments, the activator and targeter of the gRNA are covalently linked to one another (rather than hybridizing to one another) and comprise a single molecule, referred to herein as a “single-molecule gRNA,” “single guide RNA,” a “single-molecule guide RNA,” a “one-molecule guide RNA”, or a “sgRNA”. In some embodiments, the sgRNA includes an “activator” or a “targeter” and thus can be an “activator-RNA” and a “targeter-RNA,” respectively.

[0132] Collectively, the assembled gRNAs of the disclosure comprise four distinct regions, or domains: the RNA triplex, the scaffold stem, the extended stem, and the targeting sequence that, in the embodiments of the disclosure is specific for a target nucleic acid and is located on the 3′end of the gRNA. The RNA triplex, the scaffold stem, and the extended stem, together, are referred to as the “scaffold” of the gRNA.

[0133] In some embodiments, the gRNA is a ribonucleic acid molecule (“gRNA”), and in other embodiments, the gRNA is a chimera, and comprises both DNA and RNA. As used herein, the term gRNA cover naturally-occurring molecules, as well as sequence variants.

### e. RNA Triplex

[0134] In some embodiments of the guide NAs provided herein (including reference sgRNAs), there is a RNA triplex, and the RNA triplex comprises the sequence of a UUU-nX(˜4-15)-UUU (SEQ ID NO: 17) stem loop that ends with an AAAG after 2 intervening stem loops (the scaffold stem loop and the extended stem loop), forming a pseudoknot that may also extend past the triplex into a duplex pseudoknot. The UU-UUU-AAA sequence of the triplex forms as a nexus between the targeting sequence, scaffold stem, and extended stem. In exemplary CasX sgRNAs, the UUU-loop-UUU region is coded for first, then the scaffold stem loop, and then the extended stem loop, which is linked by the tetraloop, and then an AAAG closes off the triplex before becoming the targeting sequence.

### f. Scaffold Stem Loop

[0135] In some embodiments of sgRNAs of the disclosure, the triplex region is followed by the scaffold stem loop. The scaffold stem loop is a region of the gRNA that is bound by CasX protein (such as a CasX variant protein). In some embodiments, the scaffold stem loop is a fairly short and stable stem loop. In some cases, the scaffold stem loop does not tolerate many changes, and requires some form of an RNA bubble. In some embodiments, the scaffold stem is necessary for CasX sgRNA function. While it is perhaps analogous to the nexus stem of Cas9 as being a critical stem loop, the scaffold stem of a CasX sgRNA, in some embodiments, has a necessary bulge (RNA bubble) that is different from many other stem loops found in CRISPR/Cas systems. In some embodiments, the presence of this bulge is conserved across sgRNA that interact with different CasX proteins. An exemplary sequence of a scaffold stem loop sequence of a gRNA comprises the sequence CCAGCGACUAUGUCGUAUGG (SEQ ID NO: 14).

### g. Extended Stem Loop

[0136] In some embodiments of the CasX sgRNAs of the disclosure, the scaffold stem loop is followed by the extended stem loop. In some embodiments, the extended stem comprises a synthetic tracr and crRNA fusion that is largely unbound by the CasX protein. In some embodiments, the extended stem loop can be highly malleable. In some embodiments, a single guide gRNA is made with a GAAA tetraloop linker or a GAGAAA linker between the tracr and crRNA in the extended stem loop. In some cases, the targeter and activator of a CasX sgRNA are linked to one another by intervening nucleotides and the linker can have a length of from 3 to 20 nucleotides. In some embodiments of the CasX sgRNAs of the disclosure, the extended stem is a large 32-bp loop that sits outside of the CasX protein in the ribonucleoprotein complex. An exemplary sequence of an extended stem loop sequence of a sgRNA comprises the sequence GCGCUUAUUUAUCGGAGAGAAAUCCGAUAAAUAAGAAGC (SEQ ID NO: 15). In some embodiments, the extended stem loop comprises a GAGAAA spacer sequence.

### h. Targeting Sequence

[0137] In some embodiments of the gRNAs of the disclosure, the extended stem loop is followed by a region that forms part of the triplex, and then the targeting sequence (or “spacer”) at the 3′ end of the gRNA. The targeting sequence targets the CasX ribonucleoprotein holo complex (i.e., the RNP) to a specific region of the target nucleic acid sequence of the gene to be modified. Thus, for example, gRNA targeting sequences of the disclosure have sequences complementarity to, and therefore can hybridize to, a portion of the PTBP1 gene in a nucleic acid in a eukaryotic cell (e.g., a eukaryotic chromosome, chromosomal sequence, a eukaryotic RNA, etc.) as a component of the RNP when the TC PAM motif or any one of the PAM sequences TTC, ATC, GTC, or CTC is located 1 nucleotide 5′ to the non-target strand sequence complementary to the target sequence. The targeting sequence of a gRNA can be modified so that the gRNA can target a desired sequence of any desired target nucleic acid sequence, so long as the PAM sequence location is taken into consideration. In some embodiments, the gRNA scaffold is 5′ of the targeting sequence, with the targeting sequence on the 3′ end of the gRNA. In some embodiments, the PAM motif sequence recognized by the nuclease of the RNP is TC. In other embodiments, the PAM sequence recognized by the nuclease of the RNP is NTC.

[0138] In some embodiments, the targeting sequence of the gRNA has between 14 and 35 consecutive nucleotides. In some embodiments, the targeting sequence has 14, 15, 16, 18, 18, 19, 20, 21, 22, 23 24, 25, 26, 27, 28, 29, 30, 31, 32, 33, 34 or 35 consecutive nucleotides. In some embodiments, the targeting sequence consists of 20 consecutive nucleotides. In some embodiments, the targeting sequence consists of 19 consecutive nucleotides. In some embodiments, the targeting sequence consists of 18 consecutive nucleotides. In some embodiments, the targeting sequence consists of 17 consecutive nucleotides. In some embodiments, the targeting sequence consists of 16 consecutive nucleotides. In some embodiments, the targeting sequence consists of 15 consecutive nucleotides. In some embodiments, the targeting sequence has 14, 15, 16, 17, 18, 19, 20, 21, 22, 23, 24, 25, 26, 27, 28, 29, 30, 31, 32, 33, 34 or 35 consecutive nucleotides and the targeting sequence can comprise 0 to 5, 0 to 4, 0 to 3, or 0 to 2 mismatches relative to the target nucleic acid sequence and retain sufficient binding specificity such that the gRNA of the ribonuclear protein complex (RNP) can form a complementary bond with respect to the target nucleic acid.

[0139] Representative, but non-limiting examples of targeting sequences to the PTBP1 target nucleic acid sequence contemplated for use in the gRNA of the disclosure are presented as SEQ ID NOS: 492-2100 and 2286-43569 (see Table 1). In one embodiment, the targeting sequence of the gRNA comprises a sequence having at least about 65%, at least about 75%, at least about 85%, or at least about 95% identity to a sequence selected from the group consisting of SEQ ID NOS: 492-2100 and 2286-43569. In another embodiment, the targeting sequence of the gRNA consists of a sequence selected from the group consisting of SEQ ID NOS: 37971-37979, 38027, 38136, 38137, 38152-38158, 38160, 38162-38174, 38176, 38177, 38181, 38195, 38196, 38198, 38199, 38253-38256, 38259-38267, 38306 and 38311-38353.

[0140] In some embodiments, the PAM sequence of the target nucleic acid for the gRNA targeting sequence comprises an ATC. In some embodiments, the gRNA targeting sequence for an ATC PAM comprises a sequence selected from the group consisting of SEQ ID NOS: 492-2100 and 2286-6781, or a sequence that is at least 50% identical, at least 55% identical, at least 60% identical, at least 65% identical, at least 70% identical, at least 75% identical, at least 80% identical, at least 85% identical, at least 90% identical, at least 95% identical to SEQ ID NOS: 492-2100 and 2286-6781. In some embodiments, the gRNA targeting sequence for an ATC PAM of the target nucleic acid is selected from the group consisting of SEQ ID NOS: 492-2100 and 2286-6781. In some embodiments, the PAM sequence of the target nucleic acid comprises CTC. In some embodiments, the gRNA targeting sequence for a CTC PAM of the target nucleic acid comprises a sequence selected from the group consisting of SEQ ID NOS: 16676-35169, or a sequence that is at least 50% identical, at least 55% identical, at least 60% identical, at least 65% identical, at least 70% identical, at least 75% identical, at least 80% identical, at least 85% identical, at least 90% identical, at least 95% identical to SEQ ID NOS: 16676-35169. In some embodiments, the gRNA targeting sequence for a CTC PAM is selected from the group consisting of SEQ ID NOS: 16676-35169. In some embodiments, the PAM sequence of the target nucleic acid comprises GTC. In some embodiments, the gRNA targeting sequences for a GTC PAM of the target nucleic acid comprises a sequence selected from the group consisting of SEQ ID NOS: 6782-16675 or a sequence that is at least 50% identical, at least 55% identical, at least 60% identical, at least 65% identical, at least 70% identical, at least 75% identical, at least 80% identical, at least 85% identical, at least 90% identical, at least 95% identical to SEQ ID NOS: 6782-16675. In some embodiments, the gRNA targeting sequence for a GTC PAM of the target nucleic acid is selected from the group consisting of SEQ ID NOS: 6782-16675. In some embodiments, the PAM sequence comprises TTC. In some embodiments, the gRNA targeting sequence for a TTC PAM of the target nucleic acid comprises a sequence selected from the group consisting of SEQ ID NOS: 35170-43569, or a sequence that is at least 50% identical, at least 55% identical, at least 60% identical, at least 65% identical, at least 70% identical, at least 75% identical, at least 80% identical, at least 85% identical, at least 90% identical, at least 95% identical to SEQ ID NOS: 35170-43569. In some embodiments, the gRNA targeting sequence for a TTC PAM of the target nucleic acid is selected from the group consisting of SEQ ID NOS: 35170-43569. In the foregoing embodiments, thymine (T) nucleotides can be substituted for one or more or all of the uracil (U) nucleotides in any of the targeting sequences such that the gRNA targeting sequence can be a gDNA or a gRNA, or a chimera of RNA and DNA. In some embodiments, a targeting sequence selected from the group consisting of SEQ ID NOS: 492-2100 and 2286-43569 has at least 1, 2, 3, 4, 5, or 6 or more thymine nucleotides substituted for uracil nucleotides. In some embodiments, the targeting sequence of the gRNA comprises a sequence selected from the group consisting of SEQ ID NOS: 492-2100 and 2286-43569 with a single nucleotide removed from the 3′ end of the sequence. In other embodiments, the targeting sequence of the gRNA comprises a sequence selected from the group consisting of SEQ ID NOS: 492-2100 and 2286-43569 with two nucleotides removed from the 3′ end of the sequence. In other embodiments, the targeting sequence of the gRNA comprises a sequence selected from the group consisting of SEQ ID NOS: 492-2100 and 2286-43569 with three nucleotides removed from the 3′ end of the sequence. In other embodiments, the targeting sequence of the gRNA comprises a sequence selected from the group consisting of SEQ ID NOS: 492-2100 and 2286-43569 with four nucleotides removed from the 3′ end of the sequence. In other embodiments, the targeting sequence of the gRNA comprises a sequence selected from the group consisting of SEQ ID NOS: 492-2100 and 2286-43569 with five nucleotides removed from the 3′ end of the sequence. In other embodiments, the targeting sequence of the gRNA comprises a sequence selected from the group consisting of SEQ ID NOS: 37971-37979, 38027, 38136, 38137, 38152-38158, 38160, 38162-38174, 38176, 38177, 38181, 38195, 38196, 38198, 38199, 38253-38256, 38259-38267, 38306 and 38311-38353.

TABLE 1
Targeting Sequences Specific to PTBP1

| SEQ ID NO: | PAM Sequence |
|---|---|
| 492-2100, 2286-6781 | ATC |
| 35170-43569 | TTC |
| 16676-35169 | CTC |
| 6782-16675 | GTC |

[0141] By selection of the targeting sequences of the gRNA, defined regions of the target nucleic acid sequence or sequences bracketing a particular location within the target nucleic acid can be modified or edited using the CasX:gRNA systems described herein, including facilitating the insertion of a donor template or excision of a region comprising a mutation of the PTBP1 gene. In some embodiments, the targeting sequence of the gRNA is specific for a portion of a gene encoding a PTBP1 protein. In some embodiments, the targeting sequence of a gRNA is complementary to a PTBP1 exon selected from the group consisting of exon 1, exon 2, exon 3, exon 4, exon 5, exon 6, exon 7, exon 8, exon 9, exon 10, exon 11, exon 12, exon 13, exon 14, exon 15, and exon 16. In a particular embodiment, the targeting sequence of a gRNA is complementary to a PTBP1 exon selected from exon 1, exon 2, or exon 3. In some embodiments, the targeting sequence of a gRNA is specific for a PTBP1 intron. In some embodiments, the targeting sequence of the gRNA is specific for a PTBP1 intron-exon junction. In some embodiments, the targeting sequence of the gRNA has a sequence that hybridizes with a PTBP1 regulatory element, a PTBP1 coding region, a PTBP1 non-coding region, or combinations thereof (e.g., the intersection of two regions). In some embodiments, the targeting sequence of the gRNA is complementary to a sequence comprising one or more single nucleotide polymorphisms (SNPs) of the PTBP1 gene or its complement. SNPs that are within a PTBP1 coding sequence or within a PTBP1 non-coding sequence are both within the scope of the instant disclosure. In other embodiments, the targeting sequence of the gRNA is complementary to a sequence of an intergenic region of the PTBP1 gene.

[0142] In some embodiments, the targeting sequence of a gRNA is designed to be specific for a regulatory element that regulates expression of the PTBP1 gene product. Such regulatory elements include, but are not limited to promoter regions, enhancer regions, intergenic regions, 5′ untranslated regions (5′ UTR), 3′ untranslated regions (3′ UTR), conserved elements, and regions comprising cis-regulatory elements. The promoter region is intended to encompass nucleotides within 5 kb of the initiation point of the encoding sequence or, in the case of gene enhancer elements or conserved elements, can be thousands of bp, hundreds of thousands of bp, or even millions of bp away from the encoding sequence of the gene of the target nucleic acid. In the foregoing, the targets are those in which the encoding gene of the target is intended to be knocked out or knocked down such that the PTBP1 protein is not expressed or is expressed at a lower level in a cell.

### i. gRNA Scaffolds

[0143] With the exception of the targeting sequence domain, the remaining components of the gRNA are referred to herein as the scaffold. In some embodiments, the gRNA scaffolds are derived from naturally-occurring sequences of reference gRNA. In other embodiments, the gRNA scaffolds are variants of reference gRNA wherein mutations, insertions, deletions or domain substitutions are introduced to confer desirable properties on the gRNA.

[0144] In some embodiments, a CasX reference gRNA comprises a sequence isolated or derived from Deltaproteobacter. In some embodiments, a CasX reference guide RNA comprises a sequence isolated or derived from Planctomycetes. In still other embodiments, a CasX reference gRNA comprises a sequence isolated or derived from Candidatus Sungbacteria.

[0145] Table 2 provides the sequences of reference gRNAs tracr and scaffold sequences. In some embodiments, the disclosure provides gRNA variant sequences wherein the gRNA has a scaffold comprising a sequence having one or more nucleotide modifications relative to a reference gRNA sequence having a sequence of any one of SEQ ID NOS:4-16 of Table 2. It will be understood that in those embodiments wherein a vector comprises a DNA encoding sequence for a gRNA, or where a gRNA is a chimera of RNA and DNA, that thymine (T) bases can be substituted for the uracil (U) bases of any of the gRNA sequence embodiments described herein, including the sequences of Table 2 and Table 3.

TABLE 2
Reference gRNA sequences

| SEQ | |
|---|---|
| ID NO. | Nucleotide Sequence |
| 4 | ACAUCUGGCGCGUUUAUUCCAUUACUUUGGAGCCAGUCCCAG |
| | CGACUAUGUCGUAUGGACGAAGCGCUUAUUUAUCGGAGAGAA |
| | ACCGAUAAGUAAAACGCAUCAAAG |
| 5 | UACUGGCGCUUUUAUCUCAUUACUUUGAGAGCCAUCACCAGC |
| | GACUAUGUCGUAUGGGUAAAGCGCUUAUUUAUCGGAGAGAAA |
| | UCCGAUAAAUAAGAAGCAUCAAAG |
| 6 | ACAUCUGGCGCGUUUAUUCCAUUACUUUGGAGCCAGUCCCAG |
| | CGACUAUGUCGUAUGGACGAAGCGCUUAUUUAUCGGAGA |
| 7 | ACAUCUGGCGCGUUUAUUCCAUUACUUUGGAGCCAGUCCCAG |
| | CGACUAUGUCGUAUGGACGAAGCGCUUAUUUAUCGG |
| 8 | UACUGGCGCUUUUAUCUCAUUACUUUGAGAGCCAUCACCAGC |
| | GACUAUGUCGUAUGGGUAAAGCGCUUAUUUAUCGGAGA |
| 9 | UACUGGCGCUUUUAUCUCAUUACUUUGAGAGCCAUCACCAGC |
| | GACUAUGUCGUAUGGGUAAAGCGCUUAUUUAUCGG |
| 10 | GUUUACACACUCCCUCUCAUAGGGU |
| 11 | GUUUACACACUCCCUCUCAUGAGGU |
| 12 | UUUUACAUACCCCCUCUCAUGGGAU |
| 13 | GUUUACACACUCCCUCUCAUGGGGG |
| 14 | CCAGCGACUAUGUCGUAUGG |
| 15 | GCGCUUAUUUAUCGGAGAGAAAUCCGAUAAAUAAGAAGC |
| 16 | GGCGCUUUUAUCUCAUUACUUUGAGAGCCAUCACCAGCGACU |
| | AUGUCGUAUGGGUAAAGCGCUUAUUUAUCGGA |

### j. gRNA Variants

[0146] In another aspect, the disclosure relates to guide nucleic acid variants (“gRNA variant”), which comprise one or more modifications relative to a reference gRNA scaffold. As used herein, “scaffold” refers to all parts to the gRNA necessary for gRNA function with the exception of the targeting sequence.

[0147] In some embodiments, a gRNA variant comprises one or more nucleotide substitutions, insertions, deletions, or swapped or replaced regions relative to a reference gRNA sequence of the disclosure. In some embodiments, a mutation can occur in any region of a reference gRNA to produce a gRNA variant. In some embodiments, the scaffold of the gRNA variant sequence has at least 20%, at least 30%, at least 40%, at least 50%, at least 60%, or at least 70%, at least 80%, at least 85%, at least about 90%, at least about 95%, at least about 96%, at least about 97%, at least about 98%, or at least about 99% identity to the sequence of SEQ ID NO:4 or SEQ ID NO:5.

[0148] In some embodiments, a gRNA variant comprises one or more nucleotide changes within one or more regions of the reference gRNA that improve a characteristic relative to the reference gRNA. Exemplary regions include the RNA triplex, the pseudoknot, the scaffold stem loop, and the extended stem loop. In some cases, the variant scaffold stem further comprises a bubble. In other cases, the variant scaffold further comprises a triplex loop region. In still other cases, the variant scaffold further comprises a 5′ unstructured region. In one embodiment, the gRNA variant scaffold comprises a scaffold stem loop having at least 60% sequence identity to SEQ ID NO: 14. In another embodiment, the gRNA variant comprises a scaffold stem loop having the sequence of CCAGCGACUAUGUCGUAGUGG (SEQ ID NO: 20). In another embodiment, the disclosure provides a gRNA scaffold comprising, relative to SEQ ID NO: 5, a C18G substitution, a G55 insertion, a U1 deletion, and a modified extended stem loop in which the original 6 nt loop and 13 most-loop-proximal base pairs (32 nucleotides total) are replaced by a Uvsx hairpin (4 nt loop and 5 loop-proximal base pairs; 14 nucleotides total) and the loop-distal base of the extended stem was converted to a fully base-paired stem contiguous with the new Uvsx hairpin by deletion of the A99 and substitution of G64U. In the foregoing embodiment, the gRNA scaffold comprises the sequence

(SEQ ID NO: 2238)
ACUGGCGCUUUUAUCUGAUUACUUUGAGAGCCAUCACCAGCGACUAUGUC
GUAGUGGGUAAAGCUCCCUCUUCGGAGGGAGCAUCAAAG.

[0149] All gRNA variants that have one or more improved functions or characteristics, or add one or more new functions when the variant gRNA is compared to a reference gRNA described herein, are envisaged as within the scope of the disclosure. A representative example of such a gRNA variant is guide 235 (SEQ ID NO: 43577), the utility of which is described in the Examples. In some embodiments, the gRNA variant adds a new function to the RNP comprising the gRNA variant. In some embodiments, the gRNA variant has an improved characteristic selected from: improved stability; improved transcription of the gRNA; improved resistance to nuclease activity; increased productive folding; improved binding affinity to a CasX protein; improved binding affinity to a target DNA when complexed with a CasX protein; improved gene editing when complexed with a CasX protein; improved specificity of editing when complexed with a CasX protein; and improved ability to utilize a greater spectrum of one or more PAM sequences, including ATC, CTC, GTC, or TTC, in the editing of target DNA when complexed with a CasX protein, or any combination thereof. In some cases, the one or more of the improved characteristics of the gRNA variant is at least about 1.1 to about 100,000-fold improved relative to the reference gRNA of SEQ ID NO:4 or SEQ ID NO:5. In other cases, the one or more improved characteristics of the gRNA variant is at least about 1.1, at least about 10, at least about 100, at least about 1000, at least about 10,000, at least about 100,000-fold or more improved relative to the reference gRNA of SEQ ID NO:4 or SEQ ID NO:5. In other cases, the one or more of the improved characteristics of the gRNA variant is about 1.1 to 100,00-fold, about 1.1 to 10,00-fold, about 1.1 to 1,000-fold, about 1.1 to 500-fold, about 1.1 to 100-fold, about 1.1 to 50-fold, about 1.1 to 20-fold, about 10 to 100,00-fold, about 10 to 10,00-fold, about 10 to 1,000-fold, about 10 to 500-fold, about 10 to 100-fold, about 10 to 50-fold, about 10 to 20-fold, about 2 to 70-fold, about 2 to 50-fold, about 2 to 30-fold, about 2 to 20-fold, about 2 to 10-fold, about 5 to 50-fold, about 5 to 30-fold, about 5 to 10-fold, about 100 to 100,00-fold, about 100 to 10,00-fold, about 100 to 1,000-fold, about 100 to 500-fold, about 500 to 100,00-fold, about 500 to 10,00-fold, about 500 to 1,000-fold, about 500 to 750-fold, about 1,000 to 100,00-fold, about 10,000 to 100,00-fold, about 20 to 500-fold, about 20 to 250-fold, about 20 to 200-fold, about 20 to 100-fold, about 20 to 50-fold, about 50 to 10,000-fold, about 50 to 1,000-fold, about 50 to 500-fold, about 50 to 200-fold, or about 50 to 100-fold, improved relative to the reference gRNA of SEQ ID NO:4 or SEQ ID NO:5. In other cases, the one or more improved characteristics of the gRNA variant is about 1.1-fold, 1.2-fold, 1.3-fold, 1.4-fold, 1.5-fold, 1.6-fold, 1.7-fold, 1.8-fold, 1.9-fold, 2-fold, 3-fold, 4-fold, 5-fold, 6-fold, 7-fold, 8-fold, 9-fold, 10-fold, 11-fold, 12-fold, 13-fold, 14-fold, 15-fold, 16-fold, 17-fold, 18-fold, 19-fold, 20-fold, 25-fold, 30-fold, 40-fold, 45-fold, 50-fold, 55-fold, 60-fold, 70-fold, 80-fold, 90-fold, 100-fold, 110-fold, 120-fold, 130-fold, 140-fold, 150-fold, 160-fold, 170-fold, 180-fold, 190-fold, 200-fold, 210-fold, 220-fold, 230-fold, 240-fold, 250-fold, 260-fold, 270-fold, 280-fold, 290-fold, 300-fold, 310-fold, 320-fold, 330-fold, 340-fold, 350-fold, 360-fold, 370-fold, 380-fold, 390-fold, 400-fold, 425-fold, 450-fold, 475-fold, or 500-fold improved relative to the reference gRNA of SEQ ID NO:4 or SEQ ID NO:5.

[0150] In some embodiments, a gRNA variant can be created by subjecting a reference gRNA to a one or more mutagenesis methods, such as the mutagenesis methods described herein, below, which may include Deep Mutational Evolution (DME), deep mutational scanning (DMS), error prone PCR, cassette mutagenesis, random mutagenesis, staggered extension PCR, gene shuffling, or domain swapping, in order to generate the gRNA variants of the disclosure. The activity of reference gRNAs may be used as a benchmark against which the activity of gRNA variants are compared, thereby measuring improvements in function of gRNA variants. In other embodiments, a reference gRNA may be subjected to one or more deliberate, targeted mutations, substitutions, or domain swaps in order to produce a gRNA variant, for example a rationally designed variant. Exemplary gRNA variants produced by such methods are described in the Examples and representative sequences of gRNA scaffolds are presented in Table 3 SEQ ID NOS: 2101-2285, 43571-43661 and 44045.

[0151] In some embodiments, the gRNA variant comprises one or more modifications compared to a reference guide nucleic acid scaffold sequence, wherein the one or more modification is selected from: at least one nucleotide substitution in a region of the gRNA variant; at least one nucleotide deletion in a region of the gRNA variant; at least one nucleotide insertion in a region of the gRNA variant; a substitution of all or a portion of a region of the gRNA variant; a deletion of all or a portion of a region of the gRNA variant; or any combination of the foregoing. In some cases, the modification is a substitution of 1 to 15 consecutive or non-consecutive nucleotides in the gRNA variant in one or more regions. In other cases, the modification is a deletion of 1 to 10 consecutive or non-consecutive nucleotides in the gRNA variant in one or more regions. In other cases, the modification is an insertion of 1 to 10 consecutive or non-consecutive nucleotides in the gRNA variant in one or more regions. In other cases, the modification is a substitution of the scaffold stem loop or the extended stem loop with an RNA stem loop sequence from a heterologous RNA source with proximal 5′ and 3′ ends. In some cases, a gRNA variant of the disclosure comprises two or more modifications in one region. In other cases, a gRNA variant of the disclosure comprises modifications in two or more regions. In other cases, a gRNA variant comprises any combination of the foregoing modifications described in this paragraph.

[0152] In some embodiments, a 5′ G is added to a gRNA variant sequence for expression in vivo, as transcription from a U6 promoter is more efficient and more consistent with regard to the start site when the +1 nucleotide is a G. In other embodiments, two 5′ Gs are added to a gRNA variant sequence for in vitro transcription to increase production efficiency, as T7 polymerase strongly prefers a G in the +1 position and a purine in the +2 position. In some cases, the 5′ G bases are added to the reference scaffolds of Table 2. In other cases, the 5′ G bases are added to the variant scaffolds of Table 3, e.g. SEQ ID NOS: 2101-2285, 43571-43661 or 44045.

[0153] Table 3 provides exemplary gRNA variant scaffold sequences. In some embodiments, the disclosure provides gRNA a variant scaffold comprising any one of SEQ ID NOS: 2101-2285, 43571-43661, or 44045, or a sequence having at least about 50%, at least about 60%, at least about 70%, at least about 80%, at least about 90%, at least about 95%, at least about 95%, at least about 96%, at least about 97%, at least about 98%, at least about 99% sequence identity thereto. In some embodiments, the disclosure provides gRNA a variant scaffold comprising any one of SEQ ID NOS:2238-2285, 43571-43661, 44045 and 44047, or a sequence having at least about 50%, at least about 60%, at least about 70%, at least about 80%, at least about 90%, at least about 95%, at least about 95%, at least about 96%, at least about 97%, at least about 98%, at least about 99% sequence identity thereto. In some embodiments, the disclosure provides gRNA a variant scaffold comprising any one of SEQ ID NOS: 2281-2285, 43571-43661 or 44045, or a sequence having at least about 50%, at least about 60%, at least about 70%, at least about 80%, at least about 90%, at least about 95%, at least about 95%, at least about 96%, at least about 97%, at least about 98%, at least about 99% sequence identity thereto. It will be understood that in those embodiments wherein a vector comprises a DNA encoding sequence for a gRNA, or where a gRNA is a gDNA or a chimera of RNA and DNA, that thymine (T) bases can be substituted for the uracil (U) bases of any of the gRNA sequence embodiments described herein.

TABLE 3
Exemplary gRNA Scaffold Sequences

| SEQ ID NO: | Name | NUCLEOTIDE SEQUENCE OR DESCRIPTION OF MODIFICATION |
|---|---|---|
| 2101 | ND | phage replication stable |
| 2102 | ND | Kissing loop_b1 |
| 2103 | ND | Kissing loop_a |
| 2104 | ND | 32: uvsX hairpin |
| 2105 | ND | PP7 |
| 2106 | ND | 64: trip mut, extended stem truncation |
| 2107 | ND | hyperstable tetraloop |
| 2108 | ND | C18G |
| 2109 | ND | U17G |
| 2110 | ND | CUUCGG loop |
| 2111 | ND | MS2 |
| 2112 | ND | −1, A2G, −78, G77U |
| 2113 | ND | QB |
| 2114 | ND | 45, 44 hairpin |
| 2115 | ND | U1A |
| 2116 | ND | A14C, U17G |
| 2117 | ND | CUUCGG loop modified |
| 2118 | ND | Kissing loop_b2 |
| 2119 | ND | −76:78, −83:87 |
| 2120 | ND | −4 |
| 2121 | ND | extended stem truncation |
| 2122 | ND | C55 |
| 2123 | ND | trip mut |
| 2124 | ND | −76:78 |
| 2125 | ND | −1:5 |
| 2126 | ND | −83:87 |
| 2127 | ND | = +G28, A82U, −84, |
| 2128 | ND | = +51U |
| 2129 | ND | −1:4, +G5A, +G86, |
| 2130 | ND | = +A94 |
| 2131 | ND | = +G72 |
| 2132 | ND | shorten front, CUUCGG loop modified. extend extended |
| 2133 | ND | A14C |
| 2134 | ND | −1:3, +G3 |
| 2135 | ND | = +C45, +U46 |
| 2136 | ND | CUUCGG loop modified, fun start |
| 2137 | ND | −93:94 |
| 2138 | ND | = +U45 |
| 2139 | ND | −69, −94 |
| 2140 | ND | −94 |
| 2141 | ND | modified CUUCGG, minus U in 1st triplex |
| 2142 | ND | −1:4, +C4, A14C, U17G, +G72, −76:78, −83:87 |
| 2143 | ND | U1C, −73 |
| 2144 | ND | Scaffold uuCG, stem uuCG. Stem swap, t shorten |
| 2145 | ND | Scaffold uuCG, stem uuCG. Stem swap |
| 2146 | ND | = +G60 |
| 2147 | ND | no stem Scaffold uuCG |
| 2148 | ND | no stem Scaffold uuCG, fun start |
| 2149 | ND | Scaffold uuCG, stem uuCG, fun start |
| 2150 | ND | Pseudoknots |
| 2151 | ND | Scaffold uuCG, stem uuCG |
| 2152 | ND | Scaffold uuCG, stem uuCG, no start |
| 2153 | ND | Scaffold uuCG |
| 2154 | ND | = +GCUC36 |
| 2155 | ND | G quadriplex telomere basket+ ends |
| 2156 | ND | G quadriplex M3q |
| 2157 | ND | G quadriplex telomere basket no ends |
| 2158 | ND | 45, 44 hairpin (old version) |
| 2159 | ND | Sarcin-ricin loop |
| 2160 | ND | uvsX, C18G |
| 2161 | ND | truncated stem loop, C18G, trip mut (U10C) |
| 2162 | ND | short phage rep, C18G |
| 2163 | ND | phage rep loop, C18G |
| 2164 | ND | = +G18, stacked onto 64 |
| 2165 | ND | truncated stem loop, C18G, −1 A2G |
| 2166 | ND | phage rep loop, C18G, trip mut (U10C) |
| 2167 | ND | short phage rep, C18G, trip mut (U10C) |
| 2168 | ND | uvsX, trip mut (U10C) |
| 2169 | ND | truncated stem loop |
| 2170 | ND | = +A17, stacked onto 64 |
| 2171 | ND | 3′ HDV genomic ribozyme |
| 2172 | ND | phage rep loop, trip mut (U10C) |
| 2173 | ND | −79:80 |
| 2174 | ND | short phage rep, trip mut (U10C) |
| 2175 | ND | extra truncated stem loop |
| 2176 | ND | U17G, C18G |
| 2177 | ND | short phage rep |
| 2178 | ND | uvsX, C18G, −1 A2G |
| 2179 | ND | uvsX, C18G, trip mut (U10C), −1 A2G, HDV −99 G65U |
| 2180 | ND | 3′ HDV antigenomic ribozyme |
| 2181 | ND | uvsX, C18G, trip mut (U10C), −1 A2G, HDV AA(98:99)C |
| 2182 | ND | 3′ HDV ribozyme (Lior Nissim, Timothy Lu) |
| 2183 | ND | TAC(1:3)GA, stacked onto 64 |
| 2184 | ND | uvsX, −1 A2G |
| 2185 | ND | truncated stem loop, C18G, trip mut (U10C), −1 A2G, HDV −99 G65U |
| 2186 | ND | short phage rep, C18G, trip mut (U10C), −1 A2G, HDV −99 G65U |
| 2187 | ND | 3′ sTRSV WT viral Hammerhead ribozyme |
| 2188 | ND | short phage rep, C18G, −1 A2G |
| 2189 | ND | short phage rep, C18G, trip mut (U10C), −1 A2G, 3′ genomic HDV |
| 2190 | ND | phage rep loop, C18G, trip mut (U10C), −1 A2G, HDV −99 G65U |
| 2191 | ND | 3′ HDV ribozyme (Owen Ryan, Jamie Cate) |
| 2192 | ND | phage rep loop, C18G, −1 A2G |
| 2193 | ND | 0.14 |
| 2194 | ND | −78, G77U |
| 2195 | ND | ND |
| 2196 | ND | short phage rep, −1 A2G |
| 2197 | ND | truncated stem loop, C18G, trip mut (U10C), −1 A2G |
| 2198 | ND | −1, A2G |
| 2199 | ND | truncated stem loop, trip mut (U10C), −1 A2G |
| 2200 | ND | uvsX, C18G, trip mut (U10C), −1 A2G |
| 2201 | ND | phage rep loop, −1 A2G |
| 2202 | ND | phage rep loop, trip mut (U10C), −1 A2G |
| 2203 | ND | phage rep loop, C18G, trip mut (U10C), −1 A2G |
| 2204 | ND | truncated stem loop, C18G |
| 2205 | ND | uvsX, trip mut (U10C), −1 A2G |
| 2206 | ND | truncated stem loop, −1 A2G |
| 2207 | ND | short phage rep, trip mut (U10C), −1 A2G |
| 2208 | ND | 5′HDV ribozyme (Owen Ryan, Jamie Cate) |
| 2209 | ND | 5′HDV genomic ribozyme |
| 2210 | ND | truncated stem loop, C18G, trip mut (U10C), −1 A2G, HDV AA(98:99)C |
| 2211 | ND | 5′env25 pistol ribozyme (with an added CUUCGG loop) |
| 2212 | ND | 5′HDV antigenomic ribozyme |
| 2213 | ND | 3′ Hammerhead ribozyme (Lior Nissim, Timothy Lu) guide scaffold scar |
| 2214 | ND | = +A27, stacked onto 64 |
| 2215 | ND | 5′Hammerhead ribozyme (Lior Nissim, Timothy Lu) smaller scar |
| 2216 | ND | phage rep loop, C18G, trip mut (U10C), −1 A2G, HDV AA(98:99)C |
| 2217 | ND | −27, stacked onto 64 |
| 2218 | ND | 3′ Hatchet |
| 2219 | ND | 3′ Hammerhead ribozyme (Lior Nissim, Timothy Lu) |
| 2220 | ND | 5′ Hatchet |
| 2221 | ND | 5′ HDV ribozyme (Lior Nissim, Timothy Lu) |
| 2222 | ND | 5′ Hammerhead ribozyme (Lior Nissim, Timothy Lu) |
| 2223 | ND | 3′ HH15 Minimal Hammerhead ribozyme |
| 2224 | ND | 5′ RBMX recruiting motif |
| 2225 | ND | 3′ Hammerhead ribozyme (Lior Nissim, Timothy Lu) smaller scar |
| 2226 | ND | 3′ env25 pistol ribozyme (with an added CUUCGG loop) |
| 2227 | ND | 3′ Env-9 Twister |
| 2228 | ND | = +AUUAUCUCAUUACU25 |
| 2229 | ND | 5′ Env-9 Twister |
| 2230 | ND | 3′ Twisted Sister 1 |
| 2231 | ND | no stem |
| 2232 | ND | 5′ HH15 Minimal Hammerhead ribozyme |
| 2233 | ND | 5′ Hammerhead ribozyme (Lior Nissim, Timothy Lu) guide scaffold scar |
| 2234 | ND | 5′ Twisted Sister 1 |
| 2235 | ND | 5′ sTRSV WT viral Hammerhead ribozyme |
| 2236 | ND | 148: = +G55, stacked onto 64 |
| 2237 | ND | 158: 103 + 148(+G55) −99, G65U |
| 2238 | 174 | ACUGGCGCUUUUAUCUGAUUACUUUGAGAGCCAUCACCAGCGACUAUGUCGUAGUGGG |
| | | UAAAGCUCCCUCUUCGGAGGGAGCAUCAAAG |
| 2239 | 175 | ACUGGCGCCUUUAUCUCAUUACUUUGAGAGCCAUCACCAGCGACUAUGUCGUAUGGGU |
| | | AAAGCGCUUACGGACUUCGGUCCGUAAGAAGCAUCAAAG |
| 2240 | 176 | GCUGGCGCUUUUAUCUGAUUACUUUGAGAGCCAUCACCAGCGACUAUGUCGUAGUGGG |
| | | UAAAGCUCCCUCUUCGGAGGGAGCAUCAAAG |
| 2241 | 177 | ACUGGCGCUUUUAUCUGAUUACUUUGAGAGCCAUCACCAGCGACUAUGUCGUAUGGGU |
| | | AAAGCUCCCUCUUCGGAGGGAGCAUCAAAG |
| 2242 | 181 | ACUGGCGCCUUUAUCUGAUUACUUUGAGAGCCAUCACCAGCGACUAUGUCGUAUGGGU |
| | | AAAGCGCUUACGGACUUCGGUCCGUAAGAAGCAUCAAAG |
| 2243 | 182 | ACUGGCGCUUUUAUCUGAUUACUUUGAGAGCCAUCACCAGCGACUAUGUCGUAUGGGU |
| | | AAAGCGCUUACGGACUUCGGUCCGUAAGAAGCAUCAAAG |
| 2244 | 183 | ACUGGCGCUUUUAUCUGAUUACUUUGAGAGCCAUCACCAGCGACUAUGUCGUAGUGGG |
| | | UAAAGCGCUUACGGACUUCGGUCCGUAAGAAGCAUCAAAG |
| 2245 | 184 | ACUGGCGCUUUUAUCUGAUUACUUUGAGAGCCAUCACCAGCGACUAUGUCGUAUUGGG |
| | | UAAAGCUCCCUCUUCGGAGGGAGCAUCAAAG |
| 2246 | 185 | ACUGGCGCUUUUAUCUGAUUACUUUGAGAGCCAUCACCAGCGACUAUGUCGUAUUGGG |
| | | UAAAGCGCUUACGGACUUCGGUCCGUAAGAAGCAUCAAAG |
| 2247 | 186 | ACUGGCGCCUUUAUCAUCAUUACUUUGAGAGCCAUCACCAGCGACUAUGUCGUAUGGG |
| | | UAAAGCGCUUACGGACUUCGGUCCGUAAGAAGCAUCAAAG |
| 2248 | 187 | ACUGGCGCUUUUAUCUGAUUACUUUGAGAGCCAUCACCAGCGACUAUGUCGUAGUGGG |
| | | UAAAGCGCCCUCUUCGGAGGGAAGCAUCAAAG |
| 2249 | 188 | ACUGGCGCUUUUAUCUGAUUACUUUGAGAGCCAUCACCAGCGACUAUGUCGUAGUGGG |
| | | UAAAGCUCACAUGAGGAUCACCCAUGUGAGCAUCAAAG |
| 2250 | 189 | ACUGGCACUUUUACCUGAUUACUUUGAGAGCCAACACCAGCGACUAUGUCGUAGUGGG |
| | | UAAAGCUCCCUCUUCGGAGGGAGCAUCAAAG |
| 2251 | 190 | ACUGGCACUUUUAUCUGAUUACUUUGAGAGCCAUCACCAGCGACUAUGUCGUAGUGGG |
| | | UAAAGCUCCCUCUUCGGAGGGAGCAUCAAAG |
| 2252 | 191 | ACUGGCCCUUUUAUCUGAUUACUUUGAGAGCCAUCACCAGCGACUAUGUCGUAGUGGG |
| | | UAAAGCUCCCUCUUCGGAGGGAGCAUCAAAG |
| 2253 | 192 | ACUGGCGCUUUUACCUGAUUACUUUGAGAGCCAUCACCAGCGACUAUGUCGUAGUGGG |
| | | UAAAGCUCCCUCUUCGGAGGGAGCAUCAAAG |
| 2254 | 193 | ACUGGCGCUUUUAUCUGAUUACUUUGAGAGCCAACACCAGCGACUAUGUCGUAGUGGG |
| | | UAAAGCUCCCUCUUCGGAGGGAGCAUCAAAG |
| 2255 | 195 | ACUGGCACCUUUACCUGAUUACUUUGAGAGCCAACACCAGCGACUAUGUCGUAUGGGU |
| | | AAAGCGCUUACGGACUUCGGUCCGUAAGAAGCAUCAAAG |
| 2256 | 196 | ACUGGCACCUUUAUCUGAUUACUUUGAGAGCCAUCACCAGCGACUAUGUCGUAUGGGU |
| | | AAAGCGCUUACGGACUUCGGUCCGUAAGAAGCAUCAAAG |
| 2257 | 197 | ACUGGCCCCUUUAUCUGAUUACUUUGAGAGCCAUCACCAGCGACUAUGUCGUAUGGGU |
| | | AAAGCGCUUACGGACUUCGGUCCGUAAGAAGCAUCAAAG |
| 2258 | 198 | ACUGGCGCCUUUAUCUGAUUACUUUGAGAGCCAACACCAGCGACUAUGUCGUAUGGGU |
| | | AAAGCGCUUACGGACUUCGGUCCGUAAGAAGCAUCAAAG |
| 2259 | 199 | GCUGGCGCUUUUAUCUGAUUACUUUGAGAGCCAUCACCAGCGACUAUGUCGUAGUGGG |
| | | UAAAGCUCCCUCUUCGGAGGGAGCAUCAAAG |
| 2260 | 200 | GACUGGCGCUUUUAUCUGAUUACUUUGAGAGCCAUCACCAGCGACUAUGUCGUAGUGG |
| | | GUAAAGCUCCCUCUUCGGAGGGAGCAUCAAAG |
| 2261 | 201 | ACUGGCGCCUUUAUCUGAUUACUUUGGAGAGCCAUCACCAGCGACUAUGUCGUAGUGG |
| | | GUAAAGCUCCCUCUUCGGAGGGAGCAUCAAAG |
| 2262 | 202 | ACUGGCGCAUUUAUCUGAUUACUUUGUGAGCCAUCACCAGCGACUAUGUCGUAGUGGG |
| | | UAAAGCUCCCUCUUCGGAGGGAGCAUCAAAG |
| 2263 | 203 | ACUGGCGCCUUUAUCUGAUUACUUUGAGAGCCAUCACCAGCGACUAUGUCGUAGUGGG |
| | | UAAAGCUCCCUCUUCGGAGGGAGCAUCAAAG |
| 2264 | 204 | ACUGGCGCUUUUAUCUGAUUACUUUGGAGAGCCAUCACCAGCGACUAUGUCGUAGUGG |
| | | GUAAAGCUCCCUCUUCGGAGGGAGCAUCAAAG |
| 2265 | 205 | ACUGGCGCAUUUAUCUGAUUACUUUGAGAGCCAUCACCAGCGACUAUGUCGUAGUGGG |
| | | UAAAGCUCCCUCUUCGGAGGGAGCAUCAAAG |
| 2266 | 206 | ACUGGCGCUUUUAUCUGAUUACUUUGUGAGCCAUCACCAGCGACUAUGUCGUAGUGGG |
| | | UAAAGCUCCCUCUUCGGAGGGAGCAUCAAAG |
| 2267 | 207 | ACUGGCGCUUUUAUUCUGAUUACUUUGAGAGCCAUCACCAGCGACUAUGUCGUAGUGG |
| | | GUAAAGCUCCCUCUUCGGAGGGAGCAUCAAAG |
| 2268 | 208 | ACGGCGCUUUUAUCUGAUUACUUUGAGAGCCAUCACCAGCGACUAUGUCGUAGUGGGU |
| | | AAAGCUCCCUCUUCGGAGGGAGCAUCAAAG |
| 2269 | 209 | ACUGGCGCUUUUAUAUGAUUACUUUGAGAGCCAUCACCAGCGACUAUGUCGUAGUGGG |
| | | UAAAGCUCCCUCUUCGGAGGGAGCAUCAAAG |
| 2270 | 210 | ACUGGCGCUUUUAUCUUGAUUACUUUGAGAGCCAUCACCAGCGACUAUGUCGUAGUGG |
| | | GUAAAGCUCCCUCUUCGGAGGGAGCAUCAAAG |
| 2271 | 211 | ACUGGCGCUUUUAUCUGAUUACUUUGAGAGCCAGCACCAGCGACUAUGUCGUAGUGGG |
| | | UAAAGCUCCCUCUUCGGAGGGAGCAUCAAAG |
| 2272 | 212 | ACUGGCGCUGUUAUCUGAUUACUUCGAGAGCCAUCACCAGCGACUAUGUCGUAGUGGG |
| | | UAAAGCUCCCUCUUCGGAGGGAGCAUCGAAG |
| 2273 | 213 | ACUGGCGCUCUUAUCUGAUUACUUCGAGAGCCAUCACCAGCGACUAUGUCGUAGUGGG |
| | | UAAAGCUCCCUCUUCGGAGGGAGCAUCGAAG |
| 2274 | 214 | ACUGGCGCUUGUAUCUGAUUACUCUGAGAGCCAUCACCAGCGACUAUGUCGUAGUGGG |
| | | UAAAGCUCCCUCUUCGGAGGGAGCAUCAGAG |
| 2275 | 215 | ACUGGCGCUUCUAUCUGAUUACUCUGAGAGCCAUCACCAGCGACUAUGUCGUAGUGGG |
| | | UAAAGCUCCCUCUUCGGAGGGAGCAUCAGAG |
| 2276 | 216 | ACUGGCGCUUUGAUCUGAUUACCUUGAGAGCCAUCACCAGCGACUAUGUCGUAGUGGG |
| | | UAAAGCUCCCUCUUCGGAGGGAGCAUCAAGG |
| 2277 | 217 | ACUGGCGCUUUCAUCUGAUUACCUUGAGAGCCAUCACCAGCGACUAUGUCGUAGUGGG |
| | | UAAAGCUCCCUCUUCGGAGGGAGCAUCAAGG |
| 2278 | 218 | ACUGGCGCUGUUAUCUGAUUACUUUGAGAGCCAUCACCAGCGACUAUGUCGUAGUGGG |
| | | UAAAGCUCCCUCUUCGGAGGGAGCAUCAAAG |
| 2279 | 219 | ACUGGCGCUUUUAUCUGAUUACUUUGAGAGCCAUCACCAGCGACUAUGUCGUAGUGGG |
| | | UAAAGCUCCCUCUUCGGAGGGAGCAUCGAAG |
| 2280 | 220 | ACUGGCGCUUUUAUCUGAUUACUUCGAGAGCCAUCACCAGCGACUAUGUCGUAGUGGG |
| | | UAAAGCUCCCUCUUCGGAGGGAGCAUCAAAG |
| 2281 | 221 | ACUGGCACUUCUAUCUGAUUACUCUGAGAGCCAUCACCAGCGACUAUGUCGUAUGGGU |
| | | AAAGCCGCUUACGGACUUCGGUCCGUAAGAGGCAUCAGAG |
| 2282 | 222 | ACUGGCACUUCUAUCUGAUUACUCUGAGAGCCAUCACCAGCGACUAUGUCGUAGUGGG |
| | | UAAAGCUCCCUCUUCGGAGGGAGCAUCAGAG |
| 2283 | 223 | ACUGGCACCUUUAUCUGAUUACUUUGAGAGCCAUCACCAGCGACUAUGUCGUAUGGGU |
| | | AAAGCCGCUUACGGACUUCGGUCCGUAAGAGGCAUCAAAG |
| 2284 | 224 | ACUGGCACUUGUAUCUGAUUACUCUGAGAGCCAUCACCAGCGACUAUGUCGUAUGGGU |
| | | AAAGCCGCUUACGGACUUCGGUCCGUAAGAGGCAUCAGAG |
| 2285 | 225 | ACUGGCACUUGUAUCUGAUUACUCUGAGAGCCAUCACCAGCGACUAUGUCGUAGUGGG |
| | | UAAAGCUCCCUCUUCGGAGGGAGCAUCAGAG |
| 44045 | 226 | ACUGGCGCUUUUAUCUGAUUACUUUGAGAGCCAUCACCAGCGACUAUGUCGUAGUGGG |
| | | UAAAGCUGCACUAUGGGCGCAGCGUCAAUGACGCUGACGGUACAGGCCAGACAAUUAU |
| | | UGUCUGGUAUAGUGCAGCAUCAAAG |
| 43571 | 229 | ACUGGCACUUUUAUCUGAUUACUUUGAGAGCCAUCACCAGCGACUAUGUCGUAUGGGU |
| | | AAAGCGCUUACGGACUUCGGUCCGUAAGAAGCAUCAAAG |
| 43572 | 230 | ACUGGCACUUCUAUCUGAUUACUCUGAGAGCCAUCACCAGCGACUAUGUCGUAUGGGU |
| | | AAAGCGCUUACGGACUUCGGUCCGUAAGAAGCAUCAGAG |
| 43573 | 231 | ACUGGCGCUUCUAUCUGAUUACUCUGAGAGCCAUCACCAGCGACUAUGUCGUAUGGGU |
| | | AAAGCCGCUUACGGACUUCGGUCCGUAAGAGGCAUCAGAG |
| 43574 | 232 | ACUGGCACUUCUAUCUGAUUACUCUGAGCGCCAUCACCAGCGACUAUGUCGUAUGGGU |
| | | AAAGCCGCUUACGGACUUCGGUCCGUAAGAGGCAUCAGAG |
| 43575 | 233 | ACUGGCGCUUCUAUCUGAUUACUCUGAGCGCCAUCACCAGCGACUAUGUCGUAUGGGU |
| | | AAAGCCGCUUACGGACUUCGGUCCGUAAGAGGCAUCAGAG |
| 43576 | 234 | ACUGGCGCUUCUAUCUGAUUACUCUGAGCGCCAUCACCAGCGACUAUGUCGUAUGGGU |
| | | AAAGCGCCUUACGGACUUCGGUCCGUAAGGAGCAUCAGAG |
| 43577 | 235 | ACUGGCGCUUCUAUCUGAUUACUCUGAGCGCCAUCACCAGCGACUAUGUCGUAGUGGG |
| | | UAAAGCCGCUUACGGACUUCGGUCCGUAAGAGGCAUCAGAG |
| 43578 | 236 | ACGGGACUUUCUAUCUGAUUACUCUGAAGUCCCUCACCAGCGACUAUGUCGUAUGGGU |
| | | AAAGCCGCUUACGGACUUCGGUCCGUAAGAGGCAUCAGAG |
| 43579 | 237 | ACCUGUAGUUCUAUCUGAUUACUCUGACUACAGUCACCAGCGACUAUGUCGUAUGGGU |
| | | AAAGCCGCUUACGGACUUCGGUCCGUAAGAGGCAUCAGAG |
| 43580 | 238 | ACUGGCGCUUUUAUCUGAUUACUUUGAGAGCCAUCACCAGCGACUAUGUCGUAGUGGG |
| | | UAAAGCUGCACGGUGGGCGCAGCUUCGGCUGACGGUACACCGUGCAGCAUCAAAG |
| 43581 | 239 | ACUGGCGCUUUUAUCUGAUUACUUUGAGAGCCAUCACCAGCGACUAUGUCGUAGUGGG |
| | | UAAAGCUGCACGGUGGGCGCAGCUUCGGCUGACGGUACACCGGUGGGCGCAGCUUCGG |
| | | CUGACGGUACACCGUGCAGCAUCAAAG |
| 43582 | 240 | ACUGGCGCUUUUAUCUGAUUACUUUGAGAGCCAUCACCAGCGACUAUGUCGUAGUGGG |
| | | UAAAGCUGCACGGUGGGCGCAGCUUCGGCUGACGGUACACCGGUGGGCGCAGCUUCGG |
| | | CUGACGGUACACCGGUGGGCGCAGCUUCGGCUGACGGUACACCGUGCAGCAUCAAAG |
| 43583 | 241 | ACUGGCGCUUUUAUCUGAUUACUUUGAGAGCCAUCACCAGCGACUAUGUCGUAGUGGG |
| | | UAAAGCUGCACGGUGGGCGCAGCUUCGGCUGACGGUACACCGGUGGGCGCAGCUUCGG |
| | | CUGACGGUACACCGGUGGGCGCAGCUUCGGCUGACGGUACACCGGUGGGCGCAGCUUC |
| | | GGCUGACGGUACACCGUGCAGCAUCAAAG |
| 43584 | 242 | ACUGGCGCUUUUAUCUGAUUACUUUGAGAGCCAUCACCAGCGACUAUGUCGUAGUGGG |
| | | UAAAGCUGCACGGUGGGCGCAGCUUCGGCUGACGGUACACCGGUGGGCGCAGCUUCGG |
| | | CUGACGGUACACCGGUGGGCGCAGCUUCGGCUGACGGUACACCGGUGGGCGCAGCUUC |
| | | GGCUGACGGUACACCGGUGGGCGCAGCUUCGGCUGACGGUACACCGUGCAGCAUCAAA |
| | | G |
| 43585 | 243 | ACUGGCGCUUUUAUCUGAUUACUUUGAGAGCCAUCACCAGCGACUAUGUCGUAGUGGG |
| | | UAAAGCUGCACCUAGCGGAGGCUAGGUGCAGCAUCAAAG |
| 43586 | 244 | ACUGGCGCUUUUAUCUGAUUACUUUGAGAGCCAUCACCAGCGACUAUGUCGUAGUGGG |
| | | UAAAGCUGCACCUCGGCUUGCUGAAGCGCGCACGGCAAGAGGCGAGGUGCAGCAUCAA |
| | | AG |
| 43587 | 245 | ACUGGCGCUUUUAUCUGAUUACUUUGAGAGCCAUCACCAGCGACUAUGUCGUAGUGGG |
| | | UAAAGCUGCACCUCUCUCGACGCAGGACUCGGCUUGCUGAAGCGCGCACGGCAAGAGG |
| | | CGAGGGGCGGCGACUGGUGAGUACGCCAAAAAUUUUGACUAGCGGAGGCUAGAAGGAG |
| | | AGAGGUGCAGCAUCAAAG |
| 43588 | 246 | ACUGGCGCUUUUAUCUGAUUACUUUGAGAGCCAUCACCAGCGACUAUGUCGUAGUGGG |
| | | UAAAGCUGCACGGUGCCCGUCUGUUGUGUCGAGAGACGCCAAAAAUUUUGACUAGCGG |
| | | AGGCUAGAAGGAGAGAGAUGGGUGCCGUGCAGCAUCAAAG |
| 43589 | 247 | ACUGGCGCUUUUAUCUGAUUACUUUGAGAGCCAUCACCAGCGACUAUGUCGUAGUGGG |
| | | UAAAGCUGCACAUGGAGAGGAGAUGUGCAGCAUCAAAG |
| 43590 | 248 | ACUGGCGCUUUUAUCUGAUUACUUUGAGAGCCAUCACCAGCGACUAUGUCGUAGUGGG |
| | | UAAAGCUGCACAUGGAGAUGUGCAGCAUCAAAG |
| 43591 | 249 | ACUGGCGCUUUUAUCUGAUUACUUUGAGAGCCAUCACCAGCGACUAUGUCGUAGUGGG |
| | | UAAAGCUUGGGCGCAGCGUCAAUGACGCUGACGGUACAAGCAUCAAAG |
| 43592 | 250 | ACUGGCGCUUUUAUCUGAUUACUUUGAGAGCCAUCACCAGCGACUAUGUCGUAGUGGG |
| | | UAAAGCUGCACUAUGGGCGCAGCGUCAAUGACGCUGACGGUACAGGCCACAUGAGGAU |
| | | CACCCAUGUGGUAUAGUGCAGCAUCAAAG |
| 43593 | 251 | ACUGGCGCUUUUAUCUGAUUACUUUGAGAGCCAUCACCAGCGACUAUGUCGUAGUGGG |
| | | UAAAGCUGCACUAUGGGCGCAGCUCAUGAGGAUCACCCAUGAGCUGACGGUACAGGCC |
| | | ACAUGAGGAUCACCCAUGUGGUAUAGUGCAGCAUCAAAG |
| 43594 | 252 | ACUGGCGCUUUUAUCUGAUUACUUUGAGAGCCAUCACCAGCGACUAUGUCGUAGUGGG |
| | | UAAAGCUGCACUAUGGGCGCAGCGUCAAUGACGCUGACGGUACAGGCCACAUGGCAGU |
| | | CGUAACGACGCGGGUGGUAUAGUGCAGCAUCAAAG |
| 43595 | 253 | ACUGGCGCUUUUAUCUGAUUACUUUGAGAGCCAUCACCAGCGACUAUGUCGUAGUGGG |
| | | UAAAGCUGCACUAUGGGCGCAGCAAACAUGGCAGUCCUAAGGACGCGGGUUUUGCUGA |
| | | CGGUACAGGCCACAUGGCAGUCGUAACGACGCGGGUGGUAUAGUGCAGCAUCAAAG |
| 43596 | 254 | ACUGGCGCUUUUAUCUGAUUACUUUGAGAGCCAUCACCAGCGACUAUGUCGUAGUGGG |
| | | UAAAGCUGCACUAUGGGCGCAGACAUGGCAGUCGUAACGACGCGGGUCUGACGGUACA |
| | | GGCCACAUGAGGAUCACCCAUGUGGUAUAGUGCAGCAUCAAAG |
| 43597 | 255 | ACUGGCGCUUUUAUCUGAUUACUUUGAGAGCCAUCACCAGCGACUAUGUCGUAGUGGG |
| | | UAAAGCUGCACUAAGGAGUUUAUAUGGAAACCCUUAGUGCAGCAUCAAAG |
| 43598 | 256 | ACUGGCGCUUUUAUCUGAUUACUUUGAGAGCCAUCACCAGCGACUAUGUCGUAGUGGG |
| | | UAAAGCUCAGGAAGCACUAUGGGCGCAGCGUCAAUGACGCUGACGGUACAGGCCAGAC |
| | | AAUUAUUGUCUGGUAUAGUGCAGCAGCAGAACAAUUUGCUGAGGGCUAUUGAGGCGCA |
| | | ACAGCAUCUGUUGCAACUCACAGUCUGGGGCAUCAAGCAGCUCCAGGCAAGAAUCCUG |
| | | AGCAUCAAAG |
| 43599 | 257 | ACUGGCGCUUUUAUCUGAUUACUUUGAGAGCCAUCACCAGCGACUAUGUCGUAGUGGG |
| | | UAAAGCUGCACGCCCUGAAGAAGGGCGUGCAGCAUCAAAG |
| 43600 | 258 | ACUGGCGCUUUUAUCUGAUUACUUUGAGAGCCAUCACCAGCGACUAUGUCGUAGUGGG |
| | | UAAAGCUGCACGGCUCGUGUAGCUCAUUAGCUCCGAGCCGUGCAGCAUCAAAG |
| 43601 | 259 | ACUGGCGCUUUUAUCUGAUUACUUUGAGAGCCAUCACCAGCGACUAUGUCGUAGUGGG |
| | | UAAAGCUGCACCCGUGUGCAUCCGCAGUGUCGGAUCCACGGGUGCAGCAUCAAAG |
| 43602 | 260 | ACUGGCGCUUUUAUCUGAUUACUUUGAGAGCCAUCACCAGCGACUAUGUCGUAGUGGG |
| | | UAAAGCUGCACGGAAUCCAUUGCACUCCGGAUUUCACUAGGUGCAGCAUCAAAG |
| 43603 | 261 | ACUGGCGCUUUUAUCUGAUUACUUUGAGAGCCAUCACCAGCGACUAUGUCGUAGUGGG |
| | | UAAAGCUGCACAUGCAUGUCUAAGACAGCAUGUGCAGCAUCAAAG |
| 43604 | 262 | ACUGGCGCUUUUAUCUGAUUACUUUGAGAGCCAUCACCAGCGACUAUGUCGUAGUGGG |
| | | UAAAGCUGCACAAAACAUAAGGAAAACCUAUGUUGUGCAGCAUCAAAG |
| 43605 | 263 | ACUGGCGCUUCUAUCUGAUUACUCUGAGCGCCAUCACCAGCGACUAUGUCGUAGUGGG |
| | | UAAAGCCGCUUACGGACUAUGGGCGCAGCGUCAAUGACGCUGACGGUACAGGCCAGAC |
| | | AAUUAUUGUCUGGUAUAGUCCGUAAGAGGCAUCAGAG |
| 43606 | 264 | ACUGGCGCUUCUAUCUGAUUACUCUGAGCGCCAUCACCAGCGACUAUGUCGUAGUGGG |
| | | UAAAGCCGCUUACGGGUGGGCGCAGCGUCAAUGACGCUGACGGUACAGGCCAGACAAU |
| | | UAUUGUCUGGUACCCGUAAGAGGCAUCAGAG |
| 43607 | 265 | ACUGGCGCUUCUAUCUGAUUACUCUGAGCGCCAUCACCAGCGACUAUGUCGUAGUGGG |
| | | UAAAGCCGCUUACGGUAUGGGCGCAGCGUCAAUGACGCUGACGGUACAGGCCACAUGA |
| | | GGAUCACCCAUGUGGUAUACCGUAAGAGGCAUCAGAG |
| 43608 | 266 | ACUGGCGCUUUUAUCUGAUUACUUUGAGAGCCAUCACCAGCGACUAUGUCGUAGUGGG |
| | | UAAAGCUCCCUAUGGGCGCAGCGUCAAUGACGCUGACGGUACAGGCCACAUGAGGAUC |
| | | ACCCAUGUGGUAUAGGGAGCAUCAAAG |
| 43609 | 267 | ACUGGCGCUUCUAUCUGAUUACUCUGAGCGCCAUCACCAGCGACUAUGUCGUAGUGGG |
| | | UAAAGCCGCUUACGGUAUGGGCGCAGCUCAUGAGGAUCACCCAUGAGCUGACGGUACA |
| | | GGCCACAUGAGGAUCACCCAUGUGGUAUACCGUAAGAGGCAUCAGAG |
| 43610 | 268 | ACUGGCGCUUUUAUCUGAUUACUUUGAGAGCCAUCACCAGCGACUAUGUCGUAGUGGG |
| | | UAAAGCUCCCUAUGGGCGCAGCUCAUGAGGAUCACCCAUGAGCUGACGGUACAGGCCA |
| | | CAUGAGGAUCACCCAUGUGGUAUAGGGAGCAUCAAAG |
| 43611 | 269 | ACUGGCGCUUCUAUCUGAUUACUCUGAGCGCCAUCACCAGCGACUAUGUCGUAGUGGG |
| | | UAAAGCCGCUUACGGUAUGGGCGCAGCGUCAAUGACGCUGACGGUACAGGCCACAUGG |
| | | CAGUCGUAACGACGCGGGUGGUAUACCGUAAGAGGCAUCAGAG |
| 43612 | 270 | ACUGGCGCUUUUAUCUGAUUACUUUGAGAGCCAUCACCAGCGACUAUGUCGUAGUGGG |
| | | UAAAGCUCCCUAUGGGCGCAGCGUCAAUGACGCUGACGGUACAGGCCACAUGGCAGUC |
| | | GUAACGACGCGGGUGGUAUAGGGAGCAUCAAAG |
| 43613 | 27 | ACUGGCGCUUCUAUCUGAUUACUCUGAGCGCCAUCACCAGCGACUAUGUCGUAGUGGG |
| | | UAAAGCCGCUUACGGUAUGGGCGCAGCAAACAUGGCAGUCCUAAGGACGCGGGUUUUG |
| | | CUGACGGUACAGGCCACAUGGCAGUCGUAACGACGCGGGUGGUAUACCGUAAGAGGCA |
| | | UCAGAG |
| 43614 | 272 | ACUGGCGCUUUUAUCUGAUUACUUUGAGAGCCAUCACCAGCGACUAUGUCGUAGUGGG |
| | | UAAAGCUCCCUAUGGGCGCAGCAAACAUGGCAGUCCUAAGGACGCGGGUUUUGCUGAC |
| | | GGUACAGGCCACAUGGCAGUCGUAACGACGCGGGUGGUAUAGGGAGCAUCAAAG |
| 43615 | 273 | ACUGGCGCUUCUAUCUGAUUACUCUGAGCGCCAUCACCAGCGACUAUGUCGUAGUGGG |
| | | UAAAGCCGCUUACGGUAUGGGCGCAGACAUGGCAGUCGUAACGACGCGGGUCUGACGG |
| | | UACAGGCCACAUGAGGAUCACCCAUGUGGUAUACCGUAAGAGGCAUCAGAG |
| 43616 | 274 | ACUGGCGCUUUUAUCUGAUUACUUUGAGAGCCAUCACCAGCGACUAUGUCGUAGUGGG |
| | | UAAAGCUCCCUAUGGGCGCAGACAUGGCAGUCGUAACGACGCGGGUCUGACGGUACAG |
| | | GCCACAUGAGGAUCACCCAUGUGGUAUAGGGAGCAUCAAAG |
| 43617 | 275 | ACUGGCGCUUUUAUCUGAUUACUUUGAGAGCCAUCACCAGCGACUAUG |
| | | UCGUAGUGGGUAAAGCUGCACUAUGGGCGCAGCACCUGAGGAUCACCC |
| | | AGGUGCUGACGGUACAGGCCACCUGAGGAUCACCCAGGUGGUAUAGUG |
| | | CAGCAUCAAAG |
| 43618 | 276 | ACUGGCGCUUUUAUCUGAUUACUUUGAGAGCCAUCACCAGCGACUAUG |
| | | UCGUAGUGGGUAAAGCUGCACUAUGGGCGCAGCGCAUGAGGAUCACCC |
| | | AUGCGCUGACGGUACAGGCCGCAUGAGGAUCACCCAUGCGGUAUAGUG |
| | | CAGCAUCAAAG |
| 43619 | 277 | ACUGGCGCUUUUAUCUGAUUACUUUGAGAGCCAUCACCAGCGACUAUG |
| | | UCGUAGUGGGUAAAGCUGCACUAUGGGCGCAGCGCCUGAGGAUCACCC |
| | | AGGCGCUGACGGUACAGGCCGCCUGAGGAUCACCCAGGCGGUAUAGUG |
| | | CAGCAUCAAAG |
| 43620 | 278 | ACUGGCGCUUUUAUCUGAUUACUUUGAGAGCCAUCACCAGCGACUAUG |
| | | UCGUAGUGGGUAAAGCUGCACUAUGGGCGCAGCGCCUGAGCAUCAGCC |
| | | AGGCGCUGACGGUACAGGCCGCCUGAGCAUCAGCCAGGCGGUAUAGUG |
| | | CAGCAUCAAAG |
| 43621 | 279 | ACUGGCGCUUUUAUCUGAUUACUUUGAGAGCCAUCACCAGCGACUAUG |
| | | UCGUAGUGGGUAAAGCUGCACUAUGGGCGCAGCACAUGAGCAUCAGCC |
| | | AUGUGCUGACGGUACAGGCCACAUGAGCAUCAGCCAUGUGGUAUAGUG |
| | | CAGCAUCAAAG |
| 43622 | 280 | ACUGGCGCUUUUAUCUGAUUACUUUGAGAGCCAUCACCAGCGACUAUG |
| | | UCGUAGUGGGUAAAGCUGCACUAUGGGCGCAGCACAUGAGUAUCAACC |
| | | AUGUGCUGACGGUACAGGCCACAUGAGUAUCAACCAUGUGGUAUAGUG |
| | | CAGCAUCAAAG |
| 43623 | 281 | ACUGGCGCUUUUAUCUGAUUACUUUGAGAGCCAUCACCAGCGACUAUG |
| | | UCGUAGUGGGUAAAGCUGCACUAUGGGCGCAGCACAUGAGAAUCAGCC |
| | | AUGUGCUGACGGUACAGGCCACAUGAGAAUCAGCCAUGUGGUAUAGUG |
| | | CAGCAUCAAAG |
| 43624 | 282 | ACUGGCGCUUUUAUCUGAUUACUUUGAGAGCCAUCACCAGCGACUAUG |
| | | UCGUAGUGGGUAAAGCUGCACUAUGGGCGCAGCCCUUGAGGAUCACCC |
| | | AUGUGCUGACGGUACAGGCCCCUUGAGGAUCACCCAUGUGGUAUAGUG |
| | | CAGCAUCAAAG |
| 43625 | 283 | ACUGGCGCUUUUAUCUGAUUACUUUGAGAGCCAUCACCAGCGACUAUG |
| | | UCGUAGUGGGUAAAGCUGCACUAUGGGCGCAGCACUUGAGGAUCACCC |
| | | AUGUGCUGACGGUACAGGCCACUUGAGGAUCACCCAUGUGGUAUAGUG |
| | | CAGCAUCAAAG |
| 43626 | 284 | ACUGGCGCUUUUAUCUGAUUACUUUGAGAGCCAUCACCAGCGACUAUG |
| | | UCGUAGUGGGUAAAGCUGCACUAUGGGCGCAGCACCUGAGGAUCACCC |
| | | AUGUGCUGACGGUACAGGCCACCUGAGGAUCACCCAUGUGGUAUAGUG |
| | | CAGCAUCAAAG |
| 43627 | 285 | ACUGGCGCUUUUAUCUGAUUACUUUGAGAGCCAUCACCAGCGACUAUGUCGU |
| | | AGUGGGUAAAGCUGCACUAUGGGCGCAGCACAUGAGGAUCACCUAUGUGCUG |
| | | ACGGUACAGGCCACAUGAGGAUCACCUAUGUGGUAUAGUGCAGCAUCAAAG |
| 43628 | 286 | ACUGGCGCUUUUAUCUGAUUACUUUGAGAGCCAUCACCAGCGACUAUGUCGU |
| | | AGUGGGUAAAGCUGCACUAUGGGCGCAGCACAUUAGGAUCACCAAUGUGCUG |
| | | ACGGUACAGGCCACAUUAGGAUCACCAAUGUGGUAUAGUGCAGCAUCAAAG |
| 43629 | 287 | ACUGGCGCUUUUAUCUGAUUACUUUGAGAGCCAUCACCAGCGACUAUGUCGU |
| | | AGUGGGUAAAGCUGCACUAUGGGCGCAGCACAUUAGGAUCACCGAUGUGCUG |
| | | ACGGUACAGGCCACAUUAGGAUCACCGAUGUGGUAUAGUGCAGCAUCAAAG |
| 43630 | 288 | ACUGGCGCUUUUAUCUGAUUACUUUGAGAGCCAUCACCAGCGACUAUGUCGU |
| | | AGUGGGUAAAGCUGCACUAUGGGCGCAGCACAUUAGGAUCACCUAUGUGCUG |
| | | ACGGUACAGGCCACAUUAGGAUCACCUAUGUGGUAUAGUGCAGCAUCAAAG |
| 43631 | 289 | ACUGGCGCUUUUAUCUGAUUACUUUGAGAGCCAUCACCAGCGACUAUGUCGU |
| | | AGUGGGUAAAGCUGCACUAUGGGCGCAGCACAUGAGGAUUACCCAUGUGCUG |
| | | ACGGUACAGGCCACAUGAGGAUUACCCAUGUGGUAUAGUGCAGCAUCAAAG |
| 43632 | 290 | ACUGGCGCUUUUAUCUGAUUACUUUGAGAGCCAUCACCAGCGACUAUGUCGU |
| | | AGUGGGUAAAGCUGCACUAUGGGCGCAGCACAUGAGGAUAACCCAUGUGCUG |
| | | ACGGUACAGGCCACAUGAGGAUAACCCAUGUGGUAUAGUGCAGCAUCAAAG |
| 43633 | 291 | ACUGGCGCUUUUAUCUGAUUACUUUGAGAGCCAUCACCAGCGACUAUGUCGU |
| | | AGUGGGUAAAGCUGCACUAUGGGCGCAGCACAUGAGGAUGACCCAUGUGCUG |
| | | ACGGUACAGGCCACAUGAGGAUGACCCAUGUGGUAUAGUGCAGCAUCAAAG |
| 43634 | 292 | ACUGGCGCUUUUAUCUGAUUACUUUGAGAGCCAUCACCAGCGACUAUGUCGU |
| | | AGUGGGUAAAGCUGCACUAUGGGCGCAGCACAUGAGGACCACCCAUGUGCUG |
| | | ACGGUACAGGCCACAUGAGGACCACCCAUGUGGUAUAGUGCAGCAUCAAAG |
| 43635 | 293 | ACUGGCGCUUUUAUCUGAUUACUUUGAGAGCCAUCACCAGCGACUAUGUCGU |
| | | AGUGGGUAAAGCUGCACUAUGGGCGCAGCAGAUGAGGAUCACCCAUGGGCUG |
| | | ACGGUACAGGCCAGAUGAGGAUCACCCAUGGGGUAUAGUGCAGCAUCAAAG |
| 43636 | 294 | ACUGGCGCUUUUAUCUGAUUACUUUGAGAGCCAUCACCAGCGACUAUGUCGU |
| | | AGUGGGUAAAGCUGCACUAUGGGCGCAGCACAUGGGGAUCACCCAUGUGCUG |
| | | ACGGUACAGGCCACAUGGGGAUCACCCAUGUGGUAUAGUGCAGCAUCAAAG |
| 43637 | 295 | ACUGGCGCUUUUAUCUGAUUACUUUGAGAGCCAUCACCAGCGACUAUGUCGU |
| | | AGUGGGUAAAGCUGCACUAUGGGCGCAGCACAUGAGGAUCACCCAUGUGCUG |
| | | ACGGUACAGGCCACAUGAGGAUCACCCAUGUGGUAUAGUGCAGCAUCAAAG |
| 43638 | 296 | ACUGGCGCUUUUAUCUGAUUACUUUGAGAGCCAUCACCAGCGACUAUGUCGU |
| | | AGUGGGUAAAGCUCACCUGAGGAUCACCCAGGUGAGCAUCAAAG |
| 43639 | 297 | ACUGGCGCUUUUAUCUGAUUACUUUGAGAGCCAUCACCAGCGACUAUGUCGU |
| | | AGUGGGUAAAGCUCGCAUGAGGAUCACCCAUGCGAGCAUCAAAG |
| 43640 | 298 | ACUGGCGCUUUUAUCUGAUUACUUUGAGAGCCAUCACCAGCGACUAUGUCGU |
| | | AGUGGGUAAAGCUCGCCUGAGGAUCACCCAGGCGAGCAUCAAAG |
| 43641 | 299 | ACUGGCGCUUUUAUCUGAUUACUUUGAGAGCCAUCACCAGCGACUAUGUCGU |
| | | AGUGGGUAAAGCUCGCCUGAGCAUCAGCCAGGCGAGCAUCAAAG |
| 43642 | 300 | ACUGGCGCUUUUAUCUGAUUACUUUGAGAGCCAUCACCAGCGACUAUGUCGU |
| | | AGUGGGUAAAGCUCACAUGAGCAUCAGCCAUGUGAGCAUCAAAG |
| 43643 | 301 | ACUGGCGCUUUUAUCUGAUUACUUUGAGAGCCAUCACCAGCGACUAUGUCGU |
| | | AGUGGGUAAAGCUCACAUGAGUAUCAACCAUGUGAGCAUCAAAG |
| 43644 | 302 | ACUGGCGCUUUUAUCUGAUUACUUUGAGAGCCAUCACCAGCGACUAUGUCGU |
| | | AGUGGGUAAAGCUCACAUGAGAAUCAGCCAUGUGAGCAUCAAAG |
| 43645 | 303 | ACUGGCGCUUUUAUCUGAUUACUUUGAGAGCCAUCACCAGCGACUAUGUCGU |
| | | AGUGGGUAAAGCUCCCUUGAGGAUCACCCAUGUGAGCAUCAAAG |
| 43646 | 304 | ACUGGCGCUUUUAUCUGAUUACUUUGAGAGCCAUCACCAGCGACUAUGUCGU |
| | | AGUGGGUAAAGCUCACUUGAGGAUCACCCAUGUGAGCAUCAAAG |
| 43647 | 305 | ACUGGCGCUUUUAUCUGAUUACUUUGAGAGCCAUCACCAGCGACUAUGUCGU |
| | | AGUGGGUAAAGCUCACCUGAGGAUCACCCAUGUGAGCAUCAAAG |
| 43648 | 306 | ACUGGCGCUUUUAUCUGAUUACUUUGAGAGCCAUCACCAGCGACUAUGUCGU |
| | | AGUGGGUAAAGCUCACAUGAGGAUCACCUAUGUGAGCAUCAAAG |
| 43649 | 307 | ACUGGCGCUUUUAUCUGAUUACUUUGAGAGCCAUCACCAGCGACUAUGUCGU |
| | | AGUGGGUAAAGCUCACAUUAGGAUCACCAAUGUGAGCAUCAAAG |
| 43650 | 308 | ACUGGCGCUUUUAUCUGAUUACUUUGAGAGCCAUCACCAGCGACUAUGUCGU |
| | | AGUGGGUAAAGCUCACAUUAGGAUCACCGAUGUGAGCAUCAAAG |
| 43651 | 309 | ACUGGCGCUUUUAUCUGAUUACUUUGAGAGCCAUCACCAGCGACUAUGUCGU |
| | | AGUGGGUAAAGCUCACAUUAGGAUCACCUAUGUGAGCAUCAAAG |
| 43652 | 310 | ACUGGCGCUUUUAUCUGAUUACUUUGAGAGCCAUCACCAGCGACUAUGUCGU |
| | | AGUGGGUAAAGCUCACAUGAGGAUUACCCAUGUGAGCAUCAAAG |
| 43653 | 311 | ACUGGCGCUUUUAUCUGAUUACUUUGAGAGCCAUCACCAGCGACUAUGUCGU |
| | | AGUGGGUAAAGCUCACAUGAGGAUAACCCAUGUGAGCAUCAAAG |
| 43654 | 312 | ACUGGCGCUUUUAUCUGAUUACUUUGAGAGCCAUCACCAGCGACUAUGUCGU |
| | | AGUGGGUAAAGCUCACAUGAGGAUGACCCAUGUGAGCAUCAAAG |
| 43655 | 313 | ACUGGCGCUUUUAUCUGAUUACUUUGAGAGCCAUCACCAGCGACUAUGUCGU |
| | | AGUGGGUAAAGCUCACAUGAGGACCACCCAUGUGAGCAUCAAAG |
| 43656 | 314 | ACUGGCGCUUUUAUCUGAUUACUUUGAGAGCCAUCACCAGCGACUAUGUCGU |
| | | AGUGGGUAAAGCUCAGAUGAGGAUCACCCAUGGGAGCAUCAAAG |
| 43657 | 315 | ACUGGCGCUUUUAUCUGAUUACUUUGAGAGCCAUCACCAGCGACUAUGUCGU |
| | | AGUGGGUAAAGCUCACAUGGGGAUCACCCAUGUGAGCAUCAAAG |
| 43658 | 317 | ACUGGCGCUUCUAUCUGAUUACUCUGAGCGCCAUCACCAGCGACUAUGUCGUAGUGGG |
| | | UAAAGCUCACAUGAGGAUCACCCAUGUGAGCAUCAGAG |
| 43659 | 318 | ACUGGCGCUUCUAUCUGAUUACUCUGAGCGCCAUCACCAGCGACUAUGUCGUAGUGGG |
| | | UAAAGCUGCACUAUGGGCGCAGCGUCAAUGACGCUGACGGUACAGGCCACAUGAGGAU |
| | | CACCCAUGUGGUAUAGUGCAGCAUCAGAG |
| 43660 | 319 | ACUGGCGCUUCUAUCUGAUUACUCUGAGCGCCAUCACCAGCGACUAUGUCGUAGUGGG |
| | | UAAAGCUGCACUAUGGGCGCAGCUCAUGAGGAUCACCCAUGAGCUGACGGUACAGGCC |
| | | ACAUGAGGAUCACCCAUGUGGUAUAGUGCAGCAUCAGAG |
| 43661 | 320 | ACUGGCGCUUCUAUCUGAUUACUCUGAGCGCCAUCACCAGCGACUAUGUCGUAGUGGG |
| | | UAAAGCUGCACUAUGGGCGCAGACAUGGCAGUCGUAACGACGCGGGUCUGACGGUACA |
| | | GGCCACAUGAGGAUCACCCAUGUGGUAUAGUGCAGCAUCAGAG |
| 44047 | 321 | ACUGGCGCUUUUAUCUGAUUACUUUGAGAGCCAUCACCAGCGACUAUGUCGU |
| | | AGUGGGUAAAGCUGCACUAUGGGGCCACAUGAGGAUCACCCAUGUGGUGUAC |
| | | AGCGCAGCGUCAAUGACGCUGACGAUAGUGCAGCAUCAAAG |

[0154] In some embodiments, a sgRNA variant comprises one or more additional changes to a sequence of SEQ ID NO:2238, SEQ ID NO:2239, SEQ ID NO:2240, SEQ ID NO:2241, SEQ ID NO:2243, SEQ ID NO: 2249, SEQ ID NO:2256, SEQ ID NO:2274, SEQ ID NO:2275, SEQ ID NO:2279, SEQ ID NO:2281, SEQ ID NO: 2285, SEQ ID NO: 43574, SEQ ID NO: 43577, or SEQ ID NO: 43593 of Table 3.

[0155] In some embodiments of the gRNA variants of the disclosure, the gRNA variant comprises at least one modification, wherein the at least one modification compared to the reference guide scaffold of SEQ ID NO:5 is selected from one or more of: (a) a C18G substitution in the triplex loop; (b) a G55 insertion in the stem bubble; (c) a U1 deletion; (d) a modification of the extended stem loop wherein (i) a 6 nt loop and 13 loop-proximal base pairs are replaced by a Uvsx hairpin; and (ii) a deletion of A99 and a substitution of G65U that results in a loop-distal base that is fully base-paired. In exemplary embodiments of the foregoing, the gRNA variant comprises the sequence of any one of SEQ ID NOS: 2238, 2241, 2244, 2248, 2249, 2256, 2259-2285, 43574 or 43577.

[0156] In some embodiments, a gRNA variant comprises an exogenous stem loop having a long non-coding RNA (lncRNA). As used herein, a lncRNA refers to a non-coding RNA that is longer than approximately 200 bp in length. In some embodiments, the 5′ and 3′ ends of the exogenous stem loop are base paired; i.e., interact to form a region of duplex RNA. In some embodiments, the 5′ and 3′ ends of the exogenous stem loop are base paired, and one or more regions between the 5′ and 3′ ends of the exogenous stem loop are not base paired.

[0157] In some embodiments, the disclosure provide gRNA variants with nucleotide modifications relative to reference gRNA having: (a) substitution of 1 to 15 consecutive or non-consecutive nucleotides in the gRNA variant in one or more regions; (b) a deletion of 1 to 10 consecutive or non-consecutive nucleotides in the gRNA variant in one or more regions; (c) an insertion of 1 to 10 consecutive or non-consecutive nucleotides in the gRNA variant in one or more regions; (d) a substitution of the scaffold stem loop or the extended stem loop with an RNA stem loop sequence from a heterologous RNA source with proximal 5′ and 3′ ends; or any combination of (a)-(d). Any of the substitutions, insertions and deletions described herein can be combined to generate a gNA variant of the disclosure. For example, a gNA variant can comprise at least one substitution and at least one deletion relative to a reference gRNA, at least one substitution and at least one insertion relative to a reference gRNA, at least one insertion and at least one deletion relative to a reference gRNA, or at least one substitution, one insertion and one deletion relative to a reference gRNA.

[0158] In some embodiments, a sgRNA variant of the disclosure comprises one or more additional changes to a previously generated variant, the previously generated variant itself serving as the sequence to be modified. In some embodiments, a sgRNA variant comprises one or more additional changes to a sequence of SEQ ID NO: 2238, SEQ ID NO: 2239, SEQ ID NO: 2240, SEQ ID NO: 2241, SEQ ID NO:2241, SEQ ID NO: 2249, SEQ ID NO:2274, SEQ ID NO:2275, SEQ ID NO: 2279, or SEQ ID NO: 2285, SEQ ID NO: 43574, SEQ ID NO: 43577, or SEQ ID NO: 43593.

[0159] In exemplary embodiments, a gRNA variant comprises one or more modification relative to gRNA scaffold variant 174 (SEQ ID NO:2238), wherein the resulting gRNA variant exhibits a functional improvement compared to the parent 174, when assessed in an in vitro or in vivo assay under comparable conditions.

[0160] In exemplary embodiments, a gRNA variant comprises one or more modification relative to gRNA scaffold variant 175 (SEQ ID NO:2239), wherein the resulting gRNA variant exhibits a functional improvement compared to the parent 174, when assessed in an in vitro or in vivo assay under comparable conditions.

[0161] In exemplary embodiments, a gRNA variant comprises one or more modification relative to gRNA scaffold variant 188 (SEQ ID NO:2249), wherein the resulting gRNA variant exhibits a functional improvement compared to the parent 215, when assessed in an in vitro or in vivo assay under comparable conditions.

[0162] In exemplary embodiments, a gRNA variant comprises one or more modification relative to gRNA scaffold variant 215 (SEQ ID NO:2275), wherein the resulting gRNA variant exhibits a functional improvement compared to the parent 215, when assessed in an in vitro or in vivo assay under comparable conditions.

[0163] In exemplary embodiments, a gRNA variant comprises one or more modification relative to gRNA scaffold variant 221 (SEQ ID NO: 2281), wherein the resulting gRNA variant exhibits a functional improvement compared to the parent 221, when assessed in an in vitro or in vivo assay under comparable conditions.

[0164] In exemplary embodiments, a gRNA variant comprises one or more modification relative to gRNA scaffold variant 225 (SEQ ID NO: 2285), wherein the resulting gRNA variant exhibits a functional improvement compared to the parent 225, when assessed in an in vitro or in vivo assay under comparable conditions.

[0165] In exemplary embodiments, a gRNA variant comprises one or more modification relative to gRNA scaffold variant 235 (SEQ ID NO: 43577), wherein the resulting gRNA variant exhibits a functional improvement compared to the parent 235, when assessed in an in vitro or in vivo assay under comparable conditions.

[0166] In exemplary embodiments, a gRNA variant comprises one or more modification relative to gRNA scaffold variant 251 (SEQ ID NO: 43593), wherein the resulting gRNA variant exhibits a functional improvement compared to the parent 251, when assessed in an in vitro or in vivo assay under comparable conditions.

[0167] In some embodiments, the gRNA variant comprises an exogenous extended stem loop, with such differences from a reference gRNA described as follows. In some embodiments, an exogenous extended stem loop has little or no identity to the reference stem loop regions disclosed herein (e.g., SEQ ID NO:15). In some embodiments, an exogenous stem loop is at least 10 bp, at least 20 bp, at least 30 bp, at least 40 bp, at least 50 bp, at least 60 bp, at least 70 bp, at least 80 bp, at least 90 bp, at least 100 bp, at least 200 bp, at least 300 bp, at least 400 bp, at least 500 bp, at least 600 bp, at least 700 bp, at least 800 bp, at least 900 bp, at least 1,000 bp, at least 2,000 bp, at least 3,000 bp, at least 4,000 bp, at least 5,000 bp, at least 6,000 bp, at least 7,000 bp, at least 8,000 bp, at least 9,000 bp, at least 10,000 bp, at least 12,000 bp, at least 15,000 bp or at least 20,000 bp. In some embodiments, the gRNA variant comprises an extended stem loop region comprising at least 10, at least 100, at least 500, at least 1000, or at least 10,000 nucleotides. In some embodiments, the heterologous stem loop increases the stability of the gRNA. In some embodiments, the heterologous RNA stem loop is capable of binding a protein, an RNA structure, a DNA sequence, or a small molecule. In some embodiments, an exogenous stem loop region replacing the stem loop comprises an RNA stem loop or hairpin in which the resulting gRNA has increased stability and, depending on the choice of loop, can interact with certain cellular proteins or RNA. Such exogenous extended stem loops can comprise, for example a thermostable RNA such as MS2 hairpin (ACAUGAGGAUCACCCAUGU (SEQ ID NO: 22)), Qβ hairpin (UGCAUGUCUAAGACAGCA (SEQ ID NO: 23)), U1 hairpin II (AAUCCAUUGCACUCCGGAUU (SEQ ID NO: 24)), Uvsx (CCUCUUCGGAGG (SEQ ID NO: 25)), PP7 hairpin (AGGAGUUUCUAUGGAAACCCU (SEQ ID NO: 26)), Phage replication loop (AGGUGGGACGACCUCUCGGUCGUCCUAUCU (SEQ ID NO: 27)), Kissing loop_a (UGCUCGCUCCGUUCGAGCA (SEQ ID NO: 28)), Kissing loop_b1 (UGCUCGACGCGUCCUCGAGCA (SEQ ID NO: 29)), Kissing loop_b2 (UGCUCGUUUGCGGCUACGAGCA (SEQ ID NO: 30)), G quadriplex M3q (AGGGAGGGAGGGAGAGG (SEQ ID NO: 31)), G quadriplex telomere basket (GGUUAGGGUUAGGGUUAGG (SEQ ID NO: 32)), Sarcin-ricin loop (CUGCUCAGUACGAGAGGAACCGCAG (SEQ ID NO: 33)) or Pseudoknots (UACACUGGGAUCGCUGAAUUAGAGAUCGGCGUCCUUUCAUUCUAUAUACUUUGG AGUUUUAAAAUGUCUCUAAGUACA (SEQ ID NO: 34)). In other embodiments, the stem loop comprises a “Rev response element” or “RRE”, capable of binding a retroviral Rev protein incorporated into an XDP fusion protein onto the gRNA. In some embodiments, one of the foregoing hairpin or RRE sequences is incorporated into the stem loop to help traffic the incorporation of the gRNA (and an associated CasX in an RNP complex) into a budding XDP (described more fully, below).

[0168] In the embodiments of the gRNA variants, the gRNA variant further comprises a spacer (or targeting sequence) region located at the 3′ end of the gRNA, capable of hybridizing with a target nucleic acid specific to a PTBP1 sequence described more fully, supra, which comprises at least 14 to about 35 nucleotides wherein the spacer is designed with a sequence that is complementary to a target DNA. In some embodiments, the encoded gRNA variant comprises a targeting sequence of at least 10 to 30 nucleotides complementary to a target DNA. In some embodiments, the targeting sequence has 14, 15, 16, 17, 18, 19, 20, 21, 22, 23, 24, 25, 26, 27, 28, 29, 30, 31, 32, 33, 34 or 35 nucleotides. In some embodiments, the encoded gRNA variant comprises a targeting sequence having 20 nucleotides. In some embodiments, the targeting sequence has 25 nucleotides. In some embodiments, the targeting sequence has 24 nucleotides. In some embodiments, the targeting sequence has 23 nucleotides. In some embodiments, the targeting sequence has 22 nucleotides. In some embodiments, the targeting sequence has 21 nucleotides. In some embodiments, the targeting sequence has 20 nucleotides. In some embodiments, the targeting sequence has 19 nucleotides. In some embodiments, the targeting sequence has 18 nucleotides. In some embodiments, the targeting sequence has 17 nucleotides. In some embodiments, the targeting sequence has 16 nucleotides. In some embodiments, the targeting sequence has 15 nucleotides. In some embodiments, the targeting sequence has 14 nucleotides.

### k. Complex Formation with CasX Protein

[0169] In some embodiments, upon expression, the gRNA variant is complexed as an RNP with a CasX variant protein comprising any one of the sequences of Table 4 (SEQ ID NOS: 36-99, 101-148 or 43662-43907), or a sequence having at least about 50%, at least about 60%, at least about 70%, at least about 80%, at least about 85%, at least about 90%, at least about 91%, at least about 92%, at least about 93%, at least about 94%, at least about 95%, at least about 96%, at least about 97%, at least about 98%, or at least about 99% identity thereto. In some embodiments, upon expression, the gRNA variant is complexed as an RNP with a CasX variant protein comprising any one of SEQ ID NOS: 59, 72-99, 101-148, or 43662-43907, or a sequence having at least about 50%, at least about 60%, at least about 70%, at least about 80%, at least about 85%, at least about 90%, at least about 91%, at least about 92%, at least about 93%, at least about 94%, at least about 95%, at least about 96%, at least about 97%, at least about 98%, or at least about 99% identity thereto. In some embodiments, upon expression, the gRNA variant is complexed as an RNP with a CasX variant protein comprising any one of SEQ ID NOS: 132-148 or 43662-43907, or a sequence having at least about 50%, at least about 60%, at least about 70%, at least about 80%, at least about 85%, at least about 90%, at least about 91%, at least about 92%, at least about 93%, at least about 94%, at least about 95%, at least about 96%, at least about 97%, at least about 98%, or at least about 99% identity thereto.

[0170] In some embodiments, a gRNA variant has an improved ability to form a complex with a CasX protein (such as a reference CasX or a CasX variant protein) when compared to a reference gRNA. In some embodiments, a gRNA variant has an improved affinity for a CasX protein (such as a reference or variant protein) when compared to a reference gRNA, thereby improving its ability to form a ribonucleoprotein (RNP) complex with the CasX protein, as described in the Examples. Improving ribonucleoprotein complex formation may, in some embodiments, improve the efficiency with which functional RNPs are assembled. In some embodiments, greater than 90%, greater than 93%, greater than 95%, greater than 96%, greater than 97%, greater than 98% or greater than 99% of RNPs comprising a gRNA variant and its spacer are competent for gene editing of a target nucleic acid.

[0171] Exemplary nucleotide changes that can improve the ability of gRNA variants to form a complex with CasX protein may, in some embodiments, include replacing the scaffold stem with a thermostable stem loop. Without wishing to be bound by any theory, replacing the scaffold stem with a thermostable stem loop could increase the overall binding stability of the gRNA variant with the CasX protein. Alternatively, or in addition, removing a large section of the stem loop could change the gRNA variant folding kinetics and make a functional folded gRNA easier and quicker to structurally-assemble, for example by lessening the degree to which the gRNA variant can get “tangled” in itself. In some embodiments, choice of scaffold stem loop sequence could change with different spacers that are utilized for the gRNA. In some embodiments, scaffold sequence can be tailored to the spacer and therefore the target sequence. Biochemical assays can be used to evaluate the binding affinity of CasX protein for the gRNA variant to form the RNP, including the assays of the Examples. For example, a person of ordinary skill can measure changes in the amount of a fluorescently tagged gRNA that is bound to an immobilized CasX protein, as a response to increasing concentrations of an additional unlabeled “cold competitor” gRNA. Alternatively, or in addition, fluorescence signal can be monitored to see how it changes as different amounts of fluorescently labeled gRNA are flowed over immobilized CasX protein. Alternatively, the ability to form an RNP can be assessed using in vitro cleavage assays against a defined target nucleic acid sequence, wherein the cleavage rate of the RNP comprising a gRNA variant is improved compared to an RNP comprising a reference gRNA when assessed in an in vitro assay.

### II. Proteins for Modifying a Target Nucleic Acid

[0172] The present disclosure provides systems comprising a CRISPR nuclease that have utility in genome editing of the PTBP1 gene in eukaryotic cells. In some embodiments, the CRISPR nuclease employed in the genome editing systems is a Class 2, Type V nuclease. Although members of Class 2, Type V CRISPR-Cas systems have differences, they share some common characteristics that distinguish them from the Cas9 systems. Firstly, the Class 2, Type V nucleases possess a single RNA-guided RuvC domain-containing effector but no HNH domain, and they recognize T-rich PAM 5′ upstream to the target region on the non-targeted strand, which is different from Cas9 systems which rely on G-rich PAM at 3′ side of target sequences. Type V nucleases generate staggered double-stranded breaks distal to the PAM sequence, unlike Cas9, which generates a blunt end in the proximal site close to the PAM. In addition, Type V nucleases degrade ssDNA in trans when activated by target dsDNA or ssDNA binding in cis. In some embodiments, the Type V nucleases of the embodiments recognize a 5′-TC PAM motif and produce staggered ends cleaved solely by the RuvC domain. In some embodiments, the Type V nuclease is selected from the group consisting of Cas12a, Cas12b, Cas12c, Cas12d (CasY), Cas12j, Cas12k, C2c4, C2c8, C2c5, C2c10, C2c9, CasZ and CasX. In some embodiments, the present disclosure provides systems comprising a CasX protein and one or more gRNA acids (CasX:gRNA system) that are specifically designed to modify a target nucleic acid sequence in eukaryotic cells.

[0173] The term “CasX protein”, as used herein, refers to a family of proteins, and encompasses all naturally-occurring CasX proteins (“reference CasX”), as well as CasX variants that share at least 50% to about 99% identity to naturally occurring CasX proteins and that possess one or more improved characteristics relative to a reference CasX protein, described more fully, below.

[0174] CasX proteins of the disclosure comprise at least one of the following domains: a non-target strand binding (NTSB) domain, a target strand loading (TSL) domain, a helical I domain, a helical II domain, an oligonucleotide binding domain (OBD), and a RuvC DNA cleavage domain.

[0175] In some embodiments, a CasX protein can bind and/or modify (e.g., nick, catalyze a double strand break, methylate, demethylate, etc.) a target nucleic acid at a specific sequence targeted by an associated gRNA, which hybridizes to a sequence within the target nucleic acid sequence.

### a. Reference CasX Proteins

[0176] The disclosure provides naturally-occurring CasX proteins (referred to herein as a “reference CasX protein”), which were subsequently modified to create the CasX variants of the disclosure. For example, reference CasX proteins can be isolated from naturally occurring prokaryotes, such as Deltaproteobacteria, Planctomycetes, or Candidatus Sungbacteria species. A reference CasX protein (interchangeably referred to herein as a reference CasX polypeptide) is a type II CRISPR/Cas endonuclease belonging to the CasX (interchangeably referred to as Cas12e) family of proteins that interacts with a guide RNA to form a ribonucleoprotein (RNP) complex.

[0177] In some cases, a reference CasX protein is isolated or derived from Deltaproteobacter having a sequence of:

| (SEQ ID NO: 1) | |
|---|---|
| 1 | MEKRINKIRK KLSADNATKP VSRSGPMKTL LVRVMTDDLK KRLEKRRKKP EVMPQVISNN |
| 61 | AANNLRMLLD DYTKMKEAIL QVYWQEFKDD HVGLMCKFAQ PASKKIDQNK LKPEMDEKGN |
| 121 | LTTAGFACSQ CGQPLFVYKL EQVSEKGKAY TNYFGRCNVA EHEKLILLAQ LKPEKDSDEA |
| 181 | VTYSLGKFGQ RALDFYSIHV TKESTHPVKP LAQIAGNRYA SGPVGKALSD ACMGTIASFL |
| 241 | SKYQDIIIEH QKVVKGNQKR LESLRELAGK ENLEYPSVTL PPQPHTKEGV DAYNEVIARV |
| 301 | RMWVNLNLWQ KLKLSRDDAK PLLRLKGFPS FPVVERRENE VDWWNTINEV KKLIDAKRDM |
| 361 | GRVFWSGVTA EKRNTILEGY NYLPNENDHK KREGSLENPK KPAKRQFGDL LLYLEKKYAG |
| 421 | DWGKVFDEAW ERIDKKIAGL TSHIEREEAR NAEDAQSKAV LTDWLRAKAS FVLERLKEMD |
| 481 | EKEFYACEIQ LQKWYGDLRG NPFAVEAENR VVDISGFSIG SDGHSIQYRN LLAWKYLENG |
| 541 | KREFYLLMNY GKKGRIRFTD GTDIKKSGKW QGLLYGGGKA KVIDLTFDPD DEQLIILPLA |
| 601 | FGTRQGREFI WNDLLSLETG LIKLANGRVI EKTIYNKKIG RDEPALFVAL TFERREVVDP |
| 661 | SNIKPVNLIG VDRGENIPAV IALTDPEGCP LPEFKDSSGG PTDILRIGEG YKEKQRAIQA |
| 721 | AKEVEQRRAG GYSRKFASKS RNLADDMVRN SARDLFYHAV THDAVLVFEN LSRGFGRQGK |
| 781 | RTFMTERQYT KMEDWLTAKL AYEGLTSKTY LSKTLAQYTS KTCSNCGFTI TTADYDGMLV |
| 841 | RLKKTSDGWA TTLNNKELKA EGQITYYNRY KRQTVEKELS AELDRLSEES GNNDISKWTK |
| 901 | GRRDEALFLL KKRFSHRPVQ EQFVCLDCGH EVHADEQAAL NIARSWLELN SNSTEFKSYK |
| 961 | SGKQPFVGAW QAFYKRRLKE VWKPNA. |

[0178] In some cases, a reference CasX protein is isolated or derived from Planctomycetes having a sequence of.

| (SEQ ID NO: 2) | |
|---|---|
| 1 | MQEIKRINKI RRRLVKDSNT KKAGKTGPMK TLLVRVMTPD LRERLENLRK KPENIPQPIS |
| 61 | NTSRANLNKL LTDYTEMKKA ILHVYWEEFQ KDPVGLMSRV AQPAPKNIDQ RKLIPVKDGN |
| 121 | ERLTSSGFAC SQCCQPLYVY KLEQVNDKGK PHTNYFGRCN VSEHERLILL SPHKPEANDE |
| 181 | LVTYSLGKFG QRALDFYSIH VTRESNHPVK PLEQIGGNSC ASGPVGKALS DACMGAVASF |
| 241 | LTKYQDIILE HQKVIKKNEK RLANLKDIAS ANGLAFPKIT LPPQPHTKEG IEAYNNVVAQ |
| 301 | IVIWVNLNLW QKLKIGRDEA KPLQRLKGFP SFPLVERQAN EVDWWDMVCN VKKLINEKKE |
| 361 | DGKVFWQNLA GYKRQEALLP YLSSEEDRKK GKKFARYQFG DLLLHLEKKH GEDWGKVYDE |
| 421 | AWERIDKKVE GLSKHIKLEE ERRSEDAQSK AALTDWLRAK ASFVIEGLKE ADKDEFCRCE |
| 481 | LKLQKWYGDL RGKPFAIEAE NSILDISGES KQYNCAFIWQ KDGVKKLNLY LIINYFKGGK |
| 541 | LRFKKIKPEA FEANRFYTVI NKKSGEIVPM EVNENFDDPN LIILPLAFGK RQGREFIWND |
| 601 | LLSLETGSLK LANGRVIEKT LYNRRTRQDE PALFVALTFE RREVLDSSNI KPMNLIGIDR |
| 661 | GENIPAVIAL TDPEGCPLSR FKDSLGNPTH ILRIGESYKE KQRTIQAAKE VEQRRAGGYS |
| 721 | RKYASKAKNL ADDMVRNTAR DLLYYAVTQD AMLIFENLSR GFGRQGKRTF MAERQYTRME |
| 781 | DWLTAKLAYE GLPSKTYLSK TLAQYTSKTC SNCGFTITSA DYDRVLEKLK KTATGWMTTI |
| 841 | NGKELKVEGQ ITYYNRYKRQ NVVKDLSVEL DRLSEESVNN DISSWTKGRS GEALSLLKKR |
| 901 | FSHRPVQEKF VCLNCGFETH ADEQAALNIA RSWLFLRSQE YKKYQTNKTT GNTDKRAFVE |
| 961 | TWQSFYRKKL KEVWKPAV. |

[0179] In some cases, a reference CasX protein is isolated or derived from Candidatus Sungbacteria having a sequence of

| (SEQ ID NO: 3) | |
|---|---|
| 1 | MDNANKPSTK SLVNTTRISD HFGVTPGQVT RVFSFGIIPT KRQYAIIERW FAAVEAARER |
| 61 | LYGMLYAHFQ ENPPAYLKEK FSYETFFKGR PVLNGLRDID PTIMTSAVFT ALRHKAEGAM |
| 121 | AAFHTNHRRL FEEARKKMRE YAECLKANEA LLRGAADIDW DKIVNALRTR LNTCLAPEYD |
| 181 | AVIADFGALC AFRALIAETN ALKGAYNHAL NQMLPALVKV DEPEEAEESP RLRFENGRIN |
| 241 | DLPKFPVAER ETPPDTETII RQLEDMARVI PDTAEILGYI HRIRHKAARR KPGSAVPLPQ |
| 301 | RVALYCAIRM ERNPEEDPST VAGHELGEID RVCEKRRQGL VRTPEDSQIR ARYMDIISER |
| 361 | ATLAHPDRWT EIQFLRSNAA SRRVRAETIS APFEGFSWTS NRTNPAPQYG MALAKDANAP |
| 421 | ADAPELCICL SPSSAAFSVR EKGGDLIYMR PTGGRRGKDN PGKEITWVPG SFDEYPASGV |
| 481 | ALKLRLYFGR SQARRMLINK TWGLLSDNPR VFAANAELVG KKRNPQDRWK LFFHMVISGP |
| 541 | PPVEYLDFSS DVRSRARTVI GINRGEVNPL AYAVVSVEDG QVLEEGLLGK KEYIDQLIET |
| 601 | RRRISEYQSR EQTPPRDLRQ RVRHLQDTVL GSARAKIHSL IAFWKGILAI ERLDDQFHGR |
| 661 | EQKIIPKKTY LANKTGFMNA LSFSGAVRVD KKGNPWGGMI EIYPGGISRT CTQCGTVWLA |
| 721 | RRPKNPGHRD AMVVIPDIVD DAAATGFDNV DCDAGTVDYG ELFTLSREWV RLTPRYSRVM |
| 781 | RGTLGDLERA IRQGDDRKSR QMLELALEPQ PQWGQFFCHR CGENGQSDVL AATNLARRAI |
| 841 | SLIRRLPDTD TPPTP. |

### b. CasX Variant Proteins

[0180] The present disclosure provides variants of a reference CasX protein (interchangeably referred to herein as “CasX variant” or “CasX variant protein”), wherein the CasX variants comprise at least one modification in at least one domain of the reference CasX protein, including the sequences of SEQ ID NOS:1-3. Any change in amino acid sequence of a reference CasX protein that leads to an improved characteristic of the CasX protein is considered a CasX variant protein of the disclosure. For example, CasX variants can comprise one or more amino acid substitutions, insertions, deletions, or swapped domains, or any combinations thereof, relative to a reference CasX protein sequence.

[0181] The CasX variants of the disclosure have one or more improved characteristics compared to reference CasX proteins, for example a reference protein of SEQ ID NO:1, SEQ ID NO:2 or SEQ ID NO:3, or the variant from which it was derived; e.g. CasX 491 or CasX 515. Exemplary improved characteristics of the CasX variant embodiments include, but are not limited to improved binding affinity to the gRNA, improved binding affinity to the target nucleic acid, improved ability to utilize a greater spectrum of PAM sequences in the editing and/or binding of target DNA, improved unwinding of the target DNA, increased editing activity, improved editing efficiency, improved editing specificity, increased percentage of a eukaryotic genome that can be efficiently edited, increased activity of the nuclease, increased target strand loading for double strand cleavage, decreased target strand loading for single strand nicking, decreased off-target cleavage, improved binding of the non-target strand of DNA, improved protein:gRNA (RNP) complex stability, improved protein:gRNA (RNP) complex solubility, and improved fusion characteristics, as described more fully, below. Exemplary improved characteristics are described in WO2020247882A1 and PCT/US20/36505, incorporated by reference herein. In the foregoing embodiments, the one or more of the improved characteristics of the CasX variant is at least about 1.1 to about 100,000-fold improved relative to the reference CasX protein of SEQ ID NO: 1, SEQ ID NO: 2, or SEQ ID NO: 3, when assayed in a comparable fashion. In other embodiments, the improvement is at least about 1.1-fold, at least about 2-fold, at least about 5-fold, at least about 10-fold, at least about 50-fold, at least about 100-fold, at least about 500-fold, at least about 1000-fold, at least about 5000-fold, at least about 10,000-fold, or at least about 100,000-fold compared to the reference CasX protein of SEQ ID NO: 1, SEQ ID NO: 2, or SEQ ID NO: 3, when assayed in a comparable fashion. In other cases, the one or more improved characteristics of an RNP of the CasX variant and the gRNA variant are at least about 1.1, at least about 10, at least about 100, at least about 1000, at least about 10,000, at least about 100,000-fold or more improved relative to an RNP of the reference CasX protein of SEQ ID NO:1, SEQ ID NO:2, or SEQ ID NO:3 and the gRNA of Table 2 or Table 3. In other cases, the one or more of the improved characteristics of an RNP of the CasX variant and the gRNA variant are about 1.1 to 100,00-fold, about 1.1 to 10,00-fold, about 1.1 to 1,000-fold, about 1.1 to 500-fold, about 1.1 to 100-fold, about 1.1 to 50-fold, about 1.1 to 20-fold, about 10 to 100,00-fold, about 10 to 10,00-fold, about 10 to 1,000-fold, about 10 to 500-fold, about 10 to 100-fold, about 10 to 50-fold, about 10 to 20-fold, about 2 to 70-fold, about 2 to 50-fold, about 2 to 30-fold, about 2 to 20-fold, about 2 to 10-fold, about 5 to 50-fold, about 5 to 30-fold, about 5 to 10-fold, about 100 to 100,00-fold, about 100 to 10,00-fold, about 100 to 1,000-fold, about 100 to 500-fold, about 500 to 100,00-fold, about 500 to 10,00-fold, about 500 to 1,000-fold, about 500 to 750-fold, about 1,000 to 100,00-fold, about 10,000 to 100,00-fold, about 20 to 500-fold, about 20 to 250-fold, about 20 to 200-fold, about 20 to 100-fold, about 20 to 50-fold, about 50 to 10,000-fold, about 50 to 1,000-fold, about 50 to 500-fold, about 50 to 200-fold, or about 50 to 100-fold, improved relative to an RNP of the reference CasX protein of SEQ ID NO:1, SEQ ID NO:2, or SEQ ID NO:3 and the gRNA of Table 2 or Table 3, when assayed in a comparable fashion. In other cases, the one or more improved characteristics of an RNP of the CasX variant and the gRNA variant are about 1.1-fold, 1.2-fold, 1.3-fold, 1.4-fold, 1.5-fold, 1.6-fold, 1.7-fold, 1.8-fold, 1.9-fold, 2-fold, 3-fold, 4-fold, 5-fold, 6-fold, 7-fold, 8-fold, 9-fold, 10-fold, 11-fold, 12-fold, 13-fold, 14-fold, 15-fold, 16-fold, 17-fold, 18-fold, 19-fold, 20-fold, 25-fold, 30-fold, 40-fold, 45-fold, 50-fold, 55-fold, 60-fold, 70-fold, 80-fold, 90-fold, 100-fold, 110-fold, 120-fold, 130-fold, 140-fold, 150-fold, 160-fold, 170-fold, 180-fold, 190-fold, 200-fold, 210-fold, 220-fold, 230-fold, 240-fold, 250-fold, 260-fold, 270-fold, 280-fold, 290-fold, 300-fold, 310-fold, 320-fold, 330-fold, 340-fold, 350-fold, 360-fold, 370-fold, 380-fold, 390-fold, 400-fold, 425-fold, 450-fold, 475-fold, or 500-fold improved relative to an RNP of the reference CasX protein of SEQ ID NO:1, SEQ ID NO:2, or SEQ ID NO:3 and the gRNA of Table 2 or Table 3, when assayed in a comparable fashion.

[0182] The term CasX variant is inclusive of variants that are fusion proteins; i.e. the CasX is “fused to” a heterologous sequence. This includes CasX variants comprising CasX variant sequences and N-terminal, C-terminal, or internal fusions of the CasX to a heterologous protein or domain thereof.

[0183] In some embodiments, the CasX variant comprises at least one modification in the NTSB domain. In some embodiments, the CasX variant comprises at least one modification in the TSL domain. In some embodiments, the CasX variant comprises at least one modification in the helical I domain. In some embodiments, the CasX variant comprises at least one modification in the helical II domain. In some embodiments, the CasX variant comprises at least one modification in the OBD domain. In some embodiments, the CasX variant comprises at least one modification in the RuvC DNA cleavage domain. In some embodiments, the at least one modification in the RuvC DNA cleavage domain comprises an amino acid substitution of one or more of amino acids K682, G695, A708, V711, D732, A739, D733, L742, V747, F755, M771, M779, W782, A788, G791, L792, P793, Y797, M799, Q804, S819, or Y857 or a deletion of amino acid P793 of SEQ ID NO:2.

[0184] In some embodiments, the CasX variant protein comprises at least one modification in at least 1 domain, in at least each of 2 domains, in at least each of 3 domains, in at least each of 4 domains or in at least each of 5 domains of the reference CasX protein, including the sequences of SEQ ID NOS: 1-3. In some embodiments, the CasX variant protein comprises two or more modifications in at least one domain of the reference CasX protein. In some embodiments, the CasX variant protein comprises at least two modifications in at least one domain of the reference CasX protein, at least three modifications in at least one domain of the reference CasX protein or at least four modifications in at least one domain of the reference CasX protein. In some embodiments, wherein the CasX variant comprises two or more modifications compared to a reference CasX protein, each modification is made in a domain independently selected from the group consisting of a NTSBD, TSLD, Helical I domain, Helical II domain, OBD, and RuvC DNA cleavage domain. In some embodiments, the at least one modification of the CasX variant protein comprises a deletion of at least a portion of one domain of the reference CasX protein of SEQ ID NOS: 1-3. In some embodiments, the deletion is in the NTSBD, TSLD, Helical I domain, Helical II domain, OBD, or RuvC DNA cleavage domain. In other embodiments, the disclosure provides CasX variants wherein the CasX variants comprise at least one modification relative to another CasX variant; e.g., CasX variant 515 is a variant of CasX variant 491. All variants that improve one or more functions or characteristics of the CasX variant protein when compared to a reference CasX protein (or the variant from which it was derived) described herein are envisaged as being within the scope of the disclosure.

[0185] In some embodiments, the modification of the CasX variant is a mutation in one or more amino acids of the reference CasX. In other embodiments, the modification is a substitution of one or more domains of the reference CasX with one or more domains from a different CasX. In some embodiments, insertion includes the insertion of a part or all of a domain from a different CasX protein. Mutations can occur in any one or more domains of the reference CasX protein, and may include, for example, deletion of part or all of one or more domains, or one or more amino acid substitutions, deletions, or insertions in any domain of the reference CasX protein. The domains of CasX proteins include the non-target strand binding (NTSB) domain, the target strand loading (TSL) domain, the helical I domain, the helical II domain, the oligonucleotide binding domain (OBD), and the RuvC DNA cleavage domain. Any change in amino acid sequence of a reference CasX protein that leads to an improved characteristic of the CasX protein is considered a CasX variant protein of the disclosure. For example, CasX variants can comprise one or more amino acid substitutions, insertions, deletions, or swapped domains, or any combinations thereof, relative to a reference CasX protein sequence.

[0186] Suitable mutagenesis methods for generating CasX variant proteins of the disclosure may include, for example, Deep Mutational Evolution (DME), deep mutational scanning (DMS), error prone PCR, cassette mutagenesis, random mutagenesis, staggered extension PCR, gene shuffling, or domain swapping. In some embodiments, the CasX variants are designed, for example by selecting one or more desired mutations in a reference CasX. In certain embodiments, the activity of a reference CasX protein is used as a benchmark against which the activity of one or more CasX variants are compared, thereby measuring improvements in function of the CasX variants.

[0187] In some embodiments of the CasX variants described herein, the at least one modification comprises: (a) a substitution of 1 to 100 consecutive or non-consecutive amino acids in the CasX variant compared to a reference CasX of SEQ ID NO:1, SEQ ID NO:2, SEQ ID NO:3, CasX variant 491 or CasX variant 515; (b) a deletion of 1 to 100 consecutive or non-consecutive amino acids in the CasX variant compared to a reference CasX or the variant from which it was derived; (c) an insertion of 1 to 100 consecutive or non-consecutive amino acids in the CasX compared to a reference CasX or the variant from which it was derived; or (d) any combination of (a)-(c). In some embodiments, the at least one modification comprises: (a) a substitution of 5-10 consecutive or non-consecutive amino acids in the CasX variant compared to a reference CasX of SEQ ID NO:1, SEQ ID NO:2, SEQ ID NO:3, CasX 491 or CasX 515; (b) a deletion of 1-5 consecutive or non-consecutive amino acids in the CasX variant compared to a reference CasX or the variant from which it was derived; (c) an insertion of 1-5 consecutive or non-consecutive amino acids in the CasX compared to a reference CasX or the variant from which it was derived; or (d) any combination of (a)-(c).

[0188] In some embodiments, the CasX variant protein comprises or consists of a sequence that has at least 1, at least 2, at least 3, at least 4, at least 5, at least 6, at least 7, at least 8, at least 9, at least 10, at least 20, at least 30, at least 40, at least 50, at least 60, at least 70, at lease 80, at least 90, or at least 100 alterations relative to the sequence of SEQ ID NO:1, SEQ ID NO:2, SEQ ID NO:3, CasX variant 491 (with reference to Table 4) or CasX variant 515 (with reference to Table 4). These alterations can be amino acid insertions, deletions, substitutions, or any combinations thereof. The alterations can be in one domain or in any domain or any combination of domains of the CasX variant. Any amino acid can be substituted for any other amino acid in the substitutions described herein. The substitution can be a conservative substitution (e.g., a basic amino acid is substituted for another basic amino acid). The substitution can be a non-conservative substitution (e.g., a basic amino acid is substituted for an acidic amino acid or vice versa). For example, a proline in a reference CasX protein can be substituted for any of arginine, histidine, lysine, aspartic acid, glutamic acid, serine, threonine, asparagine, glutamine, cysteine, glycine, alanine, isoleucine, leucine, methionine, phenylalanine, tryptophan, tyrosine or valine to generate a CasX variant protein of the disclosure.

[0189] Any permutation of the substitution, insertion and deletion embodiments described herein can be combined to generate a CasX variant protein of the disclosure. For example, a CasX variant protein can comprise at least one substitution and at least one deletion relative to a reference CasX protein sequence, at least one substitution and at least one insertion relative to a reference CasX protein sequence, at least one insertion and at least one deletion relative to a reference CasX protein sequence, or at least one substitution, one insertion and one deletion relative to a reference CasX protein sequence.

[0190] In some embodiments, the CasX variant comprises at least one modification compared to the reference CasX sequence of SEQ ID NO:2 is selected from one or more of: (a) an amino acid substitution of L379R; (b) an amino acid substitution of A708K; (c) an amino acid substitution of T620P; (d) an amino acid substitution of E385P; (e) an amino acid substitution of Y857R; (f) an amino acid substitution of I658V; (g) an amino acid substitution of F399L; (h) an amino acid substitution of Q252K; (i) an amino acid substitution of L404K; and (j) an amino acid deletion of P793.

[0191] In some embodiments, the CasX variant protein comprises between 400 and 2000 amino acids, between 500 and 1500 amino acids, between 700 and 1200 amino acids, between 800 and 1100 amino acids, or between 900 and 1000 amino acids.

[0192] In some embodiments, a CasX variant protein comprises or consists of a sequence of SEQ ID NOS: 36-99, 101-148 or 43662-43907 as set forth in Table 4. In other embodiments, a CasX variant protein comprises a sequence at least 60% identical, at least 65% identical, at least 70% identical, at least 75% identical, at least 80% identical, at least 81% identical, at least 82% identical, at least 83% identical, at least 84% identical, at least 85% identical, at least 86% identical, at least 86% identical, at least 87% identical, at least 88% identical, at least 89% identical, at least 89% identical, at least 90% identical, at least 91% identical, at least 92% identical, at least 93% identical, at least 94% identical, at least 95% identical, at least 96% identical, at least 97% identical, at least 98% identical, at least 99% identical, at least 99.5% identical to a sequence of SEQ ID NOS: 36-99, 101-148 or 43662-43907 as set forth in Table 4. In some embodiments, a CasX variant protein comprises a sequence of SEQ ID NOS: 59, 72-99, 101-148, or 43662-43907. In some embodiments, a CasX variant protein consists of a sequence of SEQ ID NOS: 59, 72-99, 101-148, or 43662-43907. In other embodiments, a CasX variant protein comprises a sequence at least 60% identical, at least 65% identical, at least 70% identical, at least 75% identical, at least 80% identical, at least 81% identical, at least 82% identical, at least 83% identical, at least 84% identical, at least 85% identical, at least 86% identical, at least 86% identical, at least 87% identical, at least 88% identical, at least 89% identical, at least 89% identical, at least 90% identical, at least 91% identical, at least 92% identical, at least 93% identical, at least 94% identical, at least 95% identical, at least 96% identical, at least 97% identical, at least 98% identical, at least 99% identical, at least 99.5% identical to a sequence of SEQ ID NOS: 59, 72-99, 101-148, and 43662-43907. In some embodiments, a CasX variant protein comprises or consists of a sequence of SEQ ID NOS: 132-148 or 43662-43907. In other embodiments, a CasX variant protein comprises a sequence at least 60% identical, at least 65% identical, at least 70% identical, at least 75% identical, at least 80% identical, at least 81% identical, at least 82% identical, at least 83% identical, at least 84% identical, at least 85% identical, at least 86% identical, at least 86% identical, at least 87% identical, at least 88% identical, at least 89% identical, at least 89% identical, at least 90% identical, at least 91% identical, at least 92% identical, at least 93% identical, at least 94% identical, at least 95% identical, at least 96% identical, at least 97% identical, at least 98% identical, at least 99% identical, at least 99.5% identical to a sequence of SEQ ID NOS: 132-148 or 43662-43907.

TABLE 4
CasX Variant Sequences

| SEQ ID | Variant | |
|---|---|---|
| NO | No. | Description of Variant |
| 36 | ND | TSL, Helical I, Helical II, OBD and RuvC domains from SEQ ID NO: 2 and an NTSB |
| | | domain from SEQ ID NO: 1 |
| 37 | ND | NTSB, Helical I, Helical II, OBD and RuvC domains from SEQ ID NO: 2 and a TSL |
| | | domain from SEQ ID NO: 1. |
| 38 | ND | TSL, Helical I, Helical II, OBD and RuvC domains from SEQ ID NO: 1 and an NTSB |
| | | domain from SEQ ID NO: 2 |
| 39 | ND | NTSB, Helical I, Helical II, OBD and RuvC domains from SEQ ID NO: 1 and an TSL |
| | | domain from SEQ ID NO: 2. |
| 40 | ND | NTSB, TSL, Helical I, Helical II and OBD domains SEQ ID NO: 2 and an exogenous |
| | | RuvC domain or a portion thereof from a second CasX protein. |
| 41 | ND | ND |
| 42 | ND | NTSB, TSL, Helical II, OBD and RuvC domains from SEQ ID NO: 2 and a Helical I |
| | | domain from SEQ ID NO: 1 |
| 43 | ND | NTSB, TSL, Helical I, OBD and RuvC domains from SEQ ID NO: 2 and a Helical II |
| | | domain from SEQ ID NO: 1 |
| 44 | ND | NTSB, TSL, Helical I, Helical II and RuvC domains from a first CasX protein and an |
| | | exogenous OBD or a part thereof from a second CasX protein |
| 45 | ND | ND |
| 46 | ND | ND |
| 47 | ND | substitution of L379R, a substitution of C477K, a substitution of A708K, a deletion of P |
| | | at position 793 and a substitution of T620P of SEQ ID NO: 2 |
| 48 | ND | substitution of M771A of SEQ ID NO: 2. |
| 49 | ND | substitution of L379R, a substitution of A708K, a deletion of P at position 793 and a |
| | | substitution of D732N of SEQ ID NO: 2. |
| 50 | ND | substitution of W782Q of SEQ ID NO: 2. |
| 51 | ND | substitution of M771Q of SEQ ID NO: 2 |
| 52 | ND | substitution of R458I and a substitution of A739V of SEQ ID NO: 2. |
| 53 | ND | L379R, a substitution of A708K, a deletion of P at position 793 and a substitution of |
| | | M771N of SEQ ID NO: 2 |
| 54 | ND | substitution of L379R, a substitution of A708K, a deletion of P at position 793 and a |
| | | substitution of A739T of SEQ ID NO: 2 |
| 55 | ND | substitution of L379R, a substitution of C477K, a substitution of A708K, a deletion of P |
| | | at position 793 and a substitution of D489S of SEQ ID NO: 2. |
| 56 | ND | substitution of L379R, a substitution of C477K, a substitution of A708K, a deletion of P |
| | | at position 793 and a substitution of D732N of SEQ ID NO: 2. |
| 57 | ND | substitution of V711K of SEQ ID NO: 2. |
| 58 | ND | substitution of L379R, a substitution of C477K, a substitution of A708K, a deletion of P |
| | | at position 793 and a substitution of Y797L of SEQ ID NO: 2. |
| 60 | ND | substitution of L379R, a substitution of C477K, a substitution of A708K, a deletion of P |
| | | at position 793 and a substitution of M771N of SEQ ID NO: 2. |
| 61 | ND | substitution of A708K, a deletion of P at position 793 and a substitution of E386S of |
| | | SEQ ID NO: 2. |
| 62 | ND | substitution of L379R, a substitution of C477K, a substitution of A708K and a deletion |
| | | of P at position 793 of SEQ ID NO: 2. |
| 63 | ND | substitution of L792D of SEQ ID NO: 2. |
| 64 | ND | substitution of G791F of SEQ ID NO: 2. |
| 65 | ND | substitution of A708K, a deletion of P at position 793 and a substitution of A739V of |
| | | SEQ ID NO: 2. |
| 66 | ND | substitution of L379R, a substitution of A708K, a deletion of P at position 793 and a |
| | | substitution of A739V of SEQ ID NO: 2. |
| 67 | ND | substitution of C477K, a substitution of A708K and a deletion of P at position 793 of |
| | | SEQ ID NO: 2. |
| 68 | ND | substitution of L249I and a substitution of M771N of SEQ ID NO: 2. |
| 69 | ND | substitution of V747K of SEQ ID NO: 2. |
| 70 | ND | substitution of L379R, a substitution of C477K, a substitution of A708K, a deletion of P |
| | | at position 793 and a substitution of M779N of SEQ ID NO: 2. |
| 71 | ND | L379R, F755M |
| 59 | 119 | ND |
| 72 | 429 | ND |
| 73 | 430 | ND |
| 74 | 431 | ND |
| 75 | 432 | ND |
| 76 | 433 | ND |
| 77 | 434 | ND |
| 78 | 435 | ND |
| 79 | 436 | ND |
| 80 | 437 | ND |
| 81 | 438 | ND |
| 82 | 439 | ND |
| 83 | 440 | ND |
| 84 | 441 | ND |
| 85 | 442 | ND |
| 86 | 443 | ND |
| 87 | 444 | ND |
| 88 | 445 | ND |
| 89 | 446 | ND |
| 90 | 447 | ND |
| 91 | 448 | ND |
| 92 | 449 | ND |
| 93 | 450 | ND |
| 94 | 451 | ND |
| 95 | 452 | ND |
| 96 | 453 | ND |
| 97 | 454 | ND |
| 98 | 455 | ND |
| 99 | 456 | ND |
| 101 | 457 | ND |
| 102 | 458 | ND |
| 103 | 459 | ND |
| 104 | 460 | ND |
| 105 | 278 | ND |
| 106 | 279 | ND |
| 107 | 280 | ND |
| 108 | 285 | ND |
| 109 | 286 | ND |
| 110 | 287 | ND |
| 111 | 288 | ND |
| 112 | 290 | ND |
| 113 | 291 | ND |
| 114 | 293 | ND |
| 115 | 300 | ND |
| 116 | 492 | ND |
| 117 | 493 | ND |
| 118 | 387 | ND |
| 119 | 395 | ND |
| 120 | 485 | ND |
| 121 | 486 | ND |
| 122 | 487 | ND |
| 123 | 488 | ND |
| 124 | 489 | ND |
| 125 | 490 | ND |
| 126 | 491 | ND |
| 127 | 494 | ND |
| 128 | 328 | ND |
| 129 | 388 | ND |
| 130 | 389 | ND |
| 131 | 390 | ND |
| 132 | 514 | ND |
| 133 | 515 | ND |
| 134 | 516 | ND |
| 135 | 517 | ND |
| 136 | 518 | ND |
| 137 | 519 | ND |
| 138 | 520 | ND |
| 139 | 522 | ND |
| 140 | 523 | ND |
| 141 | 524 | ND |
| 142 | 525 | ND |
| 143 | 526 | ND |
| 144 | 527 | ND |
| 145 | 528 | ND |
| 146 | 529 | ND |
| 147 | 530 | ND |
| 148 | 531 | ND |
| 43662 | 532 | ND |
| 43663 | 533 | ND |
| 43664 | 534 | ND |
| 43665 | 535 | ND |
| 43666 | 536 | ND |
| 43667 | 537 | ND |
| 43668 | 538 | ND |
| 43669 | 539 | ND |
| 43670 | 540 | ND |
| 43671 | 541 | ND |
| 43672 | 542 | ND |
| 43673 | 543 | ND |
| 43674 | 544 | ND |
| 43675 | 545 | ND |
| 43676 | 546 | ND |
| 43677 | 547 | ND |
| 43678 | 548 | ND |
| 43679 | 550 | ND |
| 43680 | 551 | ND |
| 43681 | 552 | ND |
| 43682 | 553 | ND |
| 43683 | 554 | ND |
| 43684 | 555 | ND |
| 43685 | 556 | ND |
| 43686 | 557 | ND |
| 43687 | 558 | ND |
| 43688 | 559 | ND |
| 43689 | 560 | ND |
| 43690 | 561 | ND |
| 43691 | 562 | ND |
| 43692 | 563 | ND |
| 43693 | 564 | ND |
| 43694 | 565 | ND |
| 43695 | 566 | ND |
| 43696 | 567 | ND |
| 43697 | 568 | ND |
| 43698 | 569 | ND |
| 43699 | 570 | ND |
| 43700 | 571 | ND |
| 43701 | 572 | ND |
| 43702 | 573 | ND |
| 43703 | 574 | ND |
| 43704 | 575 | ND |
| 43705 | 576 | ND |
| 43706 | 577 | ND |
| 43707 | 578 | ND |
| 43708 | 579 | ND |
| 43709 | 580 | ND |
| 43710 | 581 | ND |
| 43711 | 582 | ND |
| 43712 | 583 | ND |
| 43713 | 584 | ND |
| 43714 | 585 | ND |
| 43715 | 586 | ND |
| 43716 | 587 | ND |
| 43717 | 588 | ND |
| 43718 | 589 | ND |
| 43719 | 590 | ND |
| 43720 | 591 | ND |
| 43721 | 592 | ND |
| 43722 | 593 | ND |
| 43723 | 594 | ND |
| 43724 | 595 | ND |
| 43725 | 596 | ND |
| 43726 | 597 | ND |
| 43727 | 598 | ND |
| 43728 | 599 | ND |
| 43729 | 600 | ND |
| 43730 | 601 | ND |
| 43731 | 602 | ND |
| 43732 | 603 | ND |
| 43733 | 604 | ND |
| 43734 | 605 | ND |
| 43735 | 606 | ND |
| 43736 | 607 | ND |
| 43737 | 608 | ND |
| 43738 | 609 | ND |
| 43739 | 610 | ND |
| 43740 | 611 | ND |
| 43741 | 612 | ND |
| 43742 | 613 | ND |
| 43743 | 614 | ND |
| 43744 | 615 | ND |
| 43745 | 616 | ND |
| 43746 | 617 | ND |
| 43747 | 618 | ND |
| 43748 | 619 | ND |
| 43749 | 620 | ND |
| 43750 | 621 | ND |
| 43751 | 622 | ND |
| 43752 | 623 | ND |
| 43753 | 624 | ND |
| 43754 | 625 | ND |
| 43755 | 626 | ND |
| 43756 | 627 | ND |
| 43757 | 628 | ND |
| 43758 | 629 | ND |
| 43759 | 630 | ND |
| 43760 | 631 | ND |
| 43761 | 632 | ND |
| 43762 | 633 | ND |
| 43763 | 634 | ND |
| 43764 | 635 | ND |
| 43765 | 636 | ND |
| 43766 | 637 | ND |
| 43767 | 638 | ND |
| 43768 | 639 | ND |
| 43769 | 640 | ND |
| 43770 | 641 | ND |
| 43771 | 642 | ND |
| 43772 | 643 | ND |
| 43773 | 644 | ND |
| 43774 | 645 | ND |
| 43775 | 646 | ND |
| 43776 | 647 | ND |
| 43777 | 648 | ND |
| 43778 | 649 | ND |
| 43779 | 650 | ND |
| 43780 | 651 | ND |
| 43781 | 652 | ND |
| 43782 | 653 | ND |
| 43783 | 654 | ND |
| 43784 | 655 | ND |
| 43785 | 656 | ND |
| 43786 | 657 | ND |
| 43787 | 658 | ND |
| 43788 | 659 | ND |
| 43789 | 660 | ND |
| 43790 | 661 | ND |
| 43791 | 662 | ND |
| 43792 | 663 | ND |
| 43793 | 664 | ND |
| 43794 | 665 | ND |
| 43795 | 666 | ND |
| 43796 | 667 | ND |
| 43797 | 668 | ND |
| 43798 | 669 | ND |
| 43799 | 671 | ND |
| 43800 | 672 | ND |
| 43801 | 673 | ND |
| 43802 | 674 | ND |
| 43803 | 675 | ND |
| 43804 | 676 | ND |
| 43805 | 677 | ND |
| 43806 | 678 | ND |
| 43807 | 679 | ND |
| 43808 | 680 | ND |
| 43809 | 681 | ND |
| 43810 | 682 | ND |
| 43811 | 683 | ND |
| 43812 | 684 | ND |
| 43813 | 685 | ND |
| 43814 | 686 | ND |
| 43815 | 687 | ND |
| 43816 | 688 | ND |
| 43817 | 689 | ND |
| 43818 | 690 | ND |
| 43819 | 691 | ND |
| 43820 | 692 | ND |
| 43821 | 693 | ND |
| 43822 | 694 | ND |
| 43823 | 701 | ND |
| 43824 | 702 | ND |
| 43825 | 703 | ND |
| 43826 | 704 | ND |
| 43827 | 705 | ND |
| 43828 | 706 | ND |
| 43829 | 707 | ND |
| 43830 | 708 | ND |
| 43831 | 709 | ND |
| 43832 | 710 | ND |
| 43833 | 711 | ND |
| 43834 | 712 | ND |
| 43835 | 713 | ND |
| 43836 | 714 | ND |
| 43837 | 715 | ND |
| 43838 | 716 | ND |
| 43839 | 717 | ND |
| 43840 | 718 | ND |
| 43841 | 719 | ND |
| 43842 | 720 | ND |
| 43843 | 721 | ND |
| 43844 | 722 | ND |
| 43845 | 723 | ND |
| 43846 | 724 | ND |
| 43847 | 725 | ND |
| 43848 | 726 | ND |
| 43849 | 727 | ND |
| 43850 | 728 | ND |
| 43851 | 729 | ND |
| 43852 | 730 | ND |
| 43853 | 731 | ND |
| 43854 | 732 | ND |
| 43855 | 733 | ND |
| 43856 | 734 | ND |
| 43857 | 735 | ND |
| 43858 | 736 | ND |
| 43859 | 737 | ND |
| 43860 | 738 | ND |
| 43861 | 739 | ND |
| 43862 | 740 | ND |
| 43863 | 741 | ND |
| 43864 | 742 | ND |
| 43865 | 743 | ND |
| 43866 | 744 | ND |
| 43867 | 745 | ND |
| 43868 | 746 | ND |
| 43869 | 747 | ND |
| 43870 | 748 | ND |
| 43871 | 749 | ND |
| 43872 | 750 | ND |
| 43873 | 751 | ND |
| 43874 | 752 | ND |
| 43875 | 753 | ND |
| 43876 | 754 | ND |
| 43877 | 755 | ND |
| 43878 | 756 | ND |
| 43879 | 757 | ND |
| 43880 | 758 | ND |
| 43881 | 759 | ND |
| 43882 | 760 | ND |
| 43883 | 761 | ND |
| 43884 | 762 | ND |
| 43885 | 763 | ND |
| 43886 | 764 | ND |
| 43887 | 765 | ND |
| 43888 | 766 | ND |
| 43889 | 767 | ND |
| 43890 | 768 | ND |
| 43891 | 769 | ND |
| 43892 | 770 | ND |
| 43893 | 777 | ND |
| 43894 | 778 | ND |
| 43895 | 779 | ND |
| 43896 | 780 | ND |
| 43897 | 781 | ND |
| 43898 | 782 | ND |
| 43899 | 783 | ND |
| 43900 | 784 | ND |
| 43901 | 785 | ND |
| 43902 | 786 | ND |
| 43903 | 787 | ND |
| 43904 | 788 | ND |
| 43905 | 789 | ND |
| 43906 | 790 | ND |
| 43907 | 791 | ND |

### c. CasX Variant Proteins with Domains from Multiple Source Proteins

[0193] In certain embodiments, the disclosure provides a chimeric CasX protein comprising protein domains from two or more different CasX proteins, such as two or more reference CasX proteins, or two or more CasX variant protein sequences as described herein. As used herein, a “chimeric CasX protein” refers to a CasX containing at least two domains isolated or derived from different sources, such as two naturally occurring proteins, which may, in some embodiments, be isolated from different species. For example, in some embodiments, a chimeric CasX protein comprises a first domain from a first CasX protein and a second domain from a second, different CasX protein. In some embodiments, the first domain can be selected from the group consisting of the NTSB, TSL, Helical I, Helical II, OBD and RuvC domains. In some embodiments, the second domain is selected from the group consisting of the NTSB, TSL, Helical I, Helical II, OBD and RuvC domains with the second domain being different from the foregoing first domain. For example, a chimeric CasX protein may comprise an NTSB, TSL, Helical I, Helical II, OBD domains from a CasX protein of SEQ ID NO: 2, and a RuvC domain from a CasX protein of SEQ ID NO: 1, or vice versa. As a further example, a chimeric CasX protein may comprise an NTSB, TSL, Helical II, OBD and RuvC domain from CasX protein of SEQ ID NO: 2, and a Helical I domain from a CasX protein of SEQ ID NO: 1, or vice versa. Thus, in certain embodiments, a chimeric CasX protein may comprise an NTSB, TSL, Helical II, OBD and RuvC domain from a first CasX protein, and a Helical I domain from a second CasX protein. In some embodiments of the chimeric CasX proteins, the domains of the first CasX protein are derived from the sequences of SEQ ID NO: 1, SEQ ID NO: 2 or SEQ ID NO: 3, and the domains of the second CasX protein are derived from the sequences of SEQ ID NO: 1, SEQ ID NO: 2 or SEQ ID NO: 3, and the first and second CasX proteins are not the same. In some embodiments, domains of the first CasX protein comprise sequences derived from SEQ ID NO: 1 and domains of the second CasX protein comprise sequences derived from SEQ ID NO: 2. In some embodiments, domains of the first CasX protein comprise sequences derived from SEQ ID NO: 1 and domains of the second CasX protein comprise sequences derived from SEQ ID NO: 3. In some embodiments, domains of the first CasX protein comprise sequences derived from SEQ ID NO: 2 and domains of the second CasX protein comprise sequences derived from SEQ ID NO: 3. In some embodiments, a CasX protein comprises a first domain from a first CasX protein and a second domain from a second CasX protein, and at least one chimeric domain comprising at least two parts isolated from different CasX proteins using the approach of the embodiments described in this paragraph. In some embodiments, the at least one chimeric domain comprises a chimeric RuvC domain. As an example of the foregoing, the chimeric RuvC domain comprises amino acids 660 to 823 of SEQ ID NO: 1 and amino acids 921 to 978 of SEQ ID NO: 2. As an alternative example of the foregoing, a chimeric RuvC domain comprises amino acids 647 to 810 of SEQ ID NO: 2 and amino acids 934 to 986 of SEQ ID NO: 1. In a particular embodiment, the CasX variants of 514-791 have a NTSB and helical 1B domain of SEQ ID NO: 1, while the other domains are derived from SEQ ID NO: 2, it being understood that the variants have additional amino acid changes at select locations. In another particular embodiment, the CasX variant of 494 has a NTSB domain of SEQ DI NO: 1, while the other domains are derived from SEQ ID NO: 2.

[0194] In the case of split or non-contiguous domains such as helical I, RuvC and OBD, a portion of the non-contiguous domain can be replaced with the corresponding portion from any other source. For example, the helical I-I domain (sometimes referred to as helical I-a) in SEQ ID NO: 2 can be replaced with the corresponding helical I-I sequence from SEQ ID NO: 1, and the like. Domain sequences from reference CasX proteins, and their coordinates, are shown in Table 5. Representative examples of chimeric CasX proteins include the variants of CasX 472-483, 485-491 and 515, the sequences of which are set forth in Table 4.

TABLE 5
Domain coordinates in Reference CasX proteins

| Domain | Coordinates in | Coordinates in |
|---|---|---|
| Name | SEQ ID NO: 1 | SEQ ID NO: 2 |
| OBD a | 1-55 | 1-57 |
| helical I a | 56-99 | 58-101 |
| NTSB | 100-190 | 102-191 |
| helical I b | 191-331 | 192-332 |
| helical II | 332-508 | 333-500 |
| OBD b | 509-659 | 501-646 |
| RuvC a | 660-823 | 647-810 |
| TSL | 824-933 | 811-920 |
| RuvC b | 934-986 | 921-978 |

*OBD a and b, helical I a and b, and RuvC a and b are also referred to herein as OBD I and II, helical I-I and I-II, and RuvC I and II.

### d. Protein Affinity for the gRNA

[0195] In some embodiments, a CasX variant protein has improved affinity for the gRNA relative to a reference CasX protein, leading to the formation of the ribonucleoprotein complex. Increased affinity of the CasX variant protein for the gRNA may, for example, result in a lower K_{d} for the generation of a RNP complex, which can, in some cases, result in a more stable ribonucleoprotein complex formation. In some embodiments, increased affinity of the CasX variant protein for the gRNA results in increased stability of the ribonucleoprotein complex when delivered to human cells. This increased stability can affect the function and utility of the complex in the cells of a subject, as well as result in improved pharmacokinetic properties in blood, when delivered to a subject. In some embodiments, increased affinity of the CasX variant protein, and the resulting increased stability of the ribonucleoprotein complex, allows for a lower dose of the CasX variant protein to be delivered to the subject or cells while still having the desired activity, for example in vivo or in vitro gene editing. In some embodiments, a higher affinity (tighter binding) of a CasX variant protein to a gRNA allows for a greater amount of editing events when both the CasX variant protein and the gRNA remain in an RNP complex. Increased editing events can be assessed using editing assays such as the tdTom editing assays described herein. In some embodiments, the K_{d} of a CasX variant protein for a gRNA is increased relative to a reference CasX protein by a factor of at least about 1.1, at least about 1.2, at least about 1.3, at least about 1.4, at least about 1.5, at least about 1.6, at least about 1.7, at least about 1.8, at least about 1.9, at least about 2, at least about 3, at least about 4, at least about 5, at least about 6, at least about 7, at least about 8, at least about 9, at least about 10, at least about 15, at least about 20, at least about 25, at least about 30, at least about 35, at least about 40, at least about 45, at least about 50, at least about 60, at least about 70, at least about 80, at least about 90, or at least about 100. In some embodiments, the CasX variant has about 1.1 to about 10-fold increased binding affinity to the gRNA compared to the reference CasX protein of SEQ ID NO: 2.

[0196] In some embodiments, a higher affinity (tighter binding) of a CasX variant protein to a gRNA allows for a greater amount of editing events when both the CasX variant protein and the gRNA remain in an RNP complex. Increased editing events can be assessed using editing assays such as the EGFP disruption assay described herein.

[0197] Without wishing to be bound by theory, in some embodiments amino acid changes in the Helical I domain can increase the binding affinity of the CasX variant protein with the gRNA targeting sequence, while changes in the Helical II domain can increase the binding affinity of the CasX variant protein with the gRNA scaffold stem loop, and changes in the oligonucleotide binding domain (OBD) increase the binding affinity of the CasX variant protein with the gRNA triplex.

[0198] Methods of measuring CasX protein binding affinity for a CasX gRNA include in vitro methods using purified CasX protein and gRNA. The binding affinity for reference CasX and variant proteins can be measured by fluorescence polarization if the gRNA or CasX protein is tagged with a fluorophore. Alternatively, or in addition, binding affinity can be measured by biolayer interferometry, electrophoretic mobility shift assays (EMSAs), or filter binding. Additional standard techniques to quantify absolute affinities of RNA binding proteins such as the reference CasX and variant proteins of the disclosure for specific gRNAs such as reference gRNAs and variants thereof include, but are not limited to, isothermal calorimetry (ITC), and surface plasmon resonance (SPR), as well as the methods of the Examples.

### e. Affinity for Target Nucleic Acid

[0199] In some embodiments, a CasX variant protein has improved binding affinity for a target nucleic acid relative to the affinity of a reference CasX protein for a target nucleic acid, when complexed as an RNP, relative to the affinity of a reference CasX protein for a target nucleic acid sequence. In some embodiments, affinity of a CasX variant protein of the disclosure for a target nucleic acid molecule is increased relative to a reference CasX protein by a factor of at least about 1.1, at least about 1.2, at least about 1.3, at least about 1.4, at least about 1.5, at least about 1.6, at least about 1.7, at least about 1.8, at least about 1.9, at least about 2, at least about 3, at least about 4, at least about 5, at least about 6, at least about 7, at least about 8, at least about 9, at least about 10, at least about 15, at least about 20, at least about 25, at least about 30, at least about 35, at least about 40, at least about 45, at least about 50, at least about 60, at least about 70, at least about 80, at least about 90, or at least about 100.

[0200] CasX variants with higher affinity for their target nucleic acid may, in some embodiments, cleave the target nucleic acid sequence more rapidly than a reference CasX protein that does not have increased affinity for the target nucleic acid. In some embodiments, the improved affinity for the target nucleic acid sequence comprises improved affinity for the target nucleic acid sequence, improved binding affinity to a wider spectrum of PAM sequences, an improved ability to search DNA for the target nucleic acid sequence, or any combinations thereof, resulting in an increased ability to modify the target nucleic acid. In some embodiments, a CasX variant protein with improved target nucleic acid affinity has increased affinity for specific PAM sequences other than the canonical TTC PAM recognized by the reference CasX protein of SEQ ID NO: 2, including binding affinity for PAM sequences selected from the group consisting of TTC, ATC, GTC, and CTC. A higher overall affinity for DNA also, in some embodiments, can increase the frequency at which a CasX protein can effectively start and finish a binding and unwinding step, thereby facilitating target strand invasion and R-loop formation, and ultimately the cleavage of a target nucleic acid sequence.

[0201] In some embodiments, a CasX variant protein has improved binding affinity for the non-target strand of the target nucleic acid. As used herein, the term “non-target strand” refers to the strand of the DNA target nucleic acid sequence that does not form Watson and Crick base pairs with the targeting sequence in the gRNA and is complementary to the target DNA strand. In some embodiments, the CasX variant protein has about 1.1 to about 100-fold increased binding affinity to the non-target stand of the target nucleic acid compared to the reference protein of SEQ ID NO: 1, SEQ ID NO: 2, or SEQ ID NO: 3.

[0202] Methods of measuring CasX variant protein affinity for a target nucleic acid molecule may include electrophoretic mobility shift assays (EMSAs), filter binding, isothermal calorimetry (ITC), and surface plasmon resonance (SPR), fluorescence polarization and biolayer interferometry (BLI). Further methods of measuring CasX protein affinity for a target include in vitro biochemical assays that measure DNA cleavage events over time; e.g., determination of the k_{cleave} rate, as described in the Examples.

### f. Improved Specificity for a Target Site

[0203] In some embodiments, a CasX variant protein has improved specificity for a target nucleic acid sequence relative to a reference CasX protein of SEQ ID NOS: 1-3. As used herein, “specificity,” interchangeably referred to as “target specificity,” refers to the degree to which a CRISPR/Cas system ribonucleoprotein complex cleaves off-target sequences that are similar, but not identical to the target nucleic acid sequence; e.g., a CasX variant RNP with a higher degree of specificity would exhibit reduced off-target cleavage of sequences relative to a reference CasX protein. The specificity, and the reduction of potentially deleterious off-target effects, of CRISPR/Cas system proteins can be vitally important in order to achieve an acceptable therapeutic index for use in mammalian subjects.

[0204] In some embodiments, a CasX variant protein has improved specificity for a target site within the target sequence that is complementary to the targeting sequence of the gRNA relative to a reference CasX protein of SEQ ID NOS: 1-3. Without wishing to be bound by theory, it is possible that amino acid changes in the helical I and II domains that increase the specificity of the CasX variant protein for the target nucleic acid strand can increase the specificity of the CasX variant protein for the target nucleic acid overall. In some embodiments, amino acid changes that increase specificity of CasX variant proteins for target nucleic acid may also result in decreased affinity of CasX variant proteins for DNA.

[0205] Methods of testing CasX protein (such as variant or reference) target specificity may include guide and Circularization for In vitro Reporting of Cleavage Effects by Sequencing (CIRCLE-seq), or similar methods. In brief, in CIRCLE-seq techniques, genomic DNA is sheared and circularized by ligation of stem-loop adapters, which are nicked in the stem-loop regions to expose 4 nucleotide palindromic overhangs. This is followed by intramolecular ligation and degradation of remaining linear DNA. Circular DNA molecules containing a CasX cleavage site are subsequently linearized with CasX, and adapter adapters are ligated to the exposed ends followed by high-throughput sequencing to generate paired end reads that contain information about the off-target site. Additional assays that can be used to detect off-target events, and therefore CasX protein specificity include assays used to detect and quantify indels (insertions and deletions) formed at those selected off-target sites such as mismatch-detection nuclease assays and next generation sequencing (NGS). Exemplary mismatch-detection assays include nuclease assays, in which genomic DNA from cells treated with CasX and sgRNA is PCR amplified, denatured and rehybridized to form hetero-duplex DNA, containing one wild type strand and one strand with an indel. Mismatches are recognized and cleaved by mismatch detection nucleases, such as Surveyor nuclease or T7 endonuclease I.

### g. Protospacer and PAM Sequences

[0206] Herein, the protospacer is defined as the DNA sequence complementary to the targeting sequence of the guide RNA and the DNA complementary to that sequence, referred to as the target strand and non-target strand, respectively. As used herein, the PAM is a nucleotide sequence located is located 1 nucleotide 5′ of the sequence in the non-target strand that is complementary to the target nucleic acid sequence in the target strand of the target nucleic acid that, in conjunction with the targeting sequence of the gRNA, helps the orientation and positioning of the CasX for the potential cleavage of the protospacer strand(s).

[0207] PAM sequences may be degenerate, and specific RNP constructs may have different preferred and tolerated PAM sequences that support different efficiencies of cleavage. Following convention, unless stated otherwise, the disclosure refers to both the PAM and the protospacer sequence and their directionality according to the orientation of the non-target strand. This does not imply that the PAM sequence of the non-target strand, rather than the target strand, is determinative of cleavage or mechanistically involved in target recognition. For example, when reference is to a TTC PAM, it may in fact be the complementary GAA sequence that is required for target cleavage, or it may be some combination of nucleotides from both strands. In the case of the CasX proteins disclosed herein, the PAM is located 5′ of the protospacer with a single nucleotide separating the PAM from the first nucleotide of the protospacer. Thus, in the case of reference CasX, a TTC PAM should be understood to mean a sequence following the formula 5′- . . . NNTTCN(protospacer)NNNNNN . . . 3′ where ‘N’ is any DNA nucleotide and ‘(protospacer)’ is a DNA sequence having identity with the targeting sequence of the guide RNA. In the case of a CasX variant with expanded PAM recognition, a TTC, CTC, GTC, or ATC PAM should be understood to mean a sequence following the formulae:

5′- . . . NNTTCN(protospacer)NNNNNN . . . 3′;

5′- . . . NNCTCN(protospacer)NNNNNN . . . 3′;

5′- . . . NNGTCN(protospacer)NNNNNN . . . 3′; or

5′- . . . NNATCN(protospacer)NNNNNN . . . 3′. Alternatively, a TC PAM should be understood to mean a sequence following the formula.

5′- . . . NNNTCN(protospacer)NNNNNN . . . 3′.

[0208] Additionally, the CasX variant proteins of the disclosure have an enhanced ability to efficiently edit and/or bind target DNA, when complexed with a gRNA as an RNP, utilizing a PAM TC motif, including PAM sequences selected from TTC, ATC, GTC, or CTC, (in a 5′ to 3′ orientation), compared to an RNP of a reference CasX protein and reference gRNA. In the foregoing, the PAM sequence is located at least 1 nucleotide 5′ to the non-target strand of the protospacer having identity with the targeting sequence of the gRNA in an assay system compared to the editing efficiency and/or binding of an RNP comprising a reference CasX protein and reference gRNA in a comparable assay system. In one embodiment, an RNP of a CasX variant and gRNA variant exhibits greater editing efficiency and/or binding of a target sequence in the target DNA compared to an RNP comprising a reference CasX protein and a reference gRNA in a comparable assay system, wherein the PAM sequence of the target DNA is TTC. In another embodiment, an RNP of a CasX variant and gRNA variant exhibits greater editing efficiency and/or binding of a target sequence in the target DNA compared to an RNP comprising a reference CasX protein and a reference gRNA in a comparable assay system, wherein the PAM sequence of the target DNA is ATC. In another embodiment, an RNP of a CasX variant and gRNA variant exhibits greater editing efficiency and/or binding of a target sequence in the target DNA compared to an RNP comprising a reference CasX protein and a reference gRNA in a comparable assay system, wherein the PAM sequence of the target DNA is CTC. In another embodiment, an RNP of a CasX variant and gRNA variant exhibits greater editing efficiency and/or binding of a target sequence in the target DNA compared to an RNP comprising a reference CasX protein and a reference gRNA in a comparable assay system, wherein the PAM sequence of the target DNA is GTC. In the foregoing embodiments, the increased editing efficiency and/or binding affinity for the one or more PAM sequences is at least 1.5-fold greater, at least 5-fold greater, at least 10-fold greater, or at least 100-fold greater or more compared to the editing efficiency and/or binding affinity of an RNP of any one of the CasX proteins of SEQ ID NOS:1-3 and the gRNA of Table 2 or Table 3 for the PAM sequences. In some embodiments, an RNP comprising a CasX variant and a gRNA variant of the embodiments described herein exhibit higher percent editing of the target nucleic acid in a timed in vitro assay that is at least about 5-fold, at least about 10-fold, at least about 20-fold, or at least about 100-fold higher compared to an RNP of any one of the reference CasX proteins of SEQ ID NOS: 1-3 and the gRNA of SEQ ID NOs: 4-16 in a comparable assay. Exemplary assays demonstrating the improved editing are described herein, in the Examples.

### h. Unwinding of DNA

[0209] In some embodiments, a CasX variant protein has improved ability of unwinding DNA relative to a reference CasX protein. Poor dsDNA unwinding has been shown previously to impair or prevent the ability of CRISPR/Cas system proteins AnaCas9 or Cas14s to cleave DNA. Therefore, without wishing to be bound by any theory, it is likely that increased DNA cleavage activity by some CasX variant proteins of the disclosure is due, at least in part, to an increased ability to find and unwind the dsDNA at a target site. Methods of measuring the ability of CasX proteins (such as variant or reference) to unwind DNA include, but are not limited to, in vitro assays that observe increased on rates of dsDNA targets in fluorescence polarization or biolayer interferometry.

[0210] Without wishing to be bound by theory, it is thought that amino acid changes in the NTSB domain may produce CasX variant proteins with increased DNA unwinding characteristics. Alternatively, or in addition, amino acid changes in the OBD or the helical domain regions that interact with the PAM may also produce CasX variant proteins with increased DNA unwinding characteristics.

[0211] Methods of measuring the ability of CasX proteins (such as variant or reference) to unwind DNA include, but are not limited to, in vitro assays that observe increased on rates of dsDNA targets in fluorescence polarization or biolayer interferometry.

### i. Catalytic Activity

[0212] The ribonucleoprotein complex of the CasX:gRNA systems disclosed herein comprise a variant thereof that bind to a target nucleic acid and cleaves the target nucleic acid. In some embodiments, a CasX variant protein has improved catalytic activity relative to a reference CasX protein. Without wishing to be bound by theory, it is thought that in some cases cleavage of the target strand can be a limiting factor for Cas12-like molecules in creating a dsDNA break. In some embodiments, CasX variant proteins improve bending of the target strand of DNA and cleavage of this strand, resulting in an improvement in the overall efficiency of dsDNA cleavage by the CasX ribonucleoprotein complex.

[0213] In some embodiments, a CasX variant protein has increased nuclease activity compared to a reference CasX protein. Variants with increased nuclease activity can be generated, for example, through amino acid changes in the RuvC nuclease domain. In some embodiments, the CasX variant comprises a nuclease domain having nickase activity. In the foregoing, the CasX nickase of a CasX:gRNA system generates a single-stranded break within 10-18 nucleotides 3′ of a PAM site in the non-target strand. In other embodiments, the CasX variant comprises a nuclease domain having double-stranded cleavage activity. In the foregoing, the CasX of the CasX:gRNA system generates a double-stranded break within 18-26 nucleotides 5′ of a PAM site on the target strand and 10-18 nucleotides 3′ on the non-target strand. Nuclease activity can be assayed by a variety of methods, including those of the Examples. In some embodiments, a CasX variant has a K_{cleave} constant that is at least 2-fold, or at least 3-fold, or at least 4-fold, or at least 5-fold, or at least 6-fold, or at least 7-fold, or at least 8-fold, or at least 9-fold, or at least 10-fold greater compared to a reference CasX.

[0214] In some embodiments, a CasX variant protein has the improved characteristic of forming RNP with gRNA that result in a higher percentage of cleavage-competent RNP compared to an RNP of a reference CasX protein of SEQ ID NO: 1, SEQ ID NO: 2, or SEQ ID NO: 3 and the gRNA, as described in the Examples. By cleavage competent, it is meant that the RNP that is formed has the ability to cleave the target nucleic acid. In some embodiments, the CasX variant and the gRNA of the disclosure are able to form RNP exhibiting at least a 2% to at least 40%, or at least a 5% to at least a 20%, or at least a 10% to at least a 15% higher percentage of cleavage-competent conformations compared to an RNP of the reference CasX of SEQ ID NO: 1, SEQ ID NO: 2, or SEQ ID NO: 3 and the gRNA of Table 2. In the foregoing embodiment, the improved cleavage competency can be demonstrated in an in vitro assay, such as described in the Examples.

[0215] In some embodiments, a CasX variant protein has increased target strand loading for double strand cleavage compared to a reference CasX. Variants with increased target strand loading activity can be generated, for example, through amino acid changes in the TLS domain.

[0216] Without wishing to be bound by theory, amino acid changes in the TSL domain may result in CasX variant proteins with improved catalytic activity. Alternatively, or in addition, amino acid changes around the binding channel for the RNA:DNA duplex may also improve catalytic activity of the CasX variant protein.

[0217] In some embodiments, a CasX variant protein has increased collateral cleavage activity compared to a reference CasX protein. As used herein, “collateral cleavage activity” refers to additional, non-targeted cleavage of nucleic acids following recognition and cleavage of a target nucleic acid. In some embodiments, a CasX variant protein has decreased collateral cleavage activity compared to a reference CasX protein.

[0218] In some embodiments, for example those embodiments encompassing applications where cleavage of the target nucleic acid is not a desired outcome, improving the catalytic activity of a CasX variant protein comprises altering, reducing, or abolishing the catalytic activity of the CasX variant protein. In some embodiments, a ribonucleoprotein complex comprising a dCasX variant protein binds to a target nucleic acid and does not cleave the target nucleic acid.

[0219] In some embodiments, the CasX ribonucleoprotein complex comprising a CasX variant protein binds a target DNA but generates a single stranded nick in the target DNA. In some embodiments, particularly those embodiments wherein the CasX protein is a nickase, a CasX variant protein has decreased target strand loading for single strand nicking. Variants with decreased target strand loading may be generated, for example, through amino acid changes in the TSL domain.

[0220] Exemplary methods for characterizing the catalytic activity of CasX proteins may include, but are not limited to, in vitro cleavage assays, including those of the Examples, below. In some embodiments, electrophoresis of DNA products on agarose gels can interrogate the kinetics of strand cleavage.

### J. Casx Fusion Proteins

[0221] In some embodiments, the disclosure provides CasX proteins comprising a heterologous protein fused to the CasX variant of any of the embodiments described herein.

[0222] In some embodiments, the CasX variant protein comprises any one of SEQ ID NOS: 59, 72-99, 101-148, and 43662-43907, of the sequences of Table 4 fused to one or more proteins or domains thereof that has a different activity of interest, resulting in a fusion protein. For example, in some embodiments, the CasX variant protein is fused to a protein (or domain thereof) that inhibits transcription, modifies a target nucleic acid, or modifies a polypeptide associated with a nucleic acid (e.g., histone modification).

[0223] In some embodiments, a heterologous polypeptide (or heterologous amino acid such as a cysteine residue or a non-natural amino acid) can be inserted at one or more positions within a CasX protein to generate a CasX fusion protein. In other embodiments, a cysteine residue can be inserted at one or more positions within a CasX protein followed by conjugation of a heterologous polypeptide described below. In some alternative embodiments, a heterologous polypeptide or heterologous amino acid can be added at the N- or C-terminus of the CasX variant protein. In other embodiments, a heterologous polypeptide or heterologous amino acid can be inserted internally within the sequence of the CasX protein.

[0224] In some embodiments, the CasX variant fusion protein retains RNA-guided sequence specific target nucleic acid binding and cleavage activity. In some cases, the CasX variant fusion protein has (retains) 50% or more of the activity (e.g., cleavage and/or binding activity) of the corresponding CasX variant protein that does not have the insertion of the heterologous protein. In some cases, the CasX variant fusion protein retains at least about 60%, or at least about 70% or more, at least about 80%, or at least about 90%, or at least about 92%, or at least about 95%, or at least about 98%, or at least about 100% of the activity (e.g., cleavage and/or binding activity) of the corresponding CasX protein that does not have the insertion of the heterologous protein.

[0225] In some cases, the CasX variant fusion protein retains (has) target nucleic acid binding activity relative to the activity of the CasX protein without the inserted heterologous amino acid or heterologous polypeptide. In some cases, the CasX variant fusion protein retains at least about 60%, or at least about 70% or more, at least about 80%, or at least about 90%, or at least about 92%, or at least about 95%, or at least about 98%, or at least about 100% of the binding activity of the corresponding CasX protein that does not have the insertion of the heterologous protein.

[0226] In some cases, the CasX variant fusion protein retains (has) target nucleic acid binding and/or cleavage activity relative to the activity of the parent CasX protein without the inserted heterologous amino acid or heterologous polypeptide. For example, in some cases, the CasX variant fusion protein has (retains) 50% or more of the binding and/or cleavage activity of the corresponding parent CasX protein (the CasX protein that does not have the insertion). For example, in some cases, the CasX variant fusion protein has (retains) 60% or more (70% or more, 80% or more, 90% or more, 92% or more, 95% or more, 98% or more, or 100%) of the binding and/or cleavage activity of the corresponding CasX parent protein (the CasX protein that does not have the insertion). Methods of measuring cleaving and/or binding activity of a CasX protein and/or a CasX fusion protein will be known to one of ordinary skill in the art and any convenient method can be used.

[0227] A variety of heterologous polypeptides are suitable for inclusion in a CasX variant fusion protein of the disclosure. In some cases, the fusion partner can modulate transcription (e.g., inhibit transcription, increase transcription) of a target DNA. For example, in some cases the fusion partner is a protein (or a domain from a protein) that inhibits transcription (e.g., a transcriptional repressor, a protein that functions via recruitment of transcription inhibitor proteins, modification of target DNA such as methylation, recruitment of a DNA modifier, modulation of histones associated with target DNA, recruitment of a histone modifier such as those that modify acetylation and/or methylation of histones, and the like). In some cases the fusion partner is a protein (or a domain from a protein) that increases transcription (e.g., a transcription activator, a protein that acts via recruitment of transcription activator proteins, modification of target DNA such as demethylation, recruitment of a DNA modifier, modulation of histones associated with target DNA, recruitment of a histone modifier such as those that modify acetylation and/or methylation of histones, and the like).

[0228] In some cases, a fusion partner has enzymatic activity that modifies a target nucleic acid; e.g., nuclease activity, methyltransferase activity, demethylase activity, DNA repair activity, DNA damage activity, deamination activity, dismutase activity, alkylation activity, depurination activity, oxidation activity, pyrimidine dimer forming activity, integrase activity, transposase activity, recombinase activity, polymerase activity, ligase activity, helicase activity, photolyase activity or glycosylase activity.

[0229] In some cases, a fusion partner has enzymatic activity that modifies a polypeptide (e.g., a histone) associated with a target nucleic acid (e.g., methyltransferase activity, demethylase activity, acetyltransferase activity, deacetylase activity, kinase activity, phosphatase activity, ubiquitin ligase activity, deubiquitinating activity, adenylation activity, deadenylation activity, SUMOylating activity, deSUMOylating activity, ribosylation activity, deribosylation activity, myristoylation activity or demyristoylation activity).

[0230] Examples of proteins (or fragments thereof) that can be used as a fusion partner to increase transcription include but are not limited to: transcriptional activators such as VP16, VP64, VP48, VP160, p65 subdomain (e.g., from NFkB), and activation domain of EDLL and/or TAL activation domain (e.g., for activity in plants); histone lysine methyltransferases such as SET domain containing 1A, histone lysine methyltransferase (SET1A), SET domain containing 1B, histone lysine methyltransferase (SET1B), lysine methyltransferase (MLL1 to 5), ASCL1 (ASH1) achaete-scute family bHLH transcription factor 1 (ASH1), SET and MYND domain containing 2 (SYMD2), nuclear receptor binding SET domain protein 1 (NSD1), and the like; histone lysine demethylases such as lysine demethylase 3A (JHDM2a)/Lysine-specific demethylase 3B (JHDM2b), lysine demethylase 6A (UTX), lysine demethylase 6B (JMJD3), and the like; histone acetyltransferases such as lysine acetyltransferase 1 (GCN5), lysine acetyltransferase 2 (PCAF), CREB binding protein (CBP), E1A binding protein p300 (p300), TATA-box binding protein associated factor 1 (TAF1), lysine acetyltransferase 5 (TIP60/PLIP), lysine acetyltransferase 6A (MOZ/MYST3), lysine acetyltransferase 6B (MORF/MYST4), SRC proto-oncogene, non-receptor tyrosine kinase (SRC1), nuclear receptor coactivator 3 (ACTR), MYB binding protein 1a (P160), clock circadian regulator (CLOCK), and the like; and DNA demethylases such as Ten-Eleven Translocation (TET) dioxygenase 1 (TET1CD), tet methylcytosine dioxygenase 1 (TET1), demeter (DME), demeter-like 1 (DML1), demeter-like 2 (DML2), protein ROS1 (ROS1), and the like.

[0231] Examples of proteins (or fragments thereof) that can be used as a fusion partner to decrease transcription include but are not limited to: transcriptional repressors such as the Kruppel associated box (KRAB or SKD); KOX1 repression domain; the Mad mSIN3 interaction domain (SID); the ERF repressor domain (ERD), the SRDX repression domain (e.g., for repression in plants), and the like; histone lysine methyltransferases such as PR/SET domain containing protein (Pr-SET7/8), lysine methyltransferase 5B (SUV4-20H1), PR/SET domain 2 (RIZ1), and the like; histone lysine demethylases such as lysine demethylase 4A (JMJD2A/JHDM3A), lysine demethylase 4B (JMJD2B), lysine demethylase 4C (JMJD2C/GASC1), lysine demethylase 4D (JMJD2D), lysine demethylase 5A (JARID1A/RBP2), lysine demethylase 5B (JARID1B/PLU-1), lysine demethylase 5C (JARID 1C/SMCX), lysine demethylase 5D (JARID1D/SMCY), and the like; histone lysine deacetylases such as histone deacetylase 1 (HDAC1), HDAC2, HDAC3, HDAC8, HDAC4, HDAC5, HDAC7, HDAC9, sirtuin 1 (SIRT1), SIRT2, HDAC11, and the like; DNA methylases such as HhaI DNA m5c-methyltransferase (M.HhaI), DNA methyltransferase 1 (DNMT1), DNA methyltransferase 3a (DNMT3a), DNA methyltransferase 3b (DNMT3b), methyltransferase 1 (MET1), S-adenosyl-L-methionine-dependent methyltransferases superfamily protein (DRM3) (plants), DNA cytosine methyltransferase MET2a (ZMET2), chromomethylase 1 (CMT1), chromomethylase 2 (CMT2) (plants), and the like; and periphery recruitment elements such as Lamin A, Lamin B, and the like.

[0232] In some cases, the fusion partner to a CasX variant has enzymatic activity that modifies the target nucleic acid (e.g., ssRNA, dsRNA, ssDNA, dsDNA). Examples of enzymatic activity that can be provided by the fusion partner include but are not limited to: nuclease activity such as that provided by a restriction enzyme (e.g., FokI nuclease), methyltransferase activity such as that provided by a methyltransferase (e.g., Hhal DNA m5c-methyltransferase (M.Hhal), DNA methyltransferase 1 (DNMT1), DNA methyltransferase 3a (DNMT3a), DNA methyltransferase 3b (DNMT3b), MET1, DRM3 (plants), ZMET2, CMT1, CMT2 (plants), and the like); demethylase activity such as that provided by a demethylase (e.g., Ten-Eleven Translocation (TET) dioxygenase 1 (TET 1 CD), TET1, DME, DML1, DML2, ROS1, and the like), DNA repair activity, DNA damage activity, deamination activity such as that provided by a deaminase (e.g., a cytosine deaminase enzyme; e.g., an APOBEC protein such as rat apolipoprotein B mRNA editing enzyme, catalytic polypeptide 1 {APOBEC1}), dismutase activity, alkylation activity, depurination activity, oxidation activity, pyrimidine dimer forming activity, integrase activity such as that provided by an integrase and/or resolvase (e.g., Gin invertase such as the hyperactive mutant of the Gin invertase, GinH106Y; human immunodeficiency virus type 1 integrase (IN); Tn3 resolvase; and the like), transposase activity, recombinase activity such as that provided by a recombinase (e.g., catalytic domain of Gin recombinase), polymerase activity, ligase activity, helicase activity, photolyase activity, and glycosylase activity).

[0233] In some cases, a CasX variant protein of the present disclosure is fused to a polypeptide selected from a domain for increasing transcription (e.g., a VP16 domain, a VP64 domain), a domain for decreasing transcription (e.g., a KRAB domain; e.g., from the Kox1 protein), a core catalytic domain of a histone acetyltransferase (e.g., histone acetyltransferase p300), a protein/domain that provides a detectable signal (e.g., a fluorescent protein such as GFP), a nuclease domain (e.g., a Fok1 nuclease), or a base editor (e.g., cytidine deaminase such as APOBEC1).

[0234] In some cases, a CasX variant comprises any one of SEQ ID NOS: 36-99, 101-148 or 43662-43907, or a sequence of Table 4 and a fusion partner having enzymatic activity that modifies a protein associated with the target nucleic acid (e.g., ssRNA, dsRNA, ssDNA, dsDNA) (e.g., a histone, an RNA binding protein, a DNA binding protein, and the like). Examples of enzymatic activity (that modifies a protein associated with a target nucleic acid) that can be provided by the fusion partner include but are not limited to: methyltransferase activity such as that provided by a histone methyltransferase (HMT) (e.g., suppressor of variegation 3-9 homolog 1 (SUV39H1, also known as KMT1A), euchromatic histone lysine methyltransferase 2 (G9A, also known as KMT1C and EHMT2), SUV39H2, ESET/SETDB 1, and the like, SET1A, SET1B, MLL1 to 5, ASH1, SYMD2, NSD1, DOT1L, Pr-SET7/8, SUV4-20H1, EZH2, RIZ1), demethylase activity such as that provided by a histone demethylase (e.g., Lysine Demethylase 1A (KDM1A also known as LSD1), JHDM2a/b, JMJD2A/JHDM3A, JMJD2B, JMJD2C/GASC1, JMJD2D, JARID1A/RBP2, JARID1B/PLU-1, JARID1C/SMCX, JARID1D/SMCY, UTX, JMJD3, and the like), acetyltransferase activity such as that provided by a histone acetylase transferase (e.g., catalytic core/fragment of the human acetyltransferase p300, GCN5, PCAF, CBP, TAF1, TIP60/PLIP, MOZ/MYST3, MORF/MYST4, HB01/MYST2, HMOF/MYST1, SRC1, ACTR, P160, CLOCK, and the like), deacetylase activity such as that provided by a histone deacetylase (e.g., HDAC1, HDAC2, HDAC3, HDAC8, HDAC4, HDAC5, HDAC7, HDAC9, SIRT1, SIRT2, HDAC11, and the like), kinase activity, phosphatase activity, ubiquitin ligase activity, deubiquitinating activity, adenylation activity, deadenylation activity, SUMOylating activity, deSUMOylating activity, ribosylation activity, deribosylation activity, myristoylation activity, and demyristoylation activity.

[0235] Additional examples of suitable fusion partners are (i) a dihydrofolate reductase (DHFR) destabilization domain (e.g., to generate a chemically controllable subject RNA-guided polypeptide or a conditionally active RNA-guided polypeptide), and (ii) a chloroplast transit peptide. In some cases, a CasX variant comprises any one of SEQ ID NOS: 59, 72-99, 101-148, or 43662-43907 and a fusion partner having enzymatic activity that modifies a protein associated with the target nucleic acid. In some cases, a CasX variant comprises any one of SEQ ID NOS: 132-148 or 43662-43907 and a fusion partner having enzymatic activity that modifies a protein associated with the target nucleic acid.

[0236] In some embodiments, a CasX variant comprises any one of SEQ ID NOS: 36-99, 101-148 or 43662-43907, or a sequence of Table 4, and a chloroplast transit peptide including, but are not limited to:

(SEQ ID NO: 478)
MASMISSSAVTTVSRASRGQSAAMAPFGGLKSMTGFPVRKVNTDITSITS
NGGRVKCMQVWPPIGKKKFETLSYLPPLTRDSRA;
(SEQ ID NO: 479)
MASMISSSAVTTVSRASRGQSAAMAPFGGLKSMTGFPVRKVNTDITSITS
NGGRVKS;
(SEQ ID NO: 480)
MASSMLSSATMVASPAQATMVAPFNGLKSSAAFPATRKANNDITSITSNG
GRVNCMQVWPPIEKKKFETLSYLPDLTDSGGRVNC;
(SEQ ID NO: 481)
MAQVSRICNGVQNPSLISNLSKSSQRKSPLSVSLKTQQHPRAYPISSSWG
LKKSGMTLIGSELRPLKVMSSVSTAC;
(SEQ ID NO: 482)
MAQVSRICNGVWNPSLISNLSKSSQRKSPLSVSLKTQQHPRAYPISSSWG
LKKSGMTLIGSELRPLKVMSSVSTAC;
(SEQ ID NO: 483)
MAQINNMAQGIQTLNPNSNFHKPQVPKSSSFLVFGSKKLKNSANSMLVLK
KDSIFMQLFCSFRISASVATAC;
(SEQ ID NO: 484)
MAALVTSQLATSGTVLSVTDRFRRPGFQGLRPRNPADAALGMRTVGASAA
PKQSRKPHRFDRRCLSMVV;
(SEQ ID NO: 485)
MAALTTSQLATSATGFGIADRSAPSSLLRHGFQGLKPRSPAGGDATSLSV
TTSARATPKQQRSVQRGSRRFPSVVVC;
(SEQ ID NO: 486)
MASSVLSSAAVATRSNVAQANMVAPFTGLKSAASFPVSRKQNLDITSIAS
NGGRVQC;
(SEQ ID NO: 487)
MESLAATSVFAPSRVAVPAARALVRAGTVVPTRRTSSTSGTSGVKCSAAV
TPQASPVISRSAAAA;
and
(SEQ ID NO: 488)
MGAAATSMQSLKFSNRLVPPSRRLSPVPNNVTCNNLPKSAAPVRTVKCCA
SSWNSTINGAAATTNGASAASS.

[0237] In some cases, a CasX variant comprises any one of SEQ ID NOS: 59, 72-99, 101-148, or 43662-43907 and a chloroplast transit peptide. In some cases, a CasX variant comprises any one of SEQ ID NOS: 132-148 or 43662-43907 and a chloroplast transit peptide.

[0238] In some cases, a CasX variant protein of the present disclosure can include an endosomal escape peptide. In some cases, an endosomal escape polypeptide comprises the amino acid sequence GLFXALLXLLXSLWXLLLXA (SEQ ID NO: 489), wherein each X is independently selected from lysine, histidine, and arginine. In some cases, an endosomal escape polypeptide comprises the amino acid sequence GLFHALLHLLHSLWHLLLHA (SEQ ID NO: 490), or HHHHHHHHH (SEQ ID NO: 491).

[0239] Non-limiting examples of fusion partners for use when targeting ssRNA target nucleic acids include (but are not limited to): splicing factors (e.g., RS domains); protein translation components (e.g., translation initiation, elongation, and/or release factors; e.g., eIF4G); RNA methylases; RNA editing enzymes (e.g., RNA deaminases; e.g., adenosine deaminase acting on RNA (ADAR), including A to I and/or C to U editing enzymes); helicases; RNA-binding proteins; and the like. It is understood that a heterologous polypeptide can include the entire protein or, in some cases, can include a fragment of the protein (e.g., a functional domain).

[0240] A fusion partner for a CasX variant can be any domain capable of interacting with ssRNA (which, for the purposes of this disclosure, includes intramolecular and/or intermolecular secondary structures; e.g., double-stranded RNA duplexes such as hairpins, stem-loops, etc.), whether transiently or irreversibly, directly or indirectly, including but not limited to an effector domain selected from the group comprising; endonucleases (for example RNase III, the CRR22 DYW domain, Dicer, and PIN (PilT N-terminus) domains from proteins such as SMG5 and SMG6); proteins and protein domains responsible for stimulating RNA cleavage (for example cleavage and polyadenylation specific factor {CPSF}, cleavage stimulation factor {CstF}, CFIm and CFIIm); exonucleases (for example chromatin-binding exonuclease XRN1 (XRN-1) or Exonuclease T); deadenylases (for example DNA 5′-adenosine monophosphate hydrolase {HNT3}); proteins and protein domains responsible for nonsense mediated RNA decay (for example UPF1 RNA helicase and ATPase {UPF1}, UPF2, UPF3, UPF3b, RNP SI, RNA binding motif protein 8A {Y14}, DEK proto-oncogene {DEK}, RNA-processing protein REF2 {REF2}, and Serine-arginine repetitive matrix 1 {SRm160}); proteins and protein domains responsible for stabilizing RNA (for example poly(A) binding protein cytoplasmic 1 {PABP}); proteins and protein domains responsible for repressing translation (for example argonaute RISC catalytic component 2 {Ago2} and Ago4); proteins and protein domains responsible for stimulating translation (for example Staufen); proteins and protein domains responsible for (e.g., capable of) modulating translation (e.g., translation factors such as initiation factors, elongation factors, release factors, etc.; e.g., eIF4G); proteins and protein domains responsible for polyadenylation of RNA (for example poly(A) polymerase (PAP1), PAP-associated domain-containing protein; Poly(A) RNA polymerase gld-2 {GLD-2}, and Star-PAP); proteins and protein domains responsible for polyuridinylation of RNA (for example Terminal uridylyltransferase {CID1} and terminal uridylate transferase); proteins and protein domains responsible for RNA localization (for example from insulin like growth factor 2 mRNA binding protein 1 {IMP1}, Z-DNA binding protein 1 {ZBP1}, She2p, She3p, and Bicaudal-D); proteins and protein domains responsible for nuclear retention of RNA (for example Rrp6); proteins and protein domains responsible for nuclear export of RNA (for example nuclear RNA export factor 1 {TAP}, nuclear RNA export factor 1 {NXF1}, THO Complex {THO}, TREX, REF, and Aly/REF export factor {Aly}); proteins and protein domains responsible for repression of RNA splicing (for example polypyrimidine tract binding protein 1 {PTB}, KH RNA binding domain containing, signal transduction associated 1 Sam68}, and heterogeneous nuclear ribonucleoprotein A1 {hnRNP A1}); proteins and protein domains responsible for stimulation of RNA splicing (for example serine/arginine-rich (SR) domains); proteins and protein domains responsible for reducing the efficiency of transcription (for example FUS RNA binding protein {FUS (TLS)}); and proteins and protein domains responsible for stimulating transcription (for example cyclin dependent kinase 7 {CDK7} and HIV Tat). Alternatively, the effector domain may be selected from the group comprising endonucleases; proteins and protein domains capable of stimulating RNA cleavage; exonucleases; deadenylases; proteins and protein domains having nonsense mediated RNA decay activity; proteins and protein domains capable of stabilizing RNA; proteins and protein domains capable of repressing translation; proteins and protein domains capable of stimulating translation; proteins and protein domains capable of modulating translation (e.g., translation factors such as initiation factors, elongation factors, release factors, etc.; e.g., eIF4G); proteins and protein domains capable of polyadenylation of RNA; proteins and protein domains capable of polyuridinylation of RNA; proteins and protein domains having RNA localization activity; proteins and protein domains capable of nuclear retention of RNA; proteins and protein domains having RNA nuclear export activity; proteins and protein domains capable of repression of RNA splicing; proteins and protein domains capable of stimulation of RNA splicing; proteins and protein domains capable of reducing the efficiency of transcription; and proteins and protein domains capable of stimulating transcription. Another suitable heterologous polypeptide is a PUF RNA-binding domain, which is described in more detail in WO2012068627, which is hereby incorporated by reference in its entirety.

[0241] Some RNA splicing factors that can be used (in whole or as fragments thereof) as a fusion partner have modular organization, with separate sequence-specific RNA binding modules and splicing effector domains. For example, members of the serine/arginine-rich (SR) protein family contain N-terminal RNA recognition motifs (RRMs) that bind to exonic splicing enhancers (ESEs) in pre-mRNAs and C-terminal RS domains that promote exon inclusion. As another example, the hnRNP protein hnRNP A1 binds to exonic splicing silencers (ESSs) through its RRM domains and inhibits exon inclusion through a C-terminal glycine-rich domain. Some splicing factors can regulate alternative use of splice site (ss) by binding to regulatory sequences between the two alternative sites. For example, ASF/SF2 can recognize ESEs and promote the use of intron proximal sites, whereas hnRNP A1 can bind to ESSs and shift splicing towards the use of intron distal sites. One application for such factors is to generate ESFs that modulate alternative splicing of endogenous genes, particularly disease associated genes. For example, BCL2 like 1 (Bcl-x) pre-mRNA produces two splicing isoforms with two alternative 5′ splice sites to encode proteins of opposite functions. The long splicing isoform Bcl-xL is a potent apoptosis inhibitor expressed in long-lived post mitotic cells and is up-regulated in many cancer cells, protecting cells against apoptotic signals. The short isoform Bcl-xS is a pro-apoptotic isoform and expressed at high levels in cells with a high turnover rate (e.g., developing lymphocytes). The ratio of the two Bcl-x splicing isoforms is regulated by multiple cc-elements that are located in either the core exon region or the exon extension region (i.e., between the two alternative 5′ splice sites). For more examples, see WO2010075303, which is hereby incorporated by reference in its entirety.

[0242] Further suitable fusion partners for use with a CasX variant include, but are not limited to proteins (or fragments thereof) that are boundary elements (e.g., CTCF), proteins and fragments thereof that provide periphery recruitment (e.g., Lamin A, Lamin B, etc.), and protein docking elements (e.g., FKBP/FRB, Pill/Abyl, etc.).

[0243] In some cases, a heterologous polypeptide (a fusion partner) for use with a CasX variant provides for subcellular localization, i.e., the heterologous polypeptide contains a subcellular localization sequence (e.g., a nuclear localization signal (NLS) for targeting to the nucleus, a sequence to keep the fusion protein out of the nucleus; e.g., a nuclear export sequence (NES), a sequence to keep the fusion protein retained in the cytoplasm, a mitochondrial localization signal for targeting to the mitochondria, a chloroplast localization signal for targeting to a chloroplast, an ER retention signal, and the like). In some embodiments, a subject RNA-guided polypeptide or a conditionally active RNA-guided polypeptide and/or subject CasX fusion protein does not include a NLS so that the protein is not targeted to the nucleus (which can be advantageous; e.g., when the target nucleic acid is an RNA that is present in the cytosol). In some embodiments, a fusion partner can provide a tag (i.e., the heterologous polypeptide is a detectable label) for ease of tracking and/or purification (e.g., a fluorescent protein; e.g., green fluorescent protein (GFP), yellow fluorescent protein (YFP), red fluorescent protein (RFP), cyan fluorescent protein (CFP), mCherry, tdTomato, and the like; a histidine tag; e.g., a 6XHis tag; a hemagglutinin (HA) tag; a FLAG tag; a Myc tag; and the like).

[0244] In some cases, a CasX variant protein includes (is fused to) a nuclear localization signal (NLS). In some cases, a CasX variant protein is fused to 2 or more, 3 or more, 4 or more, or 5 or more 6 or more, 7 or more, 8 or more NLSs. In some cases, one or more NLSs (2 or more, 3 or more, 4 or more, or 5 or more NLSs) are positioned at or near (e.g., within 50 amino acids of) the N-terminus and/or the C-terminus. In some cases, one or more NLSs (2 or more, 3 or more, 4 or more, or 5 or more NLSs) are positioned at or near (e.g., within 50 amino acids of) the N-terminus. In some cases, one or more NLSs (2 or more, 3 or more, 4 or more, or 5 or more NLSs) are positioned at or near (e.g., within 50 amino acids of) the C-terminus. In some cases, one or more NLSs (2 or more, 3 or more, 4 or more, or 5 or more NLSs) are positioned at or near (e.g., within 50 amino acids of) both the N-terminus and the C-terminus. In some cases, an NLS is positioned at the N-terminus and an NLS is positioned at the C-terminus. In some cases, a CasX variant protein includes (is fused to) between 1 and 10 NLSs (e.g., 1-9, 1-8, 1-7, 1-6, 1-5, 2-10, 2-9, 2-8, 2-7, 2-6, or 2-5 NLSs). In some cases, a CasX variant protein includes (is fused to) between 2 and 5 NLSs (e.g., 2-4, or 2-3 NLSs).

[0245] In some cases, non-limiting examples of NLSs suitable for use with a CasX variant include sequences having at least about 80%, at least about 90%, or at least about 95% identity or are identical to sequences derived from: the NLS of the SV40 virus large T-antigen, having the amino acid sequence PKKKRKV (SEQ ID NO: 149); the NLS from nucleoplasmin (e.g., the nucleoplasmin bipartite NLS with the sequence KRPAATKKAGQAKKKK (SEQ ID NO: 150); the c-myc NLS having the amino acid sequence PAAKRVKLD (SEQ ID NO: 151) or RQRRNELKRSP (SEQ ID NO: 152); the hRNPA1 M9 NLS having the sequence NQSSNFGPMKGGNFGGRSSGPYGGGGQYFAKPRNQGGY (SEQ ID NO: 153); the sequence RMRIZFKNKGKDTAELRRRRVEVSVELRKAKKDEQILKRRNV (SEQ ID NO: 154) of the IBB domain from importin-alpha; the sequences VSRKRPRP (SEQ ID NO: 155) and PPKKARED (SEQ ID NO: 156) of the myoma T protein; the sequence PQPKKKPL (SEQ ID NO: 185) of human p53; the sequence SALIKKKKKMAP (SEQ ID NO: 157) of mouse c-abl IV; the sequences DRLRR (SEQ ID NO: 158) and PKQKKRK (SEQ ID NO: 159) of the influenza virus NS1; the sequence RKLKKKIKKL (SEQ ID NO: 160) of the Hepatitis virus delta antigen; the sequence REKKKFLKRR (SEQ ID NO: 161) of the mouse Mx1 protein; the sequence KRKGDEVDGVDEVAKKKSKK (SEQ ID NO: 162) of the human poly(ADP-ribose) polymerase; the sequence RKCLQAGMNLEARKTKK (SEQ ID NO: 163) of the steroid hormone receptors (human) glucocorticoid; the sequence PRPRKIPR (SEQ ID NO: 164) of Borna disease virus P protein (BDV-P1); the sequence PPRKKRTVV (SEQ ID NO: 165) of hepatitis C virus nonstructural protein (HCV-NS5A); the sequence NLSKKKKRKREK (SEQ ID NO: 166) of LEF1; the sequence RRPSRPFRKP (SEQ ID NO: 167) of ORF57 simirae; the sequence KRPRSPSS (SEQ ID NO: 168) of EBV LANA; the sequence KRGINDRNFWRGENERKTR (SEQ ID NO: 169) of Influenza A protein; the sequence PRPPKMARYDN (SEQ ID NO: 170) of human RNA helicase A (RHA); the sequence KRSFSKAF (SEQ ID NO: 186) of nucleolar RNA helicase II; the sequence KLKIKRPVK (SEQ ID NO: 171) of TUS-protein; the sequence PKKKRKVPPPPAAKRVKLD (SEQ ID NO: 172) associated with importin-alpha; the sequence PKTRRRPRRSQRKRPPT (SEQ ID NO: 173) from the Rex protein in HTLV-1; the sequence SRRRKANPTKLSENAKKLAKEVEN (SEQ ID NO: 43908) from the EGL-13 protein of Caenorhabditis Elegans; and the sequences KTRRRPRRSQRKRPPT (SEQ ID NO: 175), RRKKRRPRRKKRR (SEQ ID NO: 176), PKKKSRKPKKKSRK (SEQ ID NO: 177), HKKKHPDASVNFSEFSK (SEQ ID NO: 178), QRPGPYDRPQRPGPYDRP (SEQ ID NO: 179), LSPSLSPLLSPSLSPL (SEQ ID NO: 180), RGKGGKGLGKGGAKRHRK (SEQ ID NO: 181), PKRGRGRPKRGRGR (SEQ ID NO: 182), PKKKRKVPPPPAAKRVKLD (SEQ ID NO: 183), PKKKRKVPPPPKKKRKV (SEQ ID NO: 184), PAKRARRGYKC (SEQ ID NO: 43909), KLGPRKATGRW (SEQ ID NO: 43910), PRRKREE (SEQ ID NO: 43911), PYRGRKE (SEQ ID NO: 43912), PLRKRPRR (SEQ ID NO: 43913), PLRKRPRRGSPLRKRPRR (SEQ ID NO: 43914), PAAKRVKLDGGKRTADGSEFESPKKKRKV (SEQ ID NO: 43915), PAAKRVKLDGGKRTADGSEFESPKKKRKVGIHGVPAA (SEQ ID NO: 43916), PAAKRVKLDGGKRTADGSEFESPKKKRKVAEAAAKEAAAKEAAAKA (SEQ ID NO: 43917), PAAKRVKLDGGKRTADGSEFESPKKKRKVPG (SEQ ID NO: 43918), KRKGSPERGERKRHW (SEQ ID NO: 43919), KRTADSQHSTPPKTKRKVEFEPKKKRKV (SEQ ID NO: 43920), and PKKKRKVGGSKRTADSQHSTPPKTKRKVEFEPKKKRKV (SEQ ID NO: 43921). In some embodiments, the one or more NLS are linked to the CRISPR protein or to adjacent NLS with a linker peptide wherein the linker peptide is selected from the group consisting of RS, (G)n (SEQ ID NO: 43922), (GS)n (SEQ ID NO: 43923), (GSGGS)n (SEQ ID NO: 43924), (GGSGGS)n (SEQ ID NO: 43925), (GGGS)n (SEQ ID NO: 43926), GGSG (SEQ ID NO: 203), GGSGG (SEQ ID NO: 204), GSGSG (SEQ ID NO: 205), GSGGG (SEQ ID NO: 366), GGGSG (SEQ ID NO: 367), GSSSG (SEQ ID NO: 368), GPGP (SEQ ID NO: 369), GGP, PPP, PPAPPA (SEQ ID NO: 370), PPPG (SEQ ID NO: 43926), PPPGPPP (SEQ ID NO: 371), PPP(GGGS)n (SEQ ID NO: 43927), (GGGS)nPPP (SEQ ID NO: 43928), AEAAAKEAAAKEAAAKA (SEQ ID NO: 43929), and TPPKTKRKVEFE (SEQ ID NO: 43930), where n is 1 to 5. In general, NLS (or multiple NLSs) are of sufficient strength to drive accumulation of a CasX variant fusion protein in the nucleus of a eukaryotic cell. Detection of accumulation in the nucleus may be performed by any suitable technique. For example, a detectable marker may be fused to a CasX variant fusion protein such that location within a cell may be visualized. Cell nuclei may also be isolated from cells, the contents of which may then be analyzed by any suitable process for detecting protein, such as immunohistochemistry, Western blot, or enzyme activity assay. Accumulation in the nucleus may also be determined indirectly.

[0246] In some cases, a CasX variant fusion protein includes a “Protein Transduction Domain” or PTD (also known as a CPP—cell penetrating peptide), which refers to a protein, polynucleotide, carbohydrate, or organic or inorganic compound that facilitates traversing a lipid bilayer, micelle, cell membrane, organelle membrane, or vesicle membrane. A PTD attached to another molecule, which can range from a small polar molecule to a large macromolecule and/or a nanoparticle, facilitates the molecule traversing a membrane, for example going from an extracellular space to an intracellular space, or from the cytosol to within an organelle. In some embodiments, a PTD is covalently linked to the amino terminus of a CasX variant fusion protein. In some embodiments, a PTD is covalently linked to the carboxyl terminus of a CasX variant fusion protein. In some cases, the PTD is inserted internally in the sequence of a CasX variant fusion protein at a suitable insertion site. In some cases, a CasX variant fusion protein includes (is conjugated to, is fused to) one or more PTDs (e.g., two or more, three or more, four or more PTDs). In some cases, a PTD includes one or more nuclear localization signals (NLS). Examples of PTDs include but are not limited to peptide transduction domain of HIV TAT comprising YGRKKRRQRRR (SEQ ID NO: 191), RKKRRQRR (SEQ ID NO: 192); YARAAARQARA (SEQ ID NO: 193); THRLPRRRRRR (SEQ ID NO: 194); and GGRRARRRRRR (SEQ ID NO: 195); a polyarginine sequence comprising a number of arginines sufficient to direct entry into a cell (e.g., 3, 4, 5, 6, 7, 8, 9, 10, or 10-50 arginines (SEQ ID NO: 43570)); a VP22 domain (Zender et al. (2002) Cancer Gene Ther. 9(6):489-96); a Drosophila Antennapedia protein transduction domain (Noguchi et al. (2003) Diabetes 52(7): 1732-1737); a truncated human calcitonin peptide (Trehin et al. (2004) Pharm. Research 21:1248-1256); polylysine (Wender et al. (2000) Proc. Natl. Acad. Sci. USA 97: 13003-13008); RRQRRTSKLMKR (SEQ ID NO: 196); Transportan GWTLNSAGYLLGKINLKALAALAKKIL (SEQ ID NO: 197); KALAWEAKLAKALAKALAKHLAKALAKALKCEA (SEQ ID NO: 198); and RQIKIWFQNRRMKWKK (SEQ ID NO: 199). In some embodiments, the PTD is an activatable CPP (ACPP) (Aguilera et al. (2009) Integr Biol (Camb) June; 1(5-6): 371-381). ACPPs comprise a polycationic CPP (e.g., Arg9 or “R9”) connected via a cleavable linker to a matching polyanion (e.g., Glu9 or “E9”), which reduces the net charge to nearly zero and thereby inhibits adhesion and uptake into cells. Upon cleavage of the linker, the polyanion is released, locally unmasking the polyarginine and its inherent adhesiveness, thus “activating” the ACPP to traverse the membrane.

[0247] In some embodiments, a CasX variant fusion protein can include a CasX protein that is linked to an internally inserted heterologous amino acid or heterologous polypeptide (a heterologous amino acid sequence) via a linker polypeptide (e.g., one or more linker polypeptides). In some embodiments, a CasX variant fusion protein can be linked at the C-terminal and/or N-terminal end to a heterologous polypeptide (fusion partner) via a linker polypeptide (e.g., one or more linker polypeptides). The linker polypeptide may have any of a variety of amino acid sequences. Proteins can be joined by a spacer peptide, generally of a flexible nature, although other chemical linkages are not excluded. Suitable linkers include polypeptides of between 4 amino acids and 40 amino acids in length, or between 4 amino acids and 25 amino acids in length. These linkers are generally produced by using synthetic, linker-encoding oligonucleotides to couple the proteins. Peptide linkers with a degree of flexibility can be used. The linking peptides may have virtually any amino acid sequence, bearing in mind that the preferred linkers will have a sequence that results in a generally flexible peptide. The use of small amino acids, such as glycine and alanine, are of use in creating a flexible peptide. The creation of such sequences is routine to those of skill in the art. A variety of different linkers are commercially available and are considered suitable for use. Exemplary linker polypeptides include peptides selected from the group consisting of RS, (G)n, (GS)n, (GSGGS)n (SEQ ID NO: 200), (GGSGGS)n (SEQ ID NO: 201), and (GGGS)n (SEQ ID NO: 202), where n is an integer of at least one), glycine-alanine polymers, alanine-serine polymers, glycine-proline polymers, proline polymers and proline-alanine polymers. Example linkers can comprise amino acid sequences including, but not limited to, GGSG (SEQ ID NO: 203), GGSGG (SEQ ID NO: 204), GSGSG (SEQ ID NO: 205), GSGGG (SEQ ID NO: 366), GGGSG (SEQ ID NO: 367), GSSSG (SEQ ID NO: 368), GPGP (SEQ ID NO: 369), GGP, PPP, PPAPPA (SEQ ID NO: 370), PPPGPPP (SEQ ID NO: 371), PPP(GGGS)n (SEQ ID NO: 43927), (GGGS)nPPP (SEQ ID NO: 43928), AEAAAKEAAAKEAAAKA (SEQ ID NO: 43929), and TPPKTKRKVEFE (SEQ ID NO: 43930), where n is 1 to 5. and the like. The ordinarily skilled artisan will recognize that design of a peptide conjugated to any elements described above can include linkers that are all or partially flexible, such that the linker can include a flexible linker as well as one or more portions that confer less flexible structure.

### III. Systems and Methods for Modification of PTBP1 Genes

[0248] The CRISPR proteins, guide nucleic acids, and variants thereof provided herein are useful for various applications, including as therapeutics, diagnostics, and for research. To effect the methods of the disclosure for gene editing, resulting in modification of the gene, provided herein are programmable Class 2, Type V CRISPR systems. The programmable nature of the systems provided herein allows for the precise targeting to achieve the desired effect (nicking, cleaving, etc.) at one or more regions of predetermined interest in the PTBP1 gene target nucleic acid. A variety of strategies and methods can be employed to modify the target nucleic acid sequence in a cell using the systems provided herein. As used herein “modifying” includes, but is not limited to, cleaving, nicking, editing, deleting, knocking out, knocking down, mutating, correcting, exon-skipping and the like. Depending on the system components utilized, the editing event may be a cleavage event followed by introducing random insertions or deletions (indels) or other mutations (e.g., a substitution, duplication, or inversion of one or more nucleotides), for example by utilizing the imprecise non-homologous DNA end joining (NHEJ) repair pathway, which may generate, for example, a frame shift mutation. Alternatively, the editing event may be a cleavage event followed by homology-directed repair (HDR), homology-independent targeted integration (HITI), micro-homology mediated end joining (MMEJ), single strand annealing (SSA) or base excision repair (BER), resulting in modification of the target nucleic acid sequence.

[0249] In some embodiments, the disclosure provides methods of modifying a PTBP1 target nucleic acid in a cell, the method comprising introducing into the cell a Class 2, Type V CRISPR system. In some embodiments, the disclosure provides methods of modifying a PTBP1 target nucleic acid in a cell, the method comprising introducing into the cell: i) a CasX:gRNA system comprising a CasX and a gRNA of any one of the embodiments described herein; ii) a CasX:gRNA system comprising a CasX, a gRNA, and a donor template of any one of the embodiments described herein; iii) a nucleic acid encoding the CasX and the gRNA, and optionally comprising the donor template; iv) a vector comprising the nucleic acid of (iii), above; v) a XDP comprising the CasX:gRNA system of any one of the embodiments described herein; or vi) combinations of two or more of (i) to (v), wherein the target nucleic acid sequence of the cell is modified by the CasX protein and, optionally, the donor template. In some embodiments, the disclosure provides CasX:gRNA systems for use in the methods of modifying the PTBP1 gene in a cell, wherein the system comprises a CasX variant comprising a sequence selected from the group consisting of the sequences of SEQ ID NOS: 36-99, 101-148 and 43662-43907 as set forth in Table 4, a CasX variant comprising a sequence selected from the group consisting of the sequences of SEQ ID NOS: 59, 72-99, 101-148, and 43662-43907, a CasX variant comprising a sequence selected from the group consisting of the sequences of SEQ ID NOS: 132-148 and 43662-43907, or a sequence having at least about 50%, at least about 60%, at least about 70%, at least about 80%, at least about 90%, or at least about 95%, or at least about 95%, or at least about 96%, or at least about 97%, or at least about 98%, or at least about 99% sequence identity thereto, the gRNA scaffold comprises a sequence selected from the group consisting of the sequences of SEQ ID NOS: 2101-2285, 43571-43661, 44045, and 44047 as set forth in Table 3, the gRNA scaffold comprises a sequence selected from the group consisting of the sequences of SEQ ID NOS: 2238-2285, 43571-43661, 44045 and 44047, the gRNA scaffold comprises a sequence selected from the group consisting of the sequences of SEQ ID NOS: 2281-2285, 43571-43661, 44045, and 44047 or a sequence at least 65% identical, at least 70% identical, at least 75% identical, at least 80% identical, at least 81% identical, at least 82% identical, at least 83% identical, at least 84% identical, at least 85% identical, at least 86% identical, at least 86% identical, at least 87% identical, at least 88% identical, at least 89% identical, at least 89% identical, at least 90% identical, at least 91% identical, at least 92% identical, at least 93% identical, at least 94% identical, at least 95% identical, at least 96% identical, at least 97% identical, at least 98% identical, at least 99% identical thereto, and the gRNA comprises a targeting sequence selected from the group consisting of the sequence of SEQ ID NOS: 492-2100 and 2286-43569 or a sequence at least 65% identical, at least 70% identical, at least 75% identical, at least 80% identical, at least 85% identical, at least 90% identical, or at least 95% identical thereto and having between 15 and 30 amino acids. In a particular embodiment, the targeting sequence of the gRNA of the CasX:gRNA system is selected from the group consisting of the sequence of SEQ ID NOS: 37971-37979, 38027, 38136, 38137, 38152-38158, 38160, 38162-38174, 38176, 38177, 38181, 38195, 38196, 38198, 38199, 38253-38256, 38259-38267, 38306 and 38311-38353. In a further particular embodiment, the CasX variant comprises a sequence selected from the group consisting of the sequences of SEQ ID NOS: 132-148 and 43662-43907, the gRNA scaffold comprises a sequence selected from the group consisting of the sequences of SEQ ID NOS: 2281-2285, 43571-43661 and 44045, and the targeting sequence of the gRNA of the CasX:gRNA system is selected from the group consisting of the sequence of SEQ ID NOS: 37971-37979, 38027, 38136, 38137, 38152-38158, 38160, 38162-38174, 38176, 38177, 38181, 38195, 38196, 38198, 38199, 38253-38256, 38259-38267, 38306 and 38311-38353.

[0250] In those cases where the CasX is delivered to the cell in the protein form and the gRNA is delivered in the RNA form, the CasX and gRNA can be pre-complexed and delivered as an RNP. Upon hybridization with the target nucleic acid by the CasX and the gRNA, the CasX introduces one or more single-strand breaks or double-strand breaks within or near the PTBP1 gene that result in a modification of the target nucleic acid such as a permanent indel (deletion or insertion) or other mutation (a base change, inversion or rearrangement with respect to the genomic sequence) in the target nucleic acid, as described herein, with a corresponding modulation of expression or alteration in the function of the PTBP1 gene product, thereby creating an edited cell. In other embodiments, the method comprises contacting the target nucleic acid sequence with a plurality of gRNAs targeted to different or overlapping portions of the PTBP1 gene wherein the CasX protein introduces multiple breaks in the target nucleic acid sequence that result in a permanent indel (deletion or insertion) or other mutation in the target nucleic acid, as described herein, with a corresponding modulation of expression or alteration in the function of the PTBP1 gene product, thereby creating an edited cell.

[0251] In some cases, the CasX:gRNA system for use in the methods of modifying the PTBP1 gene further comprises a donor template nucleic acid of any of the embodiments disclosed herein, wherein the donor template can be inserted by the homology-directed repair (HDR) or homology-independent targeted integration (HITI) repair mechanisms of the host cell. The donor template can be a short single-stranded or double-stranded oligonucleotide, or a long single-stranded or double-stranded oligonucleotide. The donor template may contain one or more single base changes, insertions, deletions, inversions or rearrangements with respect to the genomic sequence, provided that there is sufficient homology with the target nucleic acid sequence to support its integration into the target nucleic acid, which can result in a frame-shift or other mutation such that the PTBP1 protein is not expressed or is expressed at a lower level. In some embodiments, the donor template sequence comprises a non-homologous sequence flanked by two regions of homology to the break sites of the target nucleic acid, facilitating insertion of the non-homologous sequence at the target region which can be mediated by HDR or HITI. The exogenous donor template inserted by HITI can be any length, for example, a relatively short sequence of between 10 and 50 nucleotides in length, or a longer sequence of about 50-1000 nucleotides in length. The lack of homology can be, for example, having no more than 20-50% sequence identity and/or lacking in specific hybridization at low stringency. In other cases, the lack of homology can further include a criterion of having no more than 5, 6, 7, 8, or 9 bp identity. The donor template sequence inserted by HDR comprises a sequence flanked by two regions of homology (“homologous arms”) to the 5′ and 3′ sides of the break site(s) such that the repair mechanisms between the target DNA region and the two flanking sequences results in insertion of the donor template at the target region. In some embodiments, the donor template polynucleotide comprises at least about 10, at least about 50, at least about 100, or at least about 200, or at least about 300, or at least about 400, or at least about 500, or at least about 600, or at least about 700, or at least about 800, or at least about 900, or at least about 1000, or at least about 10,000, or at least about 15,000 nucleotides. In other embodiments, the donor template comprises at least about 10 to about 15,000 nucleotides, or at least about 100 to about 10,000 nucleotides, or at least about 400 to about 8,000 nucleotides, or at least about 600 to about 5000 nucleotides, or at least about 1000 to about 2000 nucleotides. The donor template sequence may comprise certain sequence differences as compared to the genomic sequence; e.g., restriction sites, nucleotide polymorphisms, selectable markers (e.g., drug resistance genes, fluorescent proteins, enzymes etc.), etc., which may be used to assess for successful insertion of the donor nucleic acid at the cleavage site or in some cases may be used for other purposes (e.g., to signify expression at the targeted genomic locus). Alternatively, these sequence differences may include flanking recombination sequences such as FLPs, loxP sequences, or the like, that can be activated at a later time for removal of the marker sequence.

[0252] In some embodiments, the method of the disclosure provides CasX protein and gRNA pairs that generate site-specific double strand breaks (DSBs) or single strand breaks (SSBs) (e.g., when the CasX protein is a nickase that can cleave only one strand of a target nucleic acid) within double-stranded DNA (dsDNA) target nucleic acids, which can then be repaired either by non-homologous end joining (NHEJ), homology-directed repair (HDR), homology-independent targeted integration (HITI), micro-homology mediated end joining (MMEJ), single strand annealing (SSA) or base excision repair (BER). In some cases, contacting a PTBP1 gene with a gene editing pair occurs under conditions that are permissive for non-homologous end joining or homology-directed repair. Thus, in some cases, the methods provided herein include contacting the PTBP1 gene with a donor template by introducing the donor template (either in vitro outside of a cell, in vitro inside a cell, in vivo inside a cell, or ex vivo), wherein the donor template, a portion of the donor template, a copy of the donor template, or a portion of a copy of the donor template integrates into the PTBP1 gene to replace a portion of the PTBP1 gene.

[0253] In some embodiments of the method of modifying a PTBP1 target nucleic acid of a cell in vitro or ex vivo, to induce cleavage or any desired modification to a target nucleic acid, the gRNA and/or the CasX protein of the present disclosure and, optionally, the donor template sequence, whether they be introduced as nucleic acids or polypeptides, vectors or XDPXDP, are provided to the cells for about 30 minutes to about 24 hours, or at least about 1 hour, 1.5 hours, 2 hours, 2.5 hours, 3 hours, 3.5 hours 4 hours, 5 hours, 6 hours, 7 hours, 8 hours, 12 hours, 16 hours, 18 hours, 20 hours, or any other period from about 30 minutes to about 24 hours, which may be repeated with a frequency of about every day to about every 4 days; e.g., every 1.5 days, every 2 days, every 3 days, or any other frequency from about every day to about every four days. The agent(s) may be provided to the subject cells one or more times; e.g., one time, twice, three times, or more than three times, and the cells allowed to incubate with the agent(s) for some amount of time following each contacting event e.g., 30 minutes to about 24 hours. In the case of in vitro-based methods, after the incubation period with the CasX and gRNA (and optionally the donor template), the media is replaced with fresh media and the cells are cultured further.

[0254] In some embodiments of the method of modifying a PTBP1 target nucleic acid in a cell, the method further comprises contacting the target nucleic acid sequence of the cell with: a) an additional CRISPR nuclease and a gRNA targeting a different or overlapping portion of the PTBP1 target nucleic acid compared to the first gRNA; b) a polynucleotide encoding the additional CRISPR nuclease and the gRNA of (a); c) a vector comprising the polynucleotide of (b); or d) a XDP comprising the additional CRISPR nuclease and the gRNA of (a), wherein the contacting results in modification of the PTBP1 target nucleic acid at a different location in the sequence compared to the first gRNA. In some cases, the additional CRISPR nuclease is a CasX protein having a sequence different from the CasX protein of any of the preceding claims. In other cases, the additional CRISPR nuclease is not a CasX protein and the additional CRISPR nuclease is selected from the group consisting of Cas9, Cas12a, Cas12b, Cas12c, Cas12d (CasY), Cas12j, Cas12k, Cas13a, Cas13b, Cas13c, Cas13d, CasY, Cas14, Cpf1, C2c1, Csn2, C2c4, C2c8, C2c5, C2c10, C2c9, Cas Phi, and sequence variants thereof.

[0255] In those cases where the modification results in a knock-down of the PTBP1 gene, expression of the PTBP1 protein is reduced by at least about 10%, at least about 20%, at least about 30%, at least about 40%, at least about 50%, at least about 60%, at least about 70%, at least about 80%, or at least about 90% in comparison to cells that have not been modified. In other cases, wherein the modification results in a knock-out of the PTBP1 gene, the target nucleic acid of the cells of the population is modified such that at least about 10%, at least about 20%, at least about 30%, at least about 40%, at least about 50%, at least about 60%, at least about 70%, at least about 80%, or at least about 90% of the cells do not express a detectable level of PTBP1 protein. Expression of a PTBP1 protein can be measured by flow cytometry, ELISA, cell-based assays, Western blot or other methods know in the art (Cho, C., et al. PTBP1-mediated regulation of AXL mRNA stability plays a role in lung tumorigenesis. Scientific Reports 9:16922 (2019)), or as described in the Examples.

[0256] In other embodiments of the method of modifying a target nucleic acid sequence, modifying the PTBP1 gene comprises binding of a CasX to the target nucleic acid sequence without cleavage. In some embodiments, the CasX is a catalytically inactive CasX (dCasX) protein that retains the ability to bind to the gRNA and to the PTBP1 target nucleic acid sequence but lacks the ability to cleave the nucleic acid sequence, thereby interfering with transcription of the PTBP1 allele. In some embodiments, the dCasX comprises a mutation at residues D672, E769, and/or D935 corresponding to the CasX protein of SEQ ID NO:1 or D659, E756 and/or D922 corresponding to the CasX protein of SEQ ID NO: 2. In some embodiments, the mutation is a substitution of alanine or glycine for the residue.

[0257] In some embodiments, the disclosure provides methods of modifying a PTBP1 target nucleic acid in a population of cells in vivo in a subject. In some embodiments of the method, the modifying comprises contacting the cells of the subject with a therapeutically effective dose of i) the system comprising a CasX variant and gRNA variant and, optionally, a donor template nucleic acid of any of the embodiments described herein; ii) nucleic acid encoding the system of (i); a vector comprising the nucleic acid of (ii); iii) an XDP comprising RNPs of the system of (i); or combinations of two or more of (i)-(iii), wherein the PTBP1 gene of the cells targeted by the gRNA is modified by the CasX variant protein. In some embodiments of the method, the modified cells of the population are eukaryotic, which can include rodent cells, mouse cells, rat cells, primate cells, non-human primate cells, human cells, central nervous system (CNS) cells, and peripheral nervous system (PNS) cells. In the case of cells of the CNS or PNS to be modified by the methods of the embodiments, the cells can be astrocytes, oligodendrocytes, glial cells, microglial cells, or fibroblasts. In some embodiments of the method, the modification of the PTBP1 target nucleic acid sequence and the down-regulation of PTBP1 results in reprogramming or conversion of the eukaryotic cells into functional neurons that then express nPTB (also known as PTBP2). In some embodiments of the method, the reprogramming of the eukaryotic cells into functional neurons results in the prevention or amelioration of the neurologic disease of the subject.

[0258] In other cases, the cells to be modified are cancer cells, which can include cells of a tumor, wherein the in vivo modification of the PTBP1 target nucleic acid sequence prevents or reduces tumorigenesis of the cells, or results in stasis of an existing tumor in a subject. In some embodiments, the disclosure provides methods of modifying a PTBP1 target nucleic acid in a population of tumor cells in vivo in a subject comprising contacting the tumor cells of the subject with a therapeutically effective dose of i) the system comprising a CasX variant and gRNA variant and, optionally, a donor template nucleic acid of any of the embodiments described herein; ii) nucleic acid encoding the system of (i); a vector comprising the nucleic acid of (ii); iii) an XDP comprising RNPs of the system of (i); or combinations of two or more of (i)-(iii), wherein the PTBP1 gene of the cells targeted by the gRNA is modified by the CasX variant protein. In the foregoing embodiment, the method results in stasis of an existing tumor for at least about 1 month, at least about 2 months, at least about 3 months, at least about 4 months, at least about 6 months, at least about 7 months, at least about 8 months, at least about 9 months, at least about 10 months, at least about 11 months, at least about 12 months, at least about 18 months, at least about 2 years, at least about 3 years, at least about 4 years, or at least about 5 years. In another embodiment, the method results in stasis of an existing tumor for at least about 1 to about 5 years, at least about 6 months to about 4 years, or at least about 1 year to about 3 years.

[0259] Introducing recombinant expression vectors comprising the components or the nucleic acids encoding the components of the system embodiments into a target cell can be carried out in vivo, in vitro or ex vivo. In some embodiments of the method, vectors may be provided directly to a target host cell. Methods of introducing a nucleic acid (e.g., a nucleic acid comprising a donor polynucleotide sequence, one or more nucleic acids (DNA or RNA) encoding a CasX protein and/or gRNA, or a vector comprising same) into a cell are known in the art, and any convenient method can be used to introduce a nucleic acid (e.g., an expression construct) into a cell. Suitable methods include e.g., viral infection, transfection, lipofection, electroporation, calcium phosphate precipitation, polyethyleneimine (PEI)-mediated transfection, DEAE-dextran mediated transfection, liposome-mediated transfection, particle gun technology, nucleofection, electroporation, direct addition by cell penetrating CasX proteins that are fused to or recruit donor DNA, cell squeezing, calcium phosphate precipitation, direct microinjection, nanoparticle-mediated nucleic acid delivery, and the like. Nucleic acids may be introduced into the cells using well-developed commercially-available transfection techniques such as use of TransMessenger® reagents from Qiagen, Stemfect™ RNA Transfection Kit from Stemgent, and TransIT®-mRNA Transfection Kit from Mirus Bio LLC, Lonza nucleofection, Maxagen electroporation and the like. Introducing recombinant expression vectors comprising sequences encoding the CasX:gRNA systems (and, optionally, the donor sequences) of the disclosure into cells under in vitro conditions can occur in any suitable culture media and under any suitable culture conditions that promote the survival of the cells. For example, cells may be contacted with vectors comprising the subject nucleic acids (e.g., recombinant expression vectors having the donor template sequence and nucleic acid encoding the CasX and gRNA) such that the vectors are taken up by the cells. Vectors used for providing the nucleic acids encoding gRNAs and/or CasX proteins to a target host cell can include suitable promoters for driving the expression, that is, transcriptional activation of the nucleic acid of interest. In some cases, the encoding nucleic acid of interest will be operably linked to a promoter. This may include ubiquitously acting promoters, for example, the CMV-beta-actin promoter, or inducible promoters, such as promoters that are active in particular cell populations or that respond to the presence of drugs such as tetracycline or kanamycin. By transcriptional activation, it is intended that transcription will be increased above basal levels in the target host cell comprising the vector by at least about 10-fold, by at least about 100-fold, more usually by at least about 1000-fold. In addition, vectors used for providing a nucleic acid encoding a gRNA and/or a CasX protein to a cell may include nucleic acid sequences that encode for selectable markers in the target cells, so as to identify cells that have taken up the CasX protein and/or the gRNA.

[0260] For viral vector delivery, cells can be contacted with viral particles comprising the subject viral expression vectors and the nucleic acid encoding the CasX and gRNA and, optionally, the donor template. In some embodiments, the vector is an Adeno-Associated Viral (AAV) vector, wherein the AAV is selected from AAV1, AAV2, AAV3, AAV4, AAV5, AAV6, AAV7, AAV8, AAV9, AAV10, AAV11, AAV12, AAV-Rh74, AAVRh10, or a hybrid, a derivative or variant thereof. In other embodiments, the vector is a retroviral vector, described more fully, below. In other embodiments, the vector is a lentiviral vector. Retroviruses, for example, lentiviruses, may be suitable for use in methods of the present disclosure. Commonly used retroviral vectors are “defective”; e.g., are unable to produce viral proteins required for productive infection. Rather, replication of the vector requires growth in a packaging cell line. To generate viral particles comprising nucleic acids of interest, the retroviral nucleic acids comprising the nucleic acid are packaged into viral capsids by a packaging cell line. Different packaging cell lines provide a different envelope protein (ecotropic, amphotropic or xenotropic) to be incorporated into the capsid, and this envelope protein determines the specificity or tropisms of the viral particle for the cells (ecotropic for murine and rat; amphotropic for most mammalian cell types including human, dog and mouse; and xenotropic for most mammalian cell types except murine cells). The appropriate packaging cell line may be used to ensure that the cells are targeted by the packaged viral particles. Methods of introducing subject vector expression vectors into packaging cell lines and of collecting the viral particles that are generated by the packaging lines are well known in the art, including U.S. Pat. No. 5,173,414; Tratschin et al., Mol. Cell. Biol. 5:3251-3260 (1985); Tratschin, et al., Mol. Cell. Biol. 4:2072-2081 (1984); Hermonat & Muzyczka, PNAS 81:6466-6470 (1984); and Samulski et al., J. Virol. 63:03822-3828 (1989). Nucleic acids can also be introduced by direct micro-injection (e.g., injection of RNA).

### IV. Polynucleotides and Vectors

[0261] In some embodiments, the present disclosure provides polynucleotides encoding the Class 2, Type V CRISPR proteins and the polynucleotides of the gRNA that have utility in the editing of the PTBP1 gene. In other embodiments, the present disclosure provides polynucleotides encoding the CasX proteins and the polynucleotides of the gRNAs (e.g., the gDNAs and gRNAs) described herein. In an additional embodiment, the disclosure provides donor template polynucleotides encoding portions or all of an PTBP1 gene. In some cases, the donor template comprises a mutation or a heterologous sequence for knocking down or knocking out the PTBP1 gene upon its insertion in the target nucleic acid. In yet further embodiments, the disclosure relates to vectors comprising polynucleotides encoding the CasX proteins and the gRNAs described herein. In yet further embodiments, the disclosure provides vectors comprising the donor templates described herein.

[0262] In some embodiments, the disclosure provides polynucleotide sequences encoding the CasX variants of any of the embodiments described herein, including the CasX protein variants of SEQ ID NOS: 36-99, 101-148 or 43662-43907 as described in Table 4, or sequences having at least about 50%, at least about 60%, at least about 70%, at least about 80%, or at least about 90%, or at least about 95%, or at least about 96%, or at least about 97%, or at least about 98%, or at least about 99% sequence identity thereto. In some embodiments, the disclosure provides polynucleotide sequences encoding the CasX variants of any of the embodiments described herein, including the CasX protein variants of SEQ ID NOS: 59, 72-99, 101-148, or 43662-43907, or sequences having at least about 50%, at least about 60%, at least about 70%, at least about 80%, or at least about 90%, or at least about 95%, or at least about 96%, or at least about 97%, or at least about 98%, or at least about 99% sequence identity thereto. In some embodiments, the disclosure provides polynucleotide sequences encoding the CasX variants of any of the embodiments described herein, including the CasX protein variants of SEQ ID NOS: 132-148 or 43662-43907, or sequences having at least about 50%, at least about 60%, at least about 70%, at least about 80%, or at least about 90%, or at least about 95%, or at least about 96%, or at least about 97%, or at least about 98%, or at least about 99% sequence identity thereto. In some embodiments, the disclosure provides an isolated polynucleotide sequence encoding a gRNA scaffold sequence of any of the embodiments described herein, including the sequences of SEQ ID NOS: 4-16, 2101-2285, 43571-43661 or 44045, together with sequences encoding the targeting sequences selected from the group consisting of SEQ ID NOS: 492-2100 and 2286-43569. In some embodiments, the disclosure provides an isolated polynucleotide sequence encoding a gRNA scaffold sequence of any of SEQ ID NOS: 2238-2285, 43571-43661, 44045 and 44047, together with sequences encoding the targeting sequences selected from the group consisting of SEQ ID NOS: 492-2100 and 2286-43569. In some embodiments, the disclosure provides an isolated polynucleotide sequence encoding a gRNA scaffold sequence of any of SEQ ID NOS: 2281-2285, 43571-43661 or 44045, together with sequences encoding the targeting sequences selected from the group consisting of SEQ ID NOS: 492-2100 and 2286-43569. In a particular embodiment of the foregoing, the encoded targeting sequence is selected from the group consisting of the sequence of SEQ ID NOS: 37971-37979, 38027, 38136, 38137, 38152-38158, 38160, 38162-38174, 38176, 38177, 38181, 38195, 38196, 38198, 38199, 38253-38256, 38259-38267, 38306 and 38311-38353. In some embodiments, the sequences encoding the CasX protein are codon optimized for expression in a eukaryotic cell.

[0263] In some embodiments, the polynucleotide encodes a gRNA scaffold sequence of SEQ ID NOS: 4-16, 2101-2285, 43571-43661, 44045, or 44047 as set forth in Table 2 or Table 3, or a sequence having at least about 50%, at least about 60%, at least about 70%, at least about 80%, at least about 90%, at least about 95%, at least about 96%, at least about 97%, at least about 98%, at least about 99% sequence identity thereto. In some embodiments, the polynucleotide encodes a gRNA scaffold sequence of SEQ ID NOS: 2238-2285, 43571-43661, 44045 and 44047, or a sequence having at least about 50%, at least about 60%, at least about 70%, at least about 80%, at least about 90%, at least about 95%, at least about 96%, at least about 97%, at least about 98%, at least about 99% sequence identity thereto. In some embodiments, the polynucleotide encodes a gRNA scaffold sequence of SEQ ID NOS: 2281-2285, 43571-43661 or 44045, or a sequence having at least about 50%, at least about 60%, at least about 70%, at least about 80%, at least about 90%, at least about 95%, at least about 96%, at least about 97%, at least about 98%, at least about 99% sequence identity thereto. In other embodiments, the disclosure provides a polynucleotide sequence encoding a targeting sequence selected from the group consisting of SEQ ID NOS: 492-2100 and 2286-43569, or a sequence having at least about 65%, at least about 75%, at least about 85%, or at least about 95% identity to a sequence selected from the group consisting of SEQ ID NOS: 492-2100 and 2286-43569. In a particular embodiment of the foregoing, the encoded targeting sequence is selected from the group consisting of the sequence of SEQ ID NOS: 37971-37979, 38027, 38136, 38137, 38152-38158, 38160, 38162-38174, 38176, 38177, 38181, 38195, 38196, 38198, 38199, 38253-38256, 38259-38267, 38306 and 38311-38353. In some embodiments, the targeting sequence polynucleotide is, in turn, linked to the gRNA scaffold sequence; either as a sgRNA or a dgRNA. In other embodiments, the disclosure provides gRNAs comprising targeting sequence polynucleotides having one or more single nucleotide polymorphisms (SNP) relative to a sequence selected from the group consisting of SEQ ID NOS: 492-2100 and 2286-43569. In other embodiments, the disclosure provides gRNAs comprising targeting sequence polynucleotides having one or more single nucleotide polymorphisms (SNP) relative to a sequence selected from the group consisting of SEQ ID NOS: 37971-37979, 38027, 38136, 38137, 38152-38158, 38160, 38162-38174, 38176, 38177, 38181, 38195, 38196, 38198, 38199, 38253-38256, 38259-38267, 38306 and 38311-38353.

[0264] In other embodiments, the disclosure provides an isolated polynucleotide sequence encoding a gRNA comprising a targeting sequence that is complementary to, and therefore hybridizes with the PTBP1 gene. In other embodiments, the polynucleotide sequence encodes a gRNA comprising a targeting sequence that hybridizes with a PTBP1 exon; e.g., any one of exons 1-16. In other embodiments, the polynucleotide sequence encodes a gRNA comprising a targeting sequence that hybridizes with a PTBP1 intron. In other embodiments, the polynucleotide sequence encodes a gRNA comprising a targeting sequence that hybridizes with a PTBP1 intron-exon junction. In other embodiments, the polynucleotide sequence encodes a gRNA comprising a targeting sequence that hybridizes with an intergenic region of the PTBP1 gene. In other embodiments, the polynucleotide sequence encodes a gRNA comprising a targeting sequence that hybridizes with a PTBP1 regulatory element. In some cases, the PTBP1 regulatory element is 5′ of the PTBP1 gene. In other cases, the PTBP1 regulatory element is 3′ of the PTBP1 gene. In some cases, the PTBP1 regulatory element is in an intron of the PTBP1 gene. In other cases, the PTBP1 regulatory element comprises the 5′ UTR of the PTBP1 gene. In still other cases, the PTBP1 regulatory element comprises the 3′UTR of the PTBP1 gene. In some cases of the foregoing embodiments, the PTBP1 sequence is a wild-type sequence.

[0265] In other embodiments, the disclosure provides donor template nucleic acids, wherein the donor template comprises a nucleotide sequence having homology to a PTBP1 target nucleic acid sequence. In some embodiments, the PTBP1 donor template is intended for gene editing and comprises at least a portion of a PTBP1 gene. In some embodiments, the PTBP1 donor template comprises a sequence that hybridizes with the PTBP1 gene. In other embodiments, the PTBP1 donor sequence comprises a sequence that encodes at least a portion of a PTBP1 exon selected from the group consisting of PTBP1 exon 1, PTBP1 exon 2, PTBP1 exon 3, PTBP1 exon 4, PTBP1 exon 5, PTBP1 exon 6, PTBP1 exon 7, PTBP1 exon 8, PTBP1 exon 9, PTBP1 exon 10, PTBP1 exon 11, PTBP1 exon 12, PTBP1 exon 13, PTBP1 exon 14, PTBP1 exon 15, and PTBP1 exon 16. In other embodiments, the PTBP1 donor sequence has a sequence that encodes at least a portion of a PTBP1 intron. In other embodiments, the PTBP1 donor sequence has a sequence that encodes at least a portion of with a PTBP1 intron-exon junction. In other embodiments, the PTBP1 donor sequence has a sequence that encodes at least a portion of an intergenic region of the PTBP1 gene. In other embodiments, the PTBP1 donor sequence has a sequence that encodes at least a portion of a PTBP1 regulatory element. In some cases of the foregoing donor template embodiments, the PTBP1 sequence comprises one or more mutations relative to a wild-type PTBP1 gene such that upon its insertion into the PTBP1 gene, the gene is knocked down or knocked out, with a resulting loss of expression of the PTBP1 protein. In the foregoing embodiments, the donor template is at least 10 nucleotides, at least 100 nucleotides, at least 200 nucleotides, at least 300 nucleotides, at least 400 nucleotides, at least 500 nucleotides, at least 600 nucleotides, at least 700 nucleotides, at least 800 nucleotides, at least 900 nucleotides, at least 1,000 nucleotides, at least 2,000 nucleotides, at least 3,000 nucleotides, at least 4,000 nucleotides, at least 5,000 nucleotides, at least 6,000 nucleotides, at least 7,000 nucleotides, at least 8,000 nucleotides, at least 9,000 nucleotides, at least 10,000 nucleotides, at least 12,000 nucleotides, or at least 15,000 nucleotides. In some embodiments, the donor template comprises at least about 10 to about 15,000 nucleotides. In some embodiments, the donor template is a single-stranded DNA template. In other embodiments, the donor template is a single stranded RNA template. In other embodiments, the donor template is a double-stranded DNA template. In some embodiments, the donor template can be provided as naked nucleic acid in the systems to edit the gene and does not need to be incorporated into a vector. In other embodiments, the donor template can be incorporated into a vector to facilitate its delivery to a cell; e.g., in a viral vector.

[0266] In other aspects, the disclosure relates to methods to produce polynucleotide sequences encoding the CasX variants, or the gRNA of any of the embodiments described herein, or sequences complementary to the polynucleotide sequences, including homologous variants thereof, as well as methods to express the proteins expressed or RNA transcribed by the polynucleotide sequences. In general, the methods include producing a polynucleotide sequence coding for the reference CasX, the CasX variants, or the gRNA of any of the embodiments described herein and incorporating the encoding gene into an expression vector appropriate for a host cell. For production of the encoded reference CasX, the CasX variants, or the gRNA of any of the embodiments described herein, the methods include transforming an appropriate host cell with an expression vector comprising the encoding polynucleotide, and culturing the host cell under conditions causing or permitting the resulting reference CasX, the CasX variants, or the gRNA of any of the embodiments described herein to be expressed or transcribed in the transformed host cell, thereby producing the reference CasX, the CasX variants, or the gRNA, which are recovered by methods described herein or by standard purification methods known in the art or as described in the Examples. Standard recombinant techniques in molecular biology are used to make the polynucleotides and expression vectors of the present disclosure or as described in the Examples.

[0267] In accordance with the disclosure, nucleic acid sequences that encode the reference CasX, the CasX variants, or the gRNA of any of the embodiments described herein (or their complement) are used to generate recombinant DNA molecules that direct the expression in appropriate host cells. Several cloning strategies are suitable for performing the present disclosure, many of which are used to generate a construct that comprises a gene coding for a composition of the present disclosure. In some embodiments, the cloning strategy is used to create a gene that encodes a construct that comprises nucleotides encoding the reference CasX, the CasX variants, or the gRNA that is used to transform a host cell for expression of the composition.

[0268] In some approaches, a construct is first prepared containing the DNA sequence encoding a CasX variant, or a gRNA. Exemplary methods for the preparation of such constructs are described in the Examples. The construct is then used to create an expression vector suitable for transforming a host cell, such as a prokaryotic or eukaryotic host cell for the expression and recovery of the protein construct, in the case of the CasX, or the gRNA. Where desired, the host cell is an E. coli. In other embodiments, the host cell is a eukaryotic cell. The eukaryotic host cell can be selected from Baby Hamster Kidney fibroblast (BHK) cells, human embryonic kidney 293 (HEK293), human embryonic kidney 293T (HEK293T), NS0 cells, SP2/0 cells, YO myeloma cells, P3X63 mouse myeloma cells, PER cells, PER.C6 cells, hybridoma cells, NIH3T3 cells, CV-1 (simian) in Origin with SV40 genetic material (COS), HeLa, Chinese hamster ovary (CHO), or yeast cells, or other eukaryotic cells known in the art suitable for the production of recombinant products. Exemplary methods for the creation of expression vectors, the transformation of host cells and the expression and recovery of the CasX variants and the gRNA are described in the Examples.

[0269] The gene encoding the CasX variants or the gRNA constructs can be made in one or more steps, either fully synthetically or by synthesis combined with enzymatic processes, such as restriction enzyme-mediated cloning, PCR and overlap extension, including methods more fully described in the Examples. The methods disclosed herein can be used, for example, to ligate sequences of polynucleotides encoding the various components (e.g., CasX and gRNA) genes of a desired sequence. Genes encoding polypeptide compositions are assembled from oligonucleotides using standard techniques of gene synthesis.

[0270] In some embodiments, the nucleotide sequence encoding a CasX protein is codon optimized for the intended host cell. This type of optimization can entail a mutation of an encoding nucleotide sequence to mimic the codon preferences of the intended host organism or cell while encoding the same CasX protein. Thus, the codons can be changed, but the encoded protein or gRNA remains unchanged. For example, if the intended target cell of the CasX protein was a human cell, a human codon-optimized CasX-encoding nucleotide sequence could be used. As another non-limiting example, if the intended host cell were a mouse cell, then a mouse codon-optimized CasX-encoding nucleotide sequence could be generated. The gene design can be performed using algorithms that optimize codon usage and amino acid composition appropriate for the host cell utilized in the production of the reference CasX or the CasX variants. In one method of the disclosure, a library of polynucleotides encoding the components of the constructs is created and then assembled, as described above. The resulting genes are then assembled and the resulting genes used to transform a host cell and produce and recover the CasX variants, or the gRNA compositions for evaluation of its properties, as described herein.

[0271] The disclosure provides for the use of plasmid expression vectors containing replication and control sequences that are compatible with and recognized by the host cell and are operably linked to the gene encoding the polypeptide for controlled expression of the polypeptide or transcription of the RNA. Such vector sequences are well known for a variety of bacteria, yeast, and viruses. Useful expression vectors that can be used include, for example, segments of chromosomal, non-chromosomal and synthetic DNA sequences. “Expression vector” refers to a DNA construct containing a DNA sequence that is operably linked to a suitable control sequence capable of effecting the expression of the DNA encoding the polypeptide in a suitable host. The requirements are that the vectors are replicable and viable in the host cell of choice. Low- or high-copy number vectors may be used as desired. The control sequences of the vector include a promoter to effect transcription, an optional operator sequence to control such transcription, a sequence encoding suitable mRNA ribosome binding sites, and sequences that control termination of transcription and translation. In some embodiments, a nucleotide sequence encoding a gRNA is operably linked to a control element, e.g., a transcriptional control element, such as a promoter. In some embodiments, a nucleotide sequence encoding a CasX protein is operably linked to a control element, e.g., a transcriptional control element, such as a promoter. In other cases, the nucleotide encoding the CasX and gRNA are linked and are operably linked to a single control element. The promoter may be any DNA sequence, which shows transcriptional activity in the host cell of choice and may be derived from genes encoding proteins either homologous or heterologous to the host cell. Exemplary regulatory elements include a transcription promoter, a transcription enhancer element, a transcription termination signal, internal ribosome entry site (IRES) or P2A peptide to permit translation of multiple genes from a single transcript, polyadenylation sequences to promote downstream transcriptional termination, sequences for optimization of initiation of translation, and translation termination sequences. In some cases, the promoter is a constitutively active promoter. In some cases, the promoter is a regulatable promoter. In some cases, the promoter is an inducible promoter. In some cases, the promoter is a tissue-specific promoter. In some cases, the promoter is a cell type-specific promoter. In some cases, the transcriptional control element (e.g., the promoter) is functional in a targeted cell type or targeted cell population. For example, in some cases, the transcriptional control element can be functional in eukaryotic cells, e.g., packaging cells for viral or XDP vectors, hematopoietic stem cells (HSC), hematopoietic progenitor cells (HPC), CD34+ cells, mesenchymal stem cells (MSC), embryonic stem (ES) cells, induced pluripotent stem cells (iPSC), common myeloid progenitor cells, proerythroblast cells, and erythroblast cells.

[0272] Non-limiting examples of pol II promoters include, but are not limited to EF-1alpha, EF-1alpha core promoter, Jens Tornoe (JeT), promoters from cytomegalovirus (CMV), CMV immediate early (CMVIE), CMV enhancer, herpes simplex virus (HSV) thymidine kinase, early and late simian virus 40 (SV40), the SV40 enhancer, long terminal repeats (LTRs) from retrovirus, mouse metallothionein-I, adenovirus major late promoter (Ad MLP), CMV promoter full-length promoter, the minimal CMV promoter, the chicken CE≤-actin promoter (CBA), CBA hybrid (CBh), chicken CE≤-actin promoter with cytomegalovirus enhancer (CB7), chicken beta-Actin promoter and rabbit beta-Globin splice acceptor site fusion (CAG), the rous sarcoma virus (RSV) promoter, the HIV-Ltr promoter, the hPGK promoter, the HSV TK promoter, a 7SK promoter, the Mini-TK promoter, the human synapsin I (SYN) promoter which confers neuron-specific expression, beta-actin promoter, super core promoter 1 (SCP1), the Mecp2 promoter for selective expression in neurons, the minimal IL-2 promoter, the Rous sarcoma virus enhancer/promoter (single), the spleen focus-forming virus long terminal repeat (LTR) promoter, the TBG promoter, promoter from the human thyroxine-binding globulin gene (Liver specific), the PGK promoter, the human ubiquitin C promoter (UBC), the UCOE promoter (Promoter of HNRPA2B1-CBX3), the synthetic CAG promoter, the Histone H2 promoter, the Histone H3 promoter, the U1a1 small nuclear RNA promoter (226 nt), the U1a1 small nuclear RNA promoter (226 nt), the U1b2 small nuclear RNA promoter (246 nt) 26, the GUSB promoter, the CBh promoter, rhodopsin (Rho) promoter, silencing-prone spleen focus forming virus (SFFV) promoter, a human H1 promoter (H1), a POL1 promoter, the TTR minimal enhancer/promoter, the b-kinesin promoter, mouse mammary tumor virus long terminal repeat (LTR) promoter, the human eukaryotic initiation factor 4A (EIF4A1) promoter, the ROSA26 promoter, the glyceraldehyde 3-phosphate dehydrogenase (GAPDH) promoter, tRNA promoters, and truncated versions and sequence variants of the foregoing. In a particular embodiment, the pol II promoter is EF-1alpha, wherein the promoter enhances transfection efficiency, the transgene transcription or expression of the CRISPR nuclease, the proportion of expression-positive clones and the copy number of the episomal vector in long-term culture.

[0273] Non-limiting examples of pol III promoters include, but are not limited to U6, mini U6, U6 truncated promoters, 7SK, and H1 variants, BiHi (Bidrectional H1 promoter), BiU6, Bi7SK, BiH1 (Bidirectional U6, 7SK, and H1 promoters), gorilla U6, rhesus U6, human 7SK, human H1 promoters, and sequence variants thereof. In the foregoing embodiment, the pol III promoter enhances the transcription of the gRNA.

[0274] Selection of the appropriate vector and promoter is well within the level of ordinary skill in the art, as it related to controlling expression, e.g., for modifying a PTBP1 gene. The expression vector may also contain a ribosome binding site for translation initiation and a transcription terminator. The expression vector may also include appropriate sequences for amplifying expression. The expression vector may also include nucleotide sequences encoding protein tags (e.g., 6xHis tag, hemagglutinin tag, fluorescent protein, etc.) that can be fused to the CasX protein, thus resulting in a chimeric CasX protein that are used for purification or detection.

[0275] Recombinant expression vectors of the disclosure can also comprise elements that facilitate robust expression of CasX proteins and the gRNAs of the disclosure. For example, recombinant expression vectors can include one or more of a polyadenylation signal (poly(A)), an intronic sequence or a post-transcriptional regulatory element such as a woodchuck hepatitis post-transcriptional regulatory element (WPRE). Exemplary poly(A) sequences include hGH poly(A) signal (short), HSV TK poly(A) signal, synthetic polyadenylation signals, SV40 poly(A) signal, β-globin poly(A) signal and the like. A person of ordinary skill in the art will be able to select suitable elements to include in the recombinant expression vectors described herein.

[0276] In some embodiments, provided herein are one or more recombinant expression vectors comprising one or more of: (i) a nucleotide sequence of a donor template nucleic acid where the donor template comprises a nucleotide sequence having homology to a sequence of the target PTBP1 locus of the target nucleic acid (e.g., a target genome); (ii) a nucleotide sequence that encodes a gRNA that hybridizes to a target sequence of the PTBP1 locus of the targeted genome (e.g., configured as a single or dual guide RNA) operably linked to a promoter that is operable in a target cell such as a eukaryotic cell; and (iii) a nucleotide sequence encoding a CasX protein operably linked to a promoter that is operable in a target cell such as a eukaryotic cell. In some embodiments, the sequences encoding the donor template, the gRNA and the CasX protein are in different recombinant expression vectors, and in other embodiments one or more polynucleotide sequences (for the donor template, CasX, and the gRNA) are in the same recombinant expression vector. In other cases, the CasX and gRNA are delivered to the target cell as an RNP (e.g., by electroporation or chemical means) and the donor template is delivered by a vector.

[0277] The polynucleotide sequence(s) are inserted into the vector by a variety of procedures. In general, DNA is inserted into an appropriate restriction endonuclease site(s) using techniques known in the art. Vector components generally include, but are not limited to, one or more of a signal sequence, an origin of replication, one or more marker genes, an enhancer element, a promoter, and a transcription termination sequence. Construction of suitable vectors containing one or more of these components employs standard ligation techniques which are known to the skilled artisan. Such techniques are well known in the art and well described in the scientific and patent literature. Various vectors are publicly available. The vector may, for example, be in the form of a plasmid, cosmid, viral particle, or phage that may conveniently be subjected to recombinant DNA procedures, and the choice of vector will often depend on the host cell into which it is to be introduced. Thus, the vector may be an autonomously replicating vector, i.e., a vector, which exists as an extrachromosomal entity, the replication of which is independent of chromosomal replication, e.g., a plasmid. Alternatively, the vector may be one which, when introduced into a host cell, is integrated into the host cell genome and replicated together with the chromosome(s) into which it has been integrated. Once introduced into a suitable host cell, expression of the protein involved in antigen processing, antigen presentation, antigen recognition, and/or antigen response can be determined using any nucleic acid or protein assay known in the art. For example, the presence of transcribed mRNA of reference CasX or the CasX variants can be detected and/or quantified by conventional hybridization assays (e.g., Northern blot analysis), amplification procedures (e.g. RT-PCR), SAGE (U.S. Pat. No. 5,695,937), and array-based technologies (see e.g., U.S. Pat. Nos. 5,405,783, 5,412,087 and 5,445,934), using probes complementary to any region of the polynucleotide.

[0278] The polynucleotides and recombinant expression vectors can be delivered to the target host cells by a variety of methods. Such methods include, but are not limited to, viral infection, transfection, lipofection, electroporation, calcium phosphate precipitation, polyethyleneimine (PEI)-mediated transfection, DEAE-dextran mediated transfection, microinjection, liposome-mediated transfection, particle gun technology, nucleofection, direct addition by cell penetrating CasX proteins that are fused to or recruit donor DNA, cell squeezing, calcium phosphate precipitation, direct microinjection, nanoparticle-mediated nucleic acid delivery, and using the commercially available TransMessenger® reagents from Qiagen, Stemfect™ RNA Transfection Kit from Stemgent, and TransIT®-mRNA Transfection Kit from Mirus Bio LLC, Lonza nucleofection, Maxagen electroporation and the like.

[0279] A recombinant expression vector sequence can be packaged into a virus or virus-like particle (also referred to herein as a “particle” or “virion”) for subsequent infection and transformation of a cell, ex vivo, in vitro or in vivo. Such particles or virions will typically include proteins that encapsidate or package the vector genome. Suitable expression vectors may include viral expression vectors based on vaccinia virus; poliovirus; adenovirus; a retroviral vector (e.g., Murine Leukemia Virus), spleen necrosis virus, and vectors derived from retroviruses such as Rous Sarcoma Virus, Harvey Sarcoma Virus, avian leukosis virus, a lentivirus, human immunodeficiency virus, myeloproliferative sarcoma virus, and mammary tumor virus; and the like. In some embodiments, a recombinant expression vector of the present disclosure is a recombinant adeno-associated virus (AAV) vector. In some embodiments, a recombinant expression vector of the present disclosure is a recombinant lentivirus vector. In some embodiments, a recombinant expression vector of the present disclosure is a recombinant retroviral vector.

[0280] In some embodiments, a recombinant expression vector of the present disclosure is a recombinant adeno-associated virus (AAV) vector. In some embodiments, a recombinant expression vector of the present disclosure is a recombinant lentivirus vector. In some embodiments, a recombinant expression vector of the present disclosure is a recombinant retroviral vector.

[0281] AAV is a small (20 nm), nonpathogenic virus that is useful in treating human diseases in situations that employ a viral vector for delivery to a cell such as a eukaryotic cell, either in vivo or ex vivo for cells to be prepared for administering to a subject. A construct is generated, for example a construct encoding any of the CasX proteins and/or CasX gRNA embodiments as described herein, and is flanked with AAV inverted terminal repeat (ITR) sequences, thereby enabling packaging of the AAV vector into an AAV viral particle.

[0282] An “AAV” vector may refer to the naturally occurring wild-type virus itself or derivatives thereof. The term covers all subtypes, serotypes and pseudotypes, and both naturally occurring and recombinant forms, except where required otherwise. As used herein, the term “serotype” refers to an AAV which is identified by and distinguished from other AAVs based on capsid protein reactivity with defined antisera, e.g., there are many known serotypes of primate AAVs. In some embodiments, the AAV vector is selected from AAV1, AAV2, AAV3, AAV4, AAV5, AAV6, AAV7, AAV8, AAV9, AAV10, AAV11, AAV12, AAV 44.9, AAV-Rh74 (Rhesus macaque-derived AAV), and AAVRh10, and modified capsids of these serotypes. For example, serotype AAV-2 is used to refer to an AAV which contains capsid proteins encoded from the cap gene of AAV-2 and a genome containing 5′ and 3′ ITR sequences from the same AAV-2 serotype. Pseudotyped AAV refers to an AAV that contains capsid proteins from one serotype and a viral genome including 5′-3′ ITRs of a second serotype. Pseudotyped rAAV would be expected to have cell surface binding properties of the capsid serotype and genetic properties consistent with the ITR serotype. Pseudotyped recombinant AAV (rAAV) are produced using standard techniques described in the art. As used herein, for example, rAAV1 may be used to refer an AAV having both capsid proteins and 5′-3′ ITRs from the same serotype or it may refer to an AAV having capsid proteins from serotype 1 and 5′-3′ ITRs from a different AAV serotype, e.g., AAV serotype 2. For each example illustrated herein the description of the vector design and production describes the serotype of the capsid and 5′-3′ ITR sequences.

[0283] An “AAV virus” or “AAV viral particle” refers to a viral particle composed of at least one AAV capsid protein (preferably by all of the capsid proteins of a wild-type AAV) and an encapsidated polynucleotide. If the particle additionally comprises a heterologous polynucleotide (i.e., a polynucleotide other than a wild-type AAV genome to be delivered to a mammalian cell), it is typically referred to as “rAAV”. An exemplary heterologous polynucleotide is a polynucleotide comprising a CasX protein and/or sgRNA and, optionally, a donor template of any of the embodiments described herein.

[0284] By “adeno-associated virus inverted terminal repeats” or “AAV ITRs” is meant the art recognized regions found at each end of the AAV genome which function together in cis as origins of DNA replication and as packaging signals for the virus. AAV ITRs, together with the AAV rep coding region, provide for the efficient excision and rescue from, and integration of a nucleotide sequence interposed between two flanking ITRs into a mammalian cell genome.

[0285] The nucleotide sequences of AAV ITR regions are known. See, for example Kotin, R. M. (1994) Human Gene Therapy 5:793-801; Berns, K. I. “Parvoviridae and their Replication” in Fundamental Virology, 2^{nd} Edition, (B. N. Fields and D. M. Knipe, eds.). As used herein, an AAV ITR need not have the wild-type nucleotide sequence depicted, but may be altered, e.g., by the insertion, deletion or substitution of nucleotides. Additionally, the AAV ITR may be derived from any of several AAV serotypes, including without limitation, AAV1, AAV2, AAV3, AAV4, AAV5, AAV6, AAV7, AAV8, AAV9, AAV10, AAV-Rh74, and AAVRh10, and modified capsids of these serotypes. Furthermore, 5′ and 3′ ITRs which flank a selected nucleotide sequence in an AAV vector need not necessarily be identical or derived from the same AAV serotype or isolate, so long as they function as intended, i.e., to allow for excision and rescue of the sequence of interest from a host cell genome or vector, and to allow integration of the heterologous sequence into the recipient cell genome when AAV Rep gene products are present in the cell. Use of AAV serotypes for integration of heterologous sequences into a host cell is known in the art (see, e.g., WO2018195555A1 and US20180258424A1, incorporated by reference herein.)

[0286] By “AAV rep coding region” is meant the region of the AAV genome which encodes the replication proteins Rep 78, Rep 68, Rep 52 and Rep 40. These Rep expression products have been shown to possess many functions, including recognition, binding and nicking of the AAV origin of DNA replication, DNA helicase activity and modulation of transcription from AAV (or other heterologous) promoters. The Rep expression products are collectively required for replicating the AAV genome. By “AAV cap coding region” is meant the region of the AAV genome which encodes the capsid proteins VP1, VP2, and VP3, or functional homologues thereof. These Cap expression products supply the packaging functions which are collectively required for packaging the viral genome.

[0287] In some embodiments, AAV capsids utilized for delivery of the encoding sequences for the CasX and gRNA, and, optionally, the DMPK donor template nucleotides to a host cell can be derived from any of several AAV serotypes, including without limitation, AAV1, AAV2, AAV3, AAV4, AAV5, AAV6, AAV7, AAV8, AAV9, AAV10, AAV 11, AAV12, AAV 44.9, AAV-Rh74 (Rhesus macaque-derived AAV), and AAVRh10, and the AAV ITRs are derived from AAV serotype 2. In a particular embodiment, AAV1, AAV7, AAV6, AAV8, or AAV9 are utilized for delivery of the CasX, gRNA, and, optionally, donor template nucleotides, to a host muscle cell.

[0288] In order to produce rAAV viral particles, an AAV expression vector is introduced into a suitable host cell using known techniques, such as by transfection. Packaging cells are typically used to form virus particles; such cells include HEK293 cells (and other cells known in the art), which package adenovirus. A number of transfection techniques are generally known in the art; see, e.g., Sambrook et al. (1989) Molecular Cloning, a laboratory manual, Cold Spring Harbor Laboratories, New York. Particularly suitable transfection methods include calcium phosphate co-precipitation, direct microinjection into cultured cells, electroporation, liposome mediated gene transfer, lipid-mediated transduction, and nucleic acid delivery using high-velocity microprojectiles.

[0289] In an advantage of rAAV constructs of the present disclosure, the smaller size of the CRISPR Type V nucleases; e.g., the CasX of the embodiments, permits the inclusion of all the necessary editing and ancillary expression components into the transgene such that a single rAAV particle can deliver and transduce these components into a target cell in a form that results in the expression of the CRISPR nuclease and gRNA that are capable of effectively modifying the target nucleic acid of the target cell. A representative schematic of such a construct is presented in FIG. 13. This stands in marked contrast to other CRISPR systems, such as Cas9, where typically a two-particle system is employed to deliver the necessary editing components to a target cell. Thus, in some embodiments of the rAAV systems, the disclosure provides; i) a first plasmid comprising the ITRs, sequences encoding the CasX variant, sequences encoding one or more gRNA, a first promoter operably linked to the CasX and a second promoter operably linked to the gRNA, and, optionally, one or more enhancer elements; ii) a second plasmid comprising the rep and cap genes; and iii) a third plasmid comprising helper genes, wherein upon transfection of an appropriate packaging cell, the cell is capable of producing an rAAV having the ability to deliver to a target cell, in a single particle, sequences capable of expressing the CasX nuclease and gRNA having the ability to edit the target nucleic acid of the target cell. In some embodiments of the rAAV systems, the sequence encoding the CRISPR protein and the sequence encoding the at least first gRNA are less than about 3100, less than about 3090, less than about 3080, less than about 3070, less than about 3060, less than about 3050, or less than about 3040 nucleotides in length, such that the sequences encoding the first and second promoter and, optionally, one or more enhance elements can have at least about 1300, at least about 1350, at least about 1360, at least about 1370, at least about 1380, at least about 1390, at least about 1400, at least about 1500, at least about 1600 nucleotides, at least 1650, at least about 1700, at least about 1750, at least about 1800, at least about 1850, or at least about 1900 nucleotides in combined length. In some embodiments of the rAAV systems, the sequence encoding the first promoter and the at least one accessory element have greater than at least about 1300, at least about 1350, at least about 1360, at least about 1370, at least about 1380, at least about 1390, at least about 1400, at least about 1500, at least about 1600 nucleotides, at least 1650, at least about 1700, at least about 1750, at least about 1800, at least about 1850, or at least about 1900 nucleotides in combined length. In some embodiments of the rAAV systems, the sequence encoding the first and second promoters and the at least one accessory element have greater than at least about 1300, at least about 1350, at least about 1360, at least about 1370, at least about 1380, at least about 1390, at least about 1400, at least about 1500, at least about 1600 nucleotides, at least 1650, at least about 1700, at least about 1750, at least about 1800, at least about 1850, or at least about 1900 nucleotides in combined length.

[0290] In some embodiments, host cells transfected with the above-described AAV expression vectors are rendered capable of providing AAV helper functions in order to replicate and encapsidate the nucleotide sequences flanked by the AAV ITRs to produce rAAV viral particles. AAV helper functions are generally AAV-derived coding sequences which can be expressed to provide AAV gene products that, in turn, function in trans for productive AAV replication. AAV helper functions are used herein to complement necessary AAV functions that are missing from the AAV expression vectors. Thus, AAV helper functions include one, or both of the major AAV ORFs (open reading frames), encoding the rep and cap coding regions, or functional homologues thereof. Accessory functions can be introduced into and then expressed in host cells using methods known to those of skill in the art. Commonly, accessory functions are provided by infection of the host cells with an unrelated helper virus. In some embodiments, accessory functions are provided using an accessory function vector. Depending on the host/vector system utilized, any of a number of suitable transcription and translation control elements, including constitutive and inducible promoters, transcription enhancer elements, transcription terminators, etc., may be used in the expression vector. In some embodiments, the disclosure provides host cells comprising the AAV vectors of the embodiments disclosed herein.

[0291] In other embodiments, suitable vectors may include virus-like particles (VLP). Virus-like particles (VLPs) are particles that closely resemble viruses, but do not contain viral genetic material and are therefore non-infectious. In some embodiments, VLPs comprise a polynucleotide encoding a transgene of interest, for example any of the CasX protein and/or a gRNA embodiments, and, optionally, donor template polynucleotides described herein, packaged with one or more viral structural proteins.

[0292] In other embodiments, the disclosure provides XDPs produced in vitro that comprise a CasX:gRNA RNP complex and, optionally, a donor template. Combinations of structural proteins from different viruses can be used to create XDPs, including components from virus families including Parvoviridae (e.g., adeno-associated virus), Retroviridae (e.g., alpharetrovirus, a betaretrovirus, a gammaretrovirus, a deltaretrovirus, a epsilonretrovirus, or a lentivirus), Flaviviridae (e.g., Hepatitis C virus), Paramyxoviridae (e.g., Nipah) and bacteriophages (e.g., Qβ, AP205). In some embodiments, the disclosure provides XDP systems designed using components of retrovirus, including lentiviruses (such as HIV) and alpharetrovirus, betaretrovirus, gammaretrovirus, deltaretrovirus, epsilonretrovirus, in which individual plasmids comprising polynucleotides encoding the various components are introduced into a packaging cell that, in turn, produce the XDP. In some embodiments, the disclosure provides XDP comprising one or more components of i) protease, ii) a protease cleavage site, iii) one or more components of a gag polyprotein selected from a matrix protein (MA), a nucleocapsid protein (NC), a capsid protein (CA), a p1 peptide, a p6 peptide, a P2A peptide, a P2B peptide, a P10 peptide, a p12 peptide, a PP21/24 peptide, a P12/P3/P8 peptide, and a P20 peptide; v) CasX; vi) gRNA, and vi) targeting glycoproteins or antibody fragments wherein the resulting XDP particle encapsidates a CasX:gRNA RNP. The polynucleotides encoding the Gag, CasX and gRNA can further comprise paired components designed to assist the trafficking of the components out of the nucleus of the host cell and into the budding XDP. Non-limiting examples of such trafficking components include hairpin RNA such as MS2 hairpin, PP7 hairpin, Qβ hairpin, and U1 hairpin II that have binding affinity for MS2 coat protein, PP7 coat protein, Qβ coat protein, and U1A signal recognition particle, respectively. In other embodiments, the gRNA can comprise Rev response element (RRE) or portions thereof that have binding affinity to Rev, which can be linked to the Gag polyprotein. The RRE can be selected from the group consisting of Stem IIB of Rev response element (RRE), Stem II-V of RRE, Stem II of RRE, Rev-binding element (RBE) of Stem IIB, and full-length RRE. In the foregoing embodiment, the components include sequences of UGGGCGCAGCGUCAAUGACGCUGACGGUACA (Stem JIB; SEQ ID NO: 43931), GCACUAUGGGCGCAGCGUCAAUGACGCUGACGGUACAGGCCAGACAAUUAUUGU CUGGUAUAGUGC (Stem II; SEQ ID NO: 43932), GCUGACGGUACAGGC (RBE, SEQ ID NO: 44046), CAGGAAGCACUAUGGGCGCAGCGUCAAUGACGCUGACGGUACAGGCCAGACAAU UAUUGUCUGGUAUAGUGCAGCAGCAGAACAAUUUGCUGAGGGCUAUUGAGGCGC AACAGCAUCUGUUGCAACUCACAGUCUGGGGCAUCAAGCAGCUCCAGGCAAGAA UCCUG (Stem II-V; SEQ ID NO: 43933), and AGGAGCUUUGUUCCUUGGGUUCUUGGGAGCAGCAGGAAGCACUAUGGGCGCAGC GUCAAUGACGCUGACGGUACAGGCCAGACAAUUAUUGUCUGGUAUAGUGCAGCA GCAGAACAAUUUGCUGAGGGCUAUUGAGGCGCAACAGCAUCUGUUGCAACUCAC AGUCUGGGGCAUCAAGCAGCUCCAGGCAAGAAUCCUGGCUGUGGAAAGAUACCU AAAGGAUCAACAGCUCCU (full-length RRE; SEQ ID NO: 43934). In other embodiments, the gRNA can comprise one or more RRE and one or more MS2 hairpin sequences. In a particular embodiment, the gRNA comprises an MS2 hairpin variant that is optimized to increase the binding affinity to the MS2 coat protein, thereby enhancing the incorporation of the gRNA and associated CasX into the budding XDP. gRNA variants comprising MS2 hairpin variants include gRNA variants 275-315 and 317-320 (SEQ ID NOS: 43617-43661 as shown in Table 3).

[0293] The targeting glycoproteins or antibody fragments on the surface that provides tropism of the XDP to the target cell, wherein upon administration and entry into the target cell, the RNP molecule is free to be transported into the nucleus of the cell. The envelope glycoprotein can be derived from any enveloped viruses known in the art to confer tropism to XDP, including but not limited to the group consisting of Argentine hemorrhagic fever virus, Australian bat virus, Autographa californica multiple nucleopolyhedrovirus, Avian leukosis virus, baboon endogenous virus, Bolivian hemorrhagic fever virus, Borna disease virus, Breda virus, Bunyamwera virus, Chandipura virus, Chikungunya virus, Crimean-Congo hemorrhagic fever virus, Dengue fever virus, Duvenhage virus, Eastern equine encephalitis virus, Ebola hemorrhagic fever virus, Ebola Zaire virus, enteric adenovirus, Ephemerovirus, Epstein-Bar virus (EBV), European bat virus 1, European bat virus 2, Fug Synthetic gP Fusion, Gibbon ape leukemia virus, Hantavirus, Hendra virus, hepatitis A virus, hepatitis B virus, hepatitis C virus, hepatitis D virus, hepatitis E virus, hepatitis G Virus (GB virus C), herpes simplex virus type 1, herpes simplex virus type 2, human cytomegalovirus (HHV5), human foamy virus, human herpesvirus (HHV), human Herpesvirus 7, human herpesvirus type 6, human herpesvirus type 8, human immunodeficiency virus 1 (HIV-1), human metapneumovirus, human T-lymphotropic virus 1, influenza A, influenza B, influenza C virus, Japanese encephalitis virus, Kaposi's sarcoma-associated herpesvirus (HHV8), Kaysanur Forest disease virus, La Crosse virus, Lagos bat virus, Lassa fever virus, lymphocytic choriomeningitis virus (LCMV), Machupo virus, Marburg hemorrhagic fever virus, measles virus, Middle eastern respiratory syndrome-related coronavirus, Mokola virus, Moloney murine leukemia virus, monkey pox, mouse mammary tumor virus, mumps virus, murine gammaherpesvirus, Newcastle disease virus, Nipah virus, Nipah virus, Norwalk virus, Omsk hemorrhagic fever virus, papilloma virus, parvovirus, pseudorabies virus, Quaranfil virus, rabies virus, RD 114 Endogenous Feline Retrovirus, respiratory syncytial virus (RSV), Rift Valley fever virus, Ross River virus, rRotavirus, Rous sarcoma virus, rubella virus, Sabia-associated hemorrhagic fever virus, SARS-associated coronavirus (SARS-CoV), Sendai virus, Tacaribe virus, Thogotovirus, tick-borne encephalitis causing virus, varicella zoster virus (HHV3), varicella zoster virus (HHV3), variola major virus, variola minor virus, Venezuelan equine encephalitis virus, Venezuelan hemorrhagic fever virus, vesicular stomatitis virus (VSV), VSV-G, Vesiculovirus, West Nile virus, western equine encephalitis virus, and Zika Virus.

[0294] In other embodiments, the disclosure provides XDP of the foregoing and further comprises one or more components of a pol polyprotein (e.g., a protease), and, optionally, a second CasX or a donor template. The disclosure contemplates multiple configurations of the arrangement of the encoded components, including duplicates of some of the encoded components. The foregoing offers advantages over other vectors in the art in that viral transduction to dividing and non-dividing cells is efficient and that the XDP delivers potent and short-lived RNP that escape a subject's immune surveillance mechanisms that would otherwise detect a foreign protein. Non-limiting, exemplary XDP systems are described in PCT/US20/63488 and WO2021113772A1, incorporated by reference herein. In some embodiments, the disclosure provides host cells comprising polynucleotides or vectors encoding any of the foregoing XDP embodiments.

[0295] Upon production and recovery of the XDP comprising the CasX:gRNA RNP of any of the embodiments described herein, the XDP can be used in methods to edit target cells of subjects by the administering of such XDP, as described more fully, below.

### V. Cells

[0296] In still another aspect, provided herein are populations of cells comprising a PTBP1 gene modified by any of the systems or method embodiments described herein. In some embodiments, the cells of the subject are modified in vivo by any of the systems or method embodiments described herein; e.g., to treat a subject having a neurologic disease or injury such as Parkinson's disease, Huntington's disease, Alzheimer's, amyotrophic lateral sclerosis (ALS), traumatic brain injury, traumatic spinal cord injury, amongst others, or cancer, described more fully below.

[0297] In some embodiments, the population of cells are modified by a Type V Cas nuclease and one or more guides targeted to the PTBP1 target nucleic acid. In some embodiments, the disclosure provides methods and populations of cells modified by introducing into each cell of the population: i) a CasX:gRNA system comprising a CasX and a gRNA of any one of the embodiments described herein; ii) a CasX:gRNA system comprising a CasX, a gRNA, and a donor template of any one of the embodiments described herein; iii) a nucleic acid encoding the CasX and the gRNA, and optionally comprising the donor template; iv) a vector comprising the nucleic acid of (iii), above, which can be an AAV of any of the embodiments described herein; v) a XDP comprising the CasX:gRNA system of any one of the embodiments described herein; or vi) combinations of two or more of (i) to (v), wherein the PTBP1 target nucleic acid sequence of the cells targeted by the gRNA is modified by the CasX protein and, optionally, the donor template. In some embodiments, the disclosure provides a population of cells wherein the cells have been modified such that at least 60%, at least 70%, at least 75%, at least 80%, at least 85%, at least 90%, or at least 95% of the modified cells do not express a detectable level of PTBP1 protein. In other embodiments, the disclosure provides a population of cells wherein the cells have been modified such that the expression of PTBP1 protein is reduced by at least 70%, at least 75%, at least 80%, at least 85%, at least 90%, or at least 95% compared to cells that have not been modified. In still other embodiments, the disclosure provides a population of cells wherein expression of the PTBP1 protein cannot be detected in the modified cells of the population. In the foregoing, the cells of the population modified by the methods of the disclosure can be fibroblasts, glial cells, microglial cells, oligodendrocytes or astrocytes, wherein the modification of the PTBP1 target nucleic acid sequence and the down-regulation of PTBP1 results in reprogramming or conversion of the cells into functional neurons that then express nPTB (also known as PTBP2), which can result in the prevention or amelioration of the neurologic disease of the subject. In some embodiments, the disclosure provides a population of cells wherein the cells have been modified such that the expression of nPTB in the modified cells is increased by at least about 10%, at least about 20%, at least about 30%, at least about 40%, at least about 50%, at least about 60%, at least about 70%, at least about 80%, or at least about 90% in comparison to cells in which the PTBP1 gene has not been modified. In other embodiments, the disclosure provides a population of cells wherein the cells have been modified such that at least about 10%, at least about 20%, at least about 30%, at least about 40%, at least about 50%, at least about 60%, at least about 70%, at least about 80%, or at least about 90% of the modified cells express a detectable level of nPTB protein. In some embodiments, the population of modified cells are animal cells; for example, a rodent, rat, mouse, rabbit or dog cell. In some embodiments, the cell is a human cell. In some embodiments, the cell is a non-human primate cell; e.g., a cynomolgus monkey cell. The effects of the modification can be assessed by flow cytometry, ELISA, cell-based assays, Western blot or other methods know in the art (Cho, C., et al. PTBP1-mediated regulation of AXL mRNA stability plays a role in lung tumorigenesis. Scientific Reports 9:16922 (2019)), the assays of the examples, or conventional assays known in the art.

### VI. Therapeutic Methods

[0298] In another aspect, the present disclosure relates to methods of treating a PTBP1-related disease in a subject in need thereof, including but not limited to neurologic diseases or cancers in which PTBP1 is implicated in the disease process or its amelioration. It will be understood that in some cases, PTBP1 protein is not an underlying cause of the disease, but the modification of the PTBP1 gene to reduce or eliminate the expression of the PTBP1 protein contributes to the prevention or amelioration of the disease and/or its signs and symptoms. Thus, use of the phrase “PTBP1-related disease” is intended to collectively encompass those diseases in which PTBP1 protein has either a causal role or its reduction in expression results in an improved therapeutic outcome. Non-limiting examples of neurologic diseases or injuries contemplated by the methods of treatment of the disclosure include, but are not limited to Parkinson's disease, Huntington's disease, Alzheimer's, amyotrophic lateral sclerosis (ALS), traumatic brain injury, traumatic spinal cord injury, amongst others. In those cases where the cells of the subject to be modified by the methods of the disclosure is a cell of the central nervous system (CNS) or the peripheral nervous system (PNS), the cell can be a fibroblast, a glial cell, a microglial cell, an oligodendrocyte or an astrocyte that, by the method of knocking-down or knocking-out of the PTBP1 gene, results in the reprogramming or conversion of the cells into functional neurons that then express nPTB (also known as PTBP2), which can result in the prevention or amelioration of the neurologic disease of the subject. In those cases where the cells of the subject to be modified by the methods of the disclosure is a cancer, the method results in the knocking-down or knocking-out of the PTBP1 gene in cells in which the PTBP1 protein is overexpressed, resulting in reduced tumorigenesis of the cells or stasis of an existing tumor in a subject. Non-limiting examples of cancers contemplated by the methods of treatment of the disclosure include, but are not limited to ovarian tumors, glioblastomas, bladder cancer, colon cancer and breast cancer.

[0299] In some embodiments, the allele related to the PTBP1-related disease of the subject to be modified is a wild-type sequence. A number of therapeutic strategies have been used to design the compositions for use in the methods of treatment of a subject with a PTBP1-related disease. In some embodiments, the disclosure provides methods of treating a PTBP1-related disease in a subject in need thereof in which repression or elimination of expression of the PTBP1 protein by modifying the PTBP1 gene in target cells of the subject ameliorates the signs, symptoms, or effects of the disease. In such embodiments, the method comprises administering to the subject a therapeutically effective dose of a Class 2, Type V CRISPR system embodiment disclosed herein.

[0300] In some embodiments, the method of treatment comprises administering to the subject a therapeutically effective dose of: i) the CasX:gRNA system comprising a first CasX protein and a first gRNA with a targeting sequence complementary to the target nucleic acid; ii) the CasX:gRNA system comprising a first CasX protein and a first gRNA with a targeting sequence complementary to the target nucleic acid and a donor template; iii) a nucleic acid encoding the CasX:gRNA system of (i) or (ii); iv) a vector comprising the nucleic acid of (iii), which can be an AAV of any of the embodiments described herein; v) a XDP comprising the CasX:gRNA system of (i) or (ii); or vi) combinations of two or more of (i)-(v), wherein said administering results in 1) modification of the PTBP1 target nucleic acid sequence by the CasX protein and, optionally, the donor template; and 2) decreased or elimination of expression of the PTBP1 protein in the modified cells of the subject, wherein the treatment prevents or ameliorates the signs, symptoms, or effects of the disease. The methods are described more fully, below.

[0301] In some embodiments of the method of treatment, the targeting sequence of the gRNA of the CasX:gRNA system used to target the specific sequence of the PTBP1 gene of the cells is selected from a sequence selected from the group consisting of SEQ ID NOS: 492-2100 and 2286-43569, or a sequence having at least about 65%, at least about 75%, at least about 85%, or at least about 95% identity thereto. In a particular embodiment, the targeting sequence of the gRNA of the CasX:gRNA system used to target the specific sequence of the PTBP1 gene of the cells is selected from a sequence selected from the group consisting of SEQ ID NOS: 37971-37979, 38027, 38136, 38137, 38152-38158, 38160, 38162-38174, 38176, 38177, 38181, 38195, 38196, 38198, 38199, 38253-38256, 38259-38267, 38306 and 38311-38353. In some embodiments, the targeting sequence of the gRNA has a sequence that hybridizes with a PTBP1 exon. In some embodiments, the targeting sequence of the gRNA has a sequence that hybridizes with a PTBP1 intron. In some embodiments, the targeting sequence of the gRNA has a sequence that hybridizes with a PTBP1 intron-exon junction. In some embodiments, the targeting sequence of the gRNA has a sequence that hybridizes with an intergenic region of the PTBP1 gene. In some embodiments, the targeting sequence of the gRNA has a sequence that hybridizes with a PTBP1 regulatory element. In some embodiments, the targeting sequence of the gRNA has a sequence complementary to the PTBP1 regulatory element, wherein the PTBP1 regulatory element is 5′ of the PTBP1 gene. In some embodiments, the targeting sequence of the gRNA has a sequence complementary to the PTBP1 regulatory element, wherein the PTBP1 regulatory element comprises the 5′ untranslated region (UTR) of the PTBP1 gene. In some embodiments, the targeting sequence of the gRNA has a sequence complementary to the PTBP1 regulatory element, wherein the PTBP1 regulatory element is 3′ of the PTBP1 gene. In some embodiments, the targeting sequence of the gRNA has a sequence complementary to the PTBP1 regulatory element, wherein the PTBP1 regulatory element comprises the 3′UTR of the PTBP1 gene. In some embodiments, the targeting sequence of the gRNA has a sequence complementary to the PTBP1 regulatory element, wherein the PTBP1 regulatory element comprises a promoter. In some embodiments, the targeting sequence of the gRNA has a sequence complementary to the PTBP1 regulatory element, wherein the PTBP1 regulatory element comprises an enhancer. In some embodiments, the CasX proteins and the gRNA scaffolds utilized in the methods of treating a PTBP1-related disease described herein comprise a CasX sequence selected from the sequences of SEQ ID NOS: 36-99, 101-148 and 43662-43907 as set forth in Table 4, a CasX sequence selected from the sequences of SEQ ID NOS: 59, 72-99, 101-148, and 43662-43907, a CasX sequence selected from the sequences of SEQ ID NOS: 132-148 and 43662-43907, or sequences having at least about 50%, at least about 60%, at least about 70%, at least about 80%, or at least about 90%, or at least about 95%, or at least about 99% sequence identity thereto, and the gRNA scaffold comprises any one of the sequences of SEQ ID NOS: 2101-2285, 43571-43661, 44045, or 44047 as set forth in in Table 3, the gRNA scaffold comprises any one of the sequences of SEQ ID NOS: 2238-2285, 43571-43661,44045, or 44047 the gRNA scaffold comprises any one of the sequences of SEQ ID NOS: 2281-2285, 43571-43661, 44045, or 44047, or a sequence having at least about 50%, at least about 60%, at least about 70%, at least about 80%, at least about 90%, at least about 95%, at least about 95%, at least about 96%, at least about 97%, at least about 98%, at least about 99% sequence identity thereto. In some embodiments of the method of treatment, the CasX of the CasX:gRNA system consists of a sequence of SEQ ID NOS: 36-99, 101-148 or 43662-43907 as set forth in Table 4, the gRNA scaffold consists of a sequence of SEQ ID NOS: 2101-2285, 43571-43661 or 44045 as set forth in Table 3, and the targeting sequence of the gRNA consists of a sequence selected from the group consisting of SEQ ID NOS: 492-2100 and 2286-43569. In some embodiments of the method of treatment, the CasX of the CasX:gRNA system consists of a sequence of SEQ ID NOS: 59, 72-99, 101-148, or 43662-43907, the gRNA scaffold consists of a sequence of SEQ ID NOS: 2238-2285, 43571-43661, 44045, or 44047, and the targeting sequence of the gRNA consists of a sequence selected from the group consisting of SEQ ID NOS: 492-2100 and 2286-43569. In some embodiments of the method of treatment, the CasX of the CasX:gRNA system consists of a sequence of SEQ ID NOS: 132-148 or 43662-43907, the gRNA scaffold consists of a sequence of SEQ ID NOS: 2281-2285, 43571-43661, 44045, or 44047, and the targeting sequence of the gRNA consists of a sequence selected from the group consisting of SEQ ID NOS: 492-2100 and 2286-43569.

[0302] Upon hybridization with the target nucleic acid by the CasX and the gRNA, the CasX introduces one or more single-strand breaks or double-strand breaks within or near the PTBP1 gene that results in a modification of the target nucleic acid. In those cases where the method of treatment is intended to knock-down or knock-out the PTBP1 gene in the cells of the subject, the CasX:gRNA system is designed to modify the target nucleic acid by introducing a permanent indel (deletion or insertion) or other mutation in the target nucleic acid that, together with the host cell repair mechanisms, results in reduced expression of the PTBP1 protein. In some cases, the expression of the PTBP1 protein is reduced by at least about 10%, at least about 20%, at least about 30%, at least about 40%, at least about 50%, at least about 60%, at least about 70%, at least about 80%, or at least about 90% in comparison to cells that have not been modified. In other cases, the PTBP1 target nucleic acid of the cells of the subject are modified such that expression of the PTBP1 protein cannot be detected.

[0303] In other embodiments, the target nucleic acid of the cells of the subject is modified using a CasX and a plurality of gRNAs (e.g., two, three, four or more) targeted to different or overlapping portions of the PTBP1 gene wherein the CasX protein introduces multiple breaks in the target nucleic acid sequence. Similarly, as described supra, in those cases where the method of treatment is intended to knock-down or knock-out the PTBP1 gene in the cells of the subject, the CasX:gRNA system is designed to modify the target nucleic acid by introducing one or more permanent indels (deletion or insertion) or mutations in the target nucleic acid that, together with the host cell repair mechanisms, results in reduced expression of the PTBP1 protein.

[0304] In some embodiments, the disclosure provides methods of treating a PTBP1-related disease in a subject in need thereof comprising modifying the PTBP1 gene with a CasX, one or more gRNA, and a donor template, wherein the donor template sequence is flanked by an upstream sequence and a downstream sequence with homology adjacent to the break sites in the target nucleic acid introduced by the CasX (i.e., homologous arms), facilitating insertion of the donor template sequence. In those cases where the method of treatment is intended to knock-down or knock-out the PTBP1 gene in the cells of the subject, the donor template sequence is typically not identical to the genomic sequence that it replaces and may contain one or more single base changes, insertions, deletions, inversions or rearrangements with respect to the genomic sequence, provided that there is sufficient homology with the target nucleic acid sequence to support homology-directed repair or insertion by HITI, which can result in a frame-shift or other mutation such that the PTBP1 protein is not expressed or the expression of the PTBP1 is reduced by at least about 10%, at least about 20%, at least about 30%, at least about 40%, at least about 50%, at least about 60%, at least about 70%, at least about 80%, at least about 90% in comparison to cells that have not been modified. The donor template inserted by HITI can be any length, for example, a relatively short sequence of between 1 and 50 nucleotides in length, or a longer sequence of about 50-1000 nucleotides in length. The donor template can be a short single-stranded or double-stranded oligonucleotide, or can be a long single-stranded or double-stranded oligonucleotide. The donor template of the embodiments can be designed to encode a PTBP1 exon, a PTBP1 intron, a PTBP1 intron-exon junction, a PTBP1 regulatory element, or an intergenic region. The donor template sequence may comprise certain sequence differences as compared to the genomic sequence; e.g., restriction sites, nucleotide polymorphisms, barcodes, selectable markers (e.g., drug resistance genes, fluorescent proteins, enzymes etc.), etc., which may be used to assess for successful insertion of the donor nucleic acid at the cleavage site or, in some cases, may be used for other purposes (e.g., to signify expression at the targeted genomic locus). Alternatively, these sequence differences may include flanking recombination sequences such as FLPs, loxP sequences, or the like, that can be activated at a later time for removal of the marker sequence.

[0305] In some embodiments of the method of treatment, the method comprises administration to the subject a therapeutically effective dose of a vector comprising polynucleotides encoding the CasX protein and the gRNA, wherein the contacting of the cells of the subject with the vector results in expression of the CasX and gRNA and modification of the target nucleic acid of the cells by the CasX:gRNA complex. The vectors disclosed herein may be delivered to a subject by multiple technologies including, but not limited to, DNA injection (also referred to as DNA vaccination) with and without in vivo electroporation, liposome mediated, nanoparticle facilitated, or use of recombinant vectors such as recombinant lentivirus, recombinant adenovirus, and recombinant adenovirus associated virus. In some embodiments, the method comprises administration of the vector comprising a polynucleotide encoding a CasX and a plurality of gRNAs targeted to the PTBP1 gene wherein the administration results in contacting the subject target nucleic acid within cells of the subject with the expression product(s) of the vectors wherein the PTBP1 gene is modified in the cell of the subject. In other embodiments of the method of treatment, the method comprises contacting the cell with a vector encoding the CasX protein and the gRNA and further comprising a donor template wherein said contacting results in modification of the target nucleic acid of the cell by cleavage by the CasX protein and insertion of the donor template into the target nucleic acid. In other embodiments of the method of treatment, the method comprises contacting the cell with a first vector encoding the CasX protein and the gRNA and a second vector comprising the donor template. In other embodiments, the method comprises administration of the vector comprising a polynucleotide encoding a CasX and a plurality of gRNAs targeted to the PTBP1 gene and a second vector comprising a donor template polynucleotide encoding at least a portion of or the entirety of a PTBP1 gene wherein the administration of the vectors results in contacting the subject target nucleic acid within a cell of the subject with the expression product(s) of the CasX and gRNA vectors and the donor template wherein the PTBP1 gene is modified in the cell of the subject. In those cases wherein the CasX:gRNA system is designed to knock-down/knock-out the PTBP1 gene, the donor template comprises one or more single base changes, insertions, deletions, inversions or rearrangements with respect to the genomic sequence in the PTBP1 gene portion, whereupon insertion of the donor template the gene is knocked-down or knocked-out. In some embodiments, the vector is a viral particle. In some embodiments, the vector is an AAV vector (described supra). The vectors of the embodiments are administered to the subject at a therapeutically effective dose. In some embodiments, the vector is administered to the subject at a dose of at least about 1×10⁵ vector genomes (vg/kg), at least about 1×10⁶ vg/kg, at least about 1×10⁷ vg/kg, at least about 1×10⁸ vg/kg, at least about 1×10⁹ vg/kg, at least about 1×10¹⁰ vg/kg, at least about 1×10¹¹ vg/kg, at least about 1×10¹² vg/kg, at least about 1×10¹³ vg/kg, at least about 1×10¹⁴ vg/kg, at least about 1×10¹⁵ vg/kg, or at least about 1×10¹⁶ vg/kg. In other embodiments, the vector is administered to the subject at a dose of at least about 1×10⁵ vg/kg to at least about 1×10¹⁶ vg/kg, or at least about 1×10⁶ vg/kg to about 1×10¹⁵ vg/kg, or at least about 1×10⁷ vg/kg to about 1×10¹⁴ vg/kg, or at least about 1×10⁸ vg/kg to about 1×10¹⁴ vg/kg. In other embodiments of the method of treatment, the method comprises administration to the subject a therapeutically effective dose of a XDP comprising the CasX protein and the gRNA and, optionally, the donor template (described, supra), wherein the contacting of the cells of the subject with the XDP results in modification of the target nucleic acid of the cells by the CasX:gRNA complex. In some embodiments, the method comprises administration of the XDP comprising a CasX and a plurality of gRNAs targeted to different locations in the PTBP1 gene, wherein the contacting of the cells of the subject with the XDP results in modification of the target nucleic acid of the cells by the CasX:gRNA complexes. As previously described, the components can be designed to knock-down/knock-out the PTBP1 gene. The XDP of the embodiments are administered to the subject at a therapeutically effective dose. In some embodiments, the XDP is administered to the subject at a dose of at least about 1×10⁵ particles/kg, at least about 1×10⁶ particles/kg, at least about 1×10⁷ particles/kg at least about 1×10⁸ particles/kg, at least about 1×10⁹ particles/kg, at least about 1×10¹⁰ particles/kg, at least about 1×10¹¹ particles/kg, at least about 1×10¹² particles/kg, at least about 1×10¹³ particles/kg, at least about 1×10¹⁴ particles/kg, at least about 1×10¹⁵ particles/kg, at least about 1×10¹⁶ particles/kg. In other embodiments, the XDP is administered to the subject at a dose of at least about 1×10⁵ particles/kg to at least about 1×10¹⁶ particles/kg, or at least about 1×10⁶ particles/kg to about 1×10¹⁵ particles/kg, or at least about 1×10⁷ particles/kg to about 1×10¹⁴ particles/kg, or at least about 1×10⁸ particles/kg to about 1×10¹⁴ particles/kg.

[0306] In other embodiments of the method of treatment, the method further comprises administration to the cells of a subject an additional CRISPR protein, or a polynucleotide (or a vector comprising the polynucleotide) encoding the additional CRISPR protein. In the foregoing embodiment, the additional CRISPR protein has a sequence different from the first CasX protein of the method. In some embodiments, the additional CRISPR protein is not a CasX protein; the additional CRISPR nuclease is selected from the group consisting of Cas9, Cas12a, Cas12b, Cas12c, Cas12d (CasY), Cas12j, Cas12k, Cas13a, Cas13b, Cas13c, Cas13d, CasX, CasY, Cas14, Cpf1, C2c1, Csn2, Cas Phi, and sequence variants thereof.

[0307] In some embodiments, the method comprises administering to the subject the compositions of the embodiments described herein (i.e., the CasX protein, the one or more gRNA, and, optionally the donor template, or the one or more polynucleotides encoding the CasX protein, the gRNA and the donor template, the vector or the XDP of the embodiments) at a therapeutically effective dose via an administration route selected from the group consisting of intraparenchymal, intravenous, intra-arterial, intracerebroventricular, intracisternal, intrathecal, intracranial, intra-striatal, lumbar, and intraperitoneal routes. It will be appreciated that for some neurologic diseases, the location of administration in the CNS or PNS may be more specific; e.g., regions such as the cortex, the corpus striatum, the spinal cord, or, in the case of treatment of Parkinson's disease, the substantia nigra. In some embodiments of the methods of treating a PTBP1-related disease or injury in a subject, the subject is selected from the group consisting of mouse, rat, non-human primate, and human. In a particular embodiment, the subject is a human. In the case of the treatment of cancer, the vector or XDP may be delivered parenterally or may be delivered directly into or proximally to the tumor. In the embodiments of the method of treatment, the vector or XDP may be administered according to a treatment regimen comprising one or more consecutive doses using a therapeutically effective dose of the vector or XDP. In some embodiments of the treatment regimen, the therapeutically effective dose of the vector or XDP is administered as a single dose. In other embodiments of the treatment regimen, the therapeutically effective dose of the vector or XDP is administered to the subject as two or more doses over a period of at least every two weeks, at least every month, at least every two months, at least every three months, at least every four months, at least every five months, at least every six months, or on an annual basis, or once every 2 or 3 years.

[0308] In some embodiments of the disclosure, the methods of treatment can prevent, treat and/or ameliorate a PTBP1-related disease of a subject by the administration to the subject of a therapeutically effective amount of a population of cells modified in vitro or ex vivo by CasX:gRNA system composition(s) of the embodiments described herein. In some cases, the CasX and gRNA is delivered to the cells of the population as an RNP (embodiments of which are described herein, supra), and, optionally, the donor template, wherein the target nucleic acid is modified such that the PTBP1 protein is not expressed or is expressed at a reduced level. In other cases, the CasX and gRNA is delivered to the cells of the population in a vector (embodiments of which are described herein, supra), wherein the target nucleic acid is modified such that the PTBP1 protein is not expressed or is expressed at a reduced level. In some embodiments, the cells of the population to be modified by the administration of the compositions are cells of the central nervous system (CNS) or the peripheral nervous system (PNS). In some embodiments, the cell is a glial cell, a microglial cell, an oligodendrocyte, an astrocyte, or a fibroblast, wherein the cell is reprogrammed and transformed into a functional neuron by the method. In some cases, the cells have been modified such that expression of the PTBP1 protein is decreased by at least about 50%, at least about 60%, at least about 70%, at least about 80%, at least about 90%, or at least about 95% in comparison to a cell that has not been modified. In other cases, the cells have been modified such that at least about 1%, at least about 5%, at least about 10%, at least about 20%, at least about 30%, at least about 40%, at least about 50%, at least about 60%, at least about 70%, at least about 80%, at least about 90%, or at least about 95% of the cells do not express a detectable level of the PTBP1 protein. In other embodiments of the method, the modification of the cells of the subject results in an increase in expression of nPTB in the modified cells by at least about 10%, at least about 20%, at least about 30%, at least about 40%, at least about 50%, at least about 60%, at least about 70%, at least about 80%, or at least about 90% in comparison to cells in which the PTBP1 gene has not been modified. In other embodiments of the method, the cells of the subject are modified such that at least about 10%, at least about 20%, at least about 30%, at least about 40%, at least about 50%, at least about 60%, at least about 70%, at least about 80%, or at least about 90% of the cells express a detectable level of nPTB protein.

[0309] In some embodiments, the method of treatment further comprises administering a chemotherapeutic agent, such as an immunosuppressive agent or carbidopa-levodopa for a neurologic disease, or a cytotoxic, alkylating agent, or monoclonal antibody for a cancer.

[0310] In some embodiments of the method of treating a subject having a neurologic PTBP1-disease, administering to the subject of a therapeutically effective amount of a vector, a XDP, a CasX-gRNA composition, or a plurality of modified cells of any one of the embodiments described herein can produce a beneficial effect in helping to prevent, to treat (e.g., reduce the severity) or prevent the progression of the disease, or result in an improvement in one or more clinical parameters or endpoints associated with the disease in the subject, notwithstanding that the subject may still be afflicted with the underlying disease. It will be understood that the clinical parameter or endpoint is dependent on the underlying disease of the subject. In the case of Parkinson's disease, the clinical parameter or endpoint is selected from one or any combination of the group consisting of disease progression, Unified Parkinson's Disease Rating Scale (UPDRS), Unified Dyskinesia Rating Scale (UDysRS), Parkinson's Disease Quality of Life Questionnaire (PDQ-39) score, Movement Disorder Society-Sponsored Unified Parkinson's Disease Rating Scale (MDS-UPDRS), changes from baseline of motor score as measured by Inertial Measurement Unit (IMU) on Finger taping (FT) and Pronation-supination movement of the hands (PSH), delay in time to clinically meaningful worsening of motor progression, levodopa's duration of effect (“on time”), Clinical Global Impression—Improvement (CGI-I), change from baseline in Zarit Burden Interview score (ZBI), EQ-5D summary index, total disease duration, patient cognitive status (MMSE), and change from baseline in fatigue. In the case of Huntington's disease, the clinical parameter or endpoint is selected from one or any combination of the group consisting of Unified Huntington's Disease Rating Scale (UHDRS), cognitive decline, psychiatric abnormalities, motor impairment, changes in baseline in striatal volume, Stroop word test, total motor score (TMS), bradykinesia, dystonia, Symbol Digit Modalities Test, University of Pennsylvania Smell Identification Test, emotion recognition, speeded tapping, paced tapping, the Trail Making Test, intracranial-corrected volumes (ICV), and the Everyday Cognition Rating Scale (ECOG). In the case of ALS, the clinically-relevant endpoint is selected from one or any combination of the group consisting of ALS Functional Rating Scale (ALSFRS-(R)), combined assessment of function and survival, time to death, time to tracheostomy or persistent assisted ventilation (DTP), forced vital capacity (% FVC), manual muscle test, maximum voluntary isometric contraction, duration of response, progression-free survival, time to progression of disease, and time-to-treatment failure. In the embodiments of the foregoing, the subject is a mammal selected from rodent, mouse, rat, non-human primate, and human. In the case of Alzheimer's disease, the clinical parameter or endpoint is selected from one or any combination of the group consisting of change in Alzheimer's Disease Assessment Scale-Cognitive subscale (ADAS-Cog₁₄) score, change in the Cohen-Mansfield Agitation Inventory (CMAI) score, change in the Alzheimer's Disease Cooperative Study-Instrumental Activities of Daily Living (ADCS-iADL) score, Clinical Dementia Rating Scale-Sum of Boxes (CDR-SB) score, DIAN Multivariate Cognitive Endpoint, Preclinical Alzheimer Cognitive Composite 5 (PACC5) score, Mini-Mental State Exam (MMSE) score, cognitive impairment, functional impairment, brain amyloid levels measured by amyloid positron emission tomography (PET), brain tau levels measured by PET, spinal fluid amyloid-β levels, and spinal fluid tau levels.

[0311] In some embodiments, the disclosure provides a method of treating a subject having a cancer in which PTBP1 protein in overexpressed. Non-limiting examples of such cancers include ovarian cancer, glioblastoma, bladder cancer, colon cancer and breast cancer. In some cases, the method of treating a subject having a cancer comprising modification of the PTBP1 gene in cells of a tumor by the administration of one or more therapeutically effective doses of a vector or XDP of an embodiment described herein, wherein the in vivo modification of the PTBP1 target nucleic acid sequence prevents or reduces tumorigenesis of the cells or results in stasis of an existing tumor in a subject. In the foregoing embodiment, the method results in stasis of an existing tumor for at least about 1 month, at least about 2 months, at least about 3 months, at least about 4 months, at least about 6 months, at least about 7 months, at least about 8 months, at least about 9 months, at least about 10 months, at least about 11 months, at least about 12 months, at least about 18 months, at least about 2 years, at least about 3 years, at least about 4 years, or at least about 5 years. In another embodiment, the method results in stasis of an existing tumor for at least about 1 month to about 5 years, at least about 6 months to about 4 years, or at least about 1 year to about 3 years. In other embodiments of the method of treating a subject having a cancer, the administering to the subject of a therapeutically effective amount of a vector or a XDP encoding or comprising a CasX-gRNA composition of any one of the embodiments described herein can produce a beneficial effect in helping to prevent, to treat (e.g., reduce the severity) or prevent the progression of the cancer or result in an improvement in one or more clinical parameters or endpoints associated with the disease in the subject selected from tumor shrinkage as a complete, partial or incomplete response; time-to-progression; time to treatment failure; biomarker response; progression-free survival; disease free-survival; time to recurrence; time to metastasis; time of overall survival; improvement of quality of life; and improvement of symptoms. In the embodiments of the foregoing, the subject is a mammal selected from rodent, mouse, rat, non-human primate, and human.

[0312] In some embodiments, the disclosure provides compositions comprising CasX and gRNA gene editing pairs, for use as a medicament for the treatment of a subject having a PTBP1-related disease. In the foregoing, the CasX can be a CasX variant comprising a sequence of SEQ ID NOS: 59, 72-99, 101-148, or 43662-43907, and the gRNA can be a gRNA variant comprising SEQ ID NOS: 2101-2285, 43571-43661 or 44045 having a targeting sequence complementary to a target nucleic acid sequence within the PTBP1 gene or that comprises a sequence selected from the group consisting of SEQ ID NOS: 492-2100 and 2286-43569. In the foregoing, the CasX can be a CasX variant comprising a sequence of SEQ ID NOS: 59, 72-99, 101-148, and 43662-43907 and the gRNA can be a gRNA variant comprising SEQ ID NOS: 2238-2285, 43571-43661 or 44045 having a targeting sequence complementary to a target nucleic acid sequence within the PTBP1 gene or that comprises a sequence selected from the group consisting of SEQ ID NOS: 492-2100 and 2286-43569. In the foregoing, the CasX can be a CasX variant comprising a sequence of SEQ ID NOS: 132-148 or 43662-43907, and the gRNA can be a gRNA variant comprising SEQ ID NOS: 2281-2285, 43571-43661,44045, or 44047 having a targeting sequence complementary to a target nucleic acid sequence within the PTBP1 gene or that comprises a sequence selected from the group consisting of SEQ ID NOS: 492-2100 and 2286-43569. In other embodiments, the disclosure provides compositions of vectors comprising or encoding the gene editing pairs of CasX and gRNA for use as a medicament for the treatment of a subject having a PTBP1 related disease.

### VII. Kits and Articles of Manufacture

[0313] In another aspect, provided herein are kits comprising the compositions of the embodiments described herein. In some embodiments, the kit comprises a CasX variant protein and one or a plurality of gRNA variants of any of the embodiments of the disclosure comprising a targeting sequence region specific for a PTBP1 gene, optionally a donor template, and a suitable container (for example a tube, vial or plate). In other embodiments, the kit comprises a nucleic acid encoding a CasX protein and one or a plurality of gRNA of any of the embodiments of the disclosure comprising a targeting sequence region specific for a PTBP1 gene, optionally a donor template, and a suitable container. In other embodiments, the kit comprises a vector comprising a nucleic acid encoding a CasX protein and one or a plurality of gRNA of any of the embodiments of the disclosure comprising a targeting sequence region specific for a PTBP1 gene, and a suitable container. In still other embodiments, the kit comprises a XDP comprising a CasX protein and one or a plurality of gRNA of any of the embodiments of the disclosure comprising a targeting sequence region specific for a PTBP1 gene, optionally a donor template, and a suitable container. In still other embodiments, the kit comprises a composition comprising a plurality of cells edited using the CasX systems described herein.

[0314] In some embodiments, the kit further comprises a buffer, a nuclease inhibitor, a protease inhibitor, a liposome, a therapeutic agent, a label, a label visualization reagent, or any combination of the foregoing. In some embodiments, the kit further comprises a pharmaceutically acceptable carrier, diluent or excipient.

[0315] In some embodiments, the kit comprises appropriate control compositions for gene modifying applications, and instructions for use.

[0316] The present description sets forth numerous exemplary configurations, methods, parameters, and the like. It should be recognized, however, that such description is not intended as a limitation on the scope of the present disclosure, but is instead provided as a description of exemplary embodiments.

### ENUMERATED EMBODIMENTS

[0317] The invention may be defined by reference to the following enumerated, illustrative embodiments.

### Set I

[0318] Embodiment 1. A composition comprising a Class 2 Type V CRISPR protein and a first guide nucleic acid (gNA), wherein the gNA comprises a targeting sequence complementary to a polypyrimidine tract-binding protein 1 (PTBP1) gene target nucleic acid sequence.

[0319] Embodiment 2. The composition of embodiment 1, wherein the gNA comprises a targeting sequence complementary to a target nucleic acid sequence selected from the group consisting of:
[0320] a. a PTBP1 intron;
[0321] b. a PTBP1 exon;
[0322] c. a PTBP1 intron-exon junction;
[0323] d. a PTBP1 regulatory element; and
[0324] e. an intergenic region.

[0325] Embodiment 3. The composition of embodiment 1, wherein the PTBP1 gene comprises a wild-type sequence.

[0326] Embodiment 4. The composition of any one of embodiments 1-3, wherein the gNA is a guide RNA (gRNA).

[0327] Embodiment 5. The composition of any one of embodiments 1-3, wherein the gNA is a guide DNA (gDNA).

[0328] Embodiment 6. The composition of any one of embodiments 1-3, wherein the gNA is a chimera comprising DNA and RNA.

[0329] Embodiment 7. The composition of any one of embodiments 1-6, wherein the gNA is a single-molecule gNA (sgNA).

[0330] Embodiment 8. The composition of any one of embodiments 1-6, wherein the gNA is a dual-molecule gNA (dgNA).

[0331] Embodiment 9. The composition of any one of embodiments 1-8, wherein the targeting sequence of the gNA comprises a sequence selected from the group consisting of the sequences of SEQ ID NOS: 415-457, 492-2100 and 2286-43569, or a sequence having at least about 65%, at least about 75%, at least about 85%, or at least about 95% identity thereto.

[0332] Embodiment 10. The composition of any one of embodiments 1-8, wherein the targeting sequence of the gNA comprises a sequence selected from the group consisting of the sequences of SEQ ID NOS: 415-457, 492-2100 and 2286-43569.

[0333] Embodiment 11. The composition of any one of embodiments 1-8, wherein the targeting sequence of the gNA comprises a sequence of SEQ ID NOS: 415-457, 492-2100 and 2286-43569 with a single nucleotide removed from the 3′ end of the sequence.

[0334] Embodiment 12. The composition of any one of embodiments 1-8, wherein the targeting sequence of the gNA comprises a sequence of SEQ ID NOS: 415-457, 492-2100 and 2286-43569 with two nucleotides removed from the 3′ end of the sequence.

[0335] Embodiment 13. The composition of any one of embodiments 1-8, wherein the targeting sequence of the gNA comprises a sequence of SEQ ID NOS: 415-457, 492-2100 and 2286-43569 with three nucleotides removed from the 3′ end of the sequence.

[0336] Embodiment 14. The composition of any one of embodiments 1-8, wherein the targeting sequence of the gNA comprises a sequence of SEQ ID NOS: 415-457, 492-2100 and 2286-43569 with four nucleotides removed from the 3′ end of the sequence.

[0337] Embodiment 15. The composition of any one of embodiments 1-8, wherein the targeting sequence of the gNA comprises a sequence of SEQ ID NOS: 415-457, 492-2100 and 2286-43569 with five nucleotides removed from the 3′ end of the sequence.

[0338] Embodiment 16. The composition of any one of embodiments 1-15, wherein the targeting sequence of the gNA is complementary to a sequence of a PTBP1 exon.

[0339] Embodiment 17. The composition of embodiment 16, wherein the targeting sequence of the gNA is complementary to a sequence selected from the group consisting of PTBP1 exon 1, PTBP1 exon 2, PTBP1 exon 3, PTBP1 exon 4, PTBP1 exon 5, PTBP1 exon 6, PTBP1 exon 7, PTBP1 exon 8, PTBP1 exon 9, PTBP1 exon 10, PTBP1 exon 11, PTBP1 exon 12, PTBP1 exon 13, PTBP1 exon 14, PTBP1 exon 15, and PTBP1 exon 16.

[0340] Embodiment 18. The composition of embodiment 17, wherein the targeting sequence of the gNA is complementary to a sequence selected from the group consisting of PTBP1 exon 1, PTBP1 exon 2, and PTBP1 exon 3.

[0341] Embodiment 19. The composition of any one of embodiments 1-18, further comprising a second gNA, wherein the second gNA has a targeting sequence complementary to a different or overlapping portion of the PTBP1 target nucleic acid compared to the targeting sequence of the gNA of the first gNA.

[0342] Embodiment 20. The composition of embodiment 19, wherein the second gNA has a targeting sequence complementary to the same exon targeted by the first gNA.

[0343] Embodiment 21. The composition of any one of embodiments 1-20, wherein the first or second gNA has a scaffold comprising a sequence having at least about 50%, at least about 60%, at least about 70%, at least about 80%, at least about 90%, at least about 95%, at least about 96%, at least about 97%, at least about 98%, at least about 99%, or 100% sequence identity to a sequence selected from the group consisting of SEQ ID NO: 4-16 and 2101-2285.

[0344] Embodiment 22. The composition of any one of embodiments 1-20, wherein the first or second gNA has a scaffold comprising a sequence selected from the group consisting of SEQ ID NOs:2101-2285.

[0345] Embodiment 23. The composition of any one of embodiments 1-20, wherein the first or second gNA has a scaffold consisting of a sequence selected from the group consisting of SEQ ID NOs:2101-2285.

[0346] Embodiment 24. The composition of any one of embodiments 1-20, wherein the first or second gNA scaffold comprises a sequence having at least one modification relative to a reference gNA sequence selected from the group consisting of SEQ ID NOS: 4-16.

[0347] Embodiment 25. The composition of embodiment 24, wherein the at least one modification of the reference gNA comprises at least one substitution, deletion, or substitution of a nucleotide of the reference gNA sequence.

[0348] Embodiment 26. The composition of any one of embodiments 1-25, wherein the first or second gNA is chemically modified.

[0349] Embodiment 27. The composition of any one of embodiments 1-26, wherein the Class 2 Type V CRISPR protein is a reference CasX protein having a sequence of any one of SEQ ID NOS: 1-3, a CasX variant protein having a sequence of Table 4, or a sequence having at least about 50%, at least about 60%, at least about 70%, at least about 80%, at least about 90%, or at least about 95%, or at least about 95%, or at least about 96%, or at least about 97%, or at least about 98%, or at least about 99% sequence identity thereto.

[0350] Embodiment 28. The composition of embodiment 27, wherein the Class 2 Type V CRISPR protein is a CasX variant protein comprising a sequence of SEQ ID NOS: 36-99, 101-148, 188, 190, 208, 210, 212, 214, 216-229, 240, 242, 244, 246, 248, 250, 252, 254, 256 or 258.

[0351] Embodiment 29. The composition of embodiment 27, wherein the CasX variant protein consists of a sequence of SEQ ID NOS: 36-99, 101-148, 188, 190, 208, 210, 212, 214, 216-229, 240, 242, 244, 246, 248, 250, 252, 254, 256 or 258.

[0352] Embodiment 30. The composition of embodiment 27, wherein the CasX variant protein comprises at least one modification relative to a reference CasX protein having a sequence selected from SEQ ID NOS:1-3.

[0353] Embodiment 31. The composition of embodiment 30, wherein the at least one modification comprises at least one amino acid substitution, deletion, or substitution in a domain of the CasX variant protein relative to the reference CasX protein.

[0354] Embodiment 32. The composition of embodiment 31, wherein the domain is selected from the group consisting of a non-target strand binding (NTSB) domain, a target strand loading (TSL) domain, a helical I domain, a helical II domain, an oligonucleotide binding domain (OBD), and a RuvC DNA cleavage domain.

[0355] Embodiment 33. The composition of any one of embodiments 27-32, wherein the CasX protein further comprises one or more nuclear localization signals (NLS).

[0356] Embodiment 34. The composition of embodiment 33, wherein the one or more NLS are selected from the group of sequences consisting of PKKKRKV (SEQ ID NO: 149), KRPAATKKAGQAKKKK (SEQ ID NO: 150), PAAKRVKLD (SEQ ID NO: 151), RQRRNELKRSP (SEQ ID NO: 152), NQSSNFGPMKGGNFGGRSSGPYGGGGQYFAKPRNQGGY (SEQ ID NO: 153), RMRIZFKNKGKDTAELRRRRVEVSVELRKAKKDEQILKRRNV (SEQ ID NO: 154), VSRKRPRP (SEQ ID NO: 155), PPKKARED (SEQ ID NO: 156), PQPKKKPL (SEQ ID NO: 185), SALIKKKKKMAP (SEQ ID NO: 157), DRLRR (SEQ ID NO: 158), PKQKKRK (SEQ ID NO: 159), RKLKKKIKKL (SEQ ID NO: 160), REKKKFLKRR (SEQ ID NO: 161), KRKGDEVDGVDEVAKKKSKK (SEQ ID NO: 162), RKCLQAGMNLEARKTKK (SEQ ID NO: 163), PRPRKIPR (SEQ ID NO: 164), PPRKKRTVV (SEQ ID NO: 165), NLSKKKKRKREK (SEQ ID NO: 166), RRPSRPFRKP (SEQ ID NO: 167), KRPRSPSS (SEQ ID NO: 168), KRGINDRNFWRGENERKTR (SEQ ID NO: 169), PRPPKMARYDN (SEQ ID NO: 170), KRSFSKAF (SEQ ID NO: 186), KLKIKRPVK (SEQ ID NO: 171), PKTRRRPRRSQRKRPPT (SEQ ID NO: 173), RRKKRRPRRKKRR (SEQ ID NO: 176), PKKKSRKPKKKSRK (SEQ ID NO: 177), HKKKHPDASVNFSEFSK (SEQ ID NO: 178), QRPGPYDRPQRPGPYDRP (SEQ ID NO: 179), LSPSLSPLLSPSLSPL (SEQ ID NO: 180), RGKGGKGLGKGGAKRHRK (SEQ ID NO: 181), PKRGRGRPKRGRGR (SEQ ID NO: 182), MSRRRKANPTKLSENAKKLAKEVEN (SEQ ID NO: 174), PKKKRKVPPPPAAKRVKLD (SEQ ID NO: 172), and PKKKRKVPPPPKKKRKV (SEQ ID NO: 184).

[0357] Embodiment 35. The composition of embodiment 33 or embodiment 34, wherein the one or more NLS are expressed at or near the C-terminus of the CasX protein.

[0358] Embodiment 36. The composition of embodiment 33 or embodiment 34, wherein the one or more NLS are expressed at or near the N-terminus of the CasX protein.

[0359] Embodiment 37. The composition of embodiment 33 or embodiment 34, comprising one or more NLS located at or near the N-terminus and at or near the C-terminus of the CasX protein.

[0360] Embodiment 38. The composition of any one of embodiments 27-37, wherein the CasX variant is capable of forming a ribonuclear protein complex (RNP) with a guide nucleic acid (gNA).

[0361] Embodiment 39. The composition of embodiment 39, wherein an RNP of the CasX variant protein and the gNA variant exhibit at least one or more improved characteristics as compared to an RNP of a reference CasX protein of SEQ ID NO: 1, SEQ ID NO: 2, or SEQ ID NO: 3 and a gNA comprising a sequence of SEQ ID NOs: 4-16.

[0362] Embodiment 40. The composition of embodiment 39, wherein the improved characteristic is selected from one or more of the group consisting of improved folding of the CasX variant; improved binding affinity to a guide nucleic acid (gNA); improved binding affinity to a target DNA; improved ability to utilize a greater spectrum of one or more PAM sequences, including ATC, CTC, GTC, or TTC, in the editing of target DNA; improved unwinding of the target DNA; increased editing activity; improved editing efficiency; improved editing specificity; increased nuclease activity; increased target strand loading for double strand cleavage; decreased target strand loading for single strand nicking; decreased off-target cleavage; improved binding of non-target DNA strand; improved protein stability; improved protein solubility; improved protein:gNA complex (RNP) stability; improved protein:gNA complex solubility; improved protein yield; improved protein expression; and improved fusion characteristics.

[0363] Embodiment 41. The composition of embodiment 39 or embodiment 40, wherein the improved characteristic of the RNP of the CasX variant protein and the gNA variant is at least about 1.1 to about 100-fold or more improved relative to the RNP of the reference CasX protein of SEQ ID NO: 1, SEQ ID NO: 2, or SEQ ID NO: 3 and the gNA comprising a sequence of SEQ ID NOs: 4-16.

[0364] Embodiment 42. The composition of embodiment 39 or embodiment 40, wherein the improved characteristic of the CasX variant protein is at least about 1.1, at least about 2, at least about 10, at least about 100-fold or more improved relative to the reference CasX protein of SEQ ID NO: 1, SEQ ID NO: 2, or SEQ ID NO: 3 and the gNA comprising a sequence of SEQ ID NOs: 4-16.

[0365] Embodiment 43. The composition of any one of embodiments 39-42, wherein the improved characteristic comprises editing efficiency, and the RNP of the CasX variant protein and the gNA variant comprises a 1.1 to 100-fold improvement in editing efficiency compared to the RNP of the reference CasX protein of SEQ ID NO: 2 and the gNA of SEQ ID NOs: 4-16.

[0366] Embodiment 44. The composition of any one of embodiments 38-43, wherein the RNP comprising the CasX variant and the gNA variant exhibits greater editing efficiency and/or binding of a target sequence in the target DNA when any one of the PAM sequences TTC, ATC, GTC, or CTC is located 1 nucleotide 5′ to the non-target strand of the protospacer having identity with the targeting sequence of the gNA in a cellular assay system compared to the editing efficiency and/or binding of an RNP comprising a reference CasX protein and a reference gNA in a comparable assay system.

[0367] Embodiment 45. The composition of embodiment 44, wherein the PAM sequence is TTC.

[0368] Embodiment The composition of embodiment 44, wherein the PAM sequence is ATC.

[0369] Embodiment The composition of embodiment 44, wherein the PAM sequence is CTC.

[0370] Embodiment 48. The composition of embodiment 44, wherein the PAM sequence is GTC.

[0371] Embodiment 49. The composition of any one of embodiments 44-48, wherein the increased binding affinity for the one or more PAM sequences is at least 1.5-fold greater compared to the binding affinity of any one of the CasX proteins of SEQ ID NOS: 1-3 for the PAM sequences.

[0372] Embodiment 50. The composition of any one of embodiments 38-49, wherein the RNP has at least a 5%, at least a 10%, at least a 15%, or at least a 20% higher percentage of cleavage-competent RNP compared to an RNP of the reference CasX and the gNA of SEQ ID NOs: 4-16.

[0373] Embodiment 51. The composition of any one of embodiments 27-50, wherein the CasX variant protein comprises a RuvC DNA cleavage domain having nickase activity.

[0374] Embodiment 52. The composition of any one of embodiments 27-50, wherein the CasX variant protein comprises a RuvC DNA cleavage domain having double-stranded cleavage activity.

[0375] Embodiment 53. The composition of any one of embodiments 1-38, wherein the CasX protein is a catalytically inactive CasX (dCasX) protein, and wherein the dCasX and the gNA retain the ability to bind to the PTBP1 target nucleic acid.

[0376] Embodiment The composition of embodiment 53, wherein the dCasX comprises a mutation at residues:
[0377] a. D672, E769, and/or D935 corresponding to the CasX protein of SEQ ID NO: 1; or
[0378] b. D659, E756 and/or D922 corresponding to the CasX protein of SEQ ID NO: 2.

[0379] Embodiment 55. The composition of embodiment 54, wherein the mutation is a substitution of alanine for the residue.

[0380] Embodiment 56. The composition of any one of embodiments 1-52, further comprising a donor template nucleic acid.

[0381] Embodiment 57. The composition of embodiment 56, wherein the donor template comprises a nucleic acid comprising at least a portion of a PTBP1 gene selected from the group consisting of a PTBP1 exon, a PTBP1 intron, a PTBP1 intron-exon junction, and a PTBP1 regulatory element.

[0382] Embodiment 58. The composition of embodiment 57, wherein the donor template sequence comprises one or more mutations relative to a corresponding portion of a wild-type PTBP1 gene.

[0383] Embodiment 59. The composition of embodiment 57 or embodiment 58, wherein the donor template comprises a nucleic acid comprising at least a portion of a PTBP1 exon selected from the group consisting of PTBP1 exon 1, PTBP1 exon 2, PTBP1 exon 3, PTBP1 exon 4, PTBP1 exon 5, PTBP1 exon 6, PTBP1 exon 7, PTBP1 exon 8, PTBP1 exon 9, PTBP1 exon 10, PTBP1 exon 11, PTBP1 exon 12, PTBP1 exon 13, PTBP1 exon 14, PTBP1 exon 15, and PTBP1 exon 16.

[0384] Embodiment 60. The composition of embodiment 59, wherein the donor template comprises a nucleic acid comprising at least a portion of a PTBP1 exon selected from the group consisting of PTBP1 exon 1, PTBP1 exon 2, and PTBP1 exon 3.

[0385] Embodiment 61. The composition of any one of embodiments 56-60, wherein the donor template ranges in size from 10-15,000 nucleotides.

[0386] Embodiment 62. The composition of any one of embodiments 56-61, wherein the donor template is a single-stranded DNA template or a single stranded RNA template.

[0387] Embodiment 63. The composition of any one of embodiments 56-61, wherein the donor template is a double-stranded DNA template.

[0388] Embodiment 64. The composition of any one of embodiments 56-63, wherein the donor template comprises homologous arms at or near the 5′ and 3′ ends of the donor template that are complementary to sequences flanking cleavage sites in the PTBP1 target nucleic acid introduced by the Class 2 Type V CRISPR protein.

[0389] Embodiment 65. A nucleic acid comprising the donor template of any one of embodiments 56-64.

[0390] Embodiment 66. A nucleic acid comprising a sequence that encodes the CasX of any one of embodiments 27-55.

[0391] Embodiment 67. A nucleic acid comprising a sequence that encodes the gNA of any one of embodiments 1-26.

[0392] Embodiment 68. The nucleic acid of embodiment 66, wherein the sequence that encodes the CasX protein is codon optimized for expression in a eukaryotic cell.

[0393] Embodiment 69. A vector comprising the gNA of any one of embodiments 1-26, the CasX protein of any one of embodiments 27-55, or the nucleic acid of any one of embodiments 65-68.

[0394] Embodiment 70. The vector of embodiment 69, wherein the vector further comprises a promoter.

[0395] Embodiment 71. The vector of embodiment 69 or embodiment 70, wherein the vector is selected from the group consisting of a retroviral vector, a lentiviral vector, an adenoviral vector, an adeno-associated viral (AAV) vector, a herpes simplex virus (HSV) vector, a virus-like particle (VLP), a plasmid, a minicircle, a nanoplasmid, a DNA vector, and an RNA vector.

[0396] Embodiment 72. The vector of embodiment 71, wherein the vector is an AAV vector.

[0397] Embodiment 73. The vector of embodiment 72, wherein the AAV vector is selected from AAV1, AAV2, AAV3, AAV4, AAV5, AAV6, AAV7, AAV8, AAV9, AAV10, AAV11, AAV12, AAV-Rh74, or AAVRh10.

[0398] Embodiment 74. The vector of embodiment 71, wherein the vector is a retroviral vector.

[0399] Embodiment 75. The vector of embodiment 71, wherein the vector is a VLP comprising one or more components of a gag polyprotein.

[0400] Embodiment 76. The vector of embodiment 75, wherein the one or more components of the gag polyprotein are selected from the group consisting of matrix protein (MA), nucleocapsid protein (NC), capsid protein (CA), and p1-p6 protein.

[0401] Embodiment 77. The vector of embodiment 75 or embodiment 76, comprising the CasX protein and the gNA.

[0402] Embodiment 78. The vector of embodiment 77, wherein the CasX protein and the gNA are associated together in an RNP.

[0403] Embodiment 79. The vector of any one of embodiments 76-78, further comprising the donor template.

[0404] Embodiment 80. A host cell comprising the vector of any one of embodiments 69-79.

[0405] Embodiment 81. The host cell of embodiment 80, wherein the host cell is selected from the group consisting of BHK, HEK293, HEK293T, NS0, SP2/0, YO myeloma cells, P3X63 mouse myeloma cells, PER, PER.C6, NIH3T3, COS, HeLa, CHO, and yeast cells.

[0406] Embodiment 82. A method of modifying a PTBP1 target nucleic acid sequence in a population of cells, the method comprising introducing into cells of the population:
[0407] a. the composition of any one of embodiments 1-64;
[0408] b. the nucleic acid of any one of embodiments 65-68;
[0409] c. the vector as in any one of embodiments 69-74;
[0410] d. the VLP of any one of embodiments 76-79; or
[0411] e. combinations of two or more of (a)-(d),
[0412] wherein the PTBP1 gene target nucleic acid sequence of the cells targeted by the first gNA is modified by the CasX protein.

[0413] Embodiment 83. The method of embodiment 82, wherein the modifying comprises introducing a single-stranded break in the PTBP1 gene target nucleic acid sequence of the cells of the population.

[0414] Embodiment 84. The method of embodiment 82, wherein the modifying comprises introducing a double-stranded break in the PTBP1 gene target nucleic acid sequence of the cells of the population.

[0415] Embodiment 85. The method of any one of embodiments 82-84, further comprising introducing into the cells of the population a second gNA or a nucleic acid encoding the second gNA, wherein the second gNA has a targeting sequence complementary to a different or overlapping portion of the PTBP1 gene target nucleic acid compared to the first gNA, and wherein introducing the second gNA results in an additional break in the PTBP1 target nucleic acid of the cells of the population.

[0416] Embodiment 86. The method of any one of embodiments 82-85, wherein the modifying comprises introducing an insertion, deletion, substitution, duplication, or inversion of one or more nucleotides in the PTBP1 gene of the cells of the population.

[0417] Embodiment 87. The method of any one of embodiments 82-86, wherein the method comprises insertion of the donor template into the break site(s) of the PTBP1 gene target nucleic acid sequence of the cells of the population.

[0418] Embodiment 88. The method of embodiment 87, wherein the insertion of the donor template is mediated by homology-directed repair (HDR) or homology-independent targeted integration (HITI).

[0419] Embodiment 89. The method of embodiment 87 or embodiment 88, wherein insertion of the donor template results in a knock-down or knock-out of the PTBP1 gene in the cells of the population.

[0420] Embodiment 90. The method of any one of embodiments 82-89, wherein the PTBP1 gene of the cells of the population is modified such that expression of the PTBP1 protein is reduced by at least about 10%, at least about 20%, at least about 30%, at least about 40%, at least about 50%, at least about 60%, at least about 70%, at least about 80%, or at least about 90% in comparison to cells in which the PTBP1 gene has not been modified.

[0421] Embodiment 91. The method of any one of embodiments 82-89, wherein the PTBP1 gene of the cells of the population is modified such that at least about 10%, at least about 20%, at least about 30%, at least about 40%, at least about 50%, at least about 60%, at least about 70%, at least about 80%, or at least about 90% of the cells do not express a detectable level of PTBP1 protein.

[0422] Embodiment 92. The method of any one of embodiments 82-91, wherein the cells are eukaryotic.

[0423] Embodiment 93. The method of embodiment 92, wherein the eukaryotic cells are selected from the group consisting of rodent cells, mouse cells, rat cells, and non-human primate cells.

[0424] Embodiment 94. The method of embodiment 92, wherein the eukaryotic cells are human cells.

[0425] Embodiment 95. The method of any one of embodiments 92-94, wherein the eukaryotic cells are selected from the group consisting of microglial cells, astrocytes, oligodendrocytes, and fibroblasts.

[0426] Embodiment 96. The method of embodiment 95, wherein the modification of the PTBP1 target nucleic acid sequence results in reprogramming of the eukaryotic cells into neurons.

[0427] Embodiment 97. The method of any one of embodiment 82-96, wherein the modification of the PTBP1 gene target nucleic acid sequence of the population of cells occurs in vitro or ex vivo.

[0428] Embodiment 98. The method of any one of embodiment 82-96, wherein the modification of the PTBP1 gene target nucleic acid sequence of the population of cells occurs in vivo in a subject.

[0429] Embodiment 99. The method of embodiment 98, wherein the subject is selected from the group consisting of a rodent, a mouse, a rat, and a non-human primate.

[0430] Embodiment 100. The method of embodiment 98, wherein the subject is a human.

[0431] Embodiment 101. The method of any one of embodiments 98-100, wherein the method comprises administering a therapeutically effective dose of an AAV vector to the subject.

[0432] Embodiment 102. The method of embodiment 101, wherein the AAV vector is administered to the subject at a dose of at least about 1×10⁵ vector genomes/kg (vg/kg), at least about 1×10⁶ vg/kg, at least about 1×10⁷ vg/kg, at least about 1×10⁸ vg/kg, at least about 1×10⁹ vg/kg, at least about 1×10¹⁰ vg/kg, at least about 1×10¹¹ vg/kg, at least about 1×10¹² vg/kg, at least about 1×10¹³ vg/kg, at least about 1×10¹⁴ vg/kg, at least about 1×10¹⁵ vg/kg, or at least about 1×10¹⁶ vg/kg.

[0433] Embodiment 103. The method of embodiment 101, wherein the AAV vector is administered to the subject at a dose of at least about 1×10⁵ vg/kg to about 1×10¹⁶ vg/kg, at least about 1×10⁶ vg/kg to about 1×10¹⁵ vg/kg, or at least about 1×10⁷ vg/kg to about 1×10¹⁴ vg/kg.

[0434] Embodiment 104. The method of any one of embodiments 98-100, wherein the method comprises administering a therapeutically effective dose of a VLP to the subject.

[0435] Embodiment 105. The method of embodiment 104, wherein the VLP is administered to the subject at a dose of at least about 1×10⁵ particles/kg, at least about 1×10⁶ particles/kg, at least about 1×10⁷ particles/kg at least about 1×10⁸ particles/kg, at least about 1×10⁹ particles/kg, at least about 1×10¹⁰ particles/kg, at least about 1×10¹¹ particles/kg, at least about 1×10¹² particles/kg, at least about 1×10¹³ particles/kg, at least about 1×10¹⁴ particles/kg, at least about 1×10¹⁵ particles/kg, at least about 1×10¹⁶ particles/kg.

[0436] Embodiment 106. The method of embodiment 104, wherein the VLP is administered to the subject at a dose of at least about 1×10⁵ particles/kg to about 1×10¹⁶ particles/kg, or at least about 1×10⁶ particles/kg to about 1×10¹⁵ particles/kg, or at least about 1×10⁷ particles/kg to about 1×10¹⁴ particles/kg.

[0437] Embodiment 107. The method of any one of embodiments 99-106, wherein the vector or VLP is administered to the subject by a route of administration selected from intraparenchymal, intravenous, intra-arterial, intracerebroventricular, intracisternal, intrathecal, intracranial, lumbar, intraperitoneal, or combinations thereof.

[0438] Embodiment 108. The method of any one of embodiments 82-107, further comprising contacting the PTBP1 gene target nucleic acid sequence of the population of cells with:
[0439] a. an additional CRISPR nuclease and a gNA targeting a different or overlapping portion of the PTBP1 target nucleic acid compared to the first gNA;
[0440] b. a polynucleotide encoding the additional CRISPR nuclease and the gNA of (a);
[0441] c. a vector comprising the polynucleotide of (b); or
[0442] d. a VLP comprising the additional CRISPR nuclease and the gNA of (a),
[0443] wherein the contacting results in modification of the PTBP1 gene at a different location in the sequence compared to the sequence targeted by the first gNA.

[0444] Embodiment 109. The method of embodiment 108, wherein the additional CRISPR nuclease is a CasX protein having a sequence different from the CasX protein of any of the preceding embodiments.

[0445] Embodiment 110. The method of embodiment 108, wherein the additional CRISPR nuclease is not a CasX protein.

[0446] Embodiment 111. The method of embodiment 110, wherein the additional CRISPR nuclease is selected from the group consisting of Cas9, Cas12a, Cas12b, Cas12c, Cas12d (CasY), Cas12J, Cas13a, Cas13b, Cas13c, Cas13d, CasX, CasY, Cas14, Cpf1, C2c1, Csn2, and sequence variants thereof.

[0447] Embodiment 112. A population of cells modified by the method of any one of embodiments 82-111, wherein the cells have been modified such that at least 70%, at least 75%, at least 80%, at least 85%, at least 90%, or at least 95% of the modified cells do not express a detectable level of PTBP1 protein.

[0448] Embodiment 113. A population of cells modified by the method of any one of embodiments 82-111, wherein the cells have been modified such that the expression of PTBP1 protein is reduced by at least 70%, at least 75%, at least 80%, at least 85%, at least 90%, or at least 95% compared to cells where the PTBP1 gene has not been modified.

[0449] Embodiment 114. A method of treating a PTBP1-related disease in a subject in need thereof, the method comprising administering to the subject a therapeutically effective amount of the cells of embodiment 112 or embodiment 113.

[0450] Embodiment 115. The method of embodiment 114, wherein the PTBP1-related disease is a neurologic disease or neurologic injury.

[0451] Embodiment 116. The method of embodiment 115, wherein the neurologic disease or neurologic injury is selected from the group consisting of Parkinson's disease, Huntington's disease, Alzheimer's, amyotrophic lateral sclerosis (ALS), traumatic brain injury, and traumatic spinal cord injury.

[0452] Embodiment 117. The method of any one of embodiments 114-116, wherein the cells are autologous with respect to the subject to be administered the cells.

[0453] Embodiment 118. The method of any one of embodiments 114-116, wherein the cells are allogeneic with respect to the subject to be administered the cells.

[0454] Embodiment 119. The method of any one of embodiments 114-118, wherein the cells or their progeny persist in the subject for at least one month, two month, three months, four months, five months, six months, seven months, eight months, nine months, ten months, eleven months, twelve months, thirteen months, fourteen month, fifteen months, sixteen months, seventeen months, eighteen months, nineteen months, twenty months, twenty-one months, twenty-two months, twenty-three months, two years, three years, four years, or five years after administration of the modified cells to the subject.

[0455] Embodiment 120. The method of any one of embodiments 114-119, wherein the method further comprises administering a chemotherapeutic agent.

[0456] Embodiment 121. The method of any one of embodiments 114-120, wherein the subject is selected from the group consisting of a rodent, a mouse, a rat, and a non-human primate.

[0457] Embodiment 122. The method of any one of embodiments 114-120, wherein the subject is a human.

[0458] Embodiment 123. A method of treating a PTBP1-related disease in a subject in need thereof, comprising modifying a PTBP1 gene in cells of the subject, the modifying comprising contacting said cells with a therapeutically effective dose of:
[0459] a. the composition of any one of embodiments 1-64;
[0460] b. the nucleic acid of any one of embodiments 65-68;
[0461] c. the vector as in any one of embodiments 69-74;
[0462] d. the VLP of any one of embodiments 75-79; or
[0463] e. combinations of two or more of (a)-(d),
[0464] wherein the PTBP1 gene of the cells targeted by the first gNA is modified by the CasX protein.

[0465] Embodiment 124. The method of embodiment 123, wherein the modifying comprises introducing a single-stranded break in the PTBP1 gene of the cells.

[0466] Embodiment 125. The method of embodiment 123, wherein the modifying comprises introducing a double-stranded break in the PTBP1 gene of the cells.

[0467] Embodiment 126. The method of any one of embodiments 123-125, further comprising introducing into the cells of the subject a second gNA or a nucleic acid encoding the second gNA, wherein the second gNA has a targeting sequence complementary to a different or overlapping portion of the target nucleic acid compared to the first gNA, resulting in an additional break in the PTBP1 target nucleic acid of the cells of the subject.

[0468] Embodiment 127. The method of any one of embodiments 123-126, wherein the modifying comprises introducing an insertion, deletion, substitution, duplication, or inversion of one or more nucleotides in the PTBP1 gene of the cells.

[0469] Embodiment 128. The method of embodiment 127, wherein the modifying results in a knock-down or knock-out of the PTBP1 gene in the modified cells of the subject.

[0470] Embodiment 129. The method of any one of embodiments 123-126, wherein the method comprises insertion of the donor template into the break site(s) of the PTBP1 gene target nucleic acid sequence of the cells.

[0471] Embodiment 130. The method of embodiment 129, wherein the insertion of the donor template is mediated by homology-directed repair (HDR) or homology-independent targeted integration (HITI).

[0472] Embodiment 131. The method of embodiment 129 or embodiment 130, wherein insertion of the donor template results in a knock-down or knock-out of the PTBP1 gene in the modified cells of the subject.

[0473] Embodiment 132. The method of any one of embodiments 123-131, wherein the PTBP1 gene of the cells are modified such that expression of the PTBP1 protein by the modified cells is reduced by at least about 10%, at least about 20%, at least about 30%, at least about 40%, at least about 50%, at least about 60%, at least about 70%, at least about 80%, or at least about 90% in comparison to cells that have not been modified.

[0474] Embodiment 133. The method of any one of embodiments 123-131, wherein the PTBP1 gene of the cells of the subject are modified such that at least 70%, at least 75%, at least 80%, at least 85%, at least 90%, or at least 95% of the modified cells do not express a detectable level of PTBP1 protein.

[0475] Embodiment 134. The method of any one of embodiments 123-133, wherein the PTBP1-related disease is a neurologic disease or neurologic injury.

[0476] Embodiment 135. The method of embodiment 134, wherein the neurologic disease or neurologic injury is selected from the group consisting of Parkinson's disease, Huntington's disease, Alzheimer's, amyotrophic lateral sclerosis (ALS), traumatic brain injury, and traumatic spinal cord injury.

[0477] Embodiment 136. The method of any one of embodiments 123-135, wherein the cells modified by the method are selected from the group consisting of microglial cells, astrocytes, oligodendrocytes, and fibroblasts.

[0478] Embodiment 137. The method of embodiment 136, wherein the cells are reprogrammed into functional neurons.

[0479] Embodiment 138. The method of any one of embodiments 123-133, wherein the PTBP1-related disease is a cancer.

[0480] Embodiment 139. The method of embodiment 138, wherein the cancer is selected from the group consisting of ovarian cancer, glioblastoma, bladder cancer, colon cancer and breast cancer.

[0481] Embodiment 140. The method of embodiment 138 or embodiment 139, wherein the modification of the PTBP1 gene results in prevention or reduction of tumorigenesis of the cells.

[0482] Embodiment The method of embodiment 138 or embodiment 139, wherein the modification of the PTBP1 target nucleic acid sequence results in stasis of an existing tumor in a subject.

[0483] Embodiment 142. The method of any one of embodiments 123-141, wherein the subject is selected from the group consisting of rodent, mouse, rat, and non-human primate.

[0484] Embodiment 143. The method of any one of embodiments 123-141, wherein the subject is a human.

[0485] Embodiment 144. The method of any one of embodiments 123-143, wherein the vector is AAV and is administered to the subject at a dose of at least about 1×10⁵ vector genomes/kg (vg/kg), at least about 1×10⁶ vg/kg, at least about 1×10⁷ vg/kg, at least about 1×10⁸ vg/kg, at least about 1×10⁹ vg/kg, at least about 1×10¹⁰ vg/kg, at least about 1×10¹¹ vg/kg, at least about 1×10¹² vg/kg, at least about 1×10¹³ vg/kg, at least about 1×10¹⁴ vg/kg, at least about 1×10¹⁵ vg/kg, or at least about 1×10¹⁶ vg/kg.

[0486] Embodiment 145. The method of any one of embodiments 123-143, wherein the vector is AAV and is administered to the subject at a dose of at least about 1×10⁵ vg/kg to about 1×10¹⁶ vg/kg, at least about 1×10⁶ vg/kg to about 1×10¹⁵ vg/kg, or at least about 1×10⁷ vg/kg to about 1×10¹⁴ vg/kg.

[0487] Embodiment 146. The method of any one of embodiments 123-143, wherein the VLP is administered to the subject at a dose of at least about 1×10⁵ particles/kg, at least about 1×10⁶ particles/kg, at least about 1×10⁷ particles/kg at least about 1×10⁸ particles/kg, at least about 1×10⁹ particles/kg, at least about 1×10¹⁰ particles/kg, at least about 1×10¹¹ particles/kg, at least about 1×10¹² particles/kg, at least about 1×10¹³ particles/kg, at least about 1×10¹⁴ particles/kg, at least about 1×10¹⁵ particles/kg, at least about 1×10¹⁶ particles/kg.

[0488] Embodiment 147. The method of any one of embodiments 123-143, wherein the VLP is administered to the subject at a dose of at least about 1×10⁵ particles/kg to about 1×10¹⁶ particles/kg, or at least about 1×10⁶ particles/kg to about 1×10¹⁵ particles/kg, or at least about 1×10⁷ particles/kg to about 1×10¹⁴ particles/kg.

[0489] Embodiment 148. The method of any one of embodiments 123-147, wherein the vector or VLP is administered to the subject by a route of administration selected from intraparenchymal, intravenous, intra-arterial, intracerebroventricular, intracisternal, intrathecal, intracranial, lumbar, intraperitoneal, or combinations thereof.

[0490] Embodiment 149. The method of any one of embodiments 121-148, wherein the method results in improvement in at least one clinically-relevant endpoint in the subject.

[0491] 150. The method of embodiment 149, wherein the disease is Parkinson's disease and the clinically-relevant endpoint is selected from the group consisting of disease progression, Unified Parkinson's Disease Rating Scale (UPDRS), Unified Dyskinesia Rating Scale (UDysRS), Parkinson's Disease Quality of Life Questionnaire (PDQ-39) score, Movement Disorder Society-Sponsored Unified Parkinson's Disease Rating Scale (MDS-UPDRS), changes from baseline of motor score as measured by Inertial Measurement Unit (IMU) on Finger taping (FT) and Pronation-supination movement of the hands (PSH), delay in time to clinically meaningful worsening of motor progression, levodopa's duration of effect (“on time”), Clinical Global Impression—Improvement (CGI-I), change from baseline in Zarit Burden Interview score (ZBI), EQ-5D summary index, total disease duration, patient cognitive status (MMSE), and change from baseline in fatigue.

[0492] Embodiment 151. The method of embodiment 149, wherein the disease is Huntington's disease and the clinically-relevant endpoint is selected from the group consisting of Unified Huntington's Disease Rating Scale (UHDRS), cognitive decline, psychiatric abnormalities, motor impairment, changes in baseline in striatal volume, Stroop word test, total motor score (TMS), bradykinesia, dystonia, Symbol Digit Modalities Test, University of Pennsylvania Smell Identification Test, emotion recognition, speeded tapping, paced tapping, the Trail Making Test, intracranial-corrected volumes (ICV), and the Everyday Cognition Rating Scale (ECOG).

[0493] Embodiment 152. The method of embodiment 149, wherein the disease is ALS and the clinically-relevant endpoint is selected from the group consisting of ALS Functional Rating Scale (ALSFRS-(R)), combined assessment of function and survival, time to death, time to tracheostomy, time to persistent assisted ventilation (DTP), forced vital capacity (% FVC), manual muscle test, maximum voluntary isometric contraction, duration of response, progression-free survival, time to progression of disease, and time-to-treatment failure.

[0494] Embodiment 153. The method of embodiment 149, wherein the disease is Alzheimer's disease and the clinically-relevant endpoint is selected from the group consisting of change in Alzheimer's Disease Assessment Scale-Cognitive subscale (ADAS-Cog14) score, change in the Cohen-Mansfield Agitation Inventory (CMAI) score, change in the Alzheimer's Disease Cooperative Study-Instrumental Activities of Daily Living (ADCS-iADL) score, Clinical Dementia Rating Scale-Sum of Boxes (CDR-SB) score, DIAN Multivariate Cognitive Endpoint, Preclinical Alzheimer Cognitive Composite 5 (PACC5) score, Mini-Mental State Exam (MMSE) score, cognitive impairment, functional impairment, brain amyloid levels measured by amyloid positron emission tomography (PET), brain tau levels measured by PET, spinal fluid amyloid-β levels, and spinal fluid tau levels.

[0495] Embodiment 154. The method of embodiment 149, wherein the disease is cancer and the clinically-relevant endpoint is selected from the group consisting of tumor shrinkage as a complete, partial or incomplete response; time-to-progression; time to treatment failure; biomarker response; progression-free survival; disease free-survival; time to recurrence; time to metastasis; time of overall survival; improvement of quality of life; and improvement of symptoms.

[0496] Embodiment 155. The composition of any one of embodiments 1-64, the nucleic acid of any one of embodiments 65-68, the vector of any one of 69-74, the VLP of any one of embodiments 75-79, the host cell of embodiment 80 or embodiment 81, or the population of cells of embodiment 112-113, for use as a medicament for the treatment of a PTBP1 related disease.

[0497] Embodiment 156. The composition of embodiment 1, wherein the target nucleic acid sequence is complementary to a non-target strand sequence located 1 nucleotide 3′ of a protospacer adjacent motif (PAM) sequence.

[0498] Embodiment 157. The composition of embodiment 156, wherein the PAM sequence comprises a TC motif.

[0499] Embodiment 158. The composition of embodiment 157, wherein the PAM sequence comprises ATC, GTC, CTC or TTC.

[0500] Embodiment 159. The composition of any one of embodiments 156-158, wherein the Class 2 Type V CRISPR protein comprises a RuvC domain.

[0501] Embodiment 160. The composition of embodiment 159, wherein the RuvC domain generates a staggered double-stranded break in the target nucleic acid sequence.

[0502] Embodiment 161. The composition of any one of embodiments 156-160, wherein the Class 2 Type V CRISPR protein does not comprise an HNH nuclease domain.

### Set II

[0503] Embodiment 1. A system comprising a Class 2, Type V CRISPR protein and a first guide ribonucleic acid (gRNA), wherein the gRNA comprises a targeting sequence complementary to a polypyrimidine tract-binding protein 1 (PTBP1) gene target nucleic acid sequence.

[0504] Embodiment 2. The system of embodiment 1, wherein the gRNA comprises a targeting sequence complementary to a target nucleic acid sequence selected from the group consisting of:
[0505] a. a PTBP1 intron;
[0506] b. a PTBP1 exon;
[0507] c. a PTBP1 intron-exon junction;
[0508] d. a PTBP1 regulatory element; and
[0509] e. an intergenic region.

[0510] Embodiment 3. The system of embodiment 1 or embodiment 2, wherein the PTBP1 gene comprises a wild-type sequence.

[0511] Embodiment 4. The system of any one of embodiments 1-3, wherein the gRNA is a guide RNA (gRNA).

[0512] Embodiment 5. The system of any one of embodiments 1-3, wherein the gRNA is a chimera comprising DNA and RNA.

[0513] Embodiment 6. The system of any one of embodiments 1-5, wherein the gRNA is a single-molecule gRNA (sgRNA).

[0514] Embodiment 7. The system of any one of embodiments 1-5, wherein the gRNA is a dual-molecule gRNA (dgRNA).

[0515] Embodiment 8. The system of any one of embodiments 1-7, wherein the targeting sequence of the gRNA comprises a sequence selected from the group consisting of the sequences of SEQ ID NOS: 492-2100 and 2286-43569, or a sequence having at least about 65%, at least about 75%, at least about 85%, or at least about 95% identity thereto.

[0516] Embodiment 9. The system of any one of embodiments 1-7, wherein the targeting sequence of the gRNA comprises a sequence selected from the group consisting of the sequences of SEQ ID NOS: 492-2100 and 2286-43569.

[0517] Embodiment 10. The system of any one of embodiments 1-7, wherein the targeting sequence of the gRNA comprises a sequence of SEQ ID NOS: 492-2100 and 2286-43569 with a single nucleotide removed from the 3′ end of the sequence.

[0518] Embodiment 11. The system of any one of embodiments 1-7, wherein the targeting sequence of the gRNA comprises a sequence of SEQ ID NOS: 492-2100 and 2286-43569 with two nucleotides removed from the 3′ end of the sequence.

[0519] Embodiment 12. The system of any one of embodiments 1-7, wherein the targeting sequence of the gRNA comprises a sequence of SEQ ID NOS: 492-2100 and 2286-43569 with three nucleotides removed from the 3′ end of the sequence.

[0520] Embodiment 13. The system of any one of embodiments 1-7, wherein the targeting sequence of the gRNA comprises a sequence of SEQ ID NOS: 492-2100 and 2286-43569 with four nucleotides removed from the 3′ end of the sequence.

[0521] Embodiment 14. The system of any one of embodiments 1-7, wherein the targeting sequence of the gRNA comprises a sequence of SEQ ID NOS: 492-2100 and 2286-43569 with five nucleotides removed from the 3′ end of the sequence.

[0522] Embodiment 15. The system of any one of embodiments 1-7, wherein the targeting sequence of the gRNA comprises a sequence of SEQ ID NOS: 37971-37979, 38027, 38136, 38137, 38152-38158, 38160, 38162-38174, 38176, 38177, 38181, 38195, 38196, 38198, 38199, 38253-38256, 38259-38267, 38306 and 38311-38353.

[0523] Embodiment 16. The system of embodiment 15, wherein the targeting sequence of the gRNA is complementary to a sequence selected from the group consisting of PTBP1 exon 1, PTBP1 exon 2, PTBP1 exon 3, PTBP1 exon 4, PTBP1 exon 5, PTBP1 exon 6, PTBP1 exon 7, PTBP1 exon 8, PTBP1 exon 9, PTBP1 exon 10, PTBP1 exon 11, PTBP1 exon 12, PTBP1 exon 13, PTBP1 exon 14, PTBP1 exon 15, and PTBP1 exon 16.

[0524] Embodiment 17. The system of embodiment 16, wherein the targeting sequence of the gRNA is complementary to a sequence selected from the group consisting of PTBP1 exon 1, PTBP1 exon 2, and PTBP1 exon 3.

[0525] Embodiment 18. The system of any one of embodiments 1-17, further comprising a second gRNA, wherein the second gRNA has a targeting sequence complementary to a different or overlapping portion of the PTBP1 target nucleic acid compared to the targeting sequence of the gRNA of the first gRNA.

[0526] Embodiment 19. The system of embodiment 18, wherein the second gRNA has a targeting sequence complementary to the same exon targeted by the first gRNA.

[0527] Embodiment 20. The system of embodiment 18 or embodiment 19, wherein the first or second gRNA scaffold comprises a sequence having at least one modification relative to a reference gRNA sequence selected from the group consisting of SEQ ID NOS: 4-16.

[0528] Embodiment 21. The system of embodiment 20, wherein the at least one modification of the reference gRNA comprises;
[0529] a. at least one nucleotide substitution in a region of the gRNA variant;
[0530] b. at least one nucleotide deletion in a region of the gRNA variant;
[0531] c. at least one nucleotide insertion in a region of the gRNA variant;
[0532] d. a substitution of all or a portion of a region of the gRNA variant;
[0533] e. a deletion of all or a portion of a region of the gRNA variant; or
[0534] f. any combination of (a)-(e).

[0535] Embodiment 22. The system of embodiment 21, wherein the modified region of the gRNA variant is selected from the group consisting of extended stem loop, scaffold stem loop, triplex, and pseudoknot.

[0536] Embodiment 23. The gRNA variant of embodiment 22, wherein the scaffold stem further comprises a bubble.

[0537] Embodiment 24. The gRNA variant of embodiment 22 or embodiment 23, wherein the triplex further comprises a loop region.

[0538] Embodiment 25. The gRNA variant of any one of embodiments 21-24, wherein the scaffold further comprises a 5′ unstructured region.

[0539] Embodiment 26. The gRNA variant of any one of embodiments 21-25, wherein the at least one modification comprises:
[0540] a. a substitution of 1 to 15 consecutive or non-consecutive nucleotides in the gRNA variant in one or more regions;
[0541] b. a deletion of 1 to 10 consecutive or non-consecutive nucleotides in the gRNA variant in one or more regions;
[0542] c. an insertion of 1 to 10 consecutive or non-consecutive nucleotides in the gRNA variant in one or more regions;
[0543] d. a substitution of the scaffold stem loop or the extended stem loop with an RNA stem loop sequence from a heterologous RNA source; or
[0544] e. any combination of (a)-(d).

[0545] Embodiment 27. The gRNA variant of any one of embodiments 21-26, wherein the heterologous extended stem loop region comprises at least 10, at least 20, at least 100, at least 500, at least 1000, or at least 10,000 nucleotides.

[0546] Embodiment 28. The gRNA variant of embodiment 27, wherein the heterologous extended stem loop sequence increases the stability of the gRNA.

[0547] Embodiment 29. The gRNA variant of embodiment 27 or embodiment 28, wherein the heterologous RNA stem loop sequence is selected from one or more of MS2 hairpin, Qβ hairpin, U1 hairpin II, Uvsx, PP7 stem loop, or Rev Response Element (RRE), or a sequence variant thereof.

[0548] Embodiment 30. The gRNA variant of embodiment 29, wherein the heterologous RNA stem loop is capable of binding a protein, an RNA structure, a DNA sequence, or a small molecule.

[0549] Embodiment 31. The system of any one of embodiments 1-30, wherein the first or second gRNA has a scaffold comprising a sequence having at least about 50%, at least about 60%, at least about 70%, at least about 80%, at least about 90%, at least about 95%, at least about 96%, at least about 97%, at least about 98%, at least about 99%, or 100% sequence identity to a sequence selected from the group consisting of SEQ ID NOS: 2238-2285, 43571-43661, 44045 and 44047.

[0550] Embodiment 32. The system of any one of embodiments 1-30, wherein the first or second gRNA has a scaffold comprising a sequence selected from the group consisting of SEQ ID NOs: 2238-2285, 43571-43661, 44045 and 44047.

[0551] Embodiment 33. The system of any one of embodiments 1-30, wherein the first or second gRNA has a scaffold consisting of a sequence selected from the group consisting of SEQ ID NOs: 2238-2285, 43571-43661, 44045 and 44047.

[0552] Embodiment 34. The system of any one of embodiments 1-33, wherein the Class 2, Type V CRISPR protein is a CasX variant protein having at least one modification relative to a reference CasX protein having a sequence selected from the group consisting of SEQ ID NOS: 1-3 wherein the CasX variant exhibits at least one improved characteristic as compared to the reference CasX protein.

[0553] Embodiment 35. The system of embodiment 34, wherein the at least one modification comprises at least one amino acid substitution, deletion, or substitution in a domain of the CasX variant protein relative to the reference CasX protein.

[0554] Embodiment 36. The system of embodiment 35, wherein the domain is selected from the group consisting of a non-target strand binding (NTSB) domain, a target strand loading (TSL) domain, a helical I domain, a helical II domain, an oligonucleotide binding domain (OBD), and a RuvC DNA cleavage domain.

[0555] Embodiment 37. The system of any one of embodiments 34-36, wherein the CasX variant comprises an NTSB domain derived from SEQ ID NO: 1 and TSL, helical I, helical II domain, OBD, and RuvC domains derived from SEQ ID NO: 2.

[0556] Embodiment 38. The system of embodiment 37, wherein the CasX variant comprises the sequence of SEQ ID NO: 127.

[0557] Embodiment 39. The system of embodiment 37, wherein the CasX variant comprises a helical 1B domain derived from SEQ ID NO: 1

[0558] Embodiment 40. The system of embodiment 39, wherein the CasX variant comprises the sequence of SEQ ID NOS: 132-148 or 43662-43907.

[0559] Embodiment 41. The system of any one of embodiments 34-36, wherein the Class 2, Type V CRISPR protein is a CasX variant protein comprising a sequence selected from the group consisting of SEQ ID NOS: 59, 72-99, 101-148, and 43662-43907, or a sequence having at least about 50%, at least about 60%, at least about 70%, at least about 80%, at least about 90%, or at least about 95%, or at least about 95%, or at least about 96%, or at least about 97%, or at least about 98%, or at least about 99% sequence identity thereto.

[0560] Embodiment 42. The system of any one of embodiments 34-36, wherein the Class 2, Type V CRISPR protein is a CasX variant protein comprising a sequence selected from the group consisting of SEQ ID NOS: 59, 72-99, 101-148, and 43662-43907.

[0561] Embodiment 43. The system of any one of embodiments 34-36, wherein the CasX variant protein consists of a sequence selected from the group consisting of SEQ ID NOS: 59, 72-99, 101-148, and 43662-43907.

[0562] Embodiment 44. The system of any one of embodiments 34-43, wherein the CasX variant protein further comprises one or more nuclear localization signals (NLS).

[0563] Embodiment 45. The system of embodiment 44, wherein the one or more NLS are selected from the group of sequences consisting of PKKKRKV (SEQ ID NO: 149), KRPAATKKAGQAKKKK (SEQ ID NO: 150), PAAKRVKLD (SEQ ID NO: 151), RQRRNELKRSP (SEQ ID NO: 152), NQSSNFGPMKGGNFGGRSSGPYGGGGQYFAKPRNQGGY (SEQ ID NO: 153), RMRIZFKNKGKDTAELRRRRVEVSVELRKAKKDEQILKRRNV (SEQ ID NO: 154), VSRKRPRP (SEQ ID NO: 155), PPKKARED (SEQ ID NO: 156), PQPKKKPL (SEQ ID NO: 185), SALIKKKKKMAP (SEQ ID NO: 157), DRLRR (SEQ ID NO: 158), PKQKKRK (SEQ ID NO: 159), RKLKKKIKKL (SEQ ID NO: 160), REKKKFLKRR (SEQ ID NO: 161), KRKGDEVDGVDEVAKKKSKK (SEQ ID NO: 162), RKCLQAGMNLEARKTKK (SEQ ID NO: 163), PRPRKIPR (SEQ ID NO: 164), PPRKKRTVV (SEQ ID NO: 165), NLSKKKKRKREK (SEQ ID NO: 166), RRPSRPFRKP (SEQ ID NO: 167), KRPRSPSS (SEQ ID NO: 168), KRGINDRNFWRGENERKTR (SEQ ID NO: 169), PRPPKMARYDN (SEQ ID NO: 170), KRSFSKAF (SEQ ID NO: 186), KLKIKRPVK (SEQ ID NO: 171), PKTRRRPRRSQRKRPPT (SEQ ID NO: 173), RRKKRRPRRKKRR (SEQ ID NO: 176), PKKKSRKPKKKSRK (SEQ ID NO: 177), HKKKHPDASVNFSEFSK (SEQ ID NO: 178), QRPGPYDRPQRPGPYDRP (SEQ ID NO: 179), LSPSLSPLLSPSLSPL (SEQ ID NO: 180), RGKGGKGLGKGGAKRHRK (SEQ ID NO: 181), PKRGRGRPKRGRGR (SEQ ID NO: 182), MSRRRKANPTKLSENAKKLAKEVEN (SEQ ID NO: 174), PKKKRKVPPPPAAKRVKLD (SEQ ID NO: 172), and PKKKRKVPPPPKKKRKV (SEQ ID NO: 184).

[0564] Embodiment 46. The system of embodiment 44 or embodiment 45, wherein the one or more NLS are located at or near the C-terminus of the CasX variant protein.

[0565] Embodiment 47. The system of embodiment 44 or embodiment 45, wherein the one or more NLS are located at or near the N-terminus of the CasX variant protein.

[0566] Embodiment 48. The system of embodiment 44 or embodiment 45, comprising one or more NLS located at or near the N-terminus and at or near the C-terminus of the CasX variant protein.

[0567] Embodiment 49. The system of any one of embodiments 34-48, wherein the CasX variant is capable of forming a ribonuclear protein complex (RNP) with a gRNA.

[0568] Embodiment 50. The system of embodiment 50, wherein an RNP of the CasX variant protein and the gRNA variant exhibit at least one or more improved characteristics as compared to an RNP of a reference CasX protein of SEQ ID NO: 1, SEQ ID NO: 2, or SEQ ID NO: 3 and a gRNA comprising a sequence of SEQ ID NOs: 4-16.

[0569] Embodiment 51. The system of embodiment 50, wherein the improved characteristic is selected from one or more of the group consisting of improved folding of the CasX variant; improved binding affinity to a guide ribonucleic acid (gRNA); improved binding affinity to a target DNA; improved ability to utilize a greater spectrum of one or more PAM sequences, including ATC, CTC, GTC, or TTC, in the editing of target DNA; improved unwinding of the target DNA; increased editing activity; improved editing efficiency; improved editing specificity; increased nuclease activity; increased target strand loading for double strand cleavage; decreased target strand loading for single strand nicking; decreased off-target cleavage; improved binding of non-target DNA strand; improved protein stability; improved protein solubility; improved protein:gRNA complex (RNP) stability; and improved fusion characteristics.

[0570] Embodiment 52. The system of embodiment 50 or embodiment 51, wherein the improved characteristic of the RNP of the CasX variant protein and the gRNA variant is at least about 1.1 to about 100-fold or more improved relative to the RNP of the reference CasX protein of SEQ ID NO: 1, SEQ ID NO: 2, or SEQ ID NO: 3 and the gRNA comprising a sequence of SEQ ID NOs: 4-16.

[0571] Embodiment 53. The system of embodiment 50 or embodiment 51, wherein the improved characteristic of the CasX variant protein is at least about 1.1, at least about 2, at least about 10, at least about 100-fold or more improved relative to the reference CasX protein of SEQ ID NO: 1, SEQ ID NO: 2, or SEQ ID NO: 3 and the gRNA comprising a sequence of SEQ ID NOs: 4-16.

[0572] Embodiment 54. The system of any one of embodiments 50-53, wherein the improved characteristic comprises editing efficiency, and the RNP of the CasX variant protein and the gRNA variant comprises a 1.1 to 100-fold improvement in editing efficiency compared to the RNP of the reference CasX protein of SEQ ID NO: 2 and the gRNA of SEQ ID NOs: 4-16.

[0573] Embodiment 55. The system of any one of embodiments 49-54, wherein the RNP comprising the CasX variant and the gRNA variant exhibits greater editing efficiency and/or binding of a target sequence in the target DNA when any one of the PAM sequences TTC, ATC, GTC, or CTC is located 1 nucleotide 5′ to the non-target strand of the protospacer having identity with the targeting sequence of the gRNA in a cellular assay system compared to the editing efficiency and/or binding of an RNP comprising a reference CasX protein and a reference gRNA in a comparable assay system.

[0574] Embodiment 56. The system of embodiment 55, wherein the PAM sequence is TTC.

[0575] Embodiment 57. The system of embodiment 55, wherein the PAM sequence is ATC.

[0576] Embodiment 58. The system of embodiment 55, wherein the PAM sequence is CTC.

[0577] Embodiment 59. The system of embodiment 55, wherein the PAM sequence is GTC.

[0578] Embodiment 60. The system of any one of embodiments 55-59, wherein the increased binding affinity for the one or more PAM sequences is at least 1.5-fold greater compared to the binding affinity of any one of the reference CasX proteins of SEQ ID NOS: 1-3 for the PAM sequences.

[0579] Embodiment 61. The system of any one of embodiments 49-60, wherein the CasX variant and the gRNA variant are able to form RNP having at least about a 5%, at least about a 10%, at least about a 15%, or at least about a 20% higher percentage of cleavage-competent conformation compared to an RNP of any one of the reference CasX proteins of SEQ ID NOS: 1-3 and the gRNA of SEQ ID NOs: 4-16.

[0580] Embodiment 62. The system of any one of embodiments 49-61, wherein the RNP comprising the CasX variant and the gRNA variant exhibit a cleavage rate for the target nucleic acid in a timed in vitro assay that is at least about 5-fold, at least about 10-fold, or at least about 20-fold higher compared to an RNP of any one of the reference CasX proteins of SEQ ID NOS: 1-3 and the gRNA of SEQ ID NOs: 4-16 in a comparable assay.

[0581] Embodiment 63. The system of any one of embodiments 49-62, wherein the RNP comprising the CasX variant and the gRNA variant exhibit higher percent editing of the target nucleic acid in a timed in vitro assay that is at least about 5-fold, at least about 10-fold, at least about 20-fold, or at least about 100-fold higher compared to an RNP of any one of the reference CasX proteins of SEQ ID NOS: 1-3 and the gRNA of SEQ ID NOs: 4-16 in a comparable assay.

[0582] Embodiment 64. The system of any one of embodiments 34-63, wherein the CasX variant protein comprises a RuvC DNA cleavage domain having nickase activity.

[0583] Embodiment 65. The system of any one of embodiments 34-63, wherein the CasX variant protein comprises a RuvC DNA cleavage domain having double-stranded cleavage activity.

[0584] Embodiment 66. The system of any one of embodiments 34-49, wherein the CasX variant protein is a catalytically inactive CasX variant protein (dCasX), and wherein the dCasX and the gRNA retain the ability to bind to the PTBP1 target nucleic acid.

[0585] Embodiment 67. The system of embodiment 66, wherein the dCasX comprises a mutation at residues:
[0586] a. D672, E769, and/or D935 corresponding to the CasX protein of SEQ ID NO: 1; or
[0587] b. D659, E756 and/or D922 corresponding to the CasX protein of SEQ ID NO: 2.

[0588] Embodiment 68. The system of embodiment 67, wherein the mutation is a substitution of alanine for the residue.

[0589] Embodiment 69. The system of any one of embodiments 1-65, further comprising a donor template nucleic acid.

[0590] Embodiment 70. The system of embodiment 69, wherein the donor template comprises a nucleic acid comprising at least a portion of a PTBP1 gene selected from the group consisting of a PTBP1 exon, a PTBP1 intron, a PTBP1 intron-exon junction, and a PTBP1 regulatory element.

[0591] Embodiment 71. The system of embodiment 70, wherein the donor template sequence comprises one or more mutations relative to a corresponding portion of a wild-type PTBP1 gene.

[0592] Embodiment 72. The system of embodiment 70 or embodiment 71, wherein the donor template comprises a nucleic acid comprising at least a portion of a PTBP1 exon selected from the group consisting of PTBP1 exon 1, PTBP1 exon 2, PTBP1 exon 3, PTBP1 exon 4, PTBP1 exon 5, PTBP1 exon 6, PTBP1 exon 7, PTBP1 exon 8, PTBP1 exon 9, PTBP1 exon 10, PTBP1 exon 11, PTBP1 exon 12, PTBP1 exon 13, PTBP1 exon 14, PTBP1 exon 15, and PTBP1 exon 16.

[0593] Embodiment 73. The system of embodiment 72, wherein the donor template comprises a nucleic acid comprising at least a portion of a PTBP1 exon selected from the group consisting of PTBP1 exon 1, PTBP1 exon 2, and PTBP1 exon 3.

[0594] Embodiment 74. The system of any one of embodiments 69-73, wherein the donor template ranges in size from 10-15,000 nucleotides.

[0595] Embodiment 75. The system of any one of embodiments 69-74, wherein the donor template is a single-stranded DNA template or a single stranded RNA template.

[0596] Embodiment 76. The system of any one of embodiments 69-74, wherein the donor template is a double-stranded DNA template.

[0597] Embodiment 77. The system of any one of embodiments 69-76, wherein the donor template comprises homologous arms at or near the 5′ and 3′ ends of the donor template that are complementary to sequences flanking cleavage sites in the PTBP1 target nucleic acid introduced by the Class 2, Type V CRISPR protein.

[0598] Embodiment 78. A nucleic acid comprising the donor template of any one of embodiments 69-77.

[0599] Embodiment 79. A nucleic acid comprising a sequence that encodes the CasX variant of any one of embodiments 34-68.

[0600] Embodiment 80. A nucleic acid comprising a sequence that encodes the gRNA of any one of embodiments 1-33.

[0601] Embodiment 81. The nucleic acid of embodiment 79, wherein the sequence that encodes the CasX variant protein is codon optimized for expression in a eukaryotic cell.

[0602] Embodiment 82. A vector comprising the gRNA of any one of embodiments 1-33, the CasX variant protein of any one of embodiments 34-68, or the nucleic acid of any one of embodiments 78-81.

[0603] Embodiment 83. The vector of embodiment 82, wherein the vector further comprises a promoter.

[0604] Embodiment 84. The vector of embodiment 82, wherein the vector is selected from the group consisting of a retroviral vector, a lentiviral vector, an adenoviral vector, an adeno-associated viral (AAV) vector, a herpes simplex virus (HSV) vector, a CasX delivery particle (XDP), a plasmid, a minicircle, a nanoplasmid, a DNA vector, and an RNA vector.

[0605] Embodiment 85. The vector of embodiment 84, wherein the vector is an AAV vector.

[0606] Embodiment 86. The vector of embodiment 85, wherein the AAV vector is selected from AAV1, AAV2, AAV3, AAV4, AAV5, AAV6, AAV7, AAV8, AAV9, AAV10, AAV11, AAV12, AAV-Rh74, or AAVRh10.

[0607] Embodiment 87. The vector of embodiment 84, wherein the vector is a retroviral vector.

[0608] Embodiment 88. The vector of embodiment 84, wherein the vector is a XDP comprising one or more components of a gag polyprotein.

[0609] Embodiment 89. The vector of embodiment 88, wherein the one or more components of the gag polyprotein are selected from the group consisting of matrix protein (MA), a nucleocapsid protein (NC), a capsid protein (CA), a p1 peptide, a p6 peptide, a P2A peptide, a P2B peptide, a P10 peptide, a p12 peptide, a PP21/24 peptide, a P12/P3/P8 peptide, a P20 peptide, a protease cleavage site.

[0610] Embodiment 90. The vector of embodiment 88 or embodiment 89, comprising the CasX variant protein and the gRNA.

[0611] Embodiment 91. The vector of embodiment 90, wherein the CasX variant protein and the gRNA are associated together in an RNP.

[0612] Embodiment 92. The vector of any one of embodiments 88-91, further comprising a glycoprotein tropism factor.

[0613] Embodiment 93. The vector of any one of embodiments 88-92, wherein the glycoprotein tropism factor has binding affinity for a cell surface marker of a target cell and facilitates entry of the XDP into the target cell.

[0614] Embodiment 94. The vector of any one of embodiments 82-93, further comprising the donor template.

[0615] Embodiment 95. A host cell comprising the vector of any one of embodiments 82-94.

[0616] Embodiment 96. The host cell of embodiment 95, wherein the host cell is selected from the group consisting of Baby Hamster Kidney fibroblast (BHK) cells, human embryonic kidney 293 (HEK293), human embryonic kidney 293T (HEK293T) cells, NS0 cells, SP2/0 cells, YO myeloma cells, P3X63 mouse myeloma cells, PER cells, PER.C6 cells, hybridoma cells, NIH3T3 cells, CV-1 (simian) in Origin with SV40 genetic material (COS) cells, HeLa cells, Chinese hamster ovary (CHO) cells, or yeast cells.

[0617] Embodiment 97. A method of modifying a PTBP1 target nucleic acid sequence in a population of cells, the method comprising introducing into cells of the population:
[0618] a. the system of any one of embodiments 1-77;
[0619] b. the nucleic acid of any one of embodiments 78-81;
[0620] c. the vector as in any one of embodiments 82-87;
[0621] d. the XDP of any one of embodiments 89-93; or
[0622] e. combinations of two or more of (a)-(d),
[0623] wherein the PTBP1 gene target nucleic acid sequence of the cells targeted by the first gRNA is modified by the CasX variant protein.

[0624] Embodiment 98. The method of embodiment 97, wherein the modifying comprises introducing a single-stranded break in the PTBP1 gene target nucleic acid sequence of the cells of the population.

[0625] Embodiment 99. The method of embodiment 97, wherein the modifying comprises introducing a double-stranded break in the PTBP1 gene target nucleic acid sequence of the cells of the population.

[0626] Embodiment 100. The method of any one of embodiments 97-99, further comprising introducing into the cells of the population a second gRNA or a nucleic acid encoding the second gRNA, wherein the second gRNA has a targeting sequence complementary to a different or overlapping portion of the PTBP1 gene target nucleic acid compared to the first gRNA, and wherein introducing the second gRNA results in an additional break in the PTBP1 target nucleic acid of the cells of the population.

[0627] Embodiment 101. The method of any one of embodiments 97-100, wherein the modifying comprises introducing an insertion, deletion, substitution, duplication, or inversion of one or more nucleotides in the PTBP1 gene of the cells of the population.

[0628] Embodiment 102. The method of any one of embodiments 97-101, wherein the modifying comprises insertion of the donor template into the break site(s) of the PTBP1 gene target nucleic acid sequence of the cells of the population.

[0629] Embodiment 103. The method of embodiment 102, wherein the insertion of the donor template is mediated by homology-directed repair (HDR) or homology-independent targeted integration (HITI).

[0630] Embodiment 104. The method of any one of embodiments 97-102, wherein the modifying results in at least about 10%, at least about 20%, at least about 30%, at least about 40%, at least about 50%, at least about 60%, at least about 70%, at least about 80%, or at least about 90% edits in the PTBP1 gene in the modified cells of the population.

[0631] Embodiment 105. The method of any one of embodiments 97-104, wherein the modifying results in a knock-down or knock-out of the PTBP1 gene in the cells of the population.

[0632] Embodiment 106. The method of any one of embodiments 97-105, wherein the PTBP1 gene of the cells of the population is modified such that expression of the PTBP1 protein is reduced by at least about 10%, at least about 20%, at least about 30%, at least about 40%, at least about 50%, at least about 60%, at least about 70%, at least about 80%, or at least about 90% in comparison to cells in which the PTBP1 gene has not been modified.

[0633] Embodiment 107. The method of any one of embodiments 97-105, wherein the PTBP1 gene of the cells of the population is modified such that at least about 10%, at least about 20%, at least about 30%, at least about 40%, at least about 50%, at least about 60%, at least about 70%, at least about 80%, or at least about 90% of the cells do not express a detectable level of PTBP1 protein.

[0634] Embodiment 108. The method of any one of embodiments 97-107, wherein the cells are eukaryotic.

[0635] Embodiment 109. The method of embodiment 108, wherein the eukaryotic cells are selected from the group consisting of rodent cells, mouse cells, rat cells, and non-human primate cells.

[0636] Embodiment 110. The method of embodiment 108, wherein the eukaryotic cells are human cells.

[0637] Embodiment 111. The method of any one of embodiments 108-110, wherein the eukaryotic cells are selected from the group consisting of microglial cells, astrocytes, oligodendrocytes, and fibroblasts.

[0638] Embodiment 112. The method of embodiment 111, wherein the modification of the PTBP1 target nucleic acid sequence results in reprogramming of the eukaryotic cells into neurons.

[0639] Embodiment 113. The method of embodiment 112, wherein the modification of the PTBP1 target nucleic acid sequence results in an increase in expression of nPTB in the modified cells by at least about 10%, at least about 20%, at least about 30%, at least about 40%, at least about 50%, at least about 60%, at least about 70%, at least about 80%, or at least about 90% in comparison to cells in which the PTBP1 gene has not been modified.

[0640] Embodiment 114. The method of embodiment 112 or embodiment 113, wherein the PTBP1 gene of the cells of the population is modified such that at least about 10%, at least about 20%, at least about 30%, at least about 40%, at least about 50%, at least about 60%, at least about 70%, at least about 80%, or at least about 90% of the cells express a detectable level of nPTB protein.

[0641] Embodiment 115. The method of any one of embodiment 97-114, wherein the modification of the PTBP1 gene target nucleic acid sequence of the population of cells occurs in vitro or ex vivo.

[0642] Embodiment 116. The method of any one of embodiment 97-114, wherein the modification of the PTBP1 gene target nucleic acid sequence of the population of cells occurs in vivo in a subject.

[0643] Embodiment 117. The method of embodiment 116, wherein the subject is selected from the group consisting of a rodent, a mouse, a rat, and a non-human primate.

[0644] Embodiment 118. The method of embodiment 116, wherein the subject is a human.

[0645] Embodiment 119. The method of any one of embodiments 116-118, wherein the method comprises administering a therapeutically effective dose of an AAV vector to the subject.

[0646] Embodiment 120. The method of embodiment 119, wherein the AAV vector is administered to the subject at a dose of at least about 1×10⁵ vector genomes/kg (vg/kg), at least about 1×10⁶ vg/kg, at least about 1×10⁷ vg/kg, at least about 1×10⁸ vg/kg, at least about 1×10⁹ vg/kg, at least about 1×10¹⁰ vg/kg, at least about 1×10¹¹ vg/kg, at least about 1×10¹² vg/kg, at least about 1×10¹³ vg/kg, at least about 1×10¹⁴ vg/kg, at least about 1×10¹⁵ vg/kg, or at least about 1×10¹⁶ vg/kg.

[0647] Embodiment 121. The method of embodiment 119, wherein the AAV vector is administered to the subject at a dose of at least about 1×10⁵ vg/kg to about 1×10¹⁶ vg/kg, at least about 1×10⁶ vg/kg to about 1×10¹⁵ vg/kg, or at least about 1×10⁷ vg/kg to about 1×10¹⁴ vg/kg.

[0648] Embodiment 122. The method of any one of embodiments 116-118, wherein the method comprises administering a therapeutically effective dose of a CasX delivery particle (XDP) to the subject.

[0649] Embodiment 123. The method of embodiment 122, wherein the XDP is administered to the subject at a dose of at least about 1×10⁵ particles/kg, at least about 1×10⁶ particles/kg, at least about 1×10⁷ particles/kg at least about 1×10⁸ particles/kg, at least about 1×10⁹ particles/kg, at least about 1×10¹⁰ particles/kg, at least about 1×10¹¹ particles/kg, at least about 1×10¹² particles/kg, at least about 1×10¹³ particles/kg, at least about 1×10¹⁴ particles/kg, at least about 1×10¹⁵ particles/kg, at least about 1×10¹⁶ particles/kg.

[0650] Embodiment 124. The method of embodiment 122, wherein the XDP is administered to the subject at a dose of at least about 1×10⁵ particles/kg to about 1×10¹⁶ particles/kg, or at least about 1×10⁶ particles/kg to about 1×10¹⁵ particles/kg, or at least about 1×10⁷ particles/kg to about 1×10¹⁴ particles/kg

[0651] Embodiment 125. The method of any one of embodiments 116-124, wherein the vector or XDP is administered to the subject by a route of administration selected from intraparenchymal, intravenous, intra-arterial, intracerebroventricular, intracisternal, intrathecal, intracranial, lumbar, intraperitoneal, or combinations thereof.

[0652] Embodiment 126. The method of any one of embodiments 97-125, further comprising contacting the PTBP1 gene target nucleic acid sequence of the population of cells with:
[0653] a. an additional CRISPR nuclease and a gRNA targeting a different or overlapping portion of the PTBP1 target nucleic acid compared to the first gRNA;
[0654] b. a polynucleotide encoding the additional CRISPR nuclease and the gRNA of (a);
[0655] c. a vector comprising the polynucleotide of (b); or
[0656] d. a XDP comprising the additional CRISPR nuclease and the gRNA of (a),
[0657] wherein the contacting results in modification of the PTBP1 gene at a different location in the sequence compared to the sequence targeted by the first gRNA.

[0658] Embodiment 127. The method of embodiment 126, wherein the additional CRISPR nuclease is a CasX variant protein having a sequence different from the CasX variant protein of any of the preceding embodiments.

[0659] Embodiment 128. The method of embodiment 126, wherein the additional CRISPR nuclease is not a CasX protein.

[0660] Embodiment 129. The method of embodiment 128, wherein the additional CRISPR nuclease is selected from the group consisting of Cas9, Cas12a, Cas12b, Cas12c, Cas12d (CasY), Cas12J, Cas12k, Cas13a, Cas13b, Cas13c, Cas13d, Cas12j, Cas12k, CasY, Cas14, Cpf1, C2c1, Csn2, and sequence variants thereof.

[0661] Embodiment 130. A population of cells modified by the method of any one of embodiments 97-129, wherein the cells have been modified such that at least 70%, at least 75%, at least 80%, at least 85%, at least 90%, or at least 95% of the modified cells do not express a detectable level of PTBP1 protein.

[0662] Embodiment 131. A population of cells modified by the method of any one of embodiments 97-129, wherein the cells have been modified such that the expression of PTBP1 protein is reduced by at least 70%, at least 75%, at least 80%, at least 85%, at least 90%, or at least 95% compared to cells where the PTBP1 gene has not been modified.

[0663] Embodiment 132. A population of cells modified by the method of any one of embodiments 97-129, wherein the cells have been modified such that the expression of nPTB protein is increased by at least about 10%, at least about 20%, at least about 30%, at least about 40%, at least about 50%, at least about 60%, at least about 70%, at least about 80%, or at least about 90% in comparison to cells in which the PTBP1 gene has not been modified.

[0664] Embodiment 133. A method of treating a PTBP1-related disease in a subject in need thereof, the method comprising administering to the subject a therapeutically effective amount of the cells of any one of embodiments 130-132.

[0665] Embodiment 134. The method of embodiment 133, wherein the PTBP1-related disease is a neurologic disease or neurologic injury.

[0666] Embodiment 135. The method of embodiment 134, wherein the neurologic disease or neurologic injury is selected from the group consisting of Parkinson's disease, Huntington's disease, Alzheimer's, amyotrophic lateral sclerosis (ALS), traumatic brain injury, and traumatic spinal cord injury.

[0667] Embodiment 136. The method of any one of embodiments 133-135, wherein the cells are autologous with respect to the subject to be administered the cells.

[0668] Embodiment 137. The method of any one of embodiments 133-135, wherein the cells are allogeneic with respect to the subject to be administered the cells.

[0669] Embodiment 138. The method of any one of embodiments 133-137, wherein the cells or their progeny persist in the subject for at least one month, two month, three months, four months, five months, six months, seven months, eight months, nine months, ten months, eleven months, twelve months, thirteen months, fourteen month, fifteen months, sixteen months, seventeen months, eighteen months, nineteen months, twenty months, twenty-one months, twenty-two months, twenty-three months, two years, three years, four years, or five years after administration of the modified cells to the subject.

[0670] Embodiment 139. The method of any one of embodiments 133-138, wherein the method further comprises administering a chemotherapeutic agent.

[0671] Embodiment 140. The method of any one of embodiments 133-139, wherein the subject is selected from the group consisting of a rodent, a mouse, a rat, and a non-human primate.

[0672] Embodiment 141. The method of any one of embodiments 133-139, wherein the subject is a human.

[0673] Embodiment 142. A method of treating a PTBP1-related disease in a subject in need thereof, comprising modifying a PTBP1 gene in cells of the subject, the modifying comprising contacting said cells with a therapeutically effective dose of:
[0674] a. the system of any one of embodiments 1-77;
[0675] b. the nucleic acid of any one of embodiments 78-81;
[0676] c. the vector as in any one of embodiments 82-87;
[0677] d. the XDP of any one of embodiments 88-93; or
[0678] e. combinations of two or more of (a)-(d),
[0679] wherein the PTBP1 gene of the cells targeted by the first gRNA is modified by the CasX variant protein.

[0680] Embodiment 143. The method of embodiment 142, wherein the modifying comprises introducing a single-stranded break in the PTBP1 gene of the cells.

[0681] Embodiment 144. The method of embodiment 142, wherein the modifying comprises introducing a double-stranded break in the PTBP1 gene of the cells.

[0682] Embodiment 145. The method of any one of embodiments 142-144, further comprising introducing into the cells of the subject a second gRNA or a nucleic acid encoding the second gRNA, wherein the second gRNA has a targeting sequence complementary to a different or overlapping portion of the target nucleic acid compared to the first gRNA, resulting in an additional break in the PTBP1 target nucleic acid of the cells of the subject.

[0683] Embodiment 146. The method of any one of embodiments 142-145, wherein the modifying comprises introducing an insertion, deletion, substitution, duplication, or inversion of one or more nucleotides in the PTBP1 gene of the cells.

[0684] Embodiment 147. The method of any one of embodiments 142-145, wherein the modifying comprises insertion of the donor template into the break site(s) of the PTBP1 gene target nucleic acid sequence of the cells.

[0685] Embodiment 148. The method of embodiment 147, wherein the insertion of the donor template is mediated by homology-directed repair (HDR) or homology-independent targeted integration (HITI).

[0686] Embodiment 149. The method of any one of embodiments 142-148, wherein the modifying results in edits in the PTBP1 gene in at least about 10%, at least about 20%, at least about 30%, at least about 40%, at least about 50%, at least about 60%, at least about 70%, at least about 80%, or at least about 90% edits of the modified cells of the subject.

[0687] Embodiment 150. The method of any one of embodiments 142-149, wherein the modifying results in a knock-down or knock-out of the PTBP1 gene in the modified cells of the subject.

[0688] Embodiment 151. The method of any one of embodiments 142-149, wherein the PTBP1 gene of the cells of the subject are modified such that expression of the PTBP1 protein by the modified cells is reduced by at least about 10%, at least about 20%, at least about 30%, at least about 40%, at least about 50%, at least about 60%, at least about 70%, at least about 80%, or at least about 90% in comparison to cells that have not been modified.

[0689] Embodiment 152. The method of any one of embodiments 142-149, wherein the PTBP1 gene of the cells of the subject are modified such that at least 50%, at least 60%, at least 70%, at least 75%, at least 80%, at least 85%, at least 90%, or at least 95% of the modified cells do not express a detectable level of PTBP1 protein.

[0690] Embodiment 153. The method of any one of embodiments 142-152, wherein the cells modified by the method are selected from the group consisting of microglial cells, astrocytes, oligodendrocytes, and fibroblasts.

[0691] Embodiment 154. The method of embodiment 153, wherein the modification results in reprogramming of the modified cells into neurons.

[0692] Embodiment 155. The method of any one of embodiments 142-154, wherein the modification results in an increase in expression of nPTB in the modified cells by at least about 10%, at least about 20%, at least about 30%, at least about 40%, at least about 50%, at least about 60%, at least about 70%, at least about 80%, or at least about 90% in comparison to cells in which the PTBP1 gene has not been modified.

[0693] Embodiment 156. The method of any one of embodiments 142-155, wherein at least about 10%, at least about 20%, at least about 30%, at least about 40%, at least about 50%, at least about 60%, at least about 70%, at least about 80%, or at least about 90% of the modified cells express a detectable level of nPTB protein.

[0694] Embodiment 157. The method of any one of embodiments 142-156, wherein the PTBP1-related disease is a neurologic disease or neurologic injury.

[0695] Embodiment 158. The method of embodiment 157, wherein the neurologic disease or neurologic injury is selected from the group consisting of Parkinson's disease, Huntington's disease, Alzheimer's, amyotrophic lateral sclerosis (ALS), traumatic brain injury, and traumatic spinal cord injury.

[0696] Embodiment 159. The method of any one of embodiments 142-152, wherein the PTBP1-related disease is a cancer.

[0697] Embodiment 160. The method of embodiment 159, wherein the cancer is selected from the group consisting of ovarian cancer, glioblastoma, bladder cancer, colon cancer and breast cancer.

[0698] Embodiment 161. The method of embodiment 159 or embodiment 160, wherein the modification of the PTBP1 gene results in prevention or reduction of tumorigenesis of the cells.

[0699] Embodiment 162. The method of embodiment 159 or embodiment 160, wherein the modification of the PTBP1 target nucleic acid sequence results in stasis of an existing tumor in a subject.

[0700] Embodiment 163. The method of any one of embodiments 142-162, wherein the subject is selected from the group consisting of rodent, mouse, rat, and non-human primate.

[0701] Embodiment 164. The method of any one of embodiments 142-162, wherein the subject is a human.

[0702] Embodiment 165. The method of any one of embodiments 142-164, wherein the vector is AAV and is administered to the subject at a dose of at least about 1×10⁵ vector genomes/kg (vg/kg), at least about 1×10⁶ vg/kg, at least about 1×10⁷ vg/kg, at least about 1×10⁸ vg/kg, at least about 1×10⁹ vg/kg, at least about 1×10¹⁰ vg/kg, at least about 1×10¹¹ vg/kg, at least about 1×10¹² vg/kg, at least about 1×10¹³ vg/kg, at least about 1×10¹⁴ vg/kg, at least about 1×10¹⁵ vg/kg, or at least about 1×10¹⁶ vg/kg.

[0703] Embodiment 166. The method of any one of embodiments 142-164, wherein the vector is AAV and is administered to the subject at a dose of at least about 1×10⁵ vg/kg to about 1×10¹⁶ vg/kg, at least about 1×10⁶ vg/kg to about 1×10¹⁵ vg/kg, or at least about 1×10⁷ vg/kg to about 1×10¹⁴ vg/kg.

[0704] Embodiment 167. The method of any one of embodiments 142-164, wherein the XDP is administered to the subject at a dose of at least about 1×10⁵ particles/kg, at least about 1×10⁶ particles/kg, at least about 1×10⁷ particles/kg at least about 1×10⁸ particles/kg, at least about 1×10⁹ particles/kg, at least about 1×10¹⁰ particles/kg, at least about 1×10¹¹ particles/kg, at least about 1×10¹² particles/kg, at least about 1×10¹³ particles/kg, at least about 1×10¹⁴ particles/kg, at least about 1×10¹⁵ particles/kg, at least about 1×10¹⁶ particles/kg.

[0705] Embodiment 168. The method of any one of embodiments 142-164, wherein the XDP is administered to the subject at a dose of at least about 1×10⁵ particles/kg to about 1×10¹⁶ particles/kg, or at least about 1×10⁶ particles/kg to about 1×10¹⁵ particles/kg, or at least about 1×10⁷ particles/kg to about 1×10¹⁴ particles/kg

[0706] Embodiment 169. The method of any one of embodiments 142-168, wherein the vector or XDP is administered to the subject by a route of administration selected from intraparenchymal, intravenous, intra-arterial, intracerebroventricular, intracisternal, intrathecal, intracranial, lumbar, intraperitoneal, or combinations thereof.

[0707] Embodiment 170. The method of any one of embodiments 142-169, wherein the method results in improvement in at least one clinically-relevant endpoint in the subject.

[0708] Embodiment 171. The method of embodiment 170, wherein the disease is Parkinson's disease and the clinically-relevant endpoint is selected from the group consisting of disease progression, Unified Parkinson's Disease Rating Scale (UPDRS), Unified Dyskinesia Rating Scale (UDysRS), Parkinson's Disease Quality of Life Questionnaire (PDQ-39) score, Movement Disorder Society-Sponsored Unified Parkinson's Disease Rating Scale (MDS-UPDRS), changes from baseline of motor score as measured by Inertial Measurement Unit (IMU) on Finger taping (FT) and Pronation-supination movement of the hands (PSH), delay in time to clinically meaningful worsening of motor progression, levodopa's duration of effect (“on time”), Clinical Global Impression—Improvement (CGI-I), change from baseline in Zarit Burden Interview score (ZBI), EQ-5D summary index, total disease duration, patient cognitive status (MMSE), and change from baseline in fatigue.

[0709] Embodiment 172. The method of embodiment 170, wherein the disease is Huntington's disease and the clinically-relevant endpoint is selected from the group consisting of Unified Huntington's Disease Rating Scale (UHDRS), cognitive decline, psychiatric abnormalities, motor impairment, changes in baseline in striatal volume, Stroop word test, total motor score (TMS), bradykinesia, dystonia, Symbol Digit Modalities Test, University of Pennsylvania Smell Identification Test, emotion recognition, speeded tapping, paced tapping, the Trail Making Test, intracranial-corrected volumes (ICV), and the Everyday Cognition Rating Scale (ECOG).

[0710] Embodiment 173. The method of embodiment 170, wherein the disease is ALS and the clinically-relevant endpoint is selected from the group consisting of ALS Functional Rating Scale (ALSFRS-(R)), combined assessment of function and survival, time to death, time to tracheostomy, time to persistent assisted ventilation (DTP), forced vital capacity (% FVC), manual muscle test, maximum voluntary isometric contraction, duration of response, progression-free survival, time to progression of disease, and time-to-treatment failure.

[0711] Embodiment 174. The method of embodiment 170, wherein the disease is Alzheimer's disease and the clinically-relevant endpoint is selected from the group consisting of change in Alzheimer's Disease Assessment Scale-Cognitive subscale (ADAS-Cog14) score, change in the Cohen-Mansfield Agitation Inventory (CMAI) score, change in the Alzheimer's Disease Cooperative Study-Instrumental Activities of Daily Living (ADCS-iADL) score, Clinical Dementia Rating Scale-Sum of Boxes (CDR-SB) score, DIAN Multivariate Cognitive Endpoint, Preclinical Alzheimer Cognitive Composite 5 (PACC5) score, Mini-Mental State Exam (MMSE) score, cognitive impairment, functional impairment, brain amyloid levels measured by amyloid positron emission tomography (PET), brain tau levels measured by PET, spinal fluid amyloid-β levels, and spinal fluid tau levels.

[0712] Embodiment 175. The method of embodiment 170, wherein the disease is cancer and the clinically-relevant endpoint is selected from the group consisting of tumor shrinkage as a complete, partial or incomplete response; time-to-progression; time to treatment failure; biomarker response; progression-free survival; disease free-survival; time to recurrence; time to metastasis; time of overall survival; improvement of quality of life; and improvement of symptoms.

[0713] Embodiment 176. The system of any one of embodiments 1-77, the nucleic acid of any one of embodiments 78-81, the vector of any one of 82-87, the XDP of any one of embodiments 88-93, the host cell of embodiment 95 or embodiment 96, or the population of cells of any one of embodiments 130-132, for use as a medicament for the treatment of a PTBP1 related disease.

[0714] Embodiment 177. The system of any one of embodiments 1-77, wherein the target nucleic acid sequence is complementary to a non-target strand sequence located 1 nucleotide 3′ of a protospacer adjacent motif (PAM) sequence.

[0715] Embodiment 178. The system of embodiment 177, wherein the PAM sequence comprises a TC motif.

[0716] Embodiment 179. The system of embodiment 178, wherein the PAM sequence comprises ATC, GTC, CTC or TTC.

[0717] Embodiment 180. The system of any one of embodiments 177-179, wherein the Class 2 Type V CRISPR protein comprises a RuvC domain.

[0718] Embodiment 181. The system of embodiment 180, wherein the RuvC domain generates a staggered double-stranded break in the target nucleic acid sequence.

[0719] Embodiment 182. The system of any one of embodiments 177-181, wherein the Class 2 Type V CRISPR protein does not comprise an HNH nuclease domain.

[0720] Embodiment 183. A composition of the Class 2, type V CRISPR protein of any one of embodiments 34-65 and the gRNA of any one of embodiments 1-33 as gene editing pairs for use as a medicament for the treatment of a subject having a PTBP1-related disease.

### EXAMPLES

### Example 1: Generating CasX Variant Constructs

[0721] In order to generate the CasX 488 construct (sequences in Table 6), the codon-optimized CasX 119 construct (based on the CasX Stx2 construct, encoding Planctomycetes CasX SEQ ID NO: 2, with amino acid substitutions and deletions) was cloned into a destination plasmid (pStX) using standard cloning methods. In order to generate the CasX 491 construct (sequences in Table 6), the codon-optimized CasX 484 construct (based on the CasX Stx2 construct, encoding Planctomycetes CasX SEQ ID NO: 2, with substitutions and deletions of certain amino acids, with fused NLS, and linked guide and non-targeting sequences) was cloned into a destination plasmid (pStX) using standard cloning methods. Construct CasX 1 (CasX SEQ ID NO: 1) was cloned into a destination vector using standard cloning methods. To build CasX 488, the CasX 119 construct DNA was PCR amplified in two reactions using Q5 DNA polymerase according to the manufacturer's protocol, using universal appropriate primers. To build CasX 491, the codon optimized CasX 484 construct DNA was PCR amplified in two reactions using Q5 DNA polymerase according to the manufacturer's protocol, using appropriate primers. The CasX 1 construct was PCR amplified in two reactions using Q5 DNA polymerase according to the manufacturer's protocol, universal appropriate primers. Each of the PCR products were purified by gel extraction from a 1% agarose gel (Gold Bio Cat #A-201-500) using Zymoclean Gel DNA Recovery Kit according to the manufacturer's protocol. The corresponding fragments were then pieced together using Gibson assembly (New England BioLabs Cat #E2621S) following the manufacturer's protocol. Assembled products in pStx1 were transformed into chemically-competent Turbo Competent E. coli bacterial cells, plated on LB-Agar plates containing kanamycin. Individual colonies were picked and miniprepped using Qiagen spin Miniprep Kit following the manufacturer's protocol. The resultant plasmids were sequenced using Sanger sequencing to ensure correct assembly. The correct clones were then subcloned into the mammalian expression vector pStx34 using restriction enzyme cloning. The pStx34 backbone and the CasX 488 and 491 clones in pStx1 were digested with XbaI and BamHI respectively. The digested backbone and respective insert fragments were purified by gel extraction from a 1% agarose gel (Gold Bio Cat #A-201-500) using Zymoclean Gel DNA Recovery Kit according to the manufacturer's protocol. The clean backbone and insert were then ligated together using T4 Ligase (New England Biolabs Cat #M0202L) according to the manufacturer's protocol. The ligated products were transformed into chemically-competent Turbo Competent E. coli bacterial cells, plated on LB-Agar plates containing carbenicillin. Individual colonies were picked and miniprepped using Qiagen spin Miniprep Kit following the manufacturer's protocol. The resultant plasmids were sequenced using Sanger sequencing to ensure correct assembly.

[0722] To build CasX 515 (sequences in Table 6), the CasX 491 construct DNA was PCR amplified in two reactions using Q5 DNA polymerase according to the manufacturer's protocol, using appropriate primers. To build CasX 527 (sequences in Table 6), the CasX 491 construct DNA was PCR amplified in two reactions using Q5 DNA polymerase according to the manufacturer's protocol, using appropriate primers. The PCR products were purified by gel extraction from a 1% agarose gel using Zymoclean Gel DNA Recovery Kit according to the manufacturer's protocol. The pStX backbone was digested using XbaI and SpeI in order to remove the 2931 base pair fragment of DNA between the two sites in plasmid pStx56. The digested backbone fragment was purified by gel extraction from a 1% agarose gel using Zymoclean Gel DNA Recovery Kit according to the manufacturer's protocol. The insert and backbone fragments were then pieced together using Gibson assembly (New England BioLabs Cat #E2621S) following the manufacturer's protocol. Assembled products in the pStx56 were transformed into chemically-competent Turbo Competent E. coli bacterial cells, plated on LB-Agar plates containing kanamycin. Individual colonies were picked and miniprepped using Qiagen spin Miniprep Kit following the manufacturer's protocol. The resultant plasmids were sequenced using Sanger sequencing to ensure correct assembly. pStX34 includes an EF-lα promoter for the protein as well as a selection marker for both puromycin and carbenicillin. pStX56 includes an EF-lα promoter for the protein as well as a selection marker for both puromycin and kanamycin Sequences encoding the targeting sequences that target the gene of interest were designed based on CasX PAM locations. Targeting sequence DNA was ordered as single-stranded DNA (ssDNA) oligos (Integrated DNA Technologies) consisting of the targeting sequence and the reverse complement of this sequence. These two oligos were annealed together and cloned into pStX individually or in bulk by Golden Gate assembly using T4 DNA Ligase and an appropriate restriction enzyme for the plasmid. Golden Gate products were transformed into chemically or electro-competent cells such as NEB Turbo competent E. coli (NEB Cat #C2984I), plated on LB-Agar plates containing the appropriate antibiotic. Individual colonies were picked and miniprepped using Qiaprep spin Miniprep Kit and following the manufacturer's protocol. The resultant plasmids were sequenced using Sanger sequencing to ensure correct ligation.

[0723] To build CasX 535-537 (sequences in Table 6), the CasX 515 construct DNA was PCR amplified in two reactions for each construct using Q5 DNA polymerase according to the manufacturer's protocol. For CasX 535, appropriate primers were used for the amplification. For CasX 536 appropriate primers were used. For CasX 537, appropriate primers were used. The PCR products were purified by gel extraction from a 1% agarose gel using Zymoclean Gel DNA Recovery Kit according to the manufacturer's protocol. The pStX backbone was digested using XbaI and SpeI in order to remove the 2931 base pair fragment of DNA between the two sites in plasmid pStx56. The digested backbone fragment was purified by gel extraction from a 1% agarose gel using Zymoclean Gel DNA Recovery Kit according to the manufacturer's protocol. The insert and backbone fragments were then pieced together using Gibson assembly following the manufacturer's protocol. Assembled products in pStx56 were transformed into chemically-competent Turbo Competent E. coli bacterial cells, plated on LB-Agar plates containing kanamycin. Individual colonies were picked and miniprepped using Qiagen spin Miniprep Kit following the manufacturer's protocol. The resultant plasmids were sequenced using Sanger sequencing to ensure correct assembly. pStX34 includes an EF-lα promoter for the protein as well as a selection marker for both puromycin and carbenicillin. pStX56 includes an EF-lα promoter for the protein as well as a selection marker for both puromycin and kanamycin. Sequences encoding the targeting sequences that target the gene of interest were designed based on CasX PAM locations. Targeting sequence DNA was ordered as single-stranded DNA (ssDNA) oligos (Integrated DNA Technologies) consisting of the targeting sequence and the reverse complement of this sequence. These two oligos were annealed together and cloned into pStX individually or in bulk by Golden Gate assembly using T4 DNA Ligase and an appropriate restriction enzyme for the plasmid. Golden Gate products were transformed into chemically or electro-competent cells such as NEB Turbo competent E. coli, plated on LB-Agar plates containing the appropriate antibiotic. Individual colonies were picked and miniprepped using Qiaprep spin Miniprep Kit and following the manufacturer's protocol. The resultant plasmids were sequenced using Sanger sequencing to ensure correct ligation.

[0724] All subsequent CasX variants, such as CasX 544 and CasX 660-664, 668, 670, 672, 676, and 677 were cloned using the same methodology as described above using Gibson assembly with mutation-specific internal primers and universal forward and reverse primers (the differences between them were the mutation specific primers designed as well as which CasX base construct was used). SaCas9 and SpyCas9 control plasmids were prepared similarly to pStX plasmids described above, with the protein and guide regions of pStX exchanged for the respective protein and guide. Targeting sequences for SaCas9 and SpyCas9 were either obtained from the literature or were rationally designed according to established methods.

[0725] The expression and recovery of the CasX constructs was performed using standard methodologies and are summarized as follows:

### Purification:

[0726] Frozen samples were thawed overnight at 4° C. with magnetic stirring. The viscosity of the resulting lysate was reduced by sonication and lysis was completed by homogenization in two passes at 20 k PSI using a NanoDeBEE (BEE International). Lysate was clarified by centrifugation at 50,000×g, 4° C., for 30 minutes and the supernatant was collected. The clarified supernatant was applied to a Heparin 6 Fast Flow column (Cytiva) using an AKTA Pure FPLC (Cytiva). The column was washed with 5 CV of Heparin Buffer A (50 mM HEPES-NaOH, 250 mM NaCl, 5 mM MgCl2, 0.5 mM TCEP, 10% glycerol, pH 8), then with 3 CV of Heparin Buffer B (Buffer A with the NaCl concentration adjusted to 500 mM). Protein was eluted with 1.75 CV of Heparin Buffer C (Buffer A with the NaCl concentration adjusted to 1 M). The eluate was applied to a StrepTactin HP column (Cytiva) using the FPLC. The column was washed with 10 CV of Strep Buffer (50 mM HEPES-NaOH, 500 mM NaCl, 5 mM MgCl2, 0.5 mM TCEP, 10% glycerol, pH 8). Protein was eluted from the column using 1.65 CV of Strep Buffer with 2.5 mM Desthiobiotin added. CasX-containing fractions were pooled, concentrated at 4° C. using a 50 kDa cut-off spin concentrator (Amicon), and purified by size exclusion chromatography on a Superdex 200 pg column (Cytiva). The column was equilibrated with SEC Buffer (25 mM sodium phosphate, 300 mM NaCl, 1 mM TCEP, 10% glycerol, pH 7.25) and operated by FPLC. CasX-containing fractions that eluted at the appropriate molecular weight were pooled, concentrated at 4° C. using a 50 kDa cut-off spin concentrator, aliquoted, and snap-frozen in liquid nitrogen before being stored at −80° C.

[0727] CasX variant 488: The average yield was 2.7 mg of purified CasX protein per liter of culture at 98.8% purity, as evaluated by colloidal Coomassie staining.

[0728] CasX Variant 491: The average yield was 12.4 mg of purified CasX protein per liter of culture at 99.4% purity, as evaluated by colloidal Coomassie staining.

[0729] CasX variant 515: The average yield was 7.8 mg of purified CasX protein per liter of culture at 90% purity, as evaluated by colloidal Coomassie staining.

[0730] CasX variant 526: The average yield was 13.79 mg per liter of culture, at 93% purity. Purity was evaluated by colloidal Coomassie staining.

[0731] CasX variant 668: The average yield was 3.32 mg per liter of culture, at 93% purity. Purity was evaluated by colloidal Coomassie staining.

[0732] CasX variant 672: The average yield was 6.50 mg per liter of culture, at 88% purity. Purity was evaluated by colloidal Coomassie staining.

[0733] CasX variant 676: The average yield was 5.05 mg per liter of culture, at 92% purity. Purity was evaluated by colloidal Coomassie staining.

[0734] CasX variant 677: The average yield was 2.93 mg per liter of culture, at 81% purity. Purity was evaluated by colloidal Coomassie staining.

TABLE 6
CasX variant DNA and amino acid sequences

| | SEQ ID NO of DNA | |
|---|---|---|
| Construct | Sequence | SEQ ID NO of Amino Acid Sequence |
| CasX 488 | 43936 | 123 |
| CasX 491 | 43937 | 126 |
| CasX 515 | 43938 | 133 |
| CasX 527 | 43939 | 144 |
| CasX 535 | 43940 | 43665 |
| CasX 536 | 43941 | 43666 |
| CasX 537 | 43942 | 43667 |
| CasX 583 | 43943 | 43712 |
| CasX 660 | 43944 | 43789 |
| CasX 661 | 43945 | 43790 |
| CasX 662 | 43946 | 43791 |
| CasX 663 | 43947 | 43792 |
| CasX 664 | 43948 | 43793 |
| CasX 668 | 43949 | 43797 |
| CasX 670 | 43950 | 43935 |
| CasX 672 | 43951 | 43800 |
| CasX 676 | 43952 | 43804 |
| CasX 677 | 43953 | 43805 |

### Example 2: Generation of RNA Guides

[0735] For the generation of RNA single guides and targeting sequences, templates for in vitro transcription were generated by performing PCR with Q5 polymerase, template primers for each backbone, and amplification primers with the T7 promoter and the targeting sequence. The DNA primer sequences for the T7 promoter, guide and targeting sequence for guides and targeting sequences are presented in Table 7, below. The sg1, sg2, sg32, sg64, sg174, and sg235 guides correspond to SEQ ID NOS: 4, 5, 2104, 2106, 2238, and 43577, respectively, with the exception that sg2, sg32, and sg64 were modified with an additional 5′ G to increase transcription efficiency (compare sequences in Table 7 to Table 3). The 7.37 targeting sequence targets beta2-microglobulin (B2M). Following PCR amplification, templates were cleaned and isolated by phenol-chloroform-isoamyl alcohol extraction followed by ethanol precipitation.

[0736] In vitro transcriptions were carried out in buffer containing 50 mM Tris pH 8.0, 30 mM MgCl2, 0.01% Triton X-100, 2 mM spermidine, 20 mM DTT, 5 mM NTPs, 0.5 μM template, and 100 μg/mL T7 RNA polymerase. Reactions were incubated at 37° C. overnight. 20 units of DNase I (Promega #M6101)) were added per 1 mL of transcription volume and incubated for one hour. RNA products were purified via denaturing PAGE, ethanol precipitated, and resuspended in 1× phosphate buffered saline. To fold the sgRNAs, samples were heated to 70° C. for 5 min and then cooled to room temperature. The reactions were supplemented to 1 mM final MgCl2 concentration, heated to 50° C. for 5 min and then cooled to room temperature. Final RNA guide products were stored at −80° C.

TABLE 7
Sequences for generation of guide RNA

| | SEQ ID | | SEQ |
|---|---|---|---|
| Primer | NO: | RNA product | ID NO: |
| T7 promoter | 259 | Used for all | ND |
| primer | | | |
| sg2 backbone | 260 | GGUACUGGCGCUUUUAUCUCAUUACUUUGAGAGCCAUCAC | 272 |
| fwd | | CAGCGACUAUGUCGUAUGGGUAAAGCGCUUAUUUAUCGGA | |
| sg2 backbone | 261 | GAGAAAUCCGAUAAAUAAGAAGCAUCAAAGGGCCGAGAUG | |
| rev | | UCUCGCUCCG | |
| sg2.7.37 spacer | 262 | | |
| primer | | | |
| sg32 backbone | 263 | GGUACUGGCGCUUUUAUCUCAUUACUUUGAGAGCCAUCAC | 273 |
| fwd | | CAGCGACUAUGUCGUAUGGGUAAAGCGCCCUCUUCGGAGG | |
| sg32 backbone | 264 | GAAGCAUCAAAGGGCCGAGAUGUCUCG | |
| rev | | | |
| sg32.7.37 spacer | 265 | | |
| primer | | | |
| sg64 backbone | 266 | GGUACUGGCGCCUUUAUCUCAUUACUUUGAGAGCCAUCAC | 274 |
| fwd | | CAGCGACUAUGUCGUAUGGGUAAAGCGCUUACGGACUUCG | |
| sg64 backbone | 267 | GUCCGUAAGAAGCAUCAAAGGGCCGAGAUGUCUCGCUCCG | |
| rev | | | |
| sg64.7.37 spacer | 268 | | |
| primer | | | |
| sg174 backbone | 269 | ACUGGCGCUUUUAUCUgAUUACUUUGAGAGCCAUCACCAG | 275 |
| fwd | | CGACUAUGUCGUAgUGGGUAAAGCUCCCUCUUCGGAGGGA | |
| sg174 backbone | 270 | GCAUCAAAGGGCCGAGAUGUCUCGCUCCG | |
| rev | | | |
| sg174.7.37 | 271 | | |
| spacer primer | | | |
| sg235 backbone | ND | ACUGGCGCUUCUAUCUGAUUACUCUGAGCGCCAUCACCAG | 43957 |
| fwd | | CGACUAUGUCGUAGUGGGUAAAGCCGCUUACGGACUUCGG | |
| sg235 backbone | ND | UCCGUAAGAGGCAUCAGAG | |
| rev | | | |
| sg235.7.37 | ND | | |
| spacer primer | | | |

### Example 3: Assessing Binding Affinity to the Guide RNA

[0737] Purified wild-type and improved CasX will be incubated with synthetic single-guide RNA containing a 3′ Cy7.5 moiety in low-salt buffer containing magnesium chloride as well as heparin to prevent non-specific binding and aggregation. The sgRNA will be maintained at a concentration of 10 pM, while the protein will be titrated from 1 pM to 100 μM in separate binding reactions. After allowing the reaction to come to equilibrium, the samples will be run through a vacuum manifold filter-binding assay with a nitrocellulose membrane and a positively charged nylon membrane, which bind protein and nucleic acid, respectively. The membranes will be imaged to identify guide RNA, and the fraction of bound vs unbound RNA will be determined by the amount of fluorescence on the nitrocellulose vs nylon membrane for each protein concentration to calculate the dissociation constant of the protein-sgRNA complex. The experiment will also be carried out with improved variants of the sgRNA to determine if these mutations also affect the affinity of the guide for the wild-type and mutant proteins. We will also perform electromobility shift assays to qualitatively compare to the filter-binding assay and confirm that soluble binding, rather than aggregation, is the primary contributor to protein-RNA association.

### Example 4: Assessing Binding Affinity to the Target DNA

[0738] Purified wild-type and improved CasX will be complexed with single-guide RNA bearing a targeting sequence complementary to the target nucleic acid. The RNP complex will be incubated with double-stranded target DNA containing a PAM and the appropriate target nucleic acid sequence with a 5′ Cy7.5 label on the target strand in low-salt buffer containing magnesium chloride as well as heparin to prevent non-specific binding and aggregation. The target DNA will be maintained at a concentration of 1 nM, while the RNP will be titrated from 1 pM to 100 μM in separate binding reactions. After allowing the reaction to come to equilibrium, the samples will be run on a native 5% polyacrylamide gel to separate bound and unbound target DNA. The gel will be imaged to identify mobility shifts of the target DNA, and the fraction of bound vs unbound DNA will be calculated for each protein concentration to determine the dissociation constant of the RNP-target DNA ternary complex.

### Example 5: Assessing Differential PAM Recognition In Vitro

### 1. Comparison of Reference and CasX Variants

[0739] In vitro cleavage assays were performed using CasX2 (SEQ ID NO:2), CasX119, and CasX438 complexed with sg174.7.37, essentially as describe in Example 8. Fluorescently labeled dsDNA targets with a 7.37 spacer and either a TTC, CTC, GTC, or ATC PAM were used (sequences are in Table 8). Time points were taken at 0.25, 0.5, 1, 2, 5, 10, 30, and 60 minutes. Gels were imaged with an Cytiva Typhoon and quantified using the IQTL 8.2 software. Apparent first-order rate constants for non-target strand cleavage (k_{cleave}) were determined for each CasX:sgRNA complex on each target. Rate constants for targets with non-TTC PAM were compared to the TTC PAM target to determine whether the relative preference for each PAM was altered in a given protein variant.

[0740] For all variants, the TTC target supported the highest cleavage rate, followed by the ATC, then the CTC, and finally the GTC target (FIGS. 10A-D, Table 9). For each combination of CasX variant and NTC PAM, the cleavage rate k_{cleave} is shown. For all non-NTC PAMs, the relative cleavage rate as compared to the TTC rate for that variant is shown in parentheses. All non-TTC PAMs exhibited substantially decreased cleavage rates (>10-fold for all). The ratio between the cleavage rate of a given non-TTC PAM and the TTC PAM for a specific variant remained generally consistent across all variants. The CTC target supported cleavage 3.5-4.3% as fast as the TTC target; the GTC target supported cleavage 1.0-1.4% as fast; and the ATC target supported cleavage 6.5-8.3% as fast. The exception is for 491, where the kinetics of cleavage at TTC PAMs are too fast to allow accurate measurement, which artificially decreases the apparent difference between TTC and non-TTC PAMs. Comparing the relative rates of 491 on GTC, CTC, and ATC PAMs, which fall within the measurable range, results in ratios comparable to those for other variants when comparing across non-TTC PAMs, consistent with the rates increasing in tandem. Overall, differences between the variants are not substantial enough to suggest that the relative preference for the various NTC PAMs have been altered. However, the higher basal cleavage rates of the variants allow targets with ATC or CTC PAMs to be cleaved nearly completely within 10 minutes, and the apparent k_{cleaves} are comparable to or greater than the k_{cleave} of CasX2 on a TTC PAM (Table 9). This increased cleavage rate may cross the threshold necessary for effective genome editing in a human cell, explaining the apparent increase in PAM flexibility for these variants. Experiments utilizing CasX variants 515-791 (SEQ ID NOS: 133-148 and 43662-43907) would be conducted using similar methodology, and would be expected to result in enhanced cleavage rates relative to reference CasX utilizing one or more PAM sequences in the target nucleic acid.

TABLE 8
Sequences of DNA substrates used in in vitro PAM cleavage assay

| Guide* | DNA Sequence | SEQ ID NO |
|---|---|---|
| 7.37 TTC PAM | AGCGCGAGCACAGCTAAGGCCACGGAGCGAGACATCTCGGCCCGAATGCTG | 43958 |
| TS | TCAGCTTCA | |
| 7.37 TTC PAM | TGAAGCTGACAGCATTCGGGCCGAGATGTCTCGCTCCGTGGCCTTAGCTGT | 43959 |
| NTS | GCTCGCGCT | |
| 7.37 CTC PAM | AGCGCGAGCACAGCTAAGGCCACGGAGCGAGACATCTCGGCCCGAGTGCTG | 43960 |
| TS | TCAGCTTCA | |
| 7.37 CTC PAM | TGAAGCTGACAGCACTCGGGCCGAGATGTCTCGCTCCGTGGCCTTAGCTGT | 43961 |
| NTS | GCTCGCGCT | |
| 7.37 GTC PAM | AGCGCGAGCACAGCTAAGGCCACGGAGCGAGACATCTCGGCCCGACTGCTG | 43962 |
| TS | TCAGCTTCA | |
| 7.37 GTC PAM | TGAAGCTGACAGCAGTCGGGCCGAGATGTCTCGCTCCGTGGCCTTAGCTGT | 43963 |
| NTS | GCTCGCGCT | |
| 7.37 ATC PAM | AGCGCGAGCACAGCTAAGGCCACGGAGCGAGACATCTCGGCCCGATTGCTG | 43964 |
| TS | TCAGCTTCA | |
| 7.37 ATC PAM | TGAAGCTGACAGCAATCGGGCCGAGATGTCTCGCTCCGTGGCCTTAGCTGT | 43965 |
| NTS | GCTCGCGCT | |

*The PAM sequences for each are bolded.
TS—target strand.
NTS—Non-target strand.

TABLE 9
Apparent cleavage rates of CasX variants against NTC PAMs

| Variant | TTC | CTC | GTC | ATC |
|---|---|---|---|---|
| 2 | 0.267 min⁻¹ | 9.29E-3 min⁻¹ | 3.75E-3 min⁻¹ | 1.87E-2 min⁻¹ |
| | | (0.035) | (0.014) | (0.070) |
| 119 | 8.33 min⁻¹ | 0.303 min⁻¹ | 8.64E-2 min⁻¹ | 0.540 min⁻¹ |
| | | (0.036) | (0.010) | (0.065) |
| 438 | 4.94 min⁻¹ | 0.212 min⁻¹ | 1.31E-2 min⁻¹ | 0.408 min⁻¹ |
| | | (0.043) | (0.013) | (0.083) |
| 491 | 16.42 min⁻¹ | 8.605 min⁻¹ | 2.447 min⁻¹ | 11.33 min⁻¹ |
| | | (0.524) | (0.149) | (0.690) |

### 2. Comparison of PAM Recognition Using Single CasX Variant

[0741] Materials and Methods: Fluorescently labeled dsDNA targets with a 7.37 spacer and either a TTC, CTC, GTC, ATC, TTT, CTT, GTT, or ATT PAM were used (sequences are in Table 10). Oligos were ordered with a 5′ amino modification and labeled with a Cy7.5 NHS ester for target strand oligos and a Cy5.5 NHS ester for non-target strand oligos. dsDNA targets were formed by mixing the oligos in a 1:1 ratio in 1×cleavage buffer (20 mM Tris HCl pH 7.5, 150 mM NaCl, 1 mM TCEP, 5% glycerol, 10 mM MgCl2), heating to 95° C. for 10 minutes, and allowing the solution to cool to room temperature.

[0742] CasX variant 491 was complexed with sg174.7.37. The guide was diluted in 1× cleavage buffer to a final concentration of 1.5 μM, and then protein was added to a final concentration of 1 μM. The RNP was incubated at 37° C. for 10 minutes and then put on ice.

[0743] Cleavage assays were carried out by diluting RNP in cleavage buffer to a final concentration of 200 nM and adding dsDNA target to a final concentration of 10 nM. Time points were taken at 0.25, 0.5, 1, 2, 5, and 10 minutes and quenched by adding to an equal volume of 95% formamide and 20 mM EDTA. Cleavage products were resolved by running on a 10% urea-PAGE gel. Gels were imaged with an Amersham Typhoon and quantified using the IQTL 8.2 software. Apparent first-order rate constants for non-target strand cleavage (kcleave) were determined for each target using GraphPad Prism.

### Results:

[0744] The relative cleavage rate of the 491.174 RNP on various PAMs was investigated. In addition to aiding in the prediction of cleavage efficiencies of targets and potential off-targets in cells, these data will also allow us to adjust the cleavage rate of synthetic targets. In the case of self-limiting AAV vectors, where new protospacers can be added within the vector to allow for self-targeting, we reasoned that the rate of episome cleavage could be adjusted up or down by changing the PAM. Experiments utilizing CasX variants 515-791 (SEQ ID NOS: 133-148 and 43662-43907) would be conducted using similar methodology, and would be expected to result in cleavage rates relative to reference CasX utilizing one or more PAM sequences in the target nucleic acid.

[0745] We tested the cleavage rate of the RNP against various dsDNA substrates that were identical in sequence aside from the PAM. This experimental setup should allow for the isolation of the effects of the PAM itself, rather than convoluting PAM recognition with effects resulting from spacer sequence and genomic context. All NTC and NTT PAMs were tested. As expected, the RNP cleaved the target with the TTC PAM most quickly, converting essentially all of it to product by the first time point (FIG. 11A). CTC was cleaved roughly half as quickly, though the rapid cleavage of TTC makes determining an accurate kcleave difficult under these assay conditions, which are optimized to capture a broader array of cleavage rates (FIG. 11A, Table 11). The GTC target was cleaved most slowly of the NTC PAMs, with a cleavage rate roughly six-fold slower than the TTC target. All NTT PAMs were cleaved more slowly than all NTC PAMs, with TTT cut most efficiently, followed by GTT (FIG. 11B, Table 11). The relative efficiency of GTT cleavage among all NTT PAMs, compared to the low rate of GTC cleavage compared to all NTC PAMs, demonstrates that recognition of individual PAM nucleotides is context-dependent, with nucleotide identity at one position in the PAM affecting sequence preference at the other positions.

[0746] The PAM sequences tested here yield cleavage rates spanning three orders of magnitude while still maintaining cleavage activity at the same spacer sequence. These data demonstrate that cleavage rates at a given synthetic target can be readily modified by changing the associated PAM, allowing for adjustment of self-cleavage activity to allow for efficient targeting of the genomic target prior to cleavage and elimination of the AAV episome.

TABLE 10
Sequences of DNA substrates used in in vitro PAM cleavage assay*

| PAM & Strand | Spacer and PAM Sequence | SEQ ID NO |
|---|---|---|
| 7.37 TTC PAM TS | AGCGCGAGCACAGCTAAGGCCACGGAGCGAGACATCTCGGCCCGAAT | 43958 |
| | GCTGTCAGCTTCA | |
| 7.37 TTC PAM | TGAAGCTGACAGCATTCGGGCCGAGATGTCTCGCTCCGTGGCCTTAG | 43959 |
| NTS | CTGTGCTCGCGCT | |
| 7.37 CTC PAM TS | AGCGCGAGCACAGCTAAGGCCACGGAGCGAGACATCTCGGCCCGAGT | 43960 |
| | GCTGTCAGCTTCA | |
| 7.37 CTC PAM | TGAAGCTGACAGCACTCGGGCCGAGATGTCTCGCTCCGTGGCCTTAG | 43961 |
| NTS | CTGTGCTCGCGCT | |
| 7.37 GTC PAM TS | AGCGCGAGCACAGCTAAGGCCACGGAGCGAGACATCTCGGCCCGACT | 43962 |
| | GCTGTCAGCTTCA | |
| 7.37 GTC PAM | TGAAGCTGACAGCAGTCGGGCCGAGATGTCTCGCTCCGTGGCCTTAG | 43963 |
| NTS | CTGTGCTCGCGCT | |
| 7.37 ATC PAM TS | AGCGCGAGCACAGCTAAGGCCACGGAGCGAGACATCTCGGCCCGATT | 43964 |
| | GCTGTCAGCTTCA | |
| 7.37 ATC PAM | TGAAGCTGACAGCAATCGGGCCGAGATGTCTCGCTCCGTGGCCTTAG | 43965 |
| NTS | CTGTGCTCGCGCT | |
| 7.37 TTT PAM TS | AGCGCGAGCACAGCTAAGGCCACGGAGCGAGACATCTCGGCCCAAAT | 43966 |
| | GCTGTCAGCTTCA | |
| 7.37 TTT PAM | TGAAGCTGACAGCATTTGGGCCGAGATGTCTCGCTCCGTGGCCTTAG | 43967 |
| NTS | CTGTGCTCGCGCT | |
| 7.37 CTT PAM TS | AGCGCGAGCACAGCTAAGGCCACGGAGCGAGACATCTCGGCCCTAGT | 43968 |
| | GCTGTCAGCTTCA | |
| 7.37 CTT PAM | TGAAGCTGACAGCACTTGGGCCGAGATGTCTCGCTCCGTGGCCTTAG | 43969 |
| NTS | CTGTGCTCGCGCT | |
| 7.37 GTT PAM TS | AGCGCGAGCACAGCTAAGGCCACGGAGCGAGACATCTCGGCCCTACT | 43970 |
| | GCTGTCAGCTTCA | |
| 7.37 GTT PAM | TGAAGCTGACAGCAGTTGGGCCGAGATGTCTCGCTCCGTGGCCTTAG | 43971 |
| NTS | CTGTGCTCGCGCT | |
| 7.37 ATT PAM TS | AGCGCGAGCACAGCTAAGGCCACGGAGCGAGACATCTCGGCCCTATT | 43972 |
| | GCTGTCAGCTTCA | |
| 7.37 ATT PAM | TGAAGCTGACAGCAATTGGGCCGAGATGTCTCGCTCCGTGGCCTTAG | 43973 |
| NTS | CTGTGCTCGCGCT | |

*The DNA sequences used to generate each dsDNA substrate are shown.
The PAM sequences for each are bolded.
TS—target strand.
NTS—Non-target strand.

TABLE 11
Apparent cleavage rates of CasX
491.174 against NTC and NTT PAMs

| PAM | TTC | ATC | CTC | GTC | TTT | ATT | CTT | GTT |
|---|---|---|---|---|---|---|---|---|
| k_{cleave} | 15.6* | 6.66 | 9.45 | 2.52 | 1.33 | 0.0675 | 0.0204 | 0.330 |
| (min⁻¹) | | | | | | | | |

*The rate of TTC cleavage exceeds the resolution of this assay, so the resulting k_{cleave} should be taken as a lower bound.

### Example 6: Assessing Nuclease Activity for Double-Strand Cleavage

[0747] Purified wild-type and engineered CasX variants will be complexed with single-guide RNA bearing a fixed HRS targeting sequence. The RNP complexes will be added to buffer containing MgCl2 at a final concentration of 100 nM and incubated with double-stranded target DNA with a 5′ Cy7.5 label on either the target or non-target strand at a concentration of 10 nM. Aliquots of the reactions will be taken at fixed time points and quenched by the addition of an equal volume of 50 mM EDTA and 95% formamide. The samples will be run on a denaturing polyacrylamide gel to separate cleaved and uncleaved DNA substrates. The results will be visualized and the cleavage rates of the target and non-target strands by the wild-type and engineered variants will be determined. To more clearly differentiate between changes to target binding vs the rate of catalysis of the nucleolytic reaction itself, the protein concentration will be titrated over a range from 10 nM to 1 uM and cleavage rates will be determined at each concentration to generate a pseudo-Michaelis-Menten fit and determine the kcat* and KM*. Changes to KM* are indicative of altered binding, while changes to kcat* are indicative of altered catalysis.

### Example 7: The PASS Assay Identifies CasX Protein Variants of Differing PAM Sequence Specificity

[0748] The purpose of the experiment was to identify the PAM sequence specificities of CasX proteins 2 (SEQ ID NO: 2), 491 (SEQ ID NO: 126), 515 (SEQ ID NO: 133), 533 (SEQ ID NO: 43663), 535 (SEQ ID NO: 43665), 668 (SEQ ID NO: 43797), and 672 (SEQ ID NO: 43800). To accomplish this, the HEK293 cell line PASS_V1.01 or PASS_V1.02 was treated with the above CasX proteins in at least two replicate experiments, and Next-generation sequencing (NGS) was performed to calculate the percent editing using a variety of spacers at their intended target sites.

[0749] Materials and Methods: A multiplexed pooled approach was taken to assay clonal protein variants using the PASS system. Briefly, two pooled HEK cell lines were generated and termed PASS_V1.01 and PASS_V1.02. Each cell within the pool contained a genome-integrated single-guide RNA (sgRNA), paired with a specific target site. After transfection of protein-expression constructs, editing at a specific target by a specific spacer could be quantified by NGS. Each guide-target pair was designed to provide data related to activity, specificity, and targetability of the CasX-guide RNP complex.

[0750] Paired spacer-target sequences were synthesized by Twist Biosciences and obtained as an equimolar pool of oligonucleotides. This pool was amplified by PCR and cloned by Golden Gate cloning to generate a final library of plasmids named p77. Each plasmid contained a sgRNA expression element and a target site, along with a GFP expression element. The sgRNA expression element consisted of a U6 promoter driving transcription of gRNA scaffold 174 (SEQ ID NO:2238), followed by a spacer sequence which would target the RNP of the guide and CasX variant to the intended target site. 250 possible unique, paired spacer-target synthetic sequences were designed and synthesized. A pool of lentivirus was then produced from this plasmid library using the LentiX production system (Takara Bio USA, Inc) according to the manufacturer's instructions. The resulting viral preparation was then quantified by qPCR and transduced into a standard HEK293 cell line at a low multiplicity of infection so as to generate single copy integrations. The resulting cell line was then purified by fluorescence-activated cell sorting (FACS) to complete the production of PASS_V1.01 or PASS_V1.02. A cell line was then seeded in six-well plate format and treated in duplicate with either water or was transfected with 2 μg of plasmid p67, delivered by Lipofectamine Transfection Reagent (ThermoFisher) according to the manufacturer's instructions. Plasmid p67 contains an EF-1alpha promoter driving expression of a CasX protein tagged with the SV40 Nuclear Localization Sequence. After two days, treated cells were collected, lysed, and genomic DNA was extracted using a genomic DNA isolation kit (Zymo Research). Genomic DNA was then PCR amplified with custom primers to generate amplicons compatible with Illumina NGS and sequenced on a NextSeq instrument. Sample reads were demultiplexed and filtered for quality. Editing outcome metrics (fraction of reads with indels) were then quantified for each spacer-target synthetic sequence across treated samples.

[0751] To assess the PAM sequence specificity for a CasX protein, editing outcome metrics for four different PAM sequences were categorized. For TTC PAM target sites, 48 different spacer-target pairs were quantified; for ATC, CTC, and GTC PAM target sites, 14, 22, and 11 individual target sites were quantified, respectively. For some CasX proteins, replicate experiments were repeated dozens of times over several months. For each of these experiments, the average editing efficiency was calculated for each of the above described spacers. The average editing efficiency across the four categories of PAM sequence was then calculated from all such experiments, along with the standard deviation of these measurements.

[0752] Results: Table 12 lists the average editing efficiency across PAM categories and across CasX protein variants, along with the standard deviation of these measurements. The number of measurements for each category is also indicated. These data indicate that the engineered CasX variants 491 and 515 are specific for the canonical PAM sequence TTC, while other engineered variants of CasX performed more or less efficiently at the PAM sequences tested. In particular, the average rank order of PAM preferences for CasX 491 is TTC>>ATC>CTC>GTC, or TTC>>ATC>GTC>CTC for CasX 515, while the wild-type CasX 2 exhibits an average rank order of TTC>>GTC>CTC>ATC. Note that for the lower editing PAM sequences the error of these average measurements is high. In contrast, CasX variants 535, 668, and 672 have considerably broader PAM recognition, with a rank order of TTC>CTC>ATC>GTC. Finally, CasX 533 exhibits a completely re-ordered ranking relative to the WT CasX, ATC>CTC>>GTC>TTC. These data can be used to engineer maximally-active therapeutic CasX molecules for a target DNA sequence of interest.

[0753] Under the conditions of the experiments, a set of CasX proteins was identified that are improved for double-stranded DNA cleavage in human cells at target DNA sequences associated with a PAM of sequence TTC, ATC, CTC, or GTC, supporting that CasX variants with an altered spectrum of PAM specificity, relative to wild-type CasX, can be generated.

TABLE 12
Average editing of selected CasX proteins at spacers associated with PAM sequences
of TTC, ATC, CTC, or GTC

| | PAM | Average Percent | Standard | Number of |
|---|---|---|---|---|
| CasX Name | Sequence | Editing | Deviation | Measurements |
| 2 | ATC | 0.40 | 1.35 | 336 |
| 2 | CTC | 0.46 | 2.29 | 528 |
| 2 | GTC | 0.69 | 6.27 | 264 |
| 2 | TTC | 5.28 | 7.34 | 1152 |
| 491 | ATC | 6.86 | 8.29 | 364 |
| 491 | CTC | 4.54 | 6.40 | 572 |
| 491 | GTC | 3.40 | 6.68 | 286 |
| 491 | TTC | 40.41 | 23.13 | 1248 |
| 515 | ATC | 4.47 | 5.49 | 252 |
| 515 | CTC | 3.36 | 4.80 | 396 |
| 515 | GTC | 3.65 | 10.75 | 198 |
| 515 | TTC | 36.75 | 24.89 | 864 |
| 533 | ATC | 47.50 | 15.86 | 96 |
| 533 | CTC | 25.90 | 14.74 | 28 |
| 533 | GTC | 6.34 | 8.36 | 44 |
| 533 | TTC | 0.87 | 3.05 | 22 |
| 535 | ATC | 9.70 | 10.20 | 56 |
| 535 | CTC | 11.77 | 13.59 | 88 |
| 535 | GTC | 7.62 | 15.04 | 44 |
| 535 | TTC | 29.29 | 18.78 | 192 |
| 668 | ATC | 44.69 | 24.40 | 56 |
| 668 | CTC | 46.14 | 26.57 | 88 |
| 668 | GTC | 30.48 | 24.06 | 44 |
| 668 | TTC | 55.34 | 28.59 | 192 |
| 672 | ATC | 25.51 | 20.85 | 56 |
| 672 | CTC | 30.05 | 22.95 | 88 |
| 672 | GTC | 14.21 | 13.38 | 44 |
| 672 | TTC | 52.36 | 27.64 | 192 |

### Example 8: CasX:gRNA In Vitro Cleavage Assays

### 1. Assembly of RNP

[0754] Purified wild-type and RNP of CasX and single guide RNA (sgRNA) were either prepared immediately before experiments or prepared and snap-frozen in liquid nitrogen and stored at −80° C. for later use. To prepare the RNP complexes, the CasX protein was incubated with sgRNA at 1:1.2 molar ratio. Briefly, sgRNA was added to Buffer #1 (25 mM NaPi, 150 mM NaCl, 200 mM trehalose, 1 mM MgCl2), then the CasX was added to the sgRNA solution, slowly with swirling, and incubated at 37° C. for 10 min to form RNP complexes. RNP complexes were filtered before use through a 0.22 m Costar 8160 filters that were pre-wet with 200 μl Buffer #1. If needed, the RNP sample was concentrated with a 0.5 ml Ultra 100-K_{d} cutoff filter, (Millipore part #UFC510096), until the desired volume was obtained. Formation of competent RNP was assessed as described below.

### 2. Determining Cleavage-Competent Fractions for Protein Variants Compared to Wild-Type Reference CasX

[0755] The ability of CasX variants to form active RNP compared to reference CasX was determined using an in vitro cleavage assay. The beta-2 microglobulin (B2M) 7.37 target for the cleavage assay was created as follows. DNA oligos with the sequence TGAAGCTGACAGCATTCGGGCCGAGATGTCTCGCTCCGTGGCCTTAGCTGTGCTCGC GCT (non-target strand, NTS (SEQ ID NO: 364)) and AGCGCGAGCACAGCTAAGGCCACGGAGCGAGACATCTCGGCCCGAATGCTGTCAGC TTCA (target strand, TS (SEQ ID NO: 365)) were purchased with 5′ fluorescent labels (LI-COR IRDye 700 and 800, respectively). dsDNA targets were formed by mixing the oligos in a 1:1 ratio in 1×cleavage buffer (20 mM Tris HCl pH 7.5, 150 mM NaCl, 1 mM TCEP, 5% glycerol, 10 mM MgCl2), heating to 95° C. for 10 minutes, and allowing the solution to cool to room temperature.

[0756] CasX RNPs were reconstituted with the indicated CasX and guides (see graphs) at a final concentration of 1 μM with 1.5-fold excess of the indicated guide unless otherwise specified in 1×cleavage buffer (20 mM Tris HCl pH 7.5, 150 mM NaCl, 1 mM TCEP, 5% glycerol, 10 mM MgCl2) at 37° C. for 10 min before being moved to ice until ready to use. The 7.37 target was used, along with sgRNAs having spacers complementary to the 7.37 target.

[0757] Cleavage reactions were prepared with final RNP concentrations of 100 nM and a final target concentration of 100 nM. Reactions were carried out at 37° C. and initiated by the addition of the 7.37 target DNA. Aliquots were taken at 5, 10, 30, 60, and 120 minutes and quenched by adding to 95% formamide, 20 mM EDTA. Samples were denatured by heating at 95° C. for 10 minutes and run on a 10% urea-PAGE gel. The gels were either imaged with a LI-COR Odyssey CLx and quantified using the LI-COR Image Studio software or imaged with a Cytiva Typhoon and quantified using the Cytiva IQTL software. The resulting data were plotted and analyzed using Prism. We assumed that CasX acts essentially as a single-turnover enzyme under the assayed conditions, as indicated by the observation that sub-stoichiometric amounts of enzyme fail to cleave a greater-than-stoichiometric amount of target even under extended time-scales and instead approach a plateau that scales with the amount of enzyme present. Thus, the fraction of target cleaved over long time-scales by an equimolar amount of RNP is indicative of what fraction of the RNP is properly formed and active for cleavage. The cleavage traces were fit with a biphasic rate model, as the cleavage reaction clearly deviates from monophasic under this concentration regime, and the plateau was determined for each of three independent replicates. The mean and standard deviation were calculated to determine the active fraction (Table 13).

[0758] Apparent active (competent) fractions were determined for RNPs formed for CasX2+guide 174+7.37 spacer, CasX119+guide 174+7.37 spacer, CasX457+guide 174+7.37 spacer, CasX488+guide 174+7.37 spacer, and CasX491+guide 174+7.37 spacer as shown in FIG. 1. The determined active fractions are shown in Table 13. All CasX variants had higher active fractions than the wild-type CasX2, indicating that the engineered CasX variants form significantly more active and stable RNP with the identical guide under tested conditions compared to wild-type CasX. This may be due to an increased affinity for the sgRNA, increased stability or solubility in the presence of sgRNA, or greater stability of a cleavage-competent conformation of the engineered CasX:sgRNA complex. An increase in solubility of the RNP was indicated by a notable decrease in the observed precipitate formed when CasX457, CasX488, or CasX491 was added to the sgRNA compared to CasX2.

### 3. In Vitro Cleavage Assays—Determining Cleavage-Competent Fractions for Single Guide Variants Relative to Reference Single Guides

[0759] Cleavage-competent fractions were also determined using the same protocol for CasX2.2.7.37, CasX2.32.7.37, CasX2.64.7.37, and CasX2.174.7.37 to be 16±3%, 13±3%, 5±2%, and 22±5%, as shown in FIG. 2 and Table 11.

[0760] A second set of guides were tested under different conditions to better isolate the contribution of the guide to RNP formation. Guides 174, 175, 185, 186, 196, 214, and 215 with 7.37 spacer were mixed with CasX 491 at final concentrations of 1 μM for the guide and 1.5 μM for the protein, rather than with excess guide as before. Results are shown in FIG. 3 and Table 11. Many of these guides exhibited additional improvement over 174, with 185 and 196 achieving 91±4% and 91±1% competent fractions, respectively, compared with 80±9% for 174 under these guide-limiting conditions.

[0761] The data indicate that both CasX variants and sgRNA variants are able to form a higher degree of active RNP with guide RNA compare to wild-type CasX and wild-type sgRNA.

[0762] The apparent cleavage rates of CasX variants 119, 457, 488, and 491 compared to wild-type reference CasX were determined using an in vitro fluorescent assay for cleavage of the target 7.37.

### 4. In Vitro Cleavage Assays—Determining k_{cleave} for CasX Variants Compared to Wild-Type Reference CasX

[0763] CasX RNPs were reconstituted with the indicated CasX (see FIG. 4) at a final concentration of 1 μM with 1.5-fold excess of the indicated guide in 1×cleavage buffer (20 mM Tris HCl pH 7.5, 150 mM NaCl, 1 mM TCEP, 5% glycerol, 10 mM MgCl2) at 37° C. for 10 min before being moved to ice until ready to use. Cleavage reactions were set up with a final RNP concentration of 200 nM and a final target concentration of 10 nM. Reactions were carried out at 37° C. except where otherwise noted and initiated by the addition of the target DNA. Aliquots were taken at 0.25, 0.5, 1, 2, 5, and 10 minutes and quenched by adding to 95% formamide, 20 mM EDTA. Samples were denatured by heating at 95° C. for 10 minutes and run on a 10% urea-PAGE gel. The gels were imaged with a LI-COR Odyssey CLx and quantified using the LI-COR Image Studio software or imaged with a Cytiva Typhoon and quantified using the Cytiva IQTL software. The resulting data were plotted and analyzed using Prism, and the apparent first-order rate constant of non-target strand cleavage (k_{cleave}) was determined for each CasX:sgRNA combination replicate individually. The mean and standard deviation of three replicates with independent fits are presented in Table 11, and the cleavage traces are shown in FIG. 5.

[0764] Apparent cleavage rate constants were determined for wild-type CasX2, and CasX variants 119, 457, 488, and 491 with guide 174 and spacer 7.37 utilized in each assay (see Table 11 and FIG. 4). All CasX variants had improved cleavage rates relative to the wild-type CasX2. CasX 457 cleaved more slowly than 119, despite having a higher competent fraction as determined above. CasX488 and CasX491 had the highest cleavage rates by a large margin; as the target was almost entirely cleaved in the first timepoint, the true cleavage rate exceeds the resolution of this assay, and the reported k_{cleave} should be taken as a lower bound.

[0765] The data indicate that the CasX variants have a higher level of activity, with k_{cleave} rates reaching at least 30-fold higher compared to wild-type CasX2.

### 5. In Vitro Cleavage Assays: Comparison of Guide Variants to Wild-Type Guides

[0766] Cleavage assays were also performed with wild-type reference CasX2 and reference guide 2 compared to guide variants 32, 64, and 174 to determine whether the variants improved cleavage. The experiments were performed as described above. As many of the resulting RNPs did not approach full cleavage of the target in the time tested, we determined initial reaction velocities (V₀) rather than first-order rate constants. The first two timepoints (15 and 30 seconds) were fit with a line for each CasX:sgRNA combination and replicate. The mean and standard deviation of the slope for three replicates were determined.

[0767] Under the assayed conditions, the V₀ for CasX2 with guides 2, 32, 64, and 174 were 20.4±1.4 nM/min, 18.4±2.4 nM/min, 7.8±1.8 nM/min, and 49.3±1.4 nM/min (see Table 13 and FIG. 5 and FIG. 6). Guide 174 showed substantial improvement in the cleavage rate of the resulting RNP (˜2.5-fold relative to 2, see FIG. 6), while guides 32 and 64 performed similar to or worse than guide 2. Notably, guide 64 supports a cleavage rate lower than that of guide 2 but performs much better in vivo (data not shown). Some of the sequence alterations to generate guide 64 likely improve in vivo transcription at the cost of a nucleotide involved in triplex formation. Improved expression of guide 64 likely explains its improved activity in vivo, while its reduced stability may lead to improper folding in vitro.

[0768] Additional experiments were carried out with guides 174, 175, 185, 186, 196, 214, and 215 with spacer 7.37 and CasX 491 to determine relative cleavage rates. To reduce cleavage kinetics to a range measurable with our assay, the cleavage reactions were incubated at 10° C. Results are in FIG. 7 and Table 13. Under these conditions, 215 was the only guide that supported a faster cleavage rate than 174. 196, which exhibited the highest active fraction of RNP under guide-limiting conditions, had kinetics essentially the same as 174, again highlighting that different variants result in improvements of distinct characteristics.

[0769] The data support that, under the conditions of the assay, use of the majority of the guide variants with CasX results in RNP with a higher level of activity than one with the wild-type guide, with improvements in initial cleavage velocity ranging from ˜2-fold to >6-fold. Numbers in Table 13 indicate, from left to right, CasX variant, sgRNA scaffold, and spacer sequence of the RNP construct. In the RNP construct names in the table below, CasX protein variant, guide scaffold and spacer are indicated from left to right.

### 6. In Vitro Cleavage Assays: Comparing Cleavage Rate and Competent Fraction of 515.174 and 526.174 Against Reference 2.2

[0770] We wished to compare engineered protein CasX variants 515 and 526 in complex with engineered single-guide variant 174 against the reference wild-type protein 2 (SEQ ID NO:2) and minimally-engineered guide variant 2 (SEQ ID NO:5). RNP complexes were assembled as described above, with 1.5-fold excess guide. Cleavage assays to determine k_{cleave} and competent fraction were performed as described above, with both performed at 37° C., and with different timepoints used to determine the competent fraction for the wild-type vs engineered RNPs due to the significantly different times needed for the reactions to near completion.

[0771] The resulting data clearly demonstrate the dramatic improvements made to RNP activity by engineering both protein and guide. RNPs of 515.174 and 526.174 had competent fractions of 76% and 91%, respectively, as compared to 16% for 2.2 (FIG. 8, Table 13). In the kinetic assay, both 515.174 and 526.174 cut essentially all of the target DNA by the first timepoint, exceeding the resolution of the assay and resulting in estimated cleavage rates of 17.10 and 19.87 min⁻¹, respectively (FIG. 9, Table 13). An RNP of 2.2, by contrast, cut on average less than 60% of the target DNA by the final 10-minute timepoint and has an estimated k_{cleave} nearly two orders of magnitude lower than the engineered RNPs. The modifications made to the protein and guide have resulted in RNPs that are more stable, more likely to form active particles, and cut DNA much more efficiently on a per-particle basis as well.

TABLE 13
Results of cleavage and RNP formation assays

| RNP | | Initial | Competent |
|---|---|---|---|
| Construct | k_{cleave}* | velocity* | fraction |
| 2.2.7.37 | | 20.4 + | 16 + 3% |
| | | 1.4 nM/min | |
| 2.32.7.37 | | 18.4 + | 13 + 3% |
| | | 2.4 nM/min | |
| 2.64.7.37 | | 7.8 + | 5 + 2% |
| | | 1.8 nM/min | |
| 2.174.7.37 | 0.51 + 0.01 min⁻¹ | 49.3 + | 22 + 5% |
| | | 1.4 nM/min | |
| 119.174.7.37 | 6.29 + 2.11 min⁻¹ | | 35 + 6% |
| 457.174.7.37 | 3.01 + 0.90 min⁻¹ | | 53 + 7% |
| 488.174.7.37 | 15.19 min⁻¹ | | 67% |
| 491.174.7.37 | 16.59 min⁻¹/0.293 | | 83% /17% |
| | min⁻¹ (10° C.) | | (guide-limited) |
| 491.175.7.37 | 0.089 min⁻¹ | | 5% |
| | (10° C.) | | (guide-limited) |
| 491.185.7.37 | 0.227 min⁻¹ | | 44% |
| | (10° C.) | | (guide-limited) |
| 491.186.7.37 | 0.099 min⁻¹ | | 11% |
| | (10° C.) | | (guide-limited) |
| 491.196.7.37 | 0.292 min⁻¹ | | 46% |
| | (10° C.) | | (guide-limited) |
| 491.214.7.37 | 0.284 min⁻¹ | | 30% |
| | (10° C.) | | (guide-limited) |
| 491.215.7.37 | 0.398 min⁻¹ | | 38% |
| | (10° C.) | | (guide-limited) |
| 515.174.7.37 | 17.10 min⁻¹* | | 76% |
| 526.174.7.37 | 19.87 min⁻¹* | | 91% |

*Mean and standard deviation
**Rate exceeds resolution of assay

### Example 9: Testing Effects of Spacer Length on In Vitro Cleavage Kinetics

[0772] Ribonuclear protein complexes (RNP) of two CasX variants and guide RNA with spacers of varying length were tested for in vitro cleavage activity to determine what spacer length supports the most efficient cleavage of a target nucleic acid and whether spacer length preference changes with the protein.

### Methods:

[0773] Ribonuclear protein complexes (RNP) of CasX and guide RNA with spacers of varying length were tested for in vitro cleavage activity to determine what spacer length supports the most efficient cleavage of a target nucleic acid.

[0774] CasX variant 515 and 526 were purified as described above. Guides with scaffold 174 (SEQ ID NO: 2238) were prepared by in vitro transcription (IVT). IVT templates were generated by PCR using Q5 polymerase (NEB M0491) according to the recommended protocol, template oligos for each scaffold backbone, and amplification primers with the T7 promoter and the 7.37 spacer (GGCCGAGATGTCTCGCTCCG; targeting tdTomato (SEQ ID NO: 316)) of 20 nucleotides or truncated from the 3′ end to 18 or 19 nucleotides. Spacer sequences as well as the oligonucleotides used to generate each template are shown in Table 14. The resulting templates were then used with T7 RNA polymerase to produce RNA guides according to standard protocols. The guides were purified using denaturing polyacrylamide gel electrophoresis and refolded prior to use.

[0775] CasX RNPs were reconstituted by diluting CasX to 1 μM in 1×cleavage buffer (20 mM Tris HCl pH 7.5, 150 mM NaCl, 1 mM TCEP, 5% glycerol, 10 mM MgCl2) and adding sgRNA to 1.2 μM and incubating at 37° C. for 10 min before being moved to ice until ready to use. Fluorescently-labeled 7.37 target DNA was purchased as individual oligonucleotides from Integrated DNA Technologies (full sequences in Table 14), and dsDNA target was prepared by heating an equimolar mix of the two complementary strands in 1×cleavage buffer and slow-cooling to room temperature.

[0776] RNPs were diluted in cleavage buffer to a final concentration of 200 nM and incubated at 10° C. without shaking. Cleavage reactions were initiated by the addition of 7.37 target DNA to a final concentration of 10 nM. Timepoints were taken at 0.25, 0.5, 1, 2, 5, 10, and 30 minutes. Timepoints were quenched by adding to an equal volume of 95% formamide, 20 mM EDTA. Samples were denatured by heating at 95° C. for 10 minutes and run on a 10% urea-PAGE gel. Gels were imaged with an Amersham Typhoon and analyzed with IQTL software. The resulting data were plotted and analyzed using Prism. The cleavage of the non-target strand was fit with a single exponential function to determine the apparent first-order rate constant (k_{cleave}).

### Results:

[0777] Cleavage rates were compared for CasX variants 515 and 526 in complex with sgRNAs with 18, 19, or 20 nucleotide spacers to determine which spacer length resulted in the most efficient cleavage for each protein variant. Consistent with other experiments performed with in vitro-transcribed sgRNA, the 18-nt spacer guide performed best for both protein variants (FIGS. 12A and B, Table 15). The 18-nt spacer was 1.4-fold faster than the 20-nt spacer for protein 515, and it was 3-fold faster than the 20-nt spacer for protein 526. The 19-nt spacer had intermediate activity for both proteins, though again the difference was more pronounced for variant 526. In general, spacers shorter than 20-nt have been observed to have increased activity across a range of proteins, spacers, and delivery methods, but the degree of improvement and the optimal spacer length have varied. These data show that two engineered proteins that are quite similar in sequence (different in only two residues) can have changes in activity as a result of spacer length that are similar in direction but substantially different in degree.

TABLE 14
Relevant sequences and oligonucleotides

| | | |
|---|---|---|
| 7.37 target | IR700- | SEQ ID NO: 364 |
| sequence non-target | TGAAGCTGACAGCATTCGGGCCGAGATG | |
| strand | TCTCGCTCCGTGGCCTTAGCTGTGCTCG | |
| | CGCT | |
| 7.37 target | IR800- | SEQ ID NO: 365 |
| sequence target | AGCGCGAGCACAGCTAAGGCCACGGAGC | |
| strand | GAGACATCTCGGCCCGAATGCTGTCAGC | |
| | TTCA | |
| 20-nt spacer | GGCCGAGATGTCTCGCTCCG | SEQ ID NO: 316 |
| sequence | | |
| 18-nt spacer | GGCCGAGATGTCTCGCTC | SEQ ID NO: 43974 |
| sequence | | |
| 19-nt spacer | GGCCGAGATGTCTCGCTCC | SEQ ID NO: 43975 |
| sequence | | |
| Scaffold 174 | GAAATTAATACGACTCACTATAACTGGC | SEQ ID NO: 269 |
| template fwd | GCTTTTATCTGATTACTTTGAGAGCCAT | |
| | CACCAGCGACTATGTCGTAGTGGGTAAA | |
| | GCT | |
| Scaffold 174 | CTTTGATGCTCCCTCCGAAGAGGGAGCT | SEQ ID NO: 270 |
| template rev | TTACCCACTACGACATAGTCGC | |
| T7 amplification | GAAATTAATACGACTCACTATA | SEQ ID NO: 259 |
| primer | | |
| Scaffold 174 20-nt | CGGAGCGAGACATCTCGGCCCTTTGATG | SEQ ID NO: 271 |
| spacer primer | CTCCCTCC | |
| Scaffold 174 18-nt | GAGCGAGACATCTCGGCCCTTTGATGCT | SEQ ID NO: 43976 |
| spacer primer | CCCTCC | |
| Scaffold 174 19-nt | GGAGCGAGACATCTCGGCCCTTTGATGC | SEQ ID NO: 43977 |
| spacer primer | TCCCTCC | |

TABLE 15
Cleavage rates of RNPs with truncated spacers

| | 515 k_{cleave} | 526 k_{cleave} |
|---|---|---|
| Spacer length | min⁻¹) | (min⁻¹) |
| 18 | 0.215 | 0.427 |
| 19 | 0.182 | 0.282 |
| 20 | 0.150 | 0.143 |

### Example 10: Assessing Binding Affinity to the Guide RNA

[0778] Purified wild-type and improved CasX will be incubated with synthetic single-guide RNA containing a 3′ Cy7.5 moiety in low-salt buffer containing magnesium chloride as well as heparin to prevent non-specific binding and aggregation. The sgRNA will be maintained at a concentration of 10 pM, while the protein will be titrated from 1 pM to 100 μM in separate binding reactions. After allowing the reaction to come to equilibrium, the samples will be run through a vacuum manifold filter-binding assay with a nitrocellulose membrane and a positively charged nylon membrane, which bind protein and nucleic acid, respectively. The membranes will be imaged to identify guide RNA, and the fraction of bound vs unbound RNA will be determined by the amount of fluorescence on the nitrocellulose vs nylon membrane for each protein concentration to calculate the dissociation constant of the protein-sgRNA complex. The experiment will also be carried out with improved variants of the sgRNA to determine if these mutations also affect the affinity of the guide for the wild-type and mutant proteins. We will also perform electromobility shift assays to qualitatively compare to the filter-binding assay and confirm that soluble binding, rather than aggregation, is the primary contributor to protein-RNA association.

### Example 11: Assessing Binding Affinity to the Target DNA

[0779] Purified wild-type and improved CasX will be complexed with single-guide RNA bearing a targeting sequence complementary to the target nucleic acid. The RNP complex will be incubated with double-stranded target DNA containing a PAM and the appropriate target nucleic acid sequence with a 5′ Cy7.5 label on the target strand in low-salt buffer containing magnesium chloride as well as heparin to prevent non-specific binding and aggregation. The target DNA will be maintained at a concentration of 1 nM, while the RNP will be titrated from 1 pM to 100 μM in separate binding reactions. After allowing the reaction to come to equilibrium, the samples will be run on a native 5% polyacrylamide gel to separate bound and unbound target DNA. The gel will be imaged to identify mobility shifts of the target DNA, and the fraction of bound vs unbound DNA will be calculated for each protein concentration to determine the dissociation constant of the RNP-target DNA ternary complex. The experiments are expected to demonstrate the improved binding affinity of the RNP comprising a CasX variant and gRNA variant compared to an RNP comprising a reference CasX and reference gRNA.

### Example 12: Improved Guide RNA Variants Demonstrate Enhanced On-Target Activity at Mouse and Human RHO Exon 1 Loci In Vitro

[0780] Experiments were conducted to identify novel engineered guide RNA variants with increased activity at different genomic targets, including the therapeutically-relevant mouse and human Rho exon 1. Previous assays identified many different “hotspot” regions (e.g., stem loop) within the scaffold sequences holding the potential to significantly increase editing efficiency as well as specificity (sequences in Table 16). Additionally, screens were conducted to identify scaffold variants that would increase the overall activity of our CRISPR system in an AAV vector across multiple different PAM-spacer combinations, without triggering off-target or non-specific editing. Achieving increased editing efficiency compared to current benchmark vectors would allow reduced viral vector doses to be used in in vivo studies, improving the safety of AAV-mediated CasX-guide systems.

### Materials and Methods:

[0781] New CasX variant sequences and gRNA scaffold variants were inserted into an AAV transgene construct for plasmid and viral vector validation. We conceptually broke up the AAV transgene between ITRs into different parts, which consisted of our therapeutic cargo (CasX and gRNA variants+spacer) and accessory elements (e.g., promoters, NLS, poly(A)) relevant to expression in mammalian cells. Each part in the AAV genome was separated by restriction enzyme sites to allow for modular cloning. Parts were ordered as gene fragments from Twist, were PCR amplified and digested with corresponding restriction enzymes, cleaned, then ligated into a vector digested with the same enzymes. New AAV constructs were then transformed into chemically competent E. coli (Turbos or Stbl3s), which were plated on Kanamycin LB-Agar plates following recovery at 37° C. for 1 hour. Single colonies were picked, mini-prepped, and Sanger-sequenced. Sequence-verified constructs were then cloned into a BbsI Golden-Gate assembly with spacer 12.7 (targeting tdTomato: CTGCATTCTAGTTGTGGTTT (SEQ ID NO: 43978)). Spacers were made by annealing two oligos and diluting in water. The transformation and miniprep protocols were then repeated and spacer-cloned vectors were sequence-verified again. Validated constructs were maxi-prepped. To assess the quality of maxi-preps, constructs were processed in two separate digests with XmaI (which cuts at several sites in each of the ITRs) and XhoI, which cuts once in the AAV genome. These digests and the uncut construct were then run on a 100 Agarose gel and imaged on a ChemiDoc. If the plasmid was >90% supercoiled, was the correct size, and the ITRs were intact, the construct moved on to be tested via nucleofection and subsequently used AAV vector production.

TABLE 16
Guide sequences cloned into p59.491.U6.X.Y. plasmids.
(X = guide; Y = spacer)

| Guide | Spacer | SEQ | | SEQ | | SEQ ID |
|---|---|---|---|---|---|---|
| Construct | Sequence | ID NO | Guide Sequence | ID NO | Guide + Spacer Sequence | NO |
| 174.12.7 | CTGCATT | 43978 | ACTGGCGCTTTT | 43983 | ACTGGCGCTTTTATCTGATTACT | 43993 |
| | CTAGTTG | | ATCTGATTACTT | | TTGAGAGCCATCACCAGCGACT | |
| | TGGTTT | | TGAGAGCCATCA | | ATGTCGTAGTGGGTAAAGCTCC | |
| | | | CCAGCGACTATG | | CTCTTCGGAGGGAGCATCAAAG | |
| | | | TCGTAGTGGGTA | | CTGCATTCTAGTTGTGGTTT | |
| | | | AAGCTCCCTCTT | | | |
| | | | CGGAGGGAGCA | | | |
| | | | TCAAAG | | | |
| 229.12.7 | CTGCATT | 43978 | ACTGGCACTTTT | 43984 | ACTGGCACTTTTATCTGATTACT | 43994 |
| | CTAGTTG | | ATCTGATTACTT | | TTGAGAGCCATCACCAGCGACT | |
| | TGGTT | | TGAGAGCCATCA | | ATGTCGTATGGGTAAAGCGCTT | |
| | | | CCAGCGACTATG | | ACGGACTTCGGTCCGTAAGAAG | |
| | | | TCGTATGGGTAA | | CATCAAAGCTGCATTCTAGTTG | |
| | | | AGCGCTTACGGA | | TGGTTT | |
| | | | CTTCGGTCCGTA | | | |
| | | | AGAAGCATCAA | | | |
| | | | AG | | | |
| 230.12.7 | CTGCATT | 43978 | ACTGGCACTTCT | 43985 | ACTGGCACTTCTATCTGATTAC | 43995 |
| | CTAGTTG | | ATCTGATTACTC | | TCTGAGAGCCATCACCAGCGAC | |
| | TGGTT | | TGAGAGCCATCA | | TATGTCGTATGGGTAAAGCGCT | |
| | | | CCAGCGACTATG | | TACGGACTTCGGTCCGTAAGAA | |
| | | | TCGTATGGGTAA | | GCATCAGAGCTGCATTCTAGTT | |
| | | | AGCGCTTACGGA | | GTGGTTT | |
| | | | CTTCGGTCCGTA | | | |
| | | | AGAAGCATCAG | | | |
| | | | A | | | |
| 231.12.7 | CTGCATT | 43978 | ACTGGCGCTTCT | 43986 | ACTGGCGCTTCTATCTGATTAC | 43996 |
| | CTAGTTG | | ATCTGATTACTC | | TCTGAGAGCCATCACCAGCGAC | |
| | TGGTT | | TGAGAGCCATCA | | TATGTCGTATGGGTAAAGCCGC | |
| | | | CCAGCGACTATG | | TTACGGACTTCGGTCCGTAAGA | |
| | | | TCGTATGGGTAA | | GGCATCAGAGCTGCATTCTAGT | |
| | | | AGCCGCTTACGG | | TGTGGTTT | |
| | | | ACTTCGGTCCGT | | | |
| | | | AAGAGGCATCA | | | |
| | | | GAG | | | |
| 232.12.7 | CTGCATT | 43978 | ACTGGCACTTCT | 43987 | ACTGGCACTTCTATCTGATTAC | 43997 |
| | CTAGTTG | | ATCTGATTACTC | | TCTGAGCGCCATCACCAGCGAC | |
| | TGGTT | | TGAGCGCCATCA | | TATGTCGTATGGGTAAAGCCGC | |
| | | | CCAGCGACTATG | | TTACGGACTTCGGTCCGTAAGA | |
| | | | TCGTATGGGTAA | | GGCATCAGAGCTGCATTCTAGT | |
| | | | AGCCGCTTACGG | | TGTGGTTT | |
| | | | ACTTCGGTCCGT | | | |
| | | | AAGAGGCATCA | | | |
| | | | GAG | | | |
| 233.12.7 | CTGCATT | 43978 | ACTGGCGCTTCT | 43988 | ACTGGCGCTTCTATCTGATTAC | 43998 |
| | CTAGTTG | | ATCTGATTACTC | | TCTGAGCGCCATCACCAGCGAC | |
| | TGGTT | | TGAGCGCCATCA | | TATGTCGTATGGGTAAAGCCGC | |
| | | | CCAGCGACTATG | | TTACGGACTTCGGTCCGTAAGA | |
| | | | TCGTATGGGTAA | | GGCATCAGAGCTGCATTCTAGT | |
| | | | AGCCGCTTACGG | | TGTGGTTT | |
| | | | ACTTCGGTCCGT | | | |
| | | | AAGAGGCATCA | | | |
| | | | GAG | | | |
| 234.12.7 | CTGCATT | 43978 | ACTGGCGCTTCT | 43989 | ACTGGCGCTTCTATCTGATTAC | 43999 |
| | CTAGTTG | | ATCTGATTACTC | | TCTGAGCGCCATCACCAGCGAC | |
| | TGGTT | | TGAGCGCCATCA | | TATGTCGTATGGGTAAAGCGCC | |
| | | | CCAGCGACTATG | | TTACGGACTTCGGTCCGTAAGG | |
| | | | TCGTATGGGTAA | | AGCATCAGAGCTGCATTCTAGT | |
| | | | AGCGCCTTACGG | | TGTGGTTT | |
| | | | ACTTCGGTCCGT | | | |
| | | | AAGGAGCATCA | | | |
| | | | GAG | | | |
| 235.12.7 | CTGCATT | 43978 | ACTGGCGCTTCT | 43990 | ACTGGCGCTTCTATCTGATTAC | 44000 |
| | CTAGTTG | | ATCTGATTACTC | | TCTGAGCGCCATCACCAGCGAC | |
| | TGGTT | | TGAGCGCCATCA | | TATGTCGTAGTGGGTAAAGCCG | |
| | | | CCAGCGACTATG | | CTTACGGACTTCGGTCCGTAAG | |
| | | | TCGTAGTGGGTA | | AGGCATCAGAGCTGCATTCTAG | |
| | | | AAGCCGCTTACG | | TTGTGGTT | |
| | | | GACTTCGGTCCG | | | |
| | | | TAAGAGGCATC | | | |
| | | | AGAG | | | |
| 236.12.7 | CTGCATT | 43978 | ACGGGACTTTCT | 43991 | ACGGGACTTTCTATCTGATTAC | 44001 |
| | CTAGTTG | | ATCTGATTACTC | | TCTGAAGTCCCTCACCAGCGAC | |
| | TGGTT | | TGAAGTCCCTCA | | TATGTCGTATGGGTAAAGCCGC | |
| | | | CCAGCGACTATG | | TTACGGACTTCGGTCCGTAAGA | |
| | | | TCGTATGGGTAA | | GGCATCAGAGCTGCATTCTAGT | |
| | | | AGCCGCTTACGG | | TGTGGTT | |
| | | | ACTTCGGTCCGT | | | |
| | | | AAGAGGCATCA | | | |
| | | | GAG | | | |
| 237.12.7 | CTGCATT | 43978 | ACCTGTAGTTCT | 43992 | ACCTGTAGTTCTATCTGATTACT | 44002 |
| | CTAGTTG | | ATCTGATTACTC | | CTGACTACAGTCACCAGCGACT | |
| | TGGTT | | TGACTACAGTCA | | ATGTCGTATGGGTAAAGCCGCT | |
| | | | CCAGCGACTATG | | TACGGACTTCGGTCCGTAAGAG | |
| | | | TCGTATGGGTAA | | GCATCAGAGCTGCATTCTAGTT | |
| | | | AGCCGCTTACGG | | GTGGTT | |
| | | | ACTTCGGTCCGT | | | |
| | | | AAGAGGCATCA | | | |
| | | | GAG | | | |
| 174.11.30 | AAGGG | 43979 | ACTGGCGCTTTT | 43983 | ACTGGCGCTTTTATCTGATTACT | 44003 |
| | GCTCCG | | ATCTGATTACTT | | TTGAGAGCCATCACCAGCGACT | |
| | CACCAC | | TGAGAGCCATCA | | ATGTCGTAGTGGGTAAAGCTCC | |
| | GCC | | CCAGCGACTATG | | CTCTTCGGAGGGAGCATCAAAG | |
| | | | TCGTAGTGGGTA | | AAGGGGCTCCGCACCACGCC | |
| | | | AAGCTCCCTCTT | | | |
| | | | CGGAGGGAGCA | | | |
| | | | TCAAAG | | | |
| 229.11.30 | AAGGG | 43979 | ACTGGCACTTTT | 43984 | ACTGGCACTTTTATCTGATTACT | 44004 |
| | GCTCCG | | ATCTGATTACTT | | TTGAGAGCCATCACCAGCGACT | |
| | CACCAC | | TGAGAGCCATCA | | ATGTCGTATGGGTAAAGCGCTT | |
| | GCC | | CCAGCGACTATG | | ACGGACTTCGGTCCGTAAGAAG | |
| | | | TCGTATGGGTAA | | CATCAAAGAAGGGGCTCCGCA | |
| | | | AGCGCTTACGGA | | CCACGCC | |
| | | | CTTCGGTCCGTA | | | |
| | | | AGAAGCATCAA | | | |
| | | | AG | | | |
| 230.11.30 | AAGGG | 43979 | ACTGGCACTTCT | 43985 | ACTGGCACTTCTATCTGATTAC | 44005 |
| | GCTCCG | | ATCTGATTACTC | | TCTGAGAGCCATCACCAGCGAC | |
| | CACCAC | | TGAGAGCCATCA | | TATGTCGTATGGGTAAAGCGCT | |
| | GCC | | CCAGCGACTATG | | TACGGACTTCGGTCCGTAAGAA | |
| | | | TCGTATGGGTAA | | GCATCAGAAAGGGGCTCCGCA | |
| | | | AGCGCTTACGGA | | CCACGCC | |
| | | | CTTCGGTCCGTA | | | |
| | | | AGAAGCATCAG | | | |
| | | | A | | | |
| 231.11.30 | AAGGG | 43979 | ACTGGCGCTTCT | 43986 | ACTGGCGCTTCTATCTGATTAC | 44006 |
| | GCTCCG | | ATCTGATTACTC | | TCTGAGAGCCATCACCAGCGAC | |
| | CACCAC | | TGAGAGCCATCA | | TATGTCGTATGGGTAAAGCCGC | |
| | GCC | | CCAGCGACTATG | | TTACGGACTTCGGTCCGTAAGA | |
| | | | TCGTATGGGTAA | | GGCATCAGAGAAGGGGCTCCG | |
| | | | AGCCGCTTACGG | | CACCACGCC | |
| | | | ACTTCGGTCCGT | | | |
| | | | AAGAGGCATCA | | | |
| | | | GAG | | | |
| 232.11.30 | AAGGG | 43979 | ACTGGCACTTCT | 43987 | ACTGGCACTTCTATCTGATTAC | 44007 |
| | GCTCCG | | ATCTGATTACTC | | TCTGAGCGCCATCACCAGCGAC | |
| | CACCAC | | TGAGCGCCATCA | | TATGTCGTATGGGTAAAGCCGC | |
| | GCC | | CCAGCGACTATG | | TTACGGACTTCGGTCCGTAAGA | |
| | | | TCGTATGGGTAA | | GGCATCAGAGAAGGGGCTCCG | |
| | | | AGCCGCTTACGG | | CACCACGCC | |
| | | | ACTTCGGTCCGT | | | |
| | | | AAGAGGCATCA | | | |
| | | | GAG | | | |
| 233.11.30 | AAGGG | 43979 | ACTGGCGCTTCT | 43988 | ACTGGCGCTTCTATCTGATTAC | 44008 |
| | GCTCCG | | ATCTGATTACTC | | TCTGAGCGCCATCACCAGCGAC | |
| | CACCAC | | TGAGCGCCATCA | | TATGTCGTATGGGTAAAGCCGC | |
| | GCC | | CCAGCGACTATG | | TTACGGACTTCGGTCCGTAAGA | |
| | | | TCGTATGGGTAA | | GGCATCAGAGAAGGGGCTCCG | |
| | | | AGCCGCTTACGG | | CACCACGCC | |
| | | | ACTTCGGTCCGT | | | |
| | | | AAGAGGCATCA | | | |
| | | | GAG | | | |
| 234.11.30 | AAGGG | 43979 | ACTGGCGCTTCT | 43989 | ACTGGCGCTTCTATCTGATTAC | 44009 |
| | GCTCCG | | ATCTGATTACTC | | TCTGAGCGCCATCACCAGCGAC | |
| | CACCAC | | TGAGCGCCATCA | | TATGTCGTATGGGTAAAGCGCC | |
| | GCC | | CCAGCGACTATG | | TTACGGACTTCGGTCCGTAAGG | |
| | | | TCGTATGGGTAA | | AGCATCAGAGAAGGGGCTCCG | |
| | | | AGCGCCTTACGG | | CACCACGCC | |
| | | | ACTTCGGTCCGT | | | |
| | | | AAGGAGCATCA | | | |
| | | | GAG | | | |
| 235.11.30 | AAGGG | 43979 | ACTGGCGCTTCT | 43990 | ACTGGCGCTTCTATCTGATTAC | 44010 |
| | GCTCCG | | ATCTGATTACTC | | TCTGAGCGCCATCACCAGCGAC | |
| | CACCAC | | TGAGCGCCATCA | | TATGTCGTAGTGGGTAAAGCCG | |
| | GCC | | CCAGCGACTATG | | CTTACGGACTTCGGTCCGTAAG | |
| | | | TCGTAGTGGGTA | | AGGCATCAGAGAAGGGGCTCC | |
| | | | AAGCCGCTTACG | | GCACCACGCC | |
| | | | GACTTCGGTCCG | | | |
| | | | TAAGAGGCATC | | | |
| | | | AGAG | | | |
| 236.11.30 | AAGGG | 43979 | ACGGGACTTTCT | 43991 | ACGGGACTTTCTATCTGATTAC | 44011 |
| | GCTCCG | | ATCTGATTACTC | | TCTGAAGTCCCTCACCAGCGAC | |
| | CACCAC | | TGAAGTCCCTCA | | TATGTCGTATGGGTAAAGCCGC | |
| | GCC | | CCAGCGACTATG | | TTACGGACTTCGGTCCGTAAGA | |
| | | | TCGTATGGGTAA | | GGCATCAGAGAAGGGGCTCCG | |
| | | | AGCCGCTTACGG | | CACCACGCC | |
| | | | ACTTCGGTCCGT | | | |
| | | | AAGAGGCATCA | | | |
| | | | GAG | | | |
| 237.11.30 | AAGGG | 43979 | ACCTGTAGTTCT | 43992 | ACCTGTAGTTCTATCTGATTACT | 44012 |
| | GCTCCG | | ATCTGATTACTC | | CTGACTACAGTCACCAGCGACT | |
| | CACCAC | | TGACTACAGTCA | | ATGTCGTATGGGTAAAGCCGCT | |
| | GCC | | CCAGCGACTATG | | TACGGACTTCGGTCCGTAAGAG | |
| | | | TCGTATGGGTAA | | GCATCAGAGAAGGGGCTCCGC | |
| | | | AGCCGCTTACGG | | ACCACGCC | |
| | | | ACTTCGGTCCGT | | | |
| | | | AAGAGGCATCA | | | |
| | | | GAG | | | |
| 174.11.31 | AAGTGG | 43980 | ACTGGCGCTTTT | 43983 | ACTGGCGCTTTTATCTGATTACT | 44013 |
| | CTCCGCA | | ATCTGATTACTT | | TTGAGAGCCATCACCAGCGACT | |
| | CCACGCC | | TGAGAGCCATCA | | ATGTCGTAgTGGGTAAAGCTCC | |
| | | | CCAGCGACTATG | | CTCTTCGGAGGGAGCATCAAAG | |
| | | | TCGTAgTGGGTA | | AAGTGGCTCCGCACCACGCC | |
| | | | AAGCTCCCTCTT | | | |
| | | | CGGAGGGAGCA | | | |
| | | | TCAAAG | | | |
| 235.11.31 | AAGTGG | 43980 | ACTGGCGCTTCT | 43990 | ACTGGCGCTTCTATCTGATTAC | 44014 |
| | CTCCGCA | | ATCTGATTACTC | | TCTGAGCGCCATCACCAGCGAC | |
| | CCACGCC | | TGAGCGCCATCA | | TATGTCGTAGTGGGTAAAGCCG | |
| | | | CCAGCGACTATG | | CTTACGGACTTCGGTCCGTAAG | |
| | | | TCGTAGTGGGTA | | AGGCATCAGAGAAGTGGCTCC | |
| | | | AAGCCGCTTACG | | GCACCACGCC | |
| | | | GACTTCGGTCCG | | | |
| | | | TAAGAGGCATC | | | |
| | | | AGAG | | | |
| 174.11.1 | AAGGGG | 43981 | ACTGGCGCTTTT | 43983 | ACTGGCGCTTTTATCTGATTACT | 44015 |
| | CTGCGTA | | ATCTGATTACTT | | TTGAGAGCCATCACCAGCGACT | |
| | CCACACC | | TGAGAGCCATCA | | ATGTCGTAGTGGGTAAAGCTCC | |
| | | | CCAGCGACTATG | | CTCTTCGGAGGGAGCATCAAAG | |
| | | | TCGTAGTGGGTA | | AAGGGGCTGCGTACCACACC | |
| | | | AAGCTCCCTCTT | | | |
| | | | CGGAGGGAGCA | | | |
| | | | TCAAAG | | | |
| 235.11.1 | AAGGGG | 43981 | ACTGGCGCTTCT | 43990 | ACTGGCGCTTCTATCTGATTAC | 44016 |
| | CTGCGTA | | ATCTGATTACTC | | TCTGAGCGCCATCACCAGCGAC | |
| | CCACACC | | TGAGCGCCATCA | | TATGTCGTAGTGGGTAAAGCCG | |
| | | | CCAGCGACTATG | | CTTACGGACTTCGGTCCGTAAG | |
| | | | TCGTAGTGGGTA | | AGGCATCAGAGAAGGGGCTG | |
| | | | AAGCCGCTTACG | | CGTACCACACC | |
| | | | GACTTCGGTCCG | | | |
| | | | TAAGAGGCATC | | | |
| | | | AGAG | | | |
| 235.NT | GGGTCT | 43982 | ACTGGCGCTTCT | 43990 | ACTGGCGCTTCTATCTGATTAC | 44017 |
| | TCGAGA | | ATCTGATTACTC | | TCTGAGCGCCATCACCAGCGAC | |
| | AGACCC | | TGAGCGCCATCA | | TATGTCGTAGTGGGTAAAGCCG | |
| | | | CCAGCGACTATG | | CTTACGGACTTCGGTCCGTAAG | |
| | | | TCGTAGTGGGTA | | AGGCATCAGAGGGGTCTTCG | |
| | | | AAGCCGCTTACG | | AGAAGACCC | |
| | | | GACTTCGGTCCG | | | |
| | | | TAAGAGGCATC | | | |
| | | | AGAG | | | |

### Reporter Cell Lines:

[0782] An immortalized neural progenitor cell line isolated from the Ai9-tdTomato was cultured in suspension in pre-equilibrated mNPC medium (DMEM/F12 with GlutaMax, 10 mM HEPES, 1× MEM Non-Essential Amino Acids, 1× Penicillin/Streptomycin, 1:1000 2-mercaptoethanol, 1× B-27 supplement, minus vitamin A, 1× N2 with supplemented growth factors bFGF and EGF). Prior to testing, cells were lifted using accutase, with gentle resuspension, monitoring for complete separation of the neurospheres. Cells were then quenched with media, spun down and resuspended in fresh media. Cells were counted and directly used for nucleofection or 10,000 cells were incubated in a 96-well plate coated with PLF (1× Poly-DL-ornithine hydrobromide, 10 mg/mL in sterile diH20, 1× Laminin, and 1× Fibronectin), 2 days prior to AAV transduction.

[0783] A HEK293T dual reporter cell line was generated by knocking into HEK293T cells two transgene cassettes that constitutively expressed exon 1 of the human RHO gene linked to GFP and exon 1 of the human P23H.RHO gene linked to mscarlet. The modified cells were expanded by serial passage every 3-5 days and maintained in Fibroblast (FB) medium, consisting of Dulbecco's Modified Eagle Medium (DMEM; Corning Cellgro, #10-013-CV) supplemented with 10% fetal bovine serum (FBS; Seradigm, #1500-500), and 100 Units/mL penicillin and 100 mg/mL streptomycin (100×-Pen-Strep; GIBCO #15140-122), and can additionally include sodium pyruvate (100×, ThermoFisher #11360070), non-essential amino acids (100× ThermoFisher #11140050), HEPES buffer (100× ThermoFisher #15630080), and 2-mercaptoethanol (1000× ThermoFisher #21985023). The cells were incubated at 37° C. and 5% C02. After 1-2 weeks, GFP+/mscarlet+ cells were bulk-sorted into FB medium. The reporter lines were expanded by serial passage every 3-5 days and maintained in FB medium in an incubator at 37° C. and 5% C02. Reporter clones were generated by a limiting dilution method. The clonal lines were characterized via flow cytometry, genomic sequencing, and functional modification of the RHO locus using a previously validated RHO targeting CasX molecule. The optimal reporter lines were identified as ones that i) had a single copies of WTRHO.GFP and mutRHO.mscarlet correctly integrated per cell, ii) maintained doubling times equivalent to unmodified cells, and iii) resulted in reduction in GFP and mscarlet fluorescence upon disruption of the RHO gene when assayed using the methods described below.

### Nucleofection:

[0784] AAV cis-plasmids driving expression of the CasX-scaffold-guide system were nucleofected in mNPCs using the Lonza P3 Primary Cell 96-well Nucleofector Kit. For the ARPE-19 line, the Lonza SF solution and supplement was used. Plasmids were diluted to concentrations of 200 ng/μl, 100 ng/μL. 5 μL of DNA per construct was added to the P3 or SF solution containing 200,000 tdTomato mNPCs or ARPE-19 cells respectively. The combined solution was nucleofected using a Lonza 4D Nucleofector System according to manufacturer's guidelines. Following nucleofection, the solution was quenched with appropriate culture media. The solution was then aliquoted in triplicate (approx. 67,000 cells per well) in a 96-well plate. 48 hours after transfection, treated cells were replenished with fresh mNPC media containing growth factors. 5 days after transfection, tdTomato mNPCs were lifted and activity was assessed by FACS.

### AAV Production:

[0785] Suspension HEK293T cells were adapted from parental HEK293T and grown in FreeStyle 293 media. For screening purposes, small scale cultures (20-30 mL cultured in 125 mL Erlenmeyer flasks and agitated at 110 rpm) were diluted to a density of 1.5e+6 cells/mL on the day of transfection. Endotoxin-free pAAV plasmids with the transgene flanked by ITR repeats were co-transfected with plasmids supplying the adenoviral helper genes for replication and AAV rep/cap genome using PEIMax (Polysciences) in serum-free OPTIMEM media. Cultures were supplemented with 10% CDM4HEK293 (HyClone) 3 hours post-transfection. Three days later, cultures were centrifuged at 1000 rpm for 10 minutes to separate the supernatant from the cell pellet. The supernatant was mixed with 40% PEG 2.5M NaCl (8% final concentration) and incubated on ice for at least 2 hours to precipitate AAV viral particles. The cell pellet, containing the majority of the AAV vectors, was resuspended in lysis media (0.15M NaCl, 50 mM Tris HCl, 0.05% Tween, pH 8.5), sonicated on ice (15 seconds, 30% amplitude) and treated with Benzonase (250 U/μL, Novagen) for 30 minutes at 37° C. Crude lysate and PEG-treated supernatant were then spin at 4000 rpm for 20 minutes at 4° C. to resuspend the PEG precipitated AAV (pellet) with cell debris-free crude lysate (supernatant). clarified further using 0.45 μm filter.

[0786] To determine the viral genome titer, 1 μL from crude lysate viruses was digested with DNase and ProtK, followed by quantitative PCR. 5 μL of digested virus was used in a 25 μL qPCR reaction composed of IDT primetime master mix and a set of primer and 6′FAM/Zen/IBFQ probe (IDT) designed to amplify the CMV promoter region. Ten-fold serial dilutions (5 μl each of 2e+9 to 2e+4 DNA copies/mL) of an AAV ITR plasmid was used as reference standards to calculate the titer (viral genome (vg)/mL) of viral samples. QPCR program was set up as: initial denaturation step at 95° C. for 5 minutes, followed by 40 cycles of denaturation at 95° C. for 1 min and annealing/extension at 60° C. for 1 min.

### AAV Transduction:

[0787] 10,000 cells/well of mNPCs were seeded on PLF-coated wells in 96-well plates 48-hours before AAV transduction. All viral infection conditions were performed in triplicate, with normalized number of vg among experimental vectors, in a series of 3-fold dilution of multiplicity of infection (MOI) ranging from ˜1.0e+6 to 1.0e+4 vg/cell. Calculations were based on an estimated number of 20,000 cells per well at the time of transfection. Final volume of 50 μL of AAV vectors diluted in pre-equilibrated mNPC medium supplemented with bFGF/EGF growth factors (20 ng/ml final concentration) were applied to each well. 48 hours post-transfection, complete media change was performed with fresh media supplemented with growth factors. Editing activity (tdT+ cell quantification) was assessed by FACS 5 days post-transfection.

### Assessing Editing Activity by FACS:

[0788] 5 days after transfection, treated tdTomato mNPCs or ARPE-19 cells in 96-well plates were washed with dPBS and treated with 50 μL TrypLE and Trypsin (0.25%) for 15 and 5 minutes respectively. Following cell dissociation, treated wells were quenched with media containing DMEM, 10% FBS and 1× Penicillin/Streptomycin. Resuspended cells were transferred to round-bottom 96-well plates and centrifuged for 5 min at 1000 g. Cell pellets were then resuspended with dPBS containing 1× DAPI, and plates were loaded into an Attune NxT Flow Cytometer Autosampler. The Attune NxT flow cytometer was run using the following gating parameters: FSC-A×SSC-A to select cells, FSC-H×FSC-A to select single cells, FSC-A×VL1-A to select DAPI-negative alive cells, and FSC-A×YL1-A to select tdTomato positive cells.

NGS Analysis of Indels at mRHO Exon 1 Locus:

[0789] 5 days after transfection, treated tdTomato mNPCs in 96-well plates were washed with dPBS and treated with 50 μL TrypLE and Trypsin (0.25%) for 15 and 5 minutes respectively. Following cell dissociation, treated wells were quenched with media containing DMEM, 10% FBS and 1× Penicillin/Streptomycin. Cells were then spun down and resulting cell pellets washed with PBS prior to processing them for gDNA extraction using the Zymo mini DNA kit according to the manufacturer's instructions. For assessing editing levels occurring at the mouse RHO exon 1 locus, amplicons were amplified from 200 ng of gDNA with a set of primers, bead-purified (Beckman coulter, Agencourt Ampure XP) and then re-amplified to incorporate an Illumina adapter sequence and a 16 nt unique molecular identifier (UMI). Quality and quantification of the amplicon was assessed using a Fragment Analyzer DNA analyzer kit (Agilent, dsDNA 35-1500 bp). Amplicons were sequenced on the Illumina Miseq according to the manufacturer's instructions. Raw fastq files from sequencing were processed as follows: (1) the sequences were trimmed for quality and for adapter sequences using the program cutadapt (v. 2.1); (2) the sequences from read 1 and read 2 were merged into a single insert sequence using the program flash2 (v2.2.00); and (3) the consensus insert sequences were run through the program CRISPResso2 (v 2.0.29), along with the expected amplicon sequence and the spacer sequence. This program quantifies the percent of reads that were modified in a window around the 3′ end of the spacer (30 bp window centered at −3 bp from 3′ end of spacer). CasX activity was quantified as the total percent of reads that contain insertions, substitutions and/or deletions anywhere within this window.

### Results:

[0790] Different editing experiments were conducted to quantify on-target cleavage mediated by CasX 491 paired with novel gRNA scaffold variants (guide 174 & 229-237) with different spacers targeting multiple genomic loci of interest. Constructs were cloned into the AAV backbone p59, flanked by ITR2 sequences, driving expression of the protein Cas 491 under the control of a CMV promoter, as well the scaffold-spacer under the control of the human U6 promoter. The mNPC-tdT reporter cell lines was used to assess the dual-cut efficiency mediated by a single spacer at the tdTomato locus (spacer 12.7, TTCN PAM), as well as the single cut efficiency at the endogenous mouse RHO exon 1 locus (spacer 11.30, CTCN PAM). A dual reporter system integrated in an ARPE-19 derived cell line was also used to assess on-target editing at the exogenously expressed human WT Rho locus (spacers 11.1, CTCN PAM).

[0791] Scaffold variants with spacers 12.7 and 11.30 were tested via nucleofection in the mouse NPC cell line at two different doses indicated in FIG. 14 and FIG. 15, respectively. Constructs were compared to the current benchmark gRNA scaffold 174 activity. At both targeted loci, constructs of guide scaffold variants 231, 233, 234, and 235 performed at higher levels than the construct containing scaffold 174 (FIGS. 14 and 15). Scaffold 235 displayed a 2-fold increase in activity at mRHO exon 1 locus compared to scaffold 174. We further validated that scaffold 235 consistently improved activity without increased off-target cleavage by nucleofecting dual reporter ARPE-19 cell line with construct p59.491.174.11.1 and p59.491.235.11.1 as well as a non-target spacer control. Spacer 11.1 was targeting the exogenously expressed mRHO-GFP gene. Scaffold 235 displayed 3-fold increased activity compared to 174 (9% vs 3% of Rho-GFP-cells, respectively, FIGS. 16A & B). Allele-specificity was assessed by looking at percent of P23H—RHO-Scarlett-cell population, which sequence differs from WT by 1 bp.

[0792] Finally, we sought to demonstrate that these scaffold variants packaged efficiently in AAV and remained potent when delivered virally. mNPC transduced with AAV vectors expressing guide scaffold variants 174 and 235 with spacer 11.30 (on target, mouse WT RHO) and 11.31 (off-target, mouse P23 RHO) showed increased activity of constructs containing the 235 scaffold variant compared to scaffold 174 at on-target locus (>5-fold increase, FIGS. 17A & B) at 3.0e+5 MOI while no off-target indels were detectable.

[0793] The results support that scaffold variants with novel structural mutations can be engineered with increased activity in dual reporter systems with therapeutically-relevant genomic targets such as mouse and human RHO exon 1 loci. Furthermore, while the newly-characterized scaffold displayed an overall >2-fold increase in activity, no off-target cleavage with 1-bp mismatch spacer region was detected. This is relevant for allele-specific therapeutic strategy such as adRP P23H Rho, which mutated allele differs from WT sequence by 1 nucleotide, targeted by spacer 11.31. This study further validates the use of guide scaffold 235 in AAV vectors designed for P23H RHO rescue and genotoxic studies, as well as for other therapeutic targets.

### Example 13: CasX:gRNA Constructs for Editing of PTBP1

[0794] This example describes the methods to make and test compositions capable of modifying a PTBP1 locus.

### A) Method to Design PTBP1-Modifying Spacers:

[0795] 20 bp XTC PAM spacers are designed to target the following regions in the human genome:
[0796] (a) PTBP1 cis enhancer elements
[0797] (b) PTBP1 proximal non-coding genetic elements highly conserved across vertebrates (UCSC genome browser)
[0798] (c) PTBP1 genomic locus. The PTBP1 gene is defined as the sequence that spans chr19:797,075-812,327 of the human genome (GRCh38/hg38) (the notation refers to the chromosome 19 (chr19), starting at the 797,075 bp of that chromosome, and extending to the 812,327 bp of that chromosome).

[0799] PTBP1 targeting spacers may be similarly assembled from other genomes.

### B) Methods for Generating PTBP1 Targeting Constructs:

[0800] In order to generate PTBP1 targeting constructs, PTBP1 targeting spacers (representative examples listed below) are cloned into a base mammalian-expression plasmid construct (pStX) that is comprised of the following components: codon optimized CasX (construct CasX 491 (SEQ ID NO: 126) and guide 174 (SEQ ID NO: 2238)+NLS; and a mammalian selection marker, puromycin. Spacer sequence DNA will be ordered as single-stranded DNA (ssDNA) oligos from Integrated DNA Technologies (IDT) consisting of the spacer sequence and the reverse complement of this sequence. These two oligos are annealed together and cloned into pStX individually or in bulk by Golden Gate Assembly using T4 DNA Ligase (New England BioLabs Cat #M0202L) and an appropriate restriction enzyme for the plasmid. Assembled products are transformed into chemically- or electro-competent bacterial cells, plated on LB-Agar plates (LB: Teknova Cat #L9315, Agar: Quartzy Cat #214510) containing carbenicillin and incubated until colonies appeared. Individual colonies are picked and miniprepped using a Qiagen spin Miniprep Kit (Qiagen Cat #27104), following the manufacturer's protocol. The resultant plasmids will be sequenced using Sanger sequencing to ensure correct ligation. SaCas9 and SpyCas9 control plasmids, with spacers chosen based on Cas protein-specific PAMs prepared similarly to pStX plasmids described above.

### Example 14: Use of CasX:gNA Systems to Edit the Mouse PTBP1 Locus in Primary Mouse Astrocytes when Delivered Via CasX-Delivery Particles (XDPs) In Vitro

[0801] Experiments were performed to demonstrate that CasX and guide RNAs can edit at the mouse PTBP1 locus in cultured primary mouse astrocytes when delivered via CasX-delivery particles (XDPs).

### Materials and Methods:

### XDP Construct Cloning:

[0802] XDP plasmid constructs comprising sequences coding for CasX protein 491, guide scaffold variant 174, and a spacer targeting PTBP1 were transformed into chemically-competent E. coli cells, which were plated on kanamycin LB-agar plates following recovery at 37° C. for 1 hour. Single colonies were picked, mini-prepped, and Sanger-sequenced. Sequence-verified constructs were then cloned into an expression vector via Golden Gate assembly with the PTBP1-targeting spacers. PTBP1 spacers were randomly selected based on PAM availability; in this experiment, spacers 28.1 to 28.12 (see Table 17 for sequences) were tested in an initial screen to assess editing efficiency. Spacers were made by annealing two oligos and cloned via Golden Gate assembly with the appropriate restriction enzymes. Cloned spacers were subjected to transformation, mini-prepping, and Sanger-sequencing for verification as described.

TABLE 17
Spacers for targeting mouse PTBP1

| | | SEQ | | | SEQ |
|---|---|---|---|---|---|
| Spacer | Sequence | ID NO | Spacer | Sequence | ID NO |
| 28.1 | GUCUUCCGUCUUGACUGACG | 393 | 28.44 | CUAGACCAGACCAUGGCAGC | 436 |
| 28.2 | GUCUUGACUGACGGCCGUCC | 394 | 28.45 | UUUGGUGUGUCUCAGUACAG | 437 |
| 28.3 | AUUGGUCAAAAGGUUACUCC | 395 | 28.46 | AGGUGCGCCCGGCAUAAUGU | 438 |
| 28.4 | CCCUUGGAGUAACCUUUUGA | 396 | 28.47 | CUCCCACCUUUGCCAUCCCU | 439 |
| 28.5 | CGCUGCGGUCUGUGGGCGUG | 397 | 28.48 | CGCUCAUCCUGACCCCAGCG | 440 |
| 28.6 | GCUAUUCCUGCGCCUCCGCU | 398 | 28.49 | CCUCUCCCCAGAAGGAAGGG | 441 |
| 28.7 | UGCGCCUCCGCUCCGUUCCC | 399 | 28.5 | GGAGGCCCCUUCCCCUCUCC | 442 |
| 28.8 | CCGCGGGUCUCUUCCGUGUG | 400 | 28.51 | UUCUGGGGAGAGGGGAAGGG | 443 |
| 28.9 | GUGUGCCAUGGACGGGUAAG | 401 | 28.52 | GGGGAGAGGGGAAGGGGCCU | 444 |
| 28.10 | CAGCGGGGAUCCGACGAGCU | 402 | 28.53 | CUUCAAGCACCUCUGGCGAG | 445 |
| 28.11 | CCACGUGUGUCAGCAACGGC | 403 | 28.54 | AGCACCUCUGGCGAGGACGA | 446 |
| 28.12 | UCAUGAGCAGCUCUGCCUCA | 404 | 28.55 | AUCUACUAGGGACACUGCGU | 447 |
| 28.13 | CCCAGCUCGCCCUGUACCUG | 405 | 28.56 | UCCAUGCAUGCUCCGGCGGC | 448 |
| 28.14 | UGCCUCUGCCAGGUCCUUUC | 406 | 28.57 | UUUGCAGGCCUCUCUGUCCC | 449 |
| 28.15 | AUUGGCUGAAAAGGGAUAGG | 407 | 28.58 | CAGCACCUGCCAACCCUGGG | 450 |
| 28.16 | UGCUAUCGUUUCCAUUGGCU | 408 | 28.59 | GAUUGCUGACCAAAAGGACA | 451 |
| 28.17 | GCCAAUGGAAACGAUAGCAA | 409 | 28.6 | GUCCUUUUGGUCAGCAAUCU | 452 |
| 28.18 | AAGGUGACAACAGGAGCGCA | 410 | 28.61 | CCCGCUGCACAUCACCGUAG | 453 |
| 28.19 | GACAUGGAUGACUCUGGAAG | 411 | 28.62 | AAGGCGUCUACGGUGAUGUG | 454 |
| 28.2 | AGAGUCAUCCAUGUCAGAAA | 412 | 28.63 | UAUUGAACAGGAUCUUCACC | 455 |
| 28.21 | AAAGGGCAGCCCUAGGGAGA | 413 | 28.64 | CCUUCUUAUUGAACAGGAUC | 456 |
| 28.22 | GCAUGAGAAGGUUGGUAACC | 414 | 28.65 | AUAAGAAGGAGAACGCACUU | 457 |
| 28.23 | CCUUCAGCAUGAGAAGGUUG | 415 | 28.66 | AGCACAAGCCUGUGCCCUGU | 458 |
| 28.24 | UCCCCUUCAGCAUGAGAAGG | 416 | 28.67 | GGUGGCUCAUGGCUGGACAA | 459 |
| 28.25 | UCUCAAUGAAGGCCUGGUUC | 417 | 28.68 | ACCCUUUGUCCAGCCAUGAG | 460 |
| 28.26 | CAUGCUGAAGGGGAAGAACC | 418 | 28.69 | CGUGCAGCUUGUGCCCGUUC | 461 |
| 28.27 | UUGAGAUGAACACAGAGGAG | 419 | 28.7 | UGAAGCGGUGCAGCGGGGAG | 462 |
| 28.28 | UGGACAGCCCAUCUACAUCC | 420 | 28.71 | UGGAGCCUGGUUUCUUGAAG | 463 |
| 28.29 | CCAACCACAAAGAGCUCAAG | 421 | 28.72 | GGAAGUUCUUGGAGCCUGGU | 464 |
| 28.3 | UCCACAGCGUGCCCAGGCAG | 422 | 28.73 | AGAAACCAGGCUCCAAGAAC | 465 |
| 28.31 | AGACUGGACGGAGUUUACAG | 423 | 28.74 | AGAACAUCUUUCCACCCUCA | 466 |
| 28.32 | UGCAUCCACGGCAGCAGCGG | 424 | 28.75 | ACCCUCAGCUACCCUGCACC | 467 |
| 28.33 | ACAAUGAUCCUGAGCACUGG | 425 | 28.76 | UGGCCCACCCACAAACAAGA | 468 |
| 28.34 | ACCCAGUGACCCUGGACGUG | 426 | 28.77 | CCAGCAACGGUGGUGUGGUC | 469 |
| 28.35 | CACUUGGUCGGCCCCAGCUA | 427 | 28.78 | AGUUCUUCCAGUGAGUAAAG | 470 |
| 28.36 | CACAUCCUCUCUUGCAGAUC | 428 | 28.79 | UCCAGUGAGUAAAGCCCUGC | 471 |
| 28.37 | GGACGGUGCCAAACUUAGAG | 429 | 28.8 | AGUGAGUAAAGCCCUGCCUU | 472 |
| 28.38 | CUAAGUUUGGCACCGUCCUG | 430 | 28.81 | UCCUCCACCCUUAACCCUAC | 473 |
| 28.39 | UGGUGAACGUGAUGAUCUUC | 431 | 28.82 | UGCAGGGGUGGAGUGGGGGG | 474 |
| 28.4 | CCAAGAACAACCAGUUCCAG | 432 | 28.83 | AUCAGCGCCUGCACAGCCUC | 475 |
| 28.41 | AGGCGCUGCUGCAGUAUGCU | 433 | 28.84 | CGCCCAGGUCAUGGUUGUGC | 476 |
| 28.42 | GGCCAUCCAGGGACUGUGGG | 434 | 28.85 | AAGUCCACCAUCUAGGUGCC | 477 |
| 28.43 | CCAAGCUCACCAGUCUCAAU | 435 | | | |

### Xdp Production:

[0803] XDP containing ribonucleoproteins (RNPs) of CasX 491 protein and single guide RNA with scaffold 174 and a spacer targeting the PTBP1 locus were produced using either suspension-adapted or adherent HEK293T Lenti-X cells. The methods to produce XDPs are described in WO2021113772A1, incorporated by reference in its entirety.

[0804] Briefly, for XDPs produced in suspension, suspension-adapted Lenti-X cells, maintained in FreeStyle 293 Expression media, were seeded in 40 mL of media at 1.5E6 cells/mL just before transfection. The next day, Lenti-X cells were transfected with the following plasmids using PEI Max (Polypus): XDP structural plasmids (which encode the HIV-1 gag-pol structural components, as well as the CasX variant), a plasmid encoding a single guide RNA with scaffold 174 and a spacer targeting PTBP1, and a plasmid encoding VSV-G (glycoprotein 2 or GP2) for pseudotyping the XDP. Media was supplemented with CDM4HEK293 from Cytiva within 24 hours post-transfection. XDP-containing media was collected 72 hours post-transfection and filtered through a 0.45 m PES filter. The supernatant was concentrated and purified via centrifugation. XDPs were resuspended in 125 μL of freezing buffer (15% Trehalose, 150 mM NaCl in PBS).

[0805] For XDPs produced in adherent culture, HEK293T Lenti-X cells were maintained in 10% FBS supplemented DMEM with HEPES and Glutamax (Thermo Fisher). Cells were seeded in 15 cm dishes at 20×10E6 cells per dish in 20 mL of media. Cells were allowed to settle and grow for 24 hours before transfection. Once they reached 70-90% confluency, cells were transfected with the following plasmids using PEI Max (Polypus): XDP structural plasmids (also encoding CasX), a plasmid encoding a single guide with a spacer targeting PTBP1, and a plasmid encoding VSV-G (GP2). Media was aspirated from the plates 24 hours post-transfection and replaced with Opti-MEM (Thermo Fisher). XDP-containing media was collected 72 hours post-transfection and filtered through a 0.45 m PES filter. The supernatant was concentrated and purified via centrifugation. XDPs were resuspended in freezing buffer.

### XDP Transduction of Astrocytes In Vitro:

[0806] Mouse midbrain astrocytes were grown in BrainBits Nb Astro media supplemented with Pen/Strep using 10 cm plates coated with PLF (Poly-DL-ornithine hydrobromide, laminin, and fibronectin). Cells were trypsinized at 90% confluency and seeded on a 24-well tissue culture plate, also coated with PLF, at a density of 120,000 cells per well for the assay. Next day, XDP particles containing CasX RNPs with PTBP1-targeting spacers (28.1 to 28.12) were applied. Based on cell plating density and total volume of virion applied, the effective XDP MOI was ˜6E5; for the dose-dependency experiment depicted in FIG. 21, five-fold serial dilutions were tested, starting with the effective MOI of 6E5. Cells were fed with a 50% media exchange every other day. Five days post-transduction, cells were trypsinized for editing analysis by next-generation sequencing (NGS).

### NGS Processing and Analysis:

[0807] Genomic DNA (gDNA) from harvested cells were extracted using the Zymo Quick-DNA Miniprep Plus kit following the manufacturer's instructions. Target amplicons were formed by amplifying regions of interest from 200 ng of extracted gDNA with a set of primers specific to the mouse PTBP1 locus. These gene-specific primers contain an additional sequence at the 5′ end to introduce an Illumina adapter and a 16-nucleotide unique molecule identifier. Amplified DNA products were purified with the Ampure XP DNA cleanup kit. Quality and quantification of the amplicon were assessed using a Fragment Analyzer DNA Analysis kit (Agilent, dsDNA 35-1500 bp). Amplicons were sequenced on the Illumina Miseq according to the manufacturer's instructions. Raw fastq files from sequencing were quality-controlled and processed using cutadapt v2.1, flash2 v2.2.00, and CRISPResso2 v2.0.29. Each sequence was quantified for containing an insertion or deletion (indel) relative to the reference sequence, in a window around the 3′ end of the spacer (30 bp window centered at −3 bp from 3′ end of spacer). CasX activity was quantified as the total percent of reads that contain insertions, substitutions, and/or deletions anywhere within this window for each sample.

### Results:

[0808] An initial screen testing 12 spacers targeting the mouse PTBP1 locus using CasX variant 491 and scaffold variant 174, which were delivered as RNPs via XDPs, was performed in primary mouse astrocytes. These 12 spacers targeted either exon 1 or 3 of the murine PTBP1 gene (see FIG. 18 for exon region targeted by spacers). FIG. 19 shows the editing results of the initial screen testing and demonstrated that 11 out of 12 spacers were able to edit the target locus, with spacer 28.10 achieving the highest editing efficiency of ˜88%. Additional analysis showed that most mutations generated by these PTBP1-targeting spacers were deletions (FIG. 20). Further characterization of top spacer 28.10 revealed that editing of primary mouse midbrain astrocytes was able to occur in a dose-dependent manner, with >80% editing rate achieved at the highest MOI of 6E5 (FIG. 21).

[0809] The experiments demonstrate that CasX variant 491 and guide scaffold 174 with spacers targeting the mouse PTBP1 locus were able to edit on-target efficiently in primary mouse astrocytes when packaged as RNPs and delivered in vitro via XDPs.

### Example 15: Use of CasX:gNA Systems to Edit the Mouse PTBP1 Locus in Mouse Astrocytes when Packaged and Delivered Via a Single Adeno-Associated Virus (AAV) Vector In Vitro

[0810] Experiments were performed to demonstrate the following: 1) CasX and guide RNAs, when delivered via AAVs, can edit at the PTBP1 locus in cultured murine midbrain astrocytes; 2) the ability to encode, package, and deliver CasX with a dual-guide system within a single AAV vector particle for targeted editing, which is not achievable with Cas9-based systems; and 3) the ability to mark edited astrocytes with tdTomato fluorescence to track their conversion into neurons mediated by PTBP1-editing using our engineered dual-guide vector system with CasX in cultured primary mouse astrocytes.

### Materials and Methods:

### AAV Construct Cloning:

[0811] CasX variant 491 and guide scaffold variant 174 were used in these experiments. AAV constructs containing an astrocyte-specific promoter driving CasX expression, and two Pol III promoter-scaffold 174-spacer combinations (depicted in FIG. 22) were transformed into chemically-competent E. coli cells. Transformed cells were plated on kanamycin LB-agar plates following recovery at 37° C. for 1 hour, and single colonies were picked, mini-prepped, and Sanger-sequenced. Sequence-verified constructs were then assembled using Golden Gate cloning with the indicated combinations of spacers (see Table 18). Spacer 28.10 targeting PTBP1 was selected for this experiment because it demonstrated the highest editing activity, as described in Example 14. Spacers were made by annealing two oligos and cloned via Golden Gate assembly using the appropriate restriction enzymes. Sequence-validated constructs were maxi-prepped and subjected to quality assessment prior to transfection for AAV production.

TABLE 18
Sequences of AAV constructs with dual-guide system.
NT = non-targeting guide.

| Construct | Component | | SEQ |
|---|---|---|---|
| ID | Name | DNA Sequence | ID NO |
| 1 and 2 | 5' ITR | CCTGCAGGCAGCTGCGCGCTCGCTCGCTCACTGAGGCCGCCCGG | 44018 |
| | | GCGTCGGGCGACCTTTGGTCGCCCGGCCTCAGTGAGCGAGCGAG | |
| | | CGCGCAGAGAGGGAGTGGCCAACTCCATCACTAGGGGTTCCT | |
| | buffer sequence | GCGGCCTCTAGACTCGAG | 44019 |
| | GfaABCID | AACATATCCTGGTGTGGAGTAGGGGACGCTGCTCTGACAGAGGC | 44020 |
| | promoter | TCGGGGGCCTGAGCTGGCTCTGTGAGCTGGGGAGGAGGCAGACA | |
| | | GCCAGGCCTTGTCTGCAAGCAGACCTGGCAGCATTGGGCTGGCC | |
| | | GCCCCCCAGGGCCTCCTCTTCATGCCCAGTGAATGACTCACCTT | |
| | | GGCACAGACACAATGTTCGGGGTGGGCACAGTGCCTGCTTCCCG | |
| | | CCGCACCCCAGCCCCCCTCAAATGCCTTCCGAGAAGCCCATTGA | |
| | | GCAGGGGGCTTGCATTGCACCCCAGCCTGACAGCCTGGCATCTT | |
| | | GGGATAAAAGCAGCACAGCCCCCTAGGGGCTGCCCTTGCTGTGT | |
| | | GGCGCCACCGGCGGTGGAGAACAAGGCTCTATTCAGCCTGTGCC | |
| | | CAGGAAAGGGGATCAGGGGATGCCCAGGCATGGACAGTGGGTGG | |
| | | CAGGGGGGGAGAGGAGGGCTGTCTGCTTCCCAGAAGTCCAAGGA | |
| | | CACAAATGGGTGAGGGGAGAGCTCTCCCCATAGCTGGGCTGCGG | |
| | | CCCAACCCCACCCCCTCAGGCTATGCCAGGGGGTGTTGCCAGGG | |
| | | GCACCCGGGCATCGCCAGTCTAGCCCACTCCTTCATAAAGCCCT | |
| | | CGCATCCCAGGAGCGAGCAGAGCCAGAGCAGGTTGGAGAGGAGA | |
| | | CGCATCACCTCCGCTGCTCGCGGGGTCT | |
| | buffer sequence | ACCGGT | 44021 |
| | Kozak | GCCACC | 44022 |
| | Start codon | ATGGCC | 44023 |
| | SV40 NLS | CCAAAGAAGAAGCGGAAGGTC | 230 |
| | linker | TCTAGA | 44024 |
| | CasX 491 | CAAGAGATCAAGAGAATCAACAAGATCAGAAGGAGACTGGTCAA | 215 |
| | | GGACAGCAACACAAAGAAGGCCGGCAAGACAGGCCCCATGAAAA | |
| | | CCCTGCTCGTCAGAGTGATGACCCCTGACCTGAGAGAGCGGCTG | |
| | | GAAAACCTGAGAAAGAAGCCCGAGAACATCCCTCAGCCTATCAG | |
| | | CAACACCAGCAGGGCCAACCTGAACAAGCTGCTGACCGACTACA | |
| | | CCGAGATGAAGAAAGCCATCCTGCACGTGTACTGGGAAGAGTTC | |
| | | CAGAAAGACCCCGTGGGCCTGATGAGCAGAGTTGCTCAGCCTGC | |
| | | CAGCAAGAAGATCGACCAGAACAAGCTGAAGCCCGAGATGGACG | |
| | | AGAAGGGCAATCTGACCACAGCCGGCTTTGCCTGCTCTCAGTGT | |
| | | GGCCAGCCTCTGTTCGTGTACAAGCTGGAACAGGTGTCCGAGAA | |
| | | AGGCAAGGCCTACACCAACTACTTCGGCAGATGTAACGTGGCCG | |
| | | AGCACGAGAAGCTGATTCTGCTGGCCCAGCTGAAACCTGAGAAG | |
| | | GACTCTGATGAGGCCGTGACCTACAGCCTGGGCAAGTTTGGACA | |
| | | GAGAGCCCTGGACTTCTACAGCATCCACGTGACCAAAGAAAGCA | |
| | | CACACCCCGTGAAGCCCCTGGCTCAGATCGCCGGCAATAGATAC | |
| | | GCCTCTGGACCTGTGGGCAAAGCCCTGTCCGATGCCTGCATGGG | |
| | | AACAATCGCCAGCTTCCTGAGCAAGTACCAGGACATCATCATCG | |
| | | AGCACCAGAAGGTGGTCAAGGGCAACCAGAAGAGACTGGAAAGC | |
| | | CTGAGGGAGCTGGCCGGCAAAGAGAACCTGGAATACCCCAGCGT | |
| | | GACCCTGCCTCCTCAGCCTCACACAAAAGAAGGCGTGGACGCCT | |
| | | ACAACGAAGTGATCGCCAGAGTGAGAATGTGGGTCAACCTGAAC | |
| | | CTGTGGCAGAAGCTGAAACTGTCCAGGGACGACGCCAAGCCTCT | |
| | | GCTGAGACTGAAGGGCTTCCCTAGCTTCCCTCTGGTGGAAAGAC | |
| | | AGGCCAATGAAGTGGATTGGTGGGACATGGTCTGCAACGTGAAG | |
| | | AAGCTGATCAACGAGAAGAAAGAGGATGGCAAGGTTTTCTGGCA | |
| | | GAACCTGGCCGGCTACAAGAGACAAGAAGCCCTGAGGCCTTACC | |
| | | TGAGCAGCGAAGAGGACCGGAAGAAGGGCAAGAAGTTCGCCAGA | |
| | | TACCAGCTGGGCGACCTGCTGCTGCACCTGGAAAAGAAGCACGG | |
| | | CGAGGACTGGGGCAAAGTGTACGATGAGGCCTGGGAGAGAATCG | |
| | | ACAAGAAGGTGGAAGGCCTGAGCAAGCACATTAAGCTGGAAGAG | |
| | | GAAAGAAGGAGCGAGGACGCCCAATCTAAAGCCGCTCTGACCGA | |
| | | TTGGCTGAGAGCCAAGGCCAGCTTTGTGATCGAGGGCCTGAAAG | |
| | | AGGCCGACAAGGACGAGTTCTGCAGATGCGAGCTGAAGCTGCAG | |
| | | AAGTGGTACGGCGATCTGAGAGGCAAGCCCTTCGCCATTGAGGC | |
| | | CGAGAACAGCATCCTGGACATCAGCGGCTTCAGCAAGCAGTACA | |
| | | ACTGCGCCTTCATTTGGCAGAAAGACGGCGTCAAGAAACTGAAC | |
| | | CTGTACCTGATCATCAATTACTTCAAAGGCGGCAAGCTGCGGTT | |
| | | CAAGAAGATCAAACCCGAGGCCTTCGAGGCTAACAGATTCTACA | |
| | | CCGTGATCAACAAAAAGTCCGGCGAGATCGTGCCCATGGAAGTG | |
| | | AACTTCAACTTCGACGACCCCAACCTGATTATCCTGCCTCTGGC | |
| | | CTTCGGCAAGAGACAGGGCAGAGAGTTCATCTGGAACGATCTGC | |
| | | TGAGCCTGGAAACCGGCTCTCTGAAGCTGGCCAATGGCAGAGTG | |
| | | ATCGAGAAAACCCTGTACAACAGGAGAACCAGACAGGACGAGCC | |
| | | TGCTCTGTTTGTGGCCCTGACCTTCGAGAGAAGAGAGGTGCTGG | |
| | | ACAGCAGCAACATCAAGCCCATGAACCTGATCGGCGTGGACCGG | |
| | | GGCGAGAATATCCCTGCTGTGATCGCCCTGACAGACCCTGAAGG | |
| | | ATGCCCACTGAGCAGATTCAAGGACTCCCTGGGCAACCCTACAC | |
| | | ACATCCTGAGAATCGGCGAGAGCTACAAAGAGAAGCAGAGGACA | |
| | | ATCCAGGCCAAGAAAGAGGTGGAACAGCGCAGAGCCGGCGGATA | |
| | | CTCTAGGAAGTACGCCAGCAAGGCCAAGAATCTGGCCGACGACA | |
| | | TGGTCCGAAACACCGCCAGAGATCTGCTGTACTACGCCGTGACA | |
| | | CAGGACGCCATGCTGATCTTCGAGAATCTGAGCAGAGGCTTCGG | |
| | | CCGGCAGGGCAAGAGAACCTTTATGGCCGAGAGGCAGTACACCA | |
| | | GAATGGAAGATTGGCTCACAGCTAAACTGGCCTACGAGGGACTG | |
| | | AGCAAGACCTACCTGTCCAAAACACTGGCCCAGTATACCTCCAA | |
| | | GACCTGCAGCAATTGCGGCTTCACCATCACCAGCGCCGACTACG | |
| | | ACAGAGTGCTGGAAAAGCTCAAGAAAACCGCCACCGGCTGGATG | |
| | | ACCACCATCAACGGCAAAGAGCTGAAGGTTGAGGGCCAGATCAC | |
| | | CTACTACAACAGGTACAAGAGGCAGAACGTCGTGAAGGATCTGA | |
| | | GCGTGGAACTGGACAGACTGAGCGAAGAGAGCGTGAACAACGAC | |
| | | ATCAGCAGCTGGACAAAGGGCAGATCAGGCGAGGCTCTGAGCCT | |
| | | GCTGAAGAAGAGGTTTAGCCACAGACCTGTGCAAGAGAAGTTCG | |
| | | TGTGCCTGAACTGCGGCTTCGAGACACACGCCGATGAACAGGCT | |
| | | GCCCTGAACATTGCCAGAAGCTGGCTGTTCCTGAGAAGCCAAGA | |
| | | GTACAAGAAGTACCAGACCAACAAGACCACCGGCAACACCGACA | |
| | | AGAGGGCCTTTGTGGAAACCTGGCAGAGCTTCTACAGAAAAAAG | |
| | | CTGAAAGAAGTCTGGAAGCCCGCCGTG | |
| | linker | GGATCC | 44025 |
| | SV40 NLS | CCAAAAAAGAAGAGAAAGGTA | 44026 |
| | HA tag | TACCCATATGATGTCCCTGACTACGCT | 44027 |
| | linker + stop | GGATCCTAA | 44028 |
| | buffer sequence | GAATTCCTAGAGCTCGCTGATCAGCCTCGA | 44029 |
| | bGH poly(A) | CTGTGCCTTCTAGTTGCCAGCCATCTGTTGTTTGCCCCTCCCCC | 44030 |
| | | GTGCCTTCCTTGACCCTGGAAGGTGCCACTCCCACTGTCCTTTC | |
| | | CTAATAAAATGAGGAAATTGCATCGCATTGTCTGAGTAGGTGTC | |
| | | ATTCTATTCTGGGGGGTGGGGTGGGGCAGGACAGCAAGGGGGAG | |
| | | GATTGGGAAGAGAATAGCAGGCATGCTGGGGA | |
| | buffer sequence | GGTACCGT | 44031 |
| | U6 promoter | GAGGGCCTATTTCCCATGATTCCTTCATATTTGCATATACGATA | 44032 |
| | | CAAGGCTGTTAGAGAGATAATTGGAATTAATTTGACTGTAAACA | |
| | | CAAAGATATTAGTACAAAATACGTGACGTAGAAAGTAATAATTT | |
| | | CTTGGGTAGTTTGCAGTTTTAAAATTATGTTTTAAAATGGACTA | |
| | | TCATATGCTTACCGTAACTTGAAAGTATTTCGATTTCTTGGCTT | |
| | | TATATATCTTGTGGAAAGGAC | |
| | buffer sequence | GAAACACC | 44033 |
| | Scaffold 174 | ACTGGCGCTTTTATCTGATTACTTTGAGAGCCATCACCAGCGAC | 43983 |
| | | TATGTCGTAGTGGGTAAAGCTCCCTCTTCGGAGGGAGCATCAAA | |
| | | G | |
| | Spacer 1 | See specific dual guide combos below | |
| | buffer sequence | TTTTTTTTGGCTAGC | 44034 |
| | U6 promoter | GAGGGCCTATTTCCCATGATTCCTTCATATTTGCATATACGATA | 44032 |
| | | CAAGGCTGTTAGAGAGATAATTGGAATTAATTTGACTGTAAACA | |
| | | CAAAGATATTAGTACAAAATACGTGACGTAGAAAGTAATAATTT | |
| | | CTTGGGTAGTTTGCAGTTTTAAAATTATGTTTTAAAATGGACTA | |
| | | TCATATGCTTACCGTAACTTGAAAGTATTTCGATTTCTTGGCTT | |
| | | TATATATCTTGTGGAAAGGAC | |
| | buffer sequence | GAAACACC | 44033 |
| | Scaffold 174 | ACTGGCGCTTTTATCTGATTACTTTGAGAGCCATCACCAGCGAC | 43983 |
| | | TATGTCGTAGTGGGTAAAGCTCCCTCTTCGGAGGGAGCATCAAA | |
| | | G | |
| | Spacer 2 | See specific dual guide combos below | |
| | buffer sequence | TTTTTTTTGGCGGCCGC | 44035 |
| | 3′ ITR | AGGAACCCCTAGTGATGGAGTTGGCCACTCCCTCTCTGCGCGCT | 44036 |
| | | CGCTCGCTCACTGAGGCCGGGCGACCAAAGGTCGCCCGACGCCC | |
| | | GGGCTTTGCCCGGGCGGCCTCAGTGAGCGAGCGAGCGCGCAGCT | |
| | | GCCTGCAGG | |
| 1 | Spacer 1 (28.10) | CAGCGGGGATCCGACGAGCT | |
| | Spacer 2 (12.7) | CTGCATTCTAGTTGTGGTTT | 43978 |
| 2 | Spacer 1 (NT) | GGGTCTTCGAGAAGACCC | 43982 |
| | Spacer 2 (12.7) | CTGCATTCTAGTTGTGGTTT | 43978 |

### AAV Production:

[0812] Suspension-adapted HTEK293T cells were seeded in 20-30 mL of media at 1.5E6 cells/mL on the day of transfection. Endotoxin-free pAAV plasmids with the transgene flanked by ITR repeats were co-transfected with plasmids supplying the adenoviral helper genes for replication and AAV rep/cap genome using PEI Max (Polysciences) in serum-free Opti-MVEM media. Cultures were supplemented with 1000 CDM4HEK293 (HyClone) three hours post-transfection. Three days later, cultures were centrifuged to separate the supermatant from the cell pellet. The supernatant was mixed with 400% PEG 2.5M NaCl and incubated on ice to precipitate AAV viral particles. The cell pellet, containing majority of the AAV vectors, was resuspended in lysis media (0.15 M NaCl, 50 mM Tris HCl, 0.05% Tween, pH 8.5), sonicated on ice, and treated with Benzonase (250 U/μL, Novagen) for 30 minutes at 37° C. Crude lysate and PEG-treated supernatant were then centrifuged to resuspend the PEG-precipitated AAV with cell debris-free crude lysate, and then clarified further using a 0.45 μm filter.

[0813] To determine the viral genome (vg) titer, 1 μL from crude lysate virus was digested with DNase and ProtK, followed by quantitative PCR. 5 μL of digested virus was used in a 25 μL qPCR reaction composed of IDT primetime master mix and a set of primer and 6′FAM/Zen/IBFQ probe (IDT) amplifying the poly(A) signal region (Fwd 5′-GGCACCTTCCAGGGTCAAG-3′ (SEQ ID NO: 44040); Rev 5′-GCCTTCTAGTTGCCAGCCAT-3′ (SEQ ID NO: 44041), Probe 5′-TCCCCCGTGCCTTCCTTGACC-3′) (SEQ ID NO: 44042). Ten-fold serial dilutions of an AAV ITR plasmid were used as reference standards to calculate the titer (vg/mL) of viral samples. The qPCR program was set up as: initial denaturation step at 95° C. for 5 minutes, followed by 40 cycles of denaturation at 95° C. for 1 minute and annealing/extension at 60° C. for 1 minute.

### AAV Transduction of Astrocytes In Vitro:

[0814] tdTomato mouse midbrain astrocytes, derived from the Ai9 tdTomato reporter mouse, were grown in BrainBits Nb Astro media supplemented with Pen/Strep using 10 cm plates coated with PLF. Briefly, Ai9 is a Cre reporter strain designed to have a loxP-flanked STOP cassette preventing the transcription of a CAG promoter-driven tdTomato marker. Successful excision of the STOP cassette would drive expression of the tdTomato fluorescent reporter in edited cells. Once the midbrain astrocytes reached 90% confluency, they were trypsinized and seeded at a density of 20,000 cells/well on PLF-coated 96-well plates 24 hours before AAV transduction. The next day, seeded cells were treated with AAVs expressing CasX variant 491 (XAAVs) with the dual-guide system (i.e., spacers 28.10-12.7 or NT-12.7; refer to Table 17 for sequences). Viral infection conditions were performed in triplicate, with normalized number of viral genomes (vg) among experimental vectors, in a series of three-fold serial dilution of MOI ranging from 5E5 to 6E3 to vg/cell. Cells were fed with a 50% media exchange three days post-transduction. Four days post-transduction, cells were trypsinized for editing activity assessments: tdTomato+ cell quantification by flow cytometry and editing analysis at the PTBP1 locus by NGS. For editing analysis by NGS, amplicons were amplified from 200 ng of extracted gDNA with a set of primers targeting the mouse PTBP1 locus of interest and processed as described earlier in Example 14.

### Results:

[0815] FIG. 23 shows the quantification of editing measured as indel rate detected by NGS at the mouse PTBP1 locus in primary astrocytes infected with dual-guide XAAVs harboring either the spacer combination of 28.10-12.7 (targeting PTBP1 and tdTomato) or NT-12.7 (non-targeting and tdTomato) at various MOIs. XAAV containing dual-guide 28.10-12.7 demonstrated on-target editing efficiency at the murine PTBP1 locus in a dose-dependent manner, attaining ˜20% editing at the highest MOI, while no editing was observed at the PTBP1 locus with the NT-12.7 dual-guide XAAV as expected (FIG. 23). FIG. 24 shows percent editing at the tdTomato locus within the same cultured primary astrocytes, which were marked by tdTomato expression, indicating successful editing and excision of the tdTomato STOP cassette by the targeting spacer 12.7. FIG. 24 also shows that both XAAV dual-guide systems were able to edit on-target at the tdTomato locus at comparative levels in a dose-dependent manner.

[0816] The results of the experiments demonstrate that CasX variant 491 and guide scaffold 174 with spacer targeting the mouse PTBP1 locus can edit on-target efficiently when packaged and delivered in vitro via XAAVs. Furthermore, the data show the ability to encode, package, and deliver CasX with a dual-guide system within a single AAV vector particle that can edit with on-target efficiency at different locations in the genome, an outcome not possible with Cas9-based systems. These findings justify additional studies to investigate in vivo editing after delivering AAV containing CasX with a PTBP1-targeting spacer directly into the substantia nigra of the mouse midbrain and enable accurate assessment of astrocyte conversion to neurons in vivo, as described later in Example 18.

### Example 16: CasX-Mediated Editing at the Mouse PTBP1 Locus Results in Significant Knockdown of PTBP1 and Subsequent Upregulation of Neuronal PTB In Vitro

[0817] PTBP1 has been previously shown to suppress neuronal fate in non-neuronal cells by repressing the activity of pro-neuronal factors such as neuronal PTB (nPTB, also known as PTBP2). During neural development, PTBP1 expression decreases, releasing inhibition of nPTB expression, which is critical for neuronal induction (Hu et al., 2018). Experiments were performed to demonstrate that CasX-mediated editing at the PTBP1 locus in primary mouse astrocytes, when delivered via XDPs in vitro, can induce substantial PTBP1 knockdown and consequent induction of nPTB.

### Materials and Methods:

[0818] XDP production and transduction of astrocytes in vitro were performed as described in Example 14. Briefly, for XDP transduction of cultured astrocytes, 120,000 tdTomato mouse midbrain astrocytes were seeded in each well of a 24-well plate coated with PLF. The next day, each well was treated with XDP particles containing RNPs of CasX protein 491 and a guide RNA at an MOI of 3E5. Cells were transduced with XDPs containing a spacer targeting either PTBP1 or tdTomato STOP cassette (the tdTomato spacer served as the non-targeting (NT) control; SEQ ID NO. 43978). Following transduction, cells were harvested at multiple time points and subjected to whole cell lysate extraction for western blotting analysis. Specifically, for one experiment, cells were harvested at 2 and 5 days post-transduction; in the second experiment, cells were harvested at 5, 12, and 21 days post-transduction.

### Results:

[0819] Extracted protein samples were resolved by SDS-PAGE followed by immunoblotting to analyze PTBP1 and nPTB levels in cells transduced with XDPs containing spacer targeting PTBP1 or tdTomato (NT control). PTBP1 and nPTB protein levels at the indicated time points, i.e., 2, 5, 12, and 21 days post-XDP transduction, were quantified by densitometry and illustrated in FIG. 25 and FIG. 26, respectively, as the ratio of detected protein over total protein normalized to NT control. The results from one experiment (depicted in FIG. 25A) demonstrate that XDPs harboring the PTBP1-targeting spacer (XDP-PTBP1) significantly decreased PTBP1 protein to undetectable levels as early as two days post-treatment, compared to PTBP1 levels from NT control treatment (XDP-NT). In a second experiment (results depicted in FIG. 25B), substantial reduction of PTBP1 protein levels was also observed five days post-transduction with XDP-PTBP1 compared to levels seen with XDP-NT. This decrease in PTBP1 protein levels was not observed at Day 12 and 21 in this experiment. In addition, nPTB upregulation was detected by five days post-XDP-PTBP1 treatment (FIGS. 26A & B). This nPTB induction was transient and decreased by Day 21 (FIG. 26B), an indication of a switch to a neuronal phenotype and consistent with reported findings (Qian et al., 2020).

[0820] These experiments demonstrate that XDPs containing CasX variant 491 with a gRNA having a PTBP1-targeting spacer was able to edit the mouse PTBP1 locus efficiently in vitro, resulting in a significant knockdown of PTBP1 and subsequent upregulation of nPTB, which would initiate the astrocyte-to-neuron conversion process.

### Example 17: CasX Editing at the Mouse PTBP1 Gene Results in Conversion of Mouse Astrocytes to Neurons in Cell Culture

[0821] Reducing the levels of PTBP1 in glial cells has been shown to be sufficient for converting glia to neurons in vitro and in vivo (Qian et al., 2020; Zhou et al., 2020). Experiments were performed to demonstrate induced conversion of mouse astrocytes to neurons in vitro by CasX editing at the mouse PTBP1 gene to down-regulate PTBP1 expression.

### Materials and Methods:

[0822] XDP production and transduction of astrocytes in vitro were performed as described in Example 14. Briefly, for XDP transduction of cultured astrocytes, 50,000 tdTomato mouse midbrain astrocytes were seeded in each well of a 24-well plate coated with PLF. The next day, wells were either untreated or treated with XDP particles containing CasX protein 491 and a guide RNA at an MOI of 3E5. Treated cells were transduced with XDPs containing a spacer targeting either PTBP1 (XDP-PTBP1) or tdTomato STOP cassette. The tdTomato spacer served as the non-targeting (NT) control (XDP-NT). Following transduction, cells were harvested at 5, 12, and 21 days post-transduction for gDNA extraction for editing analysis at the PTBP1 locus by NGS. For editing analysis by NGS, amplicons were amplified from 200 ng of extracted gDNA with a set of primers targeting the mouse PTBP1 locus of interest and processed as described earlier in Example 14.

### Immunocytochemistry:

[0823] Cultured mouse astrocytes that were untreated or treated with XDPs were also grown to 28 days post-treatment and harvested for immunocytochemistry analysis as previously described (Qian et al. 2020). Briefly, Day 28 cultured cells were fixed with 4% paraformaldehyde. After washing and blocking with 2% BSA/0.1% Triton X-100/2.5% normal goat serum in PBS for 1 hour at room temperature, fixed cells were incubated with the primary antibody mouse anti-MAP2 (Abcam, 1:1000) overnight at 4° C. The next day, cells were washed and then incubated with a secondary antibody conjugated to Alexa Fluor 647 (Thermo Fisher, 1:1000) for 1 hour. Cells were also counterstained with DAPI to label nuclei. Images were captured and quantified at 10× on the Pico fluorescent microscope, with ˜70,000 DAPI+ cells per experimental condition analyzed to determine the percentage of cells expressing the neuronal marker MAP2, which would indicate induced conversion of astrocytes to neurons upon editing at the mouse PTBP1 locus in vitro.

### Results:

[0824] To assess conversion of astrocytes to neurons in vitro, primary mouse astrocytes were treated with XDP-PTBP1 or XDP-NT and subjected to editing assessment by NGS at 5, 12, and 21 days after XDP transduction and immunocytochemistry analysis at 28 days after transduction. FIG. 27 shows that XDP-PTBP1 was able to edit the mouse PTBP1 locus with ˜80% efficiency by Day 5 of XDP treatment, and this editing rate persisted in culture through Day 21. FIG. 28 shows that XDP-PTBP1 treatment resulted in >3-fold increase in the percentage of cells expressing the neuronal marker MAP2, relative to that observed from XDP-NT treatment, indicating astrocyte-to-neuron conversion was occurring by Day 28 post-XDP treatment.

[0825] The experiments demonstrate that XDP targeting PTBP1 was able to effectively edit the mouse PTBP1 locus at high efficiency and consequently induce in vitro glia conversion to neurons. These results are suggestive of progressive conversion of astrocytes to new neurons that would innervate into and repopulate endogenous neural circuits, a potential therapeutic strategy for replacing neurons lost as a result of neurodegenerative disease or acute brain injury.

### Example 18: AAV Delivery of CasX into the Substantia Nigra Induces Conversion of Mouse Astrocytes to Neurons In Vivo

[0826] Experiments were performed to demonstrate induced conversion of mouse astrocytes to neurons in vivo by CasX-mediated editing of the mouse PTBP1 locus to deplete PTBP1 expression after direct delivery of AAVs into the substantia nigra of the mouse midbrain.

### Materials and Methods:

[0827] AAV construct cloning and production were performed as described in Example 15.

[0828] In vivo administration of AAV-CasX (XAAVs) and immunohistochemistry:

[0829] XAAV particles containing CasX protein 491 downstream of an astrocyte-specific promoter with the dual-guide system (i.e., spacers 28.10-12.7 targeting PTBP1-tdTomato STOP cassette, or NT-12.7 as non-targeting control; refer to Table 17 for sequences) were administered directly into the substantia nigra of Ai9 reporter mice. Briefly, 5E10 XAAV particles were stereotaxically injected unilaterally into the substantia nigra of anesthetized 8-10 week old mice. At 12 weeks post-injection, mice were euthanized by terminal anesthesia followed by transcardiac perfusion. Brains were harvested, post-fixed in 4% paraformaldehyde at 4° C., and then transferred to 30% sucrose solution. Brains were then embedded in OCT compound and frozen on dry ice. OCT-embedded brains were cut into 20 μm thick sections prior to staining for immunohistochemistry. Sections were blocked for 1 hour at room temperature in blocking buffer (5% normal goat serum/2% BSA/0.3% Triton X-100) before antibody labeling. Antibodies used were as follows: rabbit anti-Sox9 (Millipore, 1:1000); rabbit anti-NeuN (Millipore 1:1000); chicken anti-Tyrosine Hydroxylase (Abcam, 1:500); goat anti-chicken Alexa Fluor 488 (Thermo Fisher, 1:1000); and goat anti-rabbit Alexa Fluor 647 (Thermo Fisher, 1:1000). Sections were counterstained with DAPI to label nuclei and imaged on the Echo Revolution fluorescent microscope.

### Results:

[0830] In this experiment, astrocytes were marked to enable tracing and accurate assessment of their conversion into neurons in vivo. Each AAV was packaged with CasX with expression driven by an astrocyte-specific promoter and a dual-gRNA system (i.e., PTBP1-tdTomato gRNAs or non-targeting-tdTomato gRNAs). Specific editing of both PTBP1 and tdTomato loci within astrocytes would induce conversion of edited astrocytes, as marked by tdTomato fluorescence, into neurons. The results depicted in FIG. 29 shows that at three weeks after treatment, there was a 59% increase in the number of tdTomato+ edited cells that co-stained with neuronal marker NeuN in the XAAV-PTBP1 sample relative to the level seen in XAAV-NT (p<0.01), and this percent change increases to 123% at 12 weeks (p<0.001). Contrarily, while no significant difference was observed in the proportion of tdTomato+ cells that co-labeled with astrocyte marker Sox9 at three weeks, the percent decrease was significant at 12 weeks post-treatment (38% reduction, p<0.001).

[0831] The results here indicate that in vivo conversion of astrocytes to neurons was successfully initiated in the substantia nigra of the mouse midbrain upon targeting the PTBP1 locus using CasX variant 491 delivered by AAVs. Furthermore, the protocol described herein may also be applicable to converting astrocytes from different regions of the brain (e.g., striatal, cortical) and spinal cord to region-specific neurons. Similar approaches may also be taken in other organ systems, for example, in the eye.

### Example 19: Use of CasX:gNA Systems to Edit the Rat PTBP1 Locus in Rat Astrocytes when Delivered Via XDPs In Vitro

[0832] Experiments were performed to demonstrate that CasX and gRNAs can also edit at the rat PTBP1 locus in cultured rat astrocytes when delivered via XDPs.

### Materials and Methods:

[0833] XDP construct cloning and production were performed as described in Example 14. Briefly, for XDP construct cloning, XDP plasmid constructs comprising sequences coding for CasX protein 491 with scaffold variant 174 and a spacer targeting PTBP1 (specifically, spacer 28.10, 28.11, 28.15, or 28.16; see Table 17 for sequences) were subjected to E. coli transformation and selection, followed by mini-prepping and Sanger-sequencing. Sequence-validated constructs were then cloned into an expression vector via Golden Gate assembly with the indicated spacers. PTBP1 spacers 28.10, 28.11, 28.15, and 28.16 were selected given their sequence consensus between the mouse and rat genomes. For XDP production, HEK293T Lenti-X cells were transfected with XDP structural plasmids, gRNA plasmid, and plasmid encoding for GP2 using PEI Max (Polypus). XDP-containing media were collected 72 hours post-transfection and filtered. The supernatant was then concentrated and purified via centrifugation, and XDPs were resuspended in a freezing buffer.

### XDP Transduction of Rat Astrocytes In Vitro:

[0834] SV40-immortalized rat astrocytes of the D1 TNC1 cell line (ATCC CRL-2005TM) were grown in BrainBits Nb Astro media on T75 flasks coated with poly-L-lysine (PLL). Cells were lifted at 90% confluency with 0.05% Trypsin/0.02% EDTA and seeded on a 24-well tissue culture plate, also coated with PLL, at a density of 100,000 cells per well for the assay. The next day, cells were either untreated (control) or treated with XDP particles containing CasX RNPs with PTBP1-targeting spacers (28.10, 28.11, 28.15, or 28.16), which were applied either at high or low dose (based on total volume of virion). Cells were fed with a 50% media exchange every other day. Two days post-transduction, cells were trypsinized for editing analysis by NGS as described in Example 14. Briefly, amplicons were amplified from 200 ng of extracted gDNA with primers targeting the rat PTBP1 locus of interest and processed as described in Example 14.

### Results:

[0835] FIG. 30 shows the results of an editing assay assessing spacers 28.10, 28.11, 28.15, and 28.16 in targeting the rat PTBP1 locus. When administered at high dose, spacer 28.10 demonstrated the highest editing rate of ˜90%, followed by spacer 28.15 at ˜80%, spacer 28.11 at ˜42%, and then 28.16 at ˜1.1%. In addition, these spacers were able to edit in a dose-dependent manner. The level of editing achieved by spacer 28.10 in rat astrocytes is similar to the level observed in primary mouse astrocytes, as discussed earlier in Example 14, justifying the use of spacer 28.10 in planned efficacy studies using a rat model of Parkinson's disease.

[0836] The experiments demonstrate that CasX variant 491 and guide scaffold 174 with spacers targeting the rat PTBP1 locus can edit on-target efficiently in rat astrocytes when packaged as RNPs and delivered in vitro via XDPs and, therefore, should similarly be able to reprogram conversion of astrocytes into functional neurons.

### Example 20: Assessment of Editing by Engineered Variants of CasX Nucleases at the Mouse and Rat PTBP1 Loci

[0837] Here we investigated whether rationally-designed engineered CasX nucleases, with mutations predicted to increase on-target activity and specificity and reduce potentially off-target events, would improve editing at the endogenous mouse and rat PTBP1 loci when delivered via XDPs in vitro.

### Materials and Methods:

[0838] XDP construct cloning and production were performed as described in Example 14. Briefly, for XDP construct cloning, XDP plasmid constructs comprising sequences encoding for CasX variants 491, 668, 672, and 676 with scaffold variant 251 and PTBP1-targeting spacer 28.10 (see Table 17 for spacer 28.10 sequence) were subjected to E. coli transformation and selection, followed by mini-prepping and Sanger-sequencing. Sequence-validated constructs were then cloned into an expression vector via Golden Gate assembly with PTBP1 spacer 28.10. For XDP production, HEK293T Lenti-X cells were transfected with XDP structural plasmids, gRNA plasmid, and plasmid encoding for GP2 using PEI Max (Polypus). XDP-containing media were collected 72 hours post-transfection and filtered. The supernatant was then concentrated and purified via centrifugation, and XDPs were resuspended in Nb Astro media. XDP transduction of primary mouse astrocytes and immortalized rat astrocytes in vitro:

[0839] Primary mouse midbrain astrocytes and SV40-immortalized rat astrocytes were separately seeded at 15,000 cells per well in 96-well plates coated with PLF or PLL, respectively. The next day, XDP particles containing RNPs of CasX variants with PTBP1-targeting spacer 28.10 were applied at increasing doses (fixed volumes of XDPs as depicted in FIG. 31). Infection conditions were performed in duplicate. Cells were fed with a 50% media exchange every other day. Five days post-transduction, cells for each sample were harvested for gDNA extraction for editing analysis by NGS as described in Example 14. Briefly, amplicons were amplified from 200 ng of extracted gDNA with primers targeting either the mouse or rat PTBP1 locus of interest and processed as described in Example 14.

### Results:

[0840] FIGS. 31A & B illustrate the editing levels of engineered CasX variants 491, 668, 672, and 676 at the mouse (FIG. 31A) or rat (FIG. 31B) PTBP1 locus when delivered in vitro via XDPs at the indicated volumes. All four CasX variants were able to edit at the mouse and rat PTBP1 loci with varying efficiencies. FIG. 31A shows that CasX variants 491 and 668 exhibited similar levels of editing at the PTBP1 locus in primary mouse astrocytes, and both proteins demonstrated improved editing efficiency over CasX variants 672 and 676 at the different volumes of XDP treatment, eventually reaching saturation levels in editing at the highest dose. These editing outcomes were recapitulated in the immortalized rat astrocytes: both CasX 491 and 668 were able to edit at the rat PTBP1 locus with higher efficiency compared to CasX 672 and 676 at the varying MOIs, also reaching saturation at higher doses, although CasX 491 appeared to exhibit slightly better editing over CasX 668 at lower doses (FIG. 31B).

[0841] The experiments demonstrate that when packaged as RNPs and delivered in vitro via XDPs, CasX variants 491 and 668 with guide scaffold 251 and PTBP1-targeting spacer 28.10 demonstrated superior editing efficiency over CasX variants 672 and 676 in targeting the mouse and rat PTBP1 loci, although all constructs demonstrated the ability to edit the locus.

### Example 21: Use of CasX:gNA Systems to Edit the Human PTBP1 Locus in Human Fibroblasts when Delivered Via XDPs or Lentiviral Particles In Vitro

[0842] Experiments were performed to demonstrate that CasX and guide RNAs can edit at the human PTBP1 locus in cultured human fibroblasts when delivered via XDPs.

### Materials and Methods:

[0843] XDP construct cloning and production were performed as described in Example 14. Human PTBP1 spacers were designed based on PAM availability (listed in Table 19). Spacers were made by annealing two oligos and cloned via Golden Gate assembly with the appropriate restriction enzymes. Cloned spacers were subjected to transformation, mini-prepping, and Sanger-sequencing for verification as previously described.

### XDP Transduction of Human Fibroblasts In Vitro:

[0844] An initial screen of human PTBP spacers (marked in bold in Table 19) was performed to assess editing levels at the human PTBP1 locus. Human fibroblast cells (CL043 line) were seeded at 75,000 cells per well in a 24-well plate in fibroblast medium (DMEM supplemented with 10% fetal bovine serum, 100 sodium pyruvate, 1% NEAA, 0.2% BME, and Pen/Strep). The following day, XDP particles containing CasX RNPs with the indicated PTBP1-targeting spacers were applied at two fixed volumes, denoted as high (H) and low (L), followed by spinfection with polybrene. Two days post-transduction, cells were harvested for editing analysis by NGS as described in Example 14. Briefly, amplicons were amplified from 200 ng of extracted gDNA with primers targeting the human PTBP1 locus of interest and processed as described in Example 14.

TABLE 19
Spacers for targeting human PTBP1

| | | SEQ | | | SEQ |
|---|---|---|---|---|---|
| Spacer | Sequence | ID NO | Spacer | Sequence | ID NO |
| 30.01 | UGCUAUUCCGGCGCCUCCAC | 37978 | 30.50 | AGAACAUAUUCCCGCCCUCG | 38265 |
| 30.02 | CCCCCUCCCCCGACUACACA | 37972 | 30.51 | CGCCCUCGGCCACGCUGCAC | 38267 |
| 30.03 | UCAAGGCCGAAGGCGGAAAC | 37975 | 30.52 | AGCAAUGGGGGCGUCGUCAA | 38306 |
| 30.04 | GCCUUCGGCCUUGAGGAAUA | 37973 | 30.53 | CCCCGAGGUCGUGGUUGUGC | 38311 |
| 30.05 | GCCUUGAGGAAUAACCGCCU | 37974 | 30.54* | CCAAGUCCACCAUCUAGGGG | 38312 |
| 30.06 | CUGGGUCCCGCCCCCGGGCG | 37976 | 30.55 | CUGGAAUGAUGGAAGUUGUC | 38315 |
| 30.07 | GGCCAGUGGGAGGUGCUGGC | 37977 | 30.56 | GCUGUUUUUAAAGUGGCUUU | 38316 |
| 30.08* | CGCCGCCUGACUCGCCACGU | 37971 | 30.57 | AUCAUUCCAGAGAAAAGCCA | 38313 |
| 30.09* | GGCGCCUCCACUCCGUCCCC | 37979 | 30.58 | AGAGAAAAGCCACUUUAAAA | 38314 |
| 30.10 | CUACUUGUGUCACUAACGGA | 38137 | 30.59* | CUUUAAAAAAAUAAAAUCUC | 38317 |
| 30.11 | GCUGUCACCUUUGAACUUCU | 38153 | 30.60 | CCUUGCUCACCCUGCGGUGA | 38318 |
| 30.12 | AAGGUGACAGCCGAAGUGCA | 38152 | 30.61 | CGGCCCUCCACACCCGGGGC | 38319 |
| 30.13 | GGAUGUGGAUCACUCUAGAG | 38154 | 30.62 | UUGUGCCUUAAAAAACCUGC | 38320 |
| 30.14 | CCCUCCGUGACGUCGAUGGG | 38155 | 30.63 | UGCAGCCACACACCCACCCG | 38321 |
| 30.15 | CAAAGGGCAGCCCCAGGGAG | 38156 | 30.64 | CCCUUCACCCCGCCCCCAGG | 38322 |
| 30.16* | GCAUCAGGAGGUUGGUGACC | 38157 | 30.65 | CCCCGCCCCCAGGGCCUUCC | 38323 |
| 30.17* | CCUUCAGCAUCAGGAGGUUG | 38158 | 30.66 | CUUCUGCCCCCAGGCGGGCU | 38324 |
| 30.18* | CCAUGGUGUUGGCAGCCUCC | 38162 | 30.67 | GCCCCCAGGCGGGCUCCCCG | 38325 |
| 30.19* | UCGAGAUGAACACGGAGGAG | 38160 | 30.68* | AGUUGACCAAAUAUUCUAAU | 38326 |
| 30.20* | GCUCCUUGUGGUUGGAGAAC | 38164 | 30.69 | UUUGCAUAUAAAUGAAAAAA | 38329 |
| 30.21* | CCAACCACAAGGAGCUGAAG | 38163 | 30.70 | AAUCUUUUUUCAUUUAUAUG | 38327 |
| 30.22 | CCGCCUGCAGGGCCGCCUGG | 38165 | 30.71 | UUUAUAUGCAAAAGAAAUAG | 38328 |
| 30.23 | CCGACUGGACCGAGUUCACC | 38166 | 30.72* | UUGUGGUAUUACCUUGUAUG | 38330 |
| 30.24 | CCACGAUGAUCCUGAGCACG | 38167 | 30.73* | UUGUAAUUAAGUCACAGGCA | 38331 |
| 30.25 | ACCCUGUGACCCUGGAUGUG | 38168 | 30.74* | AGAGAGCAGGCGGGGCCGCC | 38332 |
| 30.26 | ACACUGUGCCGAACUUGGAG | 38171 | 30.75 | CUGAAGCUCAGGGGCUCUAA | 38334 |
| 30.27 | CCAAGUUCGGCACAGUGUUG | 38169 | 30.76 | GGGAAGGGGCGGGCGUGUCG | 38333 |
| 30.28* | UGGUGAAGGUGAUGAUCUUC | 38173 | 30.77 | AGGCGACUGCAGGUGAAGGC | 38336 |
| 30.29 | GCACAGUGUUGAAGAUCAUC | 38170 | 30.78 | CCUGCAGUCGCCUAGAAAAC | 38335 |
| 30.30* | CCAAGAACAACCAGUUCCAG | 38172 | 30.79 | GGGUUUUUUCUUCCUUCAAA | 38337 |
| 30.31 | AGGCCCUGCUGCAGUAUGCG | 38174 | 30.80 | UCCUUCAAAUUUUGGACCAA | 38338 |
| 30.32* | AAGCUCACCAGCCUCAACGU | 38176 | 30.81 | UUCAAAUUUUGGACCAAAGU | 38339 |
| 30.33 | GGGGACAGCCAGCCCUCGCU | 38177 | 30.82* | AAUUUUGGACCAAAGUCUCA | 38340 |
| 30.34 | CUCCCACCUUUGCCAUUCCU | 38181 | 30.83 | GGGUCCCAGCAUCAGAGGCA | 38342 |
| 30.35 | GUUCCGAACGUCCACGGCGC | 38195 | 30.84 | GUGUUUUGCCUGCCUCUGAU | 38341 |
| 30.36 | GAACGUCCACGGCGCCCUGG | 38196 | 30.85 | CUGUGCUCUUUCUACCGCCC | 38343 |
| 30.37* | UGCCCCCGCCAGGCCCGGGA | 38198 | 30.86 | ACCGCCCCCGCGUCCUGUCC | 38344 |
| 30.38* | GUAUUGCUGGUCAGCAACCU | 38199 | 30.87 | GUAAAAGCGUGUAACAAGGG | 38345 |
| 30.39 | CGCGCUGCACGUCACCGUAG | 38253 | 30.88 | AGGCUCAGUAUUGUGACCGC | 38346 |
| 30.40* | UAUUGAACAGGAUCUUCACG | 38255 | 30.89 | CUCCGCGUCACAAGCCAUCG | 38348 |
| 30.41* | CCUUCUUAUUGAACAGGAUC | 38256 | 30.90 | GUUGCCUUACCCGAUGGCUU | 38347 |
| 30.42 | AUAAGAAGGAGAACGCCCUA | 38254 | 30.91 | CAAACGGUUUUAAUCGGUUC | 38349 |
| 30.43 | CGUGCAGCUUGUGCCCGUUC | 38259 | 30.92* | CUGUGGACGCUGUAGAGGCA | 38350 |
| 30.44 | AGAGCGUGAUGCGGAUGGGC | 38260 | 30.93 | AAGUCCAGGUACAGACUGGC | 38352 |
| 30.45 | GGUGCUUCGAGAGCGUGAUG | 38261 | 30.94 | AAUAAAUCUUCUGUAUCCUC | 38351 |
| 30.46* | UGAAGCGGUGCAGGGGUGAG | 38263 | 30.95 | GUAUCCUCGCUCCGUUCCGC | 38353 |
| 30.47* | UGGAGCCCGGCUUCUUGAAG | 38264 | 30.97 | CUCUACAGCAUUGUCCCAGA | 38027 |
| 30.48* | GGAAGUUCUUGGAGCCCGGC | 38266 | 30.98 | CUUGCAGCGGGGAUCUGACG | 38136 |
| 30.49* | AGAAGCCGGGCUCCAAGAAC | 38262 | | | |

Bolded spacers in Table 19 were initially selected for editing assessment of human PTBPI spacers.

Spacers marked by * were subsequently tested given their sequence consensus between human and non-human primate genomes.

### Lentiviral Cloning:

[0845] Lentiviral plasmid constructs comprising sequences encoding for CasX variant 491, guide scaffold variant 174, and select spacers (marked with * in Table 19) were transformed into chemically-competent E. coli cells, which were plated on kanamycin LB-agar plates following recovery at 37° C. for 1 hour. Single colonies were picked, mini-prepped, and Sanger-sequenced. Sequence-verified constructs were then cloned into a lentiviral expression vector via BbsI Golden Gate assembly with targeting spacers against the human PTBP1 locus (Table 19). Spacers (marked with * in Table 19) were selected based on sequence conservation between human and non-human primate (i.e., consensus spacers). As previously described, spacers were made by annealing two oligos and cloned via Golden Gate assembly with the appropriate restriction enzymes. Cloned spacers were then subjected to transformation, mini-prepping, and Sanger-sequencing.

### Lentivirus Production:

[0846] Lentiviral particles packaging CasX variant 491 and gRNA constructs with scaffold 174 and consensus spacers targeting human PTBP1 were produced by transfecting HEK293T Lenti-X cells with plasmids encoding CasX, guide RNA, lentiviral packaging vector, and VSV-G envelope using PEI Max (Polypus). Media were changed 12 hours post-transfection, and viral supernatants were harvested at 72 hours post-transfection and filtered using a 0.45 m PES filter. Lentiviral transduction:

[0847] To assess the editing efficiency of CasX:gRNAs with consensus PTBP1 spacers, human fibroblast cells were seeded at 50,000 cells per well in a 24-well plate in fibroblast medium. The following day, lentiviral particles containing CasX with the indicated consensus PTBP1 spacers were applied at two fixed volumes, denoted as high and low dose, followed by spinfection with polybrene. Viral infection conditions were performed in duplicate. Five days post-transduction, cells were harvested to determine PTBP1 expression knockdown by quantitative PCR (qPCR).

Quantification of PTBP1 mRNA by qPCR:

[0848] 200 ng of RNA was extracted from lentiviral-transduced human fibroblasts using the Zymo Quick RNA 96 kit and used as input for reverse transcription. The resulting cDNA served as input for qPCR reactions to measure PTBP1 expression using SYBR Green-based detection. Expression of the GAPDH housekeeping gene was used for normalization. Expression data were analyzed according to the double delta Ct method and normalized relative to the non-targeting spacer (NT; AGGGGUCUUCGAGAAGACCC (SEQ ID NO: 44043)).

### Results:

[0849] FIG. 32 shows the results of an editing assay assessing spacers 30.1, 30.2, 30.3, 30.4, 30.5, 30.7, 30.8, and 30.9 in targeting the human PTBP1 locus. Of the 8 human PTBP1 spacers tested in this initial screen, 7 spacers demonstrated significant dose-dependent editing at the human PTBP1 gene, 6 of which exhibited >90% editing efficiency when administered at high dose (FIG. 32). Of the 7 spacers that demonstrated editing activity in the preliminary screen, spacer 30.9 has 100% sequence identity to the non-human primate species. Subsequently, human PTBP1 spacers that showed consensus with the non-human primate species (marked with * in Table 19) were selectively tested to determine the effects of editing at the PTBP1 locus in reducing PTBP1 transcript expression. Table 20 shows PTBP1 expression at high or low dose for each consensus PTBP1 spacer relative to the expression from the non-targeting (NT) spacer and the relative rankings for each spacer based on the resulting PTBP1 knockdown. As exhibited in Table 20, all consensus spacers were able to edit at the human PTBP1 locus when administered at high dose, and nearly ⅔ of the spacers were able to edit when administered at low dose. The top performing spacer in the high dose cohort was spacer 30.17; for the low dose cohort, it was spacer 30.19. In addition, these spacers also demonstrated editing activity at the PTBP1 locus in a dose-dependent manner (Table 20).

TABLE 20
PTBP1 gene expression knockdown upon CasX targeting in human
fibroblasts.
Bolded spacers were selected for follow-up characterization

| | Relative | Relative | | |
|---|---|---|---|---|
| | Expression | Expression | | |
| | with High | with Low | High | Low |
| Spacer | Viral Dose | Viral Dose | Dose Rank | Dose Rank |
| 30.08 | 0.665 | 1.034 | 23 | 22 |
| 30.09 | 0.707 | 0.922 | 25 | 13 |
| 30.16 | 0.394 | 1.022 | 5 | 20 |
| 30.17 | 0.335 | 0.933 | 1 | 15 |
| 30.18 | 0.466 | 0.807 | 12 | 4 |
| 30.19 | 0.366 | 0.683 | 3 | 1 |
| 30.20 | 0.425 | 0.7 | 8 | 2 |
| 30.21 | 0.519 | 0.86 | 19 | 7 |
| 30.28 | 0.374 | 0.83 | 4 | 5 |
| 30.30 | 0.714 | 0.891 | 27 | 8 |
| 30.32 | 0.554 | 0.908 | 20 | 10 |
| 30.37 | 0.349 | 0.849 | 2 | 6 |
| 30.38 | 0.619 | 1.096 | 21 | 26 |
| 30.40 | 0.411 | 0.98 | 7 | 18 |
| 30.41 | 0.66 | 1.056 | 22 | 24 |
| 30.46 | 0.508 | 1.046 | 17 | 23 |
| 30.47 | 0.509 | 0.965 | 18 | 17 |
| 30.48 | 0.504 | 0.897 | 15 | 9 |
| 30.49 | 0.678 | 0.933 | 24 | 14 |
| 30.54 | 0.461 | 0.909 | 11 | 11 |
| 30.59 | 0.475 | 0.794 | 13 | 3 |
| 30.68 | 0.436 | 1.087 | 10 | 25 |
| 30.72 | 0.505 | 0.921 | 16 | 12 |
| 30.73 | 0.436 | 1.029 | 9 | 21 |
| 30.74 | 0.403 | 0.952 | 6 | 16 |
| 30.82 | 0.478 | 1.104 | 14 | 28 |
| 30.92 | 0.712 | 1.097 | 26 | 27 |
| NT | 1 | 1 | 28 | 19 |

[0850] The experiments demonstrate that CasX variant 491 and guide scaffold 174 with human PTBP1 spacers can edit on-target efficiently in human fibroblasts when delivered in vitro via XDPs. In addition, lentiviral delivery of human PTBP1 spacers having consensus sequence with the non-human primate species can effectively downregulate PTBP1 expression. These findings also support the use of select spacers in preclinical efficacy studies using non-human primate models of Parkinson's disease.

### Example 22: CasX-Mediated Editing at the Human PTBP1 Locus Reduces PTBP1 RNA Expression and Upregulates nPTB Expression In Vitro

[0851] Experiments were performed to demonstrate CasX-mediated editing at the PTBP1 locus in human fibroblasts, when delivered via lentiviral particles in vitro, that CasX can induce effective PTBP1 transcript knockdown and consequent upregulation of nPTB gene expression.

### Materials and Methods:

[0852] Lentiviral production and transduction of human fibroblasts in vitro were performed as described in Example 21. Briefly, for lentiviral transduction, 100,000 human fibroblasts were seeded in each well of a 12-well plate. The next day, each well was infected with filtered lentiviral particles containing CasX with PTBP1-targeting spacer 30.17 or 30.19 or a non-targeting spacer. Spacers 30.17 and 30.19 were selected for this experiment because they demonstrated the highest editing activity described in Example 21. Viral infection conditions were performed with a normalized number of viral genomes among experimental vectors, in a series of 3-fold serial dilution of MOI ranging from 0.02 to 0.6 vg/cell. Five days post-transduction, cells were harvested for editing activity assessments: editing analysis at the PTBP1 locus by NGS and quantification of PTBP1 and nPTB RNA expression by qPCR. DNA and RNA were extracted from harvested cells using the Zymo Quick-DNA/RNA Miniprep kit. For editing analysis by NGS, target amplicons were amplified from 200 ng of extracted gDNA and processed as described in Example 14. Quantification of PTBP1 and nPTB mRNA by qPCR was also performed as described in Example 21.

### Results:

[0853] FIG. 33A shows the results of an editing assay assessing spacers 30.17 and 30.19 in targeting the human PTBP1 locus. When administered at the highest MOI of 0.6, spacers 30.17 and 30.19 demonstrated an editing rate of ˜21% and ˜33% respectively. Both spacers were also able to edit in a dose-dependent manner. FIG. 33B illustrates an overall inverse relationship between editing events at the PTBP1 locus and PTBP1 transcript expression in cultured human fibroblasts for PTBP1 spacers 30.17 and 30.19. Each data point on the line graph corresponds to an MOI, with increasing MOI from left to right (see FIG. 33A). At the highest dose, editing at the PTBP1 locus by either spacer resulted in decreased PTBP1 RNA expression by ˜30% (FIG. 33B). These editing effects also corresponded with nearly a four-fold induction of nPTB expression at the highest dose (FIG. 33C). Between the two characterized spacers, spacer 30.17 demonstrated higher potency upon editing the human PTBP1 locus.

[0854] The experiments demonstrate that lentiviral particles targeting PTBP1 were able to effectively edit the human PTBP1 locus efficiently in vitro and consequently downregulate PTBP1 expression to induce nPTB expression, which would be able to initiate astrocyte-to-neuron conversion.

### Example 23: Proof-of-Concept Demonstrating In Vivo Editing in the Substantia Nigra of the Mouse Midbrain Using XDPs

[0855] Experiments were performed to demonstrate an in vivo proof-of-concept that engineered XDPs could specifically target astrocytes for editing in the substantia nigra, a region in the midbrain prone to neuronal degeneration in Parkinson's disease.

### Materials and Methods:

### In Vivo Administration of XDPs and 2D Immunohistochemistry:

[0856] XDP particles containing CasX protein 491 with gRNA targeting the tdTomato STOP cassette were administered into the substantia nigra of Ai9 mice. Briefly, 3.15-3.5E8 XDP particles were stereotaxically injected unilaterally into the substantia nigra of anesthetized 8-10 week-old mice. At 3 weeks post-injection, mice were euthanized by terminal anesthesia followed by transcardiac perfusion. Brains were harvested, post-fixed in 4% paraformaldehyde at 4° C., and then transferred to 30% sucrose solution. Brains were then embedded in OCT compound and frozen on dry ice. OCT-embedded brains were cut sagittally into 20 μm thick sections using a cryostat prior to staining for immunohistochemistry. Sections were blocked for 1 hour at room temperature in blocking buffer (5% NGS, 2% BSA, 0.3% Triton X-100 in PBS) before antibody labeling. Antibodies used were as follows: rabbit anti-Sox9 (Millipore, 1:1000); rabbit anti-NeuN (Thermo Fisher, 1:1000); chicken anti-Tyrosine Hydroxylase (Abcam, 1:500); goat anti-chicken Alexa Fluor 488 (Thermo Fisher, 1:1000); and goat anti-rabbit Alexa Fluor 647 (Thermo Fisher, 1:1000). Sections were counterstained with DAPI to label nuclei and imaged on the Echo Revolve fluorescent microscope. Images were analyzed using a custom computational pipeline.

### Results:

[0857] In this experiment, the Ai9 tdTomato reporter mouse model was used to demonstrate a proof-of-concept for CasX delivery using engineered XDPs into the substantia nigra. Ai9 is a Cre reporter strain designed to have a loxP-flanked STOP cassette preventing the transcription of a CAG promoter-driven tdTomato marker. Successful XDP delivery and editing would result in excision of the STOP cassette to drive expression of the tdTomato fluorescent reporter in edited cells. As illustrated in FIG. 34A, efficient editing, marked by tdTomato fluorescence, was observed at three weeks post-XDP injection into the substantia nigra of the mouse midbrain. The robust tdTomato expression observed in the substantia nigra also highlights that the XDP delivery modality was able to achieve sufficient biodistribution in the mouse midbrain. FIGS. 34B and C show that of the tdTomato+ edited cells that were quantified (˜7% of total cells) within the substantia nigra, ˜27% co-labeled with astrocyte marker Sox9, while ˜24% co-stained with neuronal marker NeuN. When normalized to the total number of Sox9+ astrocytes and NeuN+ neurons in the imaged region, XDPs were able to edit astrocytes at ˜2.5-fold greater rate compared to editing in neurons (FIG. 34C), illustrating the ability to engineer XDPs that displayed a biased tropism for astrocytes.

[0858] The results demonstrate that effective in vivo editing could be achieved in the substantia nigra using engineered XDPs. In addition, the XDPs were able to exhibit tropism for astrocytes, highlighting the ability to design and engineer XDPs that could be targeted to specific cell types when necessary. These experiments also justify the use of XDP in studies to examine the efficiency of editing and astrocyte conversion to neurons in the substantia nigra via delivery of XDPs to target the mouse PTBP1 locus in vivo, which are described in Example 24.

### Example 24: XDP Delivery of CasX into the Substantia Nigra Results in Conversion of Mouse Astrocytes to Neurons In Vivo

[0859] Experiments will be performed to demonstrate induced conversion of mouse astrocytes to neurons in vivo by CasX-mediated editing of the mouse PTBP1 locus to deplete PTBP1 expression after direct delivery of XDPs into the substantia nigra of the mouse midbrain.

### Materials and Methods:

[0860] In vivo administration of XDPs and 2D immunohistochemistry analysis will be performed as described in Example 23. Briefly, 3.15-3.5E8 XDP particles containing CasX protein 491 with gRNAs targeting PTBP1 and the tdTomato STOP cassette will be stereotaxically injected into the substantia nigra of anesthetized 8-10 week old Ai9 mice. At 3 and 12 weeks post-injection, mice will be euthanized by terminal anesthesia followed by transcardiac perfusion, and brains will be harvested, fixed, sectioned, and subjected to immunohistochemistry as described in Example 23. Sections will be counterstained with DAPI to label nuclei and imaged on the Echo Revolve fluorescent microscope, and images will be analyzed using a custom computational pipeline. Cell-types will be classified in an unbiased manner using a trained machine learning model. 3D whole mount tissue clearing and analysis:

[0861] XDP particles containing CasX protein 491 with gRNAs targeting PTBP1 and tdTomato STOP cassette will be administered as described previously with 2D immunohistochemical analysis. At 12 weeks post-injection, whole brains will be chemically cleared according to the iDISCO+ protocol (Renier et al., 2016). The same antibodies against NeuN, Sox9, and Tyrosine Hydroxlyase will be used to mark specific cell types as described in the 2D immunohistochemistry experiments. Cleared whole brains will be imaged using a light-sheet microscope (Ultramicroscope II; Miltenyi Biotech) at sufficient resolution to resolve cellular markers and delineate major neuronal processes. Cell counts will be quantified using the NuMorph software package (Krupa et al., 2021) to determine viral tropism and total cell count differences upon PTBP1 knockdown. Differences in axonal projections will also be measured using the TrailMap software package (Friedmann et al., 2020) to map the projections of newly formed neurons within specific brain structures.

### Results:

[0862] The 2D immunohistochemical results are expected to show that CasX-mediated editing of the mouse PTBP1 gene will initiate conversion of mouse astrocytes to neurons in vivo. The tdTomato reporter system will enable tracing for accurate assessment of this astrocyte-to-neuron conversion, such that edited astrocytes will be expected to be marked by tdTomato fluorescence. In addition to 2D immunohistochemical analysis, 3D whole mount tissue clearing and analysis will be performed to determine differences in cell count and axonal projections upon PTBP1 knockdown. Tracing of neuronal processes within 3D whole brain images will further validate the correct axonal localization and downstream targets of newly converted neurons. Furthermore, stereotaxic injections may be similarly performed in other regions of the brain (e.g., striatum, cortex, hippocampus) to induce astrocyte conversion into region-specific neurons, and 2D immunohistochemistry and 3D whole mount tissue clearing and analysis will be conducted to analyze region-specific conversion of astrocytes to neurons.

### Example 25: CasX Mediated Editing of Mouse PTBP1 Gene in the CNS in a Parkinson's Disease Mouse Model Results in Alleviation of Disease Symptoms

[0863] Experiments will be conducted to demonstrate conversion of mouse midbrain astrocytes to functional neurons by depleting the RNA-binding protein PTBP1 in the mouse brain in a model of Parkinson's disease, demonstrating progressive conversion of astrocytes to new neurons that innervate into and repopulate endogenous neural circuits, and consequent alleviation of disease symptoms.

### Materials and Methods:

[0864] In this experiment, CasX 491 and guide 174 with spacers targeting the mouse PTBP1 gene, including the spacers of Table 17, will be administered into the 6-OHDA lesioned Parkinson's disease model mice. Adult WT mice at P30-P40 will be used to generate a well-established chemically-induced Parkinson's disease model. Animals will be anaesthetized and then placed in a stereotaxic mouse frame. Before injecting 6-hydroxydopamine (6-OHDA, Sigma), mice will be treated with a mix of desipramine (25 mg/kg) and pargyline (5 mg/kg). 6-OHDA (3.6 μg per mouse) will be dissolved in 0.02% ice-cold ascorbate/saline solution at a concentration of 15 mg/ml and the solution will be injected into the medial forebrain bundle using a 5 μl Hamilton syringe with a 33G needle at the speed of 0.1 μl/min. The needle will be slowly removed 3 min after injection. CasX and guide with PTBP1 or control spacers delivered by AAV or XDP will be stereotaxically injected into substantia nigra ˜30 days after 6-OHDA induced lesion.

[0865] Parkinson's disease phenotype will be assessed by measuring apomorphine (or amphetamine) induced rotations. All behavioral tests will be carried out at pre-determined time points, for example 21-28 days after 6-OHDA induced lesion or 2, 3 and 5 months after the delivery of AAVs or XDPs. For the rotation test, apomorphine-induced rotations in mice will be recorded after intraperitoneal injection of apomorphine (Sigma, 0.5 mg kg−1). Mice will be injected with apomorphine (0.5 mg kg) on two separate days before performing the rotation test to prevent a ‘wind-up’ effect that could obscure the final results. Rotation of full-body turns will be measured 5 min following the injection for 10-60 min. The treated group is expected to show significantly lower level of net rotation compared to control group.

[0866] At the end of the experimental period, brain tissue will be harvested from experimental animals for analysis by immunohistochemistry. Antibodies against pan-neuronal markers MAP2, Tuj 1 and midbrain dopaminergic markers TH will be used, with nuclei counterstaining by DAPI.

[0867] The results of this experiment are expected to show that CasX mediated editing of the PTBP1 gene in midbrain astrocytes of a Parkinson's disease mouse model alleviates motor symptoms of Parkinson's disease. The lesioned striatum in animals receiving the experimental treatment (PTBP1 targeting guide) is expected to show higher levels of TH labeling, compared to animals receiving the control treatment (non-targeting guide).

### REFERENCES

[0868] Friedmann, D., Pun, A., Adams, E. L., Lui, J. H., Kebschull, J. M., Grutzner, S. M., Castagnola, C., Tessier-Lavigne, M. and Luo, L., 2020. Mapping mesoscale axonal projections in the mouse brain using a 3D convolutional network. Proceedings of the National Academy of Sciences, 117(20), pp. 11068-11075.
[0869] Krupa, O., Fragola, G., Hadden-Ford, E., Mory, J. T., Liu, T., Humphrey, Z., Rees, B. W., Krishnamurthy, A., Snider, W. D., Zylka, M. J. and Wu, G., 2021. NuMorph: Tools for cortical cellular phenotyping in tissue-cleared whole-brain images. Cell reports, 37(2), p. 109802.
[0870] Qian, H., Kang, X., Hu, J. et al. Reversing a model of Parkinson's disease with in situ converted nigral neurons. Nature 582, 550-556 (2020). https://doi.org/10.1038/s41586-020-2388-4
[0871] Renier, N., Adams, E. L., Kirst, C., Wu, Z., Azevedo, R., Kohl, J., Autry, A. E., Kadiri, L., Venkataraju, K. U., Zhou, Y. and Wang, V. X., 2016. Mapping of brain activity by automated volume analysis of immediate early genes. Cell, 165(7), pp. 1789-1802.
[0872] Zhou H, Su J, Hu X, Zhou C, Li H, Chen Z, Xiao Q, Wang B, Wu W, Sun Y, Zhou Y, Tang C, Liu F, Wang L, Feng C, Liu M, Li S, Zhang Y, Xu H, Yao H, Shi L, Yang H. Glia-to-Neuron Conversion by CRISPR-CasRx Alleviates Symptoms of Neurological Disease in Mice. Cell. 2020 Apr. 30; 181(3):590-603.e16. doi: 10.1016/j.cell.2020.03.024. Epub 2020 Apr. 8. PMID: 32272060.

The application's sequence listing, which the Patent Office published only in electronic form, follows.

SEQUENCE LISTING (44047 sequences)

SEQ ID NO: 1 - protein, 986 aa, Unknown
  Deltaproteobacteria sp.
MEKRINKIRKKLSADNATKPVSRSGPMKTLLVRVMTDDLKKRLEKRRKKPEVMPQVISNNAANNLRMLLDDYTKMKEAILQVYWQEFKDDHVGLMCKFAQPASKKIDQNKLKPEMDEKGNLTTAGFACSQCGQPLFVYKLEQVSEKGKAYTNYFGRCNVAEHEKLILLAQLKPEKDSDEAVTYSLGKFGQRALDFYSIHVTKESTHPVKPLAQIAGNRYASGPVGKALSDACMGTIASFLSKYQDIIIEHQKVVKGNQKRLESLRELAGKENLEYPSVTLPPQPHTKEGVDAYNEVIARVRMWVNLNLWQKLKLSRDDAKPLLRLKGFPSFPVVERRENEVDWWNTINEVKKLIDAKRDMGRVFWSGVTAEKRNTILEGYNYLPNENDHKKREGSLENPKKPAKRQFGDLLLYLEKKYAGDWGKVFDEAWERIDKKIAGLTSHIEREEARNAEDAQSKAVLTDWLRAKASFVLERLKEMDEKEFYACEIQLQKWYGDLRGNPFAVEAENRVVDISGFSIGSDGHSIQYRNLLAWKYLENGKREFYLLMNYGKKGRIRFTDGTDIKKSGKWQGLLYGGGKAKVIDLTFDPDDEQLIILPLAFGTRQGREFIWNDLLSLETGLIKLANGRVIEKTIYNKKIGRDEPALFVALTFERREVVDPSNIKPVNLIGVDRGENIPAVIALTDPEGCPLPEFKDSSGGPTDILRIGEGYKEKQRAIQAAKEVEQRRAGGYSRKFASKSRNLADDMVRNSARDLFYHAVTHDAVLVFENLSRGFGRQGKRTFMTERQYTKMEDWLTAKLAYEGLTSKTYLSKTLAQYTSKTCSNCGFTITTADYDGMLVRLKKTSDGWATTLNNKELKAEGQITYYNRYKRQTVEKELSAELDRLSEESGNNDISKWTKGRRDEALFLLKKRFSHRPVQEQFVCLDCGHEVHADEQAALNIARSWLFLNSNSTEFKSYKSGKQPFVGAWQAFYKRRLKEVWKPNA

SEQ ID NO: 2 - protein, 978 aa, Unknown
  Planctomycetes sp.
MQEIKRINKIRRRLVKDSNTKKAGKTGPMKTLLVRVMTPDLRERLENLRKKPENIPQPISNTSRANLNKLLTDYTEMKKAILHVYWEEFQKDPVGLMSRVAQPAPKNIDQRKLIPVKDGNERLTSSGFACSQCCQPLYVYKLEQVNDKGKPHTNYFGRCNVSEHERLILLSPHKPEANDELVTYSLGKFGQRALDFYSIHVTRESNHPVKPLEQIGGNSCASGPVGKALSDACMGAVASFLTKYQDIILEHQKVIKKNEKRLANLKDIASANGLAFPKITLPPQPHTKEGIEAYNNVVAQIVIWVNLNLWQKLKIGRDEAKPLQRLKGFPSFPLVERQANEVDWWDMVCNVKKLINEKKEDGKVFWQNLAGYKRQEALLPYLSSEEDRKKGKKFARYQFGDLLLHLEKKHGEDWGKVYDEAWERIDKKVEGLSKHIKLEEERRSEDAQSKAALTDWLRAKASFVIEGLKEADKDEFCRCELKLQKWYGDLRGKPFAIEAENSILDISGFSKQYNCAFIWQKDGVKKLNLYLIINYFKGGKLRFKKIKPEAFEANRFYTVINKKSGEIVPMEVNFNFDDPNLIILPLAFGKRQGREFIWNDLLSLETGSLKLANGRVIEKTLYNRRTRQDEPALFVALTFERREVLDSSNIKPMNLIGIDRGENIPAVIALTDPEGCPLSRFKDSLGNPTHILRIGESYKEKQRTIQAAKEVEQRRAGGYSRKYASKAKNLADDMVRNTARDLLYYAVTQDAMLIFENLSRGFGRQGKRTFMAERQYTRMEDWLTAKLAYEGLPSKTYLSKTLAQYTSKTCSNCGFTITSADYDRVLEKLKKTATGWMTTINGKELKVEGQITYYNRYKRQNVVKDLSVELDRLSEESVNNDISSWTKGRSGEALSLLKKRFSHRPVQEKFVCLNCGFETHADEQAALNIARSWLFLRSQEYKKYQTNKTTGNTDKRAFVETWQSFYRKKLKEVWKPAV

SEQ ID NO: 3 - protein, 855 aa, Unknown
  Candidatus Sungbacteria sp.
MDNANKPSTKSLVNTTRISDHFGVTPGQVTRVFSFGIIPTKRQYAIIERWFAAVEAARERLYGMLYAHFQENPPAYLKEKFSYETFFKGRPVLNGLRDIDPTIMTSAVFTALRHKAEGAMAAFHTNHRRLFEEARKKMREYAECLKANEALLRGAADIDWDKIVNALRTRLNTCLAPEYDAVIADFGALCAFRALIAETNALKGAYNHALNQMLPALVKVDEPEEAEESPRLRFFNGRINDLPKFPVAERETPPDTETIIRQLEDMARVIPDTAEILGYIHRIRHKAARRKPGSAVPLPQRVALYCAIRMERNPEEDPSTVAGHFLGEIDRVCEKRRQGLVRTPFDSQIRARYMDIISFRATLAHPDRWTEIQFLRSNAASRRVRAETISAPFEGFSWTSNRTNPAPQYGMALAKDANAPADAPELCICLSPSSAAFSVREKGGDLIYMRPTGGRRGKDNPGKEITWVPGSFDEYPASGVALKLRLYFGRSQARRMLTNKTWGLLSDNPRVFAANAELVGKKRNPQDRWKLFFHMVISGPPPVEYLDFSSDVRSRARTVIGINRGEVNPLAYAVVSVEDGQVLEEGLLGKKEYIDQLIETRRRISEYQSREQTPPRDLRQRVRHLQDTVLGSARAKIHSLIAFWKGILAIERLDDQFHGREQKIIPKKTYLANKTGFMNALSFSGAVRVDKKGNPWGGMIEIYPGGISRTCTQCGTVWLARRPKNPGHRDAMVVIPDIVDDAAATGFDNVDCDAGTVDYGELFTLSREWVRLTPRYSRVMRGTLGDLERAIRQGDDRKSRQMLELALEPQPQWGQFFCHRCGFNGQSDVLAATNLARRAISLIRRLPDTDTPPTP

SEQ ID NO: 4 - RNA, 108 nt, Artificial Sequence
  gRNA sequence
acaucuggcgcguuuauuccauuacuuuggagccagucccagcgacuaugucguauggacgaagcgcuuauuuaucggagagaaaccgauaaguaaaacgcaucaaag

SEQ ID NO: 5 - RNA, 108 nt, Artificial Sequence
  gRNA sequence
uacuggcgcuuuuaucucauuacuuugagagccaucaccagcgacuaugucguauggguaaagcgcuuauuuaucggagagaaauccgauaaauaagaagcaucaaag

SEQ ID NO: 6 - RNA, 81 nt, Artificial Sequence
  gRNA sequence
acaucuggcgcguuuauuccauuacuuuggagccagucccagcgacuaugucguauggacgaagcgcuuauuuaucggaga

SEQ ID NO: 7 - RNA, 78 nt, Artificial Sequence
  gRNA sequence
acaucuggcgcguuuauuccauuacuuuggagccagucccagcgacuaugucguauggacgaagcgcuuauuuaucgg

SEQ ID NO: 8 - RNA, 80 nt, Artificial Sequence
  gRNA sequence
uacuggcgcuuuuaucucauuacuuugagagccaucaccagcgacuaugucguauggguaaagcgcuuauuuaucggaga

SEQ ID NO: 9 - RNA, 77 nt, Artificial Sequence
  gRNA sequence
uacuggcgcuuuuaucucauuacuuugagagccaucaccagcgacuaugucguauggguaaagcgcuuauuuaucgg

SEQ ID NO: 10 - RNA, 25 nt, Artificial Sequence
  gRNA sequence
guuuacacacucccucucauagggu

SEQ ID NO: 11 - RNA, 25 nt, Artificial Sequence
  gRNA sequence
guuuacacacucccucucaugaggu

SEQ ID NO: 12 - RNA, 25 nt, Artificial Sequence
  gRNA sequence
uuuuacauacccccucucaugggau

SEQ ID NO: 13 - RNA, 25 nt, Artificial Sequence
  gRNA sequence
guuuacacacucccucucauggggg

SEQ ID NO: 14 - RNA, 20 nt, Artificial Sequence
  gRNA sequence
ccagcgacuaugucguaugg

SEQ ID NO: 15 - RNA, 39 nt, Artificial Sequence
  gRNA sequence
gcgcuuauuuaucggagagaaauccgauaaauaagaagc

SEQ ID NO: 16 - RNA, 74 nt, Artificial Sequence
  gRNA sequence
ggcgcuuuuaucucauuacuuugagagccaucaccagcgacuaugucguauggguaaagcgcuuauuuaucgga

SEQ ID NO: 17 - RNA, 21 nt, Artificial Sequence
  stem loop sequence
  misc_feature (4)..(18): n is any ribonucleotide
  misc_feature (8)..(18): individual nucleotides may be absent
uuunnnnnnnnnnnnnnnuuu

SEQ ID NO: 18 - RNA, 23 nt, Unknown
  Deltaproteobacteria sp.
ccgauaaguaaaacgcaucaaag

SEQ ID NO: 19 - RNA, 26 nt, Unknown
  Planctomycetes sp.
ucuccgauaaauaagaagcaucaaag

SEQ ID NO: 20 - RNA, 21 nt, Artificial Sequence
  CasX scaffold variant
ccagcgacuaugucguagugg

SEQ ID NO: 21 - RNA, 31 nt, Artificial Sequence
  tracrRNA stem loop
  misc_feature (4)..(28): n is any ribonucleotide
  misc_feature (8)..(28): individual nucleotides may be absent
uuunnnnnnnnnnnnnnnnnnnnnnnnnuuu

SEQ ID NO: 22 - RNA, 19 nt, Artificial Sequence
  MS2
acaugaggaucacccaugu

SEQ ID NO: 23 - RNA, 18 nt, Artificial Sequence
  Qbeta
ugcaugucuaagacagca

SEQ ID NO: 24 - RNA, 20 nt, Artificial Sequence
  U1 hairpin II
aauccauugcacuccggauu

SEQ ID NO: 25 - RNA, 12 nt, Artificial Sequence
  Uvsx
ccucuucggagg

SEQ ID NO: 26 - RNA, 21 nt, Artificial Sequence
  PP7
aggaguuucuauggaaacccu

SEQ ID NO: 27 - RNA, 30 nt, Artificial Sequence
  phage replication loop
aggugggacgaccucucggucguccuaucu

SEQ ID NO: 28 - RNA, 19 nt, Artificial Sequence
  kissing loop a
ugcucgcuccguucgagca

SEQ ID NO: 29 - RNA, 21 nt, Artificial Sequence
  kissing loop b1
ugcucgacgcguccucgagca

SEQ ID NO: 30 - RNA, 22 nt, Artificial Sequence
  kissing loop b2
ugcucguuugcggcuacgagca

SEQ ID NO: 31 - RNA, 17 nt, Artificial Sequence
  G quadriplex M3q
agggagggagggagagg

SEQ ID NO: 32 - RNA, 19 nt, Artificial Sequence
  G quadriplex telomere basket
gguuaggguuaggguuagg

SEQ ID NO: 33 - RNA, 25 nt, Artificial Sequence
  sarcin-ricin loop
cugcucaguacgagaggaaccgcag

SEQ ID NO: 34 - RNA, 78 nt, Artificial Sequence
  pseudoknot
uacacugggaucgcugaauuagagaucggcguccuuucauucuauauacuuuggaguuuuaaaaugucucuaaguaca

SEQ ID NO: 35 - protein, 4 aa, Artificial Sequence
  CXXC zinc finger/ribbon domain
  SITE (2)..(3): Xaa is any amino acid
CXXC

SEQ ID NO: 36 - protein, 978 aa, Artificial Sequence
  CasX Variant
MQEIKRINKIRRRLVKDSNTKKAGKTGPMKTLLVRVMTPDLRERLENLRKKPENIPQPISNTSRANLNKLLTDYTEMKKAILHVYWEEFQKDPVGLMSRVAQPASKKIDQNKLKPEMDEKGNLTTAGFACSQCGQPLFVYKLEQVSEKGKAYTNYFGRCNVAEHEKLILLAQLKPEKDSDEAVTYSLGKFGQRALDFYSIHVTRESNHPVKPLEQIGGNSCASGPVGKALSDACMGAVASFLTKYQDIILEHQKVIKKNEKRLANLKDIASANGLAFPKITLPPQPHTKEGIEAYNNVVAQIVIWVNLNLWQKLKIGRDEAKPLQRLKGFPSFPLVERQANEVDWWDMVCNVKKLINEKKEDGKVFWQNLAGYKRQEALRPYLSSEEDRKKGKKFARYQFGDLLLHLEKKHGEDWGKVYDEAWERIDKKVEGLSKHIKLEEERRSEDAQSKAALTDWLRAKASFVIEGLKEADKDEFCRCELKLQKWYGDLRGKPFAIEAENSILDISGFSKQYNCAFIWQKDGVKKLNLYLIINYFKGGKLRFKKIKPEAFEANRFYTVINKKSGEIVPMEVNFNFDDPNLIILPLAFGKRQGREFIWNDLLSLETGSLKLANGRVIEKTLYNRRTRQDEPALFVALTFERREVLDSSNIKPMNLIGIDRGENIPAVIALTDPEGCPLSRFKDSLGNPTHILRIGESYKEKQRTIQAKKEVEQRRAGGYSRKYASKAKNLADDMVRNTARDLLYYAVTQDAMLIFENLSRGFGRQGKRTFMAERQYTRMEDWLTAKLAYEGLSKTYLSKTLAQYTSKTCSNCGFTITSADYDRVLEKLKKTATGWMTTINGKELKVEGQITYYNRYKRQNVVKDLSVELDRLSEESVNNDISSWTKGRSGEALSLLKKRFSHRPVQEKFVCLNCGFETHADEQAALNIARSWLFLRSQEYKKYQTNKTTGNTDKRAFVETWQSFYRKKLKEVWKPAV

SEQ ID NO: 37 - protein, 977 aa, Artificial Sequence
  CasX Variant
MQEIKRINKIRRRLVKDSNTKKAGKTGPMKTLLVRVMTPDLRERLENLRKKPENIPQPISNTSRANLNKLLTDYTEMKKAILHVYWEEFQKDPVGLMSRVAQPAPKNIDQRKLIPVKDGNERLTSSGFACSQCCQPLYVYKLEQVNDKGKPHTNYFGRCNVSEHERLILLSPHKPEANDELVTYSLGKFGQRALDFYSIHVTRESNHPVKPLEQIGGNSCASGPVGKALSDACMGAVASFLTKYQDIILEHQKVIKKNEKRLANLKDIASANGLAFPKITLPPQPHTKEGIEAYNNVVAQIVIWVNLNLWQKLKIGRDEAKPLQRLKGFPSFPLVERQANEVDWWDMVCNVKKLINEKKEDGKVFWQNLAGYKRQEALRPYLSSEEDRKKGKKFARYQFGDLLLHLEKKHGEDWGKVYDEAWERIDKKVEGLSKHIKLEEERRSEDAQSKAALTDWLRAKASFVIEGLKEADKDEFCRCELKLQKWYGDLRGKPFAIEAENSILDISGFSKQYNCAFIWQKDGVKKLNLYLIINYFKGGKLRFKKIKPEAFEANRFYTVINKKSGEIVPMEVNFNFDDPNLIILPLAFGKRQGREFIWNDLLSLETGSLKLANGRVIEKTLYNRRTRQDEPALFVALTFERREVLDSSNIKPMNLIGIDRGENIPAVIALTDPEGCPLSRFKDSLGNPTHILRIGESYKEKQRTIQAKKEVEQRRAGGYSRKYASKAKNLADDMVRNTARDLLYYAVTQDAMLIFENLSRGFGRQGKRTFMAERQYTRMEDWLTAKLAYEGLSKTYLSKTLAQYTSKTCSNCGFTITTADYDGMLVRLKKTSDGWATTLNNKELKAEGQITYYNRYKRQTVEKELSAELDRLSEESGNNDISKWTKGRRDEALFLLKKRFSHRPVQEQFVCLDCGHEVHADEQAALNIARSWLFLRSQEYKKYQTNKTTGNTDKRAFVETWQSFYRKKLKEVWKPAV

SEQ ID NO: 38 - protein, 985 aa, Artificial Sequence
  CasX Variant
MEKRINKIRKKLSADNATKPVSRSGPMKTLLVRVMTDDLKKRLEKRRKKPEVMPQVISNNAANNLRMLLDDYTKMKEAILQVYWQEFKDDHVGLMCKFAQPAPKNIDQRKLIPVKDGNERLTSSGFACSQCCQPLYVYKLEQVNDKGKPHTNYFGRCNVSEHERLILLSPHKPEANDELVTYSLGKFGQRALDFYSIHVTKESTHPVKPLAQIAGNRYASGPVGKALSDACMGTIASFLSKYQDIIIEHQKVVKGNQKRLESLRELAGKENLEYPSVTLPPQPHTKEGVDAYNEVIARVRMWVNLNLWQKLKLSRDDAKPLLRLKGFPSFPVVERRENEVDWWNTINEVKKLIDAKRDMGRVFWSGVTAEKRNTILEGYNYLPNENDHKKREGSLENPKKPAKRQFGDLLLYLEKKYAGDWGKVFDEAWERIDKKIAGLTSHIEREEARNAEDAQSKAVLTDWLRAKASFVLERLKEMDEKEFYACEIQLQKWYGDLRGNPFAVEAENRVVDISGFSIGSDGHSIQYRNLLAWKYLENGKREFYLLMNYGKKGRIRFTDGTDIKKSGKWQGLLYGGGKAKVIDLTFDPDDEQLIILPLAFGTRQGREFIWNDLLSLETGLIKLANGRVIEKTIYNKKIGRDEPALFVALTFERREVVDPSNIKPVNLIGVDRGENIPAVIALTDPEGCPLPEFKDSSGGPTDILRIGEGYKEKQRAIQAAKEVEQRRAGGYSRKFASKSRNLADDMVRNSARDLFYHAVTHDAVLVFENLSRGFGRQGKRTFMTERQYTKMEDWLTAKLAYEGLTSKTYLSKTLAQYTSKTCSNCGFTITTADYDGMLVRLKKTSDGWATTLNNKELKAEGQITYYNRYKRQTVEKELSAELDRLSEESGNNDISKWTKGRRDEALFLLKKRFSHRPVQEQFVCLDCGHEVHADEQAALNIARSWLFLNSNSTEFKSYKSGKQPFVGAWQAFYKRRLKEVWKPNA

SEQ ID NO: 39 - protein, 986 aa, Artificial Sequence
  CasX Variant
MEKRINKIRKKLSADNATKPVSRSGPMKTLLVRVMTDDLKKRLEKRRKKPEVMPQVISNNAANNLRMLLDDYTKMKEAILQVYWQEFKDDHVGLMCKFAQPASKKIDQNKLKPEMDEKGNLTTAGFACSQCGQPLFVYKLEQVSEKGKAYTNYFGRCNVAEHEKLILLAQLKPEKDSDEAVTYSLGKFGQRALDFYSIHVTKESTHPVKPLAQIAGNRYASGPVGKALSDACMGTIASFLSKYQDIIIEHQKVVKGNQKRLESLRELAGKENLEYPSVTLPPQPHTKEGVDAYNEVIARVRMWVNLNLWQKLKLSRDDAKPLLRLKGFPSFPVVERRENEVDWWNTINEVKKLIDAKRDMGRVFWSGVTAEKRNTILEGYNYLPNENDHKKREGSLENPKKPAKRQFGDLLLYLEKKYAGDWGKVFDEAWERIDKKIAGLTSHIEREEARNAEDAQSKAVLTDWLRAKASFVLERLKEMDEKEFYACEIQLQKWYGDLRGNPFAVEAENRVVDISGFSIGSDGHSIQYRNLLAWKYLENGKREFYLLMNYGKKGRIRFTDGTDIKKSGKWQGLLYGGGKAKVIDLTFDPDDEQLIILPLAFGTRQGREFIWNDLLSLETGLIKLANGRVIEKTIYNKKIGRDEPALFVALTFERREVVDPSNIKPVNLIGVDRGENIPAVIALTDPEGCPLPEFKDSSGGPTDILRIGEGYKEKQRAIQAAKEVEQRRAGGYSRKFASKSRNLADDMVRNSARDLFYHAVTHDAVLVFENLSRGFGRQGKRTFMTERQYTKMEDWLTAKLAYEGLTSKTYLSKTLAQYTSKTCSNCGFTITSADYDRVLEKLKKTATGWMTTINGKELKVEGQITYYNRYKRQNVVKDLSVELDRLSEESVNNDISSWTKGRSGEALSLLKKRFSHRPVQEKFVCLNCGFETHADEQAALNIARSWLFLNSNSTEFKSYKSGKQPFVGAWQAFYKRRLKEVWKPNA

SEQ ID NO: 40 - protein, 921 aa, Artificial Sequence
  CasX Variant
MQEIKRINKIRRRLVKDSNTKKAGKTGPMKTLLVRVMTPDLRERLENLRKKPENIPQPISNTSRANLNKLLTDYTEMKKAILHVYWEEFQKDPVGLMSRVAQPAPKNIDQRKLIPVKDGNERLTSSGFACSQCCQPLYVYKLEQVNDKGKPHTNYFGRCNVSEHERLILLSPHKPEANDELVTYSLGKFGQRALDFYSIHVTRESNHPVKPLEQIGGNSCASGPVGKALSDACMGAVASFLTKYQDIILEHQKVIKKNEKRLANLKDIASANGLAFPKITLPPQPHTKEGIEAYNNVVAQIVIWVNLNLWQKLKIGRDEAKPLQRLKGFPSFPLVERQANEVDWWDMVCNVKKLINEKKEDGKVFWQNLAGYKRQEALRPYLSSEEDRKKGKKFARYQFGDLLLHLEKKHGEDWGKVYDEAWERIDKKVEGLSKHIKLEEERRSEDAQSKAALTDWLRAKASFVIEGLKEADKDEFCRCELKLQKWYGDLRGKPFAIEAENSILDISGFSKQYNCAFIWQKDGVKKLNLYLIINYFKGGKLRFKKIKPEAFEANRFYTVINKKSGEIVPMEVNFNFDDPNLIILPLAFGKRQGREFIWNDLLSLETGSLKLANGRVIEKTLYNRRTRQDEPALFVALTFERREVLDSSNIKPVNLIGVDRGENIPAVIALTDPEGCPLPEFKDSSGGPTDILRIGEGYKEKQRAIQAAKEVEQRRAGGYSRKFASKSRNLADDMVRNSARDLFYHAVTHDAVLVFENLSRGFGRQGKRTFMTERQYTKMEDWLTAKLAYEGLTSKTYLSKTLAQYTSKTCSNCGFTITSADYDRVLEKLKKTATGWMTTINGKELKVEGQITYYNRYKRQNVVKDLSVELDRLSEESVNNDISSWTKGRSGEALSLLKKRFSHRPVQEKFVCLNCGFETHA

SEQ ID NO: 41 - protein, 920 aa, Artificial Sequence
  CasX Variant
MQEIKRINKIRRRLVKDSNTKKAGKTGPMKTLLVRVMTPDLRERLENLRKKPENIPQPISNTSRANLNKLLTDYTEMKKAILHVYWEEFQKDPVGLMSRVAQPAPKNIDQRKLIPVKDGNERLTSSGFACSQCCQPLYVYKLEQVNDKGKPHTNYFGRCNVSEHERLILLSPHKPEANDELVTYSLGKFGQRALDFYSIHVTRESNHPVKPLEQIGGNSCASGPVGKALSDACMGAVASFLTKYQDIILEHQKVIKKNEKRLANLKDIASANGLAFPKITLPPQPHTKEGIEAYNNVVAQIVIWVNLNLWQKLKIGRDEAKPLQRLKGFPSFPLVERQANEVDWWDMVCNVKKLINEKKEDGKVFWQNLAGYKRQEALRPYLSSEEDRKKGKKFARYQFGDLLLHLEKKHGEDWGKVYDEAWERIDKKVEGLSKHIKLEEERRSEDAQSKAALTDWLRAKASFVIEGLKEADKDEFCRCELKLQKWYGDLRGKPFAIEAENSILDISGFSKQYNCAFIWQKDGVKKLNLYLIINYFKGGKLRFKKIKPEAFEANRFYTVINKKSGEIVPMEVNFNFDDPNLIILPLAFGKRQGREFIWNDLLSLETGSLKLANGRVIEKTLYNRRTRQDEPALFVALTFERREVLDSSNIKPMNLIGIDRGENIPAVIALTDPEGCPLSRFKDSLGNPTHILRIGESYKEKQRTIQAKKEVEQRRAGGYSRKYASKAKNLADDMVRNTARDLLYYAVTQDAMLIFENLSRGFGRQGKRTFMAERQYTRMEDWLTAKLAYEGLSKTYLSKTLAQYTSKTCSNCGFTITSADYDRVLEKLKKTATGWMTTINGKELKVEGQITYYNRYKRQNVVKDLSVELDRLSEESVNNDISSWTKGRSGEALSLLKKRFSHRPVQEKFVCLNCGFETHA

SEQ ID NO: 42 - protein, 977 aa, Artificial Sequence
  CasX Variant
MQEIKRINKIRRRLVKDSNTKKAGKTGPMKTLLVRVMTPDLRERLENLRKKPENIPQPISNNAANNLRMLLDDYTKMKEAILQVYWQEFKDDHVGLMCKFAQPAPKNIDQRKLIPVKDGNERLTSSGFACSQCCQPLYVYKLEQVNDKGKPHTNYFGRCNVSEHERLILLSPHKPEANDELVTYSLGKFGQRALDFYSIHVTKESTHPVKPLAQIAGNRYASGPVGKALSDACMGTIASFLSKYQDIIIEHQKVVKGNQKRLESLRELAGKENLEYPSVTLPPQPHTKEGVDAYNEVIARVRMWVNLNLWQKLKLSRDDAKPLLRLKGFPSFPLVERQANEVDWWDMVCNVKKLINEKKEDGKVFWQNLAGYKRQEALRPYLSSEEDRKKGKKFARYQFGDLLLHLEKKHGEDWGKVYDEAWERIDKKVEGLSKHIKLEEERRSEDAQSKAALTDWLRAKASFVIEGLKEADKDEFCRCELKLQKWYGDLRGKPFAIEAENSILDISGFSKQYNCAFIWQKDGVKKLNLYLIINYFKGGKLRFKKIKPEAFEANRFYTVINKKSGEIVPMEVNFNFDDPNLIILPLAFGKRQGREFIWNDLLSLETGSLKLANGRVIEKTLYNRRTRQDEPALFVALTFERREVLDSSNIKPMNLIGIDRGENIPAVIALTDPEGCPLSRFKDSLGNPTHILRIGESYKEKQRTIQAKKEVEQRRAGGYSRKYASKAKNLADDMVRNTARDLLYYAVTQDAMLIFENLSRGFGRQGKRTFMAERQYTRMEDWLTAKLAYEGLSKTYLSKTLAQYTSKTCSNCGFTITSADYDRVLEKLKKTATGWMTTINGKELKVEGQITYYNRYKRQNVVKDLSVELDRLSEESVNNDISSWTKGRSGEALSLLKKRFSHRPVQEKFVCLNCGFETHADEQAALNIARSWLFLRSQEYKKYQTNKTTGNTDKRAFVETWQSFYRKKLKEVWKPAV

SEQ ID NO: 43 - protein, 986 aa, Artificial Sequence
  CasX Variant
MQEIKRINKIRRRLVKDSNTKKAGKTGPMKTLLVRVMTPDLRERLENLRKKPENIPQPISNTSRANLNKLLTDYTEMKKAILHVYWEEFQKDPVGLMSRVAQPAPKNIDQRKLIPVKDGNERLTSSGFACSQCCQPLYVYKLEQVNDKGKPHTNYFGRCNVSEHERLILLSPHKPEANDELVTYSLGKFGQRALDFYSIHVTRESNHPVKPLEQIGGNSCASGPVGKALSDACMGAVASFLTKYQDIILEHQKVIKKNEKRLANLKDIASANGLAFPKITLPPQPHTKEGIEAYNNVVAQIVIWVNLNLWQKLKIGRDEAKPLQRLKGFPSFPVVERRENEVDWWNTINEVKKLIDAKRDMGRVFWSGVTAEKRNTILEGYNYLPNENDHKKREGSLENPKKPAKRQFGDLLLYLEKKYAGDWGKVFDEAWERIDKKIAGLTSHIEREEARNAEDAQSKAVLTDWLRAKASFVLERLKEMDEKEFYACEIQLQKWYGDLRGNPFAVEAENSILDISGFSKQYNCAFIWQKDGVKKLNLYLIINYFKGGKLRFKKIKPEAFEANRFYTVINKKSGEIVPMEVNFNFDDPNLIILPLAFGKRQGREFIWNDLLSLETGSLKLANGRVIEKTLYNRRTRQDEPALFVALTFERREVLDSSNIKPMNLIGIDRGENIPAVIALTDPEGCPLSRFKDSLGNPTHILRIGESYKEKQRTIQAKKEVEQRRAGGYSRKYASKAKNLADDMVRNTARDLLYYAVTQDAMLIFENLSRGFGRQGKRTFMAERQYTRMEDWLTAKLAYEGLSKTYLSKTLAQYTSKTCSNCGFTITSADYDRVLEKLKKTATGWMTTINGKELKVEGQITYYNRYKRQNVVKDLSVELDRLSEESVNNDISSWTKGRSGEALSLLKKRFSHRPVQEKFVCLNCGFETHADEQAALNIARSWLFLRSQEYKKYQTNKTTGNTDKRAFVETWQSFYRKKLKEVWKPAV

SEQ ID NO: 44 - protein, 925 aa, Artificial Sequence
  CasX Variant
MISNTSRANLNKLLTDYTEMKKAILHVYWEEFQKDPVGLMSRVAQPAPKNIDQRKLIPVKDGNERLTSSGFACSQCCQPLYVYKLEQVNDKGKPHTNYFGRCNVSEHERLILLSPHKPEANDELVTYSLGKFGQRALDFYSIHVTRESNHPVKPLEQIGGNSCASGPVGKALSDACMGAVASFLTKYQDIILEHQKVIKKNEKRLANLKDIASANGLAFPKITLPPQPHTKEGIEAYNNVVAQIVIWVNLNLWQKLKIGRDEAKPLQRLKGFPSFPLVERQANEVDWWDMVCNVKKLINEKKEDGKVFWQNLAGYKRQEALRPYLSSEEDRKKGKKFARYQFGDLLLHLEKKHGEDWGKVYDEAWERIDKKVEGLSKHIKLEEERRSEDAQSKAALTDWLRAKASFVIEGLKEADKDEFCRCELKLQKWYGDLRGKPFAIEAENRVVDISGFSIGSDGHSIQYRNLLAWKYLENGKREFYLLMNYGKKGRIRFTDGTDIKKSGKWQGLLYGGGKAKVIDLTFDPDDEQLIILPLAFGTRQGREFIWNDLLSLETGLIKLANGRVIEKTIYNKKIGRDEPALFVALTFERREVVDPSNIKPMNLIGIDRGENIPAVIALTDPEGCPLSRFKDSLGNPTHILRIGESYKEKQRTIQAKKEVEQRRAGGYSRKYASKAKNLADDMVRNTARDLLYYAVTQDAMLIFENLSRGFGRQGKRTFMAERQYTRMEDWLTAKLAYEGLSKTYLSKTLAQYTSKTCSNCGFTITSADYDRVLEKLKKTATGWMTTINGKELKVEGQITYYNRYKRQNVVKDLSVELDRLSEESVNNDISSWTKGRSGEALSLLKKRFSHRPVQEKFVCLNCGFETHADEQAALNIARSWLFLRSQEYKKYQTNKTTGNTDKRAFVETWQSFYRKKLKEVWKPAV

SEQ ID NO: 45 - protein, 975 aa, Artificial Sequence
  CasX Variant
MEKRINKIRKKLSADNATKPVSRSGPMKTLLVRVMTDDLKKRLEKRRKKPEVMPQVISNTSRANLNKLLTDYTEMKKAILHVYWEEFQKDPVGLMSRVAQPAPKNIDQRKLIPVKDGNERLTSSGFACSQCCQPLYVYKLEQVNDKGKPHTNYFGRCNVSEHERLILLSPHKPEANDELVTYSLGKFGQRALDFYSIHVTRESNHPVKPLEQIGGNSCASGPVGKALSDACMGAVASFLTKYQDIILEHQKVIKKNEKRLANLKDIASANGLAFPKITLPPQPHTKEGIEAYNNVVAQIVIWVNLNLWQKLKIGRDEAKPLQRLKGFPSFPLVERQANEVDWWDMVCNVKKLINEKKEDGKVFWQNLAGYKRQEALRPYLSSEEDRKKGKKFARYQFGDLLLHLEKKHGEDWGKVYDEAWERIDKKVEGLSKHIKLEEERRSEDAQSKAALTDWLRAKASFVIEGLKEADKDEFCRCELKLQKWYGDLRGKPFAIEAENSILDISGFSKQYNCAFIWQKDGVKKLNLYLIINYFKGGKLRFKKIKPEAFEANRFYTVINKKSGEIVPMEVNFNFDDPNLIILPLAFGKRQGREFIWNDLLSLETGSLKLANGRVIEKTLYNRRTRQDEPALFVALTFERREVLDSSNIKPMNLIGIDRGENIPAVIALTDPEGCPLSRFKDSLGNPTHILRIGESYKEKQRTIQAKKEVEQRRAGGYSRKYASKAKNLADDMVRNTARDLLYYAVTQDAMLIFENLSRGFGRQGKRTFMAERQYTRMEDWLTAKLAYEGLSKTYLSKTLAQYTSKTCSNCGFTITSADYDRVLEKLKKTATGWMTTINGKELKVEGQITYYNRYKRQNVVKDLSVELDRLSEESVNNDISSWTKGRSGEALSLLKKRFSHRPVQEKFVCLNCGFETHADEQAALNIARSWLFLRSQEYKKYQTNKTTGNTDKRAFVETWQSFYRKKLKEVWKPAV

SEQ ID NO: 46 - protein, 982 aa, Artificial Sequence
  CasX Variant
MQEIKRINKIRRRLVKDSNTKKAGKTGPMKTLLVRVMTPDLRERLENLRKKPENIPQPISNTSRANLNKLLTDYTEMKKAILHVYWEEFQKDPVGLMSRVAQPAPKNIDQRKLIPVKDGNERLTSSGFACSQCCQPLYVYKLEQVNDKGKPHTNYFGRCNVSEHERLILLSPHKPEANDELVTYSLGKFGQRALDFYSIHVTRESNHPVKPLEQIGGNSCASGPVGKALSDACMGAVASFLTKYQDIILEHQKVIKKNEKRLANLKDIASANGLAFPKITLPPQPHTKEGIEAYNNVVAQIVIWVNLNLWQKLKIGRDEAKPLQRLKGFPSFPLVERQANEVDWWDMVCNVKKLINEKKEDGKVFWQNLAGYKRQEALRPYLSSEEDRKKGKKFARYQFGDLLLHLEKKHGEDWGKVYDEAWERIDKKVEGLSKHIKLEEERRSEDAQSKAALTDWLRAKASFVIEGLKEADKDEFCRCELKLQKWYGDLRGKPFAIEAENRVVDISGFSIGSDGHSIQYRNLLAWKYLENGKREFYLLMNYGKKGRIRFTDGTDIKKSGKWQGLLYGGGKAKVIDLTFDPDDEQLIILPLAFGTRQGREFIWNDLLSLETGLIKLANGRVIEKTIYNKKIGRDEPALFVALTFERREVVDPSNIKPMNLIGIDRGENIPAVIALTDPEGCPLSRFKDSLGNPTHILRIGESYKEKQRTIQAKKEVEQRRAGGYSRKYASKAKNLADDMVRNTARDLLYYAVTQDAMLIFENLSRGFGRQGKRTFMAERQYTRMEDWLTAKLAYEGLSKTYLSKTLAQYTSKTCSNCGFTITSADYDRVLEKLKKTATGWMTTINGKELKVEGQITYYNRYKRQNVVKDLSVELDRLSEESVNNDISSWTKGRSGEALSLLKKRFSHRPVQEKFVCLNCGFETHADEQAALNIARSWLFLRSQEYKKYQTNKTTGNTDKRAFVETWQSFYRKKLKEVWKPAV

SEQ ID NO: 47 - protein, 977 aa, Artificial Sequence
  CasX Variant
MQEIKRINKIRRRLVKDSNTKKAGKTGPMKTLLVRVMTPDLRERLENLRKKPENIPQPISNTSRANLNKLLTDYTEMKKAILHVYWEEFQKDPVGLMSRVAQPAPKNIDQRKLIPVKDGNERLTSSGFACSQCCQPLYVYKLEQVNDKGKPHTNYFGRCNVSEHERLILLSPHKPEANDELVTYSLGKFGQRALDFYSIHVTRESNHPVKPLEQIGGNSCASGPVGKALSDACMGAVASFLTKYQDIILEHQKVIKKNEKRLANLKDIASANGLAFPKITLPPQPHTKEGIEAYNNVVAQIVIWVNLNLWQKLKIGRDEAKPLQRLKGFPSFPLVERQANEVDWWDMVCNVKKLINEKKEDGKVFWQNLAGYKRQEALRPYLSSEEDRKKGKKFARYQFGDLLLHLEKKHGEDWGKVYDEAWERIDKKVEGLSKHIKLEEERRSEDAQSKAALTDWLRAKASFVIEGLKEADKDEFKRCELKLQKWYGDLRGKPFAIEAENSILDISGFSKQYNCAFIWQKDGVKKLNLYLIINYFKGGKLRFKKIKPEAFEANRFYTVINKKSGEIVPMEVNFNFDDPNLIILPLAFGKRQGREFIWNDLLSLETGSLKLANGRVIEKPLYNRRTRQDEPALFVALTFERREVLDSSNIKPMNLIGIDRGENIPAVIALTDPEGCPLSRFKDSLGNPTHILRIGESYKEKQRTIQAKKEVEQRRAGGYSRKYASKAKNLADDMVRNTARDLLYYAVTQDAMLIFENLSRGFGRQGKRTFMAERQYTRMEDWLTAKLAYEGLSKTYLSKTLAQYTSKTCSNCGFTITSADYDRVLEKLKKTATGWMTTINGKELKVEGQITYYNRYKRQNVVKDLSVELDRLSEESVNNDISSWTKGRSGEALSLLKKRFSHRPVQEKFVCLNCGFETHADEQAALNIARSWLFLRSQEYKKYQTNKTTGNTDKRAFVETWQSFYRKKLKEVWKPAV

SEQ ID NO: 48 - protein, 977 aa, Artificial Sequence
  CasX Variant
MQEIKRINKIRRRLVKDSNTKKAGKTGPMKTLLVRVMTPDLRERLENLRKKPENIPQPISNTSRANLNKLLTDYTEMKKAILHVYWEEFQKDPVGLMSRVAQPAPKNIDQRKLIPVKDGNERLTSSGFACSQCCQPLYVYKLEQVNDKGKPHTNYFGRCNVSEHERLILLSPHKPEANDELVTYSLGKFGQRALDFYSIHVTRESNHPVKPLEQIGGNSCASGPVGKALSDACMGAVASFLTKYQDIILEHQKVIKKNEKRLANLKDIASANGLAFPKITLPPQPHTKEGIEAYNNVVAQIVIWVNLNLWQKLKIGRDEAKPLQRLKGFPSFPLVERQANEVDWWDMVCNVKKLINEKKEDGKVFWQNLAGYKRQEALLPYLSSEEDRKKGKKFARYQFGDLLLHLEKKHGEDWGKVYDEAWERIDKKVEGLSKHIKLEEERRSEDAQSKAALTDWLRAKASFVIEGLKEADKDEFCRCELKLQKWYGDLRGKPFAIEAENSILDISGFSKQYNCAFIWQKDGVKKLNLYLIINYFKGGKLRFKKIKPEAFEANRFYTVINKKSGEIVPMEVNFNFDDPNLIILPLAFGKRQGREFIWNDLLSLETGSLKLANGRVIEKTLYNRRTRQDEPALFVALTFERREVLDSSNIKPMNLIGIDRGENIPAVIALTDPEGCPLSRFKDSLGNPTHILRIGESYKEKQRTIQAAKEVEQRRAGGYSRKYASKAKNLADDMVRNTARDLLYYAVTQDAMLIFENLSRGFGRQGKRTFAAERQYTRMEDWLTAKLAYEGLPSKTYLSKTLAQYTSKTCSNCGFTITSADYDRVLEKLKKTATGWMTTINGKELKVEGQITYYNRYKRQNVVKDLSVELDRLSEESVNNDISSWTKGRSGEALSLLKKRFSHRPVQEKFVCLNCGFETHADEQAALNIARSWLFLRSQEYKKYQTNKTTGNTDKRAFVETWQSFYRKKLKEVWKPA

SEQ ID NO: 49 - protein, 977 aa, Artificial Sequence
  CasX Variant
MQEIKRINKIRRRLVKDSNTKKAGKTGPMKTLLVRVMTPDLRERLENLRKKPENIPQPISNTSRANLNKLLTDYTEMKKAILHVYWEEFQKDPVGLMSRVAQPAPKNIDQRKLIPVKDGNERLTSSGFACSQCCQPLYVYKLEQVNDKGKPHTNYFGRCNVSEHERLILLSPHKPEANDELVTYSLGKFGQRALDFYSIHVTRESNHPVKPLEQIGGNSCASGPVGKALSDACMGAVASFLTKYQDIILEHQKVIKKNEKRLANLKDIASANGLAFPKITLPPQPHTKEGIEAYNNVVAQIVIWVNLNLWQKLKIGRDEAKPLQRLKGFPSFPLVERQANEVDWWDMVCNVKKLINEKKEDGKVFWQNLAGYKRQEALRPYLSSEEDRKKGKKFARYQFGDLLLHLEKKHGEDWGKVYDEAWERIDKKVEGLSKHIKLEEERRSEDAQSKAALTDWLRAKASFVIEGLKEADKDEFCRCELKLQKWYGDLRGKPFAIEAENSILDISGFSKQYNCAFIWQKDGVKKLNLYLIINYFKGGKLRFKKIKPEAFEANRFYTVINKKSGEIVPMEVNFNFDDPNLIILPLAFGKRQGREFIWNDLLSLETGSLKLANGRVIEKTLYNRRTRQDEPALFVALTFERREVLDSSNIKPMNLIGIDRGENIPAVIALTDPEGCPLSRFKDSLGNPTHILRIGESYKEKQRTIQAKKEVEQRRAGGYSRKYASKAKNLANDMVRNTARDLLYYAVTQDAMLIFENLSRGFGRQGKRTFMAERQYTRMEDWLTAKLAYEGLSKTYLSKTLAQYTSKTCSNCGFTITSADYDRVLEKLKKTATGWMTTINGKELKVEGQITYYNRYKRQNVVKDLSVELDRLSEESVNNDISSWTKGRSGEALSLLKKRFSHRPVQEKFVCLNCGFETHADEQAALNIARSWLFLRSQEYKKYQTNKTTGNTDKRAFVETWQSFYRKKLKEVWKPAV

SEQ ID NO: 50 - protein, 978 aa, Artificial Sequence
  CasX Variant
MQEIKRINKIRRRLVKDSNTKKAGKTGPMKTLLVRVMTPDLRERLENLRKKPENIPQPISNTSRANLNKLLTDYTEMKKAILHVYWEEFQKDPVGLMSRVAQPAPKNIDQRKLIPVKDGNERLTSSGFACSQCCQPLYVYKLEQVNDKGKPHTNYFGRCNVSEHERLILLSPHKPEANDELVTYSLGKFGQRALDFYSIHVTRESNHPVKPLEQIGGNSCASGPVGKALSDACMGAVASFLTKYQDIILEHQKVIKKNEKRLANLKDIASANGLAFPKITLPPQPHTKEGIEAYNNVVAQIVIWVNLNLWQKLKIGRDEAKPLQRLKGFPSFPLVERQANEVDWWDMVCNVKKLINEKKEDGKVFWQNLAGYKRQEALLPYLSSEEDRKKGKKFARYQFGDLLLHLEKKHGEDWGKVYDEAWERIDKKVEGLSKHIKLEEERRSEDAQSKAALTDWLRAKASFVIEGLKEADKDEFCRCELKLQKWYGDLRGKPFAIEAENSILDISGFSKQYNCAFIWQKDGVKKLNLYLIINYFKGGKLRFKKIKPEAFEANRFYTVINKKSGEIVPMEVNFNFDDPNLIILPLAFGKRQGREFIWNDLLSLETGSLKLANGRVIEKTLYNRRTRQDEPALFVALTFERREVLDSSNIKPMNLIGIDRGENIPAVIALTDPEGCPLSRFKDSLGNPTHILRIGESYKEKQRTIQAAKEVEQRRAGGYSRKYASKAKNLADDMVRNTARDLLYYAVTQDAMLIFENLSRGFGRQGKRTFMAERQYTRMEDQLTAKLAYEGLPSKTYLSKTLAQYTSKTCSNCGFTITSADYDRVLEKLKKTATGWMTTINGKELKVEGQITYYNRYKRQNVVKDLSVELDRLSEESVNNDISSWTKGRSGEALSLLKKRFSHRPVQEKFVCLNCGFETHADEQAALNIARSWLFLRSQEYKKYQTNKTTGNTDKRAFVETWQSFYRKKLKEVWKPAV

SEQ ID NO: 51 - protein, 978 aa, Artificial Sequence
  CasX Variant
MQEIKRINKIRRRLVKDSNTKKAGKTGPMKTLLVRVMTPDLRERLENLRKKPENIPQPISNTSRANLNKLLTDYTEMKKAILHVYWEEFQKDPVGLMSRVAQPAPKNIDQRKLIPVKDGNERLTSSGFACSQCCQPLYVYKLEQVNDKGKPHTNYFGRCNVSEHERLILLSPHKPEANDELVTYSLGKFGQRALDFYSIHVTRESNHPVKPLEQIGGNSCASGPVGKALSDACMGAVASFLTKYQDIILEHQKVIKKNEKRLANLKDIASANGLAFPKITLPPQPHTKEGIEAYNNVVAQIVIWVNLNLWQKLKIGRDEAKPLQRLKGFPSFPLVERQANEVDWWDMVCNVKKLINEKKEDGKVFWQNLAGYKRQEALLPYLSSEEDRKKGKKFARYQFGDLLLHLEKKHGEDWGKVYDEAWERIDKKVEGLSKHIKLEEERRSEDAQSKAALTDWLRAKASFVIEGLKEADKDEFCRCELKLQKWYGDLRGKPFAIEAENSILDISGFSKQYNCAFIWQKDGVKKLNLYLIINYFKGGKLRFKKIKPEAFEANRFYTVINKKSGEIVPMEVNFNFDDPNLIILPLAFGKRQGREFIWNDLLSLETGSLKLANGRVIEKTLYNRRTRQDEPALFVALTFERREVLDSSNIKPMNLIGIDRGENIPAVIALTDPEGCPLSRFKDSLGNPTHILRIGESYKEKQRTIQAAKEVEQRRAGGYSRKYASKAKNLADDMVRNTARDLLYYAVTQDAMLIFENLSRGFGRQGKRTFQAERQYTRMEDWLTAKLAYEGLPSKTYLSKTLAQYTSKTCSNCGFTITSADYDRVLEKLKKTATGWMTTINGKELKVEGQITYYNRYKRQNVVKDLSVELDRLSEESVNNDISSWTKGRSGEALSLLKKRFSHRPVQEKFVCLNCGFETHADEQAALNIARSWLFLRSQEYKKYQTNKTTGNTDKRAFVETWQSFYRKKLKEVWKPAV

SEQ ID NO: 52 - protein, 978 aa, Artificial Sequence
  CasX Variant
MQEIKRINKIRRRLVKDSNTKKAGKTGPMKTLLVRVMTPDLRERLENLRKKPENIPQPISNTSRANLNKLLTDYTEMKKAILHVYWEEFQKDPVGLMSRVAQPAPKNIDQRKLIPVKDGNERLTSSGFACSQCCQPLYVYKLEQVNDKGKPHTNYFGRCNVSEHERLILLSPHKPEANDELVTYSLGKFGQRALDFYSIHVTRESNHPVKPLEQIGGNSCASGPVGKALSDACMGAVASFLTKYQDIILEHQKVIKKNEKRLANLKDIASANGLAFPKITLPPQPHTKEGIEAYNNVVAQIVIWVNLNLWQKLKIGRDEAKPLQRLKGFPSFPLVERQANEVDWWDMVCNVKKLINEKKEDGKVFWQNLAGYKRQEALLPYLSSEEDRKKGKKFARYQFGDLLLHLEKKHGEDWGKVYDEAWERIDKKVEGLSKHIKLEEERRSEDAQSKAALTDWLIAKASFVIEGLKEADKDEFCRCELKLQKWYGDLRGKPFAIEAENSILDISGFSKQYNCAFIWQKDGVKKLNLYLIINYFKGGKLRFKKIKPEAFEANRFYTVINKKSGEIVPMEVNFNFDDPNLIILPLAFGKRQGREFIWNDLLSLETGSLKLANGRVIEKTLYNRRTRQDEPALFVALTFERREVLDSSNIKPMNLIGIDRGENIPAVIALTDPEGCPLSRFKDSLGNPTHILRIGESYKEKQRTIQAAKEVEQRRAGGYSRKYASKAKNLADDMVRNTVRDLLYYAVTQDAMLIFENLSRGFGRQGKRTFMAERQYTRMEDWLTAKLAYEGLPSKTYLSKTLAQYTSKTCSNCGFTITSADYDRVLEKLKKTATGWMTTINGKELKVEGQITYYNRYKRQNVVKDLSVELDRLSEESVNNDISSWTKGRSGEALSLLKKRFSHRPVQEKFVCLNCGFETHADEQAALNIARSWLFLRSQEYKKYQTNKTTGNTDKRAFVETWQSFYRKKLKEVWKPAV

SEQ ID NO: 53 - protein, 977 aa, Artificial Sequence
  CasX Variant
MQEIKRINKIRRRLVKDSNTKKAGKTGPMKTLLVRVMTPDLRERLENLRKKPENIPQPISNTSRANLNKLLTDYTEMKKAILHVYWEEFQKDPVGLMSRVAQPAPKNIDQRKLIPVKDGNERLTSSGFACSQCCQPLYVYKLEQVNDKGKPHTNYFGRCNVSEHERLILLSPHKPEANDELVTYSLGKFGQRALDFYSIHVTRESNHPVKPLEQIGGNSCASGPVGKALSDACMGAVASFLTKYQDIILEHQKVIKKNEKRLANLKDIASANGLAFPKITLPPQPHTKEGIEAYNNVVAQIVIWVNLNLWQKLKIGRDEAKPLQRLKGFPSFPLVERQANEVDWWDMVCNVKKLINEKKEDGKVFWQNLAGYKRQEALRPYLSSEEDRKKGKKFARYQFGDLLLHLEKKHGEDWGKVYDEAWERIDKKVEGLSKHIKLEEERRSEDAQSKAALTDWLRAKASFVIEGLKEADKDEFCRCELKLQKWYGDLRGKPFAIEAENSILDISGFSKQYNCAFIWQKDGVKKLNLYLIINYFKGGKLRFKKIKPEAFEANRFYTVINKKSGEIVPMEVNFNFDDPNLIILPLAFGKRQGREFIWNDLLSLETGSLKLANGRVIEKTLYNRRTRQDEPALFVALTFERREVLDSSNIKPMNLIGIDRGENIPAVIALTDPEGCPLSRFKDSLGNPTHILRIGESYKEKQRTIQAKKEVEQRRAGGYSRKYASKAKNLADDMVRNTARDLLYYAVTQDAMLIFENLSRGFGRQGKRTFNAERQYTRMEDWLTAKLAYEGLSKTYLSKTLAQYTSKTCSNCGFTITSADYDRVLEKLKKTATGWMTTINGKELKVEGQITYYNRYKRQNVVKDLSVELDRLSEESVNNDISSWTKGRSGEALSLLKKRFSHRPVQEKFVCLNCGFETHADEQAALNIARSWLFLRSQEYKKYQTNKTTGNTDKRAFVETWQSFYRKKLKEVWKPAV

SEQ ID NO: 54 - protein, 977 aa, Artificial Sequence
  CasX Variant
MQEIKRINKIRRRLVKDSNTKKAGKTGPMKTLLVRVMTPDLRERLENLRKKPENIPQPISNTSRANLNKLLTDYTEMKKAILHVYWEEFQKDPVGLMSRVAQPAPKNIDQRKLIPVKDGNERLTSSGFACSQCCQPLYVYKLEQVNDKGKPHTNYFGRCNVSEHERLILLSPHKPEANDELVTYSLGKFGQRALDFYSIHVTRESNHPVKPLEQIGGNSCASGPVGKALSDACMGAVASFLTKYQDIILEHQKVIKKNEKRLANLKDIASANGLAFPKITLPPQPHTKEGIEAYNNVVAQIVIWVNLNLWQKLKIGRDEAKPLQRLKGFPSFPLVERQANEVDWWDMVCNVKKLINEKKEDGKVFWQNLAGYKRQEALRPYLSSEEDRKKGKKFARYQFGDLLLHLEKKHGEDWGKVYDEAWERIDKKVEGLSKHIKLEEERRSEDAQSKAALTDWLRAKASFVIEGLKEADKDEFCRCELKLQKWYGDLRGKPFAIEAENSILDISGFSKQYNCAFIWQKDGVKKLNLYLIINYFKGGKLRFKKIKPEAFEANRFYTVINKKSGEIVPMEVNFNFDDPNLIILPLAFGKRQGREFIWNDLLSLETGSLKLANGRVIEKTLYNRRTRQDEPALFVALTFERREVLDSSNIKPMNLIGIDRGENIPAVIALTDPEGCPLSRFKDSLGNPTHILRIGESYKEKQRTIQAKKEVEQRRAGGYSRKYASKAKNLADDMVRNTTRDLLYYAVTQDAMLIFENLSRGFGRQGKRTFMAERQYTRMEDWLTAKLAYEGLSKTYLSKTLAQYTSKTCSNCGFTITSADYDRVLEKLKKTATGWMTTINGKELKVEGQITYYNRYKRQNVVKDLSVELDRLSEESVNNDISSWTKGRSGEALSLLKKRFSHRPVQEKFVCLNCGFETHADEQAALNIARSWLFLRSQEYKKYQTNKTTGNTDKRAFVETWQSFYRKKLKEVWKPAV

SEQ ID NO: 55 - protein, 977 aa, Artificial Sequence
  CasX Variant
MQEIKRINKIRRRLVKDSNTKKAGKTGPMKTLLVRVMTPDLRERLENLRKKPENIPQPISNTSRANLNKLLTDYTEMKKAILHVYWEEFQKDPVGLMSRVAQPAPKNIDQRKLIPVKDGNERLTSSGFACSQCCQPLYVYKLEQVNDKGKPHTNYFGRCNVSEHERLILLSPHKPEANDELVTYSLGKFGQRALDFYSIHVTRESNHPVKPLEQIGGNSCASGPVGKALSDACMGAVASFLTKYQDIILEHQKVIKKNEKRLANLKDIASANGLAFPKITLPPQPHTKEGIEAYNNVVAQIVIWVNLNLWQKLKIGRDEAKPLQRLKGFPSFPLVERQANEVDWWDMVCNVKKLINEKKEDGKVFWQNLAGYKRQEALRPYLSSEEDRKKGKKFARYQFGDLLLHLEKKHGEDWGKVYDEAWERIDKKVEGLSKHIKLEEERRSEDAQSKAALTDWLRAKASFVIEGLKEADKDEFKRCELKLQKWYGSLRGKPFAIEAENSILDISGFSKQYNCAFIWQKDGVKKLNLYLIINYFKGGKLRFKKIKPEAFEANRFYTVINKKSGEIVPMEVNFNFDDPNLIILPLAFGKRQGREFIWNDLLSLETGSLKLANGRVIEKTLYNRRTRQDEPALFVALTFERREVLDSSNIKPMNLIGIDRGENIPAVIALTDPEGCPLSRFKDSLGNPTHILRIGESYKEKQRTIQAKKEVEQRRAGGYSRKYASKAKNLADDMVRNTARDLLYYAVTQDAMLIFENLSRGFGRQGKRTFMAERQYTRMEDWLTAKLAYEGLSKTYLSKTLAQYTSKTCSNCGFTITSADYDRVLEKLKKTATGWMTTINGKELKVEGQITYYNRYKRQNVVKDLSVELDRLSEESVNNDISSWTKGRSGEALSLLKKRFSHRPVQEKFVCLNCGFETHADEQAALNIARSWLFLRSQEYKKYQTNKTTGNTDKRAFVETWQSFYRKKLKEVWKPAV

SEQ ID NO: 56 - protein, 977 aa, Artificial Sequence
  CasX Variant
MQEIKRINKIRRRLVKDSNTKKAGKTGPMKTLLVRVMTPDLRERLENLRKKPENIPQPISNTSRANLNKLLTDYTEMKKAILHVYWEEFQKDPVGLMSRVAQPAPKNIDQRKLIPVKDGNERLTSSGFACSQCCQPLYVYKLEQVNDKGKPHTNYFGRCNVSEHERLILLSPHKPEANDELVTYSLGKFGQRALDFYSIHVTRESNHPVKPLEQIGGNSCASGPVGKALSDACMGAVASFLTKYQDIILEHQKVIKKNEKRLANLKDIASANGLAFPKITLPPQPHTKEGIEAYNNVVAQIVIWVNLNLWQKLKIGRDEAKPLQRLKGFPSFPLVERQANEVDWWDMVCNVKKLINEKKEDGKVFWQNLAGYKRQEALRPYLSSEEDRKKGKKFARYQFGDLLLHLEKKHGEDWGKVYDEAWERIDKKVEGLSKHIKLEEERRSEDAQSKAALTDWLRAKASFVIEGLKEADKDEFKRCELKLQKWYGDLRGKPFAIEAENSILDISGFSKQYNCAFIWQKDGVKKLNLYLIINYFKGGKLRFKKIKPEAFEANRFYTVINKKSGEIVPMEVNFNFDDPNLIILPLAFGKRQGREFIWNDLLSLETGSLKLANGRVIEKTLYNRRTRQDEPALFVALTFERREVLDSSNIKPMNLIGIDRGENIPAVIALTDPEGCPLSRFKDSLGNPTHILRIGESYKEKQRTIQAKKEVEQRRAGGYSRKYASKAKNLANDMVRNTARDLLYYAVTQDAMLIFENLSRGFGRQGKRTFMAERQYTRMEDWLTAKLAYEGLSKTYLSKTLAQYTSKTCSNCGFTITSADYDRVLEKLKKTATGWMTTINGKELKVEGQITYYNRYKRQNVVKDLSVELDRLSEESVNNDISSWTKGRSGEALSLLKKRFSHRPVQEKFVCLNCGFETHADEQAALNIARSWLFLRSQEYKKYQTNKTTGNTDKRAFVETWQSFYRKKLKEVWKPAV

SEQ ID NO: 57 - protein, 978 aa, Artificial Sequence
  CasX Variant
MQEIKRINKIRRRLVKDSNTKKAGKTGPMKTLLVRVMTPDLRERLENLRKKPENIPQPISNTSRANLNKLLTDYTEMKKAILHVYWEEFQKDPVGLMSRVAQPAPKNIDQRKLIPVKDGNERLTSSGFACSQCCQPLYVYKLEQVNDKGKPHTNYFGRCNVSEHERLILLSPHKPEANDELVTYSLGKFGQRALDFYSIHVTRESNHPVKPLEQIGGNSCASGPVGKALSDACMGAVASFLTKYQDIILEHQKVIKKNEKRLANLKDIASANGLAFPKITLPPQPHTKEGIEAYNNVVAQIVIWVNLNLWQKLKIGRDEAKPLQRLKGFPSFPLVERQANEVDWWDMVCNVKKLINEKKEDGKVFWQNLAGYKRQEALLPYLSSEEDRKKGKKFARYQFGDLLLHLEKKHGEDWGKVYDEAWERIDKKVEGLSKHIKLEEERRSEDAQSKAALTDWLRAKASFVIEGLKEADKDEFCRCELKLQKWYGDLRGKPFAIEAENSILDISGFSKQYNCAFIWQKDGVKKLNLYLIINYFKGGKLRFKKIKPEAFEANRFYTVINKKSGEIVPMEVNFNFDDPNLIILPLAFGKRQGREFIWNDLLSLETGSLKLANGRVIEKTLYNRRTRQDEPALFVALTFERREVLDSSNIKPMNLIGIDRGENIPAVIALTDPEGCPLSRFKDSLGNPTHILRIGESYKEKQRTIQAAKEKEQRRAGGYSRKYASKAKNLADDMVRNTARDLLYYAVTQDAMLIFENLSRGFGRQGKRTFMAERQYTRMEDWLTAKLAYEGLPSKTYLSKTLAQYTSKTCSNCGFTITSADYDRVLEKLKKTATGWMTTINGKELKVEGQITYYNRYKRQNVVKDLSVELDRLSEESVNNDISSWTKGRSGEALSLLKKRFSHRPVQEKFVCLNCGFETHADEQAALNIARSWLFLRSQEYKKYQTNKTTGNTDKRAFVETWQSFYRKKLKEVWKPAV

SEQ ID NO: 58 - protein, 977 aa, Artificial Sequence
  CasX Variant
MQEIKRINKIRRRLVKDSNTKKAGKTGPMKTLLVRVMTPDLRERLENLRKKPENIPQPISNTSRANLNKLLTDYTEMKKAILHVYWEEFQKDPVGLMSRVAQPAPKNIDQRKLIPVKDGNERLTSSGFACSQCCQPLYVYKLEQVNDKGKPHTNYFGRCNVSEHERLILLSPHKPEANDELVTYSLGKFGQRALDFYSIHVTRESNHPVKPLEQIGGNSCASGPVGKALSDACMGAVASFLTKYQDIILEHQKVIKKNEKRLANLKDIASANGLAFPKITLPPQPHTKEGIEAYNNVVAQIVIWVNLNLWQKLKIGRDEAKPLQRLKGFPSFPLVERQANEVDWWDMVCNVKKLINEKKEDGKVFWQNLAGYKRQEALRPYLSSEEDRKKGKKFARYQFGDLLLHLEKKHGEDWGKVYDEAWERIDKKVEGLSKHIKLEEERRSEDAQSKAALTDWLRAKASFVIEGLKEADKDEFKRCELKLQKWYGDLRGKPFAIEAENSILDISGFSKQYNCAFIWQKDGVKKLNLYLIINYFKGGKLRFKKIKPEAFEANRFYTVINKKSGEIVPMEVNFNFDDPNLIILPLAFGKRQGREFIWNDLLSLETGSLKLANGRVIEKTLYNRRTRQDEPALFVALTFERREVLDSSNIKPMNLIGIDRGENIPAVIALTDPEGCPLSRFKDSLGNPTHILRIGESYKEKQRTIQAKKEVEQRRAGGYSRKYASKAKNLADDMVRNTARDLLYYAVTQDAMLIFENLSRGFGRQGKRTFMAERQYTRMEDWLTAKLAYEGLSKTLLSKTLAQYTSKTCSNCGFTITSADYDRVLEKLKKTATGWMTTINGKELKVEGQITYYNRYKRQNVVKDLSVELDRLSEESVNNDISSWTKGRSGEALSLLKKRFSHRPVQEKFVCLNCGFETHADEQAALNIARSWLFLRSQEYKKYQTNKTTGNTDKRAFVETWQSFYRKKLKEVWKPAV

SEQ ID NO: 59 - protein, 977 aa, Artificial Sequence
  CasX Variant
MQEIKRINKIRRRLVKDSNTKKAGKTGPMKTLLVRVMTPDLRERLENLRKKPENIPQPISNTSRANLNKLLTDYTEMKKAILHVYWEEFQKDPVGLMSRVAQPAPKNIDQRKLIPVKDGNERLTSSGFACSQCCQPLYVYKLEQVNDKGKPHTNYFGRCNVSEHERLILLSPHKPEANDELVTYSLGKFGQRALDFYSIHVTRESNHPVKPLEQIGGNSCASGPVGKALSDACMGAVASFLTKYQDIILEHQKVIKKNEKRLANLKDIASANGLAFPKITLPPQPHTKEGIEAYNNVVAQIVIWVNLNLWQKLKIGRDEAKPLQRLKGFPSFPLVERQANEVDWWDMVCNVKKLINEKKEDGKVFWQNLAGYKRQEALRPYLSSEEDRKKGKKFARYQFGDLLLHLEKKHGEDWGKVYDEAWERIDKKVEGLSKHIKLEEERRSEDAQSKAALTDWLRAKASFVIEGLKEADKDEFCRCELKLQKWYGDLRGKPFAIEAENSILDISGFSKQYNCAFIWQKDGVKKLNLYLIINYFKGGKLRFKKIKPEAFEANRFYTVINKKSGEIVPMEVNFNFDDPNLIILPLAFGKRQGREFIWNDLLSLETGSLKLANGRVIEKTLYNRRTRQDEPALFVALTFERREVLDSSNIKPMNLIGIDRGENIPAVIALTDPEGCPLSRFKDSLGNPTHILRIGESYKEKQRTIQAKKEVEQRRAGGYSRKYASKAKNLADDMVRNTARDLLYYAVTQDAMLIFENLSRGFGRQGKRTFMAERQYTRMEDWLTAKLAYEGLSKTYLSKTLAQYTSKTCSNCGFTITSADYDRVLEKLKKTATGWMTTINGKELKVEGQITYYNRYKRQNVVKDLSVELDRLSEESVNNDISSWTKGRSGEALSLLKKRFSHRPVQEKFVCLNCGFETHADEQAALNIARSWLFLRSQEYKKYQTNKTTGNTDKRAFVETWQSFYRKKLKEVWKPAV

SEQ ID NO: 60 - protein, 977 aa, Artificial Sequence
  CasX Variant
MQEIKRINKIRRRLVKDSNTKKAGKTGPMKTLLVRVMTPDLRERLENLRKKPENIPQPISNTSRANLNKLLTDYTEMKKAILHVYWEEFQKDPVGLMSRVAQPAPKNIDQRKLIPVKDGNERLTSSGFACSQCCQPLYVYKLEQVNDKGKPHTNYFGRCNVSEHERLILLSPHKPEANDELVTYSLGKFGQRALDFYSIHVTRESNHPVKPLEQIGGNSCASGPVGKALSDACMGAVASFLTKYQDIILEHQKVIKKNEKRLANLKDIASANGLAFPKITLPPQPHTKEGIEAYNNVVAQIVIWVNLNLWQKLKIGRDEAKPLQRLKGFPSFPLVERQANEVDWWDMVCNVKKLINEKKEDGKVFWQNLAGYKRQEALRPYLSSEEDRKKGKKFARYQFGDLLLHLEKKHGEDWGKVYDEAWERIDKKVEGLSKHIKLEEERRSEDAQSKAALTDWLRAKASFVIEGLKEADKDEFKRCELKLQKWYGDLRGKPFAIEAENSILDISGFSKQYNCAFIWQKDGVKKLNLYLIINYFKGGKLRFKKIKPEAFEANRFYTVINKKSGEIVPMEVNFNFDDPNLIILPLAFGKRQGREFIWNDLLSLETGSLKLANGRVIEKTLYNRRTRQDEPALFVALTFERREVLDSSNIKPMNLIGIDRGENIPAVIALTDPEGCPLSRFKDSLGNPTHILRIGESYKEKQRTIQAKKEVEQRRAGGYSRKYASKAKNLADDMVRNTARDLLYYAVTQDAMLIFENLSRGFGRQGKRTFNAERQYTRMEDWLTAKLAYEGLSKTYLSKTLAQYTSKTCSNCGFTITSADYDRVLEKLKKTATGWMTTINGKELKVEGQITYYNRYKRQNVVKDLSVELDRLSEESVNNDISSWTKGRSGEALSLLKKRFSHRPVQEKFVCLNCGFETHADEQAALNIARSWLFLRSQEYKKYQTNKTTGNTDKRAFVETWQSFYRKKLKEVWKPAV

SEQ ID NO: 61 - protein, 977 aa, Artificial Sequence
  CasX Variant
MQEIKRINKIRRRLVKDSNTKKAGKTGPMKTLLVRVMTPDLRERLENLRKKPENIPQPISNTSRANLNKLLTDYTEMKKAILHVYWEEFQKDPVGLMSRVAQPAPKNIDQRKLIPVKDGNERLTSSGFACSQCCQPLYVYKLEQVNDKGKPHTNYFGRCNVSEHERLILLSPHKPEANDELVTYSLGKFGQRALDFYSIHVTRESNHPVKPLEQIGGNSCASGPVGKALSDACMGAVASFLTKYQDIILEHQKVIKKNEKRLANLKDIASANGLAFPKITLPPQPHTKEGIEAYNNVVAQIVIWVNLNLWQKLKIGRDEAKPLQRLKGFPSFPLVERQANEVDWWDMVCNVKKLINEKKEDGKVFWQNLAGYKRQEALLPYLSSESDRKKGKKFARYQFGDLLLHLEKKHGEDWGKVYDEAWERIDKKVEGLSKHIKLEEERRSEDAQSKAALTDWLRAKASFVIEGLKEADKDEFCRCELKLQKWYGDLRGKPFAIEAENSILDISGFSKQYNCAFIWQKDGVKKLNLYLIINYFKGGKLRFKKIKPEAFEANRFYTVINKKSGEIVPMEVNFNFDDPNLIILPLAFGKRQGREFIWNDLLSLETGSLKLANGRVIEKTLYNRRTRQDEPALFVALTFERREVLDSSNIKPMNLIGIDRGENIPAVIALTDPEGCPLSRFKDSLGNPTHILRIGESYKEKQRTIQAKKEVEQRRAGGYSRKYASKAKNLADDMVRNTARDLLYYAVTQDAMLIFENLSRGFGRQGKRTFMAERQYTRMEDWLTAKLAYEGLSKTYLSKTLAQYTSKTCSNCGFTITSADYDRVLEKLKKTATGWMTTINGKELKVEGQITYYNRYKRQNVVKDLSVELDRLSEESVNNDISSWTKGRSGEALSLLKKRFSHRPVQEKFVCLNCGFETHADEQAALNIARSWLFLRSQEYKKYQTNKTTGNTDKRAFVETWQSFYRKKLKEVWKPAV

SEQ ID NO: 62 - protein, 977 aa, Artificial Sequence
  CasX Variant
MQEIKRINKIRRRLVKDSNTKKAGKTGPMKTLLVRVMTPDLRERLENLRKKPENIPQPISNTSRANLNKLLTDYTEMKKAILHVYWEEFQKDPVGLMSRVAQPAPKNIDQRKLIPVKDGNERLTSSGFACSQCCQPLYVYKLEQVNDKGKPHTNYFGRCNVSEHERLILLSPHKPEANDELVTYSLGKFGQRALDFYSIHVTRESNHPVKPLEQIGGNSCASGPVGKALSDACMGAVASFLTKYQDIILEHQKVIKKNEKRLANLKDIASANGLAFPKITLPPQPHTKEGIEAYNNVVAQIVIWVNLNLWQKLKIGRDEAKPLQRLKGFPSFPLVERQANEVDWWDMVCNVKKLINEKKEDGKVFWQNLAGYKRQEALRPYLSSEEDRKKGKKFARYQFGDLLLHLEKKHGEDWGKVYDEAWERIDKKVEGLSKHIKLEEERRSEDAQSKAALTDWLRAKASFVIEGLKEADKDEFKRCELKLQKWYGDLRGKPFAIEAENSILDISGFSKQYNCAFIWQKDGVKKLNLYLIINYFKGGKLRFKKIKPEAFEANRFYTVINKKSGEIVPMEVNFNFDDPNLIILPLAFGKRQGREFIWNDLLSLETGSLKLANGRVIEKTLYNRRTRQDEPALFVALTFERREVLDSSNIKPMNLIGIDRGENIPAVIALTDPEGCPLSRFKDSLGNPTHILRIGESYKEKQRTIQAKKEVEQRRAGGYSRKYASKAKNLADDMVRNTARDLLYYAVTQDAMLIFENLSRGFGRQGKRTFMAERQYTRMEDWLTAKLAYEGLSKTYLSKTLAQYTSKTCSNCGFTITSADYDRVLEKLKKTATGWMTTINGKELKVEGQITYYNRYKRQNVVKDLSVELDRLSEESVNNDISSWTKGRSGEALSLLKKRFSHRPVQEKFVCLNCGFETHADEQAALNIARSWLFLRSQEYKKYQTNKTTGNTDKRAFVETWQSFYRKKLKEVWKPAV

SEQ ID NO: 63 - protein, 978 aa, Artificial Sequence
  CasX Variant
MQEIKRINKIRRRLVKDSNTKKAGKTGPMKTLLVRVMTPDLRERLENLRKKPENIPQPISNTSRANLNKLLTDYTEMKKAILHVYWEEFQKDPVGLMSRVAQPAPKNIDQRKLIPVKDGNERLTSSGFACSQCCQPLYVYKLEQVNDKGKPHTNYFGRCNVSEHERLILLSPHKPEANDELVTYSLGKFGQRALDFYSIHVTRESNHPVKPLEQIGGNSCASGPVGKALSDACMGAVASFLTKYQDIILEHQKVIKKNEKRLANLKDIASANGLAFPKITLPPQPHTKEGIEAYNNVVAQIVIWVNLNLWQKLKIGRDEAKPLQRLKGFPSFPLVERQANEVDWWDMVCNVKKLINEKKEDGKVFWQNLAGYKRQEALLPYLSSEEDRKKGKKFARYQFGDLLLHLEKKHGEDWGKVYDEAWERIDKKVEGLSKHIKLEEERRSEDAQSKAALTDWLRAKASFVIEGLKEADKDEFCRCELKLQKWYGDLRGKPFAIEAENSILDISGFSKQYNCAFIWQKDGVKKLNLYLIINYFKGGKLRFKKIKPEAFEANRFYTVINKKSGEIVPMEVNFNFDDPNLIILPLAFGKRQGREFIWNDLLSLETGSLKLANGRVIEKTLYNRRTRQDEPALFVALTFERREVLDSSNIKPMNLIGIDRGENIPAVIALTDPEGCPLSRFKDSLGNPTHILRIGESYKEKQRTIQAAKEVEQRRAGGYSRKYASKAKNLADDMVRNTARDLLYYAVTQDAMLIFENLSRGFGRQGKRTFMAERQYTRMEDWLTAKLAYEGDPSKTYLSKTLAQYTSKTCSNCGFTITSADYDRVLEKLKKTATGWMTTINGKELKVEGQITYYNRYKRQNVVKDLSVELDRLSEESVNNDISSWTKGRSGEALSLLKKRFSHRPVQEKFVCLNCGFETHADEQAALNIARSWLFLRSQEYKKYQTNKTTGNTDKRAFVETWQSFYRKKLKEVWKPAV

SEQ ID NO: 64 - protein, 978 aa, Artificial Sequence
  CasX Variant
MQEIKRINKIRRRLVKDSNTKKAGKTGPMKTLLVRVMTPDLRERLENLRKKPENIPQPISNTSRANLNKLLTDYTEMKKAILHVYWEEFQKDPVGLMSRVAQPAPKNIDQRKLIPVKDGNERLTSSGFACSQCCQPLYVYKLEQVNDKGKPHTNYFGRCNVSEHERLILLSPHKPEANDELVTYSLGKFGQRALDFYSIHVTRESNHPVKPLEQIGGNSCASGPVGKALSDACMGAVASFLTKYQDIILEHQKVIKKNEKRLANLKDIASANGLAFPKITLPPQPHTKEGIEAYNNVVAQIVIWVNLNLWQKLKIGRDEAKPLQRLKGFPSFPLVERQANEVDWWDMVCNVKKLINEKKEDGKVFWQNLAGYKRQEALLPYLSSEEDRKKGKKFARYQFGDLLLHLEKKHGEDWGKVYDEAWERIDKKVEGLSKHIKLEEERRSEDAQSKAALTDWLRAKASFVIEGLKEADKDEFCRCELKLQKWYGDLRGKPFAIEAENSILDISGFSKQYNCAFIWQKDGVKKLNLYLIINYFKGGKLRFKKIKPEAFEANRFYTVINKKSGEIVPMEVNFNFDDPNLIILPLAFGKRQGREFIWNDLLSLETGSLKLANGRVIEKTLYNRRTRQDEPALFVALTFERREVLDSSNIKPMNLIGIDRGENIPAVIALTDPEGCPLSRFKDSLGNPTHILRIGESYKEKQRTIQAAKEVEQRRAGGYSRKYASKAKNLADDMVRNTARDLLYYAVTQDAMLIFENLSRGFGRQGKRTFMAERQYTRMEDWLTAKLAYEFLPSKTYLSKTLAQYTSKTCSNCGFTITSADYDRVLEKLKKTATGWMTTINGKELKVEGQITYYNRYKRQNVVKDLSVELDRLSEESVNNDISSWTKGRSGEALSLLKKRFSHRPVQEKFVCLNCGFETHADEQAALNIARSWLFLRSQEYKKYQTNKTTGNTDKRAFVETWQSFYRKKLKEVWKPAV

SEQ ID NO: 65 - protein, 977 aa, Artificial Sequence
  CasX Variant
MQEIKRINKIRRRLVKDSNTKKAGKTGPMKTLLVRVMTPDLRERLENLRKKPENIPQPISNTSRANLNKLLTDYTEMKKAILHVYWEEFQKDPVGLMSRVAQPAPKNIDQRKLIPVKDGNERLTSSGFACSQCCQPLYVYKLEQVNDKGKPHTNYFGRCNVSEHERLILLSPHKPEANDELVTYSLGKFGQRALDFYSIHVTRESNHPVKPLEQIGGNSCASGPVGKALSDACMGAVASFLTKYQDIILEHQKVIKKNEKRLANLKDIASANGLAFPKITLPPQPHTKEGIEAYNNVVAQIVIWVNLNLWQKLKIGRDEAKPLQRLKGFPSFPLVERQANEVDWWDMVCNVKKLINEKKEDGKVFWQNLAGYKRQEALLPYLSSEEDRKKGKKFARYQFGDLLLHLEKKHGEDWGKVYDEAWERIDKKVEGLSKHIKLEEERRSEDAQSKAALTDWLRAKASFVIEGLKEADKDEFCRCELKLQKWYGDLRGKPFAIEAENSILDISGFSKQYNCAFIWQKDGVKKLNLYLIINYFKGGKLRFKKIKPEAFEANRFYTVINKKSGEIVPMEVNFNFDDPNLIILPLAFGKRQGREFIWNDLLSLETGSLKLANGRVIEKTLYNRRTRQDEPALFVALTFERREVLDSSNIKPMNLIGIDRGENIPAVIALTDPEGCPLSRFKDSLGNPTHILRIGESYKEKQRTIQAKKEVEQRRAGGYSRKYASKAKNLADDMVRNTVRDLLYYAVTQDAMLIFENLSRGFGRQGKRTFMAERQYTRMEDWLTAKLAYEGLSKTYLSKTLAQYTSKTCSNCGFTITSADYDRVLEKLKKTATGWMTTINGKELKVEGQITYYNRYKRQNVVKDLSVELDRLSEESVNNDISSWTKGRSGEALSLLKKRFSHRPVQEKFVCLNCGFETHADEQAALNIARSWLFLRSQEYKKYQTNKTTGNTDKRAFVETWQSFYRKKLKEVWKPAV

SEQ ID NO: 66 - protein, 977 aa, Artificial Sequence
  CasX Variant
MQEIKRINKIRRRLVKDSNTKKAGKTGPMKTLLVRVMTPDLRERLENLRKKPENIPQPISNTSRANLNKLLTDYTEMKKAILHVYWEEFQKDPVGLMSRVAQPAPKNIDQRKLIPVKDGNERLTSSGFACSQCCQPLYVYKLEQVNDKGKPHTNYFGRCNVSEHERLILLSPHKPEANDELVTYSLGKFGQRALDFYSIHVTRESNHPVKPLEQIGGNSCASGPVGKALSDACMGAVASFLTKYQDIILEHQKVIKKNEKRLANLKDIASANGLAFPKITLPPQPHTKEGIEAYNNVVAQIVIWVNLNLWQKLKIGRDEAKPLQRLKGFPSFPLVERQANEVDWWDMVCNVKKLINEKKEDGKVFWQNLAGYKRQEALRPYLSSEEDRKKGKKFARYQFGDLLLHLEKKHGEDWGKVYDEAWERIDKKVEGLSKHIKLEEERRSEDAQSKAALTDWLRAKASFVIEGLKEADKDEFCRCELKLQKWYGDLRGKPFAIEAENSILDISGFSKQYNCAFIWQKDGVKKLNLYLIINYFKGGKLRFKKIKPEAFEANRFYTVINKKSGEIVPMEVNFNFDDPNLIILPLAFGKRQGREFIWNDLLSLETGSLKLANGRVIEKTLYNRRTRQDEPALFVALTFERREVLDSSNIKPMNLIGIDRGENIPAVIALTDPEGCPLSRFKDSLGNPTHILRIGESYKEKQRTIQAKKEVEQRRAGGYSRKYASKAKNLADDMVRNTVRDLLYYAVTQDAMLIFENLSRGFGRQGKRTFMAERQYTRMEDWLTAKLAYEGLSKTYLSKTLAQYTSKTCSNCGFTITSADYDRVLEKLKKTATGWMTTINGKELKVEGQITYYNRYKRQNVVKDLSVELDRLSEESVNNDISSWTKGRSGEALSLLKKRFSHRPVQEKFVCLNCGFETHADEQAALNIARSWLFLRSQEYKKYQTNKTTGNTDKRAFVETWQSFYRKKLKEVWKPAV

SEQ ID NO: 67 - protein, 977 aa, Artificial Sequence
  CasX Variant
MQEIKRINKIRRRLVKDSNTKKAGKTGPMKTLLVRVMTPDLRERLENLRKKPENIPQPISNTSRANLNKLLTDYTEMKKAILHVYWEEFQKDPVGLMSRVAQPAPKNIDQRKLIPVKDGNERLTSSGFACSQCCQPLYVYKLEQVNDKGKPHTNYFGRCNVSEHERLILLSPHKPEANDELVTYSLGKFGQRALDFYSIHVTRESNHPVKPLEQIGGNSCASGPVGKALSDACMGAVASFLTKYQDIILEHQKVIKKNEKRLANLKDIASANGLAFPKITLPPQPHTKEGIEAYNNVVAQIVIWVNLNLWQKLKIGRDEAKPLQRLKGFPSFPLVERQANEVDWWDMVCNVKKLINEKKEDGKVFWQNLAGYKRQEALLPYLSSEEDRKKGKKFARYQFGDLLLHLEKKHGEDWGKVYDEAWERIDKKVEGLSKHIKLEEERRSEDAQSKAALTDWLRAKASFVIEGLKEADKDEFKRCELKLQKWYGDLRGKPFAIEAENSILDISGFSKQYNCAFIWQKDGVKKLNLYLIINYFKGGKLRFKKIKPEAFEANRFYTVINKKSGEIVPMEVNFNFDDPNLIILPLAFGKRQGREFIWNDLLSLETGSLKLANGRVIEKTLYNRRTRQDEPALFVALTFERREVLDSSNIKPMNLIGIDRGENIPAVIALTDPEGCPLSRFKDSLGNPTHILRIGESYKEKQRTIQAKKEVEQRRAGGYSRKYASKAKNLADDMVRNTARDLLYYAVTQDAMLIFENLSRGFGRQGKRTFMAERQYTRMEDWLTAKLAYEGLSKTYLSKTLAQYTSKTCSNCGFTITSADYDRVLEKLKKTATGWMTTINGKELKVEGQITYYNRYKRQNVVKDLSVELDRLSEESVNNDISSWTKGRSGEALSLLKKRFSHRPVQEKFVCLNCGFETHADEQAALNIARSWLFLRSQEYKKYQTNKTTGNTDKRAFVETWQSFYRKKLKEVWKPAV

SEQ ID NO: 68 - protein, 978 aa, Artificial Sequence
  CasX Variant
MQEIKRINKIRRRLVKDSNTKKAGKTGPMKTLLVRVMTPDLRERLENLRKKPENIPQPISNTSRANLNKLLTDYTEMKKAILHVYWEEFQKDPVGLMSRVAQPAPKNIDQRKLIPVKDGNERLTSSGFACSQCCQPLYVYKLEQVNDKGKPHTNYFGRCNVSEHERLILLSPHKPEANDELVTYSLGKFGQRALDFYSIHVTRESNHPVKPLEQIGGNSCASGPVGKALSDACMGAVASFLTKYQDIIIEHQKVIKKNEKRLANLKDIASANGLAFPKITLPPQPHTKEGIEAYNNVVAQIVIWVNLNLWQKLKIGRDEAKPLQRLKGFPSFPLVERQANEVDWWDMVCNVKKLINEKKEDGKVFWQNLAGYKRQEALLPYLSSEEDRKKGKKFARYQFGDLLLHLEKKHGEDWGKVYDEAWERIDKKVEGLSKHIKLEEERRSEDAQSKAALTDWLRAKASFVIEGLKEADKDEFCRCELKLQKWYGDLRGKPFAIEAENSILDISGFSKQYNCAFIWQKDGVKKLNLYLIINYFKGGKLRFKKIKPEAFEANRFYTVINKKSGEIVPMEVNFNFDDPNLIILPLAFGKRQGREFIWNDLLSLETGSLKLANGRVIEKTLYNRRTRQDEPALFVALTFERREVLDSSNIKPMNLIGIDRGENIPAVIALTDPEGCPLSRFKDSLGNPTHILRIGESYKEKQRTIQAAKEVEQRRAGGYSRKYASKAKNLADDMVRNTARDLLYYAVTQDAMLIFENLSRGFGRQGKRTFNAERQYTRMEDWLTAKLAYEGLPSKTYLSKTLAQYTSKTCSNCGFTITSADYDRVLEKLKKTATGWMTTINGKELKVEGQITYYNRYKRQNVVKDLSVELDRLSEESVNNDISSWTKGRSGEALSLLKKRFSHRPVQEKFVCLNCGFETHADEQAALNIARSWLFLRSQEYKKYQTNKTTGNTDKRAFVETWQSFYRKKLKEVWKPAV

SEQ ID NO: 69 - protein, 978 aa, Artificial Sequence
  CasX Variant
MQEIKRINKIRRRLVKDSNTKKAGKTGPMKTLLVRVMTPDLRERLENLRKKPENIPQPISNTSRANLNKLLTDYTEMKKAILHVYWEEFQKDPVGLMSRVAQPAPKNIDQRKLIPVKDGNERLTSSGFACSQCCQPLYVYKLEQVNDKGKPHTNYFGRCNVSEHERLILLSPHKPEANDELVTYSLGKFGQRALDFYSIHVTRESNHPVKPLEQIGGNSCASGPVGKALSDACMGAVASFLTKYQDIILEHQKVIKKNEKRLANLKDIASANGLAFPKITLPPQPHTKEGIEAYNNVVAQIVIWVNLNLWQKLKIGRDEAKPLQRLKGFPSFPLVERQANEVDWWDMVCNVKKLINEKKEDGKVFWQNLAGYKRQEALLPYLSSEEDRKKGKKFARYQFGDLLLHLEKKHGEDWGKVYDEAWERIDKKVEGLSKHIKLEEERRSEDAQSKAALTDWLRAKASFVIEGLKEADKDEFCRCELKLQKWYGDLRGKPFAIEAENSILDISGFSKQYNCAFIWQKDGVKKLNLYLIINYFKGGKLRFKKIKPEAFEANRFYTVINKKSGEIVPMEVNFNFDDPNLIILPLAFGKRQGREFIWNDLLSLETGSLKLANGRVIEKTLYNRRTRQDEPALFVALTFERREVLDSSNIKPMNLIGIDRGENIPAVIALTDPEGCPLSRFKDSLGNPTHILRIGESYKEKQRTIQAAKEVEQRRAGGYSRKYASKAKNLADDMVRNTARDLLYYAKTQDAMLIFENLSRGFGRQGKRTFMAERQYTRMEDWLTAKLAYEGLPSKTYLSKTLAQYTSKTCSNCGFTITSADYDRVLEKLKKTATGWMTTINGKELKVEGQITYYNRYKRQNVVKDLSVELDRLSEESVNNDISSWTKGRSGEALSLLKKRFSHRPVQEKFVCLNCGFETHADEQAALNIARSWLFLRSQEYKKYQTNKTTGNTDKRAFVETWQSFYRKKLKEVWKPAV

SEQ ID NO: 70 - protein, 977 aa, Artificial Sequence
  CasX Variant
MQEIKRINKIRRRLVKDSNTKKAGKTGPMKTLLVRVMTPDLRERLENLRKKPENIPQPISNTSRANLNKLLTDYTEMKKAILHVYWEEFQKDPVGLMSRVAQPAPKNIDQRKLIPVKDGNERLTSSGFACSQCCQPLYVYKLEQVNDKGKPHTNYFGRCNVSEHERLILLSPHKPEANDELVTYSLGKFGQRALDFYSIHVTRESNHPVKPLEQIGGNSCASGPVGKALSDACMGAVASFLTKYQDIILEHQKVIKKNEKRLANLKDIASANGLAFPKITLPPQPHTKEGIEAYNNVVAQIVIWVNLNLWQKLKIGRDEAKPLQRLKGFPSFPLVERQANEVDWWDMVCNVKKLINEKKEDGKVFWQNLAGYKRQEALRPYLSSEEDRKKGKKFARYQFGDLLLHLEKKHGEDWGKVYDEAWERIDKKVEGLSKHIKLEEERRSEDAQSKAALTDWLRAKASFVIEGLKEADKDEFKRCELKLQKWYGDLRGKPFAIEAENSILDISGFSKQYNCAFIWQKDGVKKLNLYLIINYFKGGKLRFKKIKPEAFEANRFYTVINKKSGEIVPMEVNFNFDDPNLIILPLAFGKRQGREFIWNDLLSLETGSLKLANGRVIEKTLYNRRTRQDEPALFVALTFERREVLDSSNIKPMNLIGIDRGENIPAVIALTDPEGCPLSRFKDSLGNPTHILRIGESYKEKQRTIQAKKEVEQRRAGGYSRKYASKAKNLADDMVRNTARDLLYYAVTQDAMLIFENLSRGFGRQGKRTFMAERQYTRNEDWLTAKLAYEGLSKTYLSKTLAQYTSKTCSNCGFTITSADYDRVLEKLKKTATGWMTTINGKELKVEGQITYYNRYKRQNVVKDLSVELDRLSEESVNNDISSWTKGRSGEALSLLKKRFSHRPVQEKFVCLNCGFETHADEQAALNIARSWLFLRSQEYKKYQTNKTTGNTDKRAFVETWQSFYRKKLKEVWKPAV

SEQ ID NO: 71 - protein, 978 aa, Artificial Sequence
  CasX Variant
MQEIKRINKIRRRLVKDSNTKKAGKTGPMKTLLVRVMTPDLRERLENLRKKPENIPQPISNTSRANLNKLLTDYTEMKKAILHVYWEEFQKDPVGLMSRVAQPAPKNIDQRKLIPVKDGNERLTSSGFACSQCCQPLYVYKLEQVNDKGKPHTNYFGRCNVSEHERLILLSPHKPEANDELVTYSLGKFGQRALDFYSIHVTRESNHPVKPLEQIGGNSCASGPVGKALSDACMGAVASFLTKYQDIILEHQKVIKKNEKRLANLKDIASANGLAFPKITLPPQPHTKEGIEAYNNVVAQIVIWVNLNLWQKLKIGRDEAKPLQRLKGFPSFPLVERQANEVDWWDMVCNVKKLINEKKEDGKVFWQNLAGYKRQEALLPYLSSEEDRKKGKKFARYQFGDLLLHLEKKHGEDWGKVYDEAWERIDKKVEGLSKHIKLEEERRSEDAQSKAALTDWLRAKASFVIEGLKEADKDEFCRCELKLQKWYGDLRGKPFAIEAENSILDISGFSKQYNCAFIWQKDGVKKLNLYLIINYFKGGKLRFKKIKPEAFEANRFYTVINKKSGEIVPMEVNFNFDDPNLIILPLAFGKRQGREFIWNDLLSLETGSLKLANGRVIEKTLYNRRTRQDEPALFVALTFERREVLDSSNIKPMNLIGIDRGENIPAVIALTDPEGCPLSRFKDSLGNPTHILRIGESYKEKQRTIQAAKEVEQRRAGGYSRKYASKAKNLADDMVRNTARDLLYYAVTQDAMLIMENLSRGFGRQGKRTFMAERQYTRMEDWLTAKLAYEGLPSKTYLSKTLAQYTSKTCSNCGFTITSADYDRVLEKLKKTATGWMTTINGKELKVEGQITYYNRYKRQNVVKDLSVELDRLSEESVNNDISSWTKGRSGEALSLLKKRFSHRPVQEKFVCLNCGFETHADEQAALNIARSWLFLRSQEYKKYQTNKTTGNTDKRAFVETWQSFYRKKLKEVWKPAV

SEQ ID NO: 72 - protein, 977 aa, Artificial Sequence
  CasX Variant
MQEIKRINKIRRRLVKDSNTKKAGKTGPMKTLLVRVMTPDLRERLENLRKKPENIPQPISNTSRANLNKLLTDYTEMKKAILHVYWEEFQKDPVGLMSRVAQPAPKNIDQRKLIPVKDGNERLTSSGFACSQCCQPLYVYKLEQVNDKGKPHTNYFGRCNVSEHERLILLSPHKPEANDELVTYSLGKFGQRALDFYSIHVTRESNHPVKPLEQIGGNSCASGPVGKALSDACMGAVASFLTKYQDIILEHQKVIKKNEKRLANLKDIASANGLAFPKITLPPQPHTKEGIEAYNNVVAQIVIWVNLNLWQKLKIGRDEAKPLQRLKGFPSFPLVERQANEVDWWDMVCNVKKLINEKKEDGKVFWQNLAGYKRQEALRPYLSSEEDRKKGKKFARYQFGDLLLHLEKKHGEDWGKVYDEAWERIDKKVEGLSKHIKLEEERRSEDAQSKAALTDWLRAKASFVIEGLKEADKDEFCRCELKLQKWYGDLRGKPFAIEAENSILDISGFSKQYNCAFIWQKDGVKKLNLYLIINYFKGGKLRFKKIKPEAFEANRFYTVINKKSGEIVPMEVNFNFDDPNLIILPLAFGKRQGREFIWNDLLSLETGSLKLANGRVIEKTLYNRRTRQDEPALFVALTFERREVLDSSNIKPMNLIGIDRGENIPAVIALTDPEGCPLSRFKDSLGNPTHILRIGESYKEKQRTIQAKKEVEQRRAGGYSRKYASKAKNLADDMVRNTARDLLYYAVTQDAMLIFENLSRGFGRQGKRTFMAERQYTRMEDWLTAKLAYEGLSKTYLSKTLAQYTSKTCSNCGFTITSADYDRVLEKLKKTATGWMTTINGKELKVEGQITYYNRRKRQNVVKDLSVELDRLSEESVNNDISSWTKGRSGEALSLLKKRFSHRPVQEKFVCLNCGFETHADEQAALNIARSWLFLRSQEYKKYQTNKTTGNTDKRAFVETWQSFYRKKLKEVWKPAV

SEQ ID NO: 73 - protein, 977 aa, Artificial Sequence
  CasX Variant
MQEIKRINKIRRRLVKDSNTKKAGKTGPMKTLLVRVMTPDLRERLENLRKKPENIPQPISNTSRANLNKLLTDYTEMKKAILHVYWEEFQKDPVGLMSRVAQPAPKNIDQRKLIPVKDGNERLTSSGFACSQCCQPLYVYKLEQVNDKGKPHTNYFGRCNVSEHERLILLSPHKPEANDELVTYSLGKFGQRALDFYSIHVTRESNHPVKPLEQIGGNSCASGPVGKALSDACMGAVASFLTKYQDIILEHQKVIKKNEKRLANLKDIASANGLAFPKITLPPQPHTKEGIEAYNNVVAQIVIWVNLNLWQKLKIGRDEAKPLQRLKGFPSFPLVERQANEVDWWDMVCNVKKLINEKKEDGKVFWQNLAGYKRQEALRPYLSSEEDRKKGKKFARYQFGDLLLHLEKKHGEDWGKVYDEAWERIDKKVEGLSKHIKLEEERRSEDAQSKAALTDWLRAKASFVIEGLKEADKDEFCRCELKLQKWYGDLRGKPFAIEAENSILDISGFSKQYNCAFIWQKDGVKKLNLYLIINYFKGGKLRFKKIKPEAFEANRFYTVINKKSGEIVPMEVNFNFDDPNLIILPLAFGKRQGREFIWNDLLSLETGSLKLANGRVIEKTLYNRRTRQDEPALFVALTFERREVLDSSNIKPMNLIGVDRGENIPAVIALTDPEGCPLSRFKDSLGNPTHILRIGESYKEKQRTIQAKKEVEQRRAGGYSRKYASKAKNLADDMVRNTARDLLYYAVTQDAMLIFENLSRGFGRQGKRTFMAERQYTRMEDWLTAKLAYEGLSKTYLSKTLAQYTSKTCSNCGFTITSADYDRVLEKLKKTATGWMTTINGKELKVEGQITYYNRRKRQNVVKDLSVELDRLSEESVNNDISSWTKGRSGEALSLLKKRFSHRPVQEKFVCLNCGFETHADEQAALNIARSWLFLRSQEYKKYQTNKTTGNTDKRAFVETWQSFYRKKLKEVWKPAV

SEQ ID NO: 74 - protein, 977 aa, Artificial Sequence
  CasX Variant
MQEIKRINKIRRRLVKDSNTKKAGKTGPMKTLLVRVMTPDLRERLENLRKKPENIPQPISNTSRANLNKLLTDYTEMKKAILHVYWEEFQKDPVGLMSRVAQPAPKNIDQRKLIPVKDGNERLTSSGFACSQCCQPLYVYKLEQVNDKGKPHTNYFGRCNVSEHERLILLSPHKPEANDELVTYSLGKFGQRALDFYSIHVTRESNHPVKPLEQIGGNSCASGPVGKALSDACMGAVASFLTKYQDIILEHQKVIKKNEKRLANLKDIASANGLAFPKITLPPQPHTKEGIEAYNNVVAQIVIWVNLNLWQKLKIGRDEAKPLQRLKGFPSFPLVERQANEVDWWDMVCNVKKLINEKKEDGKVFWQNLAGYKRQEALRPYLSSENDRKKGKKFARYQFGDLLLHLEKKHGEDWGKVYDEAWERIDKKVEGLSKHIKLEEERRSEDAQSKAALTDWLRAKASFVIEGLKEADKDEFCRCELKLQKWYGDLRGKPFAIEAENSILDISGFSKQYNCAFIWQKDGVKKLNLYLIINYFKGGKLRFKKIKPEAFEANRFYTVINKKSGEIVPMEVNFNFDDPNLIILPLAFGKRQGREFIWNDLLSLETGSLKLANGRVIEKTLYNRRTRQDEPALFVALTFERREVLDSSNIKPMNLIGVDRGENIPAVIALTDPEGCPLSRFKDSLGNPTHILRIGESYKEKQRTIQAKKEVEQRRAGGYSRKYASKAKNLADDMVRNTARDLLYYAVTQDAMLIFENLSRGFGRQGKRTFMAERQYTRMEDWLTAKLAYEGLSKTYLSKTLAQYTSKTCSNCGFTITSADYDRVLEKLKKTATGWMTTINGKELKVEGQITYYNRRKRQNVVKDLSVELDRLSEESVNNDISSWTKGRSGEALSLLKKRFSHRPVQEKFVCLNCGFETHADEQAALNIARSWLFLRSQEYKKYQTNKTTGNTDKRAFVETWQSFYRKKLKEVWKPAV

SEQ ID NO: 75 - protein, 977 aa, Artificial Sequence
  CasX Variant
MQEIKRINKIRRRLVKDSNTKKAGKTGPMKTLLVRVMTPDLRERLENLRKKPENIPQPISNTSRANLNKLLTDYTEMKKAILHVYWEEFQKDPVGLMSRVAQPAPKNIDQRKLIPVKDGNERLTSSGFACSQCCQPLYVYKLEQVNDKGKPHTNYFGRCNVSEHERLILLSPHKPEANDELVTYSLGKFGQRALDFYSIHVTRESNHPVKPLEQIGGNSCASGPVGKALSDACMGAVASFLTKYQDIILEHQKVIKKNEKRLANLKDIASANGLAFPKITLPPQPHTKEGIEAYNNVVAQIVIWVNLNLWQKLKIGRDEAKPLQRLKGFPSFPLVERQANEVDWWDMVCNVKKLINEKKEDGKVFWQNLAGYKRQEALRPYLSSEEDRKKGKKFARYQFGDLLKHLEKKHGEDWGKVYDEAWERIDKKVEGLSKHIKLEEERRSEDAQSKAALTDWLRAKASFVIEGLKEADKDEFCRCELKLQKWYGDLRGKPFAIEAENSILDISGFSKQYNCAFIWQKDGVKKLNLYLIINYFKGGKLRFKKIKPEAFEANRFYTVINKKSGEIVPMEVNFNFDDPNLIILPLAFGKRQGREFIWNDLLSLETGSLKLANGRVIEKTLYNRRTRQDEPALFVALTFERREVLDSSNIKPMNLIGVDRGENIPAVIALTDPEGCPLSRFKDSLGNPTHILRIGESYKEKQRTIQAKKEVEQRRAGGYSRKYASKAKNLADDMVRNTARDLLYYAVTQDAMLIFENLSRGFGRQGKRTFMAERQYTRMEDWLTAKLAYEGLSKTYLSKTLAQYTSKTCSNCGFTITSADYDRVLEKLKKTATGWMTTINGKELKVEGQITYYNRRKRQNVVKDLSVELDRLSEESVNNDISSWTKGRSGEALSLLKKRFSHRPVQEKFVCLNCGFETHADEQAALNIARSWLFLRSQEYKKYQTNKTTGNTDKRAFVETWQSFYRKKLKEVWKPAV

SEQ ID NO: 76 - protein, 978 aa, Artificial Sequence
  CasX Variant
MQEIKRINKIRRRLVKDSNTKKAGKTGPMKTLLVRVMTPDLRERLENLRKKPENIPQPISNTSRANLNKLLTDYTEMKKAILHVYWEEFQKDPVGLMSRVAQPAPKNIDQRKLIPVKDGNERLTSSGFACSQCCQPLYVYKLEQVNDKGKPHTNYFGRCNVSEHERLILLSPHKPEANDELVTYSLGKFGQVRALDFYSIHVTRESNHPVKPLEQIGGNSCASGPVGKALSDACMGAVASFLTKYQDIILEHQKVIKKNEKRLANLKDIASANGLAFPKITLPPQPHTKEGIEAYNNVVAQIVIWVNLNLWQKLKIGRDEAKPLQRLKGFPSFPLVERQANEVDWWDMVCNVKKLINEKKEDGKVFWQNLAGYKRQEALRPYLSSEEDRKKGKKFARYQFGDLLLHLEKKHGEDWGKVYDEAWERIDKKVEGLSKHIKLEEERRSEDAQSKAALTDWLRAKASFVIEGLKEADKDEFCRCELKLQKWYGDLRGKPFAIEAENSILDISGFSKQYNCAFIWQKDGVKKLNLYLIINYFKGGKLRFKKIKPEAFEANRFYTVINKKSGEIVPMEVNFNFDDPNLIILPLAFGKRQGREFIWNDLLSLETGSLKLANGRVIEKTLYNRRTRQDEPALFVALTFERREVLDSSNIKPMNLIGVDRGENIPAVIALTDPEGCPLSRFKDSLGNPTHILRIGESYKEKQRTIQAKKEVEQRRAGGYSRKYASKAKNLADDMVRNTARDLLYYAVTQDAMLIFENLSRGFGRQGKRTFMAERQYTRMEDWLTAKLAYEGLSKTYLSKTLAQYTSKTCSNCGFTITSADYDRVLEKLKKTATGWMTTINGKELKVEGQITYYNRRKRQNVVKDLSVELDRLSEESVNNDISSWTKGRSGEALSLLKKRFSHRPVQEKFVCLNCGFETHADEQAALNIARSWLFLRSQEYKKYQTNKTTGNTDKRAFVETWQSFYRKKLKEVWKPAV

SEQ ID NO: 77 - protein, 977 aa, Artificial Sequence
  CasX Variant
MQEIKRINKIRRRLVKDSNTKKAGKTGPMKTLLVRVMTPDLRERLENLRKKPENIPQPISNTSRANLNKLLTDYTEMKKAILHVYWEEFQKDPVGLMSRVAQPAPKNIDQRKLIPVKDGNERLTSSGFACSQCCQPLYVYKLEQVNDKGKPHTNYFGRCNVSEHERLILLSPHKPEANDELVTYSLGKFGQRALDFYSIHVTRESNHPVKPLEQIGGNSCASGPVGKALSDACMGAVASFLTKYQDIILEHQKVIKKNEKRLANLKDIASANGLAFPKITLPPQPHTKEGIEAYNNVVAQIVIWVNLNLWQKLKIGRDEAKPLQRLKGFPSFPLVERQANEVDWWDMVCNVKKLINEKKEDGKVFWQNLAGYKRQEALRPYLSSENDRKKGKKFARYQFGDLLKHLEKKHGEDWGKVYDEAWERIDKKVEGLSKHIKLEEERRSEDAQSKAALTDWLRAKASFVIEGLKEADKDEFCRCELKLQKWYGDLRGKPFAIEAENSILDISGFSKQYNCAFIWQKDGVKKLNLYLIINYFKGGKLRFKKIKPEAFEANRFYTVINKKSGEIVPMEVNFNFDDPNLIILPLAFGKRQGREFIWNDLLSLETGSLKLANGRVIEKTLYNRRTRQDEPALFVALTFERREVLDSSNIKPMNLIGVDRGENIPAVIALTDPEGCPLSRFKDSLGNPTHILRIGESYKEKQRTIQAKKEVEQRRAGGYSRKYASKAKNLADDMVRNTARDLLYYAVTQDAMLIFENLSRGFGRQGKRTFMAERQYTRMEDWLTAKLAYEGLSKTYLSKTLAQYTSKTCSNCGFTITSADYDRVLEKLKKTATGWMTTINGKELKVEGQITYYNRRKRQNVVKDLSVELDRLSEESVNNDISSWTKGRSGEALSLLKKRFSHRPVQEKFVCLNCGFETHADEQAALNIARSWLFLRSQEYKKYQTNKTTGNTDKRAFVETWQSFYRKKLKEVWKPAV

SEQ ID NO: 78 - protein, 977 aa, Artificial Sequence
  CasX Variant
MQEIKRINKIRRRLVKDSNTKKAGKTGPMKTLLVRVMTPDLRERLENLRKKPENIPQPISNTSRANLNKLLTDYTEMKKAILHVYWEEFQKDPVGLMSRVAQPAPKNIDQRKLIPVKDGNERLTSSGFACSQCCQPLYVYKLEQVNDKGKPHTNYFGRCNVSEHERLILLSPHKPEANDELVTYSLGKFGQRALDFYSIHVTRESNHPVKPLEQIGGNSCASGPVGKALSDACMGAVASFLTKYQDIILEHQKVIKKNEKRLANLKDIASANGLAFPKITLPPQPHTKEGIEAYNNVVAQIVIWVNLNLWQKLKIGRDEAKPLQRLKGFPSFPLVERQANEVDWWDMVCNVKKLINEKKEDGKVFWQNLAGYKRQEALRPYLSSEEDRKKGKKFARYQLGDLLLHLEKKHGEDWGKVYDEAWERIDKKVEGLSKHIKLEEERRSEDAQSKAALTDWLRAKASFVIEGLKEADKDEFCRCELKLQKWYGDLRGKPFAIEAENSILDISGFSKQYNCAFIWQKDGVKKLNLYLIINYFKGGKLRFKKIKPEAFEANRFYTVINKKSGEIVPMEVNFNFDDPNLIILPLAFGKRQGREFIWNDLLSLETGSLKLANGRVIEKTLYNRRTRQDEPALFVALTFERREVLDSSNIKPMNLIGVDRGENIPAVIALTDPEGCPLSRFKDSLGNPTHILRIGESYKEKQRTIQAKKEVEQRRAGGYSRKYASKAKNLADDMVRNTARDLLYYAVTQDAMLIFENLSRGFGRQGKRTFMAERQYTRMEDWLTAKLAYEGLSKTYLSKTLAQYTSKTCSNCGFTITSADYDRVLEKLKKTATGWMTTINGKELKVEGQITYYNRRKRQNVVKDLSVELDRLSEESVNNDISSWTKGRSGEALSLLKKRFSHRPVQEKFVCLNCGFETHADEQAALNIARSWLFLRSQEYKKYQTNKTTGNTDKRAFVETWQSFYRKKLKEVWKPAV

SEQ ID NO: 79 - protein, 977 aa, Artificial Sequence
  CasX Variant
MQEIKRINKIRRRLVKDSNTKKAGKTGPMKTLLVRVMTPDLRERLENLRKKPENIPQPISNTSRANLNKLLTDYTEMKKAILHVYWEEFQKDPVGLMSRVAQPAPKNIDQRKLIPVKDGNERLTSSGFACSQCCQPLYVYKLEQVNDKGKPHTNYFGRCNVSEHERLILLSPHKPEANDELVTYSLGKFGQRALDFYSIHVTRESNHPVKPLEQIGGNSCASGPVGKALSDACMGAVASFLTKYQDIILEHQKVIKKNEKRLANLKDIASANGLAFPKITLPPQPHTKEGIEAYNNVVAQIVIWVNLNLWQKLKIGRDEAKPLQRLKGFPSFPLVERQANEVDWWDMVCNVKKLINEKKEDGKVFWQNLAGYKRQEALRPYLSSENDRKKGKKFARYQLGDLLLHLEKKHGEDWGKVYDEAWERIDKKVEGLSKHIKLEEERRSEDAQSKAALTDWLRAKASFVIEGLKEADKDEFCRCELKLQKWYGDLRGKPFAIEAENSILDISGFSKQYNCAFIWQKDGVKKLNLYLIINYFKGGKLRFKKIKPEAFEANRFYTVINKKSGEIVPMEVNFNFDDPNLIILPLAFGKRQGREFIWNDLLSLETGSLKLANGRVIEKTLYNRRTRQDEPALFVALTFERREVLDSSNIKPMNLIGVDRGENIPAVIALTDPEGCPLSRFKDSLGNPTHILRIGESYKEKQRTIQAKKEVEQRRAGGYSRKYASKAKNLADDMVRNTARDLLYYAVTQDAMLIFENLSRGFGRQGKRTFMAERQYTRMEDWLTAKLAYEGLSKTYLSKTLAQYTSKTCSNCGFTITSADYDRVLEKLKKTATGWMTTINGKELKVEGQITYYNRRKRQNVVKDLSVELDRLSEESVNNDISSWTKGRSGEALSLLKKRFSHRPVQEKFVCLNCGFETHADEQAALNIARSWLFLRSQEYKKYQTNKTTGNTDKRAFVETWQSFYRKKLKEVWKPAV

SEQ ID NO: 80 - protein, 977 aa, Artificial Sequence
  CasX Variant
MQEIKRINKIRRRLVKDSNTKKAGKTGPMKTLLVRVMTPDLRERLENLRKKPENIPQPISNTSRANLNKLLTDYTEMKKAILHVYWEEFQKDPVGLMSRVAQPAPKNIDQRKLIPVKDGNERLTSSGFACSQCCQPLYVYKLEQVNDKGKPHTNYFGRCNVSEHERLILLSPHKPEANDELVTYSLGKFGQRALDFYSIHVTRESNHPVKPLEQIGGNSCASGPVGKALSDACMGAVASFLTKYQDIILEHQKVIKKNEKRLANLKDIASANGLAFPKITLPPQPHTKEGIEAYNNVVAQIVIWVNLNLWQKLKIGRDEAKPLQRLKGFPSFPLVERQANEVDWWDMVCNVKKLINEKKEDGKVFWQNLAGYKRQEALRPYLSSEEDRKKGKKFARYQLGDLLLHLEKKHGEDWGKVYDEAWERIDKKVEGLSKHIKLEEERRSEDAQSKAALTDWLRAKASFVIEGLKEADKDEFSRCELKLQKWYGDLRGKPFAIEAENSILDISGFSKQYNCAFIWQKDGVKKLNLYLIINYFKGGKLRFKKIKPEAFEANRFYTVINKKSGEIVPMEVNFNFDDPNLIILPLAFGKRQGREFIWNDLLSLETGSLKLANGRVIEKTLYNRRTRQDEPALFVALTFERREVLDSSNIKPMNLIGVDRGENIPAVIALTDPEGCPLSRFKDSLGNPTHILRIGESYKEKQRTIQAKKEVEQRRAGGYSRKYASKAKNLADDMVRNTARDLLYYAVTQDAMLIFENLSRGFGRQGKRTFMAERQYTRMEDWLTAKLAYEGLSKTYLSKTLAQYTSKTCSNCGFTITSADYDRVLEKLKKTATGWMTTINGKELKVEGQITYYNRRKRQNVVKDLSVELDRLSEESVNNDISSWTKGRSGEALSLLKKRFSHRPVQEKFVCLNCGFETHADEQAALNIARSWLFLRSQEYKKYQTNKTTGNTDKRAFVETWQSFYRKKLKEVWKPAV

SEQ ID NO: 81 - protein, 977 aa, Artificial Sequence
  CasX Variant
MQEIKRINKIRRRLVKDSNTKKAGKTGPMKTLLVRVMTPDLRERLENLRKKPENIPQPISNTSRANLNKLLTDYTEMKKAILHVYWEEFQKDPVGLMSRVAQPAPKNIDQRKLIPVKDGNERLTSSGFACSQCCQPLYVYKLEQVNDKGKPHTNYFGRCNVSEHERLILLSPHKPEANDELVTYSLGKFGQRALDFYSIHVTRESNHPVKPLEQIGGNSCASGPVGKALSDACMGAVASFLTKYQDIILEHQKVIKKNEKRLANLKDIASANGLAFPKITLPPQPHTKEGIEAYNNVVAQIVIWVNLNLWQKLKIGRDEAKPLQRLKGFPSFPLVERQANEVDWWDMVCNVKKLINEKKEDGKVFWQNLAGYKRQEALRPYLSSEEDRKKGKKFARYQLGDLLKHLEKKHGEDWGKVYDEAWERIDKKVEGLSKHIKLEEERRSEDAQSKAALTDWLRAKASFVIEGLKEADKDEFCRCELKLQKWYGDLRGKPFAIEAENSILDISGFSKQYNCAFIWQKDGVKKLNLYLIINYFKGGKLRFKKIKPEAFEANRFYTVINKKSGEIVPMEVNFNFDDPNLIILPLAFGKRQGREFIWNDLLSLETGSLKLANGRVIEKTLYNRRTRQDEPALFVALTFERREVLDSSNIKPMNLIGVDRGENIPAVIALTDPEGCPLSRFKDSLGNPTHILRIGESYKEKQRTIQAKKEVEQRRAGGYSRKYASKAKNLADDMVRNTARDLLYYAVTQDAMLIFENLSRGFGRQGKRTFMAERQYTRMEDWLTAKLAYEGLSKTYLSKTLAQYTSKTCSNCGFTITSADYDRVLEKLKKTATGWMTTINGKELKVEGQITYYNRRKRQNVVKDLSVELDRLSEESVNNDISSWTKGRSGEALSLLKKRFSHRPVQEKFVCLNCGFETHADEQAALNIARSWLFLRSQEYKKYQTNKTTGNTDKRAFVETWQSFYRKKLKEVWKPAV

SEQ ID NO: 82 - protein, 977 aa, Artificial Sequence
  CasX Variant
MQEIKRINKIRRRLVKDSNTKKAGKTGPMKTLLVRVMTPDLRERLENLRKKPENIPQPISNTSRANLNKLLTDYTEMKKAILHVYWEEFQKDPVGLMSRVAQPAPKNIDQRKLIPVKDGNERLTSSGFACSQCCQPLYVYKLEQVNDKGKPHTNYFGRCNVSEHERLILLSPHKPEANDELVTYSLGKFGQRALDFYSIHVTRESNHPVKPLEQIGGNSCASGPVGKALSDACMGAVASFLTKYQDIILEHQKVIKKNEKRLANLKDIASANGLAFPKITLPPQPHTKEGIEAYNNVVAQIVIWVNLNLWQKLKIGRDEAKPLQRLKGFPSFPLVERQANEVDWWDMVCNVKKLINEKKEDGKVFWQNLAGYKRQEALRPYLSSENDRKKGKKFARYQLGDLLKHLEKKHGEDWGKVYDEAWERIDKKVEGLSKHIKLEEERRSEDAQSKAALTDWLRAKASFVIEGLKEADKDEFSRCELKLQKWYGDLRGKPFAIEAENSILDISGFSKQYNCAFIWQKDGVKKLNLYLIINYFKGGKLRFKKIKPEAFEANRFYTVINKKSGEIVPMEVNFNFDDPNLIILPLAFGKRQGREFIWNDLLSLETGSLKLANGRVIEKTLYNRRTRQDEPALFVALTFERREVLDSSNIKPMNLIGVDRGENIPAVIALTDPEGCPLSRFKDSLGNPTHILRIGESYKEKQRTIQAKKEVEQRRAGGYSRKYASKAKNLADDMVRNTARDLLYYAVTQDAMLIFENLSRGFGRQGKRTFMAERQYTRMEDWLTAKLAYEGLSKTYLSKTLAQYTSKTCSNCGFTITSADYDRVLEKLKKTATGWMTTINGKELKVEGQITYYNRRKRQNVVKDLSVELDRLSEESVNNDISSWTKGRSGEALSLLKKRFSHRPVQEKFVCLNCGFETHADEQAALNIARSWLFLRSQEYKKYQTNKTTGNTDKRAFVETWQSFYRKKLKEVWKPAV

SEQ ID NO: 83 - protein, 977 aa, Artificial Sequence
  CasX Variant
MQEIKRINKIRRRLVKDSNTKKAGKTGPMKTLLVRVMTPDLRERLENLRKKPENIPQPISNTSRANLNKLLTDYTEMKKAILHVYWEEFQKDPVGLMSRVAQPAPKNIDQRKLIPVKDGNERLTSSGFACSQCCQPLYVYKLEQVNDKGKPHTNYFGRCNVSEHERLILLSPHKPEANDELVTYSLGKFGQRALDFYSIHVTRESNHPVKPLEQIGGNSCASGPVGKALSDACMGAVASFLTKYQDIILEHQKVIKKNEKRLANLKDIASANGLAFPKITLPPQPHTKEGIEAYNNVVAQIVIWVNLNLWQKLKIGRDEAKPLQRLKGFPSFPLVERQANEVDWWDMVCNVKKLINEKKEDGKVFWQNLAGYKRQEALRPYLSSEEDRKKGKKFARYQLGDLLLHLEKKHGEDWGKVYDEAWERIDKKVEGLSKHIKLEEERRSEDAQSKAALTDWLRAKASFVIEGLKEADKDEFCRCELKLQKWYGDLRGKPFAIEAENSILDISGFSKQYNCAFIWQKDGVKKLNLYLIINYFKGGKLRFKKIKPEAFEANRFYTVINKKSGEIVPMEVNFNFDDPNLIILPLAFGKRQGREFIWNDLLSLETGSLKLANGRVIEKTLYNRRTRQDEPALFVALTFERREVLDSSNIKPMNLIGVDRGENIPAVIALTDPEGCPLSRFKDSLGNPTHILRIGESYKEKQRTIQAKKEVEQRRAGGYSRKYASKAKNLADDMVRNTARDLLYYAVTQDAMLIFENLSRGFGRQGKRTFMAERQYTRMEDWLTAKLAYEGLSKTLLSKTLAQYTSKTCSNCGFTITSADYDRVLEKLKKTATGWMTTINGKELKVEGQITYYNRRKRQNVVKDLSVELDRLSEESVNNDISSWTKGRSGEALSLLKKRFSHRPVQEKFVCLNCGFETHADEQAALNIARSWLFLRSQEYKKYQTNKTTGNTDKRAFVETWQSFYRKKLKEVWKPAV

SEQ ID NO: 84 - protein, 977 aa, Artificial Sequence
  CasX Variant
MQEIKRINKIRRRLVKDSNTKKAGKTGPMKTLLVRVMTPDLRERLENLRKKPENIPQPISNTSRANLNKLLTDYTEMKKAILHVYWEEFQKDPVGLMSRVAQPAPKNIDQRKLIPVKDGNERLTSSGFACSQCCQPLYVYKLEQVNDKGKPHTNYFGRCNVSEHERLILLSPHKPEANDELVTYSLGKFGQRALDFYSIHVTRESNHPVKPLEQIGGNSCASGPVGKALSDACMGAVASFLTKYQDIILEHQKVIKKNEKRLANLKDIASANGLAFPKITLPPQPHTKEGIEAYNNVVAQIVIWVNLNLWQKLKIGRDEAKPLQRLKGFPSFPLVERQANEVDWWDMVCNVKKLINEKKEDGKVFWQNLAGYKRQEALRPYLSSENDRKKGKKFARYQLGDLLLHLEKKHGEDWGKVYDEAWERIDKKVEGLSKHIKLEEERRSEDAQSKAALTDWLRAKASFVIEGLKEADKDEFCRCELKLQKWYGDLRGKPFAIEAENSILDISGFSKQYNCAFIWQKDGVKKLNLYLIINYFKGGKLRFKKIKPEAFEANRFYTVINKKSGEIVPMEVNFNFDDPNLIILPLAFGKRQGREFIWNDLLSLETGSLKLANGRVIEKTLYNRRTRQDEPALFVALTFERREVLDSSNIKPMNLIGVDRGENIPAVIALTDPEGCPLSRFKDSLGNPTHILRIGESYKEKQRTIQAKKEVEQRRAGGYSRKYASKAKNLADDMVRNTARDLLYYAVTQDAMLIFENLSRGFGRQGKRTFMAERQYTRMEDWLTAKLAYEGLSKTLLSKTLAQYTSKTCSNCGFTITSADYDRVLEKLKKTATGWMTTINGKELKVEGQITYYNRRKRQNVVKDLSVELDRLSEESVNNDISSWTKGRSGEALSLLKKRFSHRPVQEKFVCLNCGFETHADEQAALNIARSWLFLRSQEYKKYQTNKTTGNTDKRAFVETWQSFYRKKLKEVWKPAV

SEQ ID NO: 85 - protein, 977 aa, Artificial Sequence
  CasX Variant
MQEIKRINKIRRRLVKDSNTKKAGKTGPMKTLLVRVMTPDLRERLENLRKKPENIPQPISNTSRANLNKLLTDYTEMKKAILHVYWEEFQKDPVGLMSRVAQPAPKNIDQRKLIPVKDGNERLTSSGFACSQCCQPLYVYKLEQVNDKGKPHTNYFGRCNVSEHERLILLSPHKPEANDELVTYSLGKFGQRALDFYSIHVTRESNHPVKPLEQIGGNSCASGPVGKALSDACMGAVASFLTKYQDIILEHQKVIKKNEKRLANLKDIASANGLAFPKITLPPQPHTKEGIEAYNNVVAQIVIWVNLNLWQKLKIGRDEAKPLQRLKGFPSFPLVERQANEVDWWDMVCNVKKLINEKKEDGKVFWQNLAGYKRQEALRPYLSSENDRKKGKKFARYQLGDLLKHLEKKHGEDWGKVYDEAWERIDKKVEGLSKHIKLEEERRSEDAQSKAALTDWLRAKASFVIEGLKEADKDEFSRCELKLQKWYGDLRGKPFAIEAENSILDISGFSKQYNCAFIWQKDGVKKLNLYLIINYFKGGKLRFKKIKPEAFEANRFYTVINKKSGEIVPMEVNFNFDDPNLIILPLAFGKRQGREFIWNDLLSLETGSLKLANGRVIEKTLYNRRTRQDEPALFVALTFERREVLDSSNIKPMNLIGVDRGENIPAVIALTDPEGCPLSRFKDSLGNPTHILRIGESYKEKQRTIQAKKEVEQRRAGGYSRKYASKAKNLADDMVRNTARDLLYYAVTQDAMLIFENLSRGFGRQGKRTFMAERQYTRMEDWLTAKLAYEGLSKTLLSKTLAQYTSKTCSNCGFTITSADYDRVLEKLKKTATGWMTTINGKELKVEGQITYYNRRKRQNVVKDLSVELDRLSEESVNNDISSWTKGRSGEALSLLKKRFSHRPVQEKFVCLNCGFETHADEQAALNIARSWLFLRSQEYKKYQTNKTTGNTDKRAFVETWQSFYRKKLKEVWKPAV

SEQ ID NO: 86 - protein, 977 aa, Artificial Sequence
  CasX Variant
MQEIKRINKIRRRLVKDSNTKKAGKTGPMKTLLVRVMTPDLRERLENLRKKPENIPQPISNTSRANLNKLLTDYTEMKKAILHVYWEEFQKDPVGLMSRVAQPAPKNIDQRKLIPVKDGNERLTSSGFACSQCCQPLYVYKLEQVNDKGKPHTNYFGRCNVSEHERLILLSPHKPEANDELVTYSLGKFGQRALDFYSIHVTRESNHPVKPLEQIGGNSCASGPVGKALSDACMGAVASFLTKYQDIILEHQKVIKKNEKRLANLKDIASANGLAFPKITLPPQPHTKEGIEAYNNVVAQIVIWVNLNLWQKLKIGRDEAKPLQRLKGFPSFPLVERQANEVDWWDMVCNVKKLINEKKEDGKVFWQNLAGYKRQEALRPYLSSEEDRKKGKKFARYQFGDLLLHLEKKHGEDWGKVYDEAWERIDKKVEGLSKHIKLEEERRSEDAQSKAALTDWLRAKASFVIEGLKEADKDEFCRCELKLQKWYGDLRGKPFAIEAENSILDISGFSKQYNCAFIWQKDGVKKLNLYLIINYFKGGKLRFKKIKPEAFEANRFYTVINKKSGEIVPMEVNFNFDDPNLIILPLAFGKRQGREFIWNDLLSLETGSLKLANGRVIEKTLYNRRTRQDEPALFVALTFERREVLDSSNIKPMNLIGVDRGENIPAVIALTDPEGCPLSRFKDSLGNPTHILRIGESYKEKQRTIQAKKEVEQRRAGGYSRKYASKAKNLADDMVRNTARDLLYYAVTQDAMLIFENLSRGFGRQGKRTFMAERQYTRMEDWLTAKLAYEGLSKTLLSKTLAQYTSKTCSNCGFTITSADYDRVLEKLKKTATGWMTTINGKELKVEGQITYYNRRKRQNVVKDLSVELDRLSEESVNNDISSWTKGRSGEALSLLKKRFSHRPVQEKFVCLNCGFETHADEQAALNIARSWLFLRSQEYKKYQTNKTTGNTDKRAFVETWQSFYRKKLKEVWKPAV

SEQ ID NO: 87 - protein, 977 aa, Artificial Sequence
  CasX Variant
MQEIKRINKIRRRLVKDSNTKKAGKTGPMKTLLVRVMTPDLRERLENLRKKPENIPQPISNTSRANLNKLLTDYTEMKKAILHVYWEEFQKDPVGLMSRVAQPAPKNIDQRKLIPVKDGNERLTSSGFACSQCCQPLYVYKLEQVNDKGKPHTNYFGRCNVSEHERLILLSPHKPEANDELVTYSLGKFGQRALDFYSIHVTRESNHPVKPLEQIGGNSCASGPVGKALSDACMGAVASFLTKYQDIILEHQKVIKKNEKRLANLKDIASANGLAFPKITLPPQPHTKEGIEAYNNVVAQIVIWVNLNLWQKLKIGRDEAKPLQRLKGFPSFPLVERQANEVDWWDMVCNVKKLINEKKEDGKVFWQNLAGYKRQEALRPYLSSEEDRKKGKKFARYQFGDLLKHLEKKHGEDWGKVYDEAWERIDKKVEGLSKHIKLEEERRSEDAQSKAALTDWLRAKASFVIEGLKEADKDEFCRCELKLQKWYGDLRGKPFAIEAENSILDISGFSKQYNCAFIWQKDGVKKLNLYLIINYFKGGKLRFKKIKPEAFEANRFYTVINKKSGEIVPMEVNFNFDDPNLIILPLAFGKRQGREFIWNDLLSLETGSLKLANGRVIEKTLYNRRTRQDEPALFVALTFERREVLDSSNIKPMNLIGVDRGENIPAVIALTDPEGCPLSRFKDSLGNPTHILRIGESYKEKQRTIQAKKEVEQRRAGGYSRKYASKAKNLADDMVRNTARDLLYYAVTQDAMLIFENLSRGFGRQGKRTFMAERQYTRMEDWLTAKLAYEGLSKTLLSKTLAQYTSKTCSNCGFTITSADYDRVLEKLKKTATGWMTTINGKELKVEGQITYYNRRKRQNVVKDLSVELDRLSEESVNNDISSWTKGRSGEALSLLKKRFSHRPVQEKFVCLNCGFETHADEQAALNIARSWLFLRSQEYKKYQTNKTTGNTDKRAFVETWQSFYRKKLKEVWKPAV

SEQ ID NO: 88 - protein, 977 aa, Artificial Sequence
  CasX Variant
MQEIKRINKIRRRLVKDSNTKKAGKTGPMKTLLVRVMTPDLRERLENLRKKPENIPQPISNTSRANLNKLLTDYTEMKKAILHVYWEEFQKDPVGLMSRVAQPAPKNIDQRKLIPVKDGNERLTSSGFACSQCCQPLYVYKLEQVNDKGKPHTNYFGRCNVSEHERLILLSPHKPEANDELVTYSLGKFGQRALDFYSIHVTRESNHPVKPLEQIGGNSCASGPVGKALSDACMGAVASFLTKYQDIILEHQKVIKKNEKRLANLKDIASANGLAFPKITLPPQPHTKEGIEAYNNVVAQIVIWVNLNLWQKLKIGRDEAKPLQRLKGFPSFPLVERQANEVDWWDMVCNVKKLINEKKEDGKVFWQNLAGYKRQEALRPYLSSENDRKKGKKFARYQFGDLLLHLEKKHGEDWGKVYDEAWERIDKKVEGLSKHIKLEEERRSEDAQSKAALTDWLRAKASFVIEGLKEADKDEFCRCELKLQKWYGDLRGKPFAIEAENSILDISGFSKQYNCAFIWQKDGVKKLNLYLIINYFKGGKLRFKKIKPEAFEANRFYTVINKKSGEIVPMEVNFNFDDPNLIILPLAFGKRQGREFIWNDLLSLETGSLKLANGRVIEKTLYNRRTRQDEPALFVALTFERREVLDSSNIKPMNLIGVDRGENIPAVIALTDPEGCPLSRFKDSLGNPTHILRIGESYKEKQRTIQAKKEVEQRRAGGYSRKYASKAKNLADDMVRNTARDLLYYAVTQDAMLIFENLSRGFGRQGKRTFMAERQYTRMEDWLTAKLAYEGLSKTLLSKTLAQYTSKTCSNCGFTITSADYDRVLEKLKKTATGWMTTINGKELKVEGQITYYNRRKRQNVVKDLSVELDRLSEESVNNDISSWTKGRSGEALSLLKKRFSHRPVQEKFVCLNCGFETHADEQAALNIARSWLFLRSQEYKKYQTNKTTGNTDKRAFVETWQSFYRKKLKEVWKPAV

SEQ ID NO: 89 - protein, 977 aa, Artificial Sequence
  CasX Variant
MQEIKRINKIRRRLVKDSNTKKAGKTGPMKTLLVRVMTPDLRERLENLRKKPENIPQPISNTSRANLNKLLTDYTEMKKAILHVYWEEFQKDPVGLMSRVAQPAPKNIDQRKLIPVKDGNERLTSSGFACSQCCQPLYVYKLEQVNDKGKPHTNYFGRCNVSEHERLILLSPHKPEANDELVTYSLGKFGQRALDFYSIHVTRESNHPVKPLEQIGGNSCASGPVGKALSDACMGAVASFLTKYQDIILEHQKVIKKNEKRLANLKDIASANGLAFPKITLPPQPHTKEGIEAYNNVVAQIVIWVNLNLWQKLKIGRDEAKPLQRLKGFPSFPLVERQANEVDWWDMVCNVKKLINEKKEDGKVFWQNLAGYKRQEALRPYLSSENDRKKGKKFARYQFGDLLKHLEKKHGEDWGKVYDEAWERIDKKVEGLSKHIKLEEERRSEDAQSKAALTDWLRAKASFVIEGLKEADKDEFSRCELKLQKWYGDLRGKPFAIEAENSILDISGFSKQYNCAFIWQKDGVKKLNLYLIINYFKGGKLRFKKIKPEAFEANRFYTVINKKSGEIVPMEVNFNFDDPNLIILPLAFGKRQGREFIWNDLLSLETGSLKLANGRVIEKTLYNRRTRQDEPALFVALTFERREVLDSSNIKPMNLIGVDRGENIPAVIALTDPEGCPLSRFKDSLGNPTHILRIGESYKEKQRTIQAKKEVEQRRAGGYSRKYASKAKNLADDMVRNTARDLLYYAVTQDAMLIFENLSRGFGRQGKRTFMAERQYTRMEDWLTAKLAYEGLSKTLLSKTLAQYTSKTCSNCGFTITSADYDRVLEKLKKTATGWMTTINGKELKVEGQITYYNRRKRQNVVKDLSVELDRLSEESVNNDISSWTKGRSGEALSLLKKRFSHRPVQEKFVCLNCGFETHADEQAALNIARSWLFLRSQEYKKYQTNKTTGNTDKRAFVETWQSFYRKKLKEVWKPAV

SEQ ID NO: 90 - protein, 977 aa, Artificial Sequence
  CasX Variant
MQEIKRINKIRRRLVKDSNTKKAGKTGPMKTLLVRVMTPDLRERLENLRKKPENIPQPISNTSRANLNKLLTDYTEMKKAILHVYWEEFQKDPVGLMSRVAQPAPKNIDQRKLIPVKDGNERLTSSGFACSQCCQPLYVYKLEQVNDKGKPHTNYFGRCNVSEHERLILLSPHKPEANDELVTYSLGKFGQRALDFYSIHVTRESNHPVKPLEQIGGNSCASGPVGKALSDACMGAVASFLTKYQDIILEHQKVIKKNEKRLANLKDIASANGLAFPKITLPPQPHTKEGIEAYNNVVAQIVIWVNLNLWQKLKIGRDEAKPLQRLKGFPSFPLVERQANEVDWWDMVCNVKKLINEKKEDGKVFWQNLAGYKRQEALRPYLSSENDRKKGKKFARYQFGDLLLHLEKKHGEDWGKVYDEAWERIDKKVEGLSKHIKLEEERRSEDAQSKAALTDWLRAKASFVIEGLKEADKDEFCRCELKLQKWYGDLRGKPFAIEAENSILDISGFSKQYNCAFIWQKDGVKKLNLYLIINYFKGGKLRFKKIKPEAFEANRFYTVINKKSGEIVPMEVNFNFDDPNLIILPLAFGKRQGREFIWNDLLSLETGSLKLANGRVIEKTLYNRRTRQDEPALFVALTFERREVLDSSNIKPMNLIGIDRGENIPAVIALTDPEGCPLSRFKDSLGNPTHILRIGESYKEKQRTIQAKKEVEQRRAGGYSRKYASKAKNLADDMVRNTARDLLYYAVTQDAMLIFENLSRGFGRQGKRTFMAERQYTRMEDWLTAKLAYEGLSKTYLSKTLAQYTSKTCSNCGFTITSADYDRVLEKLKKTATGWMTTINGKELKVEGQITYYNRRKRQNVVKDLSVELDRLSEESVNNDISSWTKGRSGEALSLLKKRFSHRPVQEKFVCLNCGFETHADEQAALNIARSWLFLRSQEYKKYQTNKTTGNTDKRAFVETWQSFYRKKLKEVWKPAV

SEQ ID NO: 91 - protein, 977 aa, Artificial Sequence
  CasX Variant
MQEIKRINKIRRRLVKDSNTKKAGKTGPMKTLLVRVMTPDLRERLENLRKKPENIPQPISNTSRANLNKLLTDYTEMKKAILHVYWEEFQKDPVGLMSRVAQPAPKNIDQRKLIPVKDGNERLTSSGFACSQCCQPLYVYKLEQVNDKGKPHTNYFGRCNVSEHERLILLSPHKPEANDELVTYSLGKFGQRALDFYSIHVTRESNHPVKPLEQIGGNSCASGPVGKALSDACMGAVASFLTKYQDIILEHQKVIKKNEKRLANLKDIASANGLAFPKITLPPQPHTKEGIEAYNNVVAQIVIWVNLNLWQKLKIGRDEAKPLQRLKGFPSFPLVERQANEVDWWDMVCNVKKLINEKKEDGKVFWQNLAGYKRQEALRPYLSSENDRKKGKKFARYQFGDLLKHLEKKHGEDWGKVYDEAWERIDKKVEGLSKHIKLEEERRSEDAQSKAALTDWLRAKASFVIEGLKEADKDEFCRCELKLQKWYGDLRGKPFAIEAENSILDISGFSKQYNCAFIWQKDGVKKLNLYLIINYFKGGKLRFKKIKPEAFEANRFYTVINKKSGEIVPMEVNFNFDDPNLIILPLAFGKRQGREFIWNDLLSLETGSLKLANGRVIEKTLYNRRTRQDEPALFVALTFERREVLDSSNIKPMNLIGIDRGENIPAVIALTDPEGCPLSRFKDSLGNPTHILRIGESYKEKQRTIQAKKEVEQRRAGGYSRKYASKAKNLADDMVRNTARDLLYYAVTQDAMLIFENLSRGFGRQGKRTFMAERQYTRMEDWLTAKLAYEGLSKTYLSKTLAQYTSKTCSNCGFTITSADYDRVLEKLKKTATGWMTTINGKELKVEGQITYYNRRKRQNVVKDLSVELDRLSEESVNNDISSWTKGRSGEALSLLKKRFSHRPVQEKFVCLNCGFETHADEQAALNIARSWLFLRSQEYKKYQTNKTTGNTDKRAFVETWQSFYRKKLKEVWKPAV

SEQ ID NO: 92 - protein, 977 aa, Artificial Sequence
  CasX Variant
MQEIKRINKIRRRLVKDSNTKKAGKTGPMKTLLVRVMTPDLRERLENLRKKPENIPQPISNTSRANLNKLLTDYTEMKKAILHVYWEEFQKDPVGLMSRVAQPAPKNIDQRKLIPVKDGNERLTSSGFACSQCCQPLYVYKLEQVNDKGKPHTNYFGRCNVSEHERLILLSPHKPEANDELVTYSLGKFGQRALDFYSIHVTRESNHPVKPLEQIGGNSCASGPVGKALSDACMGAVASFLTKYQDIILEHQKVIKKNEKRLANLKDIASANGLAFPKITLPPQPHTKEGIEAYNNVVAQIVIWVNLNLWQKLKIGRDEAKPLQRLKGFPSFPLVERQANEVDWWDMVCNVKKLINEKKEDGKVFWQNLAGYKRQEALRPYLSSPEDRKKGKKFARYQFGDLLLHLEKKHGEDWGKVYDEAWERIDKKVEGLSKHIKLEEERRSEDAQSKAALTDWLRAKASFVIEGLKEADKDEFCRCELKLQKWYGDLRGKPFAIEAENSILDISGFSKQYNCAFIWQKDGVKKLNLYLIINYFKGGKLRFKKIKPEAFEANRFYTVINKKSGEIVPMEVNFNFDDPNLIILPLAFGKRQGREFIWNDLLSLETGSLKLANGRVIEKTLYNRRTRQDEPALFVALTFERREVLDSSNIKPMNLIGIDRGENIPAVIALTDPEGCPLSRFKDSLGNPTHILRIGESYKEKQRTIQAKKEVEQRRAGGYSRKYASKAKNLANDMVRNTARDLLYYAVTQDAMLIFENLSRGFGRQGKRTFMAERQYTRMEDWLTAKLAYEGLSKTYLSKTLAQYTSKTCSNCGFTITSADYDRVLEKLKKTATGWMTTINGKELKVEGQITYYNRRKRQNVVKDLSVELDRLSEESVNNDISSWTKGRSGEALSLLKKRFSHRPVQEKFVCLNCGFETHADEQAALNIARSWLFLRSQEYKKYQTNKTTGNTDKRAFVETWQSFYRKKLKEVWKPAV

SEQ ID NO: 93 - protein, 977 aa, Artificial Sequence
  CasX Variant
MQEIKRINKIRRRLVKDSNTKKAGKTGPMKTLLVRVMTPDLRERLENLRKKPENIPQPISNTSRANLNKLLTDYTEMKKAILHVYWEEFQKDPVGLMSRVAQPAPKNIDQRKLIPVKDGNERLTSSGFACSQCCQPLYVYKLEQVNDKGKPHTNYFGRCNVSEHERLILLSPHKPEANDELVTYSLGKFGQRALDFYSIHVTRESNHPVKPLEQIGGNSCASGPVGKALSDACMGAVASFLTKYQDIILEHQKVIKKNEKRLANLKDIASANGLAFPKITLPPQPHTKEGIEAYNNVVAQIVIWVNLNLWQKLKIGRDEAKPLQRLKGFPSFPLVERQANEVDWWDMVCNVKKLINEKKEDGKVFWQNLAGYKRQEALRPYLSSPEDRKKGKKFARYQFGDLLLHLEKKHGEDWGKVYDEAWERIDKKVEGLSKHIKLEEERRSEDAQSKAALTDWLRAKASFVIEGLKEADKDEFCRCELKLQKWYGDLRGKPFAIEAENSILDISGFSKQYNCAFIWQKDGVKKLNLYLIINYFKGGKLRFKKIKPEAFEANRFYTVINKKSGEIVPMEVNFNFDDPNLIILPLAFGKRQGREFIWNDLLSLETGSLKLANGRVIEKTLYNRRTRQDEPALFVALTFERREVLDSSNIKPMNLIGVDRGENIPAVIALTDPEGCPLSRFKDSLGNPTHILRIGESYKEKQRTIQAKKEVEQRRAGGYSRKYASKAKNLANDMVRNTARDLLYYAVTQDAMLIFENLSRGFGRQGKRTFMAERQYTRMEDWLTAKLAYEGLSKTYLSKTLAQYTSKTCSNCGFTITSADYDRVLEKLKKTATGWMTTINGKELKVEGQITYYNRRKRQNVVKDLSVELDRLSEESVNNDISSWTKGRSGEALSLLKKRFSHRPVQEKFVCLNCGFETHADEQAALNIARSWLFLRSQEYKKYQTNKTTGNTDKRAFVETWQSFYRKKLKEVWKPAV

SEQ ID NO: 94 - protein, 977 aa, Artificial Sequence
  CasX Variant
MQEIKRINKIRRRLVKDSNTKKAGKTGPMKTLLVRVMTPDLRERLENLRKKPENIPQPISNTSRANLNKLLTDYTEMKKAILHVYWEEFQKDPVGLMSRVAQPAPKNIDQRKLIPVKDGNERLTSSGFACSQCCQPLYVYKLEQVNDKGKPHTNYFGRCNVSEHERLILLSPHKPEANDELVTYSLGKFGQRALDFYSIHVTRESNHPVKPLEQIGGNSCASGPVGKALSDACMGAVASFLTKYQDIILEHQKVIKKNEKRLANLKDIASANGLAFPKITLPPQPHTKEGIEAYNNVVAQIVIWVNLNLWQKLKIGRDEAKPLQRLKGFPSFPLVERQANEVDWWDMVCNVKKLINEKKEDGKVFWQNLAGYKRQEALRPYLSSPEDRKKGKKFARYQLGDLLLHLEKKHGEDWGKVYDEAWERIDKKVEGLSKHIKLEEERRSEDAQSKAALTDWLRAKASFVIEGLKEADKDEFCRCELKLQKWYGDLRGKPFAIEAENSILDISGFSKQYNCAFIWQKDGVKKLNLYLIINYFKGGKLRFKKIKPEAFEANRFYTVINKKSGEIVPMEVNFNFDDPNLIILPLAFGKRQGREFIWNDLLSLETGSLKLANGRVIEKTLYNRRTRQDEPALFVALTFERREVLDSSNIKPMNLIGVDRGENIPAVIALTDPEGCPLSRFKDSLGNPTHILRIGESYKEKQRTIQAKKEVEQRRAGGYSRKYASKAKNLANDMVRNTARDLLYYAVTQDAMLIFENLSRGFGRQGKRTFMAERQYTRMEDWLTAKLAYEGLSKTYLSKTLAQYTSKTCSNCGFTITSADYDRVLEKLKKTATGWMTTINGKELKVEGQITYYNRRKRQNVVKDLSVELDRLSEESVNNDISSWTKGRSGEALSLLKKRFSHRPVQEKFVCLNCGFETHADEQAALNIARSWLFLRSQEYKKYQTNKTTGNTDKRAFVETWQSFYRKKLKEVWKPAV

SEQ ID NO: 95 - protein, 977 aa, Artificial Sequence
  CasX Variant
MQEIKRINKIRRRLVKDSNTKKAGKTGPMKTLLVRVMTPDLRERLENLRKKPENIPQPISNTSRANLNKLLTDYTEMKKAILHVYWEEFQKDPVGLMSRVAQPAPKNIDQRKLIPVKDGNERLTSSGFACSQCCQPLYVYKLEQVNDKGKPHTNYFGRCNVSEHERLILLSPHKPEANDELVTYSLGKFGQRALDFYSIHVTRESNHPVKPLEQIGGNSCASGPVGKALSDACMGAVASFLTKYQDIILEHQKVIKKNEKRLANLKDIASANGLAFPKITLPPQPHTKEGIEAYNNVVAQIVIWVNLNLWQKLKIGRDEAKPLQRLKGFPSFPLVERQANEVDWWDMVCNVKKLINEKKEDGKVFWQNLAGYKRQEALRPYLSSPNDRKKGKKFARYQFGDLLLHLEKKHGEDWGKVYDEAWERIDKKVEGLSKHIKLEEERRSEDAQSKAALTDWLRAKASFVIEGLKEADKDEFCRCELKLQKWYGDLRGKPFAIEAENSILDISGFSKQYNCAFIWQKDGVKKLNLYLIINYFKGGKLRFKKIKPEAFEANRFYTVINKKSGEIVPMEVNFNFDDPNLIILPLAFGKRQGREFIWNDLLSLETGSLKLANGRVIEKTLYNRRTRQDEPALFVALTFERREVLDSSNIKPMNLIGVDRGENIPAVIALTDPEGCPLSRFKDSLGNPTHILRIGESYKEKQRTIQAKKEVEQRRAGGYSRKYASKAKNLANDMVRNTARDLLYYAVTQDAMLIFENLSRGFGRQGKRTFMAERQYTRMEDWLTAKLAYEGLSKTYLSKTLAQYTSKTCSNCGFTITSADYDRVLEKLKKTATGWMTTINGKELKVEGQITYYNRRKRQNVVKDLSVELDRLSEESVNNDISSWTKGRSGEALSLLKKRFSHRPVQEKFVCLNCGFETHADEQAALNIARSWLFLRSQEYKKYQTNKTTGNTDKRAFVETWQSFYRKKLKEVWKPAV

SEQ ID NO: 96 - protein, 977 aa, Artificial Sequence
  CasX Variant
MQEIKRINKIRRRLVKDSNTKKAGKTGPMKTLLVRVMTPDLRERLENLRKKPENIPQPISNTSRANLNKLLTDYTEMKKAILHVYWEEFQKDPVGLMSRVAQPAPKNIDQRKLIPVKDGNERLTSSGFACSQCCQPLYVYKLEQVNDKGKPHTNYFGRCNVSEHERLILLSPHKPEANDELVTYSLGKFGQRALDFYSIHVTRESNHPVKPLEQIGGNSCASGPVGKALSDACMGAVASFLTKYQDIILEHQKVIKKNEKRLANLKDIASANGLAFPKITLPPQPHTKEGIEAYNNVVAQIVIWVNLNLWQKLKIGRDEAKPLQRLKGFPSFPLVERQANEVDWWDMVCNVKKLINEKKEDGKVFWQNLAGYKRQEALRPYLSSPEDRKKGKKFARYQFGDLLKHLEKKHGEDWGKVYDEAWERIDKKVEGLSKHIKLEEERRSEDAQSKAALTDWLRAKASFVIEGLKEADKDEFCRCELKLQKWYGDLRGKPFAIEAENSILDISGFSKQYNCAFIWQKDGVKKLNLYLIINYFKGGKLRFKKIKPEAFEANRFYTVINKKSGEIVPMEVNFNFDDPNLIILPLAFGKRQGREFIWNDLLSLETGSLKLANGRVIEKTLYNRRTRQDEPALFVALTFERREVLDSSNIKPMNLIGVDRGENIPAVIALTDPEGCPLSRFKDSLGNPTHILRIGESYKEKQRTIQAKKEVEQRRAGGYSRKYASKAKNLANDMVRNTARDLLYYAVTQDAMLIFENLSRGFGRQGKRTFMAERQYTRMEDWLTAKLAYEGLSKTYLSKTLAQYTSKTCSNCGFTITSADYDRVLEKLKKTATGWMTTINGKELKVEGQITYYNRRKRQNVVKDLSVELDRLSEESVNNDISSWTKGRSGEALSLLKKRFSHRPVQEKFVCLNCGFETHADEQAALNIARSWLFLRSQEYKKYQTNKTTGNTDKRAFVETWQSFYRKKLKEVWKPAV

SEQ ID NO: 97 - protein, 977 aa, Artificial Sequence
  CasX Variant
MQEIKRINKIRRRLVKDSNTKKAGKTGPMKTLLVRVMTPDLRERLENLRKKPENIPQPISNTSRANLNKLLTDYTEMKKAILHVYWEEFQKDPVGLMSRVAQPAPKNIDQRKLIPVKDGNERLTSSGFACSQCCQPLYVYKLEQVNDKGKPHTNYFGRCNVSEHERLILLSPHKPEANDELVTYSLGKFGQRALDFYSIHVTRESNHPVKPLEQIGGNSCASGPVGKALSDACMGAVASFLTKYQDIILEHKKVIKKNEKRLANLKDIASANGLAFPKITLPPQPHTKEGIEAYNNVVAQIVIWVNLNLWQKLKIGRDEAKPLQRLKGFPSFPLVERQANEVDWWDMVCNVKKLINEKKEDGKVFWQNLAGYKRQEALRPYLSSPEDRKKGKKFARYQFGDLLLHLEKKHGEDWGKVYDEAWERIDKKVEGLSKHIKLEEERRSEDAQSKAALTDWLRAKASFVIEGLKEADKDEFCRCELKLQKWYGDLRGKPFAIEAENSILDISGFSKQYNCAFIWQKDGVKKLNLYLIINYFKGGKLRFKKIKPEAFEANRFYTVINKKSGEIVPMEVNFNFDDPNLIILPLAFGKRQGREFIWNDLLSLETGSLKLANGRVIEKPLYNRRTRQDEPALFVALTFERREVLDSSNIKPMNLIGIDRGENIPAVIALTDPEGCPLSRFKDSLGNPTHILRIGESYKEKQRTIQAKKEVEQRRAGGYSRKYASKAKNLADDMVRNTARDLLYYAVTQDAMLIFENLSRGFGRQGKRTFMAERQYTRMEDWLTAKLAYEGLSKTYLSKTLAQYTSKTCSNCGFTITSADYDRVLEKLKKTATGWMTTINGKELKVEGQITYYNRRKRQNVVKDLSVELDRLSEESVNNDISSWTKGRSGEALSLLKKRFSHRPVQEKFVCLNCGFETHADEQAALNIARSWLFLRSQEYKKYQTNKTTGNTDKRAFVETWQSFYRKKLKEVWKPAV

SEQ ID NO: 98 - protein, 977 aa, Artificial Sequence
  CasX Variant
MQEIKRINKIRRRLVKDSNTKKAGKTGPMKTLLVRVMTPDLRERLENLRKKPENIPQPISNTSRANLNKLLTDYTEMKKAILHVYWEEFQKDPVGLMSRVAQPAPKNIDQRKLIPVKDGNERLTSSGFACSQCCQPLYVYKLEQVNDKGKPHTNYFGRCNVSEHERLILLSPHKPEANDELVTYSLGKFGQRALDFYSIHVTRESNHPVKPLEQIGGNSCASGPVGKALSDACMGAVASFLTKYQDIILEHKKVIKKNEKRLANLKDIASANGLAFPKITLPPQPHTKEGIEAYNNVVAQIVIWVNLNLWQKLKIGRDEAKPLQRLKGFPSFPLVERQANEVDWWDMVCNVKKLINEKKEDGKVFWQNLAGYKRQEALRPYLSSPEDRKKGKKFARYQFGDLLLHLEKKHGEDWGKVYDEAWERIDKKVEGLSKHIKLEEERRSEDAQSKAALTDWLRAKASFVIEGLKEADKDEFCRCELKLQKWYGDLRGKPFAIEAENSILDISGFSKQYNCAFIWQKDGVKKLNLYLIINYFKGGKLRFKKIKPEAFEANRFYTVINKKSGEIVPMEVNFNFDDPNLIILPLAFGKRQGREFIWNDLLSLETGSLKLANGRVIEKPLYNRRTRQDEPALFVALTFERREVLDSSNIKPMNLIGVDRGENIPAVIALTDPEGCPLSRFKDSLGNPTHILRIGESYKEKQRTIQAKKEVEQRRAGGYSRKYASKAKNLADDMVRNTARDLLYYAVTQDAMLIFENLSRGFGRQGKRTFMAERQYTRMEDWLTAKLAYEGLSKTYLSKTLAQYTSKTCSNCGFTITSADYDRVLEKLKKTATGWMTTINGKELKVEGQITYYNRRKRQNVVKDLSVELDRLSEESVNNDISSWTKGRSGEALSLLKKRFSHRPVQEKFVCLNCGFETHADEQAALNIARSWLFLRSQEYKKYQTNKTTGNTDKRAFVETWQSFYRKKLKEVWKPAV

SEQ ID NO: 99 - protein, 977 aa, Artificial Sequence
  CasX Variant
MQEIKRINKIRRRLVKDSNTKKAGKTGPMKTLLVRVMTPDLRERLENLRKKPENIPQPISNTSRANLNKLLTDYTEMKKAILHVYWEEFQKDPVGLMSRVAQPAPKNIDQRKLIPVKDGNERLTSSGFACSQCCQPLYVYKLEQVNDKGKPHTNYFGRCNVSEHERLILLSPHKPEANDELVTYSLGKFGQRALDFYSIHVTRESNHPVKPLEQIGGNSCASGPVGKALSDACMGAVASFLTKYQDIILEHKKVIKKNEKRLANLKDIASANGLAFPKITLPPQPHTKEGIEAYNNVVAQIVIWVNLNLWQKLKIGRDEAKPLQRLKGFPSFPLVERQANEVDWWDMVCNVKKLINEKKEDGKVFWQNLAGYKRQEALRPYLSSPNDRKKGKKFARYQFGDLLLHLEKKHGEDWGKVYDEAWERIDKKVEGLSKHIKLEEERRSEDAQSKAALTDWLRAKASFVIEGLKEADKDEFCRCELKLQKWYGDLRGKPFAIEAENSILDISGFSKQYNCAFIWQKDGVKKLNLYLIINYFKGGKLRFKKIKPEAFEANRFYTVINKKSGEIVPMEVNFNFDDPNLIILPLAFGKRQGREFIWNDLLSLETGSLKLANGRVIEKPLYNRRTRQDEPALFVALTFERREVLDSSNIKPMNLIGVDRGENIPAVIALTDPEGCPLSRFKDSLGNPTHILRIGESYKEKQRTIQAKKEVEQRRAGGYSRKYASKAKNLADDMVRNTARDLLYYAVTQDAMLIFENLSRGFGRQGKRTFMAERQYTRMEDWLTAKLAYEGLSKTYLSKTLAQYTSKTCSNCGFTITSADYDRVLEKLKKTATGWMTTINGKELKVEGQITYYNRRKRQNVVKDLSVELDRLSEESVNNDISSWTKGRSGEALSLLKKRFSHRPVQEKFVCLNCGFETHADEQAALNIARSWLFLRSQEYKKYQTNKTTGNTDKRAFVETWQSFYRKKLKEVWKPAV

SEQ ID NO: 100 - protein, 531 aa, Homo sapiens
MDGIVPDIAVGTKRGSDELFSTCVTNGPFIMSSNSASAANGNDSKKFKGDSRSAGVPSRVIHIRKLPIDVTEGEVISLGLPFGKVTNLLMLKGKNQAFIEMNTEEAANTMVNYYTSVTPVLRGQPIYIQFSNHKELKTDSSPNQARAQAALQAVNSVQSGNLALAASAAAVDAGMAMAGQSPVLRIIVENLFYPVTLDVLHQIFSKFGTVLKIITFTKNNQFQALLQYADPVSAQHAKLSLDGQNIYNACCTLRIDFSKLTSLNVKYNNDKSRDYTRPDLPSGDSQPSLDQTMAAAFGLSVPNVHGALAPLAIPSAAAAAAAAGRIAIPGLAGAGNSVLLVSNLNPERVTPQSLFILFGVYGDVQRVKILFNKKENALVQMADGNQAQLAMSHLNGHKLHGKPIRITLSKHQNVQLPREGQEDQGLTKDYGNSPLHRFKKPGSKNFQNIFPPSATLHLSNIPPSVSEEDLKVLFSSNGGVVKGFKFFQKDRKMALIQMGSVEEAVQALIDLHNHDLGENHHLRVSFSKSTI

SEQ ID NO: 101 - protein, 977 aa, Artificial Sequence
  CasX Variant
MQEIKRINKIRRRLVKDSNTKKAGKTGPMKTLLVRVMTPDLRERLENLRKKPENIPQPISNTSRANLNKLLTDYTEMKKAILHVYWEEFQKDPVGLMSRVAQPAPKNIDQRKLIPVKDGNERLTSSGFACSQCCQPLYVYKLEQVNDKGKPHTNYFGRCNVSEHERLILLSPHKPEANDELVTYSLGKFGQRALDFYSIHVTRESNHPVKPLEQIGGNSCASGPVGKALSDACMGAVASFLTKYQDIILEHKKVIKKNEKRLANLKDIASANGLAFPKITLPPQPHTKEGIEAYNNVVAQIVIWVNLNLWQKLKIGRDEAKPLQRLKGFPSFPLVERQANEVDWWDMVCNVKKLINEKKEDGKVFWQNLAGYKRQEALRPYLSSPEDRKKGKKFARYQLGDLLLHLEKKHGEDWGKVYDEAWERIDKKVEGLSKHIKLEEERRSEDAQSKAALTDWLRAKASFVIEGLKEADKDEFCRCELKLQKWYGDLRGKPFAIEAENSILDISGFSKQYNCAFIWQKDGVKKLNLYLIINYFKGGKLRFKKIKPEAFEANRFYTVINKKSGEIVPMEVNFNFDDPNLIILPLAFGKRQGREFIWNDLLSLETGSLKLANGRVIEKPLYNRRTRQDEPALFVALTFERREVLDSSNIKPMNLIGVDRGENIPAVIALTDPEGCPLSRFKDSLGNPTHILRIGESYKEKQRTIQAKKEVEQRRAGGYSRKYASKAKNLADDMVRNTARDLLYYAVTQDAMLIFENLSRGFGRQGKRTFMAERQYTRMEDWLTAKLAYEGLSKTYLSKTLAQYTSKTCSNCGFTITSADYDRVLEKLKKTATGWMTTINGKELKVEGQITYYNRRKRQNVVKDLSVELDRLSEESVNNDISSWTKGRSGEALSLLKKRFSHRPVQEKFVCLNCGFETHADEQAALNIARSWLFLRSQEYKKYQTNKTTGNTDKRAFVETWQSFYRKKLKEVWKPAV

SEQ ID NO: 102 - protein, 977 aa, Artificial Sequence
  CasX Variant
MQEIKRINKIRRRLVKDSNTKKAGKTGPMKTLLVRVMTPDLRERLENLRKKPENIPQPISNTSRANLNKLLTDYTEMKKAILHVYWEEFQKDPVGLMSRVAQPAPKNIDQRKLIPVKDGNERLTSSGFACSQCCQPLYVYKLEQVNDKGKPHTNYFGRCNVSEHERLILLSPHKPEANDELVTYSLGKFGQRALDFYSIHVTRESNHPVKPLEQIGGNSCASGPVGKALSDACMGAVASFLTKYQDIILEHKKVIKKNEKRLANLKDIASANGLAFPKITLPPQPHTKEGIEAYNNVVAQIVIWVNLNLWQKLKIGRDEAKPLQRLKGFPSFPLVERQANEVDWWDMVCNVKKLINEKKEDGKVFWQNLAGYKRQEALRPYLSSPEDRKKGKKFARYQFGDLLKHLEKKHGEDWGKVYDEAWERIDKKVEGLSKHIKLEEERRSEDAQSKAALTDWLRAKASFVIEGLKEADKDEFCRCELKLQKWYGDLRGKPFAIEAENSILDISGFSKQYNCAFIWQKDGVKKLNLYLIINYFKGGKLRFKKIKPEAFEANRFYTVINKKSGEIVPMEVNFNFDDPNLIILPLAFGKRQGREFIWNDLLSLETGSLKLANGRVIEKPLYNRRTRQDEPALFVALTFERREVLDSSNIKPMNLIGVDRGENIPAVIALTDPEGCPLSRFKDSLGNPTHILRIGESYKEKQRTIQAKKEVEQRRAGGYSRKYASKAKNLADDMVRNTARDLLYYAVTQDAMLIFENLSRGFGRQGKRTFMAERQYTRMEDWLTAKLAYEGLSKTYLSKTLAQYTSKTCSNCGFTITSADYDRVLEKLKKTATGWMTTINGKELKVEGQITYYNRRKRQNVVKDLSVELDRLSEESVNNDISSWTKGRSGEALSLLKKRFSHRPVQEKFVCLNCGFETHADEQAALNIARSWLFLRSQEYKKYQTNKTTGNTDKRAFVETWQSFYRKKLKEVWKPAV

SEQ ID NO: 103 - protein, 977 aa, Artificial Sequence
  CasX Variant
MQEIKRINKIRRRLVKDSNTKKAGKTGPMKTLLVRVMTPDLRERLENLRKKPENIPQPISNTSRANLNKLLTDYTEMKKAILHVYWEEFQKDPVGLMSRVAQPAPKNIDQRKLIPVKDGNERLTSSGFACSQCCQPLYVYKLEQVNDKGKPHTNYFGRCNVSEHERLILLSPHKPEANDELVTYSLGKFGQRALDFYSIHVTRESNHPVKPLEQIGGNSCASGPVGKALSDACMGAVASFLTKYQDIILEHQKVIKKNEKRLANLKDIASANGLAFPKITLPPQPHTKEGIEAYNNVVAQIVIWVNLNLWQKLKIGRDEAKPLQRLKGFPSFPLVERQANEVDWWDMVCNVKKLINEKKEDGKVFWQNLAGYKRQEALRPYLSSENDRKKGKKFARYQFGDLLLHLEKKHGEDWGKVYDEAWERIDKKVEGLSKHIKLEEERRSEDAQSKAALTDWLRAKASFVIEGLKEADKDEFCRCELKLQKWYGDLRGKPFAIEAENSILDISGFSKQYNCAFIWQKDGVKKLNLYLIINYFKGGKLRFKKIKPEAFEANRFYTVINKKSGEIVPMEVNFNFDDPNLIILPLAFGKRQGREFIWNDLLSLETGSLKLANGRVIEKPLYNRRTRQDEPALFVALTFERREVLDSSNIKPMNLIGVDRGENIPAVIALTDPEGCPLSRFKDSLGNPTHILRIGESYKEKQRTIQAKKEVEQRRAGGYSRKYASKAKNLADDMVRNTARDLLYYAVTQDAMLIFENLSRGFGRQGKRTFMAERQYTRMEDWLTAKLAYEGLSKTYLSKTLAQYTSKTCSNCGFTITSADYDRVLEKLKKTATGWMTTINGKELKVEGQITYYNRRKRQNVVKDLSVELDRLSEESVNNDISSWTKGRSGEALSLLKKRFSHRPVQEKFVCLNCGFETHADEQAALNIARSWLFLRSQEYKKYQTNKTTGNTDKRAFVETWQSFYRKKLKEVWKPAV

SEQ ID NO: 104 - protein, 977 aa, Artificial Sequence
  CasX Variant
MQEIKRINKIRRRLVKDSNTKKAGKTGPMKTLLVRVMTPDLRERLENLRKKPENIPQPISNTSRANLNKLLTDYTEMKKAILHVYWEEFQKDPVGLMSRVAQPAPKNIDQRKLIPVKDGNERLTSSGFACSQCCQPLYVYKLEQVNDKGKPHTNYFGRCNVSEHERLILLSPHKPEANDELVTYSLGKFGQRALDFYSIHVTRESNHPVKPLEQIGGNSCASGPVGKALSDACMGAVASFLTKYQDIILEHKKVIKKNEKRLANLKDIASANGLAFPKITLPPQPHTKEGIEAYNNVVAQIVIWVNLNLWQKLKIGRDEAKPLQRLKGFPSFPLVERQANEVDWWDMVCNVKKLINEKKEDGKVFWQNLAGYKRQEALRPYLSSPEDRKKGKKFARYQFGDLLLHLEKKHGEDWGKVYDEAWERIDKKVEGLSKHIKLEEERRSEDAQSKAALTDWLRAKASFVIEGLKEADKDEFCRCELKLQKWYGDLRGKPFAIEAENSILDISGFSKQYNCAFIWQKDGVKKLNLYLIINYFKGGKLRFKKIKPEAFEANRFYTVINKKSGEIVPMEVNFNFDDPNLIILPLAFGKRQGREFIWNDLLSLETGSLKLANGRVIEKPLYNRRTRQDEPALFVALTFERREVLDSSNIKPMNLIGIDRGENIPAVIALTDPEGCPLSRFKDSLGNPTHILRIGESYKEKQRTIQAKKEVEQRRAGGYSRKYASKAKNLADDMVRNTARDLLYYAVTQDAMLIFENLSRGFGRQGKRTFMAERQYTRMEDWLTAKLAYEGLSKTYLSKTLAQYTSKTCSNCGFTITSADYDRVLEKLKKTATGWMTTINGKELKVEGQITYYNRYKRQNVVKDLSVELDRLSEESVNNDISSWTKGRSGEALSLLKKRFSHRPVQEKFVCLNCGFETHADEQAALNIARSWLFLRSQEYKKYQTNKTTGNTDKRAFVETWQSFYRKKLKEVWKPAV

SEQ ID NO: 105 - protein, 976 aa, Artificial Sequence
  CasX Variant
QEIKRINKIRRRLVKDSNTKKAGKTGPMKTLLVRVMTPDLRERLENLRKKPENIPQPISNTSRANLNKLLTDYTEMKKAILHVYWEEFQKDPVGLMSRVAQPAPKNIDQRKLIPVKDGNERLTSSGFACSQCCQPLYVYKLEQVNDKGKPHTNYFGRCNVSEHERLILLSPHKPEANDELVTYSLGKFGQRALDFYSIHVTRESNHPVKPLEQIGGNSCASGPVGKALSDACMGAVASFLTKYQDIILEHQKVIKKNEKRLANLKDIASANGLAFPKITLPPQPHTKEGIEAYNNVVAQIVIWVNLNLWQKLKIGRDEAKPLQRLKGFPSFPLVERQANEVDWWDMVCNVKKLINEKKEDGKVFWQNLAGYKRQEALRPYLSSEEDRKKGKKFARYQFGDLLLHLEKKHGEDWGKVYDEAWERIDKKVEGLSKHIKLEEERRSEDAQSKAALTDWLRAKASFVIEGLKEADKDEFCRCELKLQKWYGDLRGKPFAIEAENSILDISGFSKQYNCAFIWQKDGVKKLNLYLIINYFKGGKLRFKKIKPEAFEANRFYTVINKKSGEIVPMEVNFNFDDPNLIILPLAFGKRQGREFIWNDLLSLETGSLKLANGRVIEKTLYNRRTRQDEPALFVALTFERREVLDSSNIKPMNLIGIDRGENIPAVIALTDPEGCPLSRFKDSLGNPTHILRIGESYKEKQRTIQAKKEVEQRRAGGYSRKYASKAKNLADDMVRNTARDLLYYAVTQDAMLIFENLSRGFGRQGKRTFMAERQYTRMEDWLTAKLAYEGLSKTYLSKTLAQYTSKTCSNCGFTITSADYDRVLEKLKKTATGWMTTINGKELKVEGQITYYNRYKRQNVVKDLSVELDRLSEESVNNDISSWTKGRSGEALSLLKKRFSHRPVQEKFVCLNCGFETHADEQAALNIARSWLFLRSQEYKKYQTNKTTGNTDKRAFVETWQSFYRKKLKEVWKPAV

SEQ ID NO: 106 - protein, 977 aa, Artificial Sequence; identical to SEQ ID NO: 59
  CasX Variant

SEQ ID NO: 107 - protein, 977 aa, Artificial Sequence; identical to SEQ ID NO: 59
  CasX Variant

SEQ ID NO: 108 - protein, 977 aa, Artificial Sequence; identical to SEQ ID NO: 59
  CasX Variant

SEQ ID NO: 109 - protein, 977 aa, Artificial Sequence; identical to SEQ ID NO: 59
  CasX Variant

SEQ ID NO: 110 - protein, 977 aa, Artificial Sequence; identical to SEQ ID NO: 59
  CasX Variant

SEQ ID NO: 111 - protein, 978 aa, Artificial Sequence
  CasX Variant
MQEIKRINKIRRRLVKDSNTKKAGKTGPMKTLLVRVMTPDLRERLENLRKKPENIPQPISNTSRANLNKLLTDYTEMKKAILHVYWEEFQKDPVGLMSRVAQPAPKNIDQRKLIPVKDGNERLTMSSGFACSQCCQPLYVYKLEQVNDKGKPHTNYFGRCNVSEHERLILLSPHKPEANDELVTYSLGKFGQRALDFYSIHVTRESNHPVKPLEQIGGNSCASGPVGKALSDACMGAVASFLTKYQDIILEHQKVIKKNEKRLANLKDIASANGLAFPKITLPPQPHTKEGIEAYNNVVAQIVIWVNLNLWQKLKIGRDEAKPLQRLKGFPSFPLVERQANEVDWWDMVCNVKKLINEKKEDGKVFWQNLAGYKRQEALRPYLSSEEDRKKGKKFARYQFGDLLLHLEKKHGEDWGKVYDEAWERIDKKVEGLSKHIKLEEERRSEDAQSKAALTDWLRAKASFVIEGLKEADKDEFCRCELKLQKWYGDLRGKPFAIEAENSILDISGFSKQYNCAFIWQKDGVKKLNLYLIINYFKGGKLRFKKIKPEAFEANRFYTVINKKSGEIVPMEVNFNFDDPNLIILPLAFGKRQGREFIWNDLLSLETGSLKLANGRVIEKTLYNRRTRQDEPALFVALTFERREVLDSSNIKPMNLIGIDRGENIPAVIALTDPEGCPLSRFKDSLGNPTHILRIGESYKEKQRTIQAKKEVEQRRAGGYSRKYASKAKNLADDMVRNTARDLLYYAVTQDAMLIFENLSRGFGRQGKRTFMAERQYTRMEDWLTAKLAYEGLSKTYLSKTLAQYTSKTCSNCGFTITSADYDRVLEKLKKTATGWMTTINGKELKVEGQITYYNRYKRQNVVKDLSVELDRLSEESVNNDISSWTKGRSGEALSLLKKRFSHRPVQEKFVCLNCGFETHADEQAALNIARSWLFLRSQEYKKYQTNKTTGNTDKRAFVETWQSFYRKKLKEVWKPAV

SEQ ID NO: 112 - protein, 977 aa, Artificial Sequence; identical to SEQ ID NO: 59
  CasX Variant

SEQ ID NO: 113 - protein, 977 aa, Artificial Sequence; identical to SEQ ID NO: 59
  CasX Variant

SEQ ID NO: 114 - protein, 977 aa, Artificial Sequence; identical to SEQ ID NO: 59
  CasX Variant

SEQ ID NO: 115 - protein, 977 aa, Artificial Sequence; identical to SEQ ID NO: 59
  CasX Variant

SEQ ID NO: 116 - protein, 977 aa, Artificial Sequence; identical to SEQ ID NO: 59
  CasX Variant

SEQ ID NO: 117 - protein, 977 aa, Artificial Sequence; identical to SEQ ID NO: 59
  CasX Variant

SEQ ID NO: 118 - protein, 977 aa, Artificial Sequence
  CasX Variant
QEIKRINKIRRRLVKDSNTKKAGKTGPMKTLLVRVMTPDLRERLENLRKKPENIPQPISNTSRANLNKLLTDYTEMKKAILHVYWEEFQKDPVGLMSRVAQPASKKIDQNKLKPEMDEKGNLTTAGFACSQCGQPLFVYKLEQVSEKGKAYTNYFGRCNVAEHEKLILLAQLKPEKDSDEAVTYSLGKFGQRALDFYSIHVTRESNHPVKPLEQIGGNSCASGPVGKALSDACMGAVASFLTKYQDIILEHQKVIKKNEKRLANLKDIASANGLAFPKITLPPQPHTKEGIEAYNNVVAQIVIWVNLNLWQKLKIGRDEAKPLQRLKGFPSFPLVERQANEVDWWDMVCNVKKLINEKKEDGKVFWQNLAGYKRQEALRPYLSSEEDRKKGKKFARYQFGDLLLHLEKKHGEDWGKVYDEAWERIDKKVEGLSKHIKLEEERRSEDAQSKAALTDWLRAKASFVIEGLKEADKDEFCRCELKLQKWYGDLRGKPFAIEAENSILDISGFSKQYNCAFIWQKDGVKKLNLYLIINYFKGGKLRFKKIKPEAFEANRFYTVINKKSGEIVPMEVNFNFDDPNLIILPLAFGKRQGREFIWNDLLSLETGSLKLANGRVIEKTLYNRRTRQDEPALFVALTFERREVLDSSNIKPMNLIGIDRGENIPAVIALTDPEGCPLSRFKDSLGNPTHILRIGESYKEKQRTIQAKKEVEQRRAGGYSRKYASKAKNLADDMVRNTARDLLYYAVTQDAMLIFENLSRGFGRQGKRTFMAERQYTRMEDWLTAKLAYEGLSKTYLSKTLAQYTSKTCSNCGFTITSADYDRVLEKLKKTATGWMTTINGKELKVEGQITYYNRYKRQNVVKDLSVELDRLSEESVNNDISSWTKGRSGEALSLLKKRFSHRPVQEKFVCLNCGFETHADEQAALNIARSWLFLRSQEYKKYQTNKTTGNTDKRAFVETWQSFYRKKLKEVWKPAV

SEQ ID NO: 119 - protein, 976 aa, Artificial Sequence
  CasX Variant
QEIKRINKIRRRLVKDSNTKKAGKTGPMKTLLVRVMTPDLRERLENLRKKPENIPQPISNTSRANLNKLLTDYTEMKKAILHVYWEEFQKDPVGLMSRVAQPAPKNIDQRKLIPVKDGNERLTSSGFACSQCCQPLYVYKLEQVNDKGKPHTNYFGRCNVSEHERLILLSPHKPEANDELVTYSLGKFGQRALDFYSIHVTKESTHPVKPLAQIAGNRYASGPVGKALSDACMGTIASFLSKYQDIIIEHQKVVKGNQKRLESLRELAGKENLEYPSVTLPPQPHTKEGVDAYNEVIARVRMWVNLNLWQKLKLSRDDAKPLLRLKGFPSFPLVERQANEVDWWDMVCNVKKLINEKKEDGKVFWQNLAGYKRQEALRPYLSSEEDRKKGKKFARYQFGDLLLHLEKKHGEDWGKVYDEAWERIDKKVEGLSKHIKLEEERRSEDAQSKAALTDWLRAKASFVIEGLKEADKDEFCRCELKLQKWYGDLRGKPFAIEAENSILDISGFSKQYNCAFIWQKDGVKKLNLYLIINYFKGGKLRFKKIKPEAFEANRFYTVINKKSGEIVPMEVNFNFDDPNLIILPLAFGKRQGREFIWNDLLSLETGSLKLANGRVIEKTLYNRRTRQDEPALFVALTFERREVLDSSNIKPMNLIGIDRGENIPAVIALTDPEGCPLSRFKDSLGNPTHILRIGESYKEKQRTIQAKKEVEQRRAGGYSRKYASKAKNLADDMVRNTARDLLYYAVTQDAMLIFENLSRGFGRQGKRTFMAERQYTRMEDWLTAKLAYEGLSKTYLSKTLAQYTSKTCSNCGFTITSADYDRVLEKLKKTATGWMTTINGKELKVEGQITYYNRYKRQNVVKDLSVELDRLSEESVNNDISSWTKGRSGEALSLLKKRFSHRPVQEKFVCLNCGFETHADEQAALNIARSWLFLRSQEYKKYQTNKTTGNTDKRAFVETWQSFYRKKLKEVWKPAV

SEQ ID NO: 120 - protein, 976 aa, Artificial Sequence
  CasX Variant
QEIKRINKIRRRLVKDSNTKKAGKTGPMKTLLVRVMTPDLRERLENLRKKPENIPQPISNTSRANLNKLLTDYTEMKKAILHVYWEEFQKDPVGLMSRVAQPAPKNIDQRKLIPVKDGNERLTSSGFACSQCCQPLYVYKLEQVNDKGKPHTNYFGRCNVSEHERLILLSPHKPEANDELVTYSLGKFGQRALDFYSIHVTKESTHPVKPLAQIAGNRYASGPVGKALSDACMGTIASFLSKYQDIIIEHQKVVKGNQKRLESLRELAGKENLEYPSVTLPPQPHTKEGVDAYNEVIARVRMWVNLNLWQKLKLSRDDAKPLLRLKGFPSFPLVERQANEVDWWDMVCNVKKLINEKKEDGKVFWQNLAGYKRQEALRPYLSSEEDRKKGKKFARYQLGDLLLHLEKKHGEDWGKVYDEAWERIDKKVEGLSKHIKLEEERRSEDAQSKAALTDWLRAKASFVIEGLKEADKDEFCRCELKLQKWYGDLRGKPFAIEAENSILDISGFSKQYNCAFIWQKDGVKKLNLYLIINYFKGGKLRFKKIKPEAFEANRFYTVINKKSGEIVPMEVNFNFDDPNLIILPLAFGKRQGREFIWNDLLSLETGSLKLANGRVIEKTLYNRRTRQDEPALFVALTFERREVLDSSNIKPMNLIGVDRGENIPAVIALTDPEGCPLSRFKDSLGNPTHILRIGESYKEKQRTIQAKKEVEQRRAGGYSRKYASKAKNLADDMVRNTARDLLYYAVTQDAMLIFENLSRGFGRQGKRTFMAERQYTRMEDWLTAKLAYEGLSKTYLSKTLAQYTSKTCSNCGFTITSADYDRVLEKLKKTATGWMTTINGKELKVEGQITYYNRRKRQNVVKDLSVELDRLSEESVNNDISSWTKGRSGEALSLLKKRFSHRPVQEKFVCLNCGFETHADEQAALNIARSWLFLRSQEYKKYQTNKTTGNTDKRAFVETWQSFYRKKLKEVWKPAV

SEQ ID NO: 121 - protein, 976 aa, Artificial Sequence
  CasX Variant
QEIKRINKIRRRLVKDSNTKKAGKTGPMKTLLVRVMTPDLRERLENLRKKPENIPQPISNTSRANLNKLLTDYTEMKKAILHVYWEEFQKDPVGLMSRVAQPAPKNIDQRKLIPVKDGNERLTSSGFACSQCCQPLYVYKLEQVNDKGKPHTNYFGRCNVSEHERLILLSPHKPEANDELVTYSLGKFGQRALDFYSIHVTKESTHPVKPLAQIAGNRYASGPVGKALSDACMGTIASFLSKYQDIIIEHQKVVKGNQKRLESLRELAGKENLEYPSVTLPPQPHTKEGVDAYNEVIARVRMWVNLNLWQKLKLSRDDAKPLLRLKGFPSFPLVERQANEVDWWDMVCNVKKLINEKKEDGKVFWQNLAGYKRQEALRPYLSSEEDRKKGKKFARYQLGDLLKHLEKKHGEDWGKVYDEAWERIDKKVEGLSKHIKLEEERRSEDAQSKAALTDWLRAKASFVIEGLKEADKDEFCRCELKLQKWYGDLRGKPFAIEAENSILDISGFSKQYNCAFIWQKDGVKKLNLYLIINYFKGGKLRFKKIKPEAFEANRFYTVINKKSGEIVPMEVNFNFDDPNLIILPLAFGKRQGREFIWNDLLSLETGSLKLANGRVIEKTLYNRRTRQDEPALFVALTFERREVLDSSNIKPMNLIGVDRGENIPAVIALTDPEGCPLSRFKDSLGNPTHILRIGESYKEKQRTIQAKKEVEQRRAGGYSRKYASKAKNLADDMVRNTARDLLYYAVTQDAMLIFENLSRGFGRQGKRTFMAERQYTRMEDWLTAKLAYEGLSKTYLSKTLAQYTSKTCSNCGFTITSADYDRVLEKLKKTATGWMTTINGKELKVEGQITYYNRRKRQNVVKDLSVELDRLSEESVNNDISSWTKGRSGEALSLLKKRFSHRPVQEKFVCLNCGFETHADEQAALNIARSWLFLRSQEYKKYQTNKTTGNTDKRAFVETWQSFYRKKLKEVWKPAV

SEQ ID NO: 122 - protein, 976 aa, Artificial Sequence
  CasX Variant
QEIKRINKIRRRLVKDSNTKKAGKTGPMKTLLVRVMTPDLRERLENLRKKPENIPQPISNTSRANLNKLLTDYTEMKKAILHVYWEEFQKDPVGLMSRVAQPAPKNIDQRKLIPVKDGNERLTSSGFACSQCCQPLYVYKLEQVNDKGKPHTNYFGRCNVSEHERLILLSPHKPEANDELVTYSLGKFGQRALDFYSIHVTKESTHPVKPLAQIAGNRYASGPVGKALSDACMGTIASFLSKYQDIIIEHQKVVKGNQKRLESLRELAGKENLEYPSVTLPPQPHTKEGVDAYNEVIARVRMWVNLNLWQKLKLSRDDAKPLLRLKGFPSFPLVERQANEVDWWDMVCNVKKLINEKKEDGKVFWQNLAGYKRQEALRPYLSSEEDRKKGKKFARYQLGDLLLHLEKKHGEDWGKVYDEAWERIDKKVEGLSKHIKLEEERRSEDAQSKAALTDWLRAKASFVIEGLKEADKDEFCRCELKLQKWYGDLRGKPFAIEAENSILDISGFSKQYNCAFIWQKDGVKKLNLYLIINYFKGGKLRFKKIKPEAFEANRFYTVINKKSGEIVPMEVNFNFDDPNLIILPLAFGKRQGREFIWNDLLSLETGSLKLANGRVIEKTLYNRRTRQDEPALFVALTFERREVLDSSNIKPMNLIGVDRGENIPAVIALTDPEGCPLSRFKDSLGNPTHILRIGESYKEKQRTIQAKKEVEQRRAGGYSRKYASKAKNLADDMVRNTARDLLYYAVTQDAMLIFENLSRGFGRQGKRTFMAERQYTRMEDWLTAKLAYEGLSKTYLSKTLAQYTSKTCSNCGFTITSADYDRVLEKLKKTATGWMTTINGKELKVEGQITYYNRYKRQNVVKDLSVELDRLSEESVNNDISSWTKGRSGEALSLLKKRFSHRPVQEKFVCLNCGFETHADEQAALNIARSWLFLRSQEYKKYQTNKTTGNTDKRAFVETWQSFYRKKLKEVWKPAV

SEQ ID NO: 123 - protein, 977 aa, Artificial Sequence
  CasX Variant
QEIKRINKIRRRLVKDSNTKKAGKTGPMKTLLVRVMTPDLRERLENLRKKPENIPQPISNTSRANLNKLLTDYTEMKKAILHVYWEEFQKDPVGLMSRVAQPASKKIDQNKLKPEMDEKGNLTTAGFACSQCGQPLFVYKLEQVSEKGKAYTNYFGRCNVAEHEKLILLAQLKPEKDSDEAVTYSLGKFGQRALDFYSIHVTKESTHPVKPLAQIAGNRYASGPVGKALSDACMGTIASFLSKYQDIIIEHQKVVKGNQKRLESLRELAGKENLEYPSVTLPPQPHTKEGVDAYNEVIARVRMWVNLNLWQKLKLSRDDAKPLLRLKGFPSFPLVERQANEVDWWDMVCNVKKLINEKKEDGKVFWQNLAGYKRQEALRPYLSSEEDRKKGKKFARYQFGDLLLHLEKKHGEDWGKVYDEAWERIDKKVEGLSKHIKLEEERRSEDAQSKAALTDWLRAKASFVIEGLKEADKDEFCRCELKLQKWYGDLRGKPFAIEAENSILDISGFSKQYNCAFIWQKDGVKKLNLYLIINYFKGGKLRFKKIKPEAFEANRFYTVINKKSGEIVPMEVNFNFDDPNLIILPLAFGKRQGREFIWNDLLSLETGSLKLANGRVIEKTLYNRRTRQDEPALFVALTFERREVLDSSNIKPMNLIGIDRGENIPAVIALTDPEGCPLSRFKDSLGNPTHILRIGESYKEKQRTIQAKKEVEQRRAGGYSRKYASKAKNLADDMVRNTARDLLYYAVTQDAMLIFENLSRGFGRQGKRTFMAERQYTRMEDWLTAKLAYEGLSKTYLSKTLAQYTSKTCSNCGFTITSADYDRVLEKLKKTATGWMTTINGKELKVEGQITYYNRYKRQNVVKDLSVELDRLSEESVNNDISSWTKGRSGEALSLLKKRFSHRPVQEKFVCLNCGFETHADEQAALNIARSWLFLRSQEYKKYQTNKTTGNTDKRAFVETWQSFYRKKLKEVWKPAV

SEQ ID NO: 124 - protein, 977 aa, Artificial Sequence
  CasX Variant
QEIKRINKIRRRLVKDSNTKKAGKTGPMKTLLVRVMTPDLRERLENLRKKPENIPQPISNTSRANLNKLLTDYTEMKKAILHVYWEEFQKDPVGLMSRVAQPASKKIDQNKLKPEMDEKGNLTTAGFACSQCGQPLFVYKLEQVSEKGKAYTNYFGRCNVAEHEKLILLAQLKPEKDSDEAVTYSLGKFGQRALDFYSIHVTKESTHPVKPLAQIAGNRYASGPVGKALSDACMGTIASFLSKYQDIIIEHQKVVKGNQKRLESLRELAGKENLEYPSVTLPPQPHTKEGVDAYNEVIARVRMWVNLNLWQKLKLSRDDAKPLLRLKGFPSFPLVERQANEVDWWDMVCNVKKLINEKKEDGKVFWQNLAGYKRQEALRPYLSSEEDRKKGKKFARYQLGDLLLHLEKKHGEDWGKVYDEAWERIDKKVEGLSKHIKLEEERRSEDAQSKAALTDWLRAKASFVIEGLKEADKDEFCRCELKLQKWYGDLRGKPFAIEAENSILDISGFSKQYNCAFIWQKDGVKKLNLYLIINYFKGGKLRFKKIKPEAFEANRFYTVINKKSGEIVPMEVNFNFDDPNLIILPLAFGKRQGREFIWNDLLSLETGSLKLANGRVIEKTLYNRRTRQDEPALFVALTFERREVLDSSNIKPMNLIGVDRGENIPAVIALTDPEGCPLSRFKDSLGNPTHILRIGESYKEKQRTIQAKKEVEQRRAGGYSRKYASKAKNLADDMVRNTARDLLYYAVTQDAMLIFENLSRGFGRQGKRTFMAERQYTRMEDWLTAKLAYEGLSKTYLSKTLAQYTSKTCSNCGFTITSADYDRVLEKLKKTATGWMTTINGKELKVEGQITYYNRRKRQNVVKDLSVELDRLSEESVNNDISSWTKGRSGEALSLLKKRFSHRPVQEKFVCLNCGFETHADEQAALNIARSWLFLRSQEYKKYQTNKTTGNTDKRAFVETWQSFYRKKLKEVWKPAV

SEQ ID NO: 125 - protein, 977 aa, Artificial Sequence
  CasX Variant
QEIKRINKIRRRLVKDSNTKKAGKTGPMKTLLVRVMTPDLRERLENLRKKPENIPQPISNTSRANLNKLLTDYTEMKKAILHVYWEEFQKDPVGLMSRVAQPASKKIDQNKLKPEMDEKGNLTTAGFACSQCGQPLFVYKLEQVSEKGKAYTNYFGRCNVAEHEKLILLAQLKPEKDSDEAVTYSLGKFGQRALDFYSIHVTKESTHPVKPLAQIAGNRYASGPVGKALSDACMGTIASFLSKYQDIIIEHQKVVKGNQKRLESLRELAGKENLEYPSVTLPPQPHTKEGVDAYNEVIARVRMWVNLNLWQKLKLSRDDAKPLLRLKGFPSFPLVERQANEVDWWDMVCNVKKLINEKKEDGKVFWQNLAGYKRQEALRPYLSSEEDRKKGKKFARYQLGDLLKHLEKKHGEDWGKVYDEAWERIDKKVEGLSKHIKLEEERRSEDAQSKAALTDWLRAKASFVIEGLKEADKDEFCRCELKLQKWYGDLRGKPFAIEAENSILDISGFSKQYNCAFIWQKDGVKKLNLYLIINYFKGGKLRFKKIKPEAFEANRFYTVINKKSGEIVPMEVNFNFDDPNLIILPLAFGKRQGREFIWNDLLSLETGSLKLANGRVIEKTLYNRRTRQDEPALFVALTFERREVLDSSNIKPMNLIGVDRGENIPAVIALTDPEGCPLSRFKDSLGNPTHILRIGESYKEKQRTIQAKKEVEQRRAGGYSRKYASKAKNLADDMVRNTARDLLYYAVTQDAMLIFENLSRGFGRQGKRTFMAERQYTRMEDWLTAKLAYEGLSKTYLSKTLAQYTSKTCSNCGFTITSADYDRVLEKLKKTATGWMTTINGKELKVEGQITYYNRRKRQNVVKDLSVELDRLSEESVNNDISSWTKGRSGEALSLLKKRFSHRPVQEKFVCLNCGFETHADEQAALNIARSWLFLRSQEYKKYQTNKTTGNTDKRAFVETWQSFYRKKLKEVWKPAV

SEQ ID NO: 126 - protein, 977 aa, Artificial Sequence
  CasX Variant
QEIKRINKIRRRLVKDSNTKKAGKTGPMKTLLVRVMTPDLRERLENLRKKPENIPQPISNTSRANLNKLLTDYTEMKKAILHVYWEEFQKDPVGLMSRVAQPASKKIDQNKLKPEMDEKGNLTTAGFACSQCGQPLFVYKLEQVSEKGKAYTNYFGRCNVAEHEKLILLAQLKPEKDSDEAVTYSLGKFGQRALDFYSIHVTKESTHPVKPLAQIAGNRYASGPVGKALSDACMGTIASFLSKYQDIIIEHQKVVKGNQKRLESLRELAGKENLEYPSVTLPPQPHTKEGVDAYNEVIARVRMWVNLNLWQKLKLSRDDAKPLLRLKGFPSFPLVERQANEVDWWDMVCNVKKLINEKKEDGKVFWQNLAGYKRQEALRPYLSSEEDRKKGKKFARYQLGDLLLHLEKKHGEDWGKVYDEAWERIDKKVEGLSKHIKLEEERRSEDAQSKAALTDWLRAKASFVIEGLKEADKDEFCRCELKLQKWYGDLRGKPFAIEAENSILDISGFSKQYNCAFIWQKDGVKKLNLYLIINYFKGGKLRFKKIKPEAFEANRFYTVINKKSGEIVPMEVNFNFDDPNLIILPLAFGKRQGREFIWNDLLSLETGSLKLANGRVIEKTLYNRRTRQDEPALFVALTFERREVLDSSNIKPMNLIGVDRGENIPAVIALTDPEGCPLSRFKDSLGNPTHILRIGESYKEKQRTIQAKKEVEQRRAGGYSRKYASKAKNLADDMVRNTARDLLYYAVTQDAMLIFENLSRGFGRQGKRTFMAERQYTRMEDWLTAKLAYEGLSKTYLSKTLAQYTSKTCSNCGFTITSADYDRVLEKLKKTATGWMTTINGKELKVEGQITYYNRYKRQNVVKDLSVELDRLSEESVNNDISSWTKGRSGEALSLLKKRFSHRPVQEKFVCLNCGFETHADEQAALNIARSWLFLRSQEYKKYQTNKTTGNTDKRAFVETWQSFYRKKLKEVWKPAV

SEQ ID NO: 127 - protein, 977 aa, Artificial Sequence
  CasX Variant
QEIKRINKIRRRLVKDSNTKKAGKTGPMKTLLVRVMTPDLRERLENLRKKPENIPQPISNTSRANLNKLLTDYTEMKKAILHVYWEEFQKDPVGLMSRVAQPASKKIDQNKLKPEMDEKGNLTTAGFACSQCGQPLFVYKLEQVSEKGKAYTNYFGRCNVAEHEKLILLAQLKPEKDSDEAVTYSLGKFGQRALDFYSIHVTRESNHPVKPLEQIGGNSCASGPVGKALSDACMGAVASFLTKYQDIILEHQKVIKKNEKRLANLKDIASANGLAFPKITLPPQPHTKEGIEAYNNVVAQIVIWVNLNLWQKLKIGRDEAKPLQRLKGFPSFPLVERQANEVDWWDMVCNVKKLINEKKEDGKVFWQNLAGYKRQEALRPYLSSEEDRKKGKKFARYQLGDLLLHLEKKHGEDWGKVYDEAWERIDKKVEGLSKHIKLEEERRSEDAQSKAALTDWLRAKASFVIEGLKEADKDEFCRCELKLQKWYGDLRGKPFAIEAENSILDISGFSKQYNCAFIWQKDGVKKLNLYLIINYFKGGKLRFKKIKPEAFEANRFYTVINKKSGEIVPMEVNFNFDDPNLIILPLAFGKRQGREFIWNDLLSLETGSLKLANGRVIEKTLYNRRTRQDEPALFVALTFERREVLDSSNIKPMNLIGVDRGENIPAVIALTDPEGCPLSRFKDSLGNPTHILRIGESYKEKQRTIQAKKEVEQRRAGGYSRKYASKAKNLADDMVRNTARDLLYYAVTQDAMLIFENLSRGFGRQGKRTFMAERQYTRMEDWLTAKLAYEGLSKTYLSKTLAQYTSKTCSNCGFTITSADYDRVLEKLKKTATGWMTTINGKELKVEGQITYYNRYKRQNVVKDLSVELDRLSEESVNNDISSWTKGRSGEALSLLKKRFSHRPVQEKFVCLNCGFETHADEQAALNIARSWLFLRSQEYKKYQTNKTTGNTDKRAFVETWQSFYRKKLKEVWKPAV

SEQ ID NO: 128 - protein, 978 aa, Artificial Sequence
  CasX Variant
MQEIKRINKIRRRLVKDSNTKKAGKTGPMKTLLVRVMTPDLRERLENLRKKPENIPQPISNTSRANLNKLLTDYTEMKKAILHVYWEEFQKDPVGLMSRVAQPAPKNIDQRKLIPVKDGNERLTSSGFACSQCCQPLYVYKLEQVNDKGKPHTNYFGRCNVSEHERLILLSPHKPEANDELVTYSLGKFGQRALDFYSIHVTRESNHPVKPLEQIGGNSCASGPVGKALSDACMGAVASFLTKYQDIILEHQKVIKKNEKRLANLKDIASANGLAFPKITLPPQPHTKEGIEAYNNVVAQIVIWVNLNLWQKLKIGRDEAKPLQRLKGFPSFPLVERQANEVDWWDMVCNVKKLINEKKEDGKVFWQNLAGYKRQEALLPYLSSEEDRKKGKKFARYQFGDLLLHLEKKHGEDWGKVYDEAWERIDKKVEGLSKHIKLEEERRSEDAQSKAALTDWLRAKASFVIEGLKEADKDEFCRCELKLQKWYGDLRGKPFAIEAENSILDISGFSKQYNCAFIWQKDGVKKLNLYLIINYFKGGKLRFKKIKPEAFEANRFYTVINKKSGEIVPMEVNFNFDDPNLIILPLAFGKRQGREFIWNDLLSLETGSLKLANGRVIEKTLYNRRTRQDEPALFVALTFERREVLDSSNIKPMNLIGIDRGENIPAVIALTDPEGCPLSRFKDSLGNPTHILRIGESYKEKQRTIQAAKEVEQRRAGGYSRKYASKAKNLADDMVRNTARDLLYYAVTQDAMLIFENLSRGFGRQGKRTFMAERQYTRMEDWLTAKLAYEGLPSKTYLSKTLAQYTSKTCSNCGFTITSADYDRVLEKLKKTATGWMTTINGKELKVEGQITYYNRYKRQNVVKDLGVELDRLSEESVNNDISSWTKGRSGEALSLLKKRFSHRPVQEKFVCLNCGFETHADEQAALNIARSWLFLRSQEYKKYQTNKTTGNTDKRAFVETWQSFYRKKLKEVWKPAV

SEQ ID NO: 129 - protein, 986 aa, Artificial Sequence; identical to SEQ ID NO: 43
  CasX Variant

SEQ ID NO: 130 - protein, 978 aa, Artificial Sequence
  CasX Variant
MQEIKRINKIRRRLVKDSNTKKAGKTGPMKTLLVRVMTPDLRERLENLRKKPENIPQPISNTSRANLNKLLTDYTEMKKAILHVYWEEFQKDPVGLMSRVAQPAPKNIDQRKLIPVKDGNERLTSSGFACSQCCQPLYVYKLEQVNDKGKPHTNYFGRCNVSEHERLILLSPHKPEANDELVTYSLGKFGQRALDFYSIHVTRESNHPVKPLEQIGGNSCASGPVGKALSDACMGAVASFLTKYQDIILEHQKVIKKNEKRLANLKDIASANGLAFPKITLPPQPHTKEGIEAYNNVVAQIVIWVNLNLWQKLKIGRDEAKPLQRLKGFPSFPLVERQANEVDWWDMVCNVKKLINEKKEDGKVFWQNLAGYKRQEALRPYLSSEEDRKKGKKFARYQFGDLLLHLEKKHGEDWGKVYDEAWERIDKKVEGLSKHIKLEEERRSEDAQSKAALTDWLRAKASFVIEGLKEADKDEFCRCELKLQKWYGDLRGKPFAIEAENSILDISGFSKQYNCAFIWQKDGVKKLNLYLIINYFKGGKLRFKKIKPEAFEANRFYTVINKKSGEIVPMEVNFNFDDPNLIILPLAFGKRQGREFIWNDLLSLETGSLKLANGRVIEKTLYNRRTRQDEPALFVALTFERREVLDSSNIKPVNLIGVDRGENIPAVIALTDPEGCPLPEFKDSSGGPTDILRIGEGYKEKQRAIQAAKEVEQRRAGGYSRKFASKSRNLADDMVRNSARDLFYHAVTHDAVLVFENLSRGFGRQGKRTFMTERQYTKMEDWLTAKLAYEGLTSKTYLSKTLAQYTSKTCSNCGFTITSADYDRVLEKLKKTATGWMTTINGKELKVEGQITYYNRYKRQNVVKDLSVELDRLSEESVNNDISSWTKGRSGEALSLLKKRFSHRPVQEKFVCLNCGFETHADEQAALNIARSWLFLRSQEYKKYQTNKTTGNTDKRAFVETWQSFYRKKLKEVWKPAV

SEQ ID NO: 131 - protein, 972 aa, Artificial Sequence
  CasX Variant
MQEIKRINKIRRRLVKDSNTKKAGKTGPMKTLLVRVMTPDLRERLENLRKKPENIPQPISNTSRANLNKLLTDYTEMKKAILHVYWEEFQKDPVGLMSRVAQPAPKNIDQRKLIPVKDGNERLTSSGFACSQCCQPLYVYKLEQVNDKGKPHTNYFGRCNVSEHERLILLSPHKPEANDELVTYSLGKFGQRALDFYSIHVTRESNHPVKPLEQIGGNSCASGPVGKALSDACMGAVASFLTKYQDIILEHQKVIKKNEKRLANLKDIASANGLAFPKITLPPQPHTKEGIEAYNNVVAQIVIWVNLNLWQKLKIGRDEAKPLQRLKGFPSFPLVERQANEVDWWDMVCNVKKLINEKKEDGKVFWQNLAGYKRQEALRPYLSSEEDRKKGKKFARYQFGDLLLHLEKKHGEDWGKVYDEAWERIDKKVEGLSKHIKLEEERRSEDAQSKAALTDWLRAKASFVIEGLKEADKDEFCRCELKLQKWYGDLRGKPFAIEAENSILDISGFSKQYNCAFIWQKDGVKKLNLYLIINYFKGGKLRFKKIKPEAFEANRFYTVINKKSGEIVPMEVNFNFDDPNLIILPLAFGKRQGREFIWNDLLSLETGSLKLANGRVIEKTLYNRRTRQDEPALFVALTFERREVLDSSNIKPMNLIGIDRGENIPAVIALTDPEGCPLSRFKDSLGNPTHILRIGESYKEKQRTIQAKKEVEQRRAGGYSRKYASKAKNLADDMVRNTARDLLYYAVTQDAMLIFENLSRGFGRQGKRTFMAERQYTRMEDWLTAKLAYEGLSKTYLSKTLAQYTSKTCSNCGFTITSADYDRVLEKLKKTATGWMTTINGKELKVEGQITYYNRYKRQNVVKDLSVELDRLSEESVNNDISSWTKGRSGEALSLLKKRFSHRPVQEKFVCLNCGFETHADEQAALNIARSWLFLNSNSTEFKSYKSGKQPFVGAWQAFYKRRLKEVWKPNA

SEQ ID NO: 132 - protein, 978 aa, Artificial Sequence
  CasX Variant
QEIKRINKIRRRLVKDSNTKKAGKTGPMKTLLVRVMTPDLRERLENLRKKPENIPQPISNTSRANLNKLLTDYTEMKKAILHVYWEEFQKDPVGLMSRVAQPASKKIDQNKLKPEMDEKGNLTTAGFACSQCGQPLFVYKLEQVSEKGKAYTNYFGRCNVAEHEKLILLAQLKPEKDSDEAVTYSLGKFGQRALDFYSIHVTKESTHPVKPLAQIAGNRYASGPVGKALSDACMGTIASFLSKYQDIIIEHQKVVKGNQKRLESLRELAGKENLEYPSVTLPPQPHTKEGVDAYNEVIARVRMWVNLNLWQKLKLSRDDAKPLLRLKGFPSFPLVERQANEVDWWDMVCNVKKLINEKKEDGKVFWQNLAGYKRQEALRPYLSSEEDRKKGKKFARYQLGDLLLHLEKKHGEDWGKVYDEAWERIDKKVEGLSKHIKLEEERRSEDAQSKAALTDWLRAKASFVIEGLKEADKDEFCRCELKLQKWYGDLRGKPFAIEAENSILDISGFSKQYNCAFIWQKDGVKKLNLYLIINYFKGGKLRFKKIKPEAFEANRFYTVINKKSGEIVPMEVNFNFDDPNLIILPLAFGKRQGREFIWNDLLSLETGSLKLANGRVIEKTLYNRRTRQDEPALFVALTFERREVLDSSNIKPMNLIGVDRGENIPAVIALTDPEGCPLSRFKDSLGNPTHILRIGESYKEKQRTIQAKKEVEQRRAGGYSRKYASKAKNLADDMVRNTARDLLYYAVTQDAMLIFENLSRGFGRQGKRTFMAERQYTRMEDWLTAKLAYEGLSKTYLSKTLAQYTSKTCSNCGFTIHTSADYDRVLEKLKKTATGWMTTINGKELKVEGQITYYNRYKRQNVVKDLSVELDRLSEESVNNDISSWTKGRSGEALSLLKKRFSHRPVQEKFVCLNCGFETHADEQAALNIARSWLFLRSQEYKKYQTNKTTGNTDKRAFVETWQSFYRKKLKEVWKPAV

SEQ ID NO: 133 - protein, 978 aa, Artificial Sequence
  CasX Variant
QEIKRINKIRRRLVKDSNTKKAGKTGPMKTLLVRVMTPDLRERLENLRKKPENIPQPISNTSRANLNKLLTDYTEMKKAILHVYWEEFQKDPVGLMSRVAQPASKKIDQNKLKPEMDEKGNLTTAGFACSQCGQPLFVYKLEQVSEKGKAYTNYFGRCNVAEHEKLILLAQLKPEKDSDEAVTYSLGKFGQRALDFYSIHVTKESTHPVKPLAQIAGNRYASGPVGKALSDACMGTIASFLSKYQDIIIEHQKVVKGNQKRLESLRELAGKENLEYPSVTLPPQPHTKEGVDAYNEVIARVRMWVNLNLWQKLKLSRDDAKPLLRLKGFPSFPLVERQANEVDWWDMVCNVKKLINEKKEDGKVFWQNLAGYKRQEALRPYLSSEEDRKKGKKFARYQLGDLLLHLEKKHGEDWGKVYDEAWERIDKKVEGLSKHIKLEEERRSEDAQSKAALTDWLRAKASFVIEGLKEADKDEFCRCELKLQKWYGDLRGKPFAIEAENSILDISGFSKQYNCAFIWQKDGVKKLNLYLIINYFKGGKLRFKKIKPEAFEANRFYTVINKKSGEIVPMEVNFNFDDPNLIILPLAFGKRQGREFIWNDLLSLETGSLKLANGRVIEKTLYNRRTRQDEPALFVALTFERREVLDSSNIKPMNLIGVDRGENIPAVIALTDPEGCPLSRFKDSLGNPTHILRIGESYKEKQRTIQAKKEVEQRRAGGYSRKYASKAKNLADDMVRNTARDLLYYAVTQDAMLIFENLSRGFGRQGKRTFMAERQYTRMEDWLTAKLAYEGLPSKTYLSKTLAQYTSKTCSNCGFTITSADYDRVLEKLKKTATGWMTTINGKELKVEGQITYYNRYKRQNVVKDLSVELDRLSEESVNNDISSWTKGRSGEALSLLKKRFSHRPVQEKFVCLNCGFETHADEQAALNIARSWLFLRSQEYKKYQTNKTTGNTDKRAFVETWQSFYRKKLKEVWKPAV

SEQ ID NO: 134 - protein, 977 aa, Artificial Sequence
  CasX Variant
QEIKRINKIRRRLVKDSNTKKAGKTGPMKTLLVRVMTPDLRERLENLRKKPENIPQPISNTSRANLNKLLTDYTEMKKAILHVYWEEFQKDPVGLMSRVAQPASKKIDQNKLKPEMDEKGNLTTAGFACSQCGQPLFVYKLEQVSEKGKAYTNYFGRCNVAEHEKLILLAQLKPEKDSDEAVTYSLGKFGQRALDFYSIHVTKESTHPVKPLAQIAGNRYASGPVGKALSDACMGTIASFLSKYQDIIIEHQKVVKGNQKRLESLRELAGKENLEYPSVTLPPQPHTKEGVDAYNEVIARVRMWVNHNLWQKLKLSRDDAKPLLRLKGFPSFPLVERQANEVDWWDMVCNVKKLINEKKEDGKVFWQNLAGYKRQEALRPYLSSEEDRKKGKKFARYQLGDLLLHLEKKHGEDWGKVYDEAWERIDKKVEGLSKHIKLEEERRSEDAQSKAALTDWLRAKASFVIEGLKEADKDEFCRCELKLQKWYGDLRGKPFAIEAENSILDISGFSKQYNCAFIWQKDGVKKLNLYLIINYFKGGKLRFKKIKPEAFEANRFYTVINKKSGEIVPMEVNFNFDDPNLIILPLAFGKRQGREFIWNDLLSLETGSLKLANGRVIEKTLYNRRTRQDEPALFVALTFERREVLDSSNIKPMNLIGVDRGENIPAVIALTDPEGCPLSRFKDSLGNPTHILRIGESYKEKQRTIQAKKEVEQRRAGGYSRKYASKAKNLADDMVRNTARDLLYYAVTQDAMLIFENLSRGFGRQGKRTFMAERQYTRMEDWLTAKLAYEGLSKTYLSKTLAQYTSKTCSNCGFTITSADYDRVLEKLKKTATGWMTTINGKELKVEGQITYYNRYKRQNVVKDLSVELDRLSEESVNNDISSWTKGRSGEALSLLKKRFSHRPVQEKFVCLNCGFETHADEQAALNIARSWLFLRSQEYKKYQTNKTTGNTDKRAFVETWQSFYRKKLKEVWKPAV

SEQ ID NO: 135 - protein, 978 aa, Artificial Sequence
  CasX Variant
QEIKRINKIRRRLVKDSNTKKAGKTGPMKTLLVRVMTPDLRERLENLRKKPENIPQPISNTSRANLNKLLTDYTEMKKAILHVYWEEFQKDPVGLMSRVAQPASKKIDQNKLKPEMDEKGNLTTAGFACSQCGQPLFVYKLEQVSEKGKAYTNYFGRCNVAEHEKLILLAQLKPEKDSDEAVTYSLGKFGQRALDFYSIHVTKESTHPVKPLAQIAGNRYASGAPVGKALSDACMGTIASFLSKYQDIIIEHQKVVKGNQKRLESLRELAGKENLEYPSVTLPPQPHTKEGVDAYNEVIARVRMWVNLNLWQKLKLSRDDAKPLLRLKGFPSFPLVERQANEVDWWDMVCNVKKLINEKKEDGKVFWQNLAGYKRQEALRPYLSSEEDRKKGKKFARYQLGDLLLHLEKKHGEDWGKVYDEAWERIDKKVEGLSKHIKLEEERRSEDAQSKAALTDWLRAKASFVIEGLKEADKDEFCRCELKLQKWYGDLRGKPFAIEAENSILDISGFSKQYNCAFIWQKDGVKKLNLYLIINYFKGGKLRFKKIKPEAFEANRFYTVINKKSGEIVPMEVNFNFDDPNLIILPLAFGKRQGREFIWNDLLSLETGSLKLANGRVIEKTLYNRRTRQDEPALFVALTFERREVLDSSNIKPMNLIGVDRGENIPAVIALTDPEGCPLSRFKDSLGNPTHILRIGESYKEKQRTIQAKKEVEQRRAGGYSRKYASKAKNLADDMVRNTARDLLYYAVTQDAMLIFENLSRGFGRQGKRTFMAERQYTRMEDWLTAKLAYEGLSKTYLSKTLAQYTSKTCSNCGFTITSADYDRVLEKLKKTATGWMTTINGKELKVEGQITYYNRYKRQNVVKDLSVELDRLSEESVNNDISSWTKGRSGEALSLLKKRFSHRPVQEKFVCLNCGFETHADEQAALNIARSWLFLRSQEYKKYQTNKTTGNTDKRAFVETWQSFYRKKLKEVWKPAV

SEQ ID NO: 136 - protein, 979 aa, Artificial Sequence
  CasX Variant
RQEIKRINKIRRRLVKDSNTKKAGKTGPMKTLLVRVMTPDLRERLENLRKKPENIPQPISNTSRANLNKLLTDYTEMKKAILHVYWEEFQKDPVGLMSRVAQPASKKIDQNKLKPEMDEKGNLTTAGFACSQCGQPLFVYKLEQVSEKGKAYTNYFGRCNVAEHEKLILLAQLKPEKDSDEAVTYSLGKFGQRALDFYSIHVTKESTHPVKPLAQIAGNRYASGAPVGKALSDACMGTIASFLSKYQDIIIEHQKVVKGNQKRLESLRELAGKENLEYPSVTLPPQPHTKEGVDAYNEVIARVRMWVNLNLWQKLKLSRDDAKPLLRLKGFPSFPLVERQANEVDWWDMVCNVKKLINEKKEDGKVFWQNLAGYKRQEALRPYLSSEEDRKKGKKFARYQLGDLLLHLEKKHGEDWGKVYDEAWERIDKKVEGLSKHIKLEEERRSEDAQSKAALTDWLRAKASFVIEGLKEADKDEFCRCELKLQKWYGDLRGKPFAIEAENSILDISGFSKQYNCAFIWQKDGVKKLNLYLIINYFKGGKLRFKKIKPEAFEANRFYTVINKKSGEIVPMEVNFNFDDPNLIILPLAFGKRQGREFIWNDLLSLETGSLKLANGRVIEKTLYNRRTRQDEPALFVALTFERREVLDSSNIKPMNLIGVDRGENIPAVIALTDPEGCPLSRFKDSLGNPTHILRIGESYKEKQRTIQAKKEVEQRRAGGYSRKYASKAKNLADDMVRNTARDLLYYAVTQDAMLIFENLSRGFGRQGKRTFMAERQYTRMEDWLTAKLAYEGLSKTYLSKTLAQYTSKTCSNCGFTITSADYDRVLEKLKKTATGWMTTINGKELKVEGQITYYNRYKRQNVVKDLSVELDRLSEESVNNDISSWTKGRSGEALSLLKKRFSHRPVQEKFVCLNCGFETHADEQAALNIARSWLFLRSQEYKKYQTNKTTGNTDKRAFVETWQSFYRKKLKEVWKPAV

SEQ ID NO: 137 - protein, 978 aa, Artificial Sequence
  CasX Variant
QEIKRINKIRRRLVKDSNTKKAGKTGPMKTLLVRVMTPDLRERLENLRKKPENIPQPISNTSRANLNKLLTDYTEMKKAILHVYWEEFQKDPVGLMSRVAQPASKKIDQNKLKPEMDEKGNLTTAGFACSQCGQPLFVYKLEQVSEKGKAYTNYFGRCNVAEHEKLILLAQLKPEKDSDEAVTYSLGKFGQRALDFYSIHVTKESTHPVKPLAQIAGNRYASGPVGKALSDACMGTIASFLSKYQDIIIEHQKVVKGNQKRLESLRELAGKENLEYPSVTLPPQPHTKEGVDAYNEVIARVRMWVNLNLWQKLKLSRDDAKPLLRLKGFPSFPLVERQANEVDWWDMVCNVKKLINEKKEDGKVFWQNLAGYKRQEALRPYLSSEEDRKKGKKFARYQLGDLLLHLEKKHGEDWGKVYDEAWERIDKKVEGLSKHIKLEEERRSEDAQSKAALTDWLRAKASFVIEGLKEADKDEFCRCELKLQKWYGDLRGKPFAIEAENSILDISGFSKQYNCAFIWQKDGVKKLNLYLIINYFKGGKLRFKKIKPEAFEANRFYTVINKKSGEIVPMEVNFNFDDPNLIILPLAFGKRQGREFIWNDLLSLETGSLKLANGRVIEKTLYNRRTRQDEPALFVALTFERREVLDSSNIKPMNLIGVDRGENIPAVIALTDPEGCPLSRFKDSLGNPTHIQLRIGESYKEKQRTIQAKKEVEQRRAGGYSRKYASKAKNLADDMVRNTARDLLYYAVTQDAMLIFENLSRGFGRQGKRTFMAERQYTRMEDWLTAKLAYEGLSKTYLSKTLAQYTSKTCSNCGFTITSADYDRVLEKLKKTATGWMTTINGKELKVEGQITYYNRYKRQNVVKDLSVELDRLSEESVNNDISSWTKGRSGEALSLLKKRFSHRPVQEKFVCLNCGFETHADEQAALNIARSWLFLRSQEYKKYQTNKTTGNTDKRAFVETWQSFYRKKLKEVWKPAV

SEQ ID NO: 138 - protein, 977 aa, Artificial Sequence
  CasX Variant
QEIKRINKIRRRLVKDSNTKKAGKTGPMKTLLVRVMTPDLRERLENLRKKPENIPQPISNTSRANLNKLLTDYTEMKKAILHVYWEEFQKDPVGLMSRVAQPASKKIDQNKLKPEMDEKGNLTTAGFACSQCGQPLFVYKLEQVSEKGKAYTNYFGRCNVAEHEKLILLAQLKPEKDSDEAVTYSLGKFGQRALDFYSIHVTKESTHPVKPLAQIAGNRYASGPVGKALSDACMGTIASFLSKYQDIIIEHQKVVKGNQKRLESLRELAGKENLEYPSVTLPPQPHTKEGVDAYNEVIARVRMWVNLNLWQKLKLSRDDAKPLLRLKGFPSFPLVERQANEVDWWDMVCNVKKLINEKKEDGKVFWQNLAGYKRQEALRPYLSSEEDRKKGKKFARYQLGDLLLHLEKKHGEDWGKVYDEAWERIDKKVEGLSKHIKLEEERRSEDAQSKAALTDWLRAKASFVIEGLKEADKDEFCRCELKLQKWYGDLRGKPFAIEAENSILDISGFSKQYNCAFIWQKDGVKKLNLYLIINYFKGGKLRFKKIKPEAFEANRFYTVINKKSGEIVPMEVNFNFDDPNLIILPLAFGKRQGREFIWNDLLSLETGSLKLANGRVIEKTLYNRRTRQDEPALFVALTFERREVLDSSNIKPMNLIGVDRGENIPAVIALTDPEGCPLSRFKDSLGNPTHILRIGESYKEKQRTTQAKKEVEQRRAGGYSRKYASKAKNLADDMVRNTARDLLYYAVTQDAMLIFENLSRGFGRQGKRTFMAERQYTRMEDWLTAKLAYEGLSKTYLSKTLAQYTSKTCSNCGFTITSADYDRVLEKLKKTATGWMTTINGKELKVEGQITYYNRYKRQNVVKDLSVELDRLSEESVNNDISSWTKGRSGEALSLLKKRFSHRPVQEKFVCLNCGFETHADEQAALNIARSWLFLRSQEYKKYQTNKTTGNTDKRAFVETWQSFYRKKLKEVWKPAV

SEQ ID NO: 139 - protein, 977 aa, Artificial Sequence
  CasX Variant
QEIKRINKIRRRLVKDSNTKKAGKTGPMKTLLVRVMTPDLRERLENLRKKPENIPQPISNTSRANLNKLLTDYTEMKKAILHVYWEEFQKDPVGLMSRVAQPASKKIDQNKLKPEMDEKGNLTTAGFACSQCGQPLFVYKLEQVSEKGKAYTNYFGRCNVAEHEKLILLAQLKPEKDSDEAVTYSLGKFGQRALDFYSIHVTKESTHPVKPLAQIAGNRYASGPVGKALSDACMGTIASFLSKYQDIIIEHQKVVKGNQKRLESLRELAGKENLEYPSVTLPPQPHTKEGVDAYNEVIARVRMWVNLNLWQKLKLSRDDAKPLLRLKGFPSFPLVERQANEVDWWDMVCNVKKLINEKKEDGKVFWQNLAGYKRQEALRPYLSSEEDRKKGKKFARYQLGDLLLHLEKKHGEDWGKVYDEAWERIDKKVEGLSKHIKLEEERRSEDAQSKAALTDWLRAKASFVIEGLKEADKDEFCRCELKLQKWYGDLRGKPFAIEAENSILDISGFSKQYNCAFIWQKDGVKKLNLYLIINYFKGGKLRFKKIKPEAFEANRFYTVINKKSGEIVPMEVNFNFDDPNLIILPLAFGKRQGREFIWNDLLSLETGSLKLANGRVIEKTLYNRRTRQDEPALFVALTFERREVLDSSNIKPMNLIGVDRGENIPAVIALTDPEGCPLSRFKRSLGNPTHILRIGESYKEKQRTIQAKKEVEQRRAGGYSRKYASKAKNLADDMVRNTARDLLYYAVTQDAMLIFENLSRGFGRQGKRTFMAERQYTRMEDWLTAKLAYEGLSKTYLSKTLAQYTSKTCSNCGFTITSADYDRVLEKLKKTATGWMTTINGKELKVEGQITYYNRYKRQNVVKDLSVELDRLSEESVNNDISSWTKGRSGEALSLLKKRFSHRPVQEKFVCLNCGFETHADEQAALNIARSWLFLRSQEYKKYQTNKTTGNTDKRAFVETWQSFYRKKLKEVWKPAV

SEQ ID NO: 140 - protein, 977 aa, Artificial Sequence
  CasX Variant
QEIKRINKIRRRLVKDSNTKKAGKTYPMKTLLVRVMTPDLRERLENLRKKPENIPQPISNTSRANLNKLLTDYTEMKKAILHVYWEEFQKDPVGLMSRVAQPASKKIDQNKLKPEMDEKGNLTTAGFACSQCGQPLFVYKLEQVSEKGKAYTNYFGRCNVAEHEKLILLAQLKPEKDSDEAVTYSLGKFGQRALDFYSIHVTKESTHPVKPLAQIAGNRYASGPVGKALSDACMGTIASFLSKYQDIIIEHQKVVKGNQKRLESLRELAGKENLEYPSVTLPPQPHTKEGVDAYNEVIARVRMWVNLNLWQKLKLSRDDAKPLLRLKGFPSFPLVERQANEVDWWDMVCNVKKLINEKKEDGKVFWQNLAGYKRQEALRPYLSSEEDRKKGKKFARYQLGDLLLHLEKKHGEDWGKVYDEAWERIDKKVEGLSKHIKLEEERRSEDAQSKAALTDWLRAKASFVIEGLKEADKDEFCRCELKLQKWYGDLRGKPFAIEAENSILDISGFSKQYNCAFIWQKDGVKKLNLYLIINYFKGGKLRFKKIKPEAFEANRFYTVINKKSGEIVPMEVNFNFDDPNLIILPLAFGKRQGREFIWNDLLSLETGSLKLANGRVIEKTLYNRRTRQDEPALFVALTFERREVLDSSNIKPMNLIGVDRGENIPAVIALTDPEGCPLSRFKDSLGNPTHILRIGESYKEKQRTIQAKKEVEQRRAGGYSRKYASKAKNLADDMVRNTARDLLYYAVTQDAMLIFENLSRGFGRQGKRTFMAERQYTRMEDWLTAKLAYEGLSKTYLSKTLAQYTSKTCSNCGFTITSADYDRVLEKLKKTATGWMTTINGKELKVEGQITYYNRYKRQNVVKDLSVELDRLSEESVNNDISSWTKGRSGEALSLLKKRFSHRPVQEKFVCLNCGFETHADEQAALNIARSWLFLRSQEYKKYQTNKTTGNTDKRAFVETWQSFYRKKLKEVWKPAV

SEQ ID NO: 141 - protein, 977 aa, Artificial Sequence
  CasX Variant
QEIKRINKIRRRLVKDSNTKKAGKTGPMKTLLVRVMTPDLRERLENLRKKPENIPQPISNTSRANLNKLLTDYTEMKKAILHVYWEEFQKDPVGLMSRVAQPASKKIDQNKLKPEMDEKGNLTTAGFACSQCGQPLFVYKLEQVSEKGKAYTNYFGRCNVAEHEKLILLAQLKPEKDSDEAVTYSLGKFGQRALDFYSIHVTKESTHPVKPLAQIAGNRYASGPVGKALSDACMGTIASFLSKYQDIIIEHQKVVKGNQKRLESLRELAGKENLEYPSVTLPPQPHTKEGVDAYNEVIARVRMWVNLNLWQKLKLSRDDAKPLLRLKGFPSFPLVERQANEVDWWDMVCNVKKLINEKKEDGKVFWQNLAGYKRQEALRPYLSSEEDRKKGKKFARYQLGDLLLHLEKKHGEDWGKVYDEAWERIDKKVEGLSKHIKLEEERRSEDAQSKAALTDWLRAKASFVIEGLKEADKDEFCRCELKLQKWYGDLRGKPFAIEAENSILDISGFSKQYNCAFIWQKDGVKKLNLYLIINYFKGGKLRFKKIKPEAFEANRFYTVINKKSGEIVPMEVNFNFDDPNLIILPLAFGKRQGREFIWNDLLSLETGSLKLANGRVIEKTLYNRRTRQDEPALFVALTFERREVLDSSNIKPMNLIGVDRGENIPAVIALTDPEGCPLSRFKDSLGNPTHILRIGESYKEKQRTIQAKKEVEQRRAGGYSRKYASKAKNLADDMVRNTARDLLYYAVTQDAMLIFENLSRGFGRQGKRTFMAERQYTRMEDWLTAKLAYEGLSKTYLSKTLAQYTSKTCSNCGFTIHSADYDRVLEKLKKTATGWMTTINGKELKVEGQITYYNRYKRQNVVKDLSVELDRLSEESVNNDISSWTKGRSGEALSLLKKRFSHRPVQEKFVCLNCGFETHADEQAALNIARSWLFLRSQEYKKYQTNKTTGNTDKRAFVETWQSFYRKKLKEVWKPAV

SEQ ID NO: 142 - protein, 977 aa, Artificial Sequence
  CasX Variant
QEIKRINKIRRRLVKDSNTKKAGKTGPMKTLLVRVMTPDLRERLENLRKKPENIPQPISNTSRANLNKLLTDYTEMKKAILHVYWEEFQKDPVGLMSRVAQPASKKIDQNKLKPEMDEKGNLTTAGFACSQCGQPLFVYKLEQVSEKGKAYTNYFGRCNVAEHEKLILLAQLKPEKDSDEAVTYSLGKFGQRALDFYSIHVTKESTHPVKPLAQIAGNRYASGPVGKALSDACMGTIASFLSKYQDIIIEHQKVVKGNQKRLESLRELAGKENLEYPSVTLPPQPHTKEGVDAYNEVIARVRMWVNLNLWQKLKLSRDDAKPLLRLKGFPSFPLVERQANEVDWWDMVCNVKKLINEKKEDGKVFWQNLAGYKRQEALRPYLSSEEDRKKGKKFARYQLGDLLLHLEKKHGEDWGKVYDEAWERIDKKVEGLSKHIKLEEERRSEDAQSKAALTDWLRAKASFVIEGLKEADKDEFCRCELKLQKWYGDLRGKPFAIEAENSILDISGFSKQYNCAFIWQKDGVKKLNLYLIINYFKGGKLRFKKIKPEAFEANRFYTVINKKSGEIVPMEVNFNFDDPNLIILPLAFGKRQGREFIWNDLLSLETGSLKLANGRVIEKTLYNRRTRQDEPALFVALTFERREVLDSSNIKPMNLIGVDRGENIPAVIALTDPEGCPLSRFKDSLGNPTHILRIGESYKEKQRTIQAKKEVEQRRAGGYSRKYASKAKNLADDMVRNTARDLLYYAATQDAMLIFENLSRGFGRQGKRTFMAERQYTRMEDWLTAKLAYEGLSKTYLSKTLAQYTSKTCSNCGFTITSADYDRVLEKLKKTATGWMTTINGKELKVEGQITYYNRYKRQNVVKDLSVELDRLSEESVNNDISSWTKGRSGEALSLLKKRFSHRPVQEKFVCLNCGFETHADEQAALNIARSWLFLRSQEYKKYQTNKTTGNTDKRAFVETWQSFYRKKLKEVWKPAV

SEQ ID NO: 143 - protein, 977 aa, Artificial Sequence
  CasX Variant
QEIKRINKIRRRLVKDSNTKKAGKTGPMKTLLVRVMTPDLRERLENLRKKPENIPQPISNTSRANLNKLLTDYTEMKKAILHVYWEEFQKDPVGLMSRVAQPASKKIDQNKLKPEMDEKGNLTTAGFACSQCGQPLFVYKLEQVSEKGKAYTNYFGRCNVAEHEKLILLAQLKPEKDSDEAVTYSLGKFGQRALDFYSIHVTKESTHPVKPLAQIAGNRYASGPVGKALSDACMGTIASFLSKYQDIIIEHQKVVKGNQKRLESLRELAGKENLEYPSVTLPPQPHTKEGVDAYNEVIARVRMWVNLNLWQKLKLSRDDAKPLLRLKGFPSFPLVERQANEVDWWDMVCNVKKLINEKKEDGKVFWQNLAGYKRQEALRPYLSSEEDRKKGKKFARYQLGDLLLHLEKKHGEDWGKVYDEAWERIDKKVEGLSKHIKLEEERRSEDAQSKAALTDWLRAKASFVIEGLKEADKDEFCRCELKLQKWYGDLRGKPFAIEAENSILDISGFSKQYNCAFIWQKDGVKKLNLYLIINYFKGGKLRFKKIKPEAFEANRFYTVINKKSGEIVPMEVNFNFDDPNLIILPLAFGKRQGREFIWNDLLSLETGSLKLANGRVIEKTLYNRRTRQDEPALFVALTFERREVLDSSNIKPMNLIGVDRGENIPAVIALTDPEGCPLSRFKDSLGNPTHILRIGESYKEKQRTIQAAKEVEQRRAGGYSRKYASKAKNLADDMVRNTARDLLYYAVTQDAMLIFENLSRGFGRQGKRTFMAERQYTRMEDWLTAKLAYEGLSKTYLSKTLAQYTSKTCSNCGFTITSADYDRVLEKLKKTATGWMTTINGKELKVEGQITYYNRYKRQNVVKDLSVELDRLSEESVNNDISSWTKGRSGEALSLLKKRFSHRPVQEKFVCLNCGFETHADEQAALNIARSWLFLRSQEYKKYQTNKTTGNTDKRAFVETWQSFYRKKLKEVWKPAV

SEQ ID NO: 144 - protein, 978 aa, Artificial Sequence
  CasX Variant
QEIKRINKIRRRLVKDSNTKKAGKTRGPMKTLLVRVMTPDLRERLENLRKKPENIPQPISNTSRANLNKLLTDYTEMKKAILHVYWEEFQKDPVGLMSRVAQPASKKIDQNKLKPEMDEKGNLTTAGFACSQCGQPLFVYKLEQVSEKGKAYTNYFGRCNVAEHEKLILLAQLKPEKDSDEAVTYSLGKFGQRALDFYSIHVTKESTHPVKPLAQIAGNRYASGPVGKALSDACMGTIASFLSKYQDIIIEHQKVVKGNQKRLESLRELAGKENLEYPSVTLPPQPHTKEGVDAYNEVIARVRMWVNLNLWQKLKLSRDDAKPLLRLKGFPSFPLVERQANEVDWWDMVCNVKKLINEKKEDGKVFWQNLAGYKRQEALRPYLSSEEDRKKGKKFARYQLGDLLLHLEKKHGEDWGKVYDEAWERIDKKVEGLSKHIKLEEERRSEDAQSKAALTDWLRAKASFVIEGLKEADKDEFCRCELKLQKWYGDLRGKPFAIEAENSILDISGFSKQYNCAFIWQKDGVKKLNLYLIINYFKGGKLRFKKIKPEAFEANRFYTVINKKSGEIVPMEVNFNFDDPNLIILPLAFGKRQGREFIWNDLLSLETGSLKLANGRVIEKTLYNRRTRQDEPALFVALTFERREVLDSSNIKPMNLIGVDRGENIPAVIALTDPEGCPLSRFKDSLGNPTHILRIGESYKEKQRTIQAKKEVEQRRAGGYSRKYASKAKNLADDMVRNTARDLLYYAVTQDAMLIFENLSRGFGRQGKRTFMAERQYTRMEDWLTAKLAYEGLSKTYLSKTLAQYTSKTCSNCGFTITSADYDRVLEKLKKTATGWMTTINGKELKVEGQITYYNRYKRQNVVKDLSVELDRLSEESVNNDISSWTKGRSGEALSLLKKRFSHRPVQEKFVCLNCGFETHADEQAALNIARSWLFLRSQEYKKYQTNKTTGNTDKRAFVETWQSFYRKKLKEVWKPAV

SEQ ID NO: 145 - protein, 978 aa, Artificial Sequence
  CasX Variant
QEIKRINKIRRRLVKDSNTKKAGKTGPMKTLLVRVMTPDLRERLENLRKKPENIPQPISNTSRANLNKLLTDYTEMKKAILHVYWEEFQKDPVGLMSRVAQPASKKIDQNKLKPEMDEKGNLTTAGFACSQCGQPLFVYKLEQVSEKGKAYTNYFGRCNVAEHEKLILLAQLKPEKDSDEAVTYSLGKFGQRALDFYSIHVTKESTHPVKPLAQIAGNRYASYPVGKALSDACMGTIASFLSKYQDIIIEHQKVVKGNQKRLESLRELAGKENLEYPSVTLPPQPHTKEGVDAYNEVIARVRMWVNLNLWQKLKLSRDDAKPLLRLKGFPSFPLVERQANEVDWWDMVCNVKKLINEKKEDGKVFWQNLAGYKRQEALRPYLSSEEDRKKGKKFARYQLGDLLLHLEKKHGEDWGKVYDEAWERIDKKVEGLSKHIKLEEERRSEDAQSKAALTDWLRAKASFVIEGLKEADKDEFCRCELKLQKWYGDLRGKPFAIEAENSILDISGFSKQYNCAFIWQKDGVKKLNLYLIINYFKGGKLRFKKIKPEAFEANRFYTVINKKSGEIVPMEVNFNFDDPNLIILPLAFGKRQGREFIWNDLLSLETGSLKLANGRVIEKTLYNRRTRQDEPALFVALTFERREVLDSSNIKPMNLIGVDRGENIPAVIALTDPEGCPLSRFKDSLGNPTHILRIGESYKEKQRTIQAKKEVEQRRAGGYSRKYASKAKNLADDMVRNTARDLLYYAVTQDAMLIFENLSRGFGRQGKRTFMAERQYTRMEDWLTAKLAYEGLPSKTYLSKTLAQYTSKTCSNCGFTITSADYDRVLEKLKKTATGWMTTINGKELKVEGQITYYNRYKRQNVVKDLSVELDRLSEESVNNDISSWTKGRSGEALSLLKKRFSHRPVQEKFVCLNCGFETHADEQAALNIARSWLFLRSQEYKKYQTNKTTGNTDKRAFVETWQSFYRKKLKEVWKPAV

SEQ ID NO: 146 - protein, 978 aa, Artificial Sequence
  CasX Variant
QEIKRINKIRRRLVKDSNTKKAGKTGPMKTLLVRVMTPDLRERLENLRKKPENIPQPISNTSRANLNKLLTDYTEMKKAILHVYWEEFQKDPVGLMSRVAQPASKKIDQNKLKPEMDEKGNLTTAGFACSQCGQPLFVYKLEQVSEKGKAYTNYFGRCNVAEHEKLILLAQLKPEKDSDEAVTYSLGKFGQRALDFYSIHVTKESTHPVKPLAQIAGNRYASNPVGKALSDACMGTIASFLSKYQDIIIEHQKVVKGNQKRLESLRELAGKENLEYPSVTLPPQPHTKEGVDAYNEVIARVRMWVNLNLWQKLKLSRDDAKPLLRLKGFPSFPLVERQANEVDWWDMVCNVKKLINEKKEDGKVFWQNLAGYKRQEALRPYLSSEEDRKKGKKFARYQLGDLLLHLEKKHGEDWGKVYDEAWERIDKKVEGLSKHIKLEEERRSEDAQSKAALTDWLRAKASFVIEGLKEADKDEFCRCELKLQKWYGDLRGKPFAIEAENSILDISGFSKQYNCAFIWQKDGVKKLNLYLIINYFKGGKLRFKKIKPEAFEANRFYTVINKKSGEIVPMEVNFNFDDPNLIILPLAFGKRQGREFIWNDLLSLETGSLKLANGRVIEKTLYNRRTRQDEPALFVALTFERREVLDSSNIKPMNLIGVDRGENIPAVIALTDPEGCPLSRFKDSLGNPTHILRIGESYKEKQRTIQAKKEVEQRRAGGYSRKYASKAKNLADDMVRNTARDLLYYAVTQDAMLIFENLSRGFGRQGKRTFMAERQYTRMEDWLTAKLAYEGLPSKTYLSKTLAQYTSKTCSNCGFTITSADYDRVLEKLKKTATGWMTTINGKELKVEGQITYYNRYKRQNVVKDLSVELDRLSEESVNNDISSWTKGRSGEALSLLKKRFSHRPVQEKFVCLNCGFETHADEQAALNIARSWLFLRSQEYKKYQTNKTTGNTDKRAFVETWQSFYRKKLKEVWKPAV

SEQ ID NO: 147 - protein, 979 aa, Artificial Sequence
  CasX Variant
QEIKRINKIRRRLVKDSNTKKAGKTGPMKTLLVRVMTPDLRERLENLRKKPENIPQPISNTSRANLNKLLTDYTEMKKAILHVYWEEFQKDPVGLMSRVAQPASKKIDQNKLKPEMDEKGNLTTAGFACSQCGQPLFVYKLEQVSEKGKAYTNYFGRCNVAEHEKLILLAQLKPEKDSDEAVTYSLGKFGQRALDFYSIHVTKESTHPVKPLAQIAGNRYASGPVGKALSDACMGTIASFLSKYQDIIIEHQKVVKGNQKRLESLRELAGKENLEYPSVTLPPQPHTKEGVDAYNEVIARVRMWVNLNLWQKLKLSRDDAKPLLRLKGFPSFPLVERQANEVDWWDMVCNVKKLINEKKEDGKVFWQNLAGYKRQEALRPYLSSEEDRKKGKKFARYQLGDLLLHLEKKHGEDWGKVYDEAWERIDKKVEGLSKHIKLEEERRSEDAQSKAALTDWLRAKASFVIEGLKEADKDEFCRCELKLQKWYGDLRGKPFAIEAENSILDISGFSKQYNCAFIWQKDGVKKLNLYLIINYFKGWGKLRFKKIKPEAFEANRFYTVINKKSGEIVPMEVNFNFDDPNLIILPLAFGKRQGREFIWNDLLSLETGSLKLANGRVIEKTLYNRRTRQDEPALFVALTFERREVLDSSNIKPMNLIGVDRGENIPAVIALTDPEGCPLSRFKDSLGNPTHILRIGESYKEKQRTIQAKKEVEQRRAGGYSRKYASKAKNLADDMVRNTARDLLYYAVTQDAMLIFENLSRGFGRQGKRTFMAERQYTRMEDWLTAKLAYEGLPSKTYLSKTLAQYTSKTCSNCGFTITSADYDRVLEKLKKTATGWMTTINGKELKVEGQITYYNRYKRQNVVKDLSVELDRLSEESVNNDISSWTKGRSGEALSLLKKRFSHRPVQEKFVCLNCGFETHADEQAALNIARSWLFLRSQEYKKYQTNKTTGNTDKRAFVETWQSFYRKKLKEVWKPAV

SEQ ID NO: 148 - protein, 979 aa, Artificial Sequence
  CasX Variant
QEIKRINKIRRRLVKDSNTKKAGKTGPMKTLLVRVMTPDLRERLENLRKKPENIPQPISNTSRANLNKLLTDYTEMKKAILHVYWEEFQKDPVGLMSRVAQPASKKIDQNKLKPEMDEKGNLTTAGFACSQCGQPLFVYKLEQVSEKGKAYTNYFGRCNVAEHEKLILLAQLKPEKDSDEAVTYSLGKFGQRALDFYSIHVTKESTHPVKPLAQIAGNRYASGPVGKALSDACMGTIASFLSKYQDIIIEHQKVVKGNQKRLESLRELAGKENLEYPSVTLPPQPHTKEGVDAYNEVIARVRMWVNLNLWQKLKLSRDDAKPLLRLKGFPSFPLVERQANEVDWWDMVCNVKKLINEKKEDGKVFWQNLAGYKRQEALRPYLSSEEDRKKGKKFARYQLGDLLLHLEKKHGEDWGKVYDEAWERIDKKVEGLSKHIKLEEERRSEDAQSKAALTDWLRAKASFVIEGLKEADKDEFCRCELKLQKWYGDLRGKPFAIEAENSILDISGFSKQYNCAFIWQKDGVKKLNLYLIINYFKGYGKLRFKKIKPEAFEANRFYTVINKKSGEIVPMEVNFNFDDPNLIILPLAFGKRQGREFIWNDLLSLETGSLKLANGRVIEKTLYNRRTRQDEPALFVALTFERREVLDSSNIKPMNLIGVDRGENIPAVIALTDPEGCPLSRFKDSLGNPTHILRIGESYKEKQRTIQAKKEVEQRRAGGYSRKYASKAKNLADDMVRNTARDLLYYAVTQDAMLIFENLSRGFGRQGKRTFMAERQYTRMEDWLTAKLAYEGLPSKTYLSKTLAQYTSKTCSNCGFTITSADYDRVLEKLKKTATGWMTTINGKELKVEGQITYYNRYKRQNVVKDLSVELDRLSEESVNNDISSWTKGRSGEALSLLKKRFSHRPVQEKFVCLNCGFETHADEQAALNIARSWLFLRSQEYKKYQTNKTTGNTDKRAFVETWQSFYRKKLKEVWKPAV

SEQ ID NO: 149 - protein, 7 aa, Artificial Sequence
  nuclear localization signal
PKKKRKV

SEQ ID NO: 150 - protein, 16 aa, Artificial Sequence
  nuclear localization signal
KRPAATKKAGQAKKKK

SEQ ID NO: 151 - protein, 9 aa, Artificial Sequence
  nuclear localization signal
PAAKRVKLD

SEQ ID NO: 152 - protein, 11 aa, Artificial Sequence
  nuclear localization signal
RQRRNELKRSP

SEQ ID NO: 153 - protein, 38 aa, Artificial Sequence
  nuclear localization signal
NQSSNFGPMKGGNFGGRSSGPYGGGGQYFAKPRNQGGY

SEQ ID NO: 154 - protein, 42 aa, Artificial Sequence
  nuclear localization signal
RMRIZFKNKGKDTAELRRRRVEVSVELRKAKKDEQILKRRNV

SEQ ID NO: 155 - protein, 8 aa, Artificial Sequence
  nuclear localization signal
VSRKRPRP

SEQ ID NO: 156 - protein, 8 aa, Artificial Sequence
  nuclear localization signal
PPKKARED

SEQ ID NO: 157 - protein, 12 aa, Artificial Sequence
  nuclear localization signal
SALIKKKKKMAP

SEQ ID NO: 158 - protein, 5 aa, Artificial Sequence
  nuclear localization signal
DRLRR

SEQ ID NO: 159 - protein, 7 aa, Artificial Sequence
  nuclear localization signal
PKQKKRK

SEQ ID NO: 160 - protein, 10 aa, Artificial Sequence
  nuclear localization signal
RKLKKKIKKL

SEQ ID NO: 161 - protein, 10 aa, Artificial Sequence
  nuclear localization signal
REKKKFLKRR

SEQ ID NO: 162 - protein, 20 aa, Artificial Sequence
  nuclear localization signal
KRKGDEVDGVDEVAKKKSKK

SEQ ID NO: 163 - protein, 17 aa, Artificial Sequence
  nuclear localization signal
RKCLQAGMNLEARKTKK

SEQ ID NO: 164 - protein, 8 aa, Artificial Sequence
  nuclear localization signal
PRPRKIPR

SEQ ID NO: 165 - protein, 9 aa, Artificial Sequence
  nuclear localization signal
PPRKKRTVV

SEQ ID NO: 166 - protein, 12 aa, Artificial Sequence
  nuclear localization signal
NLSKKKKRKREK

SEQ ID NO: 167 - protein, 10 aa, Artificial Sequence
  nuclear localization signal
RRPSRPFRKP

SEQ ID NO: 168 - protein, 8 aa, Artificial Sequence
  nuclear localization signal
KRPRSPSS

SEQ ID NO: 169 - protein, 19 aa, Artificial Sequence
  nuclear localization signal
KRGINDRNFWRGENERKTR

SEQ ID NO: 170 - protein, 11 aa, Artificial Sequence
  nuclear localization signal
PRPPKMARYDN

SEQ ID NO: 171 - protein, 9 aa, Artificial Sequence
  nuclear localization signal
KLKIKRPVK

SEQ ID NO: 172 - protein, 19 aa, Artificial Sequence
  nuclear localization signal
PKKKRKVPPPPAAKRVKLD

SEQ ID NO: 173 - protein, 17 aa, Artificial Sequence
  nuclear localization signal
PKTRRRPRRSQRKRPPT

SEQ ID NO: 174 - protein, 25 aa, Artificial Sequence
  nuclear localization signal
MSRRRKANPTKLSENAKKLAKEVEN

SEQ ID NO: 175 - protein, 16 aa, Artificial Sequence
  nuclear localization signal
KTRRRPRRSQRKRPPT

SEQ ID NO: 176 - protein, 13 aa, Artificial Sequence
  nuclear localization signal
RRKKRRPRRKKRR

SEQ ID NO: 177 - protein, 14 aa, Artificial Sequence
  nuclear localization signal
PKKKSRKPKKKSRK

SEQ ID NO: 178 - protein, 17 aa, Artificial Sequence
  nuclear localization signal
HKKKHPDASVNFSEFSK

SEQ ID NO: 179 - protein, 18 aa, Artificial Sequence
  nuclear localization signal
QRPGPYDRPQRPGPYDRP

SEQ ID NO: 180 - protein, 16 aa, Artificial Sequence
  nuclear localization signal
LSPSLSPLLSPSLSPL

SEQ ID NO: 181 - protein, 18 aa, Artificial Sequence
  nuclear localization signal
RGKGGKGLGKGGAKRHRK

SEQ ID NO: 182 - protein, 14 aa, Artificial Sequence
  nuclear localization signal
PKRGRGRPKRGRGR

SEQ ID NO: 183 - protein, 19 aa, Artificial Sequence
  nuclear localization signal
PKKKRKVPPPPAAKRVKLD

SEQ ID NO: 184 - protein, 17 aa, Artificial Sequence
  nuclear localization signal
PKKKRKVPPPPKKKRKV

SEQ ID NO: 185 - protein, 8 aa, Artificial Sequence
  nuclear localization signal
PQPKKKPL

SEQ ID NO: 186 - protein, 8 aa, Artificial Sequence
  nuclear localization signal
KRSFSKAF

SEQ ID NO: 187 - DNA, 2934 bp, Artificial Sequence
  CasX Variant 515
caagagatcaagagaatcaacaagatcagaaggagactggtcaaggacagcaacacaaagaaggccggcaagacaggccccatgaaaaccctgctcgtcagagtgatgacccctgacctgagagagcggctggaaaacctgagaaagaagcccgagaacatccctcagcctatcagcaacaccagcagggccaacctgaacaagctgctgaccgactacaccgagatgaagaaagccatcctgcacgtgtactgggaagagttccagaaagaccccgtgggcctgatgagcagagttgctcagcctgccagcaagaagatcgaccagaacaagctgaagcccgagatggacgagaagggcaatctgaccacagccggctttgcctgctctcagtgtggccagcctctgttcgtgtacaagctggaacaggtgtccgagaaaggcaaggcctacaccaactacttcggcagatgtaacgtggccgagcacgagaagctgattctgctggcccagctgaaacctgagaaggactctgatgaggccgtgacctacagcctgggcaagtttggacagagagccctggacttctacagcatccacgtgaccaaagaaagcacacaccccgtgaagcccctggctcagatcgccggcaatagatacgcctctggacctgtgggcaaagccctgtccgatgcctgcatgggaacaatcgccagcttcctgagcaagtaccaggacatcatcatcgagcaccagaaggtggtcaagggcaaccagaagagactggaaagcctgagggagctggccggcaaagagaacctggaataccccagcgtgaccctgcctcctcagcctcacacaaaagaaggcgtggacgcctacaacgaagtgatcgccagagtgagaatgtgggtcaacctgaacctgtggcagaagctgaaactgtccagggacgacgccaagcctctgctgagactgaagggcttccctagcttccctctggtggaaagacaggccaatgaagtggattggtgggacatggtctgcaacgtgaagaagctgatcaacgagaagaaagaggatggcaaggttttctggcagaacctggccggctacaagagacaagaagccctgaggccttacctgagcagcgaagaggaccggaagaagggcaagaagttcgccagataccagctgggcgacctgctgctgcacctggaaaagaagcacggcgaggactggggcaaagtgtacgatgaggcctgggagagaatcgacaagaaggtggaaggcctgagcaagcacattaagctggaagaggaaagaaggagcgaggacgcccaatctaaagccgctctgaccgattggctgagagccaaggccagctttgtgatcgagggcctgaaagaggccgacaaggacgagttctgcagatgcgagctgaagctgcagaagtggtacggcgatctgagaggcaagcccttcgccattgaggccgagaacagcatcctggacatcagcggcttcagcaagcagtacaactgcgccttcatttggcagaaagacggcgtcaagaaactgaacctgtacctgatcatcaattacttcaaaggcggcaagctgcggttcaagaagatcaaacccgaggccttcgaggctaacagattctacaccgtgatcaacaaaaagtccggcgagatcgtgcccatggaagtgaacttcaacttcgacgaccccaacctgattatcctgcctctggccttcggcaagagacagggcagagagttcatctggaacgatctgctgagcctggaaaccggctctctgaagctggccaatggcagagtgatcgagaaaaccctgtacaacaggagaaccagacaggacgagcctgctctgtttgtggccctgaccttcgagagaagagaggtgctggacagcagcaacatcaagcccatgaacctgatcggcgtggaccggggcgagaatatccctgctgtgatcgccctgacagaccctgaaggatgcccactgagcagattcaaggactccctgggcaaccctacacacatcctgagaatcggcgagagctacaaagagaagcagaggacaatccaggccaagaaagaggtggaacagagaagagccggcggatactctaggaagtacgccagcaaggccaagaatctggccgacgacatggtccgaaacaccgccagagatctgctgtactacgccgtgacacaggacgccatgctgatcttcgagaatctgagcagaggcttcggccggcagggcaagagaacctttatggccgagaggcagtacaccagaatggaagattggctcacagctaaactggcctacgagggactgcccagcaagacctacctgtccaaaacactggcccagtatacctccaagacctgcagcaattgcggcttcaccatcaccagcgccgactacgacagagtgctggaaaagctcaagaaaaccgccaccggctggatgaccaccatcaacggcaaagagctgaaggttgagggccagatcacctactacaacaggtacaagaggcagaacgtcgtgaaggatctgagcgtggaactggacagactgagcgaagagagcgtgaacaacgacatcagcagctggacaaagggcagatcaggcgaggctctgagcctgctgaagaagaggtttagccacagacctgtgcaagagaagttcgtgtgcctgaactgcggcttcgagacacacgccgatgaacaggctgccctgaacattgccagaagctggctgttcctgagaagccaagagtacaagaagtaccagaccaacaagaccaccggcaacaccgacaagagggcctttgtggaaacctggcagagcttctacagaaaaaagctgaaagaagtctggaagcccgccgtg

SEQ ID NO: 188 - protein, 978 aa, Artificial Sequence; identical to SEQ ID NO: 133
  CasX Variant 515

SEQ ID NO: 189 - DNA, 2934 bp, Artificial Sequence
  CasX Variant 527
caagagatcaagagaatcaacaagatcagaaggagactggtcaaggacagcaacacaaagaaggccggcaagacacggggccccatgaaaaccctgctcgtcagagtgatgacccctgacctgagagagcggctggaaaacctgagaaagaagcccgagaacatccctcagcctatcagcaacaccagcagggccaacctgaacaagctgctgaccgactacaccgagatgaagaaagccatcctgcacgtgtactgggaagagttccagaaagaccccgtgggcctgatgagcagagttgctcagcctgccagcaagaagatcgaccagaacaagctgaagcccgagatggacgagaagggcaatctgaccacagccggctttgcctgctctcagtgtggccagcctctgttcgtgtacaagctggaacaggtgtccgagaaaggcaaggcctacaccaactacttcggcagatgtaacgtggccgagcacgagaagctgattctgctggcccagctgaaacctgagaaggactctgatgaggccgtgacctacagcctgggcaagtttggacagagagccctggacttctacagcatccacgtgaccaaagaaagcacacaccccgtgaagcccctggctcagatcgccggcaatagatacgcctctggacctgtgggcaaagccctgtccgatgcctgcatgggaacaatcgccagcttcctgagcaagtaccaggacatcatcatcgagcaccagaaggtggtcaagggcaaccagaagagactggaaagcctgagggagctggccggcaaagagaacctggaataccccagcgtgaccctgcctcctcagcctcacacaaaagaaggcgtggacgcctacaacgaagtgatcgccagagtgagaatgtgggtcaacctgaacctgtggcagaagctgaaactgtccagggacgacgccaagcctctgctgagactgaagggcttccctagcttccctctggtggaaagacaggccaatgaagtggattggtgggacatggtctgcaacgtgaagaagctgatcaacgagaagaaagaggatggcaaggttttctggcagaacctggccggctacaagagacaagaagccctgaggccttacctgagcagcgaagaggaccggaagaagggcaagaagttcgccagataccagctgggcgacctgctgctgcacctggaaaagaagcacggcgaggactggggcaaagtgtacgatgaggcctgggagagaatcgacaagaaggtggaaggcctgagcaagcacattaagctggaagaggaaagaaggagcgaggacgcccaatctaaagccgctctgaccgattggctgagagccaaggccagctttgtgatcgagggcctgaaagaggccgacaaggacgagttctgcagatgcgagctgaagctgcagaagtggtacggcgatctgagaggcaagcccttcgccattgaggccgagaacagcatcctggacatcagcggcttcagcaagcagtacaactgcgccttcatttggcagaaagacggcgtcaagaaactgaacctgtacctgatcatcaattacttcaaaggcggcaagctgcggttcaagaagatcaaacccgaggccttcgaggctaacagattctacaccgtgatcaacaaaaagtccggcgagatcgtgcccatggaagtgaacttcaacttcgacgaccccaacctgattatcctgcctctggccttcggcaagagacagggcagagagttcatctggaacgatctgctgagcctggaaaccggctctctgaagctggccaatggcagagtgatcgagaaaaccctgtacaacaggagaaccagacaggacgagcctgctctgtttgtggccctgaccttcgagagaagagaggtgctggacagcagcaacatcaagcccatgaacctgatcggcgtggaccggggcgagaatatccctgctgtgatcgccctgacagaccctgaaggatgcccactgagcagattcaaggactccctgggcaaccctacacacatcctgagaatcggcgagagctacaaagagaagcagaggacaatccaggccaagaaagaggtggaacagagaagagccggcggatactctaggaagtacgccagcaaggccaagaatctggccgacgacatggtccgaaacaccgccagagatctgctgtactacgccgtgacacaggacgccatgctgatcttcgagaatctgagcagaggcttcggccggcagggcaagagaacctttatggccgagaggcagtacaccagaatggaagattggctcacagctaaactggcctacgagggactgagcaagacctacctgtccaaaacactggcccagtatacctccaagacctgcagcaattgcggcttcaccatcaccagcgccgactacgacagagtgctggaaaagctcaagaaaaccgccaccggctggatgaccaccatcaacggcaaagagctgaaggttgagggccagatcacctactacaacaggtacaagaggcagaacgtcgtgaaggatctgagcgtggaactggacagactgagcgaagagagcgtgaacaacgacatcagcagctggacaaagggcagatcaggcgaggctctgagcctgctgaagaagaggtttagccacagacctgtgcaagagaagttcgtgtgcctgaactgcggcttcgagacacacgccgatgaacaggctgccctgaacattgccagaagctggctgttcctgagaagccaagagtacaagaagtaccagaccaacaagaccaccggcaacaccgacaagagggcctttgtggaaacctggcagagcttctacagaaaaaagctgaaagaagtctggaagcccgccgtg

SEQ ID NO: 190 - protein, 978 aa, Artificial Sequence; identical to SEQ ID NO: 144
  CasX Variant 527

SEQ ID NO: 191 - protein, 11 aa, Artificial Sequence
  HIV TAT transduction domain
YGRKKRRQRRR

SEQ ID NO: 192 - protein, 8 aa, Artificial Sequence
  HIV TAT transduction domain
RKKRRQRR

SEQ ID NO: 193 - protein, 11 aa, Artificial Sequence
  HIV TAT transduction domain
YARAAARQARA

SEQ ID NO: 194 - protein, 11 aa, Artificial Sequence
  HIV TAT transduction domain
THRLPRRRRRR

SEQ ID NO: 195 - protein, 11 aa, Artificial Sequence
  HIV TAT transduction domain
GGRRARRRRRR

SEQ ID NO: 196 - protein, 12 aa, Artificial Sequence
  transduction domain
RRQRRTSKLMKR

SEQ ID NO: 197 - protein, 27 aa, Artificial Sequence
  transportan
GWTLNSAGYLLGKINLKALAALAKKIL

SEQ ID NO: 198 - protein, 33 aa, Artificial Sequence
  transduction domain
KALAWEAKLAKALAKALAKHLAKALAKALKCEA

SEQ ID NO: 199 - protein, 16 aa, Artificial Sequence
  transduction domain
RQIKIWFQNRRMKWKK

SEQ ID NO: 200 - protein, 5 aa, Artificial Sequence
  linker
GSGGS

SEQ ID NO: 201 - protein, 6 aa, Artificial Sequence
  linker
GGSGGS

SEQ ID NO: 202 - protein, 4 aa, Artificial Sequence
  linker
GGGS

SEQ ID NO: 203 - protein, 4 aa, Artificial Sequence
  linker
GGSG

SEQ ID NO: 204 - protein, 5 aa, Artificial Sequence
  linker
GGSGG

SEQ ID NO: 205 - protein, 5 aa, Artificial Sequence
  linker
GSGSG

SEQ ID NO: 206 - DNA, 3120 bp, Artificial Sequence
  CasX variant Stx2
atggctccgaagaagaagcgaaaggtcagccaggaaattaaacgcatcaacaagatccgccgtcgtctggtaaaagacagcaatacgaaaaaagccggaaaaaccggtccgatgaaaacgctgctggtgcgcgtgatgacgccggatctccgcgaacgtcttgagaatttgcgtaagaaacctgaaaatattccgcaaccgatttctaacacctcgcgcgccaatctgaataaactgctgaccgattacaccgaaatgaagaaagcgattctgcacgtttactgggaagagttccagaaagacccggtcggtctgatgagccgcgttgcgcaacctgcgccgaaaaatatcgatcagcgcaagttaatcccggttaaagatggtaatgaacgtttaacctccagcggctttgcctgcagtcagtgctgccagccactttatgtttataaacttgaacaggttaacgataaagggaaaccccataccaattatttcggccgctgcaatgtcagcgaacatgaacgcctgattttgttaagcccgcataaaccggaagcgaatgacgaactggtgacctattccctgggtaaatttggtcagcgggcgctggatttttacagcattcatgtgacgcgggaaagtaaccatccggtaaagccactggaacaaatcggcggtaacagctgcgcctctggcccggttggcaaagcgcttagcgatgcctgtatgggcgcggtggcgagctttctgacaaaataccaggatattatcctggagcatcagaaggtgatcaaaaagaacgagaaacgtctggcaaatttaaaggatattgcctccgctaacggcctggcgttcccgaagattaccttaccgccgcagccgcacaccaaagaaggtatcgaagcgtataacaacgttgttgcccagatcgtcatctgggtgaatctcaacctgtggcaaaaactgaaaattggtcgtgatgaagcaaaaccgttgcagcgactgaaaggattcccgtcgtttccgctggttgaacgacaggcgaacgaagtggattggtgggatatggtttgtaacgtcaaaaaattgatcaacgaaaaaaaggaagatggcaaagttttctggcaaaatctggcgggttacaaacgtcaggaggcgttgcttccgtatctctcttcagaagaagatcgcaaaaaaggcaagaagtttgctcgctatcagtttggcgatttattactgcatctggaaaaaaaacacggcgaagactggggcaaagtgtacgatgaagcctgggagcgtatcgacaaaaaagtggaaggtttgtcgaaacatattaaactcgaagaagagcgccgcagtgaagatgcgcagtcaaaagcagcgctgacggactggttacgtgcgaaagccagttttgtgattgaaggattaaaagaagctgataaagatgaattttgccgttgcgaactgaaactgcaaaaatggtatggcgacctgcgcggcaaaccgttcgccattgaggcagaaaatagcatccttgatatctccggtttcagcaaacaatataactgcgcgtttatttggcagaaagacggcgtgaaaaagcttaacctgtatctgatcattaactattttaaaggcgggaaactgcgtttcaagaaaatcaagccggaagcatttgaagccaatcgtttttataccgttattaataaaaaaagcggtgaaatcgtgccgatggaagttaattttaactttgatgatccgaacttgattattctgccgctggcattcggtaaacggcagggccgtgagtttatctggaacgacctgttatcgctggaaacgggcagcctgaaattagccaacggtcgcgtcattgaaaaaacgctctacaaccgccgcacccgccaggatgagccggcactgtttgtcgcgctgacctttgaacggcgtgaagtcctcgatagcagcaacatcaaaccaatgaaccttatcggtattgatcgtggtgaaaacattcctgccgttatcgccctgactgatccagaaggctgcccgctttctcgcttcaaagattcactgggcaacccgacccatatcctccgtattggcgagagctacaaagagaaacagcgtaccattcaggcagccaaagaagtggagcagcgtcgcgcgggcggctatagccgtaaatatgccagcaaagctaaaaacctggcggatgacatggtgcgtaacacggcgcgcgatttgctgtactacgccgtcacccaggacgcgatgctgatttttgagaacctctcccgcggttttgggcgtcagggtaaacgcacgtttatggcggaacgccagtatacgcgtatggaggactggctgaccgcgaagctggcctatgaaggcttgccgtctaaaacttacctgagcaagaccctggctcagtacaccagtaaaacctgtagtaattgcggctttaccatcaccagcgccgattatgaccgcgtgctggaaaagctgaagaaaaccgccaccggctggatgaccaccatcaatggtaaagagcttaaagtcgaagggcagattacttattacaaccgttataagcggcaaaacgtggtgaaagatctgtcggttgagctggaccgtttgtctgaagaaagcgtgaacaatgatatcagctcctggaccaaaggtcgttccggcgaagcgttaagtctgttgaaaaagcgctttagccatcgcccggtgcaggaaaaattcgtttgcctgaactgtggcttcgaaacccacgccgacgagcaagcggcgctcaatattgcgcgtagctggctgttcctgcgcagccaggaatataaaaaatatcaaaccaacaaaacaactggcaataccgacaagcgtgcctttgttgaaacctggcagagcttctatcgcaaaaaactgaaagaggtctggaaaccggcggtagcgccaaagaaaaaacgcaaagtgagcgaaaatctttattttcaaggtagcgcatggagtcatcctcaattcgagaaaggtggaggttctggcggtggatcgggaggttcagcgtggagccacccgcagttcgaaaaaggaaggggatccggctgctaa

SEQ ID NO: 207 - DNA, 3123 bp, Artificial Sequence
  CasX variant 119
atggctccgaagaagaagcgaaaggtcagccaggaaattaaacgcatcaacaagatccgccgtcgtctggtaaaagacagcaatacgaaaaaagccggaaaaaccggtccgatgaaaacgctgctggtgcgcgtgatgacgccggatctccgcgaacgtcttgagaatttgcgtaagaaacctgaaaatattccgcaaccgatttctaacacctcgcgcgccaatctgaataaactgctgaccgattacaccgaaatgaagaaagcgattctgcacgtttactgggaagagttccagaaagacccggtcggtctgatgagccgcgttgcgcaacctgcgccgaaaaatatcgatcagcgcaagttaatcccggttaaagatggtaatgaacgtttaacctccagcggctttgcctgcagtcagtgctgccagccactttatgtttataaacttgaacaggttaacgataaagggaaaccccataccaattatttcggccgctgcaatgtcagcgaacatgaacgcctgattttgttaagcccgcataaaccggaagcgaatgacgaactggtgacctattccctgggtaaatttggtcagcgggcgctggatttttacagcattcatgtgacgcgggaaagtaaccatccggtaaagccactggaacaaatcggcggtaacagctgcgcctctggcccggttggcaaagcgcttagcgatgcctgtatgggcgcggtggcgagctttctgacaaaataccaggatattatcctggagcatcagaaggtgatcaaaaagaacgagaaacgtctggcaaatttaaaggatattgcctccgctaacggcctggcgttcccgaagattaccttaccgccgcagccgcacaccaaagaaggtatcgaagcgtataacaacgttgttgcccagatcgtcatctgggtgaatctcaacctgtggcaaaaactgaaaattggtcgtgatgaagcaaaaccgttgcagcgactgaaaggattcccgtcgtttccgctggttgaacgacaggcgaacgaagtggattggtgggatatggtttgtaacgtcaaaaaattgatcaacgaaaaaaaggaagatggcaaagttttctggcaaaatctggcgggttacaaacgtcaggaggcgttgcgtccgtatctctcttcagaagaagatcgcaaaaaaggcaagaagtttgctcgctatcagtttggcgatttattactgcatctggaaaaaaaacacggcgaagactggggcaaagtgtacgatgaagcctgggagcgtatcgacaaaaaagtggaaggtttgtcgaaacatattaaactcgaagaagagcgccgcagtgaagatgcgcagtcaaaagcagcgctgacggactggttacgtgcgaaagccagttttgtgattgaaggattaaaagaagctgataaagatgaattttgccgttgcgaactgaaactgcaaaaatggtatggcgacctgcgcggcaaaccgttcgccattgaggcagaaaatagcatccttgatatctccggtttcagcaaacaatataactgcgcgtttatttggcagaaagacggcgtgaaaaagcttaacctgtatctgatcattaactattttaaaggcgggaaactgcgtttcaagaaaatcaagccggaagcatttgaagccaatcgtttttataccgttattaataaaaaaagcggtgaaatcgtgccgatggaagttaattttaactttgatgatccgaacttgattattctgccgctggcattcggtaaacggcagggccgtgagtttatctggaacgacctgttatcgctggaaacgggcagcctgaaattagccaacggtcgcgtcattgaaaaaacgctctacaaccgccgcacccgccaggatgagccggcactgtttgtcgcgctgacctttgaacggcgtgaagtcctcgatagcagcaacatcaaaccaatgaaccttatcggtattgatcgtggtgaaaacattcctgccgttatcgccctgactgatccagaaggctgcccgctttctcgcttcaaagattcactgggcaacccgacccatatcctccgtattggcgagagctacaaagagaaacagcgtaccattcaggcaaagaaagaagtggagcagcgtcgcgcgggcggctatagccgtaaatatgccagcaaagctaaaaacctggcggatgacatggtgcgtaacacggcgcgcgatttgctgtactacgccgtcacccaggacgcgatgctgatttttgagaacctctcccgcggttttgggcgtcagggtaaacgcacgtttatggcggaacgccagtatacgcgtatggaggactggctgaccgcgaagctggcctatgaaggcttgtctaaaacttacctgagcaagaccctggctcagtacaccagtaaaacctgtagtaattgcggctttaccatcaccagcgccgattatgaccgcgtgctggaaaagctgaagaaaaccgccaccggctggatgaccaccatcaatggtaaagagcttaaagtcgaagggcagattacttattacaaccgttataagcggcaaaacgtggtgaaagatctgtcggttgagctggaccgtttgtctgaagaaagcgtgaacaatgatatcagctcctggaccaaaggtcgttccggcgaagcgttaagtctgttgaaaaagcgctttagccatcgcccggtgcaggaaaaattcgtttgcctgaactgtggcttcgaaacccacgccgacgagcaagcggcgctcaatattgcgcgtagctggctgttcctgcgcagccaggaatataaaaaatatcaaaccaacaaaacaactggcaataccgacaagcgtgcctttgttgaaacctggcagagcttctatcgcaagaagctgaaagaggtctggaaaccggcggtaccacctgcgccaaagaaaaaacgcaaagtgagcgaaaatctttattttcaaggtagcgcatggagtcatcctcaattcgagaaaggtggaggttctggcggtggatcgggaggttcagcgtggagccacccgcagttcgaaaaaggaaggggatccggctgctaa

SEQ ID NO: 208 - protein, 976 aa, Artificial Sequence; identical to SEQ ID NO: 105
  CasX variant 119

SEQ ID NO: 209 - DNA, 2928 bp, Artificial Sequence
  CasX variant 457
caagagatcaagagaatcaacaagatcagaaggagactggtcaaggacagcaacacaaagaaggccggcaagacaggccccatgaaaaccctgctcgtcagagtgatgacccctgacctgagagagcggctggaaaacctgagaaagaagcccgagaacatccctcagcctatcagcaacaccagcagggccaacctgaacaagctgctgaccgactacaccgagatgaagaaagccatcctgcacgtgtactgggaagagttccagaaagaccccgtgggcctgatgagcagagttgctcagcccgctcctaagaacatcgaccagagaaagctgatccccgtgaaggacggcaacgagagactgacctctagcggctttgcctgcagccagtgttgccagcctctgtacgtgtacaagctggaacaagtgaacgacaagggcaagccccacaccaactacttcggcagatgcaacgtgtccgagcacgagaggctgatcctgctgtctcctcacaagcccgaggccaacgatgagctggtcacatacagcctgggcaagttcggacagagagccctggacttctacagcatccacgtgaccagggagagcaatcaccctgtgaagcccctggaacagatcggcggcaatagctgtgcctctggacctgtgggaaaagccctgagcgacgcctgtatgggagccgtggcatccttcctgaccaagtaccaggacatcatcctggaacacaagaaagtgatcaagaagaacgagaaaagactggccaacctcaaggatatcgccagcgctaacggcctggcctttcctaagatcaccctgcctccacagcctcacaccaaagagggcatcgaggcctacaacaacgtggtggcccagatcgtgatttgggtcaacctgaatctgtggcagaagctgaagatcggcagggacgaagccaagccactgcagagactgaagggcttccctagcttccctctggtggaaagacaggccaatgaagtggattggtgggacatggtctgcaacgtgaagaagctgatcaacgagaagaaagaggatggcaaggttttctggcagaacctggccggctacaagagacaagaagccctgaggccttacctgagcagccccgaggaccggaagaagggcaagaagttcgccagataccagctgggcgacctgctgctgcacctggaaaagaagcacggcgaggactggggcaaagtgtacgatgaggcctgggagagaatcgacaagaaggtggaaggcctgagcaagcacattaagctggaagaggaaagaaggagcgaggacgcccaatctaaagccgctctgaccgattggctgagagccaaggccagctttgtgatcgagggcctgaaagaggccgacaaggacgagttctgcagatgcgagctgaagctgcagaagtggtacggcgatctgagaggcaagcccttcgccattgaggccgagaacagcatcctggacatcagcggcttcagcaagcagtacaactgcgccttcatttggcagaaagacggcgtcaagaaactgaacctgtacctgatcatcaattacttcaaaggcggcaagctgcggttcaagaagatcaaacccgaggccttcgaggctaacagattctacaccgtgatcaacaaaaagtccggcgagatcgtgcccatggaagtgaacttcaacttcgacgaccccaacctgattatcctgcctctggccttcggcaagagacagggcagagagttcatctggaacgatctgctgagcctggaaaccggctctctgaagctggccaatggcagagtgatcgagaaacccctgtacaacaggagaaccagacaggacgagcctgctctgtttgtggccctgaccttcgagagaagagaggtgctggacagcagcaacatcaagcccatgaacctgatcggcgtggaccggggcgagaatatccctgctgtgatcgccctgacagaccctgaaggatgcccactgagcagattcaaggactccctgggcaaccctacacacatcctgagaatcggcgagagctacaaagagaagcagaggacaatccaggccaagaaagaggtggaacagagaagagccggcggatactctaggaagtacgccagcaaggccaagaatctggccgacgacatggtccgaaacaccgccagagatctgctgtactacgccgtgacacaggacgccatgctgatcttcgagaatctgagcagaggcttcggccggcagggcaagagaacctttatggccgagaggcagtacaccagaatggaagattggctcacagctaaactggcctacgagggactgagcaagacctacctgtccaaaacactggcccagtatacctccaagacctgcagcaattgcggcttcaccatcaccagcgccgactacgacagagtgctggaaaagctcaagaaaaccgccaccggctggatgaccaccatcaacggcaaagagctgaaggttgagggccagatcacctactacaacaggaggaagaggcagaacgtcgtgaaggatctgagcgtggaactggacagactgagcgaagagagcgtgaacaacgacatcagcagctggacaaagggcagatcaggcgaggctctgagcctgctgaagaagaggtttagccacagacctgtgcaagagaagttcgtgtgcctgaactgcggcttcgagacacacgccgatgaacaggctgccctgaacattgccagaagctggctgttcctgagaagccaagagtacaagaagtaccagaccaacaagaccaccggcaacaccgacaagagggcctttgtggaaacctggcagagcttctacagaaaaaagctgaaagaagtctggaagcccgccgtg

SEQ ID NO: 210 - protein, 976 aa, Artificial Sequence
  CasX variant 457
QEIKRINKIRRRLVKDSNTKKAGKTGPMKTLLVRVMTPDLRERLENLRKKPENIPQPISNTSRANLNKLLTDYTEMKKAILHVYWEEFQKDPVGLMSRVAQPAPKNIDQRKLIPVKDGNERLTSSGFACSQCCQPLYVYKLEQVNDKGKPHTNYFGRCNVSEHERLILLSPHKPEANDELVTYSLGKFGQRALDFYSIHVTRESNHPVKPLEQIGGNSCASGPVGKALSDACMGAVASFLTKYQDIILEHKKVIKKNEKRLANLKDIASANGLAFPKITLPPQPHTKEGIEAYNNVVAQIVIWVNLNLWQKLKIGRDEAKPLQRLKGFPSFPLVERQANEVDWWDMVCNVKKLINEKKEDGKVFWQNLAGYKRQEALRPYLSSPEDRKKGKKFARYQLGDLLLHLEKKHGEDWGKVYDEAWERIDKKVEGLSKHIKLEEERRSEDAQSKAALTDWLRAKASFVIEGLKEADKDEFCRCELKLQKWYGDLRGKPFAIEAENSILDISGFSKQYNCAFIWQKDGVKKLNLYLIINYFKGGKLRFKKIKPEAFEANRFYTVINKKSGEIVPMEVNFNFDDPNLIILPLAFGKRQGREFIWNDLLSLETGSLKLANGRVIEKPLYNRRTRQDEPALFVALTFERREVLDSSNIKPMNLIGVDRGENIPAVIALTDPEGCPLSRFKDSLGNPTHILRIGESYKEKQRTIQAKKEVEQRRAGGYSRKYASKAKNLADDMVRNTARDLLYYAVTQDAMLIFENLSRGFGRQGKRTFMAERQYTRMEDWLTAKLAYEGLSKTYLSKTLAQYTSKTCSNCGFTITSADYDRVLEKLKKTATGWMTTINGKELKVEGQITYYNRRKRQNVVKDLSVELDRLSEESVNNDISSWTKGRSGEALSLLKKRFSHRPVQEKFVCLNCGFETHADEQAALNIARSWLFLRSQEYKKYQTNKTTGNTDKRAFVETWQSFYRKKLKEVWKPAV

SEQ ID NO: 211 - DNA, 2928 bp, Artificial Sequence
  CasX variant 438
caagagatcaagagaatcaacaagatcagaaggagactggtcaaggacagcaacacaaagaaggccggcaagacaggccccatgaaaaccctgctcgtcagagtgatgacccctgacctgagagagcggctggaaaacctgagaaagaagcccgagaacatccctcagcctatcagcaacaccagcagggccaacctgaacaagctgctgaccgactacaccgagatgaagaaagccatcctgcacgtgtactgggaagagttccagaaagaccccgtgggcctgatgagcagagttgctcagcccgctcctaagaacatcgaccagagaaagctgatccccgtgaaggacggcaacgagagactgacctctagcggctttgcctgcagccagtgttgccagcctctgtacgtgtacaagctggaacaagtgaacgacaagggcaagccccacaccaactacttcggcagatgcaacgtgtccgagcacgagaggctgatcctgctgtctcctcacaagcccgaggccaacgatgagctggtcacatacagcctgggcaagttcggacagagagccctggacttctacagcatccacgtgaccagggagagcaatcaccctgtgaagcccctggaacagatcggcggcaatagctgtgcctctggacctgtgggaaaagccctgagcgacgcctgtatgggagccgtggcatccttcctgaccaagtaccaggacatcatcctggaacaccagaaagtgatcaagaagaacgagaaaagactggccaacctcaaggatatcgccagcgctaacggcctggcctttcctaagatcaccctgcctccacagcctcacaccaaagagggcatcgaggcctacaacaacgtggtggcccagatcgtgatttgggtcaacctgaatctgtggcagaagctgaagatcggcagggacgaagccaagccactgcagagactgaagggcttccctagcttccctctggtggaaagacaggccaatgaagtggattggtgggacatggtctgcaacgtgaagaagctgatcaacgagaagaaagaggatggcaaggttttctggcagaacctggccggctacaagagacaagaagccctgaggccttacctgagcagcgaagaggaccggaagaagggcaagaagttcgccagataccagctgggcgacctgctgaagcacctggaaaagaagcacggcgaggactggggcaaagtgtacgatgaggcctgggagagaatcgacaagaaggtggaaggcctgagcaagcacattaagctggaagaggaaagaaggagcgaggacgcccaatctaaagccgctctgaccgattggctgagagccaaggccagctttgtgatcgagggcctgaaagaggccgacaaggacgagttctgcagatgcgagctgaagctgcagaagtggtacggcgatctgagaggcaagcccttcgccattgaggccgagaacagcatcctggacatcagcggcttcagcaagcagtacaactgcgccttcatttggcagaaagacggcgtcaagaaactgaacctgtacctgatcatcaattacttcaaaggcggcaagctgcggttcaagaagatcaaacccgaggccttcgaggctaacagattctacaccgtgatcaacaaaaagtccggcgagatcgtgcccatggaagtgaacttcaacttcgacgaccccaacctgattatcctgcctctggccttcggcaagagacagggcagagagttcatctggaacgatctgctgagcctggaaaccggctctctgaagctggccaatggcagagtgatcgagaaaaccctgtacaacaggagaaccagacaggacgagcctgctctgtttgtggccctgaccttcgagagaagagaggtgctggacagcagcaacatcaagcccatgaacctgatcggcgtggaccggggcgagaatatccctgctgtgatcgccctgacagaccctgaaggatgcccactgagcagattcaaggactccctgggcaaccctacacacatcctgagaatcggcgagagctacaaagagaagcagaggacaatccaggccaagaaagaggtggaacagagaagagccggcggatactctaggaagtacgccagcaaggccaagaatctggccgacgacatggtccgaaacaccgccagagatctgctgtactacgccgtgacacaggacgccatgctgatcttcgagaatctgagcagaggcttcggccggcagggcaagagaacctttatggccgagaggcagtacaccagaatggaagattggctcacagctaaactggcctacgagggactgagcaagacctacctgtccaaaacactggcccagtatacctccaagacctgcagcaattgcggcttcaccatcaccagcgccgactacgacagagtgctggaaaagctcaagaaaaccgccaccggctggatgaccaccatcaacggcaaagagctgaaggttgagggccagatcacctactacaacaggaggaagaggcagaacgtcgtgaaggatctgagcgtggaactggacagactgagcgaagagagcgtgaacaacgacatcagcagctggacaaagggcagatcaggcgaggctctgagcctgctgaagaagaggtttagccacagacctgtgcaagagaagttcgtgtgcctgaactgcggcttcgagacacacgccgatgaacaggctgccctgaacattgccagaagctggctgttcctgagaagccaagagtacaagaagtaccagaccaacaagaccaccggcaacaccgacaagagggcctttgtggaaacctggcagagcttctacagaaaaaagctgaaagaagtctggaagcccgccgtg

SEQ ID NO: 212 - protein, 976 aa, Artificial Sequence
  CasX variant 438
QEIKRINKIRRRLVKDSNTKKAGKTGPMKTLLVRVMTPDLRERLENLRKKPENIPQPISNTSRANLNKLLTDYTEMKKAILHVYWEEFQKDPVGLMSRVAQPAPKNIDQRKLIPVKDGNERLTSSGFACSQCCQPLYVYKLEQVNDKGKPHTNYFGRCNVSEHERLILLSPHKPEANDELVTYSLGKFGQRALDFYSIHVTRESNHPVKPLEQIGGNSCASGPVGKALSDACMGAVASFLTKYQDIILEHQKVIKKNEKRLANLKDIASANGLAFPKITLPPQPHTKEGIEAYNNVVAQIVIWVNLNLWQKLKIGRDEAKPLQRLKGFPSFPLVERQANEVDWWDMVCNVKKLINEKKEDGKVFWQNLAGYKRQEALRPYLSSEEDRKKGKKFARYQLGDLLKHLEKKHGEDWGKVYDEAWERIDKKVEGLSKHIKLEEERRSEDAQSKAALTDWLRAKASFVIEGLKEADKDEFCRCELKLQKWYGDLRGKPFAIEAENSILDISGFSKQYNCAFIWQKDGVKKLNLYLIINYFKGGKLRFKKIKPEAFEANRFYTVINKKSGEIVPMEVNFNFDDPNLIILPLAFGKRQGREFIWNDLLSLETGSLKLANGRVIEKTLYNRRTRQDEPALFVALTFERREVLDSSNIKPMNLIGVDRGENIPAVIALTDPEGCPLSRFKDSLGNPTHILRIGESYKEKQRTIQAKKEVEQRRAGGYSRKYASKAKNLADDMVRNTARDLLYYAVTQDAMLIFENLSRGFGRQGKRTFMAERQYTRMEDWLTAKLAYEGLSKTYLSKTLAQYTSKTCSNCGFTITSADYDRVLEKLKKTATGWMTTINGKELKVEGQITYYNRRKRQNVVKDLSVELDRLSEESVNNDISSWTKGRSGEALSLLKKRFSHRPVQEKFVCLNCGFETHADEQAALNIARSWLFLRSQEYKKYQTNKTTGNTDKRAFVETWQSFYRKKLKEVWKPAV

SEQ ID NO: 213 - DNA, 2931 bp, Artificial Sequence
  CasX Variant 488
caagagatcaagagaatcaacaagatcagaaggagactggtcaaggacagcaacacaaagaaggccggcaagacaggccccatgaaaaccctgctcgtcagagtgatgacccctgacctgagagagcggctggaaaacctgagaaagaagcccgagaacatccctcagcctatcagcaacaccagcagggccaacctgaacaagctgctgaccgactacaccgagatgaagaaagccatcctgcacgtgtactgggaagagttccagaaagaccccgtgggcctgatgagcagagttgctcagcctgccagcaagaagatcgaccagaacaagctgaagcccgagatggacgagaagggcaatctgaccacagccggctttgcctgctctcagtgtggccagcctctgttcgtgtacaagctggaacaggtgtccgagaaaggcaaggcctacaccaactacttcggcagatgtaacgtggccgagcacgagaagctgattctgctggcccagctgaaacctgagaaggactctgatgaggccgtgacctacagcctgggcaagtttggacagagagccctggacttctacagcatccacgtgaccaaagaaagcacacaccccgtgaagcccctggctcagatcgccggcaatagatacgcctctggacctgtgggcaaagccctgtccgatgcctgcatgggaacaatcgccagcttcctgagcaagtaccaggacatcatcatcgagcaccagaaggtggtcaagggcaaccagaagagactggaaagcctgagggagctggccggcaaagagaacctggaataccccagcgtgaccctgcctcctcagcctcacacaaaagaaggcgtggacgcctacaacgaagtgatcgccagagtgagaatgtgggtcaacctgaacctgtggcagaagctgaaactgtccagggacgacgccaagcctctgctgagactgaagggcttccctagcttccctctggtggaaagacaggccaatgaagtggattggtgggacatggtctgcaacgtgaagaagctgatcaacgagaagaaagaggatggcaaggttttctggcagaacctggccggctacaagagacaagaagccctgaggccttacctgagcagcgaagaggaccggaagaagggcaagaagttcgccagataccagttcggcgacctgctgctgcacctggaaaagaagcacggcgaggactggggcaaagtgtacgatgaggcctgggagagaatcgacaagaaggtggaaggcctgagcaagcacattaagctggaagaggaaagaaggagcgaggacgcccaatctaaagccgctctgaccgattggctgagagccaaggccagctttgtgatcgagggcctgaaagaggccgacaaggacgagttctgcagatgcgagctgaagctgcagaagtggtacggcgatctgagaggcaagcccttcgccattgaggccgagaacagcatcctggacatcagcggcttcagcaagcagtacaactgcgccttcatttggcagaaagacggcgtcaagaaactgaacctgtacctgatcatcaattacttcaaaggcggcaagctgcggttcaagaagatcaaacccgaggccttcgaggctaacagattctacaccgtgatcaacaaaaagtccggcgagatcgtgcccatggaagtgaacttcaacttcgacgaccccaacctgattatcctgcctctggccttcggcaagagacagggcagagagttcatctggaacgatctgctgagcctggaaaccggctctctgaagctggccaatggcagagtgatcgagaaaaccctgtacaacaggagaaccagacaggacgagcctgctctgtttgtggccctgaccttcgagagaagagaggtgctggacagcagcaacatcaagcccatgaacctgatcggcatcgaccggggcgagaatatccctgctgtgatcgccctgacagaccctgaaggatgcccactgagcagattcaaggactccctgggcaaccctacacacatcctgagaatcggcgagagctacaaagagaagcagaggacaatccaggccaagaaagaggtggaacagagaagagccggcggatactctaggaagtacgccagcaaggccaagaatctggccgacgacatggtccgaaacaccgccagagatctgctgtactacgccgtgacacaggacgccatgctgatcttcgagaatctgagcagaggcttcggccggcagggcaagagaacctttatggccgagaggcagtacaccagaatggaagattggctcacagctaaactggcctacgagggactgagcaagacctacctgtccaaaacactggcccagtatacctccaagacctgcagcaattgcggcttcaccatcaccagcgccgactacgacagagtgctggaaaagctcaagaaaaccgccaccggctggatgaccaccatcaacggcaaagagctgaaggttgagggccagatcacctactacaacaggtacaagaggcagaacgtcgtgaaggatctgagcgtggaactggacagactgagcgaagagagcgtgaacaacgacatcagcagctggacaaagggcagatcaggcgaggctctgagcctgctgaagaagaggtttagccacagacctgtgcaagagaagttcgtgtgcctgaactgcggcttcgagacacacgccgatgaacaggctgccctgaacattgccagaagctggctgttcctgagaagccaagagtacaagaagtaccagaccaacaagaccaccggcaacaccgacaagagggcctttgtggaaacctggcagagcttctacagaaaaaagctgaaagaagtctggaagcccgccgtg

SEQ ID NO: 214 - protein, 977 aa, Artificial Sequence; identical to SEQ ID NO: 123
  CasX Variant 488

SEQ ID NO: 215 - DNA, 2931 bp, Artificial Sequence
  CasX Variant 491
caagagatcaagagaatcaacaagatcagaaggagactggtcaaggacagcaacacaaagaaggccggcaagacaggccccatgaaaaccctgctcgtcagagtgatgacccctgacctgagagagcggctggaaaacctgagaaagaagcccgagaacatccctcagcctatcagcaacaccagcagggccaacctgaacaagctgctgaccgactacaccgagatgaagaaagccatcctgcacgtgtactgggaagagttccagaaagaccccgtgggcctgatgagcagagttgctcagcctgccagcaagaagatcgaccagaacaagctgaagcccgagatggacgagaagggcaatctgaccacagccggctttgcctgctctcagtgtggccagcctctgttcgtgtacaagctggaacaggtgtccgagaaaggcaaggcctacaccaactacttcggcagatgtaacgtggccgagcacgagaagctgattctgctggcccagctgaaacctgagaaggactctgatgaggccgtgacctacagcctgggcaagtttggacagagagccctggacttctacagcatccacgtgaccaaagaaagcacacaccccgtgaagcccctggctcagatcgccggcaatagatacgcctctggacctgtgggcaaagccctgtccgatgcctgcatgggaacaatcgccagcttcctgagcaagtaccaggacatcatcatcgagcaccagaaggtggtcaagggcaaccagaagagactggaaagcctgagggagctggccggcaaagagaacctggaataccccagcgtgaccctgcctcctcagcctcacacaaaagaaggcgtggacgcctacaacgaagtgatcgccagagtgagaatgtgggtcaacctgaacctgtggcagaagctgaaactgtccagggacgacgccaagcctctgctgagactgaagggcttccctagcttccctctggtggaaagacaggccaatgaagtggattggtgggacatggtctgcaacgtgaagaagctgatcaacgagaagaaagaggatggcaaggttttctggcagaacctggccggctacaagagacaagaagccctgaggccttacctgagcagcgaagaggaccggaagaagggcaagaagttcgccagataccagctgggcgacctgctgctgcacctggaaaagaagcacggcgaggactggggcaaagtgtacgatgaggcctgggagagaatcgacaagaaggtggaaggcctgagcaagcacattaagctggaagaggaaagaaggagcgaggacgcccaatctaaagccgctctgaccgattggctgagagccaaggccagctttgtgatcgagggcctgaaagaggccgacaaggacgagttctgcagatgcgagctgaagctgcagaagtggtacggcgatctgagaggcaagcccttcgccattgaggccgagaacagcatcctggacatcagcggcttcagcaagcagtacaactgcgccttcatttggcagaaagacggcgtcaagaaactgaacctgtacctgatcatcaattacttcaaaggcggcaagctgcggttcaagaagatcaaacccgaggccttcgaggctaacagattctacaccgtgatcaacaaaaagtccggcgagatcgtgcccatggaagtgaacttcaacttcgacgaccccaacctgattatcctgcctctggccttcggcaagagacagggcagagagttcatctggaacgatctgctgagcctggaaaccggctctctgaagctggccaatggcagagtgatcgagaaaaccctgtacaacaggagaaccagacaggacgagcctgctctgtttgtggccctgaccttcgagagaagagaggtgctggacagcagcaacatcaagcccatgaacctgatcggcgtggaccggggcgagaatatccctgctgtgatcgccctgacagaccctgaaggatgcccactgagcagattcaaggactccctgggcaaccctacacacatcctgagaatcggcgagagctacaaagagaagcagaggacaatccaggccaagaaagaggtggaacagagaagagccggcggatactctaggaagtacgccagcaaggccaagaatctggccgacgacatggtccgaaacaccgccagagatctgctgtactacgccgtgacacaggacgccatgctgatcttcgagaatctgagcagaggcttcggccggcagggcaagagaacctttatggccgagaggcagtacaccagaatggaagattggctcacagctaaactggcctacgagggactgagcaagacctacctgtccaaaacactggcccagtatacctccaagacctgcagcaattgcggcttcaccatcaccagcgccgactacgacagagtgctggaaaagctcaagaaaaccgccaccggctggatgaccaccatcaacggcaaagagctgaaggttgagggccagatcacctactacaacaggtacaagaggcagaacgtcgtgaaggatctgagcgtggaactggacagactgagcgaagagagcgtgaacaacgacatcagcagctggacaaagggcagatcaggcgaggctctgagcctgctgaagaagaggtttagccacagacctgtgcaagagaagttcgtgtgcctgaactgcggcttcgagacacacgccgatgaacaggctgccctgaacattgccagaagctggctgttcctgagaagccaagagtacaagaagtaccagaccaacaagaccaccggcaacaccgacaagagggcctttgtggaaacctggcagagcttctacagaaaaaagctgaaagaagtctggaagcccgccgtg

SEQ ID NO: 216 - protein, 977 aa, Artificial Sequence; identical to SEQ ID NO: 126
  CasX Variant 491

SEQ ID NO: 217 - protein, 987 aa, Artificial Sequence
  CasX Variant
MAPKKKRKVSRQEIKRINKIRRRLVKDSNTKKAGKTGPMKTLLVRVMTPDLRERLENLRKKPENIPQPISNTSRANLNKLLTDYTEMKKAILHVYWEEFQKDPVGLMSRVAQPAPKNIDQRKLIPVKDGNERLTSSGFACSQCCQPLYVYKLEQVNDKGKPHTNYFGRCNVSEHERLILLSPHKPEANDELVTYSLGKFGQRALDFYSIHVTRESNHPVKPLEQIGGNSCASGPVGKALSDACMGAVASFLTKYQDIILEHQKVIKKNEKRLANLKDIASANGLAFPKITLPPQPHTKEGIEAYNNVVAQIVIWVNLNLWQKLKIGRDEAKPLQRLKGFPSFPLVERQANEVDWWDMVCNVKKLINEKKEDGKVFWQNLAGYKRQEALRPYLSSEEDRKKGKKFARYQFGDLLLHLEKKHGEDWGKVYDEAWERIDKKVEGLSKHIKLEEERRSEDAQSKAALTDWLRAKASFVIEGLKEADKDEFCRCELKLQKWYGDLRGKPFAIEAENSILDISGFSKQYNCAFIWQKDGVKKLNLYLIINYFKGGKLRFKKIKPEAFEANRFYTVINKKSGEIVPMEVNFNFDDPNLIILPLAFGKRQGREFIWNDLLSLETGSLKLANGRVIEKTLYNRRTRQDEPALFVALTFERREVLDSSNIKPMNLIGIDRGENIPAVIALTDPEGCPLSRFKDSLGNPTHILRIGESYKEKQRTIQAKKEVEQRRAGGYSRKYASKAKNLADDMVRNTARDLLYYAVTQDAMLIFENLSRGFGRQGKRTFMAERQYTRMEDWLTAKLAYEGLSKTYLSKTLAQYTSKTCSNCGFTITSADYDRVLEKLKKTATGWMTTINGKELKVEGQITYYNRYKRQNVVKDLSVELDRLSEESVNNDISSWTKGRSGEALSLLKKRFSHRPVQEKFVCLNCGFETHADEQAALNIARSWLFLRSQEYKKYQTNKTTGNTDKRAFVETWQSFYRKKLKEVWKPAV

SEQ ID NO: 218 - protein, 986 aa, Artificial Sequence
  CasX Variant
MQEIKRINKIRRRLVKDSNTKKAGKTGPMKTLLVRVMTPDLRERLENLRKKPENIPQPISNTSRANLNKLLTDYTEMKKAILHVYWEEFQKDPVGLMSRVAQPAPKNIDQRKLIPVKDGNERLTSSGFACSQCCQPLYVYKLEQVNDKGKPHTNYFGRCNVSEHERLILLSPHKPEANDELVTYSLGKFGQRALDFYSIHVTRESNHPVKPLEQIGGNSCASGPVGKALSDACMGAVASFLTKYQDIILEHQKVIKKNEKRLANLKDIASANGLAFPKITLPPQPHTKEGIEAYNNVVAQIVIWVNLNLWQKLKIGRDEAKPLQRLKGFPSFPLVERQANEVDWWDMVCNVKKLINEKKEDGKVFWQNLAGYKRQEALRPYLSSEEDRKKGKKFARYQFGDLLLHLEKKHGEDWGKVYDEAWERIDKKVEGLSKHIKLEEERRSEDAQSKAALTDWLRAKASFVIEGLKEADKDEFCRCELKLQKWYGDLRGKPFAIEAENSILDISGFSKQYNCAFIWQKDGVKKLNLYLIINYFKGGKLRFKKIKPEAFEANRFYTVINKKSGEIVPMEVNFNFDDPNLIILPLAFGKRQGREFIWNDLLSLETGSLKLANGRVIEKTLYNRRTRQDEPALFVALTFERREVLDSSNIKPMNLIGIDRGENIPAVIALTDPEGCPLSRFKDSLGNPTHILRIGESYKEKQRTIQAKKEVEQRRAGGYSRKYASKAKNLADDMVRNTARDLLYYAVTQDAMLIFENLSRGFGRQGKRTFMAERQYTRMEDWLTAKLAYEGLSKTYLSKTLAQYTSKTCSNCGFTITSADYDRVLEKLKKTATGWMTTINGKELKVEGQITYYNRYKRQNVVKDLSVELDRLSEESVNNDISSWTKGRSGEALSLLKKRFSHRPVQEKFVCLNCGFETHADEQAALNIARSWLFLRSQEYKKYQTNKTTGNTDKRAFVETWQSFYRKKLKEVWKPAVTSPKKKRKV

SEQ ID NO: 219 - protein, 996 aa, Artificial Sequence
  CasX Variant
MQEIKRINKIRRRLVKDSNTKKAGKTGPMKTLLVRVMTPDLRERLENLRKKPENIPQPISNTSRANLNKLLTDYTEMKKAILHVYWEEFQKDPVGLMSRVAQPAPKNIDQRKLIPVKDGNERLTSSGFACSQCCQPLYVYKLEQVNDKGKPHTNYFGRCNVSEHERLILLSPHKPEANDELVTYSLGKFGQRALDFYSIHVTRESNHPVKPLEQIGGNSCASGPVGKALSDACMGAVASFLTKYQDIILEHQKVIKKNEKRLANLKDIASANGLAFPKITLPPQPHTKEGIEAYNNVVAQIVIWVNLNLWQKLKIGRDEAKPLQRLKGFPSFPLVERQANEVDWWDMVCNVKKLINEKKEDGKVFWQNLAGYKRQEALRPYLSSEEDRKKGKKFARYQFGDLLLHLEKKHGEDWGKVYDEAWERIDKKVEGLSKHIKLEEERRSEDAQSKAALTDWLRAKASFVIEGLKEADKDEFCRCELKLQKWYGDLRGKPFAIEAENSILDISGFSKQYNCAFIWQKDGVKKLNLYLIINYFKGGKLRFKKIKPEAFEANRFYTVINKKSGEIVPMEVNFNFDDPNLIILPLAFGKRQGREFIWNDLLSLETGSLKLANGRVIEKTLYNRRTRQDEPALFVALTFERREVLDSSNIKPMNLIGIDRGENIPAVIALTDPEGCPLSRFKDSLGNPTHILRIGESYKEKQRTIQAKKEVEQRRAGGYSRKYASKAKNLADDMVRNTARDLLYYAVTQDAMLIFENLSRGFGRQGKRTFMAERQYTRMEDWLTAKLAYEGLSKTYLSKTLAQYTSKTCSNCGFTITSADYDRVLEKLKKTATGWMTTINGKELKVEGQITYYNRYKRQNVVKDLSVELDRLSEESVNNDISSWTKGRSGEALSLLKKRFSHRPVQEKFVCLNCGFETHADEQAALNIARSWLFLRSQEYKKYQTNKTTGNTDKRAFVETWQSFYRKKLKEVWKPAVTSPKKKRKVPPPPKKKRKV

SEQ ID NO: 220 - protein, 1006 aa, Artificial Sequence
  CasX Variant
MQEIKRINKIRRRLVKDSNTKKAGKTGPMKTLLVRVMTPDLRERLENLRKKPENIPQPISNTSRANLNKLLTDYTEMKKAILHVYWEEFQKDPVGLMSRVAQPAPKNIDQRKLIPVKDGNERLTSSGFACSQCCQPLYVYKLEQVNDKGKPHTNYFGRCNVSEHERLILLSPHKPEANDELVTYSLGKFGQRALDFYSIHVTRESNHPVKPLEQIGGNSCASGPVGKALSDACMGAVASFLTKYQDIILEHQKVIKKNEKRLANLKDIASANGLAFPKITLPPQPHTKEGIEAYNNVVAQIVIWVNLNLWQKLKIGRDEAKPLQRLKGFPSFPLVERQANEVDWWDMVCNVKKLINEKKEDGKVFWQNLAGYKRQEALRPYLSSEEDRKKGKKFARYQFGDLLLHLEKKHGEDWGKVYDEAWERIDKKVEGLSKHIKLEEERRSEDAQSKAALTDWLRAKASFVIEGLKEADKDEFCRCELKLQKWYGDLRGKPFAIEAENSILDISGFSKQYNCAFIWQKDGVKKLNLYLIINYFKGGKLRFKKIKPEAFEANRFYTVINKKSGEIVPMEVNFNFDDPNLIILPLAFGKRQGREFIWNDLLSLETGSLKLANGRVIEKTLYNRRTRQDEPALFVALTFERREVLDSSNIKPMNLIGIDRGENIPAVIALTDPEGCPLSRFKDSLGNPTHILRIGESYKEKQRTIQAKKEVEQRRAGGYSRKYASKAKNLADDMVRNTARDLLYYAVTQDAMLIFENLSRGFGRQGKRTFMAERQYTRMEDWLTAKLAYEGLSKTYLSKTLAQYTSKTCSNCGFTITSADYDRVLEKLKKTATGWMTTINGKELKVEGQITYYNRYKRQNVVKDLSVELDRLSEESVNNDISSWTKGRSGEALSLLKKRFSHRPVQEKFVCLNCGFETHADEQAALNIARSWLFLRSQEYKKYQTNKTTGNTDKRAFVETWQSFYRKKLKEVWKPAVTSPKKKRKVPPPHKKKHPDASVNFSEFSK

SEQ ID NO: 221 - protein, 1007 aa, Artificial Sequence
  CasX Variant
MQEIKRINKIRRRLVKDSNTKKAGKTGPMKTLLVRVMTPDLRERLENLRKKPENIPQPISNTSRANLNKLLTDYTEMKKAILHVYWEEFQKDPVGLMSRVAQPAPKNIDQRKLIPVKDGNERLTSSGFACSQCCQPLYVYKLEQVNDKGKPHTNYFGRCNVSEHERLILLSPHKPEANDELVTYSLGKFGQRALDFYSIHVTRESNHPVKPLEQIGGNSCASGPVGKALSDACMGAVASFLTKYQDIILEHQKVIKKNEKRLANLKDIASANGLAFPKITLPPQPHTKEGIEAYNNVVAQIVIWVNLNLWQKLKIGRDEAKPLQRLKGFPSFPLVERQANEVDWWDMVCNVKKLINEKKEDGKVFWQNLAGYKRQEALRPYLSSEEDRKKGKKFARYQFGDLLLHLEKKHGEDWGKVYDEAWERIDKKVEGLSKHIKLEEERRSEDAQSKAALTDWLRAKASFVIEGLKEADKDEFCRCELKLQKWYGDLRGKPFAIEAENSILDISGFSKQYNCAFIWQKDGVKKLNLYLIINYFKGGKLRFKKIKPEAFEANRFYTVINKKSGEIVPMEVNFNFDDPNLIILPLAFGKRQGREFIWNDLLSLETGSLKLANGRVIEKTLYNRRTRQDEPALFVALTFERREVLDSSNIKPMNLIGIDRGENIPAVIALTDPEGCPLSRFKDSLGNPTHILRIGESYKEKQRTIQAKKEVEQRRAGGYSRKYASKAKNLADDMVRNTARDLLYYAVTQDAMLIFENLSRGFGRQGKRTFMAERQYTRMEDWLTAKLAYEGLSKTYLSKTLAQYTSKTCSNCGFTITSADYDRVLEKLKKTATGWMTTINGKELKVEGQITYYNRYKRQNVVKDLSVELDRLSEESVNNDISSWTKGRSGEALSLLKKRFSHRPVQEKFVCLNCGFETHADEQAALNIARSWLFLRSQEYKKYQTNKTTGNTDKRAFVETWQSFYRKKLKEVWKPAVTSPKKKRKVPPPQRPGPYDRPQRPGPYDRP

SEQ ID NO: 222 - protein, 1005 aa, Artificial Sequence
  CasX Variant
MQEIKRINKIRRRLVKDSNTKKAGKTGPMKTLLVRVMTPDLRERLENLRKKPENIPQPISNTSRANLNKLLTDYTEMKKAILHVYWEEFQKDPVGLMSRVAQPAPKNIDQRKLIPVKDGNERLTSSGFACSQCCQPLYVYKLEQVNDKGKPHTNYFGRCNVSEHERLILLSPHKPEANDELVTYSLGKFGQRALDFYSIHVTRESNHPVKPLEQIGGNSCASGPVGKALSDACMGAVASFLTKYQDIILEHQKVIKKNEKRLANLKDIASANGLAFPKITLPPQPHTKEGIEAYNNVVAQIVIWVNLNLWQKLKIGRDEAKPLQRLKGFPSFPLVERQANEVDWWDMVCNVKKLINEKKEDGKVFWQNLAGYKRQEALRPYLSSEEDRKKGKKFARYQFGDLLLHLEKKHGEDWGKVYDEAWERIDKKVEGLSKHIKLEEERRSEDAQSKAALTDWLRAKASFVIEGLKEADKDEFCRCELKLQKWYGDLRGKPFAIEAENSILDISGFSKQYNCAFIWQKDGVKKLNLYLIINYFKGGKLRFKKIKPEAFEANRFYTVINKKSGEIVPMEVNFNFDDPNLIILPLAFGKRQGREFIWNDLLSLETGSLKLANGRVIEKTLYNRRTRQDEPALFVALTFERREVLDSSNIKPMNLIGIDRGENIPAVIALTDPEGCPLSRFKDSLGNPTHILRIGESYKEKQRTIQAKKEVEQRRAGGYSRKYASKAKNLADDMVRNTARDLLYYAVTQDAMLIFENLSRGFGRQGKRTFMAERQYTRMEDWLTAKLAYEGLSKTYLSKTLAQYTSKTCSNCGFTITSADYDRVLEKLKKTATGWMTTINGKELKVEGQITYYNRYKRQNVVKDLSVELDRLSEESVNNDISSWTKGRSGEALSLLKKRFSHRPVQEKFVCLNCGFETHADEQAALNIARSWLFLRSQEYKKYQTNKTTGNTDKRAFVETWQSFYRKKLKEVWKPAVTSPKKKRKVPPPLSPSLSPLLSPSLSPL

SEQ ID NO: 223 - protein, 1008 aa, Artificial Sequence
  CasX Variant
MQEIKRINKIRRRLVKDSNTKKAGKTGPMKTLLVRVMTPDLRERLENLRKKPENIPQPISNTSRANLNKLLTDYTEMKKAILHVYWEEFQKDPVGLMSRVAQPAPKNIDQRKLIPVKDGNERLTMSSGFACSQCCQPLYVYKLEQVNDKGKPHTNYFGRCNVSEHERLILLSPHKPEANDELVTYSLGKFGQRALDFYSIHVTRESNHPVKPLEQIGGNSCASGPVGKALSDACMGAVASFLTKYQDIILEHQKVIKKNEKRLANLKDIASANGLAFPKITLPPQPHTKEGIEAYNNVVAQIVIWVNLNLWQKLKIGRDEAKPLQRLKGFPSFPLVERQANEVDWWDMVCNVKKLINEKKEDGKVFWQNLAGYKRQEALRPYLSSEEDRKKGKKFARYQFGDLLLHLEKKHGEDWGKVYDEAWERIDKKVEGLSKHIKLEEERRSEDAQSKAALTDWLRAKASFVIEGLKEADKDEFCRCELKLQKWYGDLRGKPFAIEAENSILDISGFSKQYNCAFIWQKDGVKKLNLYLIINYFKGGKLRFKKIKPEAFEANRFYTVINKKSGEIVPMEVNFNFDDPNLIILPLAFGKRQGREFIWNDLLSLETGSLKLANGRVIEKTLYNRRTRQDEPALFVALTFERREVLDSSNIKPMNLIGIDRGENIPAVIALTDPEGCPLSRFKDSLGNPTHILRIGESYKEKQRTIQAKKEVEQRRAGGYSRKYASKAKNLADDMVRNTARDLLYYAVTQDAMLIFENLSRGFGRQGKRTFMAERQYTRMEDWLTAKLAYEGLSKTYLSKTLAQYTSKTCSNCGFTITSADYDRVLEKLKKTATGWMTTINGKELKVEGQITYYNRYKRQNVVKDLSVELDRLSEESVNNDISSWTKGRSGEALSLLKKRFSHRPVQEKFVCLNCGFETHADEQAALNIARSWLFLRSQEYKKYQTNKTTGNTDKRAFVETWQSFYRKKLKEVWKPAVTSPKKKRKVPPPRGKGGKGLGKGGAKRHRK

SEQ ID NO: 224 - protein, 1013 aa, Artificial Sequence
  CasX Variant
MQEIKRINKIRRRLVKDSNTKKAGKTGPMKTLLVRVMTPDLRERLENLRKKPENIPQPISNTSRANLNKLLTDYTEMKKAILHVYWEEFQKDPVGLMSRVAQPAPKNIDQRKLIPVKDGNERLTSSGFACSQCCQPLYVYKLEQVNDKGKPHTNYFGRCNVSEHERLILLSPHKPEANDELVTYSLGKFGQRALDFYSIHVTRESNHPVKPLEQIGGNSCASGPVGKALSDACMGAVASFLTKYQDIILEHQKVIKKNEKRLANLKDIASANGLAFPKITLPPQPHTKEGIEAYNNVVAQIVIWVNLNLWQKLKIGRDEAKPLQRLKGFPSFPLVERQANEVDWWDMVCNVKKLINEKKEDGKVFWQNLAGYKRQEALRPYLSSEEDRKKGKKFARYQFGDLLLHLEKKHGEDWGKVYDEAWERIDKKVEGLSKHIKLEEERRSEDAQSKAALTDWLRAKASFVIEGLKEADKDEFCRCELKLQKWYGDLRGKPFAIEAENSILDISGFSKQYNCAFIWQKDGVKKLNLYLIINYFKGGKLRFKKIKPEAFEANRFYTVINKKSGEIVPMEVNFNFDDPNLIILPLAFGKRQGREFIWNDLLSLETGSLKLANGRVIEKTLYNRRTRQDEPALFVALTFERREVLDSSNIKPMNLIGIDRGENIPAVIALTDPEGCPLSRFKDSLGNPTHILRIGESYKEKQRTIQAKKEVEQRRAGGYSRKYASKAKNLADDMVRNTARDLLYYAVTQDAMLIFENLSRGFGRQGKRTFMAERQYTRMEDWLTAKLAYEGLSKTYLSKTLAQYTSKTCSNCGFTITSADYDRVLEKLKKTATGWMTTINGKELKVEGQITYYNRYKRQNVVKDLSVELDRLSEESVNNDISSWTKGRSGEALSLLKKRFSHRPVQEKFVCLNCGFETHADEQAALNIARSWLFLRSQEYKKYQTNKTTGNTDKRAFVETWQSFYRKKLKEVWKPAVTSPKKKRKVPPPSRRRKANPTKLSENAKKLAKEVEN

SEQ ID NO: 225 - protein, 998 aa, Artificial Sequence
  CasX Variant
MQEIKRINKIRRRLVKDSNTKKAGKTGPMKTLLVRVMTPDLRERLENLRKKPENIPQPISNTSRANLNKLLTDYTEMKKAILHVYWEEFQKDPVGLMSRVAQPAPKNIDQRKLIPVKDGNERLTSSGFACSQCCQPLYVYKLEQVNDKGKPHTNYFGRCNVSEHERLILLSPHKPEANDELVTYSLGKFGQRALDFYSIHVTRESNHPVKPLEQIGGNSCASGPVGKALSDACMGAVASFLTKYQDIILEHQKVIKKNEKRLANLKDIASANGLAFPKITLPPQPHTKEGIEAYNNVVAQIVIWVNLNLWQKLKIGRDEAKPLQRLKGFPSFPLVERQANEVDWWDMVCNVKKLINEKKEDGKVFWQNLAGYKRQEALRPYLSSEEDRKKGKKFARYQFGDLLLHLEKKHGEDWGKVYDEAWERIDKKVEGLSKHIKLEEERRSEDAQSKAALTDWLRAKASFVIEGLKEADKDEFCRCELKLQKWYGDLRGKPFAIEAENSILDISGFSKQYNCAFIWQKDGVKKLNLYLIINYFKGGKLRFKKIKPEAFEANRFYTVINKKSGEIVPMEVNFNFDDPNLIILPLAFGKRQGREFIWNDLLSLETGSLKLANGRVIEKTLYNRRTRQDEPALFVALTFERREVLDSSNIKPMNLIGIDRGENIPAVIALTDPEGCPLSRFKDSLGNPTHILRIGESYKEKQRTIQAKKEVEQRRAGGYSRKYASKAKNLADDMVRNTARDLLYYAVTQDAMLIFENLSRGFGRQGKRTFMAERQYTRMEDWLTAKLAYEGLSKTYLSKTLAQYTSKTCSNCGFTITSADYDRVLEKLKKTATGWMTTINGKELKVEGQITYYNRYKRQNVVKDLSVELDRLSEESVNNDISSWTKGRSGEALSLLKKRFSHRPVQEKFVCLNCGFETHADEQAALNIARSWLFLRSQEYKKYQTNKTTGNTDKRAFVETWQSFYRKKLKEVWKPAVTSPKKKRKVPPPPAAKRVKLD

SEQ ID NO: 226 - protein, 997 aa, Artificial Sequence
  CasX Variant
MQEIKRINKIRRRLVKDSNTKKAGKTGPMKTLLVRVMTPDLRERLENLRKKPENIPQPISNTSRANLNKLLTDYTEMKKAILHVYWEEFQKDPVGLMSRVAQPAPKNIDQRKLIPVKDGNERLTSSGFACSQCCQPLYVYKLEQVNDKGKPHTNYFGRCNVSEHERLILLSPHKPEANDELVTYSLGKFGQRALDFYSIHVTRESNHPVKPLEQIGGNSCASGPVGKALSDACMGAVASFLTKYQDIILEHQKVIKKNEKRLANLKDIASANGLAFPKITLPPQPHTKEGIEAYNNVVAQIVIWVNLNLWQKLKIGRDEAKPLQRLKGFPSFPLVERQANEVDWWDMVCNVKKLINEKKEDGKVFWQNLAGYKRQEALRPYLSSEEDRKKGKKFARYQFGDLLLHLEKKHGEDWGKVYDEAWERIDKKVEGLSKHIKLEEERRSEDAQSKAALTDWLRAKASFVIEGLKEADKDEFCRCELKLQKWYGDLRGKPFAIEAENSILDISGFSKQYNCAFIWQKDGVKKLNLYLIINYFKGGKLRFKKIKPEAFEANRFYTVINKKSGEIVPMEVNFNFDDPNLIILPLAFGKRQGREFIWNDLLSLETGSLKLANGRVIEKTLYNRRTRQDEPALFVALTFERREVLDSSNIKPMNLIGIDRGENIPAVIALTDPEGCPLSRFKDSLGNPTHILRIGESYKEKQRTIQAKKEVEQRRAGGYSRKYASKAKNLADDMVRNTARDLLYYAVTQDAMLIFENLSRGFGRQGKRTFMAERQYTRMEDWLTAKLAYEGLSKTYLSKTLAQYTSKTCSNCGFTITSADYDRVLEKLKKTATGWMTTINGKELKVEGQITYYNRYKRQNVVKDLSVELDRLSEESVNNDISSWTKGRSGEALSLLKKRFSHRPVQEKFVCLNCGFETHADEQAALNIARSWLFLRSQEYKKYQTNKTTGNTDKRAFVETWQSFYRKKLKEVWKPAVTSPKKKRKVPPPKRSFSKAF

SEQ ID NO: 227 - protein, 1008 aa, Artificial Sequence
  CasX Variant
MQEIKRINKIRRRLVKDSNTKKAGKTGPMKTLLVRVMTPDLRERLENLRKKPENIPQPISNTSRANLNKLLTDYTEMKKAILHVYWEEFQKDPVGLMSRVAQPAPKNIDQRKLIPVKDGNERLTSSGFACSQCCQPLYVYKLEQVNDKGKPHTNYFGRCNVSEHERLILLSPHKPEANDELVTYSLGKFGQRALDFYSIHVTRESNHPVKPLEQIGGNSCASGPVGKALSDACMGAVASFLTKYQDIILEHQKVIKKNEKRLANLKDIASANGLAFPKITLPPQPHTKEGIEAYNNVVAQIVIWVNLNLWQKLKIGRDEAKPLQRLKGFPSFPLVERQANEVDWWDMVCNVKKLINEKKEDGKVFWQNLAGYKRQEALRPYLSSEEDRKKGKKFARYQFGDLLLHLEKKHGEDWGKVYDEAWERIDKKVEGLSKHIKLEEERRSEDAQSKAALTDWLRAKASFVIEGLKEADKDEFCRCELKLQKWYGDLRGKPFAIEAENSILDISGFSKQYNCAFIWQKDGVKKLNLYLIINYFKGGKLRFKKIKPEAFEANRFYTVINKKSGEIVPMEVNFNFDDPNLIILPLAFGKRQGREFIWNDLLSLETGSLKLANGRVIEKTLYNRRTRQDEPALFVALTFERREVLDSSNIKPMNLIGIDRGENIPAVIALTDPEGCPLSRFKDSLGNPTHILRIGESYKEKQRTIQAKKEVEQRRAGGYSRKYASKAKNLADDMVRNTARDLLYYAVTQDAMLIFENLSRGFGRQGKRTFMAERQYTRMEDWLTAKLAYEGLSKTYLSKTLAQYTSKTCSNCGFTITSADYDRVLEKLKKTATGWMTTINGKELKVEGQITYYNRYKRQNVVKDLSVELDRLSEESVNNDISSWTKGRSGEALSLLKKRFSHRPVQEKFVCLNCGFETHADEQAALNIARSWLFLRSQEYKKYQTNKTTGNTDKRAFVETWQSFYRKKLKEVWKPAVTSPKKKRKVPPPKRGINDRNFWRGENERKTR

SEQ ID NO: 228 - protein, 1007 aa, Artificial Sequence
  CasX Variant
MAPKKKRKVSRMQEIKRINKIRRRLVKDSNTKKAGKTGPMKTLLVRVMTPDLRERLENLRKKPENIPQPISNTSRANLNKLLTDYTEMKKAILHVYWEEFQKDPVGLMSRVAQPAPKNIDQRKLIPVKDGNERLTSSGFACSQCCQPLYVYKLEQVNDKGKPHTNYFGRCNVSEHERLILLSPHKPEANDELVTYSLGKFGQRALDFYSIHVTRESNHPVKPLEQIGGNSCASGPVGKALSDACMGAVASFLTKYQDIILEHQKVIKKNEKRLANLKDIASANGLAFPKITLPPQPHTKEGIEAYNNVVAQIVIWVNLNLWQKLKIGRDEAKPLQRLKGFPSFPLVERQANEVDWWDMVCNVKKLINEKKEDGKVFWQNLAGYKRQEALRPYLSSEEDRKKGKKFARYQFGDLLLHLEKKHGEDWGKVYDEAWERIDKKVEGLSKHIKLEEERRSEDAQSKAALTDWLRAKASFVIEGLKEADKDEFCRCELKLQKWYGDLRGKPFAIEAENSILDISGFSKQYNCAFIWQKDGVKKLNLYLIINYFKGGKLRFKKIKPEAFEANRFYTVINKKSGEIVPMEVNFNFDDPNLIILPLAFGKRQGREFIWNDLLSLETGSLKLANGRVIEKTLYNRRTRQDEPALFVALTFERREVLDSSNIKPMNLIGIDRGENIPAVIALTDPEGCPLSRFKDSLGNPTHILRIGESYKEKQRTIQAKKEVEQRRAGGYSRKYASKAKNLADDMVRNTARDLLYYAVTQDAMLIFENLSRGFGRQGKRTFMAERQYTRMEDWLTAKLAYEGLSKTYLSKTLAQYTSKTCSNCGFTITSADYDRVLEKLKKTATGWMTTINGKELKVEGQITYYNRYKRQNVVKDLSVELDRLSEESVNNDISSWTKGRSGEALSLLKKRFSHRPVQEKFVCLNCGFETHADEQAALNIARSWLFLRSQEYKKYQTNKTTGNTDKRAFVETWQSFYRKKLKEVWKPAVTSPKKKRKVPPPPKKKRKV

SEQ ID NO: 229 - protein, 1009 aa, Artificial Sequence
  CasX Variant
MAPKKKRKVSRMQEIKRINKIRRRLVKDSNTKKAGKTGPMKTLLVRVMTPDLRERLENLRKKPENIPQPISNTSRANLNKLLTDYTEMKKAILHVYWEEFQKDPVGLMSRVAQPAPKNIDQRKLIPVKDGNERLTSSGFACSQCCQPLYVYKLEQVNDKGKPHTNYFGRCNVSEHERLILLSPHKPEANDELVTYSLGKFGQRALDFYSIHVTRESNHPVKPLEQIGGNSCASGPVGKALSDACMGAVASFLTKYQDIILEHQKVIKKNEKRLANLKDIASANGLAFPKITLPPQPHTKEGIEAYNNVVAQIVIWVNLNLWQKLKIGRDEAKPLQRLKGFPSFPLVERQANEVDWWDMVCNVKKLINEKKEDGKVFWQNLAGYKRQEALRPYLSSEEDRKKGKKFARYQFGDLLLHLEKKHGEDWGKVYDEAWERIDKKVEGLSKHIKLEEERRSEDAQSKAALTDWLRAKASFVIEGLKEADKDEFCRCELKLQKWYGDLRGKPFAIEAENSILDISGFSKQYNCAFIWQKDGVKKLNLYLIINYFKGGKLRFKKIKPEAFEANRFYTVINKKSGEIVPMEVNFNFDDPNLIILPLAFGKRQGREFIWNDLLSLETGSLKLANGRVIEKTLYNRRTRQDEPALFVALTFERREVLDSSNIKPMNLIGIDRGENIPAVIALTDPEGCPLSRFKDSLGNPTHILRIGESYKEKQRTIQAKKEVEQRRAGGYSRKYASKAKNLADDMVRNTARDLLYYAVTQDAMLIFENLSRGFGRQGKRTFMAERQYTRMEDWLTAKLAYEGLSKTYLSKTLAQYTSKTCSNCGFTITSADYDRVLEKLKKTATGWMTTINGKELKVEGQITYYNRYKRQNVVKDLSVELDRLSEESVNNDISSWTKGRSGEALSLLKKRFSHRPVQEKFVCLNCGFETHADEQAALNIARSWLFLRSQEYKKYQTNKTTGNTDKRAFVETWQSFYRKKLKEVWKPAVTSPKKKRKVPPPPAAKRVKLD

SEQ ID NO: 230 - DNA, 21 bp, Artificial Sequence
  SV40 NLS
ccaaagaagaagcggaaggtc

SEQ ID NO: 231 - DNA, 51 bp, Artificial Sequence
  synthetic NLS
cacaagaagaaacatccagacgcatcagtcaactttagcgagttcagtaaa

SEQ ID NO: 232 - DNA, 54 bp, Artificial Sequence
  synthetic NLS
cagcgccctgggccttacgataggccgcaaagacccggaccgtatgatcgccct

SEQ ID NO: 233 - DNA, 48 bp, Artificial Sequence
  synthetic NLS
ctcagcccgagtcttagtccactgctttccccgtccctgtctccactg

SEQ ID NO: 234 - DNA, 54 bp, Artificial Sequence
  synthetic NLS
cggggcaagggtggcaaggggcttggcaaggggggggcaaagaggcacaggaag

SEQ ID NO: 235 - DNA, 72 bp, Artificial Sequence
  EGL-13 NLS
agccgccgcagaaaagccaatcctacaaaactgtcagaaaatgcgaaaaaacttgctaaggaggtggaaaac

SEQ ID NO: 236 - DNA, 27 bp, Artificial Sequence
  c-Myc NLS
cctgccgcaaagcgagtgaaattggac

SEQ ID NO: 237 - DNA, 24 bp, Artificial Sequence
  Nucleolar RNA Helicase II NLS
aagcggtccttcagtaaggccttt

SEQ ID NO: 238 - DNA, 57 bp, Artificial Sequence
  Influenza A protein NLS
aaacggggaataaacgaccggaacttctggcgcggggaaaacgagcgcaaaacccga

SEQ ID NO: 239 - DNA, 2991 bp, Artificial Sequence
  CasX Variant
atggccccaaagaagaagcggaaggtctctagacaagagatcaagagaatcaacaagatcagaaggagactggtcaaggacagcaacacaaagaaggccggcaagacaggccccatgaaaaccctgctcgtcagagtgatgacccctgacctgagagagcggctggaaaacctgagaaagaagcccgagaacatccctcagcctatcagcaacaccagcagggccaacctgaacaagctgctgaccgactacaccgagatgaagaaagccatcctgcacgtgtactgggaagagttccagaaagaccccgtgggcctgatgagcagagttgctcagcctgccagcaagaagatcgaccagaacaagctgaagcccgagatggacgagaagggcaatctgaccacagccggctttgcctgctctcagtgtggccagcctctgttcgtgtacaagctggaacaggtgtccgagaaaggcaaggcctacaccaactacttcggcagatgtaacgtggccgagcacgagaagctgattctgctggcccagctgaaacctgagaaggactctgatgaggccgtgacctacagcctgggcaagtttggacagagagccctggacttctacagcatccacgtgaccagggagagcaatcaccctgtgaagcccctggaacagatcggcggcaatagctgtgcctctggacctgtgggaaaagccctgagcgacgcctgtatgggagccgtggcatccttcctgaccaagtaccaggacatcatcctggaacaccagaaagtgatcaagaagaacgagaaaagactggccaacctcaaggatatcgccagcgctaacggcctggcctttcctaagatcaccctgcctccacagcctcacaccaaagagggcatcgaggcctacaacaacgtggtggcccagatcgtgatttgggtcaacctgaatctgtggcagaagctgaagatcggcagggacgaagccaagccactgcagagactgaagggcttccctagcttccctctggtggaaagacaggccaatgaagtggattggtgggacatggtctgcaacgtgaagaagctgatcaacgagaagaaagaggatggcaaggttttctggcagaacctggccggctacaagagacaagaagccctgaggccttacctgagcagcgaagaggaccggaagaagggcaagaagttcgccagataccagttcggcgacctgctgctgcacctggaaaagaagcacggcgaggactggggcaaagtgtacgatgaggcctgggagagaatcgacaagaaggtggaaggcctgagcaagcacattaagctggaagaggaaagaaggagcgaggacgcccaatctaaagccgctctgaccgattggctgagagccaaggccagctttgtgatcgagggcctgaaagaggccgacaaggacgagttctgcagatgcgagctgaagctgcagaagtggtacggcgatctgagaggcaagcccttcgccattgaggccgagaacagcatcctggacatcagcggcttcagcaagcagtacaactgcgccttcatttggcagaaagacggcgtcaagaaactgaacctgtacctgatcatcaattacttcaaaggcggcaagctgcggttcaagaagatcaaacccgaggccttcgaggctaacagattctacaccgtgatcaacaaaaagtccggcgagatcgtgcccatggaagtgaacttcaacttcgacgaccccaacctgattatcctgcctctggccttcggcaagagacagggcagagagttcatctggaacgatctgctgagcctggaaaccggctctctgaagctggccaatggcagagtgatcgagaaaaccctgtacaacaggagaaccagacaggacgagcctgctctgtttgtggccctgaccttcgagagaagagaggtgctggacagcagcaacatcaagcccatgaacctgatcggcatcgaccggggcgagaatatccctgctgtgatcgccctgacagaccctgaaggatgcccactgagcagattcaaggactccctgggcaaccctacacacatcctgagaatcggcgagagctacaaagagaagcagaggacaatccaggccaagaaagaggtggaacagagaagagccggcggatactctaggaagtacgccagcaaggccaagaatctggccgacgacatggtccgaaacaccgccagagatctgctgtactacgccgtgacacaggacgccatgctgatcttcgagaatctgagcagaggcttcggccggcagggcaagagaacctttatggccgagaggcagtacaccagaatggaagattggctcacagctaaactggcctacgagggactgagcaagacctacctgtccaaaacactggcccagtatacctccaagacctgcagcaattgcggcttcaccatcaccagcgccgactacgacagagtgctggaaaagctcaagaaaaccgccaccggctggatgaccaccatcaacggcaaagagctgaaggttgagggccagatcacctactacaacaggtacaagaggcagaacgtcgtgaaggatctgagcgtggaactggacagactgagcgaagagagcgtgaacaacgacatcagcagctggacaaagggcagatcaggcgaggctctgagcctgctgaagaagaggtttagccacagacctgtgcaagagaagttcgtgtgcctgaactgcggcttcgagacacacgccgatgaacaggctgccctgaacattgccagaagctggctgttcctgagaagccaagagtacaagaagtaccagaccaacaagaccaccggcaacaccgacaagagggcctttgtggaaacctggcagagcttctacagaaaaaagctgaaagaagtctggaagcccgccgtgactagtccaaaaaagaagagaaaggta

SEQ ID NO: 240 - protein, 997 aa, Artificial Sequence
  CasX Variant
MAPKKKRKVSRQEIKRINKIRRRLVKDSNTKKAGKTGPMKTLLVRVMTPDLRERLENLRKKPENIPQPISNTSRANLNKLLTDYTEMKKAILHVYWEEFQKDPVGLMSRVAQPASKKIDQNKLKPEMDEKGNLTTAGFACSQCGQPLFVYKLEQVSEKGKAYTNYFGRCNVAEHEKLILLAQLKPEKDSDEAVTYSLGKFGQRALDFYSIHVTRESNHPVKPLEQIGGNSCASGPVGKALSDACMGAVASFLTKYQDIILEHQKVIKKNEKRLANLKDIASANGLAFPKITLPPQPHTKEGIEAYNNVVAQIVIWVNLNLWQKLKIGRDEAKPLQRLKGFPSFPLVERQANEVDWWDMVCNVKKLINEKKEDGKVFWQNLAGYKRQEALRPYLSSEEDRKKGKKFARYQFGDLLLHLEKKHGEDWGKVYDEAWERIDKKVEGLSKHIKLEEERRSEDAQSKAALTDWLRAKASFVIEGLKEADKDEFCRCELKLQKWYGDLRGKPFAIEAENSILDISGFSKQYNCAFIWQKDGVKKLNLYLIINYFKGGKLRFKKIKPEAFEANRFYTVINKKSGEIVPMEVNFNFDDPNLIILPLAFGKRQGREFIWNDLLSLETGSLKLANGRVIEKTLYNRRTRQDEPALFVALTFERREVLDSSNIKPMNLIGIDRGENIPAVIALTDPEGCPLSRFKDSLGNPTHILRIGESYKEKQRTIQAKKEVEQRRAGGYSRKYASKAKNLADDMVRNTARDLLYYAVTQDAMLIFENLSRGFGRQGKRTFMAERQYTRMEDWLTAKLAYEGLSKTYLSKTLAQYTSKTCSNCGFTITSADYDRVLEKLKKTATGWMTTINGKELKVEGQITYYNRYKRQNVVKDLSVELDRLSEESVNNDISSWTKGRSGEALSLLKKRFSHRPVQEKFVCLNCGFETHADEQAALNIARSWLFLRSQEYKKYQTNKTTGNTDKRAFVETWQSFYRKKLKEVWKPAVTSPKKKRKV

SEQ ID NO: 241 - DNA, 2988 bp, Artificial Sequence
  CasX Variant
atggccccaaagaagaagcggaaggtctctagacaagagatcaagagaatcaacaagatcagaaggagactggtcaaggacagcaacacaaagaaggccggcaagacaggccccatgaaaaccctgctcgtcagagtgatgacccctgacctgagagagcggctggaaaacctgagaaagaagcccgagaacatccctcagcctatcagcaacaccagcagggccaacctgaacaagctgctgaccgactacaccgagatgaagaaagccatcctgcacgtgtactgggaagagttccagaaagaccccgtgggcctgatgagcagagttgctcagcccgctcctaagaacatcgaccagagaaagctgatccccgtgaaggacggcaacgagagactgacctctagcggctttgcctgcagccagtgttgccagcctctgtacgtgtacaagctggaacaagtgaacgacaagggcaagccccacaccaactacttcggcagatgcaacgtgtccgagcacgagaggctgatcctgctgtctcctcacaagcccgaggccaacgatgagctggtcacatacagcctgggcaagttcggacagagagccctggacttctacagcatccacgtgaccaaagaaagcacacaccccgtgaagcccctggctcagatcgccggcaatagatacgcctctggacctgtgggcaaagccctgtccgatgcctgcatgggaacaatcgccagcttcctgagcaagtaccaggacatcatcatcgagcaccagaaggtggtcaagggcaaccagaagagactggaaagcctgagggagctggccggcaaagagaacctggaataccccagcgtgaccctgcctcctcagcctcacacaaaagaaggcgtggacgcctacaacgaagtgatcgccagagtgagaatgtgggtcaacctgaacctgtggcagaagctgaaactgtccagggacgacgccaagcctctgctgagactgaagggcttccctagcttccctctggtggaaagacaggccaatgaagtggattggtgggacatggtctgcaacgtgaagaagctgatcaacgagaagaaagaggatggcaaggttttctggcagaacctggccggctacaagagacaagaagccctgaggccttacctgagcagcgaagaggaccggaagaagggcaagaagttcgccagataccagttcggcgacctgctgctgcacctggaaaagaagcacggcgaggactggggcaaagtgtacgatgaggcctgggagagaatcgacaagaaggtggaaggcctgagcaagcacattaagctggaagaggaaagaaggagcgaggacgcccaatctaaagccgctctgaccgattggctgagagccaaggccagctttgtgatcgagggcctgaaagaggccgacaaggacgagttctgcagatgcgagctgaagctgcagaagtggtacggcgatctgagaggcaagcccttcgccattgaggccgagaacagcatcctggacatcagcggcttcagcaagcagtacaactgcgccttcatttggcagaaagacggcgtcaagaaactgaacctgtacctgatcatcaattacttcaaaggcggcaagctgcggttcaagaagatcaaacccgaggccttcgaggctaacagattctacaccgtgatcaacaaaaagtccggcgagatcgtgcccatggaagtgaacttcaacttcgacgaccccaacctgattatcctgcctctggccttcggcaagagacagggcagagagttcatctggaacgatctgctgagcctggaaaccggctctctgaagctggccaatggcagagtgatcgagaaaaccctgtacaacaggagaaccagacaggacgagcctgctctgtttgtggccctgaccttcgagagaagagaggtgctggacagcagcaacatcaagcccatgaacctgatcggcatcgaccggggcgagaatatccctgctgtgatcgccctgacagaccctgaaggatgcccactgagcagattcaaggactccctgggcaaccctacacacatcctgagaatcggcgagagctacaaagagaagcagaggacaatccaggccaagaaagaggtggaacagagaagagccggcggatactctaggaagtacgccagcaaggccaagaatctggccgacgacatggtccgaaacaccgccagagatctgctgtactacgccgtgacacaggacgccatgctgatcttcgagaatctgagcagaggcttcggccggcagggcaagagaacctttatggccgagaggcagtacaccagaatggaagattggctcacagctaaactggcctacgagggactgagcaagacctacctgtccaaaacactggcccagtatacctccaagacctgcagcaattgcggcttcaccatcaccagcgccgactacgacagagtgctggaaaagctcaagaaaaccgccaccggctggatgaccaccatcaacggcaaagagctgaaggttgagggccagatcacctactacaacaggtacaagaggcagaacgtcgtgaaggatctgagcgtggaactggacagactgagcgaagagagcgtgaacaacgacatcagcagctggacaaagggcagatcaggcgaggctctgagcctgctgaagaagaggtttagccacagacctgtgcaagagaagttcgtgtgcctgaactgcggcttcgagacacacgccgatgaacaggctgccctgaacattgccagaagctggctgttcctgagaagccaagagtacaagaagtaccagaccaacaagaccaccggcaacaccgacaagagggcctttgtggaaacctggcagagcttctacagaaaaaagctgaaagaagtctggaagcccgccgtgactagtccaaaaaagaagagaaaggta

SEQ ID NO: 242 - protein, 1005 aa, Artificial Sequence
  CasX Variant
MAPKKKRKVSRQEIKRINKIRRRLVKDSNTKKAGKTGPMKTLLVRVMTPDLRERLENLRKKPENIPQPISNTSRANLNKLLTDYTEMKKAILHVYWEEFQKDPVGLMSRVAQPAPKNIDQRKLIPVKDGNERLTSSGFACSQCCQPLYVYKLEQVNDKGKPHTNYFGRCNVSEHERLILLSPHKPEANDELVTYSLGKFGQRALDFYSIHVTKESTHPVKPLAQIAGNRYASGPVGKALSDACMGTIASFLSKYQDIIIEHQKVVKGNQKRLESLRELAGKENLEYPSVTLPPQPHTKEGVDAYNEVIARVRMWVNLNLWQKLKLSRDDAKPLLRLKGFPSFPLVERQANEVDWWDMVCNVKKLINEKKEDGKVFWQNLAGYKRQEALRPYLSSEEDRKKGKKFARYQFGDLLLHLEKKHGEDWGKVYDEAWERIDKKVEGLSKHIKLEEERRSEDAQSKAALTDWLRAKASFVIEGLKEADKDEFCRCELKLQKWYGDLRGKPFAIEAENSILDISGFSKQYNCAFIWQKDGVKKLNLYLIINYFKGGKLRFKKIKPEAFEANRFYTVINKKSGEIVPMEVNFNFDDPNLIILPLAFGKRQGREFIWNDLLSLETGSLKLANGRVIEKTLYNRRTRQDEPALFVALTFERREVLDSSNIKPMNLIGIDRGENIPAVIALTDPEGCPLSRFKDSLGNPTHILRIGESYKEKQRTIQAKKEVEQRRAGGYSRKYASKAKNLADDMVRNTARDLLYYAVTQDAMLIFENLSRGFGRQGKRTFMAERQYTRMEDWLTAKLAYEGLSKTYLSKTLAQYTSKTCSNCGFTITSADYDRVLEKLKKTATGWMTTINGKELKVEGQITYYNRYKRQNVVKDLSVELDRLSEESVNNDISSWTKGRSGEALSLLKKRFSHRPVQEKFVCLNCGFETHADEQAALNIARSWLFLRSQEYKKYQTNKTTGNTDKRAFVETWQSFYRKKLKEVWKPAVTSPKKKRKVTSPKKKRKV

SEQ ID NO: 243 - DNA, 2988 bp, Artificial Sequence
  CasX Variant
atggccccaaagaagaagcggaaggtctctagacaagagatcaagagaatcaacaagatcagaaggagactggtcaaggacagcaacacaaagaaggccggcaagacaggccccatgaaaaccctgctcgtcagagtgatgacccctgacctgagagagcggctggaaaacctgagaaagaagcccgagaacatccctcagcctatcagcaacaccagcagggccaacctgaacaagctgctgaccgactacaccgagatgaagaaagccatcctgcacgtgtactgggaagagttccagaaagaccccgtgggcctgatgagcagagttgctcagcccgctcctaagaacatcgaccagagaaagctgatccccgtgaaggacggcaacgagagactgacctctagcggctttgcctgcagccagtgttgccagcctctgtacgtgtacaagctggaacaagtgaacgacaagggcaagccccacaccaactacttcggcagatgcaacgtgtccgagcacgagaggctgatcctgctgtctcctcacaagcccgaggccaacgatgagctggtcacatacagcctgggcaagttcggacagagagccctggacttctacagcatccacgtgaccaaagaaagcacacaccccgtgaagcccctggctcagatcgccggcaatagatacgcctctggacctgtgggcaaagccctgtccgatgcctgcatgggaacaatcgccagcttcctgagcaagtaccaggacatcatcatcgagcaccagaaggtggtcaagggcaaccagaagagactggaaagcctgagggagctggccggcaaagagaacctggaataccccagcgtgaccctgcctcctcagcctcacacaaaagaaggcgtggacgcctacaacgaagtgatcgccagagtgagaatgtgggtcaacctgaacctgtggcagaagctgaaactgtccagggacgacgccaagcctctgctgagactgaagggcttccctagcttccctctggtggaaagacaggccaatgaagtggattggtgggacatggtctgcaacgtgaagaagctgatcaacgagaagaaagaggatggcaaggttttctggcagaacctggccggctacaagagacaagaagccctgaggccttacctgagcagcgaagaggaccggaagaagggcaagaagttcgccagataccagctgggcgacctgctgctgcacctggaaaagaagcacggcgaggactggggcaaagtgtacgatgaggcctgggagagaatcgacaagaaggtggaaggcctgagcaagcacattaagctggaagaggaaagaaggagcgaggacgcccaatctaaagccgctctgaccgattggctgagagccaaggccagctttgtgatcgagggcctgaaagaggccgacaaggacgagttctgcagatgcgagctgaagctgcagaagtggtacggcgatctgagaggcaagcccttcgccattgaggccgagaacagcatcctggacatcagcggcttcagcaagcagtacaactgcgccttcatttggcagaaagacggcgtcaagaaactgaacctgtacctgatcatcaattacttcaaaggcggcaagctgcggttcaagaagatcaaacccgaggccttcgaggctaacagattctacaccgtgatcaacaaaaagtccggcgagatcgtgcccatggaagtgaacttcaacttcgacgaccccaacctgattatcctgcctctggccttcggcaagagacagggcagagagttcatctggaacgatctgctgagcctggaaaccggctctctgaagctggccaatggcagagtgatcgagaaaaccctgtacaacaggagaaccagacaggacgagcctgctctgtttgtggccctgaccttcgagagaagagaggtgctggacagcagcaacatcaagcccatgaacctgatcggcgtggaccggggcgagaatatccctgctgtgatcgccctgacagaccctgaaggatgcccactgagcagattcaaggactccctgggcaaccctacacacatcctgagaatcggcgagagctacaaagagaagcagaggacaatccaggccaagaaagaggtggaacagagaagagccggcggatactctaggaagtacgccagcaaggccaagaatctggccgacgacatggtccgaaacaccgccagagatctgctgtactacgccgtgacacaggacgccatgctgatcttcgagaatctgagcagaggcttcggccggcagggcaagagaacctttatggccgagaggcagtacaccagaatggaagattggctcacagctaaactggcctacgagggactgagcaagacctacctgtccaaaacactggcccagtatacctccaagacctgcagcaattgcggcttcaccatcaccagcgccgactacgacagagtgctggaaaagctcaagaaaaccgccaccggctggatgaccaccatcaacggcaaagagctgaaggttgagggccagatcacctactacaacaggaggaagaggcagaacgtcgtgaaggatctgagcgtggaactggacagactgagcgaagagagcgtgaacaacgacatcagcagctggacaaagggcagatcaggcgaggctctgagcctgctgaagaagaggtttagccacagacctgtgcaagagaagttcgtgtgcctgaactgcggcttcgagacacacgccgatgaacaggctgccctgaacattgccagaagctggctgttcctgagaagccaagagtacaagaagtaccagaccaacaagaccaccggcaacaccgacaagagggcctttgtggaaacctggcagagcttctacagaaaaaagctgaaagaagtctggaagcccgccgtgactagtccaaaaaagaagagaaaggta

SEQ ID NO: 244 - protein, 996 aa, Artificial Sequence
  CasX Variant
MAPKKKRKVSRQEIKRINKIRRRLVKDSNTKKAGKTGPMKTLLVRVMTPDLRERLENLRKKPENIPQPISNTSRANLNKLLTDYTEMKKAILHVYWEEFQKDPVGLMSRVAQPAPKNIDQRKLIPVKDGNERLTSSGFACSQCCQPLYVYKLEQVNDKGKPHTNYFGRCNVSEHERLILLSPHKPEANDELVTYSLGKFGQRALDFYSIHVTKESTHPVKPLAQIAGNRYASGPVGKALSDACMGTIASFLSKYQDIIIEHQKVVKGNQKRLESLRELAGKENLEYPSVTLPPQPHTKEGVDAYNEVIARVRMWVNLNLWQKLKLSRDDAKPLLRLKGFPSFPLVERQANEVDWWDMVCNVKKLINEKKEDGKVFWQNLAGYKRQEALRPYLSSEEDRKKGKKFARYQLGDLLLHLEKKHGEDWGKVYDEAWERIDKKVEGLSKHIKLEEERRSEDAQSKAALTDWLRAKASFVIEGLKEADKDEFCRCELKLQKWYGDLRGKPFAIEAENSILDISGFSKQYNCAFIWQKDGVKKLNLYLIINYFKGGKLRFKKIKPEAFEANRFYTVINKKSGEIVPMEVNFNFDDPNLIILPLAFGKRQGREFIWNDLLSLETGSLKLANGRVIEKTLYNRRTRQDEPALFVALTFERREVLDSSNIKPMNLIGVDRGENIPAVIALTDPEGCPLSRFKDSLGNPTHILRIGESYKEKQRTIQAKKEVEQRRAGGYSRKYASKAKNLADDMVRNTARDLLYYAVTQDAMLIFENLSRGFGRQGKRTFMAERQYTRMEDWLTAKLAYEGLSKTYLSKTLAQYTSKTCSNCGFTITSADYDRVLEKLKKTATGWMTTINGKELKVEGQITYYNRRKRQNVVKDLSVELDRLSEESVNNDISSWTKGRSGEALSLLKKRFSHRPVQEKFVCLNCGFETHADEQAALNIARSWLFLRSQEYKKYQTNKTTGNTDKRAFVETWQSFYRKKLKEVWKPAVTSPKKKRKV

SEQ ID NO: 245 - DNA, 2988 bp, Artificial Sequence
  CasX Variant
atggccccaaagaagaagcggaaggtctctagacaagagatcaagagaatcaacaagatcagaaggagactggtcaaggacagcaacacaaagaaggccggcaagacaggccccatgaaaaccctgctcgtcagagtgatgacccctgacctgagagagcggctggaaaacctgagaaagaagcccgagaacatccctcagcctatcagcaacaccagcagggccaacctgaacaagctgctgaccgactacaccgagatgaagaaagccatcctgcacgtgtactgggaagagttccagaaagaccccgtgggcctgatgagcagagttgctcagcccgctcctaagaacatcgaccagagaaagctgatccccgtgaaggacggcaacgagagactgacctctagcggctttgcctgcagccagtgttgccagcctctgtacgtgtacaagctggaacaagtgaacgacaagggcaagccccacaccaactacttcggcagatgcaacgtgtccgagcacgagaggctgatcctgctgtctcctcacaagcccgaggccaacgatgagctggtcacatacagcctgggcaagttcggacagagagccctggacttctacagcatccacgtgaccaaagaaagcacacaccccgtgaagcccctggctcagatcgccggcaatagatacgcctctggacctgtgggcaaagccctgtccgatgcctgcatgggaacaatcgccagcttcctgagcaagtaccaggacatcatcatcgagcaccagaaggtggtcaagggcaaccagaagagactggaaagcctgagggagctggccggcaaagagaacctggaataccccagcgtgaccctgcctcctcagcctcacacaaaagaaggcgtggacgcctacaacgaagtgatcgccagagtgagaatgtgggtcaacctgaacctgtggcagaagctgaaactgtccagggacgacgccaagcctctgctgagactgaagggcttccctagcttccctctggtggaaagacaggccaatgaagtggattggtgggacatggtctgcaacgtgaagaagctgatcaacgagaagaaagaggatggcaaggttttctggcagaacctggccggctacaagagacaagaagccctgaggccttacctgagcagcgaagaggaccggaagaagggcaagaagttcgccagataccagctgggcgacctgctgaagcacctggaaaagaagcacggcgaggactggggcaaagtgtacgatgaggcctgggagagaatcgacaagaaggtggaaggcctgagcaagcacattaagctggaagaggaaagaaggagcgaggacgcccaatctaaagccgctctgaccgattggctgagagccaaggccagctttgtgatcgagggcctgaaagaggccgacaaggacgagttctgcagatgcgagctgaagctgcagaagtggtacggcgatctgagaggcaagcccttcgccattgaggccgagaacagcatcctggacatcagcggcttcagcaagcagtacaactgcgccttcatttggcagaaagacggcgtcaagaaactgaacctgtacctgatcatcaattacttcaaaggcggcaagctgcggttcaagaagatcaaacccgaggccttcgaggctaacagattctacaccgtgatcaacaaaaagtccggcgagatcgtgcccatggaagtgaacttcaacttcgacgaccccaacctgattatcctgcctctggccttcggcaagagacagggcagagagttcatctggaacgatctgctgagcctggaaaccggctctctgaagctggccaatggcagagtgatcgagaaaaccctgtacaacaggagaaccagacaggacgagcctgctctgtttgtggccctgaccttcgagagaagagaggtgctggacagcagcaacatcaagcccatgaacctgatcggcgtggaccggggcgagaatatccctgctgtgatcgccctgacagaccctgaaggatgcccactgagcagattcaaggactccctgggcaaccctacacacatcctgagaatcggcgagagctacaaagagaagcagaggacaatccaggccaagaaagaggtggaacagagaagagccggcggatactctaggaagtacgccagcaaggccaagaatctggccgacgacatggtccgaaacaccgccagagatctgctgtactacgccgtgacacaggacgccatgctgatcttcgagaatctgagcagaggcttcggccggcagggcaagagaacctttatggccgagaggcagtacaccagaatggaagattggctcacagctaaactggcctacgagggactgagcaagacctacctgtccaaaacactggcccagtatacctccaagacctgcagcaattgcggcttcaccatcaccagcgccgactacgacagagtgctggaaaagctcaagaaaaccgccaccggctggatgaccaccatcaacggcaaagagctgaaggttgagggccagatcacctactacaacaggaggaagaggcagaacgtcgtgaaggatctgagcgtggaactggacagactgagcgaagagagcgtgaacaacgacatcagcagctggacaaagggcagatcaggcgaggctctgagcctgctgaagaagaggtttagccacagacctgtgcaagagaagttcgtgtgcctgaactgcggcttcgagacacacgccgatgaacaggctgccctgaacattgccagaagctggctgttcctgagaagccaagagtacaagaagtaccagaccaacaagaccaccggcaacaccgacaagagggcctttgtggaaacctggcagagcttctacagaaaaaagctgaaagaagtctggaagcccgccgtgactagtccaaaaaagaagagaaaggta

SEQ ID NO: 246 - protein, 996 aa, Artificial Sequence
  CasX Variant
MAPKKKRKVSRQEIKRINKIRRRLVKDSNTKKAGKTGPMKTLLVRVMTPDLRERLENLRKKPENIPQPISNTSRANLNKLLTDYTEMKKAILHVYWEEFQKDPVGLMSRVAQPAPKNIDQRKLIPVKDGNERLTSSGFACSQCCQPLYVYKLEQVNDKGKPHTNYFGRCNVSEHERLILLSPHKPEANDELVTYSLGKFGQRALDFYSIHVTKESTHPVKPLAQIAGNRYASGPVGKALSDACMGTIASFLSKYQDIIIEHQKVVKGNQKRLESLRELAGKENLEYPSVTLPPQPHTKEGVDAYNEVIARVRMWVNLNLWQKLKLSRDDAKPLLRLKGFPSFPLVERQANEVDWWDMVCNVKKLINEKKEDGKVFWQNLAGYKRQEALRPYLSSEEDRKKGKKFARYQLGDLLKHLEKKHGEDWGKVYDEAWERIDKKVEGLSKHIKLEEERRSEDAQSKAALTDWLRAKASFVIEGLKEADKDEFCRCELKLQKWYGDLRGKPFAIEAENSILDISGFSKQYNCAFIWQKDGVKKLNLYLIINYFKGGKLRFKKIKPEAFEANRFYTVINKKSGEIVPMEVNFNFDDPNLIILPLAFGKRQGREFIWNDLLSLETGSLKLANGRVIEKTLYNRRTRQDEPALFVALTFERREVLDSSNIKPMNLIGVDRGENIPAVIALTDPEGCPLSRFKDSLGNPTHILRIGESYKEKQRTIQAKKEVEQRRAGGYSRKYASKAKNLADDMVRNTARDLLYYAVTQDAMLIFENLSRGFGRQGKRTFMAERQYTRMEDWLTAKLAYEGLSKTYLSKTLAQYTSKTCSNCGFTITSADYDRVLEKLKKTATGWMTTINGKELKVEGQITYYNRRKRQNVVKDLSVELDRLSEESVNNDISSWTKGRSGEALSLLKKRFSHRPVQEKFVCLNCGFETHADEQAALNIARSWLFLRSQEYKKYQTNKTTGNTDKRAFVETWQSFYRKKLKEVWKPAVTSPKKKRKV

SEQ ID NO: 247 - DNA, 2988 bp, Artificial Sequence
  CasX Variant
atggccccaaagaagaagcggaaggtctctagacaagagatcaagagaatcaacaagatcagaaggagactggtcaaggacagcaacacaaagaaggccggcaagacaggccccatgaaaaccctgctcgtcagagtgatgacccctgacctgagagagcggctggaaaacctgagaaagaagcccgagaacatccctcagcctatcagcaacaccagcagggccaacctgaacaagctgctgaccgactacaccgagatgaagaaagccatcctgcacgtgtactgggaagagttccagaaagaccccgtgggcctgatgagcagagttgctcagcccgctcctaagaacatcgaccagagaaagctgatccccgtgaaggacggcaacgagagactgacctctagcggctttgcctgcagccagtgttgccagcctctgtacgtgtacaagctggaacaagtgaacgacaagggcaagccccacaccaactacttcggcagatgcaacgtgtccgagcacgagaggctgatcctgctgtctcctcacaagcccgaggccaacgatgagctggtcacatacagcctgggcaagttcggacagagagccctggacttctacagcatccacgtgaccaaagaaagcacacaccccgtgaagcccctggctcagatcgccggcaatagatacgcctctggacctgtgggcaaagccctgtccgatgcctgcatgggaacaatcgccagcttcctgagcaagtaccaggacatcatcatcgagcaccagaaggtggtcaagggcaaccagaagagactggaaagcctgagggagctggccggcaaagagaacctggaataccccagcgtgaccctgcctcctcagcctcacacaaaagaaggcgtggacgcctacaacgaagtgatcgccagagtgagaatgtgggtcaacctgaacctgtggcagaagctgaaactgtccagggacgacgccaagcctctgctgagactgaagggcttccctagcttccctctggtggaaagacaggccaatgaagtggattggtgggacatggtctgcaacgtgaagaagctgatcaacgagaagaaagaggatggcaaggttttctggcagaacctggccggctacaagagacaagaagccctgaggccttacctgagcagcgaagaggaccggaagaagggcaagaagttcgccagataccagctgggcgacctgctgctgcacctggaaaagaagcacggcgaggactggggcaaagtgtacgatgaggcctgggagagaatcgacaagaaggtggaaggcctgagcaagcacattaagctggaagaggaaagaaggagcgaggacgcccaatctaaagccgctctgaccgattggctgagagccaaggccagctttgtgatcgagggcctgaaagaggccgacaaggacgagttctgcagatgcgagctgaagctgcagaagtggtacggcgatctgagaggcaagcccttcgccattgaggccgagaacagcatcctggacatcagcggcttcagcaagcagtacaactgcgccttcatttggcagaaagacggcgtcaagaaactgaacctgtacctgatcatcaattacttcaaaggcggcaagctgcggttcaagaagatcaaacccgaggccttcgaggctaacagattctacaccgtgatcaacaaaaagtccggcgagatcgtgcccatggaagtgaacttcaacttcgacgaccccaacctgattatcctgcctctggccttcggcaagagacagggcagagagttcatctggaacgatctgctgagcctggaaaccggctctctgaagctggccaatggcagagtgatcgagaaaaccctgtacaacaggagaaccagacaggacgagcctgctctgtttgtggccctgaccttcgagagaagagaggtgctggacagcagcaacatcaagcccatgaacctgatcggcgtggaccggggcgagaatatccctgctgtgatcgccctgacagaccctgaaggatgcccactgagcagattcaaggactccctgggcaaccctacacacatcctgagaatcggcgagagctacaaagagaagcagaggacaatccaggccaagaaagaggtggaacagagaagagccggcggatactctaggaagtacgccagcaaggccaagaatctggccgacgacatggtccgaaacaccgccagagatctgctgtactacgccgtgacacaggacgccatgctgatcttcgagaatctgagcagaggcttcggccggcagggcaagagaacctttatggccgagaggcagtacaccagaatggaagattggctcacagctaaactggcctacgagggactgagcaagacctacctgtccaaaacactggcccagtatacctccaagacctgcagcaattgcggcttcaccatcaccagcgccgactacgacagagtgctggaaaagctcaagaaaaccgccaccggctggatgaccaccatcaacggcaaagagctgaaggttgagggccagatcacctactacaacaggtacaagaggcagaacgtcgtgaaggatctgagcgtggaactggacagactgagcgaagagagcgtgaacaacgacatcagcagctggacaaagggcagatcaggcgaggctctgagcctgctgaagaagaggtttagccacagacctgtgcaagagaagttcgtgtgcctgaactgcggcttcgagacacacgccgatgaacaggctgccctgaacattgccagaagctggctgttcctgagaagccaagagtacaagaagtaccagaccaacaagaccaccggcaacaccgacaagagggcctttgtggaaacctggcagagcttctacagaaaaaagctgaaagaagtctggaagcccgccgtgactagtccaaaaaagaagagaaaggta

SEQ ID NO: 248 - protein, 996 aa, Artificial Sequence
  CasX Variant
MAPKKKRKVSRQEIKRINKIRRRLVKDSNTKKAGKTGPMKTLLVRVMTPDLRERLENLRKKPENIPQPISNTSRANLNKLLTDYTEMKKAILHVYWEEFQKDPVGLMSRVAQPAPKNIDQRKLIPVKDGNERLTSSGFACSQCCQPLYVYKLEQVNDKGKPHTNYFGRCNVSEHERLILLSPHKPEANDELVTYSLGKFGQRALDFYSIHVTKESTHPVKPLAQIAGNRYASGPVGKALSDACMGTIASFLSKYQDIIIEHQKVVKGNQKRLESLRELAGKENLEYPSVTLPPQPHTKEGVDAYNEVIARVRMWVNLNLWQKLKLSRDDAKPLLRLKGFPSFPLVERQANEVDWWDMVCNVKKLINEKKEDGKVFWQNLAGYKRQEALRPYLSSEEDRKKGKKFARYQLGDLLLHLEKKHGEDWGKVYDEAWERIDKKVEGLSKHIKLEEERRSEDAQSKAALTDWLRAKASFVIEGLKEADKDEFCRCELKLQKWYGDLRGKPFAIEAENSILDISGFSKQYNCAFIWQKDGVKKLNLYLIINYFKGGKLRFKKIKPEAFEANRFYTVINKKSGEIVPMEVNFNFDDPNLIILPLAFGKRQGREFIWNDLLSLETGSLKLANGRVIEKTLYNRRTRQDEPALFVALTFERREVLDSSNIKPMNLIGVDRGENIPAVIALTDPEGCPLSRFKDSLGNPTHILRIGESYKEKQRTIQAKKEVEQRRAGGYSRKYASKAKNLADDMVRNTARDLLYYAVTQDAMLIFENLSRGFGRQGKRTFMAERQYTRMEDWLTAKLAYEGLSKTYLSKTLAQYTSKTCSNCGFTITSADYDRVLEKLKKTATGWMTTINGKELKVEGQITYYNRYKRQNVVKDLSVELDRLSEESVNNDISSWTKGRSGEALSLLKKRFSHRPVQEKFVCLNCGFETHADEQAALNIARSWLFLRSQEYKKYQTNKTTGNTDKRAFVETWQSFYRKKLKEVWKPAVTSPKKKRKV

SEQ ID NO: 249 - DNA, 2991 bp, Artificial Sequence
  CasX Variant
atggccccaaagaagaagcggaaggtctctagacaagagatcaagagaatcaacaagatcagaaggagactggtcaaggacagcaacacaaagaaggccggcaagacaggccccatgaaaaccctgctcgtcagagtgatgacccctgacctgagagagcggctggaaaacctgagaaagaagcccgagaacatccctcagcctatcagcaacaccagcagggccaacctgaacaagctgctgaccgactacaccgagatgaagaaagccatcctgcacgtgtactgggaagagttccagaaagaccccgtgggcctgatgagcagagttgctcagcctgccagcaagaagatcgaccagaacaagctgaagcccgagatggacgagaagggcaatctgaccacagccggctttgcctgctctcagtgtggccagcctctgttcgtgtacaagctggaacaggtgtccgagaaaggcaaggcctacaccaactacttcggcagatgtaacgtggccgagcacgagaagctgattctgctggcccagctgaaacctgagaaggactctgatgaggccgtgacctacagcctgggcaagtttggacagagagccctggacttctacagcatccacgtgaccaaagaaagcacacaccccgtgaagcccctggctcagatcgccggcaatagatacgcctctggacctgtgggcaaagccctgtccgatgcctgcatgggaacaatcgccagcttcctgagcaagtaccaggacatcatcatcgagcaccagaaggtggtcaagggcaaccagaagagactggaaagcctgagggagctggccggcaaagagaacctggaataccccagcgtgaccctgcctcctcagcctcacacaaaagaaggcgtggacgcctacaacgaagtgatcgccagagtgagaatgtgggtcaacctgaacctgtggcagaagctgaaactgtccagggacgacgccaagcctctgctgagactgaagggcttccctagcttccctctggtggaaagacaggccaatgaagtggattggtgggacatggtctgcaacgtgaagaagctgatcaacgagaagaaagaggatggcaaggttttctggcagaacctggccggctacaagagacaagaagccctgaggccttacctgagcagcgaagaggaccggaagaagggcaagaagttcgccagataccagttcggcgacctgctgctgcacctggaaaagaagcacggcgaggactggggcaaagtgtacgatgaggcctgggagagaatcgacaagaaggtggaaggcctgagcaagcacattaagctggaagaggaaagaaggagcgaggacgcccaatctaaagccgctctgaccgattggctgagagccaaggccagctttgtgatcgagggcctgaaagaggccgacaaggacgagttctgcagatgcgagctgaagctgcagaagtggtacggcgatctgagaggcaagcccttcgccattgaggccgagaacagcatcctggacatcagcggcttcagcaagcagtacaactgcgccttcatttggcagaaagacggcgtcaagaaactgaacctgtacctgatcatcaattacttcaaaggcggcaagctgcggttcaagaagatcaaacccgaggccttcgaggctaacagattctacaccgtgatcaacaaaaagtccggcgagatcgtgcccatggaagtgaacttcaacttcgacgaccccaacctgattatcctgcctctggccttcggcaagagacagggcagagagttcatctggaacgatctgctgagcctggaaaccggctctctgaagctggccaatggcagagtgatcgagaaaaccctgtacaacaggagaaccagacaggacgagcctgctctgtttgtggccctgaccttcgagagaagagaggtgctggacagcagcaacatcaagcccatgaacctgatcggcatcgaccggggcgagaatatccctgctgtgatcgccctgacagaccctgaaggatgcccactgagcagattcaaggactccctgggcaaccctacacacatcctgagaatcggcgagagctacaaagagaagcagaggacaatccaggccaagaaagaggtggaacagagaagagccggcggatactctaggaagtacgccagcaaggccaagaatctggccgacgacatggtccgaaacaccgccagagatctgctgtactacgccgtgacacaggacgccatgctgatcttcgagaatctgagcagaggcttcggccggcagggcaagagaacctttatggccgagaggcagtacaccagaatggaagattggctcacagctaaactggcctacgagggactgagcaagacctacctgtccaaaacactggcccagtatacctccaagacctgcagcaattgcggcttcaccatcaccagcgccgactacgacagagtgctggaaaagctcaagaaaaccgccaccggctggatgaccaccatcaacggcaaagagctgaaggttgagggccagatcacctactacaacaggtacaagaggcagaacgtcgtgaaggatctgagcgtggaactggacagactgagcgaagagagcgtgaacaacgacatcagcagctggacaaagggcagatcaggcgaggctctgagcctgctgaagaagaggtttagccacagacctgtgcaagagaagttcgtgtgcctgaactgcggcttcgagacacacgccgatgaacaggctgccctgaacattgccagaagctggctgttcctgagaagccaagagtacaagaagtaccagaccaacaagaccaccggcaacaccgacaagagggcctttgtggaaacctggcagagcttctacagaaaaaagctgaaagaagtctggaagcccgccgtgactagtccaaaaaagaagagaaaggta

SEQ ID NO: 250 - protein, 997 aa, Artificial Sequence
  CasX Variant
MAPKKKRKVSRQEIKRINKIRRRLVKDSNTKKAGKTGPMKTLLVRVMTPDLRERLENLRKKPENIPQPISNTSRANLNKLLTDYTEMKKAILHVYWEEFQKDPVGLMSRVAQPASKKIDQNKLKPEMDEKGNLTTAGFACSQCGQPLFVYKLEQVSEKGKAYTNYFGRCNVAEHEKLILLAQLKPEKDSDEAVTYSLGKFGQRALDFYSIHVTKESTHPVKPLAQIAGNRYASGPVGKALSDACMGTIASFLSKYQDIIIEHQKVVKGNQKRLESLRELAGKENLEYPSVTLPPQPHTKEGVDAYNEVIARVRMWVNLNLWQKLKLSRDDAKPLLRLKGFPSFPLVERQANEVDWWDMVCNVKKLINEKKEDGKVFWQNLAGYKRQEALRPYLSSEEDRKKGKKFARYQFGDLLLHLEKKHGEDWGKVYDEAWERIDKKVEGLSKHIKLEEERRSEDAQSKAALTDWLRAKASFVIEGLKEADKDEFCRCELKLQKWYGDLRGKPFAIEAENSILDISGFSKQYNCAFIWQKDGVKKLNLYLIINYFKGGKLRFKKIKPEAFEANRFYTVINKKSGEIVPMEVNFNFDDPNLIILPLAFGKRQGREFIWNDLLSLETGSLKLANGRVIEKTLYNRRTRQDEPALFVALTFERREVLDSSNIKPMNLIGIDRGENIPAVIALTDPEGCPLSRFKDSLGNPTHILRIGESYKEKQRTIQAKKEVEQRRAGGYSRKYASKAKNLADDMVRNTARDLLYYAVTQDAMLIFENLSRGFGRQGKRTFMAERQYTRMEDWLTAKLAYEGLSKTYLSKTLAQYTSKTCSNCGFTITSADYDRVLEKLKKTATGWMTTINGKELKVEGQITYYNRYKRQNVVKDLSVELDRLSEESVNNDISSWTKGRSGEALSLLKKRFSHRPVQEKFVCLNCGFETHADEQAALNIARSWLFLRSQEYKKYQTNKTTGNTDKRAFVETWQSFYRKKLKEVWKPAVTSPKKKRKV

SEQ ID NO: 251 - DNA, 2991 bp, Artificial Sequence
  CasX Variant
atggccccaaagaagaagcggaaggtctctagacaagagatcaagagaatcaacaagatcagaaggagactggtcaaggacagcaacacaaagaaggccggcaagacaggccccatgaaaaccctgctcgtcagagtgatgacccctgacctgagagagcggctggaaaacctgagaaagaagcccgagaacatccctcagcctatcagcaacaccagcagggccaacctgaacaagctgctgaccgactacaccgagatgaagaaagccatcctgcacgtgtactgggaagagttccagaaagaccccgtgggcctgatgagcagagttgctcagcctgccagcaagaagatcgaccagaacaagctgaagcccgagatggacgagaagggcaatctgaccacagccggctttgcctgctctcagtgtggccagcctctgttcgtgtacaagctggaacaggtgtccgagaaaggcaaggcctacaccaactacttcggcagatgtaacgtggccgagcacgagaagctgattctgctggcccagctgaaacctgagaaggactctgatgaggccgtgacctacagcctgggcaagtttggacagagagccctggacttctacagcatccacgtgaccaaagaaagcacacaccccgtgaagcccctggctcagatcgccggcaatagatacgcctctggacctgtgggcaaagccctgtccgatgcctgcatgggaacaatcgccagcttcctgagcaagtaccaggacatcatcatcgagcaccagaaggtggtcaagggcaaccagaagagactggaaagcctgagggagctggccggcaaagagaacctggaataccccagcgtgaccctgcctcctcagcctcacacaaaagaaggcgtggacgcctacaacgaagtgatcgccagagtgagaatgtgggtcaacctgaacctgtggcagaagctgaaactgtccagggacgacgccaagcctctgctgagactgaagggcttccctagcttccctctggtggaaagacaggccaatgaagtggattggtgggacatggtctgcaacgtgaagaagctgatcaacgagaagaaagaggatggcaaggttttctggcagaacctggccggctacaagagacaagaagccctgaggccttacctgagcagcgaagaggaccggaagaagggcaagaagttcgccagataccagctgggcgacctgctgctgcacctggaaaagaagcacggcgaggactggggcaaagtgtacgatgaggcctgggagagaatcgacaagaaggtggaaggcctgagcaagcacattaagctggaagaggaaagaaggagcgaggacgcccaatctaaagccgctctgaccgattggctgagagccaaggccagctttgtgatcgagggcctgaaagaggccgacaaggacgagttctgcagatgcgagctgaagctgcagaagtggtacggcgatctgagaggcaagcccttcgccattgaggccgagaacagcatcctggacatcagcggcttcagcaagcagtacaactgcgccttcatttggcagaaagacggcgtcaagaaactgaacctgtacctgatcatcaattacttcaaaggcggcaagctgcggttcaagaagatcaaacccgaggccttcgaggctaacagattctacaccgtgatcaacaaaaagtccggcgagatcgtgcccatggaagtgaacttcaacttcgacgaccccaacctgattatcctgcctctggccttcggcaagagacagggcagagagttcatctggaacgatctgctgagcctggaaaccggctctctgaagctggccaatggcagagtgatcgagaaaaccctgtacaacaggagaaccagacaggacgagcctgctctgtttgtggccctgaccttcgagagaagagaggtgctggacagcagcaacatcaagcccatgaacctgatcggcgtggaccggggcgagaatatccctgctgtgatcgccctgacagaccctgaaggatgcccactgagcagattcaaggactccctgggcaaccctacacacatcctgagaatcggcgagagctacaaagagaagcagaggacaatccaggccaagaaagaggtggaacagagaagagccggcggatactctaggaagtacgccagcaaggccaagaatctggccgacgacatggtccgaaacaccgccagagatctgctgtactacgccgtgacacaggacgccatgctgatcttcgagaatctgagcagaggcttcggccggcagggcaagagaacctttatggccgagaggcagtacaccagaatggaagattggctcacagctaaactggcctacgagggactgagcaagacctacctgtccaaaacactggcccagtatacctccaagacctgcagcaattgcggcttcaccatcaccagcgccgactacgacagagtgctggaaaagctcaagaaaaccgccaccggctggatgaccaccatcaacggcaaagagctgaaggttgagggccagatcacctactacaacaggaggaagaggcagaacgtcgtgaaggatctgagcgtggaactggacagactgagcgaagagagcgtgaacaacgacatcagcagctggacaaagggcagatcaggcgaggctctgagcctgctgaagaagaggtttagccacagacctgtgcaagagaagttcgtgtgcctgaactgcggcttcgagacacacgccgatgaacaggctgccctgaacattgccagaagctggctgttcctgagaagccaagagtacaagaagtaccagaccaacaagaccaccggcaacaccgacaagagggcctttgtggaaacctggcagagcttctacagaaaaaagctgaaagaagtctggaagcccgccgtgactagtccaaaaaagaagagaaaggta

SEQ ID NO: 252 - protein, 997 aa, Artificial Sequence
  CasX Variant
MAPKKKRKVSRQEIKRINKIRRRLVKDSNTKKAGKTGPMKTLLVRVMTPDLRERLENLRKKPENIPQPISNTSRANLNKLLTDYTEMKKAILHVYWEEFQKDPVGLMSRVAQPASKKIDQNKLKPEMDEKGNLTTAGFACSQCGQPLFVYKLEQVSEKGKAYTNYFGRCNVAEHEKLILLAQLKPEKDSDEAVTYSLGKFGQRALDFYSIHVTKESTHPVKPLAQIAGNRYASGPVGKALSDACMGTIASFLSKYQDIIIEHQKVVKGNQKRLESLRELAGKENLEYPSVTLPPQPHTKEGVDAYNEVIARVRMWVNLNLWQKLKLSRDDAKPLLRLKGFPSFPLVERQANEVDWWDMVCNVKKLINEKKEDGKVFWQNLAGYKRQEALRPYLSSEEDRKKGKKFARYQLGDLLLHLEKKHGEDWGKVYDEAWERIDKKVEGLSKHIKLEEERRSEDAQSKAALTDWLRAKASFVIEGLKEADKDEFCRCELKLQKWYGDLRGKPFAIEAENSILDISGFSKQYNCAFIWQKDGVKKLNLYLIINYFKGGKLRFKKIKPEAFEANRFYTVINKKSGEIVPMEVNFNFDDPNLIILPLAFGKRQGREFIWNDLLSLETGSLKLANGRVIEKTLYNRRTRQDEPALFVALTFERREVLDSSNIKPMNLIGVDRGENIPAVIALTDPEGCPLSRFKDSLGNPTHILRIGESYKEKQRTIQAKKEVEQRRAGGYSRKYASKAKNLADDMVRNTARDLLYYAVTQDAMLIFENLSRGFGRQGKRTFMAERQYTRMEDWLTAKLAYEGLSKTYLSKTLAQYTSKTCSNCGFTITSADYDRVLEKLKKTATGWMTTINGKELKVEGQITYYNRRKRQNVVKDLSVELDRLSEESVNNDISSWTKGRSGEALSLLKKRFSHRPVQEKFVCLNCGFETHADEQAALNIARSWLFLRSQEYKKYQTNKTTGNTDKRAFVETWQSFYRKKLKEVWKPAVTSPKKKRKV

SEQ ID NO: 253 - DNA, 2991 bp, Artificial Sequence
  CasX Variant
atggccccaaagaagaagcggaaggtctctagacaagagatcaagagaatcaacaagatcagaaggagactggtcaaggacagcaacacaaagaaggccggcaagacaggccccatgaaaaccctgctcgtcagagtgatgacccctgacctgagagagcggctggaaaacctgagaaagaagcccgagaacatccctcagcctatcagcaacaccagcagggccaacctgaacaagctgctgaccgactacaccgagatgaagaaagccatcctgcacgtgtactgggaagagttccagaaagaccccgtgggcctgatgagcagagttgctcagcctgccagcaagaagatcgaccagaacaagctgaagcccgagatggacgagaagggcaatctgaccacagccggctttgcctgctctcagtgtggccagcctctgttcgtgtacaagctggaacaggtgtccgagaaaggcaaggcctacaccaactacttcggcagatgtaacgtggccgagcacgagaagctgattctgctggcccagctgaaacctgagaaggactctgatgaggccgtgacctacagcctgggcaagtttggacagagagccctggacttctacagcatccacgtgaccaaagaaagcacacaccccgtgaagcccctggctcagatcgccggcaatagatacgcctctggacctgtgggcaaagccctgtccgatgcctgcatgggaacaatcgccagcttcctgagcaagtaccaggacatcatcatcgagcaccagaaggtggtcaagggcaaccagaagagactggaaagcctgagggagctggccggcaaagagaacctggaataccccagcgtgaccctgcctcctcagcctcacacaaaagaaggcgtggacgcctacaacgaagtgatcgccagagtgagaatgtgggtcaacctgaacctgtggcagaagctgaaactgtccagggacgacgccaagcctctgctgagactgaagggcttccctagcttccctctggtggaaagacaggccaatgaagtggattggtgggacatggtctgcaacgtgaagaagctgatcaacgagaagaaagaggatggcaaggttttctggcagaacctggccggctacaagagacaagaagccctgaggccttacctgagcagcgaagaggaccggaagaagggcaagaagttcgccagataccagctgggcgacctgctgaagcacctggaaaagaagcacggcgaggactggggcaaagtgtacgatgaggcctgggagagaatcgacaagaaggtggaaggcctgagcaagcacattaagctggaagaggaaagaaggagcgaggacgcccaatctaaagccgctctgaccgattggctgagagccaaggccagctttgtgatcgagggcctgaaagaggccgacaaggacgagttctgcagatgcgagctgaagctgcagaagtggtacggcgatctgagaggcaagcccttcgccattgaggccgagaacagcatcctggacatcagcggcttcagcaagcagtacaactgcgccttcatttggcagaaagacggcgtcaagaaactgaacctgtacctgatcatcaattacttcaaaggcggcaagctgcggttcaagaagatcaaacccgaggccttcgaggctaacagattctacaccgtgatcaacaaaaagtccggcgagatcgtgcccatggaagtgaacttcaacttcgacgaccccaacctgattatcctgcctctggccttcggcaagagacagggcagagagttcatctggaacgatctgctgagcctggaaaccggctctctgaagctggccaatggcagagtgatcgagaaaaccctgtacaacaggagaaccagacaggacgagcctgctctgtttgtggccctgaccttcgagagaagagaggtgctggacagcagcaacatcaagcccatgaacctgatcggcgtggaccggggcgagaatatccctgctgtgatcgccctgacagaccctgaaggatgcccactgagcagattcaaggactccctgggcaaccctacacacatcctgagaatcggcgagagctacaaagagaagcagaggacaatccaggccaagaaagaggtggaacagagaagagccggcggatactctaggaagtacgccagcaaggccaagaatctggccgacgacatggtccgaaacaccgccagagatctgctgtactacgccgtgacacaggacgccatgctgatcttcgagaatctgagcagaggcttcggccggcagggcaagagaacctttatggccgagaggcagtacaccagaatggaagattggctcacagctaaactggcctacgagggactgagcaagacctacctgtccaaaacactggcccagtatacctccaagacctgcagcaattgcggcttcaccatcaccagcgccgactacgacagagtgctggaaaagctcaagaaaaccgccaccggctggatgaccaccatcaacggcaaagagctgaaggttgagggccagatcacctactacaacaggaggaagaggcagaacgtcgtgaaggatctgagcgtggaactggacagactgagcgaagagagcgtgaacaacgacatcagcagctggacaaagggcagatcaggcgaggctctgagcctgctgaagaagaggtttagccacagacctgtgcaagagaagttcgtgtgcctgaactgcggcttcgagacacacgccgatgaacaggctgccctgaacattgccagaagctggctgttcctgagaagccaagagtacaagaagtaccagaccaacaagaccaccggcaacaccgacaagagggcctttgtggaaacctggcagagcttctacagaaaaaagctgaaagaagtctggaagcccgccgtgactagtccaaaaaagaagagaaaggta

SEQ ID NO: 254 - protein, 997 aa, Artificial Sequence
  CasX Variant
MAPKKKRKVSRQEIKRINKIRRRLVKDSNTKKAGKTGPMKTLLVRVMTPDLRERLENLRKKPENIPQPISNTSRANLNKLLTDYTEMKKAILHVYWEEFQKDPVGLMSRVAQPASKKIDQNKLKPEMDEKGNLTTAGFACSQCGQPLFVYKLEQVSEKGKAYTNYFGRCNVAEHEKLILLAQLKPEKDSDEAVTYSLGKFGQRALDFYSIHVTKESTHPVKPLAQIAGNRYASGPVGKALSDACMGTIASFLSKYQDIIIEHQKVVKGNQKRLESLRELAGKENLEYPSVTLPPQPHTKEGVDAYNEVIARVRMWVNLNLWQKLKLSRDDAKPLLRLKGFPSFPLVERQANEVDWWDMVCNVKKLINEKKEDGKVFWQNLAGYKRQEALRPYLSSEEDRKKGKKFARYQLGDLLKHLEKKHGEDWGKVYDEAWERIDKKVEGLSKHIKLEEERRSEDAQSKAALTDWLRAKASFVIEGLKEADKDEFCRCELKLQKWYGDLRGKPFAIEAENSILDISGFSKQYNCAFIWQKDGVKKLNLYLIINYFKGGKLRFKKIKPEAFEANRFYTVINKKSGEIVPMEVNFNFDDPNLIILPLAFGKRQGREFIWNDLLSLETGSLKLANGRVIEKTLYNRRTRQDEPALFVALTFERREVLDSSNIKPMNLIGVDRGENIPAVIALTDPEGCPLSRFKDSLGNPTHILRIGESYKEKQRTIQAKKEVEQRRAGGYSRKYASKAKNLADDMVRNTARDLLYYAVTQDAMLIFENLSRGFGRQGKRTFMAERQYTRMEDWLTAKLAYEGLSKTYLSKTLAQYTSKTCSNCGFTITSADYDRVLEKLKKTATGWMTTINGKELKVEGQITYYNRRKRQNVVKDLSVELDRLSEESVNNDISSWTKGRSGEALSLLKKRFSHRPVQEKFVCLNCGFETHADEQAALNIARSWLFLRSQEYKKYQTNKTTGNTDKRAFVETWQSFYRKKLKEVWKPAVTSPKKKRKV

SEQ ID NO: 255 - DNA, 2991 bp, Artificial Sequence
  CasX Variant
atggccccaaagaagaagcggaaggtctctagacaagagatcaagagaatcaacaagatcagaaggagactggtcaaggacagcaacacaaagaaggccggcaagacaggccccatgaaaaccctgctcgtcagagtgatgacccctgacctgagagagcggctggaaaacctgagaaagaagcccgagaacatccctcagcctatcagcaacaccagcagggccaacctgaacaagctgctgaccgactacaccgagatgaagaaagccatcctgcacgtgtactgggaagagttccagaaagaccccgtgggcctgatgagcagagttgctcagcctgccagcaagaagatcgaccagaacaagctgaagcccgagatggacgagaagggcaatctgaccacagccggctttgcctgctctcagtgtggccagcctctgttcgtgtacaagctggaacaggtgtccgagaaaggcaaggcctacaccaactacttcggcagatgtaacgtggccgagcacgagaagctgattctgctggcccagctgaaacctgagaaggactctgatgaggccgtgacctacagcctgggcaagtttggacagagagccctggacttctacagcatccacgtgaccaaagaaagcacacaccccgtgaagcccctggctcagatcgccggcaatagatacgcctctggacctgtgggcaaagccctgtccgatgcctgcatgggaacaatcgccagcttcctgagcaagtaccaggacatcatcatcgagcaccagaaggtggtcaagggcaaccagaagagactggaaagcctgagggagctggccggcaaagagaacctggaataccccagcgtgaccctgcctcctcagcctcacacaaaagaaggcgtggacgcctacaacgaagtgatcgccagagtgagaatgtgggtcaacctgaacctgtggcagaagctgaaactgtccagggacgacgccaagcctctgctgagactgaagggcttccctagcttccctctggtggaaagacaggccaatgaagtggattggtgggacatggtctgcaacgtgaagaagctgatcaacgagaagaaagaggatggcaaggttttctggcagaacctggccggctacaagagacaagaagccctgaggccttacctgagcagcgaagaggaccggaagaagggcaagaagttcgccagataccagctgggcgacctgctgctgcacctggaaaagaagcacggcgaggactggggcaaagtgtacgatgaggcctgggagagaatcgacaagaaggtggaaggcctgagcaagcacattaagctggaagaggaaagaaggagcgaggacgcccaatctaaagccgctctgaccgattggctgagagccaaggccagctttgtgatcgagggcctgaaagaggccgacaaggacgagttctgcagatgcgagctgaagctgcagaagtggtacggcgatctgagaggcaagcccttcgccattgaggccgagaacagcatcctggacatcagcggcttcagcaagcagtacaactgcgccttcatttggcagaaagacggcgtcaagaaactgaacctgtacctgatcatcaattacttcaaaggcggcaagctgcggttcaagaagatcaaacccgaggccttcgaggctaacagattctacaccgtgatcaacaaaaagtccggcgagatcgtgcccatggaagtgaacttcaacttcgacgaccccaacctgattatcctgcctctggccttcggcaagagacagggcagagagttcatctggaacgatctgctgagcctggaaaccggctctctgaagctggccaatggcagagtgatcgagaaaaccctgtacaacaggagaaccagacaggacgagcctgctctgtttgtggccctgaccttcgagagaagagaggtgctggacagcagcaacatcaagcccatgaacctgatcggcgtggaccggggcgagaatatccctgctgtgatcgccctgacagaccctgaaggatgcccactgagcagattcaaggactccctgggcaaccctacacacatcctgagaatcggcgagagctacaaagagaagcagaggacaatccaggccaagaaagaggtggaacagagaagagccggcggatactctaggaagtacgccagcaaggccaagaatctggccgacgacatggtccgaaacaccgccagagatctgctgtactacgccgtgacacaggacgccatgctgatcttcgagaatctgagcagaggcttcggccggcagggcaagagaacctttatggccgagaggcagtacaccagaatggaagattggctcacagctaaactggcctacgagggactgagcaagacctacctgtccaaaacactggcccagtatacctccaagacctgcagcaattgcggcttcaccatcaccagcgccgactacgacagagtgctggaaaagctcaagaaaaccgccaccggctggatgaccaccatcaacggcaaagagctgaaggttgagggccagatcacctactacaacaggtacaagaggcagaacgtcgtgaaggatctgagcgtggaactggacagactgagcgaagagagcgtgaacaacgacatcagcagctggacaaagggcagatcaggcgaggctctgagcctgctgaagaagaggtttagccacagacctgtgcaagagaagttcgtgtgcctgaactgcggcttcgagacacacgccgatgaacaggctgccctgaacattgccagaagctggctgttcctgagaagccaagagtacaagaagtaccagaccaacaagaccaccggcaacaccgacaagagggcctttgtggaaacctggcagagcttctacagaaaaaagctgaaagaagtctggaagcccgccgtgactagtccaaaaaagaagagaaaggta

SEQ ID NO: 256 - protein, 997 aa, Artificial Sequence
  CasX Variant
MAPKKKRKVSRQEIKRINKIRRRLVKDSNTKKAGKTGPMKTLLVRVMTPDLRERLENLRKKPENIPQPISNTSRANLNKLLTDYTEMKKAILHVYWEEFQKDPVGLMSRVAQPASKKIDQNKLKPEMDEKGNLTTAGFACSQCGQPLFVYKLEQVSEKGKAYTNYFGRCNVAEHEKLILLAQLKPEKDSDEAVTYSLGKFGQRALDFYSIHVTKESTHPVKPLAQIAGNRYASGPVGKALSDACMGTIASFLSKYQDIIIEHQKVVKGNQKRLESLRELAGKENLEYPSVTLPPQPHTKEGVDAYNEVIARVRMWVNLNLWQKLKLSRDDAKPLLRLKGFPSFPLVERQANEVDWWDMVCNVKKLINEKKEDGKVFWQNLAGYKRQEALRPYLSSEEDRKKGKKFARYQLGDLLLHLEKKHGEDWGKVYDEAWERIDKKVEGLSKHIKLEEERRSEDAQSKAALTDWLRAKASFVIEGLKEADKDEFCRCELKLQKWYGDLRGKPFAIEAENSILDISGFSKQYNCAFIWQKDGVKKLNLYLIINYFKGGKLRFKKIKPEAFEANRFYTVINKKSGEIVPMEVNFNFDDPNLIILPLAFGKRQGREFIWNDLLSLETGSLKLANGRVIEKTLYNRRTRQDEPALFVALTFERREVLDSSNIKPMNLIGVDRGENIPAVIALTDPEGCPLSRFKDSLGNPTHILRIGESYKEKQRTIQAKKEVEQRRAGGYSRKYASKAKNLADDMVRNTARDLLYYAVTQDAMLIFENLSRGFGRQGKRTFMAERQYTRMEDWLTAKLAYEGLSKTYLSKTLAQYTSKTCSNCGFTITSADYDRVLEKLKKTATGWMTTINGKELKVEGQITYYNRYKRQNVVKDLSVELDRLSEESVNNDISSWTKGRSGEALSLLKKRFSHRPVQEKFVCLNCGFETHADEQAALNIARSWLFLRSQEYKKYQTNKTTGNTDKRAFVETWQSFYRKKLKEVWKPAVTSPKKKRKV

SEQ ID NO: 257 - DNA, 2991 bp, Artificial Sequence
  CasX Variant
atggccccaaagaagaagcggaaggtctctagacaagagatcaagagaatcaacaagatcagaaggagactggtcaaggacagcaacacaaagaaggccggcaagacaggccccatgaaaaccctgctcgtcagagtgatgacccctgacctgagagagcggctggaaaacctgagaaagaagcccgagaacatccctcagcctatcagcaacaccagcagggccaacctgaacaagctgctgaccgactacaccgagatgaagaaagccatcctgcacgtgtactgggaagagttccagaaagaccccgtgggcctgatgagcagagttgctcagcctgccagcaagaagatcgaccagaacaagctgaagcccgagatggacgagaagggcaatctgaccacagccggctttgcctgctctcagtgtggccagcctctgttcgtgtacaagctggaacaggtgtccgagaaaggcaaggcctacaccaactacttcggcagatgtaacgtggccgagcacgagaagctgattctgctggcccagctgaaacctgagaaggactctgatgaggccgtgacctacagcctgggcaagtttggacagagagccctggacttctacagcatccacgtgaccagggagagcaatcaccctgtgaagcccctggaacagatcggcggcaatagctgtgcctctggacctgtgggaaaagccctgagcgacgcctgtatgggagccgtggcatccttcctgaccaagtaccaggacatcatcctggaacaccagaaagtgatcaagaagaacgagaaaagactggccaacctcaaggatatcgccagcgctaacggcctggcctttcctaagatcaccctgcctccacagcctcacaccaaagagggcatcgaggcctacaacaacgtggtggcccagatcgtgatttgggtcaacctgaatctgtggcagaagctgaagatcggcagggacgaagccaagccactgcagagactgaagggcttccctagcttccctctggtggaaagacaggccaatgaagtggattggtgggacatggtctgcaacgtgaagaagctgatcaacgagaagaaagaggatggcaaggttttctggcagaacctggccggctacaagagacaagaagccctgaggccttacctgagcagcgaagaggaccggaagaagggcaagaagttcgccagataccagctgggcgacctgctgctgcacctggaaaagaagcacggcgaggactggggcaaagtgtacgatgaggcctgggagagaatcgacaagaaggtggaaggcctgagcaagcacattaagctggaagaggaaagaaggagcgaggacgcccaatctaaagccgctctgaccgattggctgagagccaaggccagctttgtgatcgagggcctgaaagaggccgacaaggacgagttctgcagatgcgagctgaagctgcagaagtggtacggcgatctgagaggcaagcccttcgccattgaggccgagaacagcatcctggacatcagcggcttcagcaagcagtacaactgcgccttcatttggcagaaagacggcgtcaagaaactgaacctgtacctgatcatcaattacttcaaaggcggcaagctgcggttcaagaagatcaaacccgaggccttcgaggctaacagattctacaccgtgatcaacaaaaagtccggcgagatcgtgcccatggaagtgaacttcaacttcgacgaccccaacctgattatcctgcctctggccttcggcaagagacagggcagagagttcatctggaacgatctgctgagcctggaaaccggctctctgaagctggccaatggcagagtgatcgagaaaaccctgtacaacaggagaaccagacaggacgagcctgctctgtttgtggccctgaccttcgagagaagagaggtgctggacagcagcaacatcaagcccatgaacctgatcggcgtggaccggggcgagaatatccctgctgtgatcgccctgacagaccctgaaggatgcccactgagcagattcaaggactccctgggcaaccctacacacatcctgagaatcggcgagagctacaaagagaagcagaggacaatccaggccaagaaagaggtggaacagagaagagccggcggatactctaggaagtacgccagcaaggccaagaatctggccgacgacatggtccgaaacaccgccagagatctgctgtactacgccgtgacacaggacgccatgctgatcttcgagaatctgagcagaggcttcggccggcagggcaagagaacctttatggccgagaggcagtacaccagaatggaagattggctcacagctaaactggcctacgagggactgagcaagacctacctgtccaaaacactggcccagtatacctccaagacctgcagcaattgcggcttcaccatcaccagcgccgactacgacagagtgctggaaaagctcaagaaaaccgccaccggctggatgaccaccatcaacggcaaagagctgaaggttgagggccagatcacctactacaacaggtacaagaggcagaacgtcgtgaaggatctgagcgtggaactggacagactgagcgaagagagcgtgaacaacgacatcagcagctggacaaagggcagatcaggcgaggctctgagcctgctgaagaagaggtttagccacagacctgtgcaagagaagttcgtgtgcctgaactgcggcttcgagacacacgccgatgaacaggctgccctgaacattgccagaagctggctgttcctgagaagccaagagtacaagaagtaccagaccaacaagaccaccggcaacaccgacaagagggcctttgtggaaacctggcagagcttctacagaaaaaagctgaaagaagtctggaagcccgccgtgactagtccaaaaaagaagagaaaggta

SEQ ID NO: 258 - protein, 997 aa, Artificial Sequence
  CasX Variant
MAPKKKRKVSRQEIKRINKIRRRLVKDSNTKKAGKTGPMKTLLVRVMTPDLRERLENLRKKPENIPQPISNTSRANLNKLLTDYTEMKKAILHVYWEEFQKDPVGLMSRVAQPASKKIDQNKLKPEMDEKGNLTTAGFACSQCGQPLFVYKLEQVSEKGKAYTNYFGRCNVAEHEKLILLAQLKPEKDSDEAVTYSLGKFGQRALDFYSIHVTRESNHPVKPLEQIGGNSCASGPVGKALSDACMGAVASFLTKYQDIILEHQKVIKKNEKRLANLKDIASANGLAFPKITLPPQPHTKEGIEAYNNVVAQIVIWVNLNLWQKLKIGRDEAKPLQRLKGFPSFPLVERQANEVDWWDMVCNVKKLINEKKEDGKVFWQNLAGYKRQEALRPYLSSEEDRKKGKKFARYQLGDLLLHLEKKHGEDWGKVYDEAWERIDKKVEGLSKHIKLEEERRSEDAQSKAALTDWLRAKASFVIEGLKEADKDEFCRCELKLQKWYGDLRGKPFAIEAENSILDISGFSKQYNCAFIWQKDGVKKLNLYLIINYFKGGKLRFKKIKPEAFEANRFYTVINKKSGEIVPMEVNFNFDDPNLIILPLAFGKRQGREFIWNDLLSLETGSLKLANGRVIEKTLYNRRTRQDEPALFVALTFERREVLDSSNIKPMNLIGVDRGENIPAVIALTDPEGCPLSRFKDSLGNPTHILRIGESYKEKQRTIQAKKEVEQRRAGGYSRKYASKAKNLADDMVRNTARDLLYYAVTQDAMLIFENLSRGFGRQGKRTFMAERQYTRMEDWLTAKLAYEGLSKTYLSKTLAQYTSKTCSNCGFTITSADYDRVLEKLKKTATGWMTTINGKELKVEGQITYYNRYKRQNVVKDLSVELDRLSEESVNNDISSWTKGRSGEALSLLKKRFSHRPVQEKFVCLNCGFETHADEQAALNIARSWLFLRSQEYKKYQTNKTTGNTDKRAFVETWQSFYRKKLKEVWKPAVTSPKKKRKV

SEQ ID NO: 259 - DNA, 22 bp, Artificial Sequence
  T7 promoter primer
gaaattaatacgactcactata

SEQ ID NO: 260 - DNA, 87 bp, Artificial Sequence
  sg2 forward primer
gaaattaatacgactcactataggtactggcgcttttatctcattactttgagagccatcaccagcgactatgtcgtatgggtaaag

SEQ ID NO: 261 - DNA, 78 bp, Artificial Sequence
  sg2 reverse primer
ctttgatgcttcttatttatcggatttctctccgataaataagcgctttacccatacgacatagtcgctggtgatggc

SEQ ID NO: 262 - DNA, 54 bp, Artificial Sequence
  sg2.7.37 spacer primer
cggagcgagacatctcggccctttgatgcttcttatttatcggatttctctccg

SEQ ID NO: 263 - DNA, 90 bp, Artificial Sequence
  sg32 backbone forward primer
gaaattaatacgactcactataggtactggcgcttttatctcattactttgagagccatcaccagcgactatgtcgtatgggtaaagcgc

SEQ ID NO: 264 - DNA, 46 bp, Artificial Sequence
  sg32 backbone reverse primer
ctttgatgcttccctccgaagagggcgctttacccatacgacatag

SEQ ID NO: 265 - DNA, 43 bp, Artificial Sequence
  sg32.7.37 spacer primer
cggagcgagacatctcggccctttgatgcttccctccgaagag

SEQ ID NO: 266 - DNA, 90 bp, Artificial Sequence
  sg64 backbone forward primer
gaaattaatacgactcactataggtactggcgcctttatctcattactttgagagccatcaccagcgactatgtcgtatgggtaaagcgc

SEQ ID NO: 267 - DNA, 54 bp, Artificial Sequence
  sg64 backbone reverse primer
ctttgatgcttcttacggaccgaagtccgtaagcgctttacccatacgacatag

SEQ ID NO: 268 - DNA, 45 bp, Artificial Sequence
  sg64.7.37 spacer primer
cggagcgagacatctcggccctttgatgcttcttacggaccgaag

SEQ ID NO: 269 - DNA, 87 bp, Artificial Sequence
  sg174 backbone forward primer
gaaattaatacgactcactataactggcgcttttatctgattactttgagagccatcaccagcgactatgtcgtagtgggtaaagct

SEQ ID NO: 270 - DNA, 50 bp, Artificial Sequence
  sg174 backbone reverse primer
ctttgatgctccctccgaagagggagctttacccactacgacatagtcgc

SEQ ID NO: 271 - DNA, 36 bp, Artificial Sequence
  sg174.7.37 spacer primer
cggagcgagacatctcggccctttgatgctccctcc

SEQ ID NO: 272 - RNA, 130 nt, Artificial Sequence
  gRNA sequence
gguacuggcgcuuuuaucucauuacuuugagagccaucaccagcgacuaugucguauggguaaagcgcuuauuuaucggagagaaauccgauaaauaagaagcaucaaagggccgagaugucucgcuccg

SEQ ID NO: 273 - RNA, 107 nt, Artificial Sequence
  gRNA sequence
gguacuggcgcuuuuaucucauuacuuugagagccaucaccagcgacuaugucguauggguaaagcgcccucuucggagggaagcaucaaagggccgagaugucucg

SEQ ID NO: 274 - RNA, 120 nt, Artificial Sequence
  gRNA sequence
gguacuggcgccuuuaucucauuacuuugagagccaucaccagcgacuaugucguauggguaaagcgcuuacggacuucgguccguaagaagcaucaaagggccgagaugucucgcuccg

SEQ ID NO: 275 - RNA, 109 nt, Artificial Sequence
  gRNA sequence
acuggcgcuuuuaucugauuacuuugagagccaucaccagcgacuaugucguaguggguaaagcucccucuucggagggagcaucaaagggccgagaugucucgcuccg

SEQ ID NO: 276 - DNA, 20 bp, Artificial Sequence
  PCSK9 spacer
gaggaggacggcctggccga

SEQ ID NO: 277 - DNA, 20 bp, Artificial Sequence
  PCSK9 spacer
accgctgcgccaaggtgcgg

SEQ ID NO: 278 - DNA, 20 bp, Artificial Sequence
  PCSK9 spacer
gccaggccgtcctcctcgga

SEQ ID NO: 279 - DNA, 20 bp, Artificial Sequence
  PCSK9 spacer
gtgctcgggtgcttcggcca

SEQ ID NO: 280 - DNA, 20 bp, Artificial Sequence
  PCSK9 spacer
atggccttcttcctggcttc

SEQ ID NO: 281 - DNA, 20 bp, Artificial Sequence
  PCSK9 spacer
gcaccaccacgtaggtgcca

SEQ ID NO: 282 - DNA, 20 bp, Artificial Sequence
  PCSK9 spacer
tcctggcttcctggtgaaga

SEQ ID NO: 283 - DNA, 20 bp, Artificial Sequence
  PCSK9 spacer
tggcttcctggtgaagatga

SEQ ID NO: 284 - DNA, 20 bp, Artificial Sequence
  PCSK9 spacer
ccaggaagccaggaagaagg

SEQ ID NO: 285 - DNA, 20 bp, Artificial Sequence
  PCSK9 spacer
tccttgcatggggccaggat

SEQ ID NO: 286 - DNA, 20 bp, Artificial Sequence
  PMP22 spacer
ggcggcaagttctgctcagc

SEQ ID NO: 287 - DNA, 20 bp, Artificial Sequence
  PMP22 spacer
tctccacgatcgtcagcgtg

SEQ ID NO: 288 - DNA, 20 bp, Artificial Sequence
  PMP22 spacer
acgatcgtcagcgtgagtgc

SEQ ID NO: 289 - DNA, 20 bp, Artificial Sequence
  PMP22 spacer
ctctagcaatggatcgtggg

SEQ ID NO: 290 - DNA, 20 bp, Artificial Sequence
  TRAC spacer
caaacaaatgtgtcacaaag

SEQ ID NO: 291 - DNA, 20 bp, Artificial Sequence
  TRAC spacer
gatgtgtatatcacagacaa

SEQ ID NO: 292 - DNA, 20 bp, Artificial Sequence
  TRAC spacer
ggaataatgctgttgttgaa

SEQ ID NO: 293 - DNA, 20 bp, Artificial Sequence
  TRAC spacer
aaatccagtgacaagtctgt

SEQ ID NO: 294 - DNA, 20 bp, Artificial Sequence
  TRAC spacer
aggccacagcactgttgctc

SEQ ID NO: 295 - DNA, 20 bp, Artificial Sequence
  TRAC spacer
agaagacaccttcttcccca

SEQ ID NO: 296 - DNA, 20 bp, Artificial Sequence
  TRAC spacer
tccccagcccaggtaagggc

SEQ ID NO: 297 - DNA, 20 bp, Artificial Sequence
  TRAC spacer
ccagcccaggtaagggcagc

SEQ ID NO: 298 - DNA, 20 bp, Artificial Sequence
  HTT spacer
agtccctcaagtccttccag

SEQ ID NO: 299 - DNA, 20 bp, Artificial Sequence
  HTT spacer
agcagcagcagcagcagcag

SEQ ID NO: 300 - DNA, 20 bp, Artificial Sequence
  HTT spacer
tcagccgccgccgcaggcac

SEQ ID NO: 301 - DNA, 20 bp, Artificial Sequence
  HTT spacer
agggtcgccatggcggtctc

SEQ ID NO: 302 - DNA, 20 bp, Artificial Sequence
  HTT spacer
tcagcttttccagggtcgcc

SEQ ID NO: 303 - DNA, 20 bp, Artificial Sequence
  HTT spacer
gccgcagccgcccccgccgc

SEQ ID NO: 304 - DNA, 20 bp, Artificial Sequence
  HTT spacer
gccacagccgggccgggtgg

SEQ ID NO: 305 - DNA, 20 bp, Artificial Sequence
  HTT spacer
tcagccacagccgggccggg

SEQ ID NO: 306 - DNA, 20 bp, Artificial Sequence
  HTT spacer
cggtcggtgcagcggctcct

SEQ ID NO: 307 - DNA, 20 bp, Artificial Sequence
  SOD1 spacer
ccacaccttcactggtccat

SEQ ID NO: 308 - DNA, 20 bp, Artificial Sequence
  SOD1 spacer
taaaggaaagtaatggacca

SEQ ID NO: 309 - DNA, 20 bp, Artificial Sequence
  SOD1 spacer
ctggtccattactttccttt

SEQ ID NO: 310 - DNA, 20 bp, Artificial Sequence
  SOD1 spacer
atgttcatgagtttggagat

SEQ ID NO: 311 - DNA, 20 bp, Artificial Sequence
  SOD1 spacer
tgagtttggagataatacag

SEQ ID NO: 312 - DNA, 20 bp, Artificial Sequence
  SOD1 spacer
atagacacatcggccacacc

SEQ ID NO: 313 - DNA, 20 bp, Artificial Sequence
  SOD1 spacer
ttattaggcatgttggagac

SEQ ID NO: 314 - DNA, 20 bp, Artificial Sequence
  SOD1 spacer
caggagaccattgcatcatt

SEQ ID NO: 315 - DNA, 20 bp, Artificial Sequence
  SOD1 spacer
ggcctggaggctatccagcg

SEQ ID NO: 316 - DNA, 20 bp, Artificial Sequence
  B2M spacer
ggccgagatgtctcgctccg

SEQ ID NO: 317 - DNA, 20 bp, Artificial Sequence
  B2M spacer
aggccagaaagagagagtag

SEQ ID NO: 318 - DNA, 20 bp, Artificial Sequence
  B2M spacer
cgctggatagcctccaggcc

SEQ ID NO: 319 - DNA, 20 bp, Artificial Sequence
  B2M spacer
tgaagctgacagcattcggg

SEQ ID NO: 320 - RNA, 20 nt, Artificial Sequence
  PCSK9 spacer
gaggaggacggccuggccga

SEQ ID NO: 321 - RNA, 20 nt, Artificial Sequence
  PCSK9 spacer
accgcugcgccaaggugcgg

SEQ ID NO: 322 - RNA, 20 nt, Artificial Sequence
  PCSK9 spacer
gccaggccguccuccucgga

SEQ ID NO: 323 - RNA, 20 nt, Artificial Sequence
  PCSK9 spacer
gugcucgggugcuucggcca

SEQ ID NO: 324 - RNA, 20 nt, Artificial Sequence
  PCSK9 spacer
auggccuucuuccuggcuuc

SEQ ID NO: 325 - RNA, 20 nt, Artificial Sequence
  PCSK9 spacer
gcaccaccacguaggugcca

SEQ ID NO: 326 - RNA, 20 nt, Artificial Sequence
  PCSK9 spacer
uccuggcuuccuggugaaga

SEQ ID NO: 327 - RNA, 20 nt, Artificial Sequence
  PCSK9 spacer
uggcuuccuggugaagauga

SEQ ID NO: 328 - RNA, 20 nt, Artificial Sequence
  PCSK9 spacer
ccaggaagccaggaagaagg

SEQ ID NO: 329 - RNA, 20 nt, Artificial Sequence
  PCSK9 spacer
uccuugcauggggccaggau

SEQ ID NO: 330 - RNA, 20 nt, Artificial Sequence
  PMP22 spacer
ggcggcaaguucugcucagc

SEQ ID NO: 331 - RNA, 20 nt, Artificial Sequence
  PMP22 spacer
ucuccacgaucgucagcgug

SEQ ID NO: 332 - RNA, 20 nt, Artificial Sequence
  PMP22 spacer
acgaucgucagcgugagugc

SEQ ID NO: 333 - RNA, 20 nt, Artificial Sequence
  PMP22 spacer
cucuagcaauggaucguggg

SEQ ID NO: 334 - RNA, 20 nt, Artificial Sequence
  TRAC spacer
caaacaaaugugucacaaag

SEQ ID NO: 335 - RNA, 20 nt, Artificial Sequence
  TRAC spacer
gauguguauaucacagacaa

SEQ ID NO: 336 - RNA, 20 nt, Artificial Sequence
  TRAC spacer
ggaauaaugcuguuguugaa

SEQ ID NO: 337 - RNA, 20 nt, Artificial Sequence
  TRAC spacer
aaauccagugacaagucugu

SEQ ID NO: 338 - RNA, 20 nt, Artificial Sequence
  TRAC spacer
aggccacagcacuguugcuc

SEQ ID NO: 339 - RNA, 20 nt, Artificial Sequence
  TRAC spacer
agaagacaccuucuucccca

SEQ ID NO: 340 - RNA, 20 nt, Artificial Sequence
  TRAC spacer
uccccagcccagguaagggc

SEQ ID NO: 341 - RNA, 20 nt, Artificial Sequence
  TRAC spacer
ccagcccagguaagggcagc

SEQ ID NO: 342 - RNA, 20 nt, Artificial Sequence
  HTT spacer
agucccucaaguccuuccag

SEQ ID NO: 343 - RNA, 20 nt, Artificial Sequence
  HTT spacer
agcagcagcagcagcagcag

SEQ ID NO: 344 - RNA, 20 nt, Artificial Sequence
  HTT spacer
ucagccgccgccgcaggcac

SEQ ID NO: 345 - RNA, 20 nt, Artificial Sequence
  HTT spacer
agggucgccauggcggucuc

SEQ ID NO: 346 - RNA, 20 nt, Artificial Sequence
  HTT spacer
ucagcuuuuccagggucgcc

SEQ ID NO: 347 - RNA, 20 nt, Artificial Sequence
  HTT spacer
gccgcagccgcccccgccgc

SEQ ID NO: 348 - RNA, 20 nt, Artificial Sequence
  HTT spacer
gccacagccgggccgggugg

SEQ ID NO: 349 - RNA, 20 nt, Artificial Sequence
  HTT spacer
ucagccacagccgggccggg

SEQ ID NO: 350 - RNA, 20 nt, Artificial Sequence
  HTT spacer
cggucggugcagcggcuccu

SEQ ID NO: 351 - RNA, 20 nt, Artificial Sequence
  SOD1 spacer
ccacaccuucacugguccau

SEQ ID NO: 352 - RNA, 20 nt, Artificial Sequence
  SOD1 spacer
uaaaggaaaguaauggacca

SEQ ID NO: 353 - RNA, 20 nt, Artificial Sequence
  SOD1 spacer
cugguccauuacuuuccuuu

SEQ ID NO: 354 - RNA, 20 nt, Artificial Sequence
  SOD1 spacer
auguucaugaguuuggagau

SEQ ID NO: 355 - RNA, 20 nt, Artificial Sequence
  SOD1 spacer
ugaguuuggagauaauacag

SEQ ID NO: 356 - RNA, 20 nt, Artificial Sequence
  SOD1 spacer
auagacacaucggccacacc

SEQ ID NO: 357 - RNA, 20 nt, Artificial Sequence
  SOD1 spacer
uuauuaggcauguuggagac

SEQ ID NO: 358 - RNA, 20 nt, Artificial Sequence
  SOD1 spacer
caggagaccauugcaucauu

SEQ ID NO: 359 - RNA, 20 nt, Artificial Sequence
  SOD1 spacer
ggccuggaggcuauccagcg

SEQ ID NO: 360 - RNA, 20 nt, Artificial Sequence
  B2M spacer
ggccgagaugucucgcuccg

SEQ ID NO: 361 - RNA, 20 nt, Artificial Sequence
  B2M spacer
aggccagaaagagagaguag

SEQ ID NO: 362 - RNA, 20 nt, Artificial Sequence
  B2M spacer
cgcuggauagccuccaggcc

SEQ ID NO: 363 - RNA, 20 nt, Artificial Sequence
  B2M spacer
ugaagcugacagcauucggg

SEQ ID NO: 364 - DNA, 60 bp, Artificial Sequence
  B2M target oligo
tgaagctgacagcattcgggccgagatgtctcgctccgtggccttagctgtgctcgcgct

SEQ ID NO: 365 - DNA, 60 bp, Artificial Sequence
  B2M target oligo
agcgcgagcacagctaaggccacggagcgagacatctcggcccgaatgctgtcagcttca

SEQ ID NO: 366 - protein, 5 aa, Artificial Sequence
  linker
GSGGG

SEQ ID NO: 367 - protein, 5 aa, Artificial Sequence
  linker
GGGSG

SEQ ID NO: 368 - protein, 5 aa, Artificial Sequence
  linker
GSSSG

SEQ ID NO: 369 - protein, 4 aa, Artificial Sequence
  linker
GPGP

SEQ ID NO: 370 - protein, 6 aa, Artificial Sequence
  linker
PPAPPA

SEQ ID NO: 371 - protein, 7 aa, Artificial Sequence
  linker
PPPGPPP

SEQ ID NO: 372 - DNA, 20 bp, Artificial Sequence
  E6 spacer
tgtggtcggggtagcggctg

SEQ ID NO: 373 - DNA, 20 bp, Artificial Sequence
  E7 spacer
tcaagtccgccatgcccgaa

SEQ ID NO: 374 - DNA, 89 bp, Artificial Sequence
  HDV antigenomic ribozyme
gggtcggcatggcatctccacctcctcgcggtccgacctgggcatccgaaggaggacgcacgtccactcggatggctaagggagagcca

SEQ ID NO: 375 - DNA, 86 bp, Artificial Sequence
  HDV genomic ribozyme
ggccggcatggtcccagcctcctcgctggcgccggctgggcaacattccgaggggaccgtcccctcggtaatggcgaatgggaccc

SEQ ID NO: 376 - DNA, 69 bp, Artificial Sequence
  HDV ribozyme (v1)
gatggccggcatggtcccagcctcctcgctggcgccggctgggcaacaccttcgggtggcgaatgggac

SEQ ID NO: 377 - DNA, 78 bp, Artificial Sequence
  HDV ribozyme (v2)
ttttggccggcatggtcccagcctcctcgctggcgccggctgggcaacatgcttcggcatggcgaatgggaccccggg

SEQ ID NO: 378 - DNA, 78 bp, Artificial Sequence
  Hatchet
cattcctcagaaaatgacaaacctgtggggcgtaagtagatcttcggatctatgatcgtgcagacgttaaaatcaggt

SEQ ID NO: 379 - DNA, 64 bp, Artificial Sequence
  env25 pistol ribozyme (with CUUCGG loop)
cgtggttagggccacgttaaatagttgcttaagccctaagcgttgatcttcggatcaggtgcaa

SEQ ID NO: 380 - DNA, 60 bp, Artificial Sequence
  HH15 Minimal Hammerhead ribozyme
gggagccccgctgatgaggtcggggagaccgaaagggacttcggtccctacggggctccc

SEQ ID NO: 381 - DNA, 52 bp, Artificial Sequence
  sTRSV WT viral Hammerhead ribozyme
cctgtcaccggatgtgctttccggtctgatgagtccgtgaggacgaaacagg

SEQ ID NO: 382 - DNA, 63 bp, Artificial Sequence
  Hammerhead ribozyme
cgactactgatgagtccgtgaggacgaaacgagtaagctcgtctagtcgcgtgtagcgaagca

SEQ ID NO: 383 - DNA, 49 bp, Artificial Sequence
  Hammerhead ribozyme, smaller scar
cgactactgatgagtccgtgaggacgaaacgagtaagctcgtctagtcg

SEQ ID NO: 384 - DNA, 63 bp, Artificial Sequence
  Hammerhead ribozyme, guide scaffold scar
ccagtactgatgagtccgtgaggacgaaacgagtaagctcgtctactggcgcttttatctcat

SEQ ID NO: 385 - DNA, 77 bp, Artificial Sequence
  Twisted Sister 1
acccgcaaggccgacggcatccgccgccgctggtgcaagtccagccgccccttcgggggcgggcgctcatgggtaac

SEQ ID NO: 386 - DNA, 76 bp, Artificial Sequence
  Env-9 Twister
ggcaataaagcggttacaagcccgcaaaaatagcagagtaatgtcgcgatagcgcggcattaatgcagctttattg

SEQ ID NO: 387 - DNA, 36 bp, Artificial Sequence
  RBMX recruiting motif
ccacccccaccaccacccccacccccaccaccaccc

SEQ ID NO: 388 - protein, 8 aa, Artificial Sequence
  HIV-1 cleavage site
SQNYPIVQ

SEQ ID NO: 389 - DNA, 20 bp, Artificial Sequence
  PTBP1 spacer
cgccgcctgactcgccacgt

SEQ ID NO: 390 - DNA, 20 bp, Artificial Sequence
  PTBP1 spacer
gtttccgccttcggccttga

SEQ ID NO: 391 - DNA, 20 bp, Artificial Sequence
  PTBP1 spacer
gtcttccgtcttgactgacg

SEQ ID NO: 392 - DNA, 20 bp, Artificial Sequence
  PTBP1 spacer
ggagtaaccttttgaccaat

SEQ ID NO: 393 - RNA, 20 nt, Artificial Sequence
  mouse PTBP1 spacer
gucuuccgucuugacugacg

SEQ ID NO: 394 - RNA, 20 nt, Artificial Sequence
  mouse PTBP1 spacer
gucuugacugacggccgucc

SEQ ID NO: 395 - RNA, 20 nt, Artificial Sequence
  mouse PTBP1 spacer
auuggucaaaagguuacucc

SEQ ID NO: 396 - RNA, 20 nt, Artificial Sequence
  mouse PTBP1 spacer
cccuuggaguaaccuuuuga

SEQ ID NO: 397 - RNA, 20 nt, Artificial Sequence
  mouse PTBP1 spacer
cgcugcggucugugggcgug

SEQ ID NO: 398 - RNA, 20 nt, Artificial Sequence
  mouse PTBP1 spacer
gcuauuccugcgccuccgcu

SEQ ID NO: 399 - RNA, 20 nt, Artificial Sequence
  mouse PTBP1 spacer
ugcgccuccgcuccguuccc

SEQ ID NO: 400 - RNA, 20 nt, Artificial Sequence
  mouse PTBP1 spacer
ccgcgggucucuuccgugug

SEQ ID NO: 401 - RNA, 20 nt, Artificial Sequence
  mouse PTBP1 spacer
gugugccauggacggguaag

SEQ ID NO: 402 - RNA, 20 nt, Artificial Sequence
  mouse PTBP1 spacer
cagcggggauccgacgagcu

SEQ ID NO: 403 - RNA, 20 nt, Artificial Sequence
  mouse PTBP1 spacer
ccacgugugucagcaacggc

SEQ ID NO: 404 - RNA, 20 nt, Artificial Sequence
  mouse PTBP1 spacer
ucaugagcagcucugccuca

SEQ ID NO: 405 - RNA, 20 nt, Artificial Sequence
  mouse PTBP1 spacer
cccagcucgcccuguaccug

SEQ ID NO: 406 - RNA, 20 nt, Artificial Sequence
  mouse PTBP1 spacer
ugccucugccagguccuuuc

SEQ ID NO: 407 - RNA, 20 nt, Artificial Sequence
  mouse PTBP1 spacer
auuggcugaaaagggauagg

SEQ ID NO: 408 - RNA, 20 nt, Artificial Sequence
  mouse PTBP1 spacer
ugcuaucguuuccauuggcu

SEQ ID NO: 409 - RNA, 20 nt, Artificial Sequence
  mouse PTBP1 spacer
gccaauggaaacgauagcaa

SEQ ID NO: 410 - RNA, 20 nt, Artificial Sequence
  mouse PTBP1 spacer
aaggugacaacaggagcgca

SEQ ID NO: 411 - RNA, 20 nt, Artificial Sequence
  mouse PTBP1 spacer
gacauggaugacucuggaag

SEQ ID NO: 412 - RNA, 20 nt, Artificial Sequence
  mouse PTBP1 spacer
agagucauccaugucagaaa

SEQ ID NO: 413 - RNA, 20 nt, Artificial Sequence
  mouse PTBP1 spacer
aaagggcagcccuagggaga

SEQ ID NO: 414 - RNA, 20 nt, Artificial Sequence
  mouse PTBP1 spacer
gcaugagaagguugguaacc

SEQ ID NO: 415 - RNA, 20 nt, Artificial Sequence
  mouse PTBP1 spacer
ccuucagcaugagaagguug

SEQ ID NO: 416 - RNA, 20 nt, Artificial Sequence
  mouse PTBP1 spacer
uccccuucagcaugagaagg

SEQ ID NO: 417 - RNA, 20 nt, Artificial Sequence
  mouse PTBP1 spacer
ucucaaugaaggccugguuc

SEQ ID NO: 418 - RNA, 20 nt, Artificial Sequence
  mouse PTBP1 spacer
caugcugaaggggaagaacc

SEQ ID NO: 419 - RNA, 20 nt, Artificial Sequence
  mouse PTBP1 spacer
uugagaugaacacagaggag

SEQ ID NO: 420 - RNA, 20 nt, Artificial Sequence
  mouse PTBP1 spacer
uggacagcccaucuacaucc

SEQ ID NO: 421 - RNA, 20 nt, Artificial Sequence
  mouse PTBP1 spacer
ccaaccacaaagagcucaag

SEQ ID NO: 422 - RNA, 20 nt, Artificial Sequence
  mouse PTBP1 spacer
uccacagcgugcccaggcag

SEQ ID NO: 423 - RNA, 20 nt, Artificial Sequence
  mouse PTBP1 spacer
agacuggacggaguuuacag

SEQ ID NO: 424 - RNA, 20 nt, Artificial Sequence
  mouse PTBP1 spacer
ugcauccacggcagcagcgg

SEQ ID NO: 425 - RNA, 20 nt, Artificial Sequence
  mouse PTBP1 spacer
acaaugauccugagcacugg

SEQ ID NO: 426 - RNA, 20 nt, Artificial Sequence
  mouse PTBP1 spacer
acccagugacccuggacgug

SEQ ID NO: 427 - RNA, 20 nt, Artificial Sequence
  mouse PTBP1 spacer
cacuuggucggccccagcua

SEQ ID NO: 428 - RNA, 20 nt, Artificial Sequence
  mouse PTBP1 spacer
cacauccucucuugcagauc

SEQ ID NO: 429 - RNA, 20 nt, Artificial Sequence
  mouse PTBP1 spacer
ggacggugccaaacuuagag

SEQ ID NO: 430 - RNA, 20 nt, Artificial Sequence
  mouse PTBP1 spacer
cuaaguuuggcaccguccug

SEQ ID NO: 431 - RNA, 20 nt, Artificial Sequence
  mouse PTBP1 spacer
uggugaacgugaugaucuuc

SEQ ID NO: 432 - RNA, 20 nt, Artificial Sequence
  mouse PTBP1 spacer
ccaagaacaaccaguuccag

SEQ ID NO: 433 - RNA, 20 nt, Artificial Sequence
  mouse PTBP1 spacer
aggcgcugcugcaguaugcu

SEQ ID NO: 434 - RNA, 20 nt, Artificial Sequence
  mouse PTBP1 spacer
ggccauccagggacuguggg

SEQ ID NO: 435 - RNA, 20 nt, Artificial Sequence
  mouse PTBP1 spacer
ccaagcucaccagucucaau

SEQ ID NO: 436 - RNA, 20 nt, Artificial Sequence
  mouse PTBP1 spacer
cuagaccagaccauggcagc

SEQ ID NO: 437 - RNA, 20 nt, Artificial Sequence
  mouse PTBP1 spacer
uuuggugugucucaguacag

SEQ ID NO: 438 - RNA, 20 nt, Artificial Sequence
  mouse PTBP1 spacer
aggugcgcccggcauaaugu

SEQ ID NO: 439 - RNA, 20 nt, Artificial Sequence
  mouse PTBP1 spacer
cucccaccuuugccaucccu

SEQ ID NO: 440 - RNA, 20 nt, Artificial Sequence
  mouse PTBP1 spacer
cgcucauccugaccccagcg

SEQ ID NO: 441 - RNA, 20 nt, Artificial Sequence
  mouse PTBP1 spacer
ccucuccccagaaggaaggg

SEQ ID NO: 442 - RNA, 20 nt, Artificial Sequence
  mouse PTBP1 spacer
ggaggccccuuccccucucc

SEQ ID NO: 443 - RNA, 20 nt, Artificial Sequence
  mouse PTBP1 spacer
uucuggggagaggggaaggg

SEQ ID NO: 444 - RNA, 20 nt, Artificial Sequence
  mouse PTBP1 spacer
ggggagaggggaaggggccu

SEQ ID NO: 445 - RNA, 20 nt, Artificial Sequence
  mouse PTBP1 spacer
cuucaagcaccucuggcgag

SEQ ID NO: 446 - RNA, 20 nt, Artificial Sequence
  mouse PTBP1 spacer
agcaccucuggcgaggacga

SEQ ID NO: 447 - RNA, 20 nt, Artificial Sequence
  mouse PTBP1 spacer
aucuacuagggacacugcgu

SEQ ID NO: 448 - RNA, 20 nt, Artificial Sequence
  mouse PTBP1 spacer
uccaugcaugcuccggcggc

SEQ ID NO: 449 - RNA, 20 nt, Artificial Sequence
  mouse PTBP1 spacer
uuugcaggccucucuguccc

SEQ ID NO: 450 - RNA, 20 nt, Artificial Sequence
  mouse PTBP1 spacer
cagcaccugccaacccuggg

SEQ ID NO: 451 - RNA, 20 nt, Artificial Sequence
  mouse PTBP1 spacer
gauugcugaccaaaaggaca

SEQ ID NO: 452 - RNA, 20 nt, Artificial Sequence
  mouse PTBP1 spacer
guccuuuuggucagcaaucu

SEQ ID NO: 453 - RNA, 20 nt, Artificial Sequence
  mouse PTBP1 spacer
cccgcugcacaucaccguag

SEQ ID NO: 454 - RNA, 20 nt, Artificial Sequence
  mouse PTBP1 spacer
aaggcgucuacggugaugug

SEQ ID NO: 455 - RNA, 20 nt, Artificial Sequence
  mouse PTBP1 spacer
uauugaacaggaucuucacc

SEQ ID NO: 456 - RNA, 20 nt, Artificial Sequence
  mouse PTBP1 spacer
ccuucuuauugaacaggauc

SEQ ID NO: 457 - RNA, 20 nt, Artificial Sequence
  mouse PTBP1 spacer
auaagaaggagaacgcacuu

SEQ ID NO: 458 - RNA, 20 nt, Artificial Sequence
  mouse PTBP1 spacer
agcacaagccugugcccugu

SEQ ID NO: 459 - RNA, 20 nt, Artificial Sequence
  mouse PTBP1 spacer
gguggcucauggcuggacaa

SEQ ID NO: 460 - RNA, 20 nt, Artificial Sequence
  mouse PTBP1 spacer
acccuuuguccagccaugag

SEQ ID NO: 461 - RNA, 20 nt, Artificial Sequence
  mouse PTBP1 spacer
cgugcagcuugugcccguuc

SEQ ID NO: 462 - RNA, 20 nt, Artificial Sequence
  mouse PTBP1 spacer
ugaagcggugcagcggggag

SEQ ID NO: 463 - RNA, 20 nt, Artificial Sequence
  mouse PTBP1 spacer
uggagccugguuucuugaag

SEQ ID NO: 464 - RNA, 20 nt, Artificial Sequence
  mouse PTBP1 spacer
ggaaguucuuggagccuggu

SEQ ID NO: 465 - RNA, 20 nt, Artificial Sequence
  mouse PTBP1 spacer
agaaaccaggcuccaagaac

SEQ ID NO: 466 - RNA, 20 nt, Artificial Sequence
  mouse PTBP1 spacer
agaacaucuuuccacccuca

SEQ ID NO: 467 - RNA, 20 nt, Artificial Sequence
  mouse PTBP1 spacer
acccucagcuacccugcacc

SEQ ID NO: 468 - RNA, 20 nt, Artificial Sequence
  mouse PTBP1 spacer
uggcccacccacaaacaaga

SEQ ID NO: 469 - RNA, 20 nt, Artificial Sequence
  mouse PTBP1 spacer
ccagcaacgguggugugguc

SEQ ID NO: 470 - RNA, 20 nt, Artificial Sequence
  mouse PTBP1 spacer
aguucuuccagugaguaaag

SEQ ID NO: 471 - RNA, 20 nt, Artificial Sequence
  mouse PTBP1 spacer
uccagugaguaaagcccugc

SEQ ID NO: 472 - RNA, 20 nt, Artificial Sequence
  mouse PTBP1 spacer
agugaguaaagcccugccuu

SEQ ID NO: 473 - RNA, 20 nt, Artificial Sequence
  mouse PTBP1 spacer
uccuccacccuuaacccuac

SEQ ID NO: 474 - RNA, 20 nt, Artificial Sequence
  mouse PTBP1 spacer
ugcagggguggagugggggg

SEQ ID NO: 475 - RNA, 20 nt, Artificial Sequence
  mouse PTBP1 spacer
aucagcgccugcacagccuc

SEQ ID NO: 476 - RNA, 20 nt, Artificial Sequence
  mouse PTBP1 spacer
cgcccaggucaugguugugc

SEQ ID NO: 477 - RNA, 20 nt, Artificial Sequence
  mouse PTBP1 spacer
aaguccaccaucuaggugcc

SEQ ID NO: 478 - protein, 84 aa, Artificial Sequence
  chloroplast transit peptide
MASMISSSAVTTVSRASRGQSAAMAPFGGLKSMTGFPVRKVNTDITSITSNGGRVKCMQVWPPIGKKKFETLSYLPPLTRDSRA

SEQ ID NO: 479 - protein, 57 aa, Artificial Sequence
  chloroplast transit peptide
MASMISSSAVTTVSRASRGQSAAMAPFGGLKSMTGFPVRKVNTDITSITSNGGRVKS

SEQ ID NO: 480 - protein, 85 aa, Artificial Sequence
  chloroplast transit peptide
MASSMLSSATMVASPAQATMVAPFNGLKSSAAFPATRKANNDITSITSNGGRVNCMQVWPPIEKKKFETLSYLPDLTDSGGRVNC

SEQ ID NO: 481 - protein, 76 aa, Artificial Sequence
  chloroplast transit peptide
MAQVSRICNGVQNPSLISNLSKSSQRKSPLSVSLKTQQHPRAYPISSSWGLKKSGMTLIGSELRPLKVMSSVSTAC

SEQ ID NO: 482 - protein, 76 aa, Artificial Sequence
  chloroplast transit peptide
MAQVSRICNGVWNPSLISNLSKSSQRKSPLSVSLKTQQHPRAYPISSSWGLKKSGMTLIGSELRPLKVMSSVSTAC

SEQ ID NO: 483 - protein, 72 aa, Artificial Sequence
  chloroplast transit peptide
MAQINNMAQGIQTLNPNSNFHKPQVPKSSSFLVFGSKKLKNSANSMLVLKKDSIFMQLFCSFRISASVATAC

SEQ ID NO: 484 - protein, 69 aa, Artificial Sequence
  chloroplast transit peptide
MAALVTSQLATSGTVLSVTDRFRRPGFQGLRPRNPADAALGMRTVGASAAPKQSRKPHRFDRRCLSMVV

SEQ ID NO: 485 - protein, 77 aa, Artificial Sequence
  chloroplast transit peptide
MAALTTSQLATSATGFGIADRSAPSSLLRHGFQGLKPRSPAGGDATSLSVTTSARATPKQQRSVQRGSRRFPSVVVC

SEQ ID NO: 486 - protein, 57 aa, Artificial Sequence
  chloroplast transit peptide
MASSVLSSAAVATRSNVAQANMVAPFTGLKSAASFPVSRKQNLDITSIASNGGRVQC

SEQ ID NO: 487 - protein, 65 aa, Artificial Sequence
  chloroplast transit peptide
MESLAATSVFAPSRVAVPAARALVRAGTVVPTRRTSSTSGTSGVKCSAAVTPQASPVISRSAAAA

SEQ ID NO: 488 - protein, 72 aa, Artificial Sequence
  chloroplast transit peptide
MGAAATSMQSLKFSNRLVPPSRRLSPVPNNVTCNNLPKSAAPVRTVKCCASSWNSTINGAAATTNGASAASS

SEQ ID NO: 489 - protein, 20 aa, Artificial Sequence
  endosomal escape peptide
  SITE (4)..(4): Xaa is Lys, His or Arg
  SITE (8)..(8): Xaa is Lys, His or Arg
  SITE (11)..(11): Xaa is Lys, His or Arg
  SITE (15)..(15): Xaa is Lys, His or Arg
  SITE (19)..(19): Xaa is Lys, His or Arg
GLFXALLXLLXSLWXLLLXA

SEQ ID NO: 490 - protein, 20 aa, Artificial Sequence
  endosomal escape peptide
GLFHALLHLLHSLWHLLLHA

SEQ ID NO: 491 - protein, 9 aa, Artificial Sequence
  endosomal escape peptide
HHHHHHHHH

SEQ ID NO: 492 - RNA, 20 nt, Artificial Sequence
  spacer sequence ATCN PAM
caguacuuugugaggccgag

SEQ ID NO: 493 - RNA, 20 nt, Artificial Sequence
  spacer sequence ATCN PAM
cgcgccugcaaucccagcua

SEQ ID NO: 494 - RNA, 20 nt, Artificial Sequence
  spacer sequence ATCN PAM
cagcuaucugggaggaggcu

SEQ ID NO: 495 - RNA, 20 nt, Artificial Sequence
  spacer sequence ATCN PAM
gggaggaggcugaggcagga

SEQ ID NO: 496 - RNA, 20 nt, Artificial Sequence
  spacer sequence ATCN PAM
gggaggcagagguugcagug

SEQ ID NO: 497 - RNA, 20 nt, Artificial Sequence
  spacer sequence ATCN PAM
cggcucacugcaaccucugc

SEQ ID NO: 498 - RNA, 20 nt, Artificial Sequence
  spacer sequence ATCN PAM
ugccacugcacuccagccug

SEQ ID NO: 499 - RNA, 20 nt, Artificial Sequence
  spacer sequence ATCN PAM
cagcacuuugggaggccgag

SEQ ID NO: 500 - RNA, 20 nt, Artificial Sequence
  spacer sequence ATCN PAM
cgaggucagaagaucgagac

SEQ ID NO: 501 - RNA, 20 nt, Artificial Sequence
  spacer sequence ATCN PAM
ucugaccucgugauucgccc

SEQ ID NO: 502 - RNA, 20 nt, Artificial Sequence
  spacer sequence ATCN PAM
agaccauccuggcuaacguc

SEQ ID NO: 503 - RNA, 20 nt, Artificial Sequence
  spacer sequence ATCN PAM
uggcuaacgucgugaaaccu

SEQ ID NO: 504 - RNA, 20 nt, Artificial Sequence
  spacer sequence ATCN PAM
cggcuuacugcaaacucugc

SEQ ID NO: 505 - RNA, 20 nt, Artificial Sequence
  spacer sequence ATCN PAM
cagcacugaacuccagccug

SEQ ID NO: 506 - RNA, 20 nt, Artificial Sequence
  spacer sequence ATCN PAM
uauugccacagucuuuuuuu

SEQ ID NO: 507 - RNA, 20 nt, Artificial Sequence
  spacer sequence ATCN PAM
accuaugacuuauaagcccc

SEQ ID NO: 508 - RNA, 20 nt, Artificial Sequence
  spacer sequence ATCN PAM
caaauugggggcuuauaagu

SEQ ID NO: 509 - RNA, 20 nt, Artificial Sequence
  spacer sequence ATCN PAM
ugccuuuucagggagaacgg

SEQ ID NO: 510 - RNA, 20 nt, Artificial Sequence
  spacer sequence ATCN PAM
gcccguucucccugaaaagg

SEQ ID NO: 511 - RNA, 20 nt, Artificial Sequence
  spacer sequence ATCN PAM
gccuaccccguguucccugc

SEQ ID NO: 512 - RNA, 20 nt, Artificial Sequence
  spacer sequence ATCN PAM
aggaagcaggaguuacaggc

SEQ ID NO: 513 - RNA, 20 nt, Artificial Sequence
  spacer sequence ATCN PAM
cggcccgaggaaacagacuc

SEQ ID NO: 514 - RNA, 20 nt, Artificial Sequence
  spacer sequence ATCN PAM
cucauaccgcucagauaacu

SEQ ID NO: 515 - RNA, 20 nt, Artificial Sequence
  spacer sequence ATCN PAM
gagcgguaugagugaucccg

SEQ ID NO: 516 - RNA, 20 nt, Artificial Sequence
  spacer sequence ATCN PAM
uggccugugcggggccgucc

SEQ ID NO: 517 - RNA, 20 nt, Artificial Sequence
  spacer sequence ATCN PAM
ugcagcccgugcagggagaa

SEQ ID NO: 518 - RNA, 20 nt, Artificial Sequence
  spacer sequence ATCN PAM
gcucugggggccccgaguau

SEQ ID NO: 519 - RNA, 20 nt, Artificial Sequence
  spacer sequence ATCN PAM
gcaggcaaauuggcuacaac

SEQ ID NO: 520 - RNA, 20 nt, Artificial Sequence
  spacer sequence ATCN PAM
aauuccaggacguuguagcc

SEQ ID NO: 521 - RNA, 20 nt, Artificial Sequence
  spacer sequence ATCN PAM
gggcccaucccucagagccu

SEQ ID NO: 522 - RNA, 20 nt, Artificial Sequence
  spacer sequence ATCN PAM
cucagagccuggccucgguc

SEQ ID NO: 523 - RNA, 20 nt, Artificial Sequence
  spacer sequence ATCN PAM
agaggcuggccuugcugcag

SEQ ID NO: 524 - RNA, 20 nt, Artificial Sequence
  spacer sequence ATCN PAM
ccgcuggcugcugaggcacc

SEQ ID NO: 525 - RNA, 20 nt, Artificial Sequence
  spacer sequence ATCN PAM
aguccaacacagagcgggcc

SEQ ID NO: 526 - RNA, 20 nt, Artificial Sequence
  spacer sequence ATCN PAM
uucagaguuagugacaguga

SEQ ID NO: 527 - RNA, 20 nt, Artificial Sequence
  spacer sequence ATCN PAM
acauagccgggugugggucc

SEQ ID NO: 528 - RNA, 20 nt, Artificial Sequence
  spacer sequence ATCN PAM
aaagcuggacacuggacgcu

SEQ ID NO: 529 - RNA, 20 nt, Artificial Sequence
  spacer sequence ATCN PAM
cagggccccccaagguggag

SEQ ID NO: 530 - RNA, 20 nt, Artificial Sequence
  spacer sequence ATCN PAM
cuugcuccaccuuggggggc

SEQ ID NO: 531 - RNA, 20 nt, Artificial Sequence
  spacer sequence ATCN PAM
ccucgucugaccccuccccu

SEQ ID NO: 532 - RNA, 20 nt, Artificial Sequence
  spacer sequence ATCN PAM
agcccuccuggggaaagaac

SEQ ID NO: 533 - RNA, 20 nt, Artificial Sequence
  spacer sequence ATCN PAM
gggucccaggguggaccugu

SEQ ID NO: 534 - RNA, 20 nt, Artificial Sequence
  spacer sequence ATCN PAM
cgccugugcaugcuccacca

SEQ ID NO: 535 - RNA, 20 nt, Artificial Sequence
  spacer sequence ATCN PAM
acagccucaugccugugcug

SEQ ID NO: 536 - RNA, 20 nt, Artificial Sequence
  spacer sequence ATCN PAM
acagucucaugccugugcug

SEQ ID NO: 537 - RNA, 20 nt, Artificial Sequence
  spacer sequence ATCN PAM
ccuacacgugcacacagcug

SEQ ID NO: 538 - RNA, 20 nt, Artificial Sequence
  spacer sequence ATCN PAM
cacacaugugcaacacaggu

SEQ ID NO: 539 - RNA, 20 nt, Artificial Sequence
  spacer sequence ATCN PAM
ugcuggcccuggggagacca

SEQ ID NO: 540 - RNA, 20 nt, Artificial Sequence
  spacer sequence ATCN PAM
gaccacggccuccugggcug

SEQ ID NO: 541 - RNA, 20 nt, Artificial Sequence
  spacer sequence ATCN PAM
cguagacaugggagugccca

SEQ ID NO: 542 - RNA, 20 nt, Artificial Sequence
  spacer sequence ATCN PAM
uggcugagacgucccagggc

SEQ ID NO: 543 - RNA, 20 nt, Artificial Sequence
  spacer sequence ATCN PAM
uuuccccucgaaggugggag

SEQ ID NO: 544 - RNA, 20 nt, Artificial Sequence
  spacer sequence ATCN PAM
cauaaacaguaaaaggcagg

SEQ ID NO: 545 - RNA, 20 nt, Artificial Sequence
  spacer sequence ATCN PAM
guucauuggagacccagcag

SEQ ID NO: 546 - RNA, 20 nt, Artificial Sequence
  spacer sequence ATCN PAM
ccacacccggcagcccuggc

SEQ ID NO: 547 - RNA, 20 nt, Artificial Sequence
  spacer sequence ATCN PAM
agcccccaguggcagcuggg

SEQ ID NO: 548 - RNA, 20 nt, Artificial Sequence
  spacer sequence ATCN PAM
ggcuggcuccaggaggaggc

SEQ ID NO: 549 - RNA, 20 nt, Artificial Sequence
  spacer sequence ATCN PAM
ccugguccacaacucccugc

SEQ ID NO: 550 - RNA, 20 nt, Artificial Sequence
  spacer sequence ATCN PAM
agacgcaaucccagcccgcc

SEQ ID NO: 551 - RNA, 20 nt, Artificial Sequence
  spacer sequence ATCN PAM
cagcccgccaagugcgucag

SEQ ID NO: 552 - RNA, 20 nt, Artificial Sequence
  spacer sequence ATCN PAM
ccgcccugcaccgccucugc

SEQ ID NO: 553 - RNA, 20 nt, Artificial Sequence
  spacer sequence ATCN PAM
ccuggcacagcccgggccuc

SEQ ID NO: 554 - RNA, 20 nt, Artificial Sequence
  spacer sequence ATCN PAM
guguccgugcucccgggcac

SEQ ID NO: 555 - RNA, 20 nt, Artificial Sequence
  spacer sequence ATCN PAM
accaugugugccucugcggg

SEQ ID NO: 556 - RNA, 20 nt, Artificial Sequence
  spacer sequence ATCN PAM
ggcagacgaguacccaaugc

SEQ ID NO: 557 - RNA, 20 nt, Artificial Sequence
  spacer sequence ATCN PAM
ugggagagacucagccccug

SEQ ID NO: 558 - RNA, 20 nt, Artificial Sequence
  spacer sequence ATCN PAM
ggggucaagucucagcuugg

SEQ ID NO: 559 - RNA, 20 nt, Artificial Sequence
  spacer sequence ATCN PAM
gggucuucuggaggcugacg

SEQ ID NO: 560 - RNA, 20 nt, Artificial Sequence
  spacer sequence ATCN PAM
acaagccaggccugagcgcc

SEQ ID NO: 561 - RNA, 20 nt, Artificial Sequence
  spacer sequence ATCN PAM
gcccaagucagggccaggca

SEQ ID NO: 562 - RNA, 20 nt, Artificial Sequence
  spacer sequence ATCN PAM
ccaggccuccuccugguccu

SEQ ID NO: 563 - RNA, 20 nt, Artificial Sequence
  spacer sequence ATCN PAM
cucucgaggcuccucccugg

SEQ ID NO: 564 - RNA, 20 nt, Artificial Sequence
  spacer sequence ATCN PAM
gaagggaccgcauaacccuc

SEQ ID NO: 565 - RNA, 20 nt, Artificial Sequence
  spacer sequence ATCN PAM
gcaccagccccuuccuuuac

SEQ ID NO: 566 - RNA, 20 nt, Artificial Sequence
  spacer sequence ATCN PAM
guaaaggaaggggcuggugc

SEQ ID NO: 567 - RNA, 20 nt, Artificial Sequence
  spacer sequence ATCN PAM
cggcugagggcacgguggca

SEQ ID NO: 568 - RNA, 20 nt, Artificial Sequence
  spacer sequence ATCN PAM
caugggccagcacuuggucu

SEQ ID NO: 569 - RNA, 20 nt, Artificial Sequence
  spacer sequence ATCN PAM
ucguagagcccaagucucag

SEQ ID NO: 570 - RNA, 20 nt, Artificial Sequence
  spacer sequence ATCN PAM
cuggcuggaccagcugggua

SEQ ID NO: 571 - RNA, 20 nt, Artificial Sequence
  spacer sequence ATCN PAM
gccucuccugcagacagcaa

SEQ ID NO: 572 - RNA, 20 nt, Artificial Sequence
  spacer sequence ATCN PAM
uuggagccagucacugaaca

SEQ ID NO: 573 - RNA, 20 nt, Artificial Sequence
  spacer sequence ATCN PAM
acugugagcaccaaccugcu

SEQ ID NO: 574 - RNA, 20 nt, Artificial Sequence
  spacer sequence ATCN PAM
gagggaugggcgugcguggc

SEQ ID NO: 575 - RNA, 20 nt, Artificial Sequence
  spacer sequence ATCN PAM
cucagauccacugugagcac

SEQ ID NO: 576 - RNA, 20 nt, Artificial Sequence
  spacer sequence ATCN PAM
gggcagagagggaaccacug

SEQ ID NO: 577 - RNA, 20 nt, Artificial Sequence
  spacer sequence ATCN PAM
ugucgcccucagcugccucc

SEQ ID NO: 578 - RNA, 20 nt, Artificial Sequence
  spacer sequence ATCN PAM
gcacagagcagugaggggca

SEQ ID NO: 579 - RNA, 20 nt, Artificial Sequence
  spacer sequence ATCN PAM
ggucccugcguccucugccc

SEQ ID NO: 580 - RNA, 20 nt, Artificial Sequence
  spacer sequence ATCN PAM
uggaggcaaagccuauccca

SEQ ID NO: 581 - RNA, 20 nt, Artificial Sequence
  spacer sequence ATCN PAM
caaaaccuggcccugccucu

SEQ ID NO: 582 - RNA, 20 nt, Artificial Sequence
  spacer sequence ATCN PAM
cgagggccuuccugcccaca

SEQ ID NO: 583 - RNA, 20 nt, Artificial Sequence
  spacer sequence ATCN PAM
cgcaucagucccacggccgc

SEQ ID NO: 584 - RNA, 20 nt, Artificial Sequence
  spacer sequence ATCN PAM
gucccacggccgcggugcgg

SEQ ID NO: 585 - RNA, 20 nt, Artificial Sequence
  spacer sequence ATCN PAM
caggugacgaccgcaccgcg

SEQ ID NO: 586 - RNA, 20 nt, Artificial Sequence
  spacer sequence ATCN PAM
cggcugccuggcgcccccug

SEQ ID NO: 587 - RNA, 20 nt, Artificial Sequence
  spacer sequence ATCN PAM
ggcccacuggguugccccgg

SEQ ID NO: 588 - RNA, 20 nt, Artificial Sequence
  spacer sequence ATCN PAM
cccuagagucccgcugugca

SEQ ID NO: 589 - RNA, 20 nt, Artificial Sequence
  spacer sequence ATCN PAM
ucggggucagggucgggggu

SEQ ID NO: 590 - RNA, 20 nt, Artificial Sequence
  spacer sequence ATCN PAM
agggagggcaggaagggguc

SEQ ID NO: 591 - RNA, 20 nt, Artificial Sequence
  spacer sequence ATCN PAM
ccacggacaccgagugugug

SEQ ID NO: 592 - RNA, 20 nt, Artificial Sequence
  spacer sequence ATCN PAM
uucugaacggccgguccucc

SEQ ID NO: 593 - RNA, 20 nt, Artificial Sequence
  spacer sequence ATCN PAM
cgcaggccggacacaccagc

SEQ ID NO: 594 - RNA, 20 nt, Artificial Sequence
  spacer sequence ATCN PAM
ggcaccgcccucaucccgca

SEQ ID NO: 595 - RNA, 20 nt, Artificial Sequence
  spacer sequence ATCN PAM
agcugggagcggggccgauc

SEQ ID NO: 596 - RNA, 20 nt, Artificial Sequence
  spacer sequence ATCN PAM
gccccgcucccagcuugauc

SEQ ID NO: 597 - RNA, 20 nt, Artificial Sequence
  spacer sequence ATCN PAM
acaccuaucucccugaccag

SEQ ID NO: 598 - RNA, 20 nt, Artificial Sequence
  spacer sequence ATCN PAM
cccugaccaggacccaccuc

SEQ ID NO: 599 - RNA, 20 nt, Artificial Sequence
  spacer sequence ATCN PAM
ucacucauggcaggggacag

SEQ ID NO: 600 - RNA, 20 nt, Artificial Sequence
  spacer sequence ATCN PAM
ucuguccuaaauacugucau

SEQ ID NO: 601 - RNA, 20 nt, Artificial Sequence
  spacer sequence ATCN PAM
aggccagccagacccccaag

SEQ ID NO: 602 - RNA, 20 nt, Artificial Sequence
  spacer sequence ATCN PAM
gucaggagccagcagggacc

SEQ ID NO: 603 - RNA, 20 nt, Artificial Sequence
  spacer sequence ATCN PAM
gggcagagcuggcaacaagc

SEQ ID NO: 604 - RNA, 20 nt, Artificial Sequence
  spacer sequence ATCN PAM
ugucuccaaagugcugcuga

SEQ ID NO: 605 - RNA, 20 nt, Artificial Sequence
  spacer sequence ATCN PAM
ccugcguacagcccguguuc

SEQ ID NO: 606 - RNA, 20 nt, Artificial Sequence
  spacer sequence ATCN PAM
cgugguucuggaacacgggc

SEQ ID NO: 607 - RNA, 20 nt, Artificial Sequence
  spacer sequence ATCN PAM
gugaggcuuggcuuuggguu

SEQ ID NO: 608 - RNA, 20 nt, Artificial Sequence
  spacer sequence ATCN PAM
ugcguuggggugggccuggg

SEQ ID NO: 609 - RNA, 20 nt, Artificial Sequence
  spacer sequence ATCN PAM
uggguuggggugggccuggg

SEQ ID NO: 610 - RNA, 20 nt, Artificial Sequence
  spacer sequence ATCN PAM
agggcucgcaggguguggca

SEQ ID NO: 611 - RNA, 20 nt, Artificial Sequence
  spacer sequence ATCN PAM
gccaugccauuggcaggaac

SEQ ID NO: 612 - RNA, 20 nt, Artificial Sequence
  spacer sequence ATCN PAM
aggagagccggguaaccauc

SEQ ID NO: 613 - RNA, 20 nt, Artificial Sequence
  spacer sequence ATCN PAM
cacgcaguucacggggcagc

SEQ ID NO: 614 - RNA, 20 nt, Artificial Sequence
  spacer sequence ATCN PAM
ugaguccccacgccccaccc

SEQ ID NO: 615 - RNA, 20 nt, Artificial Sequence
  spacer sequence ATCN PAM
agcugguggcagaaccugga

SEQ ID NO: 616 - RNA, 20 nt, Artificial Sequence
  spacer sequence ATCN PAM
uguaccggagccgcgacuuc

SEQ ID NO: 617 - RNA, 20 nt, Artificial Sequence
  spacer sequence ATCN PAM
ucaguccccgagaucagucc

SEQ ID NO: 618 - RNA, 20 nt, Artificial Sequence
  spacer sequence ATCN PAM
cggggacugaggaugcaggu

SEQ ID NO: 619 - RNA, 20 nt, Artificial Sequence
  spacer sequence ATCN PAM
guccccagggcgucagcugg

SEQ ID NO: 620 - RNA, 20 nt, Artificial Sequence
  spacer sequence ATCN PAM
guggggcagguuuggaacgg

SEQ ID NO: 621 - RNA, 20 nt, Artificial Sequence
  spacer sequence ATCN PAM
uccccacagacccuccccuc

SEQ ID NO: 622 - RNA, 20 nt, Artificial Sequence
  spacer sequence ATCN PAM
ccuggaggggagggucugug

SEQ ID NO: 623 - RNA, 20 nt, Artificial Sequence
  spacer sequence ATCN PAM
ggggccuggacugcacggcc

SEQ ID NO: 624 - RNA, 20 nt, Artificial Sequence
  spacer sequence ATCN PAM
gcagccggcgugcccggcgg

SEQ ID NO: 625 - RNA, 20 nt, Artificial Sequence
  spacer sequence ATCN PAM
ucgacgccgcacagcuccug

SEQ ID NO: 626 - RNA, 20 nt, Artificial Sequence
  spacer sequence ATCN PAM
uccucgacgccgcacagcuc

SEQ ID NO: 627 - RNA, 20 nt, Artificial Sequence
  spacer sequence ATCN PAM
cgccagcggcgacguggagg

SEQ ID NO: 628 - RNA, 20 nt, Artificial Sequence
  spacer sequence ATCN PAM
gcugucucggggcggccgcu

SEQ ID NO: 629 - RNA, 20 nt, Artificial Sequence
  spacer sequence ATCN PAM
ccucucccagcaggggcguc

SEQ ID NO: 630 - RNA, 20 nt, Artificial Sequence
  spacer sequence ATCN PAM
gugggcagcagccagggcgg

SEQ ID NO: 631 - RNA, 20 nt, Artificial Sequence
  spacer sequence ATCN PAM
ugggggcugggggagacaca

SEQ ID NO: 632 - RNA, 20 nt, Artificial Sequence
  spacer sequence ATCN PAM
aacggccuaggcugcaggug

SEQ ID NO: 633 - RNA, 20 nt, Artificial Sequence
  spacer sequence ATCN PAM
gaaguucagccucuugacca

SEQ ID NO: 634 - RNA, 20 nt, Artificial Sequence
  spacer sequence ATCN PAM
gaggagauggaggagccgcc

SEQ ID NO: 635 - RNA, 20 nt, Artificial Sequence
  spacer sequence ATCN PAM
ccuccgaucugaaguucagc

SEQ ID NO: 636 - RNA, 20 nt, Artificial Sequence
  spacer sequence ATCN PAM
ccccgccgccgagcccugag

SEQ ID NO: 637 - RNA, 20 nt, Artificial Sequence
  spacer sequence ATCN PAM
caucuguccagugggacuca

SEQ ID NO: 638 - RNA, 20 nt, Artificial Sequence
  spacer sequence ATCN PAM
guccagugggacucagaugg

SEQ ID NO: 639 - RNA, 20 nt, Artificial Sequence
  spacer sequence ATCN PAM
gagucccacuggacagaugg

SEQ ID NO: 640 - RNA, 20 nt, Artificial Sequence
  spacer sequence ATCN PAM
cgugcccuggaugaggccug

SEQ ID NO: 641 - RNA, 20 nt, Artificial Sequence
  spacer sequence ATCN PAM
agggcacgggaugggcucca

SEQ ID NO: 642 - RNA, 20 nt, Artificial Sequence
  spacer sequence ATCN PAM
aagggugaccccacgcuuga

SEQ ID NO: 643 - RNA, 20 nt, Artificial Sequence
  spacer sequence ATCN PAM
cguccugaggcggcccccca

SEQ ID NO: 644 - RNA, 20 nt, Artificial Sequence
  spacer sequence ATCN PAM
uggaggacuacguccacgug

SEQ ID NO: 645 - RNA, 20 nt, Artificial Sequence
  spacer sequence ATCN PAM
acggagggcguccgggcuua

SEQ ID NO: 646 - RNA, 20 nt, Artificial Sequence
  spacer sequence ATCN PAM
ggugcugcgugcugacccca

SEQ ID NO: 647 - RNA, 20 nt, Artificial Sequence
  spacer sequence ATCN PAM
ggauggcuucauuccuuugg

SEQ ID NO: 648 - RNA, 20 nt, Artificial Sequence
  spacer sequence ATCN PAM
agaugggucagcugcaaagg

SEQ ID NO: 649 - RNA, 20 nt, Artificial Sequence
  spacer sequence ATCN PAM
gugcucagggacccgggugg

SEQ ID NO: 650 - RNA, 20 nt, Artificial Sequence
  spacer sequence ATCN PAM
ugugaccuaggaggggccca

SEQ ID NO: 651 - RNA, 20 nt, Artificial Sequence
  spacer sequence ATCN PAM
ggagggcucaggcggccccg

SEQ ID NO: 652 - RNA, 20 nt, Artificial Sequence
  spacer sequence ATCN PAM
acccagaggcagugacugga

SEQ ID NO: 653 - RNA, 20 nt, Artificial Sequence
  spacer sequence ATCN PAM
cugagcagcuccguguagug

SEQ ID NO: 654 - RNA, 20 nt, Artificial Sequence
  spacer sequence ATCN PAM
ugggaacagaggaagccagc

SEQ ID NO: 655 - RNA, 20 nt, Artificial Sequence
  spacer sequence ATCN PAM
cugggcccagguucuuccau

SEQ ID NO: 656 - RNA, 20 nt, Artificial Sequence
  spacer sequence ATCN PAM
acugggccucggagacggag

SEQ ID NO: 657 - RNA, 20 nt, Artificial Sequence
  spacer sequence ATCN PAM
ggugacacccuggaccccua

SEQ ID NO: 658 - RNA, 20 nt, Artificial Sequence
  spacer sequence ATCN PAM
aagucucuguucccuuuccu

SEQ ID NO: 659 - RNA, 20 nt, Artificial Sequence
  spacer sequence ATCN PAM
gggaggccccugcccucccc

SEQ ID NO: 660 - RNA, 20 nt, Artificial Sequence
  spacer sequence ATCN PAM
uguggcuuggcaucccaugg

SEQ ID NO: 661 - RNA, 20 nt, Artificial Sequence
  spacer sequence ATCN PAM
cauggggcauggggcucaug

SEQ ID NO: 662 - RNA, 20 nt, Artificial Sequence
  spacer sequence ATCN PAM
ccuccagcaccuguucgugg

SEQ ID NO: 663 - RNA, 20 nt, Artificial Sequence
  spacer sequence ATCN PAM
uggccagccgcagagcccuu

SEQ ID NO: 664 - RNA, 20 nt, Artificial Sequence
  spacer sequence ATCN PAM
uccuggccagccgcagagcc

SEQ ID NO: 665 - RNA, 20 nt, Artificial Sequence
  spacer sequence ATCN PAM
ggguggacggugggugguuu

SEQ ID NO: 666 - RNA, 20 nt, Artificial Sequence
  spacer sequence ATCN PAM
gcuguguuuugucugcacga

SEQ ID NO: 667 - RNA, 20 nt, Artificial Sequence
  spacer sequence ATCN PAM
uggugugugaaagugcucaa

SEQ ID NO: 668 - RNA, 20 nt, Artificial Sequence
  spacer sequence ATCN PAM
aauaagaacaaaauugagca

SEQ ID NO: 669 - RNA, 20 nt, Artificial Sequence
  spacer sequence ATCN PAM
accugggcugcagguggcac

SEQ ID NO: 670 - RNA, 20 nt, Artificial Sequence
  spacer sequence ATCN PAM
cgugugccaggguggucuuc

SEQ ID NO: 671 - RNA, 20 nt, Artificial Sequence
  spacer sequence ATCN PAM
ccaccacagaguaccccgcg

SEQ ID NO: 672 - RNA, 20 nt, Artificial Sequence
  spacer sequence ATCN PAM
cucaccuggcguucaucucc

SEQ ID NO: 673 - RNA, 20 nt, Artificial Sequence
  spacer sequence ATCN PAM
acacccgguuucagguccgc

SEQ ID NO: 674 - RNA, 20 nt, Artificial Sequence
  spacer sequence ATCN PAM
cgugaaccccgaggaaggac

SEQ ID NO: 675 - RNA, 20 nt, Artificial Sequence
  spacer sequence ATCN PAM
gcagcagccgcgucauguga

SEQ ID NO: 676 - RNA, 20 nt, Artificial Sequence
  spacer sequence ATCN PAM
aggcggccacccagauggag

SEQ ID NO: 677 - RNA, 20 nt, Artificial Sequence
  spacer sequence ATCN PAM
ggguggccgccucgaugcgu

SEQ ID NO: 678 - RNA, 20 nt, Artificial Sequence
  spacer sequence ATCN PAM
augagaucgacggggccccc

SEQ ID NO: 679 - RNA, 20 nt, Artificial Sequence
  spacer sequence ATCN PAM
augaccaggcaguugggcuu

SEQ ID NO: 680 - RNA, 20 nt, Artificial Sequence
  spacer sequence ATCN PAM
caucgaugaccaggcaguug

SEQ ID NO: 681 - RNA, 20 nt, Artificial Sequence
  spacer sequence ATCN PAM
acggggcccccguggugggc

SEQ ID NO: 682 - RNA, 20 nt, Artificial Sequence
  spacer sequence ATCN PAM
aggagcccaccacgggggcc

SEQ ID NO: 683 - RNA, 20 nt, Artificial Sequence
  spacer sequence ATCN PAM
acguccuccugagcauccug

SEQ ID NO: 684 - RNA, 20 nt, Artificial Sequence
  spacer sequence ATCN PAM
ugaaccgcaaggggccacag

SEQ ID NO: 685 - RNA, 20 nt, Artificial Sequence
  spacer sequence ATCN PAM
gcauuugcaaugaccaguga

SEQ ID NO: 686 - RNA, 20 nt, Artificial Sequence
  spacer sequence ATCN PAM
gccacacggcuccuggggcu

SEQ ID NO: 687 - RNA, 20 nt, Artificial Sequence
  spacer sequence ATCN PAM
uuucagggguuaccaggguu

SEQ ID NO: 688 - RNA, 20 nt, Artificial Sequence
  spacer sequence ATCN PAM
ggcccuccagcagcccuucu

SEQ ID NO: 689 - RNA, 20 nt, Artificial Sequence
  spacer sequence ATCN PAM
gggccugcaucaacacccug

SEQ ID NO: 690 - RNA, 20 nt, Artificial Sequence
  spacer sequence ATCN PAM
acacccugcaggugggcggc

SEQ ID NO: 691 - RNA, 20 nt, Artificial Sequence
  spacer sequence ATCN PAM
gggccgaggcuguggccacc

SEQ ID NO: 692 - RNA, 20 nt, Artificial Sequence
  spacer sequence ATCN PAM
ccuggggucccauggcacgu

SEQ ID NO: 693 - RNA, 20 nt, Artificial Sequence
  spacer sequence ATCN PAM
ugcagcacgaccaggccagc

SEQ ID NO: 694 - RNA, 20 nt, Artificial Sequence
  spacer sequence ATCN PAM
cacaggcccaggccagcguc

SEQ ID NO: 695 - RNA, 20 nt, Artificial Sequence
  spacer sequence ATCN PAM
gagcugccacccacuucauu

SEQ ID NO: 696 - RNA, 20 nt, Artificial Sequence
  spacer sequence ATCN PAM
agcuucagcaccccaccugc

SEQ ID NO: 697 - RNA, 20 nt, Artificial Sequence
  spacer sequence ATCN PAM
cugugaggcggaggugaggg

SEQ ID NO: 698 - RNA, 20 nt, Artificial Sequence
  spacer sequence ATCN PAM
agccccucgcagccccaggc

SEQ ID NO: 699 - RNA, 20 nt, Artificial Sequence
  spacer sequence ATCN PAM
uaaguccagaauccagcccc

SEQ ID NO: 700 - RNA, 20 nt, Artificial Sequence
  spacer sequence ATCN PAM
aaagccgcuuagagucagca

SEQ ID NO: 701 - RNA, 20 nt, Artificial Sequence
  spacer sequence ATCN PAM
ccagcugcuaauccaaagcc

SEQ ID NO: 702 - RNA, 20 nt, Artificial Sequence
  spacer sequence ATCN PAM
acaaccaauccccaaauccc

SEQ ID NO: 703 - RNA, 20 nt, Artificial Sequence
  spacer sequence ATCN PAM
ccaaaucccaaaagccgcga

SEQ ID NO: 704 - RNA, 20 nt, Artificial Sequence
  spacer sequence ATCN PAM
caaaagccgcgauguggagg

SEQ ID NO: 705 - RNA, 20 nt, Artificial Sequence
  spacer sequence ATCN PAM
cggcuuuugggauuugggga

SEQ ID NO: 706 - RNA, 20 nt, Artificial Sequence
  spacer sequence ATCN PAM
ccgccgcugcuccacgcugc

SEQ ID NO: 707 - RNA, 20 nt, Artificial Sequence
  spacer sequence ATCN PAM
agccucacucagccccuccu

SEQ ID NO: 708 - RNA, 20 nt, Artificial Sequence
  spacer sequence ATCN PAM
cuuugguuccuggaggccuc

SEQ ID NO: 709 - RNA, 20 nt, Artificial Sequence
  spacer sequence ATCN PAM
ucgcuacagcuugacagaga

SEQ ID NO: 710 - RNA, 20 nt, Artificial Sequence
  spacer sequence ATCN PAM
aaggccagccagucgagggc

SEQ ID NO: 711 - RNA, 20 nt, Artificial Sequence
  spacer sequence ATCN PAM
cagccagagcuuccagcugc

SEQ ID NO: 712 - RNA, 20 nt, Artificial Sequence
  spacer sequence ATCN PAM
uggguguguggcuggaagca

SEQ ID NO: 713 - RNA, 20 nt, Artificial Sequence
  spacer sequence ATCN PAM
ccuuccccagcagccagcag

SEQ ID NO: 714 - RNA, 20 nt, Artificial Sequence
  spacer sequence ATCN PAM
gguucugggccuggggcagg

SEQ ID NO: 715 - RNA, 20 nt, Artificial Sequence
  spacer sequence ATCN PAM
ggcucauccgguucugggcc

SEQ ID NO: 716 - RNA, 20 nt, Artificial Sequence
  spacer sequence ATCN PAM
gguuccucaucuggcucauc

SEQ ID NO: 717 - RNA, 20 nt, Artificial Sequence
  spacer sequence ATCN PAM
agacgcugguguccggcauc

SEQ ID NO: 718 - RNA, 20 nt, Artificial Sequence
  spacer sequence ATCN PAM
cgccagccacgcgcagccgg

SEQ ID NO: 719 - RNA, 20 nt, Artificial Sequence
  spacer sequence ATCN PAM
aggagcagggccuggggcgu

SEQ ID NO: 720 - RNA, 20 nt, Artificial Sequence
  spacer sequence ATCN PAM
cccaccccggggacggcacu

SEQ ID NO: 721 - RNA, 20 nt, Artificial Sequence
  spacer sequence ATCN PAM
ccuaggugagcacacagcug

SEQ ID NO: 722 - RNA, 20 nt, Artificial Sequence
  spacer sequence ATCN PAM
ugcccaccaggcuggccagc

SEQ ID NO: 723 - RNA, 20 nt, Artificial Sequence
  spacer sequence ATCN PAM
ggcgugcgcuccuggcggua

SEQ ID NO: 724 - RNA, 20 nt, Artificial Sequence
  spacer sequence ATCN PAM
acaggcuggagccgugaguc

SEQ ID NO: 725 - RNA, 20 nt, Artificial Sequence
  spacer sequence ATCN PAM
uuugcucagauguaaccgug

SEQ ID NO: 726 - RNA, 20 nt, Artificial Sequence
  spacer sequence ATCN PAM
gagcaaaagauaagcugggg

SEQ ID NO: 727 - RNA, 20 nt, Artificial Sequence
  spacer sequence ATCN PAM
caaguagcuggaagugaccc

SEQ ID NO: 728 - RNA, 20 nt, Artificial Sequence
  spacer sequence ATCN PAM
cacagcgggaaacggagugu

SEQ ID NO: 729 - RNA, 20 nt, Artificial Sequence
  spacer sequence ATCN PAM
gcagguuucaucaucauccc

SEQ ID NO: 730 - RNA, 20 nt, Artificial Sequence
  spacer sequence ATCN PAM
ucaucccacguacacuugca

SEQ ID NO: 731 - RNA, 20 nt, Artificial Sequence
  spacer sequence ATCN PAM
ucccacguacacuugcaguu

SEQ ID NO: 732 - RNA, 20 nt, Artificial Sequence
  spacer sequence ATCN PAM
cacguacacuugcaguuggg

SEQ ID NO: 733 - RNA, 20 nt, Artificial Sequence
  spacer sequence ATCN PAM
cccgcgagaucgagguggag

SEQ ID NO: 734 - RNA, 20 nt, Artificial Sequence
  spacer sequence ATCN PAM
cgcgggcgaugagcugcuuc

SEQ ID NO: 735 - RNA, 20 nt, Artificial Sequence
  spacer sequence ATCN PAM
agguggagaagaugcggcgg

SEQ ID NO: 736 - RNA, 20 nt, Artificial Sequence
  spacer sequence ATCN PAM
ucuccaccucgaucucgcgg

SEQ ID NO: 737 - RNA, 20 nt, Artificial Sequence
  spacer sequence ATCN PAM
ccacuguaucccuguguggc

SEQ ID NO: 738 - RNA, 20 nt, Artificial Sequence
  spacer sequence ATCN PAM
cuguguggccagaucucaca

SEQ ID NO: 739 - RNA, 20 nt, Artificial Sequence
  spacer sequence ATCN PAM
ggccacacagggauacagug

SEQ ID NO: 740 - RNA, 20 nt, Artificial Sequence
  spacer sequence ATCN PAM
cacaaugccugcucccuaca

SEQ ID NO: 741 - RNA, 20 nt, Artificial Sequence
  spacer sequence ATCN PAM
accuguagggagcaggcauu

SEQ ID NO: 742 - RNA, 20 nt, Artificial Sequence
  spacer sequence ATCN PAM
ugaggcgagcggcccgggag

SEQ ID NO: 743 - RNA, 20 nt, Artificial Sequence
  spacer sequence ATCN PAM
uuagggguggggccaaggca

SEQ ID NO: 744 - RNA, 20 nt, Artificial Sequence
  spacer sequence ATCN PAM
gggcagaagaguggcuguau

SEQ ID NO: 745 - RNA, 20 nt, Artificial Sequence
  spacer sequence ATCN PAM
agaagagccaauacagccac

SEQ ID NO: 746 - RNA, 20 nt, Artificial Sequence
  spacer sequence ATCN PAM
gcuccccaccaggugccaau

SEQ ID NO: 747 - RNA, 20 nt, Artificial Sequence
  spacer sequence ATCN PAM
agccccuacccaagacagga

SEQ ID NO: 748 - RNA, 20 nt, Artificial Sequence
  spacer sequence ATCN PAM
guccuauacgacugacuagu

SEQ ID NO: 749 - RNA, 20 nt, Artificial Sequence
  spacer sequence ATCN PAM
gccugagaaggacuucuuug

SEQ ID NO: 750 - RNA, 20 nt, Artificial Sequence
  spacer sequence ATCN PAM
gggacuugcucuaguucucu

SEQ ID NO: 751 - RNA, 20 nt, Artificial Sequence
  spacer sequence ATCN PAM
ccagcuuccugucucugcac

SEQ ID NO: 752 - RNA, 20 nt, Artificial Sequence
  spacer sequence ATCN PAM
cgugcgaguggagugggguu

SEQ ID NO: 753 - RNA, 20 nt, Artificial Sequence
  spacer sequence ATCN PAM
ugugaaccccacuccacucg

SEQ ID NO: 754 - RNA, 20 nt, Artificial Sequence
  spacer sequence ATCN PAM
uaugagcccacgcccggccc

SEQ ID NO: 755 - RNA, 20 nt, Artificial Sequence
  spacer sequence ATCN PAM
ugugagccccacuccuggcc

SEQ ID NO: 756 - RNA, 20 nt, Artificial Sequence
  spacer sequence ATCN PAM
ugugagaccacgccuggccc

SEQ ID NO: 757 - RNA, 20 nt, Artificial Sequence
  spacer sequence ATCN PAM
ugugagaccacgcccggccc

SEQ ID NO: 758 - RNA, 20 nt, Artificial Sequence
  spacer sequence ATCN PAM
uguaagacugugcccggccc

SEQ ID NO: 759 - RNA, 20 nt, Artificial Sequence
  spacer sequence ATCN PAM
ugugagccccacucccagcc

SEQ ID NO: 760 - RNA, 20 nt, Artificial Sequence
  spacer sequence ATCN PAM
ugugagccccacucccggcc

SEQ ID NO: 761 - RNA, 20 nt, Artificial Sequence
  spacer sequence ATCN PAM
ugugagccccacucccagcc

SEQ ID NO: 762 - RNA, 20 nt, Artificial Sequence
  spacer sequence ATCN PAM
ugugagccccacuuccagcc

SEQ ID NO: 763 - RNA, 20 nt, Artificial Sequence
  spacer sequence ATCN PAM
ugugagucccacucccagcc

SEQ ID NO: 764 - RNA, 20 nt, Artificial Sequence
  spacer sequence ATCN PAM
uguaagacuaugcccagccc

SEQ ID NO: 765 - RNA, 20 nt, Artificial Sequence
  spacer sequence ATCN PAM
ugugagcccaugcccggccc

SEQ ID NO: 766 - RNA, 20 nt, Artificial Sequence
  spacer sequence ATCN PAM
ugugagucccacucccagcc

SEQ ID NO: 767 - RNA, 20 nt, Artificial Sequence
  spacer sequence ATCN PAM
uguaagacugugcccagccc

SEQ ID NO: 768 - RNA, 20 nt, Artificial Sequence
  spacer sequence ATCN PAM
ugugagaccacgcccggccc

SEQ ID NO: 769 - RNA, 20 nt, Artificial Sequence
  spacer sequence ATCN PAM
ugugagccccgcacccggcc

SEQ ID NO: 770 - RNA, 20 nt, Artificial Sequence
  spacer sequence ATCN PAM
ggucgggguucaggaagggg

SEQ ID NO: 771 - RNA, 20 nt, Artificial Sequence
  spacer sequence ATCN PAM
ccaaggaccccuuccugaac

SEQ ID NO: 772 - RNA, 20 nt, Artificial Sequence
  spacer sequence ATCN PAM
cguccucgauccacuucagc

SEQ ID NO: 773 - RNA, 20 nt, Artificial Sequence
  spacer sequence ATCN PAM
aggacgggauccccaaggac

SEQ ID NO: 774 - RNA, 20 nt, Artificial Sequence
  spacer sequence ATCN PAM
acuucagcagccugcgggug

SEQ ID NO: 775 - RNA, 20 nt, Artificial Sequence
  spacer sequence ATCN PAM
ggcagguggggcacucacuc

SEQ ID NO: 776 - RNA, 20 nt, Artificial Sequence
  spacer sequence ATCN PAM
ccgagugagugccccaccug

SEQ ID NO: 777 - RNA, 20 nt, Artificial Sequence
  spacer sequence ATCN PAM
cccgcuggaaggccagcugg

SEQ ID NO: 778 - RNA, 20 nt, Artificial Sequence
  spacer sequence ATCN PAM
guggcacgucccacuccucc

SEQ ID NO: 779 - RNA, 20 nt, Artificial Sequence
  spacer sequence ATCN PAM
ugcgggguucagcucaggcc

SEQ ID NO: 780 - RNA, 20 nt, Artificial Sequence
  spacer sequence ATCN PAM
ucagcuacucccccauaggc

SEQ ID NO: 781 - RNA, 20 nt, Artificial Sequence
  spacer sequence ATCN PAM
ucguaaggugugggggccua

SEQ ID NO: 782 - RNA, 20 nt, Artificial Sequence
  spacer sequence ATCN PAM
cuugcaggcaggagaaaggg

SEQ ID NO: 783 - RNA, 20 nt, Artificial Sequence
  spacer sequence ATCN PAM
ugagcacacaccccaccugc

SEQ ID NO: 784 - RNA, 20 nt, Artificial Sequence
  spacer sequence ATCN PAM
ugggggcucaggcuauacua

SEQ ID NO: 785 - RNA, 20 nt, Artificial Sequence
  spacer sequence ATCN PAM
cagacucggguaguauagcc

SEQ ID NO: 786 - RNA, 20 nt, Artificial Sequence
  spacer sequence ATCN PAM
uuuggucgugcagcugcacc

SEQ ID NO: 787 - RNA, 20 nt, Artificial Sequence
  spacer sequence ATCN PAM
cucccccagaaaccugcccc

SEQ ID NO: 788 - RNA, 20 nt, Artificial Sequence
  spacer sequence ATCN PAM
gggucaugcagaggauuccc

SEQ ID NO: 789 - RNA, 20 nt, Artificial Sequence
  spacer sequence ATCN PAM
ucugcaugacccugaucacu

SEQ ID NO: 790 - RNA, 20 nt, Artificial Sequence
  spacer sequence ATCN PAM
ccggugcaggccuuuucucg

SEQ ID NO: 791 - RNA, 20 nt, Artificial Sequence
  spacer sequence ATCN PAM
gagcgccgugcgccgccugc

SEQ ID NO: 792 - RNA, 20 nt, Artificial Sequence
  spacer sequence ATCN PAM
gaccuaccuugaaaagguga

SEQ ID NO: 793 - RNA, 20 nt, Artificial Sequence
  spacer sequence ATCN PAM
cuuggcccucgcucucacuc

SEQ ID NO: 794 - RNA, 20 nt, Artificial Sequence
  spacer sequence ATCN PAM
cuggggucagcccagcccug

SEQ ID NO: 795 - RNA, 20 nt, Artificial Sequence
  spacer sequence ATCN PAM
gcugggugagcccaggggag

SEQ ID NO: 796 - RNA, 20 nt, Artificial Sequence
  spacer sequence ATCN PAM
ccacuccucccggcuggccc

SEQ ID NO: 797 - RNA, 20 nt, Artificial Sequence
  spacer sequence ATCN PAM
ugugugggccauguggcuca

SEQ ID NO: 798 - RNA, 20 nt, Artificial Sequence
  spacer sequence ATCN PAM
cagggugagccacauggccc

SEQ ID NO: 799 - RNA, 20 nt, Artificial Sequence
  spacer sequence ATCN PAM
ggcuggagcagggagcucca

SEQ ID NO: 800 - RNA, 20 nt, Artificial Sequence
  spacer sequence ATCN PAM
ccuguucccagaccaguggc

SEQ ID NO: 801 - RNA, 20 nt, Artificial Sequence
  spacer sequence ATCN PAM
gacugaaaagcacggcacuc

SEQ ID NO: 802 - RNA, 20 nt, Artificial Sequence
  spacer sequence ATCN PAM
gagcugagaguggcggccug

SEQ ID NO: 803 - RNA, 20 nt, Artificial Sequence
  spacer sequence ATCN PAM
uaggugggggcgcccaggca

SEQ ID NO: 804 - RNA, 20 nt, Artificial Sequence
  spacer sequence ATCN PAM
gggccaccugcaccucccgc

SEQ ID NO: 805 - RNA, 20 nt, Artificial Sequence
  spacer sequence ATCN PAM
gggcgggaggugcagguggc

SEQ ID NO: 806 - RNA, 20 nt, Artificial Sequence
  spacer sequence ATCN PAM
agccgacacacaucagggcg

SEQ ID NO: 807 - RNA, 20 nt, Artificial Sequence
  spacer sequence ATCN PAM
gaggcgccucuggaacuggg

SEQ ID NO: 808 - RNA, 20 nt, Artificial Sequence
  spacer sequence ATCN PAM
cuucccuaaugugccccagu

SEQ ID NO: 809 - RNA, 20 nt, Artificial Sequence
  spacer sequence ATCN PAM
auaauaaaaauaaucccuuc

SEQ ID NO: 810 - RNA, 20 nt, Artificial Sequence
  spacer sequence ATCN PAM
gcccugaggaggaggccucg

SEQ ID NO: 811 - RNA, 20 nt, Artificial Sequence
  spacer sequence ATCN PAM
gggagacgucuagcccccac

SEQ ID NO: 812 - RNA, 20 nt, Artificial Sequence
  spacer sequence ATCN PAM
cagugcccgcccugcccugc

SEQ ID NO: 813 - RNA, 20 nt, Artificial Sequence
  spacer sequence ATCN PAM
gaagucacagcaccaggggg

SEQ ID NO: 814 - RNA, 20 nt, Artificial Sequence
  spacer sequence ATCN PAM
ugggguggcacacaccccuc

SEQ ID NO: 815 - RNA, 20 nt, Artificial Sequence
  spacer sequence ATCN PAM
gcucaucuggaaggaccuag

SEQ ID NO: 816 - RNA, 20 nt, Artificial Sequence
  spacer sequence ATCN PAM
ggaaggaccuaggaggucuc

SEQ ID NO: 817 - RNA, 20 nt, Artificial Sequence
  spacer sequence ATCN PAM
ggacacagguuggagugugg

SEQ ID NO: 818 - RNA, 20 nt, Artificial Sequence
  spacer sequence ATCN PAM
cagcagagaaguggcugugu

SEQ ID NO: 819 - RNA, 20 nt, Artificial Sequence
  spacer sequence ATCN PAM
caugccugggacaugggccu

SEQ ID NO: 820 - RNA, 20 nt, Artificial Sequence
  spacer sequence ATCN PAM
gaagcagguccugugcugac

SEQ ID NO: 821 - RNA, 20 nt, Artificial Sequence
  spacer sequence ATCN PAM
ucaguaagacgggggucuug

SEQ ID NO: 822 - RNA, 20 nt, Artificial Sequence
  spacer sequence ATCN PAM
gggcgcugacgccuugagcu

SEQ ID NO: 823 - RNA, 20 nt, Artificial Sequence
  spacer sequence ATCN PAM
gccucccccggcccuacagc

SEQ ID NO: 824 - RNA, 20 nt, Artificial Sequence
  spacer sequence ATCN PAM
cugaagccggguccagcugu

SEQ ID NO: 825 - RNA, 20 nt, Artificial Sequence
  spacer sequence ATCN PAM
agaccucccauuuacagcca

SEQ ID NO: 826 - RNA, 20 nt, Artificial Sequence
  spacer sequence ATCN PAM
gagcccccuaugccagugug

SEQ ID NO: 827 - RNA, 20 nt, Artificial Sequence
  spacer sequence ATCN PAM
cuuccuagcgggaagcugca

SEQ ID NO: 828 - RNA, 20 nt, Artificial Sequence
  spacer sequence ATCN PAM
cucuguuccccggagaguug

SEQ ID NO: 829 - RNA, 20 nt, Artificial Sequence
  spacer sequence ATCN PAM
uccacccgccugugcccuag

SEQ ID NO: 830 - RNA, 20 nt, Artificial Sequence
  spacer sequence ATCN PAM
gugaaaguuucaaagugauu

SEQ ID NO: 831 - RNA, 20 nt, Artificial Sequence
  spacer sequence ATCN PAM
cuuugaaacuuucacagaug

SEQ ID NO: 832 - RNA, 20 nt, Artificial Sequence
  spacer sequence ATCN PAM
cuugaaguuuuccguugugu

SEQ ID NO: 833 - RNA, 20 nt, Artificial Sequence
  spacer sequence ATCN PAM
cuccccccuccccccacccc

SEQ ID NO: 834 - RNA, 20 nt, Artificial Sequence
  spacer sequence ATCN PAM
ccuaaugcuaucccuccccc

SEQ ID NO: 835 - RNA, 20 nt, Artificial Sequence
  spacer sequence ATCN PAM
gguauauccccuaaugcuau

SEQ ID NO: 836 - RNA, 20 nt, Artificial Sequence
  spacer sequence ATCN PAM
acaccugaccuccauugugu

SEQ ID NO: 837 - RNA, 20 nt, Artificial Sequence
  spacer sequence ATCN PAM
accgcccagccugcuucugu

SEQ ID NO: 838 - RNA, 20 nt, Artificial Sequence
  spacer sequence ATCN PAM
ccacaggcucggacgcccua

SEQ ID NO: 839 - RNA, 20 nt, Artificial Sequence
  spacer sequence ATCN PAM
ccgggagcccagcuggcauu

SEQ ID NO: 840 - RNA, 20 nt, Artificial Sequence
  spacer sequence ATCN PAM
gcgacuucugagcugguacu

SEQ ID NO: 841 - RNA, 20 nt, Artificial Sequence
  spacer sequence ATCN PAM
cgggcuccuaggaaagccgc

SEQ ID NO: 842 - RNA, 20 nt, Artificial Sequence
  spacer sequence ATCN PAM
gcagggugguggccagagcc

SEQ ID NO: 843 - RNA, 20 nt, Artificial Sequence
  spacer sequence ATCN PAM
caaagcaaguguccgucugu

SEQ ID NO: 844 - RNA, 20 nt, Artificial Sequence
  spacer sequence ATCN PAM
ucuagccucagcuucccaaa

SEQ ID NO: 845 - RNA, 20 nt, Artificial Sequence
  spacer sequence ATCN PAM
cuugagccuggaagguggag

SEQ ID NO: 846 - RNA, 20 nt, Artificial Sequence
  spacer sequence ATCN PAM
caguucacugcagccuccac

SEQ ID NO: 847 - RNA, 20 nt, Artificial Sequence
  spacer sequence ATCN PAM
ugccacagcucacaacaggg

SEQ ID NO: 848 - RNA, 20 nt, Artificial Sequence
  spacer sequence ATCN PAM
cuuuuuuuuuuugagacaag

SEQ ID NO: 849 - RNA, 20 nt, Artificial Sequence
  spacer sequence ATCN PAM
cgggaccuuugucaucccuu

SEQ ID NO: 850 - RNA, 20 nt, Artificial Sequence
  spacer sequence ATCN PAM
cgggcuggguggccaccacu

SEQ ID NO: 851 - RNA, 20 nt, Artificial Sequence
  spacer sequence ATCN PAM
gggcccaaggacccgccugu

SEQ ID NO: 852 - RNA, 20 nt, Artificial Sequence
  spacer sequence ATCN PAM
agguuggccucuaagacccu

SEQ ID NO: 853 - RNA, 20 nt, Artificial Sequence
  spacer sequence ATCN PAM
agggucuuagaggccaaccu

SEQ ID NO: 854 - RNA, 20 nt, Artificial Sequence
  spacer sequence ATCN PAM
gggauccugggacccccagu

SEQ ID NO: 855 - RNA, 20 nt, Artificial Sequence
  spacer sequence ATCN PAM
cugaugggcuguggcgugac

SEQ ID NO: 856 - RNA, 20 nt, Artificial Sequence
  spacer sequence ATCN PAM
ugggacccccagugcagggg

SEQ ID NO: 857 - RNA, 20 nt, Artificial Sequence
  spacer sequence ATCN PAM
ccugcacugggggucccagg

SEQ ID NO: 858 - RNA, 20 nt, Artificial Sequence
  spacer sequence ATCN PAM
gauuggcaaauggguuuggc

SEQ ID NO: 859 - RNA, 20 nt, Artificial Sequence
  spacer sequence ATCN PAM
gauuuggaagacuggacauu

SEQ ID NO: 860 - RNA, 20 nt, Artificial Sequence
  spacer sequence ATCN PAM
ggcuaggcucugccaaaccc

SEQ ID NO: 861 - RNA, 20 nt, Artificial Sequence
  spacer sequence ATCN PAM
uagcaucuggcuaggcucug

SEQ ID NO: 862 - RNA, 20 nt, Artificial Sequence
  spacer sequence ATCN PAM
ugcuacguggagaccagacc

SEQ ID NO: 863 - RNA, 20 nt, Artificial Sequence
  spacer sequence ATCN PAM
cuaccaccccauggggcagg

SEQ ID NO: 864 - RNA, 20 nt, Artificial Sequence
  spacer sequence ATCN PAM
caaaaagggggucacugggg

SEQ ID NO: 865 - RNA, 20 nt, Artificial Sequence
  spacer sequence ATCN PAM
accccagugacccccuuuuu

SEQ ID NO: 866 - RNA, 20 nt, Artificial Sequence
  spacer sequence ATCN PAM
ggggacccugugugucaucc

SEQ ID NO: 867 - RNA, 20 nt, Artificial Sequence
  spacer sequence ATCN PAM
caagugggccauagcccugg

SEQ ID NO: 868 - RNA, 20 nt, Artificial Sequence
  spacer sequence ATCN PAM
ggucuuaggucccagggcuu

SEQ ID NO: 869 - RNA, 20 nt, Artificial Sequence
  spacer sequence ATCN PAM
gcagaugcacaaggcuggcu

SEQ ID NO: 870 - RNA, 20 nt, Artificial Sequence
  spacer sequence ATCN PAM
gcagauaccgaggcugcuca

SEQ ID NO: 871 - RNA, 20 nt, Artificial Sequence
  spacer sequence ATCN PAM
guggggacgcaggcgccuuc

SEQ ID NO: 872 - RNA, 20 nt, Artificial Sequence
  spacer sequence ATCN PAM
aucacuugauguuugacaug

SEQ ID NO: 873 - RNA, 20 nt, Artificial Sequence
  spacer sequence ATCN PAM
cuugauguuugacaugaccu

SEQ ID NO: 874 - RNA, 20 nt, Artificial Sequence
  spacer sequence ATCN PAM
agugauugaucuguggggac

SEQ ID NO: 875 - RNA, 20 nt, Artificial Sequence
  spacer sequence ATCN PAM
cagcacuuauggaggccaag

SEQ ID NO: 876 - RNA, 20 nt, Artificial Sequence
  spacer sequence ATCN PAM
ucccgccuuggccuccauaa

SEQ ID NO: 877 - RNA, 20 nt, Artificial Sequence
  spacer sequence ATCN PAM
cuugagcucaggaguuggag

SEQ ID NO: 878 - RNA, 20 nt, Artificial Sequence
  spacer sequence ATCN PAM
ucccaccucagccucuccaa

SEQ ID NO: 879 - RNA, 20 nt, Artificial Sequence
  spacer sequence ATCN PAM
cagcucacugcagcuuccac

SEQ ID NO: 880 - RNA, 20 nt, Artificial Sequence
  spacer sequence ATCN PAM
cagcacuuugggaggccaaa

SEQ ID NO: 881 - RNA, 20 nt, Artificial Sequence
  spacer sequence ATCN PAM
cuugaacccaggagguggag

SEQ ID NO: 882 - RNA, 20 nt, Artificial Sequence
  spacer sequence ATCN PAM
cggcucacugcaaccuccac

SEQ ID NO: 883 - RNA, 20 nt, Artificial Sequence
  spacer sequence ATCN PAM
ugccauugcacuccagccug

SEQ ID NO: 884 - RNA, 20 nt, Artificial Sequence
  spacer sequence ATCN PAM
caaaaaaaaaaaaaaaaaaa

SEQ ID NO: 885 - RNA, 20 nt, Artificial Sequence
  spacer sequence ATCN PAM
cagcacuuugggaggcggag

SEQ ID NO: 886 - RNA, 20 nt, Artificial Sequence
  spacer sequence ATCN PAM
gccugccuccgccucccaaa

SEQ ID NO: 887 - RNA, 20 nt, Artificial Sequence
  spacer sequence ATCN PAM
cgaggucaggagguugagac

SEQ ID NO: 888 - RNA, 20 nt, Artificial Sequence
  spacer sequence ATCN PAM
uggccaacacggugaaaccc

SEQ ID NO: 889 - RNA, 20 nt, Artificial Sequence
  spacer sequence ATCN PAM
cggcucacugcaagcuccgc

SEQ ID NO: 890 - RNA, 20 nt, Artificial Sequence
  spacer sequence ATCN PAM
cgccgcuacacuccagcuug

SEQ ID NO: 891 - RNA, 20 nt, Artificial Sequence
  spacer sequence ATCN PAM
cuccagaggcuauagggagg

SEQ ID NO: 892 - RNA, 20 nt, Artificial Sequence
  spacer sequence ATCN PAM
uggcccccauuaccuuuuca

SEQ ID NO: 893 - RNA, 20 nt, Artificial Sequence
  spacer sequence ATCN PAM
ggaggcggcaggaggcggcg

SEQ ID NO: 894 - RNA, 20 nt, Artificial Sequence
  spacer sequence ATCN PAM
cccuucucuaaaugcaggga

SEQ ID NO: 895 - RNA, 20 nt, Artificial Sequence
  spacer sequence ATCN PAM
gcuggcgggucccuuugcca

SEQ ID NO: 896 - RNA, 20 nt, Artificial Sequence
  spacer sequence ATCN PAM
cucuuacagguggggaaacu

SEQ ID NO: 897 - RNA, 20 nt, Artificial Sequence
  spacer sequence ATCN PAM
cccaaggcggaaguaaacgg

SEQ ID NO: 898 - RNA, 20 nt, Artificial Sequence
  spacer sequence ATCN PAM
uggcuccuggcagcggcugc

SEQ ID NO: 899 - RNA, 20 nt, Artificial Sequence
  spacer sequence ATCN PAM
ggucacucuccacuggcgau

SEQ ID NO: 900 - RNA, 20 nt, Artificial Sequence
  spacer sequence ATCN PAM
ccaguggagagugaccggau

SEQ ID NO: 901 - RNA, 20 nt, Artificial Sequence
  spacer sequence ATCN PAM
ucgccaguggagagugaccg

SEQ ID NO: 902 - RNA, 20 nt, Artificial Sequence
  spacer sequence ATCN PAM
auugcauuugacggacgcga

SEQ ID NO: 903 - RNA, 20 nt, Artificial Sequence
  spacer sequence ATCN PAM
aucaucgccaguggagagug

SEQ ID NO: 904 - RNA, 20 nt, Artificial Sequence
  spacer sequence ATCN PAM
cgaagacggcgaaagucgca

SEQ ID NO: 905 - RNA, 20 nt, Artificial Sequence
  spacer sequence ATCN PAM
gaugauccagaaggaugccc

SEQ ID NO: 906 - RNA, 20 nt, Artificial Sequence
  spacer sequence ATCN PAM
gauucugcaggggucugcga

SEQ ID NO: 907 - RNA, 20 nt, Artificial Sequence
  spacer sequence ATCN PAM
ucugauucugcaggggucug

SEQ ID NO: 908 - RNA, 20 nt, Artificial Sequence
  spacer sequence ATCN PAM
agaaggaugcccgcugucuu

SEQ ID NO: 909 - RNA, 20 nt, Artificial Sequence
  spacer sequence ATCN PAM
uucuggaucaucugauucug

SEQ ID NO: 910 - RNA, 20 nt, Artificial Sequence
  spacer sequence ATCN PAM
accuguccccccaggcgcga

SEQ ID NO: 911 - RNA, 20 nt, Artificial Sequence
  spacer sequence ATCN PAM
cuggagaaaggcaucgaccu

SEQ ID NO: 912 - RNA, 20 nt, Artificial Sequence
  spacer sequence ATCN PAM
gcgaccccagccccccaccc

SEQ ID NO: 913 - RNA, 20 nt, Artificial Sequence
  spacer sequence ATCN PAM
ucggcgaccccagcccccca

SEQ ID NO: 914 - RNA, 20 nt, Artificial Sequence
  spacer sequence ATCN PAM
ugcggacgcaucaucggcga

SEQ ID NO: 915 - RNA, 20 nt, Artificial Sequence
  spacer sequence ATCN PAM
cacucuccauugcccucauc

SEQ ID NO: 916 - RNA, 20 nt, Artificial Sequence
  spacer sequence ATCN PAM
gaccucgcgucuguaguuac

SEQ ID NO: 917 - RNA, 20 nt, Artificial Sequence
  spacer sequence ATCN PAM
cauuuaggaaacuguggagg

SEQ ID NO: 918 - RNA, 20 nt, Artificial Sequence
  spacer sequence ATCN PAM
ggaaugcuucuucccuggca

SEQ ID NO: 919 - RNA, 20 nt, Artificial Sequence
  spacer sequence ATCN PAM
cacaggcgugccagggaaga

SEQ ID NO: 920 - RNA, 20 nt, Artificial Sequence
  spacer sequence ATCN PAM
gaggcagaagccaguguaca

SEQ ID NO: 921 - RNA, 20 nt, Artificial Sequence
  spacer sequence ATCN PAM
guaggcauucuccagaggcc

SEQ ID NO: 922 - RNA, 20 nt, Artificial Sequence
  spacer sequence ATCN PAM
gucucuccaauauauugguc

SEQ ID NO: 923 - RNA, 20 nt, Artificial Sequence
  spacer sequence ATCN PAM
gucuauuaauccgucucucc

SEQ ID NO: 924 - RNA, 20 nt, Artificial Sequence
  spacer sequence ATCN PAM
uccgucuauuaauccgucuc

SEQ ID NO: 925 - RNA, 20 nt, Artificial Sequence
  spacer sequence ATCN PAM
cucccgggacuucucggccu

SEQ ID NO: 926 - RNA, 20 nt, Artificial Sequence
  spacer sequence ATCN PAM
gcaagccggagaccugggau

SEQ ID NO: 927 - RNA, 20 nt, Artificial Sequence
  spacer sequence ATCN PAM
caggucuccggcuugcagau

SEQ ID NO: 928 - RNA, 20 nt, Artificial Sequence
  spacer sequence ATCN PAM
aaggagccgcugguguuaag

SEQ ID NO: 929 - RNA, 20 nt, Artificial Sequence
  spacer sequence ATCN PAM
cuccuaaaaaauacaaaaca

SEQ ID NO: 930 - RNA, 20 nt, Artificial Sequence
  spacer sequence ATCN PAM
ccauggccaggcuagucgcg

SEQ ID NO: 931 - RNA, 20 nt, Artificial Sequence
  spacer sequence ATCN PAM
cuugaggucaggaguucgcg

SEQ ID NO: 932 - RNA, 20 nt, Artificial Sequence
  spacer sequence ATCN PAM
gccugccucagccucccaaa

SEQ ID NO: 933 - RNA, 20 nt, Artificial Sequence
  spacer sequence ATCN PAM
cagcacuuugggaggcugag

SEQ ID NO: 934 - RNA, 20 nt, Artificial Sequence
  spacer sequence ATCN PAM
ugcccagccccuuuuuguuc

SEQ ID NO: 935 - RNA, 20 nt, Artificial Sequence
  spacer sequence ATCN PAM
gggcccccaggcgauugaug

SEQ ID NO: 936 - RNA, 20 nt, Artificial Sequence
  spacer sequence ATCN PAM
ccugggggcccagauagaac

SEQ ID NO: 937 - RNA, 20 nt, Artificial Sequence
  spacer sequence ATCN PAM
aucgccugggggcccagaua

SEQ ID NO: 938 - RNA, 20 nt, Artificial Sequence
  spacer sequence ATCN PAM
gcccccauggagggucuucc

SEQ ID NO: 939 - RNA, 20 nt, Artificial Sequence
  spacer sequence ATCN PAM
cuagagaccucauaaggcgc

SEQ ID NO: 940 - RNA, 20 nt, Artificial Sequence
  spacer sequence ATCN PAM
cuucacccagccaaguaggu

SEQ ID NO: 941 - RNA, 20 nt, Artificial Sequence
  spacer sequence ATCN PAM
caagcaccuacuuggcuggg

SEQ ID NO: 942 - RNA, 20 nt, Artificial Sequence
  spacer sequence ATCN PAM
cccuccucguccacuaggac

SEQ ID NO: 943 - RNA, 20 nt, Artificial Sequence
  spacer sequence ATCN PAM
gacacuguccuaguggacga

SEQ ID NO: 944 - RNA, 20 nt, Artificial Sequence
  spacer sequence ATCN PAM
gcuuaugcagggagggaaag

SEQ ID NO: 945 - RNA, 20 nt, Artificial Sequence
  spacer sequence ATCN PAM
agagaauugucacaagacag

SEQ ID NO: 946 - RNA, 20 nt, Artificial Sequence
  spacer sequence ATCN PAM
uuaaacuaaauuuguaacuc

SEQ ID NO: 947 - RNA, 20 nt, Artificial Sequence
  spacer sequence ATCN PAM
ucgugggcuccauucgugau

SEQ ID NO: 948 - RNA, 20 nt, Artificial Sequence
  spacer sequence ATCN PAM
cgaauggagcccacgaggau

SEQ ID NO: 949 - RNA, 20 nt, Artificial Sequence
  spacer sequence ATCN PAM
agcaucacgaauggagccca

SEQ ID NO: 950 - RNA, 20 nt, Artificial Sequence
  spacer sequence ATCN PAM
guguuuucuguuuccgcuuu

SEQ ID NO: 951 - RNA, 20 nt, Artificial Sequence
  spacer sequence ATCN PAM
cucacuucgaagcugcuuuu

SEQ ID NO: 952 - RNA, 20 nt, Artificial Sequence
  spacer sequence ATCN PAM
uugccgguacaauaaggagu

SEQ ID NO: 953 - RNA, 20 nt, Artificial Sequence
  spacer sequence ATCN PAM
gccuguuuggggauuuggcu

SEQ ID NO: 954 - RNA, 20 nt, Artificial Sequence
  spacer sequence ATCN PAM
ccaaacaggcugauccuugc

SEQ ID NO: 955 - RNA, 20 nt, Artificial Sequence
  spacer sequence ATCN PAM
gaacuucugagaaaccagga

SEQ ID NO: 956 - RNA, 20 nt, Artificial Sequence
  spacer sequence ATCN PAM
caacaacaaaaaaaaaaaaa

SEQ ID NO: 957 - RNA, 20 nt, Artificial Sequence
  spacer sequence ATCN PAM
cgccgcugcacuccagccug

SEQ ID NO: 958 - RNA, 20 nt, Artificial Sequence
  spacer sequence ATCN PAM
cgggucacugcaaacuccgc

SEQ ID NO: 959 - RNA, 20 nt, Artificial Sequence
  spacer sequence ATCN PAM
cuugaacccggagaggcgga

SEQ ID NO: 960 - RNA, 20 nt, Artificial Sequence
  spacer sequence ATCN PAM
cagacacuugggaggcucag

SEQ ID NO: 961 - RNA, 20 nt, Artificial Sequence
  spacer sequence ATCN PAM
gcaaggcguuguggcacgug

SEQ ID NO: 962 - RNA, 20 nt, Artificial Sequence
  spacer sequence ATCN PAM
cuacugaaaauacaaaaauc

SEQ ID NO: 963 - RNA, 20 nt, Artificial Sequence
  spacer sequence ATCN PAM
cuugaggucaggaguucgag

SEQ ID NO: 964 - RNA, 20 nt, Artificial Sequence
  spacer sequence ATCN PAM
ucccgccucggccucccaaa

SEQ ID NO: 965 - RNA, 20 nt, Artificial Sequence
  spacer sequence ATCN PAM
cagcauuuugggaggccgag

SEQ ID NO: 966 - RNA, 20 nt, Artificial Sequence
  spacer sequence ATCN PAM
auaggaagccauugguggcc

SEQ ID NO: 967 - RNA, 20 nt, Artificial Sequence
  spacer sequence ATCN PAM
cccagccucuaccacagccu

SEQ ID NO: 968 - RNA, 20 nt, Artificial Sequence
  spacer sequence ATCN PAM
cccagcccuccucagggaac

SEQ ID NO: 969 - RNA, 20 nt, Artificial Sequence
  spacer sequence ATCN PAM
gaaagaccucacugcaucuc

SEQ ID NO: 970 - RNA, 20 nt, Artificial Sequence
  spacer sequence ATCN PAM
ggaccccaugguaccugggc

SEQ ID NO: 971 - RNA, 20 nt, Artificial Sequence
  spacer sequence ATCN PAM
ugaaaggcucugcuaacccu

SEQ ID NO: 972 - RNA, 20 nt, Artificial Sequence
  spacer sequence ATCN PAM
gggacaucaugaaaggcucu

SEQ ID NO: 973 - RNA, 20 nt, Artificial Sequence
  spacer sequence ATCN PAM
aucugggacaucaugaaagg

SEQ ID NO: 974 - RNA, 20 nt, Artificial Sequence
  spacer sequence ATCN PAM
ugcagagaccucaguagaga

SEQ ID NO: 975 - RNA, 20 nt, Artificial Sequence
  spacer sequence ATCN PAM
uguuggcuccaugucccaag

SEQ ID NO: 976 - RNA, 20 nt, Artificial Sequence
  spacer sequence ATCN PAM
ggaugucccagggaaguagc

SEQ ID NO: 977 - RNA, 20 nt, Artificial Sequence
  spacer sequence ATCN PAM
ugauguggccuguuugggag

SEQ ID NO: 978 - RNA, 20 nt, Artificial Sequence
  spacer sequence ATCN PAM
gagccugcuccagaacccag

SEQ ID NO: 979 - RNA, 20 nt, Artificial Sequence
  spacer sequence ATCN PAM
auggaggguuugccuuugga

SEQ ID NO: 980 - RNA, 20 nt, Artificial Sequence
  spacer sequence ATCN PAM
aguguccggagaaccagguc

SEQ ID NO: 981 - RNA, 20 nt, Artificial Sequence
  spacer sequence ATCN PAM
ugaaaaauaauagaggcugg

SEQ ID NO: 982 - RNA, 20 nt, Artificial Sequence
  spacer sequence ATCN PAM
cagcacuuugggaggcugag

SEQ ID NO: 983 - RNA, 20 nt, Artificial Sequence
  spacer sequence ATCN PAM
ucccuucucagccucccaaa

SEQ ID NO: 984 - RNA, 20 nt, Artificial Sequence
  spacer sequence ATCN PAM
cucaaaaaaaaaaaaaaaaa

SEQ ID NO: 985 - RNA, 20 nt, Artificial Sequence
  spacer sequence ATCN PAM
uccugccucagccuccugag

SEQ ID NO: 986 - RNA, 20 nt, Artificial Sequence
  spacer sequence ATCN PAM
ccugagcccaggaguuugag

SEQ ID NO: 987 - RNA, 20 nt, Artificial Sequence
  spacer sequence ATCN PAM
gcucacugcagccucaaacu

SEQ ID NO: 988 - RNA, 20 nt, Artificial Sequence
  spacer sequence ATCN PAM
gggcuuuggccaggcgcugu

SEQ ID NO: 989 - RNA, 20 nt, Artificial Sequence
  spacer sequence ATCN PAM
cagcacucugggaggcugag

SEQ ID NO: 990 - RNA, 20 nt, Artificial Sequence
  spacer sequence ATCN PAM
acccgccucagccucccaga

SEQ ID NO: 991 - RNA, 20 nt, Artificial Sequence
  spacer sequence ATCN PAM
agaaccacguaaccuccaau

SEQ ID NO: 992 - RNA, 20 nt, Artificial Sequence
  spacer sequence ATCN PAM
cauccagaaccacguaaccu

SEQ ID NO: 993 - RNA, 20 nt, Artificial Sequence
  spacer sequence ATCN PAM
aaggcuuaaaugugaaaaua

SEQ ID NO: 994 - RNA, 20 nt, Artificial Sequence
  spacer sequence ATCN PAM
gaccccagcauucugaggcu

SEQ ID NO: 995 - RNA, 20 nt, Artificial Sequence
  spacer sequence ATCN PAM
cuagggguaacugaagacca

SEQ ID NO: 996 - RNA, 20 nt, Artificial Sequence
  spacer sequence ATCN PAM
cagacuugagacgcucuugu

SEQ ID NO: 997 - RNA, 20 nt, Artificial Sequence
  spacer sequence ATCN PAM
ucaaaauccucugccuggga

SEQ ID NO: 998 - RNA, 20 nt, Artificial Sequence
  spacer sequence ATCN PAM
ucugccugggacccccgacc

SEQ ID NO: 999 - RNA, 20 nt, Artificial Sequence
  spacer sequence ATCN PAM
gaggacaugcaggcugcaca

SEQ ID NO: 1000 - RNA, 20 nt, Artificial Sequence
  spacer sequence ATCN PAM
ccuugggaacuguaaacaca

SEQ ID NO: 1001 - RNA, 20 nt, Artificial Sequence
  spacer sequence ATCN PAM
gcccgccucagcuuccccaa

SEQ ID NO: 1002 - RNA, 20 nt, Artificial Sequence
  spacer sequence ATCN PAM
ccugagguugggaguuugag

SEQ ID NO: 1003 - RNA, 20 nt, Artificial Sequence
  spacer sequence ATCN PAM
gcugggcgugguggugcacg

SEQ ID NO: 1004 - RNA, 20 nt, Artificial Sequence
  spacer sequence ATCN PAM
cagcuacucgggaggcugag

SEQ ID NO: 1005 - RNA, 20 nt, Artificial Sequence
  spacer sequence ATCN PAM
cuugaauccaggaggcggag

SEQ ID NO: 1006 - RNA, 20 nt, Artificial Sequence
  spacer sequence ATCN PAM
aggaggcggagguugcagug

SEQ ID NO: 1007 - RNA, 20 nt, Artificial Sequence
  spacer sequence ATCN PAM
cagcucacugcaaccuccgc

SEQ ID NO: 1008 - RNA, 20 nt, Artificial Sequence
  spacer sequence ATCN PAM
cgccacugcacuccggccug

SEQ ID NO: 1009 - RNA, 20 nt, Artificial Sequence
  spacer sequence ATCN PAM
caaaaaaaaaaaaaaaaaac

SEQ ID NO: 1010 - RNA, 20 nt, Artificial Sequence
  spacer sequence ATCN PAM
gugagguuuuauuucuacaa

SEQ ID NO: 1011 - RNA, 20 nt, Artificial Sequence
  spacer sequence ATCN PAM
agugagggacuguuccuccc

SEQ ID NO: 1012 - RNA, 20 nt, Artificial Sequence
  spacer sequence ATCN PAM
ggugcgggcuccucaagguu

SEQ ID NO: 1013 - RNA, 20 nt, Artificial Sequence
  spacer sequence ATCN PAM
accuugaggagcccgcaccu

SEQ ID NO: 1014 - RNA, 20 nt, Artificial Sequence
  spacer sequence ATCN PAM
uacuaaaaaccagucuacca

SEQ ID NO: 1015 - RNA, 20 nt, Artificial Sequence
  spacer sequence ATCN PAM
uauauaucucauacggggcu

SEQ ID NO: 1016 - RNA, 20 nt, Artificial Sequence
  spacer sequence ATCN PAM
cauacggggcugagggcuca

SEQ ID NO: 1017 - RNA, 20 nt, Artificial Sequence
  spacer sequence ATCN PAM
gcagggucagcggcgcagga

SEQ ID NO: 1018 - RNA, 20 nt, Artificial Sequence
  spacer sequence ATCN PAM
ccucugcuauugcugcggga

SEQ ID NO: 1019 - RNA, 20 nt, Artificial Sequence
  spacer sequence ATCN PAM
cuggguccaccccgacuccc

SEQ ID NO: 1020 - RNA, 20 nt, Artificial Sequence
  spacer sequence ATCN PAM
ugugcgaauguuuugcuccg

SEQ ID NO: 1021 - RNA, 20 nt, Artificial Sequence
  spacer sequence ATCN PAM
ggagacgucugugaucuccg

SEQ ID NO: 1022 - RNA, 20 nt, Artificial Sequence
  spacer sequence ATCN PAM
cagacgucuccagaugccgg

SEQ ID NO: 1023 - RNA, 20 nt, Artificial Sequence
  spacer sequence ATCN PAM
ccgcugguguugccgcaggc

SEQ ID NO: 1024 - RNA, 20 nt, Artificial Sequence
  spacer sequence ATCN PAM
ggcugguggagcccggggag

SEQ ID NO: 1025 - RNA, 20 nt, Artificial Sequence
  spacer sequence ATCN PAM
gcccagggcaggcaggcagg

SEQ ID NO: 1026 - RNA, 20 nt, Artificial Sequence
  spacer sequence ATCN PAM
ccggggccgcgcgguucggg

SEQ ID NO: 1027 - RNA, 20 nt, Artificial Sequence
  spacer sequence ATCN PAM
cacggaccuguggcuccacc

SEQ ID NO: 1028 - RNA, 20 nt, Artificial Sequence
  spacer sequence ATCN PAM
uccccgugaccccggguucc

SEQ ID NO: 1029 - RNA, 20 nt, Artificial Sequence
  spacer sequence ATCN PAM
uuccggaacccggggucacg

SEQ ID NO: 1030 - RNA, 20 nt, Artificial Sequence
  spacer sequence ATCN PAM
ucacccaacgcuggcccagc

SEQ ID NO: 1031 - RNA, 20 nt, Artificial Sequence
  spacer sequence ATCN PAM
uaaaaccauucgggcuuuug

SEQ ID NO: 1032 - RNA, 20 nt, Artificial Sequence
  spacer sequence ATCN PAM
auugcacgugaacauagcau

SEQ ID NO: 1033 - RNA, 20 nt, Artificial Sequence
  spacer sequence ATCN PAM
agcacaaagucacgccuucu

SEQ ID NO: 1034 - RNA, 20 nt, Artificial Sequence
  spacer sequence ATCN PAM
cagcaccuggggaggccgag

SEQ ID NO: 1035 - RNA, 20 nt, Artificial Sequence
  spacer sequence ATCN PAM
gcccaccucggccuccccag

SEQ ID NO: 1036 - RNA, 20 nt, Artificial Sequence
  spacer sequence ATCN PAM
ccucagggcgggaguuugag

SEQ ID NO: 1037 - RNA, 20 nt, Artificial Sequence
  spacer sequence ATCN PAM
gagcuacuccggaggcugag

SEQ ID NO: 1038 - RNA, 20 nt, Artificial Sequence
  spacer sequence ATCN PAM
cuugagcccuggagguggag

SEQ ID NO: 1039 - RNA, 20 nt, Artificial Sequence
  spacer sequence ATCN PAM
cacuccagccugggcaacag

SEQ ID NO: 1040 - RNA, 20 nt, Artificial Sequence
  spacer sequence ATCN PAM
ggcggcuguguccagaccau

SEQ ID NO: 1041 - RNA, 20 nt, Artificial Sequence
  spacer sequence ATCN PAM
cugaaugaaugaagcaaagc

SEQ ID NO: 1042 - RNA, 20 nt, Artificial Sequence
  spacer sequence ATCN PAM
cggcucacugcaaccuucgc

SEQ ID NO: 1043 - RNA, 20 nt, Artificial Sequence
  spacer sequence ATCN PAM
cuugaacccgggaggcgaag

SEQ ID NO: 1044 - RNA, 20 nt, Artificial Sequence
  spacer sequence ATCN PAM
cagcuacucgggaggcugag

SEQ ID NO: 1045 - RNA, 20 nt, Artificial Sequence
  spacer sequence ATCN PAM
guaguagagaugggguuuca

SEQ ID NO: 1046 - RNA, 20 nt, Artificial Sequence
  spacer sequence ATCN PAM
cuacuacagauacaaaaaau

SEQ ID NO: 1047 - RNA, 20 nt, Artificial Sequence
  spacer sequence ATCN PAM
ggaauucaagaccagccugg

SEQ ID NO: 1048 - RNA, 20 nt, Artificial Sequence
  spacer sequence ATCN PAM
caagugauccaccugccuug

SEQ ID NO: 1049 - RNA, 20 nt, Artificial Sequence
  spacer sequence ATCN PAM
cuugagaucaggaauucaag

SEQ ID NO: 1050 - RNA, 20 nt, Artificial Sequence
  spacer sequence ATCN PAM
accugccuuggccucccaga

SEQ ID NO: 1051 - RNA, 20 nt, Artificial Sequence
  spacer sequence ATCN PAM
cagcacucugggaggccaag

SEQ ID NO: 1052 - RNA, 20 nt, Artificial Sequence
  spacer sequence ATCN PAM
uuuuguugaagacgaggauc

SEQ ID NO: 1053 - RNA, 20 nt, Artificial Sequence
  spacer sequence ATCN PAM
ucgucuucaacaaaaagauu

SEQ ID NO: 1054 - RNA, 20 nt, Artificial Sequence
  spacer sequence ATCN PAM
gacauauguuauuacaguuu

SEQ ID NO: 1055 - RNA, 20 nt, Artificial Sequence
  spacer sequence ATCN PAM
uauuuauaaccacagucacu

SEQ ID NO: 1056 - RNA, 20 nt, Artificial Sequence
  spacer sequence ATCN PAM
cggccccacuucuccucagc

SEQ ID NO: 1057 - RNA, 20 nt, Artificial Sequence
  spacer sequence ATCN PAM
gcccagcauuuccaccaacc

SEQ ID NO: 1058 - RNA, 20 nt, Artificial Sequence
  spacer sequence ATCN PAM
ugcuaccuuaaaaaguuuuu

SEQ ID NO: 1059 - RNA, 20 nt, Artificial Sequence
  spacer sequence ATCN PAM
caccacugcacuccagccug

SEQ ID NO: 1060 - RNA, 20 nt, Artificial Sequence
  spacer sequence ATCN PAM
cggcucacugcaaccucugc

SEQ ID NO: 1061 - RNA, 20 nt, Artificial Sequence
  spacer sequence ATCN PAM
cagcuacucgggaggcugag

SEQ ID NO: 1062 - RNA, 20 nt, Artificial Sequence
  spacer sequence ATCN PAM
cuacuaaaaauacaaaaauu

SEQ ID NO: 1063 - RNA, 20 nt, Artificial Sequence
  spacer sequence ATCN PAM
aucugccucagccucuggaa

SEQ ID NO: 1064 - RNA, 20 nt, Artificial Sequence
  spacer sequence ATCN PAM
gccucagccucuggaagugc

SEQ ID NO: 1065 - RNA, 20 nt, Artificial Sequence
  spacer sequence ATCN PAM
cagcacuuccagaggcugag

SEQ ID NO: 1066 - RNA, 20 nt, Artificial Sequence
  spacer sequence ATCN PAM
uagcucacugcagccuugac

SEQ ID NO: 1067 - RNA, 20 nt, Artificial Sequence
  spacer sequence ATCN PAM
cuagagcccaggagagguca

SEQ ID NO: 1068 - RNA, 20 nt, Artificial Sequence
  spacer sequence ATCN PAM
uccugccccagucuccugag

SEQ ID NO: 1069 - RNA, 20 nt, Artificial Sequence
  spacer sequence ATCN PAM
aaaaaaaaaaaaaaaaacau

SEQ ID NO: 1070 - RNA, 20 nt, Artificial Sequence
  spacer sequence ATCN PAM
cuugagaccagaaguuuaag

SEQ ID NO: 1071 - RNA, 20 nt, Artificial Sequence
  spacer sequence ATCN PAM
uccugccuuggccucgcaaa

SEQ ID NO: 1072 - RNA, 20 nt, Artificial Sequence
  spacer sequence ATCN PAM
cagcacuuugcgaggccaag

SEQ ID NO: 1073 - RNA, 20 nt, Artificial Sequence
  spacer sequence ATCN PAM
uaguacuuuaaacaaauaac

SEQ ID NO: 1074 - RNA, 20 nt, Artificial Sequence
  spacer sequence ATCN PAM
gugcccuccccgcagggucc

SEQ ID NO: 1075 - RNA, 20 nt, Artificial Sequence
  spacer sequence ATCN PAM
ugguucacgccagugugggg

SEQ ID NO: 1076 - RNA, 20 nt, Artificial Sequence
  spacer sequence ATCN PAM
acgcaguuuaccggaguccu

SEQ ID NO: 1077 - RNA, 20 nt, Artificial Sequence
  spacer sequence ATCN PAM
ugggacaguucccgucuggc

SEQ ID NO: 1078 - RNA, 20 nt, Artificial Sequence
  spacer sequence ATCN PAM
cgaccuuccuccucaaaacc

SEQ ID NO: 1079 - RNA, 20 nt, Artificial Sequence
  spacer sequence ATCN PAM
caccacugcacuccagccug

SEQ ID NO: 1080 - RNA, 20 nt, Artificial Sequence
  spacer sequence ATCN PAM
ccucucacugcaagcuccgc

SEQ ID NO: 1081 - RNA, 20 nt, Artificial Sequence
  spacer sequence ATCN PAM
cuaauaaauauacaaaaaau

SEQ ID NO: 1082 - RNA, 20 nt, Artificial Sequence
  spacer sequence ATCN PAM
uggcugacacggugaaaccu

SEQ ID NO: 1083 - RNA, 20 nt, Artificial Sequence
  spacer sequence ATCN PAM
cgaggucaggagacugagac

SEQ ID NO: 1084 - RNA, 20 nt, Artificial Sequence
  spacer sequence ATCN PAM
ucccgccucgggcucccaua

SEQ ID NO: 1085 - RNA, 20 nt, Artificial Sequence
  spacer sequence ATCN PAM
cagcacuaugggagcccgag

SEQ ID NO: 1086 - RNA, 20 nt, Artificial Sequence
  spacer sequence ATCN PAM
ggcacccccugccccgcagc

SEQ ID NO: 1087 - RNA, 20 nt, Artificial Sequence
  spacer sequence ATCN PAM
ucacccucccucgccaccgc

SEQ ID NO: 1088 - RNA, 20 nt, Artificial Sequence
  spacer sequence ATCN PAM
gaccgggaggcgaggaggga

SEQ ID NO: 1089 - RNA, 20 nt, Artificial Sequence
  spacer sequence ATCN PAM
ccuugccacccaccaucgcc

SEQ ID NO: 1090 - RNA, 20 nt, Artificial Sequence
  spacer sequence ATCN PAM
cccgccaggcccucacaccu

SEQ ID NO: 1091 - RNA, 20 nt, Artificial Sequence
  spacer sequence ATCN PAM
ucacucagcuaaaaacgugu

SEQ ID NO: 1092 - RNA, 20 nt, Artificial Sequence
  spacer sequence ATCN PAM
ccucucuccugucgacucgc

SEQ ID NO: 1093 - RNA, 20 nt, Artificial Sequence
  spacer sequence ATCN PAM
ucagagaagccacuguugag

SEQ ID NO: 1094 - RNA, 20 nt, Artificial Sequence
  spacer sequence ATCN PAM
caggcuggagugcaguggcg

SEQ ID NO: 1095 - RNA, 20 nt, Artificial Sequence
  spacer sequence ATCN PAM
cgccacugcacuccagccug

SEQ ID NO: 1096 - RNA, 20 nt, Artificial Sequence
  spacer sequence ATCN PAM
cggcucacugcaaccucugc

SEQ ID NO: 1097 - RNA, 20 nt, Artificial Sequence
  spacer sequence ATCN PAM
cuugaacucgggaggcagag

SEQ ID NO: 1098 - RNA, 20 nt, Artificial Sequence
  spacer sequence ATCN PAM
ccacuuaaaauacaaaauua

SEQ ID NO: 1099 - RNA, 20 nt, Artificial Sequence
  spacer sequence ATCN PAM
uagcacuuugggaggccaag

SEQ ID NO: 1100 - RNA, 20 nt, Artificial Sequence
  spacer sequence ATCN PAM
uaacgcccacuugccccguc

SEQ ID NO: 1101 - RNA, 20 nt, Artificial Sequence
  spacer sequence ATCN PAM
guugugaauuggggcuaaug

SEQ ID NO: 1102 - RNA, 20 nt, Artificial Sequence
  spacer sequence ATCN PAM
ucacaccuguuagguaggaa

SEQ ID NO: 1103 - RNA, 20 nt, Artificial Sequence
  spacer sequence ATCN PAM
aauccucacaccuguuaggu

SEQ ID NO: 1104 - RNA, 20 nt, Artificial Sequence
  spacer sequence ATCN PAM
auuuaucuaauccucacacc

SEQ ID NO: 1105 - RNA, 20 nt, Artificial Sequence
  spacer sequence ATCN PAM
uuggcugacacuuacauggc

SEQ ID NO: 1106 - RNA, 20 nt, Artificial Sequence
  spacer sequence ATCN PAM
ucuuuggcugacacuuacau

SEQ ID NO: 1107 - RNA, 20 nt, Artificial Sequence
  spacer sequence ATCN PAM
cuacagucuucaccaccauu

SEQ ID NO: 1108 - RNA, 20 nt, Artificial Sequence
  spacer sequence ATCN PAM
ccaucacuacagucuucacc

SEQ ID NO: 1109 - RNA, 20 nt, Artificial Sequence
  spacer sequence ATCN PAM
ucaccaucacuacagucuuc

SEQ ID NO: 1110 - RNA, 20 nt, Artificial Sequence
  spacer sequence ATCN PAM
cuacaguucaccgucaucau

SEQ ID NO: 1111 - RNA, 20 nt, Artificial Sequence
  spacer sequence ATCN PAM
ccaucacuacaguucaccgu

SEQ ID NO: 1112 - RNA, 20 nt, Artificial Sequence
  spacer sequence ATCN PAM
ucaccaucacuacaguucac

SEQ ID NO: 1113 - RNA, 20 nt, Artificial Sequence
  spacer sequence ATCN PAM
ucaucaccaucacuacaguu

SEQ ID NO: 1114 - RNA, 20 nt, Artificial Sequence
  spacer sequence ATCN PAM
cuacagucuucaccaucauc

SEQ ID NO: 1115 - RNA, 20 nt, Artificial Sequence
  spacer sequence ATCN PAM
ccaucacuacagucuucacc

SEQ ID NO: 1116 - RNA, 20 nt, Artificial Sequence
  spacer sequence ATCN PAM
ucaccaucacuacagucuuc

SEQ ID NO: 1117 - RNA, 20 nt, Artificial Sequence
  spacer sequence ATCN PAM
cuacagucuucaccaucauc

SEQ ID NO: 1118 - RNA, 20 nt, Artificial Sequence
  spacer sequence ATCN PAM
ucacuacagucuucaccauc

SEQ ID NO: 1119 - RNA, 20 nt, Artificial Sequence
  spacer sequence ATCN PAM
cuagucuucaccaucaucac

SEQ ID NO: 1120 - RNA, 20 nt, Artificial Sequence
  spacer sequence ATCN PAM
ccaucacuagucuucaccau

SEQ ID NO: 1121 - RNA, 20 nt, Artificial Sequence
  spacer sequence ATCN PAM
ucaccaucacuagucuucac

SEQ ID NO: 1122 - RNA, 20 nt, Artificial Sequence
  spacer sequence ATCN PAM
cuagucuucaccaucaucac

SEQ ID NO: 1123 - RNA, 20 nt, Artificial Sequence
  spacer sequence ATCN PAM
ccaucacuagucuucaccau

SEQ ID NO: 1124 - RNA, 20 nt, Artificial Sequence
  spacer sequence ATCN PAM
ucaccaucacuagucuucac

SEQ ID NO: 1125 - RNA, 20 nt, Artificial Sequence
  spacer sequence ATCN PAM
cuacagucuucaccaucauc

SEQ ID NO: 1126 - RNA, 20 nt, Artificial Sequence
  spacer sequence ATCN PAM
ccaucacuacagucuucacc

SEQ ID NO: 1127 - RNA, 20 nt, Artificial Sequence
  spacer sequence ATCN PAM
ucaccaucacuacagucuuc

SEQ ID NO: 1128 - RNA, 20 nt, Artificial Sequence
  spacer sequence ATCN PAM
ucaucaccaucacuacaguc

SEQ ID NO: 1129 - RNA, 20 nt, Artificial Sequence
  spacer sequence ATCN PAM
cuauagucuucaccaucauc

SEQ ID NO: 1130 - RNA, 20 nt, Artificial Sequence
  spacer sequence ATCN PAM
ccaucacuauagucuucacc

SEQ ID NO: 1131 - RNA, 20 nt, Artificial Sequence
  spacer sequence ATCN PAM
ucaccaucacuauagucuuc

SEQ ID NO: 1132 - RNA, 20 nt, Artificial Sequence
  spacer sequence ATCN PAM
cuacagucuuuacuaccauc

SEQ ID NO: 1133 - RNA, 20 nt, Artificial Sequence
  spacer sequence ATCN PAM
ccaccaucacuacagucuuu

SEQ ID NO: 1134 - RNA, 20 nt, Artificial Sequence
  spacer sequence ATCN PAM
ucaccaccaucacuacaguc

SEQ ID NO: 1135 - RNA, 20 nt, Artificial Sequence
  spacer sequence ATCN PAM
ucaucaccaccaucacuaca

SEQ ID NO: 1136 - RNA, 20 nt, Artificial Sequence
  spacer sequence ATCN PAM
uggcuguaccacguccaguu

SEQ ID NO: 1137 - RNA, 20 nt, Artificial Sequence
  spacer sequence ATCN PAM
ucaggcuguguccugacagc

SEQ ID NO: 1138 - RNA, 20 nt, Artificial Sequence
  spacer sequence ATCN PAM
gaaaauaggcguugagaaag

SEQ ID NO: 1139 - RNA, 20 nt, Artificial Sequence
  spacer sequence ATCN PAM
cuuucucaacgccuauuuuc

SEQ ID NO: 1140 - RNA, 20 nt, Artificial Sequence
  spacer sequence ATCN PAM
ucuaaguugagcuuuguugc

SEQ ID NO: 1141 - RNA, 20 nt, Artificial Sequence
  spacer sequence ATCN PAM
gaugcucagagcacaagcuc

SEQ ID NO: 1142 - RNA, 20 nt, Artificial Sequence
  spacer sequence ATCN PAM
gauaaauugucguaaugucu

SEQ ID NO: 1143 - RNA, 20 nt, Artificial Sequence
  spacer sequence ATCN PAM
ccuggguucacucuuucagu

SEQ ID NO: 1144 - RNA, 20 nt, Artificial Sequence
  spacer sequence ATCN PAM
cgccuaccgucacuccaccc

SEQ ID NO: 1145 - RNA, 20 nt, Artificial Sequence
  spacer sequence ATCN PAM
gacguguguguguugucggc

SEQ ID NO: 1146 - RNA, 20 nt, Artificial Sequence
  spacer sequence ATCN PAM
uuuccugagggccccgcagu

SEQ ID NO: 1147 - RNA, 20 nt, Artificial Sequence
  spacer sequence ATCN PAM
gcggagugguuucccucuga

SEQ ID NO: 1148 - RNA, 20 nt, Artificial Sequence
  spacer sequence ATCN PAM
ucacuugggagacugagggg

SEQ ID NO: 1149 - RNA, 20 nt, Artificial Sequence
  spacer sequence ATCN PAM
ucuaggagccccucagucuc

SEQ ID NO: 1150 - RNA, 20 nt, Artificial Sequence
  spacer sequence ATCN PAM
gcuggggccugaucuuagag

SEQ ID NO: 1151 - RNA, 20 nt, Artificial Sequence
  spacer sequence ATCN PAM
ggccccagcagaucuucuag

SEQ ID NO: 1152 - RNA, 20 nt, Artificial Sequence
  spacer sequence ATCN PAM
uagaggaaaagcggaucugc

SEQ ID NO: 1153 - RNA, 20 nt, Artificial Sequence
  spacer sequence ATCN PAM
gcuuuuccucuaagaucagg

SEQ ID NO: 1154 - RNA, 20 nt, Artificial Sequence
  spacer sequence ATCN PAM
gcguccauaggacggggucg

SEQ ID NO: 1155 - RNA, 20 nt, Artificial Sequence
  spacer sequence ATCN PAM
cgcuccccuucgaggcccuc

SEQ ID NO: 1156 - RNA, 20 nt, Artificial Sequence
  spacer sequence ATCN PAM
ggaguauugugagcugcagg

SEQ ID NO: 1157 - RNA, 20 nt, Artificial Sequence
  spacer sequence ATCN PAM
caguugccugcagcucacaa

SEQ ID NO: 1158 - RNA, 20 nt, Artificial Sequence
  spacer sequence ATCN PAM
acagaggcagaaaaacggcu

SEQ ID NO: 1159 - RNA, 20 nt, Artificial Sequence
  spacer sequence ATCN PAM
ccgugaagaaggaauuugua

SEQ ID NO: 1160 - RNA, 20 nt, Artificial Sequence
  spacer sequence ATCN PAM
cugcuuggggggaccaagac

SEQ ID NO: 1161 - RNA, 20 nt, Artificial Sequence
  spacer sequence ATCN PAM
uaaacuaacuuccuuccuuc

SEQ ID NO: 1162 - RNA, 20 nt, Artificial Sequence
  spacer sequence ATCN PAM
cgccucugcacucuagccug

SEQ ID NO: 1163 - RNA, 20 nt, Artificial Sequence
  spacer sequence ATCN PAM
cagcucacugaaaccuccgc

SEQ ID NO: 1164 - RNA, 20 nt, Artificial Sequence
  spacer sequence ATCN PAM
cuugacccaggaggcggagg

SEQ ID NO: 1165 - RNA, 20 nt, Artificial Sequence
  spacer sequence ATCN PAM
cagcuacucggggggcugag

SEQ ID NO: 1166 - RNA, 20 nt, Artificial Sequence
  spacer sequence ATCN PAM
caaaaaaaaaaaaaauuagc

SEQ ID NO: 1167 - RNA, 20 nt, Artificial Sequence
  spacer sequence ATCN PAM
cgccacugcacuccagcccg

SEQ ID NO: 1168 - RNA, 20 nt, Artificial Sequence
  spacer sequence ATCN PAM
cagcucacugcaaccuccgc

SEQ ID NO: 1169 - RNA, 20 nt, Artificial Sequence
  spacer sequence ATCN PAM
cagcuacucggggggcuaag

SEQ ID NO: 1170 - RNA, 20 nt, Artificial Sequence
  spacer sequence ATCN PAM
ugaaacccccucucuacuaa

SEQ ID NO: 1171 - RNA, 20 nt, Artificial Sequence
  spacer sequence ATCN PAM
cgaggucaggaguucaagac

SEQ ID NO: 1172 - RNA, 20 nt, Artificial Sequence
  spacer sequence ATCN PAM
gccugccuuggccucccaaa

SEQ ID NO: 1173 - RNA, 20 nt, Artificial Sequence
  spacer sequence ATCN PAM
cuacuaaaaauacaaaaauu

SEQ ID NO: 1174 - RNA, 20 nt, Artificial Sequence
  spacer sequence ATCN PAM
caacacuuugagaggcugag

SEQ ID NO: 1175 - RNA, 20 nt, Artificial Sequence
  spacer sequence ATCN PAM
ucacuaggucagggaagggg

SEQ ID NO: 1176 - RNA, 20 nt, Artificial Sequence
  spacer sequence ATCN PAM
aguuuuucauccuauggauc

SEQ ID NO: 1177 - RNA, 20 nt, Artificial Sequence
  spacer sequence ATCN PAM
uauggauccgucuuuuguca

SEQ ID NO: 1178 - RNA, 20 nt, Artificial Sequence
  spacer sequence ATCN PAM
auaggaugaaaaacuugauu

SEQ ID NO: 1179 - RNA, 20 nt, Artificial Sequence
  spacer sequence ATCN PAM
gucuuuugucaguuuaauuu

SEQ ID NO: 1180 - RNA, 20 nt, Artificial Sequence
  spacer sequence ATCN PAM
ucaccucccggguuugcugg

SEQ ID NO: 1181 - RNA, 20 nt, Artificial Sequence
  spacer sequence ATCN PAM
cacgcaauccucaccucccg

SEQ ID NO: 1182 - RNA, 20 nt, Artificial Sequence
  spacer sequence ATCN PAM
ccuugugcagguggcugaga

SEQ ID NO: 1183 - RNA, 20 nt, Artificial Sequence
  spacer sequence ATCN PAM
acagccccccaaugcugcca

SEQ ID NO: 1184 - RNA, 20 nt, Artificial Sequence
  spacer sequence ATCN PAM
uuuucacguuuuccaauauc

SEQ ID NO: 1185 - RNA, 20 nt, Artificial Sequence
  spacer sequence ATCN PAM
cgccauugcgcuccagccug

SEQ ID NO: 1186 - RNA, 20 nt, Artificial Sequence
  spacer sequence ATCN PAM
cggcucacugcaaccucugc

SEQ ID NO: 1187 - RNA, 20 nt, Artificial Sequence
  spacer sequence ATCN PAM
cuugaacccgggaggcagag

SEQ ID NO: 1188 - RNA, 20 nt, Artificial Sequence
  spacer sequence ATCN PAM
cagcuacucgggaggcugag

SEQ ID NO: 1189 - RNA, 20 nt, Artificial Sequence
  spacer sequence ATCN PAM
cugguaaaaaaaaaaaaaaa

SEQ ID NO: 1190 - RNA, 20 nt, Artificial Sequence
  spacer sequence ATCN PAM
ggaguucaagaccagccuga

SEQ ID NO: 1191 - RNA, 20 nt, Artificial Sequence
  spacer sequence ATCN PAM
caggugauccgcccaccucg

SEQ ID NO: 1192 - RNA, 20 nt, Artificial Sequence
  spacer sequence ATCN PAM
ccugagaucgggaguucaag

SEQ ID NO: 1193 - RNA, 20 nt, Artificial Sequence
  spacer sequence ATCN PAM
gcccaccucggccucccaaa

SEQ ID NO: 1194 - RNA, 20 nt, Artificial Sequence
  spacer sequence ATCN PAM
cagcacuuugggaggccgag

SEQ ID NO: 1195 - RNA, 20 nt, Artificial Sequence
  spacer sequence ATCN PAM
cuguaaucccagcacuuugg

SEQ ID NO: 1196 - RNA, 20 nt, Artificial Sequence
  spacer sequence ATCN PAM
uugguggggagguauggauc

SEQ ID NO: 1197 - RNA, 20 nt, Artificial Sequence
  spacer sequence ATCN PAM
auaccuccccaccaaagauu

SEQ ID NO: 1198 - RNA, 20 nt, Artificial Sequence
  spacer sequence ATCN PAM
accacgugucccccacugca

SEQ ID NO: 1199 - RNA, 20 nt, Artificial Sequence
  spacer sequence ATCN PAM
cuaggccugacccuucuuuc

SEQ ID NO: 1200 - RNA, 20 nt, Artificial Sequence
  spacer sequence ATCN PAM
agggagccucaaauauggcc

SEQ ID NO: 1201 - RNA, 20 nt, Artificial Sequence
  spacer sequence ATCN PAM
uaauguaauuccuccugcaa

SEQ ID NO: 1202 - RNA, 20 nt, Artificial Sequence
  spacer sequence ATCN PAM
ccgccuccguccacauggcc

SEQ ID NO: 1203 - RNA, 20 nt, Artificial Sequence
  spacer sequence ATCN PAM
gagccaugugucuacaagcc

SEQ ID NO: 1204 - RNA, 20 nt, Artificial Sequence
  spacer sequence ATCN PAM
uguggccgccaaggagcagg

SEQ ID NO: 1205 - RNA, 20 nt, Artificial Sequence
  spacer sequence ATCN PAM
aguggcaggucccacagggu

SEQ ID NO: 1206 - RNA, 20 nt, Artificial Sequence
  spacer sequence ATCN PAM
cagcugaaccccccgagcuc

SEQ ID NO: 1207 - RNA, 20 nt, Artificial Sequence
  spacer sequence ATCN PAM
agacccacacggagcauguc

SEQ ID NO: 1208 - RNA, 20 nt, Artificial Sequence
  spacer sequence ATCN PAM
ggaguccuucccccaccucc

SEQ ID NO: 1209 - RNA, 20 nt, Artificial Sequence
  spacer sequence ATCN PAM
gaaacucggauuuuagcuug

SEQ ID NO: 1210 - RNA, 20 nt, Artificial Sequence
  spacer sequence ATCN PAM
gaguuucugaugagaaacau

SEQ ID NO: 1211 - RNA, 20 nt, Artificial Sequence
  spacer sequence ATCN PAM
cuuuucugugucuacaugaa

SEQ ID NO: 1212 - RNA, 20 nt, Artificial Sequence
  spacer sequence ATCN PAM
caaaaaaaaaaaacucccua

SEQ ID NO: 1213 - RNA, 20 nt, Artificial Sequence
  spacer sequence ATCN PAM
cgugacugcacuacagccug

SEQ ID NO: 1214 - RNA, 20 nt, Artificial Sequence
  spacer sequence ATCN PAM
cagcucacugcaaccuccgc

SEQ ID NO: 1215 - RNA, 20 nt, Artificial Sequence
  spacer sequence ATCN PAM
cgaggucaggaguuugagac

SEQ ID NO: 1216 - RNA, 20 nt, Artificial Sequence
  spacer sequence ATCN PAM
gcccgcuucggccucccaca

SEQ ID NO: 1217 - RNA, 20 nt, Artificial Sequence
  spacer sequence ATCN PAM
cagcacugugggaggccgaa

SEQ ID NO: 1218 - RNA, 20 nt, Artificial Sequence
  spacer sequence ATCN PAM
gaggcgugagccgcugcgcc

SEQ ID NO: 1219 - RNA, 20 nt, Artificial Sequence
  spacer sequence ATCN PAM
ugcugcuuuucaagggaagg

SEQ ID NO: 1220 - RNA, 20 nt, Artificial Sequence
  spacer sequence ATCN PAM
uucccuugaaaagcagcacg

SEQ ID NO: 1221 - RNA, 20 nt, Artificial Sequence
  spacer sequence ATCN PAM
uacgggccccacuuccgugg

SEQ ID NO: 1222 - RNA, 20 nt, Artificial Sequence
  spacer sequence ATCN PAM
gaauucccuguguaucacgg

SEQ ID NO: 1223 - RNA, 20 nt, Artificial Sequence
  spacer sequence ATCN PAM
cgggcagaaggcugaaggaa

SEQ ID NO: 1224 - RNA, 20 nt, Artificial Sequence
  spacer sequence ATCN PAM
aaacacgcguuuccaccgcg

SEQ ID NO: 1225 - RNA, 20 nt, Artificial Sequence
  spacer sequence ATCN PAM
aaucaaaacacgcguuucca

SEQ ID NO: 1226 - RNA, 20 nt, Artificial Sequence
  spacer sequence ATCN PAM
ggacagacaucgaaucaaaa

SEQ ID NO: 1227 - RNA, 20 nt, Artificial Sequence
  spacer sequence ATCN PAM
uuuccaggguggcuuuggcc

SEQ ID NO: 1228 - RNA, 20 nt, Artificial Sequence
  spacer sequence ATCN PAM
uggccaaagccacccuggaa

SEQ ID NO: 1229 - RNA, 20 nt, Artificial Sequence
  spacer sequence ATCN PAM
caaauccuggccaaagccac

SEQ ID NO: 1230 - RNA, 20 nt, Artificial Sequence
  spacer sequence ATCN PAM
ggaacgcaaacccaccgcaa

SEQ ID NO: 1231 - RNA, 20 nt, Artificial Sequence
  spacer sequence ATCN PAM
caaauccggaacgcaaaccc

SEQ ID NO: 1232 - RNA, 20 nt, Artificial Sequence
  spacer sequence ATCN PAM
ggaacgcaaacccaccgcaa

SEQ ID NO: 1233 - RNA, 20 nt, Artificial Sequence
  spacer sequence ATCN PAM
caaaucuggaacgcaaaccc

SEQ ID NO: 1234 - RNA, 20 nt, Artificial Sequence
  spacer sequence ATCN PAM
cagugcgagcccagcaaucc

SEQ ID NO: 1235 - RNA, 20 nt, Artificial Sequence
  spacer sequence ATCN PAM
cuuagaucccuugaggcuau

SEQ ID NO: 1236 - RNA, 20 nt, Artificial Sequence
  spacer sequence ATCN PAM
aagggauagcccagaggcca

SEQ ID NO: 1237 - RNA, 20 nt, Artificial Sequence
  spacer sequence ATCN PAM
cuugaggcuauuuggggucu

SEQ ID NO: 1238 - RNA, 20 nt, Artificial Sequence
  spacer sequence ATCN PAM
ucccaggagaaagugaaaua

SEQ ID NO: 1239 - RNA, 20 nt, Artificial Sequence
  spacer sequence ATCN PAM
uggaugacaaugucgucuga

SEQ ID NO: 1240 - RNA, 20 nt, Artificial Sequence
  spacer sequence ATCN PAM
aggauauuucacuuucuccu

SEQ ID NO: 1241 - RNA, 20 nt, Artificial Sequence
  spacer sequence ATCN PAM
gacgacauugucauccagga

SEQ ID NO: 1242 - RNA, 20 nt, Artificial Sequence
  spacer sequence ATCN PAM
aagaagguccuuaaaaaugg

SEQ ID NO: 1243 - RNA, 20 nt, Artificial Sequence
  spacer sequence ATCN PAM
ucuggagguuccauuuuuaa

SEQ ID NO: 1244 - RNA, 20 nt, Artificial Sequence
  spacer sequence ATCN PAM
ccucauguccccggcacucg

SEQ ID NO: 1245 - RNA, 20 nt, Artificial Sequence
  spacer sequence ATCN PAM
gagccuuguauacacagggg

SEQ ID NO: 1246 - RNA, 20 nt, Artificial Sequence
  spacer sequence ATCN PAM
cagaaaggcaaagagcccaa

SEQ ID NO: 1247 - RNA, 20 nt, Artificial Sequence
  spacer sequence ATCN PAM
caccgucacacuaggcccac

SEQ ID NO: 1248 - RNA, 20 nt, Artificial Sequence
  spacer sequence ATCN PAM
acucucccugaguuucaugg

SEQ ID NO: 1249 - RNA, 20 nt, Artificial Sequence
  spacer sequence ATCN PAM
cuuucccgacacagcacgaa

SEQ ID NO: 1250 - RNA, 20 nt, Artificial Sequence
  spacer sequence ATCN PAM
cggcaaggcgucgggagcug

SEQ ID NO: 1251 - RNA, 20 nt, Artificial Sequence
  spacer sequence ATCN PAM
uaaugacuuguguuacgggc

SEQ ID NO: 1252 - RNA, 20 nt, Artificial Sequence
  spacer sequence ATCN PAM
gcggcaccaccaucucguuc

SEQ ID NO: 1253 - RNA, 20 nt, Artificial Sequence
  spacer sequence ATCN PAM
cguucacggcaccaacgucc

SEQ ID NO: 1254 - RNA, 20 nt, Artificial Sequence
  spacer sequence ATCN PAM
auggcaccacugcuggccug

SEQ ID NO: 1255 - RNA, 20 nt, Artificial Sequence
  spacer sequence ATCN PAM
uggccaggccagcaguggug

SEQ ID NO: 1256 - RNA, 20 nt, Artificial Sequence
  spacer sequence ATCN PAM
cugcgggggggcugccccug

SEQ ID NO: 1257 - RNA, 20 nt, Artificial Sequence
  spacer sequence ATCN PAM
ucagagcaggggcagccccc

SEQ ID NO: 1258 - RNA, 20 nt, Artificial Sequence
  spacer sequence ATCN PAM
ggugaguggaggcugaggag

SEQ ID NO: 1259 - RNA, 20 nt, Artificial Sequence
  spacer sequence ATCN PAM
gugauucgagaugggcaaaa

SEQ ID NO: 1260 - RNA, 20 nt, Artificial Sequence
  spacer sequence ATCN PAM
cagaugcugcuggcaucagg

SEQ ID NO: 1261 - RNA, 20 nt, Artificial Sequence
  spacer sequence ATCN PAM
cgaaucacagaugcugcugg

SEQ ID NO: 1262 - RNA, 20 nt, Artificial Sequence
  spacer sequence ATCN PAM
cacguugcccuggggugccc

SEQ ID NO: 1263 - RNA, 20 nt, Artificial Sequence
  spacer sequence ATCN PAM
uggcuucucacuguccagag

SEQ ID NO: 1264 - RNA, 20 nt, Artificial Sequence
  spacer sequence ATCN PAM
gcaccaaugccccaucgugg

SEQ ID NO: 1265 - RNA, 20 nt, Artificial Sequence
  spacer sequence ATCN PAM
cgcucuccucugcuucccgg

SEQ ID NO: 1266 - RNA, 20 nt, Artificial Sequence
  spacer sequence ATCN PAM
cccucccgcucggagaggga

SEQ ID NO: 1267 - RNA, 20 nt, Artificial Sequence
  spacer sequence ATCN PAM
gggcaaauguguugcuuuga

SEQ ID NO: 1268 - RNA, 20 nt, Artificial Sequence
  spacer sequence ATCN PAM
acggccguuuguggcucaca

SEQ ID NO: 1269 - RNA, 20 nt, Artificial Sequence
  spacer sequence ATCN PAM
cagagccagacuccgggccc

SEQ ID NO: 1270 - RNA, 20 nt, Artificial Sequence
  spacer sequence ATCN PAM
ggcucucggcccaccgugcc

SEQ ID NO: 1271 - RNA, 20 nt, Artificial Sequence
  spacer sequence ATCN PAM
uccuugcaggaucccugggg

SEQ ID NO: 1272 - RNA, 20 nt, Artificial Sequence
  spacer sequence ATCN PAM
ugcaaggaagaugucuagca

SEQ ID NO: 1273 - RNA, 20 nt, Artificial Sequence
  spacer sequence ATCN PAM
cuggggaauucuaaauuuca

SEQ ID NO: 1274 - RNA, 20 nt, Artificial Sequence
  spacer sequence ATCN PAM
uuuucucugggugaaggcuc

SEQ ID NO: 1275 - RNA, 20 nt, Artificial Sequence
  spacer sequence ATCN PAM
aucauuuucucugggugaag

SEQ ID NO: 1276 - RNA, 20 nt, Artificial Sequence
  spacer sequence ATCN PAM
aauccaucauuuucucuggg

SEQ ID NO: 1277 - RNA, 20 nt, Artificial Sequence
  spacer sequence ATCN PAM
ggcuccuguccaacaacaaa

SEQ ID NO: 1278 - RNA, 20 nt, Artificial Sequence
  spacer sequence ATCN PAM
aauuuuaucuggcuccuguc

SEQ ID NO: 1279 - RNA, 20 nt, Artificial Sequence
  spacer sequence ATCN PAM
aaccgggauuugagaauguu

SEQ ID NO: 1280 - RNA, 20 nt, Artificial Sequence
  spacer sequence ATCN PAM
cgguuugaugggaaccgagg

SEQ ID NO: 1281 - RNA, 20 nt, Artificial Sequence
  spacer sequence ATCN PAM
cuuuuagcaaauaaacauuc

SEQ ID NO: 1282 - RNA, 20 nt, Artificial Sequence
  spacer sequence ATCN PAM
cacagaaaauaaaagcagag

SEQ ID NO: 1283 - RNA, 20 nt, Artificial Sequence
  spacer sequence ATCN PAM
cggacuuuaaaaaguggaau

SEQ ID NO: 1284 - RNA, 20 nt, Artificial Sequence
  spacer sequence ATCN PAM
uaccagcuuugagcuguaaa

SEQ ID NO: 1285 - RNA, 20 nt, Artificial Sequence
  spacer sequence ATCN PAM
gauuccucauccgccucucc

SEQ ID NO: 1286 - RNA, 20 nt, Artificial Sequence
  spacer sequence ATCN PAM
gauuaauuuacuuugugcag

SEQ ID NO: 1287 - RNA, 20 nt, Artificial Sequence
  spacer sequence ATCN PAM
gccucuccuucucccuccca

SEQ ID NO: 1288 - RNA, 20 nt, Artificial Sequence
  spacer sequence ATCN PAM
aagagaaagagaacuuggga

SEQ ID NO: 1289 - RNA, 20 nt, Artificial Sequence
  spacer sequence ATCN PAM
ggccggguuaaaaagcagca

SEQ ID NO: 1290 - RNA, 20 nt, Artificial Sequence
  spacer sequence ATCN PAM
acaggcacaguggcgaccac

SEQ ID NO: 1291 - RNA, 20 nt, Artificial Sequence
  spacer sequence ATCN PAM
guuuuuaaaauucaccaucc

SEQ ID NO: 1292 - RNA, 20 nt, Artificial Sequence
  spacer sequence ATCN PAM
cagcacuuugggaggcugag

SEQ ID NO: 1293 - RNA, 20 nt, Artificial Sequence
  spacer sequence ATCN PAM
accugccucagccucccaaa

SEQ ID NO: 1294 - RNA, 20 nt, Artificial Sequence
  spacer sequence ATCN PAM
ccugaggucaggaguuugag

SEQ ID NO: 1295 - RNA, 20 nt, Artificial Sequence
  spacer sequence ATCN PAM
cuaguaaacacacacacaca

SEQ ID NO: 1296 - RNA, 20 nt, Artificial Sequence
  spacer sequence ATCN PAM
accacuacacuccagccugg

SEQ ID NO: 1297 - RNA, 20 nt, Artificial Sequence
  spacer sequence ATCN PAM
cgccacugcacuccagccug

SEQ ID NO: 1298 - RNA, 20 nt, Artificial Sequence
  spacer sequence ATCN PAM
cggcucacugcaagcuccgc

SEQ ID NO: 1299 - RNA, 20 nt, Artificial Sequence
  spacer sequence ATCN PAM
uggcuaacacggugaaaccc

SEQ ID NO: 1300 - RNA, 20 nt, Artificial Sequence
  spacer sequence ATCN PAM
agaccauccuggcuaacacg

SEQ ID NO: 1301 - RNA, 20 nt, Artificial Sequence
  spacer sequence ATCN PAM
ccugaccucgugauccgccc

SEQ ID NO: 1302 - RNA, 20 nt, Artificial Sequence
  spacer sequence ATCN PAM
cgaggucaggagaucgagac

SEQ ID NO: 1303 - RNA, 20 nt, Artificial Sequence
  spacer sequence ATCN PAM
gcccgccucggccucccaaa

SEQ ID NO: 1304 - RNA, 20 nt, Artificial Sequence
  spacer sequence ATCN PAM
cagcacuuugggaggccgag

SEQ ID NO: 1305 - RNA, 20 nt, Artificial Sequence
  spacer sequence ATCN PAM
ucaguguuuaugagcagagg

SEQ ID NO: 1306 - RNA, 20 nt, Artificial Sequence
  spacer sequence ATCN PAM
ggcggcgaaacccaugagac

SEQ ID NO: 1307 - RNA, 20 nt, Artificial Sequence
  spacer sequence ATCN PAM
cugggcacagugacuggcac

SEQ ID NO: 1308 - RNA, 20 nt, Artificial Sequence
  spacer sequence ATCN PAM
cuggggugacuccggggagc

SEQ ID NO: 1309 - RNA, 20 nt, Artificial Sequence
  spacer sequence ATCN PAM
caacccaggcagcagaggcc

SEQ ID NO: 1310 - RNA, 20 nt, Artificial Sequence
  spacer sequence ATCN PAM
cgaaauccugccagaggcug

SEQ ID NO: 1311 - RNA, 20 nt, Artificial Sequence
  spacer sequence ATCN PAM
ugccagaggcuggaagccag

SEQ ID NO: 1312 - RNA, 20 nt, Artificial Sequence
  spacer sequence ATCN PAM
cagcacauuuaaugcaccug

SEQ ID NO: 1313 - RNA, 20 nt, Artificial Sequence
  spacer sequence ATCN PAM
agcuuuacaacaacccuguu

SEQ ID NO: 1314 - RNA, 20 nt, Artificial Sequence
  spacer sequence ATCN PAM
cacaagucucaguguuugaa

SEQ ID NO: 1315 - RNA, 20 nt, Artificial Sequence
  spacer sequence ATCN PAM
ucgggcucugugagcuagag

SEQ ID NO: 1316 - RNA, 20 nt, Artificial Sequence
  spacer sequence ATCN PAM
cuguggcagccccaugcccu

SEQ ID NO: 1317 - RNA, 20 nt, Artificial Sequence
  spacer sequence ATCN PAM
ggggccugcucauaacacag

SEQ ID NO: 1318 - RNA, 20 nt, Artificial Sequence
  spacer sequence ATCN PAM
gccgacagccccuucccagg

SEQ ID NO: 1319 - RNA, 20 nt, Artificial Sequence
  spacer sequence ATCN PAM
cgcccacugggaccgacauc

SEQ ID NO: 1320 - RNA, 20 nt, Artificial Sequence
  spacer sequence ATCN PAM
cgcccacuggggcccacauc

SEQ ID NO: 1321 - RNA, 20 nt, Artificial Sequence
  spacer sequence ATCN PAM
cgcccacuggggcccacauc

SEQ ID NO: 1322 - RNA, 20 nt, Artificial Sequence
  spacer sequence ATCN PAM
cgcccacuggggcccacauc

SEQ ID NO: 1323 - RNA, 20 nt, Artificial Sequence
  spacer sequence ATCN PAM
cacccacggcggccagggac

SEQ ID NO: 1324 - RNA, 20 nt, Artificial Sequence
  spacer sequence ATCN PAM
caggucagugucggagugag

SEQ ID NO: 1325 - RNA, 20 nt, Artificial Sequence
  spacer sequence ATCN PAM
aggccuucccaggugcgugc

SEQ ID NO: 1326 - RNA, 20 nt, Artificial Sequence
  spacer sequence ATCN PAM
uguuggcugggaagaagugg

SEQ ID NO: 1327 - RNA, 20 nt, Artificial Sequence
  spacer sequence ATCN PAM
gcagcaaugcaaacagcacu

SEQ ID NO: 1328 - RNA, 20 nt, Artificial Sequence
  spacer sequence ATCN PAM
gaggugccuccugcugcugu

SEQ ID NO: 1329 - RNA, 20 nt, Artificial Sequence
  spacer sequence ATCN PAM
cucugagagcaccucguaga

SEQ ID NO: 1330 - RNA, 20 nt, Artificial Sequence
  spacer sequence ATCN PAM
ccccacacagaagccagagg

SEQ ID NO: 1331 - RNA, 20 nt, Artificial Sequence
  spacer sequence ATCN PAM
uuaggaaagaaaaacaguuu

SEQ ID NO: 1332 - RNA, 20 nt, Artificial Sequence
  spacer sequence ATCN PAM
gaccaccgcacuccagccug

SEQ ID NO: 1333 - RNA, 20 nt, Artificial Sequence
  spacer sequence ATCN PAM
cagcucacugcaaccuccac

SEQ ID NO: 1334 - RNA, 20 nt, Artificial Sequence
  spacer sequence ATCN PAM
cagccacucgggaggcugag

SEQ ID NO: 1335 - RNA, 20 nt, Artificial Sequence
  spacer sequence ATCN PAM
cuacuaaaaauacaaaaaaa

SEQ ID NO: 1336 - RNA, 20 nt, Artificial Sequence
  spacer sequence ATCN PAM
ccugaggucaggaguucgag

SEQ ID NO: 1337 - RNA, 20 nt, Artificial Sequence
  spacer sequence ATCN PAM
aucuccuucggccucccaca

SEQ ID NO: 1338 - RNA, 20 nt, Artificial Sequence
  spacer sequence ATCN PAM
ccuucggccucccacagcac

SEQ ID NO: 1339 - RNA, 20 nt, Artificial Sequence
  spacer sequence ATCN PAM
cagugcugugggaggccgaa

SEQ ID NO: 1340 - RNA, 20 nt, Artificial Sequence
  spacer sequence ATCN PAM
guuaacaccggccgggggug

SEQ ID NO: 1341 - RNA, 20 nt, Artificial Sequence
  spacer sequence ATCN PAM
ccccaaaaggaaacccuguc

SEQ ID NO: 1342 - RNA, 20 nt, Artificial Sequence
  spacer sequence ATCN PAM
gcacuggcucaccacccuuu

SEQ ID NO: 1343 - RNA, 20 nt, Artificial Sequence
  spacer sequence ATCN PAM
agaacaggccaagccagaga

SEQ ID NO: 1344 - RNA, 20 nt, Artificial Sequence
  spacer sequence ATCN PAM
cauuucuacgaaacauccag

SEQ ID NO: 1345 - RNA, 20 nt, Artificial Sequence
  spacer sequence ATCN PAM
gacacugugucccucugagc

SEQ ID NO: 1346 - RNA, 20 nt, Artificial Sequence
  spacer sequence ATCN PAM
cgguguggugugugcugggg

SEQ ID NO: 1347 - RNA, 20 nt, Artificial Sequence
  spacer sequence ATCN PAM
gugaguggaugccaggcugc

SEQ ID NO: 1348 - RNA, 20 nt, Artificial Sequence
  spacer sequence ATCN PAM
acucacagaugagccacaaa

SEQ ID NO: 1349 - RNA, 20 nt, Artificial Sequence
  spacer sequence ATCN PAM
cacgcacugcgcccagcagc

SEQ ID NO: 1350 - RNA, 20 nt, Artificial Sequence
  spacer sequence ATCN PAM
cgcccgaggccacaacgccc

SEQ ID NO: 1351 - RNA, 20 nt, Artificial Sequence
  spacer sequence ATCN PAM
guagguggacgguaccaaac

SEQ ID NO: 1352 - RNA, 20 nt, Artificial Sequence
  spacer sequence ATCN PAM
gugaacguuuuuaauccgua

SEQ ID NO: 1353 - RNA, 20 nt, Artificial Sequence
  spacer sequence ATCN PAM
gcuuucaaaacacccaggcc

SEQ ID NO: 1354 - RNA, 20 nt, Artificial Sequence
  spacer sequence ATCN PAM
aggagcagguuccccuccuc

SEQ ID NO: 1355 - RNA, 20 nt, Artificial Sequence
  spacer sequence ATCN PAM
caggcuccugcagccucguu

SEQ ID NO: 1356 - RNA, 20 nt, Artificial Sequence
  spacer sequence ATCN PAM
gggacugccgggccugcgcc

SEQ ID NO: 1357 - RNA, 20 nt, Artificial Sequence
  spacer sequence ATCN PAM
aaagucagaagacacggcca

SEQ ID NO: 1358 - RNA, 20 nt, Artificial Sequence
  spacer sequence ATCN PAM
agacggacccuaaauccaaa

SEQ ID NO: 1359 - RNA, 20 nt, Artificial Sequence
  spacer sequence ATCN PAM
gguaugaccgcaucucaaug

SEQ ID NO: 1360 - RNA, 20 nt, Artificial Sequence
  spacer sequence ATCN PAM
caaugacgucggcaaggacc

SEQ ID NO: 1361 - RNA, 20 nt, Artificial Sequence
  spacer sequence ATCN PAM
aaaagcugccuugccuggaa

SEQ ID NO: 1362 - RNA, 20 nt, Artificial Sequence
  spacer sequence ATCN PAM
aaaaacgccugugucagcag

SEQ ID NO: 1363 - RNA, 20 nt, Artificial Sequence
  spacer sequence ATCN PAM
ccaaaaaccacagaggccgg

SEQ ID NO: 1364 - RNA, 20 nt, Artificial Sequence
  spacer sequence ATCN PAM
uuaaaggccaucuccaaaaa

SEQ ID NO: 1365 - RNA, 20 nt, Artificial Sequence
  spacer sequence ATCN PAM
aaaacaaaucuuuaaaggcc

SEQ ID NO: 1366 - RNA, 20 nt, Artificial Sequence
  spacer sequence ATCN PAM
uuaaagaagaugcaggaaag

SEQ ID NO: 1367 - RNA, 20 nt, Artificial Sequence
  spacer sequence ATCN PAM
ucuuuaaagauaaaaucgaa

SEQ ID NO: 1368 - RNA, 20 nt, Artificial Sequence
  spacer sequence ATCN PAM
gggaggaaggcccugagccu

SEQ ID NO: 1369 - RNA, 20 nt, Artificial Sequence
  spacer sequence ATCN PAM
cugcagccccugcccuacac

SEQ ID NO: 1370 - RNA, 20 nt, Artificial Sequence
  spacer sequence ATCN PAM
caggaggaggcgcucccggc

SEQ ID NO: 1371 - RNA, 20 nt, Artificial Sequence
  spacer sequence ATCN PAM
ucacgggucaggaaagcccu

SEQ ID NO: 1372 - RNA, 20 nt, Artificial Sequence
  spacer sequence ATCN PAM
cgggucaggaaagcccugcc

SEQ ID NO: 1373 - RNA, 20 nt, Artificial Sequence
  spacer sequence ATCN PAM
cgggccccagccgggaggag

SEQ ID NO: 1374 - RNA, 20 nt, Artificial Sequence
  spacer sequence ATCN PAM
cuaaggccagggcagggccg

SEQ ID NO: 1375 - RNA, 20 nt, Artificial Sequence
  spacer sequence ATCN PAM
acacagaaacaaauggauga

SEQ ID NO: 1376 - RNA, 20 nt, Artificial Sequence
  spacer sequence ATCN PAM
auuuguuucuguguugauuu

SEQ ID NO: 1377 - RNA, 20 nt, Artificial Sequence
  spacer sequence ATCN PAM
cagcacuuugggaggccgag

SEQ ID NO: 1378 - RNA, 20 nt, Artificial Sequence
  spacer sequence ATCN PAM
uuuucuacguuugucccuuc

SEQ ID NO: 1379 - RNA, 20 nt, Artificial Sequence
  spacer sequence ATCN PAM
cagacgcucacaccaccaac

SEQ ID NO: 1380 - RNA, 20 nt, Artificial Sequence
  spacer sequence ATCN PAM
gcuuccucccggcuccucuu

SEQ ID NO: 1381 - RNA, 20 nt, Artificial Sequence
  spacer sequence ATCN PAM
gagcucacaagcgcccucug

SEQ ID NO: 1382 - RNA, 20 nt, Artificial Sequence
  spacer sequence ATCN PAM
gggagagcaaaacgugggcg

SEQ ID NO: 1383 - RNA, 20 nt, Artificial Sequence
  spacer sequence ATCN PAM
uucccagcaugugacgcccu

SEQ ID NO: 1384 - RNA, 20 nt, Artificial Sequence
  spacer sequence ATCN PAM
uccuucccagcaugugacgc

SEQ ID NO: 1385 - RNA, 20 nt, Artificial Sequence
  spacer sequence ATCN PAM
ucaucauccuucccagcaug

SEQ ID NO: 1386 - RNA, 20 nt, Artificial Sequence
  spacer sequence ATCN PAM
auccucaucauccuucccag

SEQ ID NO: 1387 - RNA, 20 nt, Artificial Sequence
  spacer sequence ATCN PAM
uuccugucauccauccucau

SEQ ID NO: 1388 - RNA, 20 nt, Artificial Sequence
  spacer sequence ATCN PAM
uccuuccugucauccauccu

SEQ ID NO: 1389 - RNA, 20 nt, Artificial Sequence
  spacer sequence ATCN PAM
uccccuaucauccuuccugu

SEQ ID NO: 1390 - RNA, 20 nt, Artificial Sequence
  spacer sequence ATCN PAM
uccuccccuaucauccuucc

SEQ ID NO: 1391 - RNA, 20 nt, Artificial Sequence
  spacer sequence ATCN PAM
uucccaucauccuccccuau

SEQ ID NO: 1392 - RNA, 20 nt, Artificial Sequence
  spacer sequence ATCN PAM
uccuucccaucauccucccc

SEQ ID NO: 1393 - RNA, 20 nt, Artificial Sequence
  spacer sequence ATCN PAM
uuccccaucauccuucccau

SEQ ID NO: 1394 - RNA, 20 nt, Artificial Sequence
  spacer sequence ATCN PAM
uccuuccccaucauccuucc

SEQ ID NO: 1395 - RNA, 20 nt, Artificial Sequence
  spacer sequence ATCN PAM
uuaccaucauccuuccccau

SEQ ID NO: 1396 - RNA, 20 nt, Artificial Sequence
  spacer sequence ATCN PAM
uccuuaccaucauccuuccc

SEQ ID NO: 1397 - RNA, 20 nt, Artificial Sequence
  spacer sequence ATCN PAM
uucuccaucauccuuaccau

SEQ ID NO: 1398 - RNA, 20 nt, Artificial Sequence
  spacer sequence ATCN PAM
uccuucuccaucauccuuac

SEQ ID NO: 1399 - RNA, 20 nt, Artificial Sequence
  spacer sequence ATCN PAM
uuccccaucauccuucucca

SEQ ID NO: 1400 - RNA, 20 nt, Artificial Sequence
  spacer sequence ATCN PAM
uccuuccccaucauccuucu

SEQ ID NO: 1401 - RNA, 20 nt, Artificial Sequence
  spacer sequence ATCN PAM
uuccccaucauccuucccca

SEQ ID NO: 1402 - RNA, 20 nt, Artificial Sequence
  spacer sequence ATCN PAM
uccuuccccaucauccuucc

SEQ ID NO: 1403 - RNA, 20 nt, Artificial Sequence
  spacer sequence ATCN PAM
uuccccaucauccuucccca

SEQ ID NO: 1404 - RNA, 20 nt, Artificial Sequence
  spacer sequence ATCN PAM
uccuuccccaucauccuucc

SEQ ID NO: 1405 - RNA, 20 nt, Artificial Sequence
  spacer sequence ATCN PAM
uucuccaucauccuucccca

SEQ ID NO: 1406 - RNA, 20 nt, Artificial Sequence
  spacer sequence ATCN PAM
ucguucuccaucauccuucc

SEQ ID NO: 1407 - RNA, 20 nt, Artificial Sequence
  spacer sequence ATCN PAM
uucuccaucaucguucucca

SEQ ID NO: 1408 - RNA, 20 nt, Artificial Sequence
  spacer sequence ATCN PAM
ucguucuccaucaucguucu

SEQ ID NO: 1409 - RNA, 20 nt, Artificial Sequence
  spacer sequence ATCN PAM
ccuucccacauuccuucucc

SEQ ID NO: 1410 - RNA, 20 nt, Artificial Sequence
  spacer sequence ATCN PAM
uuccccaucaccuucccaca

SEQ ID NO: 1411 - RNA, 20 nt, Artificial Sequence
  spacer sequence ATCN PAM
uccuuccccaucaccuuccc

SEQ ID NO: 1412 - RNA, 20 nt, Artificial Sequence
  spacer sequence ATCN PAM
uucccaucauccuuccccau

SEQ ID NO: 1413 - RNA, 20 nt, Artificial Sequence
  spacer sequence ATCN PAM
uccuucccaucauccuuccc

SEQ ID NO: 1414 - RNA, 20 nt, Artificial Sequence
  spacer sequence ATCN PAM
uuccccaucauccuucccau

SEQ ID NO: 1415 - RNA, 20 nt, Artificial Sequence
  spacer sequence ATCN PAM
uccuuccccaucauccuucc

SEQ ID NO: 1416 - RNA, 20 nt, Artificial Sequence
  spacer sequence ATCN PAM
uuaccaucauccuuccccau

SEQ ID NO: 1417 - RNA, 20 nt, Artificial Sequence
  spacer sequence ATCN PAM
uccuuaccaucauccuuccc

SEQ ID NO: 1418 - RNA, 20 nt, Artificial Sequence
  spacer sequence ATCN PAM
uucuccaucauccuuaccau

SEQ ID NO: 1419 - RNA, 20 nt, Artificial Sequence
  spacer sequence ATCN PAM
uccuucuccaucauccuuac

SEQ ID NO: 1420 - RNA, 20 nt, Artificial Sequence
  spacer sequence ATCN PAM
uucuccaucauccuucucca

SEQ ID NO: 1421 - RNA, 20 nt, Artificial Sequence
  spacer sequence ATCN PAM
uccuucuccaucauccuucu

SEQ ID NO: 1422 - RNA, 20 nt, Artificial Sequence
  spacer sequence ATCN PAM
uucuccaucauccuucucca

SEQ ID NO: 1423 - RNA, 20 nt, Artificial Sequence
  spacer sequence ATCN PAM
ucguucuccaucauccuucu

SEQ ID NO: 1424 - RNA, 20 nt, Artificial Sequence
  spacer sequence ATCN PAM
uucuccaucaucguucucca

SEQ ID NO: 1425 - RNA, 20 nt, Artificial Sequence
  spacer sequence ATCN PAM
ucguucuccaucaucguucu

SEQ ID NO: 1426 - RNA, 20 nt, Artificial Sequence
  spacer sequence ATCN PAM
uuauugagugccugcuguau

SEQ ID NO: 1427 - RNA, 20 nt, Artificial Sequence
  spacer sequence ATCN PAM
ucccgccucggccuuccaaa

SEQ ID NO: 1428 - RNA, 20 nt, Artificial Sequence
  spacer sequence ATCN PAM
ccacucacugcaaccuccgc

SEQ ID NO: 1429 - RNA, 20 nt, Artificial Sequence
  spacer sequence ATCN PAM
caccacugcgcuccagccug

SEQ ID NO: 1430 - RNA, 20 nt, Artificial Sequence
  spacer sequence ATCN PAM
ccccugccucaugcuuguua

SEQ ID NO: 1431 - RNA, 20 nt, Artificial Sequence
  spacer sequence ATCN PAM
gcugaggucaggaguucgag

SEQ ID NO: 1432 - RNA, 20 nt, Artificial Sequence
  spacer sequence ATCN PAM
cucauauugucuuaugccca

SEQ ID NO: 1433 - RNA, 20 nt, Artificial Sequence
  spacer sequence ATCN PAM
acaggcagacagcccggcgc

SEQ ID NO: 1434 - RNA, 20 nt, Artificial Sequence
  spacer sequence ATCN PAM
auagauuccagacauuguau

SEQ ID NO: 1435 - RNA, 20 nt, Artificial Sequence
  spacer sequence ATCN PAM
auagauaacguaacccagua

SEQ ID NO: 1436 - RNA, 20 nt, Artificial Sequence
  spacer sequence ATCN PAM
gaacagaacaggacaagggu

SEQ ID NO: 1437 - RNA, 20 nt, Artificial Sequence
  spacer sequence ATCN PAM
gauugccggugcaugcagcc

SEQ ID NO: 1438 - RNA, 20 nt, Artificial Sequence
  spacer sequence ATCN PAM
gaucggaacagaacaggaca

SEQ ID NO: 1439 - RNA, 20 nt, Artificial Sequence
  spacer sequence ATCN PAM
aucacgacccucucacgcgg

SEQ ID NO: 1440 - RNA, 20 nt, Artificial Sequence
  spacer sequence ATCN PAM
auugaacaagcaggggguac

SEQ ID NO: 1441 - RNA, 20 nt, Artificial Sequence
  spacer sequence ATCN PAM
cgacccucucacgcggaccc

SEQ ID NO: 1442 - RNA, 20 nt, Artificial Sequence
  spacer sequence ATCN PAM
gcaagacuccugucccaaga

SEQ ID NO: 1443 - RNA, 20 nt, Artificial Sequence
  spacer sequence ATCN PAM
cuacuaaaaauacaaaaaaa

SEQ ID NO: 1444 - RNA, 20 nt, Artificial Sequence
  spacer sequence ATCN PAM
cagcuccucgggaggcugag

SEQ ID NO: 1445 - RNA, 20 nt, Artificial Sequence
  spacer sequence ATCN PAM
gcccgccucagccucccgag

SEQ ID NO: 1446 - RNA, 20 nt, Artificial Sequence
  spacer sequence ATCN PAM
cgaggucaggagaucgagac

SEQ ID NO: 1447 - RNA, 20 nt, Artificial Sequence
  spacer sequence ATCN PAM
ccugaccucgugaucugccc

SEQ ID NO: 1448 - RNA, 20 nt, Artificial Sequence
  spacer sequence ATCN PAM
agaccauccuggcuaacacg

SEQ ID NO: 1449 - RNA, 20 nt, Artificial Sequence
  spacer sequence ATCN PAM
uggcuaacacggugaaaccc

SEQ ID NO: 1450 - RNA, 20 nt, Artificial Sequence
  spacer sequence ATCN PAM
cggcucaccgcaagcuccgc

SEQ ID NO: 1451 - RNA, 20 nt, Artificial Sequence
  spacer sequence ATCN PAM
guguggaacuaacgagcgcc

SEQ ID NO: 1452 - RNA, 20 nt, Artificial Sequence
  spacer sequence ATCN PAM
gcgucccggaaccuggaucc

SEQ ID NO: 1453 - RNA, 20 nt, Artificial Sequence
  spacer sequence ATCN PAM
agguuccgggacgcggauuc

SEQ ID NO: 1454 - RNA, 20 nt, Artificial Sequence
  spacer sequence ATCN PAM
ccgaccgggcccugcggccc

SEQ ID NO: 1455 - RNA, 20 nt, Artificial Sequence
  spacer sequence ATCN PAM
gcccgccacgaacucggagg

SEQ ID NO: 1456 - RNA, 20 nt, Artificial Sequence
  spacer sequence ATCN PAM
gcagggauggcggcgcuuug

SEQ ID NO: 1457 - RNA, 20 nt, Artificial Sequence
  spacer sequence ATCN PAM
cugcugaugacauucucgac

SEQ ID NO: 1458 - RNA, 20 nt, Artificial Sequence
  spacer sequence ATCN PAM
gcccggcaguggacgcagag

SEQ ID NO: 1459 - RNA, 20 nt, Artificial Sequence
  spacer sequence ATCN PAM
uccccgaccgugcucgaucc

SEQ ID NO: 1460 - RNA, 20 nt, Artificial Sequence
  spacer sequence ATCN PAM
agcacggucggggaggaugc

SEQ ID NO: 1461 - RNA, 20 nt, Artificial Sequence
  spacer sequence ATCN PAM
agcccgggugugcugcaccc

SEQ ID NO: 1462 - RNA, 20 nt, Artificial Sequence
  spacer sequence ATCN PAM
uggccugcacggucacccac

SEQ ID NO: 1463 - RNA, 20 nt, Artificial Sequence
  spacer sequence ATCN PAM
cccccuucccagucgugaca

SEQ ID NO: 1464 - RNA, 20 nt, Artificial Sequence
  spacer sequence ATCN PAM
gugguugucacgacugggaa

SEQ ID NO: 1465 - RNA, 20 nt, Artificial Sequence
  spacer sequence ATCN PAM
ggggccaucugugguuguca

SEQ ID NO: 1466 - RNA, 20 nt, Artificial Sequence
  spacer sequence ATCN PAM
cgcccccaggaggcacuaac

SEQ ID NO: 1467 - RNA, 20 nt, Artificial Sequence
  spacer sequence ATCN PAM
cgagcgcgcucuccgucccu

SEQ ID NO: 1468 - RNA, 20 nt, Artificial Sequence
  spacer sequence ATCN PAM
uggccgccggacguggggcu

SEQ ID NO: 1469 - RNA, 20 nt, Artificial Sequence
  spacer sequence ATCN PAM
uaugaaacauaaaacaaggc

SEQ ID NO: 1470 - RNA, 20 nt, Artificial Sequence
  spacer sequence ATCN PAM
cagcacugugggaggccgag

SEQ ID NO: 1471 - RNA, 20 nt, Artificial Sequence
  spacer sequence ATCN PAM
accugccucggccucccaca

SEQ ID NO: 1472 - RNA, 20 nt, Artificial Sequence
  spacer sequence ATCN PAM
ccugaggucaggaguuugag

SEQ ID NO: 1473 - RNA, 20 nt, Artificial Sequence
  spacer sequence ATCN PAM
cuugaacccgugagguggag

SEQ ID NO: 1474 - RNA, 20 nt, Artificial Sequence
  spacer sequence ATCN PAM
cggcucacugcaaccuccac

SEQ ID NO: 1475 - RNA, 20 nt, Artificial Sequence
  spacer sequence ATCN PAM
uuguuuuacguuucuuucuu

SEQ ID NO: 1476 - RNA, 20 nt, Artificial Sequence
  spacer sequence ATCN PAM
uuaucuuauuuaauccacug

SEQ ID NO: 1477 - RNA, 20 nt, Artificial Sequence
  spacer sequence ATCN PAM
uauuuaauccacugugucca

SEQ ID NO: 1478 - RNA, 20 nt, Artificial Sequence
  spacer sequence ATCN PAM
acuguguccaaaauacuauc

SEQ ID NO: 1479 - RNA, 20 nt, Artificial Sequence
  spacer sequence ATCN PAM
uuucgauucauaagcaauac

SEQ ID NO: 1480 - RNA, 20 nt, Artificial Sequence
  spacer sequence ATCN PAM
aaaggauaguauuuuggaca

SEQ ID NO: 1481 - RNA, 20 nt, Artificial Sequence
  spacer sequence ATCN PAM
caacauguauugcuuaugaa

SEQ ID NO: 1482 - RNA, 20 nt, Artificial Sequence
  spacer sequence ATCN PAM
acuuagaaacggacgcagcu

SEQ ID NO: 1483 - RNA, 20 nt, Artificial Sequence
  spacer sequence ATCN PAM
agcacuuugggagcccaagg

SEQ ID NO: 1484 - RNA, 20 nt, Artificial Sequence
  spacer sequence ATCN PAM
gcccaccuugggcucccaaa

SEQ ID NO: 1485 - RNA, 20 nt, Artificial Sequence
  spacer sequence ATCN PAM
cuugagguggggaguucaag

SEQ ID NO: 1486 - RNA, 20 nt, Artificial Sequence
  spacer sequence ATCN PAM
cagcaccuugggaggccaag

SEQ ID NO: 1487 - RNA, 20 nt, Artificial Sequence
  spacer sequence ATCN PAM
gcccgccuuggccucccaag

SEQ ID NO: 1488 - RNA, 20 nt, Artificial Sequence
  spacer sequence ATCN PAM
ccugaggucaggcguuugag

SEQ ID NO: 1489 - RNA, 20 nt, Artificial Sequence
  spacer sequence ATCN PAM
cagcucacugcaaccucugc

SEQ ID NO: 1490 - RNA, 20 nt, Artificial Sequence
  spacer sequence ATCN PAM
ugccacugcacuccagccug

SEQ ID NO: 1491 - RNA, 20 nt, Artificial Sequence
  spacer sequence ATCN PAM
cagcuacucaggaggcucag

SEQ ID NO: 1492 - RNA, 20 nt, Artificial Sequence
  spacer sequence ATCN PAM
cuugaacccaggaggcggag

SEQ ID NO: 1493 - RNA, 20 nt, Artificial Sequence
  spacer sequence ATCN PAM
accgggcgcgguggcucacg

SEQ ID NO: 1494 - RNA, 20 nt, Artificial Sequence
  spacer sequence ATCN PAM
uuccuccuuaaaccugaugc

SEQ ID NO: 1495 - RNA, 20 nt, Artificial Sequence
  spacer sequence ATCN PAM
gguuuaaggaggaaggaucg

SEQ ID NO: 1496 - RNA, 20 nt, Artificial Sequence
  spacer sequence ATCN PAM
ugggcuucauggcuacaacu

SEQ ID NO: 1497 - RNA, 20 nt, Artificial Sequence
  spacer sequence ATCN PAM
aucucauuccucccccacuc

SEQ ID NO: 1498 - RNA, 20 nt, Artificial Sequence
  spacer sequence ATCN PAM
cauuccucccccacucuccu

SEQ ID NO: 1499 - RNA, 20 nt, Artificial Sequence
  spacer sequence ATCN PAM
cggcagggccuccuuguugg

SEQ ID NO: 1500 - RNA, 20 nt, Artificial Sequence
  spacer sequence ATCN PAM
ggaacgcucccucggcagcu

SEQ ID NO: 1501 - RNA, 20 nt, Artificial Sequence
  spacer sequence ATCN PAM
uggccucccuguccacagcu

SEQ ID NO: 1502 - RNA, 20 nt, Artificial Sequence
  spacer sequence ATCN PAM
caccagccccagaccccaca

SEQ ID NO: 1503 - RNA, 20 nt, Artificial Sequence
  spacer sequence ATCN PAM
ccuucccggcauuguccucg

SEQ ID NO: 1504 - RNA, 20 nt, Artificial Sequence
  spacer sequence ATCN PAM
auccccuucccggcauuguc

SEQ ID NO: 1505 - RNA, 20 nt, Artificial Sequence
  spacer sequence ATCN PAM
uccgccggcaacggggaccu

SEQ ID NO: 1506 - RNA, 20 nt, Artificial Sequence
  spacer sequence ATCN PAM
cucugccucugccucucugu

SEQ ID NO: 1507 - RNA, 20 nt, Artificial Sequence
  spacer sequence ATCN PAM
cccugugucucucugccuug

SEQ ID NO: 1508 - RNA, 20 nt, Artificial Sequence
  spacer sequence ATCN PAM
aggaagagagacaaggcaga

SEQ ID NO: 1509 - RNA, 20 nt, Artificial Sequence
  spacer sequence ATCN PAM
gucucucccucucugugucu

SEQ ID NO: 1510 - RNA, 20 nt, Artificial Sequence
  spacer sequence ATCN PAM
caccugcccuguccucaggg

SEQ ID NO: 1511 - RNA, 20 nt, Artificial Sequence
  spacer sequence ATCN PAM
acaggcuugugggggcgggg

SEQ ID NO: 1512 - RNA, 20 nt, Artificial Sequence
  spacer sequence ATCN PAM
cgcugcucacaguccccgug

SEQ ID NO: 1513 - RNA, 20 nt, Artificial Sequence
  spacer sequence ATCN PAM
ccacgcgugacccagcgggc

SEQ ID NO: 1514 - RNA, 20 nt, Artificial Sequence
  spacer sequence ATCN PAM
cccuccugcccaggcuggug

SEQ ID NO: 1515 - RNA, 20 nt, Artificial Sequence
  spacer sequence ATCN PAM
agggcagggccugggugcaa

SEQ ID NO: 1516 - RNA, 20 nt, Artificial Sequence
  spacer sequence ATCN PAM
caguuucccuccucuggucc

SEQ ID NO: 1517 - RNA, 20 nt, Artificial Sequence
  spacer sequence ATCN PAM
gaggagggaaacugaggccc

SEQ ID NO: 1518 - RNA, 20 nt, Artificial Sequence
  spacer sequence ATCN PAM
cagccccuccucugggccuc

SEQ ID NO: 1519 - RNA, 20 nt, Artificial Sequence
  spacer sequence ATCN PAM
gaggagggaaacugaggccc

SEQ ID NO: 1520 - RNA, 20 nt, Artificial Sequence
  spacer sequence ATCN PAM
cagccccuccucugggccuc

SEQ ID NO: 1521 - RNA, 20 nt, Artificial Sequence
  spacer sequence ATCN PAM
gcuuaccugucagaggaggg

SEQ ID NO: 1522 - RNA, 20 nt, Artificial Sequence
  spacer sequence ATCN PAM
uuuuauucccgcgugccugc

SEQ ID NO: 1523 - RNA, 20 nt, Artificial Sequence
  spacer sequence ATCN PAM
cgacugccaccacaggcccu

SEQ ID NO: 1524 - RNA, 20 nt, Artificial Sequence
  spacer sequence ATCN PAM
ccgggacccucccagggccu

SEQ ID NO: 1525 - RNA, 20 nt, Artificial Sequence
  spacer sequence ATCN PAM
acccaccuguuccuccaagc

SEQ ID NO: 1526 - RNA, 20 nt, Artificial Sequence
  spacer sequence ATCN PAM
uccaaacgcacuggaaucca

SEQ ID NO: 1527 - RNA, 20 nt, Artificial Sequence
  spacer sequence ATCN PAM
gcgaguccugggaaccucau

SEQ ID NO: 1528 - RNA, 20 nt, Artificial Sequence
  spacer sequence ATCN PAM
cuuccagaucccucuugugg

SEQ ID NO: 1529 - RNA, 20 nt, Artificial Sequence
  spacer sequence ATCN PAM
ggaagggaugcuggcuggac

SEQ ID NO: 1530 - RNA, 20 nt, Artificial Sequence
  spacer sequence ATCN PAM
cucuuguggaccgagaucca

SEQ ID NO: 1531 - RNA, 20 nt, Artificial Sequence
  spacer sequence ATCN PAM
cgguccacaagagggaucug

SEQ ID NO: 1532 - RNA, 20 nt, Artificial Sequence
  spacer sequence ATCN PAM
aggucucaguguagaccaag

SEQ ID NO: 1533 - RNA, 20 nt, Artificial Sequence
  spacer sequence ATCN PAM
cacgggcagaggccgcccac

SEQ ID NO: 1534 - RNA, 20 nt, Artificial Sequence
  spacer sequence ATCN PAM
cugagccuggcuuccuucca

SEQ ID NO: 1535 - RNA, 20 nt, Artificial Sequence
  spacer sequence ATCN PAM
ccagcgaccuucaccugacc

SEQ ID NO: 1536 - RNA, 20 nt, Artificial Sequence
  spacer sequence ATCN PAM
caggcgugagccaccgcgcc

SEQ ID NO: 1537 - RNA, 20 nt, Artificial Sequence
  spacer sequence ATCN PAM
cagcacuuugggaggccgag

SEQ ID NO: 1538 - RNA, 20 nt, Artificial Sequence
  spacer sequence ATCN PAM
gcccaccucggccucccaaa

SEQ ID NO: 1539 - RNA, 20 nt, Artificial Sequence
  spacer sequence ATCN PAM
ccugaggucgggaguucgag

SEQ ID NO: 1540 - RNA, 20 nt, Artificial Sequence
  spacer sequence ATCN PAM
uuaguagagacaggguuucu

SEQ ID NO: 1541 - RNA, 20 nt, Artificial Sequence
  spacer sequence ATCN PAM
cagcuacuggaguggcugag

SEQ ID NO: 1542 - RNA, 20 nt, Artificial Sequence
  spacer sequence ATCN PAM
cuugagcccgggagacagag

SEQ ID NO: 1543 - RNA, 20 nt, Artificial Sequence
  spacer sequence ATCN PAM
cagcucaccgcaaccucugu

SEQ ID NO: 1544 - RNA, 20 nt, Artificial Sequence
  spacer sequence ATCN PAM
caccauugcacuccagccug

SEQ ID NO: 1545 - RNA, 20 nt, Artificial Sequence
  spacer sequence ATCN PAM
cagacggaggccggaggguc

SEQ ID NO: 1546 - RNA, 20 nt, Artificial Sequence
  spacer sequence ATCN PAM
ucccgugccugaauaugagg

SEQ ID NO: 1547 - RNA, 20 nt, Artificial Sequence
  spacer sequence ATCN PAM
uuggcccccagccccugccu

SEQ ID NO: 1548 - RNA, 20 nt, Artificial Sequence
  spacer sequence ATCN PAM
augcucaguccccucugucc

SEQ ID NO: 1549 - RNA, 20 nt, Artificial Sequence
  spacer sequence ATCN PAM
cggagccccuuaacucugag

SEQ ID NO: 1550 - RNA, 20 nt, Artificial Sequence
  spacer sequence ATCN PAM
cccccuaucucggagccccu

SEQ ID NO: 1551 - RNA, 20 nt, Artificial Sequence
  spacer sequence ATCN PAM
ccaaucacccccuaucucgg

SEQ ID NO: 1552 - RNA, 20 nt, Artificial Sequence
  spacer sequence ATCN PAM
ugccagaggagggggcucgg

SEQ ID NO: 1553 - RNA, 20 nt, Artificial Sequence
  spacer sequence ATCN PAM
gggaggcuuccaggaagagg

SEQ ID NO: 1554 - RNA, 20 nt, Artificial Sequence
  spacer sequence ATCN PAM
cuacuaaaaauacaaaaauu

SEQ ID NO: 1555 - RNA, 20 nt, Artificial Sequence
  spacer sequence ATCN PAM
uggccaacauggugaaaccc

SEQ ID NO: 1556 - RNA, 20 nt, Artificial Sequence
  spacer sequence ATCN PAM
cuugaccuugugauccuccc

SEQ ID NO: 1557 - RNA, 20 nt, Artificial Sequence
  spacer sequence ATCN PAM
caaggucaagagauugaggc

SEQ ID NO: 1558 - RNA, 20 nt, Artificial Sequence
  spacer sequence ATCN PAM
ucccaccucggccucccaaa

SEQ ID NO: 1559 - RNA, 20 nt, Artificial Sequence
  spacer sequence ATCN PAM
cagcacuuugggaggccgag

SEQ ID NO: 1560 - RNA, 20 nt, Artificial Sequence
  spacer sequence ATCN PAM
ugagaaaaacaugucuuaca

SEQ ID NO: 1561 - RNA, 20 nt, Artificial Sequence
  spacer sequence ATCN PAM
guuuugugacccugcagccg

SEQ ID NO: 1562 - RNA, 20 nt, Artificial Sequence
  spacer sequence ATCN PAM
auacucuccaacuccacauu

SEQ ID NO: 1563 - RNA, 20 nt, Artificial Sequence
  spacer sequence ATCN PAM
ucuuaaaguugcugcaaagu

SEQ ID NO: 1564 - RNA, 20 nt, Artificial Sequence
  spacer sequence ATCN PAM
gcucuaaccuaauaguagua

SEQ ID NO: 1565 - RNA, 20 nt, Artificial Sequence
  spacer sequence ATCN PAM
ggccccagugaagaaggaau

SEQ ID NO: 1566 - RNA, 20 nt, Artificial Sequence
  spacer sequence ATCN PAM
gucuggggcaucuggcccca

SEQ ID NO: 1567 - RNA, 20 nt, Artificial Sequence
  spacer sequence ATCN PAM
acggcaggcaucugucuggg

SEQ ID NO: 1568 - RNA, 20 nt, Artificial Sequence
  spacer sequence ATCN PAM
cugugagcuucaugucuccc

SEQ ID NO: 1569 - RNA, 20 nt, Artificial Sequence
  spacer sequence ATCN PAM
ugucucacucgcugucccac

SEQ ID NO: 1570 - RNA, 20 nt, Artificial Sequence
  spacer sequence ATCN PAM
cccucaccuccucccugguc

SEQ ID NO: 1571 - RNA, 20 nt, Artificial Sequence
  spacer sequence ATCN PAM
gggggaaggcagugucacgg

SEQ ID NO: 1572 - RNA, 20 nt, Artificial Sequence
  spacer sequence ATCN PAM
agcccuggcuucccagcucc

SEQ ID NO: 1573 - RNA, 20 nt, Artificial Sequence
  spacer sequence ATCN PAM
ucccagcccccacccagccu

SEQ ID NO: 1574 - RNA, 20 nt, Artificial Sequence
  spacer sequence ATCN PAM
uggccuccauccucccagcc

SEQ ID NO: 1575 - RNA, 20 nt, Artificial Sequence
  spacer sequence ATCN PAM
uggccuccccccucccagcc

SEQ ID NO: 1576 - RNA, 20 nt, Artificial Sequence
  spacer sequence ATCN PAM
ccgccuccacccagccuggc

SEQ ID NO: 1577 - RNA, 20 nt, Artificial Sequence
  spacer sequence ATCN PAM
cccuccucccagccucuacc

SEQ ID NO: 1578 - RNA, 20 nt, Artificial Sequence
  spacer sequence ATCN PAM
agguugggaggaggcccagg

SEQ ID NO: 1579 - RNA, 20 nt, Artificial Sequence
  spacer sequence ATCN PAM
cccuccucccagccucuacc

SEQ ID NO: 1580 - RNA, 20 nt, Artificial Sequence
  spacer sequence ATCN PAM
agguugggaggaggccgagg

SEQ ID NO: 1581 - RNA, 20 nt, Artificial Sequence
  spacer sequence ATCN PAM
caagcccaggccucccuccu

SEQ ID NO: 1582 - RNA, 20 nt, Artificial Sequence
  spacer sequence ATCN PAM
ccagcccaggccuccuccuc

SEQ ID NO: 1583 - RNA, 20 nt, Artificial Sequence
  spacer sequence ATCN PAM
ccagccugggccucuccucc

SEQ ID NO: 1584 - RNA, 20 nt, Artificial Sequence
  spacer sequence ATCN PAM
ccagcccaggccucccuccu

SEQ ID NO: 1585 - RNA, 20 nt, Artificial Sequence
  spacer sequence ATCN PAM
ccagcccgggccucuccucc

SEQ ID NO: 1586 - RNA, 20 nt, Artificial Sequence
  spacer sequence ATCN PAM
ccagcccgggccucuccucc

SEQ ID NO: 1587 - RNA, 20 nt, Artificial Sequence
  spacer sequence ATCN PAM
cugaagcuccucucuugagc

SEQ ID NO: 1588 - RNA, 20 nt, Artificial Sequence
  spacer sequence ATCN PAM
ccggccuccccuccuccuca

SEQ ID NO: 1589 - RNA, 20 nt, Artificial Sequence
  spacer sequence ATCN PAM
gccgggacggccaagccccc

SEQ ID NO: 1590 - RNA, 20 nt, Artificial Sequence
  spacer sequence ATCN PAM
cgaaggucaagccggugggc

SEQ ID NO: 1591 - RNA, 20 nt, Artificial Sequence
  spacer sequence ATCN PAM
cuugagcccagguuggggcu

SEQ ID NO: 1592 - RNA, 20 nt, Artificial Sequence
  spacer sequence ATCN PAM
uccugccccagucucucaaa

SEQ ID NO: 1593 - RNA, 20 nt, Artificial Sequence
  spacer sequence ATCN PAM
cagcacuuugagagacuggg

SEQ ID NO: 1594 - RNA, 20 nt, Artificial Sequence
  spacer sequence ATCN PAM
guccgcuggugaaugcauaa

SEQ ID NO: 1595 - RNA, 20 nt, Artificial Sequence
  spacer sequence ATCN PAM
cauuguguggcuggaccacg

SEQ ID NO: 1596 - RNA, 20 nt, Artificial Sequence
  spacer sequence ATCN PAM
aggcuguggccugugucaga

SEQ ID NO: 1597 - RNA, 20 nt, Artificial Sequence
  spacer sequence ATCN PAM
cacaggaccuguugcguugg

SEQ ID NO: 1598 - RNA, 20 nt, Artificial Sequence
  spacer sequence ATCN PAM
cagcacugggaggccgaggu

SEQ ID NO: 1599 - RNA, 20 nt, Artificial Sequence
  spacer sequence ATCN PAM
acccaccucggccucccagu

SEQ ID NO: 1600 - RNA, 20 nt, Artificial Sequence
  spacer sequence ATCN PAM
ccugaggucgggaguuugag

SEQ ID NO: 1601 - RNA, 20 nt, Artificial Sequence
  spacer sequence ATCN PAM
cggcucacugcaagcuccgc

SEQ ID NO: 1602 - RNA, 20 nt, Artificial Sequence
  spacer sequence ATCN PAM
caccaccgcacuccagccug

SEQ ID NO: 1603 - RNA, 20 nt, Artificial Sequence
  spacer sequence ATCN PAM
cugaaaaaaaaaaaaaaaaa

SEQ ID NO: 1604 - RNA, 20 nt, Artificial Sequence
  spacer sequence ATCN PAM
caccugacaaaguaacacuu

SEQ ID NO: 1605 - RNA, 20 nt, Artificial Sequence
  spacer sequence ATCN PAM
ucacaccugacaaaguaaca

SEQ ID NO: 1606 - RNA, 20 nt, Artificial Sequence
  spacer sequence ATCN PAM
cgaguccucuuugagaaaca

SEQ ID NO: 1607 - RNA, 20 nt, Artificial Sequence
  spacer sequence ATCN PAM
uugagcauuuuagaaagugu

SEQ ID NO: 1608 - RNA, 20 nt, Artificial Sequence
  spacer sequence ATCN PAM
cggcucccacucaccuacug

SEQ ID NO: 1609 - RNA, 20 nt, Artificial Sequence
  spacer sequence ATCN PAM
agggacccaccgagagcgcu

SEQ ID NO: 1610 - RNA, 20 nt, Artificial Sequence
  spacer sequence ATCN PAM
uggguguaagagcggagauu

SEQ ID NO: 1611 - RNA, 20 nt, Artificial Sequence
  spacer sequence ATCN PAM
ccgcucuuacacccaggaug

SEQ ID NO: 1612 - RNA, 20 nt, Artificial Sequence
  spacer sequence ATCN PAM
uuguuuggagggggacugag

SEQ ID NO: 1613 - RNA, 20 nt, Artificial Sequence
  spacer sequence ATCN PAM
cgagcuccucacgcuucacc

SEQ ID NO: 1614 - RNA, 20 nt, Artificial Sequence
  spacer sequence ATCN PAM
cgggaccgugggagagugug

SEQ ID NO: 1615 - RNA, 20 nt, Artificial Sequence
  spacer sequence ATCN PAM
ucccggcagcagccagaagg

SEQ ID NO: 1616 - RNA, 20 nt, Artificial Sequence
  spacer sequence ATCN PAM
ccuucgccaagucucagucu

SEQ ID NO: 1617 - RNA, 20 nt, Artificial Sequence
  spacer sequence ATCN PAM
agucccagcucugcccuccc

SEQ ID NO: 1618 - RNA, 20 nt, Artificial Sequence
  spacer sequence ATCN PAM
ccgcuggcugccugccacca

SEQ ID NO: 1619 - RNA, 20 nt, Artificial Sequence
  spacer sequence ATCN PAM
agagccccugucacucaguc

SEQ ID NO: 1620 - RNA, 20 nt, Artificial Sequence
  spacer sequence ATCN PAM
ucuuggguccccaacucauc

SEQ ID NO: 1621 - RNA, 20 nt, Artificial Sequence
  spacer sequence ATCN PAM
agccgucagucaucaucauc

SEQ ID NO: 1622 - RNA, 20 nt, Artificial Sequence
  spacer sequence ATCN PAM
ucauccuuccucccauuuuu

SEQ ID NO: 1623 - RNA, 20 nt, Artificial Sequence
  spacer sequence ATCN PAM
uccuuccucccauuuuuauu

SEQ ID NO: 1624 - RNA, 20 nt, Artificial Sequence
  spacer sequence ATCN PAM
uuccucccauuuuuauuucc

SEQ ID NO: 1625 - RNA, 20 nt, Artificial Sequence
  spacer sequence ATCN PAM
ucccucccucccucccuccc

SEQ ID NO: 1626 - RNA, 20 nt, Artificial Sequence
  spacer sequence ATCN PAM
cucccucccucccucccucc

SEQ ID NO: 1627 - RNA, 20 nt, Artificial Sequence
  spacer sequence ATCN PAM
ccccuuccuucccucuaccc

SEQ ID NO: 1628 - RNA, 20 nt, Artificial Sequence
  spacer sequence ATCN PAM
uuccuccuuccauucuucca

SEQ ID NO: 1629 - RNA, 20 nt, Artificial Sequence
  spacer sequence ATCN PAM
aucauccaucccucuaccca

SEQ ID NO: 1630 - RNA, 20 nt, Artificial Sequence
  spacer sequence ATCN PAM
uccaucccucuacccauggg

SEQ ID NO: 1631 - RNA, 20 nt, Artificial Sequence
  spacer sequence ATCN PAM
aucccucuacccaugggucc

SEQ ID NO: 1632 - RNA, 20 nt, Artificial Sequence
  spacer sequence ATCN PAM
cucuacccauggguccauca

SEQ ID NO: 1633 - RNA, 20 nt, Artificial Sequence
  spacer sequence ATCN PAM
uccaucccucccucccuccu

SEQ ID NO: 1634 - RNA, 20 nt, Artificial Sequence
  spacer sequence ATCN PAM
aucccucccucccuccuuuc

SEQ ID NO: 1635 - RNA, 20 nt, Artificial Sequence
  spacer sequence ATCN PAM
cucccucccuccuuucguuc

SEQ ID NO: 1636 - RNA, 20 nt, Artificial Sequence
  spacer sequence ATCN PAM
acccaucauuccuccuuccu

SEQ ID NO: 1637 - RNA, 20 nt, Artificial Sequence
  spacer sequence ATCN PAM
uuccuccuuccucccauucu

SEQ ID NO: 1638 - RNA, 20 nt, Artificial Sequence
  spacer sequence ATCN PAM
aucauccaucccuccuuuca

SEQ ID NO: 1639 - RNA, 20 nt, Artificial Sequence
  spacer sequence ATCN PAM
uccaucccuccuuucaaccu

SEQ ID NO: 1640 - RNA, 20 nt, Artificial Sequence
  spacer sequence ATCN PAM
aucccuccuuucaaccuccc

SEQ ID NO: 1641 - RNA, 20 nt, Artificial Sequence
  spacer sequence ATCN PAM
cuccuuucaaccucccuccu

SEQ ID NO: 1642 - RNA, 20 nt, Artificial Sequence
  spacer sequence ATCN PAM
uucccucccuccuuccaugu

SEQ ID NO: 1643 - RNA, 20 nt, Artificial Sequence
  spacer sequence ATCN PAM
acccauccauccaucaugcc

SEQ ID NO: 1644 - RNA, 20 nt, Artificial Sequence
  spacer sequence ATCN PAM
auccaucaugccucucucuu

SEQ ID NO: 1645 - RNA, 20 nt, Artificial Sequence
  spacer sequence ATCN PAM
aucaugccucucucuuccuu

SEQ ID NO: 1646 - RNA, 20 nt, Artificial Sequence
  spacer sequence ATCN PAM
ugccucucucuuccuuuccc

SEQ ID NO: 1647 - RNA, 20 nt, Artificial Sequence
  spacer sequence ATCN PAM
auccaucauccauuccuccu

SEQ ID NO: 1648 - RNA, 20 nt, Artificial Sequence
  spacer sequence ATCN PAM
aucauccauuccuccuucca

SEQ ID NO: 1649 - RNA, 20 nt, Artificial Sequence
  spacer sequence ATCN PAM
uccauuccuccuuccauccc

SEQ ID NO: 1650 - RNA, 20 nt, Artificial Sequence
  spacer sequence ATCN PAM
auuccuccuuccaucccucc

SEQ ID NO: 1651 - RNA, 20 nt, Artificial Sequence
  spacer sequence ATCN PAM
cuccuuccuuucucccgugc

SEQ ID NO: 1652 - RNA, 20 nt, Artificial Sequence
  spacer sequence ATCN PAM
auccguauuugcagggcucg

SEQ ID NO: 1653 - RNA, 20 nt, Artificial Sequence
  spacer sequence ATCN PAM
guauuugcagggcucgugcu

SEQ ID NO: 1654 - RNA, 20 nt, Artificial Sequence
  spacer sequence ATCN PAM
ggcgugagaggcgcagcagc

SEQ ID NO: 1655 - RNA, 20 nt, Artificial Sequence
  spacer sequence ATCN PAM
gcuacauccaucagugggag

SEQ ID NO: 1656 - RNA, 20 nt, Artificial Sequence
  spacer sequence ATCN PAM
aucagugggaggaggugagg

SEQ ID NO: 1657 - RNA, 20 nt, Artificial Sequence
  spacer sequence ATCN PAM
gugggaggaggugagguggg

SEQ ID NO: 1658 - RNA, 20 nt, Artificial Sequence
  spacer sequence ATCN PAM
cucauagccccaccccugcu

SEQ ID NO: 1659 - RNA, 20 nt, Artificial Sequence
  spacer sequence ATCN PAM
ggguggggucaaggccccag

SEQ ID NO: 1660 - RNA, 20 nt, Artificial Sequence
  spacer sequence ATCN PAM
cccauagccccaccccuggg

SEQ ID NO: 1661 - RNA, 20 nt, Artificial Sequence
  spacer sequence ATCN PAM
ggguggggucaaggccccag

SEQ ID NO: 1662 - RNA, 20 nt, Artificial Sequence
  spacer sequence ATCN PAM
cuggggccuugaccccaccc

SEQ ID NO: 1663 - RNA, 20 nt, Artificial Sequence
  spacer sequence ATCN PAM
cucauagccccaucccuggg

SEQ ID NO: 1664 - RNA, 20 nt, Artificial Sequence
  spacer sequence ATCN PAM
gaguggggucaaggccccag

SEQ ID NO: 1665 - RNA, 20 nt, Artificial Sequence
  spacer sequence ATCN PAM
cuggggccuugaccccacuc

SEQ ID NO: 1666 - RNA, 20 nt, Artificial Sequence
  spacer sequence ATCN PAM
cucauagccccaucccuggg

SEQ ID NO: 1667 - RNA, 20 nt, Artificial Sequence
  spacer sequence ATCN PAM
ggguggggucaaggccccag

SEQ ID NO: 1668 - RNA, 20 nt, Artificial Sequence
  spacer sequence ATCN PAM
cccauagccccaccccuggg

SEQ ID NO: 1669 - RNA, 20 nt, Artificial Sequence
  spacer sequence ATCN PAM
ggguggggucaaggccccag

SEQ ID NO: 1670 - RNA, 20 nt, Artificial Sequence
  spacer sequence ATCN PAM
cuggggccuugaccccaccc

SEQ ID NO: 1671 - RNA, 20 nt, Artificial Sequence
  spacer sequence ATCN PAM
cucauagccccaucccuggg

SEQ ID NO: 1672 - RNA, 20 nt, Artificial Sequence
  spacer sequence ATCN PAM
ggguggggucaaggccccag

SEQ ID NO: 1673 - RNA, 20 nt, Artificial Sequence
  spacer sequence ATCN PAM
gguugcugagcagggucgag

SEQ ID NO: 1674 - RNA, 20 nt, Artificial Sequence
  spacer sequence ATCN PAM
uagcccugccccugcugccu

SEQ ID NO: 1675 - RNA, 20 nt, Artificial Sequence
  spacer sequence ATCN PAM
cggccccaccccugcugcuu

SEQ ID NO: 1676 - RNA, 20 nt, Artificial Sequence
  spacer sequence ATCN PAM
ggguggggucaaggagcagg

SEQ ID NO: 1677 - RNA, 20 nt, Artificial Sequence
  spacer sequence ATCN PAM
ggggcggggcuaugaggguu

SEQ ID NO: 1678 - RNA, 20 nt, Artificial Sequence
  spacer sequence ATCN PAM
gaguggagauaugaggguug

SEQ ID NO: 1679 - RNA, 20 nt, Artificial Sequence
  spacer sequence ATCN PAM
ccacucggaugucugacccc

SEQ ID NO: 1680 - RNA, 20 nt, Artificial Sequence
  spacer sequence ATCN PAM
gggguggggauaugaggguu

SEQ ID NO: 1681 - RNA, 20 nt, Artificial Sequence
  spacer sequence ATCN PAM
ccaccccugaugucuggccc

SEQ ID NO: 1682 - RNA, 20 nt, Artificial Sequence
  spacer sequence ATCN PAM
gggguggggagcuguggauu

SEQ ID NO: 1683 - RNA, 20 nt, Artificial Sequence
  spacer sequence ATCN PAM
acagcuccccaccccugaug

SEQ ID NO: 1684 - RNA, 20 nt, Artificial Sequence
  spacer sequence ATCN PAM
acagcccccgcccuaggaca

SEQ ID NO: 1685 - RNA, 20 nt, Artificial Sequence
  spacer sequence ATCN PAM
aaggccccgcacaggacccc

SEQ ID NO: 1686 - RNA, 20 nt, Artificial Sequence
  spacer sequence ATCN PAM
gcaggaaggcgccgugagcc

SEQ ID NO: 1687 - RNA, 20 nt, Artificial Sequence
  spacer sequence ATCN PAM
uccacaugaccuaugaccug

SEQ ID NO: 1688 - RNA, 20 nt, Artificial Sequence
  spacer sequence ATCN PAM
ccgcgcuggccaggucauag

SEQ ID NO: 1689 - RNA, 20 nt, Artificial Sequence
  spacer sequence ATCN PAM
ucaucaccgcgcuggccagg

SEQ ID NO: 1690 - RNA, 20 nt, Artificial Sequence
  spacer sequence ATCN PAM
gcaaucucaucagcaugaug

SEQ ID NO: 1691 - RNA, 20 nt, Artificial Sequence
  spacer sequence ATCN PAM
caucagcaugaugcugcugc

SEQ ID NO: 1692 - RNA, 20 nt, Artificial Sequence
  spacer sequence ATCN PAM
gcaugaugcugcugcucugc

SEQ ID NO: 1693 - RNA, 20 nt, Artificial Sequence
  spacer sequence ATCN PAM
ugcugaugagauugcagauc

SEQ ID NO: 1694 - RNA, 20 nt, Artificial Sequence
  spacer sequence ATCN PAM
auggcaugguggugagcgcc

SEQ ID NO: 1695 - RNA, 20 nt, Artificial Sequence
  spacer sequence ATCN PAM
cgcuuacagaggguugaacc

SEQ ID NO: 1696 - RNA, 20 nt, Artificial Sequence
  spacer sequence ATCN PAM
caggccugaaagguuccaag

SEQ ID NO: 1697 - RNA, 20 nt, Artificial Sequence
  spacer sequence ATCN PAM
uccguggagagaagcugagu

SEQ ID NO: 1698 - RNA, 20 nt, Artificial Sequence
  spacer sequence ATCN PAM
guggagagaagcugagugug

SEQ ID NO: 1699 - RNA, 20 nt, Artificial Sequence
  spacer sequence ATCN PAM
uaaccacacucagcuucucu

SEQ ID NO: 1700 - RNA, 20 nt, Artificial Sequence
  spacer sequence ATCN PAM
gcuuagcgcguuuuccaaug

SEQ ID NO: 1701 - RNA, 20 nt, Artificial Sequence
  spacer sequence ATCN PAM
auuggaaaacgcgcuaagca

SEQ ID NO: 1702 - RNA, 20 nt, Artificial Sequence
  spacer sequence ATCN PAM
cgcggucucugcccugagcg

SEQ ID NO: 1703 - RNA, 20 nt, Artificial Sequence
  spacer sequence ATCN PAM
cagccacagacccccagggu

SEQ ID NO: 1704 - RNA, 20 nt, Artificial Sequence
  spacer sequence ATCN PAM
ccaggcucuggaccucccuc

SEQ ID NO: 1705 - RNA, 20 nt, Artificial Sequence
  spacer sequence ATCN PAM
ccuccccagcccccgcccca

SEQ ID NO: 1706 - RNA, 20 nt, Artificial Sequence
  spacer sequence ATCN PAM
caacucaccccuuccugccc

SEQ ID NO: 1707 - RNA, 20 nt, Artificial Sequence
  spacer sequence ATCN PAM
gggcaggacagggucagucu

SEQ ID NO: 1708 - RNA, 20 nt, Artificial Sequence
  spacer sequence ATCN PAM
ggaagcccccgggcugaagg

SEQ ID NO: 1709 - RNA, 20 nt, Artificial Sequence
  spacer sequence ATCN PAM
ugagccggccuagagacccc

SEQ ID NO: 1710 - RNA, 20 nt, Artificial Sequence
  spacer sequence ATCN PAM
gagcaguggggcagccuugc

SEQ ID NO: 1711 - RNA, 20 nt, Artificial Sequence
  spacer sequence ATCN PAM
uaggcuuggcaguggagggg

SEQ ID NO: 1712 - RNA, 20 nt, Artificial Sequence
  spacer sequence ATCN PAM
cccuccaccccucccagcuc

SEQ ID NO: 1713 - RNA, 20 nt, Artificial Sequence
  spacer sequence ATCN PAM
uaaucucccuccaccccucc

SEQ ID NO: 1714 - RNA, 20 nt, Artificial Sequence
  spacer sequence ATCN PAM
ggucagccccuccugagcag

SEQ ID NO: 1715 - RNA, 20 nt, Artificial Sequence
  spacer sequence ATCN PAM
uuccagaaaccaucggguca

SEQ ID NO: 1716 - RNA, 20 nt, Artificial Sequence
  spacer sequence ATCN PAM
ucagggaagggccagagccc

SEQ ID NO: 1717 - RNA, 20 nt, Artificial Sequence
  spacer sequence ATCN PAM
gggaagggccagagcccccg

SEQ ID NO: 1718 - RNA, 20 nt, Artificial Sequence
  spacer sequence ATCN PAM
cugaggaaugggugggcacc

SEQ ID NO: 1719 - RNA, 20 nt, Artificial Sequence
  spacer sequence ATCN PAM
agcaacccuaucccugagga

SEQ ID NO: 1720 - RNA, 20 nt, Artificial Sequence
  spacer sequence ATCN PAM
cggcacucugggaggccgag

SEQ ID NO: 1721 - RNA, 20 nt, Artificial Sequence
  spacer sequence ATCN PAM
gccugucucggccucccaga

SEQ ID NO: 1722 - RNA, 20 nt, Artificial Sequence
  spacer sequence ATCN PAM
ccugaggucaggaguuuaag

SEQ ID NO: 1723 - RNA, 20 nt, Artificial Sequence
  spacer sequence ATCN PAM
cuacaaaaaauuaaaaaauu

SEQ ID NO: 1724 - RNA, 20 nt, Artificial Sequence
  spacer sequence ATCN PAM
ccacuacucaggaggccgag

SEQ ID NO: 1725 - RNA, 20 nt, Artificial Sequence
  spacer sequence ATCN PAM
ucccaccucggccuccugag

SEQ ID NO: 1726 - RNA, 20 nt, Artificial Sequence
  spacer sequence ATCN PAM
cuugagcccaggaguucaag

SEQ ID NO: 1727 - RNA, 20 nt, Artificial Sequence
  spacer sequence ATCN PAM
ccacaaaaaauaaaagaauc

SEQ ID NO: 1728 - RNA, 20 nt, Artificial Sequence
  spacer sequence ATCN PAM
gccaggcgugguggcgcaca

SEQ ID NO: 1729 - RNA, 20 nt, Artificial Sequence
  spacer sequence ATCN PAM
ucccaccucagccuccugag

SEQ ID NO: 1730 - RNA, 20 nt, Artificial Sequence
  spacer sequence ATCN PAM
cagcucacugcagccuccgc

SEQ ID NO: 1731 - RNA, 20 nt, Artificial Sequence
  spacer sequence ATCN PAM
uugaaacgaauucaacuuug

SEQ ID NO: 1732 - RNA, 20 nt, Artificial Sequence
  spacer sequence ATCN PAM
aaguugaauucguuucaaug

SEQ ID NO: 1733 - RNA, 20 nt, Artificial Sequence
  spacer sequence ATCN PAM
ggccgccccuguguguggcg

SEQ ID NO: 1734 - RNA, 20 nt, Artificial Sequence
  spacer sequence ATCN PAM
ccccgccacaggccgggggg

SEQ ID NO: 1735 - RNA, 20 nt, Artificial Sequence
  spacer sequence ATCN PAM
ucuggcggaagucagcuggc

SEQ ID NO: 1736 - RNA, 20 nt, Artificial Sequence
  spacer sequence ATCN PAM
acgacuacuaugagcaccgu

SEQ ID NO: 1737 - RNA, 20 nt, Artificial Sequence
  spacer sequence ATCN PAM
ugcccugguaacggugcuca

SEQ ID NO: 1738 - RNA, 20 nt, Artificial Sequence
  spacer sequence ATCN PAM
ugggcgagcucaacgggccc

SEQ ID NO: 1739 - RNA, 20 nt, Artificial Sequence
  spacer sequence ATCN PAM
gccucagugcccccaggacc

SEQ ID NO: 1740 - RNA, 20 nt, Artificial Sequence
  spacer sequence ATCN PAM
ccgcuguucaagccacucag

SEQ ID NO: 1741 - RNA, 20 nt, Artificial Sequence
  spacer sequence ATCN PAM
aggcgugggccgggccgugc

SEQ ID NO: 1742 - RNA, 20 nt, Artificial Sequence
  spacer sequence ATCN PAM
uccccaggggcuccgggggg

SEQ ID NO: 1743 - RNA, 20 nt, Artificial Sequence
  spacer sequence ATCN PAM
uuccugccucuuccggcguc

SEQ ID NO: 1744 - RNA, 20 nt, Artificial Sequence
  spacer sequence ATCN PAM
gcaagccaagggcgccugga

SEQ ID NO: 1745 - RNA, 20 nt, Artificial Sequence
  spacer sequence ATCN PAM
aucugcaagccaagggcgcc

SEQ ID NO: 1746 - RNA, 20 nt, Artificial Sequence
  spacer sequence ATCN PAM
cccugaucucugccuccauc

SEQ ID NO: 1747 - RNA, 20 nt, Artificial Sequence
  spacer sequence ATCN PAM
gggagaucaaucugcaagcc

SEQ ID NO: 1748 - RNA, 20 nt, Artificial Sequence
  spacer sequence ATCN PAM
cugccuccaucugcucacag

SEQ ID NO: 1749 - RNA, 20 nt, Artificial Sequence
  spacer sequence ATCN PAM
gcucacagccuucuccccug

SEQ ID NO: 1750 - RNA, 20 nt, Artificial Sequence
  spacer sequence ATCN PAM
gucguuggaucagggcccac

SEQ ID NO: 1751 - RNA, 20 nt, Artificial Sequence
  spacer sequence ATCN PAM
aacgacggaugaauuuacaa

SEQ ID NO: 1752 - RNA, 20 nt, Artificial Sequence
  spacer sequence ATCN PAM
gggcccacccgguuccucgu

SEQ ID NO: 1753 - RNA, 20 nt, Artificial Sequence
  spacer sequence ATCN PAM
ugacccccgguuccugugaa

SEQ ID NO: 1754 - RNA, 20 nt, Artificial Sequence
  spacer sequence ATCN PAM
cccagaaagacaggcugaca

SEQ ID NO: 1755 - RNA, 20 nt, Artificial Sequence
  spacer sequence ATCN PAM
aacaguuauugagcgccgac

SEQ ID NO: 1756 - RNA, 20 nt, Artificial Sequence
  spacer sequence ATCN PAM
cuaggccccgcuuccugagg

SEQ ID NO: 1757 - RNA, 20 nt, Artificial Sequence
  spacer sequence ATCN PAM
cggccgccaucccuaggccc

SEQ ID NO: 1758 - RNA, 20 nt, Artificial Sequence
  spacer sequence ATCN PAM
cgcaggcagcagagagcagc

SEQ ID NO: 1759 - RNA, 20 nt, Artificial Sequence
  spacer sequence ATCN PAM
gcaaggccgugugugagcca

SEQ ID NO: 1760 - RNA, 20 nt, Artificial Sequence
  spacer sequence ATCN PAM
aaugcaauuaaacauucuug

SEQ ID NO: 1761 - RNA, 20 nt, Artificial Sequence
  spacer sequence ATCN PAM
cuacaaaugaaugaauggaa

SEQ ID NO: 1762 - RNA, 20 nt, Artificial Sequence
  spacer sequence ATCN PAM
ggugcagcacucuguuaaua

SEQ ID NO: 1763 - RNA, 20 nt, Artificial Sequence
  spacer sequence ATCN PAM
uuaaacccacauauggccag

SEQ ID NO: 1764 - RNA, 20 nt, Artificial Sequence
  spacer sequence ATCN PAM
cagcacuuucagaggccgag

SEQ ID NO: 1765 - RNA, 20 nt, Artificial Sequence
  spacer sequence ATCN PAM
gcccgucucggccucugaaa

SEQ ID NO: 1766 - RNA, 20 nt, Artificial Sequence
  spacer sequence ATCN PAM
ccugaggucaggaguucgag

SEQ ID NO: 1767 - RNA, 20 nt, Artificial Sequence
  spacer sequence ATCN PAM
cagcuacucuggaggcugag

SEQ ID NO: 1768 - RNA, 20 nt, Artificial Sequence
  spacer sequence ATCN PAM
cuugaacccaggaggcggcg

SEQ ID NO: 1769 - RNA, 20 nt, Artificial Sequence
  spacer sequence ATCN PAM
cggcucacugcaaccgccgc

SEQ ID NO: 1770 - RNA, 20 nt, Artificial Sequence
  spacer sequence ATCN PAM
agcugugcccuuaugaccug

SEQ ID NO: 1771 - RNA, 20 nt, Artificial Sequence
  spacer sequence ATCN PAM
auggugugggaagucagggc

SEQ ID NO: 1772 - RNA, 20 nt, Artificial Sequence
  spacer sequence ATCN PAM
ccagacccuugguuuucaug

SEQ ID NO: 1773 - RNA, 20 nt, Artificial Sequence
  spacer sequence ATCN PAM
acaugaaaaccaagggucug

SEQ ID NO: 1774 - RNA, 20 nt, Artificial Sequence
  spacer sequence ATCN PAM
ccugauagucugaccgaaug

SEQ ID NO: 1775 - RNA, 20 nt, Artificial Sequence
  spacer sequence ATCN PAM
ggugauuuuugaaaaaucaa

SEQ ID NO: 1776 - RNA, 20 nt, Artificial Sequence
  spacer sequence ATCN PAM
cucucucacacacacacaca

SEQ ID NO: 1777 - RNA, 20 nt, Artificial Sequence
  spacer sequence ATCN PAM
cacaacugcacuggagcccg

SEQ ID NO: 1778 - RNA, 20 nt, Artificial Sequence
  spacer sequence ATCN PAM
ugguucacuguaaccuccuc

SEQ ID NO: 1779 - RNA, 20 nt, Artificial Sequence
  spacer sequence ATCN PAM
cagcuacucgggaggcugag

SEQ ID NO: 1780 - RNA, 20 nt, Artificial Sequence
  spacer sequence ATCN PAM
agaggucaugaguucaagac

SEQ ID NO: 1781 - RNA, 20 nt, Artificial Sequence
  spacer sequence ATCN PAM
gcccgccucggccucccaaa

SEQ ID NO: 1782 - RNA, 20 nt, Artificial Sequence
  spacer sequence ATCN PAM
cagcacuuugggaggccgag

SEQ ID NO: 1783 - RNA, 20 nt, Artificial Sequence
  spacer sequence ATCN PAM
agaggucaaggguccgaggc

SEQ ID NO: 1784 - RNA, 20 nt, Artificial Sequence
  spacer sequence ATCN PAM
gcccaccuuggccacccaaa

SEQ ID NO: 1785 - RNA, 20 nt, Artificial Sequence
  spacer sequence ATCN PAM
agaggucggggguucgaggc

SEQ ID NO: 1786 - RNA, 20 nt, Artificial Sequence
  spacer sequence ATCN PAM
gcccaccucggccacccaaa

SEQ ID NO: 1787 - RNA, 20 nt, Artificial Sequence
  spacer sequence ATCN PAM
cagcacuuuuggguggccga

SEQ ID NO: 1788 - RNA, 20 nt, Artificial Sequence
  spacer sequence ATCN PAM
ugucugcguccauuaggcag

SEQ ID NO: 1789 - RNA, 20 nt, Artificial Sequence
  spacer sequence ATCN PAM
agucuccauuaggcgccuac

SEQ ID NO: 1790 - RNA, 20 nt, Artificial Sequence
  spacer sequence ATCN PAM
uggcucugcacauguggccu

SEQ ID NO: 1791 - RNA, 20 nt, Artificial Sequence
  spacer sequence ATCN PAM
ugggccucaccuaugucccu

SEQ ID NO: 1792 - RNA, 20 nt, Artificial Sequence
  spacer sequence ATCN PAM
cuugcaccgcucaugggccc

SEQ ID NO: 1793 - RNA, 20 nt, Artificial Sequence
  spacer sequence ATCN PAM
gagccuuugccuuuucuccc

SEQ ID NO: 1794 - RNA, 20 nt, Artificial Sequence
  spacer sequence ATCN PAM
ugggagucuacuuccggcug

SEQ ID NO: 1795 - RNA, 20 nt, Artificial Sequence
  spacer sequence ATCN PAM
gagcguccaccggcgcaugc

SEQ ID NO: 1796 - RNA, 20 nt, Artificial Sequence
  spacer sequence ATCN PAM
ggacuuuuuuucuguuuuuc

SEQ ID NO: 1797 - RNA, 20 nt, Artificial Sequence
  spacer sequence ATCN PAM
cgccacugcacuccagccug

SEQ ID NO: 1798 - RNA, 20 nt, Artificial Sequence
  spacer sequence ATCN PAM
uagcucagugcagcuucgaa

SEQ ID NO: 1799 - RNA, 20 nt, Artificial Sequence
  spacer sequence ATCN PAM
cuuuaccccagcaguucgaa

SEQ ID NO: 1800 - RNA, 20 nt, Artificial Sequence
  spacer sequence ATCN PAM
ucgccccucggcuucccaaa

SEQ ID NO: 1801 - RNA, 20 nt, Artificial Sequence
  spacer sequence ATCN PAM
cagcgcuuugggaagccgag

SEQ ID NO: 1802 - RNA, 20 nt, Artificial Sequence
  spacer sequence ATCN PAM
aauaacgaggacagcaucug

SEQ ID NO: 1803 - RNA, 20 nt, Artificial Sequence
  spacer sequence ATCN PAM
gcaauuuagagauuccuguc

SEQ ID NO: 1804 - RNA, 20 nt, Artificial Sequence
  spacer sequence ATCN PAM
cuaaauugcagaugcugucc

SEQ ID NO: 1805 - RNA, 20 nt, Artificial Sequence
  spacer sequence ATCN PAM
uaaugacucuuacccaaaag

SEQ ID NO: 1806 - RNA, 20 nt, Artificial Sequence
  spacer sequence ATCN PAM
uggaggaagcugaggcucag

SEQ ID NO: 1807 - RNA, 20 nt, Artificial Sequence
  spacer sequence ATCN PAM
ccaagcccucaggggcagga

SEQ ID NO: 1808 - RNA, 20 nt, Artificial Sequence
  spacer sequence ATCN PAM
aagccugccgcuccauucgg

SEQ ID NO: 1809 - RNA, 20 nt, Artificial Sequence
  spacer sequence ATCN PAM
cgcggagaccagggcaggcu

SEQ ID NO: 1810 - RNA, 20 nt, Artificial Sequence
  spacer sequence ATCN PAM
ugccuaggaggagcagggcg

SEQ ID NO: 1811 - RNA, 20 nt, Artificial Sequence
  spacer sequence ATCN PAM
ggggguaacuguguuccagg

SEQ ID NO: 1812 - RNA, 20 nt, Artificial Sequence
  spacer sequence ATCN PAM
caguugcaaaggggagcugg

SEQ ID NO: 1813 - RNA, 20 nt, Artificial Sequence
  spacer sequence ATCN PAM
cagcacuuugggaggcugag

SEQ ID NO: 1814 - RNA, 20 nt, Artificial Sequence
  spacer sequence ATCN PAM
gcccgccucagccucccaaa

SEQ ID NO: 1815 - RNA, 20 nt, Artificial Sequence
  spacer sequence ATCN PAM
ccuaaggucagaguucgaga

SEQ ID NO: 1816 - RNA, 20 nt, Artificial Sequence
  spacer sequence ATCN PAM
gggggugguggcgggcaccu

SEQ ID NO: 1817 - RNA, 20 nt, Artificial Sequence
  spacer sequence ATCN PAM
cagcuacucgggaggcugag

SEQ ID NO: 1818 - RNA, 20 nt, Artificial Sequence
  spacer sequence ATCN PAM
cuugaacccgggaggcggag

SEQ ID NO: 1819 - RNA, 20 nt, Artificial Sequence
  spacer sequence ATCN PAM
uggcucacugcaaccuccgc

SEQ ID NO: 1820 - RNA, 20 nt, Artificial Sequence
  spacer sequence ATCN PAM
cgccacugcacuccagccug

SEQ ID NO: 1821 - RNA, 20 nt, Artificial Sequence
  spacer sequence ATCN PAM
cagcacuuugggaggcugcg

SEQ ID NO: 1822 - RNA, 20 nt, Artificial Sequence
  spacer sequence ATCN PAM
ucccgccgcagccucccaaa

SEQ ID NO: 1823 - RNA, 20 nt, Artificial Sequence
  spacer sequence ATCN PAM
cuugagcccaggaguuccag

SEQ ID NO: 1824 - RNA, 20 nt, Artificial Sequence
  spacer sequence ATCN PAM
cgguugcccaaggcuugucu

SEQ ID NO: 1825 - RNA, 20 nt, Artificial Sequence
  spacer sequence ATCN PAM
uuccugcagcugcuguaacg

SEQ ID NO: 1826 - RNA, 20 nt, Artificial Sequence
  spacer sequence ATCN PAM
cugugaccgcaugggccgug

SEQ ID NO: 1827 - RNA, 20 nt, Artificial Sequence
  spacer sequence ATCN PAM
gucccgagaggcagugggag

SEQ ID NO: 1828 - RNA, 20 nt, Artificial Sequence
  spacer sequence ATCN PAM
agagcugggccauuuccuuc

SEQ ID NO: 1829 - RNA, 20 nt, Artificial Sequence
  spacer sequence ATCN PAM
uuccaccuuagccuccugag

SEQ ID NO: 1830 - RNA, 20 nt, Artificial Sequence
  spacer sequence ATCN PAM
gggacuacaggugugcacca

SEQ ID NO: 1831 - RNA, 20 nt, Artificial Sequence
  spacer sequence ATCN PAM
ucccaccucagccuccugag

SEQ ID NO: 1832 - RNA, 20 nt, Artificial Sequence
  spacer sequence ATCN PAM
gguaauccucccaccucagc

SEQ ID NO: 1833 - RNA, 20 nt, Artificial Sequence
  spacer sequence ATCN PAM
agacaccugcuguuagacgc

SEQ ID NO: 1834 - RNA, 20 nt, Artificial Sequence
  spacer sequence ATCN PAM
gccugccucggccucccaaa

SEQ ID NO: 1835 - RNA, 20 nt, Artificial Sequence
  spacer sequence ATCN PAM
agaggucaggagaucgagac

SEQ ID NO: 1836 - RNA, 20 nt, Artificial Sequence
  spacer sequence ATCN PAM
ccugaccucuugauccgccu

SEQ ID NO: 1837 - RNA, 20 nt, Artificial Sequence
  spacer sequence ATCN PAM
agaccauccuggcuaacacg

SEQ ID NO: 1838 - RNA, 20 nt, Artificial Sequence
  spacer sequence ATCN PAM
uggcuaacacggugaaaccc

SEQ ID NO: 1839 - RNA, 20 nt, Artificial Sequence
  spacer sequence ATCN PAM
cuacuaaaaauacaaaaaau

SEQ ID NO: 1840 - RNA, 20 nt, Artificial Sequence
  spacer sequence ATCN PAM
cggcucacugcaauuuccac

SEQ ID NO: 1841 - RNA, 20 nt, Artificial Sequence
  spacer sequence ATCN PAM
ccccacugcacuccagccug

SEQ ID NO: 1842 - RNA, 20 nt, Artificial Sequence
  spacer sequence ATCN PAM
aggaggugaagacccugggc

SEQ ID NO: 1843 - RNA, 20 nt, Artificial Sequence
  spacer sequence ATCN PAM
cuugaauccaggaggugaag

SEQ ID NO: 1844 - RNA, 20 nt, Artificial Sequence
  spacer sequence ATCN PAM
uccugcuucagucuccugaa

SEQ ID NO: 1845 - RNA, 20 nt, Artificial Sequence
  spacer sequence ATCN PAM
caacacuucaggagacugaa

SEQ ID NO: 1846 - RNA, 20 nt, Artificial Sequence
  spacer sequence ATCN PAM
uuuauguaggggacaaaaau

SEQ ID NO: 1847 - RNA, 20 nt, Artificial Sequence
  spacer sequence ATCN PAM
cagggccguaguguacugac

SEQ ID NO: 1848 - RNA, 20 nt, Artificial Sequence
  spacer sequence ATCN PAM
ugccguaucuuucuccacag

SEQ ID NO: 1849 - RNA, 20 nt, Artificial Sequence
  spacer sequence ATCN PAM
uucuccacagcucauccggg

SEQ ID NO: 1850 - RNA, 20 nt, Artificial Sequence
  spacer sequence ATCN PAM
ccccgcgcaaagcugcuguu

SEQ ID NO: 1851 - RNA, 20 nt, Artificial Sequence
  spacer sequence ATCN PAM
ccccgccgagguccgggugg

SEQ ID NO: 1852 - RNA, 20 nt, Artificial Sequence
  spacer sequence ATCN PAM
ccccggggccacccacaggu

SEQ ID NO: 1853 - RNA, 20 nt, Artificial Sequence
  spacer sequence ATCN PAM
ggggaggggucgcuccaucu

SEQ ID NO: 1854 - RNA, 20 nt, Artificial Sequence
  spacer sequence ATCN PAM
ccggggaaaguuggcggcuu

SEQ ID NO: 1855 - RNA, 20 nt, Artificial Sequence
  spacer sequence ATCN PAM
gcccugcucgccaggccccg

SEQ ID NO: 1856 - RNA, 20 nt, Artificial Sequence
  spacer sequence ATCN PAM
ccgucguccuccuaggcagc

SEQ ID NO: 1857 - RNA, 20 nt, Artificial Sequence
  spacer sequence ATCN PAM
cccucccagaggaggggugu

SEQ ID NO: 1858 - RNA, 20 nt, Artificial Sequence
  spacer sequence ATCN PAM
cccuuuuuaaugagaggcag

SEQ ID NO: 1859 - RNA, 20 nt, Artificial Sequence
  spacer sequence ATCN PAM
agggagugggccgugcacgg

SEQ ID NO: 1860 - RNA, 20 nt, Artificial Sequence
  spacer sequence ATCN PAM
uuacagaagcccugcgagag

SEQ ID NO: 1861 - RNA, 20 nt, Artificial Sequence
  spacer sequence ATCN PAM
uucucagaaaagguucauga

SEQ ID NO: 1862 - RNA, 20 nt, Artificial Sequence
  spacer sequence ATCN PAM
aggcaggcagaaggaugcac

SEQ ID NO: 1863 - RNA, 20 nt, Artificial Sequence
  spacer sequence ATCN PAM
uucugccugccuggaugaac

SEQ ID NO: 1864 - RNA, 20 nt, Artificial Sequence
  spacer sequence ATCN PAM
cagcuacucgggaggcugag

SEQ ID NO: 1865 - RNA, 20 nt, Artificial Sequence
  spacer sequence ATCN PAM
cuugaacccaggaggagguu

SEQ ID NO: 1866 - RNA, 20 nt, Artificial Sequence
  spacer sequence ATCN PAM
cgcucagugagagacgccag

SEQ ID NO: 1867 - RNA, 20 nt, Artificial Sequence
  spacer sequence ATCN PAM
gcgccguggccugggucaga

SEQ ID NO: 1868 - RNA, 20 nt, Artificial Sequence
  spacer sequence ATCN PAM
cggggacgggaggccugugc

SEQ ID NO: 1869 - RNA, 20 nt, Artificial Sequence
  spacer sequence ATCN PAM
ccccaagcacaggccggggg

SEQ ID NO: 1870 - RNA, 20 nt, Artificial Sequence
  spacer sequence ATCN PAM
cccgcccccggccugugcuu

SEQ ID NO: 1871 - RNA, 20 nt, Artificial Sequence
  spacer sequence ATCN PAM
aucaccggggcggcggcgcc

SEQ ID NO: 1872 - RNA, 20 nt, Artificial Sequence
  spacer sequence ATCN PAM
ccggggcggcggcgcccggg

SEQ ID NO: 1873 - RNA, 20 nt, Artificial Sequence
  spacer sequence ATCN PAM
ugcguguccuggggaaaggc

SEQ ID NO: 1874 - RNA, 20 nt, Artificial Sequence
  spacer sequence ATCN PAM
acagggggaggcccaggcug

SEQ ID NO: 1875 - RNA, 20 nt, Artificial Sequence
  spacer sequence ATCN PAM
ggacuuggauccuuugcugu

SEQ ID NO: 1876 - RNA, 20 nt, Artificial Sequence
  spacer sequence ATCN PAM
aaguccggauucaaccccag

SEQ ID NO: 1877 - RNA, 20 nt, Artificial Sequence
  spacer sequence ATCN PAM
uuugcugugcguccuuggga

SEQ ID NO: 1878 - RNA, 20 nt, Artificial Sequence
  spacer sequence ATCN PAM
ggacaguccucucugcaccc

SEQ ID NO: 1879 - RNA, 20 nt, Artificial Sequence
  spacer sequence ATCN PAM
gucuuauggucugggccagg

SEQ ID NO: 1880 - RNA, 20 nt, Artificial Sequence
  spacer sequence ATCN PAM
cccucccgcaggguccuggc

SEQ ID NO: 1881 - RNA, 20 nt, Artificial Sequence
  spacer sequence ATCN PAM
cagugaguuuccgccgcccc

SEQ ID NO: 1882 - RNA, 20 nt, Artificial Sequence
  spacer sequence ATCN PAM
cugaccccacccggcccucc

SEQ ID NO: 1883 - RNA, 20 nt, Artificial Sequence
  spacer sequence ATCN PAM
ccgccugccgcuuccgcuuc

SEQ ID NO: 1884 - RNA, 20 nt, Artificial Sequence
  spacer sequence ATCN PAM
agaacaagcgccggcagcug

SEQ ID NO: 1885 - RNA, 20 nt, Artificial Sequence
  spacer sequence ATCN PAM
aggucagagucgugggcagg

SEQ ID NO: 1886 - RNA, 20 nt, Artificial Sequence
  spacer sequence ATCN PAM
cugcugcucaguccaaggca

SEQ ID NO: 1887 - RNA, 20 nt, Artificial Sequence
  spacer sequence ATCN PAM
cccucugaggccgaggacgg

SEQ ID NO: 1888 - RNA, 20 nt, Artificial Sequence
  spacer sequence ATCN PAM
gccuccucagguccucaucc

SEQ ID NO: 1889 - RNA, 20 nt, Artificial Sequence
  spacer sequence ATCN PAM
uguccccuuccugcccccgc

SEQ ID NO: 1890 - RNA, 20 nt, Artificial Sequence
  spacer sequence ATCN PAM
cugugggggcugggaccaaa

SEQ ID NO: 1891 - RNA, 20 nt, Artificial Sequence
  spacer sequence ATCN PAM
cuucuaauacuuggaaagug

SEQ ID NO: 1892 - RNA, 20 nt, Artificial Sequence
  spacer sequence ATCN PAM
caccagggaaacuggaaaaa

SEQ ID NO: 1893 - RNA, 20 nt, Artificial Sequence
  spacer sequence ATCN PAM
ccaccucugucuugcgcucc

SEQ ID NO: 1894 - RNA, 20 nt, Artificial Sequence
  spacer sequence ATCN PAM
gcuccccccagucacccccu

SEQ ID NO: 1895 - RNA, 20 nt, Artificial Sequence
  spacer sequence ATCN PAM
ccaggcacccacucccgcug

SEQ ID NO: 1896 - RNA, 20 nt, Artificial Sequence
  spacer sequence ATCN PAM
cuggucuucuugcuguuucu

SEQ ID NO: 1897 - RNA, 20 nt, Artificial Sequence
  spacer sequence ATCN PAM
uccucccuuggccuccuggg

SEQ ID NO: 1898 - RNA, 20 nt, Artificial Sequence
  spacer sequence ATCN PAM
cuugagagcaggaguggacg

SEQ ID NO: 1899 - RNA, 20 nt, Artificial Sequence
  spacer sequence ATCN PAM
agccggcuccuccgugcccc

SEQ ID NO: 1900 - RNA, 20 nt, Artificial Sequence
  spacer sequence ATCN PAM
gcggcucccgcaggccaccc

SEQ ID NO: 1901 - RNA, 20 nt, Artificial Sequence
  spacer sequence ATCN PAM
cauuucuucccucccucccc

SEQ ID NO: 1902 - RNA, 20 nt, Artificial Sequence
  spacer sequence ATCN PAM
cggcacuuugggaggccgag

SEQ ID NO: 1903 - RNA, 20 nt, Artificial Sequence
  spacer sequence ATCN PAM
acccaccucggccucccaaa

SEQ ID NO: 1904 - RNA, 20 nt, Artificial Sequence
  spacer sequence ATCN PAM
ccugaggucaggggaucgaa

SEQ ID NO: 1905 - RNA, 20 nt, Artificial Sequence
  spacer sequence ATCN PAM
ccugaccucaggugauccac

SEQ ID NO: 1906 - RNA, 20 nt, Artificial Sequence
  spacer sequence ATCN PAM
aaaccagccuggccaacaug

SEQ ID NO: 1907 - RNA, 20 nt, Artificial Sequence
  spacer sequence ATCN PAM
ccgggaagaggaaggggagc

SEQ ID NO: 1908 - RNA, 20 nt, Artificial Sequence
  spacer sequence ATCN PAM
ccucucuggccaccagagug

SEQ ID NO: 1909 - RNA, 20 nt, Artificial Sequence
  spacer sequence ATCN PAM
uuaaaaaaauccagacaggc

SEQ ID NO: 1910 - RNA, 20 nt, Artificial Sequence
  spacer sequence ATCN PAM
agacaggccucucagggauu

SEQ ID NO: 1911 - RNA, 20 nt, Artificial Sequence
  spacer sequence ATCN PAM
cugagaggccugucuggauu

SEQ ID NO: 1912 - RNA, 20 nt, Artificial Sequence
  spacer sequence ATCN PAM
cugggcugaggaugaggaau

SEQ ID NO: 1913 - RNA, 20 nt, Artificial Sequence
  spacer sequence ATCN PAM
ucagcccagugauuuucaca

SEQ ID NO: 1914 - RNA, 20 nt, Artificial Sequence
  spacer sequence ATCN PAM
cucucuccgcuuccaccucc

SEQ ID NO: 1915 - RNA, 20 nt, Artificial Sequence
  spacer sequence ATCN PAM
ugggggagccgucaaccguc

SEQ ID NO: 1916 - RNA, 20 nt, Artificial Sequence
  spacer sequence ATCN PAM
ggggcccagagccugggggc

SEQ ID NO: 1917 - RNA, 20 nt, Artificial Sequence
  spacer sequence ATCN PAM
agccgcugucagggaccaag

SEQ ID NO: 1918 - RNA, 20 nt, Artificial Sequence
  spacer sequence ATCN PAM
uggggcaacccccacccugg

SEQ ID NO: 1919 - RNA, 20 nt, Artificial Sequence
  spacer sequence ATCN PAM
gcgggggaccugggccucgg

SEQ ID NO: 1920 - RNA, 20 nt, Artificial Sequence
  spacer sequence ATCN PAM
ccguggccacugacuuugug

SEQ ID NO: 1921 - RNA, 20 nt, Artificial Sequence
  spacer sequence ATCN PAM
ggaggaagguguccaaggca

SEQ ID NO: 1922 - RNA, 20 nt, Artificial Sequence
  spacer sequence ATCN PAM
ggggaaagguguuccaggca

SEQ ID NO: 1923 - RNA, 20 nt, Artificial Sequence
  spacer sequence ATCN PAM
ccuggccguuccuccaacac

SEQ ID NO: 1924 - RNA, 20 nt, Artificial Sequence
  spacer sequence ATCN PAM
guguggcuggagcagcguga

SEQ ID NO: 1925 - RNA, 20 nt, Artificial Sequence
  spacer sequence ATCN PAM
cuccuccgcccucucccccu

SEQ ID NO: 1926 - RNA, 20 nt, Artificial Sequence
  spacer sequence ATCN PAM
ucucuccuccgcccucuccc

SEQ ID NO: 1927 - RNA, 20 nt, Artificial Sequence
  spacer sequence ATCN PAM
cuccaucaucucuccuccgc

SEQ ID NO: 1928 - RNA, 20 nt, Artificial Sequence
  spacer sequence ATCN PAM
cagccuccucccccagcagc

SEQ ID NO: 1929 - RNA, 20 nt, Artificial Sequence
  spacer sequence ATCN PAM
cagcaccuuuggaggccaag

SEQ ID NO: 1930 - RNA, 20 nt, Artificial Sequence
  spacer sequence ATCN PAM
gcccgccuuggccuccaaag

SEQ ID NO: 1931 - RNA, 20 nt, Artificial Sequence
  spacer sequence ATCN PAM
uuugaggucaggaguucaag

SEQ ID NO: 1932 - RNA, 20 nt, Artificial Sequence
  spacer sequence ATCN PAM
cagcacuuugggaggccgag

SEQ ID NO: 1933 - RNA, 20 nt, Artificial Sequence
  spacer sequence ATCN PAM
gccccccucggccucccaaa

SEQ ID NO: 1934 - RNA, 20 nt, Artificial Sequence
  spacer sequence ATCN PAM
ugaggucaggagaucgagac

SEQ ID NO: 1935 - RNA, 20 nt, Artificial Sequence
  spacer sequence ATCN PAM
ccugaccucaugaucugccc

SEQ ID NO: 1936 - RNA, 20 nt, Artificial Sequence
  spacer sequence ATCN PAM
agaccaucuuggcuaacacg

SEQ ID NO: 1937 - RNA, 20 nt, Artificial Sequence
  spacer sequence ATCN PAM
uggcuaacacggugaaaccc

SEQ ID NO: 1938 - RNA, 20 nt, Artificial Sequence
  spacer sequence ATCN PAM
cagcugcucgggagccuuag

SEQ ID NO: 1939 - RNA, 20 nt, Artificial Sequence
  spacer sequence ATCN PAM
guugaaccugggaggcagag

SEQ ID NO: 1940 - RNA, 20 nt, Artificial Sequence
  spacer sequence ATCN PAM
cugccucccagguucaaccg

SEQ ID NO: 1941 - RNA, 20 nt, Artificial Sequence
  spacer sequence ATCN PAM
cugcaaucucugccucccag

SEQ ID NO: 1942 - RNA, 20 nt, Artificial Sequence
  spacer sequence ATCN PAM
gagaucacgccacugcacuc

SEQ ID NO: 1943 - RNA, 20 nt, Artificial Sequence
  spacer sequence ATCN PAM
cagaucacugcaaucucugc

SEQ ID NO: 1944 - RNA, 20 nt, Artificial Sequence
  spacer sequence ATCN PAM
cgccacugcacuccagccug

SEQ ID NO: 1945 - RNA, 20 nt, Artificial Sequence
  spacer sequence ATCN PAM
gcccccuacaccugccccca

SEQ ID NO: 1946 - RNA, 20 nt, Artificial Sequence
  spacer sequence ATCN PAM
acaggggccccacucucaca

SEQ ID NO: 1947 - RNA, 20 nt, Artificial Sequence
  spacer sequence ATCN PAM
ccaccuggaccuugaccugg

SEQ ID NO: 1948 - RNA, 20 nt, Artificial Sequence
  spacer sequence ATCN PAM
cccgcacacccauccccacc

SEQ ID NO: 1949 - RNA, 20 nt, Artificial Sequence
  spacer sequence ATCN PAM
ccuggccccucggcccccau

SEQ ID NO: 1950 - RNA, 20 nt, Artificial Sequence
  spacer sequence ATCN PAM
ugggcagcccugccaucgcc

SEQ ID NO: 1951 - RNA, 20 nt, Artificial Sequence
  spacer sequence ATCN PAM
guccccaucgugggcagccc

SEQ ID NO: 1952 - RNA, 20 nt, Artificial Sequence
  spacer sequence ATCN PAM
ggggggugugccaggcauug

SEQ ID NO: 1953 - RNA, 20 nt, Artificial Sequence
  spacer sequence ATCN PAM
ccaggcaccucccugagacc

SEQ ID NO: 1954 - RNA, 20 nt, Artificial Sequence
  spacer sequence ATCN PAM
ccagugcucgucaucuucaa

SEQ ID NO: 1955 - RNA, 20 nt, Artificial Sequence
  spacer sequence ATCN PAM
ucaagcaggccugggggugg

SEQ ID NO: 1956 - RNA, 20 nt, Artificial Sequence
  spacer sequence ATCN PAM
uaacagcgacugguggcugc

SEQ ID NO: 1957 - RNA, 20 nt, Artificial Sequence
  spacer sequence ATCN PAM
uuccugcagaaaccacacag

SEQ ID NO: 1958 - RNA, 20 nt, Artificial Sequence
  spacer sequence ATCN PAM
gggcccuaacuccacagcca

SEQ ID NO: 1959 - RNA, 20 nt, Artificial Sequence
  spacer sequence ATCN PAM
caggaggguuccuucauucu

SEQ ID NO: 1960 - RNA, 20 nt, Artificial Sequence
  spacer sequence ATCN PAM
auuuagacucagaaugaagg

SEQ ID NO: 1961 - RNA, 20 nt, Artificial Sequence
  spacer sequence ATCN PAM
aagcucccaggacuugacgc

SEQ ID NO: 1962 - RNA, 20 nt, Artificial Sequence
  spacer sequence ATCN PAM
ugccuugcccggggucacgg

SEQ ID NO: 1963 - RNA, 20 nt, Artificial Sequence
  spacer sequence ATCN PAM
cucugggauucaccugcucc

SEQ ID NO: 1964 - RNA, 20 nt, Artificial Sequence
  spacer sequence ATCN PAM
cagagagauccugccuugcc

SEQ ID NO: 1965 - RNA, 20 nt, Artificial Sequence
  spacer sequence ATCN PAM
cagggcuuugggaggcugag

SEQ ID NO: 1966 - RNA, 20 nt, Artificial Sequence
  spacer sequence ATCN PAM
ucccaccucagccucccaaa

SEQ ID NO: 1967 - RNA, 20 nt, Artificial Sequence
  spacer sequence ATCN PAM
uuuuuggaaaugggggucuc

SEQ ID NO: 1968 - RNA, 20 nt, Artificial Sequence
  spacer sequence ATCN PAM
cagcucacugcagucaugac

SEQ ID NO: 1969 - RNA, 20 nt, Artificial Sequence
  spacer sequence ATCN PAM
ugccgcuccacuccagccug

SEQ ID NO: 1970 - RNA, 20 nt, Artificial Sequence
  spacer sequence ATCN PAM
auuuaaauaauaggcugggc

SEQ ID NO: 1971 - RNA, 20 nt, Artificial Sequence
  spacer sequence ATCN PAM
cagcacuuugggaggccaag

SEQ ID NO: 1972 - RNA, 20 nt, Artificial Sequence
  spacer sequence ATCN PAM
accugccuuggccucccaaa

SEQ ID NO: 1973 - RNA, 20 nt, Artificial Sequence
  spacer sequence ATCN PAM
ccugaggucaggaguuugag

SEQ ID NO: 1974 - RNA, 20 nt, Artificial Sequence
  spacer sequence ATCN PAM
cuagaaccgggaggugaguc

SEQ ID NO: 1975 - RNA, 20 nt, Artificial Sequence
  spacer sequence ATCN PAM
ggacucaccucccgguucua

SEQ ID NO: 1976 - RNA, 20 nt, Artificial Sequence
  spacer sequence ATCN PAM
caccacugugcuccagccgg

SEQ ID NO: 1977 - RNA, 20 nt, Artificial Sequence
  spacer sequence ATCN PAM
caaaaaaauuaaaaagaucc

SEQ ID NO: 1978 - RNA, 20 nt, Artificial Sequence
  spacer sequence ATCN PAM
uuuuaauuuuuuugagaugg

SEQ ID NO: 1979 - RNA, 20 nt, Artificial Sequence
  spacer sequence ATCN PAM
gggaacaaugaaggcuuucc

SEQ ID NO: 1980 - RNA, 20 nt, Artificial Sequence
  spacer sequence ATCN PAM
ggaaagccuucauuguuccc

SEQ ID NO: 1981 - RNA, 20 nt, Artificial Sequence
  spacer sequence ATCN PAM
gggcggacagcaggaugggc

SEQ ID NO: 1982 - RNA, 20 nt, Artificial Sequence
  spacer sequence ATCN PAM
ugcuguccgcccagaugguc

SEQ ID NO: 1983 - RNA, 20 nt, Artificial Sequence
  spacer sequence ATCN PAM
cuccauagcuccccagugcc

SEQ ID NO: 1984 - RNA, 20 nt, Artificial Sequence
  spacer sequence ATCN PAM
ccggcuccgccugccccauc

SEQ ID NO: 1985 - RNA, 20 nt, Artificial Sequence
  spacer sequence ATCN PAM
cugcuuggcucugcgcugcu

SEQ ID NO: 1986 - RNA, 20 nt, Artificial Sequence
  spacer sequence ATCN PAM
caaccgaguacauggcuggc

SEQ ID NO: 1987 - RNA, 20 nt, Artificial Sequence
  spacer sequence ATCN PAM
cuguggagaaggacaaggug

SEQ ID NO: 1988 - RNA, 20 nt, Artificial Sequence
  spacer sequence ATCN PAM
aagucuacgaggacgagacc

SEQ ID NO: 1989 - RNA, 20 nt, Artificial Sequence
  spacer sequence ATCN PAM
ggaccccgauucgaugugaa

SEQ ID NO: 1990 - RNA, 20 nt, Artificial Sequence
  spacer sequence ATCN PAM
ggguccugauuccggggcag

SEQ ID NO: 1991 - RNA, 20 nt, Artificial Sequence
  spacer sequence ATCN PAM
aaucgggguccugauuccgg

SEQ ID NO: 1992 - RNA, 20 nt, Artificial Sequence
  spacer sequence ATCN PAM
gcuucacaucgaaucggggu

SEQ ID NO: 1993 - RNA, 20 nt, Artificial Sequence
  spacer sequence ATCN PAM
uucauccacuccagaaagcu

SEQ ID NO: 1994 - RNA, 20 nt, Artificial Sequence
  spacer sequence ATCN PAM
acuccagaaagcugccugaa

SEQ ID NO: 1995 - RNA, 20 nt, Artificial Sequence
  spacer sequence ATCN PAM
ggagguagauucagcuucug

SEQ ID NO: 1996 - RNA, 20 nt, Artificial Sequence
  spacer sequence ATCN PAM
accuccggauuucccuccag

SEQ ID NO: 1997 - RNA, 20 nt, Artificial Sequence
  spacer sequence ATCN PAM
ggagcuccuaaauaauucgu

SEQ ID NO: 1998 - RNA, 20 nt, Artificial Sequence
  spacer sequence ATCN PAM
uccucccucggccucccaaa

SEQ ID NO: 1999 - RNA, 20 nt, Artificial Sequence
  spacer sequence ATCN PAM
cuugagcccagaaguuugag

SEQ ID NO: 2000 - RNA, 20 nt, Artificial Sequence
  spacer sequence ATCN PAM
cagccucccaaguagcuggg

SEQ ID NO: 2001 - RNA, 20 nt, Artificial Sequence
  spacer sequence ATCN PAM
ucccaucucagccucccaag

SEQ ID NO: 2002 - RNA, 20 nt, Artificial Sequence
  spacer sequence ATCN PAM
cuugggcccaggagguugag

SEQ ID NO: 2003 - RNA, 20 nt, Artificial Sequence
  spacer sequence ATCN PAM
cggcucacuacagccucaac

SEQ ID NO: 2004 - RNA, 20 nt, Artificial Sequence
  spacer sequence ATCN PAM
caccacugcacuccaaccug

SEQ ID NO: 2005 - RNA, 20 nt, Artificial Sequence
  spacer sequence ATCN PAM
agggggcugugagaagucuc

SEQ ID NO: 2006 - RNA, 20 nt, Artificial Sequence
  spacer sequence ATCN PAM
ucacccugugagacuucuca

SEQ ID NO: 2007 - RNA, 20 nt, Artificial Sequence
  spacer sequence ATCN PAM
gagacacgcagugcauggga

SEQ ID NO: 2008 - RNA, 20 nt, Artificial Sequence
  spacer sequence ATCN PAM
uaccucagggccuuugcagg

SEQ ID NO: 2009 - RNA, 20 nt, Artificial Sequence
  spacer sequence ATCN PAM
cccacagccuguuugccucu

SEQ ID NO: 2010 - RNA, 20 nt, Artificial Sequence
  spacer sequence ATCN PAM
cugcacugcgggccgggcga

SEQ ID NO: 2011 - RNA, 20 nt, Artificial Sequence
  spacer sequence ATCN PAM
cagcucacugcagccuccag

SEQ ID NO: 2012 - RNA, 20 nt, Artificial Sequence
  spacer sequence ATCN PAM
ccugagcccaggagcuggag

SEQ ID NO: 2013 - RNA, 20 nt, Artificial Sequence
  spacer sequence ATCN PAM
uccugccucggccucccgaa

SEQ ID NO: 2014 - RNA, 20 nt, Artificial Sequence
  spacer sequence ATCN PAM
cauaaaagaaaaagaggccg

SEQ ID NO: 2015 - RNA, 20 nt, Artificial Sequence
  spacer sequence ATCN PAM
gggcccgggacauugaggcu

SEQ ID NO: 2016 - RNA, 20 nt, Artificial Sequence
  spacer sequence ATCN PAM
uagcucauugcagccucaau

SEQ ID NO: 2017 - RNA, 20 nt, Artificial Sequence
  spacer sequence ATCN PAM
ccaucagcugucacuuccug

SEQ ID NO: 2018 - RNA, 20 nt, Artificial Sequence
  spacer sequence ATCN PAM
gcugucacuuccuguccccu

SEQ ID NO: 2019 - RNA, 20 nt, Artificial Sequence
  spacer sequence ATCN PAM
ccuccccagcucuggcaccc

SEQ ID NO: 2020 - RNA, 20 nt, Artificial Sequence
  spacer sequence ATCN PAM
ccuccugucucucuggauug

SEQ ID NO: 2021 - RNA, 20 nt, Artificial Sequence
  spacer sequence ATCN PAM
agagagacaggaggggaugc

SEQ ID NO: 2022 - RNA, 20 nt, Artificial Sequence
  spacer sequence ATCN PAM
cauuucuaugaaauguccag

SEQ ID NO: 2023 - RNA, 20 nt, Artificial Sequence
  spacer sequence ATCN PAM
cacggccgggugcgguggcu

SEQ ID NO: 2024 - RNA, 20 nt, Artificial Sequence
  spacer sequence ATCN PAM
cggcacuuugggaggccgag

SEQ ID NO: 2025 - RNA, 20 nt, Artificial Sequence
  spacer sequence ATCN PAM
acccgccucggccucccaaa

SEQ ID NO: 2026 - RNA, 20 nt, Artificial Sequence
  spacer sequence ATCN PAM
ccugaggucaggaguucgag

SEQ ID NO: 2027 - RNA, 20 nt, Artificial Sequence
  spacer sequence ATCN PAM
cagauacuuuggaggcugaa

SEQ ID NO: 2028 - RNA, 20 nt, Artificial Sequence
  spacer sequence ATCN PAM
gggauuacaggcguccgcca

SEQ ID NO: 2029 - RNA, 20 nt, Artificial Sequence
  spacer sequence ATCN PAM
cuugaacccaggaggcggag

SEQ ID NO: 2030 - RNA, 20 nt, Artificial Sequence
  spacer sequence ATCN PAM
cggcucacugcaaccuccgc

SEQ ID NO: 2031 - RNA, 20 nt, Artificial Sequence
  spacer sequence ATCN PAM
cgccacugcucuccagccug

SEQ ID NO: 2032 - RNA, 20 nt, Artificial Sequence
  spacer sequence ATCN PAM
gcacuguggccugggucgga

SEQ ID NO: 2033 - RNA, 20 nt, Artificial Sequence
  spacer sequence ATCN PAM
cuucuuccaucuguagacag

SEQ ID NO: 2034 - RNA, 20 nt, Artificial Sequence
  spacer sequence ATCN PAM
guagacaguugggcuguuuc

SEQ ID NO: 2035 - RNA, 20 nt, Artificial Sequence
  spacer sequence ATCN PAM
acgaccugugggaacgggac

SEQ ID NO: 2036 - RNA, 20 nt, Artificial Sequence
  spacer sequence ATCN PAM
aaaccacagggagaccccac

SEQ ID NO: 2037 - RNA, 20 nt, Artificial Sequence
  spacer sequence ATCN PAM
ggggcaccgcagaggccaag

SEQ ID NO: 2038 - RNA, 20 nt, Artificial Sequence
  spacer sequence ATCN PAM
cagcucuagcucuccccagc

SEQ ID NO: 2039 - RNA, 20 nt, Artificial Sequence
  spacer sequence ATCN PAM
ggaagacgaggcauggggac

SEQ ID NO: 2040 - RNA, 20 nt, Artificial Sequence
  spacer sequence ATCN PAM
cuccacccuccucagccuca

SEQ ID NO: 2041 - RNA, 20 nt, Artificial Sequence
  spacer sequence ATCN PAM
ccagggaccaggugaggcug

SEQ ID NO: 2042 - RNA, 20 nt, Artificial Sequence
  spacer sequence ATCN PAM
ccugcccguugcuaagcaac

SEQ ID NO: 2043 - RNA, 20 nt, Artificial Sequence
  spacer sequence ATCN PAM
guuuccauggcagccgaggg

SEQ ID NO: 2044 - RNA, 20 nt, Artificial Sequence
  spacer sequence ATCN PAM
ggcggaacugaacucagugu

SEQ ID NO: 2045 - RNA, 20 nt, Artificial Sequence
  spacer sequence ATCN PAM
agacacaccccacccucugg

SEQ ID NO: 2046 - RNA, 20 nt, Artificial Sequence
  spacer sequence ATCN PAM
caaugacuuugggcuggagg

SEQ ID NO: 2047 - RNA, 20 nt, Artificial Sequence
  spacer sequence ATCN PAM
aacaccagcccuagcucaca

SEQ ID NO: 2048 - RNA, 20 nt, Artificial Sequence
  spacer sequence ATCN PAM
uagcagggagccguggggug

SEQ ID NO: 2049 - RNA, 20 nt, Artificial Sequence
  spacer sequence ATCN PAM
gguccuuggagaguccaaca

SEQ ID NO: 2050 - RNA, 20 nt, Artificial Sequence
  spacer sequence ATCN PAM
gugugucucugacuugacau

SEQ ID NO: 2051 - RNA, 20 nt, Artificial Sequence
  spacer sequence ATCN PAM
ugcuaaauguguuucucaag

SEQ ID NO: 2052 - RNA, 20 nt, Artificial Sequence
  spacer sequence ATCN PAM
aucuugcuaaauguguuucu

SEQ ID NO: 2053 - RNA, 20 nt, Artificial Sequence
  spacer sequence ATCN PAM
ucugcucuguguuccucucc

SEQ ID NO: 2054 - RNA, 20 nt, Artificial Sequence
  spacer sequence ATCN PAM
aucaaacuaggaauuaaaaa

SEQ ID NO: 2055 - RNA, 20 nt, Artificial Sequence
  spacer sequence ATCN PAM
aacuaggaauuaaaaacuau

SEQ ID NO: 2056 - RNA, 20 nt, Artificial Sequence
  spacer sequence ATCN PAM
cagcacuuugggaggcugag

SEQ ID NO: 2057 - RNA, 20 nt, Artificial Sequence
  spacer sequence ATCN PAM
uccugccucagccucccaaa

SEQ ID NO: 2058 - RNA, 20 nt, Artificial Sequence
  spacer sequence ATCN PAM
cgaggucaggagaucgagac

SEQ ID NO: 2059 - RNA, 20 nt, Artificial Sequence
  spacer sequence ATCN PAM
ccugaccucgugauccuccu

SEQ ID NO: 2060 - RNA, 20 nt, Artificial Sequence
  spacer sequence ATCN PAM
agaccagccuggcuaacaag

SEQ ID NO: 2061 - RNA, 20 nt, Artificial Sequence
  spacer sequence ATCN PAM
gccaccacgcccagcuaauu

SEQ ID NO: 2062 - RNA, 20 nt, Artificial Sequence
  spacer sequence ATCN PAM
cuugaacccgggagguggag

SEQ ID NO: 2063 - RNA, 20 nt, Artificial Sequence
  spacer sequence ATCN PAM
cguucucggcggugccgucc

SEQ ID NO: 2064 - RNA, 20 nt, Artificial Sequence
  spacer sequence ATCN PAM
acccccugagcuccuccgag

SEQ ID NO: 2065 - RNA, 20 nt, Artificial Sequence
  spacer sequence ATCN PAM
acaaagcggacgaggucacg

SEQ ID NO: 2066 - RNA, 20 nt, Artificial Sequence
  spacer sequence ATCN PAM
cccgccgggagggcgugguc

SEQ ID NO: 2067 - RNA, 20 nt, Artificial Sequence
  spacer sequence ATCN PAM
ccggugugcaggcacagcca

SEQ ID NO: 2068 - RNA, 20 nt, Artificial Sequence
  spacer sequence ATCN PAM
ccggcgggccggacguggcc

SEQ ID NO: 2069 - RNA, 20 nt, Artificial Sequence
  spacer sequence ATCN PAM
agcccggccaggagcccccg

SEQ ID NO: 2070 - RNA, 20 nt, Artificial Sequence
  spacer sequence ATCN PAM
uugugaccgggggcuccugg

SEQ ID NO: 2071 - RNA, 20 nt, Artificial Sequence
  spacer sequence ATCN PAM
ucauggguuaccagaacgug

SEQ ID NO: 2072 - RNA, 20 nt, Artificial Sequence
  spacer sequence ATCN PAM
uccacguucugguaacccau

SEQ ID NO: 2073 - RNA, 20 nt, Artificial Sequence
  spacer sequence ATCN PAM
ugaaggcccagcaccuucuu

SEQ ID NO: 2074 - RNA, 20 nt, Artificial Sequence
  spacer sequence ATCN PAM
cggcggagcugguggucauc

SEQ ID NO: 2075 - RNA, 20 nt, Artificial Sequence
  spacer sequence ATCN PAM
aagacgcggcugagcccaag

SEQ ID NO: 2076 - RNA, 20 nt, Artificial Sequence
  spacer sequence ATCN PAM
ggcggggcccgaggccacca

SEQ ID NO: 2077 - RNA, 20 nt, Artificial Sequence
  spacer sequence ATCN PAM
ugugagccggcccccgagac

SEQ ID NO: 2078 - RNA, 20 nt, Artificial Sequence
  spacer sequence ATCN PAM
caggcaguuggggugaggcc

SEQ ID NO: 2079 - RNA, 20 nt, Artificial Sequence
  spacer sequence ATCN PAM
ucuagacggggcgaaccagg

SEQ ID NO: 2080 - RNA, 20 nt, Artificial Sequence
  spacer sequence ATCN PAM
ugcuuggaccaggguccugg

SEQ ID NO: 2081 - RNA, 20 nt, Artificial Sequence
  spacer sequence ATCN PAM
cgggguaugguugggaagac

SEQ ID NO: 2082 - RNA, 20 nt, Artificial Sequence
  spacer sequence ATCN PAM
ggccccaccugccagcucua

SEQ ID NO: 2083 - RNA, 20 nt, Artificial Sequence
  spacer sequence ATCN PAM
gagguggccccuguaccugc

SEQ ID NO: 2084 - RNA, 20 nt, Artificial Sequence
  spacer sequence ATCN PAM
ggggccucgucacacaccag

SEQ ID NO: 2085 - RNA, 20 nt, Artificial Sequence
  spacer sequence ATCN PAM
agaacaucgggggccucguc

SEQ ID NO: 2086 - RNA, 20 nt, Artificial Sequence
  spacer sequence ATCN PAM
ccacugugcagguaaggccu

SEQ ID NO: 2087 - RNA, 20 nt, Artificial Sequence
  spacer sequence ATCN PAM
cccaggggcugugagcccag

SEQ ID NO: 2088 - RNA, 20 nt, Artificial Sequence
  spacer sequence ATCN PAM
guaaaauaagccuucguggc

SEQ ID NO: 2089 - RNA, 20 nt, Artificial Sequence
  spacer sequence ATCN PAM
uaguacuuugggaggccgag

SEQ ID NO: 2090 - RNA, 20 nt, Artificial Sequence
  spacer sequence ATCN PAM
gcccaccucggccucccaaa

SEQ ID NO: 2091 - RNA, 20 nt, Artificial Sequence
  spacer sequence ATCN PAM
caaggucaagagaucgauac

SEQ ID NO: 2092 - RNA, 20 nt, Artificial Sequence
  spacer sequence ATCN PAM
cuugaccuugugauccgccc

SEQ ID NO: 2093 - RNA, 20 nt, Artificial Sequence
  spacer sequence ATCN PAM
auaccauccuggccaacaua

SEQ ID NO: 2094 - RNA, 20 nt, Artificial Sequence
  spacer sequence ATCN PAM
aucucuugaccuugugaucc

SEQ ID NO: 2095 - RNA, 20 nt, Artificial Sequence
  spacer sequence ATCN PAM
uggccaacauacugaaaccc

SEQ ID NO: 2096 - RNA, 20 nt, Artificial Sequence
  spacer sequence ATCN PAM
uagcuauucaggaggcugag

SEQ ID NO: 2097 - RNA, 20 nt, Artificial Sequence
  spacer sequence ATCN PAM
cuugaaccugggaggcggag

SEQ ID NO: 2098 - RNA, 20 nt, Artificial Sequence
  spacer sequence ATCN PAM
cagcucacugcagccuccgc

SEQ ID NO: 2099 - RNA, 20 nt, Artificial Sequence
  spacer sequence ATCN PAM
ugccacugcacuccaaccug

SEQ ID NO: 2100 - RNA, 20 nt, Artificial Sequence
  spacer sequence ATCN PAM
cccaugagcugggggcacug

SEQ ID NO: 2101 - RNA, 108 nt, Artificial Sequence
  gNA Variant Scaffold
uacuggcgcuuuuaucucauuacuuugagagccaucaccagcgacuaugucguauggguaaagcgcaggugggacgaccucucggucguccuaucugaagcaucaaag

SEQ ID NO: 2102 - RNA, 99 nt, Artificial Sequence
  gNA Variant Scaffold
uacuggcgcuuuuaucucauuacuuugagagccaucaccagcgacuaugucguauggguaaagcgcugcucgacgcguccucgagcagaagcaucaaag

SEQ ID NO: 2103 - RNA, 97 nt, Artificial Sequence
  gNA Variant Scaffold
uacuggcgcuuuuaucucauuacuuugagagccaucaccagcgacuaugucguauggguaaagcgcugcucgcuccguucgagcagaagcaucaaag

SEQ ID NO: 2104 - RNA, 91 nt, Artificial Sequence
  gNA Variant Scaffold
guacuggcgcuuuuaucucauuacuuugagagccaucaccagcgacuaugucguauggguaaagcgcccucuucggagggaagcaucaaag

SEQ ID NO: 2105 - RNA, 99 nt, Artificial Sequence
  gNA Variant Scaffold
uacuggcgcuuuuaucucauuacuuugagagccaucaccagcgacuaugucguauggguaaagcgcaggaguuucuauggaaacccugaagcaucaaag

SEQ ID NO: 2106 - RNA, 99 nt, Artificial Sequence
  gNA Variant Scaffold
guacuggcgccuuuaucucauuacuuugagagccaucaccagcgacuaugucguauggguaaagcgcuuacggacuucgguccguaagaagcaucaaag

SEQ ID NO: 2107 - RNA, 90 nt, Artificial Sequence
  gNA Variant Scaffold
uacuggcgcuuuuaucucauuacuuugagagccaucaccagcgacuaugucguauggguaaagcgcugcgcuugcgcagaagcaucaaag

SEQ ID NO: 2108 - RNA, 108 nt, Artificial Sequence
  gNA Variant Scaffold
uacuggcgcuuuuaucugauuacuuugagagccaucaccagcgacuaugucguauggguaaagcgcuuauuuaucggagagaaauccgauaaauaagaagcaucaaag

SEQ ID NO: 2109 - RNA, 108 nt, Artificial Sequence
  gNA Variant Scaffold
uacuggcgcuuuuaucgcauuacuuugagagccaucaccagcgacuaugucguauggguaaagcgcuuauuuaucggagagaaauccgauaaauaagaagcaucaaag

SEQ ID NO: 2110 - RNA, 110 nt, Artificial Sequence
  gNA Variant Scaffold
uacuggcgcuuuuaucucauuacuuugagagccaucaccagcgacuaugucguauggguaaagcgcuuauuuaucggagacuucgguccgauaaauaagaagcaucaaag

SEQ ID NO: 2111 - RNA, 97 nt, Artificial Sequence
  gNA Variant Scaffold
uacuggcgcuuuuaucucauuacuuugagagccaucaccagcgacuaugucguauggguaaagcgcacaugaggauuacccaugugaagcaucaaag

SEQ ID NO: 2112 - RNA, 106 nt, Artificial Sequence
  gNA Variant Scaffold
gcuggcgcuuuuaucucauuacuuugagagccaucaccagcgacuaugucguauggguaaagcgcuuauuuaucgugagaaauccgauaaauaagaagcaucaaag

SEQ ID NO: 2113 - RNA, 96 nt, Artificial Sequence
  gNA Variant Scaffold
uacuggcgcuuuuaucucauuacuuugagagccaucaccagcgacuaugucguauggguaaagcgcugcaugucuaagacagcagaagcaucaaag

SEQ ID NO: 2114 - RNA, 90 nt, Artificial Sequence
  gNA Variant Scaffold
uacuggcgcuuuuaucucauuacuuugagagccaucaccagcgacuaugucguauggguaaagcgcagggcuucggccgaagcaucaaag

SEQ ID NO: 2115 - RNA, 98 nt, Artificial Sequence
  gNA Variant Scaffold
uacuggcgcuuuuaucucauuacuuugagagccaucaccagcgacuaugucguauggguaaagcgcaauccauugcacuccggauugaagcaucaaag

SEQ ID NO: 2116 - RNA, 108 nt, Artificial Sequence
  gNA Variant Scaffold
uacuggcgcuuuucucgcauuacuuugagagccaucaccagcgacuaugucguauggguaaagcgcuuauuuaucggagagaaauccgauaaauaagaagcaucaaag

SEQ ID NO: 2117 - RNA, 108 nt, Artificial Sequence
  gNA Variant Scaffold
uacuggcgcuuuuaucucauuacuuugagagccaucaccagcgacuaugucguauggguaaagcgcuuauuuaucggacuucgguccgauaaauaagaagcaucaaag

SEQ ID NO: 2118 - RNA, 100 nt, Artificial Sequence
  gNA Variant Scaffold
uacuggcgcuuuuaucucauuacuuugagagccaucaccagcgacuaugucguauggguaaagcgcugcucguuugcggcuacgagcagaagcaucaaag

SEQ ID NO: 2119 - RNA, 100 nt, Artificial Sequence
  gNA Variant Scaffold
uacuggcgcuuuuaucucauuacuuugagagccaucaccagcgacuaugucguauggguaaagcgcuuauuuaucgagagauaaauaagaagcaucaaag

SEQ ID NO: 2120 - RNA, 107 nt, Artificial Sequence
  gNA Variant Scaffold
uacggcgcuuuuaucucauuacuuugagagccaucaccagcgacuaugucguauggguaaagcgcuuauuuaucggagagaaauccgauaaauaagaagcaucaaag

SEQ ID NO: 2121 - RNA, 99 nt, Artificial Sequence
  gNA Variant Scaffold
uacuggcgccuuuuaucucauuacuuugagagccaucaccagcgacuaugucguauggguaaagcgcuuacggacuucgguccguaagaagcaucaaag

SEQ ID NO: 2122 - RNA, 108 nt, Artificial Sequence
  gNA Variant Scaffold
uacuggcgcuuuuaucucauuacuuugagagccaucaccagcgacuaugucguaucgguaaagcgcuuauuuaucggagagaaauccgauaaauaagaagcaucaaag

SEQ ID NO: 2123 - RNA, 108 nt, Artificial Sequence
  gNA Variant Scaffold
uacuggcgccuuuaucucauuacuuugagagccaucaccagcgacuaugucguauggguaaagcgcuuauuuaucggacuucgguccgauaaauaagaagcaucaaag

SEQ ID NO: 2124 - RNA, 105 nt, Artificial Sequence
  gNA Variant Scaffold
uacuggcgcuuuuaucucauuacuuugagagccaucaccagcgacuaugucguauggguaaagcgcuuauuuaucgagaaauccgauaaauaagaagcaucaaag

SEQ ID NO: 2125 - RNA, 103 nt, Artificial Sequence
  gNA Variant Scaffold
gcgcuuuuaucucauuacuuugagagccaucaccagcgacuaugucguauggguaaagcgcuuauuuaucggagagaaauccgauaaauaagaagcaucaaag

SEQ ID NO: 2126 - RNA, 103 nt, Artificial Sequence
  gNA Variant Scaffold
uacuggcgcuuuuaucucauuacuuugagagccaucaccagcgacuaugucguauggguaaagcgcuuauuuaucggagagagauaaauaagaagcaucaaag

SEQ ID NO: 2127 - RNA, 108 nt, Artificial Sequence
  gNA Variant Scaffold
uacuggcgcuuuuaucucauuacuuuggagagccaucaccagcgacuaugucguauggguaaagcgcuuauuuaucggagaguauccgauaaauaagaagcaucaaag

SEQ ID NO: 2128 - RNA, 109 nt, Artificial Sequence
  gNA Variant Scaffold
uacuggcgcuuuuaucucauuacuuugagagccaucaccagcgacuauguucguauggguaaagcgcuuauuuaucggagagaaauccgauaaauaagaagcaucaaag

SEQ ID NO: 2129 - RNA, 105 nt, Artificial Sequence
  gNA Variant Scaffold
agcgcuuuuaucucauuacuuugagagccaucaccagcgacuaugucguauggguaaagcgcuuauuuaucggagagaaaugccgauaaauaagaagcaucaaag

SEQ ID NO: 2130 - RNA, 109 nt, Artificial Sequence
  gNA Variant Scaffold
uacuggcgcuuuuaucucauuacuuugagagccaucaccagcgacuaugucguauggguaaagcgcuuauuuaucggagagaaauccgauaaaauaagaagcaucaaag

SEQ ID NO: 2131 - RNA, 109 nt, Artificial Sequence
  gNA Variant Scaffold
uacuggcgcuuuuaucucauuacuuugagagccaucaccagcgacuaugucguauggguaaagcgcuuauuguaucggagagaaauccgauaaauaagaagcaucaaag

SEQ ID NO: 2132 - RNA, 102 nt, Artificial Sequence
  gNA Variant Scaffold
gcgcuuuuaucucauuacuuugagagccaucaccagcgacuaugucguauggguaaagcgcuuauuuaucggacuucgguccgauaaauaagcgcaucaaag

SEQ ID NO: 2133 - RNA, 108 nt, Artificial Sequence
  gNA Variant Scaffold
uacuggcgcuuuucucucauuacuuugagagccaucaccagcgacuaugucguauggguaaagcgcuuauuuaucggagagaaauccgauaaauaagaagcaucaaag

SEQ ID NO: 2134 - RNA, 106 nt, Artificial Sequence
  gNA Variant Scaffold
guggcgcuuuuaucucauuacuuugagagccaucaccagcgacuaugucguauggguaaagcgcuuauuuaucggagagaaauccgauaaauaagaagcaucaaag

SEQ ID NO: 2135 - RNA, 110 nt, Artificial Sequence
  gNA Variant Scaffold
uacuggcgcuuuuaucucauuacuuugagagccaucaccagcgaccuuaugucguauggguaaagcgcuuauuuaucggagagaaauccgauaaauaagaagcaucaaag

SEQ ID NO: 2136 - RNA, 107 nt, Artificial Sequence
  gNA Variant Scaffold
gauggcgcuuuuaucucauuacuuugagagccaucaccagcgacuaugucguauggguaaagcgcuuauuuaucggacuucgguccgauaaauaagaagcaucaaag

SEQ ID NO: 2137 - RNA, 106 nt, Artificial Sequence
  gNA Variant Scaffold
uacuggcgcuuuuaucucauuacuuugagagccaucaccagcgacuaugucguauggguaaagcgcuuauuuaucggagagaaauccgauaaaagaagcaucaaag

SEQ ID NO: 2138 - RNA, 109 nt, Artificial Sequence
  gNA Variant Scaffold
uacuggcgcuuuuaucucauuacuuugagagccaucaccagcgaucuaugucguauggguaaagcgcuuauuuaucggagagaaauccgauaaauaagaagcaucaaag

SEQ ID NO: 2139 - RNA, 106 nt, Artificial Sequence
  gNA Variant Scaffold
uacuggcgcuuuuaucucauuacuuugagagccaucaccagcgacuaugucguauggguaaaggcuuauuuaucggagagaaauccgauaaaaagaagcaucaaag

SEQ ID NO: 2140 - RNA, 107 nt, Artificial Sequence
  gNA Variant Scaffold
uacuggcgcuuuuaucucauuacuuugagagccaucaccagcgacuaugucguauggguaaagcgcuuauuuaucggagagaaauccgauaaaaagaagcaucaaag

SEQ ID NO: 2141 - RNA, 107 nt, Artificial Sequence
  gNA Variant Scaffold
uacuggcgcuuuaucucauuacuuugagagccaucaccagcgacuaugucguauggguaaagcgcuuauuuaucggacuucgguccgauaaauaagaagcaucaaag

SEQ ID NO: 2142 - RNA, 98 nt, Artificial Sequence
  gNA Variant Scaffold
cggcgcuuuucucgcauuacuuugagagccaucaccagcgacuaugucguauggguaaagcgcuuauuguaucgagagauaaauaagaagcaucaaag

SEQ ID NO: 2143 - RNA, 107 nt, Artificial Sequence
  gNA Variant Scaffold
cacuggcgcuuuuaucucauuacuuugagagccaucaccagcgacuaugucguauggguaaagcgcuuauuuucggagagaaauccgauaaauaagaagcaucaaag

SEQ ID NO: 2144 - RNA, 106 nt, Artificial Sequence
  gNA Variant Scaffold
uacuggcgcuuuaucucauuacuuugagagccaucaccagcgacuucggucguauggguaaagcgcuuauguaucggcuucggccgauacauaagaagcaucaaag

SEQ ID NO: 2145 - RNA, 107 nt, Artificial Sequence
  gNA Variant Scaffold
uacuggcgcuuuuaucucauuacuuugagagccaucaccagcgacuucggucguauggguaaagcgcuuauguaucggcuucggccgauacauaagaagcaucaaag

SEQ ID NO: 2146 - RNA, 109 nt, Artificial Sequence
  gNA Variant Scaffold
uacuggcgcuuuuaucucauuacuuugagagccaucaccagcgacuaugucguaugggugaaagcgcuuauuuaucggagagaaauccgauaaauaagaagcaucaaag

SEQ ID NO: 2147 - RNA, 64 nt, Artificial Sequence
  gNA Variant Scaffold
uacuggcgcuuuuaucucauuacuuugagagccaucaccagcgacuucggucguauggguaaag

SEQ ID NO: 2148 - RNA, 62 nt, Artificial Sequence
  gNA Variant Scaffold
gaugggcuuuuaucucauuacuuugagagccaucaccagcgacuucggucguauggguaaag

SEQ ID NO: 2149 - RNA, 105 nt, Artificial Sequence
  gNA Variant Scaffold
gaugggcuuuuaucucauuacuuugagagccaucaccagcgacuucggucguauggguaaagcgcuuauuuaucggcuucggccgauaaauaagaagcaucaaag

SEQ ID NO: 2150 - RNA, 156 nt, Artificial Sequence
  gNA Variant Scaffold
uacuggcgcuuuuaucucauuacuuugagagccaucaccagcgacuaugucguauggguaaagcgcuacacugggaucgcugaauuagagaucggcguccuuucauucuauauacuuuggaguuuuaaaaugucucuaaguacagaagcaucaaag

SEQ ID NO: 2151 - RNA, 103 nt, Artificial Sequence
  gNA Variant Scaffold
ggcgcuuuuaucucauuacuuugagagccaucaccagcgacuucggucguauggguaaagcgcuuauuuaucggcuucggccgauaaauaagaagcaucaaag

SEQ ID NO: 2152 - RNA, 106 nt, Artificial Sequence
  gNA Variant Scaffold
gcuggcgcuuuuaucucauuacuuugagagccaucaccagcgacuucggucguauggguaaagcgcuuauuuaucggcuucggccgauaaauaagaagcaucaaag

SEQ ID NO: 2153 - RNA, 109 nt, Artificial Sequence
  gNA Variant Scaffold
uacuggcgcuuuuaucucauuacuuugagagccaucaccagcgacuucggucguauggguaaagcgcuuauuuaucggagagaaauccgauaaauaagaagcaucaaag

SEQ ID NO: 2154 - RNA, 112 nt, Artificial Sequence
  gNA Variant Scaffold
uacuggcgcuuuuaucucauuacuuugagagccaugcuccaccagcgacuaugucguauggguaaagcgcuuauuuaucggagagaaauccgauaaauaagaagcaucaaag

SEQ ID NO: 2155 - RNA, 97 nt, Artificial Sequence
  gNA Variant Scaffold
uacuggcgcuuuuaucucauuacuuugagagccaucaccagcgacuaugucguauggguaaagcgggguuaggguuaggguuagggaagcaucaaag

SEQ ID NO: 2156 - RNA, 96 nt, Artificial Sequence
  gNA Variant Scaffold
uacuggcgcuuuuaucucauuacuuugagagccaucaccagcgacuaugucguauggguaaagcggagggagggagggagagggaaagcaucaaag

SEQ ID NO: 2157 - RNA, 101 nt, Artificial Sequence
  gNA Variant Scaffold
uacuggcgcuuuuaucucauuacuuugagagccaucaccagcgacuaugucguauggguaaagcguuggguuaggguuaggguuagggaaaagcaucaaag

SEQ ID NO: 2158 - RNA, 91 nt, Artificial Sequence
  gNA Variant Scaffold
uacuggcgcuuuuaucucauuacuuugagagccaucaccagcgacuaugucguauggguaaagcgcagggcuucggccggaagcaucaaag

SEQ ID NO: 2159 - RNA, 103 nt, Artificial Sequence
  gNA Variant Scaffold
uacuggcgcuuuuaucucauuacuuugagagccaucaccagcgacuaugucguauggguaaagcgccugcucaguacgagaggaaccgcaggaagcaucaaag

SEQ ID NO: 2160 - RNA, 90 nt, Artificial Sequence
  gNA Variant Scaffold
uacuggcgcuuuuaucugauuacuuugagagccaucaccagcgacuaugucguauggguaaagcgcccucuucggagggaagcaucaaag

SEQ ID NO: 2161 - RNA, 98 nt, Artificial Sequence
  gNA Variant Scaffold
uacuggcgccuuuaucugauuacuuugagagccaucaccagcgacuaugucguauggguaaagcgcuuacggacuucgguccguaagaagcaucaaag

SEQ ID NO: 2162 - RNA, 98 nt, Artificial Sequence
  gNA Variant Scaffold
uacuggcgcuuuuaucugauuacuuugagagccaucaccagcgacuaugucguauggguaaagcgcggacgaccucucggucguccgaagcaucaaag

SEQ ID NO: 2163 - RNA, 108 nt, Artificial Sequence
  gNA Variant Scaffold
uacuggcgcuuuuaucugauuacuuugagagccaucaccagcgacuaugucguauggguaaagcgcaggugggacgaccucucggucguccuaucugaagcaucaaag

SEQ ID NO: 2164 - RNA, 99 nt, Artificial Sequence
  gNA Variant Scaffold
uacuggcgccuuuaucugcauuacuuugagagccaucaccagcgacuaugucguauggguaaagcgcuuacggacuucgguccguaagaagcaucaaag

SEQ ID NO: 2165 - RNA, 97 nt, Artificial Sequence
  gNA Variant Scaffold
gcuggcgcuuuuaucugauuacuuugagagccaucaccagcgacuaugucguauggguaaagcgcuuacggacuucgguccguaagaagcaucaaag

SEQ ID NO: 2166 - RNA, 108 nt, Artificial Sequence
  gNA Variant Scaffold
uacuggcgccuuuaucugauuacuuugagagccaucaccagcgacuaugucguauggguaaagcgcaggugggacgaccucucggucguccuaucugaagcaucaaag

SEQ ID NO: 2167 - RNA, 98 nt, Artificial Sequence
  gNA Variant Scaffold
uacuggcgccuuuaucugauuacuuugagagccaucaccagcgacuaugucguauggguaaagcgcggacgaccucucggucguccgaagcaucaaag

SEQ ID NO: 2168 - RNA, 90 nt, Artificial Sequence
  gNA Variant Scaffold
uacuggcgccuuuaucucauuacuuugagagccaucaccagcgacuaugucguauggguaaagcgcccucuucggagggaagcaucaaag

SEQ ID NO: 2169 - RNA, 98 nt, Artificial Sequence
  gNA Variant Scaffold
uacuggcgcuuuuaucucauuacuuugagagccaucaccagcgacuaugucguauggguaaagcgcuuacggacuucgguccguaagaagcaucaaag

SEQ ID NO: 2170 - RNA, 99 nt, Artificial Sequence
  gNA Variant Scaffold
uacuggcgccuuuaucaucauuacuuugagagccaucaccagcgacuaugucguauggguaaagcgcuuacggacuucgguccguaagaagcaucaaag

SEQ ID NO: 2171 - RNA, 194 nt, Artificial Sequence
  gNA Variant Scaffold
uacuggcgcuuuuaucucauuacuuugagagccaucaccagcgacuaugucguauggguaaagcgcuuauuuaucggagagaaauccgauaaauaagaagcaucaaagggccggcauggucccagccuccucgcuggcgccggcugggcaacauuccgaggggaccguccccucgguaauggcgaaugggaccc

SEQ ID NO: 2172 - RNA, 108 nt, Artificial Sequence
  gNA Variant Scaffold
uacuggcgccuuuaucucauuacuuugagagccaucaccagcgacuaugucguauggguaaagcgcaggugggacgaccucucggucguccuaucugaagcaucaaag

SEQ ID NO: 2173 - RNA, 106 nt, Artificial Sequence
  gNA Variant Scaffold
uacuggcgcuuuuaucucauuacuuugagagccaucaccagcgacuaugucguauggguaaagcgcuuauuuaucggagaaauccgauaaauaagaagcaucaaag

SEQ ID NO: 2174 - RNA, 98 nt, Artificial Sequence
  gNA Variant Scaffold
uacuggcgccuuuaucucauuacuuugagagccaucaccagcgacuaugucguauggguaaagcgcggacgaccucucggucguccgaagcaucaaag

SEQ ID NO: 2175 - RNA, 92 nt, Artificial Sequence
  gNA Variant Scaffold
uacuggcgcuuuuaucucauuacuuugagagccaucaccagcgacuaugucguauggguaaagcgccggacuucgguccggaagcaucaaag

SEQ ID NO: 2176 - RNA, 108 nt, Artificial Sequence
  gNA Variant Scaffold
uacuggcgcuuuuaucggauuacuuugagagccaucaccagcgacuaugucguauggguaaagcgcuuauuuaucggagagaaauccgauaaauaagaagcaucaaag

SEQ ID NO: 2177 - RNA, 98 nt, Artificial Sequence
  gNA Variant Scaffold
uacuggcgcuuuuaucucauuacuuugagagccaucaccagcgacuaugucguauggguaaagcgcggacgaccucucggucguccgaagcaucaaag

SEQ ID NO: 2178 - RNA, 89 nt, Artificial Sequence
  gNA Variant Scaffold
gcuggcgcuuuuaucugauuacuuugagagccaucaccagcgacuaugucguauggguaaagcgcccucuucggagggaagcaucaaag

SEQ ID NO: 2179 - RNA, 88 nt, Artificial Sequence
  gNA Variant Scaffold
gcuggcgccuuuaucugauuacuuugagagccaucaccagcgacuaugucguauggguaaagcucccucuucggagggagcaucaaag

SEQ ID NO: 2180 - RNA, 197 nt, Artificial Sequence
  gNA Variant Scaffold
uacuggcgcuuuuaucucauuacuuugagagccaucaccagcgacuaugucguauggguaaagcgcuuauuuaucggagagaaauccgauaaauaagaagcaucaaaggggucggcauggcaucuccaccuccucgcgguccgaccugggcauccgaaggaggacgcacguccacucggauggcuaagggagagcca

SEQ ID NO: 2181 - RNA, 88 nt, Artificial Sequence
  gNA Variant Scaffold
gcuggcgccuuuaucugauuacuuugagagccaucaccagcgacuaugucguauggguaaagcgcccucuucggagggcgcaucaaag

SEQ ID NO: 2182 - RNA, 186 nt, Artificial Sequence
  gNA Variant Scaffold
uacuggcgcuuuuaucucauuacuuugagagccaucaccagcgacuaugucguauggguaaagcgcuuauuuaucggagagaaauccgauaaauaagaagcaucaaaguuuuggccggcauggucccagccuccucgcuggcgccggcugggcaacaugcuucggcauggcgaaugggaccccggg

SEQ ID NO: 2183 - RNA, 97 nt, Artificial Sequence
  gNA Variant Scaffold
gauggcgccuuuaucucauuacuuugagagccaucaccagcgacuaugucguauggguaaagcgcuuacggacuucgguccguaagaagcaucaaag

SEQ ID NO: 2184 - RNA, 89 nt, Artificial Sequence
  gNA Variant Scaffold
gcuggcgcuuuuaucucauuacuuugagagccaucaccagcgacuaugucguauggguaaagcgcccucuucggagggaagcaucaaag

SEQ ID NO: 2185 - RNA, 96 nt, Artificial Sequence
  gNA Variant Scaffold
gcuggcgccuuuaucugauuacuuugagagccaucaccagcgacuaugucguauggguaaagcucuuacggacuucgguccguaagagcaucaaag

SEQ ID NO: 2186 - RNA, 96 nt, Artificial Sequence
  gNA Variant Scaffold
gcuggcgccuuuaucugauuacuuugagagccaucaccagcgacuaugucguauggguaaagcucggacgaccucucggucguccgagcaucaaag

SEQ ID NO: 2187 - RNA, 160 nt, Artificial Sequence
  gNA Variant Scaffold
uacuggcgcuuuuaucucauuacuuugagagccaucaccagcgacuaugucguauggguaaagcgcuuauuuaucggagagaaauccgauaaauaagaagcaucaaagccugucaccggaugugcuuuccggucugaugaguccgugaggacgaaacagg

SEQ ID NO: 2188 - RNA, 97 nt, Artificial Sequence
  gNA Variant Scaffold
gcuggcgcuuuuaucugauuacuuugagagccaucaccagcgacuaugucguauggguaaagcgcggacgaccucucggucguccgaagcaucaaag

SEQ ID NO: 2189 - RNA, 97 nt, Artificial Sequence
  gNA Variant Scaffold
gcuggcgccuuuaucugauuacuuugagagccaucaccagcgacuaugucguauggguaaagcgcggacgaccucucggucguccgaagcaucaaag

SEQ ID NO: 2190 - RNA, 106 nt, Artificial Sequence
  gNA Variant Scaffold
gcuggcgccuuuaucugauuacuuugagagccaucaccagcgacuaugucguauggguaaagcucaggugggacgaccucucggucguccuaucugagcaucaaag

SEQ ID NO: 2191 - RNA, 177 nt, Artificial Sequence
  gNA Variant Scaffold
uacuggcgcuuuuaucucauuacuuugagagccaucaccagcgacuaugucguauggguaaagcgcuuauuuaucggagagaaauccgauaaauaagaagcaucaaaggauggccggcauggucccagccuccucgcuggcgccggcugggcaacaccuucggguggcgaaugggac

SEQ ID NO: 2192 - RNA, 107 nt, Artificial Sequence
  gNA Variant Scaffold
gcuggcgcuuuuaucugauuacuuugagagccaucaccagcgacuaugucguauggguaaagcgcaggugggacgaccucucggucguccuaucugaagcaucaaag

SEQ ID NO: 2193 - RNA, 109 nt, Artificial Sequence
  gNA Variant Scaffold
uacuggcgcuuuuaucucauuacuuugagagccaucaccagcgacuaugucguacuggguaaagcgcuuauuuaucggagagaaauccgauaaauaagaagcaucaaag

SEQ ID NO: 2194 - RNA, 107 nt, Artificial Sequence
  gNA Variant Scaffold
uacuggcgcuuuuaucucauuacuuugagagccaucaccagcgacuaugucguauggguaaagcgcuuauuuaucgugagaaauccgauaaauaagaagcaucaaag

SEQ ID NO: 2195 - RNA, 109 nt, Artificial Sequence
  gNA Variant Scaffold
guacuggcgcuuuuaucucauuacuuugagagccaucaccagcgacuaugucguauggguaaagcgcuuauuuaucggagagaaauccgauaaauaagaagcaucaaag

SEQ ID NO: 2196 - RNA, 97 nt, Artificial Sequence
  gNA Variant Scaffold
gcuggcgcuuuuaucucauuacuuugagagccaucaccagcgacuaugucguauggguaaagcgcggacgaccucucggucguccgaagcaucaaag

SEQ ID NO: 2197 - RNA, 97 nt, Artificial Sequence
  gNA Variant Scaffold
gcuggcgccuuuaucugauuacuuugagagccaucaccagcgacuaugucguauggguaaagcgcuuacggacuucgguccguaagaagcaucaaag

SEQ ID NO: 2198 - RNA, 107 nt, Artificial Sequence
  gNA Variant Scaffold
gcuggcgcuuuuaucucauuacuuugagagccaucaccagcgacuaugucguauggguaaagcgcuuauuuaucggagagaaauccgauaaauaagaagcaucaaag

SEQ ID NO: 2199 - RNA, 97 nt, Artificial Sequence
  gNA Variant Scaffold
gcuggcgccuuuaucucauuacuuugagagccaucaccagcgacuaugucguauggguaaagcgcuuacggacuucgguccguaagaagcaucaaag

SEQ ID NO: 2200 - RNA, 89 nt, Artificial Sequence
  gNA Variant Scaffold
gcuggcgccuuuaucugauuacuuugagagccaucaccagcgacuaugucguauggguaaagcgcccucuucggagggaagcaucaaag

SEQ ID NO: 2201 - RNA, 107 nt, Artificial Sequence
  gNA Variant Scaffold
gcuggcgcuuuuaucucauuacuuugagagccaucaccagcgacuaugucguauggguaaagcgcaggugggacgaccucucggucguccuaucugaagcaucaaag

SEQ ID NO: 2202 - RNA, 107 nt, Artificial Sequence
  gNA Variant Scaffold
gcuggcgccuuuaucucauuacuuugagagccaucaccagcgacuaugucguauggguaaagcgcaggugggacgaccucucggucguccuaucugaagcaucaaag

SEQ ID NO: 2203 - RNA, 107 nt, Artificial Sequence
  gNA Variant Scaffold
gcuggcgccuuuaucugauuacuuugagagccaucaccagcgacuaugucguauggguaaagcgcaggugggacgaccucucggucguccuaucugaagcaucaaag

SEQ ID NO: 2204 - RNA, 98 nt, Artificial Sequence
  gNA Variant Scaffold
uacuggcgcuuuuaucugauuacuuugagagccaucaccagcgacuaugucguauggguaaagcgcuuacggacuucgguccguaagaagcaucaaag

SEQ ID NO: 2205 - RNA, 89 nt, Artificial Sequence
  gNA Variant Scaffold
gcuggcgccuuuaucucauuacuuugagagccaucaccagcgacuaugucguauggguaaagcgcccucuucggagggaagcaucaaag

SEQ ID NO: 2206 - RNA, 97 nt, Artificial Sequence
  gNA Variant Scaffold
gcuggcgcuuuuaucucauuacuuugagagccaucaccagcgacuaugucguauggguaaagcgcuuacggacuucgguccguaagaagcaucaaag

SEQ ID NO: 2207 - RNA, 97 nt, Artificial Sequence
  gNA Variant Scaffold
gcuggcgccuuuaucucauuacuuugagagccaucaccagcgacuaugucguauggguaaagcgcggacgaccucucggucguccgaagcaucaaag

SEQ ID NO: 2208 - RNA, 177 nt, Artificial Sequence
  gNA Variant Scaffold
gauggccggcauggucccagccuccucgcuggcgccggcugggcaacaccuucggguggcgaaugggacuacuggcgcuuuuaucucauuacuuugagagccaucaccagcgacuaugucguauggguaaagcgcuuauuuaucggagagaaauccgauaaauaagaagcaucaaag

SEQ ID NO: 2209 - RNA, 194 nt, Artificial Sequence
  gNA Variant Scaffold
ggccggcauggucccagccuccucgcuggcgccggcugggcaacauuccgaggggaccguccccucgguaauggcgaaugggacccuacuggcgcuuuuaucucauuacuuugagagccaucaccagcgacuaugucguauggguaaagcgcuuauuuaucggagagaaauccgauaaauaagaagcaucaaag

SEQ ID NO: 2210 - RNA, 96 nt, Artificial Sequence
  gNA Variant Scaffold
gcuggcgccuuuaucugauuacuuugagagccaucaccagcgacuaugucguauggguaaagcgcuuacggacuucgguccguaagcgcaucaaag

SEQ ID NO: 2211 - RNA, 172 nt, Artificial Sequence
  gNA Variant Scaffold
cgugguuagggccacguuaaauaguugcuuaagcccuaagcguugaucuucggaucaggugcaauacuggcgcuuuuaucucauuacuuugagagccaucaccagcgacuaugucguauggguaaagcgcuuauuuaucggagagaaauccgauaaauaagaagcaucaaag

SEQ ID NO: 2212 - RNA, 197 nt, Artificial Sequence
  gNA Variant Scaffold
gggucggcauggcaucuccaccuccucgcgguccgaccugggcauccgaaggaggacgcacguccacucggauggcuaagggagagccauacuggcgcuuuuaucucauuacuuugagagccaucaccagcgacuaugucguauggguaaagcgcuuauuuaucggagagaaauccgauaaauaagaagcaucaaag

SEQ ID NO: 2213 - RNA, 171 nt, Artificial Sequence
  gNA Variant Scaffold
uacuggcgcuuuuaucucauuacuuugagagccaucaccagcgacuaugucguauggguaaagcgcuuauuuaucggagagaaauccgauaaauaagaagcaucaaagccaguacugaugaguccgugaggacgaaacgaguaagcucgucuacuggcgcuuuuaucucau

SEQ ID NO: 2214 - RNA, 99 nt, Artificial Sequence
  gNA Variant Scaffold
uacuggcgccuuuaucucauuacuuuagagagccaucaccagcgacuaugucguauggguaaagcgcuuacggacuucgguccguaagaagcaucaaag

SEQ ID NO: 2215 - RNA, 157 nt, Artificial Sequence
  gNA Variant Scaffold
cgacuacugaugaguccgugaggacgaaacgaguaagcucgucuagucguacuggcgcuuuuaucucauuacuuugagagccaucaccagcgacuaugucguauggguaaagcgcuuauuuaucggagagaaauccgauaaauaagaagcaucaaag

SEQ ID NO: 2216 - RNA, 106 nt, Artificial Sequence
  gNA Variant Scaffold
gcuggcgccuuuaucugauuacuuugagagccaucaccagcgacuaugucguauggguaaagcgcaggugggacgaccucucggucguccuaucugcgcaucaaag

SEQ ID NO: 2217 - RNA, 97 nt, Artificial Sequence
  gNA Variant Scaffold
uacuggcgccuuuaucucauuacuuuagagccaucaccagcgacuaugucguauggguaaagcgcuuacggacuucgguccguaagaagcaucaaag

SEQ ID NO: 2218 - RNA, 186 nt, Artificial Sequence
  gNA Variant Scaffold
uacuggcgcuuuuaucucauuacuuugagagccaucaccagcgacuaugucguauggguaaagcgcuuauuuaucggagagaaauccgauaaauaagaagcaucaaagcauuccucagaaaaugacaaaccuguggggcguaaguagaucuucggaucuaugaucgugcagacguuaaaaucaggu

SEQ ID NO: 2219 - RNA, 171 nt, Artificial Sequence
  gNA Variant Scaffold
uacuggcgcuuuuaucucauuacuuugagagccaucaccagcgacuaugucguauggguaaagcgcuuauuuaucggagagaaauccgauaaauaagaagcaucaaagcgacuacugaugaguccgugaggacgaaacgaguaagcucgucuagucgcguguagcgaagca

SEQ ID NO: 2220 - RNA, 186 nt, Artificial Sequence
  gNA Variant Scaffold
cauuccucagaaaaugacaaaccuguggggcguaaguagaucuucggaucuaugaucgugcagacguuaaaaucagguuacuggcgcuuuuaucucauuacuuugagagccaucaccagcgacuaugucguauggguaaagcgcuuauuuaucggagagaaauccgauaaauaagaagcaucaaag

SEQ ID NO: 2221 - RNA, 186 nt, Artificial Sequence
  gNA Variant Scaffold
uuuuggccggcauggucccagccuccucgcuggcgccggcugggcaacaugcuucggcauggcgaaugggaccccggguacuggcgcuuuuaucucauuacuuugagagccaucaccagcgacuaugucguauggguaaagcgcuuauuuaucggagagaaauccgauaaauaagaagcaucaaag

SEQ ID NO: 2222 - RNA, 171 nt, Artificial Sequence
  gNA Variant Scaffold
cgacuacugaugaguccgugaggacgaaacgaguaagcucgucuagucgcguguagcgaagcauacuggcgcuuuuaucucauuacuuugagagccaucaccagcgacuaugucguauggguaaagcgcuuauuuaucggagagaaauccgauaaauaagaagcaucaaag

SEQ ID NO: 2223 - RNA, 168 nt, Artificial Sequence
  gNA Variant Scaffold
uacuggcgcuuuuaucucauuacuuugagagccaucaccagcgacuaugucguauggguaaagcgcuuauuuaucggagagaaauccgauaaauaagaagcaucaaaggggagccccgcugaugaggucggggagaccgaaagggacuucggucccuacggggcuccc

SEQ ID NO: 2224 - RNA, 144 nt, Artificial Sequence
  gNA Variant Scaffold
ccacccccaccaccacccccacccccaccaccacccuacuggcgcuuuuaucucauuacuuugagagccaucaccagcgacuaugucguauggguaaagcgcuuauuuaucggagagaaauccgauaaauaagaagcaucaaag

SEQ ID NO: 2225 - RNA, 157 nt, Artificial Sequence
  gNA Variant Scaffold
uacuggcgcuuuuaucucauuacuuugagagccaucaccagcgacuaugucguauggguaaagcgcuuauuuaucggagagaaauccgauaaauaagaagcaucaaagcgacuacugaugaguccgugaggacgaaacgaguaagcucgucuagucg

SEQ ID NO: 2226 - RNA, 172 nt, Artificial Sequence
  gNA Variant Scaffold
uacuggcgcuuuuaucucauuacuuugagagccaucaccagcgacuaugucguauggguaaagcgcuuauuuaucggagagaaauccgauaaauaagaagcaucaaagcgugguuagggccacguuaaauaguugcuuaagcccuaagcguugaucuucggaucaggugcaa

SEQ ID NO: 2227 - RNA, 184 nt, Artificial Sequence
  gNA Variant Scaffold
uacuggcgcuuuuaucucauuacuuugagagccaucaccagcgacuaugucguauggguaaagcgcuuauuuaucggagagaaauccgauaaauaagaagcaucaaagggcaauaaagcgguuacaagcccgcaaaaauagcagaguaaugucgcgauagcgcggcauuaaugcagcuuuauug

SEQ ID NO: 2228 - RNA, 122 nt, Artificial Sequence
  gNA Variant Scaffold
uacuggcgcuuuuaucucauuacuauuaucucauuacuuugagagccaucaccagcgacuaugucguauggguaaagcgcuuauuuaucggagagaaauccgauaaauaagaagcaucaaag

SEQ ID NO: 2229 - RNA, 184 nt, Artificial Sequence
  gNA Variant Scaffold
ggcaauaaagcgguuacaagcccgcaaaaauagcagaguaaugucgcgauagcgcggcauuaaugcagcuuuauuguacuggcgcuuuuaucucauuacuuugagagccaucaccagcgacuaugucguauggguaaagcgcuuauuuaucggagagaaauccgauaaauaagaagcaucaaag

SEQ ID NO: 2230 - RNA, 185 nt, Artificial Sequence
  gNA Variant Scaffold
uacuggcgcuuuuaucucauuacuuugagagccaucaccagcgacuaugucguauggguaaagcgcuuauuuaucggagagaaauccgauaaauaagaagcaucaaagacccgcaaggccgacggcauccgccgccgcuggugcaaguccagccgccccuucgggggcgggcgcucauggguaac

SEQ ID NO: 2231 - RNA, 63 nt, Artificial Sequence
  gNA Variant Scaffold
uacuggcgcuuuuaucucauuacuuugagagccaucaccagcgacuaugucguauggguaaag

SEQ ID NO: 2232 - RNA, 168 nt, Artificial Sequence
  gNA Variant Scaffold
gggagccccgcugaugaggucggggagaccgaaagggacuucggucccuacggggcucccuacuggcgcuuuuaucucauuacuuugagagccaucaccagcgacuaugucguauggguaaagcgcuuauuuaucggagagaaauccgauaaauaagaagcaucaaag

SEQ ID NO: 2233 - RNA, 171 nt, Artificial Sequence
  gNA Variant Scaffold
ccaguacugaugaguccgugaggacgaaacgaguaagcucgucuacuggcgcuuuuaucucauuacuggcgcuuuuaucucauuacuuugagagccaucaccagcgacuaugucguauggguaaagcgcuuauuuaucggagagaaauccgauaaauaagaagcaucaaag

SEQ ID NO: 2234 - RNA, 185 nt, Artificial Sequence
  gNA Variant Scaffold
acccgcaaggccgacggcauccgccgccgcuggugcaaguccagccgccccuucgggggcgggcgcucauggguaacuacuggcgcuuuuaucucauuacuuugagagccaucaccagcgacuaugucguauggguaaagcgcuuauuuaucggagagaaauccgauaaauaagaagcaucaaag

SEQ ID NO: 2235 - RNA, 160 nt, Artificial Sequence
  gNA Variant Scaffold
ccugucaccggaugugcuuuccggucugaugaguccgugaggacgaaacagguacuggcgcuuuuaucucauuacuuugagagccaucaccagcgacuaugucguauggguaaagcgcuuauuuaucggagagaaauccgauaaauaagaagcaucaaag

SEQ ID NO: 2236 - RNA, 100 nt, Artificial Sequence
  gNA Variant Scaffold
guacuggcgccuuuaucucauuacuuugagagccaucaccagcgacuaugucguaguggguaaagcgcuuacggacuucgguccguaagaagcaucaaag

SEQ ID NO: 2237 - RNA, 91 nt, Artificial Sequence
  gNA Variant Scaffold
guacuggcgcuuuuaucugauuacuuugagagccaucaccagcgacuaugucguaguggguaaagcucccucuucggagggagcaucaaag

SEQ ID NO: 2238 - RNA, 89 nt, Artificial Sequence
  gNA Variant Scaffold
acuggcgcuuuuaucugauuacuuugagagccaucaccagcgacuaugucguaguggguaaagcucccucuucggagggagcaucaaag

SEQ ID NO: 2239 - RNA, 97 nt, Artificial Sequence
  gNA Variant Scaffold
acuggcgccuuuaucucauuacuuugagagccaucaccagcgacuaugucguauggguaaagcgcuuacggacuucgguccguaagaagcaucaaag

SEQ ID NO: 2240 - RNA, 89 nt, Artificial Sequence
  gNA Variant Scaffold
gcuggcgcuuuuaucugauuacuuugagagccaucaccagcgacuaugucguaguggguaaagcucccucuucggagggagcaucaaag

SEQ ID NO: 2241 - RNA, 88 nt, Artificial Sequence
  gNA Variant Scaffold
acuggcgcuuuuaucugauuacuuugagagccaucaccagcgacuaugucguauggguaaagcucccucuucggagggagcaucaaag

SEQ ID NO: 2242 - RNA, 97 nt, Artificial Sequence
  gNA Variant Scaffold
acuggcgccuuuaucugauuacuuugagagccaucaccagcgacuaugucguauggguaaagcgcuuacggacuucgguccguaagaagcaucaaag

SEQ ID NO: 2243 - RNA, 97 nt, Artificial Sequence
  gNA Variant Scaffold
acuggcgcuuuuaucugauuacuuugagagccaucaccagcgacuaugucguauggguaaagcgcuuacggacuucgguccguaagaagcaucaaag

SEQ ID NO: 2244 - RNA, 98 nt, Artificial Sequence
  gNA Variant Scaffold
acuggcgcuuuuaucugauuacuuugagagccaucaccagcgacuaugucguaguggguaaagcgcuuacggacuucgguccguaagaagcaucaaag

SEQ ID NO: 2245 - RNA, 89 nt, Artificial Sequence
  gNA Variant Scaffold
acuggcgcuuuuaucugauuacuuugagagccaucaccagcgacuaugucguauuggguaaagcucccucuucggagggagcaucaaag

SEQ ID NO: 2246 - RNA, 98 nt, Artificial Sequence
  gNA Variant Scaffold
acuggcgcuuuuaucugauuacuuugagagccaucaccagcgacuaugucguauuggguaaagcgcuuacggacuucgguccguaagaagcaucaaag

SEQ ID NO: 2247 - RNA, 98 nt, Artificial Sequence
  gNA Variant Scaffold
acuggcgccuuuaucaucauuacuuugagagccaucaccagcgacuaugucguauggguaaagcgcuuacggacuucgguccguaagaagcaucaaag

SEQ ID NO: 2248 - RNA, 90 nt, Artificial Sequence
  gNA Variant Scaffold
acuggcgcuuuuaucugauuacuuugagagccaucaccagcgacuaugucguaguggguaaagcgcccucuucggagggaagcaucaaag

SEQ ID NO: 2249 - RNA, 96 nt, Artificial Sequence
  gNA Variant Scaffold
acuggcgcuuuuaucugauuacuuugagagccaucaccagcgacuaugucguaguggguaaagcucacaugaggaucacccaugugagcaucaaag

SEQ ID NO: 2250 - RNA, 89 nt, Artificial Sequence
  gNA Variant Scaffold
acuggcacuuuuaccugauuacuuugagagccaacaccagcgacuaugucguaguggguaaagcucccucuucggagggagcaucaaag

SEQ ID NO: 2251 - RNA, 89 nt, Artificial Sequence
  gNA Variant Scaffold
acuggcacuuuuaucugauuacuuugagagccaucaccagcgacuaugucguaguggguaaagcucccucuucggagggagcaucaaag

SEQ ID NO: 2252 - RNA, 89 nt, Artificial Sequence
  gNA Variant Scaffold
acuggcccuuuuaucugauuacuuugagagccaucaccagcgacuaugucguaguggguaaagcucccucuucggagggagcaucaaag

SEQ ID NO: 2253 - RNA, 89 nt, Artificial Sequence
  gNA Variant Scaffold
acuggcgcuuuuaccugauuacuuugagagccaucaccagcgacuaugucguaguggguaaagcucccucuucggagggagcaucaaag

SEQ ID NO: 2254 - RNA, 89 nt, Artificial Sequence
  gNA Variant Scaffold
acuggcgcuuuuaucugauuacuuugagagccaacaccagcgacuaugucguaguggguaaagcucccucuucggagggagcaucaaag

SEQ ID NO: 2255 - RNA, 97 nt, Artificial Sequence
  gNA Variant Scaffold
acuggcaccuuuaccugauuacuuugagagccaacaccagcgacuaugucguauggguaaagcgcuuacggacuucgguccguaagaagcaucaaag

SEQ ID NO: 2256 - RNA, 97 nt, Artificial Sequence
  gNA Variant Scaffold
acuggcaccuuuaucugauuacuuugagagccaucaccagcgacuaugucguauggguaaagcgcuuacggacuucgguccguaagaagcaucaaag

SEQ ID NO: 2257 - RNA, 97 nt, Artificial Sequence
  gNA Variant Scaffold
acuggccccuuuaucugauuacuuugagagccaucaccagcgacuaugucguauggguaaagcgcuuacggacuucgguccguaagaagcaucaaag

SEQ ID NO: 2258 - RNA, 97 nt, Artificial Sequence
  gNA Variant Scaffold
acuggcgccuuuaucugauuacuuugagagccaacaccagcgacuaugucguauggguaaagcgcuuacggacuucgguccguaagaagcaucaaag

SEQ ID NO: 2259 - RNA, 89 nt, Artificial Sequence; identical to SEQ ID NO: 2240
  gNA Variant Scaffold

SEQ ID NO: 2260 - RNA, 90 nt, Artificial Sequence
  gNA Variant Scaffold
gacuggcgcuuuuaucugauuacuuugagagccaucaccagcgacuaugucguaguggguaaagcucccucuucggagggagcaucaaag

SEQ ID NO: 2261 - RNA, 90 nt, Artificial Sequence
  gNA Variant Scaffold
acuggcgccuuuaucugauuacuuuggagagccaucaccagcgacuaugucguaguggguaaagcucccucuucggagggagcaucaaag

SEQ ID NO: 2262 - RNA, 89 nt, Artificial Sequence
  gNA Variant Scaffold
acuggcgcauuuaucugauuacuuugugagccaucaccagcgacuaugucguaguggguaaagcucccucuucggagggagcaucaaag

SEQ ID NO: 2263 - RNA, 89 nt, Artificial Sequence
  gNA Variant Scaffold
acuggcgccuuuaucugauuacuuugagagccaucaccagcgacuaugucguaguggguaaagcucccucuucggagggagcaucaaag

SEQ ID NO: 2264 - RNA, 90 nt, Artificial Sequence
  gNA Variant Scaffold
acuggcgcuuuuaucugauuacuuuggagagccaucaccagcgacuaugucguaguggguaaagcucccucuucggagggagcaucaaag

SEQ ID NO: 2265 - RNA, 89 nt, Artificial Sequence
  gNA Variant Scaffold
acuggcgcauuuaucugauuacuuugagagccaucaccagcgacuaugucguaguggguaaagcucccucuucggagggagcaucaaag

SEQ ID NO: 2266 - RNA, 89 nt, Artificial Sequence
  gNA Variant Scaffold
acuggcgcuuuuaucugauuacuuugugagccaucaccagcgacuaugucguaguggguaaagcucccucuucggagggagcaucaaag

SEQ ID NO: 2267 - RNA, 90 nt, Artificial Sequence
  gNA Variant Scaffold
acuggcgcuuuuauucugauuacuuugagagccaucaccagcgacuaugucguaguggguaaagcucccucuucggagggagcaucaaag

SEQ ID NO: 2268 - RNA, 88 nt, Artificial Sequence
  gNA Variant Scaffold
acggcgcuuuuaucugauuacuuugagagccaucaccagcgacuaugucguaguggguaaagcucccucuucggagggagcaucaaag

SEQ ID NO: 2269 - RNA, 89 nt, Artificial Sequence
  gNA Variant Scaffold
acuggcgcuuuuauaugauuacuuugagagccaucaccagcgacuaugucguaguggguaaagcucccucuucggagggagcaucaaag

SEQ ID NO: 2270 - RNA, 90 nt, Artificial Sequence
  gNA Variant Scaffold
acuggcgcuuuuaucuugauuacuuugagagccaucaccagcgacuaugucguaguggguaaagcucccucuucggagggagcaucaaag

SEQ ID NO: 2271 - RNA, 89 nt, Artificial Sequence
  gNA Variant Scaffold
acuggcgcuuuuaucugauuacuuugagagccagcaccagcgacuaugucguaguggguaaagcucccucuucggagggagcaucaaag

SEQ ID NO: 2272 - RNA, 89 nt, Artificial Sequence
  gNA Variant Scaffold
acuggcgcuguuaucugauuacuucgagagccaucaccagcgacuaugucguaguggguaaagcucccucuucggagggagcaucgaag

SEQ ID NO: 2273 - RNA, 89 nt, Artificial Sequence
  gNA Variant Scaffold
acuggcgcucuuaucugauuacuucgagagccaucaccagcgacuaugucguaguggguaaagcucccucuucggagggagcaucgaag

SEQ ID NO: 2274 - RNA, 89 nt, Artificial Sequence
  gNA Variant Scaffold
acuggcgcuuguaucugauuacucugagagccaucaccagcgacuaugucguaguggguaaagcucccucuucggagggagcaucagag

SEQ ID NO: 2275 - RNA, 89 nt, Artificial Sequence
  gNA Variant Scaffold
acuggcgcuucuaucugauuacucugagagccaucaccagcgacuaugucguaguggguaaagcucccucuucggagggagcaucagag

SEQ ID NO: 2276 - RNA, 89 nt, Artificial Sequence
  gNA Variant Scaffold
acuggcgcuuugaucugauuaccuugagagccaucaccagcgacuaugucguaguggguaaagcucccucuucggagggagcaucaagg

SEQ ID NO: 2277 - RNA, 89 nt, Artificial Sequence
  gNA Variant Scaffold
acuggcgcuuucaucugauuaccuugagagccaucaccagcgacuaugucguaguggguaaagcucccucuucggagggagcaucaagg

SEQ ID NO: 2278 - RNA, 89 nt, Artificial Sequence
  gNA Variant Scaffold
acuggcgcuguuaucugauuacuuugagagccaucaccagcgacuaugucguaguggguaaagcucccucuucggagggagcaucaaag

SEQ ID NO: 2279 - RNA, 89 nt, Artificial Sequence
  gNA Variant Scaffold
acuggcgcuuuuaucugauuacuuugagagccaucaccagcgacuaugucguaguggguaaagcucccucuucggagggagcaucgaag

SEQ ID NO: 2280 - RNA, 89 nt, Artificial Sequence
  gNA Variant Scaffold
acuggcgcuuuuaucugauuacuucgagagccaucaccagcgacuaugucguaguggguaaagcucccucuucggagggagcaucaaag

SEQ ID NO: 2281 - RNA, 98 nt, Artificial Sequence
  gNA Variant Scaffold
acuggcacuucuaucugauuacucugagagccaucaccagcgacuaugucguauggguaaagccgcuuacggacuucgguccguaagaggcaucagag

SEQ ID NO: 2282 - RNA, 89 nt, Artificial Sequence
  gNA Variant Scaffold
acuggcacuucuaucugauuacucugagagccaucaccagcgacuaugucguaguggguaaagcucccucuucggagggagcaucagag

SEQ ID NO: 2283 - RNA, 98 nt, Artificial Sequence
  gNA Variant Scaffold
acuggcaccuuuaucugauuacuuugagagccaucaccagcgacuaugucguauggguaaagccgcuuacggacuucgguccguaagaggcaucaaag

SEQ ID NO: 2284 - RNA, 98 nt, Artificial Sequence
  gNA Variant Scaffold
acuggcacuuguaucugauuacucugagagccaucaccagcgacuaugucguauggguaaagccgcuuacggacuucgguccguaagaggcaucagag

SEQ ID NO: 2285 - RNA, 89 nt, Artificial Sequence
  gNA Variant Scaffold
acuggcacuuguaucugauuacucugagagccaucaccagcgacuaugucguaguggguaaagcucccucuucggagggagcaucagag

SEQ ID NO: 2286 - RNA, 20 nt, Artificial Sequence
  spacer sequence ATCN PAM
agccuccacccugcuggggc

SEQ ID NO: 2287 - RNA, 20 nt, Artificial Sequence
  spacer sequence ATCN PAM
gggaaaacugaggccccagc

SEQ ID NO: 2288 - RNA, 20 nt, Artificial Sequence
  spacer sequence ATCN PAM
cgccucaggaauggcggggg

SEQ ID NO: 2289 - RNA, 20 nt, Artificial Sequence
  spacer sequence ATCN PAM
acaagccagggagaaaagga

SEQ ID NO: 2290 - RNA, 20 nt, Artificial Sequence
  spacer sequence ATCN PAM
agauuuguccuuaaacaccc

SEQ ID NO: 2291 - RNA, 20 nt, Artificial Sequence
  spacer sequence ATCN PAM
ggauaaagggcccccaaagg

SEQ ID NO: 2292 - RNA, 20 nt, Artificial Sequence
  spacer sequence ATCN PAM
uggccaggcgccguggcucg

SEQ ID NO: 2293 - RNA, 20 nt, Artificial Sequence
  spacer sequence ATCN PAM
cagcacuuugggaggcugag

SEQ ID NO: 2294 - RNA, 20 nt, Artificial Sequence
  spacer sequence ATCN PAM
ccugaggucaggaguucgag

SEQ ID NO: 2295 - RNA, 20 nt, Artificial Sequence
  spacer sequence ATCN PAM
cagcuacuagggaagcugag

SEQ ID NO: 2296 - RNA, 20 nt, Artificial Sequence
  spacer sequence ATCN PAM
cggcucacggcaaccucccc

SEQ ID NO: 2297 - RNA, 20 nt, Artificial Sequence
  spacer sequence ATCN PAM
ugccacugcacuccagccug

SEQ ID NO: 2298 - RNA, 20 nt, Artificial Sequence
  spacer sequence ATCN PAM
agcagggcugcucaggaggg

SEQ ID NO: 2299 - RNA, 20 nt, Artificial Sequence
  spacer sequence ATCN PAM
guggggaagucgggccacug

SEQ ID NO: 2300 - RNA, 20 nt, Artificial Sequence
  spacer sequence ATCN PAM
aggaggaccaugggcgccug

SEQ ID NO: 2301 - RNA, 20 nt, Artificial Sequence
  spacer sequence ATCN PAM
cucgggguggccugggucuu

SEQ ID NO: 2302 - RNA, 20 nt, Artificial Sequence
  spacer sequence ATCN PAM
caccacugcacuccagccug

SEQ ID NO: 2303 - RNA, 20 nt, Artificial Sequence
  spacer sequence ATCN PAM
cggcucacugcaaccuccaa

SEQ ID NO: 2304 - RNA, 20 nt, Artificial Sequence
  spacer sequence ATCN PAM
cuugaacccaggaguuggag

SEQ ID NO: 2305 - RNA, 20 nt, Artificial Sequence
  spacer sequence ATCN PAM
cagcuacuugggaggcugag

SEQ ID NO: 2306 - RNA, 20 nt, Artificial Sequence
  spacer sequence ATCN PAM
cuugaggccaggaguucgag

SEQ ID NO: 2307 - RNA, 20 nt, Artificial Sequence
  spacer sequence ATCN PAM
gcccgccucggccucccaaa

SEQ ID NO: 2308 - RNA, 20 nt, Artificial Sequence
  spacer sequence ATCN PAM
cagcacuuugggaggccgag

SEQ ID NO: 2309 - RNA, 20 nt, Artificial Sequence
  spacer sequence ATCN PAM
acauaaaaacccauacgagg

SEQ ID NO: 2310 - RNA, 20 nt, Artificial Sequence
  spacer sequence ATCN PAM
cgcccgggcucccucagggc

SEQ ID NO: 2311 - RNA, 20 nt, Artificial Sequence
  spacer sequence ATCN PAM
caccugaccucucuuagccc

SEQ ID NO: 2312 - RNA, 20 nt, Artificial Sequence
  spacer sequence ATCN PAM
gaacccaggccacaccaaac

SEQ ID NO: 2313 - RNA, 20 nt, Artificial Sequence
  spacer sequence ATCN PAM
aggggaguugccccaagggg

SEQ ID NO: 2314 - RNA, 20 nt, Artificial Sequence
  spacer sequence ATCN PAM
cguccgugccuucuggccca

SEQ ID NO: 2315 - RNA, 20 nt, Artificial Sequence
  spacer sequence ATCN PAM
ucuuucucccuccuccuccu

SEQ ID NO: 2316 - RNA, 20 nt, Artificial Sequence
  spacer sequence ATCN PAM
ggaaacaaaguccagaggag

SEQ ID NO: 2317 - RNA, 20 nt, Artificial Sequence
  spacer sequence ATCN PAM
cagguggggcuggggggagg

SEQ ID NO: 2318 - RNA, 20 nt, Artificial Sequence
  spacer sequence ATCN PAM
aggagucagaguggaggcug

SEQ ID NO: 2319 - RNA, 20 nt, Artificial Sequence
  spacer sequence ATCN PAM
ccgcccggcccggcccgggg

SEQ ID NO: 2320 - RNA, 20 nt, Artificial Sequence
  spacer sequence ATCN PAM
uguguggggcgguuggaucc

SEQ ID NO: 2321 - RNA, 20 nt, Artificial Sequence
  spacer sequence ATCN PAM
aaccgccccacacaggaucc

SEQ ID NO: 2322 - RNA, 20 nt, Artificial Sequence
  spacer sequence ATCN PAM
acauuuggcgugggagcguc

SEQ ID NO: 2323 - RNA, 20 nt, Artificial Sequence
  spacer sequence ATCN PAM
caagugccgccaggcaagca

SEQ ID NO: 2324 - RNA, 20 nt, Artificial Sequence
  spacer sequence ATCN PAM
agggaggcccccugccccac

SEQ ID NO: 2325 - RNA, 20 nt, Artificial Sequence
  spacer sequence ATCN PAM
cagagcccuccaagggaggg

SEQ ID NO: 2326 - RNA, 20 nt, Artificial Sequence
  spacer sequence ATCN PAM
cuccagaagccucuggaauu

SEQ ID NO: 2327 - RNA, 20 nt, Artificial Sequence
  spacer sequence ATCN PAM
gucccaccaggccccugacu

SEQ ID NO: 2328 - RNA, 20 nt, Artificial Sequence
  spacer sequence ATCN PAM
caggcuaccaccucaccccc

SEQ ID NO: 2329 - RNA, 20 nt, Artificial Sequence
  spacer sequence ATCN PAM
cgggcagccagcagggacuc

SEQ ID NO: 2330 - RNA, 20 nt, Artificial Sequence
  spacer sequence ATCN PAM
cagcuccuugggcuccuggg

SEQ ID NO: 2331 - RNA, 20 nt, Artificial Sequence
  spacer sequence ATCN PAM
cucaggguugcagucacccu

SEQ ID NO: 2332 - RNA, 20 nt, Artificial Sequence
  spacer sequence ATCN PAM
gccaguuggcucuaugugag

SEQ ID NO: 2333 - RNA, 20 nt, Artificial Sequence
  spacer sequence ATCN PAM
acagaguucagggugaggcu

SEQ ID NO: 2334 - RNA, 20 nt, Artificial Sequence
  spacer sequence ATCN PAM
cccccuccuacaggaagccc

SEQ ID NO: 2335 - RNA, 20 nt, Artificial Sequence
  spacer sequence ATCN PAM
cugugugaccucagaugagc

SEQ ID NO: 2336 - RNA, 20 nt, Artificial Sequence
  spacer sequence ATCN PAM
gaggucacacagcgaugaca

SEQ ID NO: 2337 - RNA, 20 nt, Artificial Sequence
  spacer sequence ATCN PAM
uccguccuggggcucuuccc

SEQ ID NO: 2338 - RNA, 20 nt, Artificial Sequence
  spacer sequence ATCN PAM
acggcggcucucauggccgg

SEQ ID NO: 2339 - RNA, 20 nt, Artificial Sequence
  spacer sequence ATCN PAM
agggguuuuuuuggccgaca

SEQ ID NO: 2340 - RNA, 20 nt, Artificial Sequence
  spacer sequence ATCN PAM
cuacuaaaaauacaaaacuu

SEQ ID NO: 2341 - RNA, 20 nt, Artificial Sequence
  spacer sequence ATCN PAM
gggaggcagagguugcagug

SEQ ID NO: 2342 - RNA, 20 nt, Artificial Sequence
  spacer sequence ATCN PAM
ccauucacugcaaccucugc

SEQ ID NO: 2343 - RNA, 20 nt, Artificial Sequence
  spacer sequence ATCN PAM
cgccacugcacuccagccug

SEQ ID NO: 2344 - RNA, 20 nt, Artificial Sequence
  spacer sequence ATCN PAM
caaaaaaaaaagcggggggc

SEQ ID NO: 2345 - RNA, 20 nt, Artificial Sequence
  spacer sequence ATCN PAM
cuggggaggaaugagcagag

SEQ ID NO: 2346 - RNA, 20 nt, Artificial Sequence
  spacer sequence ATCN PAM
uccucugcucauuccucccc

SEQ ID NO: 2347 - RNA, 20 nt, Artificial Sequence
  spacer sequence ATCN PAM
ccacccaaccccgaccccac

SEQ ID NO: 2348 - RNA, 20 nt, Artificial Sequence
  spacer sequence ATCN PAM
gacgucaacuccgggagaaa

SEQ ID NO: 2349 - RNA, 20 nt, Artificial Sequence
  spacer sequence ATCN PAM
cgcuguguaaacgucugucc

SEQ ID NO: 2350 - RNA, 20 nt, Artificial Sequence
  spacer sequence ATCN PAM
cagcugcucagacguggggg

SEQ ID NO: 2351 - RNA, 20 nt, Artificial Sequence
  spacer sequence ATCN PAM
gugcgucacgcuuugggagg

SEQ ID NO: 2352 - RNA, 20 nt, Artificial Sequence
  spacer sequence ATCN PAM
cacacaaacagcugagcuuc

SEQ ID NO: 2353 - RNA, 20 nt, Artificial Sequence
  spacer sequence ATCN PAM
aaugucagaaacuaaaauag

SEQ ID NO: 2354 - RNA, 20 nt, Artificial Sequence
  spacer sequence ATCN PAM
uccgcgcguaucaaauguca

SEQ ID NO: 2355 - RNA, 20 nt, Artificial Sequence
  spacer sequence ATCN PAM
aacagcauaaaguggagaga

SEQ ID NO: 2356 - RNA, 20 nt, Artificial Sequence
  spacer sequence ATCN PAM
caccauugcacuccagccug

SEQ ID NO: 2357 - RNA, 20 nt, Artificial Sequence
  spacer sequence ATCN PAM
cagcucccugcaagcuccac

SEQ ID NO: 2358 - RNA, 20 nt, Artificial Sequence
  spacer sequence ATCN PAM
cuacuaaaaauacaaaaaaa

SEQ ID NO: 2359 - RNA, 20 nt, Artificial Sequence
  spacer sequence ATCN PAM
uggcuaaaauggugaaaccc

SEQ ID NO: 2360 - RNA, 20 nt, Artificial Sequence
  spacer sequence ATCN PAM
agaccauccuggcuaaaaug

SEQ ID NO: 2361 - RNA, 20 nt, Artificial Sequence
  spacer sequence ATCN PAM
ccugaccucgugauccgcca

SEQ ID NO: 2362 - RNA, 20 nt, Artificial Sequence
  spacer sequence ATCN PAM
cgaggucaggagaucgagac

SEQ ID NO: 2363 - RNA, 20 nt, Artificial Sequence
  spacer sequence ATCN PAM
gccaaagugcugggauuaca

SEQ ID NO: 2364 - RNA, 20 nt, Artificial Sequence
  spacer sequence ATCN PAM
cagcacuuuggcggaucacg

SEQ ID NO: 2365 - RNA, 20 nt, Artificial Sequence
  spacer sequence ATCN PAM
gcugccuuuacaccaaccag

SEQ ID NO: 2366 - RNA, 20 nt, Artificial Sequence
  spacer sequence ATCN PAM
aaauaauagccuugguggcc

SEQ ID NO: 2367 - RNA, 20 nt, Artificial Sequence
  spacer sequence ATCN PAM
cagcucaccgcaaccuccac

SEQ ID NO: 2368 - RNA, 20 nt, Artificial Sequence
  spacer sequence ATCN PAM
cuugaaccugugagguggag

SEQ ID NO: 2369 - RNA, 20 nt, Artificial Sequence
  spacer sequence ATCN PAM
cagcuacuugggaggcugag

SEQ ID NO: 2370 - RNA, 20 nt, Artificial Sequence
  spacer sequence ATCN PAM
caaaagcuugagcuccugac

SEQ ID NO: 2371 - RNA, 20 nt, Artificial Sequence
  spacer sequence ATCN PAM
cugugucuucaggugaggcu

SEQ ID NO: 2372 - RNA, 20 nt, Artificial Sequence
  spacer sequence ATCN PAM
uucauaguugaggaaaggaa

SEQ ID NO: 2373 - RNA, 20 nt, Artificial Sequence
  spacer sequence ATCN PAM
ucuuucauaguugaggaaag

SEQ ID NO: 2374 - RNA, 20 nt, Artificial Sequence
  spacer sequence ATCN PAM
cugcacuuugggaggccgag

SEQ ID NO: 2375 - RNA, 20 nt, Artificial Sequence
  spacer sequence ATCN PAM
gccugccucggccucccaaa

SEQ ID NO: 2376 - RNA, 20 nt, Artificial Sequence
  spacer sequence ATCN PAM
ccugaagucaggaguucaag

SEQ ID NO: 2377 - RNA, 20 nt, Artificial Sequence
  spacer sequence ATCN PAM
caacacuuugggaggccgag

SEQ ID NO: 2378 - RNA, 20 nt, Artificial Sequence
  spacer sequence ATCN PAM
ucccgccucggccucccaaa

SEQ ID NO: 2379 - RNA, 20 nt, Artificial Sequence
  spacer sequence ATCN PAM
cgaggucaggagaucaagac

SEQ ID NO: 2380 - RNA, 20 nt, Artificial Sequence
  spacer sequence ATCN PAM
ccugaccucgugauccuccc

SEQ ID NO: 2381 - RNA, 20 nt, Artificial Sequence
  spacer sequence ATCN PAM
agaccauccuggcuaauaug

SEQ ID NO: 2382 - RNA, 20 nt, Artificial Sequence
  spacer sequence ATCN PAM
uggcuaauauggugaaaccc

SEQ ID NO: 2383 - RNA, 20 nt, Artificial Sequence
  spacer sequence ATCN PAM
cggcucccugcaagcucugc

SEQ ID NO: 2384 - RNA, 20 nt, Artificial Sequence
  spacer sequence ATCN PAM
cgccacugcacuccagccug

SEQ ID NO: 2385 - RNA, 20 nt, Artificial Sequence
  spacer sequence ATCN PAM
ccaccucccggguucaagca

SEQ ID NO: 2386 - RNA, 20 nt, Artificial Sequence
  spacer sequence ATCN PAM
cagcucacugcaaucuccac

SEQ ID NO: 2387 - RNA, 20 nt, Artificial Sequence
  spacer sequence ATCN PAM
cgcuaccgcaguccagccug

SEQ ID NO: 2388 - RNA, 20 nt, Artificial Sequence
  spacer sequence ATCN PAM
cagcgagacucugucucaaa

SEQ ID NO: 2389 - RNA, 20 nt, Artificial Sequence
  spacer sequence ATCN PAM
gaacaccuccuucaugucag

SEQ ID NO: 2390 - RNA, 20 nt, Artificial Sequence
  spacer sequence ATCN PAM
ucugaacaccuccuucaugu

SEQ ID NO: 2391 - RNA, 20 nt, Artificial Sequence
  spacer sequence ATCN PAM
ggguuacuuccuggaggagg

SEQ ID NO: 2392 - RNA, 20 nt, Artificial Sequence
  spacer sequence ATCN PAM
gcagggcacaguucucacac

SEQ ID NO: 2393 - RNA, 20 nt, Artificial Sequence
  spacer sequence ATCN PAM
cuucuguggcuccuggcauc

SEQ ID NO: 2394 - RNA, 20 nt, Artificial Sequence
  spacer sequence ATCN PAM
uggcuuuauggcgacaaggc

SEQ ID NO: 2395 - RNA, 20 nt, Artificial Sequence
  spacer sequence ATCN PAM
ccgccugggccuugucgcca

SEQ ID NO: 2396 - RNA, 20 nt, Artificial Sequence
  spacer sequence ATCN PAM
gagacaacauccccgccugg

SEQ ID NO: 2397 - RNA, 20 nt, Artificial Sequence
  spacer sequence ATCN PAM
ugguucuccacccugcccug

SEQ ID NO: 2398 - RNA, 20 nt, Artificial Sequence
  spacer sequence ATCN PAM
cuuagcaaggggccaucugu

SEQ ID NO: 2399 - RNA, 20 nt, Artificial Sequence
  spacer sequence ATCN PAM
guaauugucagauggaaaaa

SEQ ID NO: 2400 - RNA, 20 nt, Artificial Sequence
  spacer sequence ATCN PAM
gacaauuacagauggccccu

SEQ ID NO: 2401 - RNA, 20 nt, Artificial Sequence
  spacer sequence ATCN PAM
cacaccaggagucucagagu

SEQ ID NO: 2402 - RNA, 20 nt, Artificial Sequence
  spacer sequence ATCN PAM
gugucuccugugcacugagc

SEQ ID NO: 2403 - RNA, 20 nt, Artificial Sequence
  spacer sequence ATCN PAM
cugaagccuuccuuggccgc

SEQ ID NO: 2404 - RNA, 20 nt, Artificial Sequence
  spacer sequence ATCN PAM
aggcugaggccaggcgcggu

SEQ ID NO: 2405 - RNA, 20 nt, Artificial Sequence
  spacer sequence ATCN PAM
gcccgccucggccucccaaa

SEQ ID NO: 2406 - RNA, 20 nt, Artificial Sequence
  spacer sequence ATCN PAM
ccugagcucaggaguucgag

SEQ ID NO: 2407 - RNA, 20 nt, Artificial Sequence
  spacer sequence ATCN PAM
cagcuacucaggaggcugag

SEQ ID NO: 2408 - RNA, 20 nt, Artificial Sequence
  spacer sequence ATCN PAM
caaaaaaaaaaaaaucaagg

SEQ ID NO: 2409 - RNA, 20 nt, Artificial Sequence
  spacer sequence ATCN PAM
aggcugagcuggacuccaca

SEQ ID NO: 2410 - RNA, 20 nt, Artificial Sequence
  spacer sequence ATCN PAM
cccagacacacacaccugcc

SEQ ID NO: 2411 - RNA, 20 nt, Artificial Sequence
  spacer sequence ATCN PAM
gggugcccugcccaccuuau

SEQ ID NO: 2412 - RNA, 20 nt, Artificial Sequence
  spacer sequence ATCN PAM
cugaaugucccgguuacuac

SEQ ID NO: 2413 - RNA, 20 nt, Artificial Sequence
  spacer sequence ATCN PAM
gggagcuuaaaaguuuucag

SEQ ID NO: 2414 - RNA, 20 nt, Artificial Sequence
  spacer sequence ATCN PAM
ugaaaacuuuuaagcucccu

SEQ ID NO: 2415 - RNA, 20 nt, Artificial Sequence
  spacer sequence ATCN PAM
cauuccaucagccuaacaag

SEQ ID NO: 2416 - RNA, 20 nt, Artificial Sequence
  spacer sequence ATCN PAM
gccuaacaagaccagcggga

SEQ ID NO: 2417 - RNA, 20 nt, Artificial Sequence
  spacer sequence ATCN PAM
ucugcauuaauuguaaaguc

SEQ ID NO: 2418 - RNA, 20 nt, Artificial Sequence
  spacer sequence ATCN PAM
cugaaccaauuacagaggcc

SEQ ID NO: 2419 - RNA, 20 nt, Artificial Sequence
  spacer sequence ATCN PAM
uugaaccaaucacagaggcc

SEQ ID NO: 2420 - RNA, 20 nt, Artificial Sequence
  spacer sequence ATCN PAM
cagaggccagugggugggau

SEQ ID NO: 2421 - RNA, 20 nt, Artificial Sequence
  spacer sequence ATCN PAM
cacccacuggccucugugau

SEQ ID NO: 2422 - RNA, 20 nt, Artificial Sequence
  spacer sequence ATCN PAM
gagcaucccacccacuggcc

SEQ ID NO: 2423 - RNA, 20 nt, Artificial Sequence
  spacer sequence ATCN PAM
aucagagcaucccacccacu

SEQ ID NO: 2424 - RNA, 20 nt, Artificial Sequence
  spacer sequence ATCN PAM
ggaugagucacuuacccauc

SEQ ID NO: 2425 - RNA, 20 nt, Artificial Sequence
  spacer sequence ATCN PAM
ugaucaaucagagcauccca

SEQ ID NO: 2426 - RNA, 20 nt, Artificial Sequence
  spacer sequence ATCN PAM
cugaaccaaucacagaggcc

SEQ ID NO: 2427 - RNA, 20 nt, Artificial Sequence
  spacer sequence ATCN PAM
cagaggccagagaaugggcu

SEQ ID NO: 2428 - RNA, 20 nt, Artificial Sequence
  spacer sequence ATCN PAM
uugaaccaaucacagaggcc

SEQ ID NO: 2429 - RNA, 20 nt, Artificial Sequence
  spacer sequence ATCN PAM
cagaggccagaaggugggau

SEQ ID NO: 2430 - RNA, 20 nt, Artificial Sequence
  spacer sequence ATCN PAM
caccuucuggccucugugau

SEQ ID NO: 2431 - RNA, 20 nt, Artificial Sequence
  spacer sequence ATCN PAM
gagcaucccaccuucuggcc

SEQ ID NO: 2432 - RNA, 20 nt, Artificial Sequence
  spacer sequence ATCN PAM
cuuagccaaucacagagauu

SEQ ID NO: 2433 - RNA, 20 nt, Artificial Sequence
  spacer sequence ATCN PAM
cagagauuagacaaugggcu

SEQ ID NO: 2434 - RNA, 20 nt, Artificial Sequence
  spacer sequence ATCN PAM
cugugauuggcuaagggaua

SEQ ID NO: 2435 - RNA, 20 nt, Artificial Sequence
  spacer sequence ATCN PAM
agucagagcaccuagggaga

SEQ ID NO: 2436 - RNA, 20 nt, Artificial Sequence
  spacer sequence ATCN PAM
cuuccggggucuuggccuca

SEQ ID NO: 2437 - RNA, 20 nt, Artificial Sequence
  spacer sequence ATCN PAM
ggucacgcgguccaucucuu

SEQ ID NO: 2438 - RNA, 20 nt, Artificial Sequence
  spacer sequence ATCN PAM
ugggcaucccucaggcacac

SEQ ID NO: 2439 - RNA, 20 nt, Artificial Sequence
  spacer sequence ATCN PAM
cucaggcacaccguggcacc

SEQ ID NO: 2440 - RNA, 20 nt, Artificial Sequence
  spacer sequence ATCN PAM
agcaccaggccggugccacg

SEQ ID NO: 2441 - RNA, 20 nt, Artificial Sequence
  spacer sequence ATCN PAM
ggugugcaugggccccgagg

SEQ ID NO: 2442 - RNA, 20 nt, Artificial Sequence
  spacer sequence ATCN PAM
uggccccagccgcuggccuc

SEQ ID NO: 2443 - RNA, 20 nt, Artificial Sequence
  spacer sequence ATCN PAM
ucccuguucuccgaguggag

SEQ ID NO: 2444 - RNA, 20 nt, Artificial Sequence
  spacer sequence ATCN PAM
cuggcgcccaggcgguaaac

SEQ ID NO: 2445 - RNA, 20 nt, Artificial Sequence
  spacer sequence ATCN PAM
ccuuguccuccccguccucu

SEQ ID NO: 2446 - RNA, 20 nt, Artificial Sequence
  spacer sequence ATCN PAM
aggcgguaggucuucaucuc

SEQ ID NO: 2447 - RNA, 20 nt, Artificial Sequence
  spacer sequence ATCN PAM
agggccaggcagucaggaag

SEQ ID NO: 2448 - RNA, 20 nt, Artificial Sequence
  spacer sequence ATCN PAM
gcucccugucaaccacguuc

SEQ ID NO: 2449 - RNA, 20 nt, Artificial Sequence
  spacer sequence ATCN PAM
agcgggagauccgucuggcu

SEQ ID NO: 2450 - RNA, 20 nt, Artificial Sequence
  spacer sequence ATCN PAM
cccgcucgaugggcgucucc

SEQ ID NO: 2451 - RNA, 20 nt, Artificial Sequence
  spacer sequence ATCN PAM
gucuggcucaggagcgugag

SEQ ID NO: 2452 - RNA, 20 nt, Artificial Sequence
  spacer sequence ATCN PAM
ccaccaggccgcugcugacc

SEQ ID NO: 2453 - RNA, 20 nt, Artificial Sequence
  spacer sequence ATCN PAM
ggcucagcuuggucagcagc

SEQ ID NO: 2454 - RNA, 20 nt, Artificial Sequence
  spacer sequence ATCN PAM
cagccccacggcgggagaga

SEQ ID NO: 2455 - RNA, 20 nt, Artificial Sequence
  spacer sequence ATCN PAM
gagcugagggcucuccggag

SEQ ID NO: 2456 - RNA, 20 nt, Artificial Sequence
  spacer sequence ATCN PAM
ucagcccggccccagaugcc

SEQ ID NO: 2457 - RNA, 20 nt, Artificial Sequence
  spacer sequence ATCN PAM
ggggccgggcugaggaugga

SEQ ID NO: 2458 - RNA, 20 nt, Artificial Sequence
  spacer sequence ATCN PAM
uggccuuuggugaagucgca

SEQ ID NO: 2459 - RNA, 20 nt, Artificial Sequence
  spacer sequence ATCN PAM
cucagaauccucuggaaaac

SEQ ID NO: 2460 - RNA, 20 nt, Artificial Sequence
  spacer sequence ATCN PAM
ucuggaaaaccccugagcac

SEQ ID NO: 2461 - RNA, 20 nt, Artificial Sequence
  spacer sequence ATCN PAM
aagcccccucggggaugccc

SEQ ID NO: 2462 - RNA, 20 nt, Artificial Sequence
  spacer sequence ATCN PAM
gaucugcuggaaagggagag

SEQ ID NO: 2463 - RNA, 20 nt, Artificial Sequence
  spacer sequence ATCN PAM
gaugacugggacuucugcag

SEQ ID NO: 2464 - RNA, 20 nt, Artificial Sequence
  spacer sequence ATCN PAM
gcuggaaagggagagggaga

SEQ ID NO: 2465 - RNA, 20 nt, Artificial Sequence
  spacer sequence ATCN PAM
ggcguuggggagaagaccuc

SEQ ID NO: 2466 - RNA, 20 nt, Artificial Sequence
  spacer sequence ATCN PAM
ggugagaaggggcuccaggg

SEQ ID NO: 2467 - RNA, 20 nt, Artificial Sequence
  spacer sequence ATCN PAM
cgggcaguuacucggugucu

SEQ ID NO: 2468 - RNA, 20 nt, Artificial Sequence
  spacer sequence ATCN PAM
accuacacucaaacguggcg

SEQ ID NO: 2469 - RNA, 20 nt, Artificial Sequence
  spacer sequence ATCN PAM
uccacuguccacgccacguu

SEQ ID NO: 2470 - RNA, 20 nt, Artificial Sequence
  spacer sequence ATCN PAM
aguggacagugcuccucccg

SEQ ID NO: 2471 - RNA, 20 nt, Artificial Sequence
  spacer sequence ATCN PAM
accccucggacgguaucaac

SEQ ID NO: 2472 - RNA, 20 nt, Artificial Sequence
  spacer sequence ATCN PAM
acucagaggugaguaugcuc

SEQ ID NO: 2473 - RNA, 20 nt, Artificial Sequence
  spacer sequence ATCN PAM
acccugagcagacacuacca

SEQ ID NO: 2474 - RNA, 20 nt, Artificial Sequence
  spacer sequence ATCN PAM
cagcaaaauccacccugagc

SEQ ID NO: 2475 - RNA, 20 nt, Artificial Sequence
  spacer sequence ATCN PAM
gcuugugaugucugccaugg

SEQ ID NO: 2476 - RNA, 20 nt, Artificial Sequence
  spacer sequence ATCN PAM
caagcagaucacagcaaaau

SEQ ID NO: 2477 - RNA, 20 nt, Artificial Sequence
  spacer sequence ATCN PAM
uauuacuaggaguagagggu

SEQ ID NO: 2478 - RNA, 20 nt, Artificial Sequence
  spacer sequence ATCN PAM
ccuccucuguuucagacccu

SEQ ID NO: 2479 - RNA, 20 nt, Artificial Sequence
  spacer sequence ATCN PAM
uacuuuacccccguucuagg

SEQ ID NO: 2480 - RNA, 20 nt, Artificial Sequence
  spacer sequence ATCN PAM
agguccuaccacacccccaa

SEQ ID NO: 2481 - RNA, 20 nt, Artificial Sequence
  spacer sequence ATCN PAM
ggggaauucaugccuccuuu

SEQ ID NO: 2482 - RNA, 20 nt, Artificial Sequence
  spacer sequence ATCN PAM
cgcaucuacgccagugagga

SEQ ID NO: 2483 - RNA, 20 nt, Artificial Sequence
  spacer sequence ATCN PAM
acgccagugaggaggaugac

SEQ ID NO: 2484 - RNA, 20 nt, Artificial Sequence
  spacer sequence ATCN PAM
uccucacuggcguagaugcg

SEQ ID NO: 2485 - RNA, 20 nt, Artificial Sequence
  spacer sequence ATCN PAM
cgaggcucagucauccuccu

SEQ ID NO: 2486 - RNA, 20 nt, Artificial Sequence
  spacer sequence ATCN PAM
gcaggggucccauuucaucc

SEQ ID NO: 2487 - RNA, 20 nt, Artificial Sequence
  spacer sequence ATCN PAM
gcaugcaguaggugcuuagc

SEQ ID NO: 2488 - RNA, 20 nt, Artificial Sequence
  spacer sequence ATCN PAM
gcuaagcaccuacugcaugc

SEQ ID NO: 2489 - RNA, 20 nt, Artificial Sequence
  spacer sequence ATCN PAM
auugucagucacucaacaag

SEQ ID NO: 2490 - RNA, 20 nt, Artificial Sequence
  spacer sequence ATCN PAM
gacuggggucucccugaaga

SEQ ID NO: 2491 - RNA, 20 nt, Artificial Sequence
  spacer sequence ATCN PAM
gccuucacagagaucccagg

SEQ ID NO: 2492 - RNA, 20 nt, Artificial Sequence
  spacer sequence ATCN PAM
uaaauuuguuuuuuuguauu

SEQ ID NO: 2493 - RNA, 20 nt, Artificial Sequence
  spacer sequence ATCN PAM
caacacuuugggaggcugaa

SEQ ID NO: 2494 - RNA, 20 nt, Artificial Sequence
  spacer sequence ATCN PAM
gcccgcuucagccucccaaa

SEQ ID NO: 2495 - RNA, 20 nt, Artificial Sequence
  spacer sequence ATCN PAM
ccugaggucaggaguuugag

SEQ ID NO: 2496 - RNA, 20 nt, Artificial Sequence
  spacer sequence ATCN PAM
cagcuacccgggaggccgag

SEQ ID NO: 2497 - RNA, 20 nt, Artificial Sequence
  spacer sequence ATCN PAM
uuugaacccaggagguggag

SEQ ID NO: 2498 - RNA, 20 nt, Artificial Sequence
  spacer sequence ATCN PAM
caaacaaacaaaaggacaga

SEQ ID NO: 2499 - RNA, 20 nt, Artificial Sequence
  spacer sequence ATCN PAM
cgcacuccagccugggcaaa

SEQ ID NO: 2500 - RNA, 20 nt, Artificial Sequence
  spacer sequence ATCN PAM
cggcucaccgaaaccucugc

SEQ ID NO: 2501 - RNA, 20 nt, Artificial Sequence
  spacer sequence ATCN PAM
cuggaauucaggaggcagag

SEQ ID NO: 2502 - RNA, 20 nt, Artificial Sequence
  spacer sequence ATCN PAM
cagcuacucgagaggcugag

SEQ ID NO: 2503 - RNA, 20 nt, Artificial Sequence
  spacer sequence ATCN PAM
ccuggagucaggaguucgag

SEQ ID NO: 2504 - RNA, 20 nt, Artificial Sequence
  spacer sequence ATCN PAM
acuugccucagccucccaaa

SEQ ID NO: 2505 - RNA, 20 nt, Artificial Sequence
  spacer sequence ATCN PAM
cagcacuuugggaggcugag

SEQ ID NO: 2506 - RNA, 20 nt, Artificial Sequence
  spacer sequence ATCN PAM
uaaaaaaacaggacagaaua

SEQ ID NO: 2507 - RNA, 20 nt, Artificial Sequence
  spacer sequence ATCN PAM
caccauuuugggaggccgag

SEQ ID NO: 2508 - RNA, 20 nt, Artificial Sequence
  spacer sequence ATCN PAM
gcccgccucggccucccaaa

SEQ ID NO: 2509 - RNA, 20 nt, Artificial Sequence
  spacer sequence ATCN PAM
caaggucaggagaucgagac

SEQ ID NO: 2510 - RNA, 20 nt, Artificial Sequence
  spacer sequence ATCN PAM
ccugaccuugugauccgccc

SEQ ID NO: 2511 - RNA, 20 nt, Artificial Sequence
  spacer sequence ATCN PAM
agaccagccuggccaaugug

SEQ ID NO: 2512 - RNA, 20 nt, Artificial Sequence
  spacer sequence ATCN PAM
caauuacucgggaggcugag

SEQ ID NO: 2513 - RNA, 20 nt, Artificial Sequence
  spacer sequence ATCN PAM
cuugaacccgagaggcggag

SEQ ID NO: 2514 - RNA, 20 nt, Artificial Sequence
  spacer sequence ATCN PAM
uggcucacugcaaccuccgc

SEQ ID NO: 2515 - RNA, 20 nt, Artificial Sequence
  spacer sequence ATCN PAM
cgccacggcacuccagccug

SEQ ID NO: 2516 - RNA, 20 nt, Artificial Sequence
  spacer sequence ATCN PAM
uuuuuuuugagcacagucuu

SEQ ID NO: 2517 - RNA, 20 nt, Artificial Sequence
  spacer sequence ATCN PAM
gacagaauucugccugcuga

SEQ ID NO: 2518 - RNA, 20 nt, Artificial Sequence
  spacer sequence ATCN PAM
cagcaaucacagaggccuuu

SEQ ID NO: 2519 - RNA, 20 nt, Artificial Sequence
  spacer sequence ATCN PAM
cagaggccuuuggggcgggc

SEQ ID NO: 2520 - RNA, 20 nt, Artificial Sequence
  spacer sequence ATCN PAM
ugauaugccagggaaaggag

SEQ ID NO: 2521 - RNA, 20 nt, Artificial Sequence
  spacer sequence ATCN PAM
ugauacacugagccaggagg

SEQ ID NO: 2522 - RNA, 20 nt, Artificial Sequence
  spacer sequence ATCN PAM
cagcucaccacaaccucugc

SEQ ID NO: 2523 - RNA, 20 nt, Artificial Sequence
  spacer sequence ATCN PAM
cuugaacccaggaggcagag

SEQ ID NO: 2524 - RNA, 20 nt, Artificial Sequence
  spacer sequence ATCN PAM
caguuacuccggggguugag

SEQ ID NO: 2525 - RNA, 20 nt, Artificial Sequence
  spacer sequence ATCN PAM
ugcccaacauggagaaaccc

SEQ ID NO: 2526 - RNA, 20 nt, Artificial Sequence
  spacer sequence ATCN PAM
gaggucuggaguuccagacc

SEQ ID NO: 2527 - RNA, 20 nt, Artificial Sequence
  spacer sequence ATCN PAM
ucugaggucuggaguuccag

SEQ ID NO: 2528 - RNA, 20 nt, Artificial Sequence
  spacer sequence ATCN PAM
acccgccucagccucccaaa

SEQ ID NO: 2529 - RNA, 20 nt, Artificial Sequence
  spacer sequence ATCN PAM
uggcauuuugggaagcugag

SEQ ID NO: 2530 - RNA, 20 nt, Artificial Sequence
  spacer sequence ATCN PAM
accuccugccucagcuuccc

SEQ ID NO: 2531 - RNA, 20 nt, Artificial Sequence
  spacer sequence ATCN PAM
ccugaggucaggaguuugag

SEQ ID NO: 2532 - RNA, 20 nt, Artificial Sequence
  spacer sequence ATCN PAM
cagcuacucgggaggcugag

SEQ ID NO: 2533 - RNA, 20 nt, Artificial Sequence
  spacer sequence ATCN PAM
auguagggccagcuucaggc

SEQ ID NO: 2534 - RNA, 20 nt, Artificial Sequence
  spacer sequence ATCN PAM
ucagguuccuucgguguugg

SEQ ID NO: 2535 - RNA, 20 nt, Artificial Sequence
  spacer sequence ATCN PAM
guaagugaagucgccacauu

SEQ ID NO: 2536 - RNA, 20 nt, Artificial Sequence
  spacer sequence ATCN PAM
cugcccugggggacgucaug

SEQ ID NO: 2537 - RNA, 20 nt, Artificial Sequence
  spacer sequence ATCN PAM
gugaggaauaagaaugaaug

SEQ ID NO: 2538 - RNA, 20 nt, Artificial Sequence
  spacer sequence ATCN PAM
cagcacucugggaggccgag

SEQ ID NO: 2539 - RNA, 20 nt, Artificial Sequence
  spacer sequence ATCN PAM
gcccgccucggccucccaga

SEQ ID NO: 2540 - RNA, 20 nt, Artificial Sequence
  spacer sequence ATCN PAM
cgaggucaggagaucaagac

SEQ ID NO: 2541 - RNA, 20 nt, Artificial Sequence
  spacer sequence ATCN PAM
ccugaccucgugauccgccc

SEQ ID NO: 2542 - RNA, 20 nt, Artificial Sequence
  spacer sequence ATCN PAM
agaccauccuggcuaacaug

SEQ ID NO: 2543 - RNA, 20 nt, Artificial Sequence
  spacer sequence ATCN PAM
uggcuaacauggugaaacuc

SEQ ID NO: 2544 - RNA, 20 nt, Artificial Sequence
  spacer sequence ATCN PAM
cagcuacucgggaggcugac

SEQ ID NO: 2545 - RNA, 20 nt, Artificial Sequence
  spacer sequence ATCN PAM
cggcucacugcaagcuccac

SEQ ID NO: 2546 - RNA, 20 nt, Artificial Sequence
  spacer sequence ATCN PAM
cgccacugcacuccagccug

SEQ ID NO: 2547 - RNA, 20 nt, Artificial Sequence
  spacer sequence ATCN PAM
gcuccucuccggcucacacc

SEQ ID NO: 2548 - RNA, 20 nt, Artificial Sequence
  spacer sequence ATCN PAM
uugguguuugccgcccucug

SEQ ID NO: 2549 - RNA, 20 nt, Artificial Sequence
  spacer sequence ATCN PAM
gguuacgggaaugagaaggu

SEQ ID NO: 2550 - RNA, 20 nt, Artificial Sequence
  spacer sequence ATCN PAM
cagcacuucgggaggccaag

SEQ ID NO: 2551 - RNA, 20 nt, Artificial Sequence
  spacer sequence ATCN PAM
acccgucuuggccucccgaa

SEQ ID NO: 2552 - RNA, 20 nt, Artificial Sequence
  spacer sequence ATCN PAM
cuugaggucaggaguucaag

SEQ ID NO: 2553 - RNA, 20 nt, Artificial Sequence
  spacer sequence ATCN PAM
cacccggcuauuuuuuuuuu

SEQ ID NO: 2554 - RNA, 20 nt, Artificial Sequence
  spacer sequence ATCN PAM
cagcuacucaggaagcugag

SEQ ID NO: 2555 - RNA, 20 nt, Artificial Sequence
  spacer sequence ATCN PAM
cagcucacugcaaccuccac

SEQ ID NO: 2556 - RNA, 20 nt, Artificial Sequence
  spacer sequence ATCN PAM
aaaaaaaaaaauuauuugua

SEQ ID NO: 2557 - RNA, 20 nt, Artificial Sequence
  spacer sequence ATCN PAM
cuacaaauaauuuuuuuuuu

SEQ ID NO: 2558 - RNA, 20 nt, Artificial Sequence
  spacer sequence ATCN PAM
aaaaaaaaauuauuuguaga

SEQ ID NO: 2559 - RNA, 20 nt, Artificial Sequence
  spacer sequence ATCN PAM
cuacaaauaauuuuuuuuua

SEQ ID NO: 2560 - RNA, 20 nt, Artificial Sequence
  spacer sequence ATCN PAM
cuugaggaguucaagaccag

SEQ ID NO: 2561 - RNA, 20 nt, Artificial Sequence
  spacer sequence ATCN PAM
uccugccucauccccacaaa

SEQ ID NO: 2562 - RNA, 20 nt, Artificial Sequence
  spacer sequence ATCN PAM
ccacaaagugcugggauuac

SEQ ID NO: 2563 - RNA, 20 nt, Artificial Sequence
  spacer sequence ATCN PAM
cagcacuuuguggggaugag

SEQ ID NO: 2564 - RNA, 20 nt, Artificial Sequence
  spacer sequence ATCN PAM
agcccagcccugaccaacua

SEQ ID NO: 2565 - RNA, 20 nt, Artificial Sequence
  spacer sequence ATCN PAM
cagcacuuugggaggccgag

SEQ ID NO: 2566 - RNA, 20 nt, Artificial Sequence
  spacer sequence ATCN PAM
gagggccucggccucccaaa

SEQ ID NO: 2567 - RNA, 20 nt, Artificial Sequence
  spacer sequence ATCN PAM
cgaggucaggagauugagac

SEQ ID NO: 2568 - RNA, 20 nt, Artificial Sequence
  spacer sequence ATCN PAM
ccugaccucgugauccgagg

SEQ ID NO: 2569 - RNA, 20 nt, Artificial Sequence
  spacer sequence ATCN PAM
uggcuaacaaggugaaaccc

SEQ ID NO: 2570 - RNA, 20 nt, Artificial Sequence
  spacer sequence ATCN PAM
cuugaaccugggaggaggcg

SEQ ID NO: 2571 - RNA, 20 nt, Artificial Sequence
  spacer sequence ATCN PAM
cggcucacugcaagcuccgc

SEQ ID NO: 2572 - RNA, 20 nt, Artificial Sequence
  spacer sequence ATCN PAM
agccacugcacuccagccug

SEQ ID NO: 2573 - RNA, 20 nt, Artificial Sequence
  spacer sequence ATCN PAM
cccccuccuccucuacccag

SEQ ID NO: 2574 - RNA, 20 nt, Artificial Sequence
  spacer sequence ATCN PAM
cccccuccuccucuacccag

SEQ ID NO: 2575 - RNA, 20 nt, Artificial Sequence
  spacer sequence ATCN PAM
cacagcuguugcucaguaaa

SEQ ID NO: 2576 - RNA, 20 nt, Artificial Sequence
  spacer sequence ATCN PAM
caggcaugagccacugagcc

SEQ ID NO: 2577 - RNA, 20 nt, Artificial Sequence
  spacer sequence ATCN PAM
uagcacuucuggaggcugag

SEQ ID NO: 2578 - RNA, 20 nt, Artificial Sequence
  spacer sequence ATCN PAM
cuacuuagggugaccagggg

SEQ ID NO: 2579 - RNA, 20 nt, Artificial Sequence
  spacer sequence ATCN PAM
ugggcucauuuuuuuuuuuu

SEQ ID NO: 2580 - RNA, 20 nt, Artificial Sequence
  spacer sequence ATCN PAM
caccacugcacucuagccug

SEQ ID NO: 2581 - RNA, 20 nt, Artificial Sequence
  spacer sequence ATCN PAM
cggcucacugcaaccuccac

SEQ ID NO: 2582 - RNA, 20 nt, Artificial Sequence
  spacer sequence ATCN PAM
cgccagcauuugcuccacac

SEQ ID NO: 2583 - RNA, 20 nt, Artificial Sequence
  spacer sequence ATCN PAM
cucuaucccgccagcauuug

SEQ ID NO: 2584 - RNA, 20 nt, Artificial Sequence
  spacer sequence ATCN PAM
gagaacagagcucugguuuc

SEQ ID NO: 2585 - RNA, 20 nt, Artificial Sequence
  spacer sequence ATCN PAM
ccagagccggcgcuaugcuu

SEQ ID NO: 2586 - RNA, 20 nt, Artificial Sequence
  spacer sequence ATCN PAM
gccagggagagaccagcucc

SEQ ID NO: 2587 - RNA, 20 nt, Artificial Sequence
  spacer sequence ATCN PAM
aggggcccuggagcuggucu

SEQ ID NO: 2588 - RNA, 20 nt, Artificial Sequence
  spacer sequence ATCN PAM
ggggacagccugagcucuaa

SEQ ID NO: 2589 - RNA, 20 nt, Artificial Sequence
  spacer sequence ATCN PAM
cccacccccucuccggugag

SEQ ID NO: 2590 - RNA, 20 nt, Artificial Sequence
  spacer sequence ATCN PAM
uggccugaguaggugaccaa

SEQ ID NO: 2591 - RNA, 20 nt, Artificial Sequence
  spacer sequence ATCN PAM
uccucuguggcugguauuuc

SEQ ID NO: 2592 - RNA, 20 nt, Artificial Sequence
  spacer sequence ATCN PAM
cagcacuuugggaggccaag

SEQ ID NO: 2593 - RNA, 20 nt, Artificial Sequence
  spacer sequence ATCN PAM
cuugaacccgggaggcggag

SEQ ID NO: 2594 - RNA, 20 nt, Artificial Sequence
  spacer sequence ATCN PAM
uggcucacugcaaccuccgc

SEQ ID NO: 2595 - RNA, 20 nt, Artificial Sequence
  spacer sequence ATCN PAM
caaaacaaaauaaaaaauaa

SEQ ID NO: 2596 - RNA, 20 nt, Artificial Sequence
  spacer sequence ATCN PAM
caacacuuugggaggccaag

SEQ ID NO: 2597 - RNA, 20 nt, Artificial Sequence
  spacer sequence ATCN PAM
gccugccuuggccucccaaa

SEQ ID NO: 2598 - RNA, 20 nt, Artificial Sequence
  spacer sequence ATCN PAM
caaggucaggagauugagac

SEQ ID NO: 2599 - RNA, 20 nt, Artificial Sequence
  spacer sequence ATCN PAM
ccugaccuugugauccgccu

SEQ ID NO: 2600 - RNA, 20 nt, Artificial Sequence
  spacer sequence ATCN PAM
ugaccaacauggugaaaccu

SEQ ID NO: 2601 - RNA, 20 nt, Artificial Sequence
  spacer sequence ATCN PAM
cagcuacucaggaggcugag

SEQ ID NO: 2602 - RNA, 20 nt, Artificial Sequence
  spacer sequence ATCN PAM
cuugaaccugggaggcagag

SEQ ID NO: 2603 - RNA, 20 nt, Artificial Sequence
  spacer sequence ATCN PAM
cggcucacuacaagcuccgc

SEQ ID NO: 2604 - RNA, 20 nt, Artificial Sequence
  spacer sequence ATCN PAM
gucuggcuuagcaggaaaca

SEQ ID NO: 2605 - RNA, 20 nt, Artificial Sequence
  spacer sequence ATCN PAM
ccagcaccaucugucuggcu

SEQ ID NO: 2606 - RNA, 20 nt, Artificial Sequence
  spacer sequence ATCN PAM
auaaucuuuuaaaaaauagg

SEQ ID NO: 2607 - RNA, 20 nt, Artificial Sequence
  spacer sequence ATCN PAM
ggggcuaaaaggagaaggga

SEQ ID NO: 2608 - RNA, 20 nt, Artificial Sequence
  spacer sequence ATCN PAM
agaauggaauguuaucuggg

SEQ ID NO: 2609 - RNA, 20 nt, Artificial Sequence
  spacer sequence ATCN PAM
gcucgccugccgaaggacgu

SEQ ID NO: 2610 - RNA, 20 nt, Artificial Sequence
  spacer sequence ATCN PAM
cagcaguucaggaggccaag

SEQ ID NO: 2611 - RNA, 20 nt, Artificial Sequence
  spacer sequence ATCN PAM
cagauacccuggaggcugaa

SEQ ID NO: 2612 - RNA, 20 nt, Artificial Sequence
  spacer sequence ATCN PAM
cuacuaaaaauacaaaaauu

SEQ ID NO: 2613 - RNA, 20 nt, Artificial Sequence
  spacer sequence ATCN PAM
cuugaggucaggaguuugag

SEQ ID NO: 2614 - RNA, 20 nt, Artificial Sequence
  spacer sequence ATCN PAM
gccugccucagccucucaaa

SEQ ID NO: 2615 - RNA, 20 nt, Artificial Sequence
  spacer sequence ATCN PAM
cggcacuuugagaggcugag

SEQ ID NO: 2616 - RNA, 20 nt, Artificial Sequence
  spacer sequence ATCN PAM
cagcacuuugggaucaccug

SEQ ID NO: 2617 - RNA, 20 nt, Artificial Sequence
  spacer sequence ATCN PAM
caaagugcugggauuacagg

SEQ ID NO: 2618 - RNA, 20 nt, Artificial Sequence
  spacer sequence ATCN PAM
ccugaggucaagaguucgag

SEQ ID NO: 2619 - RNA, 20 nt, Artificial Sequence
  spacer sequence ATCN PAM
uggccaacauggcaaaaccc

SEQ ID NO: 2620 - RNA, 20 nt, Artificial Sequence
  spacer sequence ATCN PAM
cagcuacuugggaggcugag

SEQ ID NO: 2621 - RNA, 20 nt, Artificial Sequence
  spacer sequence ATCN PAM
cgacucacugcaaccuccgg

SEQ ID NO: 2622 - RNA, 20 nt, Artificial Sequence
  spacer sequence ATCN PAM
aaacaaacaaaaaaagccac

SEQ ID NO: 2623 - RNA, 20 nt, Artificial Sequence
  spacer sequence ATCN PAM
aggccaguuuuuccagccca

SEQ ID NO: 2624 - RNA, 20 nt, Artificial Sequence
  spacer sequence ATCN PAM
ggugggcuggaaaaacuggc

SEQ ID NO: 2625 - RNA, 20 nt, Artificial Sequence
  spacer sequence ATCN PAM
caggcagcuuccaggaggau

SEQ ID NO: 2626 - RNA, 20 nt, Artificial Sequence
  spacer sequence ATCN PAM
uccuggaagcugccugagau

SEQ ID NO: 2627 - RNA, 20 nt, Artificial Sequence
  spacer sequence ATCN PAM
gaaaaccaugugcccaggag

SEQ ID NO: 2628 - RNA, 20 nt, Artificial Sequence
  spacer sequence ATCN PAM
ucugaaaaccaugugcccag

SEQ ID NO: 2629 - RNA, 20 nt, Artificial Sequence
  spacer sequence ATCN PAM
ugggccccggguuuagucca

SEQ ID NO: 2630 - RNA, 20 nt, Artificial Sequence
  spacer sequence ATCN PAM
auguuuuccacggcggcugc

SEQ ID NO: 2631 - RNA, 20 nt, Artificial Sequence
  spacer sequence ATCN PAM
gugcuucagaaagccagaca

SEQ ID NO: 2632 - RNA, 20 nt, Artificial Sequence
  spacer sequence ATCN PAM
accccagauaaccgaacaca

SEQ ID NO: 2633 - RNA, 20 nt, Artificial Sequence
  spacer sequence ATCN PAM
gggguggauuccucggagcc

SEQ ID NO: 2634 - RNA, 20 nt, Artificial Sequence
  spacer sequence ATCN PAM
ugcugcuguuuccuuccacg

SEQ ID NO: 2635 - RNA, 20 nt, Artificial Sequence
  spacer sequence ATCN PAM
ugccacuguuuccuuccacg

SEQ ID NO: 2636 - RNA, 20 nt, Artificial Sequence
  spacer sequence ATCN PAM
acgccuggcucccgugaauc

SEQ ID NO: 2637 - RNA, 20 nt, Artificial Sequence
  spacer sequence ATCN PAM
gcgcuguggcuggcgucaga

SEQ ID NO: 2638 - RNA, 20 nt, Artificial Sequence
  spacer sequence ATCN PAM
ucagggugcaucugcgcugu

SEQ ID NO: 2639 - RNA, 20 nt, Artificial Sequence
  spacer sequence ATCN PAM
gucugagcccuacauccuca

SEQ ID NO: 2640 - RNA, 20 nt, Artificial Sequence
  spacer sequence ATCN PAM
cacgcuguguggccuuucgu

SEQ ID NO: 2641 - RNA, 20 nt, Artificial Sequence
  spacer sequence ATCN PAM
cauuuccaugaaauguccag

SEQ ID NO: 2642 - RNA, 20 nt, Artificial Sequence
  spacer sequence ATCN PAM
caggcgugagccaccacgcc

SEQ ID NO: 2643 - RNA, 20 nt, Artificial Sequence
  spacer sequence ATCN PAM
cagcacuuugggaggccgag

SEQ ID NO: 2644 - RNA, 20 nt, Artificial Sequence
  spacer sequence ATCN PAM
ugccgcugcacuccagccug

SEQ ID NO: 2645 - RNA, 20 nt, Artificial Sequence
  spacer sequence ATCN PAM
ugacccaccaaaacuucugc

SEQ ID NO: 2646 - RNA, 20 nt, Artificial Sequence
  spacer sequence ATCN PAM
caguacuuugggaggccaag

SEQ ID NO: 2647 - RNA, 20 nt, Artificial Sequence
  spacer sequence ATCN PAM
cagcucacugcaaacuccgc

SEQ ID NO: 2648 - RNA, 20 nt, Artificial Sequence
  spacer sequence ATCN PAM
cgccacugcacuccagccug

SEQ ID NO: 2649 - RNA, 20 nt, Artificial Sequence
  spacer sequence ATCN PAM
cuugaacccgggaggcgagg

SEQ ID NO: 2650 - RNA, 20 nt, Artificial Sequence
  spacer sequence ATCN PAM
cggcucacugcaacccucgc

SEQ ID NO: 2651 - RNA, 20 nt, Artificial Sequence
  spacer sequence ATCN PAM
cgccacugcaagacuccguc

SEQ ID NO: 2652 - RNA, 20 nt, Artificial Sequence
  spacer sequence ATCN PAM
ccgcucuacagacaacccca

SEQ ID NO: 2653 - RNA, 20 nt, Artificial Sequence
  spacer sequence ATCN PAM
aggcuggggcagugagacgc

SEQ ID NO: 2654 - RNA, 20 nt, Artificial Sequence
  spacer sequence ATCN PAM
ugggggccuguggccuucag

SEQ ID NO: 2655 - RNA, 20 nt, Artificial Sequence
  spacer sequence ATCN PAM
caccccguccgucucucccu

SEQ ID NO: 2656 - RNA, 20 nt, Artificial Sequence
  spacer sequence ATCN PAM
cugccgcugacagccgcagg

SEQ ID NO: 2657 - RNA, 20 nt, Artificial Sequence
  spacer sequence ATCN PAM
cccucuguccccagccccug

SEQ ID NO: 2658 - RNA, 20 nt, Artificial Sequence
  spacer sequence ATCN PAM
ccaccucgguuuugucuuag

SEQ ID NO: 2659 - RNA, 20 nt, Artificial Sequence
  spacer sequence ATCN PAM
ggaccuggcgugcccugcaa

SEQ ID NO: 2660 - RNA, 20 nt, Artificial Sequence
  spacer sequence ATCN PAM
ccaggguugacggaggucga

SEQ ID NO: 2661 - RNA, 20 nt, Artificial Sequence
  spacer sequence ATCN PAM
auccggaggggcggaguggc

SEQ ID NO: 2662 - RNA, 20 nt, Artificial Sequence
  spacer sequence ATCN PAM
ggaggggcggaguggccucg

SEQ ID NO: 2663 - RNA, 20 nt, Artificial Sequence
  spacer sequence ATCN PAM
uccccggggacucacacacc

SEQ ID NO: 2664 - RNA, 20 nt, Artificial Sequence
  spacer sequence ATCN PAM
cagagcccccggcagccaag

SEQ ID NO: 2665 - RNA, 20 nt, Artificial Sequence
  spacer sequence ATCN PAM
caggaaugugggcgaggucc

SEQ ID NO: 2666 - RNA, 20 nt, Artificial Sequence
  spacer sequence ATCN PAM
aaggucccccaaggacccac

SEQ ID NO: 2667 - RNA, 20 nt, Artificial Sequence
  spacer sequence ATCN PAM
cauucuuggcugugagguaa

SEQ ID NO: 2668 - RNA, 20 nt, Artificial Sequence
  spacer sequence ATCN PAM
ccuuuggugagggcugcggc

SEQ ID NO: 2669 - RNA, 20 nt, Artificial Sequence
  spacer sequence ATCN PAM
cuggggguacaggaaccccu

SEQ ID NO: 2670 - RNA, 20 nt, Artificial Sequence
  spacer sequence ATCN PAM
ggugauuuaagaaaacgugu

SEQ ID NO: 2671 - RNA, 20 nt, Artificial Sequence
  spacer sequence ATCN PAM
ccagauuccgccaccaaccu

SEQ ID NO: 2672 - RNA, 20 nt, Artificial Sequence
  spacer sequence ATCN PAM
ggaagugaccaagaaaauuc

SEQ ID NO: 2673 - RNA, 20 nt, Artificial Sequence
  spacer sequence ATCN PAM
ccacggcgcagccuccgggu

SEQ ID NO: 2674 - RNA, 20 nt, Artificial Sequence
  spacer sequence ATCN PAM
caagcaaaaaaaaggaagcu

SEQ ID NO: 2675 - RNA, 20 nt, Artificial Sequence
  spacer sequence ATCN PAM
aggggugauggauagaaggc

SEQ ID NO: 2676 - RNA, 20 nt, Artificial Sequence
  spacer sequence ATCN PAM
ccccuggauuucugggcagc

SEQ ID NO: 2677 - RNA, 20 nt, Artificial Sequence
  spacer sequence ATCN PAM
aucaccccuggauuucuggg

SEQ ID NO: 2678 - RNA, 20 nt, Artificial Sequence
  spacer sequence ATCN PAM
ccuucuauccaucaccccug

SEQ ID NO: 2679 - RNA, 20 nt, Artificial Sequence
  spacer sequence ATCN PAM
guugggccacugcaggcccc

SEQ ID NO: 2680 - RNA, 20 nt, Artificial Sequence
  spacer sequence ATCN PAM
uccuagaggaaaauucuaga

SEQ ID NO: 2681 - RNA, 20 nt, Artificial Sequence
  spacer sequence ATCN PAM
uuucccugccaccccgagcu

SEQ ID NO: 2682 - RNA, 20 nt, Artificial Sequence
  spacer sequence ATCN PAM
cuguggccuuccuuccuucc

SEQ ID NO: 2683 - RNA, 20 nt, Artificial Sequence
  spacer sequence ATCN PAM
uaguuugcugcggcccugac

SEQ ID NO: 2684 - RNA, 20 nt, Artificial Sequence
  spacer sequence ATCN PAM
ccuaaguagcugggacuaca

SEQ ID NO: 2685 - RNA, 20 nt, Artificial Sequence
  spacer sequence ATCN PAM
cuuccaccugggaggcggag

SEQ ID NO: 2686 - RNA, 20 nt, Artificial Sequence
  spacer sequence ATCN PAM
cagcuacuugggaggcugag

SEQ ID NO: 2687 - RNA, 20 nt, Artificial Sequence
  spacer sequence ATCN PAM
caaggucaggaguucgagac

SEQ ID NO: 2688 - RNA, 20 nt, Artificial Sequence
  spacer sequence ATCN PAM
acccaccucggccucccaaa

SEQ ID NO: 2689 - RNA, 20 nt, Artificial Sequence
  spacer sequence ATCN PAM
cagcacuuugggaggccgag

SEQ ID NO: 2690 - RNA, 20 nt, Artificial Sequence
  spacer sequence ATCN PAM
ugccacugcacuccagccug

SEQ ID NO: 2691 - RNA, 20 nt, Artificial Sequence
  spacer sequence ATCN PAM
caucccacugcagccucgac

SEQ ID NO: 2692 - RNA, 20 nt, Artificial Sequence
  spacer sequence ATCN PAM
cacugcagccucgaccuccu

SEQ ID NO: 2693 - RNA, 20 nt, Artificial Sequence
  spacer sequence ATCN PAM
cuugagcccaggaggucgag

SEQ ID NO: 2694 - RNA, 20 nt, Artificial Sequence
  spacer sequence ATCN PAM
uccugccucagccuccugag

SEQ ID NO: 2695 - RNA, 20 nt, Artificial Sequence
  spacer sequence ATCN PAM
cagcaauuugggaagcugag

SEQ ID NO: 2696 - RNA, 20 nt, Artificial Sequence
  spacer sequence ATCN PAM
guccgccucagcuucccaaa

SEQ ID NO: 2697 - RNA, 20 nt, Artificial Sequence
  spacer sequence ATCN PAM
cuagaggucaggaguuugag

SEQ ID NO: 2698 - RNA, 20 nt, Artificial Sequence
  spacer sequence ATCN PAM
cugucucuacuaaaaauaca

SEQ ID NO: 2699 - RNA, 20 nt, Artificial Sequence
  spacer sequence ATCN PAM
cagcuacuccggaggcugag

SEQ ID NO: 2700 - RNA, 20 nt, Artificial Sequence
  spacer sequence ATCN PAM
cuugaacccgggaagcagag

SEQ ID NO: 2701 - RNA, 20 nt, Artificial Sequence
  spacer sequence ATCN PAM
caccucacugcaaccucugc

SEQ ID NO: 2702 - RNA, 20 nt, Artificial Sequence
  spacer sequence ATCN PAM
ugccccugggcgacagaggg

SEQ ID NO: 2703 - RNA, 20 nt, Artificial Sequence
  spacer sequence ATCN PAM
aucucaaaaaaaaaaaaaaa

SEQ ID NO: 2704 - RNA, 20 nt, Artificial Sequence
  spacer sequence ATCN PAM
caaaaaaaaaaaaaaaaaau

SEQ ID NO: 2705 - RNA, 20 nt, Artificial Sequence
  spacer sequence ATCN PAM
ggaaauuuuuuuuuuuuuuu

SEQ ID NO: 2706 - RNA, 20 nt, Artificial Sequence
  spacer sequence ATCN PAM
cuugagcucaggaguucaag

SEQ ID NO: 2707 - RNA, 20 nt, Artificial Sequence
  spacer sequence ATCN PAM
cagguugguggauuacaggc

SEQ ID NO: 2708 - RNA, 20 nt, Artificial Sequence
  spacer sequence ATCN PAM
accaaccugggaugucgagg

SEQ ID NO: 2709 - RNA, 20 nt, Artificial Sequence
  spacer sequence ATCN PAM
caacagcagagccugacaaa

SEQ ID NO: 2710 - RNA, 20 nt, Artificial Sequence
  spacer sequence ATCN PAM
uccccaaccccgcacaccag

SEQ ID NO: 2711 - RNA, 20 nt, Artificial Sequence
  spacer sequence ATCN PAM
agcgccaaugccacauucca

SEQ ID NO: 2712 - RNA, 20 nt, Artificial Sequence
  spacer sequence ATCN PAM
gacacgcagucagcgcacac

SEQ ID NO: 2713 - RNA, 20 nt, Artificial Sequence
  spacer sequence ATCN PAM
guggggccacaguccucugu

SEQ ID NO: 2714 - RNA, 20 nt, Artificial Sequence
  spacer sequence ATCN PAM
ggaagaugaccaggaggagg

SEQ ID NO: 2715 - RNA, 20 nt, Artificial Sequence
  spacer sequence ATCN PAM
uccagaugcaggagcuggua

SEQ ID NO: 2716 - RNA, 20 nt, Artificial Sequence
  spacer sequence ATCN PAM
cuuugaacacuugcagaccg

SEQ ID NO: 2717 - RNA, 20 nt, Artificial Sequence
  spacer sequence ATCN PAM
gccugccucagccucccaaa

SEQ ID NO: 2718 - RNA, 20 nt, Artificial Sequence
  spacer sequence ATCN PAM
ccugaggucgggaguucgag

SEQ ID NO: 2719 - RNA, 20 nt, Artificial Sequence
  spacer sequence ATCN PAM
cuugaacccgggaggcggag

SEQ ID NO: 2720 - RNA, 20 nt, Artificial Sequence
  spacer sequence ATCN PAM
gggaauaaauggauacaaaa

SEQ ID NO: 2721 - RNA, 20 nt, Artificial Sequence
  spacer sequence ATCN PAM
auuuauucccugauguguuu

SEQ ID NO: 2722 - RNA, 20 nt, Artificial Sequence
  spacer sequence ATCN PAM
gcuauuguucauuucuuaag

SEQ ID NO: 2723 - RNA, 20 nt, Artificial Sequence
  spacer sequence ATCN PAM
cuugaggucaggaguuugag

SEQ ID NO: 2724 - RNA, 20 nt, Artificial Sequence
  spacer sequence ATCN PAM
ucccgccucugcuauuuauu

SEQ ID NO: 2725 - RNA, 20 nt, Artificial Sequence
  spacer sequence ATCN PAM
uucuuuuccuauuuauuuag

SEQ ID NO: 2726 - RNA, 20 nt, Artificial Sequence
  spacer sequence ATCN PAM
gcccaugccggccucccagu

SEQ ID NO: 2727 - RNA, 20 nt, Artificial Sequence
  spacer sequence ATCN PAM
cagcacacugggaggccggc

SEQ ID NO: 2728 - RNA, 20 nt, Artificial Sequence
  spacer sequence ATCN PAM
cuauuaaaaauuuaaaaaug

SEQ ID NO: 2729 - RNA, 20 nt, Artificial Sequence
  spacer sequence ATCN PAM
gcccaccucggccucccaaa

SEQ ID NO: 2730 - RNA, 20 nt, Artificial Sequence
  spacer sequence ATCN PAM
cagcacuuugggaggccgag

SEQ ID NO: 2731 - RNA, 20 nt, Artificial Sequence
  spacer sequence ATCN PAM
caggugggagccacgcgccc

SEQ ID NO: 2732 - RNA, 20 nt, Artificial Sequence
  spacer sequence ATCN PAM
aaaccagagcaaacugguac

SEQ ID NO: 2733 - RNA, 20 nt, Artificial Sequence
  spacer sequence ATCN PAM
cagguaccaguuugcucugg

SEQ ID NO: 2734 - RNA, 20 nt, Artificial Sequence
  spacer sequence ATCN PAM
auaguuuauagcaggaaacg

SEQ ID NO: 2735 - RNA, 20 nt, Artificial Sequence
  spacer sequence ATCN PAM
ugggcccgccuggggcucuu

SEQ ID NO: 2736 - RNA, 20 nt, Artificial Sequence
  spacer sequence ATCN PAM
ggaucccacauccccucaca

SEQ ID NO: 2737 - RNA, 20 nt, Artificial Sequence
  spacer sequence ATCN PAM
cgauaggaagcuaauuuugg

SEQ ID NO: 2738 - RNA, 20 nt, Artificial Sequence
  spacer sequence ATCN PAM
cacauccccucacaauggag

SEQ ID NO: 2739 - RNA, 20 nt, Artificial Sequence
  spacer sequence ATCN PAM
ccucacaauggaggccugac

SEQ ID NO: 2740 - RNA, 20 nt, Artificial Sequence
  spacer sequence ATCN PAM
aauaaauaaaaauaaaagua

SEQ ID NO: 2741 - RNA, 20 nt, Artificial Sequence
  spacer sequence ATCN PAM
cacuaaugcaguccagccug

SEQ ID NO: 2742 - RNA, 20 nt, Artificial Sequence
  spacer sequence ATCN PAM
uggcucacugcaaccucugc

SEQ ID NO: 2743 - RNA, 20 nt, Artificial Sequence
  spacer sequence ATCN PAM
cgccacugcacuccagccug

SEQ ID NO: 2744 - RNA, 20 nt, Artificial Sequence
  spacer sequence ATCN PAM
cagcucacugcaaccuccgc

SEQ ID NO: 2745 - RNA, 20 nt, Artificial Sequence
  spacer sequence ATCN PAM
cagcuacucgggaggcugag

SEQ ID NO: 2746 - RNA, 20 nt, Artificial Sequence
  spacer sequence ATCN PAM
uugguagagacaggcuuuug

SEQ ID NO: 2747 - RNA, 20 nt, Artificial Sequence
  spacer sequence ATCN PAM
acccgccucagucacccaac

SEQ ID NO: 2748 - RNA, 20 nt, Artificial Sequence
  spacer sequence ATCN PAM
cagcacguugggugacugag

SEQ ID NO: 2749 - RNA, 20 nt, Artificial Sequence
  spacer sequence ATCN PAM
caggcgugagccaccgcgcc

SEQ ID NO: 2750 - RNA, 20 nt, Artificial Sequence
  spacer sequence ATCN PAM
auggcagguggaaggucugc

SEQ ID NO: 2751 - RNA, 20 nt, Artificial Sequence
  spacer sequence ATCN PAM
cucugugcccccgccccacc

SEQ ID NO: 2752 - RNA, 20 nt, Artificial Sequence
  spacer sequence ATCN PAM
gcucaccagcccgaccacag

SEQ ID NO: 2753 - RNA, 20 nt, Artificial Sequence
  spacer sequence ATCN PAM
agcagccaucugcucaccag

SEQ ID NO: 2754 - RNA, 20 nt, Artificial Sequence
  spacer sequence ATCN PAM
cugacagcccggcucacguu

SEQ ID NO: 2755 - RNA, 20 nt, Artificial Sequence
  spacer sequence ATCN PAM
uccuuuuaauaaauuuugca

SEQ ID NO: 2756 - RNA, 20 nt, Artificial Sequence
  spacer sequence ATCN PAM
ccaucaccacacgaggcccc

SEQ ID NO: 2757 - RNA, 20 nt, Artificial Sequence
  spacer sequence ATCN PAM
ccacacgaggccccagcacg

SEQ ID NO: 2758 - RNA, 20 nt, Artificial Sequence
  spacer sequence ATCN PAM
ugcggggacuuaggccagcc

SEQ ID NO: 2759 - RNA, 20 nt, Artificial Sequence
  spacer sequence ATCN PAM
guguccaaauuucccuuguc

SEQ ID NO: 2760 - RNA, 20 nt, Artificial Sequence
  spacer sequence ATCN PAM
uuagggcgggcaccaccgca

SEQ ID NO: 2761 - RNA, 20 nt, Artificial Sequence
  spacer sequence ATCN PAM
cauccuaacuaauuacaucu

SEQ ID NO: 2762 - RNA, 20 nt, Artificial Sequence
  spacer sequence ATCN PAM
uaacuaauuacaucugcaga

SEQ ID NO: 2763 - RNA, 20 nt, Artificial Sequence
  spacer sequence ATCN PAM
gcagaaacccuauuuccaca

SEQ ID NO: 2764 - RNA, 20 nt, Artificial Sequence
  spacer sequence ATCN PAM
gucuuugcgugaaccccagg

SEQ ID NO: 2765 - RNA, 20 nt, Artificial Sequence
  spacer sequence ATCN PAM
uugagggaacucaauucacc

SEQ ID NO: 2766 - RNA, 20 nt, Artificial Sequence
  spacer sequence ATCN PAM
gagggggaagggccggccac

SEQ ID NO: 2767 - RNA, 20 nt, Artificial Sequence
  spacer sequence ATCN PAM
aauucugccuccucagcgag

SEQ ID NO: 2768 - RNA, 20 nt, Artificial Sequence
  spacer sequence ATCN PAM
ucggcaaccccuggcuucua

SEQ ID NO: 2769 - RNA, 20 nt, Artificial Sequence
  spacer sequence ATCN PAM
agucucuaaagcaacagaaa

SEQ ID NO: 2770 - RNA, 20 nt, Artificial Sequence
  spacer sequence ATCN PAM
aggcuggagugcaguggcga

SEQ ID NO: 2771 - RNA, 20 nt, Artificial Sequence
  spacer sequence ATCN PAM
cgguucacugcagccuccau

SEQ ID NO: 2772 - RNA, 20 nt, Artificial Sequence
  spacer sequence ATCN PAM
ccugggcucuggugagacua

SEQ ID NO: 2773 - RNA, 20 nt, Artificial Sequence
  spacer sequence ATCN PAM
gcugggcgugguggugcacg

SEQ ID NO: 2774 - RNA, 20 nt, Artificial Sequence
  spacer sequence ATCN PAM
ucgugccucgcccucccgaa

SEQ ID NO: 2775 - RNA, 20 nt, Artificial Sequence
  spacer sequence ATCN PAM
cuucgggagggcgaggcacg

SEQ ID NO: 2776 - RNA, 20 nt, Artificial Sequence
  spacer sequence ATCN PAM
caucacuucgggagggcgag

SEQ ID NO: 2777 - RNA, 20 nt, Artificial Sequence
  spacer sequence ATCN PAM
uuuccuuuuuuuuuuuuuuu

SEQ ID NO: 2778 - RNA, 20 nt, Artificial Sequence
  spacer sequence ATCN PAM
caccauugcacuccagccug

SEQ ID NO: 2779 - RNA, 20 nt, Artificial Sequence
  spacer sequence ATCN PAM
cagcucacugcaaccuccgc

SEQ ID NO: 2780 - RNA, 20 nt, Artificial Sequence
  spacer sequence ATCN PAM
cuugaaccugggaggcggag

SEQ ID NO: 2781 - RNA, 20 nt, Artificial Sequence
  spacer sequence ATCN PAM
cagcuacucgggaggcugag

SEQ ID NO: 2782 - RNA, 20 nt, Artificial Sequence
  spacer sequence ATCN PAM
cagcaguuugggaggcugag

SEQ ID NO: 2783 - RNA, 20 nt, Artificial Sequence
  spacer sequence ATCN PAM
ccugaaaacccugucucggc

SEQ ID NO: 2784 - RNA, 20 nt, Artificial Sequence
  spacer sequence ATCN PAM
gccugccucgggcucccgaa

SEQ ID NO: 2785 - RNA, 20 nt, Artificial Sequence
  spacer sequence ATCN PAM
uagcacuucgggagcccgag

SEQ ID NO: 2786 - RNA, 20 nt, Artificial Sequence
  spacer sequence ATCN PAM
caaaaaauuaaauaaagcca

SEQ ID NO: 2787 - RNA, 20 nt, Artificial Sequence
  spacer sequence ATCN PAM
caucucaaaaaauuaaauaa

SEQ ID NO: 2788 - RNA, 20 nt, Artificial Sequence
  spacer sequence ATCN PAM
cacucuguggcccaggaugg

SEQ ID NO: 2789 - RNA, 20 nt, Artificial Sequence
  spacer sequence ATCN PAM
ugggccacagagugagaucc

SEQ ID NO: 2790 - RNA, 20 nt, Artificial Sequence
  spacer sequence ATCN PAM
caccacugcacuccauccug

SEQ ID NO: 2791 - RNA, 20 nt, Artificial Sequence
  spacer sequence ATCN PAM
cagcuaacuacagccuugaa

SEQ ID NO: 2792 - RNA, 20 nt, Artificial Sequence
  spacer sequence ATCN PAM
cuacuaaaaauacaaaaauu

SEQ ID NO: 2793 - RNA, 20 nt, Artificial Sequence
  spacer sequence ATCN PAM
cagcuccuugggacucugag

SEQ ID NO: 2794 - RNA, 20 nt, Artificial Sequence
  spacer sequence ATCN PAM
auucuccugccucagagucc

SEQ ID NO: 2795 - RNA, 20 nt, Artificial Sequence
  spacer sequence ATCN PAM
caguucacugcaaccucugc

SEQ ID NO: 2796 - RNA, 20 nt, Artificial Sequence
  spacer sequence ATCN PAM
ugccauugcacuccagccug

SEQ ID NO: 2797 - RNA, 20 nt, Artificial Sequence
  spacer sequence ATCN PAM
cauuuauuuuauuuuuucga

SEQ ID NO: 2798 - RNA, 20 nt, Artificial Sequence
  spacer sequence ATCN PAM
cacgcuguguguccuucugu

SEQ ID NO: 2799 - RNA, 20 nt, Artificial Sequence
  spacer sequence ATCN PAM
gcgcuguggccugggucaga

SEQ ID NO: 2800 - RNA, 20 nt, Artificial Sequence
  spacer sequence ATCN PAM
aggcucugacccaggccaca

SEQ ID NO: 2801 - RNA, 20 nt, Artificial Sequence
  spacer sequence ATCN PAM
uuuucacgcugaguuguguu

SEQ ID NO: 2802 - RNA, 20 nt, Artificial Sequence
  spacer sequence ATCN PAM
uaguguuauucacggaggcc

SEQ ID NO: 2803 - RNA, 20 nt, Artificial Sequence
  spacer sequence ATCN PAM
ccaagccaagccccaccccu

SEQ ID NO: 2804 - RNA, 20 nt, Artificial Sequence
  spacer sequence ATCN PAM
cggcucacugcaaccuccgc

SEQ ID NO: 2805 - RNA, 20 nt, Artificial Sequence
  spacer sequence ATCN PAM
gggcaugguggugggugccu

SEQ ID NO: 2806 - RNA, 20 nt, Artificial Sequence
  spacer sequence ATCN PAM
gccuggccaacauggggaaa

SEQ ID NO: 2807 - RNA, 20 nt, Artificial Sequence
  spacer sequence ATCN PAM
ugaacuccugaucucaggga

SEQ ID NO: 2808 - RNA, 20 nt, Artificial Sequence
  spacer sequence ATCN PAM
ggaguucaagaucagccugg

SEQ ID NO: 2809 - RNA, 20 nt, Artificial Sequence
  spacer sequence ATCN PAM
cagggauccacgcaccucag

SEQ ID NO: 2810 - RNA, 20 nt, Artificial Sequence
  spacer sequence ATCN PAM
cugagaucaggaguucaaga

SEQ ID NO: 2811 - RNA, 20 nt, Artificial Sequence
  spacer sequence ATCN PAM
acgcaccucagcacccucuu

SEQ ID NO: 2812 - RNA, 20 nt, Artificial Sequence
  spacer sequence ATCN PAM
ccccuagagcuggguccuga

SEQ ID NO: 2813 - RNA, 20 nt, Artificial Sequence
  spacer sequence ATCN PAM
uccucaauccccccuagagc

SEQ ID NO: 2814 - RNA, 20 nt, Artificial Sequence
  spacer sequence ATCN PAM
gggcccagcucuagcugaac

SEQ ID NO: 2815 - RNA, 20 nt, Artificial Sequence
  spacer sequence ATCN PAM
gccucucccccaggccuggc

SEQ ID NO: 2816 - RNA, 20 nt, Artificial Sequence
  spacer sequence ATCN PAM
uuccccaccccauccgccuc

SEQ ID NO: 2817 - RNA, 20 nt, Artificial Sequence
  spacer sequence ATCN PAM
gcccagacccauccuucccc

SEQ ID NO: 2818 - RNA, 20 nt, Artificial Sequence
  spacer sequence ATCN PAM
caggacaccucccuaugccc

SEQ ID NO: 2819 - RNA, 20 nt, Artificial Sequence
  spacer sequence ATCN PAM
aagucacuucucaagagucu

SEQ ID NO: 2820 - RNA, 20 nt, Artificial Sequence
  spacer sequence ATCN PAM
gcccccgaauuaucaaaguc

SEQ ID NO: 2821 - RNA, 20 nt, Artificial Sequence
  spacer sequence ATCN PAM
uugggcccaccaccccuugc

SEQ ID NO: 2822 - RNA, 20 nt, Artificial Sequence
  spacer sequence ATCN PAM
cccaccccaagaaggacccc

SEQ ID NO: 2823 - RNA, 20 nt, Artificial Sequence
  spacer sequence ATCN PAM
cagcacacugggcagcugag

SEQ ID NO: 2824 - RNA, 20 nt, Artificial Sequence
  spacer sequence ATCN PAM
caccguguuacccaggcugg

SEQ ID NO: 2825 - RNA, 20 nt, Artificial Sequence
  spacer sequence ATCN PAM
ucccgccucagccucucggu

SEQ ID NO: 2826 - RNA, 20 nt, Artificial Sequence
  spacer sequence ATCN PAM
ccugagcuggggagguuggg

SEQ ID NO: 2827 - RNA, 20 nt, Artificial Sequence
  spacer sequence ATCN PAM
uaaagggaaugggggcuuua

SEQ ID NO: 2828 - RNA, 20 nt, Artificial Sequence
  spacer sequence ATCN PAM
cuacuuccuauaccaaccca

SEQ ID NO: 2829 - RNA, 20 nt, Artificial Sequence
  spacer sequence ATCN PAM
acugcggcucgaggcugguc

SEQ ID NO: 2830 - RNA, 20 nt, Artificial Sequence
  spacer sequence ATCN PAM
ggccuugggguggccucacc

SEQ ID NO: 2831 - RNA, 20 nt, Artificial Sequence
  spacer sequence ATCN PAM
aggaaaugggccggagaggc

SEQ ID NO: 2832 - RNA, 20 nt, Artificial Sequence
  spacer sequence ATCN PAM
agggcgcggccucgggcugg

SEQ ID NO: 2833 - RNA, 20 nt, Artificial Sequence
  spacer sequence ATCN PAM
cugagcccucacuuuuguaa

SEQ ID NO: 2834 - RNA, 20 nt, Artificial Sequence
  spacer sequence ATCN PAM
uaauuacaaaagugagggcu

SEQ ID NO: 2835 - RNA, 20 nt, Artificial Sequence
  spacer sequence ATCN PAM
cagcacuuugggagaccaag

SEQ ID NO: 2836 - RNA, 20 nt, Artificial Sequence
  spacer sequence ATCN PAM
gcccgccuuggucucccaaa

SEQ ID NO: 2837 - RNA, 20 nt, Artificial Sequence
  spacer sequence ATCN PAM
ccugaggucaggaguucgag

SEQ ID NO: 2838 - RNA, 20 nt, Artificial Sequence
  spacer sequence ATCN PAM
cuacuaaaaauacaaaaauu

SEQ ID NO: 2839 - RNA, 20 nt, Artificial Sequence
  spacer sequence ATCN PAM
accugugagccaccacaccc

SEQ ID NO: 2840 - RNA, 20 nt, Artificial Sequence
  spacer sequence ATCN PAM
cagcacuuugggaggccaag

SEQ ID NO: 2841 - RNA, 20 nt, Artificial Sequence
  spacer sequence ATCN PAM
gcccuccuuggccucccaaa

SEQ ID NO: 2842 - RNA, 20 nt, Artificial Sequence
  spacer sequence ATCN PAM
caaggucaagagaucgagac

SEQ ID NO: 2843 - RNA, 20 nt, Artificial Sequence
  spacer sequence ATCN PAM
cuugaccuugugaucugccc

SEQ ID NO: 2844 - RNA, 20 nt, Artificial Sequence
  spacer sequence ATCN PAM
agaccauccuggccaacaug

SEQ ID NO: 2845 - RNA, 20 nt, Artificial Sequence
  spacer sequence ATCN PAM
uggccaacaugcugaaaccc

SEQ ID NO: 2846 - RNA, 20 nt, Artificial Sequence
  spacer sequence ATCN PAM
gaacugaaaggugucugagg

SEQ ID NO: 2847 - RNA, 20 nt, Artificial Sequence
  spacer sequence ATCN PAM
uuuucaaaaugguaaccagc

SEQ ID NO: 2848 - RNA, 20 nt, Artificial Sequence
  spacer sequence ATCN PAM
cguugguuugcugguuacca

SEQ ID NO: 2849 - RNA, 20 nt, Artificial Sequence
  spacer sequence ATCN PAM
uucaugaaggaggcagcugg

SEQ ID NO: 2850 - RNA, 20 nt, Artificial Sequence
  spacer sequence ATCN PAM
cagcccgcaggccagcugcc

SEQ ID NO: 2851 - RNA, 20 nt, Artificial Sequence
  spacer sequence ATCN PAM
ggugcccacgggagccccug

SEQ ID NO: 2852 - RNA, 20 nt, Artificial Sequence
  spacer sequence ATCN PAM
cuugaacgcgggaggcggag

SEQ ID NO: 2853 - RNA, 20 nt, Artificial Sequence
  spacer sequence ATCN PAM
cagcuacucgggagacugag

SEQ ID NO: 2854 - RNA, 20 nt, Artificial Sequence
  spacer sequence ATCN PAM
cuuaccccgcaagccccaca

SEQ ID NO: 2855 - RNA, 20 nt, Artificial Sequence
  spacer sequence ATCN PAM
uggccccgccaggccuccug

SEQ ID NO: 2856 - RNA, 20 nt, Artificial Sequence
  spacer sequence ATCN PAM
gaaguggguuuuaacacgau

SEQ ID NO: 2857 - RNA, 20 nt, Artificial Sequence
  spacer sequence ATCN PAM
uguuaaaacccacuucugau

SEQ ID NO: 2858 - RNA, 20 nt, Artificial Sequence
  spacer sequence ATCN PAM
caggcacuccgcgaacagac

SEQ ID NO: 2859 - RNA, 20 nt, Artificial Sequence
  spacer sequence ATCN PAM
ucacaccaccagaaccagcc

SEQ ID NO: 2860 - RNA, 20 nt, Artificial Sequence
  spacer sequence ATCN PAM
acaguaacacacugggcuuc

SEQ ID NO: 2861 - RNA, 20 nt, Artificial Sequence
  spacer sequence ATCN PAM
gggagaagcccaguguguua

SEQ ID NO: 2862 - RNA, 20 nt, Artificial Sequence
  spacer sequence ATCN PAM
accggacauuccugaugagu

SEQ ID NO: 2863 - RNA, 20 nt, Artificial Sequence
  spacer sequence ATCN PAM
ggaauguccgguggaucugg

SEQ ID NO: 2864 - RNA, 20 nt, Artificial Sequence
  spacer sequence ATCN PAM
gcagccagggucacucauca

SEQ ID NO: 2865 - RNA, 20 nt, Artificial Sequence
  spacer sequence ATCN PAM
cacggcaagguccuuuggcc

SEQ ID NO: 2866 - RNA, 20 nt, Artificial Sequence
  spacer sequence ATCN PAM
gggcuggaauccucuggcac

SEQ ID NO: 2867 - RNA, 20 nt, Artificial Sequence
  spacer sequence ATCN PAM
ucuggcaccagacgcccggc

SEQ ID NO: 2868 - RNA, 20 nt, Artificial Sequence
  spacer sequence ATCN PAM
aggcgagccuagcgcccugc

SEQ ID NO: 2869 - RNA, 20 nt, Artificial Sequence
  spacer sequence ATCN PAM
cgcuaauucuauuuagggag

SEQ ID NO: 2870 - RNA, 20 nt, Artificial Sequence
  spacer sequence ATCN PAM
ccucacucugggauggcucc

SEQ ID NO: 2871 - RNA, 20 nt, Artificial Sequence
  spacer sequence ATCN PAM
cagagugaggggaugacccc

SEQ ID NO: 2872 - RNA, 20 nt, Artificial Sequence
  spacer sequence ATCN PAM
caugaagagucugacagagc

SEQ ID NO: 2873 - RNA, 20 nt, Artificial Sequence
  spacer sequence ATCN PAM
gcgcuccugggaacauuagu

SEQ ID NO: 2874 - RNA, 20 nt, Artificial Sequence
  spacer sequence ATCN PAM
cagcagcagaaaacacccua

SEQ ID NO: 2875 - RNA, 20 nt, Artificial Sequence
  spacer sequence ATCN PAM
aaggccgcccgccuacaggu

SEQ ID NO: 2876 - RNA, 20 nt, Artificial Sequence
  spacer sequence ATCN PAM
gccuacagcuggagaaacug

SEQ ID NO: 2877 - RNA, 20 nt, Artificial Sequence
  spacer sequence ATCN PAM
gccuacagcgggggaaacug

SEQ ID NO: 2878 - RNA, 20 nt, Artificial Sequence
  spacer sequence ATCN PAM
gccuacagcuggggaaacug

SEQ ID NO: 2879 - RNA, 20 nt, Artificial Sequence
  spacer sequence ATCN PAM
ccgcagucgggauucgcugu

SEQ ID NO: 2880 - RNA, 20 nt, Artificial Sequence
  spacer sequence ATCN PAM
cgacugcggagauagggaaa

SEQ ID NO: 2881 - RNA, 20 nt, Artificial Sequence
  spacer sequence ATCN PAM
ggggucacccccgaccguuc

SEQ ID NO: 2882 - RNA, 20 nt, Artificial Sequence
  spacer sequence ATCN PAM
uggcgcgcccgcaguaucug

SEQ ID NO: 2883 - RNA, 20 nt, Artificial Sequence
  spacer sequence ATCN PAM
guggccacuguggaaacagc

SEQ ID NO: 2884 - RNA, 20 nt, Artificial Sequence
  spacer sequence ATCN PAM
cgcggggagggaaaggccgc

SEQ ID NO: 2885 - RNA, 20 nt, Artificial Sequence
  spacer sequence ATCN PAM
cccagaugugagcgcucagu

SEQ ID NO: 2886 - RNA, 20 nt, Artificial Sequence
  spacer sequence ATCN PAM
gggugaucgcgcggggaggg

SEQ ID NO: 2887 - RNA, 20 nt, Artificial Sequence
  spacer sequence ATCN PAM
gacuuuuuggccaugugccc

SEQ ID NO: 2888 - RNA, 20 nt, Artificial Sequence
  spacer sequence ATCN PAM
uggagucgggcaggaaaccc

SEQ ID NO: 2889 - RNA, 20 nt, Artificial Sequence
  spacer sequence ATCN PAM
ccaucuuggagucgggcagg

SEQ ID NO: 2890 - RNA, 20 nt, Artificial Sequence
  spacer sequence ATCN PAM
ugcaagugggcaggacccgc

SEQ ID NO: 2891 - RNA, 20 nt, Artificial Sequence
  spacer sequence ATCN PAM
ugagaguggguacguggcga

SEQ ID NO: 2892 - RNA, 20 nt, Artificial Sequence
  spacer sequence ATCN PAM
cgugacggcgucugagccag

SEQ ID NO: 2893 - RNA, 20 nt, Artificial Sequence
  spacer sequence ATCN PAM
cauuuucucccccucccccg

SEQ ID NO: 2894 - RNA, 20 nt, Artificial Sequence
  spacer sequence ATCN PAM
caggcgccuauugggggagg

SEQ ID NO: 2895 - RNA, 20 nt, Artificial Sequence
  spacer sequence ATCN PAM
gccccggggaggccggcgcg

SEQ ID NO: 2896 - RNA, 20 nt, Artificial Sequence
  spacer sequence ATCN PAM
cgcccccucucgggcgggag

SEQ ID NO: 2897 - RNA, 20 nt, Artificial Sequence
  spacer sequence ATCN PAM
cccguccggcccgcuuccgg

SEQ ID NO: 2898 - RNA, 20 nt, Artificial Sequence
  spacer sequence ATCN PAM
gggcgcgcgagggccggacg

SEQ ID NO: 2899 - RNA, 20 nt, Artificial Sequence
  spacer sequence ATCN PAM
ggggcgcgcgccuuucccgc

SEQ ID NO: 2900 - RNA, 20 nt, Artificial Sequence
  spacer sequence ATCN PAM
ccgaaaccccuuggccgcgg

SEQ ID NO: 2901 - RNA, 20 nt, Artificial Sequence
  spacer sequence ATCN PAM
cgggagagaagcggccgccc

SEQ ID NO: 2902 - RNA, 20 nt, Artificial Sequence
  spacer sequence ATCN PAM
ccagccucucccgcuuccua

SEQ ID NO: 2903 - RNA, 20 nt, Artificial Sequence
  spacer sequence ATCN PAM
accuuccccccggggugucc

SEQ ID NO: 2904 - RNA, 20 nt, Artificial Sequence
  spacer sequence ATCN PAM
acccgagccccgcccgaccc

SEQ ID NO: 2905 - RNA, 20 nt, Artificial Sequence
  spacer sequence ATCN PAM
guaacugaggcuguguucug

SEQ ID NO: 2906 - RNA, 20 nt, Artificial Sequence
  spacer sequence ATCN PAM
accgaggagagcaggaggcg

SEQ ID NO: 2907 - RNA, 20 nt, Artificial Sequence
  spacer sequence ATCN PAM
ggcuccacucugcugagagg

SEQ ID NO: 2908 - RNA, 20 nt, Artificial Sequence
  spacer sequence ATCN PAM
agcauuccucggggcuuccg

SEQ ID NO: 2909 - RNA, 20 nt, Artificial Sequence
  spacer sequence ATCN PAM
gaagccccgaggaaugcuag

SEQ ID NO: 2910 - RNA, 20 nt, Artificial Sequence
  spacer sequence ATCN PAM
gggacaaugcuguagagaga

SEQ ID NO: 2911 - RNA, 20 nt, Artificial Sequence
  spacer sequence ATCN PAM
ggaguugggcgguaggguuu

SEQ ID NO: 2912 - RNA, 20 nt, Artificial Sequence
  spacer sequence ATCN PAM
gagcugcucuucgguucuug

SEQ ID NO: 2913 - RNA, 20 nt, Artificial Sequence
  spacer sequence ATCN PAM
ugccguucagugggaaaccu

SEQ ID NO: 2914 - RNA, 20 nt, Artificial Sequence
  spacer sequence ATCN PAM
aaaccaagagucucccaggc

SEQ ID NO: 2915 - RNA, 20 nt, Artificial Sequence
  spacer sequence ATCN PAM
agguccccuccacagccagg

SEQ ID NO: 2916 - RNA, 20 nt, Artificial Sequence
  spacer sequence ATCN PAM
agccuauuugaguggcuagg

SEQ ID NO: 2917 - RNA, 20 nt, Artificial Sequence
  spacer sequence ATCN PAM
uagccacucaaauaggcugg

SEQ ID NO: 2918 - RNA, 20 nt, Artificial Sequence
  spacer sequence ATCN PAM
accaguaaaugcccauccua

SEQ ID NO: 2919 - RNA, 20 nt, Artificial Sequence
  spacer sequence ATCN PAM
caaaaauaaaaaacaaaaac

SEQ ID NO: 2920 - RNA, 20 nt, Artificial Sequence
  spacer sequence ATCN PAM
caccacugcacuccagccug

SEQ ID NO: 2921 - RNA, 20 nt, Artificial Sequence
  spacer sequence ATCN PAM
uggcucacugcaaccuccac

SEQ ID NO: 2922 - RNA, 20 nt, Artificial Sequence
  spacer sequence ATCN PAM
cuugaaccugagagguggag

SEQ ID NO: 2923 - RNA, 20 nt, Artificial Sequence
  spacer sequence ATCN PAM
cggcuacucaggagguugag

SEQ ID NO: 2924 - RNA, 20 nt, Artificial Sequence
  spacer sequence ATCN PAM
uuaccaaaaaaaaaaaaaaa

SEQ ID NO: 2925 - RNA, 20 nt, Artificial Sequence
  spacer sequence ATCN PAM
ccuguguuccagaccagccu

SEQ ID NO: 2926 - RNA, 20 nt, Artificial Sequence
  spacer sequence ATCN PAM
cagcacugugggaggccaag

SEQ ID NO: 2927 - RNA, 20 nt, Artificial Sequence
  spacer sequence ATCN PAM
uugauggcaucugguuagaa

SEQ ID NO: 2928 - RNA, 20 nt, Artificial Sequence
  spacer sequence ATCN PAM
aagauacuuaaugucagccg

SEQ ID NO: 2929 - RNA, 20 nt, Artificial Sequence
  spacer sequence ATCN PAM
gguuagaacagcagcaaacu

SEQ ID NO: 2930 - RNA, 20 nt, Artificial Sequence
  spacer sequence ATCN PAM
ugcagccccauggaggguga

SEQ ID NO: 2931 - RNA, 20 nt, Artificial Sequence
  spacer sequence ATCN PAM
ccuccccaggaccuucuucu

SEQ ID NO: 2932 - RNA, 20 nt, Artificial Sequence
  spacer sequence ATCN PAM
uuaaccaacuaccccagcua

SEQ ID NO: 2933 - RNA, 20 nt, Artificial Sequence
  spacer sequence ATCN PAM
gggcaggcagcgcguaaaga

SEQ ID NO: 2934 - RNA, 20 nt, Artificial Sequence
  spacer sequence ATCN PAM
uccuggagauaaaaccuguu

SEQ ID NO: 2935 - RNA, 20 nt, Artificial Sequence
  spacer sequence ATCN PAM
ccaggaagaucggggcaggc

SEQ ID NO: 2936 - RNA, 20 nt, Artificial Sequence
  spacer sequence ATCN PAM
gaagcauuugcaacaauccc

SEQ ID NO: 2937 - RNA, 20 nt, Artificial Sequence
  spacer sequence ATCN PAM
cuagaugugucuggcuugca

SEQ ID NO: 2938 - RNA, 20 nt, Artificial Sequence
  spacer sequence ATCN PAM
agggauuguugcaaaugcuu

SEQ ID NO: 2939 - RNA, 20 nt, Artificial Sequence
  spacer sequence ATCN PAM
ggugguccuugagcccuccu

SEQ ID NO: 2940 - RNA, 20 nt, Artificial Sequence
  spacer sequence ATCN PAM
cucccgcaggcuucaagucc

SEQ ID NO: 2941 - RNA, 20 nt, Artificial Sequence
  spacer sequence ATCN PAM
gggucaggguacuaccccgu

SEQ ID NO: 2942 - RNA, 20 nt, Artificial Sequence
  spacer sequence ATCN PAM
ucugggucaggguacuaccc

SEQ ID NO: 2943 - RNA, 20 nt, Artificial Sequence
  spacer sequence ATCN PAM
gugugcuucaggacaggugc

SEQ ID NO: 2944 - RNA, 20 nt, Artificial Sequence
  spacer sequence ATCN PAM
cauucccaugggcaaguggc

SEQ ID NO: 2945 - RNA, 20 nt, Artificial Sequence
  spacer sequence ATCN PAM
uggacccugucuuugacugg

SEQ ID NO: 2946 - RNA, 20 nt, Artificial Sequence
  spacer sequence ATCN PAM
ucccuuccucccguccuccc

SEQ ID NO: 2947 - RNA, 20 nt, Artificial Sequence
  spacer sequence ATCN PAM
gaaaacacagcagugccagg

SEQ ID NO: 2948 - RNA, 20 nt, Artificial Sequence
  spacer sequence ATCN PAM
cgugguuuccaccugaggcg

SEQ ID NO: 2949 - RNA, 20 nt, Artificial Sequence
  spacer sequence ATCN PAM
guguccggccggaaccucag

SEQ ID NO: 2950 - RNA, 20 nt, Artificial Sequence
  spacer sequence ATCN PAM
cucaggguccacaggcccgg

SEQ ID NO: 2951 - RNA, 20 nt, Artificial Sequence
  spacer sequence ATCN PAM
agcagccacaagggccggaa

SEQ ID NO: 2952 - RNA, 20 nt, Artificial Sequence
  spacer sequence ATCN PAM
cacaagcacucagggcguca

SEQ ID NO: 2953 - RNA, 20 nt, Artificial Sequence
  spacer sequence ATCN PAM
uccuugagcaggugccggag

SEQ ID NO: 2954 - RNA, 20 nt, Artificial Sequence
  spacer sequence ATCN PAM
cacccuguccccccucagac

SEQ ID NO: 2955 - RNA, 20 nt, Artificial Sequence
  spacer sequence ATCN PAM
acugguucuuucugaugcga

SEQ ID NO: 2956 - RNA, 20 nt, Artificial Sequence
  spacer sequence ATCN PAM
gaaagaaccaguggauauca

SEQ ID NO: 2957 - RNA, 20 nt, Artificial Sequence
  spacer sequence ATCN PAM
caucagaaagaaccagugga

SEQ ID NO: 2958 - RNA, 20 nt, Artificial Sequence
  spacer sequence ATCN PAM
ugauacgggagauggaggcu

SEQ ID NO: 2959 - RNA, 20 nt, Artificial Sequence
  spacer sequence ATCN PAM
ggauugaggccaagagccug

SEQ ID NO: 2960 - RNA, 20 nt, Artificial Sequence
  spacer sequence ATCN PAM
cccguaucaggauugaggcc

SEQ ID NO: 2961 - RNA, 20 nt, Artificial Sequence
  spacer sequence ATCN PAM
cagggaacaaaggagccucc

SEQ ID NO: 2962 - RNA, 20 nt, Artificial Sequence
  spacer sequence ATCN PAM
uugcagcgggggggaugucu

SEQ ID NO: 2963 - RNA, 20 nt, Artificial Sequence
  spacer sequence ATCN PAM
cccccgcugcaaggauugaa

SEQ ID NO: 2964 - RNA, 20 nt, Artificial Sequence
  spacer sequence ATCN PAM
uaggcucaggacggcagaca

SEQ ID NO: 2965 - RNA, 20 nt, Artificial Sequence
  spacer sequence ATCN PAM
gucuagugcaauucuuagaa

SEQ ID NO: 2966 - RNA, 20 nt, Artificial Sequence
  spacer sequence ATCN PAM
acuucuaagaauugcacuag

SEQ ID NO: 2967 - RNA, 20 nt, Artificial Sequence
  spacer sequence ATCN PAM
aauuacauagaaauaaccag

SEQ ID NO: 2968 - RNA, 20 nt, Artificial Sequence
  spacer sequence ATCN PAM
auucacugguuauuucuaug

SEQ ID NO: 2969 - RNA, 20 nt, Artificial Sequence
  spacer sequence ATCN PAM
cuucugaccuguccauuuuc

SEQ ID NO: 2970 - RNA, 20 nt, Artificial Sequence
  spacer sequence ATCN PAM
cggccgugacuagggccggg

SEQ ID NO: 2971 - RNA, 20 nt, Artificial Sequence
  spacer sequence ATCN PAM
gcugguaucgcggccgugac

SEQ ID NO: 2972 - RNA, 20 nt, Artificial Sequence
  spacer sequence ATCN PAM
cugggcgggaggccgugucu

SEQ ID NO: 2973 - RNA, 20 nt, Artificial Sequence
  spacer sequence ATCN PAM
ccacggccaacucugcugug

SEQ ID NO: 2974 - RNA, 20 nt, Artificial Sequence
  spacer sequence ATCN PAM
ccgcugcaagagaagggaca

SEQ ID NO: 2975 - RNA, 20 nt, Artificial Sequence
  spacer sequence ATCN PAM
gacgagcuuuucucuacuug

SEQ ID NO: 2976 - RNA, 20 nt, Artificial Sequence
  spacer sequence ATCN PAM
ugagcagcaacucggcuucu

SEQ ID NO: 2977 - RNA, 20 nt, Artificial Sequence
  spacer sequence ATCN PAM
ccaacugcaggggcccaugg

SEQ ID NO: 2978 - RNA, 20 nt, Artificial Sequence
  spacer sequence ATCN PAM
agcgccucccuggaaauucu

SEQ ID NO: 2979 - RNA, 20 nt, Artificial Sequence
  spacer sequence ATCN PAM
auccagcgccucccuggaaa

SEQ ID NO: 2980 - RNA, 20 nt, Artificial Sequence
  spacer sequence ATCN PAM
cccuagagcccugccugcua

SEQ ID NO: 2981 - RNA, 20 nt, Artificial Sequence
  spacer sequence ATCN PAM
cauggcacccccuuuucagc

SEQ ID NO: 2982 - RNA, 20 nt, Artificial Sequence
  spacer sequence ATCN PAM
cucuagaggggacgccugca

SEQ ID NO: 2983 - RNA, 20 nt, Artificial Sequence
  spacer sequence ATCN PAM
acauccggaagcuccccauc

SEQ ID NO: 2984 - RNA, 20 nt, Artificial Sequence
  spacer sequence ATCN PAM
ggaagcuccccaucgacguc

SEQ ID NO: 2985 - RNA, 20 nt, Artificial Sequence
  spacer sequence ATCN PAM
acgucacggagggggaaguc

SEQ ID NO: 2986 - RNA, 20 nt, Artificial Sequence
  spacer sequence ATCN PAM
cccuggggcugcccuuuggg

SEQ ID NO: 2987 - RNA, 20 nt, Artificial Sequence
  spacer sequence ATCN PAM
ggagguuggugaccuuccca

SEQ ID NO: 2988 - RNA, 20 nt, Artificial Sequence
  spacer sequence ATCN PAM
agaugaacacggaggaggcu

SEQ ID NO: 2989 - RNA, 20 nt, Artificial Sequence
  spacer sequence ATCN PAM
cgaugaaggccuguugggga

SEQ ID NO: 2990 - RNA, 20 nt, Artificial Sequence
  spacer sequence ATCN PAM
acauccaguucuccaaccac

SEQ ID NO: 2991 - RNA, 20 nt, Artificial Sequence
  spacer sequence ATCN PAM
aguucuccaaccacaaggag

SEQ ID NO: 2992 - RNA, 20 nt, Artificial Sequence
  spacer sequence ATCN PAM
cugcguccacggccgccgcc

SEQ ID NO: 2993 - RNA, 20 nt, Artificial Sequence
  spacer sequence ATCN PAM
ccaucccugcguccacggcc

SEQ ID NO: 2994 - RNA, 20 nt, Artificial Sequence
  spacer sequence ATCN PAM
ugagcacggggcucugcccg

SEQ ID NO: 2995 - RNA, 20 nt, Artificial Sequence
  spacer sequence ATCN PAM
ucguggagaaccucuucuac

SEQ ID NO: 2996 - RNA, 20 nt, Artificial Sequence
  spacer sequence ATCN PAM
uggagaaccucuucuacccu

SEQ ID NO: 2997 - RNA, 20 nt, Artificial Sequence
  spacer sequence ATCN PAM
agggucacaggguagaagag

SEQ ID NO: 2998 - RNA, 20 nt, Artificial Sequence
  spacer sequence ATCN PAM
ccgccagggcaggucggcug

SEQ ID NO: 2999 - RNA, 20 nt, Artificial Sequence
  spacer sequence ATCN PAM
gcaggucccgggccacagca

SEQ ID NO: 3000 - RNA, 20 nt, Artificial Sequence
  spacer sequence ATCN PAM
ucaacacugugccgaacuug

SEQ ID NO: 3001 - RNA, 20 nt, Artificial Sequence
  spacer sequence ATCN PAM
ucaccuucaccaagaacaac

SEQ ID NO: 3002 - RNA, 20 nt, Artificial Sequence
  spacer sequence ATCN PAM
ccuucaccaagaacaaccag

SEQ ID NO: 3003 - RNA, 20 nt, Artificial Sequence
  spacer sequence ATCN PAM
acaacgccugcugcacgcug

SEQ ID NO: 3004 - RNA, 20 nt, Artificial Sequence
  spacer sequence ATCN PAM
acuuuuccaagcucaccagc

SEQ ID NO: 3005 - RNA, 20 nt, Artificial Sequence
  spacer sequence ATCN PAM
cccuggugcagggccgggcc

SEQ ID NO: 3006 - RNA, 20 nt, Artificial Sequence
  spacer sequence ATCN PAM
gcugcuccagggggggccgu

SEQ ID NO: 3007 - RNA, 20 nt, Artificial Sequence
  spacer sequence ATCN PAM
gcccgcgaaggcucugccgg

SEQ ID NO: 3008 - RNA, 20 nt, Artificial Sequence
  spacer sequence ATCN PAM
cgcagcacagcgcccgcucg

SEQ ID NO: 3009 - RNA, 20 nt, Artificial Sequence
  spacer sequence ATCN PAM
cacccacaaccuccaccgcg

SEQ ID NO: 3010 - RNA, 20 nt, Artificial Sequence
  spacer sequence ATCN PAM
ucgcacccacaaccuccacc

SEQ ID NO: 3011 - RNA, 20 nt, Artificial Sequence
  spacer sequence ATCN PAM
cagccucuccguaugcagga

SEQ ID NO: 3012 - RNA, 20 nt, Artificial Sequence
  spacer sequence ATCN PAM
acggcggcagccugggcgga

SEQ ID NO: 3013 - RNA, 20 nt, Artificial Sequence
  spacer sequence ATCN PAM
cacagucuuuguggucuggu

SEQ ID NO: 3014 - RNA, 20 nt, Artificial Sequence
  spacer sequence ATCN PAM
cuccaaccacuggcgguccu

SEQ ID NO: 3015 - RNA, 20 nt, Artificial Sequence
  spacer sequence ATCN PAM
gcaugcgccccgcccacagc

SEQ ID NO: 3016 - RNA, 20 nt, Artificial Sequence
  spacer sequence ATCN PAM
caccuccugcuuuuccaggc

SEQ ID NO: 3017 - RNA, 20 nt, Artificial Sequence
  spacer sequence ATCN PAM
ccucggcggcggcggcagcu

SEQ ID NO: 3018 - RNA, 20 nt, Artificial Sequence
  spacer sequence ATCN PAM
gaccugccgccgcagcugcc

SEQ ID NO: 3019 - RNA, 20 nt, Artificial Sequence
  spacer sequence ATCN PAM
ccaucccgggccuggcgggg

SEQ ID NO: 3020 - RNA, 20 nt, Artificial Sequence
  spacer sequence ATCN PAM
cgggccuggcgggggcagga

SEQ ID NO: 3021 - RNA, 20 nt, Artificial Sequence
  spacer sequence ATCN PAM
ccugcucgcucuuccgggag

SEQ ID NO: 3022 - RNA, 20 nt, Artificial Sequence
  spacer sequence ATCN PAM
uggaaaaggagggucucagc

SEQ ID NO: 3023 - RNA, 20 nt, Artificial Sequence
  spacer sequence ATCN PAM
ugguucgcguuuucucuugc

SEQ ID NO: 3024 - RNA, 20 nt, Artificial Sequence
  spacer sequence ATCN PAM
ugcaagagaaaacgcgaacc

SEQ ID NO: 3025 - RNA, 20 nt, Artificial Sequence
  spacer sequence ATCN PAM
aaaaauuacuuggagcugag

SEQ ID NO: 3026 - RNA, 20 nt, Artificial Sequence
  spacer sequence ATCN PAM
accaguuaagugacaggcuc

SEQ ID NO: 3027 - RNA, 20 nt, Artificial Sequence
  spacer sequence ATCN PAM
guuauuucccagaaugguua

SEQ ID NO: 3028 - RNA, 20 nt, Artificial Sequence
  spacer sequence ATCN PAM
agaguuacauauuuugggcc

SEQ ID NO: 3029 - RNA, 20 nt, Artificial Sequence
  spacer sequence ATCN PAM
aucaagaguuacauauuuug

SEQ ID NO: 3030 - RNA, 20 nt, Artificial Sequence
  spacer sequence ATCN PAM
cauccaucaagaguuacaua

SEQ ID NO: 3031 - RNA, 20 nt, Artificial Sequence
  spacer sequence ATCN PAM
uccuggaaucagcauuucag

SEQ ID NO: 3032 - RNA, 20 nt, Artificial Sequence
  spacer sequence ATCN PAM
gcauuucaggcuguucuguu

SEQ ID NO: 3033 - RNA, 20 nt, Artificial Sequence
  spacer sequence ATCN PAM
agucuguuagugcacggccu

SEQ ID NO: 3034 - RNA, 20 nt, Artificial Sequence
  spacer sequence ATCN PAM
cccuucacgccuguaaucgu

SEQ ID NO: 3035 - RNA, 20 nt, Artificial Sequence
  spacer sequence ATCN PAM
uccuuagagacugacuugug

SEQ ID NO: 3036 - RNA, 20 nt, Artificial Sequence
  spacer sequence ATCN PAM
caaccacgccccccaggagc

SEQ ID NO: 3037 - RNA, 20 nt, Artificial Sequence
  spacer sequence ATCN PAM
gcuucugggagccccuccag

SEQ ID NO: 3038 - RNA, 20 nt, Artificial Sequence
  spacer sequence ATCN PAM
gucacacuccacacacauuc

SEQ ID NO: 3039 - RNA, 20 nt, Artificial Sequence
  spacer sequence ATCN PAM
gguaguguucuaucagucac

SEQ ID NO: 3040 - RNA, 20 nt, Artificial Sequence
  spacer sequence ATCN PAM
gggcaagaaaaaaaauaggg

SEQ ID NO: 3041 - RNA, 20 nt, Artificial Sequence
  spacer sequence ATCN PAM
ggaauuucuuugccaacuga

SEQ ID NO: 3042 - RNA, 20 nt, Artificial Sequence
  spacer sequence ATCN PAM
ugacaacuucaucauccauc

SEQ ID NO: 3043 - RNA, 20 nt, Artificial Sequence
  spacer sequence ATCN PAM
uccaucaaccacugcacgcc

SEQ ID NO: 3044 - RNA, 20 nt, Artificial Sequence
  spacer sequence ATCN PAM
aucaaccacugcacgccugc

SEQ ID NO: 3045 - RNA, 20 nt, Artificial Sequence
  spacer sequence ATCN PAM
accacugcacgccugcgggg

SEQ ID NO: 3046 - RNA, 20 nt, Artificial Sequence
  spacer sequence ATCN PAM
uccacacgaggaagacaguc

SEQ ID NO: 3047 - RNA, 20 nt, Artificial Sequence
  spacer sequence ATCN PAM
uucacacuuuuauuaccuug

SEQ ID NO: 3048 - RNA, 20 nt, Artificial Sequence
  spacer sequence ATCN PAM
caauuaaugaaaacaaggua

SEQ ID NO: 3049 - RNA, 20 nt, Artificial Sequence
  spacer sequence ATCN PAM
ucucaauuaaugaaaacaag

SEQ ID NO: 3050 - RNA, 20 nt, Artificial Sequence
  spacer sequence ATCN PAM
aaaucaucucaauuaaugaa

SEQ ID NO: 3051 - RNA, 20 nt, Artificial Sequence
  spacer sequence ATCN PAM
gagugccaaaccgcaaacuc

SEQ ID NO: 3052 - RNA, 20 nt, Artificial Sequence
  spacer sequence ATCN PAM
gccucguuuuaugguuugcu

SEQ ID NO: 3053 - RNA, 20 nt, Artificial Sequence
  spacer sequence ATCN PAM
acgggaccaaauaaaauucg

SEQ ID NO: 3054 - RNA, 20 nt, Artificial Sequence
  spacer sequence ATCN PAM
cccugcaugcuuuucagagu

SEQ ID NO: 3055 - RNA, 20 nt, Artificial Sequence
  spacer sequence ATCN PAM
aggacagguaagcugccagc

SEQ ID NO: 3056 - RNA, 20 nt, Artificial Sequence
  spacer sequence ATCN PAM
gccacugcggagcugcgucu

SEQ ID NO: 3057 - RNA, 20 nt, Artificial Sequence
  spacer sequence ATCN PAM
ccccgucagccccggccccg

SEQ ID NO: 3058 - RNA, 20 nt, Artificial Sequence
  spacer sequence ATCN PAM
cugggcuuuugaaggcgucu

SEQ ID NO: 3059 - RNA, 20 nt, Artificial Sequence
  spacer sequence ATCN PAM
ucacgcgcugcacgucaccg

SEQ ID NO: 3060 - RNA, 20 nt, Artificial Sequence
  spacer sequence ATCN PAM
uguucaauaagaaggagaac

SEQ ID NO: 3061 - RNA, 20 nt, Artificial Sequence
  spacer sequence ATCN PAM
gcacuagggcguucuccuuc

SEQ ID NO: 3062 - RNA, 20 nt, Artificial Sequence
  spacer sequence ATCN PAM
gcaucacgcucucgaagcac

SEQ ID NO: 3063 - RNA, 20 nt, Artificial Sequence
  spacer sequence ATCN PAM
cgcucucgaagcaccagaac

SEQ ID NO: 3064 - RNA, 20 nt, Artificial Sequence
  spacer sequence ATCN PAM
cgugagugcugggccggggg

SEQ ID NO: 3065 - RNA, 20 nt, Artificial Sequence
  spacer sequence ATCN PAM
ccugagccaaaaccuccaaa

SEQ ID NO: 3066 - RNA, 20 nt, Artificial Sequence
  spacer sequence ATCN PAM
uuccacuguacuccagccug

SEQ ID NO: 3067 - RNA, 20 nt, Artificial Sequence
  spacer sequence ATCN PAM
cgguucacugcaaccuccgc

SEQ ID NO: 3068 - RNA, 20 nt, Artificial Sequence
  spacer sequence ATCN PAM
cuugaacccaagaggcggag

SEQ ID NO: 3069 - RNA, 20 nt, Artificial Sequence
  spacer sequence ATCN PAM
gccuggccaauauggugaaa

SEQ ID NO: 3070 - RNA, 20 nt, Artificial Sequence
  spacer sequence ATCN PAM
ugaucuccugaccuugugau

SEQ ID NO: 3071 - RNA, 20 nt, Artificial Sequence
  spacer sequence ATCN PAM
agaucagccuggccaauaug

SEQ ID NO: 3072 - RNA, 20 nt, Artificial Sequence
  spacer sequence ATCN PAM
ccugaccuugugauccgccu

SEQ ID NO: 3073 - RNA, 20 nt, Artificial Sequence
  spacer sequence ATCN PAM
caaggucaggagaucaagau

SEQ ID NO: 3074 - RNA, 20 nt, Artificial Sequence
  spacer sequence ATCN PAM
gccugcuucggccucccaaa

SEQ ID NO: 3075 - RNA, 20 nt, Artificial Sequence
  spacer sequence ATCN PAM
cagcacuuugggaggccgaa

SEQ ID NO: 3076 - RNA, 20 nt, Artificial Sequence
  spacer sequence ATCN PAM
caaaauaaguaaaauaaaua

SEQ ID NO: 3077 - RNA, 20 nt, Artificial Sequence
  spacer sequence ATCN PAM
cgccacugcacuccagccug

SEQ ID NO: 3078 - RNA, 20 nt, Artificial Sequence
  spacer sequence ATCN PAM
cugcaaguucugccuccugg

SEQ ID NO: 3079 - RNA, 20 nt, Artificial Sequence
  spacer sequence ATCN PAM
uggcuaacacagugaaaccc

SEQ ID NO: 3080 - RNA, 20 nt, Artificial Sequence
  spacer sequence ATCN PAM
acaccauccuggcuaacaca

SEQ ID NO: 3081 - RNA, 20 nt, Artificial Sequence
  spacer sequence ATCN PAM
ccugacuuugugaucaaccc

SEQ ID NO: 3082 - RNA, 20 nt, Artificial Sequence
  spacer sequence ATCN PAM
caaagucaggagaucgacac

SEQ ID NO: 3083 - RNA, 20 nt, Artificial Sequence
  spacer sequence ATCN PAM
acccgccucggccucccaaa

SEQ ID NO: 3084 - RNA, 20 nt, Artificial Sequence
  spacer sequence ATCN PAM
cagcacuuugggaggccgag

SEQ ID NO: 3085 - RNA, 20 nt, Artificial Sequence
  spacer sequence ATCN PAM
caguacuguggggggccggg

SEQ ID NO: 3086 - RNA, 20 nt, Artificial Sequence
  spacer sequence ATCN PAM
ccugcccggccccccacagu

SEQ ID NO: 3087 - RNA, 20 nt, Artificial Sequence
  spacer sequence ATCN PAM
ggaagagcugggaccugacg

SEQ ID NO: 3088 - RNA, 20 nt, Artificial Sequence
  spacer sequence ATCN PAM
cagcucacugcaaccucaac

SEQ ID NO: 3089 - RNA, 20 nt, Artificial Sequence
  spacer sequence ATCN PAM
ggccccaagcaugucaacca

SEQ ID NO: 3090 - RNA, 20 nt, Artificial Sequence
  spacer sequence ATCN PAM
aagggcuuacuacugguuga

SEQ ID NO: 3091 - RNA, 20 nt, Artificial Sequence
  spacer sequence ATCN PAM
gaaaaucaacaaggggccug

SEQ ID NO: 3092 - RNA, 20 nt, Artificial Sequence
  spacer sequence ATCN PAM
acaaggggccuggcagagug

SEQ ID NO: 3093 - RNA, 20 nt, Artificial Sequence
  spacer sequence ATCN PAM
ucccagcacuuuaggaggcc

SEQ ID NO: 3094 - RNA, 20 nt, Artificial Sequence
  spacer sequence ATCN PAM
cagcacuuuaggaggccgag

SEQ ID NO: 3095 - RNA, 20 nt, Artificial Sequence
  spacer sequence ATCN PAM
gccugccucggccuccuaaa

SEQ ID NO: 3096 - RNA, 20 nt, Artificial Sequence
  spacer sequence ATCN PAM
ccugaggucaggaguucaag

SEQ ID NO: 3097 - RNA, 20 nt, Artificial Sequence
  spacer sequence ATCN PAM
cagcuacuugggagacugag

SEQ ID NO: 3098 - RNA, 20 nt, Artificial Sequence
  spacer sequence ATCN PAM
cuugaaccugcaggcggagg

SEQ ID NO: 3099 - RNA, 20 nt, Artificial Sequence
  spacer sequence ATCN PAM
cagcucaccacaaccuccgc

SEQ ID NO: 3100 - RNA, 20 nt, Artificial Sequence
  spacer sequence ATCN PAM
cgccacugugcucccgccug

SEQ ID NO: 3101 - RNA, 20 nt, Artificial Sequence
  spacer sequence ATCN PAM
ugcucugucgcccaggcggg

SEQ ID NO: 3102 - RNA, 20 nt, Artificial Sequence
  spacer sequence ATCN PAM
ggaaaaaaaaaaguggagga

SEQ ID NO: 3103 - RNA, 20 nt, Artificial Sequence
  spacer sequence ATCN PAM
acaaguuugcagaaacagag

SEQ ID NO: 3104 - RNA, 20 nt, Artificial Sequence
  spacer sequence ATCN PAM
uguccacaauggucugaagc

SEQ ID NO: 3105 - RNA, 20 nt, Artificial Sequence
  spacer sequence ATCN PAM
aaucauguccacaauggucu

SEQ ID NO: 3106 - RNA, 20 nt, Artificial Sequence
  spacer sequence ATCN PAM
uccucggagacugagggccu

SEQ ID NO: 3107 - RNA, 20 nt, Artificial Sequence
  spacer sequence ATCN PAM
caagguccuguuuuccagca

SEQ ID NO: 3108 - RNA, 20 nt, Artificial Sequence
  spacer sequence ATCN PAM
uuugacgacgcccccauugc

SEQ ID NO: 3109 - RNA, 20 nt, Artificial Sequence
  spacer sequence ATCN PAM
ugcgguccuuccugcaagac

SEQ ID NO: 3110 - RNA, 20 nt, Artificial Sequence
  spacer sequence ATCN PAM
gugccaucuugcgguccuuc

SEQ ID NO: 3111 - RNA, 20 nt, Artificial Sequence
  spacer sequence ATCN PAM
agaugggcuccguggaggag

SEQ ID NO: 3112 - RNA, 20 nt, Artificial Sequence
  spacer sequence ATCN PAM
ggaucagugccaucuugcgg

SEQ ID NO: 3113 - RNA, 20 nt, Artificial Sequence
  spacer sequence ATCN PAM
aggggcacaggcccccacgg

SEQ ID NO: 3114 - RNA, 20 nt, Artificial Sequence
  spacer sequence ATCN PAM
uuccagagaaaagccacuuu

SEQ ID NO: 3115 - RNA, 20 nt, Artificial Sequence
  spacer sequence ATCN PAM
cuggucugcuaaggucacuu

SEQ ID NO: 3116 - RNA, 20 nt, Artificial Sequence
  spacer sequence ATCN PAM
guuuaccuguuuuuaaaaaa

SEQ ID NO: 3117 - RNA, 20 nt, Artificial Sequence
  spacer sequence ATCN PAM
aguucaccuugcucacccug

SEQ ID NO: 3118 - RNA, 20 nt, Artificial Sequence
  spacer sequence ATCN PAM
ugcaggagccggccaggccc

SEQ ID NO: 3119 - RNA, 20 nt, Artificial Sequence
  spacer sequence ATCN PAM
ugcagcuggggcgcggcggc

SEQ ID NO: 3120 - RNA, 20 nt, Artificial Sequence
  spacer sequence ATCN PAM
agucacgugauucucccuuc

SEQ ID NO: 3121 - RNA, 20 nt, Artificial Sequence
  spacer sequence ATCN PAM
cgugacuugauuagagggcu

SEQ ID NO: 3122 - RNA, 20 nt, Artificial Sequence
  spacer sequence ATCN PAM
cuguauuauauacuuugcag

SEQ ID NO: 3123 - RNA, 20 nt, Artificial Sequence
  spacer sequence ATCN PAM
uuuuucauuuauaugcaaaa

SEQ ID NO: 3124 - RNA, 20 nt, Artificial Sequence
  spacer sequence ATCN PAM
ugcuauaaaaaguuacuuaa

SEQ ID NO: 3125 - RNA, 20 nt, Artificial Sequence
  spacer sequence ATCN PAM
ucuugcuauaaaaaguuacu

SEQ ID NO: 3126 - RNA, 20 nt, Artificial Sequence
  spacer sequence ATCN PAM
aaacuuccuugugguauuac

SEQ ID NO: 3127 - RNA, 20 nt, Artificial Sequence
  spacer sequence ATCN PAM
uagagccccugagcuucagg

SEQ ID NO: 3128 - RNA, 20 nt, Artificial Sequence
  spacer sequence ATCN PAM
ccuccgguugccuuacacca

SEQ ID NO: 3129 - RNA, 20 nt, Artificial Sequence
  spacer sequence ATCN PAM
gaggcaggcaaaacacagaa

SEQ ID NO: 3130 - RNA, 20 nt, Artificial Sequence
  spacer sequence ATCN PAM
uaggagagcccccgggacag

SEQ ID NO: 3131 - RNA, 20 nt, Artificial Sequence
  spacer sequence ATCN PAM
ccuuuccguaaaagcgugua

SEQ ID NO: 3132 - RNA, 20 nt, Artificial Sequence
  spacer sequence ATCN PAM
gguaaggcaacggaaugugc

SEQ ID NO: 3133 - RNA, 20 nt, Artificial Sequence
  spacer sequence ATCN PAM
guucucuccgcgucacaagc

SEQ ID NO: 3134 - RNA, 20 nt, Artificial Sequence
  spacer sequence ATCN PAM
ucuguauccucgcuccguuc

SEQ ID NO: 3135 - RNA, 20 nt, Artificial Sequence
  spacer sequence ATCN PAM
ucgcuccguuccgccuucgu

SEQ ID NO: 3136 - RNA, 20 nt, Artificial Sequence
  spacer sequence ATCN PAM
ugcggaaguagcccucggcc

SEQ ID NO: 3137 - RNA, 20 nt, Artificial Sequence
  spacer sequence ATCN PAM
gccgcgcccagcgggggcag

SEQ ID NO: 3138 - RNA, 20 nt, Artificial Sequence
  spacer sequence ATCN PAM
acgcgcacgcgccgcaccac

SEQ ID NO: 3139 - RNA, 20 nt, Artificial Sequence
  spacer sequence ATCN PAM
ugaccaucgacgcgcacgcg

SEQ ID NO: 3140 - RNA, 20 nt, Artificial Sequence
  spacer sequence ATCN PAM
ccauguccaaggcuccgggc

SEQ ID NO: 3141 - RNA, 20 nt, Artificial Sequence
  spacer sequence ATCN PAM
ugagccacuuggcgcgcacc

SEQ ID NO: 3142 - RNA, 20 nt, Artificial Sequence
  spacer sequence ATCN PAM
cggaggagggcgcgcagacg

SEQ ID NO: 3143 - RNA, 20 nt, Artificial Sequence
  spacer sequence ATCN PAM
ucccaccgcgcgcggggccg

SEQ ID NO: 3144 - RNA, 20 nt, Artificial Sequence
  spacer sequence ATCN PAM
gcgaguggaagcagaagagc

SEQ ID NO: 3145 - RNA, 20 nt, Artificial Sequence
  spacer sequence ATCN PAM
acgugccgcuggacgccucg

SEQ ID NO: 3146 - RNA, 20 nt, Artificial Sequence
  spacer sequence ATCN PAM
gcagaauaagucggugagca

SEQ ID NO: 3147 - RNA, 20 nt, Artificial Sequence
  spacer sequence ATCN PAM
gaaccugccacucaccaggu

SEQ ID NO: 3148 - RNA, 20 nt, Artificial Sequence
  spacer sequence ATCN PAM
cugccuaccuggugaguggc

SEQ ID NO: 3149 - RNA, 20 nt, Artificial Sequence
  spacer sequence ATCN PAM
gggcgggcaucgcugccuac

SEQ ID NO: 3150 - RNA, 20 nt, Artificial Sequence
  spacer sequence ATCN PAM
cgcaguaccgcagccacccu

SEQ ID NO: 3151 - RNA, 20 nt, Artificial Sequence
  spacer sequence ATCN PAM
gcgugagcccgcauacgccc

SEQ ID NO: 3152 - RNA, 20 nt, Artificial Sequence
  spacer sequence ATCN PAM
ccgcgggcguaugcgggcuc

SEQ ID NO: 3153 - RNA, 20 nt, Artificial Sequence
  spacer sequence ATCN PAM
uggucuucgccuuugccauc

SEQ ID NO: 3154 - RNA, 20 nt, Artificial Sequence
  spacer sequence ATCN PAM
cggacaccaccaagcugcug

SEQ ID NO: 3155 - RNA, 20 nt, Artificial Sequence
  spacer sequence ATCN PAM
ggggcauggggguugggguc

SEQ ID NO: 3156 - RNA, 20 nt, Artificial Sequence
  spacer sequence ATCN PAM
ugucugcacggugagccgga

SEQ ID NO: 3157 - RNA, 20 nt, Artificial Sequence
  spacer sequence ATCN PAM
acgccauccugucugcacgg

SEQ ID NO: 3158 - RNA, 20 nt, Artificial Sequence
  spacer sequence ATCN PAM
gcuccggccacgacauccac

SEQ ID NO: 3159 - RNA, 20 nt, Artificial Sequence
  spacer sequence ATCN PAM
cgcaggacaucugcuccggc

SEQ ID NO: 3160 - RNA, 20 nt, Artificial Sequence
  spacer sequence ATCN PAM
agcuggccacggguuaccac

SEQ ID NO: 3161 - RNA, 20 nt, Artificial Sequence
  spacer sequence ATCN PAM
cguccgucaccagggcugug

SEQ ID NO: 3162 - RNA, 20 nt, Artificial Sequence
  spacer sequence ATCN PAM
acgccggcggcugcaacuuc

SEQ ID NO: 3163 - RNA, 20 nt, Artificial Sequence
  spacer sequence ATCN PAM
ugguggccgagggcauguug

SEQ ID NO: 3164 - RNA, 20 nt, Artificial Sequence
  spacer sequence ATCN PAM
gccaacagggagggggcgcu

SEQ ID NO: 3165 - RNA, 20 nt, Artificial Sequence
  spacer sequence ATCN PAM
acacuggggccugucgguga

SEQ ID NO: 3166 - RNA, 20 nt, Artificial Sequence
  spacer sequence ATCN PAM
gcagcgggaugagcuccucg

SEQ ID NO: 3167 - RNA, 20 nt, Artificial Sequence
  spacer sequence ATCN PAM
cgcugcugaugcugcucagc

SEQ ID NO: 3168 - RNA, 20 nt, Artificial Sequence
  spacer sequence ATCN PAM
uuguacuuccuggagcugac

SEQ ID NO: 3169 - RNA, 20 nt, Artificial Sequence
  spacer sequence ATCN PAM
uauccuuguacuuccuggag

SEQ ID NO: 3170 - RNA, 20 nt, Artificial Sequence
  spacer sequence ATCN PAM
caaaaaauaauaauaauaaa

SEQ ID NO: 3171 - RNA, 20 nt, Artificial Sequence
  spacer sequence ATCN PAM
ugccacugcacuccagccug

SEQ ID NO: 3172 - RNA, 20 nt, Artificial Sequence
  spacer sequence ATCN PAM
cugcucacugcaaccuccac

SEQ ID NO: 3173 - RNA, 20 nt, Artificial Sequence
  spacer sequence ATCN PAM
cuugaacccaggagguggag

SEQ ID NO: 3174 - RNA, 20 nt, Artificial Sequence
  spacer sequence ATCN PAM
cuacuaaaaaauacaaaaaa

SEQ ID NO: 3175 - RNA, 20 nt, Artificial Sequence
  spacer sequence ATCN PAM
ccugagggcaggaguucaag

SEQ ID NO: 3176 - RNA, 20 nt, Artificial Sequence
  spacer sequence ATCN PAM
gcccaccucggccucccaaa

SEQ ID NO: 3177 - RNA, 20 nt, Artificial Sequence
  spacer sequence ATCN PAM
cagcacuuugggaggccgag

SEQ ID NO: 3178 - RNA, 20 nt, Artificial Sequence
  spacer sequence ATCN PAM
ccuaggucaggaguucaaga

SEQ ID NO: 3179 - RNA, 20 nt, Artificial Sequence
  spacer sequence ATCN PAM
acccgccuuggccucccaaa

SEQ ID NO: 3180 - RNA, 20 nt, Artificial Sequence
  spacer sequence ATCN PAM
cagcacuuugggaggccaag

SEQ ID NO: 3181 - RNA, 20 nt, Artificial Sequence
  spacer sequence ATCN PAM
acagaauacggaaacguguu

SEQ ID NO: 3182 - RNA, 20 nt, Artificial Sequence
  spacer sequence ATCN PAM
gcuccaggaguggaaaagcg

SEQ ID NO: 3183 - RNA, 20 nt, Artificial Sequence
  spacer sequence ATCN PAM
gccggacaccccgguccugc

SEQ ID NO: 3184 - RNA, 20 nt, Artificial Sequence
  spacer sequence ATCN PAM
cgaaggacagcaugacgcuu

SEQ ID NO: 3185 - RNA, 20 nt, Artificial Sequence
  spacer sequence ATCN PAM
uguucuucuccuugguggag

SEQ ID NO: 3186 - RNA, 20 nt, Artificial Sequence
  spacer sequence ATCN PAM
ccaccaaggagaagaacaag

SEQ ID NO: 3187 - RNA, 20 nt, Artificial Sequence
  spacer sequence ATCN PAM
uggugccgcgggcgccgcag

SEQ ID NO: 3188 - RNA, 20 nt, Artificial Sequence
  spacer sequence ATCN PAM
cggguguaggggcgcccgga

SEQ ID NO: 3189 - RNA, 20 nt, Artificial Sequence
  spacer sequence ATCN PAM
gggggucggggccgggaucg

SEQ ID NO: 3190 - RNA, 20 nt, Artificial Sequence
  spacer sequence ATCN PAM
cggccccgaccccccgaucc

SEQ ID NO: 3191 - RNA, 20 nt, Artificial Sequence
  spacer sequence ATCN PAM
ccgaggagggcggggggucu

SEQ ID NO: 3192 - RNA, 20 nt, Artificial Sequence
  spacer sequence ATCN PAM
gggagaacugggguuccggg

SEQ ID NO: 3193 - RNA, 20 nt, Artificial Sequence
  spacer sequence ATCN PAM
agacgggggcggaggcgggg

SEQ ID NO: 3194 - RNA, 20 nt, Artificial Sequence
  spacer sequence ATCN PAM
gagacaaaagagcuggggga

SEQ ID NO: 3195 - RNA, 20 nt, Artificial Sequence
  spacer sequence ATCN PAM
cgccgugcgcaccgagcggc

SEQ ID NO: 3196 - RNA, 20 nt, Artificial Sequence
  spacer sequence ATCN PAM
cgcagcccccagcccccagc

SEQ ID NO: 3197 - RNA, 20 nt, Artificial Sequence
  spacer sequence ATCN PAM
cuacaacgggggucaaccag

SEQ ID NO: 3198 - RNA, 20 nt, Artificial Sequence
  spacer sequence ATCN PAM
gaggucuccgggccccaaac

SEQ ID NO: 3199 - RNA, 20 nt, Artificial Sequence
  spacer sequence ATCN PAM
ugccguuuggggcccggaga

SEQ ID NO: 3200 - RNA, 20 nt, Artificial Sequence
  spacer sequence ATCN PAM
guuuuugggccgugcgcggu

SEQ ID NO: 3201 - RNA, 20 nt, Artificial Sequence
  spacer sequence ATCN PAM
cagcacuuugggaggucgag

SEQ ID NO: 3202 - RNA, 20 nt, Artificial Sequence
  spacer sequence ATCN PAM
gcccgccucgaccucccaaa

SEQ ID NO: 3203 - RNA, 20 nt, Artificial Sequence
  spacer sequence ATCN PAM
cgagggcaggaguucgagac

SEQ ID NO: 3204 - RNA, 20 nt, Artificial Sequence
  spacer sequence ATCN PAM
cagcuacucgggaggcugag

SEQ ID NO: 3205 - RNA, 20 nt, Artificial Sequence
  spacer sequence ATCN PAM
cagcacuuugggaggcagag

SEQ ID NO: 3206 - RNA, 20 nt, Artificial Sequence
  spacer sequence ATCN PAM
ucccgccucugccucccaaa

SEQ ID NO: 3207 - RNA, 20 nt, Artificial Sequence
  spacer sequence ATCN PAM
cuugaggccaggaguuccag

SEQ ID NO: 3208 - RNA, 20 nt, Artificial Sequence
  spacer sequence ATCN PAM
cuacuaaaaauauaaaaauu

SEQ ID NO: 3209 - RNA, 20 nt, Artificial Sequence
  spacer sequence ATCN PAM
cagccagaugggaggcugag

SEQ ID NO: 3210 - RNA, 20 nt, Artificial Sequence
  spacer sequence ATCN PAM
ggcugggauuacaggcgccu

SEQ ID NO: 3211 - RNA, 20 nt, Artificial Sequence
  spacer sequence ATCN PAM
cggcucacugcaaccuccgc

SEQ ID NO: 3212 - RNA, 20 nt, Artificial Sequence
  spacer sequence ATCN PAM
caaaaaaaaaaaaaaaaaca

SEQ ID NO: 3213 - RNA, 20 nt, Artificial Sequence
  spacer sequence ATCN PAM
agcagggcuccaacccucug

SEQ ID NO: 3214 - RNA, 20 nt, Artificial Sequence
  spacer sequence ATCN PAM
ccauuuaacuguuuccgcau

SEQ ID NO: 3215 - RNA, 20 nt, Artificial Sequence
  spacer sequence ATCN PAM
uauucccaucgccauuuaac

SEQ ID NO: 3216 - RNA, 20 nt, Artificial Sequence
  spacer sequence ATCN PAM
aaagguagcaacaccauuga

SEQ ID NO: 3217 - RNA, 20 nt, Artificial Sequence
  spacer sequence ATCN PAM
aaugggacccaccugugacc

SEQ ID NO: 3218 - RNA, 20 nt, Artificial Sequence
  spacer sequence ATCN PAM
caucgaaugggacccaccug

SEQ ID NO: 3219 - RNA, 20 nt, Artificial Sequence
  spacer sequence ATCN PAM
uguuccuccccaacagcccu

SEQ ID NO: 3220 - RNA, 20 nt, Artificial Sequence
  spacer sequence ATCN PAM
ggguguugcaaggugaccac

SEQ ID NO: 3221 - RNA, 20 nt, Artificial Sequence
  spacer sequence ATCN PAM
auugcauuuuccuccuccuc

SEQ ID NO: 3222 - RNA, 20 nt, Artificial Sequence
  spacer sequence ATCN PAM
ucuguuggacccccaagcug

SEQ ID NO: 3223 - RNA, 20 nt, Artificial Sequence
  spacer sequence ATCN PAM
gggggagucucagggucuuc

SEQ ID NO: 3224 - RNA, 20 nt, Artificial Sequence
  spacer sequence ATCN PAM
uagggggagaagacccugag

SEQ ID NO: 3225 - RNA, 20 nt, Artificial Sequence
  spacer sequence ATCN PAM
ccagugguggagauggggca

SEQ ID NO: 3226 - RNA, 20 nt, Artificial Sequence
  spacer sequence ATCN PAM
ccaccacuggugauccuagg

SEQ ID NO: 3227 - RNA, 20 nt, Artificial Sequence
  spacer sequence ATCN PAM
cucaagcccaggccccacac

SEQ ID NO: 3228 - RNA, 20 nt, Artificial Sequence
  spacer sequence ATCN PAM
uuuuuaaauaaaaguuuuga

SEQ ID NO: 3229 - RNA, 20 nt, Artificial Sequence
  spacer sequence ATCN PAM
caaaauaauaguaauaauaa

SEQ ID NO: 3230 - RNA, 20 nt, Artificial Sequence
  spacer sequence ATCN PAM
ugcgauuucagcucacugca

SEQ ID NO: 3231 - RNA, 20 nt, Artificial Sequence
  spacer sequence ATCN PAM
cacgauugcacuccagccug

SEQ ID NO: 3232 - RNA, 20 nt, Artificial Sequence
  spacer sequence ATCN PAM
cuugaacccaggagguggga

SEQ ID NO: 3233 - RNA, 20 nt, Artificial Sequence
  spacer sequence ATCN PAM
caacuacucgggaggcugag

SEQ ID NO: 3234 - RNA, 20 nt, Artificial Sequence
  spacer sequence ATCN PAM
ucuuucuacuaaaaauacaa

SEQ ID NO: 3235 - RNA, 20 nt, Artificial Sequence
  spacer sequence ATCN PAM
ccccauguuggucaggcugg

SEQ ID NO: 3236 - RNA, 20 nt, Artificial Sequence
  spacer sequence ATCN PAM
acaccagccugaccaacaug

SEQ ID NO: 3237 - RNA, 20 nt, Artificial Sequence
  spacer sequence ATCN PAM
ccugaccucagcugaucugc

SEQ ID NO: 3238 - RNA, 20 nt, Artificial Sequence
  spacer sequence ATCN PAM
gcugaggucaggagaucaac

SEQ ID NO: 3239 - RNA, 20 nt, Artificial Sequence
  spacer sequence ATCN PAM
gcugccucagccucccaaag

SEQ ID NO: 3240 - RNA, 20 nt, Artificial Sequence
  spacer sequence ATCN PAM
caguacuuugggaggcugag

SEQ ID NO: 3241 - RNA, 20 nt, Artificial Sequence
  spacer sequence ATCN PAM
cgccacugcacuccagccua

SEQ ID NO: 3242 - RNA, 20 nt, Artificial Sequence
  spacer sequence ATCN PAM
cggcucacugcaagcuccac

SEQ ID NO: 3243 - RNA, 20 nt, Artificial Sequence
  spacer sequence ATCN PAM
uggcuaacacggugaaacac

SEQ ID NO: 3244 - RNA, 20 nt, Artificial Sequence
  spacer sequence ATCN PAM
agaccauccuggcuaacacg

SEQ ID NO: 3245 - RNA, 20 nt, Artificial Sequence
  spacer sequence ATCN PAM
ccugaccucgugauccgccc

SEQ ID NO: 3246 - RNA, 20 nt, Artificial Sequence
  spacer sequence ATCN PAM
cgaggucaggagaucaagac

SEQ ID NO: 3247 - RNA, 20 nt, Artificial Sequence
  spacer sequence ATCN PAM
gcccgucuuggccucccaaa

SEQ ID NO: 3248 - RNA, 20 nt, Artificial Sequence
  spacer sequence ATCN PAM
cagcacuuugggaggccaag

SEQ ID NO: 3249 - RNA, 20 nt, Artificial Sequence
  spacer sequence ATCN PAM
acccuguccuggccaaacgu

SEQ ID NO: 3250 - RNA, 20 nt, Artificial Sequence
  spacer sequence ATCN PAM
uaccuguccaucuucccugc

SEQ ID NO: 3251 - RNA, 20 nt, Artificial Sequence
  spacer sequence ATCN PAM
ggggugggcagagagggaga

SEQ ID NO: 3252 - RNA, 20 nt, Artificial Sequence
  spacer sequence ATCN PAM
cugccuccguccaagccagc

SEQ ID NO: 3253 - RNA, 20 nt, Artificial Sequence
  spacer sequence ATCN PAM
gggggcugugccauggaccc

SEQ ID NO: 3254 - RNA, 20 nt, Artificial Sequence
  spacer sequence ATCN PAM
cccauacagacgcgcaggac

SEQ ID NO: 3255 - RNA, 20 nt, Artificial Sequence
  spacer sequence ATCN PAM
aggcaggcacuucugcgggg

SEQ ID NO: 3256 - RNA, 20 nt, Artificial Sequence
  spacer sequence ATCN PAM
gggcacccccgcagaagugc

SEQ ID NO: 3257 - RNA, 20 nt, Artificial Sequence
  spacer sequence ATCN PAM
augcccgcuucgugaugacc

SEQ ID NO: 3258 - RNA, 20 nt, Artificial Sequence
  spacer sequence ATCN PAM
cgaagcgggcauggaucagg

SEQ ID NO: 3259 - RNA, 20 nt, Artificial Sequence
  spacer sequence ATCN PAM
gacccccuuuccuucacugc

SEQ ID NO: 3260 - RNA, 20 nt, Artificial Sequence
  spacer sequence ATCN PAM
gagccccuucccuucucugg

SEQ ID NO: 3261 - RNA, 20 nt, Artificial Sequence
  spacer sequence ATCN PAM
uucacccugaaaacuccccc

SEQ ID NO: 3262 - RNA, 20 nt, Artificial Sequence
  spacer sequence ATCN PAM
ggucguucagguucugcugg

SEQ ID NO: 3263 - RNA, 20 nt, Artificial Sequence
  spacer sequence ATCN PAM
ucucaccugaagcagcauca

SEQ ID NO: 3264 - RNA, 20 nt, Artificial Sequence
  spacer sequence ATCN PAM
cagguggcaccauccucuca

SEQ ID NO: 3265 - RNA, 20 nt, Artificial Sequence
  spacer sequence ATCN PAM
cagcaccucgggaggccgac

SEQ ID NO: 3266 - RNA, 20 nt, Artificial Sequence
  spacer sequence ATCN PAM
ucacgcugcuggugagguug

SEQ ID NO: 3267 - RNA, 20 nt, Artificial Sequence
  spacer sequence ATCN PAM
ggugccggcuuccaccgugg

SEQ ID NO: 3268 - RNA, 20 nt, Artificial Sequence
  spacer sequence ATCN PAM
gcaaugugagugcucccugu

SEQ ID NO: 3269 - RNA, 20 nt, Artificial Sequence
  spacer sequence ATCN PAM
agucucggaagagcgccacu

SEQ ID NO: 3270 - RNA, 20 nt, Artificial Sequence
  spacer sequence ATCN PAM
augguguucucaacaacccg

SEQ ID NO: 3271 - RNA, 20 nt, Artificial Sequence
  spacer sequence ATCN PAM
auccagucucggaagagcgc

SEQ ID NO: 3272 - RNA, 20 nt, Artificial Sequence
  spacer sequence ATCN PAM
cagcuauucaggaggcugag

SEQ ID NO: 3273 - RNA, 20 nt, Artificial Sequence
  spacer sequence ATCN PAM
cuuguacccaggaggcggag

SEQ ID NO: 3274 - RNA, 20 nt, Artificial Sequence
  spacer sequence ATCN PAM
uucuuguucucucuuuuuuc

SEQ ID NO: 3275 - RNA, 20 nt, Artificial Sequence
  spacer sequence ATCN PAM
cucucagucucucuggcucu

SEQ ID NO: 3276 - RNA, 20 nt, Artificial Sequence
  spacer sequence ATCN PAM
cugucucccuuuuuuaaaac

SEQ ID NO: 3277 - RNA, 20 nt, Artificial Sequence
  spacer sequence ATCN PAM
cugugucugugucugugucu

SEQ ID NO: 3278 - RNA, 20 nt, Artificial Sequence
  spacer sequence ATCN PAM
gucugucucuucaucucugu

SEQ ID NO: 3279 - RNA, 20 nt, Artificial Sequence
  spacer sequence ATCN PAM
auguuauauacauuaauaua

SEQ ID NO: 3280 - RNA, 20 nt, Artificial Sequence
  spacer sequence ATCN PAM
cgccaaagugcugggaacac

SEQ ID NO: 3281 - RNA, 20 nt, Artificial Sequence
  spacer sequence ATCN PAM
uuuccaaaugaaacguuaaa

SEQ ID NO: 3282 - RNA, 20 nt, Artificial Sequence
  spacer sequence ATCN PAM
ugggcacugcagggcccugc

SEQ ID NO: 3283 - RNA, 20 nt, Artificial Sequence
  spacer sequence ATCN PAM
gugguugucacgacuuggag

SEQ ID NO: 3284 - RNA, 20 nt, Artificial Sequence
  spacer sequence ATCN PAM
ccccaggguuagaggauucc

SEQ ID NO: 3285 - RNA, 20 nt, Artificial Sequence
  spacer sequence ATCN PAM
ucuaacccuggggugauucu

SEQ ID NO: 3286 - RNA, 20 nt, Artificial Sequence
  spacer sequence ATCN PAM
acacccugagugggagggag

SEQ ID NO: 3287 - RNA, 20 nt, Artificial Sequence
  spacer sequence ATCN PAM
auccagccuccaggccccgg

SEQ ID NO: 3288 - RNA, 20 nt, Artificial Sequence
  spacer sequence ATCN PAM
agccuccaggccccggugga

SEQ ID NO: 3289 - RNA, 20 nt, Artificial Sequence
  spacer sequence ATCN PAM
aaagcccuucuggcacagcu

SEQ ID NO: 3290 - RNA, 20 nt, Artificial Sequence
  spacer sequence ATCN PAM
ugagggugauuuucuuuuuc

SEQ ID NO: 3291 - RNA, 20 nt, Artificial Sequence
  spacer sequence ATCN PAM
cccucaggauagggaccuga

SEQ ID NO: 3292 - RNA, 20 nt, Artificial Sequence
  spacer sequence ATCN PAM
cgccacugcacuccagccug

SEQ ID NO: 3293 - RNA, 20 nt, Artificial Sequence
  spacer sequence ATCN PAM
cggcucacugcaagcucagc

SEQ ID NO: 3294 - RNA, 20 nt, Artificial Sequence
  spacer sequence ATCN PAM
aggcaugguggugggcgccu

SEQ ID NO: 3295 - RNA, 20 nt, Artificial Sequence
  spacer sequence ATCN PAM
uggcuaacaccuugaaaccc

SEQ ID NO: 3296 - RNA, 20 nt, Artificial Sequence
  spacer sequence ATCN PAM
agaccauccuggcuaacacc

SEQ ID NO: 3297 - RNA, 20 nt, Artificial Sequence
  spacer sequence ATCN PAM
ccugacuucgugauccgccu

SEQ ID NO: 3298 - RNA, 20 nt, Artificial Sequence
  spacer sequence ATCN PAM
ccgcagcucgggcagcaccu

SEQ ID NO: 3299 - RNA, 20 nt, Artificial Sequence
  spacer sequence ATCN PAM
ugggcgggcacgaggcgcag

SEQ ID NO: 3300 - RNA, 20 nt, Artificial Sequence
  spacer sequence ATCN PAM
gcagggaggccauguagggc

SEQ ID NO: 3301 - RNA, 20 nt, Artificial Sequence
  spacer sequence ATCN PAM
aggugccuccgcagaagugg

SEQ ID NO: 3302 - RNA, 20 nt, Artificial Sequence
  spacer sequence ATCN PAM
accccagcuucgugcugacg

SEQ ID NO: 3303 - RNA, 20 nt, Artificial Sequence
  spacer sequence ATCN PAM
aggugggcgggcagggccgc

SEQ ID NO: 3304 - RNA, 20 nt, Artificial Sequence
  spacer sequence ATCN PAM
cagccucccaaaguacuggg

SEQ ID NO: 3305 - RNA, 20 nt, Artificial Sequence
  spacer sequence ATCN PAM
ucccaucccagccucccaaa

SEQ ID NO: 3306 - RNA, 20 nt, Artificial Sequence
  spacer sequence ATCN PAM
cuugaggccaggaguuuggg

SEQ ID NO: 3307 - RNA, 20 nt, Artificial Sequence
  spacer sequence ATCN PAM
cuauaaaagacauuuuuuuu

SEQ ID NO: 3308 - RNA, 20 nt, Artificial Sequence
  spacer sequence ATCN PAM
cagcuacucaggaggcugag

SEQ ID NO: 3309 - RNA, 20 nt, Artificial Sequence
  spacer sequence ATCN PAM
cuugaggucaggaguucgag

SEQ ID NO: 3310 - RNA, 20 nt, Artificial Sequence
  spacer sequence ATCN PAM
gcucuccucagccucccaaa

SEQ ID NO: 3311 - RNA, 20 nt, Artificial Sequence
  spacer sequence ATCN PAM
cagcacuuugggaggcugag

SEQ ID NO: 3312 - RNA, 20 nt, Artificial Sequence
  spacer sequence ATCN PAM
gcuucguaaguaaccgugcc

SEQ ID NO: 3313 - RNA, 20 nt, Artificial Sequence
  spacer sequence ATCN PAM
cuugaacccgggaggcagag

SEQ ID NO: 3314 - RNA, 20 nt, Artificial Sequence
  spacer sequence ATCN PAM
ggggccaccugagucucccu

SEQ ID NO: 3315 - RNA, 20 nt, Artificial Sequence
  spacer sequence ATCN PAM
gggggccaccugagucuccc

SEQ ID NO: 3316 - RNA, 20 nt, Artificial Sequence
  spacer sequence ATCN PAM
gugauggcaucauccaagga

SEQ ID NO: 3317 - RNA, 20 nt, Artificial Sequence
  spacer sequence ATCN PAM
cagaucagggggccaccuga

SEQ ID NO: 3318 - RNA, 20 nt, Artificial Sequence
  spacer sequence ATCN PAM
uccaaggaauagacuccuuc

SEQ ID NO: 3319 - RNA, 20 nt, Artificial Sequence
  spacer sequence ATCN PAM
aaggaauagacuccuucgug

SEQ ID NO: 3320 - RNA, 20 nt, Artificial Sequence
  spacer sequence ATCN PAM
cgaaggagucuauuccuugg

SEQ ID NO: 3321 - RNA, 20 nt, Artificial Sequence
  spacer sequence ATCN PAM
ggggaugugccacccgccuu

SEQ ID NO: 3322 - RNA, 20 nt, Artificial Sequence
  spacer sequence ATCN PAM
ccagaucacgaaggagucua

SEQ ID NO: 3323 - RNA, 20 nt, Artificial Sequence
  spacer sequence ATCN PAM
aguccacguagagggcuacc

SEQ ID NO: 3324 - RNA, 20 nt, Artificial Sequence
  spacer sequence ATCN PAM
guuccacgcugcgccgugug

SEQ ID NO: 3325 - RNA, 20 nt, Artificial Sequence
  spacer sequence ATCN PAM
cauaaaccugucaagaggau

SEQ ID NO: 3326 - RNA, 20 nt, Artificial Sequence
  spacer sequence ATCN PAM
aucacauaaaccugucaaga

SEQ ID NO: 3327 - RNA, 20 nt, Artificial Sequence
  spacer sequence ATCN PAM
uacgauuauaauuuuacaga

SEQ ID NO: 3328 - RNA, 20 nt, Artificial Sequence
  spacer sequence ATCN PAM
uaggauccaucacauaaacc

SEQ ID NO: 3329 - RNA, 20 nt, Artificial Sequence
  spacer sequence ATCN PAM
ugggggagaugggaagagga

SEQ ID NO: 3330 - RNA, 20 nt, Artificial Sequence
  spacer sequence ATCN PAM
cagggcccuggguaaacuga

SEQ ID NO: 3331 - RNA, 20 nt, Artificial Sequence
  spacer sequence ATCN PAM
cagggcccuggguaaacuga

SEQ ID NO: 3332 - RNA, 20 nt, Artificial Sequence
  spacer sequence ATCN PAM
caggcgugagccacugcgcc

SEQ ID NO: 3333 - RNA, 20 nt, Artificial Sequence
  spacer sequence ATCN PAM
cagcacucugggaggcugag

SEQ ID NO: 3334 - RNA, 20 nt, Artificial Sequence
  spacer sequence ATCN PAM
gccugccucagccucccaga

SEQ ID NO: 3335 - RNA, 20 nt, Artificial Sequence
  spacer sequence ATCN PAM
cccgaggucagauguucaag

SEQ ID NO: 3336 - RNA, 20 nt, Artificial Sequence
  spacer sequence ATCN PAM
cggcucacggcaaccuccgc

SEQ ID NO: 3337 - RNA, 20 nt, Artificial Sequence
  spacer sequence ATCN PAM
cgccaccgcacuccagccug

SEQ ID NO: 3338 - RNA, 20 nt, Artificial Sequence
  spacer sequence ATCN PAM
cccaggcuggagugcggugg

SEQ ID NO: 3339 - RNA, 20 nt, Artificial Sequence
  spacer sequence ATCN PAM
acgcccugugccaggggaga

SEQ ID NO: 3340 - RNA, 20 nt, Artificial Sequence
  spacer sequence ATCN PAM
ccgaggccagcgcggugccu

SEQ ID NO: 3341 - RNA, 20 nt, Artificial Sequence
  spacer sequence ATCN PAM
ggguggcgccgcagaagugg

SEQ ID NO: 3342 - RNA, 20 nt, Artificial Sequence
  spacer sequence ATCN PAM
ucgaaaacggcuacgacccc

SEQ ID NO: 3343 - RNA, 20 nt, Artificial Sequence
  spacer sequence ATCN PAM
ugauucuccaggugccgccg

SEQ ID NO: 3344 - RNA, 20 nt, Artificial Sequence
  spacer sequence ATCN PAM
cgaugucguugagcaaguuu

SEQ ID NO: 3345 - RNA, 20 nt, Artificial Sequence
  spacer sequence ATCN PAM
gggccucccuucucaguaag

SEQ ID NO: 3346 - RNA, 20 nt, Artificial Sequence
  spacer sequence ATCN PAM
guugucaaucaacaaacuua

SEQ ID NO: 3347 - RNA, 20 nt, Artificial Sequence
  spacer sequence ATCN PAM
acaaacuuacugagaaggga

SEQ ID NO: 3348 - RNA, 20 nt, Artificial Sequence
  spacer sequence ATCN PAM
gggccucccuucucaguaag

SEQ ID NO: 3349 - RNA, 20 nt, Artificial Sequence
  spacer sequence ATCN PAM
guugucaaucaacaaacuua

SEQ ID NO: 3350 - RNA, 20 nt, Artificial Sequence
  spacer sequence ATCN PAM
acaaacuuacugagaaggga

SEQ ID NO: 3351 - RNA, 20 nt, Artificial Sequence
  spacer sequence ATCN PAM
gggccucccuucucaguaag

SEQ ID NO: 3352 - RNA, 20 nt, Artificial Sequence
  spacer sequence ATCN PAM
guugucaaucaacaaacuua

SEQ ID NO: 3353 - RNA, 20 nt, Artificial Sequence
  spacer sequence ATCN PAM
acaaacuuacugagaaggga

SEQ ID NO: 3354 - RNA, 20 nt, Artificial Sequence
  spacer sequence ATCN PAM
gggccucccuucucaguaag

SEQ ID NO: 3355 - RNA, 20 nt, Artificial Sequence
  spacer sequence ATCN PAM
gcugucaaucaacaaacuua

SEQ ID NO: 3356 - RNA, 20 nt, Artificial Sequence
  spacer sequence ATCN PAM
acaaacuuacugagaaggga

SEQ ID NO: 3357 - RNA, 20 nt, Artificial Sequence
  spacer sequence ATCN PAM
gggccucccuucucaguaag

SEQ ID NO: 3358 - RNA, 20 nt, Artificial Sequence
  spacer sequence ATCN PAM
guugucaaucaacaaacuua

SEQ ID NO: 3359 - RNA, 20 nt, Artificial Sequence
  spacer sequence ATCN PAM
acaaacuuacugagaaggga

SEQ ID NO: 3360 - RNA, 20 nt, Artificial Sequence
  spacer sequence ATCN PAM
ucagcgcgucacacggggca

SEQ ID NO: 3361 - RNA, 20 nt, Artificial Sequence
  spacer sequence ATCN PAM
guccccaccgccacagcuca

SEQ ID NO: 3362 - RNA, 20 nt, Artificial Sequence
  spacer sequence ATCN PAM
acgccaacgugcagguggcc

SEQ ID NO: 3363 - RNA, 20 nt, Artificial Sequence
  spacer sequence ATCN PAM
cacgguuccugcccagaagg

SEQ ID NO: 3364 - RNA, 20 nt, Artificial Sequence
  spacer sequence ATCN PAM
ccagcguccugcaggagcuc

SEQ ID NO: 3365 - RNA, 20 nt, Artificial Sequence
  spacer sequence ATCN PAM
acggaauugccuccuucguc

SEQ ID NO: 3366 - RNA, 20 nt, Artificial Sequence
  spacer sequence ATCN PAM
ggguagagcccugaggcgca

SEQ ID NO: 3367 - RNA, 20 nt, Artificial Sequence
  spacer sequence ATCN PAM
aguuuacaaacugugccacc

SEQ ID NO: 3368 - RNA, 20 nt, Artificial Sequence
  spacer sequence ATCN PAM
acucuaucauccaacgcucc

SEQ ID NO: 3369 - RNA, 20 nt, Artificial Sequence
  spacer sequence ATCN PAM
uccaacgcuccgaggacaac

SEQ ID NO: 3370 - RNA, 20 nt, Artificial Sequence
  spacer sequence ATCN PAM
aacgcuccgaggacaacccc

SEQ ID NO: 3371 - RNA, 20 nt, Artificial Sequence
  spacer sequence ATCN PAM
ggcacaauaaacauucucug

SEQ ID NO: 3372 - RNA, 20 nt, Artificial Sequence
  spacer sequence ATCN PAM
aacacauucuacaaaacaga

SEQ ID NO: 3373 - RNA, 20 nt, Artificial Sequence
  spacer sequence ATCN PAM
cuggaguaagccaccaccag

SEQ ID NO: 3374 - RNA, 20 nt, Artificial Sequence
  spacer sequence ATCN PAM
aaaaacaaaaaagaaaaaaa

SEQ ID NO: 3375 - RNA, 20 nt, Artificial Sequence
  spacer sequence ATCN PAM
cgccacugcacuccagccug

SEQ ID NO: 3376 - RNA, 20 nt, Artificial Sequence
  spacer sequence ATCN PAM
cggcucacugcaagcuccgc

SEQ ID NO: 3377 - RNA, 20 nt, Artificial Sequence
  spacer sequence ATCN PAM
uggcuaacacggugaaaccc

SEQ ID NO: 3378 - RNA, 20 nt, Artificial Sequence
  spacer sequence ATCN PAM
agaccauccuggcuaacacg

SEQ ID NO: 3379 - RNA, 20 nt, Artificial Sequence
  spacer sequence ATCN PAM
ccugaacucgugauccgccc

SEQ ID NO: 3380 - RNA, 20 nt, Artificial Sequence
  spacer sequence ATCN PAM
cgaguucaggagaucgagac

SEQ ID NO: 3381 - RNA, 20 nt, Artificial Sequence
  spacer sequence ATCN PAM
gcccgccuugaccucccaaa

SEQ ID NO: 3382 - RNA, 20 nt, Artificial Sequence
  spacer sequence ATCN PAM
cagcacuuugggaggucaag

SEQ ID NO: 3383 - RNA, 20 nt, Artificial Sequence
  spacer sequence ATCN PAM
uuuucuauucucugugcgua

SEQ ID NO: 3384 - RNA, 20 nt, Artificial Sequence
  spacer sequence ATCN PAM
acagggggccaggcauggug

SEQ ID NO: 3385 - RNA, 20 nt, Artificial Sequence
  spacer sequence ATCN PAM
cagcacuuugggaggccgag

SEQ ID NO: 3386 - RNA, 20 nt, Artificial Sequence
  spacer sequence ATCN PAM
gcccaccucggccucccaaa

SEQ ID NO: 3387 - RNA, 20 nt, Artificial Sequence
  spacer sequence ATCN PAM
cacgcccccucccaaacugu

SEQ ID NO: 3388 - RNA, 20 nt, Artificial Sequence
  spacer sequence ATCN PAM
aggcuccaccaacccaaggc

SEQ ID NO: 3389 - RNA, 20 nt, Artificial Sequence
  spacer sequence ATCN PAM
aggugccugaacaaugucca

SEQ ID NO: 3390 - RNA, 20 nt, Artificial Sequence
  spacer sequence ATCN PAM
agccacaccugaaggcggac

SEQ ID NO: 3391 - RNA, 20 nt, Artificial Sequence
  spacer sequence ATCN PAM
cugaacuuuccauauaacuu

SEQ ID NO: 3392 - RNA, 20 nt, Artificial Sequence
  spacer sequence ATCN PAM
uagcuggaggccacagcgug

SEQ ID NO: 3393 - RNA, 20 nt, Artificial Sequence
  spacer sequence ATCN PAM
gaccacggggcggcgccgcu

SEQ ID NO: 3394 - RNA, 20 nt, Artificial Sequence
  spacer sequence ATCN PAM
ugggcggcagagaggccgag

SEQ ID NO: 3395 - RNA, 20 nt, Artificial Sequence
  spacer sequence ATCN PAM
accacgaccuccugcugcua

SEQ ID NO: 3396 - RNA, 20 nt, Artificial Sequence
  spacer sequence ATCN PAM
ccgagcgcuugaugugcgcg

SEQ ID NO: 3397 - RNA, 20 nt, Artificial Sequence
  spacer sequence ATCN PAM
agcgcucggugauggcgccg

SEQ ID NO: 3398 - RNA, 20 nt, Artificial Sequence
  spacer sequence ATCN PAM
ccgggacagcugcaagguga

SEQ ID NO: 3399 - RNA, 20 nt, Artificial Sequence
  spacer sequence ATCN PAM
cgggcuucuugcgguugccg

SEQ ID NO: 3400 - RNA, 20 nt, Artificial Sequence
  spacer sequence ATCN PAM
acacccgcguggcgagcuau

SEQ ID NO: 3401 - RNA, 20 nt, Artificial Sequence
  spacer sequence ATCN PAM
aggccgcauagcucgccacg

SEQ ID NO: 3402 - RNA, 20 nt, Artificial Sequence
  spacer sequence ATCN PAM
acagcguccuggccuagggu

SEQ ID NO: 3403 - RNA, 20 nt, Artificial Sequence
  spacer sequence ATCN PAM
acuccugcaucugguugguc

SEQ ID NO: 3404 - RNA, 20 nt, Artificial Sequence
  spacer sequence ATCN PAM
gguuggucuuuauugagcac

SEQ ID NO: 3405 - RNA, 20 nt, Artificial Sequence
  spacer sequence ATCN PAM
uccugccucagccuccugag

SEQ ID NO: 3406 - RNA, 20 nt, Artificial Sequence
  spacer sequence ATCN PAM
cagcucacugcaaccuccgc

SEQ ID NO: 3407 - RNA, 20 nt, Artificial Sequence
  spacer sequence ATCN PAM
caccacuguacuccgaccug

SEQ ID NO: 3408 - RNA, 20 nt, Artificial Sequence
  spacer sequence ATCN PAM
gagucacccagugcccgacu

SEQ ID NO: 3409 - RNA, 20 nt, Artificial Sequence
  spacer sequence ATCN PAM
cccggccccugaagcugccc

SEQ ID NO: 3410 - RNA, 20 nt, Artificial Sequence
  spacer sequence ATCN PAM
ccuccccguccacccgccgc

SEQ ID NO: 3411 - RNA, 20 nt, Artificial Sequence
  spacer sequence ATCN PAM
uucagcauuuauggggcacc

SEQ ID NO: 3412 - RNA, 20 nt, Artificial Sequence
  spacer sequence ATCN PAM
aggucguggguggggucggg

SEQ ID NO: 3413 - RNA, 20 nt, Artificial Sequence
  spacer sequence ATCN PAM
agaacugccugugcgguggg

SEQ ID NO: 3414 - RNA, 20 nt, Artificial Sequence
  spacer sequence ATCN PAM
agcgcugcucccacugcuuc

SEQ ID NO: 3415 - RNA, 20 nt, Artificial Sequence
  spacer sequence ATCN PAM
cugggagucagcgguuccgg

SEQ ID NO: 3416 - RNA, 20 nt, Artificial Sequence
  spacer sequence ATCN PAM
accaccugcggaggcugcac

SEQ ID NO: 3417 - RNA, 20 nt, Artificial Sequence
  spacer sequence ATCN PAM
ugggcuggccuggggcccug

SEQ ID NO: 3418 - RNA, 20 nt, Artificial Sequence
  spacer sequence ATCN PAM
ccagccuggacuggcugcca

SEQ ID NO: 3419 - RNA, 20 nt, Artificial Sequence
  spacer sequence ATCN PAM
accagcgccucguccggcuc

SEQ ID NO: 3420 - RNA, 20 nt, Artificial Sequence
  spacer sequence ATCN PAM
cgaccugcggagagaggugg

SEQ ID NO: 3421 - RNA, 20 nt, Artificial Sequence
  spacer sequence ATCN PAM
gcugugaggcacccccgccc

SEQ ID NO: 3422 - RNA, 20 nt, Artificial Sequence
  spacer sequence ATCN PAM
agagcuuggugagcaggcgg

SEQ ID NO: 3423 - RNA, 20 nt, Artificial Sequence
  spacer sequence ATCN PAM
gagguggccguauacacggg

SEQ ID NO: 3424 - RNA, 20 nt, Artificial Sequence
  spacer sequence ATCN PAM
ggggccuucugaagcccagc

SEQ ID NO: 3425 - RNA, 20 nt, Artificial Sequence
  spacer sequence ATCN PAM
gcaucuggggccuucugaag

SEQ ID NO: 3426 - RNA, 20 nt, Artificial Sequence
  spacer sequence ATCN PAM
auucccgaagcaugcccagc

SEQ ID NO: 3427 - RNA, 20 nt, Artificial Sequence
  spacer sequence ATCN PAM
guguggcuggggcggcgggg

SEQ ID NO: 3428 - RNA, 20 nt, Artificial Sequence
  spacer sequence ATCN PAM
acaccuccaccuucaguucu

SEQ ID NO: 3429 - RNA, 20 nt, Artificial Sequence
  spacer sequence ATCN PAM
accucaagacggaggaauuu

SEQ ID NO: 3430 - RNA, 20 nt, Artificial Sequence
  spacer sequence ATCN PAM
ugaccuugucaaugucuaca

SEQ ID NO: 3431 - RNA, 20 nt, Artificial Sequence
  spacer sequence ATCN PAM
ccgacgucgguggguccuuu

SEQ ID NO: 3432 - RNA, 20 nt, Artificial Sequence
  spacer sequence ATCN PAM
uggugcagaucucggucagc

SEQ ID NO: 3433 - RNA, 20 nt, Artificial Sequence
  spacer sequence ATCN PAM
gcaccaagaucaccgacguc

SEQ ID NO: 3434 - RNA, 20 nt, Artificial Sequence
  spacer sequence ATCN PAM
cggucagccggucgccgggg

SEQ ID NO: 3435 - RNA, 20 nt, Artificial Sequence
  spacer sequence ATCN PAM
gcuccacccugaagucgcug

SEQ ID NO: 3436 - RNA, 20 nt, Artificial Sequence
  spacer sequence ATCN PAM
ccaucagcuccacccugaag

SEQ ID NO: 3437 - RNA, 20 nt, Artificial Sequence
  spacer sequence ATCN PAM
uggccaugaaggccucgcuc

SEQ ID NO: 3438 - RNA, 20 nt, Artificial Sequence
  spacer sequence ATCN PAM
ggguggagaggaccugaggg

SEQ ID NO: 3439 - RNA, 20 nt, Artificial Sequence
  spacer sequence ATCN PAM
ugcugcacgugcagcccagu

SEQ ID NO: 3440 - RNA, 20 nt, Artificial Sequence
  spacer sequence ATCN PAM
caccgggcucuccuugggcu

SEQ ID NO: 3441 - RNA, 20 nt, Artificial Sequence
  spacer sequence ATCN PAM
ccaccagggccagugacguc

SEQ ID NO: 3442 - RNA, 20 nt, Artificial Sequence
  spacer sequence ATCN PAM
uggacgucacuggcccuggu

SEQ ID NO: 3443 - RNA, 20 nt, Artificial Sequence
  spacer sequence ATCN PAM
acaggccucggggccgcgga

SEQ ID NO: 3444 - RNA, 20 nt, Artificial Sequence
  spacer sequence ATCN PAM
ugcaccggcucucacugcag

SEQ ID NO: 3445 - RNA, 20 nt, Artificial Sequence
  spacer sequence ATCN PAM
cgcucaccaacaccgaccuc

SEQ ID NO: 3446 - RNA, 20 nt, Artificial Sequence
  spacer sequence ATCN PAM
ggaccgugugucggccgugg

SEQ ID NO: 3447 - RNA, 20 nt, Artificial Sequence
  spacer sequence ATCN PAM
uugguggccgauaggauccg

SEQ ID NO: 3448 - RNA, 20 nt, Artificial Sequence
  spacer sequence ATCN PAM
gccaccaacgaucuggaccg

SEQ ID NO: 3449 - RNA, 20 nt, Artificial Sequence
  spacer sequence ATCN PAM
uaucggccaccaacgaucug

SEQ ID NO: 3450 - RNA, 20 nt, Artificial Sequence
  spacer sequence ATCN PAM
gccauuugagaauugugggc

SEQ ID NO: 3451 - RNA, 20 nt, Artificial Sequence
  spacer sequence ATCN PAM
ggggcaggaaaacaggaagg

SEQ ID NO: 3452 - RNA, 20 nt, Artificial Sequence
  spacer sequence ATCN PAM
cccccgugggugagucuccc

SEQ ID NO: 3453 - RNA, 20 nt, Artificial Sequence
  spacer sequence ATCN PAM
gcuggaagauguuguucacg

SEQ ID NO: 3454 - RNA, 20 nt, Artificial Sequence
  spacer sequence ATCN PAM
uccagcagaucucccccgug

SEQ ID NO: 3455 - RNA, 20 nt, Artificial Sequence
  spacer sequence ATCN PAM
uggagugcuggucccugcgc

SEQ ID NO: 3456 - RNA, 20 nt, Artificial Sequence
  spacer sequence ATCN PAM
cgugggcuggcaggcuugga

SEQ ID NO: 3457 - RNA, 20 nt, Artificial Sequence
  spacer sequence ATCN PAM
cccaccucaaguuccuggcc

SEQ ID NO: 3458 - RNA, 20 nt, Artificial Sequence
  spacer sequence ATCN PAM
ugcccucccuguucaugcgc

SEQ ID NO: 3459 - RNA, 20 nt, Artificial Sequence
  spacer sequence ATCN PAM
ccgugucgauacggcacuuc

SEQ ID NO: 3460 - RNA, 20 nt, Artificial Sequence
  spacer sequence ATCN PAM
acacggagauccugcccucc

SEQ ID NO: 3461 - RNA, 20 nt, Artificial Sequence
  spacer sequence ATCN PAM
ugguggccacggcggacggc

SEQ ID NO: 3462 - RNA, 20 nt, Artificial Sequence
  spacer sequence ATCN PAM
ccuucaccggcggcggcaac

SEQ ID NO: 3463 - RNA, 20 nt, Artificial Sequence
  spacer sequence ATCN PAM
cggugacggucagcggccug

SEQ ID NO: 3464 - RNA, 20 nt, Artificial Sequence
  spacer sequence ATCN PAM
agcccuccaugggcuugccg

SEQ ID NO: 3465 - RNA, 20 nt, Artificial Sequence
  spacer sequence ATCN PAM
cagcuacucaggaggcugag

SEQ ID NO: 3466 - RNA, 20 nt, Artificial Sequence
  spacer sequence ATCN PAM
gccucauccgcucacucggg

SEQ ID NO: 3467 - RNA, 20 nt, Artificial Sequence
  spacer sequence ATCN PAM
gcucacucgggcaggacacu

SEQ ID NO: 3468 - RNA, 20 nt, Artificial Sequence
  spacer sequence ATCN PAM
agugcuggagcauggcggac

SEQ ID NO: 3469 - RNA, 20 nt, Artificial Sequence
  spacer sequence ATCN PAM
gcccgucggcaucugcugac

SEQ ID NO: 3470 - RNA, 20 nt, Artificial Sequence
  spacer sequence ATCN PAM
gcugacaggagccgggagcc

SEQ ID NO: 3471 - RNA, 20 nt, Artificial Sequence
  spacer sequence ATCN PAM
uugcgaaccuuccagggaug

SEQ ID NO: 3472 - RNA, 20 nt, Artificial Sequence
  spacer sequence ATCN PAM
cuggaagguucgcaaugaug

SEQ ID NO: 3473 - RNA, 20 nt, Artificial Sequence
  spacer sequence ATCN PAM
gggucgccaccccuggccac

SEQ ID NO: 3474 - RNA, 20 nt, Artificial Sequence
  spacer sequence ATCN PAM
ccugccuggagugggaccag

SEQ ID NO: 3475 - RNA, 20 nt, Artificial Sequence
  spacer sequence ATCN PAM
ccucagagcaccacgaggcc

SEQ ID NO: 3476 - RNA, 20 nt, Artificial Sequence
  spacer sequence ATCN PAM
agugcaggucccaggggugc

SEQ ID NO: 3477 - RNA, 20 nt, Artificial Sequence
  spacer sequence ATCN PAM
uggacacggagcaccccugg

SEQ ID NO: 3478 - RNA, 20 nt, Artificial Sequence
  spacer sequence ATCN PAM
acauccuggacacggagcac

SEQ ID NO: 3479 - RNA, 20 nt, Artificial Sequence
  spacer sequence ATCN PAM
ugcgggucaggucugugggg

SEQ ID NO: 3480 - RNA, 20 nt, Artificial Sequence
  spacer sequence ATCN PAM
cugcgcagguccauggugaa

SEQ ID NO: 3481 - RNA, 20 nt, Artificial Sequence
  spacer sequence ATCN PAM
ccuucaccauggaccugcgc

SEQ ID NO: 3482 - RNA, 20 nt, Artificial Sequence
  spacer sequence ATCN PAM
caucgccuucaccauggacc

SEQ ID NO: 3483 - RNA, 20 nt, Artificial Sequence
  spacer sequence ATCN PAM
gugccccuggccugcgccug

SEQ ID NO: 3484 - RNA, 20 nt, Artificial Sequence
  spacer sequence ATCN PAM
ucccaccugccgcuggccgc

SEQ ID NO: 3485 - RNA, 20 nt, Artificial Sequence
  spacer sequence ATCN PAM
caccugccgcuggccgccgc

SEQ ID NO: 3486 - RNA, 20 nt, Artificial Sequence
  spacer sequence ATCN PAM
cacaugagggcagucaccag

SEQ ID NO: 3487 - RNA, 20 nt, Artificial Sequence
  spacer sequence ATCN PAM
caccgcggacgcccgcugag

SEQ ID NO: 3488 - RNA, 20 nt, Artificial Sequence
  spacer sequence ATCN PAM
ucccuagcgccucgggucug

SEQ ID NO: 3489 - RNA, 20 nt, Artificial Sequence
  spacer sequence ATCN PAM
uuccaauuuuaguauaugug

SEQ ID NO: 3490 - RNA, 20 nt, Artificial Sequence
  spacer sequence ATCN PAM
ucucuguaucguuccaauuu

SEQ ID NO: 3491 - RNA, 20 nt, Artificial Sequence
  spacer sequence ATCN PAM
uugcgcaggggccaugcuaa

SEQ ID NO: 3492 - RNA, 20 nt, Artificial Sequence
  spacer sequence ATCN PAM
cguguccccucgucccccag

SEQ ID NO: 3493 - RNA, 20 nt, Artificial Sequence
  spacer sequence ATCN PAM
ucgucauucugcguguccuc

SEQ ID NO: 3494 - RNA, 20 nt, Artificial Sequence
  spacer sequence ATCN PAM
uguguuguauaugugugcgc

SEQ ID NO: 3495 - RNA, 20 nt, Artificial Sequence
  spacer sequence ATCN PAM
acaacaaaucacaccaaauu

SEQ ID NO: 3496 - RNA, 20 nt, Artificial Sequence
  spacer sequence ATCN PAM
caccaaauucauuaaaagug

SEQ ID NO: 3497 - RNA, 20 nt, Artificial Sequence
  spacer sequence ATCN PAM
cuuuuaaugaauuuggugug

SEQ ID NO: 3498 - RNA, 20 nt, Artificial Sequence
  spacer sequence ATCN PAM
uucauauuuuuagaauuugu

SEQ ID NO: 3499 - RNA, 20 nt, Artificial Sequence
  spacer sequence ATCN PAM
gagggcuugauggcugggcg

SEQ ID NO: 3500 - RNA, 20 nt, Artificial Sequence
  spacer sequence ATCN PAM
gcugugcugcuccagguagg

SEQ ID NO: 3501 - RNA, 20 nt, Artificial Sequence
  spacer sequence ATCN PAM
aggugccgauuacugaccuu

SEQ ID NO: 3502 - RNA, 20 nt, Artificial Sequence
  spacer sequence ATCN PAM
gcaccuggauuuccugccgc

SEQ ID NO: 3503 - RNA, 20 nt, Artificial Sequence
  spacer sequence ATCN PAM
gccgcuuccccuccagguca

SEQ ID NO: 3504 - RNA, 20 nt, Artificial Sequence
  spacer sequence ATCN PAM
caggugccggccagcacgcc

SEQ ID NO: 3505 - RNA, 20 nt, Artificial Sequence
  spacer sequence ATCN PAM
cagcuacucgggaggcugag

SEQ ID NO: 3506 - RNA, 20 nt, Artificial Sequence
  spacer sequence ATCN PAM
cuugaacccggagguggagg

SEQ ID NO: 3507 - RNA, 20 nt, Artificial Sequence
  spacer sequence ATCN PAM
uccgguugccauggaaacug

SEQ ID NO: 3508 - RNA, 20 nt, Artificial Sequence
  spacer sequence ATCN PAM
cggccaguaagugccggugg

SEQ ID NO: 3509 - RNA, 20 nt, Artificial Sequence
  spacer sequence ATCN PAM
cccacucaccauggggaugc

SEQ ID NO: 3510 - RNA, 20 nt, Artificial Sequence
  spacer sequence ATCN PAM
ccauggugagugggggauug

SEQ ID NO: 3511 - RNA, 20 nt, Artificial Sequence
  spacer sequence ATCN PAM
gccggcgucugcgagccguc

SEQ ID NO: 3512 - RNA, 20 nt, Artificial Sequence
  spacer sequence ATCN PAM
uccagguagcgaagaacccg

SEQ ID NO: 3513 - RNA, 20 nt, Artificial Sequence
  spacer sequence ATCN PAM
uuccagaccuggaagagagg

SEQ ID NO: 3514 - RNA, 20 nt, Artificial Sequence
  spacer sequence ATCN PAM
uugccgaggccugcaacaac

SEQ ID NO: 3515 - RNA, 20 nt, Artificial Sequence
  spacer sequence ATCN PAM
ccaggcaucuuugccgaggc

SEQ ID NO: 3516 - RNA, 20 nt, Artificial Sequence
  spacer sequence ATCN PAM
uccaggccaggcaggccccc

SEQ ID NO: 3517 - RNA, 20 nt, Artificial Sequence
  spacer sequence ATCN PAM
guuuccaccuagcccaguac

SEQ ID NO: 3518 - RNA, 20 nt, Artificial Sequence
  spacer sequence ATCN PAM
accaggcagugcggaacuca

SEQ ID NO: 3519 - RNA, 20 nt, Artificial Sequence
  spacer sequence ATCN PAM
gccuggccggagcaaauggc

SEQ ID NO: 3520 - RNA, 20 nt, Artificial Sequence
  spacer sequence ATCN PAM
uaggaggaaaacaagcaagu

SEQ ID NO: 3521 - RNA, 20 nt, Artificial Sequence
  spacer sequence ATCN PAM
aaagcaguguggcauggcug

SEQ ID NO: 3522 - RNA, 20 nt, Artificial Sequence
  spacer sequence ATCN PAM
aaguaauagaacuugccucc

SEQ ID NO: 3523 - RNA, 20 nt, Artificial Sequence
  spacer sequence ATCN PAM
guauaaugggcaucaaagua

SEQ ID NO: 3524 - RNA, 20 nt, Artificial Sequence
  spacer sequence ATCN PAM
caaaacaaaacaaaacaaaa

SEQ ID NO: 3525 - RNA, 20 nt, Artificial Sequence
  spacer sequence ATCN PAM
gcccuguccagcugcugggg

SEQ ID NO: 3526 - RNA, 20 nt, Artificial Sequence
  spacer sequence ATCN PAM
gaggggagcccucggggaag

SEQ ID NO: 3527 - RNA, 20 nt, Artificial Sequence
  spacer sequence ATCN PAM
ggaagccagggcucagggcg

SEQ ID NO: 3528 - RNA, 20 nt, Artificial Sequence
  spacer sequence ATCN PAM
cuacaacccuuguggguuaa

SEQ ID NO: 3529 - RNA, 20 nt, Artificial Sequence
  spacer sequence ATCN PAM
ggccauugaaggcccaagcg

SEQ ID NO: 3530 - RNA, 20 nt, Artificial Sequence
  spacer sequence ATCN PAM
cggcgcuugggccuucaaug

SEQ ID NO: 3531 - RNA, 20 nt, Artificial Sequence
  spacer sequence ATCN PAM
gggcacuauguccagcgugg

SEQ ID NO: 3532 - RNA, 20 nt, Artificial Sequence
  spacer sequence ATCN PAM
agacggggcuccucccggaa

SEQ ID NO: 3533 - RNA, 20 nt, Artificial Sequence
  spacer sequence ATCN PAM
aauccagacggggcuccucc

SEQ ID NO: 3534 - RNA, 20 nt, Artificial Sequence
  spacer sequence ATCN PAM
cccaaaacucacguccaccc

SEQ ID NO: 3535 - RNA, 20 nt, Artificial Sequence
  spacer sequence ATCN PAM
ugagguucuggguggacgug

SEQ ID NO: 3536 - RNA, 20 nt, Artificial Sequence
  spacer sequence ATCN PAM
ucagagacccuauuuccaaa

SEQ ID NO: 3537 - RNA, 20 nt, Artificial Sequence
  spacer sequence ATCN PAM
caugccggucgguuguccuc

SEQ ID NO: 3538 - RNA, 20 nt, Artificial Sequence
  spacer sequence ATCN PAM
caggugugaccucccccuua

SEQ ID NO: 3539 - RNA, 20 nt, Artificial Sequence
  spacer sequence ATCN PAM
ccgcgcuuuggaaggccaag

SEQ ID NO: 3540 - RNA, 20 nt, Artificial Sequence
  spacer sequence ATCN PAM
uccugccuuagccuccagag

SEQ ID NO: 3541 - RNA, 20 nt, Artificial Sequence
  spacer sequence ATCN PAM
cagcacuuugggaggccgag

SEQ ID NO: 3542 - RNA, 20 nt, Artificial Sequence
  spacer sequence ATCN PAM
gcccuccucggccucccaaa

SEQ ID NO: 3543 - RNA, 20 nt, Artificial Sequence
  spacer sequence ATCN PAM
ccuguggucagaaguuugag

SEQ ID NO: 3544 - RNA, 20 nt, Artificial Sequence
  spacer sequence ATCN PAM
cagcuacuugggaagcugag

SEQ ID NO: 3545 - RNA, 20 nt, Artificial Sequence
  spacer sequence ATCN PAM
cagcucacugcagccuccgc

SEQ ID NO: 3546 - RNA, 20 nt, Artificial Sequence
  spacer sequence ATCN PAM
caccacuacacuccagccug

SEQ ID NO: 3547 - RNA, 20 nt, Artificial Sequence
  spacer sequence ATCN PAM
cccuacguguccguguccaa

SEQ ID NO: 3548 - RNA, 20 nt, Artificial Sequence
  spacer sequence ATCN PAM
cuccagccucugccucuguc

SEQ ID NO: 3549 - RNA, 20 nt, Artificial Sequence
  spacer sequence ATCN PAM
gcgugucacuggggcuccag

SEQ ID NO: 3550 - RNA, 20 nt, Artificial Sequence
  spacer sequence ATCN PAM
guaugccagcccgacccucu

SEQ ID NO: 3551 - RNA, 20 nt, Artificial Sequence
  spacer sequence ATCN PAM
cccaggcgugucugcucccc

SEQ ID NO: 3552 - RNA, 20 nt, Artificial Sequence
  spacer sequence ATCN PAM
accgaagcaacggggcugag

SEQ ID NO: 3553 - RNA, 20 nt, Artificial Sequence
  spacer sequence ATCN PAM
caggggcaccacgcucacug

SEQ ID NO: 3554 - RNA, 20 nt, Artificial Sequence
  spacer sequence ATCN PAM
acccccgaaaaccagacaau

SEQ ID NO: 3555 - RNA, 20 nt, Artificial Sequence
  spacer sequence ATCN PAM
ccggagcccgggaggucgag

SEQ ID NO: 3556 - RNA, 20 nt, Artificial Sequence
  spacer sequence ATCN PAM
ucccgugucagccuccugag

SEQ ID NO: 3557 - RNA, 20 nt, Artificial Sequence
  spacer sequence ATCN PAM
cggcuccccuaagagcucag

SEQ ID NO: 3558 - RNA, 20 nt, Artificial Sequence
  spacer sequence ATCN PAM
cuucuuucuccucuccccuc

SEQ ID NO: 3559 - RNA, 20 nt, Artificial Sequence
  spacer sequence ATCN PAM
cgugggggcccuuggaccug

SEQ ID NO: 3560 - RNA, 20 nt, Artificial Sequence
  spacer sequence ATCN PAM
gucuaguucuuccccaagaa

SEQ ID NO: 3561 - RNA, 20 nt, Artificial Sequence
  spacer sequence ATCN PAM
ccucugugguuauucauugc

SEQ ID NO: 3562 - RNA, 20 nt, Artificial Sequence
  spacer sequence ATCN PAM
cugcauguuggugugcccag

SEQ ID NO: 3563 - RNA, 20 nt, Artificial Sequence
  spacer sequence ATCN PAM
cagcucugcccgaccugggc

SEQ ID NO: 3564 - RNA, 20 nt, Artificial Sequence
  spacer sequence ATCN PAM
ccgucuuacgggcggggaaa

SEQ ID NO: 3565 - RNA, 20 nt, Artificial Sequence
  spacer sequence ATCN PAM
gaaggagugcagcucuugug

SEQ ID NO: 3566 - RNA, 20 nt, Artificial Sequence
  spacer sequence ATCN PAM
uuggccuuuacgguucacca

SEQ ID NO: 3567 - RNA, 20 nt, Artificial Sequence
  spacer sequence ATCN PAM
cacccgcugcagggagcaga

SEQ ID NO: 3568 - RNA, 20 nt, Artificial Sequence
  spacer sequence ATCN PAM
cucccagcccagguucucug

SEQ ID NO: 3569 - RNA, 20 nt, Artificial Sequence
  spacer sequence ATCN PAM
caccacugcacuccagccug

SEQ ID NO: 3570 - RNA, 20 nt, Artificial Sequence
  spacer sequence ATCN PAM
uggcucacugcaagcuccgc

SEQ ID NO: 3571 - RNA, 20 nt, Artificial Sequence
  spacer sequence ATCN PAM
cuugaacccgggaggcggag

SEQ ID NO: 3572 - RNA, 20 nt, Artificial Sequence
  spacer sequence ATCN PAM
cagcuacucgggaggcuaag

SEQ ID NO: 3573 - RNA, 20 nt, Artificial Sequence
  spacer sequence ATCN PAM
uuuuuuuuuuuuuuuuuuuu

SEQ ID NO: 3574 - RNA, 20 nt, Artificial Sequence
  spacer sequence ATCN PAM
cuacuaaaaauacaaaaauu

SEQ ID NO: 3575 - RNA, 20 nt, Artificial Sequence
  spacer sequence ATCN PAM
cuugaggucaggagcuugag

SEQ ID NO: 3576 - RNA, 20 nt, Artificial Sequence
  spacer sequence ATCN PAM
gccugccucggccucccaaa

SEQ ID NO: 3577 - RNA, 20 nt, Artificial Sequence
  spacer sequence ATCN PAM
cagcacuuugggaggccgag

SEQ ID NO: 3578 - RNA, 20 nt, Artificial Sequence
  spacer sequence ATCN PAM
caaaggcuucaaaacuaaaa

SEQ ID NO: 3579 - RNA, 20 nt, Artificial Sequence
  spacer sequence ATCN PAM
cugcacuccagccugggcaa

SEQ ID NO: 3580 - RNA, 20 nt, Artificial Sequence
  spacer sequence ATCN PAM
cggcucacugcagccucgag

SEQ ID NO: 3581 - RNA, 20 nt, Artificial Sequence
  spacer sequence ATCN PAM
cgugagcccaggagcucgag

SEQ ID NO: 3582 - RNA, 20 nt, Artificial Sequence
  spacer sequence ATCN PAM
uccugccucagcccccugag

SEQ ID NO: 3583 - RNA, 20 nt, Artificial Sequence
  spacer sequence ATCN PAM
cagcuacucagggggcugag

SEQ ID NO: 3584 - RNA, 20 nt, Artificial Sequence
  spacer sequence ATCN PAM
cagcacugugggaggccgag

SEQ ID NO: 3585 - RNA, 20 nt, Artificial Sequence
  spacer sequence ATCN PAM
aaggugggagccacugugcc

SEQ ID NO: 3586 - RNA, 20 nt, Artificial Sequence
  spacer sequence ATCN PAM
cagugugggcugggcacagu

SEQ ID NO: 3587 - RNA, 20 nt, Artificial Sequence
  spacer sequence ATCN PAM
gggcugacggcagggggugc

SEQ ID NO: 3588 - RNA, 20 nt, Artificial Sequence
  spacer sequence ATCN PAM
gugucugugucugcaucugu

SEQ ID NO: 3589 - RNA, 20 nt, Artificial Sequence
  spacer sequence ATCN PAM
gugaaacggguuuccuggca

SEQ ID NO: 3590 - RNA, 20 nt, Artificial Sequence
  spacer sequence ATCN PAM
gccaggaaacccguuucaca

SEQ ID NO: 3591 - RNA, 20 nt, Artificial Sequence
  spacer sequence ATCN PAM
ggggcccgcagucccuaaua

SEQ ID NO: 3592 - RNA, 20 nt, Artificial Sequence
  spacer sequence ATCN PAM
cgccgccauggggcugccuc

SEQ ID NO: 3593 - RNA, 20 nt, Artificial Sequence
  spacer sequence ATCN PAM
gcugacaggcacuuccagaa

SEQ ID NO: 3594 - RNA, 20 nt, Artificial Sequence
  spacer sequence ATCN PAM
caccccggccacaucucagc

SEQ ID NO: 3595 - RNA, 20 nt, Artificial Sequence
  spacer sequence ATCN PAM
cagcaccaggccugucgcug

SEQ ID NO: 3596 - RNA, 20 nt, Artificial Sequence
  spacer sequence ATCN PAM
augucucagcccccacccag

SEQ ID NO: 3597 - RNA, 20 nt, Artificial Sequence
  spacer sequence ATCN PAM
gggugggggcugagacaugg

SEQ ID NO: 3598 - RNA, 20 nt, Artificial Sequence
  spacer sequence ATCN PAM
gugaaacggucccggggcau

SEQ ID NO: 3599 - RNA, 20 nt, Artificial Sequence
  spacer sequence ATCN PAM
ccacccuggcaccucggucu

SEQ ID NO: 3600 - RNA, 20 nt, Artificial Sequence
  spacer sequence ATCN PAM
cacgaagggcccgucacggg

SEQ ID NO: 3601 - RNA, 20 nt, Artificial Sequence
  spacer sequence ATCN PAM
cgugaucuggaaauccacag

SEQ ID NO: 3602 - RNA, 20 nt, Artificial Sequence
  spacer sequence ATCN PAM
cgagauuccgggggagcuug

SEQ ID NO: 3603 - RNA, 20 nt, Artificial Sequence
  spacer sequence ATCN PAM
ggaaauccacagagaagcac

SEQ ID NO: 3604 - RNA, 20 nt, Artificial Sequence
  spacer sequence ATCN PAM
acagagaagcaccuucacca

SEQ ID NO: 3605 - RNA, 20 nt, Artificial Sequence
  spacer sequence ATCN PAM
gccccgugggugcggcgcug

SEQ ID NO: 3606 - RNA, 20 nt, Artificial Sequence
  spacer sequence ATCN PAM
gggccgggggaguggagccg

SEQ ID NO: 3607 - RNA, 20 nt, Artificial Sequence
  spacer sequence ATCN PAM
gccggcuccacucccccggc

SEQ ID NO: 3608 - RNA, 20 nt, Artificial Sequence
  spacer sequence ATCN PAM
cuuccccaauuuccccacgc

SEQ ID NO: 3609 - RNA, 20 nt, Artificial Sequence
  spacer sequence ATCN PAM
gcauccgccgaggccuggcu

SEQ ID NO: 3610 - RNA, 20 nt, Artificial Sequence
  spacer sequence ATCN PAM
gccgaggccuggcugugcug

SEQ ID NO: 3611 - RNA, 20 nt, Artificial Sequence
  spacer sequence ATCN PAM
guccaggucggucggggccg

SEQ ID NO: 3612 - RNA, 20 nt, Artificial Sequence
  spacer sequence ATCN PAM
ccccagcauacaagauaguc

SEQ ID NO: 3613 - RNA, 20 nt, Artificial Sequence
  spacer sequence ATCN PAM
uguaugcuggggagaugcag

SEQ ID NO: 3614 - RNA, 20 nt, Artificial Sequence
  spacer sequence ATCN PAM
cgcuguuuuucccgucccgg

SEQ ID NO: 3615 - RNA, 20 nt, Artificial Sequence
  spacer sequence ATCN PAM
cccggccucccggggccgcg

SEQ ID NO: 3616 - RNA, 20 nt, Artificial Sequence
  spacer sequence ATCN PAM
agaagcggaagcuggcgcug

SEQ ID NO: 3617 - RNA, 20 nt, Artificial Sequence
  spacer sequence ATCN PAM
guccagcuguucauuccugg

SEQ ID NO: 3618 - RNA, 20 nt, Artificial Sequence
  spacer sequence ATCN PAM
cucguccccuccccacagag

SEQ ID NO: 3619 - RNA, 20 nt, Artificial Sequence
  spacer sequence ATCN PAM
ugccacugcacuccagccug

SEQ ID NO: 3620 - RNA, 20 nt, Artificial Sequence
  spacer sequence ATCN PAM
cagcucacugcaaccuccgc

SEQ ID NO: 3621 - RNA, 20 nt, Artificial Sequence
  spacer sequence ATCN PAM
gggaggcggagguugcagug

SEQ ID NO: 3622 - RNA, 20 nt, Artificial Sequence
  spacer sequence ATCN PAM
cuugaauccgggaggcggag

SEQ ID NO: 3623 - RNA, 20 nt, Artificial Sequence
  spacer sequence ATCN PAM
ccugaggucaggaguuugag

SEQ ID NO: 3624 - RNA, 20 nt, Artificial Sequence
  spacer sequence ATCN PAM
gcccgccucggccucccaaa

SEQ ID NO: 3625 - RNA, 20 nt, Artificial Sequence
  spacer sequence ATCN PAM
caguacuuugggaggccgag

SEQ ID NO: 3626 - RNA, 20 nt, Artificial Sequence
  spacer sequence ATCN PAM
cauaaucccaguacuuuggg

SEQ ID NO: 3627 - RNA, 20 nt, Artificial Sequence
  spacer sequence ATCN PAM
uggagucuacagcagugaug

SEQ ID NO: 3628 - RNA, 20 nt, Artificial Sequence
  spacer sequence ATCN PAM
cugcuguagacuccaggaug

SEQ ID NO: 3629 - RNA, 20 nt, Artificial Sequence
  spacer sequence ATCN PAM
cagccucugccccgggccuc

SEQ ID NO: 3630 - RNA, 20 nt, Artificial Sequence
  spacer sequence ATCN PAM
ggcacggcggaggcccgggg

SEQ ID NO: 3631 - RNA, 20 nt, Artificial Sequence
  spacer sequence ATCN PAM
ugcuaucuggcacggcggag

SEQ ID NO: 3632 - RNA, 20 nt, Artificial Sequence
  spacer sequence ATCN PAM
ucaggccuccgggagggggu

SEQ ID NO: 3633 - RNA, 20 nt, Artificial Sequence
  spacer sequence ATCN PAM
ggccuccgggaggggguggg

SEQ ID NO: 3634 - RNA, 20 nt, Artificial Sequence
  spacer sequence ATCN PAM
acugacagcacccccagccc

SEQ ID NO: 3635 - RNA, 20 nt, Artificial Sequence
  spacer sequence ATCN PAM
uccugccucggccucccaaa

SEQ ID NO: 3636 - RNA, 20 nt, Artificial Sequence
  spacer sequence ATCN PAM
cagcacuuugggaggccgag

SEQ ID NO: 3637 - RNA, 20 nt, Artificial Sequence
  spacer sequence ATCN PAM
acuggagggaggggaaaggc

SEQ ID NO: 3638 - RNA, 20 nt, Artificial Sequence
  spacer sequence ATCN PAM
agcaggcauccacuggaggg

SEQ ID NO: 3639 - RNA, 20 nt, Artificial Sequence
  spacer sequence ATCN PAM
gggucuguggggcacagugg

SEQ ID NO: 3640 - RNA, 20 nt, Artificial Sequence
  spacer sequence ATCN PAM
caaaaaaaaaaaaaaaaaag

SEQ ID NO: 3641 - RNA, 20 nt, Artificial Sequence
  spacer sequence ATCN PAM
caccacugcacuccagccug

SEQ ID NO: 3642 - RNA, 20 nt, Artificial Sequence
  spacer sequence ATCN PAM
gagcucacgcaaucucugcc

SEQ ID NO: 3643 - RNA, 20 nt, Artificial Sequence
  spacer sequence ATCN PAM
cugccucucagguucaagug

SEQ ID NO: 3644 - RNA, 20 nt, Artificial Sequence
  spacer sequence ATCN PAM
cuugaaccugagaggcagag

SEQ ID NO: 3645 - RNA, 20 nt, Artificial Sequence
  spacer sequence ATCN PAM
ccugaggucaggagucccag

SEQ ID NO: 3646 - RNA, 20 nt, Artificial Sequence
  spacer sequence ATCN PAM
gcccaccucggccucccaaa

SEQ ID NO: 3647 - RNA, 20 nt, Artificial Sequence
  spacer sequence ATCN PAM
cagcacuuugggaggccgag

SEQ ID NO: 3648 - RNA, 20 nt, Artificial Sequence
  spacer sequence ATCN PAM
gggcuagauuuugccuugau

SEQ ID NO: 3649 - RNA, 20 nt, Artificial Sequence
  spacer sequence ATCN PAM
agcccagaugcggugacuca

SEQ ID NO: 3650 - RNA, 20 nt, Artificial Sequence
  spacer sequence ATCN PAM
aggcaaaaucuagcccagau

SEQ ID NO: 3651 - RNA, 20 nt, Artificial Sequence
  spacer sequence ATCN PAM
uuccugccuaccucccaccc

SEQ ID NO: 3652 - RNA, 20 nt, Artificial Sequence
  spacer sequence ATCN PAM
guucacucuggggacggccu

SEQ ID NO: 3653 - RNA, 20 nt, Artificial Sequence
  spacer sequence ATCN PAM
auccguucacucuggggacg

SEQ ID NO: 3654 - RNA, 20 nt, Artificial Sequence
  spacer sequence ATCN PAM
guucacucuggggacggccu

SEQ ID NO: 3655 - RNA, 20 nt, Artificial Sequence
  spacer sequence ATCN PAM
auccguucacucuggggacg

SEQ ID NO: 3656 - RNA, 20 nt, Artificial Sequence
  spacer sequence ATCN PAM
guucacucuggggacggccu

SEQ ID NO: 3657 - RNA, 20 nt, Artificial Sequence
  spacer sequence ATCN PAM
auccguucacucuggggacg

SEQ ID NO: 3658 - RNA, 20 nt, Artificial Sequence
  spacer sequence ATCN PAM
guucacucuggggacggccu

SEQ ID NO: 3659 - RNA, 20 nt, Artificial Sequence
  spacer sequence ATCN PAM
auccguucacucuggggacg

SEQ ID NO: 3660 - RNA, 20 nt, Artificial Sequence
  spacer sequence ATCN PAM
guucacucuggggacggccu

SEQ ID NO: 3661 - RNA, 20 nt, Artificial Sequence
  spacer sequence ATCN PAM
auccguucacucuggggacg

SEQ ID NO: 3662 - RNA, 20 nt, Artificial Sequence
  spacer sequence ATCN PAM
guucacucuggggacggccu

SEQ ID NO: 3663 - RNA, 20 nt, Artificial Sequence
  spacer sequence ATCN PAM
auccguucacucuggggacg

SEQ ID NO: 3664 - RNA, 20 nt, Artificial Sequence
  spacer sequence ATCN PAM
guucccucuggggacggccu

SEQ ID NO: 3665 - RNA, 20 nt, Artificial Sequence
  spacer sequence ATCN PAM
auccguucccucuggggacg

SEQ ID NO: 3666 - RNA, 20 nt, Artificial Sequence
  spacer sequence ATCN PAM
guucccucuggggacggccu

SEQ ID NO: 3667 - RNA, 20 nt, Artificial Sequence
  spacer sequence ATCN PAM
auccguucccucuggggacg

SEQ ID NO: 3668 - RNA, 20 nt, Artificial Sequence
  spacer sequence ATCN PAM
guucccucuggggacggccu

SEQ ID NO: 3669 - RNA, 20 nt, Artificial Sequence
  spacer sequence ATCN PAM
auccguucccucuggggacg

SEQ ID NO: 3670 - RNA, 20 nt, Artificial Sequence
  spacer sequence ATCN PAM
guucccucuggggacggccu

SEQ ID NO: 3671 - RNA, 20 nt, Artificial Sequence
  spacer sequence ATCN PAM
auccguucccucuggggacg

SEQ ID NO: 3672 - RNA, 20 nt, Artificial Sequence
  spacer sequence ATCN PAM
guucccucuggggacggccu

SEQ ID NO: 3673 - RNA, 20 nt, Artificial Sequence
  spacer sequence ATCN PAM
auccguucccucuggggacg

SEQ ID NO: 3674 - RNA, 20 nt, Artificial Sequence
  spacer sequence ATCN PAM
guucccucuggggacggccu

SEQ ID NO: 3675 - RNA, 20 nt, Artificial Sequence
  spacer sequence ATCN PAM
auccguucccucuggggacg

SEQ ID NO: 3676 - RNA, 20 nt, Artificial Sequence
  spacer sequence ATCN PAM
auucccucuggggacggccu

SEQ ID NO: 3677 - RNA, 20 nt, Artificial Sequence
  spacer sequence ATCN PAM
auccauucccucuggggacg

SEQ ID NO: 3678 - RNA, 20 nt, Artificial Sequence
  spacer sequence ATCN PAM
auucacucuggggacggccu

SEQ ID NO: 3679 - RNA, 20 nt, Artificial Sequence
  spacer sequence ATCN PAM
guacacaccuggcugcuccc

SEQ ID NO: 3680 - RNA, 20 nt, Artificial Sequence
  spacer sequence ATCN PAM
aaccaggucucuccccugcu

SEQ ID NO: 3681 - RNA, 20 nt, Artificial Sequence
  spacer sequence ATCN PAM
uggucuugacuuccaagccc

SEQ ID NO: 3682 - RNA, 20 nt, Artificial Sequence
  spacer sequence ATCN PAM
cauuuaccauccuggcugcu

SEQ ID NO: 3683 - RNA, 20 nt, Artificial Sequence
  spacer sequence ATCN PAM
uggcugcuucauggggauuu

SEQ ID NO: 3684 - RNA, 20 nt, Artificial Sequence
  spacer sequence ATCN PAM
ccaugaagcagccaggaugg

SEQ ID NO: 3685 - RNA, 20 nt, Artificial Sequence
  spacer sequence ATCN PAM
cccaaauccccaugaagcag

SEQ ID NO: 3686 - RNA, 20 nt, Artificial Sequence
  spacer sequence ATCN PAM
ugccauugcacuccagccug

SEQ ID NO: 3687 - RNA, 20 nt, Artificial Sequence
  spacer sequence ATCN PAM
cagcucaccacaaccucugc

SEQ ID NO: 3688 - RNA, 20 nt, Artificial Sequence
  spacer sequence ATCN PAM
aaaauacaaaauaggccagg

SEQ ID NO: 3689 - RNA, 20 nt, Artificial Sequence
  spacer sequence ATCN PAM
cuaucaaaaauacaaaauag

SEQ ID NO: 3690 - RNA, 20 nt, Artificial Sequence
  spacer sequence ATCN PAM
ccugaggucaggaguuugag

SEQ ID NO: 3691 - RNA, 20 nt, Artificial Sequence
  spacer sequence ATCN PAM
gcccgccucagccucccuaa

SEQ ID NO: 3692 - RNA, 20 nt, Artificial Sequence
  spacer sequence ATCN PAM
cagcacuuagggaggcugag

SEQ ID NO: 3693 - RNA, 20 nt, Artificial Sequence
  spacer sequence ATCN PAM
uggccgggcauaguggcuca

SEQ ID NO: 3694 - RNA, 20 nt, Artificial Sequence
  spacer sequence ATCN PAM
gccucagcaacacagcgaga

SEQ ID NO: 3695 - RNA, 20 nt, Artificial Sequence
  spacer sequence ATCN PAM
caaacuccugggcucaagug

SEQ ID NO: 3696 - RNA, 20 nt, Artificial Sequence
  spacer sequence ATCN PAM
cuugagcccaggaguuugag

SEQ ID NO: 3697 - RNA, 20 nt, Artificial Sequence
  spacer sequence ATCN PAM
uucugccuuggccucccaac

SEQ ID NO: 3698 - RNA, 20 nt, Artificial Sequence
  spacer sequence ATCN PAM
cagcacguugggaggccaag

SEQ ID NO: 3699 - RNA, 20 nt, Artificial Sequence
  spacer sequence ATCN PAM
uauaaaaggcuggguguggu

SEQ ID NO: 3700 - RNA, 20 nt, Artificial Sequence
  spacer sequence ATCN PAM
uuuaaggccaggcgcggugg

SEQ ID NO: 3701 - RNA, 20 nt, Artificial Sequence
  spacer sequence ATCN PAM
cagcacuuugggaggccgag

SEQ ID NO: 3702 - RNA, 20 nt, Artificial Sequence
  spacer sequence ATCN PAM
gcccgccucggccucccaaa

SEQ ID NO: 3703 - RNA, 20 nt, Artificial Sequence
  spacer sequence ATCN PAM
caaggucaggaguucaagac

SEQ ID NO: 3704 - RNA, 20 nt, Artificial Sequence
  spacer sequence ATCN PAM
cuacuaaaaauacaaaaauu

SEQ ID NO: 3705 - RNA, 20 nt, Artificial Sequence
  spacer sequence ATCN PAM
ggaggcugaggugggaggau

SEQ ID NO: 3706 - RNA, 20 nt, Artificial Sequence
  spacer sequence ATCN PAM
ucccaccucagccucccgau

SEQ ID NO: 3707 - RNA, 20 nt, Artificial Sequence
  spacer sequence ATCN PAM
cuugagcccaggaggcugca

SEQ ID NO: 3708 - RNA, 20 nt, Artificial Sequence
  spacer sequence ATCN PAM
cugcacuccagccugggcga

SEQ ID NO: 3709 - RNA, 20 nt, Artificial Sequence
  spacer sequence ATCN PAM
aacagccaggcccacccaga

SEQ ID NO: 3710 - RNA, 20 nt, Artificial Sequence
  spacer sequence ATCN PAM
gagucagcagccgcccccuc

SEQ ID NO: 3711 - RNA, 20 nt, Artificial Sequence
  spacer sequence ATCN PAM
auugcugcugcuucugagca

SEQ ID NO: 3712 - RNA, 20 nt, Artificial Sequence
  spacer sequence ATCN PAM
gcagaccuauaucuggccuu

SEQ ID NO: 3713 - RNA, 20 nt, Artificial Sequence
  spacer sequence ATCN PAM
ggccuuagaggaaaacauac

SEQ ID NO: 3714 - RNA, 20 nt, Artificial Sequence
  spacer sequence ATCN PAM
cagcacuucgagaggcagag

SEQ ID NO: 3715 - RNA, 20 nt, Artificial Sequence
  spacer sequence ATCN PAM
ucccgccucugccucucgaa

SEQ ID NO: 3716 - RNA, 20 nt, Artificial Sequence
  spacer sequence ATCN PAM
caccuacuugggaggcuggg

SEQ ID NO: 3717 - RNA, 20 nt, Artificial Sequence
  spacer sequence ATCN PAM
uuugaacccgggaggcggag

SEQ ID NO: 3718 - RNA, 20 nt, Artificial Sequence
  spacer sequence ATCN PAM
cagcacucugggaggccgag

SEQ ID NO: 3719 - RNA, 20 nt, Artificial Sequence
  spacer sequence ATCN PAM
ucccuccucggccucccaga

SEQ ID NO: 3720 - RNA, 20 nt, Artificial Sequence
  spacer sequence ATCN PAM
cuugagcccaggaguuugua

SEQ ID NO: 3721 - RNA, 20 nt, Artificial Sequence
  spacer sequence ATCN PAM
cuacaaaaaaaaguuaaaac

SEQ ID NO: 3722 - RNA, 20 nt, Artificial Sequence
  spacer sequence ATCN PAM
uccugccucagccucuggag

SEQ ID NO: 3723 - RNA, 20 nt, Artificial Sequence
  spacer sequence ATCN PAM
cuugagccugagaggcugag

SEQ ID NO: 3724 - RNA, 20 nt, Artificial Sequence
  spacer sequence ATCN PAM
cagcucacugcagccucagc

SEQ ID NO: 3725 - RNA, 20 nt, Artificial Sequence
  spacer sequence ATCN PAM
ugccagugcacuccagccug

SEQ ID NO: 3726 - RNA, 20 nt, Artificial Sequence
  spacer sequence ATCN PAM
cucugccaagucucgggcca

SEQ ID NO: 3727 - RNA, 20 nt, Artificial Sequence
  spacer sequence ATCN PAM
aagugucuagcguuugggga

SEQ ID NO: 3728 - RNA, 20 nt, Artificial Sequence
  spacer sequence ATCN PAM
aagaaagaauccaagugucu

SEQ ID NO: 3729 - RNA, 20 nt, Artificial Sequence
  spacer sequence ATCN PAM
ccagguggggccucauggac

SEQ ID NO: 3730 - RNA, 20 nt, Artificial Sequence
  spacer sequence ATCN PAM
aaggaaaggguuggccagga

SEQ ID NO: 3731 - RNA, 20 nt, Artificial Sequence
  spacer sequence ATCN PAM
ugcacccuguccgccagcag

SEQ ID NO: 3732 - RNA, 20 nt, Artificial Sequence
  spacer sequence ATCN PAM
ucaacguuucgccacaaaca

SEQ ID NO: 3733 - RNA, 20 nt, Artificial Sequence
  spacer sequence ATCN PAM
acguuucgccacaaacaaga

SEQ ID NO: 3734 - RNA, 20 nt, Artificial Sequence
  spacer sequence ATCN PAM
cacuuuuuccuccccucccc

SEQ ID NO: 3735 - RNA, 20 nt, Artificial Sequence
  spacer sequence ATCN PAM
ggugggggcggcaccuccca

SEQ ID NO: 3736 - RNA, 20 nt, Artificial Sequence
  spacer sequence ATCN PAM
ccagagccacggaguguguc

SEQ ID NO: 3737 - RNA, 20 nt, Artificial Sequence
  spacer sequence ATCN PAM
gcaagacacacuccguggcu

SEQ ID NO: 3738 - RNA, 20 nt, Artificial Sequence
  spacer sequence ATCN PAM
guguaacggggcucgggcgu

SEQ ID NO: 3739 - RNA, 20 nt, Artificial Sequence
  spacer sequence ATCN PAM
cagcgcugugggaggcugag

SEQ ID NO: 3740 - RNA, 20 nt, Artificial Sequence
  spacer sequence ATCN PAM
uccugccucagccucccaca

SEQ ID NO: 3741 - RNA, 20 nt, Artificial Sequence
  spacer sequence ATCN PAM
cuuaaggccaggaguuugag

SEQ ID NO: 3742 - RNA, 20 nt, Artificial Sequence
  spacer sequence ATCN PAM
gagcaugacccucccucggc

SEQ ID NO: 3743 - RNA, 20 nt, Artificial Sequence
  spacer sequence ATCN PAM
ucuccccuucccagcaccac

SEQ ID NO: 3744 - RNA, 20 nt, Artificial Sequence
  spacer sequence ATCN PAM
cccacagcaggaaguggaca

SEQ ID NO: 3745 - RNA, 20 nt, Artificial Sequence
  spacer sequence ATCN PAM
cacugagaaagcaaguucau

SEQ ID NO: 3746 - RNA, 20 nt, Artificial Sequence
  spacer sequence ATCN PAM
ggcacacagcaguugccuaa

SEQ ID NO: 3747 - RNA, 20 nt, Artificial Sequence
  spacer sequence ATCN PAM
aaaaucgggcacacagcagu

SEQ ID NO: 3748 - RNA, 20 nt, Artificial Sequence
  spacer sequence ATCN PAM
uguugccagcauccaaaauc

SEQ ID NO: 3749 - RNA, 20 nt, Artificial Sequence
  spacer sequence ATCN PAM
acacagcuggggccaugcga

SEQ ID NO: 3750 - RNA, 20 nt, Artificial Sequence
  spacer sequence ATCN PAM
gcggaggugauaucgguccu

SEQ ID NO: 3751 - RNA, 20 nt, Artificial Sequence
  spacer sequence ATCN PAM
ccuccgcagaugcucugcuc

SEQ ID NO: 3752 - RNA, 20 nt, Artificial Sequence
  spacer sequence ATCN PAM
guccugggaggacggggggc

SEQ ID NO: 3753 - RNA, 20 nt, Artificial Sequence
  spacer sequence ATCN PAM
gccccgagcggccgccuucg

SEQ ID NO: 3754 - RNA, 20 nt, Artificial Sequence
  spacer sequence ATCN PAM
cgggaggggucgggugugaa

SEQ ID NO: 3755 - RNA, 20 nt, Artificial Sequence
  spacer sequence ATCN PAM
gagcaggccccagggagguc

SEQ ID NO: 3756 - RNA, 20 nt, Artificial Sequence
  spacer sequence ATCN PAM
cggcccucagccccugggga

SEQ ID NO: 3757 - RNA, 20 nt, Artificial Sequence
  spacer sequence ATCN PAM
ccggaaacucccuccccagg

SEQ ID NO: 3758 - RNA, 20 nt, Artificial Sequence
  spacer sequence ATCN PAM
ccagccuggguuuagggcuc

SEQ ID NO: 3759 - RNA, 20 nt, Artificial Sequence
  spacer sequence ATCN PAM
gccgcccaccacacacccac

SEQ ID NO: 3760 - RNA, 20 nt, Artificial Sequence
  spacer sequence ATCN PAM
cggguugaacugcugggcca

SEQ ID NO: 3761 - RNA, 20 nt, Artificial Sequence
  spacer sequence ATCN PAM
ggcccacaaggggggccugg

SEQ ID NO: 3762 - RNA, 20 nt, Artificial Sequence
  spacer sequence ATCN PAM
cuggggccucggccagcugg

SEQ ID NO: 3763 - RNA, 20 nt, Artificial Sequence
  spacer sequence ATCN PAM
gugccccggccccacagggg

SEQ ID NO: 3764 - RNA, 20 nt, Artificial Sequence
  spacer sequence ATCN PAM
gcugccccauguacagccag

SEQ ID NO: 3765 - RNA, 20 nt, Artificial Sequence
  spacer sequence ATCN PAM
gggaugugaggguagcuggg

SEQ ID NO: 3766 - RNA, 20 nt, Artificial Sequence
  spacer sequence ATCN PAM
cggauggggaaaccgaggcg

SEQ ID NO: 3767 - RNA, 20 nt, Artificial Sequence
  spacer sequence ATCN PAM
cucaaauagagugugugaga

SEQ ID NO: 3768 - RNA, 20 nt, Artificial Sequence
  spacer sequence ATCN PAM
cagaggagaggaccuuccgc

SEQ ID NO: 3769 - RNA, 20 nt, Artificial Sequence
  spacer sequence ATCN PAM
aggcguccgcagggcugcgc

SEQ ID NO: 3770 - RNA, 20 nt, Artificial Sequence
  spacer sequence ATCN PAM
aauugagaaaaagucacagu

SEQ ID NO: 3771 - RNA, 20 nt, Artificial Sequence
  spacer sequence ATCN PAM
cgucugcaaaggcccuuuuu

SEQ ID NO: 3772 - RNA, 20 nt, Artificial Sequence
  spacer sequence ATCN PAM
gcccagaaccucagaacgag

SEQ ID NO: 3773 - RNA, 20 nt, Artificial Sequence
  spacer sequence ATCN PAM
cccacccaaauucacaucgg

SEQ ID NO: 3774 - RNA, 20 nt, Artificial Sequence
  spacer sequence ATCN PAM
agguucaaguaacgagcauu

SEQ ID NO: 3775 - RNA, 20 nt, Artificial Sequence
  spacer sequence ATCN PAM
gccgagcacacagcaguugc

SEQ ID NO: 3776 - RNA, 20 nt, Artificial Sequence
  spacer sequence ATCN PAM
gggguuuagucuguuuuguu

SEQ ID NO: 3777 - RNA, 20 nt, Artificial Sequence
  spacer sequence ATCN PAM
aggaguguaucugggguuua

SEQ ID NO: 3778 - RNA, 20 nt, Artificial Sequence
  spacer sequence ATCN PAM
gugacucggugauggacggg

SEQ ID NO: 3779 - RNA, 20 nt, Artificial Sequence
  spacer sequence ATCN PAM
ccgagucacggaucuaggag

SEQ ID NO: 3780 - RNA, 20 nt, Artificial Sequence
  spacer sequence ATCN PAM
gcgcaggaaugcaggcuggc

SEQ ID NO: 3781 - RNA, 20 nt, Artificial Sequence
  spacer sequence ATCN PAM
cccugcagccguccugcccc

SEQ ID NO: 3782 - RNA, 20 nt, Artificial Sequence
  spacer sequence ATCN PAM
caggugcuggggaggccggc

SEQ ID NO: 3783 - RNA, 20 nt, Artificial Sequence
  spacer sequence ATCN PAM
gucauuagggcccagaagga

SEQ ID NO: 3784 - RNA, 20 nt, Artificial Sequence
  spacer sequence ATCN PAM
ucccagcugaggccuaauug

SEQ ID NO: 3785 - RNA, 20 nt, Artificial Sequence
  spacer sequence ATCN PAM
cagcugaggccuaauuggug

SEQ ID NO: 3786 - RNA, 20 nt, Artificial Sequence
  spacer sequence ATCN PAM
cugccggcuuucccccaccc

SEQ ID NO: 3787 - RNA, 20 nt, Artificial Sequence
  spacer sequence ATCN PAM
ccaggccccggaacgucuuc

SEQ ID NO: 3788 - RNA, 20 nt, Artificial Sequence
  spacer sequence ATCN PAM
ucuuccuccccagccaccac

SEQ ID NO: 3789 - RNA, 20 nt, Artificial Sequence
  spacer sequence ATCN PAM
cgguccuccugucuccugcu

SEQ ID NO: 3790 - RNA, 20 nt, Artificial Sequence
  spacer sequence ATCN PAM
cugcaaaaauucaccagcau

SEQ ID NO: 3791 - RNA, 20 nt, Artificial Sequence
  spacer sequence ATCN PAM
ucacguguugccuucucaaa

SEQ ID NO: 3792 - RNA, 20 nt, Artificial Sequence
  spacer sequence ATCN PAM
agggagcccaggaggucgag

SEQ ID NO: 3793 - RNA, 20 nt, Artificial Sequence
  spacer sequence ATCN PAM
cuacaaaagaaaauguaaaa

SEQ ID NO: 3794 - RNA, 20 nt, Artificial Sequence
  spacer sequence ATCN PAM
cacccggcuaaguuuuuaca

SEQ ID NO: 3795 - RNA, 20 nt, Artificial Sequence
  spacer sequence ATCN PAM
cuugagcccaggagguugag

SEQ ID NO: 3796 - RNA, 20 nt, Artificial Sequence
  spacer sequence ATCN PAM
uagcucacugcagccucaac

SEQ ID NO: 3797 - RNA, 20 nt, Artificial Sequence
  spacer sequence ATCN PAM
gccugccacagccucccaaa

SEQ ID NO: 3798 - RNA, 20 nt, Artificial Sequence
  spacer sequence ATCN PAM
cuugaggucaggaguucaag

SEQ ID NO: 3799 - RNA, 20 nt, Artificial Sequence
  spacer sequence ATCN PAM
cagcuacucaggaggcugag

SEQ ID NO: 3800 - RNA, 20 nt, Artificial Sequence
  spacer sequence ATCN PAM
cagcucgcugcaaccucugu

SEQ ID NO: 3801 - RNA, 20 nt, Artificial Sequence
  spacer sequence ATCN PAM
aaaaauaauaauaauaaaaa

SEQ ID NO: 3802 - RNA, 20 nt, Artificial Sequence
  spacer sequence ATCN PAM
cagcacuuuaggagacugag

SEQ ID NO: 3803 - RNA, 20 nt, Artificial Sequence
  spacer sequence ATCN PAM
gacugccucagucuccuaaa

SEQ ID NO: 3804 - RNA, 20 nt, Artificial Sequence
  spacer sequence ATCN PAM
cgaggucaggagaccauccu

SEQ ID NO: 3805 - RNA, 20 nt, Artificial Sequence
  spacer sequence ATCN PAM
uggccaaauggugaaacucc

SEQ ID NO: 3806 - RNA, 20 nt, Artificial Sequence
  spacer sequence ATCN PAM
uggcccacugcaagcuccac

SEQ ID NO: 3807 - RNA, 20 nt, Artificial Sequence
  spacer sequence ATCN PAM
cgccacugcacuccagccug

SEQ ID NO: 3808 - RNA, 20 nt, Artificial Sequence
  spacer sequence ATCN PAM
caaaaaaaaaaaaaaaaaag

SEQ ID NO: 3809 - RNA, 20 nt, Artificial Sequence
  spacer sequence ATCN PAM
agugcuugaaccuguccucu

SEQ ID NO: 3810 - RNA, 20 nt, Artificial Sequence
  spacer sequence ATCN PAM
cguguugacacuuuggucaa

SEQ ID NO: 3811 - RNA, 20 nt, Artificial Sequence
  spacer sequence ATCN PAM
gcggucugagguugaccaaa

SEQ ID NO: 3812 - RNA, 20 nt, Artificial Sequence
  spacer sequence ATCN PAM
ugugggaccaccgucccauc

SEQ ID NO: 3813 - RNA, 20 nt, Artificial Sequence
  spacer sequence ATCN PAM
cagcacuuugggaggccgag

SEQ ID NO: 3814 - RNA, 20 nt, Artificial Sequence
  spacer sequence ATCN PAM
gcccgccucggccucccaaa

SEQ ID NO: 3815 - RNA, 20 nt, Artificial Sequence
  spacer sequence ATCN PAM
cgaggucaggagaucgagac

SEQ ID NO: 3816 - RNA, 20 nt, Artificial Sequence
  spacer sequence ATCN PAM
ccugaccucgugauccgccc

SEQ ID NO: 3817 - RNA, 20 nt, Artificial Sequence
  spacer sequence ATCN PAM
agaccauccuggcuaacacg

SEQ ID NO: 3818 - RNA, 20 nt, Artificial Sequence
  spacer sequence ATCN PAM
uggcuaacacggugaagccc

SEQ ID NO: 3819 - RNA, 20 nt, Artificial Sequence
  spacer sequence ATCN PAM
gggcgugguggcgggcgccu

SEQ ID NO: 3820 - RNA, 20 nt, Artificial Sequence
  spacer sequence ATCN PAM
cggcucaccgcaaccuccgc

SEQ ID NO: 3821 - RNA, 20 nt, Artificial Sequence
  spacer sequence ATCN PAM
guggcuguccugggucccgu

SEQ ID NO: 3822 - RNA, 20 nt, Artificial Sequence
  spacer sequence ATCN PAM
aacagugagucacacacacc

SEQ ID NO: 3823 - RNA, 20 nt, Artificial Sequence
  spacer sequence ATCN PAM
ccaacagacauuuaucagga

SEQ ID NO: 3824 - RNA, 20 nt, Artificial Sequence
  spacer sequence ATCN PAM
ggacgcauccugcacgaaga

SEQ ID NO: 3825 - RNA, 20 nt, Artificial Sequence
  spacer sequence ATCN PAM
ugcacgaagacagaggcaga

SEQ ID NO: 3826 - RNA, 20 nt, Artificial Sequence
  spacer sequence ATCN PAM
uuuguuuuguuuuguuuuua

SEQ ID NO: 3827 - RNA, 20 nt, Artificial Sequence
  spacer sequence ATCN PAM
ucccaccucagccucccgag

SEQ ID NO: 3828 - RNA, 20 nt, Artificial Sequence
  spacer sequence ATCN PAM
uaauguagagauggggucuc

SEQ ID NO: 3829 - RNA, 20 nt, Artificial Sequence
  spacer sequence ATCN PAM
cuacauuaugauaacaaaaa

SEQ ID NO: 3830 - RNA, 20 nt, Artificial Sequence
  spacer sequence ATCN PAM
cuugagcccgggaauucaag

SEQ ID NO: 3831 - RNA, 20 nt, Artificial Sequence
  spacer sequence ATCN PAM
cagcaccuugggaggcgggu

SEQ ID NO: 3832 - RNA, 20 nt, Artificial Sequence
  spacer sequence ATCN PAM
auucucccgcggucccggag

SEQ ID NO: 3833 - RNA, 20 nt, Artificial Sequence
  spacer sequence ATCN PAM
uuaacucccuuacagccaca

SEQ ID NO: 3834 - RNA, 20 nt, Artificial Sequence
  spacer sequence ATCN PAM
auuugagaugagguggcccu

SEQ ID NO: 3835 - RNA, 20 nt, Artificial Sequence
  spacer sequence ATCN PAM
auccuuaacucccuuacagc

SEQ ID NO: 3836 - RNA, 20 nt, Artificial Sequence
  spacer sequence ATCN PAM
caaaucgauccuuaacuccc

SEQ ID NO: 3837 - RNA, 20 nt, Artificial Sequence
  spacer sequence ATCN PAM
aggugcguccuggcuugugg

SEQ ID NO: 3838 - RNA, 20 nt, Artificial Sequence
  spacer sequence ATCN PAM
gggguucccgggccccugga

SEQ ID NO: 3839 - RNA, 20 nt, Artificial Sequence
  spacer sequence ATCN PAM
ccucuccacccucacagcuc

SEQ ID NO: 3840 - RNA, 20 nt, Artificial Sequence
  spacer sequence ATCN PAM
aggaauuccuuccucuuggg

SEQ ID NO: 3841 - RNA, 20 nt, Artificial Sequence
  spacer sequence ATCN PAM
aaggcuccuaaaucgggagg

SEQ ID NO: 3842 - RNA, 20 nt, Artificial Sequence
  spacer sequence ATCN PAM
ggagggacuucagggguguc

SEQ ID NO: 3843 - RNA, 20 nt, Artificial Sequence
  spacer sequence ATCN PAM
ugccauggagguuugacgcg

SEQ ID NO: 3844 - RNA, 20 nt, Artificial Sequence
  spacer sequence ATCN PAM
ccuuagcauccagggugcag

SEQ ID NO: 3845 - RNA, 20 nt, Artificial Sequence
  spacer sequence ATCN PAM
agggugcagugaaguggggg

SEQ ID NO: 3846 - RNA, 20 nt, Artificial Sequence
  spacer sequence ATCN PAM
gaccccacucccuaaacaca

SEQ ID NO: 3847 - RNA, 20 nt, Artificial Sequence
  spacer sequence ATCN PAM
cgcggccgggcggggggcuu

SEQ ID NO: 3848 - RNA, 20 nt, Artificial Sequence
  spacer sequence ATCN PAM
uuagacucuaagccaucucg

SEQ ID NO: 3849 - RNA, 20 nt, Artificial Sequence
  spacer sequence ATCN PAM
cauggcggccaaugcgacau

SEQ ID NO: 3850 - RNA, 20 nt, Artificial Sequence
  spacer sequence ATCN PAM
guaaaaacgggccacaaaca

SEQ ID NO: 3851 - RNA, 20 nt, Artificial Sequence
  spacer sequence ATCN PAM
gggguaccugcuggccacug

SEQ ID NO: 3852 - RNA, 20 nt, Artificial Sequence
  spacer sequence ATCN PAM
gagcuagcucccugcccuag

SEQ ID NO: 3853 - RNA, 20 nt, Artificial Sequence
  spacer sequence ATCN PAM
ccacuguucagacgggggag

SEQ ID NO: 3854 - RNA, 20 nt, Artificial Sequence
  spacer sequence ATCN PAM
ucuguucccagcacgggagg

SEQ ID NO: 3855 - RNA, 20 nt, Artificial Sequence
  spacer sequence ATCN PAM
agacccgggaccugggcggg

SEQ ID NO: 3856 - RNA, 20 nt, Artificial Sequence
  spacer sequence ATCN PAM
uccaaggccaggcuugacca

SEQ ID NO: 3857 - RNA, 20 nt, Artificial Sequence
  spacer sequence ATCN PAM
guccagccucacagggggca

SEQ ID NO: 3858 - RNA, 20 nt, Artificial Sequence
  spacer sequence ATCN PAM
uccccaugacccuuuaucau

SEQ ID NO: 3859 - RNA, 20 nt, Artificial Sequence
  spacer sequence ATCN PAM
uccuguucgcaccugcucag

SEQ ID NO: 3860 - RNA, 20 nt, Artificial Sequence
  spacer sequence ATCN PAM
uguucgcaccugcucagccc

SEQ ID NO: 3861 - RNA, 20 nt, Artificial Sequence
  spacer sequence ATCN PAM
cagcacuuugggaggccgag

SEQ ID NO: 3862 - RNA, 20 nt, Artificial Sequence
  spacer sequence ATCN PAM
accugccucggccucccaaa

SEQ ID NO: 3863 - RNA, 20 nt, Artificial Sequence
  spacer sequence ATCN PAM
cuugaggucaggaguucaag

SEQ ID NO: 3864 - RNA, 20 nt, Artificial Sequence
  spacer sequence ATCN PAM
cagcuacuugggaggcugag

SEQ ID NO: 3865 - RNA, 20 nt, Artificial Sequence
  spacer sequence ATCN PAM
aggaggcagagguugcagug

SEQ ID NO: 3866 - RNA, 20 nt, Artificial Sequence
  spacer sequence ATCN PAM
cggcucacugcaaccucugc

SEQ ID NO: 3867 - RNA, 20 nt, Artificial Sequence
  spacer sequence ATCN PAM
cacccacacucaugagcagc

SEQ ID NO: 3868 - RNA, 20 nt, Artificial Sequence
  spacer sequence ATCN PAM
gucaggugaaccugcccauc

SEQ ID NO: 3869 - RNA, 20 nt, Artificial Sequence
  spacer sequence ATCN PAM
cccuagacuucacaaucuuc

SEQ ID NO: 3870 - RNA, 20 nt, Artificial Sequence
  spacer sequence ATCN PAM
uccucuccuucacuccagac

SEQ ID NO: 3871 - RNA, 20 nt, Artificial Sequence
  spacer sequence ATCN PAM
gggccccacgacgggcccug

SEQ ID NO: 3872 - RNA, 20 nt, Artificial Sequence
  spacer sequence ATCN PAM
ccagggcccgucguggggcc

SEQ ID NO: 3873 - RNA, 20 nt, Artificial Sequence
  spacer sequence ATCN PAM
uccucccgcccacugcagag

SEQ ID NO: 3874 - RNA, 20 nt, Artificial Sequence
  spacer sequence ATCN PAM
gcagcagaggguugguuccc

SEQ ID NO: 3875 - RNA, 20 nt, Artificial Sequence
  spacer sequence ATCN PAM
uuuuuuuuuuuuuuuuuuga

SEQ ID NO: 3876 - RNA, 20 nt, Artificial Sequence
  spacer sequence ATCN PAM
cuugaaccugggagguggag

SEQ ID NO: 3877 - RNA, 20 nt, Artificial Sequence
  spacer sequence ATCN PAM
cagcuacucaggaggcugag

SEQ ID NO: 3878 - RNA, 20 nt, Artificial Sequence
  spacer sequence ATCN PAM
cccaaggucaggaguucgag

SEQ ID NO: 3879 - RNA, 20 nt, Artificial Sequence
  spacer sequence ATCN PAM
gcccgccucagccucccaaa

SEQ ID NO: 3880 - RNA, 20 nt, Artificial Sequence
  spacer sequence ATCN PAM
ggccgggcgcgguggcucaa

SEQ ID NO: 3881 - RNA, 20 nt, Artificial Sequence
  spacer sequence ATCN PAM
gcccggaaaccugcccagag

SEQ ID NO: 3882 - RNA, 20 nt, Artificial Sequence
  spacer sequence ATCN PAM
ugcagcugaaacccggcgcg

SEQ ID NO: 3883 - RNA, 20 nt, Artificial Sequence
  spacer sequence ATCN PAM
caccugaaacccacuuuaca

SEQ ID NO: 3884 - RNA, 20 nt, Artificial Sequence
  spacer sequence ATCN PAM
ggucugaggcccgucuuccu

SEQ ID NO: 3885 - RNA, 20 nt, Artificial Sequence
  spacer sequence ATCN PAM
cagguuggaggaagacgggc

SEQ ID NO: 3886 - RNA, 20 nt, Artificial Sequence
  spacer sequence ATCN PAM
ccuccauucacuggggguuu

SEQ ID NO: 3887 - RNA, 20 nt, Artificial Sequence
  spacer sequence ATCN PAM
cagaaccucgauguccacgu

SEQ ID NO: 3888 - RNA, 20 nt, Artificial Sequence
  spacer sequence ATCN PAM
agguucugggaugugacugg

SEQ ID NO: 3889 - RNA, 20 nt, Artificial Sequence
  spacer sequence ATCN PAM
cuaacagggcgaugggcguc

SEQ ID NO: 3890 - RNA, 20 nt, Artificial Sequence
  spacer sequence ATCN PAM
cccuguuagggauggggacg

SEQ ID NO: 3891 - RNA, 20 nt, Artificial Sequence
  spacer sequence ATCN PAM
auuguguacagucuguggcc

SEQ ID NO: 3892 - RNA, 20 nt, Artificial Sequence
  spacer sequence ATCN PAM
ccuaagugcagaauuucacg

SEQ ID NO: 3893 - RNA, 20 nt, Artificial Sequence
  spacer sequence ATCN PAM
uucuguccgugaaauucugc

SEQ ID NO: 3894 - RNA, 20 nt, Artificial Sequence
  spacer sequence ATCN PAM
gaagccagaggcuccuggug

SEQ ID NO: 3895 - RNA, 20 nt, Artificial Sequence
  spacer sequence ATCN PAM
ucccccuuucccucccuggc

SEQ ID NO: 3896 - RNA, 20 nt, Artificial Sequence
  spacer sequence ATCN PAM
ccuuccccucccuaggccag

SEQ ID NO: 3897 - RNA, 20 nt, Artificial Sequence
  spacer sequence ATCN PAM
uuguuauuccuucuccacgc

SEQ ID NO: 3898 - RNA, 20 nt, Artificial Sequence
  spacer sequence ATCN PAM
gggcgucucccgcacguccc

SEQ ID NO: 3899 - RNA, 20 nt, Artificial Sequence
  spacer sequence ATCN PAM
accaguaaccugggcuuagg

SEQ ID NO: 3900 - RNA, 20 nt, Artificial Sequence
  spacer sequence ATCN PAM
aggcugggaaccucugcucg

SEQ ID NO: 3901 - RNA, 20 nt, Artificial Sequence
  spacer sequence ATCN PAM
uccaggcugggaaccucugc

SEQ ID NO: 3902 - RNA, 20 nt, Artificial Sequence
  spacer sequence ATCN PAM
ugcacccacagagggcccug

SEQ ID NO: 3903 - RNA, 20 nt, Artificial Sequence
  spacer sequence ATCN PAM
gugguugucacagccugggc

SEQ ID NO: 3904 - RNA, 20 nt, Artificial Sequence
  spacer sequence ATCN PAM
ccaucauggccaaacagguc

SEQ ID NO: 3905 - RNA, 20 nt, Artificial Sequence
  spacer sequence ATCN PAM
uggccaaacagguccuugac

SEQ ID NO: 3906 - RNA, 20 nt, Artificial Sequence
  spacer sequence ATCN PAM
cccacagacacgacacgcag

SEQ ID NO: 3907 - RNA, 20 nt, Artificial Sequence
  spacer sequence ATCN PAM
ggccucccggcggugggugg

SEQ ID NO: 3908 - RNA, 20 nt, Artificial Sequence
  spacer sequence ATCN PAM
agguccacccaccgccggga

SEQ ID NO: 3909 - RNA, 20 nt, Artificial Sequence
  spacer sequence ATCN PAM
gaguuaacagcaggcucaag

SEQ ID NO: 3910 - RNA, 20 nt, Artificial Sequence
  spacer sequence ATCN PAM
ucggaguuaacagcaggcuc

SEQ ID NO: 3911 - RNA, 20 nt, Artificial Sequence
  spacer sequence ATCN PAM
aggaccgggccccauagacc

SEQ ID NO: 3912 - RNA, 20 nt, Artificial Sequence
  spacer sequence ATCN PAM
gcagggucugggggcaacac

SEQ ID NO: 3913 - RNA, 20 nt, Artificial Sequence
  spacer sequence ATCN PAM
accacuucgcgggccucuuc

SEQ ID NO: 3914 - RNA, 20 nt, Artificial Sequence
  spacer sequence ATCN PAM
gcaaggggagcaggcugcag

SEQ ID NO: 3915 - RNA, 20 nt, Artificial Sequence
  spacer sequence ATCN PAM
accgcgcccucaacacggag

SEQ ID NO: 3916 - RNA, 20 nt, Artificial Sequence
  spacer sequence ATCN PAM
ugguccgccccgaccaccac

SEQ ID NO: 3917 - RNA, 20 nt, Artificial Sequence
  spacer sequence ATCN PAM
ucugccgucagcggccucug

SEQ ID NO: 3918 - RNA, 20 nt, Artificial Sequence
  spacer sequence ATCN PAM
aagucgcgcgugagcggcuc

SEQ ID NO: 3919 - RNA, 20 nt, Artificial Sequence
  spacer sequence ATCN PAM
ccgagugggacuggaccacg

SEQ ID NO: 3920 - RNA, 20 nt, Artificial Sequence
  spacer sequence ATCN PAM
guggcagcagccagggccgu

SEQ ID NO: 3921 - RNA, 20 nt, Artificial Sequence
  spacer sequence ATCN PAM
ucaggacgguucacugcaga

SEQ ID NO: 3922 - RNA, 20 nt, Artificial Sequence
  spacer sequence ATCN PAM
cagacgccuccuuccugucc

SEQ ID NO: 3923 - RNA, 20 nt, Artificial Sequence
  spacer sequence ATCN PAM
ucacagacgccuccuuccug

SEQ ID NO: 3924 - RNA, 20 nt, Artificial Sequence
  spacer sequence ATCN PAM
aacccaggucaccaccggca

SEQ ID NO: 3925 - RNA, 20 nt, Artificial Sequence
  spacer sequence ATCN PAM
caaccggcuaauuuuuuugu

SEQ ID NO: 3926 - RNA, 20 nt, Artificial Sequence
  spacer sequence ATCN PAM
uagcuacuccgcaggcugag

SEQ ID NO: 3927 - RNA, 20 nt, Artificial Sequence
  spacer sequence ATCN PAM
cggcucacugcaaacuccac

SEQ ID NO: 3928 - RNA, 20 nt, Artificial Sequence
  spacer sequence ATCN PAM
aaccacugcacuccagccug

SEQ ID NO: 3929 - RNA, 20 nt, Artificial Sequence
  spacer sequence ATCN PAM
caaaaaaaaaaaaaaaaaaa

SEQ ID NO: 3930 - RNA, 20 nt, Artificial Sequence
  spacer sequence ATCN PAM
cuggguggugaauuuuuuuu

SEQ ID NO: 3931 - RNA, 20 nt, Artificial Sequence
  spacer sequence ATCN PAM
cacaguccaaagcccucugc

SEQ ID NO: 3932 - RNA, 20 nt, Artificial Sequence
  spacer sequence ATCN PAM
cuccucucucagcagagggc

SEQ ID NO: 3933 - RNA, 20 nt, Artificial Sequence
  spacer sequence ATCN PAM
gaccaccugugagugguauu

SEQ ID NO: 3934 - RNA, 20 nt, Artificial Sequence
  spacer sequence ATCN PAM
ccaggccaauaccacucaca

SEQ ID NO: 3935 - RNA, 20 nt, Artificial Sequence
  spacer sequence ATCN PAM
agccuacccggcuccaucuc

SEQ ID NO: 3936 - RNA, 20 nt, Artificial Sequence
  spacer sequence ATCN PAM
cuuuccaaaccgggacaugg

SEQ ID NO: 3937 - RNA, 20 nt, Artificial Sequence
  spacer sequence ATCN PAM
cugucgccugggcccugguc

SEQ ID NO: 3938 - RNA, 20 nt, Artificial Sequence
  spacer sequence ATCN PAM
uguucccaggcuacuccaug

SEQ ID NO: 3939 - RNA, 20 nt, Artificial Sequence
  spacer sequence ATCN PAM
uucccaccuuccucccugca

SEQ ID NO: 3940 - RNA, 20 nt, Artificial Sequence
  spacer sequence ATCN PAM
uccuucccaccuuccucccu

SEQ ID NO: 3941 - RNA, 20 nt, Artificial Sequence
  spacer sequence ATCN PAM
gugccuccccaggccagagc

SEQ ID NO: 3942 - RNA, 20 nt, Artificial Sequence
  spacer sequence ATCN PAM
ggaggcuggggggccuuccg

SEQ ID NO: 3943 - RNA, 20 nt, Artificial Sequence
  spacer sequence ATCN PAM
ugggcaaguucccagccuga

SEQ ID NO: 3944 - RNA, 20 nt, Artificial Sequence
  spacer sequence ATCN PAM
cagccuggcccgccagcauc

SEQ ID NO: 3945 - RNA, 20 nt, Artificial Sequence
  spacer sequence ATCN PAM
gaccccucuuugcaggcuag

SEQ ID NO: 3946 - RNA, 20 nt, Artificial Sequence
  spacer sequence ATCN PAM
agccugcaaagagggguccg

SEQ ID NO: 3947 - RNA, 20 nt, Artificial Sequence
  spacer sequence ATCN PAM
aaaaagcucacggcgcaacu

SEQ ID NO: 3948 - RNA, 20 nt, Artificial Sequence
  spacer sequence ATCN PAM
gaacaccgccgcgccggggc

SEQ ID NO: 3949 - RNA, 20 nt, Artificial Sequence
  spacer sequence ATCN PAM
gccugacucccucugagaag

SEQ ID NO: 3950 - RNA, 20 nt, Artificial Sequence
  spacer sequence ATCN PAM
gaggagggcgggagggggac

SEQ ID NO: 3951 - RNA, 20 nt, Artificial Sequence
  spacer sequence ATCN PAM
ccggccucuuccuccgcugg

SEQ ID NO: 3952 - RNA, 20 nt, Artificial Sequence
  spacer sequence ATCN PAM
uguccccggcgaccgccuuu

SEQ ID NO: 3953 - RNA, 20 nt, Artificial Sequence
  spacer sequence ATCN PAM
cgcugcacuagaagccgcug

SEQ ID NO: 3954 - RNA, 20 nt, Artificial Sequence
  spacer sequence ATCN PAM
ggccuucccggguggacguc

SEQ ID NO: 3955 - RNA, 20 nt, Artificial Sequence
  spacer sequence ATCN PAM
cgcccggggacguccacccg

SEQ ID NO: 3956 - RNA, 20 nt, Artificial Sequence
  spacer sequence ATCN PAM
cagggucagaggucgcgagg

SEQ ID NO: 3957 - RNA, 20 nt, Artificial Sequence
  spacer sequence ATCN PAM
guagggccggguauaggccu

SEQ ID NO: 3958 - RNA, 20 nt, Artificial Sequence
  spacer sequence ATCN PAM
ugaagaacagcgcguggaag

SEQ ID NO: 3959 - RNA, 20 nt, Artificial Sequence
  spacer sequence ATCN PAM
acgugcgcgaccggcucuuc

SEQ ID NO: 3960 - RNA, 20 nt, Artificial Sequence
  spacer sequence ATCN PAM
caaccccaacccccucauca

SEQ ID NO: 3961 - RNA, 20 nt, Artificial Sequence
  spacer sequence ATCN PAM
gccgcccucgcagccgccgc

SEQ ID NO: 3962 - RNA, 20 nt, Artificial Sequence
  spacer sequence ATCN PAM
uccgcuuucucguccggcug

SEQ ID NO: 3963 - RNA, 20 nt, Artificial Sequence
  spacer sequence ATCN PAM
cagcguucucugcgggcgca

SEQ ID NO: 3964 - RNA, 20 nt, Artificial Sequence
  spacer sequence ATCN PAM
gggccaccucuuuugcauau

SEQ ID NO: 3965 - RNA, 20 nt, Artificial Sequence
  spacer sequence ATCN PAM
accgcggcuaugaggccagu

SEQ ID NO: 3966 - RNA, 20 nt, Artificial Sequence
  spacer sequence ATCN PAM
uaauuuuaccgccuuauacu

SEQ ID NO: 3967 - RNA, 20 nt, Artificial Sequence
  spacer sequence ATCN PAM
uaucguaauuuuaccgccuu

SEQ ID NO: 3968 - RNA, 20 nt, Artificial Sequence
  spacer sequence ATCN PAM
cauaucuuaucguaauuuua

SEQ ID NO: 3969 - RNA, 20 nt, Artificial Sequence
  spacer sequence ATCN PAM
cguaaaaucccauaucuuau

SEQ ID NO: 3970 - RNA, 20 nt, Artificial Sequence
  spacer sequence ATCN PAM
aagacaucaaaguaagcgua

SEQ ID NO: 3971 - RNA, 20 nt, Artificial Sequence
  spacer sequence ATCN PAM
aaguaagcguaagcacgaaa

SEQ ID NO: 3972 - RNA, 20 nt, Artificial Sequence
  spacer sequence ATCN PAM
uaaccaaaagaugauuugau

SEQ ID NO: 3973 - RNA, 20 nt, Artificial Sequence
  spacer sequence ATCN PAM
uuugguuaggauaacuuaug

SEQ ID NO: 3974 - RNA, 20 nt, Artificial Sequence
  spacer sequence ATCN PAM
ucuuuugguuaggauaacuu

SEQ ID NO: 3975 - RNA, 20 nt, Artificial Sequence
  spacer sequence ATCN PAM
aaucaucuuuugguuaggau

SEQ ID NO: 3976 - RNA, 20 nt, Artificial Sequence
  spacer sequence ATCN PAM
uuccaauuuuaguauaugug

SEQ ID NO: 3977 - RNA, 20 nt, Artificial Sequence
  spacer sequence ATCN PAM
ucucuguaucguuccaauuu

SEQ ID NO: 3978 - RNA, 20 nt, Artificial Sequence
  spacer sequence ATCN PAM
uugcgcaggggccaugcuaa

SEQ ID NO: 3979 - RNA, 20 nt, Artificial Sequence
  spacer sequence ATCN PAM
gggcaagagaagccaaacga

SEQ ID NO: 3980 - RNA, 20 nt, Artificial Sequence
  spacer sequence ATCN PAM
ugccaugacgucacagggcc

SEQ ID NO: 3981 - RNA, 20 nt, Artificial Sequence
  spacer sequence ATCN PAM
ccuguggcgccacuaagguu

SEQ ID NO: 3982 - RNA, 20 nt, Artificial Sequence
  spacer sequence ATCN PAM
ggcagucucuacuccugcgu

SEQ ID NO: 3983 - RNA, 20 nt, Artificial Sequence
  spacer sequence ATCN PAM
ucuuguguacgcagccggca

SEQ ID NO: 3984 - RNA, 20 nt, Artificial Sequence
  spacer sequence ATCN PAM
caaacaaacaaccaaaaaac

SEQ ID NO: 3985 - RNA, 20 nt, Artificial Sequence
  spacer sequence ATCN PAM
aucucaaacaaacaaccaaa

SEQ ID NO: 3986 - RNA, 20 nt, Artificial Sequence
  spacer sequence ATCN PAM
cgcuucugcgcuccagccug

SEQ ID NO: 3987 - RNA, 20 nt, Artificial Sequence
  spacer sequence ATCN PAM
cggcucucugcaacccccgc

SEQ ID NO: 3988 - RNA, 20 nt, Artificial Sequence
  spacer sequence ATCN PAM
cagcuacuugggaggcugag

SEQ ID NO: 3989 - RNA, 20 nt, Artificial Sequence
  spacer sequence ATCN PAM
ccuaaaguuaggaguucgag

SEQ ID NO: 3990 - RNA, 20 nt, Artificial Sequence
  spacer sequence ATCN PAM
cagcacuuugggaggccuag

SEQ ID NO: 3991 - RNA, 20 nt, Artificial Sequence
  spacer sequence ATCN PAM
cgccacugcacuccagccug

SEQ ID NO: 3992 - RNA, 20 nt, Artificial Sequence
  spacer sequence ATCN PAM
cggcucacugcaaccuccgc

SEQ ID NO: 3993 - RNA, 20 nt, Artificial Sequence
  spacer sequence ATCN PAM
cagcuauucaggaggcugag

SEQ ID NO: 3994 - RNA, 20 nt, Artificial Sequence
  spacer sequence ATCN PAM
aaccuggucuccacuaaaaa

SEQ ID NO: 3995 - RNA, 20 nt, Artificial Sequence
  spacer sequence ATCN PAM
ucuuggccagguugguauug

SEQ ID NO: 3996 - RNA, 20 nt, Artificial Sequence
  spacer sequence ATCN PAM
uggccagguugguauugaac

SEQ ID NO: 3997 - RNA, 20 nt, Artificial Sequence
  spacer sequence ATCN PAM
cgaggucaggaguucaauac

SEQ ID NO: 3998 - RNA, 20 nt, Artificial Sequence
  spacer sequence ATCN PAM
acccgcgucagccucccaaa

SEQ ID NO: 3999 - RNA, 20 nt, Artificial Sequence
  spacer sequence ATCN PAM
uggcucacugcagccuccaa

SEQ ID NO: 4000 - RNA, 20 nt, Artificial Sequence
  spacer sequence ATCN PAM
uaucccugcgcuccagguug

SEQ ID NO: 4001 - RNA, 20 nt, Artificial Sequence
  spacer sequence ATCN PAM
cugcgcuccagguuggauga

SEQ ID NO: 4002 - RNA, 20 nt, Artificial Sequence
  spacer sequence ATCN PAM
aaccuggagcgcagggauac

SEQ ID NO: 4003 - RNA, 20 nt, Artificial Sequence
  spacer sequence ATCN PAM
uuuacggcugcguuuucugu

SEQ ID NO: 4004 - RNA, 20 nt, Artificial Sequence
  spacer sequence ATCN PAM
auuuauguaucauuuacggc

SEQ ID NO: 4005 - RNA, 20 nt, Artificial Sequence
  spacer sequence ATCN PAM
aacguggaaauuacauaaca

SEQ ID NO: 4006 - RNA, 20 nt, Artificial Sequence
  spacer sequence ATCN PAM
agcugcagccuauuuuugua

SEQ ID NO: 4007 - RNA, 20 nt, Artificial Sequence
  spacer sequence ATCN PAM
uucucuuggaaagcuguguu

SEQ ID NO: 4008 - RNA, 20 nt, Artificial Sequence
  spacer sequence ATCN PAM
caaguuauccaaacaagguc

SEQ ID NO: 4009 - RNA, 20 nt, Artificial Sequence
  spacer sequence ATCN PAM
aaacaaggucaggcgcggug

SEQ ID NO: 4010 - RNA, 20 nt, Artificial Sequence
  spacer sequence ATCN PAM
cagcacuuuuggaggcugag

SEQ ID NO: 4011 - RNA, 20 nt, Artificial Sequence
  spacer sequence ATCN PAM
ucccgccucagccuccaaaa

SEQ ID NO: 4012 - RNA, 20 nt, Artificial Sequence
  spacer sequence ATCN PAM
uuucagcccagguguucaag

SEQ ID NO: 4013 - RNA, 20 nt, Artificial Sequence
  spacer sequence ATCN PAM
cauuauauugcccaggcugg

SEQ ID NO: 4014 - RNA, 20 nt, Artificial Sequence
  spacer sequence ATCN PAM
ugucucuacgaaaaauacca

SEQ ID NO: 4015 - RNA, 20 nt, Artificial Sequence
  spacer sequence ATCN PAM
ucuugccucagccucccaag

SEQ ID NO: 4016 - RNA, 20 nt, Artificial Sequence
  spacer sequence ATCN PAM
cagcucacugcagccuccaa

SEQ ID NO: 4017 - RNA, 20 nt, Artificial Sequence
  spacer sequence ATCN PAM
cagcacuugggaggccgagg

SEQ ID NO: 4018 - RNA, 20 nt, Artificial Sequence
  spacer sequence ATCN PAM
gcccgccucggccucccaag

SEQ ID NO: 4019 - RNA, 20 nt, Artificial Sequence
  spacer sequence ATCN PAM
cgaggucaggagaucgagac

SEQ ID NO: 4020 - RNA, 20 nt, Artificial Sequence
  spacer sequence ATCN PAM
ccugaccucgugauccgccc

SEQ ID NO: 4021 - RNA, 20 nt, Artificial Sequence
  spacer sequence ATCN PAM
agaccacccuggcaaacacg

SEQ ID NO: 4022 - RNA, 20 nt, Artificial Sequence
  spacer sequence ATCN PAM
cggcucacugcaagcuccgc

SEQ ID NO: 4023 - RNA, 20 nt, Artificial Sequence
  spacer sequence ATCN PAM
cgccacugcaccccagccug

SEQ ID NO: 4024 - RNA, 20 nt, Artificial Sequence
  spacer sequence ATCN PAM
caguuacuuuuuuuuuuuuu

SEQ ID NO: 4025 - RNA, 20 nt, Artificial Sequence
  spacer sequence ATCN PAM
gguguguuucccauccaugg

SEQ ID NO: 4026 - RNA, 20 nt, Artificial Sequence
  spacer sequence ATCN PAM
augggguguuccaauaugga

SEQ ID NO: 4027 - RNA, 20 nt, Artificial Sequence
  spacer sequence ATCN PAM
auauuggaacaccccaugga

SEQ ID NO: 4028 - RNA, 20 nt, Artificial Sequence
  spacer sequence ATCN PAM
ccacaguauuuagauuuaca

SEQ ID NO: 4029 - RNA, 20 nt, Artificial Sequence
  spacer sequence ATCN PAM
aaauacuguggagauaagua

SEQ ID NO: 4030 - RNA, 20 nt, Artificial Sequence
  spacer sequence ATCN PAM
cagcacuuugggaggcugag

SEQ ID NO: 4031 - RNA, 20 nt, Artificial Sequence
  spacer sequence ATCN PAM
ucccgccucagccucccaaa

SEQ ID NO: 4032 - RNA, 20 nt, Artificial Sequence
  spacer sequence ATCN PAM
cuugaauccagacugggcaa

SEQ ID NO: 4033 - RNA, 20 nt, Artificial Sequence
  spacer sequence ATCN PAM
agacugggcaacauagggag

SEQ ID NO: 4034 - RNA, 20 nt, Artificial Sequence
  spacer sequence ATCN PAM
cuacaaaaaauuuaaaaauu

SEQ ID NO: 4035 - RNA, 20 nt, Artificial Sequence
  spacer sequence ATCN PAM
gggacuacaggcaugugcca

SEQ ID NO: 4036 - RNA, 20 nt, Artificial Sequence
  spacer sequence ATCN PAM
ccugccucagccuccugagu

SEQ ID NO: 4037 - RNA, 20 nt, Artificial Sequence
  spacer sequence ATCN PAM
auauauuuacauuuauaugu

SEQ ID NO: 4038 - RNA, 20 nt, Artificial Sequence
  spacer sequence ATCN PAM
ugucaguuuuuaauuuuuaa

SEQ ID NO: 4039 - RNA, 20 nt, Artificial Sequence
  spacer sequence ATCN PAM
cagcacuucggaaggcugag

SEQ ID NO: 4040 - RNA, 20 nt, Artificial Sequence
  spacer sequence ATCN PAM
gccggccucagccuuccgaa

SEQ ID NO: 4041 - RNA, 20 nt, Artificial Sequence
  spacer sequence ATCN PAM
cuugaggucaggaguucaag

SEQ ID NO: 4042 - RNA, 20 nt, Artificial Sequence
  spacer sequence ATCN PAM
cuacuaaaaaugcaaaaauu

SEQ ID NO: 4043 - RNA, 20 nt, Artificial Sequence
  spacer sequence ATCN PAM
agugccaguuuuuaauuuuu

SEQ ID NO: 4044 - RNA, 20 nt, Artificial Sequence
  spacer sequence ATCN PAM
cagcacuuugggaggcugag

SEQ ID NO: 4045 - RNA, 20 nt, Artificial Sequence
  spacer sequence ATCN PAM
gcccgccucagccucccaaa

SEQ ID NO: 4046 - RNA, 20 nt, Artificial Sequence
  spacer sequence ATCN PAM
cgaggucaggagaucgagac

SEQ ID NO: 4047 - RNA, 20 nt, Artificial Sequence
  spacer sequence ATCN PAM
ccugaccucgugaucugccc

SEQ ID NO: 4048 - RNA, 20 nt, Artificial Sequence
  spacer sequence ATCN PAM
agaccauccuggauaacaca

SEQ ID NO: 4049 - RNA, 20 nt, Artificial Sequence
  spacer sequence ATCN PAM
uggauaacacagugaaaccc

SEQ ID NO: 4050 - RNA, 20 nt, Artificial Sequence
  spacer sequence ATCN PAM
aggauggucucgaucuccug

SEQ ID NO: 4051 - RNA, 20 nt, Artificial Sequence
  spacer sequence ATCN PAM
uggcucacugcaagcuccac

SEQ ID NO: 4052 - RNA, 20 nt, Artificial Sequence
  spacer sequence ATCN PAM
gggaagcaaauacuucaugu

SEQ ID NO: 4053 - RNA, 20 nt, Artificial Sequence
  spacer sequence ATCN PAM
acuacuguagccacuggcca

SEQ ID NO: 4054 - RNA, 20 nt, Artificial Sequence
  spacer sequence ATCN PAM
cagaauaacagaaaugguca

SEQ ID NO: 4055 - RNA, 20 nt, Artificial Sequence
  spacer sequence ATCN PAM
caguacuuugggaggcugag

SEQ ID NO: 4056 - RNA, 20 nt, Artificial Sequence
  spacer sequence ATCN PAM
acccgccucagccucccaaa

SEQ ID NO: 4057 - RNA, 20 nt, Artificial Sequence
  spacer sequence ATCN PAM
ccugaggucagggguucgag

SEQ ID NO: 4058 - RNA, 20 nt, Artificial Sequence
  spacer sequence ATCN PAM
cuacuaaaaauaaaauaaaa

SEQ ID NO: 4059 - RNA, 20 nt, Artificial Sequence
  spacer sequence ATCN PAM
auaggaguuugacacauuuu

SEQ ID NO: 4060 - RNA, 20 nt, Artificial Sequence
  spacer sequence ATCN PAM
cccuugccuccucuuacaug

SEQ ID NO: 4061 - RNA, 20 nt, Artificial Sequence
  spacer sequence ATCN PAM
aggaaagcugcauguaagag

SEQ ID NO: 4062 - RNA, 20 nt, Artificial Sequence
  spacer sequence ATCN PAM
ggguuggggguuggucugug

SEQ ID NO: 4063 - RNA, 20 nt, Artificial Sequence
  spacer sequence ATCN PAM
cgccacugcacuccagccug

SEQ ID NO: 4064 - RNA, 20 nt, Artificial Sequence
  spacer sequence ATCN PAM
cgacuuacuacaaccuccgc

SEQ ID NO: 4065 - RNA, 20 nt, Artificial Sequence
  spacer sequence ATCN PAM
cuugaagccaggaggcggag

SEQ ID NO: 4066 - RNA, 20 nt, Artificial Sequence
  spacer sequence ATCN PAM
ucccaccucagccuccucag

SEQ ID NO: 4067 - RNA, 20 nt, Artificial Sequence
  spacer sequence ATCN PAM
cuugaggucaggaguuccag

SEQ ID NO: 4068 - RNA, 20 nt, Artificial Sequence
  spacer sequence ATCN PAM
gcccgccucggccuuccaaa

SEQ ID NO: 4069 - RNA, 20 nt, Artificial Sequence
  spacer sequence ATCN PAM
cagcacuuuggaaggccgag

SEQ ID NO: 4070 - RNA, 20 nt, Artificial Sequence
  spacer sequence ATCN PAM
gaguggcucacgccugcaau

SEQ ID NO: 4071 - RNA, 20 nt, Artificial Sequence
  spacer sequence ATCN PAM
caacaugacgcuccagccug

SEQ ID NO: 4072 - RNA, 20 nt, Artificial Sequence
  spacer sequence ATCN PAM
ucacaacaugacgcuccagc

SEQ ID NO: 4073 - RNA, 20 nt, Artificial Sequence
  spacer sequence ATCN PAM
guugagcccaagaggucgaa

SEQ ID NO: 4074 - RNA, 20 nt, Artificial Sequence
  spacer sequence ATCN PAM
ucccccuucggccucagccu

SEQ ID NO: 4075 - RNA, 20 nt, Artificial Sequence
  spacer sequence ATCN PAM
uauucucuuuuggacugaca

SEQ ID NO: 4076 - RNA, 20 nt, Artificial Sequence
  spacer sequence ATCN PAM
aacaaagccccagcuccaau

SEQ ID NO: 4077 - RNA, 20 nt, Artificial Sequence
  spacer sequence ATCN PAM
cagacuucucuucugccaga

SEQ ID NO: 4078 - RNA, 20 nt, Artificial Sequence
  spacer sequence ATCN PAM
aagggggcgaggggccccuc

SEQ ID NO: 4079 - RNA, 20 nt, Artificial Sequence
  spacer sequence ATCN PAM
gcggcgggggcguggcgcgc

SEQ ID NO: 4080 - RNA, 20 nt, Artificial Sequence
  spacer sequence ATCN PAM
ccccaccaggcgucagggag

SEQ ID NO: 4081 - RNA, 20 nt, Artificial Sequence
  spacer sequence ATCN PAM
uggggagcacccaggucuga

SEQ ID NO: 4082 - RNA, 20 nt, Artificial Sequence
  spacer sequence ATCN PAM
cagaccugggugcuccccaa

SEQ ID NO: 4083 - RNA, 20 nt, Artificial Sequence
  spacer sequence ATCN PAM
gggggacgagugacccauuc

SEQ ID NO: 4084 - RNA, 20 nt, Artificial Sequence
  spacer sequence ATCN PAM
agggguaguugggucugacu

SEQ ID NO: 4085 - RNA, 20 nt, Artificial Sequence
  spacer sequence ATCN PAM
ccuggccacacuucugcuuu

SEQ ID NO: 4086 - RNA, 20 nt, Artificial Sequence
  spacer sequence ATCN PAM
gacuaauuuaaacggauaac

SEQ ID NO: 4087 - RNA, 20 nt, Artificial Sequence
  spacer sequence ATCN PAM
guuuaaauuagucagauggg

SEQ ID NO: 4088 - RNA, 20 nt, Artificial Sequence
  spacer sequence ATCN PAM
cagggccaccuucagagaac

SEQ ID NO: 4089 - RNA, 20 nt, Artificial Sequence
  spacer sequence ATCN PAM
cagcacuuuggggggcggag

SEQ ID NO: 4090 - RNA, 20 nt, Artificial Sequence
  spacer sequence ATCN PAM
acccagcuccgccccccaaa

SEQ ID NO: 4091 - RNA, 20 nt, Artificial Sequence
  spacer sequence ATCN PAM
cuauaauuaaaaacaagcca

SEQ ID NO: 4092 - RNA, 20 nt, Artificial Sequence
  spacer sequence ATCN PAM
uguccaggacccugcugugu

SEQ ID NO: 4093 - RNA, 20 nt, Artificial Sequence
  spacer sequence ATCN PAM
caacccccgccccccacuuu

SEQ ID NO: 4094 - RNA, 20 nt, Artificial Sequence
  spacer sequence ATCN PAM
gcacccugcauucauagagc

SEQ ID NO: 4095 - RNA, 20 nt, Artificial Sequence
  spacer sequence ATCN PAM
accugcccccaccccacccc

SEQ ID NO: 4096 - RNA, 20 nt, Artificial Sequence
  spacer sequence ATCN PAM
gagcugccuccgugccgucc

SEQ ID NO: 4097 - RNA, 20 nt, Artificial Sequence
  spacer sequence ATCN PAM
acagugucugcggccuugca

SEQ ID NO: 4098 - RNA, 20 nt, Artificial Sequence
  spacer sequence ATCN PAM
cggcuuggggguccggaccc

SEQ ID NO: 4099 - RNA, 20 nt, Artificial Sequence
  spacer sequence ATCN PAM
gaaccagcuguucccagcgg

SEQ ID NO: 4100 - RNA, 20 nt, Artificial Sequence
  spacer sequence ATCN PAM
cgaggaaugagaacgguggc

SEQ ID NO: 4101 - RNA, 20 nt, Artificial Sequence
  spacer sequence ATCN PAM
aaguugccggcggggcgggg

SEQ ID NO: 4102 - RNA, 20 nt, Artificial Sequence
  spacer sequence ATCN PAM
caggcagguccaggucaggg

SEQ ID NO: 4103 - RNA, 20 nt, Artificial Sequence
  spacer sequence ATCN PAM
caaauaaucccaggcagguc

SEQ ID NO: 4104 - RNA, 20 nt, Artificial Sequence
  spacer sequence ATCN PAM
caggcagguccagcucaggg

SEQ ID NO: 4105 - RNA, 20 nt, Artificial Sequence
  spacer sequence ATCN PAM
ucccaggcagguccagcuca

SEQ ID NO: 4106 - RNA, 20 nt, Artificial Sequence
  spacer sequence ATCN PAM
caggcagguccagcucaggg

SEQ ID NO: 4107 - RNA, 20 nt, Artificial Sequence
  spacer sequence ATCN PAM
ucccaggcagguccagcuca

SEQ ID NO: 4108 - RNA, 20 nt, Artificial Sequence
  spacer sequence ATCN PAM
caggcagguccagcucaggg

SEQ ID NO: 4109 - RNA, 20 nt, Artificial Sequence
  spacer sequence ATCN PAM
ucccaggcagguccagcuca

SEQ ID NO: 4110 - RNA, 20 nt, Artificial Sequence
  spacer sequence ATCN PAM
caggcagguccagcucaggg

SEQ ID NO: 4111 - RNA, 20 nt, Artificial Sequence
  spacer sequence ATCN PAM
uuccaggcagaucuagcuca

SEQ ID NO: 4112 - RNA, 20 nt, Artificial Sequence
  spacer sequence ATCN PAM
gccuggaaugauuuggguag

SEQ ID NO: 4113 - RNA, 20 nt, Artificial Sequence
  spacer sequence ATCN PAM
agcucaggggacccuaaccc

SEQ ID NO: 4114 - RNA, 20 nt, Artificial Sequence
  spacer sequence ATCN PAM
ucccaggcagguccagcuca

SEQ ID NO: 4115 - RNA, 20 nt, Artificial Sequence
  spacer sequence ATCN PAM
caggcagguccagcucaggg

SEQ ID NO: 4116 - RNA, 20 nt, Artificial Sequence
  spacer sequence ATCN PAM
ucccaggcagguccagcuca

SEQ ID NO: 4117 - RNA, 20 nt, Artificial Sequence
  spacer sequence ATCN PAM
caggcagguccagcucaggg

SEQ ID NO: 4118 - RNA, 20 nt, Artificial Sequence
  spacer sequence ATCN PAM
ucccaggcagguccagguca

SEQ ID NO: 4119 - RNA, 20 nt, Artificial Sequence
  spacer sequence ATCN PAM
caggcagguccaggucaggg

SEQ ID NO: 4120 - RNA, 20 nt, Artificial Sequence
  spacer sequence ATCN PAM
ucccaggcaggucuagcuca

SEQ ID NO: 4121 - RNA, 20 nt, Artificial Sequence
  spacer sequence ATCN PAM
caggcaggucuagcucaggg

SEQ ID NO: 4122 - RNA, 20 nt, Artificial Sequence
  spacer sequence ATCN PAM
ucccaggcagguccagcuca

SEQ ID NO: 4123 - RNA, 20 nt, Artificial Sequence
  spacer sequence ATCN PAM
caggcagguccagcucaggg

SEQ ID NO: 4124 - RNA, 20 nt, Artificial Sequence
  spacer sequence ATCN PAM
ucccaggcagguccagcuca

SEQ ID NO: 4125 - RNA, 20 nt, Artificial Sequence
  spacer sequence ATCN PAM
caggcagguccagcucaggg

SEQ ID NO: 4126 - RNA, 20 nt, Artificial Sequence
  spacer sequence ATCN PAM
uccuaggcagguccagcuca

SEQ ID NO: 4127 - RNA, 20 nt, Artificial Sequence
  spacer sequence ATCN PAM
uaggcagguccagcucaggg

SEQ ID NO: 4128 - RNA, 20 nt, Artificial Sequence
  spacer sequence ATCN PAM
ucccaggcagguccagcuca

SEQ ID NO: 4129 - RNA, 20 nt, Artificial Sequence
  spacer sequence ATCN PAM
caggcagguccagcucaggg

SEQ ID NO: 4130 - RNA, 20 nt, Artificial Sequence
  spacer sequence ATCN PAM
ucccaggcagguccagguca

SEQ ID NO: 4131 - RNA, 20 nt, Artificial Sequence
  spacer sequence ATCN PAM
caggcagguccaggucaggg

SEQ ID NO: 4132 - RNA, 20 nt, Artificial Sequence
  spacer sequence ATCN PAM
caggaagagaugaggaagcg

SEQ ID NO: 4133 - RNA, 20 nt, Artificial Sequence
  spacer sequence ATCN PAM
cuuccugggauuauuugggu

SEQ ID NO: 4134 - RNA, 20 nt, Artificial Sequence
  spacer sequence ATCN PAM
ccccagguucccgcggacag

SEQ ID NO: 4135 - RNA, 20 nt, Artificial Sequence
  spacer sequence ATCN PAM
cucucccugcucugcaccca

SEQ ID NO: 4136 - RNA, 20 nt, Artificial Sequence
  spacer sequence ATCN PAM
aaucccucucccugcucugc

SEQ ID NO: 4137 - RNA, 20 nt, Artificial Sequence
  spacer sequence ATCN PAM
ggccacuucacuccagccug

SEQ ID NO: 4138 - RNA, 20 nt, Artificial Sequence
  spacer sequence ATCN PAM
uggcucacugccuccucugc

SEQ ID NO: 4139 - RNA, 20 nt, Artificial Sequence
  spacer sequence ATCN PAM
cuugaacccaggaggcagag

SEQ ID NO: 4140 - RNA, 20 nt, Artificial Sequence
  spacer sequence ATCN PAM
cgucuguacuaaaauacaaa

SEQ ID NO: 4141 - RNA, 20 nt, Artificial Sequence
  spacer sequence ATCN PAM
gaggucaggaguucgagacu

SEQ ID NO: 4142 - RNA, 20 nt, Artificial Sequence
  spacer sequence ATCN PAM
ucugaggucaggaguucgag

SEQ ID NO: 4143 - RNA, 20 nt, Artificial Sequence
  spacer sequence ATCN PAM
gcccgccuuggccucccaaa

SEQ ID NO: 4144 - RNA, 20 nt, Artificial Sequence
  spacer sequence ATCN PAM
cagcacuuugggaggccaag

SEQ ID NO: 4145 - RNA, 20 nt, Artificial Sequence
  spacer sequence ATCN PAM
cccgcucccgcuacacgacc

SEQ ID NO: 4146 - RNA, 20 nt, Artificial Sequence
  spacer sequence ATCN PAM
agccacuagugaccgcggag

SEQ ID NO: 4147 - RNA, 20 nt, Artificial Sequence
  spacer sequence ATCN PAM
guggcaaggagccaggugcg

SEQ ID NO: 4148 - RNA, 20 nt, Artificial Sequence
  spacer sequence ATCN PAM
ugcuucuuagcaacucccga

SEQ ID NO: 4149 - RNA, 20 nt, Artificial Sequence
  spacer sequence ATCN PAM
cagcacuuuggagggcugag

SEQ ID NO: 4150 - RNA, 20 nt, Artificial Sequence
  spacer sequence ATCN PAM
gcccgucucagcccuccaaa

SEQ ID NO: 4151 - RNA, 20 nt, Artificial Sequence
  spacer sequence ATCN PAM
cgaggucaggagauggagac

SEQ ID NO: 4152 - RNA, 20 nt, Artificial Sequence
  spacer sequence ATCN PAM
ccugaccucgugaucugccc

SEQ ID NO: 4153 - RNA, 20 nt, Artificial Sequence
  spacer sequence ATCN PAM
uggcuaacacggugaaaccc

SEQ ID NO: 4154 - RNA, 20 nt, Artificial Sequence
  spacer sequence ATCN PAM
cggcucacugcaagcuccgc

SEQ ID NO: 4155 - RNA, 20 nt, Artificial Sequence
  spacer sequence ATCN PAM
caccacugcacuccagccug

SEQ ID NO: 4156 - RNA, 20 nt, Artificial Sequence
  spacer sequence ATCN PAM
gcucuuuuuucuuuuuuauu

SEQ ID NO: 4157 - RNA, 20 nt, Artificial Sequence
  spacer sequence ATCN PAM
caccugacguuuaccacuuc

SEQ ID NO: 4158 - RNA, 20 nt, Artificial Sequence
  spacer sequence ATCN PAM
gccuccccgcccugccuucu

SEQ ID NO: 4159 - RNA, 20 nt, Artificial Sequence
  spacer sequence ATCN PAM
ggccagguuuguccugcacc

SEQ ID NO: 4160 - RNA, 20 nt, Artificial Sequence
  spacer sequence ATCN PAM
acucccggugcaggacaaac

SEQ ID NO: 4161 - RNA, 20 nt, Artificial Sequence
  spacer sequence ATCN PAM
gcucuaauccacucccggug

SEQ ID NO: 4162 - RNA, 20 nt, Artificial Sequence
  spacer sequence ATCN PAM
gugaguucuaagccgguugu

SEQ ID NO: 4163 - RNA, 20 nt, Artificial Sequence
  spacer sequence ATCN PAM
gugcccgccugcaguggcug

SEQ ID NO: 4164 - RNA, 20 nt, Artificial Sequence
  spacer sequence ATCN PAM
uugggggcgccccagccacu

SEQ ID NO: 4165 - RNA, 20 nt, Artificial Sequence
  spacer sequence ATCN PAM
gcguggguguggugaggggg

SEQ ID NO: 4166 - RNA, 20 nt, Artificial Sequence
  spacer sequence ATCN PAM
gcuguugcccuggagucccc

SEQ ID NO: 4167 - RNA, 20 nt, Artificial Sequence
  spacer sequence ATCN PAM
aggugcggagcucugccucc

SEQ ID NO: 4168 - RNA, 20 nt, Artificial Sequence
  spacer sequence ATCN PAM
agggacucaccggccucucc

SEQ ID NO: 4169 - RNA, 20 nt, Artificial Sequence
  spacer sequence ATCN PAM
gccccgacuuccagaagggc

SEQ ID NO: 4170 - RNA, 20 nt, Artificial Sequence
  spacer sequence ATCN PAM
uucaggcccuucuggaaguc

SEQ ID NO: 4171 - RNA, 20 nt, Artificial Sequence
  spacer sequence ATCN PAM
uaugcacgugaguacacgca

SEQ ID NO: 4172 - RNA, 20 nt, Artificial Sequence
  spacer sequence ATCN PAM
ugguuuuucucacuuuuuuu

SEQ ID NO: 4173 - RNA, 20 nt, Artificial Sequence
  spacer sequence ATCN PAM
cagcacuuuuggaggccgag

SEQ ID NO: 4174 - RNA, 20 nt, Artificial Sequence
  spacer sequence ATCN PAM
cagcuacucgggaggcugag

SEQ ID NO: 4175 - RNA, 20 nt, Artificial Sequence
  spacer sequence ATCN PAM
ccugaggucaggaguuccag

SEQ ID NO: 4176 - RNA, 20 nt, Artificial Sequence
  spacer sequence ATCN PAM
ucccaccuuggccucccaaa

SEQ ID NO: 4177 - RNA, 20 nt, Artificial Sequence
  spacer sequence ATCN PAM
cagcacuuugggaggccaag

SEQ ID NO: 4178 - RNA, 20 nt, Artificial Sequence
  spacer sequence ATCN PAM
augauaccaagcugggaacc

SEQ ID NO: 4179 - RNA, 20 nt, Artificial Sequence
  spacer sequence ATCN PAM
uagaugugccgccggguccc

SEQ ID NO: 4180 - RNA, 20 nt, Artificial Sequence
  spacer sequence ATCN PAM
gcagggacauggaggaguug

SEQ ID NO: 4181 - RNA, 20 nt, Artificial Sequence
  spacer sequence ATCN PAM
gccggcccaggccgaagacc

SEQ ID NO: 4182 - RNA, 20 nt, Artificial Sequence
  spacer sequence ATCN PAM
gccacugugccuugcgggca

SEQ ID NO: 4183 - RNA, 20 nt, Artificial Sequence
  spacer sequence ATCN PAM
cccuuacuaccaggaggagg

SEQ ID NO: 4184 - RNA, 20 nt, Artificial Sequence
  spacer sequence ATCN PAM
ucugcccaucuggguuuuug

SEQ ID NO: 4185 - RNA, 20 nt, Artificial Sequence
  spacer sequence ATCN PAM
ggguuuuuggguuuuucugu

SEQ ID NO: 4186 - RNA, 20 nt, Artificial Sequence
  spacer sequence ATCN PAM
uuuuuuuuuuuuucuuaacc

SEQ ID NO: 4187 - RNA, 20 nt, Artificial Sequence
  spacer sequence ATCN PAM
cacgcugacacucacagacc

SEQ ID NO: 4188 - RNA, 20 nt, Artificial Sequence
  spacer sequence ATCN PAM
ggcagcagagcuuuuuuccc

SEQ ID NO: 4189 - RNA, 20 nt, Artificial Sequence
  spacer sequence ATCN PAM
aggcaaaggggaaaaaagcu

SEQ ID NO: 4190 - RNA, 20 nt, Artificial Sequence
  spacer sequence ATCN PAM
uucgcaaggcugagccacug

SEQ ID NO: 4191 - RNA, 20 nt, Artificial Sequence
  spacer sequence ATCN PAM
caauacguguagggcgaggg

SEQ ID NO: 4192 - RNA, 20 nt, Artificial Sequence
  spacer sequence ATCN PAM
cggcccgguccccuuuccca

SEQ ID NO: 4193 - RNA, 20 nt, Artificial Sequence
  spacer sequence ATCN PAM
ccggcucccaagugacugga

SEQ ID NO: 4194 - RNA, 20 nt, Artificial Sequence
  spacer sequence ATCN PAM
agucacuugggagccggaga

SEQ ID NO: 4195 - RNA, 20 nt, Artificial Sequence
  spacer sequence ATCN PAM
acugaggccagaguggguug

SEQ ID NO: 4196 - RNA, 20 nt, Artificial Sequence
  spacer sequence ATCN PAM
uggcucacugcaccuccacc

SEQ ID NO: 4197 - RNA, 20 nt, Artificial Sequence
  spacer sequence ATCN PAM
cuugagcccggaagguggag

SEQ ID NO: 4198 - RNA, 20 nt, Artificial Sequence
  spacer sequence ATCN PAM
cuacuaaaaauacaaaaauu

SEQ ID NO: 4199 - RNA, 20 nt, Artificial Sequence
  spacer sequence ATCN PAM
caccugaggccaggaguucg

SEQ ID NO: 4200 - RNA, 20 nt, Artificial Sequence
  spacer sequence ATCN PAM
gcccgccuccgccuccccaa

SEQ ID NO: 4201 - RNA, 20 nt, Artificial Sequence
  spacer sequence ATCN PAM
cagcgcuuggggaggcggag

SEQ ID NO: 4202 - RNA, 20 nt, Artificial Sequence
  spacer sequence ATCN PAM
uccccggccacaugccccgc

SEQ ID NO: 4203 - RNA, 20 nt, Artificial Sequence
  spacer sequence ATCN PAM
cacggagcagguccccuggg

SEQ ID NO: 4204 - RNA, 20 nt, Artificial Sequence
  spacer sequence ATCN PAM
acgccaacucucuuggccac

SEQ ID NO: 4205 - RNA, 20 nt, Artificial Sequence
  spacer sequence ATCN PAM
aagcaaagcacgcccucauc

SEQ ID NO: 4206 - RNA, 20 nt, Artificial Sequence
  spacer sequence ATCN PAM
cccaagaccuccucucuccc

SEQ ID NO: 4207 - RNA, 20 nt, Artificial Sequence
  spacer sequence ATCN PAM
ccccaucccccaagaccucc

SEQ ID NO: 4208 - RNA, 20 nt, Artificial Sequence
  spacer sequence ATCN PAM
aggggaaaauguccaccuca

SEQ ID NO: 4209 - RNA, 20 nt, Artificial Sequence
  spacer sequence ATCN PAM
uucauuccacccagacucac

SEQ ID NO: 4210 - RNA, 20 nt, Artificial Sequence
  spacer sequence ATCN PAM
aggcugaggccacgagacuu

SEQ ID NO: 4211 - RNA, 20 nt, Artificial Sequence
  spacer sequence ATCN PAM
ucaaagccccaacggcaaug

SEQ ID NO: 4212 - RNA, 20 nt, Artificial Sequence
  spacer sequence ATCN PAM
ggguagccacuauaaucgga

SEQ ID NO: 4213 - RNA, 20 nt, Artificial Sequence
  spacer sequence ATCN PAM
gagacucuagaauguuggcc

SEQ ID NO: 4214 - RNA, 20 nt, Artificial Sequence
  spacer sequence ATCN PAM
ucugcagaagccgaggagcg

SEQ ID NO: 4215 - RNA, 20 nt, Artificial Sequence
  spacer sequence ATCN PAM
uucguucauucauucauucc

SEQ ID NO: 4216 - RNA, 20 nt, Artificial Sequence
  spacer sequence ATCN PAM
aguggaaccccuacuuuaca

SEQ ID NO: 4217 - RNA, 20 nt, Artificial Sequence
  spacer sequence ATCN PAM
ccguaggguggcggagugcc

SEQ ID NO: 4218 - RNA, 20 nt, Artificial Sequence
  spacer sequence ATCN PAM
cagaagggccucgccuagcc

SEQ ID NO: 4219 - RNA, 20 nt, Artificial Sequence
  spacer sequence ATCN PAM
cgucuccucccuuggcccgc

SEQ ID NO: 4220 - RNA, 20 nt, Artificial Sequence
  spacer sequence ATCN PAM
cucccggccccaaccccgca

SEQ ID NO: 4221 - RNA, 20 nt, Artificial Sequence
  spacer sequence ATCN PAM
auucagccgucgucaacauu

SEQ ID NO: 4222 - RNA, 20 nt, Artificial Sequence
  spacer sequence ATCN PAM
cugauucucaaggggggcau

SEQ ID NO: 4223 - RNA, 20 nt, Artificial Sequence
  spacer sequence ATCN PAM
gugaucaauucagccgucgu

SEQ ID NO: 4224 - RNA, 20 nt, Artificial Sequence
  spacer sequence ATCN PAM
gacaucugggacccuuaaga

SEQ ID NO: 4225 - RNA, 20 nt, Artificial Sequence
  spacer sequence ATCN PAM
gggacccuuaagagggccuu

SEQ ID NO: 4226 - RNA, 20 nt, Artificial Sequence
  spacer sequence ATCN PAM
gcaaaggcccucuuaagggu

SEQ ID NO: 4227 - RNA, 20 nt, Artificial Sequence
  spacer sequence ATCN PAM
cacaccugcagcccccugcc

SEQ ID NO: 4228 - RNA, 20 nt, Artificial Sequence
  spacer sequence ATCN PAM
gggggagugggcucaguuuc

SEQ ID NO: 4229 - RNA, 20 nt, Artificial Sequence
  spacer sequence ATCN PAM
uaagucccgcuugauguaaa

SEQ ID NO: 4230 - RNA, 20 nt, Artificial Sequence
  spacer sequence ATCN PAM
agcgggacuuaggaucuggg

SEQ ID NO: 4231 - RNA, 20 nt, Artificial Sequence
  spacer sequence ATCN PAM
gacgcugacagaggggcagg

SEQ ID NO: 4232 - RNA, 20 nt, Artificial Sequence
  spacer sequence ATCN PAM
gugucagagguggaccggcc

SEQ ID NO: 4233 - RNA, 20 nt, Artificial Sequence
  spacer sequence ATCN PAM
auuuuccuugggccggucca

SEQ ID NO: 4234 - RNA, 20 nt, Artificial Sequence
  spacer sequence ATCN PAM
ggaaucgcugacuccaggag

SEQ ID NO: 4235 - RNA, 20 nt, Artificial Sequence
  spacer sequence ATCN PAM
cugacuccaggagucucuau

SEQ ID NO: 4236 - RNA, 20 nt, Artificial Sequence
  spacer sequence ATCN PAM
cagccccuucgccugacucu

SEQ ID NO: 4237 - RNA, 20 nt, Artificial Sequence
  spacer sequence ATCN PAM
cucagagggaccgcgggagc

SEQ ID NO: 4238 - RNA, 20 nt, Artificial Sequence
  spacer sequence ATCN PAM
ccccacucuacagaagugga

SEQ ID NO: 4239 - RNA, 20 nt, Artificial Sequence
  spacer sequence ATCN PAM
ucggagaacagugaggggaa

SEQ ID NO: 4240 - RNA, 20 nt, Artificial Sequence
  spacer sequence ATCN PAM
uugccugggcugggccaggc

SEQ ID NO: 4241 - RNA, 20 nt, Artificial Sequence
  spacer sequence ATCN PAM
uccagggaccgaguuugggc

SEQ ID NO: 4242 - RNA, 20 nt, Artificial Sequence
  spacer sequence ATCN PAM
ucuaauccuccagggaccga

SEQ ID NO: 4243 - RNA, 20 nt, Artificial Sequence
  spacer sequence ATCN PAM
uccucuaauccuccagggac

SEQ ID NO: 4244 - RNA, 20 nt, Artificial Sequence
  spacer sequence ATCN PAM
uuaaguccccagcugucagc

SEQ ID NO: 4245 - RNA, 20 nt, Artificial Sequence
  spacer sequence ATCN PAM
gaugcgaggacggcugcggg

SEQ ID NO: 4246 - RNA, 20 nt, Artificial Sequence
  spacer sequence ATCN PAM
gauuggcugccaggacuguc

SEQ ID NO: 4247 - RNA, 20 nt, Artificial Sequence
  spacer sequence ATCN PAM
agugacuacuguuugccucg

SEQ ID NO: 4248 - RNA, 20 nt, Artificial Sequence
  spacer sequence ATCN PAM
gagcuuccaggaacccugcg

SEQ ID NO: 4249 - RNA, 20 nt, Artificial Sequence
  spacer sequence ATCN PAM
cacagcgcaggguuccugga

SEQ ID NO: 4250 - RNA, 20 nt, Artificial Sequence
  spacer sequence ATCN PAM
gcuguguccagaaggccaug

SEQ ID NO: 4251 - RNA, 20 nt, Artificial Sequence
  spacer sequence ATCN PAM
ccggagacagccgguaacgc

SEQ ID NO: 4252 - RNA, 20 nt, Artificial Sequence
  spacer sequence ATCN PAM
ugguggcuguucgccacucc

SEQ ID NO: 4253 - RNA, 20 nt, Artificial Sequence
  spacer sequence ATCN PAM
gccuuccccuacacacacaa

SEQ ID NO: 4254 - RNA, 20 nt, Artificial Sequence
  spacer sequence ATCN PAM
cccgugcaugucagggagcc

SEQ ID NO: 4255 - RNA, 20 nt, Artificial Sequence
  spacer sequence ATCN PAM
cuggaggcaugcaagcggug

SEQ ID NO: 4256 - RNA, 20 nt, Artificial Sequence
  spacer sequence ATCN PAM
ggucgcccggcaccgcuugc

SEQ ID NO: 4257 - RNA, 20 nt, Artificial Sequence
  spacer sequence ATCN PAM
gcgggcaccgugcccuggcu

SEQ ID NO: 4258 - RNA, 20 nt, Artificial Sequence
  spacer sequence ATCN PAM
guaaugugaacaacaccugc

SEQ ID NO: 4259 - RNA, 20 nt, Artificial Sequence
  spacer sequence ATCN PAM
gcuagcagccgggagacccu

SEQ ID NO: 4260 - RNA, 20 nt, Artificial Sequence
  spacer sequence ATCN PAM
gcuucccuaggccagccagc

SEQ ID NO: 4261 - RNA, 20 nt, Artificial Sequence
  spacer sequence ATCN PAM
ccacgcugagggcugcacgc

SEQ ID NO: 4262 - RNA, 20 nt, Artificial Sequence
  spacer sequence ATCN PAM
agcaugggugguuccagugg

SEQ ID NO: 4263 - RNA, 20 nt, Artificial Sequence
  spacer sequence ATCN PAM
ccagugcagugucccaggaa

SEQ ID NO: 4264 - RNA, 20 nt, Artificial Sequence
  spacer sequence ATCN PAM
aggcugucccuggucucugc

SEQ ID NO: 4265 - RNA, 20 nt, Artificial Sequence
  spacer sequence ATCN PAM
ccgcagagaccagggacagc

SEQ ID NO: 4266 - RNA, 20 nt, Artificial Sequence
  spacer sequence ATCN PAM
cacagacgagucuuccucac

SEQ ID NO: 4267 - RNA, 20 nt, Artificial Sequence
  spacer sequence ATCN PAM
ccaaugagucccuuugccuc

SEQ ID NO: 4268 - RNA, 20 nt, Artificial Sequence
  spacer sequence ATCN PAM
uagcccccacuuuacaaaua

SEQ ID NO: 4269 - RNA, 20 nt, Artificial Sequence
  spacer sequence ATCN PAM
uugucccccuuguggucuuu

SEQ ID NO: 4270 - RNA, 20 nt, Artificial Sequence
  spacer sequence ATCN PAM
cugggguuggcacugggcca

SEQ ID NO: 4271 - RNA, 20 nt, Artificial Sequence
  spacer sequence ATCN PAM
ucaacccccauggaggcaac

SEQ ID NO: 4272 - RNA, 20 nt, Artificial Sequence
  spacer sequence ATCN PAM
uccugaaaacccacccaagg

SEQ ID NO: 4273 - RNA, 20 nt, Artificial Sequence
  spacer sequence ATCN PAM
caccuccaagcccuaaccag

SEQ ID NO: 4274 - RNA, 20 nt, Artificial Sequence
  spacer sequence ATCN PAM
uugccagcuccgucugguaa

SEQ ID NO: 4275 - RNA, 20 nt, Artificial Sequence
  spacer sequence ATCN PAM
ggucacuagccucguaccag

SEQ ID NO: 4276 - RNA, 20 nt, Artificial Sequence
  spacer sequence ATCN PAM
gcccugccagacagcagccu

SEQ ID NO: 4277 - RNA, 20 nt, Artificial Sequence
  spacer sequence ATCN PAM
caggccccgccugcucggag

SEQ ID NO: 4278 - RNA, 20 nt, Artificial Sequence
  spacer sequence ATCN PAM
gcuccgagcaggcggggccu

SEQ ID NO: 4279 - RNA, 20 nt, Artificial Sequence
  spacer sequence ATCN PAM
gaggcuucaggcgucuccag

SEQ ID NO: 4280 - RNA, 20 nt, Artificial Sequence
  spacer sequence ATCN PAM
ucgggaagcuacucuuugca

SEQ ID NO: 4281 - RNA, 20 nt, Artificial Sequence
  spacer sequence ATCN PAM
ggugcaaagaguagcuuccc

SEQ ID NO: 4282 - RNA, 20 nt, Artificial Sequence
  spacer sequence ATCN PAM
ucaagacuuuacccaggcca

SEQ ID NO: 4283 - RNA, 20 nt, Artificial Sequence
  spacer sequence ATCN PAM
gccuaaagaggugggcacug

SEQ ID NO: 4284 - RNA, 20 nt, Artificial Sequence
  spacer sequence ATCN PAM
ccaaugcaguguaacuacuu

SEQ ID NO: 4285 - RNA, 20 nt, Artificial Sequence
  spacer sequence ATCN PAM
uggugcucaucuuucuggcc

SEQ ID NO: 4286 - RNA, 20 nt, Artificial Sequence
  spacer sequence ATCN PAM
uucuggccuuccagcagagg

SEQ ID NO: 4287 - RNA, 20 nt, Artificial Sequence
  spacer sequence ATCN PAM
cagcagcauuaauguggaag

SEQ ID NO: 4288 - RNA, 20 nt, Artificial Sequence
  spacer sequence ATCN PAM
ucuccuugggagucacugca

SEQ ID NO: 4289 - RNA, 20 nt, Artificial Sequence
  spacer sequence ATCN PAM
ccucagaccuccauauccuc

SEQ ID NO: 4290 - RNA, 20 nt, Artificial Sequence
  spacer sequence ATCN PAM
cacacggcaucaccucagac

SEQ ID NO: 4291 - RNA, 20 nt, Artificial Sequence
  spacer sequence ATCN PAM
aauucaguggugugccaagg

SEQ ID NO: 4292 - RNA, 20 nt, Artificial Sequence
  spacer sequence ATCN PAM
uauccugacucauauuagua

SEQ ID NO: 4293 - RNA, 20 nt, Artificial Sequence
  spacer sequence ATCN PAM
ugacucauauuaguagaguu

SEQ ID NO: 4294 - RNA, 20 nt, Artificial Sequence
  spacer sequence ATCN PAM
ucucugccuuagaccuugac

SEQ ID NO: 4295 - RNA, 20 nt, Artificial Sequence
  spacer sequence ATCN PAM
ccauucccaucuucucugcc

SEQ ID NO: 4296 - RNA, 20 nt, Artificial Sequence
  spacer sequence ATCN PAM
accagcugaagggacaauag

SEQ ID NO: 4297 - RNA, 20 nt, Artificial Sequence
  spacer sequence ATCN PAM
caccgcucauguacccagcc

SEQ ID NO: 4298 - RNA, 20 nt, Artificial Sequence
  spacer sequence ATCN PAM
auggaagcauggccaccuuu

SEQ ID NO: 4299 - RNA, 20 nt, Artificial Sequence
  spacer sequence ATCN PAM
gagaagagcucaagcacaaa

SEQ ID NO: 4300 - RNA, 20 nt, Artificial Sequence
  spacer sequence ATCN PAM
gguggggcaccacgaggcug

SEQ ID NO: 4301 - RNA, 20 nt, Artificial Sequence
  spacer sequence ATCN PAM
gucucccacccuugagcaga

SEQ ID NO: 4302 - RNA, 20 nt, Artificial Sequence
  spacer sequence ATCN PAM
ggcucaccuccugcagcuuc

SEQ ID NO: 4303 - RNA, 20 nt, Artificial Sequence
  spacer sequence ATCN PAM
ugaaacaggucuuccuuauc

SEQ ID NO: 4304 - RNA, 20 nt, Artificial Sequence
  spacer sequence ATCN PAM
ucccccacuucugcuugggc

SEQ ID NO: 4305 - RNA, 20 nt, Artificial Sequence
  spacer sequence ATCN PAM
gccauggccugguuccgcac

SEQ ID NO: 4306 - RNA, 20 nt, Artificial Sequence
  spacer sequence ATCN PAM
guagccauggccccaccuga

SEQ ID NO: 4307 - RNA, 20 nt, Artificial Sequence
  spacer sequence ATCN PAM
aagaauuagcuuuuuauggc

SEQ ID NO: 4308 - RNA, 20 nt, Artificial Sequence
  spacer sequence ATCN PAM
caagaggccucuucuguuuu

SEQ ID NO: 4309 - RNA, 20 nt, Artificial Sequence
  spacer sequence ATCN PAM
aauuuguguuccuuucccuu

SEQ ID NO: 4310 - RNA, 20 nt, Artificial Sequence
  spacer sequence ATCN PAM
agagugacauggauggagaa

SEQ ID NO: 4311 - RNA, 20 nt, Artificial Sequence
  spacer sequence ATCN PAM
augucacucuggauucuuaa

SEQ ID NO: 4312 - RNA, 20 nt, Artificial Sequence
  spacer sequence ATCN PAM
acaggagacaggcaguucca

SEQ ID NO: 4313 - RNA, 20 nt, Artificial Sequence
  spacer sequence ATCN PAM
gaucuugugaaacccacgua

SEQ ID NO: 4314 - RNA, 20 nt, Artificial Sequence
  spacer sequence ATCN PAM
gauggucuaaaaacuggagu

SEQ ID NO: 4315 - RNA, 20 nt, Artificial Sequence
  spacer sequence ATCN PAM
ugugaaacccacguacuauc

SEQ ID NO: 4316 - RNA, 20 nt, Artificial Sequence
  spacer sequence ATCN PAM
ugagaacagcccaggaaaga

SEQ ID NO: 4317 - RNA, 20 nt, Artificial Sequence
  spacer sequence ATCN PAM
uggaggugcgucuuuccugg

SEQ ID NO: 4318 - RNA, 20 nt, Artificial Sequence
  spacer sequence ATCN PAM
uccaccagcucccucccaca

SEQ ID NO: 4319 - RNA, 20 nt, Artificial Sequence
  spacer sequence ATCN PAM
uguagcucccauaauuccca

SEQ ID NO: 4320 - RNA, 20 nt, Artificial Sequence
  spacer sequence ATCN PAM
acaccucucuccuuccguuu

SEQ ID NO: 4321 - RNA, 20 nt, Artificial Sequence
  spacer sequence ATCN PAM
aacuaccuaacuuuucuuuc

SEQ ID NO: 4322 - RNA, 20 nt, Artificial Sequence
  spacer sequence ATCN PAM
cagcucacugcagccuccgc

SEQ ID NO: 4323 - RNA, 20 nt, Artificial Sequence
  spacer sequence ATCN PAM
uuuaaacccaggaggcggag

SEQ ID NO: 4324 - RNA, 20 nt, Artificial Sequence
  spacer sequence ATCN PAM
cagcuacucgggaggccaag

SEQ ID NO: 4325 - RNA, 20 nt, Artificial Sequence
  spacer sequence ATCN PAM
cuaccaaaaauacaaaaaaa

SEQ ID NO: 4326 - RNA, 20 nt, Artificial Sequence
  spacer sequence ATCN PAM
gaggucagaaguucaagacc

SEQ ID NO: 4327 - RNA, 20 nt, Artificial Sequence
  spacer sequence ATCN PAM
ucugcuugccucggccuucc

SEQ ID NO: 4328 - RNA, 20 nt, Artificial Sequence
  spacer sequence ATCN PAM
gcuugccucggccuuccgaa

SEQ ID NO: 4329 - RNA, 20 nt, Artificial Sequence
  spacer sequence ATCN PAM
cagcacuucggaaggccgag

SEQ ID NO: 4330 - RNA, 20 nt, Artificial Sequence
  spacer sequence ATCN PAM
ucccaccucagccucccgag

SEQ ID NO: 4331 - RNA, 20 nt, Artificial Sequence
  spacer sequence ATCN PAM
aggaucgccugagcccagcg

SEQ ID NO: 4332 - RNA, 20 nt, Artificial Sequence
  spacer sequence ATCN PAM
uagaucuucccaccucagcc

SEQ ID NO: 4333 - RNA, 20 nt, Artificial Sequence
  spacer sequence ATCN PAM
ccugagcccagcgguugagg

SEQ ID NO: 4334 - RNA, 20 nt, Artificial Sequence
  spacer sequence ATCN PAM
cagcucacugcagccucaac

SEQ ID NO: 4335 - RNA, 20 nt, Artificial Sequence
  spacer sequence ATCN PAM
ccaggcaaccccagguuucc

SEQ ID NO: 4336 - RNA, 20 nt, Artificial Sequence
  spacer sequence ATCN PAM
ggcagacagcacagccagga

SEQ ID NO: 4337 - RNA, 20 nt, Artificial Sequence
  spacer sequence ATCN PAM
uggcugugcugucugccuga

SEQ ID NO: 4338 - RNA, 20 nt, Artificial Sequence
  spacer sequence ATCN PAM
cccagaccuugcccugaacu

SEQ ID NO: 4339 - RNA, 20 nt, Artificial Sequence
  spacer sequence ATCN PAM
ucaccacguggccacccugc

SEQ ID NO: 4340 - RNA, 20 nt, Artificial Sequence
  spacer sequence ATCN PAM
cacagccaggucugcagcuc

SEQ ID NO: 4341 - RNA, 20 nt, Artificial Sequence
  spacer sequence ATCN PAM
caggcagguuacucaaccuc

SEQ ID NO: 4342 - RNA, 20 nt, Artificial Sequence
  spacer sequence ATCN PAM
uauuuagggaacacuuaugc

SEQ ID NO: 4343 - RNA, 20 nt, Artificial Sequence
  spacer sequence ATCN PAM
cauagccacucccuucccuc

SEQ ID NO: 4344 - RNA, 20 nt, Artificial Sequence
  spacer sequence ATCN PAM
cugcucaguccucaggcuga

SEQ ID NO: 4345 - RNA, 20 nt, Artificial Sequence
  spacer sequence ATCN PAM
guccugccaggcacuggccc

SEQ ID NO: 4346 - RNA, 20 nt, Artificial Sequence
  spacer sequence ATCN PAM
ccaauuccucuccucccuca

SEQ ID NO: 4347 - RNA, 20 nt, Artificial Sequence
  spacer sequence ATCN PAM
gccccacaucuccaauuccu

SEQ ID NO: 4348 - RNA, 20 nt, Artificial Sequence
  spacer sequence ATCN PAM
acuccugaggccuguccguc

SEQ ID NO: 4349 - RNA, 20 nt, Artificial Sequence
  spacer sequence ATCN PAM
ggaguaaagaccaagcagug

SEQ ID NO: 4350 - RNA, 20 nt, Artificial Sequence
  spacer sequence ATCN PAM
gggggcagggguggacugag

SEQ ID NO: 4351 - RNA, 20 nt, Artificial Sequence
  spacer sequence ATCN PAM
aggccgccccuggcuugggc

SEQ ID NO: 4352 - RNA, 20 nt, Artificial Sequence
  spacer sequence ATCN PAM
uccaggccgccccuggcuug

SEQ ID NO: 4353 - RNA, 20 nt, Artificial Sequence
  spacer sequence ATCN PAM
uggccugacuuccgggccuc

SEQ ID NO: 4354 - RNA, 20 nt, Artificial Sequence
  spacer sequence ATCN PAM
acacacagggcaggugaaaa

SEQ ID NO: 4355 - RNA, 20 nt, Artificial Sequence
  spacer sequence ATCN PAM
uacauuuucaccugcccugu

SEQ ID NO: 4356 - RNA, 20 nt, Artificial Sequence
  spacer sequence ATCN PAM
aagcgcucugggaggcugag

SEQ ID NO: 4357 - RNA, 20 nt, Artificial Sequence
  spacer sequence ATCN PAM
gccugccucagccucccaga

SEQ ID NO: 4358 - RNA, 20 nt, Artificial Sequence
  spacer sequence ATCN PAM
acugaggucagggguucgag

SEQ ID NO: 4359 - RNA, 20 nt, Artificial Sequence
  spacer sequence ATCN PAM
cagcuacuugggaggccgag

SEQ ID NO: 4360 - RNA, 20 nt, Artificial Sequence
  spacer sequence ATCN PAM
cuugaaccugggagguggag

SEQ ID NO: 4361 - RNA, 20 nt, Artificial Sequence
  spacer sequence ATCN PAM
cggcucacugcaaccuccac

SEQ ID NO: 4362 - RNA, 20 nt, Artificial Sequence
  spacer sequence ATCN PAM
ugccacugcacuccagcuug

SEQ ID NO: 4363 - RNA, 20 nt, Artificial Sequence
  spacer sequence ATCN PAM
caaaaaaaaaaaaacaacaa

SEQ ID NO: 4364 - RNA, 20 nt, Artificial Sequence
  spacer sequence ATCN PAM
accagacuguuuguuguuuu

SEQ ID NO: 4365 - RNA, 20 nt, Artificial Sequence
  spacer sequence ATCN PAM
ucaaacuguuacacaaagag

SEQ ID NO: 4366 - RNA, 20 nt, Artificial Sequence
  spacer sequence ATCN PAM
cagcuauucaggaggcugag

SEQ ID NO: 4367 - RNA, 20 nt, Artificial Sequence
  spacer sequence ATCN PAM
caggucacugcaaccuccgc

SEQ ID NO: 4368 - RNA, 20 nt, Artificial Sequence
  spacer sequence ATCN PAM
gggguuuuuuuuuuugagac

SEQ ID NO: 4369 - RNA, 20 nt, Artificial Sequence
  spacer sequence ATCN PAM
acagaugaauaaauaaacac

SEQ ID NO: 4370 - RNA, 20 nt, Artificial Sequence
  spacer sequence ATCN PAM
guggauggacaucugggguu

SEQ ID NO: 4371 - RNA, 20 nt, Artificial Sequence
  spacer sequence ATCN PAM
cauuguguuuauuuauucau

SEQ ID NO: 4372 - RNA, 20 nt, Artificial Sequence
  spacer sequence ATCN PAM
cuccacacacuggaauauuu

SEQ ID NO: 4373 - RNA, 20 nt, Artificial Sequence
  spacer sequence ATCN PAM
uuccuuuucauggcucagaa

SEQ ID NO: 4374 - RNA, 20 nt, Artificial Sequence
  spacer sequence ATCN PAM
acauuguggccugugucaga

SEQ ID NO: 4375 - RNA, 20 nt, Artificial Sequence
  spacer sequence ATCN PAM
cacacugcguguucuuuugu

SEQ ID NO: 4376 - RNA, 20 nt, Artificial Sequence
  spacer sequence ATCN PAM
cauuuccaugaaauguccag

SEQ ID NO: 4377 - RNA, 20 nt, Artificial Sequence
  spacer sequence ATCN PAM
acagagacaggaggggaugu

SEQ ID NO: 4378 - RNA, 20 nt, Artificial Sequence
  spacer sequence ATCN PAM
ccuccugucucuguggauug

SEQ ID NO: 4379 - RNA, 20 nt, Artificial Sequence
  spacer sequence ATCN PAM
ccuccccuaggaccuggcac

SEQ ID NO: 4380 - RNA, 20 nt, Artificial Sequence
  spacer sequence ATCN PAM
gccuucacucuccaucuccu

SEQ ID NO: 4381 - RNA, 20 nt, Artificial Sequence
  spacer sequence ATCN PAM
cagcacuuugggaggccuag

SEQ ID NO: 4382 - RNA, 20 nt, Artificial Sequence
  spacer sequence ATCN PAM
gccugccuaggccucccaaa

SEQ ID NO: 4383 - RNA, 20 nt, Artificial Sequence
  spacer sequence ATCN PAM
ccugaggucgggaguuugag

SEQ ID NO: 4384 - RNA, 20 nt, Artificial Sequence
  spacer sequence ATCN PAM
cagcuacuugggaggcugag

SEQ ID NO: 4385 - RNA, 20 nt, Artificial Sequence
  spacer sequence ATCN PAM
cuugaaccugggagguggca

SEQ ID NO: 4386 - RNA, 20 nt, Artificial Sequence
  spacer sequence ATCN PAM
cagcucacugcacugccacc

SEQ ID NO: 4387 - RNA, 20 nt, Artificial Sequence
  spacer sequence ATCN PAM
ugccacugcacuccagccug

SEQ ID NO: 4388 - RNA, 20 nt, Artificial Sequence
  spacer sequence ATCN PAM
aguuccagaauuuuuuuuuu

SEQ ID NO: 4389 - RNA, 20 nt, Artificial Sequence
  spacer sequence ATCN PAM
aucuaguuccagaauuuuuu

SEQ ID NO: 4390 - RNA, 20 nt, Artificial Sequence
  spacer sequence ATCN PAM
ccucuaucuaucuaguucca

SEQ ID NO: 4391 - RNA, 20 nt, Artificial Sequence
  spacer sequence ATCN PAM
ccccaggcuggagugcagug

SEQ ID NO: 4392 - RNA, 20 nt, Artificial Sequence
  spacer sequence ATCN PAM
cagcuacucaggaggcugag

SEQ ID NO: 4393 - RNA, 20 nt, Artificial Sequence
  spacer sequence ATCN PAM
ccacuaaaaauacaaaaauu

SEQ ID NO: 4394 - RNA, 20 nt, Artificial Sequence
  spacer sequence ATCN PAM
cgaggucaggaguucaagac

SEQ ID NO: 4395 - RNA, 20 nt, Artificial Sequence
  spacer sequence ATCN PAM
acccgccuuggccucccaaa

SEQ ID NO: 4396 - RNA, 20 nt, Artificial Sequence
  spacer sequence ATCN PAM
cagcacuuugggaggccaag

SEQ ID NO: 4397 - RNA, 20 nt, Artificial Sequence
  spacer sequence ATCN PAM
ccugagguuaggaguuugag

SEQ ID NO: 4398 - RNA, 20 nt, Artificial Sequence
  spacer sequence ATCN PAM
gccugcuucggccucccaaa

SEQ ID NO: 4399 - RNA, 20 nt, Artificial Sequence
  spacer sequence ATCN PAM
cagcacuuugggaggccgaa

SEQ ID NO: 4400 - RNA, 20 nt, Artificial Sequence
  spacer sequence ATCN PAM
guaaucccagcacuuuggga

SEQ ID NO: 4401 - RNA, 20 nt, Artificial Sequence
  spacer sequence ATCN PAM
caccaccgcacuccagccug

SEQ ID NO: 4402 - RNA, 20 nt, Artificial Sequence
  spacer sequence ATCN PAM
cggcucacugcaagcuccgc

SEQ ID NO: 4403 - RNA, 20 nt, Artificial Sequence
  spacer sequence ATCN PAM
uggcuaacacggugaaaccc

SEQ ID NO: 4404 - RNA, 20 nt, Artificial Sequence
  spacer sequence ATCN PAM
agaccauccuggcuaacacg

SEQ ID NO: 4405 - RNA, 20 nt, Artificial Sequence
  spacer sequence ATCN PAM
ccugaccucgugaucugccc

SEQ ID NO: 4406 - RNA, 20 nt, Artificial Sequence
  spacer sequence ATCN PAM
cgaggucaggagaucgagac

SEQ ID NO: 4407 - RNA, 20 nt, Artificial Sequence
  spacer sequence ATCN PAM
gcccgucucagccucccaaa

SEQ ID NO: 4408 - RNA, 20 nt, Artificial Sequence
  spacer sequence ATCN PAM
cagcacuuugggaggcugag

SEQ ID NO: 4409 - RNA, 20 nt, Artificial Sequence
  spacer sequence ATCN PAM
uuuuggccaggcaugguggc

SEQ ID NO: 4410 - RNA, 20 nt, Artificial Sequence
  spacer sequence ATCN PAM
uaaaaaagaaaugaagccac

SEQ ID NO: 4411 - RNA, 20 nt, Artificial Sequence
  spacer sequence ATCN PAM
uucuagagcagccccuggcu

SEQ ID NO: 4412 - RNA, 20 nt, Artificial Sequence
  spacer sequence ATCN PAM
cucccagagccuggggcccc

SEQ ID NO: 4413 - RNA, 20 nt, Artificial Sequence
  spacer sequence ATCN PAM
gagaacggggccccaggcuc

SEQ ID NO: 4414 - RNA, 20 nt, Artificial Sequence
  spacer sequence ATCN PAM
gaggucgcgaccccguguuu

SEQ ID NO: 4415 - RNA, 20 nt, Artificial Sequence
  spacer sequence ATCN PAM
caauuggcaggaagucagga

SEQ ID NO: 4416 - RNA, 20 nt, Artificial Sequence
  spacer sequence ATCN PAM
cauuccugacuuccugccaa

SEQ ID NO: 4417 - RNA, 20 nt, Artificial Sequence
  spacer sequence ATCN PAM
agucucuccgcggagcugug

SEQ ID NO: 4418 - RNA, 20 nt, Artificial Sequence
  spacer sequence ATCN PAM
uggucuugcauaagucuguu

SEQ ID NO: 4419 - RNA, 20 nt, Artificial Sequence
  spacer sequence ATCN PAM
cugagcagggcuggccgaau

SEQ ID NO: 4420 - RNA, 20 nt, Artificial Sequence
  spacer sequence ATCN PAM
uugcuucacugccucugcca

SEQ ID NO: 4421 - RNA, 20 nt, Artificial Sequence
  spacer sequence ATCN PAM
augacgccucugugcugcau

SEQ ID NO: 4422 - RNA, 20 nt, Artificial Sequence
  spacer sequence ATCN PAM
ggcaggccugagucgggggc

SEQ ID NO: 4423 - RNA, 20 nt, Artificial Sequence
  spacer sequence ATCN PAM
caagcaccuaggcgggguag

SEQ ID NO: 4424 - RNA, 20 nt, Artificial Sequence
  spacer sequence ATCN PAM
cagcacuuugggaggccgag

SEQ ID NO: 4425 - RNA, 20 nt, Artificial Sequence
  spacer sequence ATCN PAM
gccugccucggccucccaaa

SEQ ID NO: 4426 - RNA, 20 nt, Artificial Sequence
  spacer sequence ATCN PAM
ccugaggucgggaguucgag

SEQ ID NO: 4427 - RNA, 20 nt, Artificial Sequence
  spacer sequence ATCN PAM
acuaaaaacacaaaaauuag

SEQ ID NO: 4428 - RNA, 20 nt, Artificial Sequence
  spacer sequence ATCN PAM
cagcuacucaggagacugag

SEQ ID NO: 4429 - RNA, 20 nt, Artificial Sequence
  spacer sequence ATCN PAM
cuugaacccggaaagcggag

SEQ ID NO: 4430 - RNA, 20 nt, Artificial Sequence
  spacer sequence ATCN PAM
cagcucacugcaaccuccgc

SEQ ID NO: 4431 - RNA, 20 nt, Artificial Sequence
  spacer sequence ATCN PAM
aaaccccugccuguacaggg

SEQ ID NO: 4432 - RNA, 20 nt, Artificial Sequence
  spacer sequence ATCN PAM
cggugacucaguucccaagu

SEQ ID NO: 4433 - RNA, 20 nt, Artificial Sequence
  spacer sequence ATCN PAM
cauacuugggaacugaguca

SEQ ID NO: 4434 - RNA, 20 nt, Artificial Sequence
  spacer sequence ATCN PAM
uggcuuccaacucuguuuuu

SEQ ID NO: 4435 - RNA, 20 nt, Artificial Sequence
  spacer sequence ATCN PAM
agacaguuaccacuuaacug

SEQ ID NO: 4436 - RNA, 20 nt, Artificial Sequence
  spacer sequence ATCN PAM
ugggucugguugcugagccg

SEQ ID NO: 4437 - RNA, 20 nt, Artificial Sequence
  spacer sequence ATCN PAM
uaugggggugucccuacccu

SEQ ID NO: 4438 - RNA, 20 nt, Artificial Sequence
  spacer sequence ATCN PAM
cagcuccaucuuaugggggu

SEQ ID NO: 4439 - RNA, 20 nt, Artificial Sequence
  spacer sequence ATCN PAM
cuuggccggaugcgguggcu

SEQ ID NO: 4440 - RNA, 20 nt, Artificial Sequence
  spacer sequence ATCN PAM
ggccaagggauuugccuuuu

SEQ ID NO: 4441 - RNA, 20 nt, Artificial Sequence
  spacer sequence ATCN PAM
cagcacucugggaggccuag

SEQ ID NO: 4442 - RNA, 20 nt, Artificial Sequence
  spacer sequence ATCN PAM
gcccgccuaggccucccaga

SEQ ID NO: 4443 - RNA, 20 nt, Artificial Sequence
  spacer sequence ATCN PAM
ccugaggucaggaguucgag

SEQ ID NO: 4444 - RNA, 20 nt, Artificial Sequence
  spacer sequence ATCN PAM
cgaacuccugaccucaggug

SEQ ID NO: 4445 - RNA, 20 nt, Artificial Sequence
  spacer sequence ATCN PAM
gccuggccaacauggugaaa

SEQ ID NO: 4446 - RNA, 20 nt, Artificial Sequence
  spacer sequence ATCN PAM
cagcuacucaggaggcugag

SEQ ID NO: 4447 - RNA, 20 nt, Artificial Sequence
  spacer sequence ATCN PAM
cuugaacccgggggcugggu

SEQ ID NO: 4448 - RNA, 20 nt, Artificial Sequence
  spacer sequence ATCN PAM
cagcucacugcaaccuccac

SEQ ID NO: 4449 - RNA, 20 nt, Artificial Sequence
  spacer sequence ATCN PAM
cggccgagccuuuggcucac

SEQ ID NO: 4450 - RNA, 20 nt, Artificial Sequence
  spacer sequence ATCN PAM
caugcgugagccaaaggcuc

SEQ ID NO: 4451 - RNA, 20 nt, Artificial Sequence
  spacer sequence ATCN PAM
cagcacuuuugggaagcuga

SEQ ID NO: 4452 - RNA, 20 nt, Artificial Sequence
  spacer sequence ATCN PAM
uccagccucagcuucccaaa

SEQ ID NO: 4453 - RNA, 20 nt, Artificial Sequence
  spacer sequence ATCN PAM
cuugaggucagaaguuugag

SEQ ID NO: 4454 - RNA, 20 nt, Artificial Sequence
  spacer sequence ATCN PAM
accauuccuggcuaauuauu

SEQ ID NO: 4455 - RNA, 20 nt, Artificial Sequence
  spacer sequence ATCN PAM
gggcacacugcagccucgac

SEQ ID NO: 4456 - RNA, 20 nt, Artificial Sequence
  spacer sequence ATCN PAM
ugccacugcacguuagccug

SEQ ID NO: 4457 - RNA, 20 nt, Artificial Sequence
  spacer sequence ATCN PAM
ggcugguugacagcagcgcg

SEQ ID NO: 4458 - RNA, 20 nt, Artificial Sequence
  spacer sequence ATCN PAM
cggcggggcugggagccagc

SEQ ID NO: 4459 - RNA, 20 nt, Artificial Sequence
  spacer sequence ATCN PAM
cgcgcccgccccaacgguca

SEQ ID NO: 4460 - RNA, 20 nt, Artificial Sequence
  spacer sequence ATCN PAM
cugccuccgcucgccggcgu

SEQ ID NO: 4461 - RNA, 20 nt, Artificial Sequence
  spacer sequence ATCN PAM
cggaucacgcgcccccgggc

SEQ ID NO: 4462 - RNA, 20 nt, Artificial Sequence
  spacer sequence ATCN PAM
gggauuuccagcccuccgcg

SEQ ID NO: 4463 - RNA, 20 nt, Artificial Sequence
  spacer sequence ATCN PAM
cgcgcccccgggcgccgccc

SEQ ID NO: 4464 - RNA, 20 nt, Artificial Sequence
  spacer sequence ATCN PAM
ccggucgcaagcugcgggga

SEQ ID NO: 4465 - RNA, 20 nt, Artificial Sequence
  spacer sequence ATCN PAM
acgaaugucccaagucccag

SEQ ID NO: 4466 - RNA, 20 nt, Artificial Sequence
  spacer sequence ATCN PAM
ggagcgggucgguggcgggg

SEQ ID NO: 4467 - RNA, 20 nt, Artificial Sequence
  spacer sequence ATCN PAM
cuuccugccucagggucccg

SEQ ID NO: 4468 - RNA, 20 nt, Artificial Sequence
  spacer sequence ATCN PAM
acgggcacaugguuaaccug

SEQ ID NO: 4469 - RNA, 20 nt, Artificial Sequence
  spacer sequence ATCN PAM
gcggcgucagcgcagaagaa

SEQ ID NO: 4470 - RNA, 20 nt, Artificial Sequence
  spacer sequence ATCN PAM
ucgcaggggcuucgugugca

SEQ ID NO: 4471 - RNA, 20 nt, Artificial Sequence
  spacer sequence ATCN PAM
ucaccaacguggccucccag

SEQ ID NO: 4472 - RNA, 20 nt, Artificial Sequence
  spacer sequence ATCN PAM
ggcgugcaggucgacgagcu

SEQ ID NO: 4473 - RNA, 20 nt, Artificial Sequence
  spacer sequence ATCN PAM
gcaaaccacacucagcguau

SEQ ID NO: 4474 - RNA, 20 nt, Artificial Sequence
  spacer sequence ATCN PAM
uggccuucccguguaaccag

SEQ ID NO: 4475 - RNA, 20 nt, Artificial Sequence
  spacer sequence ATCN PAM
cuucguuacucccuggcucc

SEQ ID NO: 4476 - RNA, 20 nt, Artificial Sequence
  spacer sequence ATCN PAM
aagaguucgccgcgggcuac

SEQ ID NO: 4477 - RNA, 20 nt, Artificial Sequence
  spacer sequence ATCN PAM
aauuugacguuguagcccgc

SEQ ID NO: 4478 - RNA, 20 nt, Artificial Sequence
  spacer sequence ATCN PAM
ugcugaacauaucgaauuug

SEQ ID NO: 4479 - RNA, 20 nt, Artificial Sequence
  spacer sequence ATCN PAM
gcgugaacggggacgacgcc

SEQ ID NO: 4480 - RNA, 20 nt, Artificial Sequence
  spacer sequence ATCN PAM
acuuccacagcgggugggcg

SEQ ID NO: 4481 - RNA, 20 nt, Artificial Sequence
  spacer sequence ATCN PAM
ucauccacuuccacagcggg

SEQ ID NO: 4482 - RNA, 20 nt, Artificial Sequence
  spacer sequence ATCN PAM
aacccaagggcaagggcauc

SEQ ID NO: 4483 - RNA, 20 nt, Artificial Sequence
  spacer sequence ATCN PAM
ugggaaagugcgugaccucu

SEQ ID NO: 4484 - RNA, 20 nt, Artificial Sequence
  spacer sequence ATCN PAM
cagcagcccccccaccccca

SEQ ID NO: 4485 - RNA, 20 nt, Artificial Sequence
  spacer sequence ATCN PAM
cguggccuccuggggguaag

SEQ ID NO: 4486 - RNA, 20 nt, Artificial Sequence
  spacer sequence ATCN PAM
uacccccaggaggccacgcg

SEQ ID NO: 4487 - RNA, 20 nt, Artificial Sequence
  spacer sequence ATCN PAM
cuggcugccuccacagcccu

SEQ ID NO: 4488 - RNA, 20 nt, Artificial Sequence
  spacer sequence ATCN PAM
uguccccaggaggccacaaa

SEQ ID NO: 4489 - RNA, 20 nt, Artificial Sequence
  spacer sequence ATCN PAM
uaccccaggaggccaugcag

SEQ ID NO: 4490 - RNA, 20 nt, Artificial Sequence
  spacer sequence ATCN PAM
aguggaacuucaccaaggua

SEQ ID NO: 4491 - RNA, 20 nt, Artificial Sequence
  spacer sequence ATCN PAM
gggccacggcuguggccagg

SEQ ID NO: 4492 - RNA, 20 nt, Artificial Sequence
  spacer sequence ATCN PAM
acaagaacggcugcguggug

SEQ ID NO: 4493 - RNA, 20 nt, Artificial Sequence
  spacer sequence ATCN PAM
ccugucggggaggaaagcug

SEQ ID NO: 4494 - RNA, 20 nt, Artificial Sequence
  spacer sequence ATCN PAM
agcgugcaccccgccggagg

SEQ ID NO: 4495 - RNA, 20 nt, Artificial Sequence
  spacer sequence ATCN PAM
agcaggcuaauuugucuguu

SEQ ID NO: 4496 - RNA, 20 nt, Artificial Sequence
  spacer sequence ATCN PAM
uucugcguaggggcuugggg

SEQ ID NO: 4497 - RNA, 20 nt, Artificial Sequence
  spacer sequence ATCN PAM
cacugcaccccagcacugca

SEQ ID NO: 4498 - RNA, 20 nt, Artificial Sequence
  spacer sequence ATCN PAM
gggcccguuggacacccagc

SEQ ID NO: 4499 - RNA, 20 nt, Artificial Sequence
  spacer sequence ATCN PAM
gugcagccccaccugcugug

SEQ ID NO: 4500 - RNA, 20 nt, Artificial Sequence
  spacer sequence ATCN PAM
ccuccaagacucggcacuac

SEQ ID NO: 4501 - RNA, 20 nt, Artificial Sequence
  spacer sequence ATCN PAM
ccagcaccagggccacgcug

SEQ ID NO: 4502 - RNA, 20 nt, Artificial Sequence
  spacer sequence ATCN PAM
ccagcccucacggagggacu

SEQ ID NO: 4503 - RNA, 20 nt, Artificial Sequence
  spacer sequence ATCN PAM
gccacccuggcaggcugcag

SEQ ID NO: 4504 - RNA, 20 nt, Artificial Sequence
  spacer sequence ATCN PAM
cagcugcccccacugggggu

SEQ ID NO: 4505 - RNA, 20 nt, Artificial Sequence
  spacer sequence ATCN PAM
acauggggccagcacaggca

SEQ ID NO: 4506 - RNA, 20 nt, Artificial Sequence
  spacer sequence ATCN PAM
ccccaggcucuccugguuac

SEQ ID NO: 4507 - RNA, 20 nt, Artificial Sequence
  spacer sequence ATCN PAM
gaacuugcuauaaauacaua

SEQ ID NO: 4508 - RNA, 20 nt, Artificial Sequence
  spacer sequence ATCN PAM
gugaaaccggguggucccaa

SEQ ID NO: 4509 - RNA, 20 nt, Artificial Sequence
  spacer sequence ATCN PAM
ugagccagacugagaacaaa

SEQ ID NO: 4510 - RNA, 20 nt, Artificial Sequence
  spacer sequence ATCN PAM
aggggucugggggaggaccc

SEQ ID NO: 4511 - RNA, 20 nt, Artificial Sequence
  spacer sequence ATCN PAM
acccccucccccaggcucuu

SEQ ID NO: 4512 - RNA, 20 nt, Artificial Sequence
  spacer sequence ATCN PAM
aagagccugggggagggggu

SEQ ID NO: 4513 - RNA, 20 nt, Artificial Sequence
  spacer sequence ATCN PAM
ggcccucccuagaccccugc

SEQ ID NO: 4514 - RNA, 20 nt, Artificial Sequence
  spacer sequence ATCN PAM
guuggucaccuggggucugg

SEQ ID NO: 4515 - RNA, 20 nt, Artificial Sequence
  spacer sequence ATCN PAM
uggccaagcgccuggagagu

SEQ ID NO: 4516 - RNA, 20 nt, Artificial Sequence
  spacer sequence ATCN PAM
cggagcuggccggggagcgc

SEQ ID NO: 4517 - RNA, 20 nt, Artificial Sequence
  spacer sequence ATCN PAM
agcaguucggugaguccggc

SEQ ID NO: 4518 - RNA, 20 nt, Artificial Sequence
  spacer sequence ATCN PAM
cggaggccuccagcucgggu

SEQ ID NO: 4519 - RNA, 20 nt, Artificial Sequence
  spacer sequence ATCN PAM
ucucggaggccuccagcucg

SEQ ID NO: 4520 - RNA, 20 nt, Artificial Sequence
  spacer sequence ATCN PAM
accacgugaaccucagggag

SEQ ID NO: 4521 - RNA, 20 nt, Artificial Sequence
  spacer sequence ATCN PAM
gcagccgagacagggacaaa

SEQ ID NO: 4522 - RNA, 20 nt, Artificial Sequence
  spacer sequence ATCN PAM
ccuggguccagcagucccgc

SEQ ID NO: 4523 - RNA, 20 nt, Artificial Sequence
  spacer sequence ATCN PAM
gccagccggcgccacgaagu

SEQ ID NO: 4524 - RNA, 20 nt, Artificial Sequence
  spacer sequence ATCN PAM
uugccugaacgcaccccuug

SEQ ID NO: 4525 - RNA, 20 nt, Artificial Sequence
  spacer sequence ATCN PAM
aagcagaggccugcgcaggc

SEQ ID NO: 4526 - RNA, 20 nt, Artificial Sequence
  spacer sequence ATCN PAM
cccagccuggccugcgcagg

SEQ ID NO: 4527 - RNA, 20 nt, Artificial Sequence
  spacer sequence ATCN PAM
ggggcuuagagggauggggc

SEQ ID NO: 4528 - RNA, 20 nt, Artificial Sequence
  spacer sequence ATCN PAM
cucuaagccccagauccccc

SEQ ID NO: 4529 - RNA, 20 nt, Artificial Sequence
  spacer sequence ATCN PAM
accagcugggcggcccccag

SEQ ID NO: 4530 - RNA, 20 nt, Artificial Sequence
  spacer sequence ATCN PAM
gcuggacaaagugcggcggc

SEQ ID NO: 4531 - RNA, 20 nt, Artificial Sequence
  spacer sequence ATCN PAM
ugcuucagccgcuccacccg

SEQ ID NO: 4532 - RNA, 20 nt, Artificial Sequence
  spacer sequence ATCN PAM
guaaagugggcaccauagca

SEQ ID NO: 4533 - RNA, 20 nt, Artificial Sequence
  spacer sequence ATCN PAM
ugacccagagguggcugcuc

SEQ ID NO: 4534 - RNA, 20 nt, Artificial Sequence
  spacer sequence ATCN PAM
ugacccacagguggcuggcc

SEQ ID NO: 4535 - RNA, 20 nt, Artificial Sequence
  spacer sequence ATCN PAM
acgaugacaacgucgucauc

SEQ ID NO: 4536 - RNA, 20 nt, Artificial Sequence
  spacer sequence ATCN PAM
uugaugcagucgggcucccc

SEQ ID NO: 4537 - RNA, 20 nt, Artificial Sequence
  spacer sequence ATCN PAM
accagggacucgggggagga

SEQ ID NO: 4538 - RNA, 20 nt, Artificial Sequence
  spacer sequence ATCN PAM
gugacgacagcagcacggag

SEQ ID NO: 4539 - RNA, 20 nt, Artificial Sequence
  spacer sequence ATCN PAM
gcaucagugacgacagcagc

SEQ ID NO: 4540 - RNA, 20 nt, Artificial Sequence
  spacer sequence ATCN PAM
gagaacccccugccucuggg

SEQ ID NO: 4541 - RNA, 20 nt, Artificial Sequence
  spacer sequence ATCN PAM
uaccuguugggcgugugacc

SEQ ID NO: 4542 - RNA, 20 nt, Artificial Sequence
  spacer sequence ATCN PAM
agcaaccccugcgcagcagc

SEQ ID NO: 4543 - RNA, 20 nt, Artificial Sequence
  spacer sequence ATCN PAM
gaccccgccgucaggagcuc

SEQ ID NO: 4544 - RNA, 20 nt, Artificial Sequence
  spacer sequence ATCN PAM
caagccaaccccgaaagugg

SEQ ID NO: 4545 - RNA, 20 nt, Artificial Sequence
  spacer sequence ATCN PAM
cagccacgacgucccccugg

SEQ ID NO: 4546 - RNA, 20 nt, Artificial Sequence
  spacer sequence ATCN PAM
gccucacauuccuggcuugg

SEQ ID NO: 4547 - RNA, 20 nt, Artificial Sequence
  spacer sequence ATCN PAM
ggggaaccagaccccagauc

SEQ ID NO: 4548 - RNA, 20 nt, Artificial Sequence
  spacer sequence ATCN PAM
ggggucugguuccccagaug

SEQ ID NO: 4549 - RNA, 20 nt, Artificial Sequence
  spacer sequence ATCN PAM
cagaacccagaccucagauc

SEQ ID NO: 4550 - RNA, 20 nt, Artificial Sequence
  spacer sequence ATCN PAM
gaggucuggguucugggauc

SEQ ID NO: 4551 - RNA, 20 nt, Artificial Sequence
  spacer sequence ATCN PAM
cagaucccagaucucagacc

SEQ ID NO: 4552 - RNA, 20 nt, Artificial Sequence
  spacer sequence ATCN PAM
gggaucugaggucuggguuc

SEQ ID NO: 4553 - RNA, 20 nt, Artificial Sequence
  spacer sequence ATCN PAM
cagaucucagaccccagauc

SEQ ID NO: 4554 - RNA, 20 nt, Artificial Sequence
  spacer sequence ATCN PAM
gggaucugggaucugagguc

SEQ ID NO: 4555 - RNA, 20 nt, Artificial Sequence
  spacer sequence ATCN PAM
cagaccccagaucccagacu

SEQ ID NO: 4556 - RNA, 20 nt, Artificial Sequence
  spacer sequence ATCN PAM
ggggucugagaucugggauc

SEQ ID NO: 4557 - RNA, 20 nt, Artificial Sequence
  spacer sequence ATCN PAM
cagacuucagaucccuagau

SEQ ID NO: 4558 - RNA, 20 nt, Artificial Sequence
  spacer sequence ATCN PAM
gaagucugggaucugggguc

SEQ ID NO: 4559 - RNA, 20 nt, Artificial Sequence
  spacer sequence ATCN PAM
cuagaucccagaccccagac

SEQ ID NO: 4560 - RNA, 20 nt, Artificial Sequence
  spacer sequence ATCN PAM
agggaucugaagucugggau

SEQ ID NO: 4561 - RNA, 20 nt, Artificial Sequence
  spacer sequence ATCN PAM
cagaccccagaccccaguac

SEQ ID NO: 4562 - RNA, 20 nt, Artificial Sequence
  spacer sequence ATCN PAM
ggggucuggguacugggguc

SEQ ID NO: 4563 - RNA, 20 nt, Artificial Sequence
  spacer sequence ATCN PAM
cagaccccagaccccagauc

SEQ ID NO: 4564 - RNA, 20 nt, Artificial Sequence
  spacer sequence ATCN PAM
ggggucuggggucugagauc

SEQ ID NO: 4565 - RNA, 20 nt, Artificial Sequence
  spacer sequence ATCN PAM
cagaccccagaucucagacu

SEQ ID NO: 4566 - RNA, 20 nt, Artificial Sequence
  spacer sequence ATCN PAM
ggggucugagaucugggguc

SEQ ID NO: 4567 - RNA, 20 nt, Artificial Sequence
  spacer sequence ATCN PAM
cagacuccagaccccagauc

SEQ ID NO: 4568 - RNA, 20 nt, Artificial Sequence
  spacer sequence ATCN PAM
ggggucuggagucugagauc

SEQ ID NO: 4569 - RNA, 20 nt, Artificial Sequence
  spacer sequence ATCN PAM
cagaccccagaccccagauc

SEQ ID NO: 4570 - RNA, 20 nt, Artificial Sequence
  spacer sequence ATCN PAM
ggggucuggggucugagauc

SEQ ID NO: 4571 - RNA, 20 nt, Artificial Sequence
  spacer sequence ATCN PAM
cagaccccagaucccagacc

SEQ ID NO: 4572 - RNA, 20 nt, Artificial Sequence
  spacer sequence ATCN PAM
ggggucugagaucugggguc

SEQ ID NO: 4573 - RNA, 20 nt, Artificial Sequence
  spacer sequence ATCN PAM
cagaccccagaccccagauc

SEQ ID NO: 4574 - RNA, 20 nt, Artificial Sequence
  spacer sequence ATCN PAM
ggggucuggggucugggauc

SEQ ID NO: 4575 - RNA, 20 nt, Artificial Sequence
  spacer sequence ATCN PAM
cagaccccagaucucagacc

SEQ ID NO: 4576 - RNA, 20 nt, Artificial Sequence
  spacer sequence ATCN PAM
ggggucugggaucugggguc

SEQ ID NO: 4577 - RNA, 20 nt, Artificial Sequence
  spacer sequence ATCN PAM
cagacccccagaccccagau

SEQ ID NO: 4578 - RNA, 20 nt, Artificial Sequence
  spacer sequence ATCN PAM
ggggucugggggucugagau

SEQ ID NO: 4579 - RNA, 20 nt, Artificial Sequence
  spacer sequence ATCN PAM
cagaucucagaccccagauc

SEQ ID NO: 4580 - RNA, 20 nt, Artificial Sequence
  spacer sequence ATCN PAM
gggaucuggggucugggggu

SEQ ID NO: 4581 - RNA, 20 nt, Artificial Sequence
  spacer sequence ATCN PAM
cagaccccagaucccagacc

SEQ ID NO: 4582 - RNA, 20 nt, Artificial Sequence
  spacer sequence ATCN PAM
ggggucugagaucugggauc

SEQ ID NO: 4583 - RNA, 20 nt, Artificial Sequence
  spacer sequence ATCN PAM
cagaccccagaccccagauc

SEQ ID NO: 4584 - RNA, 20 nt, Artificial Sequence
  spacer sequence ATCN PAM
ggggucuggggucugggauc

SEQ ID NO: 4585 - RNA, 20 nt, Artificial Sequence
  spacer sequence ATCN PAM
cagaccccagaucucagacc

SEQ ID NO: 4586 - RNA, 20 nt, Artificial Sequence
  spacer sequence ATCN PAM
ggggucugggaucugggguc

SEQ ID NO: 4587 - RNA, 20 nt, Artificial Sequence
  spacer sequence ATCN PAM
cagacccccagaccccagau

SEQ ID NO: 4588 - RNA, 20 nt, Artificial Sequence
  spacer sequence ATCN PAM
ggggucugggggucugagau

SEQ ID NO: 4589 - RNA, 20 nt, Artificial Sequence
  spacer sequence ATCN PAM
cagaucucagaccccaaacc

SEQ ID NO: 4590 - RNA, 20 nt, Artificial Sequence
  spacer sequence ATCN PAM
gggaucuggggucugggggu

SEQ ID NO: 4591 - RNA, 20 nt, Artificial Sequence
  spacer sequence ATCN PAM
cagaccccaaaccccagauc

SEQ ID NO: 4592 - RNA, 20 nt, Artificial Sequence
  spacer sequence ATCN PAM
gggguuuggggucugagauc

SEQ ID NO: 4593 - RNA, 20 nt, Artificial Sequence
  spacer sequence ATCN PAM
uagaucucagaccccagauc

SEQ ID NO: 4594 - RNA, 20 nt, Artificial Sequence
  spacer sequence ATCN PAM
aggaucugggguuugggguc

SEQ ID NO: 4595 - RNA, 20 nt, Artificial Sequence
  spacer sequence ATCN PAM
cagaccccagaucccagauc

SEQ ID NO: 4596 - RNA, 20 nt, Artificial Sequence
  spacer sequence ATCN PAM
ggggucugagaucuaggauc

SEQ ID NO: 4597 - RNA, 20 nt, Artificial Sequence
  spacer sequence ATCN PAM
cagaucccagaccgcaagau

SEQ ID NO: 4598 - RNA, 20 nt, Artificial Sequence
  spacer sequence ATCN PAM
gggaucuggggucugagauc

SEQ ID NO: 4599 - RNA, 20 nt, Artificial Sequence
  spacer sequence ATCN PAM
cagaccgcaagaucccagac

SEQ ID NO: 4600 - RNA, 20 nt, Artificial Sequence
  spacer sequence ATCN PAM
ugcggucugggaucugggau

SEQ ID NO: 4601 - RNA, 20 nt, Artificial Sequence
  spacer sequence ATCN PAM
cagaccccagauccuagauc

SEQ ID NO: 4602 - RNA, 20 nt, Artificial Sequence
  spacer sequence ATCN PAM
ggggucugggaucuugcggu

SEQ ID NO: 4603 - RNA, 20 nt, Artificial Sequence
  spacer sequence ATCN PAM
uagaucccagaccucagacc

SEQ ID NO: 4604 - RNA, 20 nt, Artificial Sequence
  spacer sequence ATCN PAM
aggaucuggggucugggauc

SEQ ID NO: 4605 - RNA, 20 nt, Artificial Sequence
  spacer sequence ATCN PAM
cagaccucagaccccagacc

SEQ ID NO: 4606 - RNA, 20 nt, Artificial Sequence
  spacer sequence ATCN PAM
ggggucuggggucugggguc

SEQ ID NO: 4607 - RNA, 20 nt, Artificial Sequence
  spacer sequence ATCN PAM
cagaucccagaccccagacc

SEQ ID NO: 4608 - RNA, 20 nt, Artificial Sequence
  spacer sequence ATCN PAM
gggaucuggggucugggguc

SEQ ID NO: 4609 - RNA, 20 nt, Artificial Sequence
  spacer sequence ATCN PAM
cagaccccagacccccagau

SEQ ID NO: 4610 - RNA, 20 nt, Artificial Sequence
  spacer sequence ATCN PAM
gggggucuggggucugggau

SEQ ID NO: 4611 - RNA, 20 nt, Artificial Sequence
  spacer sequence ATCN PAM
cagaucccagacccuagauc

SEQ ID NO: 4612 - RNA, 20 nt, Artificial Sequence
  spacer sequence ATCN PAM
gagaucugggggucuggggu

SEQ ID NO: 4613 - RNA, 20 nt, Artificial Sequence
  spacer sequence ATCN PAM
cagacccuagaucccaaacc

SEQ ID NO: 4614 - RNA, 20 nt, Artificial Sequence
  spacer sequence ATCN PAM
agggucugggaucugagauc

SEQ ID NO: 4615 - RNA, 20 nt, Artificial Sequence
  spacer sequence ATCN PAM
caaaccccagaucucagacc

SEQ ID NO: 4616 - RNA, 20 nt, Artificial Sequence
  spacer sequence ATCN PAM
gggguuugggaucuaggguc

SEQ ID NO: 4617 - RNA, 20 nt, Artificial Sequence
  spacer sequence ATCN PAM
cagaccccagaucccagacu

SEQ ID NO: 4618 - RNA, 20 nt, Artificial Sequence
  spacer sequence ATCN PAM
ggggucugagaucugggguu

SEQ ID NO: 4619 - RNA, 20 nt, Artificial Sequence
  spacer sequence ATCN PAM
cagacuucagauccccagac

SEQ ID NO: 4620 - RNA, 20 nt, Artificial Sequence
  spacer sequence ATCN PAM
gaagucugggaucugggguc

SEQ ID NO: 4621 - RNA, 20 nt, Artificial Sequence
  spacer sequence ATCN PAM
ccagaccccagaucccagac

SEQ ID NO: 4622 - RNA, 20 nt, Artificial Sequence
  spacer sequence ATCN PAM
ggggucuggggaucugaagu

SEQ ID NO: 4623 - RNA, 20 nt, Artificial Sequence
  spacer sequence ATCN PAM
cagacuucagauccccagac

SEQ ID NO: 4624 - RNA, 20 nt, Artificial Sequence
  spacer sequence ATCN PAM
gaagucugggaucugggguc

SEQ ID NO: 4625 - RNA, 20 nt, Artificial Sequence
  spacer sequence ATCN PAM
ccagaccccagaucccagac

SEQ ID NO: 4626 - RNA, 20 nt, Artificial Sequence
  spacer sequence ATCN PAM
ggggucuggggaucugaagu

SEQ ID NO: 4627 - RNA, 20 nt, Artificial Sequence
  spacer sequence ATCN PAM
cagacuucagauccccggau

SEQ ID NO: 4628 - RNA, 20 nt, Artificial Sequence
  spacer sequence ATCN PAM
gaagucugggaucugggguc

SEQ ID NO: 4629 - RNA, 20 nt, Artificial Sequence
  spacer sequence ATCN PAM
ccggauccccagaucccaga

SEQ ID NO: 4630 - RNA, 20 nt, Artificial Sequence
  spacer sequence ATCN PAM
ggggaucugaagucugggau

SEQ ID NO: 4631 - RNA, 20 nt, Artificial Sequence
  spacer sequence ATCN PAM
ccagaucccagacccgagau

SEQ ID NO: 4632 - RNA, 20 nt, Artificial Sequence
  spacer sequence ATCN PAM
ggggauccggggaucugaag

SEQ ID NO: 4633 - RNA, 20 nt, Artificial Sequence
  spacer sequence ATCN PAM
cagacccgagauuccagacc

SEQ ID NO: 4634 - RNA, 20 nt, Artificial Sequence
  spacer sequence ATCN PAM
cgggucugggaucuggggau

SEQ ID NO: 4635 - RNA, 20 nt, Artificial Sequence
  spacer sequence ATCN PAM
ggggucuggaaucucggguc

SEQ ID NO: 4636 - RNA, 20 nt, Artificial Sequence
  spacer sequence ATCN PAM
cagaccccagcccagaggga

SEQ ID NO: 4637 - RNA, 20 nt, Artificial Sequence
  spacer sequence ATCN PAM
ccuuuccacucccucaccgg

SEQ ID NO: 4638 - RNA, 20 nt, Artificial Sequence
  spacer sequence ATCN PAM
cagugcugggaggacugcgu

SEQ ID NO: 4639 - RNA, 20 nt, Artificial Sequence
  spacer sequence ATCN PAM
ccacucacuccagacuuccg

SEQ ID NO: 4640 - RNA, 20 nt, Artificial Sequence
  spacer sequence ATCN PAM
auguggaggguagucuggcc

SEQ ID NO: 4641 - RNA, 20 nt, Artificial Sequence
  spacer sequence ATCN PAM
cacaccugcuacugucacug

SEQ ID NO: 4642 - RNA, 20 nt, Artificial Sequence
  spacer sequence ATCN PAM
gcggccucaggccacaaggu

SEQ ID NO: 4643 - RNA, 20 nt, Artificial Sequence
  spacer sequence ATCN PAM
gcauagcccggcugcuggca

SEQ ID NO: 4644 - RNA, 20 nt, Artificial Sequence
  spacer sequence ATCN PAM
cagacaaguggcucgaccgg

SEQ ID NO: 4645 - RNA, 20 nt, Artificial Sequence
  spacer sequence ATCN PAM
gagcccugagggcaucaggu

SEQ ID NO: 4646 - RNA, 20 nt, Artificial Sequence
  spacer sequence ATCN PAM
gguccuggaggaggaggaag

SEQ ID NO: 4647 - RNA, 20 nt, Artificial Sequence
  spacer sequence ATCN PAM
cagaagcaggaacuccaggu

SEQ ID NO: 4648 - RNA, 20 nt, Artificial Sequence
  spacer sequence ATCN PAM
ggccgcacuggcgaaccugg

SEQ ID NO: 4649 - RNA, 20 nt, Artificial Sequence
  spacer sequence ATCN PAM
accuucccucaaacguagcu

SEQ ID NO: 4650 - RNA, 20 nt, Artificial Sequence
  spacer sequence ATCN PAM
cgcccccggccgagcucagg

SEQ ID NO: 4651 - RNA, 20 nt, Artificial Sequence
  spacer sequence ATCN PAM
cgccaucccucccuccuaaa

SEQ ID NO: 4652 - RNA, 20 nt, Artificial Sequence
  spacer sequence ATCN PAM
cucccuccuaaaagccagca

SEQ ID NO: 4653 - RNA, 20 nt, Artificial Sequence
  spacer sequence ATCN PAM
ucacaaauguccucaugcgu

SEQ ID NO: 4654 - RNA, 20 nt, Artificial Sequence
  spacer sequence ATCN PAM
aggacgaccccucugcagag

SEQ ID NO: 4655 - RNA, 20 nt, Artificial Sequence
  spacer sequence ATCN PAM
acagccucugggccccuaaa

SEQ ID NO: 4656 - RNA, 20 nt, Artificial Sequence
  spacer sequence ATCN PAM
cccucucaguguaaccuccc

SEQ ID NO: 4657 - RNA, 20 nt, Artificial Sequence
  spacer sequence ATCN PAM
uccaaguggggcaggagccg

SEQ ID NO: 4658 - RNA, 20 nt, Artificial Sequence
  spacer sequence ATCN PAM
agaaacccuggccacauucc

SEQ ID NO: 4659 - RNA, 20 nt, Artificial Sequence
  spacer sequence ATCN PAM
ucugguuuuucaagagaagc

SEQ ID NO: 4660 - RNA, 20 nt, Artificial Sequence
  spacer sequence ATCN PAM
gguuuuucaagagaagccac

SEQ ID NO: 4661 - RNA, 20 nt, Artificial Sequence
  spacer sequence ATCN PAM
acacccccaccccggggcag

SEQ ID NO: 4662 - RNA, 20 nt, Artificial Sequence
  spacer sequence ATCN PAM
accugggggcucgcagcucc

SEQ ID NO: 4663 - RNA, 20 nt, Artificial Sequence
  spacer sequence ATCN PAM
uggaaugacugcuacccgcc

SEQ ID NO: 4664 - RNA, 20 nt, Artificial Sequence
  spacer sequence ATCN PAM
gauaaaagcccccgaaaaug

SEQ ID NO: 4665 - RNA, 20 nt, Artificial Sequence
  spacer sequence ATCN PAM
gauccuggaaugacugcuac

SEQ ID NO: 4666 - RNA, 20 nt, Artificial Sequence
  spacer sequence ATCN PAM
cugugaccagaauguuuuca

SEQ ID NO: 4667 - RNA, 20 nt, Artificial Sequence
  spacer sequence ATCN PAM
cuuucaaaacgcagcggggc

SEQ ID NO: 4668 - RNA, 20 nt, Artificial Sequence
  spacer sequence ATCN PAM
ccagcaagaacaagcgucca

SEQ ID NO: 4669 - RNA, 20 nt, Artificial Sequence
  spacer sequence ATCN PAM
caaggcuccgggaagcacgg

SEQ ID NO: 4670 - RNA, 20 nt, Artificial Sequence
  spacer sequence ATCN PAM
gacuggcgggccuggugccg

SEQ ID NO: 4671 - RNA, 20 nt, Artificial Sequence
  spacer sequence ATCN PAM
gcugaccccagccagggccc

SEQ ID NO: 4672 - RNA, 20 nt, Artificial Sequence
  spacer sequence ATCN PAM
ccccugcaggcacugucccg

SEQ ID NO: 4673 - RNA, 20 nt, Artificial Sequence
  spacer sequence ATCN PAM
cucaugggguuguccagggc

SEQ ID NO: 4674 - RNA, 20 nt, Artificial Sequence
  spacer sequence ATCN PAM
gcaggagagccagggcacag

SEQ ID NO: 4675 - RNA, 20 nt, Artificial Sequence
  spacer sequence ATCN PAM
ccccaccccccgggggcccc

SEQ ID NO: 4676 - RNA, 20 nt, Artificial Sequence
  spacer sequence ATCN PAM
cuguugccguccuacggguu

SEQ ID NO: 4677 - RNA, 20 nt, Artificial Sequence
  spacer sequence ATCN PAM
ccccuugaugcaagcuggcu

SEQ ID NO: 4678 - RNA, 20 nt, Artificial Sequence
  spacer sequence ATCN PAM
aggggugaugggcagcuguc

SEQ ID NO: 4679 - RNA, 20 nt, Artificial Sequence
  spacer sequence ATCN PAM
ccaguugucaccacaggguu

SEQ ID NO: 4680 - RNA, 20 nt, Artificial Sequence
  spacer sequence ATCN PAM
cagggaaaauaaaaguguuu

SEQ ID NO: 4681 - RNA, 20 nt, Artificial Sequence
  spacer sequence ATCN PAM
acaccaggaggggcaccugu

SEQ ID NO: 4682 - RNA, 20 nt, Artificial Sequence
  spacer sequence ATCN PAM
guggacugcccugcucugca

SEQ ID NO: 4683 - RNA, 20 nt, Artificial Sequence
  spacer sequence ATCN PAM
augccgggcgcacagacgac

SEQ ID NO: 4684 - RNA, 20 nt, Artificial Sequence
  spacer sequence ATCN PAM
gucgucugugcgcccggcau

SEQ ID NO: 4685 - RNA, 20 nt, Artificial Sequence
  spacer sequence ATCN PAM
aaucuccgccuccucacggg

SEQ ID NO: 4686 - RNA, 20 nt, Artificial Sequence
  spacer sequence ATCN PAM
ccgccuccucacggggccca

SEQ ID NO: 4687 - RNA, 20 nt, Artificial Sequence
  spacer sequence ATCN PAM
gcucucgcccugggccuccu

SEQ ID NO: 4688 - RNA, 20 nt, Artificial Sequence
  spacer sequence ATCN PAM
gaaauccccgucuuggccag

SEQ ID NO: 4689 - RNA, 20 nt, Artificial Sequence
  spacer sequence ATCN PAM
ccgucuuggccagaacccca

SEQ ID NO: 4690 - RNA, 20 nt, Artificial Sequence
  spacer sequence ATCN PAM
cacacacaugcacacaggga

SEQ ID NO: 4691 - RNA, 20 nt, Artificial Sequence
  spacer sequence ATCN PAM
guguuuguguguugugugug

SEQ ID NO: 4692 - RNA, 20 nt, Artificial Sequence
  spacer sequence ATCN PAM
guacaacacacacacagaac

SEQ ID NO: 4693 - RNA, 20 nt, Artificial Sequence
  spacer sequence ATCN PAM
auacaacacacaggcacaca

SEQ ID NO: 4694 - RNA, 20 nt, Artificial Sequence
  spacer sequence ATCN PAM
guauguugcgccaugugcau

SEQ ID NO: 4695 - RNA, 20 nt, Artificial Sequence
  spacer sequence ATCN PAM
acagcuguaaacacuccugg

SEQ ID NO: 4696 - RNA, 20 nt, Artificial Sequence
  spacer sequence ATCN PAM
uguaauccacagcuguaaac

SEQ ID NO: 4697 - RNA, 20 nt, Artificial Sequence
  spacer sequence ATCN PAM
gcucugggaagggggcggua

SEQ ID NO: 4698 - RNA, 20 nt, Artificial Sequence
  spacer sequence ATCN PAM
caccccccagcaugggggcc

SEQ ID NO: 4699 - RNA, 20 nt, Artificial Sequence
  spacer sequence ATCN PAM
gugacuccgcuggagccggg

SEQ ID NO: 4700 - RNA, 20 nt, Artificial Sequence
  spacer sequence ATCN PAM
auucacucuugguuggcuuu

SEQ ID NO: 4701 - RNA, 20 nt, Artificial Sequence
  spacer sequence ATCN PAM
auucacucucaguuugcuuu

SEQ ID NO: 4702 - RNA, 20 nt, Artificial Sequence
  spacer sequence ATCN PAM
gcccacaccugccaggagcc

SEQ ID NO: 4703 - RNA, 20 nt, Artificial Sequence
  spacer sequence ATCN PAM
cggcagacaucugcccacac

SEQ ID NO: 4704 - RNA, 20 nt, Artificial Sequence
  spacer sequence ATCN PAM
ucagaguuaaacaaaagccu

SEQ ID NO: 4705 - RNA, 20 nt, Artificial Sequence
  spacer sequence ATCN PAM
cacuccaggggcuggcaggc

SEQ ID NO: 4706 - RNA, 20 nt, Artificial Sequence
  spacer sequence ATCN PAM
ugcuguucuccaucccaccc

SEQ ID NO: 4707 - RNA, 20 nt, Artificial Sequence
  spacer sequence ATCN PAM
cacccaccaagggguccaga

SEQ ID NO: 4708 - RNA, 20 nt, Artificial Sequence
  spacer sequence ATCN PAM
ggaccccuugguggguggga

SEQ ID NO: 4709 - RNA, 20 nt, Artificial Sequence
  spacer sequence ATCN PAM
caaauucgcccuuucucggc

SEQ ID NO: 4710 - RNA, 20 nt, Artificial Sequence
  spacer sequence ATCN PAM
ccccacgaccagggucaccc

SEQ ID NO: 4711 - RNA, 20 nt, Artificial Sequence
  spacer sequence ATCN PAM
ggggccgggcagccagaucc

SEQ ID NO: 4712 - RNA, 20 nt, Artificial Sequence
  spacer sequence ATCN PAM
ggcugcccggccccagauuu

SEQ ID NO: 4713 - RNA, 20 nt, Artificial Sequence
  spacer sequence ATCN PAM
cugaaggccagaggaugucu

SEQ ID NO: 4714 - RNA, 20 nt, Artificial Sequence
  spacer sequence ATCN PAM
ucuggccuucagggaucugg

SEQ ID NO: 4715 - RNA, 20 nt, Artificial Sequence
  spacer sequence ATCN PAM
cagggagggcacccgaaaca

SEQ ID NO: 4716 - RNA, 20 nt, Artificial Sequence
  spacer sequence ATCN PAM
ccguguaaucgggcuggcug

SEQ ID NO: 4717 - RNA, 20 nt, Artificial Sequence
  spacer sequence ATCN PAM
ggcuggcugcccacgggguc

SEQ ID NO: 4718 - RNA, 20 nt, Artificial Sequence
  spacer sequence ATCN PAM
gcacaggccagcuccgaggc

SEQ ID NO: 4719 - RNA, 20 nt, Artificial Sequence
  spacer sequence ATCN PAM
guugcacgcccugucagcga

SEQ ID NO: 4720 - RNA, 20 nt, Artificial Sequence
  spacer sequence ATCN PAM
cgucccgucccagcagucac

SEQ ID NO: 4721 - RNA, 20 nt, Artificial Sequence
  spacer sequence ATCN PAM
cuuaaauguguagccggggc

SEQ ID NO: 4722 - RNA, 20 nt, Artificial Sequence
  spacer sequence ATCN PAM
guucauccagggagacaccc

SEQ ID NO: 4723 - RNA, 20 nt, Artificial Sequence
  spacer sequence ATCN PAM
agggagacacccaccguccc

SEQ ID NO: 4724 - RNA, 20 nt, Artificial Sequence
  spacer sequence ATCN PAM
gugcccggcgucccuggagg

SEQ ID NO: 4725 - RNA, 20 nt, Artificial Sequence
  spacer sequence ATCN PAM
ccagacugaccuggggcgug

SEQ ID NO: 4726 - RNA, 20 nt, Artificial Sequence
  spacer sequence ATCN PAM
cagcccgcuacccucccucc

SEQ ID NO: 4727 - RNA, 20 nt, Artificial Sequence
  spacer sequence ATCN PAM
gcaagcccccaucccaaacc

SEQ ID NO: 4728 - RNA, 20 nt, Artificial Sequence
  spacer sequence ATCN PAM
caaaccgggggaccuccaug

SEQ ID NO: 4729 - RNA, 20 nt, Artificial Sequence
  spacer sequence ATCN PAM
gccccagaagagaagucgga

SEQ ID NO: 4730 - RNA, 20 nt, Artificial Sequence
  spacer sequence ATCN PAM
gggcggcgggagagaccggg

SEQ ID NO: 4731 - RNA, 20 nt, Artificial Sequence
  spacer sequence ATCN PAM
uggccuucccuuuuggggac

SEQ ID NO: 4732 - RNA, 20 nt, Artificial Sequence
  spacer sequence ATCN PAM
gugcccccgagccccuuggu

SEQ ID NO: 4733 - RNA, 20 nt, Artificial Sequence
  spacer sequence ATCN PAM
ugggggccccgcgcacuucc

SEQ ID NO: 4734 - RNA, 20 nt, Artificial Sequence
  spacer sequence ATCN PAM
cuugagguccuuccgcuauu

SEQ ID NO: 4735 - RNA, 20 nt, Artificial Sequence
  spacer sequence ATCN PAM
cgcccugccugguucucuug

SEQ ID NO: 4736 - RNA, 20 nt, Artificial Sequence
  spacer sequence ATCN PAM
gcuuugugguacagcauccc

SEQ ID NO: 4737 - RNA, 20 nt, Artificial Sequence
  spacer sequence ATCN PAM
ccuuuuuuccuccuuccuca

SEQ ID NO: 4738 - RNA, 20 nt, Artificial Sequence
  spacer sequence ATCN PAM
ucuuaguagcuuuugaggga

SEQ ID NO: 4739 - RNA, 20 nt, Artificial Sequence
  spacer sequence ATCN PAM
ccagccgggcgcaguggcuc

SEQ ID NO: 4740 - RNA, 20 nt, Artificial Sequence
  spacer sequence ATCN PAM
cagcacuuugagaggcugag

SEQ ID NO: 4741 - RNA, 20 nt, Artificial Sequence
  spacer sequence ATCN PAM
gccucagccucucaaagugc

SEQ ID NO: 4742 - RNA, 20 nt, Artificial Sequence
  spacer sequence ATCN PAM
auccgccucagccucucaaa

SEQ ID NO: 4743 - RNA, 20 nt, Artificial Sequence
  spacer sequence ATCN PAM
cuugaggucgggaguuugag

SEQ ID NO: 4744 - RNA, 20 nt, Artificial Sequence
  spacer sequence ATCN PAM
uauuguccagguuggccuca

SEQ ID NO: 4745 - RNA, 20 nt, Artificial Sequence
  spacer sequence ATCN PAM
cgcccagcuaauuuuuguau

SEQ ID NO: 4746 - RNA, 20 nt, Artificial Sequence
  spacer sequence ATCN PAM
cagcuacucaggaggcugag

SEQ ID NO: 4747 - RNA, 20 nt, Artificial Sequence
  spacer sequence ATCN PAM
cuugaaccugggagguaguu

SEQ ID NO: 4748 - RNA, 20 nt, Artificial Sequence
  spacer sequence ATCN PAM
cagcucacugcaauaacuac

SEQ ID NO: 4749 - RNA, 20 nt, Artificial Sequence
  spacer sequence ATCN PAM
caccacugcacuccagcccg

SEQ ID NO: 4750 - RNA, 20 nt, Artificial Sequence
  spacer sequence ATCN PAM
caaaaauaaauaaauaaaua

SEQ ID NO: 4751 - RNA, 20 nt, Artificial Sequence
  spacer sequence ATCN PAM
ucaccucugggccugucaga

SEQ ID NO: 4752 - RNA, 20 nt, Artificial Sequence
  spacer sequence ATCN PAM
ccucugggccugucagacau

SEQ ID NO: 4753 - RNA, 20 nt, Artificial Sequence
  spacer sequence ATCN PAM
cuguucauuaaucucucucc

SEQ ID NO: 4754 - RNA, 20 nt, Artificial Sequence
  spacer sequence ATCN PAM
cucucccuaaccaaauacag

SEQ ID NO: 4755 - RNA, 20 nt, Artificial Sequence
  spacer sequence ATCN PAM
ugcucucuuggggguagccc

SEQ ID NO: 4756 - RNA, 20 nt, Artificial Sequence
  spacer sequence ATCN PAM
uuucaggcagggccacgggg

SEQ ID NO: 4757 - RNA, 20 nt, Artificial Sequence
  spacer sequence ATCN PAM
gccuucacuggcucaaguca

SEQ ID NO: 4758 - RNA, 20 nt, Artificial Sequence
  spacer sequence ATCN PAM
agugugggaggcaccaccgc

SEQ ID NO: 4759 - RNA, 20 nt, Artificial Sequence
  spacer sequence ATCN PAM
guauugucauggcugaaauu

SEQ ID NO: 4760 - RNA, 20 nt, Artificial Sequence
  spacer sequence ATCN PAM
acucuaguuucaggggguug

SEQ ID NO: 4761 - RNA, 20 nt, Artificial Sequence
  spacer sequence ATCN PAM
augcugcucugugcuugguc

SEQ ID NO: 4762 - RNA, 20 nt, Artificial Sequence
  spacer sequence ATCN PAM
auuagaagucacugaaugaa

SEQ ID NO: 4763 - RNA, 20 nt, Artificial Sequence
  spacer sequence ATCN PAM
gaaagccccuggucuagggg

SEQ ID NO: 4764 - RNA, 20 nt, Artificial Sequence
  spacer sequence ATCN PAM
cgcauauuggagugucuggu

SEQ ID NO: 4765 - RNA, 20 nt, Artificial Sequence
  spacer sequence ATCN PAM
cugggaggguugaaaugucu

SEQ ID NO: 4766 - RNA, 20 nt, Artificial Sequence
  spacer sequence ATCN PAM
gccuuaccaggccuucuuug

SEQ ID NO: 4767 - RNA, 20 nt, Artificial Sequence
  spacer sequence ATCN PAM
uaaaccugcuuauuaucugc

SEQ ID NO: 4768 - RNA, 20 nt, Artificial Sequence
  spacer sequence ATCN PAM
cagcacuacgggagucugag

SEQ ID NO: 4769 - RNA, 20 nt, Artificial Sequence
  spacer sequence ATCN PAM
cuacuaaaaguacaaaaaag

SEQ ID NO: 4770 - RNA, 20 nt, Artificial Sequence
  spacer sequence ATCN PAM
cuugaacccaggagguagag

SEQ ID NO: 4771 - RNA, 20 nt, Artificial Sequence
  spacer sequence ATCN PAM
cagcucacugcaaccucuac

SEQ ID NO: 4772 - RNA, 20 nt, Artificial Sequence
  spacer sequence ATCN PAM
caccacugcacuccagccug

SEQ ID NO: 4773 - RNA, 20 nt, Artificial Sequence
  spacer sequence ATCN PAM
cccaggcuggagugcagugg

SEQ ID NO: 4774 - RNA, 20 nt, Artificial Sequence
  spacer sequence ATCN PAM
caacacuuugggaggcugag

SEQ ID NO: 4775 - RNA, 20 nt, Artificial Sequence
  spacer sequence ATCN PAM
ccuaggucagaaguucaaca

SEQ ID NO: 4776 - RNA, 20 nt, Artificial Sequence
  spacer sequence ATCN PAM
ugacuacucaggaggcugag

SEQ ID NO: 4777 - RNA, 20 nt, Artificial Sequence
  spacer sequence ATCN PAM
cuugaaucugggaggcggag

SEQ ID NO: 4778 - RNA, 20 nt, Artificial Sequence
  spacer sequence ATCN PAM
gggaggcggagguugcagug

SEQ ID NO: 4779 - RNA, 20 nt, Artificial Sequence
  spacer sequence ATCN PAM
cagcucacugcaaccuccgc

SEQ ID NO: 4780 - RNA, 20 nt, Artificial Sequence
  spacer sequence ATCN PAM
cgccauugcacuccagccug

SEQ ID NO: 4781 - RNA, 20 nt, Artificial Sequence
  spacer sequence ATCN PAM
aacccaaaagcacaaggggg

SEQ ID NO: 4782 - RNA, 20 nt, Artificial Sequence
  spacer sequence ATCN PAM
gcccccuugugcuuuugggu

SEQ ID NO: 4783 - RNA, 20 nt, Artificial Sequence
  spacer sequence ATCN PAM
cuucugccuucugggucuga

SEQ ID NO: 4784 - RNA, 20 nt, Artificial Sequence
  spacer sequence ATCN PAM
cacucuggacauaucacuuc

SEQ ID NO: 4785 - RNA, 20 nt, Artificial Sequence
  spacer sequence ATCN PAM
cugucggguccggcugcucu

SEQ ID NO: 4786 - RNA, 20 nt, Artificial Sequence
  spacer sequence ATCN PAM
cuuuuuuuuuuuuuuuuuuu

SEQ ID NO: 4787 - RNA, 20 nt, Artificial Sequence
  spacer sequence ATCN PAM
cagcucacugcaagcuccac

SEQ ID NO: 4788 - RNA, 20 nt, Artificial Sequence
  spacer sequence ATCN PAM
uggcuaacacggugaaaccc

SEQ ID NO: 4789 - RNA, 20 nt, Artificial Sequence
  spacer sequence ATCN PAM
agaccauccuggcuaacacg

SEQ ID NO: 4790 - RNA, 20 nt, Artificial Sequence
  spacer sequence ATCN PAM
ccugaccucgugauccgccc

SEQ ID NO: 4791 - RNA, 20 nt, Artificial Sequence
  spacer sequence ATCN PAM
cgaggucaggagaucgagac

SEQ ID NO: 4792 - RNA, 20 nt, Artificial Sequence
  spacer sequence ATCN PAM
gcccgccucggccacccaaa

SEQ ID NO: 4793 - RNA, 20 nt, Artificial Sequence
  spacer sequence ATCN PAM
cagcacuuuggguggccgag

SEQ ID NO: 4794 - RNA, 20 nt, Artificial Sequence
  spacer sequence ATCN PAM
ccuuuuuuuugagauggagu

SEQ ID NO: 4795 - RNA, 20 nt, Artificial Sequence
  spacer sequence ATCN PAM
caaaaaaaaggagauuuggc

SEQ ID NO: 4796 - RNA, 20 nt, Artificial Sequence
  spacer sequence ATCN PAM
caacuuugagacuauuuucu

SEQ ID NO: 4797 - RNA, 20 nt, Artificial Sequence
  spacer sequence ATCN PAM
caaaaaaaagagaaaauagu

SEQ ID NO: 4798 - RNA, 20 nt, Artificial Sequence
  spacer sequence ATCN PAM
uggcccacugcaaccuccuc

SEQ ID NO: 4799 - RNA, 20 nt, Artificial Sequence
  spacer sequence ATCN PAM
ugccucagccugccaaguag

SEQ ID NO: 4800 - RNA, 20 nt, Artificial Sequence
  spacer sequence ATCN PAM
cagcuacuuggcaggcugag

SEQ ID NO: 4801 - RNA, 20 nt, Artificial Sequence
  spacer sequence ATCN PAM
ccugaggucaggaguuugag

SEQ ID NO: 4802 - RNA, 20 nt, Artificial Sequence
  spacer sequence ATCN PAM
gccugccucggccucccaaa

SEQ ID NO: 4803 - RNA, 20 nt, Artificial Sequence
  spacer sequence ATCN PAM
cagcacuuugggaggccgag

SEQ ID NO: 4804 - RNA, 20 nt, Artificial Sequence
  spacer sequence ATCN PAM
uuagugccuauugcucaauu

SEQ ID NO: 4805 - RNA, 20 nt, Artificial Sequence
  spacer sequence ATCN PAM
gcucauuuccucccacacug

SEQ ID NO: 4806 - RNA, 20 nt, Artificial Sequence
  spacer sequence ATCN PAM
acacaacuuuugaggaucag

SEQ ID NO: 4807 - RNA, 20 nt, Artificial Sequence
  spacer sequence ATCN PAM
ucaaaaguuguguggauggu

SEQ ID NO: 4808 - RNA, 20 nt, Artificial Sequence
  spacer sequence ATCN PAM
guggaaaugaaaacacggug

SEQ ID NO: 4809 - RNA, 20 nt, Artificial Sequence
  spacer sequence ATCN PAM
cgcugagcgccgggaccuuc

SEQ ID NO: 4810 - RNA, 20 nt, Artificial Sequence
  spacer sequence ATCN PAM
agcccacgccucuuccuagc

SEQ ID NO: 4811 - RNA, 20 nt, Artificial Sequence
  spacer sequence ATCN PAM
cugccacauccaccucggga

SEQ ID NO: 4812 - RNA, 20 nt, Artificial Sequence
  spacer sequence ATCN PAM
accucgggaaaccacaaggu

SEQ ID NO: 4813 - RNA, 20 nt, Artificial Sequence
  spacer sequence ATCN PAM
agaccuugugguuucccgag

SEQ ID NO: 4814 - RNA, 20 nt, Artificial Sequence
  spacer sequence ATCN PAM
cccaucgagaccuugugguu

SEQ ID NO: 4815 - RNA, 20 nt, Artificial Sequence
  spacer sequence ATCN PAM
cagcaggcaggaaucugcca

SEQ ID NO: 4816 - RNA, 20 nt, Artificial Sequence
  spacer sequence ATCN PAM
gccaaguugggggaugcuua

SEQ ID NO: 4817 - RNA, 20 nt, Artificial Sequence
  spacer sequence ATCN PAM
cccaacuuggcagauuccug

SEQ ID NO: 4818 - RNA, 20 nt, Artificial Sequence
  spacer sequence ATCN PAM
gacuaauucccuaagcaucc

SEQ ID NO: 4819 - RNA, 20 nt, Artificial Sequence
  spacer sequence ATCN PAM
ccgcaucugacuaauucccu

SEQ ID NO: 4820 - RNA, 20 nt, Artificial Sequence
  spacer sequence ATCN PAM
caggggguggcuccggaaag

SEQ ID NO: 4821 - RNA, 20 nt, Artificial Sequence
  spacer sequence ATCN PAM
gcugugugacccaaggagag

SEQ ID NO: 4822 - RNA, 20 nt, Artificial Sequence
  spacer sequence ATCN PAM
cccuccccauuuuauaggug

SEQ ID NO: 4823 - RNA, 20 nt, Artificial Sequence
  spacer sequence ATCN PAM
cagcacuuugggaggcugag

SEQ ID NO: 4824 - RNA, 20 nt, Artificial Sequence
  spacer sequence ATCN PAM
ucccgucucagccucccaaa

SEQ ID NO: 4825 - RNA, 20 nt, Artificial Sequence
  spacer sequence ATCN PAM
cgaggucaagagauugagac

SEQ ID NO: 4826 - RNA, 20 nt, Artificial Sequence
  spacer sequence ATCN PAM
cuugaccucgugaucuuccc

SEQ ID NO: 4827 - RNA, 20 nt, Artificial Sequence
  spacer sequence ATCN PAM
uggauaacauggugaaaccc

SEQ ID NO: 4828 - RNA, 20 nt, Artificial Sequence
  spacer sequence ATCN PAM
aggauggucucaaucucuug

SEQ ID NO: 4829 - RNA, 20 nt, Artificial Sequence
  spacer sequence ATCN PAM
uguccggcuuauuuuuguau

SEQ ID NO: 4830 - RNA, 20 nt, Artificial Sequence
  spacer sequence ATCN PAM
cuugaacccgggaggcggag

SEQ ID NO: 4831 - RNA, 20 nt, Artificial Sequence
  spacer sequence ATCN PAM
cagcucauugcaaccuccgc

SEQ ID NO: 4832 - RNA, 20 nt, Artificial Sequence
  spacer sequence ATCN PAM
caccacugcacuccagccug

SEQ ID NO: 4833 - RNA, 20 nt, Artificial Sequence
  spacer sequence ATCN PAM
uuauuauuauuuuuuuugag

SEQ ID NO: 4834 - RNA, 20 nt, Artificial Sequence
  spacer sequence ATCN PAM
cuuggacccaagaggcaggg

SEQ ID NO: 4835 - RNA, 20 nt, Artificial Sequence
  spacer sequence ATCN PAM
ugccucagccucccaaguag

SEQ ID NO: 4836 - RNA, 20 nt, Artificial Sequence
  spacer sequence ATCN PAM
cagcuacuugggaggcugag

SEQ ID NO: 4837 - RNA, 20 nt, Artificial Sequence
  spacer sequence ATCN PAM
uggucaacauggugaaaccc

SEQ ID NO: 4838 - RNA, 20 nt, Artificial Sequence
  spacer sequence ATCN PAM
cgaggucaagagcucgagac

SEQ ID NO: 4839 - RNA, 20 nt, Artificial Sequence
  spacer sequence ATCN PAM
gccugccuuggccucccaua

SEQ ID NO: 4840 - RNA, 20 nt, Artificial Sequence
  spacer sequence ATCN PAM
cagcaauaugggaggccaag

SEQ ID NO: 4841 - RNA, 20 nt, Artificial Sequence
  spacer sequence ATCN PAM
agaauuucccuaggguggcu

SEQ ID NO: 4842 - RNA, 20 nt, Artificial Sequence
  spacer sequence ATCN PAM
acuucagugacgccauggac

SEQ ID NO: 4843 - RNA, 20 nt, Artificial Sequence
  spacer sequence ATCN PAM
uuauuauuuucucauugaac

SEQ ID NO: 4844 - RNA, 20 nt, Artificial Sequence
  spacer sequence ATCN PAM
guggcgucaaaaaugccucc

SEQ ID NO: 4845 - RNA, 20 nt, Artificial Sequence
  spacer sequence ATCN PAM
cugcccaucuguggcgucaa

SEQ ID NO: 4846 - RNA, 20 nt, Artificial Sequence
  spacer sequence ATCN PAM
acaccucugaccaguugagc

SEQ ID NO: 4847 - RNA, 20 nt, Artificial Sequence
  spacer sequence ATCN PAM
uccccagucagccuccuaag

SEQ ID NO: 4848 - RNA, 20 nt, Artificial Sequence
  spacer sequence ATCN PAM
ggguaaaauggugaaacccc

SEQ ID NO: 4849 - RNA, 20 nt, Artificial Sequence
  spacer sequence ATCN PAM
cagcacuuugggaggccaag

SEQ ID NO: 4850 - RNA, 20 nt, Artificial Sequence
  spacer sequence ATCN PAM
caccuggcccauuucuuucu

SEQ ID NO: 4851 - RNA, 20 nt, Artificial Sequence
  spacer sequence ATCN PAM
cuacaaaaaaaagaaagaaa

SEQ ID NO: 4852 - RNA, 20 nt, Artificial Sequence
  spacer sequence ATCN PAM
accugccucggccucccaaa

SEQ ID NO: 4853 - RNA, 20 nt, Artificial Sequence
  spacer sequence ATCN PAM
uagcauuuugggaggccgag

SEQ ID NO: 4854 - RNA, 20 nt, Artificial Sequence
  spacer sequence ATCN PAM
gggagaugccagccuggauu

SEQ ID NO: 4855 - RNA, 20 nt, Artificial Sequence
  spacer sequence ATCN PAM
cccagauggggaaacugagg

SEQ ID NO: 4856 - RNA, 20 nt, Artificial Sequence
  spacer sequence ATCN PAM
aggcuggcaucucccagaug

SEQ ID NO: 4857 - RNA, 20 nt, Artificial Sequence
  spacer sequence ATCN PAM
ggccgcgccgggccagaccc

SEQ ID NO: 4858 - RNA, 20 nt, Artificial Sequence
  spacer sequence ATCN PAM
cugcccccgcaucgggccgc

SEQ ID NO: 4859 - RNA, 20 nt, Artificial Sequence
  spacer sequence ATCN PAM
caucccugcccccgcaucgg

SEQ ID NO: 4860 - RNA, 20 nt, Artificial Sequence
  spacer sequence ATCN PAM
ggcccuuccuggugugcaga

SEQ ID NO: 4861 - RNA, 20 nt, Artificial Sequence
  spacer sequence ATCN PAM
gcuuucccuucugcacacca

SEQ ID NO: 4862 - RNA, 20 nt, Artificial Sequence
  spacer sequence ATCN PAM
gucaccccucugucugucuc

SEQ ID NO: 4863 - RNA, 20 nt, Artificial Sequence
  spacer sequence ATCN PAM
gucucucugucucucucugu

SEQ ID NO: 4864 - RNA, 20 nt, Artificial Sequence
  spacer sequence ATCN PAM
cgccauugcaccccagccug

SEQ ID NO: 4865 - RNA, 20 nt, Artificial Sequence
  spacer sequence ATCN PAM
cggcucacugcaagcuccgc

SEQ ID NO: 4866 - RNA, 20 nt, Artificial Sequence
  spacer sequence ATCN PAM
uggcuaacacggugaaaccc

SEQ ID NO: 4867 - RNA, 20 nt, Artificial Sequence
  spacer sequence ATCN PAM
agaccauccuggcuaacacg

SEQ ID NO: 4868 - RNA, 20 nt, Artificial Sequence
  spacer sequence ATCN PAM
ccugaccucgugauccgccc

SEQ ID NO: 4869 - RNA, 20 nt, Artificial Sequence
  spacer sequence ATCN PAM
cgaggucaggagaucgagac

SEQ ID NO: 4870 - RNA, 20 nt, Artificial Sequence
  spacer sequence ATCN PAM
gcccgccucagccucccaaa

SEQ ID NO: 4871 - RNA, 20 nt, Artificial Sequence
  spacer sequence ATCN PAM
cagcacuuugggaggcugag

SEQ ID NO: 4872 - RNA, 20 nt, Artificial Sequence
  spacer sequence ATCN PAM
agagacagagacagggagac

SEQ ID NO: 4873 - RNA, 20 nt, Artificial Sequence
  spacer sequence ATCN PAM
cucugucuguuucucuagcu

SEQ ID NO: 4874 - RNA, 20 nt, Artificial Sequence
  spacer sequence ATCN PAM
cugucuaucucugucucagu

SEQ ID NO: 4875 - RNA, 20 nt, Artificial Sequence
  spacer sequence ATCN PAM
cugucucagucccuucuuuu

SEQ ID NO: 4876 - RNA, 20 nt, Artificial Sequence
  spacer sequence ATCN PAM
cccucccguggccgcccuca

SEQ ID NO: 4877 - RNA, 20 nt, Artificial Sequence
  spacer sequence ATCN PAM
cacucugggccuggcccugg

SEQ ID NO: 4878 - RNA, 20 nt, Artificial Sequence
  spacer sequence ATCN PAM
uaccaggccaggucggggca

SEQ ID NO: 4879 - RNA, 20 nt, Artificial Sequence
  spacer sequence ATCN PAM
caaacccgucagacagguuu

SEQ ID NO: 4880 - RNA, 20 nt, Artificial Sequence
  spacer sequence ATCN PAM
uccuucacccagccugcccu

SEQ ID NO: 4881 - RNA, 20 nt, Artificial Sequence
  spacer sequence ATCN PAM
gcaaucugccggucgcccug

SEQ ID NO: 4882 - RNA, 20 nt, Artificial Sequence
  spacer sequence ATCN PAM
gccggucgcccugugcaggg

SEQ ID NO: 4883 - RNA, 20 nt, Artificial Sequence
  spacer sequence ATCN PAM
ucccugcacagggcgaccgg

SEQ ID NO: 4884 - RNA, 20 nt, Artificial Sequence
  spacer sequence ATCN PAM
ucacaccccaggccccgcac

SEQ ID NO: 4885 - RNA, 20 nt, Artificial Sequence
  spacer sequence ATCN PAM
auccucacaccccaggcccc

SEQ ID NO: 4886 - RNA, 20 nt, Artificial Sequence
  spacer sequence ATCN PAM
aguacaccgcuagccccacc

SEQ ID NO: 4887 - RNA, 20 nt, Artificial Sequence
  spacer sequence ATCN PAM
gaaauucggucccugugccu

SEQ ID NO: 4888 - RNA, 20 nt, Artificial Sequence
  spacer sequence ATCN PAM
gaaggcucaucugguaguca

SEQ ID NO: 4889 - RNA, 20 nt, Artificial Sequence
  spacer sequence ATCN PAM
gguagucagacugaggccgg

SEQ ID NO: 4890 - RNA, 20 nt, Artificial Sequence
  spacer sequence ATCN PAM
ucggggcaguugagccuccu

SEQ ID NO: 4891 - RNA, 20 nt, Artificial Sequence
  spacer sequence ATCN PAM
cagcacuuugggaggccaag

SEQ ID NO: 4892 - RNA, 20 nt, Artificial Sequence
  spacer sequence ATCN PAM
cagcuacucggcaggcugag

SEQ ID NO: 4893 - RNA, 20 nt, Artificial Sequence
  spacer sequence ATCN PAM
cggcucacugcaaccuccgc

SEQ ID NO: 4894 - RNA, 20 nt, Artificial Sequence
  spacer sequence ATCN PAM
caccacugcacuccacccug

SEQ ID NO: 4895 - RNA, 20 nt, Artificial Sequence
  spacer sequence ATCN PAM
ugcucucucugucacccagg

SEQ ID NO: 4896 - RNA, 20 nt, Artificial Sequence
  spacer sequence ATCN PAM
caccacugcacuccagccug

SEQ ID NO: 4897 - RNA, 20 nt, Artificial Sequence
  spacer sequence ATCN PAM
cggcucacagaacccuugaa

SEQ ID NO: 4898 - RNA, 20 nt, Artificial Sequence
  spacer sequence ATCN PAM
ucccuccucagccuccagag

SEQ ID NO: 4899 - RNA, 20 nt, Artificial Sequence
  spacer sequence ATCN PAM
cagcuacucuggaggcugag

SEQ ID NO: 4900 - RNA, 20 nt, Artificial Sequence
  spacer sequence ATCN PAM
cgccuggccaacaaaauuua

SEQ ID NO: 4901 - RNA, 20 nt, Artificial Sequence
  spacer sequence ATCN PAM
cagcacuuugggagaccaag

SEQ ID NO: 4902 - RNA, 20 nt, Artificial Sequence
  spacer sequence ATCN PAM
caggugacucacccgccuug

SEQ ID NO: 4903 - RNA, 20 nt, Artificial Sequence
  spacer sequence ATCN PAM
ggaguucgagaccagccuca

SEQ ID NO: 4904 - RNA, 20 nt, Artificial Sequence
  spacer sequence ATCN PAM
cagcuacucgggaggcugau

SEQ ID NO: 4905 - RNA, 20 nt, Artificial Sequence
  spacer sequence ATCN PAM
gccucccgaguagcugggau

SEQ ID NO: 4906 - RNA, 20 nt, Artificial Sequence
  spacer sequence ATCN PAM
cuugaacccaggaggcggag

SEQ ID NO: 4907 - RNA, 20 nt, Artificial Sequence
  spacer sequence ATCN PAM
cggcucaccgcaaccuccgc

SEQ ID NO: 4908 - RNA, 20 nt, Artificial Sequence
  spacer sequence ATCN PAM
caccacugcacuccagucug

SEQ ID NO: 4909 - RNA, 20 nt, Artificial Sequence
  spacer sequence ATCN PAM
ugaacuccuggcuucaagug

SEQ ID NO: 4910 - RNA, 20 nt, Artificial Sequence
  spacer sequence ATCN PAM
cagcacuuugggagaccgag

SEQ ID NO: 4911 - RNA, 20 nt, Artificial Sequence
  spacer sequence ATCN PAM
ggugcucauuaugagccagg

SEQ ID NO: 4912 - RNA, 20 nt, Artificial Sequence
  spacer sequence ATCN PAM
uggcucauaaugagcaccug

SEQ ID NO: 4913 - RNA, 20 nt, Artificial Sequence
  spacer sequence ATCN PAM
ugggggccgucuccccuccc

SEQ ID NO: 4914 - RNA, 20 nt, Artificial Sequence
  spacer sequence ATCN PAM
aaggacgacaaggcagaggc

SEQ ID NO: 4915 - RNA, 20 nt, Artificial Sequence
  spacer sequence ATCN PAM
ccucuggugcccuacuucug

SEQ ID NO: 4916 - RNA, 20 nt, Artificial Sequence
  spacer sequence ATCN PAM
aacgccccugcccugccccc

SEQ ID NO: 4917 - RNA, 20 nt, Artificial Sequence
  spacer sequence ATCN PAM
uuggauggggcugcaaggug

SEQ ID NO: 4918 - RNA, 20 nt, Artificial Sequence
  spacer sequence ATCN PAM
aacgauccaacgccccugcc

SEQ ID NO: 4919 - RNA, 20 nt, Artificial Sequence
  spacer sequence ATCN PAM
gagaugaauuucucagugcc

SEQ ID NO: 4920 - RNA, 20 nt, Artificial Sequence
  spacer sequence ATCN PAM
cggaugaauacauggcccca

SEQ ID NO: 4921 - RNA, 20 nt, Artificial Sequence
  spacer sequence ATCN PAM
ggcuucuucguggccugggg

SEQ ID NO: 4922 - RNA, 20 nt, Artificial Sequence
  spacer sequence ATCN PAM
gcacugggcugaccacugcg

SEQ ID NO: 4923 - RNA, 20 nt, Artificial Sequence
  spacer sequence ATCN PAM
gaggugaagguccaggaagu

SEQ ID NO: 4924 - RNA, 20 nt, Artificial Sequence
  spacer sequence ATCN PAM
gcugcccggccccgagggaa

SEQ ID NO: 4925 - RNA, 20 nt, Artificial Sequence
  spacer sequence ATCN PAM
uuuuuuuuuuuuuuuugaga

SEQ ID NO: 4926 - RNA, 20 nt, Artificial Sequence
  spacer sequence ATCN PAM
caccacugcacccaugccug

SEQ ID NO: 4927 - RNA, 20 nt, Artificial Sequence
  spacer sequence ATCN PAM
cuugaacccgggaagcugag

SEQ ID NO: 4928 - RNA, 20 nt, Artificial Sequence
  spacer sequence ATCN PAM
cagcuacuggggaggcugag

SEQ ID NO: 4929 - RNA, 20 nt, Artificial Sequence
  spacer sequence ATCN PAM
ccugaggucaggaguucaag

SEQ ID NO: 4930 - RNA, 20 nt, Artificial Sequence
  spacer sequence ATCN PAM
acccgccucagccucccaaa

SEQ ID NO: 4931 - RNA, 20 nt, Artificial Sequence
  spacer sequence ATCN PAM
cagcacuuugggaggcugag

SEQ ID NO: 4932 - RNA, 20 nt, Artificial Sequence
  spacer sequence ATCN PAM
acagggcacaagugggaauc

SEQ ID NO: 4933 - RNA, 20 nt, Artificial Sequence
  spacer sequence ATCN PAM
ggguucuaggaggugagaac

SEQ ID NO: 4934 - RNA, 20 nt, Artificial Sequence
  spacer sequence ATCN PAM
cagcacuuugggaagccgag

SEQ ID NO: 4935 - RNA, 20 nt, Artificial Sequence
  spacer sequence ATCN PAM
gccucccucggcuucccaaa

SEQ ID NO: 4936 - RNA, 20 nt, Artificial Sequence
  spacer sequence ATCN PAM
ccugaggucaggaguucgag

SEQ ID NO: 4937 - RNA, 20 nt, Artificial Sequence
  spacer sequence ATCN PAM
cagcuacucgggaggcugag

SEQ ID NO: 4938 - RNA, 20 nt, Artificial Sequence
  spacer sequence ATCN PAM
caaaaaaacaaaagaggagu

SEQ ID NO: 4939 - RNA, 20 nt, Artificial Sequence
  spacer sequence ATCN PAM
ucacuacuuguucccacacu

SEQ ID NO: 4940 - RNA, 20 nt, Artificial Sequence
  spacer sequence ATCN PAM
cgccacucccccccggggcu

SEQ ID NO: 4941 - RNA, 20 nt, Artificial Sequence
  spacer sequence ATCN PAM
auaaaaugaggauaaucgug

SEQ ID NO: 4942 - RNA, 20 nt, Artificial Sequence
  spacer sequence ATCN PAM
ucauuuuauagaugggcaaa

SEQ ID NO: 4943 - RNA, 20 nt, Artificial Sequence
  spacer sequence ATCN PAM
ugguaccuccuuuggaagcc

SEQ ID NO: 4944 - RNA, 20 nt, Artificial Sequence
  spacer sequence ATCN PAM
cagcacuuugggaggccgag

SEQ ID NO: 4945 - RNA, 20 nt, Artificial Sequence
  spacer sequence ATCN PAM
cuugaggucaggaguuugag

SEQ ID NO: 4946 - RNA, 20 nt, Artificial Sequence
  spacer sequence ATCN PAM
caaacuccugaccucaagug

SEQ ID NO: 4947 - RNA, 20 nt, Artificial Sequence
  spacer sequence ATCN PAM
accuggccaacauggugaag

SEQ ID NO: 4948 - RNA, 20 nt, Artificial Sequence
  spacer sequence ATCN PAM
auugaaucugggaggcagag

SEQ ID NO: 4949 - RNA, 20 nt, Artificial Sequence
  spacer sequence ATCN PAM
gggaggcagagguugcagug

SEQ ID NO: 4950 - RNA, 20 nt, Artificial Sequence
  spacer sequence ATCN PAM
cagcucacugcaaccucugc

SEQ ID NO: 4951 - RNA, 20 nt, Artificial Sequence
  spacer sequence ATCN PAM
cgccauugcacuccagccug

SEQ ID NO: 4952 - RNA, 20 nt, Artificial Sequence
  spacer sequence ATCN PAM
uuugguugcagcugacagaa

SEQ ID NO: 4953 - RNA, 20 nt, Artificial Sequence
  spacer sequence ATCN PAM
uucaguuccaugagcaaaaa

SEQ ID NO: 4954 - RNA, 20 nt, Artificial Sequence
  spacer sequence ATCN PAM
cuaaaucuuucaguuccaug

SEQ ID NO: 4955 - RNA, 20 nt, Artificial Sequence
  spacer sequence ATCN PAM
acggugcugagagggguggc

SEQ ID NO: 4956 - RNA, 20 nt, Artificial Sequence
  spacer sequence ATCN PAM
ccagacauugcugagugucc

SEQ ID NO: 4957 - RNA, 20 nt, Artificial Sequence
  spacer sequence ATCN PAM
cccuugguugagcccuacug

SEQ ID NO: 4958 - RNA, 20 nt, Artificial Sequence
  spacer sequence ATCN PAM
agcugugucugaaacccgcc

SEQ ID NO: 4959 - RNA, 20 nt, Artificial Sequence
  spacer sequence ATCN PAM
aggacccucggucaguguca

SEQ ID NO: 4960 - RNA, 20 nt, Artificial Sequence
  spacer sequence ATCN PAM
uugugacacugaccgagggu

SEQ ID NO: 4961 - RNA, 20 nt, Artificial Sequence
  spacer sequence ATCN PAM
cuuagcauugccauccccuc

SEQ ID NO: 4962 - RNA, 20 nt, Artificial Sequence
  spacer sequence ATCN PAM
ccucucuuggcuuuuuucuu

SEQ ID NO: 4963 - RNA, 20 nt, Artificial Sequence
  spacer sequence ATCN PAM
cuugaacccgggaggcagag

SEQ ID NO: 4964 - RNA, 20 nt, Artificial Sequence
  spacer sequence ATCN PAM
cuacuaaaaauacguaaauu

SEQ ID NO: 4965 - RNA, 20 nt, Artificial Sequence
  spacer sequence ATCN PAM
ccugaggucaggaguucaag

SEQ ID NO: 4966 - RNA, 20 nt, Artificial Sequence
  spacer sequence ATCN PAM
acccgccaugaccucccaaa

SEQ ID NO: 4967 - RNA, 20 nt, Artificial Sequence
  spacer sequence ATCN PAM
cagcacuuugggaggucaug

SEQ ID NO: 4968 - RNA, 20 nt, Artificial Sequence
  spacer sequence ATCN PAM
uuuccccauaaaggcaaagu

SEQ ID NO: 4969 - RNA, 20 nt, Artificial Sequence
  spacer sequence ATCN PAM
ucuuuuccccauaaaggcaa

SEQ ID NO: 4970 - RNA, 20 nt, Artificial Sequence
  spacer sequence ATCN PAM
caucugcccaucaucuuaac

SEQ ID NO: 4971 - RNA, 20 nt, Artificial Sequence
  spacer sequence ATCN PAM
gcccaucaucuuaacagccc

SEQ ID NO: 4972 - RNA, 20 nt, Artificial Sequence
  spacer sequence ATCN PAM
ucuuaacagcccuggcagga

SEQ ID NO: 4973 - RNA, 20 nt, Artificial Sequence
  spacer sequence ATCN PAM
uaacagcccuggcaggaguc

SEQ ID NO: 4974 - RNA, 20 nt, Artificial Sequence
  spacer sequence ATCN PAM
ccuuaccaggccacagccca

SEQ ID NO: 4975 - RNA, 20 nt, Artificial Sequence
  spacer sequence ATCN PAM
gggcauccccuuaccaggcc

SEQ ID NO: 4976 - RNA, 20 nt, Artificial Sequence
  spacer sequence ATCN PAM
cugccuggccaaucugggca

SEQ ID NO: 4977 - RNA, 20 nt, Artificial Sequence
  spacer sequence ATCN PAM
caugguuguauggagugagc

SEQ ID NO: 4978 - RNA, 20 nt, Artificial Sequence
  spacer sequence ATCN PAM
cgaccacgaguuuucaccca

SEQ ID NO: 4979 - RNA, 20 nt, Artificial Sequence
  spacer sequence ATCN PAM
cagcacuuugggaggccgag

SEQ ID NO: 4980 - RNA, 20 nt, Artificial Sequence
  spacer sequence ATCN PAM
cagaacuuugggaggccgag

SEQ ID NO: 4981 - RNA, 20 nt, Artificial Sequence
  spacer sequence ATCN PAM
accugccucggccucccaaa

SEQ ID NO: 4982 - RNA, 20 nt, Artificial Sequence
  spacer sequence ATCN PAM
ccugagguuaggaguucggg

SEQ ID NO: 4983 - RNA, 20 nt, Artificial Sequence
  spacer sequence ATCN PAM
aaaaauuauccagccauggu

SEQ ID NO: 4984 - RNA, 20 nt, Artificial Sequence
  spacer sequence ATCN PAM
agccauggugguguaugccu

SEQ ID NO: 4985 - RNA, 20 nt, Artificial Sequence
  spacer sequence ATCN PAM
gggaagcagagguugcagug

SEQ ID NO: 4986 - RNA, 20 nt, Artificial Sequence
  spacer sequence ATCN PAM
ugguucacugcaaccucugc

SEQ ID NO: 4987 - RNA, 20 nt, Artificial Sequence
  spacer sequence ATCN PAM
ugccauugcacuccagcccg

SEQ ID NO: 4988 - RNA, 20 nt, Artificial Sequence
  spacer sequence ATCN PAM
accuggugcgagcuuuuccu

SEQ ID NO: 4989 - RNA, 20 nt, Artificial Sequence
  spacer sequence ATCN PAM
cuccaaacacuucuuggaga

SEQ ID NO: 4990 - RNA, 20 nt, Artificial Sequence
  spacer sequence ATCN PAM
cccugucacagcgagcuuug

SEQ ID NO: 4991 - RNA, 20 nt, Artificial Sequence
  spacer sequence ATCN PAM
uuuuucuuuccuuucuuacc

SEQ ID NO: 4992 - RNA, 20 nt, Artificial Sequence
  spacer sequence ATCN PAM
caaugcuccuagaaggccac

SEQ ID NO: 4993 - RNA, 20 nt, Artificial Sequence
  spacer sequence ATCN PAM
gccuucuuccuguuuugcuc

SEQ ID NO: 4994 - RNA, 20 nt, Artificial Sequence
  spacer sequence ATCN PAM
cccaaagaucaaaaguggac

SEQ ID NO: 4995 - RNA, 20 nt, Artificial Sequence
  spacer sequence ATCN PAM
uugggcgauguucagagcaa

SEQ ID NO: 4996 - RNA, 20 nt, Artificial Sequence
  spacer sequence ATCN PAM
aaaguggacacccaggccua

SEQ ID NO: 4997 - RNA, 20 nt, Artificial Sequence
  spacer sequence ATCN PAM
uuggcugacugcccagacca

SEQ ID NO: 4998 - RNA, 20 nt, Artificial Sequence
  spacer sequence ATCN PAM
cuccuguagcuuaacugcuu

SEQ ID NO: 4999 - RNA, 20 nt, Artificial Sequence
  spacer sequence ATCN PAM
ugcuaagggcaaaagugaag

SEQ ID NO: 5000 - RNA, 20 nt, Artificial Sequence
  spacer sequence ATCN PAM
ucugguuuguucuucuuuga

SEQ ID NO: 5001 - RNA, 20 nt, Artificial Sequence
  spacer sequence ATCN PAM
ucuuucuccuccuccuccuc

SEQ ID NO: 5002 - RNA, 20 nt, Artificial Sequence
  spacer sequence ATCN PAM
ucaucuucuuucuccuccuc

SEQ ID NO: 5003 - RNA, 20 nt, Artificial Sequence
  spacer sequence ATCN PAM
ucacccucuuccuccucauc

SEQ ID NO: 5004 - RNA, 20 nt, Artificial Sequence
  spacer sequence ATCN PAM
uuuaaugaugccugugcagu

SEQ ID NO: 5005 - RNA, 20 nt, Artificial Sequence
  spacer sequence ATCN PAM
uuaaaggauagccauuuauu

SEQ ID NO: 5006 - RNA, 20 nt, Artificial Sequence
  spacer sequence ATCN PAM
uaugagcuauacgaaaauuu

SEQ ID NO: 5007 - RNA, 20 nt, Artificial Sequence
  spacer sequence ATCN PAM
cgccauugcacuccagccua

SEQ ID NO: 5008 - RNA, 20 nt, Artificial Sequence
  spacer sequence ATCN PAM
cggcucaccgcaaccuccgc

SEQ ID NO: 5009 - RNA, 20 nt, Artificial Sequence
  spacer sequence ATCN PAM
cagcuacucaggaggcugag

SEQ ID NO: 5010 - RNA, 20 nt, Artificial Sequence
  spacer sequence ATCN PAM
cuacuaaaaauacaaaaauu

SEQ ID NO: 5011 - RNA, 20 nt, Artificial Sequence
  spacer sequence ATCN PAM
cgaggucaggaguuugaaag

SEQ ID NO: 5012 - RNA, 20 nt, Artificial Sequence
  spacer sequence ATCN PAM
gccugcuucggccucccaaa

SEQ ID NO: 5013 - RNA, 20 nt, Artificial Sequence
  spacer sequence ATCN PAM
caguauuuugggaggccgaa

SEQ ID NO: 5014 - RNA, 20 nt, Artificial Sequence
  spacer sequence ATCN PAM
acaguacaucuugcguuuuu

SEQ ID NO: 5015 - RNA, 20 nt, Artificial Sequence
  spacer sequence ATCN PAM
ugcguuuuuuaagaugcugc

SEQ ID NO: 5016 - RNA, 20 nt, Artificial Sequence
  spacer sequence ATCN PAM
uaaaaaacgcaagauguacu

SEQ ID NO: 5017 - RNA, 20 nt, Artificial Sequence
  spacer sequence ATCN PAM
aaaaaacaaagaaauuccgu

SEQ ID NO: 5018 - RNA, 20 nt, Artificial Sequence
  spacer sequence ATCN PAM
ccguccaggcacuugagaga

SEQ ID NO: 5019 - RNA, 20 nt, Artificial Sequence
  spacer sequence ATCN PAM
aucuucaaggauucugucug

SEQ ID NO: 5020 - RNA, 20 nt, Artificial Sequence
  spacer sequence ATCN PAM
ucaaggauucugucuguaau

SEQ ID NO: 5021 - RNA, 20 nt, Artificial Sequence
  spacer sequence ATCN PAM
uugaagauggauucuccguu

SEQ ID NO: 5022 - RNA, 20 nt, Artificial Sequence
  spacer sequence ATCN PAM
guaggucccacgccccuuca

SEQ ID NO: 5023 - RNA, 20 nt, Artificial Sequence
  spacer sequence ATCN PAM
agcauuaucuccagauucca

SEQ ID NO: 5024 - RNA, 20 nt, Artificial Sequence
  spacer sequence ATCN PAM
ccagauuccaagaaguuggg

SEQ ID NO: 5025 - RNA, 20 nt, Artificial Sequence
  spacer sequence ATCN PAM
ggagauaaugcuggauaauu

SEQ ID NO: 5026 - RNA, 20 nt, Artificial Sequence
  spacer sequence ATCN PAM
guacagaaaagagauaccaa

SEQ ID NO: 5027 - RNA, 20 nt, Artificial Sequence
  spacer sequence ATCN PAM
cuuuucuguacugauugcug

SEQ ID NO: 5028 - RNA, 20 nt, Artificial Sequence
  spacer sequence ATCN PAM
cuuccagaaaacugaaguug

SEQ ID NO: 5029 - RNA, 20 nt, Artificial Sequence
  spacer sequence ATCN PAM
uuuuuuuuuuuuugagacag

SEQ ID NO: 5030 - RNA, 20 nt, Artificial Sequence
  spacer sequence ATCN PAM
ugccacugcacuccagcuug

SEQ ID NO: 5031 - RNA, 20 nt, Artificial Sequence
  spacer sequence ATCN PAM
cggcucaccgcaaccuccuc

SEQ ID NO: 5032 - RNA, 20 nt, Artificial Sequence
  spacer sequence ATCN PAM
cuugaacccgggaggaggag

SEQ ID NO: 5033 - RNA, 20 nt, Artificial Sequence
  spacer sequence ATCN PAM
cagcuacucagaaggcugag

SEQ ID NO: 5034 - RNA, 20 nt, Artificial Sequence
  spacer sequence ATCN PAM
cagcuacuggggaggcugag

SEQ ID NO: 5035 - RNA, 20 nt, Artificial Sequence
  spacer sequence ATCN PAM
cuugaaaccaggaggcggag

SEQ ID NO: 5036 - RNA, 20 nt, Artificial Sequence
  spacer sequence ATCN PAM
ccgccuccugguuucaagcg

SEQ ID NO: 5037 - RNA, 20 nt, Artificial Sequence
  spacer sequence ATCN PAM
ugguacaaucuccgccuccu

SEQ ID NO: 5038 - RNA, 20 nt, Artificial Sequence
  spacer sequence ATCN PAM
agccauauuuuggcaacucu

SEQ ID NO: 5039 - RNA, 20 nt, Artificial Sequence
  spacer sequence ATCN PAM
gaacucaugggggaagccuc

SEQ ID NO: 5040 - RNA, 20 nt, Artificial Sequence
  spacer sequence ATCN PAM
uucuuuugagccacucuugg

SEQ ID NO: 5041 - RNA, 20 nt, Artificial Sequence
  spacer sequence ATCN PAM
cccuuuggggcgaggucaag

SEQ ID NO: 5042 - RNA, 20 nt, Artificial Sequence
  spacer sequence ATCN PAM
accccucgggcggggccaag

SEQ ID NO: 5043 - RNA, 20 nt, Artificial Sequence
  spacer sequence ATCN PAM
ccgcucgggcgcccggccgg

SEQ ID NO: 5044 - RNA, 20 nt, Artificial Sequence
  spacer sequence ATCN PAM
ucagcggcggcggggcgggc

SEQ ID NO: 5045 - RNA, 20 nt, Artificial Sequence
  spacer sequence ATCN PAM
ccggcccucugcccgccccg

SEQ ID NO: 5046 - RNA, 20 nt, Artificial Sequence
  spacer sequence ATCN PAM
uguuuaccucccucccccuc

SEQ ID NO: 5047 - RNA, 20 nt, Artificial Sequence
  spacer sequence ATCN PAM
aaggccgcggcagcaagugc

SEQ ID NO: 5048 - RNA, 20 nt, Artificial Sequence
  spacer sequence ATCN PAM
cacaggccggguccgcgacg

SEQ ID NO: 5049 - RNA, 20 nt, Artificial Sequence
  spacer sequence ATCN PAM
uccggggaccucaggcccac

SEQ ID NO: 5050 - RNA, 20 nt, Artificial Sequence
  spacer sequence ATCN PAM
uuucuguuggaagaaggguu

SEQ ID NO: 5051 - RNA, 20 nt, Artificial Sequence
  spacer sequence ATCN PAM
gcucgcccuccgugaacaug

SEQ ID NO: 5052 - RNA, 20 nt, Artificial Sequence
  spacer sequence ATCN PAM
accgcaucgacuccaccgag

SEQ ID NO: 5053 - RNA, 20 nt, Artificial Sequence
  spacer sequence ATCN PAM
acuccaccgaggucaucuac

SEQ ID NO: 5054 - RNA, 20 nt, Artificial Sequence
  spacer sequence ATCN PAM
accagccgcgccgcaagcgg

SEQ ID NO: 5055 - RNA, 20 nt, Artificial Sequence
  spacer sequence ATCN PAM
gcaaguaccugaugggggac

SEQ ID NO: 5056 - RNA, 20 nt, Artificial Sequence
  spacer sequence ATCN PAM
gguacuugccgaugagcuug

SEQ ID NO: 5057 - RNA, 20 nt, Artificial Sequence
  spacer sequence ATCN PAM
ugacggcccuccugcacagc

SEQ ID NO: 5058 - RNA, 20 nt, Artificial Sequence
  spacer sequence ATCN PAM
ucaagaagaagaaguugcga

SEQ ID NO: 5059 - RNA, 20 nt, Artificial Sequence
  spacer sequence ATCN PAM
uucgcaacuucuucuucuug

SEQ ID NO: 5060 - RNA, 20 nt, Artificial Sequence
  spacer sequence ATCN PAM
ccaacggggaggccaacgug

SEQ ID NO: 5061 - RNA, 20 nt, Artificial Sequence
  spacer sequence ATCN PAM
gcaccgugacuggcccggcc

SEQ ID NO: 5062 - RNA, 20 nt, Artificial Sequence
  spacer sequence ATCN PAM
ccuaagacuagccccuuggc

SEQ ID NO: 5063 - RNA, 20 nt, Artificial Sequence
  spacer sequence ATCN PAM
gccuguguuuguuugggccc

SEQ ID NO: 5064 - RNA, 20 nt, Artificial Sequence
  spacer sequence ATCN PAM
cauuucgccuggccccggua

SEQ ID NO: 5065 - RNA, 20 nt, Artificial Sequence
  spacer sequence ATCN PAM
ugucagaggggaacccuggg

SEQ ID NO: 5066 - RNA, 20 nt, Artificial Sequence
  spacer sequence ATCN PAM
gucagcaggagggaaacgua

SEQ ID NO: 5067 - RNA, 20 nt, Artificial Sequence
  spacer sequence ATCN PAM
cuggcaaaugaggaaaggcu

SEQ ID NO: 5068 - RNA, 20 nt, Artificial Sequence
  spacer sequence ATCN PAM
cuggcccccggggcuggaag

SEQ ID NO: 5069 - RNA, 20 nt, Artificial Sequence
  spacer sequence ATCN PAM
ggaagaccuuacuuuuccaa

SEQ ID NO: 5070 - RNA, 20 nt, Artificial Sequence
  spacer sequence ATCN PAM
cggacgccucugcaucugug

SEQ ID NO: 5071 - RNA, 20 nt, Artificial Sequence
  spacer sequence ATCN PAM
gugcgcggagaagcuccuac

SEQ ID NO: 5072 - RNA, 20 nt, Artificial Sequence
  spacer sequence ATCN PAM
cagccagacacgcugcaccu

SEQ ID NO: 5073 - RNA, 20 nt, Artificial Sequence
  spacer sequence ATCN PAM
gcugggcuaggccucgaggg

SEQ ID NO: 5074 - RNA, 20 nt, Artificial Sequence
  spacer sequence ATCN PAM
uggcuaacacggugaaaccc

SEQ ID NO: 5075 - RNA, 20 nt, Artificial Sequence
  spacer sequence ATCN PAM
ccugaccucgugauccgccc

SEQ ID NO: 5076 - RNA, 20 nt, Artificial Sequence
  spacer sequence ATCN PAM
cgaggucaggagauugagac

SEQ ID NO: 5077 - RNA, 20 nt, Artificial Sequence
  spacer sequence ATCN PAM
gcccgccucggccucccaaa

SEQ ID NO: 5078 - RNA, 20 nt, Artificial Sequence
  spacer sequence ATCN PAM
ccgcccccuggguucaagug

SEQ ID NO: 5079 - RNA, 20 nt, Artificial Sequence
  spacer sequence ATCN PAM
cuugaacccagggggcggag

SEQ ID NO: 5080 - RNA, 20 nt, Artificial Sequence
  spacer sequence ATCN PAM
cagcuacucgggaggcugag

SEQ ID NO: 5081 - RNA, 20 nt, Artificial Sequence
  spacer sequence ATCN PAM
uggccagguuggucuugaac

SEQ ID NO: 5082 - RNA, 20 nt, Artificial Sequence
  spacer sequence ATCN PAM
cgaggucagaaguucaagac

SEQ ID NO: 5083 - RNA, 20 nt, Artificial Sequence
  spacer sequence ATCN PAM
accugccucagccucccaaa

SEQ ID NO: 5084 - RNA, 20 nt, Artificial Sequence
  spacer sequence ATCN PAM
cagcacuuugggaggcugag

SEQ ID NO: 5085 - RNA, 20 nt, Artificial Sequence
  spacer sequence ATCN PAM
gcaugcaggcugugacaugc

SEQ ID NO: 5086 - RNA, 20 nt, Artificial Sequence
  spacer sequence ATCN PAM
gaaaggccucguggaaacac

SEQ ID NO: 5087 - RNA, 20 nt, Artificial Sequence
  spacer sequence ATCN PAM
cacagagaccaggcacaggc

SEQ ID NO: 5088 - RNA, 20 nt, Artificial Sequence
  spacer sequence ATCN PAM
cacagagaccaggcacaggc

SEQ ID NO: 5089 - RNA, 20 nt, Artificial Sequence
  spacer sequence ATCN PAM
cagcacuuugggaggcugag

SEQ ID NO: 5090 - RNA, 20 nt, Artificial Sequence
  spacer sequence ATCN PAM
acccaccucagccucccaaa

SEQ ID NO: 5091 - RNA, 20 nt, Artificial Sequence
  spacer sequence ATCN PAM
ccugaggucaggaguucgag

SEQ ID NO: 5092 - RNA, 20 nt, Artificial Sequence
  spacer sequence ATCN PAM
cuacuaaaaauacaaaaguu

SEQ ID NO: 5093 - RNA, 20 nt, Artificial Sequence
  spacer sequence ATCN PAM
cagcuacucgggaggcugag

SEQ ID NO: 5094 - RNA, 20 nt, Artificial Sequence
  spacer sequence ATCN PAM
cgggucaccgcaagcuccgc

SEQ ID NO: 5095 - RNA, 20 nt, Artificial Sequence
  spacer sequence ATCN PAM
caccauugcgcuccagccug

SEQ ID NO: 5096 - RNA, 20 nt, Artificial Sequence
  spacer sequence ATCN PAM
ggcuugaguuuugacaaaug

SEQ ID NO: 5097 - RNA, 20 nt, Artificial Sequence
  spacer sequence ATCN PAM
cucacuucaaggcagugggg

SEQ ID NO: 5098 - RNA, 20 nt, Artificial Sequence
  spacer sequence ATCN PAM
uggcccugaguguguaacgg

SEQ ID NO: 5099 - RNA, 20 nt, Artificial Sequence
  spacer sequence ATCN PAM
cagggggccccgcaagggca

SEQ ID NO: 5100 - RNA, 20 nt, Artificial Sequence
  spacer sequence ATCN PAM
ggagcugccccgcuuacagc

SEQ ID NO: 5101 - RNA, 20 nt, Artificial Sequence
  spacer sequence ATCN PAM
cagcuguaagcggggcagcu

SEQ ID NO: 5102 - RNA, 20 nt, Artificial Sequence
  spacer sequence ATCN PAM
gagcggaguuuauuaaacuu

SEQ ID NO: 5103 - RNA, 20 nt, Artificial Sequence
  spacer sequence ATCN PAM
cccacgcuuuccacaccaac

SEQ ID NO: 5104 - RNA, 20 nt, Artificial Sequence
  spacer sequence ATCN PAM
ccaagggggguggguugggg

SEQ ID NO: 5105 - RNA, 20 nt, Artificial Sequence
  spacer sequence ATCN PAM
gccccaacccaccccccuug

SEQ ID NO: 5106 - RNA, 20 nt, Artificial Sequence
  spacer sequence ATCN PAM
uauuagaaauaggaaaguuc

SEQ ID NO: 5107 - RNA, 20 nt, Artificial Sequence
  spacer sequence ATCN PAM
augaguuaaaaagagggcug

SEQ ID NO: 5108 - RNA, 20 nt, Artificial Sequence
  spacer sequence ATCN PAM
cagcacuuugggaggccaag

SEQ ID NO: 5109 - RNA, 20 nt, Artificial Sequence
  spacer sequence ATCN PAM
acccgccuuggccucccaaa

SEQ ID NO: 5110 - RNA, 20 nt, Artificial Sequence
  spacer sequence ATCN PAM
cccgagguugggaguuagcc

SEQ ID NO: 5111 - RNA, 20 nt, Artificial Sequence
  spacer sequence ATCN PAM
cagcuacucuggaggcugag

SEQ ID NO: 5112 - RNA, 20 nt, Artificial Sequence
  spacer sequence ATCN PAM
ccugcggcucccacguccac

SEQ ID NO: 5113 - RNA, 20 nt, Artificial Sequence
  spacer sequence ATCN PAM
agcaugggugggcagagagc

SEQ ID NO: 5114 - RNA, 20 nt, Artificial Sequence
  spacer sequence ATCN PAM
caccgacgugggcccugggc

SEQ ID NO: 5115 - RNA, 20 nt, Artificial Sequence
  spacer sequence ATCN PAM
ucggggggccccuccucccc

SEQ ID NO: 5116 - RNA, 20 nt, Artificial Sequence
  spacer sequence ATCN PAM
acugaaaaauaccugccgag

SEQ ID NO: 5117 - RNA, 20 nt, Artificial Sequence
  spacer sequence ATCN PAM
aguacauugcccgggcgggc

SEQ ID NO: 5118 - RNA, 20 nt, Artificial Sequence
  spacer sequence ATCN PAM
cccuccuccugcuccgugcu

SEQ ID NO: 5119 - RNA, 20 nt, Artificial Sequence
  spacer sequence ATCN PAM
cgugcgcagguucccccaag

SEQ ID NO: 5120 - RNA, 20 nt, Artificial Sequence
  spacer sequence ATCN PAM
ccccgggucaggugggugcg

SEQ ID NO: 5121 - RNA, 20 nt, Artificial Sequence
  spacer sequence ATCN PAM
gugccagaggcccuuccacu

SEQ ID NO: 5122 - RNA, 20 nt, Artificial Sequence
  spacer sequence ATCN PAM
cagaaccuguuugcuggggc

SEQ ID NO: 5123 - RNA, 20 nt, Artificial Sequence
  spacer sequence ATCN PAM
ugaaaugaauggggcccagg

SEQ ID NO: 5124 - RNA, 20 nt, Artificial Sequence
  spacer sequence ATCN PAM
ggauucucucagcuggagcg

SEQ ID NO: 5125 - RNA, 20 nt, Artificial Sequence
  spacer sequence ATCN PAM
agaucuugaaaugaaugggg

SEQ ID NO: 5126 - RNA, 20 nt, Artificial Sequence
  spacer sequence ATCN PAM
gacagugggagacccugugu

SEQ ID NO: 5127 - RNA, 20 nt, Artificial Sequence
  spacer sequence ATCN PAM
ucagacagugggagacccug

SEQ ID NO: 5128 - RNA, 20 nt, Artificial Sequence
  spacer sequence ATCN PAM
uggccucaccugacgacagg

SEQ ID NO: 5129 - RNA, 20 nt, Artificial Sequence
  spacer sequence ATCN PAM
guagcacuggcagcaggcac

SEQ ID NO: 5130 - RNA, 20 nt, Artificial Sequence
  spacer sequence ATCN PAM
gggcucgaggcaggaguuug

SEQ ID NO: 5131 - RNA, 20 nt, Artificial Sequence
  spacer sequence ATCN PAM
uggagacagggcugccuuau

SEQ ID NO: 5132 - RNA, 20 nt, Artificial Sequence
  spacer sequence ATCN PAM
ugccugacccaaggccugca

SEQ ID NO: 5133 - RNA, 20 nt, Artificial Sequence
  spacer sequence ATCN PAM
cuggacuguuugacaguagc

SEQ ID NO: 5134 - RNA, 20 nt, Artificial Sequence
  spacer sequence ATCN PAM
augugcuacagcccagaggg

SEQ ID NO: 5135 - RNA, 20 nt, Artificial Sequence
  spacer sequence ATCN PAM
ggggccugaugggaaaaguc

SEQ ID NO: 5136 - RNA, 20 nt, Artificial Sequence
  spacer sequence ATCN PAM
ggccccggauggugguguuc

SEQ ID NO: 5137 - RNA, 20 nt, Artificial Sequence
  spacer sequence ATCN PAM
gcugcugugugaccuuggcc

SEQ ID NO: 5138 - RNA, 20 nt, Artificial Sequence
  spacer sequence ATCN PAM
cugggaaugugaguggaagg

SEQ ID NO: 5139 - RNA, 20 nt, Artificial Sequence
  spacer sequence ATCN PAM
ccucccagccaugcucggcu

SEQ ID NO: 5140 - RNA, 20 nt, Artificial Sequence
  spacer sequence ATCN PAM
uggaugccccaauggcccga

SEQ ID NO: 5141 - RNA, 20 nt, Artificial Sequence
  spacer sequence ATCN PAM
aggaugaggugguaaaggag

SEQ ID NO: 5142 - RNA, 20 nt, Artificial Sequence
  spacer sequence ATCN PAM
aggagcaggagguugugggc

SEQ ID NO: 5143 - RNA, 20 nt, Artificial Sequence
  spacer sequence ATCN PAM
aggcuggcauggcggcgcag

SEQ ID NO: 5144 - RNA, 20 nt, Artificial Sequence
  spacer sequence ATCN PAM
ggggcagguaccguucugca

SEQ ID NO: 5145 - RNA, 20 nt, Artificial Sequence
  spacer sequence ATCN PAM
cgggcccgccuccccaggcc

SEQ ID NO: 5146 - RNA, 20 nt, Artificial Sequence
  spacer sequence ATCN PAM
aacuggcagggaacagagau

SEQ ID NO: 5147 - RNA, 20 nt, Artificial Sequence
  spacer sequence ATCN PAM
cuguucccugccaguuggau

SEQ ID NO: 5148 - RNA, 20 nt, Artificial Sequence
  spacer sequence ATCN PAM
cugggacagagagggguacc

SEQ ID NO: 5149 - RNA, 20 nt, Artificial Sequence
  spacer sequence ATCN PAM
agggaccuuccccagagggc

SEQ ID NO: 5150 - RNA, 20 nt, Artificial Sequence
  spacer sequence ATCN PAM
agcgacucuggggaaggcac

SEQ ID NO: 5151 - RNA, 20 nt, Artificial Sequence
  spacer sequence ATCN PAM
cccauccccauggcggggga

SEQ ID NO: 5152 - RNA, 20 nt, Artificial Sequence
  spacer sequence ATCN PAM
ccauggcgggggaggaggcc

SEQ ID NO: 5153 - RNA, 20 nt, Artificial Sequence
  spacer sequence ATCN PAM
caacugcacacagccggugc

SEQ ID NO: 5154 - RNA, 20 nt, Artificial Sequence
  spacer sequence ATCN PAM
cggggguggggggcuacccc

SEQ ID NO: 5155 - RNA, 20 nt, Artificial Sequence
  spacer sequence ATCN PAM
guucccagccccggagaagc

SEQ ID NO: 5156 - RNA, 20 nt, Artificial Sequence
  spacer sequence ATCN PAM
ugcggcuucgcgcccgcccc

SEQ ID NO: 5157 - RNA, 20 nt, Artificial Sequence
  spacer sequence ATCN PAM
ccggccgccuuacgcucggg

SEQ ID NO: 5158 - RNA, 20 nt, Artificial Sequence
  spacer sequence ATCN PAM
cagggggucggggcuggcgc

SEQ ID NO: 5159 - RNA, 20 nt, Artificial Sequence
  spacer sequence ATCN PAM
ugcgccuguccccacccccu

SEQ ID NO: 5160 - RNA, 20 nt, Artificial Sequence
  spacer sequence ATCN PAM
uccccggccuccggucacca

SEQ ID NO: 5161 - RNA, 20 nt, Artificial Sequence
  spacer sequence ATCN PAM
ccacccuuggccggcucggg

SEQ ID NO: 5162 - RNA, 20 nt, Artificial Sequence
  spacer sequence ATCN PAM
uccucgcccgaccucacagg

SEQ ID NO: 5163 - RNA, 20 nt, Artificial Sequence
  spacer sequence ATCN PAM
gggccuugcgccccccaccc

SEQ ID NO: 5164 - RNA, 20 nt, Artificial Sequence
  spacer sequence ATCN PAM
cgguccccacgcccgccgga

SEQ ID NO: 5165 - RNA, 20 nt, Artificial Sequence
  spacer sequence ATCN PAM
cagccggcugugggcuaagc

SEQ ID NO: 5166 - RNA, 20 nt, Artificial Sequence
  spacer sequence ATCN PAM
ccggccugucccccguccgc

SEQ ID NO: 5167 - RNA, 20 nt, Artificial Sequence
  spacer sequence ATCN PAM
gcacgauucaccucgcccgg

SEQ ID NO: 5168 - RNA, 20 nt, Artificial Sequence
  spacer sequence ATCN PAM
ugccgaugggccgggggcgg

SEQ ID NO: 5169 - RNA, 20 nt, Artificial Sequence
  spacer sequence ATCN PAM
cugucacacaggggaggggg

SEQ ID NO: 5170 - RNA, 20 nt, Artificial Sequence
  spacer sequence ATCN PAM
cagaccccggcacaaagcug

SEQ ID NO: 5171 - RNA, 20 nt, Artificial Sequence
  spacer sequence ATCN PAM
gggcccaaacgugcacucac

SEQ ID NO: 5172 - RNA, 20 nt, Artificial Sequence
  spacer sequence ATCN PAM
gaacgacacccgcagaaacc

SEQ ID NO: 5173 - RNA, 20 nt, Artificial Sequence
  spacer sequence ATCN PAM
aaccucauccugcagauacu

SEQ ID NO: 5174 - RNA, 20 nt, Artificial Sequence
  spacer sequence ATCN PAM
ugcagauacucaggccacac

SEQ ID NO: 5175 - RNA, 20 nt, Artificial Sequence
  spacer sequence ATCN PAM
gcaggaugagguucgauggu

SEQ ID NO: 5176 - RNA, 20 nt, Artificial Sequence
  spacer sequence ATCN PAM
cuggcugcauggacagaggc

SEQ ID NO: 5177 - RNA, 20 nt, Artificial Sequence
  spacer sequence ATCN PAM
gagugguggccccacagcac

SEQ ID NO: 5178 - RNA, 20 nt, Artificial Sequence
  spacer sequence ATCN PAM
ucuuguucccagcaggacca

SEQ ID NO: 5179 - RNA, 20 nt, Artificial Sequence
  spacer sequence ATCN PAM
caccacugcacuccagccug

SEQ ID NO: 5180 - RNA, 20 nt, Artificial Sequence
  spacer sequence ATCN PAM
cggcucacugcaaccuccac

SEQ ID NO: 5181 - RNA, 20 nt, Artificial Sequence
  spacer sequence ATCN PAM
gggagguggagguugcagug

SEQ ID NO: 5182 - RNA, 20 nt, Artificial Sequence
  spacer sequence ATCN PAM
ugcccagcuaauuuuuguuu

SEQ ID NO: 5183 - RNA, 20 nt, Artificial Sequence
  spacer sequence ATCN PAM
cuacaaaaaaaaacaaaaca

SEQ ID NO: 5184 - RNA, 20 nt, Artificial Sequence
  spacer sequence ATCN PAM
ugcuauguuguccgggcugg

SEQ ID NO: 5185 - RNA, 20 nt, Artificial Sequence
  spacer sequence ATCN PAM
cuugagcccagaaguucgag

SEQ ID NO: 5186 - RNA, 20 nt, Artificial Sequence
  spacer sequence ATCN PAM
uucugucucagucuccuaaa

SEQ ID NO: 5187 - RNA, 20 nt, Artificial Sequence
  spacer sequence ATCN PAM
gaaaccuggcgggguguggg

SEQ ID NO: 5188 - RNA, 20 nt, Artificial Sequence
  spacer sequence ATCN PAM
cuugccuaggaggccccagc

SEQ ID NO: 5189 - RNA, 20 nt, Artificial Sequence
  spacer sequence ATCN PAM
agcugccacuccaggaaacu

SEQ ID NO: 5190 - RNA, 20 nt, Artificial Sequence
  spacer sequence ATCN PAM
uggcccuggcucggggggug

SEQ ID NO: 5191 - RNA, 20 nt, Artificial Sequence
  spacer sequence ATCN PAM
ugagucggaccagcagggcc

SEQ ID NO: 5192 - RNA, 20 nt, Artificial Sequence
  spacer sequence ATCN PAM
ggaggcugcacccucgcccc

SEQ ID NO: 5193 - RNA, 20 nt, Artificial Sequence
  spacer sequence ATCN PAM
guggcucccuacauccggag

SEQ ID NO: 5194 - RNA, 20 nt, Artificial Sequence
  spacer sequence ATCN PAM
ugucggauucgcccacagca

SEQ ID NO: 5195 - RNA, 20 nt, Artificial Sequence
  spacer sequence ATCN PAM
gacacgauccguggcucccu

SEQ ID NO: 5196 - RNA, 20 nt, Artificial Sequence
  spacer sequence ATCN PAM
aaugccuccugcugugggcg

SEQ ID NO: 5197 - RNA, 20 nt, Artificial Sequence
  spacer sequence ATCN PAM
cccuggcugcacccuuguaa

SEQ ID NO: 5198 - RNA, 20 nt, Artificial Sequence
  spacer sequence ATCN PAM
ccgauuccgcauuuucccgg

SEQ ID NO: 5199 - RNA, 20 nt, Artificial Sequence
  spacer sequence ATCN PAM
gggauggcggggguuggggc

SEQ ID NO: 5200 - RNA, 20 nt, Artificial Sequence
  spacer sequence ATCN PAM
ccgggcgcggagcgcccucu

SEQ ID NO: 5201 - RNA, 20 nt, Artificial Sequence
  spacer sequence ATCN PAM
cggaccccggcgcgcugcuc

SEQ ID NO: 5202 - RNA, 20 nt, Artificial Sequence
  spacer sequence ATCN PAM
ccagcgagcccucccgcguc

SEQ ID NO: 5203 - RNA, 20 nt, Artificial Sequence
  spacer sequence ATCN PAM
caguaaaagccgagaaagug

SEQ ID NO: 5204 - RNA, 20 nt, Artificial Sequence
  spacer sequence ATCN PAM
cgccacugcacuccagccug

SEQ ID NO: 5205 - RNA, 20 nt, Artificial Sequence
  spacer sequence ATCN PAM
cggcucacugcaaccucccc

SEQ ID NO: 5206 - RNA, 20 nt, Artificial Sequence
  spacer sequence ATCN PAM
cagcuacucgggaggcugag

SEQ ID NO: 5207 - RNA, 20 nt, Artificial Sequence
  spacer sequence ATCN PAM
ccugaggucaggaguuugaa

SEQ ID NO: 5208 - RNA, 20 nt, Artificial Sequence
  spacer sequence ATCN PAM
gccugccucgcccuccagau

SEQ ID NO: 5209 - RNA, 20 nt, Artificial Sequence
  spacer sequence ATCN PAM
ggagggcgaggcaggcggau

SEQ ID NO: 5210 - RNA, 20 nt, Artificial Sequence
  spacer sequence ATCN PAM
gauaaagugcuggaauuaca

SEQ ID NO: 5211 - RNA, 20 nt, Artificial Sequence
  spacer sequence ATCN PAM
gaucuggagggcgaggcagg

SEQ ID NO: 5212 - RNA, 20 nt, Artificial Sequence
  spacer sequence ATCN PAM
uuaauaagcaggucaggccg

SEQ ID NO: 5213 - RNA, 20 nt, Artificial Sequence
  spacer sequence ATCN PAM
caaaugucugcuaaauaacc

SEQ ID NO: 5214 - RNA, 20 nt, Artificial Sequence
  spacer sequence ATCN PAM
cacucuggggccggggguua

SEQ ID NO: 5215 - RNA, 20 nt, Artificial Sequence
  spacer sequence ATCN PAM
uugcgccacugccuagccug

SEQ ID NO: 5216 - RNA, 20 nt, Artificial Sequence
  spacer sequence ATCN PAM
ccuuaggcccaagcgaugcu

SEQ ID NO: 5217 - RNA, 20 nt, Artificial Sequence
  spacer sequence ATCN PAM
cuugggccuaaggagauuga

SEQ ID NO: 5218 - RNA, 20 nt, Artificial Sequence
  spacer sequence ATCN PAM
ccacgcccggcuaauuuuga

SEQ ID NO: 5219 - RNA, 20 nt, Artificial Sequence
  spacer sequence ATCN PAM
aaauuagccgggcgugguga

SEQ ID NO: 5220 - RNA, 20 nt, Artificial Sequence
  spacer sequence ATCN PAM
ccuggggucaagugauucuc

SEQ ID NO: 5221 - RNA, 20 nt, Artificial Sequence
  spacer sequence ATCN PAM
cuugaccccaggagauggag

SEQ ID NO: 5222 - RNA, 20 nt, Artificial Sequence
  spacer sequence ATCN PAM
cagcaccuugagaggccaag

SEQ ID NO: 5223 - RNA, 20 nt, Artificial Sequence
  spacer sequence ATCN PAM
aguuuccggcucugggccag

SEQ ID NO: 5224 - RNA, 20 nt, Artificial Sequence
  spacer sequence ATCN PAM
agaaaacaucaaguuuccgg

SEQ ID NO: 5225 - RNA, 20 nt, Artificial Sequence
  spacer sequence ATCN PAM
agggcccugcauccaaugag

SEQ ID NO: 5226 - RNA, 20 nt, Artificial Sequence
  spacer sequence ATCN PAM
aaugagcgccccaaaaaucu

SEQ ID NO: 5227 - RNA, 20 nt, Artificial Sequence
  spacer sequence ATCN PAM
uuuuuuuuuuuuuuguacag

SEQ ID NO: 5228 - RNA, 20 nt, Artificial Sequence
  spacer sequence ATCN PAM
cccccacccccgacccgucu

SEQ ID NO: 5229 - RNA, 20 nt, Artificial Sequence
  spacer sequence ATCN PAM
acacuauugcccaggcuggu

SEQ ID NO: 5230 - RNA, 20 nt, Artificial Sequence
  spacer sequence ATCN PAM
cuugaggccaggagcuggaa

SEQ ID NO: 5231 - RNA, 20 nt, Artificial Sequence
  spacer sequence ATCN PAM
ucuggccucagccuccuaaa

SEQ ID NO: 5232 - RNA, 20 nt, Artificial Sequence
  spacer sequence ATCN PAM
ugaauuucacugaaguucgu

SEQ ID NO: 5233 - RNA, 20 nt, Artificial Sequence
  spacer sequence ATCN PAM
gaccacccccugguucugcc

SEQ ID NO: 5234 - RNA, 20 nt, Artificial Sequence
  spacer sequence ATCN PAM
gguuggggccagaggcggca

SEQ ID NO: 5235 - RNA, 20 nt, Artificial Sequence
  spacer sequence ATCN PAM
cggggaggugcccgggacga

SEQ ID NO: 5236 - RNA, 20 nt, Artificial Sequence
  spacer sequence ATCN PAM
gggagggcacccaggagacg

SEQ ID NO: 5237 - RNA, 20 nt, Artificial Sequence
  spacer sequence ATCN PAM
cccuggccaaagccugggug

SEQ ID NO: 5238 - RNA, 20 nt, Artificial Sequence
  spacer sequence ATCN PAM
ggcgacacccaggcuuuggc

SEQ ID NO: 5239 - RNA, 20 nt, Artificial Sequence
  spacer sequence ATCN PAM
uugcauucccauuucgcgga

SEQ ID NO: 5240 - RNA, 20 nt, Artificial Sequence
  spacer sequence ATCN PAM
gcgaaaugggaaugcaacga

SEQ ID NO: 5241 - RNA, 20 nt, Artificial Sequence
  spacer sequence ATCN PAM
guagaaugaggcgcaacugu

SEQ ID NO: 5242 - RNA, 20 nt, Artificial Sequence
  spacer sequence ATCN PAM
gaaguugcagcuuugguccu

SEQ ID NO: 5243 - RNA, 20 nt, Artificial Sequence
  spacer sequence ATCN PAM
cugcgcuggguugucucagu

SEQ ID NO: 5244 - RNA, 20 nt, Artificial Sequence
  spacer sequence ATCN PAM
gcgccagguccugcccugac

SEQ ID NO: 5245 - RNA, 20 nt, Artificial Sequence
  spacer sequence ATCN PAM
uuccccacgcuguugucugc

SEQ ID NO: 5246 - RNA, 20 nt, Artificial Sequence
  spacer sequence ATCN PAM
uggcggcccacgugcccacg

SEQ ID NO: 5247 - RNA, 20 nt, Artificial Sequence
  spacer sequence ATCN PAM
caggucagucuccgucucag

SEQ ID NO: 5248 - RNA, 20 nt, Artificial Sequence
  spacer sequence ATCN PAM
cagcacuuugggaggccgag

SEQ ID NO: 5249 - RNA, 20 nt, Artificial Sequence
  spacer sequence ATCN PAM
accugccucggccucccaaa

SEQ ID NO: 5250 - RNA, 20 nt, Artificial Sequence
  spacer sequence ATCN PAM
ccugaggucagaaguucgga

SEQ ID NO: 5251 - RNA, 20 nt, Artificial Sequence
  spacer sequence ATCN PAM
uguuggccaggcuggucucc

SEQ ID NO: 5252 - RNA, 20 nt, Artificial Sequence
  spacer sequence ATCN PAM
cagcacuuugggaggccgag

SEQ ID NO: 5253 - RNA, 20 nt, Artificial Sequence
  spacer sequence ATCN PAM
ccccgccucggccucccaaa

SEQ ID NO: 5254 - RNA, 20 nt, Artificial Sequence
  spacer sequence ATCN PAM
cgaggucaggagaucgagac

SEQ ID NO: 5255 - RNA, 20 nt, Artificial Sequence
  spacer sequence ATCN PAM
ccugaccucgugaucccccc

SEQ ID NO: 5256 - RNA, 20 nt, Artificial Sequence
  spacer sequence ATCN PAM
agaccauccuggcuaacacg

SEQ ID NO: 5257 - RNA, 20 nt, Artificial Sequence
  spacer sequence ATCN PAM
uggcuaacacggugaaaccc

SEQ ID NO: 5258 - RNA, 20 nt, Artificial Sequence
  spacer sequence ATCN PAM
ccucagccuccugacuagcu

SEQ ID NO: 5259 - RNA, 20 nt, Artificial Sequence
  spacer sequence ATCN PAM
caaauaagaaaaauacaguu

SEQ ID NO: 5260 - RNA, 20 nt, Artificial Sequence
  spacer sequence ATCN PAM
ccggccagcccaggcuccuc

SEQ ID NO: 5261 - RNA, 20 nt, Artificial Sequence
  spacer sequence ATCN PAM
uacauugguugguccagagc

SEQ ID NO: 5262 - RNA, 20 nt, Artificial Sequence
  spacer sequence ATCN PAM
cuugcuucgaccauccuaca

SEQ ID NO: 5263 - RNA, 20 nt, Artificial Sequence
  spacer sequence ATCN PAM
cagcacuuugggagacugaa

SEQ ID NO: 5264 - RNA, 20 nt, Artificial Sequence
  spacer sequence ATCN PAM
cuuaagcccaggaguuugag

SEQ ID NO: 5265 - RNA, 20 nt, Artificial Sequence
  spacer sequence ATCN PAM
uagcacuuuggaaggccggg

SEQ ID NO: 5266 - RNA, 20 nt, Artificial Sequence
  spacer sequence ATCN PAM
cauacuacaaaaaauuagcu

SEQ ID NO: 5267 - RNA, 20 nt, Artificial Sequence
  spacer sequence ATCN PAM
uggcucacugcagccuugac

SEQ ID NO: 5268 - RNA, 20 nt, Artificial Sequence
  spacer sequence ATCN PAM
ugccacugcacuucagccug

SEQ ID NO: 5269 - RNA, 20 nt, Artificial Sequence
  spacer sequence ATCN PAM
gcccucccaacaugguuuuu

SEQ ID NO: 5270 - RNA, 20 nt, Artificial Sequence
  spacer sequence ATCN PAM
gauuaggggaggaaggucau

SEQ ID NO: 5271 - RNA, 20 nt, Artificial Sequence
  spacer sequence ATCN PAM
gaucagcccucccaacaugg

SEQ ID NO: 5272 - RNA, 20 nt, Artificial Sequence
  spacer sequence ATCN PAM
ggccaccacuggaaaccagu

SEQ ID NO: 5273 - RNA, 20 nt, Artificial Sequence
  spacer sequence ATCN PAM
aagucuguguccugagugug

SEQ ID NO: 5274 - RNA, 20 nt, Artificial Sequence
  spacer sequence ATCN PAM
cagugaacgccgacucuucg

SEQ ID NO: 5275 - RNA, 20 nt, Artificial Sequence
  spacer sequence ATCN PAM
cugcccgcguggccucguca

SEQ ID NO: 5276 - RNA, 20 nt, Artificial Sequence
  spacer sequence ATCN PAM
agauccgaaucgaggccaac

SEQ ID NO: 5277 - RNA, 20 nt, Artificial Sequence
  spacer sequence ATCN PAM
ggaucucugcccgcguggcc

SEQ ID NO: 5278 - RNA, 20 nt, Artificial Sequence
  spacer sequence ATCN PAM
gaaucgaggccaacgaggcc

SEQ ID NO: 5279 - RNA, 20 nt, Artificial Sequence
  spacer sequence ATCN PAM
aggccaacgaggcccuggug

SEQ ID NO: 5280 - RNA, 20 nt, Artificial Sequence
  spacer sequence ATCN PAM
cugcccagccccuggccggg

SEQ ID NO: 5281 - RNA, 20 nt, Artificial Sequence
  spacer sequence ATCN PAM
ugagaggcggaaggagagcc

SEQ ID NO: 5282 - RNA, 20 nt, Artificial Sequence
  spacer sequence ATCN PAM
ccccagccugacgggccgcu

SEQ ID NO: 5283 - RNA, 20 nt, Artificial Sequence
  spacer sequence ATCN PAM
ccucugcccugcagagccag

SEQ ID NO: 5284 - RNA, 20 nt, Artificial Sequence
  spacer sequence ATCN PAM
agagguggcuccgaagcuga

SEQ ID NO: 5285 - RNA, 20 nt, Artificial Sequence
  spacer sequence ATCN PAM
cuggugaccuucacccuccc

SEQ ID NO: 5286 - RNA, 20 nt, Artificial Sequence
  spacer sequence ATCN PAM
gucagggaggggugucccug

SEQ ID NO: 5287 - RNA, 20 nt, Artificial Sequence
  spacer sequence ATCN PAM
gcaguguuuuuggcaccucc

SEQ ID NO: 5288 - RNA, 20 nt, Artificial Sequence
  spacer sequence ATCN PAM
ggggccaacccagaagccua

SEQ ID NO: 5289 - RNA, 20 nt, Artificial Sequence
  spacer sequence ATCN PAM
cagcuccagugacacaggca

SEQ ID NO: 5290 - RNA, 20 nt, Artificial Sequence
  spacer sequence ATCN PAM
gcugaccggcggccucagag

SEQ ID NO: 5291 - RNA, 20 nt, Artificial Sequence
  spacer sequence ATCN PAM
gguauucuggaacagcccac

SEQ ID NO: 5292 - RNA, 20 nt, Artificial Sequence
  spacer sequence ATCN PAM
gcagcccagggaagguugug

SEQ ID NO: 5293 - RNA, 20 nt, Artificial Sequence
  spacer sequence ATCN PAM
agccagcacgggcuguuccc

SEQ ID NO: 5294 - RNA, 20 nt, Artificial Sequence
  spacer sequence ATCN PAM
cacccaggaacaacccacuc

SEQ ID NO: 5295 - RNA, 20 nt, Artificial Sequence
  spacer sequence ATCN PAM
gguccccaaagggccacaca

SEQ ID NO: 5296 - RNA, 20 nt, Artificial Sequence
  spacer sequence ATCN PAM
ccucagucuggucgggagug

SEQ ID NO: 5297 - RNA, 20 nt, Artificial Sequence
  spacer sequence ATCN PAM
aagccccauucaucgacccu

SEQ ID NO: 5298 - RNA, 20 nt, Artificial Sequence
  spacer sequence ATCN PAM
acccugccccuccucccucc

SEQ ID NO: 5299 - RNA, 20 nt, Artificial Sequence
  spacer sequence ATCN PAM
ucuuuuuuuuuuuuuuuuuu

SEQ ID NO: 5300 - RNA, 20 nt, Artificial Sequence
  spacer sequence ATCN PAM
cagcucaccacaaucuccgu

SEQ ID NO: 5301 - RNA, 20 nt, Artificial Sequence
  spacer sequence ATCN PAM
ccgucucccggguucgagca

SEQ ID NO: 5302 - RNA, 20 nt, Artificial Sequence
  spacer sequence ATCN PAM
cagcuacuugggaggcugag

SEQ ID NO: 5303 - RNA, 20 nt, Artificial Sequence
  spacer sequence ATCN PAM
ccacgccuggcuaauuuuug

SEQ ID NO: 5304 - RNA, 20 nt, Artificial Sequence
  spacer sequence ATCN PAM
acauggugaaacccugucug

SEQ ID NO: 5305 - RNA, 20 nt, Artificial Sequence
  spacer sequence ATCN PAM
ggcuggucucgaacuccuga

SEQ ID NO: 5306 - RNA, 20 nt, Artificial Sequence
  spacer sequence ATCN PAM
cgaggucaggaguucgagac

SEQ ID NO: 5307 - RNA, 20 nt, Artificial Sequence
  spacer sequence ATCN PAM
gcccgccucggccucccaaa

SEQ ID NO: 5308 - RNA, 20 nt, Artificial Sequence
  spacer sequence ATCN PAM
uggcacuuugggaggccgag

SEQ ID NO: 5309 - RNA, 20 nt, Artificial Sequence
  spacer sequence ATCN PAM
cguuuugucgcucaggcugg

SEQ ID NO: 5310 - RNA, 20 nt, Artificial Sequence
  spacer sequence ATCN PAM
ugccagggcacuccagccug

SEQ ID NO: 5311 - RNA, 20 nt, Artificial Sequence
  spacer sequence ATCN PAM
ggguuuauuguaaccuccgc

SEQ ID NO: 5312 - RNA, 20 nt, Artificial Sequence
  spacer sequence ATCN PAM
cuugaacgcgggaggcggag

SEQ ID NO: 5313 - RNA, 20 nt, Artificial Sequence
  spacer sequence ATCN PAM
cuugaccuugugauccgccc

SEQ ID NO: 5314 - RNA, 20 nt, Artificial Sequence
  spacer sequence ATCN PAM
caaggucaagagauugagac

SEQ ID NO: 5315 - RNA, 20 nt, Artificial Sequence
  spacer sequence ATCN PAM
gcccgccucggccucccaaa

SEQ ID NO: 5316 - RNA, 20 nt, Artificial Sequence
  spacer sequence ATCN PAM
cagcacuuugggaggccgag

SEQ ID NO: 5317 - RNA, 20 nt, Artificial Sequence
  spacer sequence ATCN PAM
ucuuuuuuaugugacaaacu

SEQ ID NO: 5318 - RNA, 20 nt, Artificial Sequence
  spacer sequence ATCN PAM
uuuuuaugugacaaacuccu

SEQ ID NO: 5319 - RNA, 20 nt, Artificial Sequence
  spacer sequence ATCN PAM
cagccucucccucucuggcc

SEQ ID NO: 5320 - RNA, 20 nt, Artificial Sequence
  spacer sequence ATCN PAM
ggccugaccaccuccacccc

SEQ ID NO: 5321 - RNA, 20 nt, Artificial Sequence
  spacer sequence ATCN PAM
ggccccucccuuuaucuggc

SEQ ID NO: 5322 - RNA, 20 nt, Artificial Sequence
  spacer sequence ATCN PAM
ucaaaaagccgacggggaag

SEQ ID NO: 5323 - RNA, 20 nt, Artificial Sequence
  spacer sequence ATCN PAM
cacccuuccccgucggcuuu

SEQ ID NO: 5324 - RNA, 20 nt, Artificial Sequence
  spacer sequence ATCN PAM
guaaaaugggguaaugccca

SEQ ID NO: 5325 - RNA, 20 nt, Artificial Sequence
  spacer sequence ATCN PAM
ccccccauuaaugcaggaca

SEQ ID NO: 5326 - RNA, 20 nt, Artificial Sequence
  spacer sequence ATCN PAM
cuuuggggccaucacccccc

SEQ ID NO: 5327 - RNA, 20 nt, Artificial Sequence
  spacer sequence ATCN PAM
ugccgcauccccucaccaca

SEQ ID NO: 5328 - RNA, 20 nt, Artificial Sequence
  spacer sequence ATCN PAM
ccucaccacacucccaccca

SEQ ID NO: 5329 - RNA, 20 nt, Artificial Sequence
  spacer sequence ATCN PAM
cuccauaaaugcccucugag

SEQ ID NO: 5330 - RNA, 20 nt, Artificial Sequence
  spacer sequence ATCN PAM
gucaauggugaccucagagg

SEQ ID NO: 5331 - RNA, 20 nt, Artificial Sequence
  spacer sequence ATCN PAM
ucagcgggacaggguuuugg

SEQ ID NO: 5332 - RNA, 20 nt, Artificial Sequence
  spacer sequence ATCN PAM
cagcccgcggcgaggcgggc

SEQ ID NO: 5333 - RNA, 20 nt, Artificial Sequence
  spacer sequence ATCN PAM
gcgccgccuucccucggggu

SEQ ID NO: 5334 - RNA, 20 nt, Artificial Sequence
  spacer sequence ATCN PAM
agagugggcacccuuccucg

SEQ ID NO: 5335 - RNA, 20 nt, Artificial Sequence
  spacer sequence ATCN PAM
ugagccaucuagagugggca

SEQ ID NO: 5336 - RNA, 20 nt, Artificial Sequence
  spacer sequence ATCN PAM
cuccugucccaagaacaaag

SEQ ID NO: 5337 - RNA, 20 nt, Artificial Sequence
  spacer sequence ATCN PAM
gggagccuccgguccuggga

SEQ ID NO: 5338 - RNA, 20 nt, Artificial Sequence
  spacer sequence ATCN PAM
ggaacgaaagacuguagucg

SEQ ID NO: 5339 - RNA, 20 nt, Artificial Sequence
  spacer sequence ATCN PAM
ggguuccucccccgcgcgca

SEQ ID NO: 5340 - RNA, 20 nt, Artificial Sequence
  spacer sequence ATCN PAM
ccgagcgcgcgcgggcgcag

SEQ ID NO: 5341 - RNA, 20 nt, Artificial Sequence
  spacer sequence ATCN PAM
caagggagcggccgggagcg

SEQ ID NO: 5342 - RNA, 20 nt, Artificial Sequence
  spacer sequence ATCN PAM
cgagggguaccagacccguc

SEQ ID NO: 5343 - RNA, 20 nt, Artificial Sequence
  spacer sequence ATCN PAM
ccgcgcgccgagcgcccagu

SEQ ID NO: 5344 - RNA, 20 nt, Artificial Sequence
  spacer sequence ATCN PAM
acguuccagggggcggggcc

SEQ ID NO: 5345 - RNA, 20 nt, Artificial Sequence
  spacer sequence ATCN PAM
gggggugaaaguaacaagaa

SEQ ID NO: 5346 - RNA, 20 nt, Artificial Sequence
  spacer sequence ATCN PAM
uccgagcggcggcgacggcu

SEQ ID NO: 5347 - RNA, 20 nt, Artificial Sequence
  spacer sequence ATCN PAM
gaguggcgcuccgaggucgc

SEQ ID NO: 5348 - RNA, 20 nt, Artificial Sequence
  spacer sequence ATCN PAM
aaaauccgaguggcgcuccg

SEQ ID NO: 5349 - RNA, 20 nt, Artificial Sequence
  spacer sequence ATCN PAM
ggggagccucucgccccugu

SEQ ID NO: 5350 - RNA, 20 nt, Artificial Sequence
  spacer sequence ATCN PAM
ucgccgcgccuccgggacag

SEQ ID NO: 5351 - RNA, 20 nt, Artificial Sequence
  spacer sequence ATCN PAM
ccggcgcgcgcuggggggcu

SEQ ID NO: 5352 - RNA, 20 nt, Artificial Sequence
  spacer sequence ATCN PAM
acagcaccacgggcacccgc

SEQ ID NO: 5353 - RNA, 20 nt, Artificial Sequence
  spacer sequence ATCN PAM
cagggcguugcggggguccc

SEQ ID NO: 5354 - RNA, 20 nt, Artificial Sequence
  spacer sequence ATCN PAM
gcucggcggccuccucugcg

SEQ ID NO: 5355 - RNA, 20 nt, Artificial Sequence
  spacer sequence ATCN PAM
ccugcaggcccggagcccuc

SEQ ID NO: 5356 - RNA, 20 nt, Artificial Sequence
  spacer sequence ATCN PAM
caguggaggggcccaucggg

SEQ ID NO: 5357 - RNA, 20 nt, Artificial Sequence
  spacer sequence ATCN PAM
ggggaggggcggagggggag

SEQ ID NO: 5358 - RNA, 20 nt, Artificial Sequence
  spacer sequence ATCN PAM
ccaggauggggcucccagca

SEQ ID NO: 5359 - RNA, 20 nt, Artificial Sequence
  spacer sequence ATCN PAM
uggcgauucggaccccuucc

SEQ ID NO: 5360 - RNA, 20 nt, Artificial Sequence
  spacer sequence ATCN PAM
agggcccuaagcgcgugcag

SEQ ID NO: 5361 - RNA, 20 nt, Artificial Sequence
  spacer sequence ATCN PAM
ggaagccgggaagggguggg

SEQ ID NO: 5362 - RNA, 20 nt, Artificial Sequence
  spacer sequence ATCN PAM
gucucuccccacacaagcac

SEQ ID NO: 5363 - RNA, 20 nt, Artificial Sequence
  spacer sequence ATCN PAM
cccacgccgaacuccugcag

SEQ ID NO: 5364 - RNA, 20 nt, Artificial Sequence
  spacer sequence ATCN PAM
ugggcuggaauagggggugg

SEQ ID NO: 5365 - RNA, 20 nt, Artificial Sequence
  spacer sequence ATCN PAM
cggacuguuccggccuugag

SEQ ID NO: 5366 - RNA, 20 nt, Artificial Sequence
  spacer sequence ATCN PAM
ugggggagaggaggugggga

SEQ ID NO: 5367 - RNA, 20 nt, Artificial Sequence
  spacer sequence ATCN PAM
ugcaggcagucuugugaaag

SEQ ID NO: 5368 - RNA, 20 nt, Artificial Sequence
  spacer sequence ATCN PAM
ccgcucacacccuggccugc

SEQ ID NO: 5369 - RNA, 20 nt, Artificial Sequence
  spacer sequence ATCN PAM
ccagcccccuccgcccccac

SEQ ID NO: 5370 - RNA, 20 nt, Artificial Sequence
  spacer sequence ATCN PAM
ugagaggguggggaucucgu

SEQ ID NO: 5371 - RNA, 20 nt, Artificial Sequence
  spacer sequence ATCN PAM
ccacccucucacgauggggg

SEQ ID NO: 5372 - RNA, 20 nt, Artificial Sequence
  spacer sequence ATCN PAM
cgucacccuccccuccucuc

SEQ ID NO: 5373 - RNA, 20 nt, Artificial Sequence
  spacer sequence ATCN PAM
ugucuaggccucacuggccc

SEQ ID NO: 5374 - RNA, 20 nt, Artificial Sequence
  spacer sequence ATCN PAM
gcccgcugccaggguggggg

SEQ ID NO: 5375 - RNA, 20 nt, Artificial Sequence
  spacer sequence ATCN PAM
cgggggcagggcgggggccg

SEQ ID NO: 5376 - RNA, 20 nt, Artificial Sequence
  spacer sequence ATCN PAM
ccugcagcccccgcccuggc

SEQ ID NO: 5377 - RNA, 20 nt, Artificial Sequence
  spacer sequence ATCN PAM
cagccuaugucacuucucag

SEQ ID NO: 5378 - RNA, 20 nt, Artificial Sequence
  spacer sequence ATCN PAM
cggccacuggggagagcagg

SEQ ID NO: 5379 - RNA, 20 nt, Artificial Sequence
  spacer sequence ATCN PAM
cacccuguccucgccaagcc

SEQ ID NO: 5380 - RNA, 20 nt, Artificial Sequence
  spacer sequence ATCN PAM
gcccccguucagggugggug

SEQ ID NO: 5381 - RNA, 20 nt, Artificial Sequence
  spacer sequence ATCN PAM
guccugggcggggcggaggc

SEQ ID NO: 5382 - RNA, 20 nt, Artificial Sequence
  spacer sequence ATCN PAM
ugagaaagcaaagguuagga

SEQ ID NO: 5383 - RNA, 20 nt, Artificial Sequence
  spacer sequence ATCN PAM
acaggcagagaggaucuagg

SEQ ID NO: 5384 - RNA, 20 nt, Artificial Sequence
  spacer sequence ATCN PAM
ucucugccuguggauacggg

SEQ ID NO: 5385 - RNA, 20 nt, Artificial Sequence
  spacer sequence ATCN PAM
aggggcccaugagggugggg

SEQ ID NO: 5386 - RNA, 20 nt, Artificial Sequence
  spacer sequence ATCN PAM
guauuuccggaagccuccuc

SEQ ID NO: 5387 - RNA, 20 nt, Artificial Sequence
  spacer sequence ATCN PAM
uguggucgcccacacgcaag

SEQ ID NO: 5388 - RNA, 20 nt, Artificial Sequence
  spacer sequence ATCN PAM
cccucgcccaucacagccgg

SEQ ID NO: 5389 - RNA, 20 nt, Artificial Sequence
  spacer sequence ATCN PAM
cagccggcuccuuccggucc

SEQ ID NO: 5390 - RNA, 20 nt, Artificial Sequence
  spacer sequence ATCN PAM
aaagggugggccguccuggg

SEQ ID NO: 5391 - RNA, 20 nt, Artificial Sequence
  spacer sequence ATCN PAM
ugugaccucgggcugguggg

SEQ ID NO: 5392 - RNA, 20 nt, Artificial Sequence
  spacer sequence ATCN PAM
cccaccagcccgaggucaca

SEQ ID NO: 5393 - RNA, 20 nt, Artificial Sequence
  spacer sequence ATCN PAM
cccagccuagauuggugggg

SEQ ID NO: 5394 - RNA, 20 nt, Artificial Sequence
  spacer sequence ATCN PAM
aggcugggggaucacccacc

SEQ ID NO: 5395 - RNA, 20 nt, Artificial Sequence
  spacer sequence ATCN PAM
agaaauaccccaccaaucua

SEQ ID NO: 5396 - RNA, 20 nt, Artificial Sequence
  spacer sequence ATCN PAM
ugaguugacggucaucgccu

SEQ ID NO: 5397 - RNA, 20 nt, Artificial Sequence
  spacer sequence ATCN PAM
ccugacaugaccuggaccag

SEQ ID NO: 5398 - RNA, 20 nt, Artificial Sequence
  spacer sequence ATCN PAM
acugguccaggucaugucag

SEQ ID NO: 5399 - RNA, 20 nt, Artificial Sequence
  spacer sequence ATCN PAM
ucuacugguccaggucaugu

SEQ ID NO: 5400 - RNA, 20 nt, Artificial Sequence
  spacer sequence ATCN PAM
cuugaucuuugacucauggg

SEQ ID NO: 5401 - RNA, 20 nt, Artificial Sequence
  spacer sequence ATCN PAM
agagaucaucuacuggucca

SEQ ID NO: 5402 - RNA, 20 nt, Artificial Sequence
  spacer sequence ATCN PAM
uugacucaugggucaucucu

SEQ ID NO: 5403 - RNA, 20 nt, Artificial Sequence
  spacer sequence ATCN PAM
cuguguccuggguugguugu

SEQ ID NO: 5404 - RNA, 20 nt, Artificial Sequence
  spacer sequence ATCN PAM
cuaaacccuguguugacagg

SEQ ID NO: 5405 - RNA, 20 nt, Artificial Sequence
  spacer sequence ATCN PAM
ccugaccugggcuggugggu

SEQ ID NO: 5406 - RNA, 20 nt, Artificial Sequence
  spacer sequence ATCN PAM
cccaccagcccaggucagga

SEQ ID NO: 5407 - RNA, 20 nt, Artificial Sequence
  spacer sequence ATCN PAM
cuggucccuggguugcuggu

SEQ ID NO: 5408 - RNA, 20 nt, Artificial Sequence
  spacer sequence ATCN PAM
ccagcaacccagggaccaga

SEQ ID NO: 5409 - RNA, 20 nt, Artificial Sequence
  spacer sequence ATCN PAM
ccugauccuggaccccgugc

SEQ ID NO: 5410 - RNA, 20 nt, Artificial Sequence
  spacer sequence ATCN PAM
ggggaucaccagcaacccag

SEQ ID NO: 5411 - RNA, 20 nt, Artificial Sequence
  spacer sequence ATCN PAM
uggaccccgugcucaugugc

SEQ ID NO: 5412 - RNA, 20 nt, Artificial Sequence
  spacer sequence ATCN PAM
gcagauggacugcuccccca

SEQ ID NO: 5413 - RNA, 20 nt, Artificial Sequence
  spacer sequence ATCN PAM
gcugaugggaggaaggggca

SEQ ID NO: 5414 - RNA, 20 nt, Artificial Sequence
  spacer sequence ATCN PAM
agagcuuugugaaucacgcc

SEQ ID NO: 5415 - RNA, 20 nt, Artificial Sequence
  spacer sequence ATCN PAM
cgccccgggggucuucucag

SEQ ID NO: 5416 - RNA, 20 nt, Artificial Sequence
  spacer sequence ATCN PAM
acccacaggcgacuccacau

SEQ ID NO: 5417 - RNA, 20 nt, Artificial Sequence
  spacer sequence ATCN PAM
cccacacacacgccuggccc

SEQ ID NO: 5418 - RNA, 20 nt, Artificial Sequence
  spacer sequence ATCN PAM
gcccacauguccacgccauu

SEQ ID NO: 5419 - RNA, 20 nt, Artificial Sequence
  spacer sequence ATCN PAM
gcaccauccugcagauccug

SEQ ID NO: 5420 - RNA, 20 nt, Artificial Sequence
  spacer sequence ATCN PAM
ugcagauccugaacgaccuc

SEQ ID NO: 5421 - RNA, 20 nt, Artificial Sequence
  spacer sequence ATCN PAM
gcaggauggugccgauguca

SEQ ID NO: 5422 - RNA, 20 nt, Artificial Sequence
  spacer sequence ATCN PAM
ugaacgaccuccugagcgcc

SEQ ID NO: 5423 - RNA, 20 nt, Artificial Sequence
  spacer sequence ATCN PAM
ggcucuggcccugcagcagg

SEQ ID NO: 5424 - RNA, 20 nt, Artificial Sequence
  spacer sequence ATCN PAM
gcaugugcaagcccccgggu

SEQ ID NO: 5425 - RNA, 20 nt, Artificial Sequence
  spacer sequence ATCN PAM
cccccagccccugggcaggu

SEQ ID NO: 5426 - RNA, 20 nt, Artificial Sequence
  spacer sequence ATCN PAM
ucuccagauggcauuuggug

SEQ ID NO: 5427 - RNA, 20 nt, Artificial Sequence
  spacer sequence ATCN PAM
ccagauggcauuuggugccu

SEQ ID NO: 5428 - RNA, 20 nt, Artificial Sequence
  spacer sequence ATCN PAM
ggagaugaugccccgggugg

SEQ ID NO: 5429 - RNA, 20 nt, Artificial Sequence
  spacer sequence ATCN PAM
ucuggugagacucuggaggg

SEQ ID NO: 5430 - RNA, 20 nt, Artificial Sequence
  spacer sequence ATCN PAM
cagcacuuugggaggccgac

SEQ ID NO: 5431 - RNA, 20 nt, Artificial Sequence
  spacer sequence ATCN PAM
gcccgcgucggccucccaaa

SEQ ID NO: 5432 - RNA, 20 nt, Artificial Sequence
  spacer sequence ATCN PAM
cgaggucaggagaucgagac

SEQ ID NO: 5433 - RNA, 20 nt, Artificial Sequence
  spacer sequence ATCN PAM
ccugaccucgugauccgccc

SEQ ID NO: 5434 - RNA, 20 nt, Artificial Sequence
  spacer sequence ATCN PAM
agaccaucuuggcuaacaug

SEQ ID NO: 5435 - RNA, 20 nt, Artificial Sequence
  spacer sequence ATCN PAM
uggcuaacauggugaaacuc

SEQ ID NO: 5436 - RNA, 20 nt, Artificial Sequence
  spacer sequence ATCN PAM
cggcucacugcaagcuccgc

SEQ ID NO: 5437 - RNA, 20 nt, Artificial Sequence
  spacer sequence ATCN PAM
cgccacugcacuccagccug

SEQ ID NO: 5438 - RNA, 20 nt, Artificial Sequence
  spacer sequence ATCN PAM
ccccucggaucacagaagcg

SEQ ID NO: 5439 - RNA, 20 nt, Artificial Sequence
  spacer sequence ATCN PAM
gaggggagauacuugggggu

SEQ ID NO: 5440 - RNA, 20 nt, Artificial Sequence
  spacer sequence ATCN PAM
cagaagcggccaagcccccu

SEQ ID NO: 5441 - RNA, 20 nt, Artificial Sequence
  spacer sequence ATCN PAM
cuugagcucaggaguucgag

SEQ ID NO: 5442 - RNA, 20 nt, Artificial Sequence
  spacer sequence ATCN PAM
cagcacuuugggaggccgag

SEQ ID NO: 5443 - RNA, 20 nt, Artificial Sequence
  spacer sequence ATCN PAM
accaugccgggcacaguggu

SEQ ID NO: 5444 - RNA, 20 nt, Artificial Sequence
  spacer sequence ATCN PAM
agucagaguucgugguggcu

SEQ ID NO: 5445 - RNA, 20 nt, Artificial Sequence
  spacer sequence ATCN PAM
uaagccaccacgaacucuga

SEQ ID NO: 5446 - RNA, 20 nt, Artificial Sequence
  spacer sequence ATCN PAM
ucggaucggccacccucgcc

SEQ ID NO: 5447 - RNA, 20 nt, Artificial Sequence
  spacer sequence ATCN PAM
gaagauccuaagccaccacg

SEQ ID NO: 5448 - RNA, 20 nt, Artificial Sequence
  spacer sequence ATCN PAM
gccacccucgccccucgcac

SEQ ID NO: 5449 - RNA, 20 nt, Artificial Sequence
  spacer sequence ATCN PAM
agagagacugcuacauauug

SEQ ID NO: 5450 - RNA, 20 nt, Artificial Sequence
  spacer sequence ATCN PAM
cuuccgccgccuccuuuccc

SEQ ID NO: 5451 - RNA, 20 nt, Artificial Sequence
  spacer sequence ATCN PAM
acauuuuugacuuaaaaccu

SEQ ID NO: 5452 - RNA, 20 nt, Artificial Sequence
  spacer sequence ATCN PAM
guaaagugcauaaugacaua

SEQ ID NO: 5453 - RNA, 20 nt, Artificial Sequence
  spacer sequence ATCN PAM
ucuuuucuugaucuuuuuuu

SEQ ID NO: 5454 - RNA, 20 nt, Artificial Sequence
  spacer sequence ATCN PAM
agaaaagaggauaggagugg

SEQ ID NO: 5455 - RNA, 20 nt, Artificial Sequence
  spacer sequence ATCN PAM
uuuuuuugcauuuuccuuca

SEQ ID NO: 5456 - RNA, 20 nt, Artificial Sequence
  spacer sequence ATCN PAM
cucagguugggccgggaagg

SEQ ID NO: 5457 - RNA, 20 nt, Artificial Sequence
  spacer sequence ATCN PAM
acaucccucagguugggccg

SEQ ID NO: 5458 - RNA, 20 nt, Artificial Sequence
  spacer sequence ATCN PAM
ucgcugcaggaggggccccc

SEQ ID NO: 5459 - RNA, 20 nt, Artificial Sequence
  spacer sequence ATCN PAM
ccugggcagggggcgacaac

SEQ ID NO: 5460 - RNA, 20 nt, Artificial Sequence
  spacer sequence ATCN PAM
ccuacuggggccauuucaau

SEQ ID NO: 5461 - RNA, 20 nt, Artificial Sequence
  spacer sequence ATCN PAM
aaaaacuaccccauugaaau

SEQ ID NO: 5462 - RNA, 20 nt, Artificial Sequence
  spacer sequence ATCN PAM
uuaaaaaauaaaaagugagu

SEQ ID NO: 5463 - RNA, 20 nt, Artificial Sequence
  spacer sequence ATCN PAM
ccauuaucauuaaaaaauaa

SEQ ID NO: 5464 - RNA, 20 nt, Artificial Sequence
  spacer sequence ATCN PAM
gaaaccauuaacuuucaaca

SEQ ID NO: 5465 - RNA, 20 nt, Artificial Sequence
  spacer sequence ATCN PAM
cguguuauaacuguagcgcu

SEQ ID NO: 5466 - RNA, 20 nt, Artificial Sequence
  spacer sequence ATCN PAM
uugagcucuacccucuggga

SEQ ID NO: 5467 - RNA, 20 nt, Artificial Sequence
  spacer sequence ATCN PAM
aagacaguucuucaaaaaac

SEQ ID NO: 5468 - RNA, 20 nt, Artificial Sequence
  spacer sequence ATCN PAM
uuaaaaaacaaaacagaaca

SEQ ID NO: 5469 - RNA, 20 nt, Artificial Sequence
  spacer sequence ATCN PAM
cggugcucguguagguuuuu

SEQ ID NO: 5470 - RNA, 20 nt, Artificial Sequence
  spacer sequence ATCN PAM
ccccacuaggcgagcaggcg

SEQ ID NO: 5471 - RNA, 20 nt, Artificial Sequence
  spacer sequence ATCN PAM
ggccuugguugggaggguuc

SEQ ID NO: 5472 - RNA, 20 nt, Artificial Sequence
  spacer sequence ATCN PAM
caccccaggaacccucccaa

SEQ ID NO: 5473 - RNA, 20 nt, Artificial Sequence
  spacer sequence ATCN PAM
guguggcuugcugcagggag

SEQ ID NO: 5474 - RNA, 20 nt, Artificial Sequence
  spacer sequence ATCN PAM
cccugcagcaagccacacag

SEQ ID NO: 5475 - RNA, 20 nt, Artificial Sequence
  spacer sequence ATCN PAM
ccaggccgacugggaggacc

SEQ ID NO: 5476 - RNA, 20 nt, Artificial Sequence
  spacer sequence ATCN PAM
ccugccagcccaagguaccc

SEQ ID NO: 5477 - RNA, 20 nt, Artificial Sequence
  spacer sequence ATCN PAM
cugcccagcccggacauggg

SEQ ID NO: 5478 - RNA, 20 nt, Artificial Sequence
  spacer sequence ATCN PAM
auaaaaugggagcccaauua

SEQ ID NO: 5479 - RNA, 20 nt, Artificial Sequence
  spacer sequence ATCN PAM
cuuggcccagaggauuuggg

SEQ ID NO: 5480 - RNA, 20 nt, Artificial Sequence
  spacer sequence ATCN PAM
ucugggccaagugauguucc

SEQ ID NO: 5481 - RNA, 20 nt, Artificial Sequence
  spacer sequence ATCN PAM
uugaacaaacaccccaaauc

SEQ ID NO: 5482 - RNA, 20 nt, Artificial Sequence
  spacer sequence ATCN PAM
caucucuaggggccccagua

SEQ ID NO: 5483 - RNA, 20 nt, Artificial Sequence
  spacer sequence ATCN PAM
cuaggggccccaguaccggg

SEQ ID NO: 5484 - RNA, 20 nt, Artificial Sequence
  spacer sequence ATCN PAM
ucgcacgcccacggcaggaa

SEQ ID NO: 5485 - RNA, 20 nt, Artificial Sequence
  spacer sequence ATCN PAM
cacgcccacggcaggaaggc

SEQ ID NO: 5486 - RNA, 20 nt, Artificial Sequence
  spacer sequence ATCN PAM
gccuuccugccgugggcgug

SEQ ID NO: 5487 - RNA, 20 nt, Artificial Sequence
  spacer sequence ATCN PAM
gcaccagggacggggcgggg

SEQ ID NO: 5488 - RNA, 20 nt, Artificial Sequence
  spacer sequence ATCN PAM
uccuuccuccuucccacccc

SEQ ID NO: 5489 - RNA, 20 nt, Artificial Sequence
  spacer sequence ATCN PAM
caggggcugugucuguagcc

SEQ ID NO: 5490 - RNA, 20 nt, Artificial Sequence
  spacer sequence ATCN PAM
cgaggggcggguccuggagu

SEQ ID NO: 5491 - RNA, 20 nt, Artificial Sequence
  spacer sequence ATCN PAM
ccagucuggggugggggucg

SEQ ID NO: 5492 - RNA, 20 nt, Artificial Sequence
  spacer sequence ATCN PAM
caggggucaaggcugugccc

SEQ ID NO: 5493 - RNA, 20 nt, Artificial Sequence
  spacer sequence ATCN PAM
cagcggucccugcccucuuu

SEQ ID NO: 5494 - RNA, 20 nt, Artificial Sequence
  spacer sequence ATCN PAM
cgcggggcggggucggcccu

SEQ ID NO: 5495 - RNA, 20 nt, Artificial Sequence
  spacer sequence ATCN PAM
agggccgaccccgccccgcg

SEQ ID NO: 5496 - RNA, 20 nt, Artificial Sequence
  spacer sequence ATCN PAM
cucccuucccccaaccauug

SEQ ID NO: 5497 - RNA, 20 nt, Artificial Sequence
  spacer sequence ATCN PAM
cggcggguuuccgggggccg

SEQ ID NO: 5498 - RNA, 20 nt, Artificial Sequence
  spacer sequence ATCN PAM
ccaaugaggcuuccccgcug

SEQ ID NO: 5499 - RNA, 20 nt, Artificial Sequence
  spacer sequence ATCN PAM
caccgcucgcucaucggcgu

SEQ ID NO: 5500 - RNA, 20 nt, Artificial Sequence
  spacer sequence ATCN PAM
gcgugccccaguagcagcgc

SEQ ID NO: 5501 - RNA, 20 nt, Artificial Sequence
  spacer sequence ATCN PAM
aagaugggaggaaaggcgag

SEQ ID NO: 5502 - RNA, 20 nt, Artificial Sequence
  spacer sequence ATCN PAM
uugauuuuucuccaccaacu

SEQ ID NO: 5503 - RNA, 20 nt, Artificial Sequence
  spacer sequence ATCN PAM
ccguuuaggguccuugucag

SEQ ID NO: 5504 - RNA, 20 nt, Artificial Sequence
  spacer sequence ATCN PAM
cuccaguggccgacuugggg

SEQ ID NO: 5505 - RNA, 20 nt, Artificial Sequence
  spacer sequence ATCN PAM
gggagguggcuagacccgug

SEQ ID NO: 5506 - RNA, 20 nt, Artificial Sequence
  spacer sequence ATCN PAM
aacucgaccgccccccaaag

SEQ ID NO: 5507 - RNA, 20 nt, Artificial Sequence
  spacer sequence ATCN PAM
augaucgauggggacccugg

SEQ ID NO: 5508 - RNA, 20 nt, Artificial Sequence
  spacer sequence ATCN PAM
auccaacucgaccgcccccc

SEQ ID NO: 5509 - RNA, 20 nt, Artificial Sequence
  spacer sequence ATCN PAM
ucgauccaacucgaccgccc

SEQ ID NO: 5510 - RNA, 20 nt, Artificial Sequence
  spacer sequence ATCN PAM
auggggacccuggcggccuc

SEQ ID NO: 5511 - RNA, 20 nt, Artificial Sequence
  spacer sequence ATCN PAM
aucaucgauccaacucgacc

SEQ ID NO: 5512 - RNA, 20 nt, Artificial Sequence
  spacer sequence ATCN PAM
gaaaugccggugugagcucc

SEQ ID NO: 5513 - RNA, 20 nt, Artificial Sequence
  spacer sequence ATCN PAM
cccguggccgcccgcugcuu

SEQ ID NO: 5514 - RNA, 20 nt, Artificial Sequence
  spacer sequence ATCN PAM
ccgccuggcagggacgccag

SEQ ID NO: 5515 - RNA, 20 nt, Artificial Sequence
  spacer sequence ATCN PAM
cacaggugagcggugcuugg

SEQ ID NO: 5516 - RNA, 20 nt, Artificial Sequence
  spacer sequence ATCN PAM
cuccaacccaguggcucuaa

SEQ ID NO: 5517 - RNA, 20 nt, Artificial Sequence
  spacer sequence ATCN PAM
ggacagaaauagagaaaggc

SEQ ID NO: 5518 - RNA, 20 nt, Artificial Sequence
  spacer sequence ATCN PAM
cuggcgcucuccccaaccca

SEQ ID NO: 5519 - RNA, 20 nt, Artificial Sequence
  spacer sequence ATCN PAM
ccgccccuccgucccucccc

SEQ ID NO: 5520 - RNA, 20 nt, Artificial Sequence
  spacer sequence ATCN PAM
cacgaggggccugcacagcc

SEQ ID NO: 5521 - RNA, 20 nt, Artificial Sequence
  spacer sequence ATCN PAM
cacacccccgaccagcacgc

SEQ ID NO: 5522 - RNA, 20 nt, Artificial Sequence
  spacer sequence ATCN PAM
gggagccuggcacaccagcc

SEQ ID NO: 5523 - RNA, 20 nt, Artificial Sequence
  spacer sequence ATCN PAM
acugugugacccuaaaacaa

SEQ ID NO: 5524 - RNA, 20 nt, Artificial Sequence
  spacer sequence ATCN PAM
ggugacagcugcggugugug

SEQ ID NO: 5525 - RNA, 20 nt, Artificial Sequence
  spacer sequence ATCN PAM
ggucagggcccucuuuguau

SEQ ID NO: 5526 - RNA, 20 nt, Artificial Sequence
  spacer sequence ATCN PAM
cuggugcacagaggggugag

SEQ ID NO: 5527 - RNA, 20 nt, Artificial Sequence
  spacer sequence ATCN PAM
uccgcugcccagccaagcuu

SEQ ID NO: 5528 - RNA, 20 nt, Artificial Sequence
  spacer sequence ATCN PAM
cccacccagacuccagcagg

SEQ ID NO: 5529 - RNA, 20 nt, Artificial Sequence
  spacer sequence ATCN PAM
cgccaaugcacuccagccag

SEQ ID NO: 5530 - RNA, 20 nt, Artificial Sequence
  spacer sequence ATCN PAM
cggcucaccgcaaccucugc

SEQ ID NO: 5531 - RNA, 20 nt, Artificial Sequence
  spacer sequence ATCN PAM
cuugaacccgggaggcagag

SEQ ID NO: 5532 - RNA, 20 nt, Artificial Sequence
  spacer sequence ATCN PAM
cagcuacuccagaggcugag

SEQ ID NO: 5533 - RNA, 20 nt, Artificial Sequence
  spacer sequence ATCN PAM
ggaguucgagaccugccugg

SEQ ID NO: 5534 - RNA, 20 nt, Artificial Sequence
  spacer sequence ATCN PAM
caagugaucugccugucucg

SEQ ID NO: 5535 - RNA, 20 nt, Artificial Sequence
  spacer sequence ATCN PAM
cuugagaucaggaguucgag

SEQ ID NO: 5536 - RNA, 20 nt, Artificial Sequence
  spacer sequence ATCN PAM
gccugucucggccuccuaaa

SEQ ID NO: 5537 - RNA, 20 nt, Artificial Sequence
  spacer sequence ATCN PAM
cagcacuuuaggaggccgag

SEQ ID NO: 5538 - RNA, 20 nt, Artificial Sequence
  spacer sequence ATCN PAM
agcccaauuuuauuuauuuu

SEQ ID NO: 5539 - RNA, 20 nt, Artificial Sequence
  spacer sequence ATCN PAM
cuucucuacuaaaaauaaau

SEQ ID NO: 5540 - RNA, 20 nt, Artificial Sequence
  spacer sequence ATCN PAM
uuugagggcaggaguuugag

SEQ ID NO: 5541 - RNA, 20 nt, Artificial Sequence
  spacer sequence ATCN PAM
acccgcauuggccucccaaa

SEQ ID NO: 5542 - RNA, 20 nt, Artificial Sequence
  spacer sequence ATCN PAM
cagcaauuugggaggccaau

SEQ ID NO: 5543 - RNA, 20 nt, Artificial Sequence
  spacer sequence ATCN PAM
cagcucacugcagccucgcu

SEQ ID NO: 5544 - RNA, 20 nt, Artificial Sequence
  spacer sequence ATCN PAM
cuugagcccaggaguuccag

SEQ ID NO: 5545 - RNA, 20 nt, Artificial Sequence
  spacer sequence ATCN PAM
uccugccucagccuccugag

SEQ ID NO: 5546 - RNA, 20 nt, Artificial Sequence
  spacer sequence ATCN PAM
aacuccuggacucaaacgaa

SEQ ID NO: 5547 - RNA, 20 nt, Artificial Sequence
  spacer sequence ATCN PAM
cagcacuuucguuugagucc

SEQ ID NO: 5548 - RNA, 20 nt, Artificial Sequence
  spacer sequence ATCN PAM
cguaugcaggccgggagcgc

SEQ ID NO: 5549 - RNA, 20 nt, Artificial Sequence
  spacer sequence ATCN PAM
ucccguaugcaggccgggag

SEQ ID NO: 5550 - RNA, 20 nt, Artificial Sequence
  spacer sequence ATCN PAM
aggaagcaaacaacaaggaa

SEQ ID NO: 5551 - RNA, 20 nt, Artificial Sequence
  spacer sequence ATCN PAM
gagaggugggcaugccagca

SEQ ID NO: 5552 - RNA, 20 nt, Artificial Sequence
  spacer sequence ATCN PAM
agacggacagacgggccagg

SEQ ID NO: 5553 - RNA, 20 nt, Artificial Sequence
  spacer sequence ATCN PAM
ugcuggagaggcaccuggca

SEQ ID NO: 5554 - RNA, 20 nt, Artificial Sequence
  spacer sequence ATCN PAM
ccauggcaacaguggagugg

SEQ ID NO: 5555 - RNA, 20 nt, Artificial Sequence
  spacer sequence ATCN PAM
ccacucuuugaccucucugu

SEQ ID NO: 5556 - RNA, 20 nt, Artificial Sequence
  spacer sequence ATCN PAM
ccaccugggcccaguucccu

SEQ ID NO: 5557 - RNA, 20 nt, Artificial Sequence
  spacer sequence ATCN PAM
auccgccuaccccagagcgc

SEQ ID NO: 5558 - RNA, 20 nt, Artificial Sequence
  spacer sequence ATCN PAM
gccuaccccagagcgcgcau

SEQ ID NO: 5559 - RNA, 20 nt, Artificial Sequence
  spacer sequence ATCN PAM
guugcuaagcaacaucugag

SEQ ID NO: 5560 - RNA, 20 nt, Artificial Sequence
  spacer sequence ATCN PAM
gaggcugcauggaggugggg

SEQ ID NO: 5561 - RNA, 20 nt, Artificial Sequence
  spacer sequence ATCN PAM
ccagcguccacgcaggcgag

SEQ ID NO: 5562 - RNA, 20 nt, Artificial Sequence
  spacer sequence ATCN PAM
ggugucugugaaaggcccaa

SEQ ID NO: 5563 - RNA, 20 nt, Artificial Sequence
  spacer sequence ATCN PAM
gcacgucacagacacgcaug

SEQ ID NO: 5564 - RNA, 20 nt, Artificial Sequence
  spacer sequence ATCN PAM
uguguacugaaagagcaaac

SEQ ID NO: 5565 - RNA, 20 nt, Artificial Sequence
  spacer sequence ATCN PAM
ggagacccugccugccacag

SEQ ID NO: 5566 - RNA, 20 nt, Artificial Sequence
  spacer sequence ATCN PAM
ccggcacacacaccccgcca

SEQ ID NO: 5567 - RNA, 20 nt, Artificial Sequence
  spacer sequence ATCN PAM
cagcagcccaaaggccaggc

SEQ ID NO: 5568 - RNA, 20 nt, Artificial Sequence
  spacer sequence ATCN PAM
gaggaacaggagggaaacug

SEQ ID NO: 5569 - RNA, 20 nt, Artificial Sequence
  spacer sequence ATCN PAM
caggcccggggguggggcgg

SEQ ID NO: 5570 - RNA, 20 nt, Artificial Sequence
  spacer sequence ATCN PAM
cagguccccugggaggcccc

SEQ ID NO: 5571 - RNA, 20 nt, Artificial Sequence
  spacer sequence ATCN PAM
cagcccuggacucagcuggg

SEQ ID NO: 5572 - RNA, 20 nt, Artificial Sequence
  spacer sequence ATCN PAM
acauccggauaagcgcacac

SEQ ID NO: 5573 - RNA, 20 nt, Artificial Sequence
  spacer sequence ATCN PAM
ggauaagcgcacacuuugga

SEQ ID NO: 5574 - RNA, 20 nt, Artificial Sequence
  spacer sequence ATCN PAM
ggauguggaugugggggcag

SEQ ID NO: 5575 - RNA, 20 nt, Artificial Sequence
  spacer sequence ATCN PAM
cccacccuggcucugggccc

SEQ ID NO: 5576 - RNA, 20 nt, Artificial Sequence
  spacer sequence ATCN PAM
ucggccacgcccgucgcagg

SEQ ID NO: 5577 - RNA, 20 nt, Artificial Sequence
  spacer sequence ATCN PAM
gggugcaggaggugcgcgcc

SEQ ID NO: 5578 - RNA, 20 nt, Artificial Sequence
  spacer sequence ATCN PAM
gcccccuuuccagccugccg

SEQ ID NO: 5579 - RNA, 20 nt, Artificial Sequence
  spacer sequence ATCN PAM
gucagaguccccgaaccugc

SEQ ID NO: 5580 - RNA, 20 nt, Artificial Sequence
  spacer sequence ATCN PAM
ccgcgccucgccgggcaggg

SEQ ID NO: 5581 - RNA, 20 nt, Artificial Sequence
  spacer sequence ATCN PAM
cgcggggcgaggacgcagcc

SEQ ID NO: 5582 - RNA, 20 nt, Artificial Sequence
  spacer sequence ATCN PAM
accccugcuggccacugacc

SEQ ID NO: 5583 - RNA, 20 nt, Artificial Sequence
  spacer sequence ATCN PAM
uguguccccaccgggggucu

SEQ ID NO: 5584 - RNA, 20 nt, Artificial Sequence
  spacer sequence ATCN PAM
cggugagauaccugggaguc

SEQ ID NO: 5585 - RNA, 20 nt, Artificial Sequence
  spacer sequence ATCN PAM
caccgcgauccugugucccc

SEQ ID NO: 5586 - RNA, 20 nt, Artificial Sequence
  spacer sequence ATCN PAM
gugccgagcacugugcaccg

SEQ ID NO: 5587 - RNA, 20 nt, Artificial Sequence
  spacer sequence ATCN PAM
uggguucccaggguggcguu

SEQ ID NO: 5588 - RNA, 20 nt, Artificial Sequence
  spacer sequence ATCN PAM
uucccugguucugugagccu

SEQ ID NO: 5589 - RNA, 20 nt, Artificial Sequence
  spacer sequence ATCN PAM
gcgcccccagcccccagccc

SEQ ID NO: 5590 - RNA, 20 nt, Artificial Sequence
  spacer sequence ATCN PAM
gaaagaaugggccugaauug

SEQ ID NO: 5591 - RNA, 20 nt, Artificial Sequence
  spacer sequence ATCN PAM
gcaccgagcuccccugcgcc

SEQ ID NO: 5592 - RNA, 20 nt, Artificial Sequence
  spacer sequence ATCN PAM
ccacccccucugcaccucgg

SEQ ID NO: 5593 - RNA, 20 nt, Artificial Sequence
  spacer sequence ATCN PAM
cacagcugcugccuggggga

SEQ ID NO: 5594 - RNA, 20 nt, Artificial Sequence
  spacer sequence ATCN PAM
agguggggguagccaggggc

SEQ ID NO: 5595 - RNA, 20 nt, Artificial Sequence
  spacer sequence ATCN PAM
acuugaggguggaagugagu

SEQ ID NO: 5596 - RNA, 20 nt, Artificial Sequence
  spacer sequence ATCN PAM
cggccccacuccugaccuca

SEQ ID NO: 5597 - RNA, 20 nt, Artificial Sequence
  spacer sequence ATCN PAM
cagggaaaucccggccccac

SEQ ID NO: 5598 - RNA, 20 nt, Artificial Sequence
  spacer sequence ATCN PAM
cuccgaagacuuucuggggc

SEQ ID NO: 5599 - RNA, 20 nt, Artificial Sequence
  spacer sequence ATCN PAM
caugccgccgccucccccag

SEQ ID NO: 5600 - RNA, 20 nt, Artificial Sequence
  spacer sequence ATCN PAM
ggagaaccagcuuuacaagg

SEQ ID NO: 5601 - RNA, 20 nt, Artificial Sequence
  spacer sequence ATCN PAM
ggccaggcgagugugggggu

SEQ ID NO: 5602 - RNA, 20 nt, Artificial Sequence
  spacer sequence ATCN PAM
cggcugggugcguggcccac

SEQ ID NO: 5603 - RNA, 20 nt, Artificial Sequence
  spacer sequence ATCN PAM
cgguuccagugggaguuagg

SEQ ID NO: 5604 - RNA, 20 nt, Artificial Sequence
  spacer sequence ATCN PAM
ccacacuuuggugcacccca

SEQ ID NO: 5605 - RNA, 20 nt, Artificial Sequence
  spacer sequence ATCN PAM
caauucuuccuacaucgcca

SEQ ID NO: 5606 - RNA, 20 nt, Artificial Sequence
  spacer sequence ATCN PAM
accccaugcccaccaaaacc

SEQ ID NO: 5607 - RNA, 20 nt, Artificial Sequence
  spacer sequence ATCN PAM
cgacaggugucgggguucag

SEQ ID NO: 5608 - RNA, 20 nt, Artificial Sequence
  spacer sequence ATCN PAM
gaaccccgacaccugucgug

SEQ ID NO: 5609 - RNA, 20 nt, Artificial Sequence
  spacer sequence ATCN PAM
caacuucaucugaaccccga

SEQ ID NO: 5610 - RNA, 20 nt, Artificial Sequence
  spacer sequence ATCN PAM
ccuacccaaccaagacccgg

SEQ ID NO: 5611 - RNA, 20 nt, Artificial Sequence
  spacer sequence ATCN PAM
gggcuagguuguuaugucgg

SEQ ID NO: 5612 - RNA, 20 nt, Artificial Sequence
  spacer sequence ATCN PAM
gggcuagaggcccauuuguu

SEQ ID NO: 5613 - RNA, 20 nt, Artificial Sequence
  spacer sequence ATCN PAM
cgguuccgcccccucccgcg

SEQ ID NO: 5614 - RNA, 20 nt, Artificial Sequence
  spacer sequence ATCN PAM
gagggcgcgccugcgucuua

SEQ ID NO: 5615 - RNA, 20 nt, Artificial Sequence
  spacer sequence ATCN PAM
ugggccaaucagagggcgcg

SEQ ID NO: 5616 - RNA, 20 nt, Artificial Sequence
  spacer sequence ATCN PAM
cccgcugucccucgccgccg

SEQ ID NO: 5617 - RNA, 20 nt, Artificial Sequence
  spacer sequence ATCN PAM
gggaacucggcgcucccgcc

SEQ ID NO: 5618 - RNA, 20 nt, Artificial Sequence
  spacer sequence ATCN PAM
acacaccaacgcuuuugcuu

SEQ ID NO: 5619 - RNA, 20 nt, Artificial Sequence
  spacer sequence ATCN PAM
caaugggaaaaggaggaaac

SEQ ID NO: 5620 - RNA, 20 nt, Artificial Sequence
  spacer sequence ATCN PAM
uggguaggcguggcccguuc

SEQ ID NO: 5621 - RNA, 20 nt, Artificial Sequence
  spacer sequence ATCN PAM
ugccuuaucacuuccggggc

SEQ ID NO: 5622 - RNA, 20 nt, Artificial Sequence
  spacer sequence ATCN PAM
cuuccggggccaucccuucc

SEQ ID NO: 5623 - RNA, 20 nt, Artificial Sequence
  spacer sequence ATCN PAM
cuucccgauucccggccuag

SEQ ID NO: 5624 - RNA, 20 nt, Artificial Sequence
  spacer sequence ATCN PAM
ggaagggauggccccggaag

SEQ ID NO: 5625 - RNA, 20 nt, Artificial Sequence
  spacer sequence ATCN PAM
acuuguugcuggaccagaac

SEQ ID NO: 5626 - RNA, 20 nt, Artificial Sequence
  spacer sequence ATCN PAM
acccccaagacugaaggcag

SEQ ID NO: 5627 - RNA, 20 nt, Artificial Sequence
  spacer sequence ATCN PAM
caaaacuuuggguggccaag

SEQ ID NO: 5628 - RNA, 20 nt, Artificial Sequence
  spacer sequence ATCN PAM
ucccaccuuggccacccaaa

SEQ ID NO: 5629 - RNA, 20 nt, Artificial Sequence
  spacer sequence ATCN PAM
cuacuaaaacaaauuuaaaa

SEQ ID NO: 5630 - RNA, 20 nt, Artificial Sequence
  spacer sequence ATCN PAM
aggcguggugguguacaccu

SEQ ID NO: 5631 - RNA, 20 nt, Artificial Sequence
  spacer sequence ATCN PAM
uccuaccucagccucccaag

SEQ ID NO: 5632 - RNA, 20 nt, Artificial Sequence
  spacer sequence ATCN PAM
caaacucauaccuaggacuu

SEQ ID NO: 5633 - RNA, 20 nt, Artificial Sequence
  spacer sequence ATCN PAM
gauuuucuaauauuuccccu

SEQ ID NO: 5634 - RNA, 20 nt, Artificial Sequence
  spacer sequence ATCN PAM
gauuuuuauuuuucauuauc

SEQ ID NO: 5635 - RNA, 20 nt, Artificial Sequence
  spacer sequence ATCN PAM
cucaccaccucuccccgcuu

SEQ ID NO: 5636 - RNA, 20 nt, Artificial Sequence
  spacer sequence ATCN PAM
ucaacaggggucaucucuca

SEQ ID NO: 5637 - RNA, 20 nt, Artificial Sequence
  spacer sequence ATCN PAM
gaugaaggcaaacuuuuugu

SEQ ID NO: 5638 - RNA, 20 nt, Artificial Sequence
  spacer sequence ATCN PAM
gaugccauggcggccugugg

SEQ ID NO: 5639 - RNA, 20 nt, Artificial Sequence
  spacer sequence ATCN PAM
guccguacuuugagaagacc

SEQ ID NO: 5640 - RNA, 20 nt, Artificial Sequence
  spacer sequence ATCN PAM
cugaaggugaggcugcugcu

SEQ ID NO: 5641 - RNA, 20 nt, Artificial Sequence
  spacer sequence ATCN PAM
cugggucucccugucuuuca

SEQ ID NO: 5642 - RNA, 20 nt, Artificial Sequence
  spacer sequence ATCN PAM
cggggauuuggguuugucac

SEQ ID NO: 5643 - RNA, 20 nt, Artificial Sequence
  spacer sequence ATCN PAM
ccgagaucucugggucuccc

SEQ ID NO: 5644 - RNA, 20 nt, Artificial Sequence
  spacer sequence ATCN PAM
uuagcgucgucaauguucuc

SEQ ID NO: 5645 - RNA, 20 nt, Artificial Sequence
  spacer sequence ATCN PAM
uggcauccuuagcgucguca

SEQ ID NO: 5646 - RNA, 20 nt, Artificial Sequence
  spacer sequence ATCN PAM
ucaccuucccauucauggcc

SEQ ID NO: 5647 - RNA, 20 nt, Artificial Sequence
  spacer sequence ATCN PAM
gggugcugagcaggaguccc

SEQ ID NO: 5648 - RNA, 20 nt, Artificial Sequence
  spacer sequence ATCN PAM
ucgagacgggacuccugcuc

SEQ ID NO: 5649 - RNA, 20 nt, Artificial Sequence
  spacer sequence ATCN PAM
acagacuggagacagagggc

SEQ ID NO: 5650 - RNA, 20 nt, Artificial Sequence
  spacer sequence ATCN PAM
gccguccaucuacagacugg

SEQ ID NO: 5651 - RNA, 20 nt, Artificial Sequence
  spacer sequence ATCN PAM
gaguagaccaggcaggcaag

SEQ ID NO: 5652 - RNA, 20 nt, Artificial Sequence
  spacer sequence ATCN PAM
guugucugacgacuugccug

SEQ ID NO: 5653 - RNA, 20 nt, Artificial Sequence
  spacer sequence ATCN PAM
cguggguaccgugguggcuc

SEQ ID NO: 5654 - RNA, 20 nt, Artificial Sequence
  spacer sequence ATCN PAM
ccaagggacccacucauggc

SEQ ID NO: 5655 - RNA, 20 nt, Artificial Sequence
  spacer sequence ATCN PAM
cgcaaccaccccugugcuug

SEQ ID NO: 5656 - RNA, 20 nt, Artificial Sequence
  spacer sequence ATCN PAM
cagcucccccagggaccugg

SEQ ID NO: 5657 - RNA, 20 nt, Artificial Sequence
  spacer sequence ATCN PAM
ccaccagccugucccccagg

SEQ ID NO: 5658 - RNA, 20 nt, Artificial Sequence
  spacer sequence ATCN PAM
uggaaauuguucaaaaucuc

SEQ ID NO: 5659 - RNA, 20 nt, Artificial Sequence
  spacer sequence ATCN PAM
guccucucagagccauuucu

SEQ ID NO: 5660 - RNA, 20 nt, Artificial Sequence
  spacer sequence ATCN PAM
caggacgcaaaagccaaaug

SEQ ID NO: 5661 - RNA, 20 nt, Artificial Sequence
  spacer sequence ATCN PAM
ugagcaggaaggguuuuuac

SEQ ID NO: 5662 - RNA, 20 nt, Artificial Sequence
  spacer sequence ATCN PAM
uccuuccaauggcugugugu

SEQ ID NO: 5663 - RNA, 20 nt, Artificial Sequence
  spacer sequence ATCN PAM
uuaaacacacagccauugga

SEQ ID NO: 5664 - RNA, 20 nt, Artificial Sequence
  spacer sequence ATCN PAM
gaaccgaaaugacuacgaaa

SEQ ID NO: 5665 - RNA, 20 nt, Artificial Sequence
  spacer sequence ATCN PAM
ugucaaacccagccugaccg

SEQ ID NO: 5666 - RNA, 20 nt, Artificial Sequence
  spacer sequence ATCN PAM
cggcgucagaagcggucagg

SEQ ID NO: 5667 - RNA, 20 nt, Artificial Sequence
  spacer sequence ATCN PAM
gggguuguguggguuuuugg

SEQ ID NO: 5668 - RNA, 20 nt, Artificial Sequence
  spacer sequence ATCN PAM
cagagaagugaguggggcac

SEQ ID NO: 5669 - RNA, 20 nt, Artificial Sequence
  spacer sequence ATCN PAM
aacggacugugaauccgcuc

SEQ ID NO: 5670 - RNA, 20 nt, Artificial Sequence
  spacer sequence ATCN PAM
gcucuuugucggaagcugag

SEQ ID NO: 5671 - RNA, 20 nt, Artificial Sequence
  spacer sequence ATCN PAM
gugcugugcgccccacagua

SEQ ID NO: 5672 - RNA, 20 nt, Artificial Sequence
  spacer sequence ATCN PAM
ucaagaaccucucagggacg

SEQ ID NO: 5673 - RNA, 20 nt, Artificial Sequence
  spacer sequence ATCN PAM
auguuguauuugcaguggcu

SEQ ID NO: 5674 - RNA, 20 nt, Artificial Sequence
  spacer sequence ATCN PAM
auggaguaugcguacgucuu

SEQ ID NO: 5675 - RNA, 20 nt, Artificial Sequence
  spacer sequence ATCN PAM
gcuucguaaagccaaagaaa

SEQ ID NO: 5676 - RNA, 20 nt, Artificial Sequence
  spacer sequence ATCN PAM
cagggcgaccucagacggcc

SEQ ID NO: 5677 - RNA, 20 nt, Artificial Sequence
  spacer sequence ATCN PAM
cucuuguugagagcucacug

SEQ ID NO: 5678 - RNA, 20 nt, Artificial Sequence
  spacer sequence ATCN PAM
augagccaggcaugacuggg

SEQ ID NO: 5679 - RNA, 20 nt, Artificial Sequence
  spacer sequence ATCN PAM
cuuaagcaggauugaagacc

SEQ ID NO: 5680 - RNA, 20 nt, Artificial Sequence
  spacer sequence ATCN PAM
ugcuuaagggauuucaucua

SEQ ID NO: 5681 - RNA, 20 nt, Artificial Sequence
  spacer sequence ATCN PAM
aaaaggcgggggcguucacu

SEQ ID NO: 5682 - RNA, 20 nt, Artificial Sequence
  spacer sequence ATCN PAM
gagaaagcuaaguuaagagu

SEQ ID NO: 5683 - RNA, 20 nt, Artificial Sequence
  spacer sequence ATCN PAM
cauacggguagcuggcucca

SEQ ID NO: 5684 - RNA, 20 nt, Artificial Sequence
  spacer sequence ATCN PAM
cugcucucaggccacccuuc

SEQ ID NO: 5685 - RNA, 20 nt, Artificial Sequence
  spacer sequence ATCN PAM
uugugggcaaggacuggccg

SEQ ID NO: 5686 - RNA, 20 nt, Artificial Sequence
  spacer sequence ATCN PAM
gacuuucacagggcuccaca

SEQ ID NO: 5687 - RNA, 20 nt, Artificial Sequence
  spacer sequence ATCN PAM
cgcgagacuggagucuccgc

SEQ ID NO: 5688 - RNA, 20 nt, Artificial Sequence
  spacer sequence ATCN PAM
gaggcgcacucggcuucgag

SEQ ID NO: 5689 - RNA, 20 nt, Artificial Sequence
  spacer sequence ATCN PAM
ggcuggcagcggggagacgg

SEQ ID NO: 5690 - RNA, 20 nt, Artificial Sequence
  spacer sequence ATCN PAM
ggacggaggcccggagcccg

SEQ ID NO: 5691 - RNA, 20 nt, Artificial Sequence
  spacer sequence ATCN PAM
cuuggagcgguucgacgaag

SEQ ID NO: 5692 - RNA, 20 nt, Artificial Sequence
  spacer sequence ATCN PAM
ccuccgcgcgccugacugac

SEQ ID NO: 5693 - RNA, 20 nt, Artificial Sequence
  spacer sequence ATCN PAM
cguagaaggagcgcgucagc

SEQ ID NO: 5694 - RNA, 20 nt, Artificial Sequence
  spacer sequence ATCN PAM
ugggcuucugcggccugacc

SEQ ID NO: 5695 - RNA, 20 nt, Artificial Sequence
  spacer sequence ATCN PAM
ggaaguagagcgcggucagg

SEQ ID NO: 5696 - RNA, 20 nt, Artificial Sequence
  spacer sequence ATCN PAM
gggcguuuaggugcgucagg

SEQ ID NO: 5697 - RNA, 20 nt, Artificial Sequence
  spacer sequence ATCN PAM
ggcgacaaggagccaaggag

SEQ ID NO: 5698 - RNA, 20 nt, Artificial Sequence
  spacer sequence ATCN PAM
ucccgccugccgccaggccu

SEQ ID NO: 5699 - RNA, 20 nt, Artificial Sequence
  spacer sequence ATCN PAM
ggaccccacggaaaggccug

SEQ ID NO: 5700 - RNA, 20 nt, Artificial Sequence
  spacer sequence ATCN PAM
cuccccaucaccacccuggc

SEQ ID NO: 5701 - RNA, 20 nt, Artificial Sequence
  spacer sequence ATCN PAM
ccacccuggcaaagucaagc

SEQ ID NO: 5702 - RNA, 20 nt, Artificial Sequence
  spacer sequence ATCN PAM
cuacaauaaaaacuuauaaa

SEQ ID NO: 5703 - RNA, 20 nt, Artificial Sequence
  spacer sequence ATCN PAM
cuugagcccaggaguucaga

SEQ ID NO: 5704 - RNA, 20 nt, Artificial Sequence
  spacer sequence ATCN PAM
uuuuucguuggccucccaaa

SEQ ID NO: 5705 - RNA, 20 nt, Artificial Sequence
  spacer sequence ATCN PAM
auaaugccagcacuuuggga

SEQ ID NO: 5706 - RNA, 20 nt, Artificial Sequence
  spacer sequence ATCN PAM
gugcaaugggagugacauca

SEQ ID NO: 5707 - RNA, 20 nt, Artificial Sequence
  spacer sequence ATCN PAM
gcgugccucuccuggggucc

SEQ ID NO: 5708 - RNA, 20 nt, Artificial Sequence
  spacer sequence ATCN PAM
ccccugcgccaggaccccag

SEQ ID NO: 5709 - RNA, 20 nt, Artificial Sequence
  spacer sequence ATCN PAM
ccaugggagugaaugguaau

SEQ ID NO: 5710 - RNA, 20 nt, Artificial Sequence
  spacer sequence ATCN PAM
cuuggcgauuaggacaugaa

SEQ ID NO: 5711 - RNA, 20 nt, Artificial Sequence
  spacer sequence ATCN PAM
ccaagugauuaccauucacu

SEQ ID NO: 5712 - RNA, 20 nt, Artificial Sequence
  spacer sequence ATCN PAM
ccuccgcugaggcuucuuca

SEQ ID NO: 5713 - RNA, 20 nt, Artificial Sequence
  spacer sequence ATCN PAM
ccgugggguccucaguguug

SEQ ID NO: 5714 - RNA, 20 nt, Artificial Sequence
  spacer sequence ATCN PAM
gagauggugugcacccuucc

SEQ ID NO: 5715 - RNA, 20 nt, Artificial Sequence
  spacer sequence ATCN PAM
cagauuccgggacucaaaca

SEQ ID NO: 5716 - RNA, 20 nt, Artificial Sequence
  spacer sequence ATCN PAM
cagcugacagcgguagucag

SEQ ID NO: 5717 - RNA, 20 nt, Artificial Sequence
  spacer sequence ATCN PAM
ccccccaccugcgaagcacg

SEQ ID NO: 5718 - RNA, 20 nt, Artificial Sequence
  spacer sequence ATCN PAM
ggcggcaggggucacggggc

SEQ ID NO: 5719 - RNA, 20 nt, Artificial Sequence
  spacer sequence ATCN PAM
uugccuggcugagauggggc

SEQ ID NO: 5720 - RNA, 20 nt, Artificial Sequence
  spacer sequence ATCN PAM
cagccaggcaaggaucaggc

SEQ ID NO: 5721 - RNA, 20 nt, Artificial Sequence
  spacer sequence ATCN PAM
gcgucccgcagccccucagc

SEQ ID NO: 5722 - RNA, 20 nt, Artificial Sequence
  spacer sequence ATCN PAM
caagcccuguggccuggcca

SEQ ID NO: 5723 - RNA, 20 nt, Artificial Sequence
  spacer sequence ATCN PAM
agcccuguacuggcuccaga

SEQ ID NO: 5724 - RNA, 20 nt, Artificial Sequence
  spacer sequence ATCN PAM
agggucgcccucagucccug

SEQ ID NO: 5725 - RNA, 20 nt, Artificial Sequence
  spacer sequence ATCN PAM
ggcucacucugggaacaggu

SEQ ID NO: 5726 - RNA, 20 nt, Artificial Sequence
  spacer sequence ATCN PAM
guucagcgguggcgguggug

SEQ ID NO: 5727 - RNA, 20 nt, Artificial Sequence
  spacer sequence ATCN PAM
cgugggugaggagggguggg

SEQ ID NO: 5728 - RNA, 20 nt, Artificial Sequence
  spacer sequence ATCN PAM
cuugaagcaggagggggcuu

SEQ ID NO: 5729 - RNA, 20 nt, Artificial Sequence
  spacer sequence ATCN PAM
ccugaccccacuacagacgu

SEQ ID NO: 5730 - RNA, 20 nt, Artificial Sequence
  spacer sequence ATCN PAM
ugcucuuccagaaaggucug

SEQ ID NO: 5731 - RNA, 20 nt, Artificial Sequence
  spacer sequence ATCN PAM
ggggaggagggcacgcagga

SEQ ID NO: 5732 - RNA, 20 nt, Artificial Sequence
  spacer sequence ATCN PAM
cuggguucacggucccugcc

SEQ ID NO: 5733 - RNA, 20 nt, Artificial Sequence
  spacer sequence ATCN PAM
uguuguacgucucugaauua

SEQ ID NO: 5734 - RNA, 20 nt, Artificial Sequence
  spacer sequence ATCN PAM
gggcaucgccagcaaagucc

SEQ ID NO: 5735 - RNA, 20 nt, Artificial Sequence
  spacer sequence ATCN PAM
ccagcaaaguccagccagcg

SEQ ID NO: 5736 - RNA, 20 nt, Artificial Sequence
  spacer sequence ATCN PAM
aacgcuggcuggacuuugcu

SEQ ID NO: 5737 - RNA, 20 nt, Artificial Sequence
  spacer sequence ATCN PAM
uagcacuuugggaagcccag

SEQ ID NO: 5738 - RNA, 20 nt, Artificial Sequence
  spacer sequence ATCN PAM
ucccaccugggcuucccaaa

SEQ ID NO: 5739 - RNA, 20 nt, Artificial Sequence
  spacer sequence ATCN PAM
ccugagcccaggaguucaag

SEQ ID NO: 5740 - RNA, 20 nt, Artificial Sequence
  spacer sequence ATCN PAM
auagagacagugucuggcca

SEQ ID NO: 5741 - RNA, 20 nt, Artificial Sequence
  spacer sequence ATCN PAM
cucggcguucccugaacaga

SEQ ID NO: 5742 - RNA, 20 nt, Artificial Sequence
  spacer sequence ATCN PAM
guucagggaacgccgaguga

SEQ ID NO: 5743 - RNA, 20 nt, Artificial Sequence
  spacer sequence ATCN PAM
gaccccgggucuuugcacaa

SEQ ID NO: 5744 - RNA, 20 nt, Artificial Sequence
  spacer sequence ATCN PAM
ugcaggcaggggagggccgc

SEQ ID NO: 5745 - RNA, 20 nt, Artificial Sequence
  spacer sequence ATCN PAM
gucuccacgcacgaauccug

SEQ ID NO: 5746 - RNA, 20 nt, Artificial Sequence
  spacer sequence ATCN PAM
aagaagcccagagugaagcc

SEQ ID NO: 5747 - RNA, 20 nt, Artificial Sequence
  spacer sequence ATCN PAM
cauccccagcugcucacacu

SEQ ID NO: 5748 - RNA, 20 nt, Artificial Sequence
  spacer sequence ATCN PAM
ccagcugcucacacuccaca

SEQ ID NO: 5749 - RNA, 20 nt, Artificial Sequence
  spacer sequence ATCN PAM
guccaccuacuaugcucccg

SEQ ID NO: 5750 - RNA, 20 nt, Artificial Sequence
  spacer sequence ATCN PAM
ccagggaacagcgugggucc

SEQ ID NO: 5751 - RNA, 20 nt, Artificial Sequence
  spacer sequence ATCN PAM
ggcucggccaacuccagucu

SEQ ID NO: 5752 - RNA, 20 nt, Artificial Sequence
  spacer sequence ATCN PAM
gcagccucaccaaccccgac

SEQ ID NO: 5753 - RNA, 20 nt, Artificial Sequence
  spacer sequence ATCN PAM
gcguggcccggccugggguc

SEQ ID NO: 5754 - RNA, 20 nt, Artificial Sequence
  spacer sequence ATCN PAM
gggucgcugggggcaggccc

SEQ ID NO: 5755 - RNA, 20 nt, Artificial Sequence
  spacer sequence ATCN PAM
cgggccgcccccgccuccgc

SEQ ID NO: 5756 - RNA, 20 nt, Artificial Sequence
  spacer sequence ATCN PAM
ccaagcgccgccgcgcccuc

SEQ ID NO: 5757 - RNA, 20 nt, Artificial Sequence
  spacer sequence ATCN PAM
cggcggcggcgcgcgcgugg

SEQ ID NO: 5758 - RNA, 20 nt, Artificial Sequence
  spacer sequence ATCN PAM
cccagagcgccgacgucucc

SEQ ID NO: 5759 - RNA, 20 nt, Artificial Sequence
  spacer sequence ATCN PAM
gaggguaccagagggguucc

SEQ ID NO: 5760 - RNA, 20 nt, Artificial Sequence
  spacer sequence ATCN PAM
gggguccccccaaguccagg

SEQ ID NO: 5761 - RNA, 20 nt, Artificial Sequence
  spacer sequence ATCN PAM
acccgcuucucuggggagcc

SEQ ID NO: 5762 - RNA, 20 nt, Artificial Sequence
  spacer sequence ATCN PAM
ccaccaaaugcgaaaccgag

SEQ ID NO: 5763 - RNA, 20 nt, Artificial Sequence
  spacer sequence ATCN PAM
ccggggaccuuggcaccgga

SEQ ID NO: 5764 - RNA, 20 nt, Artificial Sequence
  spacer sequence ATCN PAM
cucgagggccacaguccccc

SEQ ID NO: 5765 - RNA, 20 nt, Artificial Sequence
  spacer sequence ATCN PAM
cuggguucguccugcccgca

SEQ ID NO: 5766 - RNA, 20 nt, Artificial Sequence
  spacer sequence ATCN PAM
ggggaccugcgggcaggacg

SEQ ID NO: 5767 - RNA, 20 nt, Artificial Sequence
  spacer sequence ATCN PAM
gcuucacuccagggggccaa

SEQ ID NO: 5768 - RNA, 20 nt, Artificial Sequence
  spacer sequence ATCN PAM
cacugccccucccggggcug

SEQ ID NO: 5769 - RNA, 20 nt, Artificial Sequence
  spacer sequence ATCN PAM
ccucugcaccucaguuuccu

SEQ ID NO: 5770 - RNA, 20 nt, Artificial Sequence
  spacer sequence ATCN PAM
cggccgggcguggcaggcag

SEQ ID NO: 5771 - RNA, 20 nt, Artificial Sequence
  spacer sequence ATCN PAM
cagggucuccaagacaggag

SEQ ID NO: 5772 - RNA, 20 nt, Artificial Sequence
  spacer sequence ATCN PAM
ggggcugaggcggccccccc

SEQ ID NO: 5773 - RNA, 20 nt, Artificial Sequence
  spacer sequence ATCN PAM
aacccacaugugaccagcac

SEQ ID NO: 5774 - RNA, 20 nt, Artificial Sequence
  spacer sequence ATCN PAM
cccguccccagcguggccug

SEQ ID NO: 5775 - RNA, 20 nt, Artificial Sequence
  spacer sequence ATCN PAM
aggguugcuggggacggagc

SEQ ID NO: 5776 - RNA, 20 nt, Artificial Sequence
  spacer sequence ATCN PAM
cggcuucccgggaaggugcu

SEQ ID NO: 5777 - RNA, 20 nt, Artificial Sequence
  spacer sequence ATCN PAM
agccagaaucagggcuuugu

SEQ ID NO: 5778 - RNA, 20 nt, Artificial Sequence
  spacer sequence ATCN PAM
gggcuuugucgcggacauca

SEQ ID NO: 5779 - RNA, 20 nt, Artificial Sequence
  spacer sequence ATCN PAM
ggggucucugcaguucucag

SEQ ID NO: 5780 - RNA, 20 nt, Artificial Sequence
  spacer sequence ATCN PAM
gagaacugcagagaccccug

SEQ ID NO: 5781 - RNA, 20 nt, Artificial Sequence
  spacer sequence ATCN PAM
aaggggacccuguggagggg

SEQ ID NO: 5782 - RNA, 20 nt, Artificial Sequence
  spacer sequence ATCN PAM
gcuuggggagaggaguggcg

SEQ ID NO: 5783 - RNA, 20 nt, Artificial Sequence
  spacer sequence ATCN PAM
gagggacagagacagagaga

SEQ ID NO: 5784 - RNA, 20 nt, Artificial Sequence
  spacer sequence ATCN PAM
cugacucugucugccugcgu

SEQ ID NO: 5785 - RNA, 20 nt, Artificial Sequence
  spacer sequence ATCN PAM
uucuuccuuuucucuucuuu

SEQ ID NO: 5786 - RNA, 20 nt, Artificial Sequence
  spacer sequence ATCN PAM
cggguugagaaauuggaggg

SEQ ID NO: 5787 - RNA, 20 nt, Artificial Sequence
  spacer sequence ATCN PAM
agaccugggucaguggccuc

SEQ ID NO: 5788 - RNA, 20 nt, Artificial Sequence
  spacer sequence ATCN PAM
cccgggcacuugccgaggcc

SEQ ID NO: 5789 - RNA, 20 nt, Artificial Sequence
  spacer sequence ATCN PAM
gcccuccgguccccgugcca

SEQ ID NO: 5790 - RNA, 20 nt, Artificial Sequence
  spacer sequence ATCN PAM
guaaagugggacccaggagg

SEQ ID NO: 5791 - RNA, 20 nt, Artificial Sequence
  spacer sequence ATCN PAM
ucgcccggccugagucgcgg

SEQ ID NO: 5792 - RNA, 20 nt, Artificial Sequence
  spacer sequence ATCN PAM
gcaaacgcugcggguuccag

SEQ ID NO: 5793 - RNA, 20 nt, Artificial Sequence
  spacer sequence ATCN PAM
gggcggcuccgccguuuccu

SEQ ID NO: 5794 - RNA, 20 nt, Artificial Sequence
  spacer sequence ATCN PAM
augacgcauuguuuagacag

SEQ ID NO: 5795 - RNA, 20 nt, Artificial Sequence
  spacer sequence ATCN PAM
uuacgccggccguugucuug

SEQ ID NO: 5796 - RNA, 20 nt, Artificial Sequence
  spacer sequence ATCN PAM
ucgggaggggaacugucugu

SEQ ID NO: 5797 - RNA, 20 nt, Artificial Sequence
  spacer sequence ATCN PAM
cagcgccccacucuccgcuc

SEQ ID NO: 5798 - RNA, 20 nt, Artificial Sequence
  spacer sequence ATCN PAM
gccccccaggcccccgcauu

SEQ ID NO: 5799 - RNA, 20 nt, Artificial Sequence
  spacer sequence ATCN PAM
uggcucaggcccugccaggc

SEQ ID NO: 5800 - RNA, 20 nt, Artificial Sequence
  spacer sequence ATCN PAM
ccaggcuggucugguguggg

SEQ ID NO: 5801 - RNA, 20 nt, Artificial Sequence
  spacer sequence ATCN PAM
cagcacuuugggaggcugag

SEQ ID NO: 5802 - RNA, 20 nt, Artificial Sequence
  spacer sequence ATCN PAM
uaaaacaggcagacaaaacc

SEQ ID NO: 5803 - RNA, 20 nt, Artificial Sequence
  spacer sequence ATCN PAM
uuuaauuuucacaauuccac

SEQ ID NO: 5804 - RNA, 20 nt, Artificial Sequence
  spacer sequence ATCN PAM
uuaguacugguuguaaacuu

SEQ ID NO: 5805 - RNA, 20 nt, Artificial Sequence
  spacer sequence ATCN PAM
auuuaagcaagauggaaaau

SEQ ID NO: 5806 - RNA, 20 nt, Artificial Sequence
  spacer sequence ATCN PAM
ugcuuaaauugauaaguuua

SEQ ID NO: 5807 - RNA, 20 nt, Artificial Sequence
  spacer sequence ATCN PAM
agggugugucagggaagggg

SEQ ID NO: 5808 - RNA, 20 nt, Artificial Sequence
  spacer sequence ATCN PAM
caaaguaagggggcucagac

SEQ ID NO: 5809 - RNA, 20 nt, Artificial Sequence
  spacer sequence ATCN PAM
cggcgacuccucugcagaau

SEQ ID NO: 5810 - RNA, 20 nt, Artificial Sequence
  spacer sequence ATCN PAM
ccgcauucugcagaggaguc

SEQ ID NO: 5811 - RNA, 20 nt, Artificial Sequence
  spacer sequence ATCN PAM
cggaccccuuaccgcaacau

SEQ ID NO: 5812 - RNA, 20 nt, Artificial Sequence
  spacer sequence ATCN PAM
ugaacgaaagacaucaguga

SEQ ID NO: 5813 - RNA, 20 nt, Artificial Sequence
  spacer sequence ATCN PAM
gugaucgcaagaggcgcuaa

SEQ ID NO: 5814 - RNA, 20 nt, Artificial Sequence
  spacer sequence ATCN PAM
cugaugucuuucguucagga

SEQ ID NO: 5815 - RNA, 20 nt, Artificial Sequence
  spacer sequence ATCN PAM
caagaggcgcuaaaacuucu

SEQ ID NO: 5816 - RNA, 20 nt, Artificial Sequence
  spacer sequence ATCN PAM
cggguuucggcagaaguuuu

SEQ ID NO: 5817 - RNA, 20 nt, Artificial Sequence
  spacer sequence ATCN PAM
aaccagggaccuuuagaucu

SEQ ID NO: 5818 - RNA, 20 nt, Artificial Sequence
  spacer sequence ATCN PAM
aaaggucccugguucgaucc

SEQ ID NO: 5819 - RNA, 20 nt, Artificial Sequence
  spacer sequence ATCN PAM
ucagucuaacgcucucccaa

SEQ ID NO: 5820 - RNA, 20 nt, Artificial Sequence
  spacer sequence ATCN PAM
uuuguaaggucucccagggc

SEQ ID NO: 5821 - RNA, 20 nt, Artificial Sequence
  spacer sequence ATCN PAM
guuagcgcguucggcuguua

SEQ ID NO: 5822 - RNA, 20 nt, Artificial Sequence
  spacer sequence ATCN PAM
gagugcgcacgugggggccg

SEQ ID NO: 5823 - RNA, 20 nt, Artificial Sequence
  spacer sequence ATCN PAM
cccgaggcggaaaggucauc

SEQ ID NO: 5824 - RNA, 20 nt, Artificial Sequence
  spacer sequence ATCN PAM
gggggugcacggcgcaacac

SEQ ID NO: 5825 - RNA, 20 nt, Artificial Sequence
  spacer sequence ATCN PAM
uggccucggccuucagacaa

SEQ ID NO: 5826 - RNA, 20 nt, Artificial Sequence
  spacer sequence ATCN PAM
caagccgggcggggagcccg

SEQ ID NO: 5827 - RNA, 20 nt, Artificial Sequence
  spacer sequence ATCN PAM
caagagcagccucgcgggcc

SEQ ID NO: 5828 - RNA, 20 nt, Artificial Sequence
  spacer sequence ATCN PAM
acgccacccugcuggacccu

SEQ ID NO: 5829 - RNA, 20 nt, Artificial Sequence
  spacer sequence ATCN PAM
caaaaaagucccuggagcag

SEQ ID NO: 5830 - RNA, 20 nt, Artificial Sequence
  spacer sequence ATCN PAM
gcugaagccugcggaccucu

SEQ ID NO: 5831 - RNA, 20 nt, Artificial Sequence
  spacer sequence ATCN PAM
gagcagagguccgcaggcuu

SEQ ID NO: 5832 - RNA, 20 nt, Artificial Sequence
  spacer sequence ATCN PAM
auagaauugcaaggaaauca

SEQ ID NO: 5833 - RNA, 20 nt, Artificial Sequence
  spacer sequence ATCN PAM
guuacacggagaggcaguua

SEQ ID NO: 5834 - RNA, 20 nt, Artificial Sequence
  spacer sequence ATCN PAM
uuuaauaacugccucuccgu

SEQ ID NO: 5835 - RNA, 20 nt, Artificial Sequence
  spacer sequence ATCN PAM
gguuucaagacaaucuuuua

SEQ ID NO: 5836 - RNA, 20 nt, Artificial Sequence
  spacer sequence ATCN PAM
aagugcuucccuuaugaacg

SEQ ID NO: 5837 - RNA, 20 nt, Artificial Sequence
  spacer sequence ATCN PAM
cguucauaagggaagcacuu

SEQ ID NO: 5838 - RNA, 20 nt, Artificial Sequence
  spacer sequence ATCN PAM
agcggcaggucuaauugcga

SEQ ID NO: 5839 - RNA, 20 nt, Artificial Sequence
  spacer sequence ATCN PAM
cagucgcaauuagaccugcc

SEQ ID NO: 5840 - RNA, 20 nt, Artificial Sequence
  spacer sequence ATCN PAM
aagccucauuuccacuccuc

SEQ ID NO: 5841 - RNA, 20 nt, Artificial Sequence
  spacer sequence ATCN PAM
ucaaagccucauuuccacuc

SEQ ID NO: 5842 - RNA, 20 nt, Artificial Sequence
  spacer sequence ATCN PAM
gugauuccgcuuggugaaaa

SEQ ID NO: 5843 - RNA, 20 nt, Artificial Sequence
  spacer sequence ATCN PAM
cagauguuuccuagcuaugg

SEQ ID NO: 5844 - RNA, 20 nt, Artificial Sequence
  spacer sequence ATCN PAM
uggcucaucacugcaaccug

SEQ ID NO: 5845 - RNA, 20 nt, Artificial Sequence
  spacer sequence ATCN PAM
cugcaaccugugccucccag

SEQ ID NO: 5846 - RNA, 20 nt, Artificial Sequence
  spacer sequence ATCN PAM
cuugagccugggaggcacag

SEQ ID NO: 5847 - RNA, 20 nt, Artificial Sequence
  spacer sequence ATCN PAM
cuacuaaaaauacaaaaacu

SEQ ID NO: 5848 - RNA, 20 nt, Artificial Sequence
  spacer sequence ATCN PAM
ucccaccugagccucccaaa

SEQ ID NO: 5849 - RNA, 20 nt, Artificial Sequence
  spacer sequence ATCN PAM
uauggaaaauuagcccuuca

SEQ ID NO: 5850 - RNA, 20 nt, Artificial Sequence
  spacer sequence ATCN PAM
ucaccaggccccuuguuaag

SEQ ID NO: 5851 - RNA, 20 nt, Artificial Sequence
  spacer sequence ATCN PAM
cagcacuuuggaaggccaag

SEQ ID NO: 5852 - RNA, 20 nt, Artificial Sequence
  spacer sequence ATCN PAM
gcccaccuuggccuuccaaa

SEQ ID NO: 5853 - RNA, 20 nt, Artificial Sequence
  spacer sequence ATCN PAM
ccugagguccggaguucgag

SEQ ID NO: 5854 - RNA, 20 nt, Artificial Sequence
  spacer sequence ATCN PAM
gcugggugugguggcgcaug

SEQ ID NO: 5855 - RNA, 20 nt, Artificial Sequence
  spacer sequence ATCN PAM
cagcuacuggggggcugggg

SEQ ID NO: 5856 - RNA, 20 nt, Artificial Sequence
  spacer sequence ATCN PAM
ucucccugcgucuuuccucu

SEQ ID NO: 5857 - RNA, 20 nt, Artificial Sequence
  spacer sequence ATCN PAM
ggacacaaacauguacagag

SEQ ID NO: 5858 - RNA, 20 nt, Artificial Sequence
  spacer sequence ATCN PAM
ccuuuucuuacaaggacaua

SEQ ID NO: 5859 - RNA, 20 nt, Artificial Sequence
  spacer sequence ATCN PAM
gaugagggcccacccucgug

SEQ ID NO: 5860 - RNA, 20 nt, Artificial Sequence
  spacer sequence ATCN PAM
gauaugacuuauguccuugu

SEQ ID NO: 5861 - RNA, 20 nt, Artificial Sequence
  spacer sequence ATCN PAM
caaaaaauaaaauaaagggu

SEQ ID NO: 5862 - RNA, 20 nt, Artificial Sequence
  spacer sequence ATCN PAM
cuugaacccgggagguagag

SEQ ID NO: 5863 - RNA, 20 nt, Artificial Sequence
  spacer sequence ATCN PAM
cagcuacucgagaggcugag

SEQ ID NO: 5864 - RNA, 20 nt, Artificial Sequence
  spacer sequence ATCN PAM
ccugaggucaggaguucgag

SEQ ID NO: 5865 - RNA, 20 nt, Artificial Sequence
  spacer sequence ATCN PAM
accugccucggccuccugaa

SEQ ID NO: 5866 - RNA, 20 nt, Artificial Sequence
  spacer sequence ATCN PAM
uuaaugccugggcguggugg

SEQ ID NO: 5867 - RNA, 20 nt, Artificial Sequence
  spacer sequence ATCN PAM
cuuuaaagaccccaucucca

SEQ ID NO: 5868 - RNA, 20 nt, Artificial Sequence
  spacer sequence ATCN PAM
ccaaaagcagucacauucug

SEQ ID NO: 5869 - RNA, 20 nt, Artificial Sequence
  spacer sequence ATCN PAM
gaagcccuaaccccaggacc

SEQ ID NO: 5870 - RNA, 20 nt, Artificial Sequence
  spacer sequence ATCN PAM
agaaaggcaggcuuggugcu

SEQ ID NO: 5871 - RNA, 20 nt, Artificial Sequence
  spacer sequence ATCN PAM
uggcucacaaggaagaaucc

SEQ ID NO: 5872 - RNA, 20 nt, Artificial Sequence
  spacer sequence ATCN PAM
acacagaaaagcaccccuag

SEQ ID NO: 5873 - RNA, 20 nt, Artificial Sequence
  spacer sequence ATCN PAM
gcaguccgcuaagcggggag

SEQ ID NO: 5874 - RNA, 20 nt, Artificial Sequence
  spacer sequence ATCN PAM
ugcaggaaucugcaguccgc

SEQ ID NO: 5875 - RNA, 20 nt, Artificial Sequence
  spacer sequence ATCN PAM
augcgugcuuguggggugcc

SEQ ID NO: 5876 - RNA, 20 nt, Artificial Sequence
  spacer sequence ATCN PAM
ccaucuaugcgugcuugugg

SEQ ID NO: 5877 - RNA, 20 nt, Artificial Sequence
  spacer sequence ATCN PAM
gaacugaaaccugccucaug

SEQ ID NO: 5878 - RNA, 20 nt, Artificial Sequence
  spacer sequence ATCN PAM
ucacuggcaccugccgcuuu

SEQ ID NO: 5879 - RNA, 20 nt, Artificial Sequence
  spacer sequence ATCN PAM
ccagggcggggagacggggc

SEQ ID NO: 5880 - RNA, 20 nt, Artificial Sequence
  spacer sequence ATCN PAM
caacucgagugccacuuaac

SEQ ID NO: 5881 - RNA, 20 nt, Artificial Sequence
  spacer sequence ATCN PAM
gagcuaggcugugcgggcag

SEQ ID NO: 5882 - RNA, 20 nt, Artificial Sequence
  spacer sequence ATCN PAM
ggcuccugcccgcacagccu

SEQ ID NO: 5883 - RNA, 20 nt, Artificial Sequence
  spacer sequence ATCN PAM
uggggucaggagcucugccc

SEQ ID NO: 5884 - RNA, 20 nt, Artificial Sequence
  spacer sequence ATCN PAM
cccagucccggcugccacgc

SEQ ID NO: 5885 - RNA, 20 nt, Artificial Sequence
  spacer sequence ATCN PAM
ccagcaaagagcucuggcuu

SEQ ID NO: 5886 - RNA, 20 nt, Artificial Sequence
  spacer sequence ATCN PAM
gguccucgugggaugcccgg

SEQ ID NO: 5887 - RNA, 20 nt, Artificial Sequence
  spacer sequence ATCN PAM
cacgaggacccgaugacccu

SEQ ID NO: 5888 - RNA, 20 nt, Artificial Sequence
  spacer sequence ATCN PAM
ccguccagggcagccccggg

SEQ ID NO: 5889 - RNA, 20 nt, Artificial Sequence
  spacer sequence ATCN PAM
cgggcugucacagggaccuc

SEQ ID NO: 5890 - RNA, 20 nt, Artificial Sequence
  spacer sequence ATCN PAM
ugcagcugcagaggaagauc

SEQ ID NO: 5891 - RNA, 20 nt, Artificial Sequence
  spacer sequence ATCN PAM
uccucugcagcugcaggaug

SEQ ID NO: 5892 - RNA, 20 nt, Artificial Sequence
  spacer sequence ATCN PAM
agcgggagcggaggcugcag

SEQ ID NO: 5893 - RNA, 20 nt, Artificial Sequence
  spacer sequence ATCN PAM
gcagccuccgcucccgcuug

SEQ ID NO: 5894 - RNA, 20 nt, Artificial Sequence
  spacer sequence ATCN PAM
gguaccgcagguagcgccgc

SEQ ID NO: 5895 - RNA, 20 nt, Artificial Sequence
  spacer sequence ATCN PAM
ccccacguccccggcuccuu

SEQ ID NO: 5896 - RNA, 20 nt, Artificial Sequence
  spacer sequence ATCN PAM
cagacccccugcggcgugcc

SEQ ID NO: 5897 - RNA, 20 nt, Artificial Sequence
  spacer sequence ATCN PAM
uggcccaaagucccgagcgu

SEQ ID NO: 5898 - RNA, 20 nt, Artificial Sequence
  spacer sequence ATCN PAM
uuccugggagggcccugacu

SEQ ID NO: 5899 - RNA, 20 nt, Artificial Sequence
  spacer sequence ATCN PAM
cccuggccccagcccucagc

SEQ ID NO: 5900 - RNA, 20 nt, Artificial Sequence
  spacer sequence ATCN PAM
gucgaaguccaggccucauc

SEQ ID NO: 5901 - RNA, 20 nt, Artificial Sequence
  spacer sequence ATCN PAM
gggacgugcauucauucagc

SEQ ID NO: 5902 - RNA, 20 nt, Artificial Sequence
  spacer sequence ATCN PAM
uccuguguucagcgccagau

SEQ ID NO: 5903 - RNA, 20 nt, Artificial Sequence
  spacer sequence ATCN PAM
ggcgcugaacacaggaagau

SEQ ID NO: 5904 - RNA, 20 nt, Artificial Sequence
  spacer sequence ATCN PAM
ccagaacugucccuggugug

SEQ ID NO: 5905 - RNA, 20 nt, Artificial Sequence
  spacer sequence ATCN PAM
gcaguuaugacgggccaggc

SEQ ID NO: 5906 - RNA, 20 nt, Artificial Sequence
  spacer sequence ATCN PAM
cagccuggcccgucauaacu

SEQ ID NO: 5907 - RNA, 20 nt, Artificial Sequence
  spacer sequence ATCN PAM
uccuggggccguccugcucg

SEQ ID NO: 5908 - RNA, 20 nt, Artificial Sequence
  spacer sequence ATCN PAM
acaugugugcagcccgccca

SEQ ID NO: 5909 - RNA, 20 nt, Artificial Sequence
  spacer sequence ATCN PAM
cggguccugccugucugugc

SEQ ID NO: 5910 - RNA, 20 nt, Artificial Sequence
  spacer sequence ATCN PAM
ccccugcugggcccauugca

SEQ ID NO: 5911 - RNA, 20 nt, Artificial Sequence
  spacer sequence ATCN PAM
ggaaaugggaggcuugggga

SEQ ID NO: 5912 - RNA, 20 nt, Artificial Sequence
  spacer sequence ATCN PAM
uugcccaccccaggcaggaa

SEQ ID NO: 5913 - RNA, 20 nt, Artificial Sequence
  spacer sequence ATCN PAM
uugucccacccacaccccgg

SEQ ID NO: 5914 - RNA, 20 nt, Artificial Sequence
  spacer sequence ATCN PAM
gaggaagggacaucgggcau

SEQ ID NO: 5915 - RNA, 20 nt, Artificial Sequence
  spacer sequence ATCN PAM
ggcaucagcuggagaugucu

SEQ ID NO: 5916 - RNA, 20 nt, Artificial Sequence
  spacer sequence ATCN PAM
gcuggagaugucugcuaugg

SEQ ID NO: 5917 - RNA, 20 nt, Artificial Sequence
  spacer sequence ATCN PAM
ccagcugaugcccgaugucc

SEQ ID NO: 5918 - RNA, 20 nt, Artificial Sequence
  spacer sequence ATCN PAM
gccccgccccccccacuguc

SEQ ID NO: 5919 - RNA, 20 nt, Artificial Sequence
  spacer sequence ATCN PAM
uggggccgcucagaaaccug

SEQ ID NO: 5920 - RNA, 20 nt, Artificial Sequence
  spacer sequence ATCN PAM
cauggacacaggaaaagugg

SEQ ID NO: 5921 - RNA, 20 nt, Artificial Sequence
  spacer sequence ATCN PAM
cagcugugugucaccagcag

SEQ ID NO: 5922 - RNA, 20 nt, Artificial Sequence
  spacer sequence ATCN PAM
gcccugggcuggugggaccc

SEQ ID NO: 5923 - RNA, 20 nt, Artificial Sequence
  spacer sequence ATCN PAM
cagcugugugucaccagaag

SEQ ID NO: 5924 - RNA, 20 nt, Artificial Sequence
  spacer sequence ATCN PAM
gcccagggcuggugcgacac

SEQ ID NO: 5925 - RNA, 20 nt, Artificial Sequence
  spacer sequence ATCN PAM
cgccccuggugaccaaaggc

SEQ ID NO: 5926 - RNA, 20 nt, Artificial Sequence
  spacer sequence ATCN PAM
ucugugggaaggcguaguag

SEQ ID NO: 5927 - RNA, 20 nt, Artificial Sequence
  spacer sequence ATCN PAM
gugggaaggcguaguagcgg

SEQ ID NO: 5928 - RNA, 20 nt, Artificial Sequence
  spacer sequence ATCN PAM
cagggugggccuccccagcu

SEQ ID NO: 5929 - RNA, 20 nt, Artificial Sequence
  spacer sequence ATCN PAM
aagugaccgucaggcagggu

SEQ ID NO: 5930 - RNA, 20 nt, Artificial Sequence
  spacer sequence ATCN PAM
ucccacaggccuuucaaggg

SEQ ID NO: 5931 - RNA, 20 nt, Artificial Sequence
  spacer sequence ATCN PAM
ccuugaaaggccugugggag

SEQ ID NO: 5932 - RNA, 20 nt, Artificial Sequence
  spacer sequence ATCN PAM
uggggaccucucuacccugu

SEQ ID NO: 5933 - RNA, 20 nt, Artificial Sequence
  spacer sequence ATCN PAM
ccccaccugcagaaagggag

SEQ ID NO: 5934 - RNA, 20 nt, Artificial Sequence
  spacer sequence ATCN PAM
agugcaaugacggcgucuuc

SEQ ID NO: 5935 - RNA, 20 nt, Artificial Sequence
  spacer sequence ATCN PAM
ucgagugcaaugacggcguc

SEQ ID NO: 5936 - RNA, 20 nt, Artificial Sequence
  spacer sequence ATCN PAM
aaugcucaucaaugggcgcc

SEQ ID NO: 5937 - RNA, 20 nt, Artificial Sequence
  spacer sequence ATCN PAM
augggcgccuccugcaccuu

SEQ ID NO: 5938 - RNA, 20 nt, Artificial Sequence
  spacer sequence ATCN PAM
cagcgucaaaggugcaggag

SEQ ID NO: 5939 - RNA, 20 nt, Artificial Sequence
  spacer sequence ATCN PAM
cuagguggggcgggcuuagg

SEQ ID NO: 5940 - RNA, 20 nt, Artificial Sequence
  spacer sequence ATCN PAM
ccuccuccuggcagccucuc

SEQ ID NO: 5941 - RNA, 20 nt, Artificial Sequence
  spacer sequence ATCN PAM
ucucucuggccgcuggccag

SEQ ID NO: 5942 - RNA, 20 nt, Artificial Sequence
  spacer sequence ATCN PAM
cucggguuaguuacuuuucu

SEQ ID NO: 5943 - RNA, 20 nt, Artificial Sequence
  spacer sequence ATCN PAM
gaaaguuggauuugcaagag

SEQ ID NO: 5944 - RNA, 20 nt, Artificial Sequence
  spacer sequence ATCN PAM
aacuuucggauagagggagg

SEQ ID NO: 5945 - RNA, 20 nt, Artificial Sequence
  spacer sequence ATCN PAM
gggaggggaaggacuggucc

SEQ ID NO: 5946 - RNA, 20 nt, Artificial Sequence
  spacer sequence ATCN PAM
ugauuggcacuggacacugg

SEQ ID NO: 5947 - RNA, 20 nt, Artificial Sequence
  spacer sequence ATCN PAM
ggauugagcggggggcccau

SEQ ID NO: 5948 - RNA, 20 nt, Artificial Sequence
  spacer sequence ATCN PAM
ggagagcggggggccucacu

SEQ ID NO: 5949 - RNA, 20 nt, Artificial Sequence
  spacer sequence ATCN PAM
ccggcuugcccaggaugcgc

SEQ ID NO: 5950 - RNA, 20 nt, Artificial Sequence
  spacer sequence ATCN PAM
ugggcaagccggugauggag

SEQ ID NO: 5951 - RNA, 20 nt, Artificial Sequence
  spacer sequence ATCN PAM
ucgcgcccggcgagaacugc

SEQ ID NO: 5952 - RNA, 20 nt, Artificial Sequence
  spacer sequence ATCN PAM
aggucgggucgccguccagc

SEQ ID NO: 5953 - RNA, 20 nt, Artificial Sequence
  spacer sequence ATCN PAM
cgcgccgcccgggcccgcuc

SEQ ID NO: 5954 - RNA, 20 nt, Artificial Sequence
  spacer sequence ATCN PAM
ccgccuugccgcuuacgcgc

SEQ ID NO: 5955 - RNA, 20 nt, Artificial Sequence
  spacer sequence ATCN PAM
auggcgcguaagcggcaagg

SEQ ID NO: 5956 - RNA, 20 nt, Artificial Sequence
  spacer sequence ATCN PAM
gucagcaccgcagaaaggcc

SEQ ID NO: 5957 - RNA, 20 nt, Artificial Sequence
  spacer sequence ATCN PAM
gaggaucuuccaggcgcugu

SEQ ID NO: 5958 - RNA, 20 nt, Artificial Sequence
  spacer sequence ATCN PAM
ucagauucucacaccccagc

SEQ ID NO: 5959 - RNA, 20 nt, Artificial Sequence
  spacer sequence ATCN PAM
uccaggcgcuguuggaagug

SEQ ID NO: 5960 - RNA, 20 nt, Artificial Sequence
  spacer sequence ATCN PAM
uuuaaucuucagaagaugcu

SEQ ID NO: 5961 - RNA, 20 nt, Artificial Sequence
  spacer sequence ATCN PAM
ucagaagaugcuacagugag

SEQ ID NO: 5962 - RNA, 20 nt, Artificial Sequence
  spacer sequence ATCN PAM
ucugaagauuaaaugauuuu

SEQ ID NO: 5963 - RNA, 20 nt, Artificial Sequence
  spacer sequence ATCN PAM
cuugcgcccaggaguuugag

SEQ ID NO: 5964 - RNA, 20 nt, Artificial Sequence
  spacer sequence ATCN PAM
ucccgcuucagccucccaaa

SEQ ID NO: 5965 - RNA, 20 nt, Artificial Sequence
  spacer sequence ATCN PAM
caacacuuugggaggcugaa

SEQ ID NO: 5966 - RNA, 20 nt, Artificial Sequence
  spacer sequence ATCN PAM
uagaaccuggcgggcgcggu

SEQ ID NO: 5967 - RNA, 20 nt, Artificial Sequence
  spacer sequence ATCN PAM
guaaaaugacagucggcugc

SEQ ID NO: 5968 - RNA, 20 nt, Artificial Sequence
  spacer sequence ATCN PAM
gagcucuaaugcuggguccc

SEQ ID NO: 5969 - RNA, 20 nt, Artificial Sequence
  spacer sequence ATCN PAM
gagaccccgggucccuaaug

SEQ ID NO: 5970 - RNA, 20 nt, Artificial Sequence
  spacer sequence ATCN PAM
cccauuagggacccgggguc

SEQ ID NO: 5971 - RNA, 20 nt, Artificial Sequence
  spacer sequence ATCN PAM
cagcagugcccuuuccuccg

SEQ ID NO: 5972 - RNA, 20 nt, Artificial Sequence
  spacer sequence ATCN PAM
gagccaggacgccaccgcag

SEQ ID NO: 5973 - RNA, 20 nt, Artificial Sequence
  spacer sequence ATCN PAM
guuaacccgugcagaacgca

SEQ ID NO: 5974 - RNA, 20 nt, Artificial Sequence
  spacer sequence ATCN PAM
cugccugcucaacgccucca

SEQ ID NO: 5975 - RNA, 20 nt, Artificial Sequence
  spacer sequence ATCN PAM
ugccacugcacuccaaccug

SEQ ID NO: 5976 - RNA, 20 nt, Artificial Sequence
  spacer sequence ATCN PAM
cuugaacccgggaggcagag

SEQ ID NO: 5977 - RNA, 20 nt, Artificial Sequence
  spacer sequence ATCN PAM
cagcuacccaggaggcugag

SEQ ID NO: 5978 - RNA, 20 nt, Artificial Sequence
  spacer sequence ATCN PAM
uggcuaacauggugaaaccc

SEQ ID NO: 5979 - RNA, 20 nt, Artificial Sequence
  spacer sequence ATCN PAM
agaccauccuggcuaacaug

SEQ ID NO: 5980 - RNA, 20 nt, Artificial Sequence
  spacer sequence ATCN PAM
ccugaccucgugauucaccc

SEQ ID NO: 5981 - RNA, 20 nt, Artificial Sequence
  spacer sequence ATCN PAM
cgaggucaggagaucaagac

SEQ ID NO: 5982 - RNA, 20 nt, Artificial Sequence
  spacer sequence ATCN PAM
cagcacuuuaggaggccgag

SEQ ID NO: 5983 - RNA, 20 nt, Artificial Sequence
  spacer sequence ATCN PAM
cugacagcccugugagaggg

SEQ ID NO: 5984 - RNA, 20 nt, Artificial Sequence
  spacer sequence ATCN PAM
uggcacacagaacaugcuug

SEQ ID NO: 5985 - RNA, 20 nt, Artificial Sequence
  spacer sequence ATCN PAM
agcauguucugugugccagg

SEQ ID NO: 5986 - RNA, 20 nt, Artificial Sequence
  spacer sequence ATCN PAM
caggugggagcugcugcacc

SEQ ID NO: 5987 - RNA, 20 nt, Artificial Sequence
  spacer sequence ATCN PAM
cagugccugggggaggugca

SEQ ID NO: 5988 - RNA, 20 nt, Artificial Sequence
  spacer sequence ATCN PAM
caggccugagccccugcacc

SEQ ID NO: 5989 - RNA, 20 nt, Artificial Sequence
  spacer sequence ATCN PAM
caccacuuugggaugccgag

SEQ ID NO: 5990 - RNA, 20 nt, Artificial Sequence
  spacer sequence ATCN PAM
caaaguggugggaucacagg

SEQ ID NO: 5991 - RNA, 20 nt, Artificial Sequence
  spacer sequence ATCN PAM
uggcuaacauggugaaaccc

SEQ ID NO: 5992 - RNA, 20 nt, Artificial Sequence
  spacer sequence ATCN PAM
agaccauccuggcuaacaug

SEQ ID NO: 5993 - RNA, 20 nt, Artificial Sequence
  spacer sequence ATCN PAM
ccugaccucgugauccgccc

SEQ ID NO: 5994 - RNA, 20 nt, Artificial Sequence
  spacer sequence ATCN PAM
cgaggucaggagaucgagac

SEQ ID NO: 5995 - RNA, 20 nt, Artificial Sequence
  spacer sequence ATCN PAM
gcccaccuuggccucccaaa

SEQ ID NO: 5996 - RNA, 20 nt, Artificial Sequence
  spacer sequence ATCN PAM
cagcaguuugggaggccaag

SEQ ID NO: 5997 - RNA, 20 nt, Artificial Sequence
  spacer sequence ATCN PAM
cgccacugcacaccaaccug

SEQ ID NO: 5998 - RNA, 20 nt, Artificial Sequence
  spacer sequence ATCN PAM
cggcucacugcaaccucuac

SEQ ID NO: 5999 - RNA, 20 nt, Artificial Sequence
  spacer sequence ATCN PAM
cagcuacucgggaagcuaag

SEQ ID NO: 6000 - RNA, 20 nt, Artificial Sequence
  spacer sequence ATCN PAM
agaccagccuagccaacaua

SEQ ID NO: 6001 - RNA, 20 nt, Artificial Sequence
  spacer sequence ATCN PAM
ccugaccuaaauugauccuc

SEQ ID NO: 6002 - RNA, 20 nt, Artificial Sequence
  spacer sequence ATCN PAM
auuuaggucaggagaucgag

SEQ ID NO: 6003 - RNA, 20 nt, Artificial Sequence
  spacer sequence ATCN PAM
ucggccucccaaaguguugg

SEQ ID NO: 6004 - RNA, 20 nt, Artificial Sequence
  spacer sequence ATCN PAM
caacacuuugggaggccgag

SEQ ID NO: 6005 - RNA, 20 nt, Artificial Sequence
  spacer sequence ATCN PAM
cagaauuaaauaaauacaag

SEQ ID NO: 6006 - RNA, 20 nt, Artificial Sequence
  spacer sequence ATCN PAM
ucacagaauuaaauaaauac

SEQ ID NO: 6007 - RNA, 20 nt, Artificial Sequence
  spacer sequence ATCN PAM
uuugguuuauucaucaucac

SEQ ID NO: 6008 - RNA, 20 nt, Artificial Sequence
  spacer sequence ATCN PAM
ggcugucaaugugcugugag

SEQ ID NO: 6009 - RNA, 20 nt, Artificial Sequence
  spacer sequence ATCN PAM
cacagcacauugacagccug

SEQ ID NO: 6010 - RNA, 20 nt, Artificial Sequence
  spacer sequence ATCN PAM
uucuuuuuggggggucgucg

SEQ ID NO: 6011 - RNA, 20 nt, Artificial Sequence
  spacer sequence ATCN PAM
aguggguccagaccagacau

SEQ ID NO: 6012 - RNA, 20 nt, Artificial Sequence
  spacer sequence ATCN PAM
ccuagggggcaaagucaccc

SEQ ID NO: 6013 - RNA, 20 nt, Artificial Sequence
  spacer sequence ATCN PAM
gugguucuucuucuggguga

SEQ ID NO: 6014 - RNA, 20 nt, Artificial Sequence
  spacer sequence ATCN PAM
guuaauugcauacaucagug

SEQ ID NO: 6015 - RNA, 20 nt, Artificial Sequence
  spacer sequence ATCN PAM
uuucauagucauugaauuua

SEQ ID NO: 6016 - RNA, 20 nt, Artificial Sequence
  spacer sequence ATCN PAM
aaacaauuaacuaaauucaa

SEQ ID NO: 6017 - RNA, 20 nt, Artificial Sequence
  spacer sequence ATCN PAM
aaucaaaacaauuaacuaaa

SEQ ID NO: 6018 - RNA, 20 nt, Artificial Sequence
  spacer sequence ATCN PAM
cgaggguccgagaggcugag

SEQ ID NO: 6019 - RNA, 20 nt, Artificial Sequence
  spacer sequence ATCN PAM
ucuucugugaaaugcggaca

SEQ ID NO: 6020 - RNA, 20 nt, Artificial Sequence
  spacer sequence ATCN PAM
uccccuugcaggggcggggc

SEQ ID NO: 6021 - RNA, 20 nt, Artificial Sequence
  spacer sequence ATCN PAM
gccucagggacgcacgcaca

SEQ ID NO: 6022 - RNA, 20 nt, Artificial Sequence
  spacer sequence ATCN PAM
gcgcaacggcggcggcggcg

SEQ ID NO: 6023 - RNA, 20 nt, Artificial Sequence
  spacer sequence ATCN PAM
gggccgcggcuguggggagg

SEQ ID NO: 6024 - RNA, 20 nt, Artificial Sequence
  spacer sequence ATCN PAM
cgucggcgcccgaguuguuc

SEQ ID NO: 6025 - RNA, 20 nt, Artificial Sequence
  spacer sequence ATCN PAM
ggugaggacgagcggcgcgg

SEQ ID NO: 6026 - RNA, 20 nt, Artificial Sequence
  spacer sequence ATCN PAM
cccaggacgggaagccggga

SEQ ID NO: 6027 - RNA, 20 nt, Artificial Sequence
  spacer sequence ATCN PAM
ugaaggagagccugaggggu

SEQ ID NO: 6028 - RNA, 20 nt, Artificial Sequence
  spacer sequence ATCN PAM
cacucggggcuccgggcucc

SEQ ID NO: 6029 - RNA, 20 nt, Artificial Sequence
  spacer sequence ATCN PAM
cacccccccaaagugguaag

SEQ ID NO: 6030 - RNA, 20 nt, Artificial Sequence
  spacer sequence ATCN PAM
gcgggcccgucgccgccucg

SEQ ID NO: 6031 - RNA, 20 nt, Artificial Sequence
  spacer sequence ATCN PAM
uugcugcgccgaggcguccc

SEQ ID NO: 6032 - RNA, 20 nt, Artificial Sequence
  spacer sequence ATCN PAM
acaagugugaccuguagcug

SEQ ID NO: 6033 - RNA, 20 nt, Artificial Sequence
  spacer sequence ATCN PAM
ugguucuccaacggaaggug

SEQ ID NO: 6034 - RNA, 20 nt, Artificial Sequence
  spacer sequence ATCN PAM
cugcaaugucccucacacag

SEQ ID NO: 6035 - RNA, 20 nt, Artificial Sequence
  spacer sequence ATCN PAM
cccauggccgguggacuccc

SEQ ID NO: 6036 - RNA, 20 nt, Artificial Sequence
  spacer sequence ATCN PAM
acuuuggggugaggcaggga

SEQ ID NO: 6037 - RNA, 20 nt, Artificial Sequence
  spacer sequence ATCN PAM
gggagcccuuucccugccuc

SEQ ID NO: 6038 - RNA, 20 nt, Artificial Sequence
  spacer sequence ATCN PAM
agguaccccaucugggagcc

SEQ ID NO: 6039 - RNA, 20 nt, Artificial Sequence
  spacer sequence ATCN PAM
gagcagaccguggacuccgc

SEQ ID NO: 6040 - RNA, 20 nt, Artificial Sequence
  spacer sequence ATCN PAM
ugcuguguggaguuguugug

SEQ ID NO: 6041 - RNA, 20 nt, Artificial Sequence
  spacer sequence ATCN PAM
aagcucagcacccuccugca

SEQ ID NO: 6042 - RNA, 20 nt, Artificial Sequence
  spacer sequence ATCN PAM
gccgcagagagggccugcuu

SEQ ID NO: 6043 - RNA, 20 nt, Artificial Sequence
  spacer sequence ATCN PAM
ggaagagggagcuccucagg

SEQ ID NO: 6044 - RNA, 20 nt, Artificial Sequence
  spacer sequence ATCN PAM
ccugccuccuccauggcagu

SEQ ID NO: 6045 - RNA, 20 nt, Artificial Sequence
  spacer sequence ATCN PAM
cgccggaccccgcuuggagg

SEQ ID NO: 6046 - RNA, 20 nt, Artificial Sequence
  spacer sequence ATCN PAM
acaccuggaagguggguuag

SEQ ID NO: 6047 - RNA, 20 nt, Artificial Sequence
  spacer sequence ATCN PAM
uugggggaagcucugcuuuu

SEQ ID NO: 6048 - RNA, 20 nt, Artificial Sequence
  spacer sequence ATCN PAM
agcuuuacauggacuucuaa

SEQ ID NO: 6049 - RNA, 20 nt, Artificial Sequence
  spacer sequence ATCN PAM
cccaucaagcuuuacaugga

SEQ ID NO: 6050 - RNA, 20 nt, Artificial Sequence
  spacer sequence ATCN PAM
ccggcaggccucagcugacu

SEQ ID NO: 6051 - RNA, 20 nt, Artificial Sequence
  spacer sequence ATCN PAM
guuaucaccggcaggccuca

SEQ ID NO: 6052 - RNA, 20 nt, Artificial Sequence
  spacer sequence ATCN PAM
agagagggacuccccacacc

SEQ ID NO: 6053 - RNA, 20 nt, Artificial Sequence
  spacer sequence ATCN PAM
ugguggguuuggcacgcgga

SEQ ID NO: 6054 - RNA, 20 nt, Artificial Sequence
  spacer sequence ATCN PAM
accauguaggguccgcgugc

SEQ ID NO: 6055 - RNA, 20 nt, Artificial Sequence
  spacer sequence ATCN PAM
cauccaccauguaggguccg

SEQ ID NO: 6056 - RNA, 20 nt, Artificial Sequence
  spacer sequence ATCN PAM
cgcgugcucugagcgcucca

SEQ ID NO: 6057 - RNA, 20 nt, Artificial Sequence
  spacer sequence ATCN PAM
ggaaggcccgagucuccagu

SEQ ID NO: 6058 - RNA, 20 nt, Artificial Sequence
  spacer sequence ATCN PAM
uaaagucuggcuugagcgcc

SEQ ID NO: 6059 - RNA, 20 nt, Artificial Sequence
  spacer sequence ATCN PAM
aagucagaggcgcucaagcc

SEQ ID NO: 6060 - RNA, 20 nt, Artificial Sequence
  spacer sequence ATCN PAM
uguugaguagccgcugggug

SEQ ID NO: 6061 - RNA, 20 nt, Artificial Sequence
  spacer sequence ATCN PAM
cugacaccuggucuaccacc

SEQ ID NO: 6062 - RNA, 20 nt, Artificial Sequence
  spacer sequence ATCN PAM
uccauaaaccucucucucca

SEQ ID NO: 6063 - RNA, 20 nt, Artificial Sequence
  spacer sequence ATCN PAM
gguacacuggggaaugguaa

SEQ ID NO: 6064 - RNA, 20 nt, Artificial Sequence
  spacer sequence ATCN PAM
ucgaagcugcccagaggcgg

SEQ ID NO: 6065 - RNA, 20 nt, Artificial Sequence
  spacer sequence ATCN PAM
ugaguggggcuccuggcugg

SEQ ID NO: 6066 - RNA, 20 nt, Artificial Sequence
  spacer sequence ATCN PAM
ugccaggugccuugugcuca

SEQ ID NO: 6067 - RNA, 20 nt, Artificial Sequence
  spacer sequence ATCN PAM
cggcccucucuggccugacc

SEQ ID NO: 6068 - RNA, 20 nt, Artificial Sequence
  spacer sequence ATCN PAM
gggggaggcuguugcagugc

SEQ ID NO: 6069 - RNA, 20 nt, Artificial Sequence
  spacer sequence ATCN PAM
cuccccgcacugcaacagcc

SEQ ID NO: 6070 - RNA, 20 nt, Artificial Sequence
  spacer sequence ATCN PAM
aggccagagugcugacagag

SEQ ID NO: 6071 - RNA, 20 nt, Artificial Sequence
  spacer sequence ATCN PAM
cucuggggcaccgugggcac

SEQ ID NO: 6072 - RNA, 20 nt, Artificial Sequence
  spacer sequence ATCN PAM
cccaguguccugcugggggg

SEQ ID NO: 6073 - RNA, 20 nt, Artificial Sequence
  spacer sequence ATCN PAM
gugcuuuuggccugguugcc

SEQ ID NO: 6074 - RNA, 20 nt, Artificial Sequence
  spacer sequence ATCN PAM
aaggagccgacacaggacaa

SEQ ID NO: 6075 - RNA, 20 nt, Artificial Sequence
  spacer sequence ATCN PAM
acccucaaggcccauucaca

SEQ ID NO: 6076 - RNA, 20 nt, Artificial Sequence
  spacer sequence ATCN PAM
cucaacuccucugugccuca

SEQ ID NO: 6077 - RNA, 20 nt, Artificial Sequence
  spacer sequence ATCN PAM
uccacccccuggggugaccc

SEQ ID NO: 6078 - RNA, 20 nt, Artificial Sequence
  spacer sequence ATCN PAM
ggagcugggaguccacacuc

SEQ ID NO: 6079 - RNA, 20 nt, Artificial Sequence
  spacer sequence ATCN PAM
gagguugugcugucuucugu

SEQ ID NO: 6080 - RNA, 20 nt, Artificial Sequence
  spacer sequence ATCN PAM
aggccugguccccgugacac

SEQ ID NO: 6081 - RNA, 20 nt, Artificial Sequence
  spacer sequence ATCN PAM
ugacauggugucacggggac

SEQ ID NO: 6082 - RNA, 20 nt, Artificial Sequence
  spacer sequence ATCN PAM
cugagagcugugacagggcu

SEQ ID NO: 6083 - RNA, 20 nt, Artificial Sequence
  spacer sequence ATCN PAM
gucgaaugacuggccucugc

SEQ ID NO: 6084 - RNA, 20 nt, Artificial Sequence
  spacer sequence ATCN PAM
ucucccugccagccccgccc

SEQ ID NO: 6085 - RNA, 20 nt, Artificial Sequence
  spacer sequence ATCN PAM
ugggugcuaacuguggucac

SEQ ID NO: 6086 - RNA, 20 nt, Artificial Sequence
  spacer sequence ATCN PAM
gacccugcuggggagaggga

SEQ ID NO: 6087 - RNA, 20 nt, Artificial Sequence
  spacer sequence ATCN PAM
ggaagagccucuagggacuu

SEQ ID NO: 6088 - RNA, 20 nt, Artificial Sequence
  spacer sequence ATCN PAM
gccgccacugggccuggacu

SEQ ID NO: 6089 - RNA, 20 nt, Artificial Sequence
  spacer sequence ATCN PAM
caagaggcagaaguccaggc

SEQ ID NO: 6090 - RNA, 20 nt, Artificial Sequence
  spacer sequence ATCN PAM
gcagaggcuuccucuggccu

SEQ ID NO: 6091 - RNA, 20 nt, Artificial Sequence
  spacer sequence ATCN PAM
aaaacggcuuuugcuuuaac

SEQ ID NO: 6092 - RNA, 20 nt, Artificial Sequence
  spacer sequence ATCN PAM
acgguggccggcgcagccac

SEQ ID NO: 6093 - RNA, 20 nt, Artificial Sequence
  spacer sequence ATCN PAM
gcaagccuggcacccagggc

SEQ ID NO: 6094 - RNA, 20 nt, Artificial Sequence
  spacer sequence ATCN PAM
ugggagauguucaucaugac

SEQ ID NO: 6095 - RNA, 20 nt, Artificial Sequence
  spacer sequence ATCN PAM
cccaggaucugcaagccugg

SEQ ID NO: 6096 - RNA, 20 nt, Artificial Sequence
  spacer sequence ATCN PAM
ugaccuuugaugggcagacu

SEQ ID NO: 6097 - RNA, 20 nt, Artificial Sequence
  spacer sequence ATCN PAM
aaggucaugaugaacaucuc

SEQ ID NO: 6098 - RNA, 20 nt, Artificial Sequence
  spacer sequence ATCN PAM
ccgacacuggaagucguggc

SEQ ID NO: 6099 - RNA, 20 nt, Artificial Sequence
  spacer sequence ATCN PAM
cccagcugacggcaucuccg

SEQ ID NO: 6100 - RNA, 20 nt, Artificial Sequence
  spacer sequence ATCN PAM
gcguaggccaguguugccuu

SEQ ID NO: 6101 - RNA, 20 nt, Artificial Sequence
  spacer sequence ATCN PAM
acugcccaggcagcagaacc

SEQ ID NO: 6102 - RNA, 20 nt, Artificial Sequence
  spacer sequence ATCN PAM
gaaacaugcggagcccuggg

SEQ ID NO: 6103 - RNA, 20 nt, Artificial Sequence
  spacer sequence ATCN PAM
auaaaauaagaaagcuccug

SEQ ID NO: 6104 - RNA, 20 nt, Artificial Sequence
  spacer sequence ATCN PAM
ugagauucagaaguagggac

SEQ ID NO: 6105 - RNA, 20 nt, Artificial Sequence
  spacer sequence ATCN PAM
caggauguuuuaaucaauaa

SEQ ID NO: 6106 - RNA, 20 nt, Artificial Sequence
  spacer sequence ATCN PAM
cuucaguggcagggacugcc

SEQ ID NO: 6107 - RNA, 20 nt, Artificial Sequence
  spacer sequence ATCN PAM
caacagaaacacacagugug

SEQ ID NO: 6108 - RNA, 20 nt, Artificial Sequence
  spacer sequence ATCN PAM
uagcacuuugggaggccgag

SEQ ID NO: 6109 - RNA, 20 nt, Artificial Sequence
  spacer sequence ATCN PAM
guugcugucucagauuccau

SEQ ID NO: 6110 - RNA, 20 nt, Artificial Sequence
  spacer sequence ATCN PAM
gagacagcaacagauagcuu

SEQ ID NO: 6111 - RNA, 20 nt, Artificial Sequence
  spacer sequence ATCN PAM
ucuuggcccugccagacuca

SEQ ID NO: 6112 - RNA, 20 nt, Artificial Sequence
  spacer sequence ATCN PAM
aaacacacacacacacacac

SEQ ID NO: 6113 - RNA, 20 nt, Artificial Sequence
  spacer sequence ATCN PAM
agccacugcacuccagccug

SEQ ID NO: 6114 - RNA, 20 nt, Artificial Sequence
  spacer sequence ATCN PAM
uggcucagugcaaccuccgc

SEQ ID NO: 6115 - RNA, 20 nt, Artificial Sequence
  spacer sequence ATCN PAM
uagccacucgggaggcugag

SEQ ID NO: 6116 - RNA, 20 nt, Artificial Sequence
  spacer sequence ATCN PAM
cuacuaaaaauacaaaaauu

SEQ ID NO: 6117 - RNA, 20 nt, Artificial Sequence
  spacer sequence ATCN PAM
ccugaggucaggaguucgag

SEQ ID NO: 6118 - RNA, 20 nt, Artificial Sequence
  spacer sequence ATCN PAM
gcccaccucagccuugcaaa

SEQ ID NO: 6119 - RNA, 20 nt, Artificial Sequence
  spacer sequence ATCN PAM
cagcacuuugcaaggcugag

SEQ ID NO: 6120 - RNA, 20 nt, Artificial Sequence
  spacer sequence ATCN PAM
ccacuguguguguuucuacu

SEQ ID NO: 6121 - RNA, 20 nt, Artificial Sequence
  spacer sequence ATCN PAM
gucuccagcuacucucaaau

SEQ ID NO: 6122 - RNA, 20 nt, Artificial Sequence
  spacer sequence ATCN PAM
caguguacacauaaagggga

SEQ ID NO: 6123 - RNA, 20 nt, Artificial Sequence
  spacer sequence ATCN PAM
auuguuucccaagaacaaug

SEQ ID NO: 6124 - RNA, 20 nt, Artificial Sequence
  spacer sequence ATCN PAM
cugugcuguguucaugugag

SEQ ID NO: 6125 - RNA, 20 nt, Artificial Sequence
  spacer sequence ATCN PAM
aaauugagaaaguggccggg

SEQ ID NO: 6126 - RNA, 20 nt, Artificial Sequence
  spacer sequence ATCN PAM
cagcacuuugagaggccgag

SEQ ID NO: 6127 - RNA, 20 nt, Artificial Sequence
  spacer sequence ATCN PAM
accagccucggccucucaaa

SEQ ID NO: 6128 - RNA, 20 nt, Artificial Sequence
  spacer sequence ATCN PAM
cgaggucaagagauugagac

SEQ ID NO: 6129 - RNA, 20 nt, Artificial Sequence
  spacer sequence ATCN PAM
cuugaccucgugauccacca

SEQ ID NO: 6130 - RNA, 20 nt, Artificial Sequence
  spacer sequence ATCN PAM
uggccaauauggugaaaccc

SEQ ID NO: 6131 - RNA, 20 nt, Artificial Sequence
  spacer sequence ATCN PAM
cuugaacccgggaggcggag

SEQ ID NO: 6132 - RNA, 20 nt, Artificial Sequence
  spacer sequence ATCN PAM
cagcucacugcaaccuccgc

SEQ ID NO: 6133 - RNA, 20 nt, Artificial Sequence
  spacer sequence ATCN PAM
cgccacuacacuccagccug

SEQ ID NO: 6134 - RNA, 20 nt, Artificial Sequence
  spacer sequence ATCN PAM
cuuaaauaaaauuaaaaaaa

SEQ ID NO: 6135 - RNA, 20 nt, Artificial Sequence
  spacer sequence ATCN PAM
caucucuuaaauaaaauuaa

SEQ ID NO: 6136 - RNA, 20 nt, Artificial Sequence
  spacer sequence ATCN PAM
cugucaccccugcuggagug

SEQ ID NO: 6137 - RNA, 20 nt, Artificial Sequence
  spacer sequence ATCN PAM
cggcucacugcagccucgac

SEQ ID NO: 6138 - RNA, 20 nt, Artificial Sequence
  spacer sequence ATCN PAM
uuugagucaaggucgaggcu

SEQ ID NO: 6139 - RNA, 20 nt, Artificial Sequence
  spacer sequence ATCN PAM
uucugccucagccucccaag

SEQ ID NO: 6140 - RNA, 20 nt, Artificial Sequence
  spacer sequence ATCN PAM
cagcauuacgggaggccagg

SEQ ID NO: 6141 - RNA, 20 nt, Artificial Sequence
  spacer sequence ATCN PAM
cgccuauaaucacagcauua

SEQ ID NO: 6142 - RNA, 20 nt, Artificial Sequence
  spacer sequence ATCN PAM
gcgcccagcugagaaagaca

SEQ ID NO: 6143 - RNA, 20 nt, Artificial Sequence
  spacer sequence ATCN PAM
guacugucuuucucagcugg

SEQ ID NO: 6144 - RNA, 20 nt, Artificial Sequence
  spacer sequence ATCN PAM
aacccccccggcccuguuuc

SEQ ID NO: 6145 - RNA, 20 nt, Artificial Sequence
  spacer sequence ATCN PAM
aagucacuugaagaaacagc

SEQ ID NO: 6146 - RNA, 20 nt, Artificial Sequence
  spacer sequence ATCN PAM
uuuggaauuaaaguucaagc

SEQ ID NO: 6147 - RNA, 20 nt, Artificial Sequence
  spacer sequence ATCN PAM
cugccagcagggcccggcac

SEQ ID NO: 6148 - RNA, 20 nt, Artificial Sequence
  spacer sequence ATCN PAM
ggccagggagcguugagguc

SEQ ID NO: 6149 - RNA, 20 nt, Artificial Sequence
  spacer sequence ATCN PAM
uacgucucccacgcacccuu

SEQ ID NO: 6150 - RNA, 20 nt, Artificial Sequence
  spacer sequence ATCN PAM
cgcaacagcaacaggcuuag

SEQ ID NO: 6151 - RNA, 20 nt, Artificial Sequence
  spacer sequence ATCN PAM
gcaugguuuucccugaaauu

SEQ ID NO: 6152 - RNA, 20 nt, Artificial Sequence
  spacer sequence ATCN PAM
gaaaaggcaaauuucaggga

SEQ ID NO: 6153 - RNA, 20 nt, Artificial Sequence
  spacer sequence ATCN PAM
cgucucuaagggucaggaag

SEQ ID NO: 6154 - RNA, 20 nt, Artificial Sequence
  spacer sequence ATCN PAM
gucguucuuagggaaaaaag

SEQ ID NO: 6155 - RNA, 20 nt, Artificial Sequence
  spacer sequence ATCN PAM
accaccaccuggggccugua

SEQ ID NO: 6156 - RNA, 20 nt, Artificial Sequence
  spacer sequence ATCN PAM
ccucucaucaaccaccaccu

SEQ ID NO: 6157 - RNA, 20 nt, Artificial Sequence
  spacer sequence ATCN PAM
cugacggccaaccacaccac

SEQ ID NO: 6158 - RNA, 20 nt, Artificial Sequence
  spacer sequence ATCN PAM
ugccagccucacugaaagca

SEQ ID NO: 6159 - RNA, 20 nt, Artificial Sequence
  spacer sequence ATCN PAM
cccuuggucuccagagagca

SEQ ID NO: 6160 - RNA, 20 nt, Artificial Sequence
  spacer sequence ATCN PAM
ucacccuuggucuccagaga

SEQ ID NO: 6161 - RNA, 20 nt, Artificial Sequence
  spacer sequence ATCN PAM
cagcugugacucagugccag

SEQ ID NO: 6162 - RNA, 20 nt, Artificial Sequence
  spacer sequence ATCN PAM
ugccugcuuucccugggaaa

SEQ ID NO: 6163 - RNA, 20 nt, Artificial Sequence
  spacer sequence ATCN PAM
gcgacucucccauccugccu

SEQ ID NO: 6164 - RNA, 20 nt, Artificial Sequence
  spacer sequence ATCN PAM
aaggccccgugccuggguaa

SEQ ID NO: 6165 - RNA, 20 nt, Artificial Sequence
  spacer sequence ATCN PAM
acccugcagcgacgcccaag

SEQ ID NO: 6166 - RNA, 20 nt, Artificial Sequence
  spacer sequence ATCN PAM
gccaauaagagacagcccca

SEQ ID NO: 6167 - RNA, 20 nt, Artificial Sequence
  spacer sequence ATCN PAM
gugggccucucguuaguucg

SEQ ID NO: 6168 - RNA, 20 nt, Artificial Sequence
  spacer sequence ATCN PAM
uuucagauguagacuucuac

SEQ ID NO: 6169 - RNA, 20 nt, Artificial Sequence
  spacer sequence ATCN PAM
gaaaugaugcacaguaaacu

SEQ ID NO: 6170 - RNA, 20 nt, Artificial Sequence
  spacer sequence ATCN PAM
ggaaaaagaauguagaaguc

SEQ ID NO: 6171 - RNA, 20 nt, Artificial Sequence
  spacer sequence ATCN PAM
cccgccacgcaugaggucag

SEQ ID NO: 6172 - RNA, 20 nt, Artificial Sequence
  spacer sequence ATCN PAM
uugccauggggagaggaccg

SEQ ID NO: 6173 - RNA, 20 nt, Artificial Sequence
  spacer sequence ATCN PAM
caauccuugccauggggaga

SEQ ID NO: 6174 - RNA, 20 nt, Artificial Sequence
  spacer sequence ATCN PAM
ucuuucaugucugcagacag

SEQ ID NO: 6175 - RNA, 20 nt, Artificial Sequence
  spacer sequence ATCN PAM
uucaugucugcagacagcau

SEQ ID NO: 6176 - RNA, 20 nt, Artificial Sequence
  spacer sequence ATCN PAM
aagccaagcugaggucuuaa

SEQ ID NO: 6177 - RNA, 20 nt, Artificial Sequence
  spacer sequence ATCN PAM
agacagcgcucgccuuagaa

SEQ ID NO: 6178 - RNA, 20 nt, Artificial Sequence
  spacer sequence ATCN PAM
ugaauguuuucucauugaau

SEQ ID NO: 6179 - RNA, 20 nt, Artificial Sequence
  spacer sequence ATCN PAM
caggaagcucuucgugggcg

SEQ ID NO: 6180 - RNA, 20 nt, Artificial Sequence
  spacer sequence ATCN PAM
gcaguacccaccugacaccc

SEQ ID NO: 6181 - RNA, 20 nt, Artificial Sequence
  spacer sequence ATCN PAM
aagacaguagcaagaggcgg

SEQ ID NO: 6182 - RNA, 20 nt, Artificial Sequence
  spacer sequence ATCN PAM
gaacaacgucaaaaggacuu

SEQ ID NO: 6183 - RNA, 20 nt, Artificial Sequence
  spacer sequence ATCN PAM
caaguuacagggaagaccuc

SEQ ID NO: 6184 - RNA, 20 nt, Artificial Sequence
  spacer sequence ATCN PAM
ggggcugccagugagcacag

SEQ ID NO: 6185 - RNA, 20 nt, Artificial Sequence
  spacer sequence ATCN PAM
cucggugcguggcuggugga

SEQ ID NO: 6186 - RNA, 20 nt, Artificial Sequence
  spacer sequence ATCN PAM
ggaagaaaacacaaacacac

SEQ ID NO: 6187 - RNA, 20 nt, Artificial Sequence
  spacer sequence ATCN PAM
acgacuucuccauauuggga

SEQ ID NO: 6188 - RNA, 20 nt, Artificial Sequence
  spacer sequence ATCN PAM
ugaaagauaaaaccaccaac

SEQ ID NO: 6189 - RNA, 20 nt, Artificial Sequence
  spacer sequence ATCN PAM
uucaugauaacacaaucuac

SEQ ID NO: 6190 - RNA, 20 nt, Artificial Sequence
  spacer sequence ATCN PAM
agcgugugcggucugcuggc

SEQ ID NO: 6191 - RNA, 20 nt, Artificial Sequence
  spacer sequence ATCN PAM
gucagaguccaggaaaaaau

SEQ ID NO: 6192 - RNA, 20 nt, Artificial Sequence
  spacer sequence ATCN PAM
accccacguucaaacauacu

SEQ ID NO: 6193 - RNA, 20 nt, Artificial Sequence
  spacer sequence ATCN PAM
uucccaaucgaccccacguu

SEQ ID NO: 6194 - RNA, 20 nt, Artificial Sequence
  spacer sequence ATCN PAM
agccucagcaccaaggcuua

SEQ ID NO: 6195 - RNA, 20 nt, Artificial Sequence
  spacer sequence ATCN PAM
uccugcaauauccagccuca

SEQ ID NO: 6196 - RNA, 20 nt, Artificial Sequence
  spacer sequence ATCN PAM
gcugguugugaauaagaggc

SEQ ID NO: 6197 - RNA, 20 nt, Artificial Sequence
  spacer sequence ATCN PAM
gcaggaaauuucaaaucagc

SEQ ID NO: 6198 - RNA, 20 nt, Artificial Sequence
  spacer sequence ATCN PAM
accccaagccaugcacaccc

SEQ ID NO: 6199 - RNA, 20 nt, Artificial Sequence
  spacer sequence ATCN PAM
cccggggugugcauggcuug

SEQ ID NO: 6200 - RNA, 20 nt, Artificial Sequence
  spacer sequence ATCN PAM
uuccuucggccguguucucu

SEQ ID NO: 6201 - RNA, 20 nt, Artificial Sequence
  spacer sequence ATCN PAM
gcuguugucgcucguuaaga

SEQ ID NO: 6202 - RNA, 20 nt, Artificial Sequence
  spacer sequence ATCN PAM
uaacgagcgacaacagcaga

SEQ ID NO: 6203 - RNA, 20 nt, Artificial Sequence
  spacer sequence ATCN PAM
ucagcugcucgagugccaac

SEQ ID NO: 6204 - RNA, 20 nt, Artificial Sequence
  spacer sequence ATCN PAM
cccagauuuaucagugccgu

SEQ ID NO: 6205 - RNA, 20 nt, Artificial Sequence
  spacer sequence ATCN PAM
gggugauccucagcugcucg

SEQ ID NO: 6206 - RNA, 20 nt, Artificial Sequence
  spacer sequence ATCN PAM
gugccgugaguguuuuacag

SEQ ID NO: 6207 - RNA, 20 nt, Artificial Sequence
  spacer sequence ATCN PAM
aucuuagggaaaaaaaaaau

SEQ ID NO: 6208 - RNA, 20 nt, Artificial Sequence
  spacer sequence ATCN PAM
uagggaaaaaaaaaaugaca

SEQ ID NO: 6209 - RNA, 20 nt, Artificial Sequence
  spacer sequence ATCN PAM
guggcaugagcugucauuuu

SEQ ID NO: 6210 - RNA, 20 nt, Artificial Sequence
  spacer sequence ATCN PAM
ggagccagucagcuucccuc

SEQ ID NO: 6211 - RNA, 20 nt, Artificial Sequence
  spacer sequence ATCN PAM
uuccacugccggggcugggc

SEQ ID NO: 6212 - RNA, 20 nt, Artificial Sequence
  spacer sequence ATCN PAM
caaguggagcaguaaagugg

SEQ ID NO: 6213 - RNA, 20 nt, Artificial Sequence
  spacer sequence ATCN PAM
ccugacguggcaacuugggu

SEQ ID NO: 6214 - RNA, 20 nt, Artificial Sequence
  spacer sequence ATCN PAM
gcaccgccccaccaggcucc

SEQ ID NO: 6215 - RNA, 20 nt, Artificial Sequence
  spacer sequence ATCN PAM
aucucuguccacauacacca

SEQ ID NO: 6216 - RNA, 20 nt, Artificial Sequence
  spacer sequence ATCN PAM
cuguccacauacaccauucc

SEQ ID NO: 6217 - RNA, 20 nt, Artificial Sequence
  spacer sequence ATCN PAM
cgugucaucuguguccaggc

SEQ ID NO: 6218 - RNA, 20 nt, Artificial Sequence
  spacer sequence ATCN PAM
guguccaggccguguuccca

SEQ ID NO: 6219 - RNA, 20 nt, Artificial Sequence
  spacer sequence ATCN PAM
ggcggccgcccugaaggcug

SEQ ID NO: 6220 - RNA, 20 nt, Artificial Sequence
  spacer sequence ATCN PAM
ggugguaccugagggugcca

SEQ ID NO: 6221 - RNA, 20 nt, Artificial Sequence
  spacer sequence ATCN PAM
uagcaggggacgugggagcc

SEQ ID NO: 6222 - RNA, 20 nt, Artificial Sequence
  spacer sequence ATCN PAM
agacgccugcccuggagcug

SEQ ID NO: 6223 - RNA, 20 nt, Artificial Sequence
  spacer sequence ATCN PAM
ugacuaccuccgugaccugg

SEQ ID NO: 6224 - RNA, 20 nt, Artificial Sequence
  spacer sequence ATCN PAM
augacgccgagaagcagagg

SEQ ID NO: 6225 - RNA, 20 nt, Artificial Sequence
  spacer sequence ATCN PAM
gcccuuaccucggggccucu

SEQ ID NO: 6226 - RNA, 20 nt, Artificial Sequence
  spacer sequence ATCN PAM
aguuugaccucggccuucuc

SEQ ID NO: 6227 - RNA, 20 nt, Artificial Sequence
  spacer sequence ATCN PAM
gagggaggagcagggagaag

SEQ ID NO: 6228 - RNA, 20 nt, Artificial Sequence
  spacer sequence ATCN PAM
cacccgccaggcacacacag

SEQ ID NO: 6229 - RNA, 20 nt, Artificial Sequence
  spacer sequence ATCN PAM
ucccuuccugaggcuguuug

SEQ ID NO: 6230 - RNA, 20 nt, Artificial Sequence
  spacer sequence ATCN PAM
aguccucccaguguggccgg

SEQ ID NO: 6231 - RNA, 20 nt, Artificial Sequence
  spacer sequence ATCN PAM
aaacuccacaccgagccagc

SEQ ID NO: 6232 - RNA, 20 nt, Artificial Sequence
  spacer sequence ATCN PAM
cggaaaauccaaacuccaca

SEQ ID NO: 6233 - RNA, 20 nt, Artificial Sequence
  spacer sequence ATCN PAM
aucccaugcuuuuuuuuucu

SEQ ID NO: 6234 - RNA, 20 nt, Artificial Sequence
  spacer sequence ATCN PAM
caugcuuuuuuuuucuuucu

SEQ ID NO: 6235 - RNA, 20 nt, Artificial Sequence
  spacer sequence ATCN PAM
augcugguuuguggagcugg

SEQ ID NO: 6236 - RNA, 20 nt, Artificial Sequence
  spacer sequence ATCN PAM
ucccagcuccacaaaccagc

SEQ ID NO: 6237 - RNA, 20 nt, Artificial Sequence
  spacer sequence ATCN PAM
gcugcuuuuggccggccacg

SEQ ID NO: 6238 - RNA, 20 nt, Artificial Sequence
  spacer sequence ATCN PAM
cuguacuuuacuaugaaaca

SEQ ID NO: 6239 - RNA, 20 nt, Artificial Sequence
  spacer sequence ATCN PAM
cacacaauucacagagagaa

SEQ ID NO: 6240 - RNA, 20 nt, Artificial Sequence
  spacer sequence ATCN PAM
uuaaucacacacaauucaca

SEQ ID NO: 6241 - RNA, 20 nt, Artificial Sequence
  spacer sequence ATCN PAM
cuuuagauuucucuucucca

SEQ ID NO: 6242 - RNA, 20 nt, Artificial Sequence
  spacer sequence ATCN PAM
aaagagauaucguuaaucac

SEQ ID NO: 6243 - RNA, 20 nt, Artificial Sequence
  spacer sequence ATCN PAM
cacagguacaggccaguccc

SEQ ID NO: 6244 - RNA, 20 nt, Artificial Sequence
  spacer sequence ATCN PAM
ccacugaggaagcgggacag

SEQ ID NO: 6245 - RNA, 20 nt, Artificial Sequence
  spacer sequence ATCN PAM
ccgaugcuguguuccaauac

SEQ ID NO: 6246 - RNA, 20 nt, Artificial Sequence
  spacer sequence ATCN PAM
gugaugaaacaacguauuua

SEQ ID NO: 6247 - RNA, 20 nt, Artificial Sequence
  spacer sequence ATCN PAM
gaggcaguauuggaacacag

SEQ ID NO: 6248 - RNA, 20 nt, Artificial Sequence
  spacer sequence ATCN PAM
ugggaaacuugagcgcgcgg

SEQ ID NO: 6249 - RNA, 20 nt, Artificial Sequence
  spacer sequence ATCN PAM
gaggguugcuucuagauccu

SEQ ID NO: 6250 - RNA, 20 nt, Artificial Sequence
  spacer sequence ATCN PAM
agaagcaacccucagauucc

SEQ ID NO: 6251 - RNA, 20 nt, Artificial Sequence
  spacer sequence ATCN PAM
ucccggucccccuccggcug

SEQ ID NO: 6252 - RNA, 20 nt, Artificial Sequence
  spacer sequence ATCN PAM
ucugagacgggucugugucc

SEQ ID NO: 6253 - RNA, 20 nt, Artificial Sequence
  spacer sequence ATCN PAM
ugcgcuccucucgcugugug

SEQ ID NO: 6254 - RNA, 20 nt, Artificial Sequence
  spacer sequence ATCN PAM
uuccccgcccccaguuuugc

SEQ ID NO: 6255 - RNA, 20 nt, Artificial Sequence
  spacer sequence ATCN PAM
ucagcccggucucagcucuu

SEQ ID NO: 6256 - RNA, 20 nt, Artificial Sequence
  spacer sequence ATCN PAM
uuguucugugaggucuuggg

SEQ ID NO: 6257 - RNA, 20 nt, Artificial Sequence
  spacer sequence ATCN PAM
ggggaggggcuggugccgcc

SEQ ID NO: 6258 - RNA, 20 nt, Artificial Sequence
  spacer sequence ATCN PAM
aaacagaaaauuuuaaaggc

SEQ ID NO: 6259 - RNA, 20 nt, Artificial Sequence
  spacer sequence ATCN PAM
cauggugcaucucgcucuug

SEQ ID NO: 6260 - RNA, 20 nt, Artificial Sequence
  spacer sequence ATCN PAM
cgcucuugcugcuggcagca

SEQ ID NO: 6261 - RNA, 20 nt, Artificial Sequence
  spacer sequence ATCN PAM
uugugcauuguuucucuacc

SEQ ID NO: 6262 - RNA, 20 nt, Artificial Sequence
  spacer sequence ATCN PAM
augcauguucuauacaggua

SEQ ID NO: 6263 - RNA, 20 nt, Artificial Sequence
  spacer sequence ATCN PAM
uagacaucuaugcauguucu

SEQ ID NO: 6264 - RNA, 20 nt, Artificial Sequence
  spacer sequence ATCN PAM
uagcuggugccucgcuaggc

SEQ ID NO: 6265 - RNA, 20 nt, Artificial Sequence
  spacer sequence ATCN PAM
aucauagcuggugccucgcu

SEQ ID NO: 6266 - RNA, 20 nt, Artificial Sequence
  spacer sequence ATCN PAM
guuaacgcuuuagaacgaua

SEQ ID NO: 6267 - RNA, 20 nt, Artificial Sequence
  spacer sequence ATCN PAM
uucuaaagcguuaacagaua

SEQ ID NO: 6268 - RNA, 20 nt, Artificial Sequence
  spacer sequence ATCN PAM
uggguuucagagaagcauac

SEQ ID NO: 6269 - RNA, 20 nt, Artificial Sequence
  spacer sequence ATCN PAM
acggugcacaccccugacua

SEQ ID NO: 6270 - RNA, 20 nt, Artificial Sequence
  spacer sequence ATCN PAM
uagucaggggugugcaccgu

SEQ ID NO: 6271 - RNA, 20 nt, Artificial Sequence
  spacer sequence ATCN PAM
ccccacaggcgagagccaga

SEQ ID NO: 6272 - RNA, 20 nt, Artificial Sequence
  spacer sequence ATCN PAM
cuacuggcagacaaagcgcc

SEQ ID NO: 6273 - RNA, 20 nt, Artificial Sequence
  spacer sequence ATCN PAM
uauaaaacagcagcggagac

SEQ ID NO: 6274 - RNA, 20 nt, Artificial Sequence
  spacer sequence ATCN PAM
uugugacacggagccccagc

SEQ ID NO: 6275 - RNA, 20 nt, Artificial Sequence
  spacer sequence ATCN PAM
accuuggguuucagcuaagc

SEQ ID NO: 6276 - RNA, 20 nt, Artificial Sequence
  spacer sequence ATCN PAM
cucggcccgucccuaauacu

SEQ ID NO: 6277 - RNA, 20 nt, Artificial Sequence
  spacer sequence ATCN PAM
uccuguuuugugucacaaca

SEQ ID NO: 6278 - RNA, 20 nt, Artificial Sequence
  spacer sequence ATCN PAM
uguuuugugucacaacaccc

SEQ ID NO: 6279 - RNA, 20 nt, Artificial Sequence
  spacer sequence ATCN PAM
agguagcaggguguugugac

SEQ ID NO: 6280 - RNA, 20 nt, Artificial Sequence
  spacer sequence ATCN PAM
aaaaccuagccaacgacgaa

SEQ ID NO: 6281 - RNA, 20 nt, Artificial Sequence
  spacer sequence ATCN PAM
guggaccaggcugucaacau

SEQ ID NO: 6282 - RNA, 20 nt, Artificial Sequence
  spacer sequence ATCN PAM
ugggcaaaaaaguguguagu

SEQ ID NO: 6283 - RNA, 20 nt, Artificial Sequence
  spacer sequence ATCN PAM
uuccccagcacccuuccugc

SEQ ID NO: 6284 - RNA, 20 nt, Artificial Sequence
  spacer sequence ATCN PAM
ccaccccgcaggaagggugc

SEQ ID NO: 6285 - RNA, 20 nt, Artificial Sequence
  spacer sequence ATCN PAM
cucagcuuugcuccuggagc

SEQ ID NO: 6286 - RNA, 20 nt, Artificial Sequence
  spacer sequence ATCN PAM
uacuggaauuaaguauaaag

SEQ ID NO: 6287 - RNA, 20 nt, Artificial Sequence
  spacer sequence ATCN PAM
cuccuaggccaggcgcggug

SEQ ID NO: 6288 - RNA, 20 nt, Artificial Sequence
  spacer sequence ATCN PAM
cagcacuuugggaggccaaa

SEQ ID NO: 6289 - RNA, 20 nt, Artificial Sequence
  spacer sequence ATCN PAM
acccgcuuuggccucccaaa

SEQ ID NO: 6290 - RNA, 20 nt, Artificial Sequence
  spacer sequence ATCN PAM
ccugaggucaggaguucgag

SEQ ID NO: 6291 - RNA, 20 nt, Artificial Sequence
  spacer sequence ATCN PAM
cagcuacuugggaggcugag

SEQ ID NO: 6292 - RNA, 20 nt, Artificial Sequence
  spacer sequence ATCN PAM
cuugaacccaggaggcagag

SEQ ID NO: 6293 - RNA, 20 nt, Artificial Sequence
  spacer sequence ATCN PAM
cggcucacugcaaccucugc

SEQ ID NO: 6294 - RNA, 20 nt, Artificial Sequence
  spacer sequence ATCN PAM
caccacugcacuccagccag

SEQ ID NO: 6295 - RNA, 20 nt, Artificial Sequence
  spacer sequence ATCN PAM
uuauucacauuacauuuaca

SEQ ID NO: 6296 - RNA, 20 nt, Artificial Sequence
  spacer sequence ATCN PAM
uaacaaacccagugauauuc

SEQ ID NO: 6297 - RNA, 20 nt, Artificial Sequence
  spacer sequence ATCN PAM
cuggguuuguuaagauaugu

SEQ ID NO: 6298 - RNA, 20 nt, Artificial Sequence
  spacer sequence ATCN PAM
cgccaacggcacuccagccu

SEQ ID NO: 6299 - RNA, 20 nt, Artificial Sequence
  spacer sequence ATCN PAM
cggcucacugcagccuugac

SEQ ID NO: 6300 - RNA, 20 nt, Artificial Sequence
  spacer sequence ATCN PAM
guuaaagccggaaugguucu

SEQ ID NO: 6301 - RNA, 20 nt, Artificial Sequence
  spacer sequence ATCN PAM
guaaugaauucucguguucc

SEQ ID NO: 6302 - RNA, 20 nt, Artificial Sequence
  spacer sequence ATCN PAM
acaaguauuuauggagcgcc

SEQ ID NO: 6303 - RNA, 20 nt, Artificial Sequence
  spacer sequence ATCN PAM
uguagaugacggagcacgaa

SEQ ID NO: 6304 - RNA, 20 nt, Artificial Sequence
  spacer sequence ATCN PAM
acacgauggcacccacauca

SEQ ID NO: 6305 - RNA, 20 nt, Artificial Sequence
  spacer sequence ATCN PAM
cugcagccuguguuuugccc

SEQ ID NO: 6306 - RNA, 20 nt, Artificial Sequence
  spacer sequence ATCN PAM
cgagacugccggcauguccc

SEQ ID NO: 6307 - RNA, 20 nt, Artificial Sequence
  spacer sequence ATCN PAM
cuuugguccgcgccugcgca

SEQ ID NO: 6308 - RNA, 20 nt, Artificial Sequence
  spacer sequence ATCN PAM
cuucugaggauccggcaaga

SEQ ID NO: 6309 - RNA, 20 nt, Artificial Sequence
  spacer sequence ATCN PAM
ucagaagagaucgcuuuggu

SEQ ID NO: 6310 - RNA, 20 nt, Artificial Sequence
  spacer sequence ATCN PAM
ggcaagauggugaguguugc

SEQ ID NO: 6311 - RNA, 20 nt, Artificial Sequence
  spacer sequence ATCN PAM
ugccggauccucagaagaga

SEQ ID NO: 6312 - RNA, 20 nt, Artificial Sequence
  spacer sequence ATCN PAM
caacacucaccaucuugccg

SEQ ID NO: 6313 - RNA, 20 nt, Artificial Sequence
  spacer sequence ATCN PAM
ggcuccauccaaccucugac

SEQ ID NO: 6314 - RNA, 20 nt, Artificial Sequence
  spacer sequence ATCN PAM
aaccucugaccgucucgcgg

SEQ ID NO: 6315 - RNA, 20 nt, Artificial Sequence
  spacer sequence ATCN PAM
agccgccugcagggucggga

SEQ ID NO: 6316 - RNA, 20 nt, Artificial Sequence
  spacer sequence ATCN PAM
cucgcggcuccggguuacga

SEQ ID NO: 6317 - RNA, 20 nt, Artificial Sequence
  spacer sequence ATCN PAM
ccggggacgggucgaagcgg

SEQ ID NO: 6318 - RNA, 20 nt, Artificial Sequence
  spacer sequence ATCN PAM
cccggggccaccgggcccga

SEQ ID NO: 6319 - RNA, 20 nt, Artificial Sequence
  spacer sequence ATCN PAM
cgacacccaucucccggggc

SEQ ID NO: 6320 - RNA, 20 nt, Artificial Sequence
  spacer sequence ATCN PAM
cgcugacgcccgauccgcgc

SEQ ID NO: 6321 - RNA, 20 nt, Artificial Sequence
  spacer sequence ATCN PAM
ggcgucagcgggaucccgac

SEQ ID NO: 6322 - RNA, 20 nt, Artificial Sequence
  spacer sequence ATCN PAM
gcgcccgcacaggcagaagu

SEQ ID NO: 6323 - RNA, 20 nt, Artificial Sequence
  spacer sequence ATCN PAM
aaggagucuaacgcagcccc

SEQ ID NO: 6324 - RNA, 20 nt, Artificial Sequence
  spacer sequence ATCN PAM
ggcuugcgcuuuuauuuuuu

SEQ ID NO: 6325 - RNA, 20 nt, Artificial Sequence
  spacer sequence ATCN PAM
aaaauuaaaaaauaaaagcg

SEQ ID NO: 6326 - RNA, 20 nt, Artificial Sequence
  spacer sequence ATCN PAM
ugucgcccaggcuggagugc

SEQ ID NO: 6327 - RNA, 20 nt, Artificial Sequence
  spacer sequence ATCN PAM
cuugaacccgggagugggag

SEQ ID NO: 6328 - RNA, 20 nt, Artificial Sequence
  spacer sequence ATCN PAM
cagcuacucgagaggcugag

SEQ ID NO: 6329 - RNA, 20 nt, Artificial Sequence
  spacer sequence ATCN PAM
ccugaggucaggaguuugag

SEQ ID NO: 6330 - RNA, 20 nt, Artificial Sequence
  spacer sequence ATCN PAM
accugccucggccucccaaa

SEQ ID NO: 6331 - RNA, 20 nt, Artificial Sequence
  spacer sequence ATCN PAM
cagcacuuugggaggccgag

SEQ ID NO: 6332 - RNA, 20 nt, Artificial Sequence
  spacer sequence ATCN PAM
aggucgggcgcgguguucac

SEQ ID NO: 6333 - RNA, 20 nt, Artificial Sequence
  spacer sequence ATCN PAM
aaaaucaaggucgggcgcgg

SEQ ID NO: 6334 - RNA, 20 nt, Artificial Sequence
  spacer sequence ATCN PAM
cagcacuucgggagguugag

SEQ ID NO: 6335 - RNA, 20 nt, Artificial Sequence
  spacer sequence ATCN PAM
caggcgggagccacugcgcc

SEQ ID NO: 6336 - RNA, 20 nt, Artificial Sequence
  spacer sequence ATCN PAM
cugcagucacacgguggcuc

SEQ ID NO: 6337 - RNA, 20 nt, Artificial Sequence
  spacer sequence ATCN PAM
ggcgggggugccagagggac

SEQ ID NO: 6338 - RNA, 20 nt, Artificial Sequence
  spacer sequence ATCN PAM
uccccagcgagcagcugaug

SEQ ID NO: 6339 - RNA, 20 nt, Artificial Sequence
  spacer sequence ATCN PAM
gcugcucgcuggggaggaug

SEQ ID NO: 6340 - RNA, 20 nt, Artificial Sequence
  spacer sequence ATCN PAM
ugucccgcaggugcgucuuc

SEQ ID NO: 6341 - RNA, 20 nt, Artificial Sequence
  spacer sequence ATCN PAM
uccuacccgagauggugggc

SEQ ID NO: 6342 - RNA, 20 nt, Artificial Sequence
  spacer sequence ATCN PAM
uacccgagauggugggcagc

SEQ ID NO: 6343 - RNA, 20 nt, Artificial Sequence
  spacer sequence ATCN PAM
cggguaggaugaucaugucc

SEQ ID NO: 6344 - RNA, 20 nt, Artificial Sequence
  spacer sequence ATCN PAM
ccaccugguugaaggucuug

SEQ ID NO: 6345 - RNA, 20 nt, Artificial Sequence
  spacer sequence ATCN PAM
aggugugugcggccgucccu

SEQ ID NO: 6346 - RNA, 20 nt, Artificial Sequence
  spacer sequence ATCN PAM
ggcgaccccagcccacccca

SEQ ID NO: 6347 - RNA, 20 nt, Artificial Sequence
  spacer sequence ATCN PAM
cgccugcaucaggcgacccc

SEQ ID NO: 6348 - RNA, 20 nt, Artificial Sequence
  spacer sequence ATCN PAM
gcugacacccagcuuugcuc

SEQ ID NO: 6349 - RNA, 20 nt, Artificial Sequence
  spacer sequence ATCN PAM
cgggcugcgggagaccaaga

SEQ ID NO: 6350 - RNA, 20 nt, Artificial Sequence
  spacer sequence ATCN PAM
ucucgggcugcgggagacca

SEQ ID NO: 6351 - RNA, 20 nt, Artificial Sequence
  spacer sequence ATCN PAM
gccacuaccugggcgaguuc

SEQ ID NO: 6352 - RNA, 20 nt, Artificial Sequence
  spacer sequence ATCN PAM
ccuacaagcccguaaagcau

SEQ ID NO: 6353 - RNA, 20 nt, Artificial Sequence
  spacer sequence ATCN PAM
gggccacccacuccucccgc

SEQ ID NO: 6354 - RNA, 20 nt, Artificial Sequence
  spacer sequence ATCN PAM
cucucaaguaauggcucagc

SEQ ID NO: 6355 - RNA, 20 nt, Artificial Sequence
  spacer sequence ATCN PAM
acacaacacuaccacacacc

SEQ ID NO: 6356 - RNA, 20 nt, Artificial Sequence
  spacer sequence ATCN PAM
ccuguggaggguucccgcag

SEQ ID NO: 6357 - RNA, 20 nt, Artificial Sequence
  spacer sequence ATCN PAM
ucaccccugcuuggcuucuu

SEQ ID NO: 6358 - RNA, 20 nt, Artificial Sequence
  spacer sequence ATCN PAM
ccucucccagcaggcuccau

SEQ ID NO: 6359 - RNA, 20 nt, Artificial Sequence
  spacer sequence ATCN PAM
gcccagccuggggcuuugug

SEQ ID NO: 6360 - RNA, 20 nt, Artificial Sequence
  spacer sequence ATCN PAM
guggccuggccagcucuguc

SEQ ID NO: 6361 - RNA, 20 nt, Artificial Sequence
  spacer sequence ATCN PAM
gagagcccauggagggcugg

SEQ ID NO: 6362 - RNA, 20 nt, Artificial Sequence
  spacer sequence ATCN PAM
cugggccacucugcugggug

SEQ ID NO: 6363 - RNA, 20 nt, Artificial Sequence
  spacer sequence ATCN PAM
gccuggcugagcucucaccc

SEQ ID NO: 6364 - RNA, 20 nt, Artificial Sequence
  spacer sequence ATCN PAM
ccccugcccccaucugccug

SEQ ID NO: 6365 - RNA, 20 nt, Artificial Sequence
  spacer sequence ATCN PAM
caccacugcacuccggcugg

SEQ ID NO: 6366 - RNA, 20 nt, Artificial Sequence
  spacer sequence ATCN PAM
uggcucacugcagccuaaau

SEQ ID NO: 6367 - RNA, 20 nt, Artificial Sequence
  spacer sequence ATCN PAM
caugggcucaggugaucuuc

SEQ ID NO: 6368 - RNA, 20 nt, Artificial Sequence
  spacer sequence ATCN PAM
ccugagcccaugagauuuag

SEQ ID NO: 6369 - RNA, 20 nt, Artificial Sequence
  spacer sequence ATCN PAM
ucccacugcuucccaaagug

SEQ ID NO: 6370 - RNA, 20 nt, Artificial Sequence
  spacer sequence ATCN PAM
cagcacuuugggaagcagug

SEQ ID NO: 6371 - RNA, 20 nt, Artificial Sequence
  spacer sequence ATCN PAM
caggcaugagacacugcagc

SEQ ID NO: 6372 - RNA, 20 nt, Artificial Sequence
  spacer sequence ATCN PAM
cggcucacugcaagcucugc

SEQ ID NO: 6373 - RNA, 20 nt, Artificial Sequence
  spacer sequence ATCN PAM
ugccacugcacuccagccug

SEQ ID NO: 6374 - RNA, 20 nt, Artificial Sequence
  spacer sequence ATCN PAM
cagcacuuugggaggccgag

SEQ ID NO: 6375 - RNA, 20 nt, Artificial Sequence
  spacer sequence ATCN PAM
cgaggucaggagaucgagac

SEQ ID NO: 6376 - RNA, 20 nt, Artificial Sequence
  spacer sequence ATCN PAM
ccugaccucgugauucgccc

SEQ ID NO: 6377 - RNA, 20 nt, Artificial Sequence
  spacer sequence ATCN PAM
agaccauccuggccaacaug

SEQ ID NO: 6378 - RNA, 20 nt, Artificial Sequence
  spacer sequence ATCN PAM
uggccaacauggugaaaccc

SEQ ID NO: 6379 - RNA, 20 nt, Artificial Sequence
  spacer sequence ATCN PAM
cuacuaaaaaaggaaggaaa

SEQ ID NO: 6380 - RNA, 20 nt, Artificial Sequence
  spacer sequence ATCN PAM
cgccauugcacuccagccug

SEQ ID NO: 6381 - RNA, 20 nt, Artificial Sequence
  spacer sequence ATCN PAM
cggcucacugcaagcuccgc

SEQ ID NO: 6382 - RNA, 20 nt, Artificial Sequence
  spacer sequence ATCN PAM
uagcgaacacggugaaaccc

SEQ ID NO: 6383 - RNA, 20 nt, Artificial Sequence
  spacer sequence ATCN PAM
cgucucgauuuccugaccuu

SEQ ID NO: 6384 - RNA, 20 nt, Artificial Sequence
  spacer sequence ATCN PAM
agacgagauccuagcgaaca

SEQ ID NO: 6385 - RNA, 20 nt, Artificial Sequence
  spacer sequence ATCN PAM
caaggucaggaaaucgagac

SEQ ID NO: 6386 - RNA, 20 nt, Artificial Sequence
  spacer sequence ATCN PAM
gaccgccuccgccucccaaa

SEQ ID NO: 6387 - RNA, 20 nt, Artificial Sequence
  spacer sequence ATCN PAM
cagcacuuugggaggcggag

SEQ ID NO: 6388 - RNA, 20 nt, Artificial Sequence
  spacer sequence ATCN PAM
ccuucccuccaucccaugac

SEQ ID NO: 6389 - RNA, 20 nt, Artificial Sequence
  spacer sequence ATCN PAM
caugaccuagacggugggga

SEQ ID NO: 6390 - RNA, 20 nt, Artificial Sequence
  spacer sequence ATCN PAM
uggcgccugccagggccugg

SEQ ID NO: 6391 - RNA, 20 nt, Artificial Sequence
  spacer sequence ATCN PAM
gggucuuccugccuccucuu

SEQ ID NO: 6392 - RNA, 20 nt, Artificial Sequence
  spacer sequence ATCN PAM
ucugugguucucgugguugu

SEQ ID NO: 6393 - RNA, 20 nt, Artificial Sequence
  spacer sequence ATCN PAM
ucccugacgggcaguacuuu

SEQ ID NO: 6394 - RNA, 20 nt, Artificial Sequence
  spacer sequence ATCN PAM
ggggauguggggaagcggcc

SEQ ID NO: 6395 - RNA, 20 nt, Artificial Sequence
  spacer sequence ATCN PAM
ccagaucuucccugacgggc

SEQ ID NO: 6396 - RNA, 20 nt, Artificial Sequence
  spacer sequence ATCN PAM
gugcggccgcuuccccacau

SEQ ID NO: 6397 - RNA, 20 nt, Artificial Sequence
  spacer sequence ATCN PAM
agagucccagcccaccccug

SEQ ID NO: 6398 - RNA, 20 nt, Artificial Sequence
  spacer sequence ATCN PAM
cggucccacccaccggcccc

SEQ ID NO: 6399 - RNA, 20 nt, Artificial Sequence
  spacer sequence ATCN PAM
augucagcagcugggccguc

SEQ ID NO: 6400 - RNA, 20 nt, Artificial Sequence
  spacer sequence ATCN PAM
gggcgggccgcauggaggcg

SEQ ID NO: 6401 - RNA, 20 nt, Artificial Sequence
  spacer sequence ATCN PAM
ccucccucccgccaaaccgc

SEQ ID NO: 6402 - RNA, 20 nt, Artificial Sequence
  spacer sequence ATCN PAM
ucgcgccccuccuggcugag

SEQ ID NO: 6403 - RNA, 20 nt, Artificial Sequence
  spacer sequence ATCN PAM
aacagaagcgggagagggac

SEQ ID NO: 6404 - RNA, 20 nt, Artificial Sequence
  spacer sequence ATCN PAM
caacagugaacccgcuucuc

SEQ ID NO: 6405 - RNA, 20 nt, Artificial Sequence
  spacer sequence ATCN PAM
gcccggccuccuguccggcc

SEQ ID NO: 6406 - RNA, 20 nt, Artificial Sequence
  spacer sequence ATCN PAM
gaaucauucuuuugcguaau

SEQ ID NO: 6407 - RNA, 20 nt, Artificial Sequence
  spacer sequence ATCN PAM
uucuuuugcguaaucccgcc

SEQ ID NO: 6408 - RNA, 20 nt, Artificial Sequence
  spacer sequence ATCN PAM
cgccuccuccgauaagccuc

SEQ ID NO: 6409 - RNA, 20 nt, Artificial Sequence
  spacer sequence ATCN PAM
gaggaggcgggauuacgcaa

SEQ ID NO: 6410 - RNA, 20 nt, Artificial Sequence
  spacer sequence ATCN PAM
caaaggaggcagggcggaau

SEQ ID NO: 6411 - RNA, 20 nt, Artificial Sequence
  spacer sequence ATCN PAM
gccccgcccuccacuggucu

SEQ ID NO: 6412 - RNA, 20 nt, Artificial Sequence
  spacer sequence ATCN PAM
cgucccguuucuccaaucgg

SEQ ID NO: 6413 - RNA, 20 nt, Artificial Sequence
  spacer sequence ATCN PAM
gcucggauguuucuuuagcc

SEQ ID NO: 6414 - RNA, 20 nt, Artificial Sequence
  spacer sequence ATCN PAM
gagccgauuggagaaacggg

SEQ ID NO: 6415 - RNA, 20 nt, Artificial Sequence
  spacer sequence ATCN PAM
cauccucugacaccgcccuu

SEQ ID NO: 6416 - RNA, 20 nt, Artificial Sequence
  spacer sequence ATCN PAM
ucugacaccgcccuuccaau

SEQ ID NO: 6417 - RNA, 20 nt, Artificial Sequence
  spacer sequence ATCN PAM
gcuacgucucgcuccggccc

SEQ ID NO: 6418 - RNA, 20 nt, Artificial Sequence
  spacer sequence ATCN PAM
gugcccugggccgccgcgcc

SEQ ID NO: 6419 - RNA, 20 nt, Artificial Sequence
  spacer sequence ATCN PAM
cggcucaggcugcgggaaag

SEQ ID NO: 6420 - RNA, 20 nt, Artificial Sequence
  spacer sequence ATCN PAM
ggcugcaggugagccgucgg

SEQ ID NO: 6421 - RNA, 20 nt, Artificial Sequence
  spacer sequence ATCN PAM
cgaccccucuggggccacug

SEQ ID NO: 6422 - RNA, 20 nt, Artificial Sequence
  spacer sequence ATCN PAM
cuacuguugcagccaggccg

SEQ ID NO: 6423 - RNA, 20 nt, Artificial Sequence
  spacer sequence ATCN PAM
ucccguuuuucugaggggag

SEQ ID NO: 6424 - RNA, 20 nt, Artificial Sequence
  spacer sequence ATCN PAM
cagccgucagacaacccaac

SEQ ID NO: 6425 - RNA, 20 nt, Artificial Sequence
  spacer sequence ATCN PAM
ccggcucugugggccccagu

SEQ ID NO: 6426 - RNA, 20 nt, Artificial Sequence
  spacer sequence ATCN PAM
aggcaccccgauugugacuc

SEQ ID NO: 6427 - RNA, 20 nt, Artificial Sequence
  spacer sequence ATCN PAM
gggugccuggaucuccggcu

SEQ ID NO: 6428 - RNA, 20 nt, Artificial Sequence
  spacer sequence ATCN PAM
cuagcaagagcauguaguaa

SEQ ID NO: 6429 - RNA, 20 nt, Artificial Sequence
  spacer sequence ATCN PAM
caccacugcacuccagccug

SEQ ID NO: 6430 - RNA, 20 nt, Artificial Sequence
  spacer sequence ATCN PAM
uggcucacugcaaccuccac

SEQ ID NO: 6431 - RNA, 20 nt, Artificial Sequence
  spacer sequence ATCN PAM
cuugaacccaggagguggag

SEQ ID NO: 6432 - RNA, 20 nt, Artificial Sequence
  spacer sequence ATCN PAM
cagcuacuugguagacugag

SEQ ID NO: 6433 - RNA, 20 nt, Artificial Sequence
  spacer sequence ATCN PAM
ccugaggccaggaguucaag

SEQ ID NO: 6434 - RNA, 20 nt, Artificial Sequence
  spacer sequence ATCN PAM
gcccaccucggccucccaaa

SEQ ID NO: 6435 - RNA, 20 nt, Artificial Sequence
  spacer sequence ATCN PAM
cagcaguuugggaggccgag

SEQ ID NO: 6436 - RNA, 20 nt, Artificial Sequence
  spacer sequence ATCN PAM
cuugagcccagaaguuuaag

SEQ ID NO: 6437 - RNA, 20 nt, Artificial Sequence
  spacer sequence ATCN PAM
uccugccucagccucccaaa

SEQ ID NO: 6438 - RNA, 20 nt, Artificial Sequence
  spacer sequence ATCN PAM
cagagcuuugggaggcugag

SEQ ID NO: 6439 - RNA, 20 nt, Artificial Sequence
  spacer sequence ATCN PAM
accugcagaaggugcucaaa

SEQ ID NO: 6440 - RNA, 20 nt, Artificial Sequence
  spacer sequence ATCN PAM
caggaguccaguuccccccc

SEQ ID NO: 6441 - RNA, 20 nt, Artificial Sequence
  spacer sequence ATCN PAM
ggggguucccaugccaggca

SEQ ID NO: 6442 - RNA, 20 nt, Artificial Sequence
  spacer sequence ATCN PAM
cuggggcuagugggcaggaa

SEQ ID NO: 6443 - RNA, 20 nt, Artificial Sequence
  spacer sequence ATCN PAM
gcugcuaaucuugggggcug

SEQ ID NO: 6444 - RNA, 20 nt, Artificial Sequence
  spacer sequence ATCN PAM
ugggggcugggccucccucc

SEQ ID NO: 6445 - RNA, 20 nt, Artificial Sequence
  spacer sequence ATCN PAM
gaacuguggagggaggccca

SEQ ID NO: 6446 - RNA, 20 nt, Artificial Sequence
  spacer sequence ATCN PAM
ucccgucgcugaagcugcag

SEQ ID NO: 6447 - RNA, 20 nt, Artificial Sequence
  spacer sequence ATCN PAM
cuuuuccugcagcuucagcg

SEQ ID NO: 6448 - RNA, 20 nt, Artificial Sequence
  spacer sequence ATCN PAM
cuccccgggccuggcucgug

SEQ ID NO: 6449 - RNA, 20 nt, Artificial Sequence
  spacer sequence ATCN PAM
ccaucucccaccuccuuuaa

SEQ ID NO: 6450 - RNA, 20 nt, Artificial Sequence
  spacer sequence ATCN PAM
cccaccuccuuuaaauugac

SEQ ID NO: 6451 - RNA, 20 nt, Artificial Sequence
  spacer sequence ATCN PAM
cacaccccuggguaacauac

SEQ ID NO: 6452 - RNA, 20 nt, Artificial Sequence
  spacer sequence ATCN PAM
aaaagcacccaaggucaggg

SEQ ID NO: 6453 - RNA, 20 nt, Artificial Sequence
  spacer sequence ATCN PAM
cacucugcagauagcagccc

SEQ ID NO: 6454 - RNA, 20 nt, Artificial Sequence
  spacer sequence ATCN PAM
gcagagugagauagaggcca

SEQ ID NO: 6455 - RNA, 20 nt, Artificial Sequence
  spacer sequence ATCN PAM
ugaaccuggcucugaaaaga

SEQ ID NO: 6456 - RNA, 20 nt, Artificial Sequence
  spacer sequence ATCN PAM
gccuuucugcacauuuauua

SEQ ID NO: 6457 - RNA, 20 nt, Artificial Sequence
  spacer sequence ATCN PAM
cagcaguuugggaggccaag

SEQ ID NO: 6458 - RNA, 20 nt, Artificial Sequence
  spacer sequence ATCN PAM
gcccgccuuggccucccaaa

SEQ ID NO: 6459 - RNA, 20 nt, Artificial Sequence
  spacer sequence ATCN PAM
ccugaggucaggaguuugag

SEQ ID NO: 6460 - RNA, 20 nt, Artificial Sequence
  spacer sequence ATCN PAM
gcugggcauggugguacgcu

SEQ ID NO: 6461 - RNA, 20 nt, Artificial Sequence
  spacer sequence ATCN PAM
cuugagccugggaggcgagc

SEQ ID NO: 6462 - RNA, 20 nt, Artificial Sequence
  spacer sequence ATCN PAM
caggucacuacaagcucgcc

SEQ ID NO: 6463 - RNA, 20 nt, Artificial Sequence
  spacer sequence ATCN PAM
cgaaaauaaauagaaauaaa

SEQ ID NO: 6464 - RNA, 20 nt, Artificial Sequence
  spacer sequence ATCN PAM
ccuggguggaggagagcccu

SEQ ID NO: 6465 - RNA, 20 nt, Artificial Sequence
  spacer sequence ATCN PAM
agaugcugggguuugcugcc

SEQ ID NO: 6466 - RNA, 20 nt, Artificial Sequence
  spacer sequence ATCN PAM
cgauccccuggguggaggag

SEQ ID NO: 6467 - RNA, 20 nt, Artificial Sequence
  spacer sequence ATCN PAM
cccaguguccccuggggcgg

SEQ ID NO: 6468 - RNA, 20 nt, Artificial Sequence
  spacer sequence ATCN PAM
ccagacaucacccagugucc

SEQ ID NO: 6469 - RNA, 20 nt, Artificial Sequence
  spacer sequence ATCN PAM
gcccccaagucaugacgacu

SEQ ID NO: 6470 - RNA, 20 nt, Artificial Sequence
  spacer sequence ATCN PAM
gcagugccaaggcagagaaa

SEQ ID NO: 6471 - RNA, 20 nt, Artificial Sequence
  spacer sequence ATCN PAM
uagcgcaggguuucucugcc

SEQ ID NO: 6472 - RNA, 20 nt, Artificial Sequence
  spacer sequence ATCN PAM
guuaucuuagcgcaggguuu

SEQ ID NO: 6473 - RNA, 20 nt, Artificial Sequence
  spacer sequence ATCN PAM
agucuucaugacagccuggc

SEQ ID NO: 6474 - RNA, 20 nt, Artificial Sequence
  spacer sequence ATCN PAM
cuuauauugaaacacuggcc

SEQ ID NO: 6475 - RNA, 20 nt, Artificial Sequence
  spacer sequence ATCN PAM
cauuccaggcccuuugggag

SEQ ID NO: 6476 - RNA, 20 nt, Artificial Sequence
  spacer sequence ATCN PAM
uugcagauuacacuuuuuuu

SEQ ID NO: 6477 - RNA, 20 nt, Artificial Sequence
  spacer sequence ATCN PAM
gcaacgauagccaucucauu

SEQ ID NO: 6478 - RNA, 20 nt, Artificial Sequence
  spacer sequence ATCN PAM
cgccguugcacuccagccug

SEQ ID NO: 6479 - RNA, 20 nt, Artificial Sequence
  spacer sequence ATCN PAM
uggcucacugcaagcuccgc

SEQ ID NO: 6480 - RNA, 20 nt, Artificial Sequence
  spacer sequence ATCN PAM
uuuguauuuuuaguagagau

SEQ ID NO: 6481 - RNA, 20 nt, Artificial Sequence
  spacer sequence ATCN PAM
cuacuaaaaauacaaaagau

SEQ ID NO: 6482 - RNA, 20 nt, Artificial Sequence
  spacer sequence ATCN PAM
uggcuaacacggugaaaccc

SEQ ID NO: 6483 - RNA, 20 nt, Artificial Sequence
  spacer sequence ATCN PAM
ccugaccucgugauccaccu

SEQ ID NO: 6484 - RNA, 20 nt, Artificial Sequence
  spacer sequence ATCN PAM
cgaggucaggagauggagac

SEQ ID NO: 6485 - RNA, 20 nt, Artificial Sequence
  spacer sequence ATCN PAM
accugccucggccucccaaa

SEQ ID NO: 6486 - RNA, 20 nt, Artificial Sequence
  spacer sequence ATCN PAM
ugccucuaggcccugagccu

SEQ ID NO: 6487 - RNA, 20 nt, Artificial Sequence
  spacer sequence ATCN PAM
cccaucgugccucuaggccc

SEQ ID NO: 6488 - RNA, 20 nt, Artificial Sequence
  spacer sequence ATCN PAM
ggggcaguggacauauccug

SEQ ID NO: 6489 - RNA, 20 nt, Artificial Sequence
  spacer sequence ATCN PAM
uggaggcggcuccugggagg

SEQ ID NO: 6490 - RNA, 20 nt, Artificial Sequence
  spacer sequence ATCN PAM
ugccuccuaagccuccagca

SEQ ID NO: 6491 - RNA, 20 nt, Artificial Sequence
  spacer sequence ATCN PAM
cuugagcccaggaggucaag

SEQ ID NO: 6492 - RNA, 20 nt, Artificial Sequence
  spacer sequence ATCN PAM
ugcauuugcauucauucauu

SEQ ID NO: 6493 - RNA, 20 nt, Artificial Sequence
  spacer sequence ATCN PAM
cccugaaaagcagcucuguc

SEQ ID NO: 6494 - RNA, 20 nt, Artificial Sequence
  spacer sequence ATCN PAM
aauuccagaacauucucauc

SEQ ID NO: 6495 - RNA, 20 nt, Artificial Sequence
  spacer sequence ATCN PAM
ccgcuaucuaauuccagaac

SEQ ID NO: 6496 - RNA, 20 nt, Artificial Sequence
  spacer sequence ATCN PAM
cagcacuuugggaggcugag

SEQ ID NO: 6497 - RNA, 20 nt, Artificial Sequence
  spacer sequence ATCN PAM
cagcuacucgggaggcugag

SEQ ID NO: 6498 - RNA, 20 nt, Artificial Sequence
  spacer sequence ATCN PAM
cuugaacccgggagguggag

SEQ ID NO: 6499 - RNA, 20 nt, Artificial Sequence
  spacer sequence ATCN PAM
cagcccacugcaaccuccac

SEQ ID NO: 6500 - RNA, 20 nt, Artificial Sequence
  spacer sequence ATCN PAM
ccaaaaaaaaaccccacuga

SEQ ID NO: 6501 - RNA, 20 nt, Artificial Sequence
  spacer sequence ATCN PAM
cagcacuuugggaggcugag

SEQ ID NO: 6502 - RNA, 20 nt, Artificial Sequence
  spacer sequence ATCN PAM
cuauaaaaauaagccaggua

SEQ ID NO: 6503 - RNA, 20 nt, Artificial Sequence
  spacer sequence ATCN PAM
cggcuuacgcauucuugacc

SEQ ID NO: 6504 - RNA, 20 nt, Artificial Sequence
  spacer sequence ATCN PAM
caauuuuaaauaaagguuau

SEQ ID NO: 6505 - RNA, 20 nt, Artificial Sequence
  spacer sequence ATCN PAM
auugacacaaaaugaugucc

SEQ ID NO: 6506 - RNA, 20 nt, Artificial Sequence
  spacer sequence ATCN PAM
uuuugugucaauagaugggc

SEQ ID NO: 6507 - RNA, 20 nt, Artificial Sequence
  spacer sequence ATCN PAM
cagggacaucauuuuguguc

SEQ ID NO: 6508 - RNA, 20 nt, Artificial Sequence
  spacer sequence ATCN PAM
aggcuguucuuuuuucauug

SEQ ID NO: 6509 - RNA, 20 nt, Artificial Sequence
  spacer sequence ATCN PAM
gaggcugcaggcucccagac

SEQ ID NO: 6510 - RNA, 20 nt, Artificial Sequence
  spacer sequence ATCN PAM
cuagccuguagaggagcuuc

SEQ ID NO: 6511 - RNA, 20 nt, Artificial Sequence
  spacer sequence ATCN PAM
ccccaccucucucauuccca

SEQ ID NO: 6512 - RNA, 20 nt, Artificial Sequence
  spacer sequence ATCN PAM
ugaggcugucaucaccccac

SEQ ID NO: 6513 - RNA, 20 nt, Artificial Sequence
  spacer sequence ATCN PAM
gcccucccagauuucagcau

SEQ ID NO: 6514 - RNA, 20 nt, Artificial Sequence
  spacer sequence ATCN PAM
gggagggcagaugacggggc

SEQ ID NO: 6515 - RNA, 20 nt, Artificial Sequence
  spacer sequence ATCN PAM
gcagugacacaugcugaaau

SEQ ID NO: 6516 - RNA, 20 nt, Artificial Sequence
  spacer sequence ATCN PAM
caggacguguacaggguucc

SEQ ID NO: 6517 - RNA, 20 nt, Artificial Sequence
  spacer sequence ATCN PAM
gaagcaauguguggggccuc

SEQ ID NO: 6518 - RNA, 20 nt, Artificial Sequence
  spacer sequence ATCN PAM
cagccauccuuuccccgcuc

SEQ ID NO: 6519 - RNA, 20 nt, Artificial Sequence
  spacer sequence ATCN PAM
uuuccccgcucacuuuucuc

SEQ ID NO: 6520 - RNA, 20 nt, Artificial Sequence
  spacer sequence ATCN PAM
ccccaaaccgggacagucaa

SEQ ID NO: 6521 - RNA, 20 nt, Artificial Sequence
  spacer sequence ATCN PAM
aagcuggcccagaaucaaaa

SEQ ID NO: 6522 - RNA, 20 nt, Artificial Sequence
  spacer sequence ATCN PAM
aaagcaucuuucccgagcca

SEQ ID NO: 6523 - RNA, 20 nt, Artificial Sequence
  spacer sequence ATCN PAM
uucccgagccaggaaaaaaa

SEQ ID NO: 6524 - RNA, 20 nt, Artificial Sequence
  spacer sequence ATCN PAM
acgcaaagacuaccguuagg

SEQ ID NO: 6525 - RNA, 20 nt, Artificial Sequence
  spacer sequence ATCN PAM
gggagggcgugcgugaaaau

SEQ ID NO: 6526 - RNA, 20 nt, Artificial Sequence
  spacer sequence ATCN PAM
gcccaugagcccugcucccc

SEQ ID NO: 6527 - RNA, 20 nt, Artificial Sequence
  spacer sequence ATCN PAM
cggcuggccacccccucggg

SEQ ID NO: 6528 - RNA, 20 nt, Artificial Sequence
  spacer sequence ATCN PAM
ggccgccgccaggcgccccu

SEQ ID NO: 6529 - RNA, 20 nt, Artificial Sequence
  spacer sequence ATCN PAM
cuguggccggccgacagccc

SEQ ID NO: 6530 - RNA, 20 nt, Artificial Sequence
  spacer sequence ATCN PAM
gcgcgcugggagggggcggg

SEQ ID NO: 6531 - RNA, 20 nt, Artificial Sequence
  spacer sequence ATCN PAM
gggggacuucccccgugacc

SEQ ID NO: 6532 - RNA, 20 nt, Artificial Sequence
  spacer sequence ATCN PAM
cgccucugcacuccagccug

SEQ ID NO: 6533 - RNA, 20 nt, Artificial Sequence
  spacer sequence ATCN PAM
uggcucacuguagccuccgc

SEQ ID NO: 6534 - RNA, 20 nt, Artificial Sequence
  spacer sequence ATCN PAM
cgucucuacuaaaacuacaa

SEQ ID NO: 6535 - RNA, 20 nt, Artificial Sequence
  spacer sequence ATCN PAM
ccugaaguaaggaguucgag

SEQ ID NO: 6536 - RNA, 20 nt, Artificial Sequence
  spacer sequence ATCN PAM
gcccacuucggccucccaaa

SEQ ID NO: 6537 - RNA, 20 nt, Artificial Sequence
  spacer sequence ATCN PAM
cagcgcuuugggaggccgaa

SEQ ID NO: 6538 - RNA, 20 nt, Artificial Sequence
  spacer sequence ATCN PAM
aggaaucugagcaccccccc

SEQ ID NO: 6539 - RNA, 20 nt, Artificial Sequence
  spacer sequence ATCN PAM
gagcacccccccccagcucc

SEQ ID NO: 6540 - RNA, 20 nt, Artificial Sequence
  spacer sequence ATCN PAM
cuggccgggagaguuccagg

SEQ ID NO: 6541 - RNA, 20 nt, Artificial Sequence
  spacer sequence ATCN PAM
cccacccccuguugucuccc

SEQ ID NO: 6542 - RNA, 20 nt, Artificial Sequence
  spacer sequence ATCN PAM
cucuggcuggcuggggaagg

SEQ ID NO: 6543 - RNA, 20 nt, Artificial Sequence
  spacer sequence ATCN PAM
ugaaauggaaacgggugggc

SEQ ID NO: 6544 - RNA, 20 nt, Artificial Sequence
  spacer sequence ATCN PAM
guucccccugacagcgucgc

SEQ ID NO: 6545 - RNA, 20 nt, Artificial Sequence
  spacer sequence ATCN PAM
aacagcaagcauuuauuuau

SEQ ID NO: 6546 - RNA, 20 nt, Artificial Sequence
  spacer sequence ATCN PAM
gugcuuucauccaacagcaa

SEQ ID NO: 6547 - RNA, 20 nt, Artificial Sequence
  spacer sequence ATCN PAM
caggccugaguuacccacgc

SEQ ID NO: 6548 - RNA, 20 nt, Artificial Sequence
  spacer sequence ATCN PAM
cauuccacuugaagguccca

SEQ ID NO: 6549 - RNA, 20 nt, Artificial Sequence
  spacer sequence ATCN PAM
cagacugggggacaggucgg

SEQ ID NO: 6550 - RNA, 20 nt, Artificial Sequence
  spacer sequence ATCN PAM
uaagccuuugcuuuuuucuu

SEQ ID NO: 6551 - RNA, 20 nt, Artificial Sequence
  spacer sequence ATCN PAM
cagcucaccacaaccuccac

SEQ ID NO: 6552 - RNA, 20 nt, Artificial Sequence
  spacer sequence ATCN PAM
cucaaacccgggagguggag

SEQ ID NO: 6553 - RNA, 20 nt, Artificial Sequence
  spacer sequence ATCN PAM
cagcuacuugggaggcugag

SEQ ID NO: 6554 - RNA, 20 nt, Artificial Sequence
  spacer sequence ATCN PAM
cccgaggucaggaguuugag

SEQ ID NO: 6555 - RNA, 20 nt, Artificial Sequence
  spacer sequence ATCN PAM
caacacuuugggaggccaag

SEQ ID NO: 6556 - RNA, 20 nt, Artificial Sequence
  spacer sequence ATCN PAM
cuacaaaaaaauuuagagcu

SEQ ID NO: 6557 - RNA, 20 nt, Artificial Sequence
  spacer sequence ATCN PAM
uuugagccugggaauuugag

SEQ ID NO: 6558 - RNA, 20 nt, Artificial Sequence
  spacer sequence ATCN PAM
ucccaccuuagccuccccag

SEQ ID NO: 6559 - RNA, 20 nt, Artificial Sequence
  spacer sequence ATCN PAM
gggcaugguggcaccugucu

SEQ ID NO: 6560 - RNA, 20 nt, Artificial Sequence
  spacer sequence ATCN PAM
cuacaaaacaaaaaauuauc

SEQ ID NO: 6561 - RNA, 20 nt, Artificial Sequence
  spacer sequence ATCN PAM
uggacaacacaaugaaaccc

SEQ ID NO: 6562 - RNA, 20 nt, Artificial Sequence
  spacer sequence ATCN PAM
cuugagccugggaguucaag

SEQ ID NO: 6563 - RNA, 20 nt, Artificial Sequence
  spacer sequence ATCN PAM
cagugcuuugggaggcccag

SEQ ID NO: 6564 - RNA, 20 nt, Artificial Sequence
  spacer sequence ATCN PAM
caggccggagccacugcacc

SEQ ID NO: 6565 - RNA, 20 nt, Artificial Sequence
  spacer sequence ATCN PAM
cagcucacugcaaccuccuc

SEQ ID NO: 6566 - RNA, 20 nt, Artificial Sequence
  spacer sequence ATCN PAM
cuugaacccgggaggaggag

SEQ ID NO: 6567 - RNA, 20 nt, Artificial Sequence
  spacer sequence ATCN PAM
cagcuacucgggaggcugag

SEQ ID NO: 6568 - RNA, 20 nt, Artificial Sequence
  spacer sequence ATCN PAM
ccugaggucaggaguucgag

SEQ ID NO: 6569 - RNA, 20 nt, Artificial Sequence
  spacer sequence ATCN PAM
accugccucggccucacaaa

SEQ ID NO: 6570 - RNA, 20 nt, Artificial Sequence
  spacer sequence ATCN PAM
cagcgcuuugugaggccgag

SEQ ID NO: 6571 - RNA, 20 nt, Artificial Sequence
  spacer sequence ATCN PAM
caggcgggagccaccgcacc

SEQ ID NO: 6572 - RNA, 20 nt, Artificial Sequence
  spacer sequence ATCN PAM
uaaaaaccaaaauaguggca

SEQ ID NO: 6573 - RNA, 20 nt, Artificial Sequence
  spacer sequence ATCN PAM
ucggccuuugccacuauuuu

SEQ ID NO: 6574 - RNA, 20 nt, Artificial Sequence
  spacer sequence ATCN PAM
ccagcccagcacucgcggca

SEQ ID NO: 6575 - RNA, 20 nt, Artificial Sequence
  spacer sequence ATCN PAM
ggacucggcaccuucugggc

SEQ ID NO: 6576 - RNA, 20 nt, Artificial Sequence
  spacer sequence ATCN PAM
gaauggugacccccuggacg

SEQ ID NO: 6577 - RNA, 20 nt, Artificial Sequence
  spacer sequence ATCN PAM
cccgguagagauggggaaac

SEQ ID NO: 6578 - RNA, 20 nt, Artificial Sequence
  spacer sequence ATCN PAM
cuaccgggggauccgaaugg

SEQ ID NO: 6579 - RNA, 20 nt, Artificial Sequence
  spacer sequence ATCN PAM
gcgcucccgccucggcccag

SEQ ID NO: 6580 - RNA, 20 nt, Artificial Sequence
  spacer sequence ATCN PAM
cggcggagucgcacccucag

SEQ ID NO: 6581 - RNA, 20 nt, Artificial Sequence
  spacer sequence ATCN PAM
ugagggugcgacuccgccgc

SEQ ID NO: 6582 - RNA, 20 nt, Artificial Sequence
  spacer sequence ATCN PAM
uccgccacugugcgcgcaga

SEQ ID NO: 6583 - RNA, 20 nt, Artificial Sequence
  spacer sequence ATCN PAM
gccacugugcgcgcagaccc

SEQ ID NO: 6584 - RNA, 20 nt, Artificial Sequence
  spacer sequence ATCN PAM
gccgccagaccacguggcca

SEQ ID NO: 6585 - RNA, 20 nt, Artificial Sequence
  spacer sequence ATCN PAM
cuggcagguagccccgcgga

SEQ ID NO: 6586 - RNA, 20 nt, Artificial Sequence
  spacer sequence ATCN PAM
cagcucuuccccucugugug

SEQ ID NO: 6587 - RNA, 20 nt, Artificial Sequence
  spacer sequence ATCN PAM
ggaacaacgccugacgccuc

SEQ ID NO: 6588 - RNA, 20 nt, Artificial Sequence
  spacer sequence ATCN PAM
cuuugcaggauuccguuugc

SEQ ID NO: 6589 - RNA, 20 nt, Artificial Sequence
  spacer sequence ATCN PAM
ugcaaagagauuuccgacag

SEQ ID NO: 6590 - RNA, 20 nt, Artificial Sequence
  spacer sequence ATCN PAM
agagacguucaccgagcaag

SEQ ID NO: 6591 - RNA, 20 nt, Artificial Sequence
  spacer sequence ATCN PAM
gcuaagagcauccagagacg

SEQ ID NO: 6592 - RNA, 20 nt, Artificial Sequence
  spacer sequence ATCN PAM
cgcccagugccccgucuagg

SEQ ID NO: 6593 - RNA, 20 nt, Artificial Sequence
  spacer sequence ATCN PAM
cgaggccugcaagugacgcu

SEQ ID NO: 6594 - RNA, 20 nt, Artificial Sequence
  spacer sequence ATCN PAM
cuaucccugguuaaggacuc

SEQ ID NO: 6595 - RNA, 20 nt, Artificial Sequence
  spacer sequence ATCN PAM
cugguuaaggacucagggug

SEQ ID NO: 6596 - RNA, 20 nt, Artificial Sequence
  spacer sequence ATCN PAM
ugucauugcacuccagccug

SEQ ID NO: 6597 - RNA, 20 nt, Artificial Sequence
  spacer sequence ATCN PAM
cggcucacugcaaccuccgc

SEQ ID NO: 6598 - RNA, 20 nt, Artificial Sequence
  spacer sequence ATCN PAM
cuacuaaaaauacaaaaacu

SEQ ID NO: 6599 - RNA, 20 nt, Artificial Sequence
  spacer sequence ATCN PAM
cuugaggucaggaauucaag

SEQ ID NO: 6600 - RNA, 20 nt, Artificial Sequence
  spacer sequence ATCN PAM
gccucccaaaaugcugggau

SEQ ID NO: 6601 - RNA, 20 nt, Artificial Sequence
  spacer sequence ATCN PAM
cagcauuuugggaggcggau

SEQ ID NO: 6602 - RNA, 20 nt, Artificial Sequence
  spacer sequence ATCN PAM
caagcucaaaaaccccaagc

SEQ ID NO: 6603 - RNA, 20 nt, Artificial Sequence
  spacer sequence ATCN PAM
gagagcaccugaauaagacu

SEQ ID NO: 6604 - RNA, 20 nt, Artificial Sequence
  spacer sequence ATCN PAM
cacuuuuuuaaguuuccacc

SEQ ID NO: 6605 - RNA, 20 nt, Artificial Sequence
  spacer sequence ATCN PAM
ggaaacucugggcugacauu

SEQ ID NO: 6606 - RNA, 20 nt, Artificial Sequence
  spacer sequence ATCN PAM
uuagggacuuaguguucugg

SEQ ID NO: 6607 - RNA, 20 nt, Artificial Sequence
  spacer sequence ATCN PAM
gggcuuaagugaucaaagug

SEQ ID NO: 6608 - RNA, 20 nt, Artificial Sequence
  spacer sequence ATCN PAM
cuuaagccccgaugggagcc

SEQ ID NO: 6609 - RNA, 20 nt, Artificial Sequence
  spacer sequence ATCN PAM
aaguggcuggaaucagagcc

SEQ ID NO: 6610 - RNA, 20 nt, Artificial Sequence
  spacer sequence ATCN PAM
gagccaggggcuuucugagg

SEQ ID NO: 6611 - RNA, 20 nt, Artificial Sequence
  spacer sequence ATCN PAM
uggcugcuccucagaaagcc

SEQ ID NO: 6612 - RNA, 20 nt, Artificial Sequence
  spacer sequence ATCN PAM
ccaacaccuuccccagccag

SEQ ID NO: 6613 - RNA, 20 nt, Artificial Sequence
  spacer sequence ATCN PAM
uggccacaggcgcugugccu

SEQ ID NO: 6614 - RNA, 20 nt, Artificial Sequence
  spacer sequence ATCN PAM
acagguccaaaggggaccca

SEQ ID NO: 6615 - RNA, 20 nt, Artificial Sequence
  spacer sequence ATCN PAM
gcuuuguccccuaggacacc

SEQ ID NO: 6616 - RNA, 20 nt, Artificial Sequence
  spacer sequence ATCN PAM
guuuccucuucugagaaaug

SEQ ID NO: 6617 - RNA, 20 nt, Artificial Sequence
  spacer sequence ATCN PAM
gguccagggaaguaagugcu

SEQ ID NO: 6618 - RNA, 20 nt, Artificial Sequence
  spacer sequence ATCN PAM
ccacucuguuccugcaugcc

SEQ ID NO: 6619 - RNA, 20 nt, Artificial Sequence
  spacer sequence ATCN PAM
gggaacggcuccgacccggg

SEQ ID NO: 6620 - RNA, 20 nt, Artificial Sequence
  spacer sequence ATCN PAM
cgggucggagccguucccag

SEQ ID NO: 6621 - RNA, 20 nt, Artificial Sequence
  spacer sequence ATCN PAM
guagacaggccagaagaaac

SEQ ID NO: 6622 - RNA, 20 nt, Artificial Sequence
  spacer sequence ATCN PAM
gucccuguacggcccauucu

SEQ ID NO: 6623 - RNA, 20 nt, Artificial Sequence
  spacer sequence ATCN PAM
aaccaccuaagacucugaag

SEQ ID NO: 6624 - RNA, 20 nt, Artificial Sequence
  spacer sequence ATCN PAM
cugcggagcaggcaggcccg

SEQ ID NO: 6625 - RNA, 20 nt, Artificial Sequence
  spacer sequence ATCN PAM
caauccagccuccuccuggc

SEQ ID NO: 6626 - RNA, 20 nt, Artificial Sequence
  spacer sequence ATCN PAM
agccuccuccuggcccaagc

SEQ ID NO: 6627 - RNA, 20 nt, Artificial Sequence
  spacer sequence ATCN PAM
ucugcccaccaggggagucc

SEQ ID NO: 6628 - RNA, 20 nt, Artificial Sequence
  spacer sequence ATCN PAM
uuccucaaagaaguaaagga

SEQ ID NO: 6629 - RNA, 20 nt, Artificial Sequence
  spacer sequence ATCN PAM
uacucuaucgcccaggaagg

SEQ ID NO: 6630 - RNA, 20 nt, Artificial Sequence
  spacer sequence ATCN PAM
cccaggaaggagugcagugg

SEQ ID NO: 6631 - RNA, 20 nt, Artificial Sequence
  spacer sequence ATCN PAM
cagcucacugcagccucaac

SEQ ID NO: 6632 - RNA, 20 nt, Artificial Sequence
  spacer sequence ATCN PAM
cuugagcccuggagguugag

SEQ ID NO: 6633 - RNA, 20 nt, Artificial Sequence
  spacer sequence ATCN PAM
accaccacuccuagcuaauu

SEQ ID NO: 6634 - RNA, 20 nt, Artificial Sequence
  spacer sequence ATCN PAM
cuugaggccaggaguuccaa

SEQ ID NO: 6635 - RNA, 20 nt, Artificial Sequence
  spacer sequence ATCN PAM
ucccgccucagccucccaaa

SEQ ID NO: 6636 - RNA, 20 nt, Artificial Sequence
  spacer sequence ATCN PAM
cugcacuccagucugguuga

SEQ ID NO: 6637 - RNA, 20 nt, Artificial Sequence
  spacer sequence ATCN PAM
uuuacuuacuuuuaauuuuu

SEQ ID NO: 6638 - RNA, 20 nt, Artificial Sequence
  spacer sequence ATCN PAM
acaaugagguaagcgacccu

SEQ ID NO: 6639 - RNA, 20 nt, Artificial Sequence
  spacer sequence ATCN PAM
gggucgcuuaccucauugua

SEQ ID NO: 6640 - RNA, 20 nt, Artificial Sequence
  spacer sequence ATCN PAM
ggcccauuuuacagaucaga

SEQ ID NO: 6641 - RNA, 20 nt, Artificial Sequence
  spacer sequence ATCN PAM
guaaaaugggccugaucagg

SEQ ID NO: 6642 - RNA, 20 nt, Artificial Sequence
  spacer sequence ATCN PAM
gaagaucaaggccgcauuuu

SEQ ID NO: 6643 - RNA, 20 nt, Artificial Sequence
  spacer sequence ATCN PAM
ucugaucuguaaaaugggcc

SEQ ID NO: 6644 - RNA, 20 nt, Artificial Sequence
  spacer sequence ATCN PAM
aggccgcauuuugcuuaccc

SEQ ID NO: 6645 - RNA, 20 nt, Artificial Sequence
  spacer sequence ATCN PAM
guaaagcaguaggcuguaga

SEQ ID NO: 6646 - RNA, 20 nt, Artificial Sequence
  spacer sequence ATCN PAM
aaacagcugaggcuccaucg

SEQ ID NO: 6647 - RNA, 20 nt, Artificial Sequence
  spacer sequence ATCN PAM
cugaaguauucagcaaacac

SEQ ID NO: 6648 - RNA, 20 nt, Artificial Sequence
  spacer sequence ATCN PAM
ucugcggcugguucauucuc

SEQ ID NO: 6649 - RNA, 20 nt, Artificial Sequence
  spacer sequence ATCN PAM
accaagcaggguuuccaggc

SEQ ID NO: 6650 - RNA, 20 nt, Artificial Sequence
  spacer sequence ATCN PAM
guccccacauccaccaagca

SEQ ID NO: 6651 - RNA, 20 nt, Artificial Sequence
  spacer sequence ATCN PAM
aguugccaaguuuaaacugc

SEQ ID NO: 6652 - RNA, 20 nt, Artificial Sequence
  spacer sequence ATCN PAM
ggcuguuccucccuuucccg

SEQ ID NO: 6653 - RNA, 20 nt, Artificial Sequence
  spacer sequence ATCN PAM
uaccccgccccgagggaaau

SEQ ID NO: 6654 - RNA, 20 nt, Artificial Sequence
  spacer sequence ATCN PAM
ccaaauuucccucggggcgg

SEQ ID NO: 6655 - RNA, 20 nt, Artificial Sequence
  spacer sequence ATCN PAM
gcugggggaggggggaauca

SEQ ID NO: 6656 - RNA, 20 nt, Artificial Sequence
  spacer sequence ATCN PAM
acaagucagaaaaccacgaa

SEQ ID NO: 6657 - RNA, 20 nt, Artificial Sequence
  spacer sequence ATCN PAM
uaugcagggaccagcaaagc

SEQ ID NO: 6658 - RNA, 20 nt, Artificial Sequence
  spacer sequence ATCN PAM
cccuccccccaagaaaaccc

SEQ ID NO: 6659 - RNA, 20 nt, Artificial Sequence
  spacer sequence ATCN PAM
agggcuguuuuuuuuuucuu

SEQ ID NO: 6660 - RNA, 20 nt, Artificial Sequence
  spacer sequence ATCN PAM
cgacaguaaagcaaucuagg

SEQ ID NO: 6661 - RNA, 20 nt, Artificial Sequence
  spacer sequence ATCN PAM
gggaauuauuuuuaagcaaa

SEQ ID NO: 6662 - RNA, 20 nt, Artificial Sequence
  spacer sequence ATCN PAM
cuugccugcccuccaugagc

SEQ ID NO: 6663 - RNA, 20 nt, Artificial Sequence
  spacer sequence ATCN PAM
uagaauggagcccccuggga

SEQ ID NO: 6664 - RNA, 20 nt, Artificial Sequence
  spacer sequence ATCN PAM
cccaucuuagaauggagccc

SEQ ID NO: 6665 - RNA, 20 nt, Artificial Sequence
  spacer sequence ATCN PAM
cccaucccccaucuuagaau

SEQ ID NO: 6666 - RNA, 20 nt, Artificial Sequence
  spacer sequence ATCN PAM
accugccaagacccauucca

SEQ ID NO: 6667 - RNA, 20 nt, Artificial Sequence
  spacer sequence ATCN PAM
ccucuuugucugccaacugg

SEQ ID NO: 6668 - RNA, 20 nt, Artificial Sequence
  spacer sequence ATCN PAM
guuucagcuaccccacaaaa

SEQ ID NO: 6669 - RNA, 20 nt, Artificial Sequence
  spacer sequence ATCN PAM
gcuccgcguuaaugcggggc

SEQ ID NO: 6670 - RNA, 20 nt, Artificial Sequence
  spacer sequence ATCN PAM
uccugcggcgggagacaugu

SEQ ID NO: 6671 - RNA, 20 nt, Artificial Sequence
  spacer sequence ATCN PAM
gcgugggccgccgggcgggg

SEQ ID NO: 6672 - RNA, 20 nt, Artificial Sequence
  spacer sequence ATCN PAM
cuccgccaccuccgggcggc

SEQ ID NO: 6673 - RNA, 20 nt, Artificial Sequence
  spacer sequence ATCN PAM
cgugagguccagagccuggg

SEQ ID NO: 6674 - RNA, 20 nt, Artificial Sequence
  spacer sequence ATCN PAM
cggacuauccccguccgcgg

SEQ ID NO: 6675 - RNA, 20 nt, Artificial Sequence
  spacer sequence ATCN PAM
ccguccgcggaagcacacac

SEQ ID NO: 6676 - RNA, 20 nt, Artificial Sequence
  spacer sequence ATCN PAM
cacgggccuuacucgcuugc

SEQ ID NO: 6677 - RNA, 20 nt, Artificial Sequence
  spacer sequence ATCN PAM
gaagccgcgaaagucugaug

SEQ ID NO: 6678 - RNA, 20 nt, Artificial Sequence
  spacer sequence ATCN PAM
gacuuucgcggcuuccgauu

SEQ ID NO: 6679 - RNA, 20 nt, Artificial Sequence
  spacer sequence ATCN PAM
ccgcccaucagacuuucgcg

SEQ ID NO: 6680 - RNA, 20 nt, Artificial Sequence
  spacer sequence ATCN PAM
uagccauucguggugaggcc

SEQ ID NO: 6681 - RNA, 20 nt, Artificial Sequence
  spacer sequence ATCN PAM
cggccccgagggggcuacgu

SEQ ID NO: 6682 - RNA, 20 nt, Artificial Sequence
  spacer sequence ATCN PAM
gugaauuuggaccugacuuu

SEQ ID NO: 6683 - RNA, 20 nt, Artificial Sequence
  spacer sequence ATCN PAM
ggccugaguucuguccaaag

SEQ ID NO: 6684 - RNA, 20 nt, Artificial Sequence
  spacer sequence ATCN PAM
ggcuuccugauucuuaguag

SEQ ID NO: 6685 - RNA, 20 nt, Artificial Sequence
  spacer sequence ATCN PAM
ggaagccagaucuggccuga

SEQ ID NO: 6686 - RNA, 20 nt, Artificial Sequence
  spacer sequence ATCN PAM
uaggcggggucacuuuuuac

SEQ ID NO: 6687 - RNA, 20 nt, Artificial Sequence
  spacer sequence ATCN PAM
ggcgccguggcuccugccug

SEQ ID NO: 6688 - RNA, 20 nt, Artificial Sequence
  spacer sequence ATCN PAM
caggcaggagccacggcgcc

SEQ ID NO: 6689 - RNA, 20 nt, Artificial Sequence
  spacer sequence ATCN PAM
cagcgcuuugaaggaggccg

SEQ ID NO: 6690 - RNA, 20 nt, Artificial Sequence
  spacer sequence ATCN PAM
ucccgccucggccuccuuca

SEQ ID NO: 6691 - RNA, 20 nt, Artificial Sequence
  spacer sequence ATCN PAM
cuugaggccaggaguucgag

SEQ ID NO: 6692 - RNA, 20 nt, Artificial Sequence
  spacer sequence ATCN PAM
gcccgccuuggccucccaaa

SEQ ID NO: 6693 - RNA, 20 nt, Artificial Sequence
  spacer sequence ATCN PAM
ccugaagucaggaguucgag

SEQ ID NO: 6694 - RNA, 20 nt, Artificial Sequence
  spacer sequence ATCN PAM
cuacuaaaaauacaaaaauu

SEQ ID NO: 6695 - RNA, 20 nt, Artificial Sequence
  spacer sequence ATCN PAM
cuuucacccgaaaggcggag

SEQ ID NO: 6696 - RNA, 20 nt, Artificial Sequence
  spacer sequence ATCN PAM
cagcuacucgggaagcugag

SEQ ID NO: 6697 - RNA, 20 nt, Artificial Sequence
  spacer sequence ATCN PAM
cuuaaacccaggaggcagag

SEQ ID NO: 6698 - RNA, 20 nt, Artificial Sequence
  spacer sequence ATCN PAM
cugcucacugcaaccucugc

SEQ ID NO: 6699 - RNA, 20 nt, Artificial Sequence
  spacer sequence ATCN PAM
cagcacugcacuccaggcug

SEQ ID NO: 6700 - RNA, 20 nt, Artificial Sequence
  spacer sequence ATCN PAM
cccagggcucccuggggccc

SEQ ID NO: 6701 - RNA, 20 nt, Artificial Sequence
  spacer sequence ATCN PAM
ucccaggcugggaguggagu

SEQ ID NO: 6702 - RNA, 20 nt, Artificial Sequence
  spacer sequence ATCN PAM
cgcuggcccgcuuggcucca

SEQ ID NO: 6703 - RNA, 20 nt, Artificial Sequence
  spacer sequence ATCN PAM
ugcccucuggaugguccaga

SEQ ID NO: 6704 - RNA, 20 nt, Artificial Sequence
  spacer sequence ATCN PAM
agagggcaggauggcuggag

SEQ ID NO: 6705 - RNA, 20 nt, Artificial Sequence
  spacer sequence ATCN PAM
ccaccccgggccucuacguu

SEQ ID NO: 6706 - RNA, 20 nt, Artificial Sequence
  spacer sequence ATCN PAM
ggagccccugagucaucaca

SEQ ID NO: 6707 - RNA, 20 nt, Artificial Sequence
  spacer sequence ATCN PAM
caguucaaugcugcaccuau

SEQ ID NO: 6708 - RNA, 20 nt, Artificial Sequence
  spacer sequence ATCN PAM
cucaucccucuccaccucac

SEQ ID NO: 6709 - RNA, 20 nt, Artificial Sequence
  spacer sequence ATCN PAM
cucuccaccucacugugacc

SEQ ID NO: 6710 - RNA, 20 nt, Artificial Sequence
  spacer sequence ATCN PAM
ggacaguggaaggggggagu

SEQ ID NO: 6711 - RNA, 20 nt, Artificial Sequence
  spacer sequence ATCN PAM
cuacuaaaaauacaaaaaau

SEQ ID NO: 6712 - RNA, 20 nt, Artificial Sequence
  spacer sequence ATCN PAM
uggcuaacauggugaaaccc

SEQ ID NO: 6713 - RNA, 20 nt, Artificial Sequence
  spacer sequence ATCN PAM
agaccauccuggcuaacaug

SEQ ID NO: 6714 - RNA, 20 nt, Artificial Sequence
  spacer sequence ATCN PAM
ccugaccucgugaucugcuc

SEQ ID NO: 6715 - RNA, 20 nt, Artificial Sequence
  spacer sequence ATCN PAM
cgaggucaggagaucgagac

SEQ ID NO: 6716 - RNA, 20 nt, Artificial Sequence
  spacer sequence ATCN PAM
gcucgccucggccucccaaa

SEQ ID NO: 6717 - RNA, 20 nt, Artificial Sequence
  spacer sequence ATCN PAM
cagcacuuugggaggccgag

SEQ ID NO: 6718 - RNA, 20 nt, Artificial Sequence
  spacer sequence ATCN PAM
ugggcacagacccugagguc

SEQ ID NO: 6719 - RNA, 20 nt, Artificial Sequence
  spacer sequence ATCN PAM
ucaguuuaucguuccuccca

SEQ ID NO: 6720 - RNA, 20 nt, Artificial Sequence
  spacer sequence ATCN PAM
guuuaucguuccucccacuc

SEQ ID NO: 6721 - RNA, 20 nt, Artificial Sequence
  spacer sequence ATCN PAM
uuccucccacucucaggccc

SEQ ID NO: 6722 - RNA, 20 nt, Artificial Sequence
  spacer sequence ATCN PAM
aucuggggccugacacacag

SEQ ID NO: 6723 - RNA, 20 nt, Artificial Sequence
  spacer sequence ATCN PAM
ggggccugacacacaguagg

SEQ ID NO: 6724 - RNA, 20 nt, Artificial Sequence
  spacer sequence ATCN PAM
uacaggugaggaaacugagg

SEQ ID NO: 6725 - RNA, 20 nt, Artificial Sequence
  spacer sequence ATCN PAM
gggagccccggcccaggcga

SEQ ID NO: 6726 - RNA, 20 nt, Artificial Sequence
  spacer sequence ATCN PAM
cugucuuugucucucugucu

SEQ ID NO: 6727 - RNA, 20 nt, Artificial Sequence
  spacer sequence ATCN PAM
cugucugucuuuuugucucu

SEQ ID NO: 6728 - RNA, 20 nt, Artificial Sequence
  spacer sequence ATCN PAM
cuuucugucccucugucucu

SEQ ID NO: 6729 - RNA, 20 nt, Artificial Sequence
  spacer sequence ATCN PAM
cucucugucuccaucucucu

SEQ ID NO: 6730 - RNA, 20 nt, Artificial Sequence
  spacer sequence ATCN PAM
cucucguugucucucuguuu

SEQ ID NO: 6731 - RNA, 20 nt, Artificial Sequence
  spacer sequence ATCN PAM
cuuucugucucucucugccu

SEQ ID NO: 6732 - RNA, 20 nt, Artificial Sequence
  spacer sequence ATCN PAM
cuaucucucugucucuuugu

SEQ ID NO: 6733 - RNA, 20 nt, Artificial Sequence
  spacer sequence ATCN PAM
cucugucucuuugucuguuu

SEQ ID NO: 6734 - RNA, 20 nt, Artificial Sequence
  spacer sequence ATCN PAM
cuugucuuuuucucugucuc

SEQ ID NO: 6735 - RNA, 20 nt, Artificial Sequence
  spacer sequence ATCN PAM
cucccccugugagccugcau

SEQ ID NO: 6736 - RNA, 20 nt, Artificial Sequence
  spacer sequence ATCN PAM
ggcugggagccccgacgggc

SEQ ID NO: 6737 - RNA, 20 nt, Artificial Sequence
  spacer sequence ATCN PAM
ccuuacaggcauuugaaacu

SEQ ID NO: 6738 - RNA, 20 nt, Artificial Sequence
  spacer sequence ATCN PAM
cggguggaggagcaggcagg

SEQ ID NO: 6739 - RNA, 20 nt, Artificial Sequence
  spacer sequence ATCN PAM
cggaagggaggguccuuggg

SEQ ID NO: 6740 - RNA, 20 nt, Artificial Sequence
  spacer sequence ATCN PAM
acaccccugauccccccucg

SEQ ID NO: 6741 - RNA, 20 nt, Artificial Sequence
  spacer sequence ATCN PAM
gggguguagaucccggaagg

SEQ ID NO: 6742 - RNA, 20 nt, Artificial Sequence
  spacer sequence ATCN PAM
ccccucgccagcacauccac

SEQ ID NO: 6743 - RNA, 20 nt, Artificial Sequence
  spacer sequence ATCN PAM
acccaccacccucgcagaca

SEQ ID NO: 6744 - RNA, 20 nt, Artificial Sequence
  spacer sequence ATCN PAM
cuguagaaacauccucuggg

SEQ ID NO: 6745 - RNA, 20 nt, Artificial Sequence
  spacer sequence ATCN PAM
ucuggggcuggggcuuaauc

SEQ ID NO: 6746 - RNA, 20 nt, Artificial Sequence
  spacer sequence ATCN PAM
guuccugauuugcauuuuug

SEQ ID NO: 6747 - RNA, 20 nt, Artificial Sequence
  spacer sequence ATCN PAM
ggaacugauuaagccccagc

SEQ ID NO: 6748 - RNA, 20 nt, Artificial Sequence
  spacer sequence ATCN PAM
ugugccaaaauuagcagcuc

SEQ ID NO: 6749 - RNA, 20 nt, Artificial Sequence
  spacer sequence ATCN PAM
ccaagggucccugcagcucc

SEQ ID NO: 6750 - RNA, 20 nt, Artificial Sequence
  spacer sequence ATCN PAM
cugucuuugacucucugucu

SEQ ID NO: 6751 - RNA, 20 nt, Artificial Sequence
  spacer sequence ATCN PAM
cuguuucugucucucugugu

SEQ ID NO: 6752 - RNA, 20 nt, Artificial Sequence
  spacer sequence ATCN PAM
cuucucuauuucacucucug

SEQ ID NO: 6753 - RNA, 20 nt, Artificial Sequence
  spacer sequence ATCN PAM
uucucucugucucugugucu

SEQ ID NO: 6754 - RNA, 20 nt, Artificial Sequence
  spacer sequence ATCN PAM
cauucucugucucucugucu

SEQ ID NO: 6755 - RNA, 20 nt, Artificial Sequence
  spacer sequence ATCN PAM
cagaacccaaagcaggaccu

SEQ ID NO: 6756 - RNA, 20 nt, Artificial Sequence
  spacer sequence ATCN PAM
cagguccugcuuuggguucu

SEQ ID NO: 6757 - RNA, 20 nt, Artificial Sequence
  spacer sequence ATCN PAM
cccccagaaggugcccuggg

SEQ ID NO: 6758 - RNA, 20 nt, Artificial Sequence
  spacer sequence ATCN PAM
cagcugaggacgggcagacu

SEQ ID NO: 6759 - RNA, 20 nt, Artificial Sequence
  spacer sequence ATCN PAM
ugagucugcccguccucagc

SEQ ID NO: 6760 - RNA, 20 nt, Artificial Sequence
  spacer sequence ATCN PAM
cccccguggcuccuggcccc

SEQ ID NO: 6761 - RNA, 20 nt, Artificial Sequence
  spacer sequence ATCN PAM
gaggcuucagauuuccccgg

SEQ ID NO: 6762 - RNA, 20 nt, Artificial Sequence
  spacer sequence ATCN PAM
gaagccucugaugugugggg

SEQ ID NO: 6763 - RNA, 20 nt, Artificial Sequence
  spacer sequence ATCN PAM
gauuugggccacuccgacgc

SEQ ID NO: 6764 - RNA, 20 nt, Artificial Sequence
  spacer sequence ATCN PAM
gauucuccggggaaaucuga

SEQ ID NO: 6765 - RNA, 20 nt, Artificial Sequence
  spacer sequence ATCN PAM
gcccacuggcgagggacccc

SEQ ID NO: 6766 - RNA, 20 nt, Artificial Sequence
  spacer sequence ATCN PAM
acagccucaggugguggaaa

SEQ ID NO: 6767 - RNA, 20 nt, Artificial Sequence
  spacer sequence ATCN PAM
cggcgcuuugggaggccuag

SEQ ID NO: 6768 - RNA, 20 nt, Artificial Sequence
  spacer sequence ATCN PAM
acccaccuaggccucccaaa

SEQ ID NO: 6769 - RNA, 20 nt, Artificial Sequence
  spacer sequence ATCN PAM
ccugaggucaggaguucgag

SEQ ID NO: 6770 - RNA, 20 nt, Artificial Sequence
  spacer sequence ATCN PAM
cuugaacccgggagauggag

SEQ ID NO: 6771 - RNA, 20 nt, Artificial Sequence
  spacer sequence ATCN PAM
cccggguucaagcgauucuc

SEQ ID NO: 6772 - RNA, 20 nt, Artificial Sequence
  spacer sequence ATCN PAM
caaaaaaaaaaaaaaaacag

SEQ ID NO: 6773 - RNA, 20 nt, Artificial Sequence
  spacer sequence ATCN PAM
ucgaacgcuugcacaggagg

SEQ ID NO: 6774 - RNA, 20 nt, Artificial Sequence
  spacer sequence ATCN PAM
gccuguacaccaagggcgcc

SEQ ID NO: 6775 - RNA, 20 nt, Artificial Sequence
  spacer sequence ATCN PAM
guuugcgcgugcuguugaag

SEQ ID NO: 6776 - RNA, 20 nt, Artificial Sequence
  spacer sequence ATCN PAM
uggagcugggggaggaacgg

SEQ ID NO: 6777 - RNA, 20 nt, Artificial Sequence
  spacer sequence ATCN PAM
ugacgguguccugggugcgg

SEQ ID NO: 6778 - RNA, 20 nt, Artificial Sequence
  spacer sequence ATCN PAM
ccacagugcagggaggagau

SEQ ID NO: 6779 - RNA, 20 nt, Artificial Sequence
  spacer sequence ATCN PAM
ccucccugcacuguggagau

SEQ ID NO: 6780 - RNA, 20 nt, Artificial Sequence
  spacer sequence ATCN PAM
ccugggcuacaccuuuauug

SEQ ID NO: 6781 - RNA, 20 nt, Artificial Sequence
  spacer sequence ATCN PAM
auaaagguguagcccaggcg

SEQ ID NO: 6782 - RNA, 20 nt, Artificial Sequence
  spacer sequence GTCN PAM
cggccucacaaaguacuggg

SEQ ID NO: 6783 - RNA, 20 nt, Artificial Sequence
  spacer sequence GTCN PAM
cuugaggccaggaguuugag

SEQ ID NO: 6784 - RNA, 20 nt, Artificial Sequence
  spacer sequence GTCN PAM
caaacuccuggccucaagug

SEQ ID NO: 6785 - RNA, 20 nt, Artificial Sequence
  spacer sequence GTCN PAM
guauuaaaaauucaaaaauu

SEQ ID NO: 6786 - RNA, 20 nt, Artificial Sequence
  spacer sequence GTCN PAM
cccaggcuggagugcagugg

SEQ ID NO: 6787 - RNA, 20 nt, Artificial Sequence
  spacer sequence GTCN PAM
cacucugucacccaggcugg

SEQ ID NO: 6788 - RNA, 20 nt, Artificial Sequence
  spacer sequence GTCN PAM
caaaaauaaauaaauaggcu

SEQ ID NO: 6789 - RNA, 20 nt, Artificial Sequence
  spacer sequence GTCN PAM
gaagaucgagaccauccugg

SEQ ID NO: 6790 - RNA, 20 nt, Artificial Sequence
  spacer sequence GTCN PAM
cgaucuucugaccucgugau

SEQ ID NO: 6791 - RNA, 20 nt, Artificial Sequence
  spacer sequence GTCN PAM
ugaaaccuugucucuacuaa

SEQ ID NO: 6792 - RNA, 20 nt, Artificial Sequence
  spacer sequence GTCN PAM
cuacuaaaaauagaaaaaau

SEQ ID NO: 6793 - RNA, 20 nt, Artificial Sequence
  spacer sequence GTCN PAM
cccaggcuggaguucagugc

SEQ ID NO: 6794 - RNA, 20 nt, Artificial Sequence
  spacer sequence GTCN PAM
cgcucugucgcccaggcugg

SEQ ID NO: 6795 - RNA, 20 nt, Artificial Sequence
  spacer sequence GTCN PAM
caaagaaaaaaaaaaauaaa

SEQ ID NO: 6796 - RNA, 20 nt, Artificial Sequence
  spacer sequence GTCN PAM
uuuuuucucuuuuauuuauu

SEQ ID NO: 6797 - RNA, 20 nt, Artificial Sequence
  spacer sequence GTCN PAM
cauuuauaauuugguaucuu

SEQ ID NO: 6798 - RNA, 20 nt, Artificial Sequence
  spacer sequence GTCN PAM
cucugucccuccuguggccu

SEQ ID NO: 6799 - RNA, 20 nt, Artificial Sequence
  spacer sequence GTCN PAM
cuccuguggccuccuugucu

SEQ ID NO: 6800 - RNA, 20 nt, Artificial Sequence
  spacer sequence GTCN PAM
gaguugaaagcauucccuau

SEQ ID NO: 6801 - RNA, 20 nt, Artificial Sequence
  spacer sequence GTCN PAM
auguuuuacacagggcuuua

SEQ ID NO: 6802 - RNA, 20 nt, Artificial Sequence
  spacer sequence GTCN PAM
cugaauccaccuaugacuua

SEQ ID NO: 6803 - RNA, 20 nt, Artificial Sequence
  spacer sequence GTCN PAM
uagguggauucagagacucu

SEQ ID NO: 6804 - RNA, 20 nt, Artificial Sequence
  spacer sequence GTCN PAM
guuuccucgggccgggauca

SEQ ID NO: 6805 - RNA, 20 nt, Artificial Sequence
  spacer sequence GTCN PAM
cugugugguuuucccgugaa

SEQ ID NO: 6806 - RNA, 20 nt, Artificial Sequence
  spacer sequence GTCN PAM
uucugccuuucccuuuuccu

SEQ ID NO: 6807 - RNA, 20 nt, Artificial Sequence
  spacer sequence GTCN PAM
aggaaaagggaaaggcagaa

SEQ ID NO: 6808 - RNA, 20 nt, Artificial Sequence
  spacer sequence GTCN PAM
ucacuggggacacagugggg

SEQ ID NO: 6809 - RNA, 20 nt, Artificial Sequence
  spacer sequence GTCN PAM
ccagugaggacgaggguuca

SEQ ID NO: 6810 - RNA, 20 nt, Artificial Sequence
  spacer sequence GTCN PAM
uggaauuagauaagccuggg

SEQ ID NO: 6811 - RNA, 20 nt, Artificial Sequence
  spacer sequence GTCN PAM
cccugccuccugguggaccu

SEQ ID NO: 6812 - RNA, 20 nt, Artificial Sequence
  spacer sequence GTCN PAM
accaggaggcagggugacuu

SEQ ID NO: 6813 - RNA, 20 nt, Artificial Sequence
  spacer sequence GTCN PAM
uggggggccgcagagacaca

SEQ ID NO: 6814 - RNA, 20 nt, Artificial Sequence
  spacer sequence GTCN PAM
cugcggccccccaggacggg

SEQ ID NO: 6815 - RNA, 20 nt, Artificial Sequence
  spacer sequence GTCN PAM
cgaccguggucacacugggu

SEQ ID NO: 6816 - RNA, 20 nt, Artificial Sequence
  spacer sequence GTCN PAM
ggacaggguguguggccccc

SEQ ID NO: 6817 - RNA, 20 nt, Artificial Sequence
  spacer sequence GTCN PAM
cacuggguugugccccagcu

SEQ ID NO: 6818 - RNA, 20 nt, Artificial Sequence
  spacer sequence GTCN PAM
uucgccucucacaccugagc

SEQ ID NO: 6819 - RNA, 20 nt, Artificial Sequence
  spacer sequence GTCN PAM
cccgcccacccacucacacu

SEQ ID NO: 6820 - RNA, 20 nt, Artificial Sequence
  spacer sequence GTCN PAM
cccuccaggccuggcaggug

SEQ ID NO: 6821 - RNA, 20 nt, Artificial Sequence
  spacer sequence GTCN PAM
cggggcagcuggcuggccgg

SEQ ID NO: 6822 - RNA, 20 nt, Artificial Sequence
  spacer sequence GTCN PAM
ccuccucucugcccagugcc

SEQ ID NO: 6823 - RNA, 20 nt, Artificial Sequence
  spacer sequence GTCN PAM
aggagggguggaagcagcug

SEQ ID NO: 6824 - RNA, 20 nt, Artificial Sequence
  spacer sequence GTCN PAM
ugcaggcugcgugcggccca

SEQ ID NO: 6825 - RNA, 20 nt, Artificial Sequence
  spacer sequence GTCN PAM
gacuccaccgcuccccagca

SEQ ID NO: 6826 - RNA, 20 nt, Artificial Sequence
  spacer sequence GTCN PAM
gaccuugguccugcaggcug

SEQ ID NO: 6827 - RNA, 20 nt, Artificial Sequence
  spacer sequence GTCN PAM
ggggcaccaccucccacucu

SEQ ID NO: 6828 - RNA, 20 nt, Artificial Sequence
  spacer sequence GTCN PAM
ugcuucacucacucacucau

SEQ ID NO: 6829 - RNA, 20 nt, Artificial Sequence
  spacer sequence GTCN PAM
augagugaaugagugaguga

SEQ ID NO: 6830 - RNA, 20 nt, Artificial Sequence
  spacer sequence GTCN PAM
cucauucacucauucacuca

SEQ ID NO: 6831 - RNA, 20 nt, Artificial Sequence
  spacer sequence GTCN PAM
uucauucauucucuccagaa

SEQ ID NO: 6832 - RNA, 20 nt, Artificial Sequence
  spacer sequence GTCN PAM
aggcaggggccacacauaag

SEQ ID NO: 6833 - RNA, 20 nt, Artificial Sequence
  spacer sequence GTCN PAM
cagggucuaggcaggggcca

SEQ ID NO: 6834 - RNA, 20 nt, Artificial Sequence
  spacer sequence GTCN PAM
cagccggccgggagcucagg

SEQ ID NO: 6835 - RNA, 20 nt, Artificial Sequence
  spacer sequence GTCN PAM
ccuccucaggugccucagca

SEQ ID NO: 6836 - RNA, 20 nt, Artificial Sequence
  spacer sequence GTCN PAM
ccccagccuuccuuguggug

SEQ ID NO: 6837 - RNA, 20 nt, Artificial Sequence
  spacer sequence GTCN PAM
aauccaguccaacacagagc

SEQ ID NO: 6838 - RNA, 20 nt, Artificial Sequence
  spacer sequence GTCN PAM
aacacagagcgggccuugug

SEQ ID NO: 6839 - RNA, 20 nt, Artificial Sequence
  spacer sequence GTCN PAM
ugaguggcacaaggcccgcu

SEQ ID NO: 6840 - RNA, 20 nt, Artificial Sequence
  spacer sequence GTCN PAM
gugaggcagggcuggggucc

SEQ ID NO: 6841 - RNA, 20 nt, Artificial Sequence
  spacer sequence GTCN PAM
acugaccagccugucacugu

SEQ ID NO: 6842 - RNA, 20 nt, Artificial Sequence
  spacer sequence GTCN PAM
guugacuaaccagggcgucu

SEQ ID NO: 6843 - RNA, 20 nt, Artificial Sequence
  spacer sequence GTCN PAM
cugucacuaacucugaagga

SEQ ID NO: 6844 - RNA, 20 nt, Artificial Sequence
  spacer sequence GTCN PAM
cuaacucugaaggaugggga

SEQ ID NO: 6845 - RNA, 20 nt, Artificial Sequence
  spacer sequence GTCN PAM
ucuggggugggcagaggcgg

SEQ ID NO: 6846 - RNA, 20 nt, Artificial Sequence
  spacer sequence GTCN PAM
ggcccugccgccucugccca

SEQ ID NO: 6847 - RNA, 20 nt, Artificial Sequence
  spacer sequence GTCN PAM
uucagccacugccgaggccu

SEQ ID NO: 6848 - RNA, 20 nt, Artificial Sequence
  spacer sequence GTCN PAM
agcuuuggaucuacauagcc

SEQ ID NO: 6849 - RNA, 20 nt, Artificial Sequence
  spacer sequence GTCN PAM
aguguccagcuuuggaucua

SEQ ID NO: 6850 - RNA, 20 nt, Artificial Sequence
  spacer sequence GTCN PAM
ucucagggccccccaaggug

SEQ ID NO: 6851 - RNA, 20 nt, Artificial Sequence
  spacer sequence GTCN PAM
ucucuugcuccaccuugggg

SEQ ID NO: 6852 - RNA, 20 nt, Artificial Sequence
  spacer sequence GTCN PAM
gcacgcugaggcugucaucu

SEQ ID NO: 6853 - RNA, 20 nt, Artificial Sequence
  spacer sequence GTCN PAM
ggggcuggccgccagcaguc

SEQ ID NO: 6854 - RNA, 20 nt, Artificial Sequence
  spacer sequence GTCN PAM
gaccccuccccuggccugac

SEQ ID NO: 6855 - RNA, 20 nt, Artificial Sequence
  spacer sequence GTCN PAM
gacgaggggauggggagggg

SEQ ID NO: 6856 - RNA, 20 nt, Artificial Sequence
  spacer sequence GTCN PAM
ggccaggggaggggucagac

SEQ ID NO: 6857 - RNA, 20 nt, Artificial Sequence
  spacer sequence GTCN PAM
gcuucuuggucaggccaggg

SEQ ID NO: 6858 - RNA, 20 nt, Artificial Sequence
  spacer sequence GTCN PAM
cuugcugcccacugcucugg

SEQ ID NO: 6859 - RNA, 20 nt, Artificial Sequence
  spacer sequence GTCN PAM
cggcgggagcaggggccggg

SEQ ID NO: 6860 - RNA, 20 nt, Artificial Sequence
  spacer sequence GTCN PAM
caggguggaccugugacccc

SEQ ID NO: 6861 - RNA, 20 nt, Artificial Sequence
  spacer sequence GTCN PAM
acccugggacccggaugccc

SEQ ID NO: 6862 - RNA, 20 nt, Artificial Sequence
  spacer sequence GTCN PAM
cagguccacccugggacccg

SEQ ID NO: 6863 - RNA, 20 nt, Artificial Sequence
  spacer sequence GTCN PAM
gcuugaggccagaggacaug

SEQ ID NO: 6864 - RNA, 20 nt, Artificial Sequence
  spacer sequence GTCN PAM
ucuggccucaagcagacccc

SEQ ID NO: 6865 - RNA, 20 nt, Artificial Sequence
  spacer sequence GTCN PAM
ugcgcuugggcccaggcugu

SEQ ID NO: 6866 - RNA, 20 nt, Artificial Sequence
  spacer sequence GTCN PAM
gguggagcaugcacaggcgu

SEQ ID NO: 6867 - RNA, 20 nt, Artificial Sequence
  spacer sequence GTCN PAM
ccuacaugugcgugccugca

SEQ ID NO: 6868 - RNA, 20 nt, Artificial Sequence
  spacer sequence GTCN PAM
cuuacacgugcacacuguca

SEQ ID NO: 6869 - RNA, 20 nt, Artificial Sequence
  spacer sequence GTCN PAM
ccuacccgugcacacuguca

SEQ ID NO: 6870 - RNA, 20 nt, Artificial Sequence
  spacer sequence GTCN PAM
ccuacacaugcgugcccgca

SEQ ID NO: 6871 - RNA, 20 nt, Artificial Sequence
  spacer sequence GTCN PAM
ccuacaugugcacacuguca

SEQ ID NO: 6872 - RNA, 20 nt, Artificial Sequence
  spacer sequence GTCN PAM
ccuacccgugcacacuguca

SEQ ID NO: 6873 - RNA, 20 nt, Artificial Sequence
  spacer sequence GTCN PAM
caugccugugcuguauaccc

SEQ ID NO: 6874 - RNA, 20 nt, Artificial Sequence
  spacer sequence GTCN PAM
ccuacacaugcgugccugca

SEQ ID NO: 6875 - RNA, 20 nt, Artificial Sequence
  spacer sequence GTCN PAM
ccuacacgugcacacuguca

SEQ ID NO: 6876 - RNA, 20 nt, Artificial Sequence
  spacer sequence GTCN PAM
ccuaccugugcacacuguca

SEQ ID NO: 6877 - RNA, 20 nt, Artificial Sequence
  spacer sequence GTCN PAM
ccuacccaugcacacuguaa

SEQ ID NO: 6878 - RNA, 20 nt, Artificial Sequence
  spacer sequence GTCN PAM
ccuacccgugcacacagcug

SEQ ID NO: 6879 - RNA, 20 nt, Artificial Sequence
  spacer sequence GTCN PAM
ccuacccgugcacacagcug

SEQ ID NO: 6880 - RNA, 20 nt, Artificial Sequence
  spacer sequence GTCN PAM
ccuacccgugcacaccguca

SEQ ID NO: 6881 - RNA, 20 nt, Artificial Sequence
  spacer sequence GTCN PAM
ccuacccgugcacaccguca

SEQ ID NO: 6882 - RNA, 20 nt, Artificial Sequence
  spacer sequence GTCN PAM
ccucccugugcacacagcuu

SEQ ID NO: 6883 - RNA, 20 nt, Artificial Sequence
  spacer sequence GTCN PAM
ccucccugugcacacaacug

SEQ ID NO: 6884 - RNA, 20 nt, Artificial Sequence
  spacer sequence GTCN PAM
ccuacccgugcacacagcug

SEQ ID NO: 6885 - RNA, 20 nt, Artificial Sequence
  spacer sequence GTCN PAM
ccuccccgugcacauaacug

SEQ ID NO: 6886 - RNA, 20 nt, Artificial Sequence
  spacer sequence GTCN PAM
ccuccccaugcacacagcug

SEQ ID NO: 6887 - RNA, 20 nt, Artificial Sequence
  spacer sequence GTCN PAM
ccuaccucugcacaccguca

SEQ ID NO: 6888 - RNA, 20 nt, Artificial Sequence
  spacer sequence GTCN PAM
ccuccccgugcacacagcug

SEQ ID NO: 6889 - RNA, 20 nt, Artificial Sequence
  spacer sequence GTCN PAM
ccuacccaugcacacagcuu

SEQ ID NO: 6890 - RNA, 20 nt, Artificial Sequence
  spacer sequence GTCN PAM
ccuacccgugcacacuguca

SEQ ID NO: 6891 - RNA, 20 nt, Artificial Sequence
  spacer sequence GTCN PAM
ugcacacaacugucaccuac

SEQ ID NO: 6892 - RNA, 20 nt, Artificial Sequence
  spacer sequence GTCN PAM
accuguguugcacaugugug

SEQ ID NO: 6893 - RNA, 20 nt, Artificial Sequence
  spacer sequence GTCN PAM
ggagggagguagaaggagcu

SEQ ID NO: 6894 - RNA, 20 nt, Artificial Sequence
  spacer sequence GTCN PAM
cagggcuccacugugagaac

SEQ ID NO: 6895 - RNA, 20 nt, Artificial Sequence
  spacer sequence GTCN PAM
cggcagggccucccagcagg

SEQ ID NO: 6896 - RNA, 20 nt, Artificial Sequence
  spacer sequence GTCN PAM
ccccagggccagcaagauaa

SEQ ID NO: 6897 - RNA, 20 nt, Artificial Sequence
  spacer sequence GTCN PAM
cuucuccggcaggcgucaag

SEQ ID NO: 6898 - RNA, 20 nt, Artificial Sequence
  spacer sequence GTCN PAM
agcagggguugccacagccc

SEQ ID NO: 6899 - RNA, 20 nt, Artificial Sequence
  spacer sequence GTCN PAM
gauuucugugugggcugugg

SEQ ID NO: 6900 - RNA, 20 nt, Artificial Sequence
  spacer sequence GTCN PAM
ggccacaggcagggcugggc

SEQ ID NO: 6901 - RNA, 20 nt, Artificial Sequence
  spacer sequence GTCN PAM
ccacucacccccacaccguu

SEQ ID NO: 6902 - RNA, 20 nt, Artificial Sequence
  spacer sequence GTCN PAM
agcugccugggccaggagug

SEQ ID NO: 6903 - RNA, 20 nt, Artificial Sequence
  spacer sequence GTCN PAM
ugggagggugaggcagggca

SEQ ID NO: 6904 - RNA, 20 nt, Artificial Sequence
  spacer sequence GTCN PAM
ggcugccagggcacugugag

SEQ ID NO: 6905 - RNA, 20 nt, Artificial Sequence
  spacer sequence GTCN PAM
ugcugcugcugggcagggcc

SEQ ID NO: 6906 - RNA, 20 nt, Artificial Sequence
  spacer sequence GTCN PAM
caagccaaggaaggagaagg

SEQ ID NO: 6907 - RNA, 20 nt, Artificial Sequence
  spacer sequence GTCN PAM
gucccaagccaaggaaggag

SEQ ID NO: 6908 - RNA, 20 nt, Artificial Sequence
  spacer sequence GTCN PAM
acgggauggcuuugccauga

SEQ ID NO: 6909 - RNA, 20 nt, Artificial Sequence
  spacer sequence GTCN PAM
cgucucacccacucuggggc

SEQ ID NO: 6910 - RNA, 20 nt, Artificial Sequence
  spacer sequence GTCN PAM
cacccacucuggggcccacg

SEQ ID NO: 6911 - RNA, 20 nt, Artificial Sequence
  spacer sequence GTCN PAM
gugcggcggcgugcacuggu

SEQ ID NO: 6912 - RNA, 20 nt, Artificial Sequence
  spacer sequence GTCN PAM
uccuggcugagacgucccag

SEQ ID NO: 6913 - RNA, 20 nt, Artificial Sequence
  spacer sequence GTCN PAM
cagccaggaugaccagugca

SEQ ID NO: 6914 - RNA, 20 nt, Artificial Sequence
  spacer sequence GTCN PAM
cagggcaggaaggugcuggg

SEQ ID NO: 6915 - RNA, 20 nt, Artificial Sequence
  spacer sequence GTCN PAM
aggacuagcuggagaggcgu

SEQ ID NO: 6916 - RNA, 20 nt, Artificial Sequence
  spacer sequence GTCN PAM
uggacccacugcccuuggcc

SEQ ID NO: 6917 - RNA, 20 nt, Artificial Sequence
  spacer sequence GTCN PAM
cgccucuccagcuaguccug

SEQ ID NO: 6918 - RNA, 20 nt, Artificial Sequence
  spacer sequence GTCN PAM
cgccucugucacgccucucc

SEQ ID NO: 6919 - RNA, 20 nt, Artificial Sequence
  spacer sequence GTCN PAM
caccugugucucgccucugu

SEQ ID NO: 6920 - RNA, 20 nt, Artificial Sequence
  spacer sequence GTCN PAM
agguucacccagggcagcgg

SEQ ID NO: 6921 - RNA, 20 nt, Artificial Sequence
  spacer sequence GTCN PAM
gggccuaggggacccauggg

SEQ ID NO: 6922 - RNA, 20 nt, Artificial Sequence
  spacer sequence GTCN PAM
ccuaggccccgaccugcaau

SEQ ID NO: 6923 - RNA, 20 nt, Artificial Sequence
  spacer sequence GTCN PAM
ccaaugaacagauuuccaac

SEQ ID NO: 6924 - RNA, 20 nt, Artificial Sequence
  spacer sequence GTCN PAM
cccaggcagccucgugcagc

SEQ ID NO: 6925 - RNA, 20 nt, Artificial Sequence
  spacer sequence GTCN PAM
gcgaaagagcccaacagcug

SEQ ID NO: 6926 - RNA, 20 nt, Artificial Sequence
  spacer sequence GTCN PAM
cuggccuugcagcuuccauu

SEQ ID NO: 6927 - RNA, 20 nt, Artificial Sequence
  spacer sequence GTCN PAM
gguacugcugugggucacug

SEQ ID NO: 6928 - RNA, 20 nt, Artificial Sequence
  spacer sequence GTCN PAM
cugccuccuccuggagccag

SEQ ID NO: 6929 - RNA, 20 nt, Artificial Sequence
  spacer sequence GTCN PAM
ggaggcccagaggugcccaa

SEQ ID NO: 6930 - RNA, 20 nt, Artificial Sequence
  spacer sequence GTCN PAM
cccuccugggccacagucag

SEQ ID NO: 6931 - RNA, 20 nt, Artificial Sequence
  spacer sequence GTCN PAM
gggaccggcccugcgggugg

SEQ ID NO: 6932 - RNA, 20 nt, Artificial Sequence
  spacer sequence GTCN PAM
cggaccuguggcugggccug

SEQ ID NO: 6933 - RNA, 20 nt, Artificial Sequence
  spacer sequence GTCN PAM
acaacucccugccaggagca

SEQ ID NO: 6934 - RNA, 20 nt, Artificial Sequence
  spacer sequence GTCN PAM
ggaucaccugguccacaacu

SEQ ID NO: 6935 - RNA, 20 nt, Artificial Sequence
  spacer sequence GTCN PAM
gccgcuaccacugagcgccc

SEQ ID NO: 6936 - RNA, 20 nt, Artificial Sequence
  spacer sequence GTCN PAM
ccgcucaccuccaugccugg

SEQ ID NO: 6937 - RNA, 20 nt, Artificial Sequence
  spacer sequence GTCN PAM
caugccgccugccaggccag

SEQ ID NO: 6938 - RNA, 20 nt, Artificial Sequence
  spacer sequence GTCN PAM
cacucccacggugacgcccg

SEQ ID NO: 6939 - RNA, 20 nt, Artificial Sequence
  spacer sequence GTCN PAM
ccgugggagugggacugggc

SEQ ID NO: 6940 - RNA, 20 nt, Artificial Sequence
  spacer sequence GTCN PAM
ugugggggaggcccgggcug

SEQ ID NO: 6941 - RNA, 20 nt, Artificial Sequence
  spacer sequence GTCN PAM
gccccuggggaccucaggca

SEQ ID NO: 6942 - RNA, 20 nt, Artificial Sequence
  spacer sequence GTCN PAM
ccaggggcugacgcggugca

SEQ ID NO: 6943 - RNA, 20 nt, Artificial Sequence
  spacer sequence GTCN PAM
gugccccaggggucaugucg

SEQ ID NO: 6944 - RNA, 20 nt, Artificial Sequence
  spacer sequence GTCN PAM
ugucgugcgccugcaccuga

SEQ ID NO: 6945 - RNA, 20 nt, Artificial Sequence
  spacer sequence GTCN PAM
ugcgccugcaccugagucug

SEQ ID NO: 6946 - RNA, 20 nt, Artificial Sequence
  spacer sequence GTCN PAM
gccguguuugcuggugccug

SEQ ID NO: 6947 - RNA, 20 nt, Artificial Sequence
  spacer sequence GTCN PAM
gugugcccgggagcacggac

SEQ ID NO: 6948 - RNA, 20 nt, Artificial Sequence
  spacer sequence GTCN PAM
gugcucccgggcacacagac

SEQ ID NO: 6949 - RNA, 20 nt, Artificial Sequence
  spacer sequence GTCN PAM
ccgcagaggcacacauggug

SEQ ID NO: 6950 - RNA, 20 nt, Artificial Sequence
  spacer sequence GTCN PAM
gccugauguccccgcagagg

SEQ ID NO: 6951 - RNA, 20 nt, Artificial Sequence
  spacer sequence GTCN PAM
ccauuccuggcccccgcauu

SEQ ID NO: 6952 - RNA, 20 nt, Artificial Sequence
  spacer sequence GTCN PAM
ggcuccaccaggcaggccag

SEQ ID NO: 6953 - RNA, 20 nt, Artificial Sequence
  spacer sequence GTCN PAM
ucuccugcccuggccugccu

SEQ ID NO: 6954 - RNA, 20 nt, Artificial Sequence
  spacer sequence GTCN PAM
cuccugugucuucuccugcc

SEQ ID NO: 6955 - RNA, 20 nt, Artificial Sequence
  spacer sequence GTCN PAM
cagugaggggagaagccugg

SEQ ID NO: 6956 - RNA, 20 nt, Artificial Sequence
  spacer sequence GTCN PAM
cccagcacccugucccagug

SEQ ID NO: 6957 - RNA, 20 nt, Artificial Sequence
  spacer sequence GTCN PAM
cucccaagaugagagcuggg

SEQ ID NO: 6958 - RNA, 20 nt, Artificial Sequence
  spacer sequence GTCN PAM
ugccaagcaggggcugaguc

SEQ ID NO: 6959 - RNA, 20 nt, Artificial Sequence
  spacer sequence GTCN PAM
cagcuuggccauggagcugg

SEQ ID NO: 6960 - RNA, 20 nt, Artificial Sequence
  spacer sequence GTCN PAM
agucucagcuuggccaugga

SEQ ID NO: 6961 - RNA, 20 nt, Artificial Sequence
  spacer sequence GTCN PAM
ucuggaggcugacggcaggg

SEQ ID NO: 6962 - RNA, 20 nt, Artificial Sequence
  spacer sequence GTCN PAM
gccuccagaagacccagauc

SEQ ID NO: 6963 - RNA, 20 nt, Artificial Sequence
  spacer sequence GTCN PAM
ccuaccaguuccccugccgu

SEQ ID NO: 6964 - RNA, 20 nt, Artificial Sequence
  spacer sequence GTCN PAM
gccuagagcucucaaagggg

SEQ ID NO: 6965 - RNA, 20 nt, Artificial Sequence
  spacer sequence GTCN PAM
cucauggugcccgugccucg

SEQ ID NO: 6966 - RNA, 20 nt, Artificial Sequence
  spacer sequence GTCN PAM
ggcucaggucaggccuugaa

SEQ ID NO: 6967 - RNA, 20 nt, Artificial Sequence
  spacer sequence GTCN PAM
ggccuugaaggccccuuggc

SEQ ID NO: 6968 - RNA, 20 nt, Artificial Sequence
  spacer sequence GTCN PAM
gcugggccagcccagcugga

SEQ ID NO: 6969 - RNA, 20 nt, Artificial Sequence
  spacer sequence GTCN PAM
agcugggcuggcccagcuga

SEQ ID NO: 6970 - RNA, 20 nt, Artificial Sequence
  spacer sequence GTCN PAM
gcagcccccagucuagaggg

SEQ ID NO: 6971 - RNA, 20 nt, Artificial Sequence
  spacer sequence GTCN PAM
agagggguggggccccgugg

SEQ ID NO: 6972 - RNA, 20 nt, Artificial Sequence
  spacer sequence GTCN PAM
ccccacccugccccacgggg

SEQ ID NO: 6973 - RNA, 20 nt, Artificial Sequence
  spacer sequence GTCN PAM
cagccagagaggggaggcgu

SEQ ID NO: 6974 - RNA, 20 nt, Artificial Sequence
  spacer sequence GTCN PAM
gggccaggcacgccuccccu

SEQ ID NO: 6975 - RNA, 20 nt, Artificial Sequence
  spacer sequence GTCN PAM
gaaucagcccaagucagggc

SEQ ID NO: 6976 - RNA, 20 nt, Artificial Sequence
  spacer sequence GTCN PAM
uugucugaaucagcccaagu

SEQ ID NO: 6977 - RNA, 20 nt, Artificial Sequence
  spacer sequence GTCN PAM
acccucgggcaccuggcccc

SEQ ID NO: 6978 - RNA, 20 nt, Artificial Sequence
  spacer sequence GTCN PAM
cggggcuggccagggaggag

SEQ ID NO: 6979 - RNA, 20 nt, Artificial Sequence
  spacer sequence GTCN PAM
gccaccccaacagagugcgg

SEQ ID NO: 6980 - RNA, 20 nt, Artificial Sequence
  spacer sequence GTCN PAM
cuucggaucugcaccagccc

SEQ ID NO: 6981 - RNA, 20 nt, Artificial Sequence
  spacer sequence GTCN PAM
ugggagcagcagcagugagu

SEQ ID NO: 6982 - RNA, 20 nt, Artificial Sequence
  spacer sequence GTCN PAM
agggccuguggccucaccuc

SEQ ID NO: 6983 - RNA, 20 nt, Artificial Sequence
  spacer sequence GTCN PAM
cugaggugaggccacaggcc

SEQ ID NO: 6984 - RNA, 20 nt, Artificial Sequence
  spacer sequence GTCN PAM
cggcugagggcacgguggca

SEQ ID NO: 6985 - RNA, 20 nt, Artificial Sequence
  spacer sequence GTCN PAM
ggccccgguggggacuccgg

SEQ ID NO: 6986 - RNA, 20 nt, Artificial Sequence
  spacer sequence GTCN PAM
ccaccggggcccgacuggag

SEQ ID NO: 6987 - RNA, 20 nt, Artificial Sequence
  spacer sequence GTCN PAM
ggaacccgcgucucggcuga

SEQ ID NO: 6988 - RNA, 20 nt, Artificial Sequence
  spacer sequence GTCN PAM
cggcugaggacacgguggca

SEQ ID NO: 6989 - RNA, 20 nt, Artificial Sequence
  spacer sequence GTCN PAM
ucagccgagacgcggguucc

SEQ ID NO: 6990 - RNA, 20 nt, Artificial Sequence
  spacer sequence GTCN PAM
gggccccgguggggacuccg

SEQ ID NO: 6991 - RNA, 20 nt, Artificial Sequence
  spacer sequence GTCN PAM
ccaccggggcccagaccgga

SEQ ID NO: 6992 - RNA, 20 nt, Artificial Sequence
  spacer sequence GTCN PAM
ggaacccgcaucucggcuga

SEQ ID NO: 6993 - RNA, 20 nt, Artificial Sequence
  spacer sequence GTCN PAM
aggcccugcugcugucaccg

SEQ ID NO: 6994 - RNA, 20 nt, Artificial Sequence
  spacer sequence GTCN PAM
ccgcuggggucguaaccagg

SEQ ID NO: 6995 - RNA, 20 nt, Artificial Sequence
  spacer sequence GTCN PAM
uaaccaggguuucagggcug

SEQ ID NO: 6996 - RNA, 20 nt, Artificial Sequence
  spacer sequence GTCN PAM
agcuccggggccagcccuga

SEQ ID NO: 6997 - RNA, 20 nt, Artificial Sequence
  spacer sequence GTCN PAM
gccuggccccugccugccac

SEQ ID NO: 6998 - RNA, 20 nt, Artificial Sequence
  spacer sequence GTCN PAM
cagguccgccuggccccugc

SEQ ID NO: 6999 - RNA, 20 nt, Artificial Sequence
  spacer sequence GTCN PAM
cagagcucuguggaaggggc

SEQ ID NO: 7000 - RNA, 20 nt, Artificial Sequence
  spacer sequence GTCN PAM
agccagggaucuucguagag

SEQ ID NO: 7001 - RNA, 20 nt, Artificial Sequence
  spacer sequence GTCN PAM
ggggccggcccagggucugu

SEQ ID NO: 7002 - RNA, 20 nt, Artificial Sequence
  spacer sequence GTCN PAM
gugcccaggccaaagcugca

SEQ ID NO: 7003 - RNA, 20 nt, Artificial Sequence
  spacer sequence GTCN PAM
gcaggagaggccgauaggag

SEQ ID NO: 7004 - RNA, 20 nt, Artificial Sequence
  spacer sequence GTCN PAM
aggcuccuaucggccucucc

SEQ ID NO: 7005 - RNA, 20 nt, Artificial Sequence
  spacer sequence GTCN PAM
guccuggguccugcuggggc

SEQ ID NO: 7006 - RNA, 20 nt, Artificial Sequence
  spacer sequence GTCN PAM
uggguccugcuggggccuca

SEQ ID NO: 7007 - RNA, 20 nt, Artificial Sequence
  spacer sequence GTCN PAM
ugcuggggccucagggcagg

SEQ ID NO: 7008 - RNA, 20 nt, Artificial Sequence
  spacer sequence GTCN PAM
ggguggccagaccugucccu

SEQ ID NO: 7009 - RNA, 20 nt, Artificial Sequence
  spacer sequence GTCN PAM
ggccacccagaccuuuccua

SEQ ID NO: 7010 - RNA, 20 nt, Artificial Sequence
  spacer sequence GTCN PAM
cuuggaagccccacuucgga

SEQ ID NO: 7011 - RNA, 20 nt, Artificial Sequence
  spacer sequence GTCN PAM
gaaguggggcuuccaaggga

SEQ ID NO: 7012 - RNA, 20 nt, Artificial Sequence
  spacer sequence GTCN PAM
uccuuggagccagucacuga

SEQ ID NO: 7013 - RNA, 20 nt, Artificial Sequence
  spacer sequence GTCN PAM
cugaacauuuauuuggaguc

SEQ ID NO: 7014 - RNA, 20 nt, Artificial Sequence
  spacer sequence GTCN PAM
cuggagcccugcuguagcca

SEQ ID NO: 7015 - RNA, 20 nt, Artificial Sequence
  spacer sequence GTCN PAM
cccaugccacaaccugggcu

SEQ ID NO: 7016 - RNA, 20 nt, Artificial Sequence
  spacer sequence GTCN PAM
caccuccucugucccccaug

SEQ ID NO: 7017 - RNA, 20 nt, Artificial Sequence
  spacer sequence GTCN PAM
gccaggucccaccuccucug

SEQ ID NO: 7018 - RNA, 20 nt, Artificial Sequence
  spacer sequence GTCN PAM
cggaggcagagugacaaugc

SEQ ID NO: 7019 - RNA, 20 nt, Artificial Sequence
  spacer sequence GTCN PAM
cucugccuccgggaccccag

SEQ ID NO: 7020 - RNA, 20 nt, Artificial Sequence
  spacer sequence GTCN PAM
ccgccugccuggcucccaca

SEQ ID NO: 7021 - RNA, 20 nt, Artificial Sequence
  spacer sequence GTCN PAM
cuugggccccugcuggcagc

SEQ ID NO: 7022 - RNA, 20 nt, Artificial Sequence
  spacer sequence GTCN PAM
ggggccauggccaaggcccu

SEQ ID NO: 7023 - RNA, 20 nt, Artificial Sequence
  spacer sequence GTCN PAM
gcaggcccggcugcgugugc

SEQ ID NO: 7024 - RNA, 20 nt, Artificial Sequence
  spacer sequence GTCN PAM
cugcugggcucgagucugca

SEQ ID NO: 7025 - RNA, 20 nt, Artificial Sequence
  spacer sequence GTCN PAM
cgggaggaggcagcugaggg

SEQ ID NO: 7026 - RNA, 20 nt, Artificial Sequence
  spacer sequence GTCN PAM
cccucagcugccuccucccg

SEQ ID NO: 7027 - RNA, 20 nt, Artificial Sequence
  spacer sequence GTCN PAM
ucugccccucacugcucugu

SEQ ID NO: 7028 - RNA, 20 nt, Artificial Sequence
  spacer sequence GTCN PAM
cugcguccucugccccucac

SEQ ID NO: 7029 - RNA, 20 nt, Artificial Sequence
  spacer sequence GTCN PAM
cccaggccaggugagcccag

SEQ ID NO: 7030 - RNA, 20 nt, Artificial Sequence
  spacer sequence GTCN PAM
ccucaggaagaggcagggcc

SEQ ID NO: 7031 - RNA, 20 nt, Artificial Sequence
  spacer sequence GTCN PAM
guaaaacugacgccccuggg

SEQ ID NO: 7032 - RNA, 20 nt, Artificial Sequence
  spacer sequence GTCN PAM
guuuuacggacucaagguca

SEQ ID NO: 7033 - RNA, 20 nt, Artificial Sequence
  spacer sequence GTCN PAM
ccccaggggcgucaguuuua

SEQ ID NO: 7034 - RNA, 20 nt, Artificial Sequence
  spacer sequence GTCN PAM
cacggccgcggugcggucgu

SEQ ID NO: 7035 - RNA, 20 nt, Artificial Sequence
  spacer sequence GTCN PAM
ucaccugugaucacggcugc

SEQ ID NO: 7036 - RNA, 20 nt, Artificial Sequence
  spacer sequence GTCN PAM
ccugugaucacggcugccug

SEQ ID NO: 7037 - RNA, 20 nt, Artificial Sequence
  spacer sequence GTCN PAM
gcucacuggcucuggggccu

SEQ ID NO: 7038 - RNA, 20 nt, Artificial Sequence
  spacer sequence GTCN PAM
cgcugugcagcugacacccc

SEQ ID NO: 7039 - RNA, 20 nt, Artificial Sequence
  spacer sequence GTCN PAM
gcugcacagcgggacucuag

SEQ ID NO: 7040 - RNA, 20 nt, Artificial Sequence
  spacer sequence GTCN PAM
gguuccagcguccacuccga

SEQ ID NO: 7041 - RNA, 20 nt, Artificial Sequence
  spacer sequence GTCN PAM
acuccgacagccacugcagg

SEQ ID NO: 7042 - RNA, 20 nt, Artificial Sequence
  spacer sequence GTCN PAM
gaguggacgcuggaaccgga

SEQ ID NO: 7043 - RNA, 20 nt, Artificial Sequence
  spacer sequence GTCN PAM
cagggggcuugguugggggu

SEQ ID NO: 7044 - RNA, 20 nt, Artificial Sequence
  spacer sequence GTCN PAM
gggucggggguggcccguaa

SEQ ID NO: 7045 - RNA, 20 nt, Artificial Sequence
  spacer sequence GTCN PAM
gggguggcccguaaggccug

SEQ ID NO: 7046 - RNA, 20 nt, Artificial Sequence
  spacer sequence GTCN PAM
agcgacugcagcagugugug

SEQ ID NO: 7047 - RNA, 20 nt, Artificial Sequence
  spacer sequence GTCN PAM
cuggaccagcucgugcaggc

SEQ ID NO: 7048 - RNA, 20 nt, Artificial Sequence
  spacer sequence GTCN PAM
ggcgugcagaccuccacaca

SEQ ID NO: 7049 - RNA, 20 nt, Artificial Sequence
  spacer sequence GTCN PAM
gcacgccugaccccuuccug

SEQ ID NO: 7050 - RNA, 20 nt, Artificial Sequence
  spacer sequence GTCN PAM
guggggaugcgcagguagaa

SEQ ID NO: 7051 - RNA, 20 nt, Artificial Sequence
  spacer sequence GTCN PAM
ucccggcccgagacuucucc

SEQ ID NO: 7052 - RNA, 20 nt, Artificial Sequence
  spacer sequence GTCN PAM
cgggccgggaggaccggccg

SEQ ID NO: 7053 - RNA, 20 nt, Artificial Sequence
  spacer sequence GTCN PAM
ggucgcccaccacggggugg

SEQ ID NO: 7054 - RNA, 20 nt, Artificial Sequence
  spacer sequence GTCN PAM
cccaccacgggguggcccag

SEQ ID NO: 7055 - RNA, 20 nt, Artificial Sequence
  spacer sequence GTCN PAM
ggccugcgggaugagggcgg

SEQ ID NO: 7056 - RNA, 20 nt, Artificial Sequence
  spacer sequence GTCN PAM
gggagauagguguggaucgg

SEQ ID NO: 7057 - RNA, 20 nt, Artificial Sequence
  spacer sequence GTCN PAM
uggucagggagauaggugug

SEQ ID NO: 7058 - RNA, 20 nt, Artificial Sequence
  spacer sequence GTCN PAM
ugaccccgcugcagucuuga

SEQ ID NO: 7059 - RNA, 20 nt, Artificial Sequence
  spacer sequence GTCN PAM
ugacgggagguggguccugg

SEQ ID NO: 7060 - RNA, 20 nt, Artificial Sequence
  spacer sequence GTCN PAM
ugaagcagccucuuggggug

SEQ ID NO: 7061 - RNA, 20 nt, Artificial Sequence
  spacer sequence GTCN PAM
ccugccaugagugaggauga

SEQ ID NO: 7062 - RNA, 20 nt, Artificial Sequence
  spacer sequence GTCN PAM
uccucacucauggcagggga

SEQ ID NO: 7063 - RNA, 20 nt, Artificial Sequence
  spacer sequence GTCN PAM
uaaauacugucauccucacu

SEQ ID NO: 7064 - RNA, 20 nt, Artificial Sequence
  spacer sequence GTCN PAM
ccacuggugaggacagggcc

SEQ ID NO: 7065 - RNA, 20 nt, Artificial Sequence
  spacer sequence GTCN PAM
ucaccaguggugaccugaac

SEQ ID NO: 7066 - RNA, 20 nt, Artificial Sequence
  spacer sequence GTCN PAM
uggagaaucuaggccagcca

SEQ ID NO: 7067 - RNA, 20 nt, Artificial Sequence
  spacer sequence GTCN PAM
ggcuggccuagauucuccag

SEQ ID NO: 7068 - RNA, 20 nt, Artificial Sequence
  spacer sequence GTCN PAM
ggagccagcagggacccugu

SEQ ID NO: 7069 - RNA, 20 nt, Artificial Sequence
  spacer sequence GTCN PAM
cugcuggcuccugacugauu

SEQ ID NO: 7070 - RNA, 20 nt, Artificial Sequence
  spacer sequence GTCN PAM
ggugagaagcugagaggcug

SEQ ID NO: 7071 - RNA, 20 nt, Artificial Sequence
  spacer sequence GTCN PAM
ccaccaggacaccgcccacc

SEQ ID NO: 7072 - RNA, 20 nt, Artificial Sequence
  spacer sequence GTCN PAM
ugguggugacagaagggaaa

SEQ ID NO: 7073 - RNA, 20 nt, Artificial Sequence
  spacer sequence GTCN PAM
ggggugggcgguguccuggu

SEQ ID NO: 7074 - RNA, 20 nt, Artificial Sequence
  spacer sequence GTCN PAM
ccaaagugcugcugaagccg

SEQ ID NO: 7075 - RNA, 20 nt, Artificial Sequence
  spacer sequence GTCN PAM
cacuaaccucacaccugccu

SEQ ID NO: 7076 - RNA, 20 nt, Artificial Sequence
  spacer sequence GTCN PAM
gucccacuaaccucacaccu

SEQ ID NO: 7077 - RNA, 20 nt, Artificial Sequence
  spacer sequence GTCN PAM
cugccugcccaggcccaccc

SEQ ID NO: 7078 - RNA, 20 nt, Artificial Sequence
  spacer sequence GTCN PAM
cugccugccacacccugcga

SEQ ID NO: 7079 - RNA, 20 nt, Artificial Sequence
  spacer sequence GTCN PAM
ccacgccccaccccaggacu

SEQ ID NO: 7080 - RNA, 20 nt, Artificial Sequence
  spacer sequence GTCN PAM
ugggguggggcguggggacu

SEQ ID NO: 7081 - RNA, 20 nt, Artificial Sequence
  spacer sequence GTCN PAM
guccugggguggggcguggg

SEQ ID NO: 7082 - RNA, 20 nt, Artificial Sequence
  spacer sequence GTCN PAM
uaccaaugccagguaagccu

SEQ ID NO: 7083 - RNA, 20 nt, Artificial Sequence
  spacer sequence GTCN PAM
cgcgccgcuccuugaagcac

SEQ ID NO: 7084 - RNA, 20 nt, Artificial Sequence
  spacer sequence GTCN PAM
cacuccagguucugccacca

SEQ ID NO: 7085 - RNA, 20 nt, Artificial Sequence
  spacer sequence GTCN PAM
agagucugagccacuuuccu

SEQ ID NO: 7086 - RNA, 20 nt, Artificial Sequence
  spacer sequence GTCN PAM
gagccacuuuccuccacaga

SEQ ID NO: 7087 - RNA, 20 nt, Artificial Sequence
  spacer sequence GTCN PAM
guggaggaaaguggcucaga

SEQ ID NO: 7088 - RNA, 20 nt, Artificial Sequence
  spacer sequence GTCN PAM
gggucggccagcucgggaaa

SEQ ID NO: 7089 - RNA, 20 nt, Artificial Sequence
  spacer sequence GTCN PAM
gccagcucgggaaagcggua

SEQ ID NO: 7090 - RNA, 20 nt, Artificial Sequence
  spacer sequence GTCN PAM
gagucucccgccacgccuug

SEQ ID NO: 7091 - RNA, 20 nt, Artificial Sequence
  spacer sequence GTCN PAM
cccgccacgccuugcuguca

SEQ ID NO: 7092 - RNA, 20 nt, Artificial Sequence
  spacer sequence GTCN PAM
augcgaacgucccagugcuu

SEQ ID NO: 7093 - RNA, 20 nt, Artificial Sequence
  spacer sequence GTCN PAM
cagugcuuguugaccaccag

SEQ ID NO: 7094 - RNA, 20 nt, Artificial Sequence
  spacer sequence GTCN PAM
acaagcacugggacguucgc

SEQ ID NO: 7095 - RNA, 20 nt, Artificial Sequence
  spacer sequence GTCN PAM
cggcuccgguacacgaugga

SEQ ID NO: 7096 - RNA, 20 nt, Artificial Sequence
  spacer sequence GTCN PAM
aucguguaccggagccgcga

SEQ ID NO: 7097 - RNA, 20 nt, Artificial Sequence
  spacer sequence GTCN PAM
gcagcccuacugugcaccug

SEQ ID NO: 7098 - RNA, 20 nt, Artificial Sequence
  spacer sequence GTCN PAM
ccgagaucaguccccagggc

SEQ ID NO: 7099 - RNA, 20 nt, Artificial Sequence
  spacer sequence GTCN PAM
ccagggcgucagcuggggag

SEQ ID NO: 7100 - RNA, 20 nt, Artificial Sequence
  spacer sequence GTCN PAM
gcuggggagucaaggaguca

SEQ ID NO: 7101 - RNA, 20 nt, Artificial Sequence
  spacer sequence GTCN PAM
aggagucagccugcuccggg

SEQ ID NO: 7102 - RNA, 20 nt, Artificial Sequence
  spacer sequence GTCN PAM
gccugcuccgggcugaccug

SEQ ID NO: 7103 - RNA, 20 nt, Artificial Sequence
  spacer sequence GTCN PAM
gcccggagcaggcugacucc

SEQ ID NO: 7104 - RNA, 20 nt, Artificial Sequence
  spacer sequence GTCN PAM
ggcagggcccuucaggucag

SEQ ID NO: 7105 - RNA, 20 nt, Artificial Sequence
  spacer sequence GTCN PAM
guggggaggaucuguggggc

SEQ ID NO: 7106 - RNA, 20 nt, Artificial Sequence
  spacer sequence GTCN PAM
ggcagaggcauucacgugca

SEQ ID NO: 7107 - RNA, 20 nt, Artificial Sequence
  spacer sequence GTCN PAM
gcccgcagcgcggguuaggg

SEQ ID NO: 7108 - RNA, 20 nt, Artificial Sequence
  spacer sequence GTCN PAM
gcgcagacccgcgccccgca

SEQ ID NO: 7109 - RNA, 20 nt, Artificial Sequence
  spacer sequence GTCN PAM
gcgcggacugcggggagcga

SEQ ID NO: 7110 - RNA, 20 nt, Artificial Sequence
  spacer sequence GTCN PAM
gccugcccaccgggccugug

SEQ ID NO: 7111 - RNA, 20 nt, Artificial Sequence
  spacer sequence GTCN PAM
uggcgugggcgugggcgcgg

SEQ ID NO: 7112 - RNA, 20 nt, Artificial Sequence
  spacer sequence GTCN PAM
aggcccccgaugccgugccc

SEQ ID NO: 7113 - RNA, 20 nt, Artificial Sequence
  spacer sequence GTCN PAM
ccagcgcgcgggcgcgcggc

SEQ ID NO: 7114 - RNA, 20 nt, Artificial Sequence
  spacer sequence GTCN PAM
cugggucgccagcgcgcggg

SEQ ID NO: 7115 - RNA, 20 nt, Artificial Sequence
  spacer sequence GTCN PAM
ggagcggagcuuccaggguc

SEQ ID NO: 7116 - RNA, 20 nt, Artificial Sequence
  spacer sequence GTCN PAM
uggggagcucgccauuggcc

SEQ ID NO: 7117 - RNA, 20 nt, Artificial Sequence
  spacer sequence GTCN PAM
uguccuggggagcucgccau

SEQ ID NO: 7118 - RNA, 20 nt, Artificial Sequence
  spacer sequence GTCN PAM
cgcacugcccgccccgagcg

SEQ ID NO: 7119 - RNA, 20 nt, Artificial Sequence
  spacer sequence GTCN PAM
gcgagcccgagcucccgcuc

SEQ ID NO: 7120 - RNA, 20 nt, Artificial Sequence
  spacer sequence GTCN PAM
uccauaccguccgcgagccc

SEQ ID NO: 7121 - RNA, 20 nt, Artificial Sequence
  spacer sequence GTCN PAM
aggaugauuuccacaaccag

SEQ ID NO: 7122 - RNA, 20 nt, Artificial Sequence
  spacer sequence GTCN PAM
cggcuuucgcagcuccuccc

SEQ ID NO: 7123 - RNA, 20 nt, Artificial Sequence
  spacer sequence GTCN PAM
ccacugucccggcuuucgca

SEQ ID NO: 7124 - RNA, 20 nt, Artificial Sequence
  spacer sequence GTCN PAM
ccgcuggcgggaucugcugu

SEQ ID NO: 7125 - RNA, 20 nt, Artificial Sequence
  spacer sequence GTCN PAM
cggggcggccgcugacaauc

SEQ ID NO: 7126 - RNA, 20 nt, Artificial Sequence
  spacer sequence GTCN PAM
gcggccgccccgagacagca

SEQ ID NO: 7127 - RNA, 20 nt, Artificial Sequence
  spacer sequence GTCN PAM
acuccgucgcccuccggggu

SEQ ID NO: 7128 - RNA, 20 nt, Artificial Sequence
  spacer sequence GTCN PAM
acgccccugcugggagagga

SEQ ID NO: 7129 - RNA, 20 nt, Artificial Sequence
  spacer sequence GTCN PAM
cccuccggggucccccuguu

SEQ ID NO: 7130 - RNA, 20 nt, Artificial Sequence
  spacer sequence GTCN PAM
cccuguucaccgcgggccga

SEQ ID NO: 7131 - RNA, 20 nt, Artificial Sequence
  spacer sequence GTCN PAM
gcccgcggugaacaggggga

SEQ ID NO: 7132 - RNA, 20 nt, Artificial Sequence
  spacer sequence GTCN PAM
gcgggggucggcccgcggug

SEQ ID NO: 7133 - RNA, 20 nt, Artificial Sequence
  spacer sequence GTCN PAM
ccucuggcaagggccuccuc

SEQ ID NO: 7134 - RNA, 20 nt, Artificial Sequence
  spacer sequence GTCN PAM
cgccccagccgcaucugugg

SEQ ID NO: 7135 - RNA, 20 nt, Artificial Sequence
  spacer sequence GTCN PAM
accugccucuuccuggcgcc

SEQ ID NO: 7136 - RNA, 20 nt, Artificial Sequence
  spacer sequence GTCN PAM
gcguccaccugccucuuccu

SEQ ID NO: 7137 - RNA, 20 nt, Artificial Sequence
  spacer sequence GTCN PAM
cugccccacgguagguuggc

SEQ ID NO: 7138 - RNA, 20 nt, Artificial Sequence
  spacer sequence GTCN PAM
cccccagcccccaggaucaa

SEQ ID NO: 7139 - RNA, 20 nt, Artificial Sequence
  spacer sequence GTCN PAM
agaggcugaacuucagaucg

SEQ ID NO: 7140 - RNA, 20 nt, Artificial Sequence
  spacer sequence GTCN PAM
ggagggggcggcuccuccau

SEQ ID NO: 7141 - RNA, 20 nt, Artificial Sequence
  spacer sequence GTCN PAM
gcgaggagucgggagggggc

SEQ ID NO: 7142 - RNA, 20 nt, Artificial Sequence
  spacer sequence GTCN PAM
gucggcgaggagucgggagg

SEQ ID NO: 7143 - RNA, 20 nt, Artificial Sequence
  spacer sequence GTCN PAM
ucagggcucggcggcggggu

SEQ ID NO: 7144 - RNA, 20 nt, Artificial Sequence
  spacer sequence GTCN PAM
aagccacacacccguggccc

SEQ ID NO: 7145 - RNA, 20 nt, Artificial Sequence
  spacer sequence GTCN PAM
caucccaucuguccaguggg

SEQ ID NO: 7146 - RNA, 20 nt, Artificial Sequence
  spacer sequence GTCN PAM
agugggacucagauggagcc

SEQ ID NO: 7147 - RNA, 20 nt, Artificial Sequence
  spacer sequence GTCN PAM
cacuggacagaugggauggg

SEQ ID NO: 7148 - RNA, 20 nt, Artificial Sequence
  spacer sequence GTCN PAM
cggacacccauauccaaggg

SEQ ID NO: 7149 - RNA, 20 nt, Artificial Sequence
  spacer sequence GTCN PAM
gagacugcucucagccaugg

SEQ ID NO: 7150 - RNA, 20 nt, Artificial Sequence
  spacer sequence GTCN PAM
cccuuggauauggguguccg

SEQ ID NO: 7151 - RNA, 20 nt, Artificial Sequence
  spacer sequence GTCN PAM
cucuccagagucucagaagc

SEQ ID NO: 7152 - RNA, 20 nt, Artificial Sequence
  spacer sequence GTCN PAM
cagaagcugcugccgacgug

SEQ ID NO: 7153 - RNA, 20 nt, Artificial Sequence
  spacer sequence GTCN PAM
gcagcagcuucugagacucu

SEQ ID NO: 7154 - RNA, 20 nt, Artificial Sequence
  spacer sequence GTCN PAM
cacacgggccucaccagcug

SEQ ID NO: 7155 - RNA, 20 nt, Artificial Sequence
  spacer sequence GTCN PAM
ugaggcggccccccaucuug

SEQ ID NO: 7156 - RNA, 20 nt, Artificial Sequence
  spacer sequence GTCN PAM
uccaagauggggggccgccu

SEQ ID NO: 7157 - RNA, 20 nt, Artificial Sequence
  spacer sequence GTCN PAM
acgugacauccacggagggc

SEQ ID NO: 7158 - RNA, 20 nt, Artificial Sequence
  spacer sequence GTCN PAM
cguggacguaguccuccaag

SEQ ID NO: 7159 - RNA, 20 nt, Artificial Sequence
  spacer sequence GTCN PAM
gggcuuaucuggugcugcgu

SEQ ID NO: 7160 - RNA, 20 nt, Artificial Sequence
  spacer sequence GTCN PAM
gcacgcagcaccagauaagc

SEQ ID NO: 7161 - RNA, 20 nt, Artificial Sequence
  spacer sequence GTCN PAM
uuggagccccucaccccugc

SEQ ID NO: 7162 - RNA, 20 nt, Artificial Sequence
  spacer sequence GTCN PAM
ugugcagagccccaggggug

SEQ ID NO: 7163 - RNA, 20 nt, Artificial Sequence
  spacer sequence GTCN PAM
uggggcguagacuuagagga

SEQ ID NO: 7164 - RNA, 20 nt, Artificial Sequence
  spacer sequence GTCN PAM
acgccccaugacgcagccuc

SEQ ID NO: 7165 - RNA, 20 nt, Artificial Sequence
  spacer sequence GTCN PAM
ucuaagucuacgccccauga

SEQ ID NO: 7166 - RNA, 20 nt, Artificial Sequence
  spacer sequence GTCN PAM
agccuguuuguauggccucg

SEQ ID NO: 7167 - RNA, 20 nt, Artificial Sequence
  spacer sequence GTCN PAM
gcugcaaagggaaauugggg

SEQ ID NO: 7168 - RNA, 20 nt, Artificial Sequence
  spacer sequence GTCN PAM
agucucccaccccucacugg

SEQ ID NO: 7169 - RNA, 20 nt, Artificial Sequence
  spacer sequence GTCN PAM
cccaccccucacuggccagc

SEQ ID NO: 7170 - RNA, 20 nt, Artificial Sequence
  spacer sequence GTCN PAM
cacccgggucccugagcacu

SEQ ID NO: 7171 - RNA, 20 nt, Artificial Sequence
  spacer sequence GTCN PAM
cugagcacugaugggggcug

SEQ ID NO: 7172 - RNA, 20 nt, Artificial Sequence
  spacer sequence GTCN PAM
gcccccaucagugcucaggg

SEQ ID NO: 7173 - RNA, 20 nt, Artificial Sequence
  spacer sequence GTCN PAM
caggauucacgucagccccc

SEQ ID NO: 7174 - RNA, 20 nt, Artificial Sequence
  spacer sequence GTCN PAM
ucccuuccccacagggcucu

SEQ ID NO: 7175 - RNA, 20 nt, Artificial Sequence
  spacer sequence GTCN PAM
cauggcgaggcgguggccag

SEQ ID NO: 7176 - RNA, 20 nt, Artificial Sequence
  spacer sequence GTCN PAM
agcuggccaccgccucgcca

SEQ ID NO: 7177 - RNA, 20 nt, Artificial Sequence
  spacer sequence GTCN PAM
uuagccucccugaagaagca

SEQ ID NO: 7178 - RNA, 20 nt, Artificial Sequence
  spacer sequence GTCN PAM
acggcgagguaggggcugcg

SEQ ID NO: 7179 - RNA, 20 nt, Artificial Sequence
  spacer sequence GTCN PAM
accugcuucuucagggaggc

SEQ ID NO: 7180 - RNA, 20 nt, Artificial Sequence
  spacer sequence GTCN PAM
gaaagcuucugggccuccug

SEQ ID NO: 7181 - RNA, 20 nt, Artificial Sequence
  spacer sequence GTCN PAM
ccugugcagggugucugaaa

SEQ ID NO: 7182 - RNA, 20 nt, Artificial Sequence
  spacer sequence GTCN PAM
ccagggcggaagggccaacc

SEQ ID NO: 7183 - RNA, 20 nt, Artificial Sequence
  spacer sequence GTCN PAM
cugcgaguuguuuguggcuc

SEQ ID NO: 7184 - RNA, 20 nt, Artificial Sequence
  spacer sequence GTCN PAM
ugagccacaaacaacucgca

SEQ ID NO: 7185 - RNA, 20 nt, Artificial Sequence
  spacer sequence GTCN PAM
ucuccagucucaggucgggg

SEQ ID NO: 7186 - RNA, 20 nt, Artificial Sequence
  spacer sequence GTCN PAM
caggucgggggaggaggagg

SEQ ID NO: 7187 - RNA, 20 nt, Artificial Sequence
  spacer sequence GTCN PAM
ggggaggaggaggcagccca

SEQ ID NO: 7188 - RNA, 20 nt, Artificial Sequence
  spacer sequence GTCN PAM
gcuccuccucaggggccccc

SEQ ID NO: 7189 - RNA, 20 nt, Artificial Sequence
  spacer sequence GTCN PAM
gucggcuccuccucaggggc

SEQ ID NO: 7190 - RNA, 20 nt, Artificial Sequence
  spacer sequence GTCN PAM
agacgccuccagucacugcc

SEQ ID NO: 7191 - RNA, 20 nt, Artificial Sequence
  spacer sequence GTCN PAM
ugaccgucagucggcuccuc

SEQ ID NO: 7192 - RNA, 20 nt, Artificial Sequence
  spacer sequence GTCN PAM
cugccucuggguggaugagu

SEQ ID NO: 7193 - RNA, 20 nt, Artificial Sequence
  spacer sequence GTCN PAM
ucacugagcagcuccgugua

SEQ ID NO: 7194 - RNA, 20 nt, Artificial Sequence
  spacer sequence GTCN PAM
uguucucacucaaguguggc

SEQ ID NO: 7195 - RNA, 20 nt, Artificial Sequence
  spacer sequence GTCN PAM
ccgaggcccaguggauuggc

SEQ ID NO: 7196 - RNA, 20 nt, Artificial Sequence
  spacer sequence GTCN PAM
ccugugaccugugaggcagg

SEQ ID NO: 7197 - RNA, 20 nt, Artificial Sequence
  spacer sequence GTCN PAM
caggggaccaguagcacaca

SEQ ID NO: 7198 - RNA, 20 nt, Artificial Sequence
  spacer sequence GTCN PAM
agggugucaccugauccaag

SEQ ID NO: 7199 - RNA, 20 nt, Artificial Sequence
  spacer sequence GTCN PAM
ccugauccaagucucuguuc

SEQ ID NO: 7200 - RNA, 20 nt, Artificial Sequence
  spacer sequence GTCN PAM
cuguucccuuuccuaccuuc

SEQ ID NO: 7201 - RNA, 20 nt, Artificial Sequence
  spacer sequence GTCN PAM
gcugcugugaagguaggaaa

SEQ ID NO: 7202 - RNA, 20 nt, Artificial Sequence
  spacer sequence GTCN PAM
cucgcuggcaggaagacggg

SEQ ID NO: 7203 - RNA, 20 nt, Artificial Sequence
  spacer sequence GTCN PAM
uccugccagcgagugaccgc

SEQ ID NO: 7204 - RNA, 20 nt, Artificial Sequence
  spacer sequence GTCN PAM
accugccaccaugagcccca

SEQ ID NO: 7205 - RNA, 20 nt, Artificial Sequence
  spacer sequence GTCN PAM
gugccuggaggcggugcccu

SEQ ID NO: 7206 - RNA, 20 nt, Artificial Sequence
  spacer sequence GTCN PAM
uucccgcaguucaccaaccg

SEQ ID NO: 7207 - RNA, 20 nt, Artificial Sequence
  spacer sequence GTCN PAM
cacaacuucagccacuugag

SEQ ID NO: 7208 - RNA, 20 nt, Artificial Sequence
  spacer sequence GTCN PAM
gcaaggaggccacagcccca

SEQ ID NO: 7209 - RNA, 20 nt, Artificial Sequence
  spacer sequence GTCN PAM
agcccagccuccagcaucuc

SEQ ID NO: 7210 - RNA, 20 nt, Artificial Sequence
  spacer sequence GTCN PAM
cuggcucggguccagcccag

SEQ ID NO: 7211 - RNA, 20 nt, Artificial Sequence
  spacer sequence GTCN PAM
acaggcugcaagggugccgg

SEQ ID NO: 7212 - RNA, 20 nt, Artificial Sequence
  spacer sequence GTCN PAM
ccacacccacggcuccugga

SEQ ID NO: 7213 - RNA, 20 nt, Artificial Sequence
  spacer sequence GTCN PAM
uggcgugaagcgccauuagc

SEQ ID NO: 7214 - RNA, 20 nt, Artificial Sequence
  spacer sequence GTCN PAM
uugucccugaagggcucugc

SEQ ID NO: 7215 - RNA, 20 nt, Artificial Sequence
  spacer sequence GTCN PAM
cugaagggcucugcggcugg

SEQ ID NO: 7216 - RNA, 20 nt, Artificial Sequence
  spacer sequence GTCN PAM
acccagaucauccuggccag

SEQ ID NO: 7217 - RNA, 20 nt, Artificial Sequence
  spacer sequence GTCN PAM
cacugguaucagcuguguuu

SEQ ID NO: 7218 - RNA, 20 nt, Artificial Sequence
  spacer sequence GTCN PAM
gcacgaacuuugcuuugugu

SEQ ID NO: 7219 - RNA, 20 nt, Artificial Sequence
  spacer sequence GTCN PAM
cacaggcugggcgcucccuc

SEQ ID NO: 7220 - RNA, 20 nt, Artificial Sequence
  spacer sequence GTCN PAM
cuggcugcuaggccgggagc

SEQ ID NO: 7221 - RNA, 20 nt, Artificial Sequence
  spacer sequence GTCN PAM
uguaggugcggugcacacua

SEQ ID NO: 7222 - RNA, 20 nt, Artificial Sequence
  spacer sequence GTCN PAM
uccccagccccgggggccca

SEQ ID NO: 7223 - RNA, 20 nt, Artificial Sequence
  spacer sequence GTCN PAM
cgcgggguacucuguggugg

SEQ ID NO: 7224 - RNA, 20 nt, Artificial Sequence
  spacer sequence GTCN PAM
gucucuggcucgccuucugu

SEQ ID NO: 7225 - RNA, 20 nt, Artificial Sequence
  spacer sequence GTCN PAM
cuggcucgccuucuguccug

SEQ ID NO: 7226 - RNA, 20 nt, Artificial Sequence
  spacer sequence GTCN PAM
ugacguguuugaguucuggu

SEQ ID NO: 7227 - RNA, 20 nt, Artificial Sequence
  spacer sequence GTCN PAM
ggacagaaggcgagccagag

SEQ ID NO: 7228 - RNA, 20 nt, Artificial Sequence
  spacer sequence GTCN PAM
gccaccagaacucaaacacg

SEQ ID NO: 7229 - RNA, 20 nt, Artificial Sequence
  spacer sequence GTCN PAM
ugaggguggugggggccugg

SEQ ID NO: 7230 - RNA, 20 nt, Artificial Sequence
  spacer sequence GTCN PAM
uuccucgggguucacgggau

SEQ ID NO: 7231 - RNA, 20 nt, Artificial Sequence
  spacer sequence GTCN PAM
ugugacggucuccacgcaaa

SEQ ID NO: 7232 - RNA, 20 nt, Artificial Sequence
  spacer sequence GTCN PAM
caugacgcggcugcugccga

SEQ ID NO: 7233 - RNA, 20 nt, Artificial Sequence
  spacer sequence GTCN PAM
ccacgcaaaugcggcagccc

SEQ ID NO: 7234 - RNA, 20 nt, Artificial Sequence
  spacer sequence GTCN PAM
cuggcagggcagccucccaa

SEQ ID NO: 7235 - RNA, 20 nt, Artificial Sequence
  spacer sequence GTCN PAM
gggcagugggcgucccuggc

SEQ ID NO: 7236 - RNA, 20 nt, Artificial Sequence
  spacer sequence GTCN PAM
ucagggcagugggcgucccu

SEQ ID NO: 7237 - RNA, 20 nt, Artificial Sequence
  spacer sequence GTCN PAM
ggggucgucagggcaguggg

SEQ ID NO: 7238 - RNA, 20 nt, Artificial Sequence
  spacer sequence GTCN PAM
cugcaauggggaggucaggg

SEQ ID NO: 7239 - RNA, 20 nt, Artificial Sequence
  spacer sequence GTCN PAM
ucacugcaauggggagguca

SEQ ID NO: 7240 - RNA, 20 nt, Artificial Sequence
  spacer sequence GTCN PAM
uccgcacacgcaucgaggcg

SEQ ID NO: 7241 - RNA, 20 nt, Artificial Sequence
  spacer sequence GTCN PAM
gugcugggugcuggcgggaa

SEQ ID NO: 7242 - RNA, 20 nt, Artificial Sequence
  spacer sequence GTCN PAM
ucgaugagaucgacggggcc

SEQ ID NO: 7243 - RNA, 20 nt, Artificial Sequence
  spacer sequence GTCN PAM
aucucaucgaugaccaggca

SEQ ID NO: 7244 - RNA, 20 nt, Artificial Sequence
  spacer sequence GTCN PAM
aggcccugcugcccgccugc

SEQ ID NO: 7245 - RNA, 20 nt, Artificial Sequence
  spacer sequence GTCN PAM
ucugaccucccccaaggccg

SEQ ID NO: 7246 - RNA, 20 nt, Artificial Sequence
  spacer sequence GTCN PAM
gaggacacggugaguccagg

SEQ ID NO: 7247 - RNA, 20 nt, Artificial Sequence
  spacer sequence GTCN PAM
uccugagcauccugaaccgc

SEQ ID NO: 7248 - RNA, 20 nt, Artificial Sequence
  spacer sequence GTCN PAM
gccgccucccgaaggcacag

SEQ ID NO: 7249 - RNA, 20 nt, Artificial Sequence
  spacer sequence GTCN PAM
uugcaaaugcagauaauggg

SEQ ID NO: 7250 - RNA, 20 nt, Artificial Sequence
  spacer sequence GTCN PAM
ggagaggcucuggugccugg

SEQ ID NO: 7251 - RNA, 20 nt, Artificial Sequence
  spacer sequence GTCN PAM
cuguguccugggcuguggug

SEQ ID NO: 7252 - RNA, 20 nt, Artificial Sequence
  spacer sequence GTCN PAM
ugggcuguggugccaacccu

SEQ ID NO: 7253 - RNA, 20 nt, Artificial Sequence
  spacer sequence GTCN PAM
cuggcccugccgccucuccu

SEQ ID NO: 7254 - RNA, 20 nt, Artificial Sequence
  spacer sequence GTCN PAM
cugcggcagcugaagcagca

SEQ ID NO: 7255 - RNA, 20 nt, Artificial Sequence
  spacer sequence GTCN PAM
gcgggaaguggagcaggaag

SEQ ID NO: 7256 - RNA, 20 nt, Artificial Sequence
  spacer sequence GTCN PAM
guggagccccaggagccgug

SEQ ID NO: 7257 - RNA, 20 nt, Artificial Sequence
  spacer sequence GTCN PAM
cccugcggcagggcaugagg

SEQ ID NO: 7258 - RNA, 20 nt, Artificial Sequence
  spacer sequence GTCN PAM
gcccucaugcccugccgcag

SEQ ID NO: 7259 - RNA, 20 nt, Artificial Sequence
  spacer sequence GTCN PAM
guuuucucacagagggcggc

SEQ ID NO: 7260 - RNA, 20 nt, Artificial Sequence
  spacer sequence GTCN PAM
uugucaguuuucucacagag

SEQ ID NO: 7261 - RNA, 20 nt, Artificial Sequence
  spacer sequence GTCN PAM
ggaguuggccgcuucucaug

SEQ ID NO: 7262 - RNA, 20 nt, Artificial Sequence
  spacer sequence GTCN PAM
aguuccuguacagccggggc

SEQ ID NO: 7263 - RNA, 20 nt, Artificial Sequence
  spacer sequence GTCN PAM
cgcacgcucagcucccgcug

SEQ ID NO: 7264 - RNA, 20 nt, Artificial Sequence
  spacer sequence GTCN PAM
uugaggcccacgcguguggc

SEQ ID NO: 7265 - RNA, 20 nt, Artificial Sequence
  spacer sequence GTCN PAM
uccagcugccucgagcccag

SEQ ID NO: 7266 - RNA, 20 nt, Artificial Sequence
  spacer sequence GTCN PAM
gggcaccgugagcaucuggg

SEQ ID NO: 7267 - RNA, 20 nt, Artificial Sequence
  spacer sequence GTCN PAM
ugagguccgggcaccgugag

SEQ ID NO: 7268 - RNA, 20 nt, Artificial Sequence
  spacer sequence GTCN PAM
ccgccucgaagguagugcug

SEQ ID NO: 7269 - RNA, 20 nt, Artificial Sequence
  spacer sequence GTCN PAM
ugagcccgcgguugccuggu

SEQ ID NO: 7270 - RNA, 20 nt, Artificial Sequence
  spacer sequence GTCN PAM
agccuccagggcccuccuca

SEQ ID NO: 7271 - RNA, 20 nt, Artificial Sequence
  spacer sequence GTCN PAM
gcuagagaagccuccagggc

SEQ ID NO: 7272 - RNA, 20 nt, Artificial Sequence
  spacer sequence GTCN PAM
uucccacagggggcccugga

SEQ ID NO: 7273 - RNA, 20 nt, Artificial Sequence
  spacer sequence GTCN PAM
cucuccagggcgccccuuga

SEQ ID NO: 7274 - RNA, 20 nt, Artificial Sequence
  spacer sequence GTCN PAM
aggggcgcccuggagaggga

SEQ ID NO: 7275 - RNA, 20 nt, Artificial Sequence
  spacer sequence GTCN PAM
caguugcacccucauuuuug

SEQ ID NO: 7276 - RNA, 20 nt, Artificial Sequence
  spacer sequence GTCN PAM
cugagccccugccugcccac

SEQ ID NO: 7277 - RNA, 20 nt, Artificial Sequence
  spacer sequence GTCN PAM
cuguccugacgugccauggg

SEQ ID NO: 7278 - RNA, 20 nt, Artificial Sequence
  spacer sequence GTCN PAM
ugacgugccaugggacccca

SEQ ID NO: 7279 - RNA, 20 nt, Artificial Sequence
  spacer sequence GTCN PAM
ggacagagacaugcuggcug

SEQ ID NO: 7280 - RNA, 20 nt, Artificial Sequence
  spacer sequence GTCN PAM
cauggcacgucaggacagag

SEQ ID NO: 7281 - RNA, 20 nt, Artificial Sequence
  spacer sequence GTCN PAM
ugcugcaggauaugggagac

SEQ ID NO: 7282 - RNA, 20 nt, Artificial Sequence
  spacer sequence GTCN PAM
cccauauccugcagcacgac

SEQ ID NO: 7283 - RNA, 20 nt, Artificial Sequence
  spacer sequence GTCN PAM
aggccaggagcagcacaucc

SEQ ID NO: 7284 - RNA, 20 nt, Artificial Sequence
  spacer sequence GTCN PAM
cccuccggguccaggccagg

SEQ ID NO: 7285 - RNA, 20 nt, Artificial Sequence
  spacer sequence GTCN PAM
ccuaaccccagagggucagg

SEQ ID NO: 7286 - RNA, 20 nt, Artificial Sequence
  spacer sequence GTCN PAM
gggcagggcuccucucagag

SEQ ID NO: 7287 - RNA, 20 nt, Artificial Sequence
  spacer sequence GTCN PAM
gggcgugucuuuggcugucu

SEQ ID NO: 7288 - RNA, 20 nt, Artificial Sequence
  spacer sequence GTCN PAM
uuggcugucuccaccugagc

SEQ ID NO: 7289 - RNA, 20 nt, Artificial Sequence
  spacer sequence GTCN PAM
ccaccugagcgaggcagcaa

SEQ ID NO: 7290 - RNA, 20 nt, Artificial Sequence
  spacer sequence GTCN PAM
cggggagacggguggggcug

SEQ ID NO: 7291 - RNA, 20 nt, Artificial Sequence
  spacer sequence GTCN PAM
ccccgggacacucagaggcc

SEQ ID NO: 7292 - RNA, 20 nt, Artificial Sequence
  spacer sequence GTCN PAM
aucuagcuucagcaccccac

SEQ ID NO: 7293 - RNA, 20 nt, Artificial Sequence
  spacer sequence GTCN PAM
uggcccacacggcgccugca

SEQ ID NO: 7294 - RNA, 20 nt, Artificial Sequence
  spacer sequence GTCN PAM
gcaggcagggcgggguccug

SEQ ID NO: 7295 - RNA, 20 nt, Artificial Sequence
  spacer sequence GTCN PAM
cccagcaggagugugucagc

SEQ ID NO: 7296 - RNA, 20 nt, Artificial Sequence
  spacer sequence GTCN PAM
ccgucacccagcaggagugu

SEQ ID NO: 7297 - RNA, 20 nt, Artificial Sequence
  spacer sequence GTCN PAM
ugcaugccgcugccucugcg

SEQ ID NO: 7298 - RNA, 20 nt, Artificial Sequence
  spacer sequence GTCN PAM
agguaccugucuuccaccaa

SEQ ID NO: 7299 - RNA, 20 nt, Artificial Sequence
  spacer sequence GTCN PAM
uccaccaaaaugccugccug

SEQ ID NO: 7300 - RNA, 20 nt, Artificial Sequence
  spacer sequence GTCN PAM
uagccaggcggccccaggca

SEQ ID NO: 7301 - RNA, 20 nt, Artificial Sequence
  spacer sequence GTCN PAM
ucccguauggacggggaggc

SEQ ID NO: 7302 - RNA, 20 nt, Artificial Sequence
  spacer sequence GTCN PAM
auacgggaggaccggcaggg

SEQ ID NO: 7303 - RNA, 20 nt, Artificial Sequence
  spacer sequence GTCN PAM
cugagguggggagcaggagc

SEQ ID NO: 7304 - RNA, 20 nt, Artificial Sequence
  spacer sequence GTCN PAM
gacgggggaggucgcucugg

SEQ ID NO: 7305 - RNA, 20 nt, Artificial Sequence
  spacer sequence GTCN PAM
gacggccgccccuaccuccu

SEQ ID NO: 7306 - RNA, 20 nt, Artificial Sequence
  spacer sequence GTCN PAM
cucugguggcugcuugggac

SEQ ID NO: 7307 - RNA, 20 nt, Artificial Sequence
  spacer sequence GTCN PAM
caagcagccaccagagcgac

SEQ ID NO: 7308 - RNA, 20 nt, Artificial Sequence
  spacer sequence GTCN PAM
ggcaggggcuccaccccaac

SEQ ID NO: 7309 - RNA, 20 nt, Artificial Sequence
  spacer sequence GTCN PAM
agaauccagccccucgcagc

SEQ ID NO: 7310 - RNA, 20 nt, Artificial Sequence
  spacer sequence GTCN PAM
ccgccuaagcugucugcuga

SEQ ID NO: 7311 - RNA, 20 nt, Artificial Sequence
  spacer sequence GTCN PAM
gcugacucuaagcggcuuug

SEQ ID NO: 7312 - RNA, 20 nt, Artificial Sequence
  spacer sequence GTCN PAM
gcagacagcuuaggcgggga

SEQ ID NO: 7313 - RNA, 20 nt, Artificial Sequence
  spacer sequence GTCN PAM
auccccgccgcugcuccacg

SEQ ID NO: 7314 - RNA, 20 nt, Artificial Sequence
  spacer sequence GTCN PAM
ccaccccuguuccguggggg

SEQ ID NO: 7315 - RNA, 20 nt, Artificial Sequence
  spacer sequence GTCN PAM
aggccguggcguccccaccc

SEQ ID NO: 7316 - RNA, 20 nt, Artificial Sequence
  spacer sequence GTCN PAM
aaggaggggcugagugaggc

SEQ ID NO: 7317 - RNA, 20 nt, Artificial Sequence
  spacer sequence GTCN PAM
cccccucgugucagucucug

SEQ ID NO: 7318 - RNA, 20 nt, Artificial Sequence
  spacer sequence GTCN PAM
gucucugucaagucagucuc

SEQ ID NO: 7319 - RNA, 20 nt, Artificial Sequence
  spacer sequence GTCN PAM
cugucaagucagucucuguc

SEQ ID NO: 7320 - RNA, 20 nt, Artificial Sequence
  spacer sequence GTCN PAM
agucagucucugucaagcug

SEQ ID NO: 7321 - RNA, 20 nt, Artificial Sequence
  spacer sequence GTCN PAM
gucucugucaagcuguagcg

SEQ ID NO: 7322 - RNA, 20 nt, Artificial Sequence
  spacer sequence GTCN PAM
cugucaagcuguagcgagga

SEQ ID NO: 7323 - RNA, 20 nt, Artificial Sequence
  spacer sequence GTCN PAM
agcuguagcgaggaugcuca

SEQ ID NO: 7324 - RNA, 20 nt, Artificial Sequence
  spacer sequence GTCN PAM
acccugagcauccucgcuac

SEQ ID NO: 7325 - RNA, 20 nt, Artificial Sequence
  spacer sequence GTCN PAM
ggggaggguccacccugagc

SEQ ID NO: 7326 - RNA, 20 nt, Artificial Sequence
  spacer sequence GTCN PAM
cugggcccaaggggucgggg

SEQ ID NO: 7327 - RNA, 20 nt, Artificial Sequence
  spacer sequence GTCN PAM
gaggcagcagcacacaccag

SEQ ID NO: 7328 - RNA, 20 nt, Artificial Sequence
  spacer sequence GTCN PAM
uggggacccuuguggagggu

SEQ ID NO: 7329 - RNA, 20 nt, Artificial Sequence
  spacer sequence GTCN PAM
ccacgacgcugggcgucuga

SEQ ID NO: 7330 - RNA, 20 nt, Artificial Sequence
  spacer sequence GTCN PAM
gcgaagccucguggggcagg

SEQ ID NO: 7331 - RNA, 20 nt, Artificial Sequence
  spacer sequence GTCN PAM
guggcgggagguggaggguc

SEQ ID NO: 7332 - RNA, 20 nt, Artificial Sequence
  spacer sequence GTCN PAM
gugguggugcaccuucccug

SEQ ID NO: 7333 - RNA, 20 nt, Artificial Sequence
  spacer sequence GTCN PAM
aacaagcccugcaggcggcc

SEQ ID NO: 7334 - RNA, 20 nt, Artificial Sequence
  spacer sequence GTCN PAM
gcggcugcgagacuccagcc

SEQ ID NO: 7335 - RNA, 20 nt, Artificial Sequence
  spacer sequence GTCN PAM
cgcagccgcagacgcaggaa

SEQ ID NO: 7336 - RNA, 20 nt, Artificial Sequence
  spacer sequence GTCN PAM
agggccacacacacagcacc

SEQ ID NO: 7337 - RNA, 20 nt, Artificial Sequence
  spacer sequence GTCN PAM
ucgaaggccagccagucgag

SEQ ID NO: 7338 - RNA, 20 nt, Artificial Sequence
  spacer sequence GTCN PAM
cugcaccacgccugcccccg

SEQ ID NO: 7339 - RNA, 20 nt, Artificial Sequence
  spacer sequence GTCN PAM
ccugggccucccgggcgagg

SEQ ID NO: 7340 - RNA, 20 nt, Artificial Sequence
  spacer sequence GTCN PAM
ggaucagguuccucaucugg

SEQ ID NO: 7341 - RNA, 20 nt, Artificial Sequence
  spacer sequence GTCN PAM
ggcaucgcgccagccacgcg

SEQ ID NO: 7342 - RNA, 20 nt, Artificial Sequence
  spacer sequence GTCN PAM
aggagcaggcagagggcauc

SEQ ID NO: 7343 - RNA, 20 nt, Artificial Sequence
  spacer sequence GTCN PAM
ccggggugggggauuccccg

SEQ ID NO: 7344 - RNA, 20 nt, Artificial Sequence
  spacer sequence GTCN PAM
uaggugagcacacauuugua

SEQ ID NO: 7345 - RNA, 20 nt, Artificial Sequence
  spacer sequence GTCN PAM
gcugccucccauccccuagg

SEQ ID NO: 7346 - RNA, 20 nt, Artificial Sequence
  spacer sequence GTCN PAM
ggcuguaagcgagcaucgug

SEQ ID NO: 7347 - RNA, 20 nt, Artificial Sequence
  spacer sequence GTCN PAM
cccagugccuggggugugcu

SEQ ID NO: 7348 - RNA, 20 nt, Artificial Sequence
  spacer sequence GTCN PAM
ugcuccccggcugugcucca

SEQ ID NO: 7349 - RNA, 20 nt, Artificial Sequence
  spacer sequence GTCN PAM
gaaagcacggucauggcguc

SEQ ID NO: 7350 - RNA, 20 nt, Artificial Sequence
  spacer sequence GTCN PAM
uggcgucuggggguggcggg

SEQ ID NO: 7351 - RNA, 20 nt, Artificial Sequence
  spacer sequence GTCN PAM
ggggguggcgggccccagcu

SEQ ID NO: 7352 - RNA, 20 nt, Artificial Sequence
  spacer sequence GTCN PAM
cuuccagcuacuugagauug

SEQ ID NO: 7353 - RNA, 20 nt, Artificial Sequence
  spacer sequence GTCN PAM
cagagccaaucucaaguagc

SEQ ID NO: 7354 - RNA, 20 nt, Artificial Sequence
  spacer sequence GTCN PAM
cucucggggcccccggcucc

SEQ ID NO: 7355 - RNA, 20 nt, Artificial Sequence
  spacer sequence GTCN PAM
ugcugccccagcgacggcac

SEQ ID NO: 7356 - RNA, 20 nt, Artificial Sequence
  spacer sequence GTCN PAM
cuggggcagcaggaccccgg

SEQ ID NO: 7357 - RNA, 20 nt, Artificial Sequence
  spacer sequence GTCN PAM
ugcaaguuggugccgucgcu

SEQ ID NO: 7358 - RNA, 20 nt, Artificial Sequence
  spacer sequence GTCN PAM
cucuccguggcagccaucgg

SEQ ID NO: 7359 - RNA, 20 nt, Artificial Sequence
  spacer sequence GTCN PAM
uggugccaccgcaccccaac

SEQ ID NO: 7360 - RNA, 20 nt, Artificial Sequence
  spacer sequence GTCN PAM
gcggggccaggcucagggcc

SEQ ID NO: 7361 - RNA, 20 nt, Artificial Sequence
  spacer sequence GTCN PAM
cccugugcugagcaggaacg

SEQ ID NO: 7362 - RNA, 20 nt, Artificial Sequence
  spacer sequence GTCN PAM
gguaggugaggggcuugcgg

SEQ ID NO: 7363 - RNA, 20 nt, Artificial Sequence
  spacer sequence GTCN PAM
gggcgugcaccauccccacu

SEQ ID NO: 7364 - RNA, 20 nt, Artificial Sequence
  spacer sequence GTCN PAM
gcuggggggcauuggggaga

SEQ ID NO: 7365 - RNA, 20 nt, Artificial Sequence
  spacer sequence GTCN PAM
gugcaccccuuucuccccaa

SEQ ID NO: 7366 - RNA, 20 nt, Artificial Sequence
  spacer sequence GTCN PAM
cacccccacagcugcccauu

SEQ ID NO: 7367 - RNA, 20 nt, Artificial Sequence
  spacer sequence GTCN PAM
ugaggcggggccaaggcacc

SEQ ID NO: 7368 - RNA, 20 nt, Artificial Sequence
  spacer sequence GTCN PAM
ugaggcggggccaggguauc

SEQ ID NO: 7369 - RNA, 20 nt, Artificial Sequence
  spacer sequence GTCN PAM
ggcugaggguggggcuggcu

SEQ ID NO: 7370 - RNA, 20 nt, Artificial Sequence
  spacer sequence GTCN PAM
uucagagccccccuuagggc

SEQ ID NO: 7371 - RNA, 20 nt, Artificial Sequence
  spacer sequence GTCN PAM
ugcugaggguaaggagcugg

SEQ ID NO: 7372 - RNA, 20 nt, Artificial Sequence
  spacer sequence GTCN PAM
cagagguguucuggucccuc

SEQ ID NO: 7373 - RNA, 20 nt, Artificial Sequence
  spacer sequence GTCN PAM
cuccucccugggaaggcucu

SEQ ID NO: 7374 - RNA, 20 nt, Artificial Sequence
  spacer sequence GTCN PAM
uccugucuuggguaggggcu

SEQ ID NO: 7375 - RNA, 20 nt, Artificial Sequence
  spacer sequence GTCN PAM
uggguaggggcuggaugggg

SEQ ID NO: 7376 - RNA, 20 nt, Artificial Sequence
  spacer sequence GTCN PAM
uauacgacugacuaguccuu

SEQ ID NO: 7377 - RNA, 20 nt, Artificial Sequence
  spacer sequence GTCN PAM
uauaggacagaugccccauc

SEQ ID NO: 7378 - RNA, 20 nt, Artificial Sequence
  spacer sequence GTCN PAM
gucguauaggacagaugccc

SEQ ID NO: 7379 - RNA, 20 nt, Artificial Sequence
  spacer sequence GTCN PAM
uuccucccaucagccugaga

SEQ ID NO: 7380 - RNA, 20 nt, Artificial Sequence
  spacer sequence GTCN PAM
uucucaggcugaugggagga

SEQ ID NO: 7381 - RNA, 20 nt, Artificial Sequence
  spacer sequence GTCN PAM
aaagaaguccuucucaggcu

SEQ ID NO: 7382 - RNA, 20 nt, Artificial Sequence
  spacer sequence GTCN PAM
ucaggagcacagcagucccg

SEQ ID NO: 7383 - RNA, 20 nt, Artificial Sequence
  spacer sequence GTCN PAM
ggagcacagcagucccgagu

SEQ ID NO: 7384 - RNA, 20 nt, Artificial Sequence
  spacer sequence GTCN PAM
cgagugcagguguguguggg

SEQ ID NO: 7385 - RNA, 20 nt, Artificial Sequence
  spacer sequence GTCN PAM
ccugcggggccacaggguug

SEQ ID NO: 7386 - RNA, 20 nt, Artificial Sequence
  spacer sequence GTCN PAM
ugcuccggggccgugucccc

SEQ ID NO: 7387 - RNA, 20 nt, Artificial Sequence
  spacer sequence GTCN PAM
gguuccgcuucaacgagggu

SEQ ID NO: 7388 - RNA, 20 nt, Artificial Sequence
  spacer sequence GTCN PAM
ccaacgccgugcggcgcagc

SEQ ID NO: 7389 - RNA, 20 nt, Artificial Sequence
  spacer sequence GTCN PAM
cugauguacaggcugcgccg

SEQ ID NO: 7390 - RNA, 20 nt, Artificial Sequence
  spacer sequence GTCN PAM
gcggcucagagaacuagagc

SEQ ID NO: 7391 - RNA, 20 nt, Artificial Sequence
  spacer sequence GTCN PAM
cugcacucugcgggaagcaa

SEQ ID NO: 7392 - RNA, 20 nt, Artificial Sequence
  spacer sequence GTCN PAM
uuauaaagucacaccuuuac

SEQ ID NO: 7393 - RNA, 20 nt, Artificial Sequence
  spacer sequence GTCN PAM
caccuuuacagacuguaauc

SEQ ID NO: 7394 - RNA, 20 nt, Artificial Sequence
  spacer sequence GTCN PAM
guaaaggugugacuuuauaa

SEQ ID NO: 7395 - RNA, 20 nt, Artificial Sequence
  spacer sequence GTCN PAM
cacaggauagagugaguggg

SEQ ID NO: 7396 - RNA, 20 nt, Artificial Sequence
  spacer sequence GTCN PAM
cacaggauggagugaauggg

SEQ ID NO: 7397 - RNA, 20 nt, Artificial Sequence
  spacer sequence GTCN PAM
uacaagauguugugaguggg

SEQ ID NO: 7398 - RNA, 20 nt, Artificial Sequence
  spacer sequence GTCN PAM
cacucccagccccacuccca

SEQ ID NO: 7399 - RNA, 20 nt, Artificial Sequence
  spacer sequence GTCN PAM
uacaagauggagugaguggg

SEQ ID NO: 7400 - RNA, 20 nt, Artificial Sequence
  spacer sequence GTCN PAM
cacucccagccccacuccca

SEQ ID NO: 7401 - RNA, 20 nt, Artificial Sequence
  spacer sequence GTCN PAM
uacaagauggugggaguggg

SEQ ID NO: 7402 - RNA, 20 nt, Artificial Sequence
  spacer sequence GTCN PAM
cacaggauggugugagaggg

SEQ ID NO: 7403 - RNA, 20 nt, Artificial Sequence
  spacer sequence GTCN PAM
ggguucaggaagggguccuu

SEQ ID NO: 7404 - RNA, 20 nt, Artificial Sequence
  spacer sequence GTCN PAM
uuggggaucccguccucgau

SEQ ID NO: 7405 - RNA, 20 nt, Artificial Sequence
  spacer sequence GTCN PAM
ucgauccacuucagcagccu

SEQ ID NO: 7406 - RNA, 20 nt, Artificial Sequence
  spacer sequence GTCN PAM
ggugccaccacucaccugcc

SEQ ID NO: 7407 - RNA, 20 nt, Artificial Sequence
  spacer sequence GTCN PAM
gcggcgguggucguggcuau

SEQ ID NO: 7408 - RNA, 20 nt, Artificial Sequence
  spacer sequence GTCN PAM
uggcuauggaaaugagcagc

SEQ ID NO: 7409 - RNA, 20 nt, Artificial Sequence
  spacer sequence GTCN PAM
gcccugcgcuggcugcucau

SEQ ID NO: 7410 - RNA, 20 nt, Artificial Sequence
  spacer sequence GTCN PAM
uggacgccaucucccgcugg

SEQ ID NO: 7411 - RNA, 20 nt, Artificial Sequence
  spacer sequence GTCN PAM
aagaccauccccgagugagu

SEQ ID NO: 7412 - RNA, 20 nt, Artificial Sequence
  spacer sequence GTCN PAM
cacuccuccauggggucagg

SEQ ID NO: 7413 - RNA, 20 nt, Artificial Sequence
  spacer sequence GTCN PAM
ggggcuucugaagcagccag

SEQ ID NO: 7414 - RNA, 20 nt, Artificial Sequence
  spacer sequence GTCN PAM
ccacccccgcugcuccccgc

SEQ ID NO: 7415 - RNA, 20 nt, Artificial Sequence
  spacer sequence GTCN PAM
acaccacugccugggccagu

SEQ ID NO: 7416 - RNA, 20 nt, Artificial Sequence
  spacer sequence GTCN PAM
ccuaggcguugcuagggugc

SEQ ID NO: 7417 - RNA, 20 nt, Artificial Sequence
  spacer sequence GTCN PAM
cagugcaggaggcgggagcu

SEQ ID NO: 7418 - RNA, 20 nt, Artificial Sequence
  spacer sequence GTCN PAM
gccugcgugggccucagugg

SEQ ID NO: 7419 - RNA, 20 nt, Artificial Sequence
  spacer sequence GTCN PAM
gggucagccugcgugggccu

SEQ ID NO: 7420 - RNA, 20 nt, Artificial Sequence
  spacer sequence GTCN PAM
ucaggagguggccccugccc

SEQ ID NO: 7421 - RNA, 20 nt, Artificial Sequence
  spacer sequence GTCN PAM
agagccaggacuccuggaca

SEQ ID NO: 7422 - RNA, 20 nt, Artificial Sequence
  spacer sequence GTCN PAM
uggcucuggacugggcucug

SEQ ID NO: 7423 - RNA, 20 nt, Artificial Sequence
  spacer sequence GTCN PAM
aggaguccuggcucuggacu

SEQ ID NO: 7424 - RNA, 20 nt, Artificial Sequence
  spacer sequence GTCN PAM
gggauaugggcugugggugg

SEQ ID NO: 7425 - RNA, 20 nt, Artificial Sequence
  spacer sequence GTCN PAM
ccagugugucugggaaccac

SEQ ID NO: 7426 - RNA, 20 nt, Artificial Sequence
  spacer sequence GTCN PAM
gggaaccacacacguuaccu

SEQ ID NO: 7427 - RNA, 20 nt, Artificial Sequence
  spacer sequence GTCN PAM
accuguggcuuucccaggcu

SEQ ID NO: 7428 - RNA, 20 nt, Artificial Sequence
  spacer sequence GTCN PAM
cucacuccgucccaacucug

SEQ ID NO: 7429 - RNA, 20 nt, Artificial Sequence
  spacer sequence GTCN PAM
caacucuggcccccgucccc

SEQ ID NO: 7430 - RNA, 20 nt, Artificial Sequence
  spacer sequence GTCN PAM
ccaagguugggagacagggc

SEQ ID NO: 7431 - RNA, 20 nt, Artificial Sequence
  spacer sequence GTCN PAM
cccaaccuuggggacggggg

SEQ ID NO: 7432 - RNA, 20 nt, Artificial Sequence
  spacer sequence GTCN PAM
aguuucggggagccugccuc

SEQ ID NO: 7433 - RNA, 20 nt, Artificial Sequence
  spacer sequence GTCN PAM
ccccauccuuuggucgugca

SEQ ID NO: 7434 - RNA, 20 nt, Artificial Sequence
  spacer sequence GTCN PAM
ugcagcugcaccggccaccu

SEQ ID NO: 7435 - RNA, 20 nt, Artificial Sequence
  spacer sequence GTCN PAM
cgguggugaauugggcagac

SEQ ID NO: 7436 - RNA, 20 nt, Artificial Sequence
  spacer sequence GTCN PAM
gcccaauucaccaccgggac

SEQ ID NO: 7437 - RNA, 20 nt, Artificial Sequence
  spacer sequence GTCN PAM
gcccguaguggggugggagg

SEQ ID NO: 7438 - RNA, 20 nt, Artificial Sequence
  spacer sequence GTCN PAM
ugcagaggauucccucccgg

SEQ ID NO: 7439 - RNA, 20 nt, Artificial Sequence
  spacer sequence GTCN PAM
ccgggagggaauccucugca

SEQ ID NO: 7440 - RNA, 20 nt, Artificial Sequence
  spacer sequence GTCN PAM
ccgagaaaaggccugcaccg

SEQ ID NO: 7441 - RNA, 20 nt, Artificial Sequence
  spacer sequence GTCN PAM
ugcgcccacggggcugagug

SEQ ID NO: 7442 - RNA, 20 nt, Artificial Sequence
  spacer sequence GTCN PAM
ucccaggcccgggguguugg

SEQ ID NO: 7443 - RNA, 20 nt, Artificial Sequence
  spacer sequence GTCN PAM
uugcugcccagcccuaccuu

SEQ ID NO: 7444 - RNA, 20 nt, Artificial Sequence
  spacer sequence GTCN PAM
acggggugcacggggugggu

SEQ ID NO: 7445 - RNA, 20 nt, Artificial Sequence
  spacer sequence GTCN PAM
cguggcugggggcguccacg

SEQ ID NO: 7446 - RNA, 20 nt, Artificial Sequence
  spacer sequence GTCN PAM
aucugagcgccgugcgccgc

SEQ ID NO: 7447 - RNA, 20 nt, Artificial Sequence
  spacer sequence GTCN PAM
ccugggcucacccuaacucc

SEQ ID NO: 7448 - RNA, 20 nt, Artificial Sequence
  spacer sequence GTCN PAM
guccccugggcucacccuaa

SEQ ID NO: 7449 - RNA, 20 nt, Artificial Sequence
  spacer sequence GTCN PAM
aggggccuccgggcccuccc

SEQ ID NO: 7450 - RNA, 20 nt, Artificial Sequence
  spacer sequence GTCN PAM
gaugaacaggcgcccggggc

SEQ ID NO: 7451 - RNA, 20 nt, Artificial Sequence
  spacer sequence GTCN PAM
ccuuuucaagguagguccga

SEQ ID NO: 7452 - RNA, 20 nt, Artificial Sequence
  spacer sequence GTCN PAM
cuccgcugucaccuuuucaa

SEQ ID NO: 7453 - RNA, 20 nt, Artificial Sequence
  spacer sequence GTCN PAM
uugucccuccgcugucaccu

SEQ ID NO: 7454 - RNA, 20 nt, Artificial Sequence
  spacer sequence GTCN PAM
ccuggccguugucauugucc

SEQ ID NO: 7455 - RNA, 20 nt, Artificial Sequence
  spacer sequence GTCN PAM
gccaggcagagcccuggcug

SEQ ID NO: 7456 - RNA, 20 nt, Artificial Sequence
  spacer sequence GTCN PAM
gcccagcccugaggagggug

SEQ ID NO: 7457 - RNA, 20 nt, Artificial Sequence
  spacer sequence GTCN PAM
auccgcugggugagcccagg

SEQ ID NO: 7458 - RNA, 20 nt, Artificial Sequence
  spacer sequence GTCN PAM
auuuucccugaggggccagc

SEQ ID NO: 7459 - RNA, 20 nt, Artificial Sequence
  spacer sequence GTCN PAM
ccuuccacuugagggggugg

SEQ ID NO: 7460 - RNA, 20 nt, Artificial Sequence
  spacer sequence GTCN PAM
ugggccagccgggaggagug

SEQ ID NO: 7461 - RNA, 20 nt, Artificial Sequence
  spacer sequence GTCN PAM
cagccccauccccacuccuc

SEQ ID NO: 7462 - RNA, 20 nt, Artificial Sequence
  spacer sequence GTCN PAM
ccugaacccugcaggcugca

SEQ ID NO: 7463 - RNA, 20 nt, Artificial Sequence
  spacer sequence GTCN PAM
ggggggcacagcugaguguc

SEQ ID NO: 7464 - RNA, 20 nt, Artificial Sequence
  spacer sequence GTCN PAM
gggaacaggggaucgggcug

SEQ ID NO: 7465 - RNA, 20 nt, Artificial Sequence
  spacer sequence GTCN PAM
gaucugagcugagaguggcg

SEQ ID NO: 7466 - RNA, 20 nt, Artificial Sequence
  spacer sequence GTCN PAM
ccaacaccgguccacugugg

SEQ ID NO: 7467 - RNA, 20 nt, Artificial Sequence
  spacer sequence GTCN PAM
acugugggugcucuggggca

SEQ ID NO: 7468 - RNA, 20 nt, Artificial Sequence
  spacer sequence GTCN PAM
cacaacccgagcccaagugc

SEQ ID NO: 7469 - RNA, 20 nt, Artificial Sequence
  spacer sequence GTCN PAM
gccugcagagcugagacugg

SEQ ID NO: 7470 - RNA, 20 nt, Artificial Sequence
  spacer sequence GTCN PAM
cagcucugcaggcugacagg

SEQ ID NO: 7471 - RNA, 20 nt, Artificial Sequence
  spacer sequence GTCN PAM
gaggaaaaggggccagucuc

SEQ ID NO: 7472 - RNA, 20 nt, Artificial Sequence
  spacer sequence GTCN PAM
ccucccacccugcccuuggg

SEQ ID NO: 7473 - RNA, 20 nt, Artificial Sequence
  spacer sequence GTCN PAM
ccugcugguacauagggcac

SEQ ID NO: 7474 - RNA, 20 nt, Artificial Sequence
  spacer sequence GTCN PAM
cugcagaagcugggccaccc

SEQ ID NO: 7475 - RNA, 20 nt, Artificial Sequence
  spacer sequence GTCN PAM
cucugccuuccccaguguca

SEQ ID NO: 7476 - RNA, 20 nt, Artificial Sequence
  spacer sequence GTCN PAM
cagggaaccgcccggccugc

SEQ ID NO: 7477 - RNA, 20 nt, Artificial Sequence
  spacer sequence GTCN PAM
gggccaccccaggcaggccg

SEQ ID NO: 7478 - RNA, 20 nt, Artificial Sequence
  spacer sequence GTCN PAM
gggagaggugggcccugucc

SEQ ID NO: 7479 - RNA, 20 nt, Artificial Sequence
  spacer sequence GTCN PAM
cucucaggcgcucagguccc

SEQ ID NO: 7480 - RNA, 20 nt, Artificial Sequence
  spacer sequence GTCN PAM
cugaagucacucagcaggac

SEQ ID NO: 7481 - RNA, 20 nt, Artificial Sequence
  spacer sequence GTCN PAM
cucagcaggacucccugcca

SEQ ID NO: 7482 - RNA, 20 nt, Artificial Sequence
  spacer sequence GTCN PAM
ugcugagugacuucagggac

SEQ ID NO: 7483 - RNA, 20 nt, Artificial Sequence
  spacer sequence GTCN PAM
cacuggcagggaguccugcu

SEQ ID NO: 7484 - RNA, 20 nt, Artificial Sequence
  spacer sequence GTCN PAM
gcuggaucagaggcgccucu

SEQ ID NO: 7485 - RNA, 20 nt, Artificial Sequence
  spacer sequence GTCN PAM
agcccccaccaugccaagag

SEQ ID NO: 7486 - RNA, 20 nt, Artificial Sequence
  spacer sequence GTCN PAM
cccugaucccagugcccgcc

SEQ ID NO: 7487 - RNA, 20 nt, Artificial Sequence
  spacer sequence GTCN PAM
cagcaccagggggcacaggc

SEQ ID NO: 7488 - RNA, 20 nt, Artificial Sequence
  spacer sequence GTCN PAM
cccccgccuugccugcaucc

SEQ ID NO: 7489 - RNA, 20 nt, Artificial Sequence
  spacer sequence GTCN PAM
cccacguucccugggacagc

SEQ ID NO: 7490 - RNA, 20 nt, Artificial Sequence
  spacer sequence GTCN PAM
cagggaacgugggggacaug

SEQ ID NO: 7491 - RNA, 20 nt, Artificial Sequence
  spacer sequence GTCN PAM
gcagcugaguugugagagcu

SEQ ID NO: 7492 - RNA, 20 nt, Artificial Sequence
  spacer sequence GTCN PAM
ugagaguggccacagaaccc

SEQ ID NO: 7493 - RNA, 20 nt, Artificial Sequence
  spacer sequence GTCN PAM
uuccagaugagcagaugcaa

SEQ ID NO: 7494 - RNA, 20 nt, Artificial Sequence
  spacer sequence GTCN PAM
ccuaauggggucgccaaggc

SEQ ID NO: 7495 - RNA, 20 nt, Artificial Sequence
  spacer sequence GTCN PAM
ccaaggcuccagguucuggc

SEQ ID NO: 7496 - RNA, 20 nt, Artificial Sequence
  spacer sequence GTCN PAM
auucacuggacccaguaagg

SEQ ID NO: 7497 - RNA, 20 nt, Artificial Sequence
  spacer sequence GTCN PAM
agugaauugaccaaaagcca

SEQ ID NO: 7498 - RNA, 20 nt, Artificial Sequence
  spacer sequence GTCN PAM
cugagggugccugagcucug

SEQ ID NO: 7499 - RNA, 20 nt, Artificial Sequence
  spacer sequence GTCN PAM
aacacggccagugcccccag

SEQ ID NO: 7500 - RNA, 20 nt, Artificial Sequence
  spacer sequence GTCN PAM
ugauucacugggggcacugg

SEQ ID NO: 7501 - RNA, 20 nt, Artificial Sequence
  spacer sequence GTCN PAM
ugguggcccacaccacacuc

SEQ ID NO: 7502 - RNA, 20 nt, Artificial Sequence
  spacer sequence GTCN PAM
caccuguccugguggcccac

SEQ ID NO: 7503 - RNA, 20 nt, Artificial Sequence
  spacer sequence GTCN PAM
cguccuggagugagcacugc

SEQ ID NO: 7504 - RNA, 20 nt, Artificial Sequence
  spacer sequence GTCN PAM
uggagugagcacugcccugu

SEQ ID NO: 7505 - RNA, 20 nt, Artificial Sequence
  spacer sequence GTCN PAM
gggcagguccugccaguccu

SEQ ID NO: 7506 - RNA, 20 nt, Artificial Sequence
  spacer sequence GTCN PAM
ugccaguccucagcaucuca

SEQ ID NO: 7507 - RNA, 20 nt, Artificial Sequence
  spacer sequence GTCN PAM
ucagcaucucagcagagaag

SEQ ID NO: 7508 - RNA, 20 nt, Artificial Sequence
  spacer sequence GTCN PAM
accaugcagguacacacagc

SEQ ID NO: 7509 - RNA, 20 nt, Artificial Sequence
  spacer sequence GTCN PAM
gggugacccccaaggccaag

SEQ ID NO: 7510 - RNA, 20 nt, Artificial Sequence
  spacer sequence GTCN PAM
cccagacccugcucagguag

SEQ ID NO: 7511 - RNA, 20 nt, Artificial Sequence
  spacer sequence GTCN PAM
gcugcaggcccaugucccag

SEQ ID NO: 7512 - RNA, 20 nt, Artificial Sequence
  spacer sequence GTCN PAM
caggcaugugaugugggucc

SEQ ID NO: 7513 - RNA, 20 nt, Artificial Sequence
  spacer sequence GTCN PAM
cgucucucaccccacuucug

SEQ ID NO: 7514 - RNA, 20 nt, Artificial Sequence
  spacer sequence GTCN PAM
cucaccccacuucuguggcg

SEQ ID NO: 7515 - RNA, 20 nt, Artificial Sequence
  spacer sequence GTCN PAM
cugggggggcaccagucagc

SEQ ID NO: 7516 - RNA, 20 nt, Artificial Sequence
  spacer sequence GTCN PAM
gccucggugucguguggacc

SEQ ID NO: 7517 - RNA, 20 nt, Artificial Sequence
  spacer sequence GTCN PAM
uguggacccccagaaucaga

SEQ ID NO: 7518 - RNA, 20 nt, Artificial Sequence
  spacer sequence GTCN PAM
acacgacaccgaggcugacu

SEQ ID NO: 7519 - RNA, 20 nt, Artificial Sequence
  spacer sequence GTCN PAM
ugugcugaccugggugggug

SEQ ID NO: 7520 - RNA, 20 nt, Artificial Sequence
  spacer sequence GTCN PAM
gcacaggaccugcuucugau

SEQ ID NO: 7521 - RNA, 20 nt, Artificial Sequence
  spacer sequence GTCN PAM
cauccucaguaagacggggg

SEQ ID NO: 7522 - RNA, 20 nt, Artificial Sequence
  spacer sequence GTCN PAM
uacugaggaugggaccucac

SEQ ID NO: 7523 - RNA, 20 nt, Artificial Sequence
  spacer sequence GTCN PAM
ugaagacugacuucgaccuu

SEQ ID NO: 7524 - RNA, 20 nt, Artificial Sequence
  spacer sequence GTCN PAM
ucaagacccccgucuuacug

SEQ ID NO: 7525 - RNA, 20 nt, Artificial Sequence
  spacer sequence GTCN PAM
gucuucaagacccccgucuu

SEQ ID NO: 7526 - RNA, 20 nt, Artificial Sequence
  spacer sequence GTCN PAM
aagucagucuucaagacccc

SEQ ID NO: 7527 - RNA, 20 nt, Artificial Sequence
  spacer sequence GTCN PAM
gcgcccggauguguuugggg

SEQ ID NO: 7528 - RNA, 20 nt, Artificial Sequence
  spacer sequence GTCN PAM
gccucgggucuggaaucugc

SEQ ID NO: 7529 - RNA, 20 nt, Artificial Sequence
  spacer sequence GTCN PAM
ggaaucugccucccccggcc

SEQ ID NO: 7530 - RNA, 20 nt, Artificial Sequence
  spacer sequence GTCN PAM
agcuguagggccgggggagg

SEQ ID NO: 7531 - RNA, 20 nt, Artificial Sequence
  spacer sequence GTCN PAM
cccaacggagugaccacagc

SEQ ID NO: 7532 - RNA, 20 nt, Artificial Sequence
  spacer sequence GTCN PAM
cuccguugggggacuggcug

SEQ ID NO: 7533 - RNA, 20 nt, Artificial Sequence
  spacer sequence GTCN PAM
cuggcccgaggggcucuuga

SEQ ID NO: 7534 - RNA, 20 nt, Artificial Sequence
  spacer sequence GTCN PAM
agagccccucgggccaggga

SEQ ID NO: 7535 - RNA, 20 nt, Artificial Sequence
  spacer sequence GTCN PAM
cgaugcuccugccccaagcc

SEQ ID NO: 7536 - RNA, 20 nt, Artificial Sequence
  spacer sequence GTCN PAM
ugguuggcuguaaaugggag

SEQ ID NO: 7537 - RNA, 20 nt, Artificial Sequence
  spacer sequence GTCN PAM
gcgugaagggccuccggccu

SEQ ID NO: 7538 - RNA, 20 nt, Artificial Sequence
  spacer sequence GTCN PAM
cccgggacuggccucucgcu

SEQ ID NO: 7539 - RNA, 20 nt, Artificial Sequence
  spacer sequence GTCN PAM
cgggagacccugcugcagcu

SEQ ID NO: 7540 - RNA, 20 nt, Artificial Sequence
  spacer sequence GTCN PAM
cccccacccauucggaguug

SEQ ID NO: 7541 - RNA, 20 nt, Artificial Sequence
  spacer sequence GTCN PAM
ggggcugucucccccaccca

SEQ ID NO: 7542 - RNA, 20 nt, Artificial Sequence
  spacer sequence GTCN PAM
acucuccggggaacagaggg

SEQ ID NO: 7543 - RNA, 20 nt, Artificial Sequence
  spacer sequence GTCN PAM
ccagcucagcacuuuauccc

SEQ ID NO: 7544 - RNA, 20 nt, Artificial Sequence
  spacer sequence GTCN PAM
uugguccccagcucagcacu

SEQ ID NO: 7545 - RNA, 20 nt, Artificial Sequence
  spacer sequence GTCN PAM
cauccuccacccgccugugc

SEQ ID NO: 7546 - RNA, 20 nt, Artificial Sequence
  spacer sequence GTCN PAM
uagggggacccuguggccug

SEQ ID NO: 7547 - RNA, 20 nt, Artificial Sequence
  spacer sequence GTCN PAM
cccuaggacagccagagccc

SEQ ID NO: 7548 - RNA, 20 nt, Artificial Sequence
  spacer sequence GTCN PAM
ugcaggccacaggguccccc

SEQ ID NO: 7549 - RNA, 20 nt, Artificial Sequence
  spacer sequence GTCN PAM
uccacacacauucacccacc

SEQ ID NO: 7550 - RNA, 20 nt, Artificial Sequence
  spacer sequence GTCN PAM
gcguguccuccacacacauu

SEQ ID NO: 7551 - RNA, 20 nt, Artificial Sequence
  spacer sequence GTCN PAM
cugcaaacaaaacugcaagc

SEQ ID NO: 7552 - RNA, 20 nt, Artificial Sequence
  spacer sequence GTCN PAM
uugccgugagcuccaguuaa

SEQ ID NO: 7553 - RNA, 20 nt, Artificial Sequence
  spacer sequence GTCN PAM
ucugugaaaguuucaaagug

SEQ ID NO: 7554 - RNA, 20 nt, Artificial Sequence
  spacer sequence GTCN PAM
uuuaacaucagguauauccc

SEQ ID NO: 7555 - RNA, 20 nt, Artificial Sequence
  spacer sequence GTCN PAM
cgggugcguggcugucaucc

SEQ ID NO: 7556 - RNA, 20 nt, Artificial Sequence
  spacer sequence GTCN PAM
uccacaccugaccuccauug

SEQ ID NO: 7557 - RNA, 20 nt, Artificial Sequence
  spacer sequence GTCN PAM
gguguggaugacagccacgc

SEQ ID NO: 7558 - RNA, 20 nt, Artificial Sequence
  spacer sequence GTCN PAM
ggggccugcugggggcuugg

SEQ ID NO: 7559 - RNA, 20 nt, Artificial Sequence
  spacer sequence GTCN PAM
gugcgugguuacagucgccg

SEQ ID NO: 7560 - RNA, 20 nt, Artificial Sequence
  spacer sequence GTCN PAM
ccggagguuuccuacuuaag

SEQ ID NO: 7561 - RNA, 20 nt, Artificial Sequence
  spacer sequence GTCN PAM
cuuaaguaggaaaccuccgg

SEQ ID NO: 7562 - RNA, 20 nt, Artificial Sequence
  spacer sequence GTCN PAM
ccugaaaagcuagguauguc

SEQ ID NO: 7563 - RNA, 20 nt, Artificial Sequence
  spacer sequence GTCN PAM
uugcuaaccagaagcauggc

SEQ ID NO: 7564 - RNA, 20 nt, Artificial Sequence
  spacer sequence GTCN PAM
uggaaggacagaagcaggcu

SEQ ID NO: 7565 - RNA, 20 nt, Artificial Sequence
  spacer sequence GTCN PAM
uuccaggaccuccugccuca

SEQ ID NO: 7566 - RNA, 20 nt, Artificial Sequence
  spacer sequence GTCN PAM
gagccuguggggauccaccg

SEQ ID NO: 7567 - RNA, 20 nt, Artificial Sequence
  spacer sequence GTCN PAM
ucaggccaggagcuagggcg

SEQ ID NO: 7568 - RNA, 20 nt, Artificial Sequence
  spacer sequence GTCN PAM
gugugucaccaggagcaaug

SEQ ID NO: 7569 - RNA, 20 nt, Artificial Sequence
  spacer sequence GTCN PAM
ccaggagcaaugccagcugg

SEQ ID NO: 7570 - RNA, 20 nt, Artificial Sequence
  spacer sequence GTCN PAM
guuccccuuaaacacacuca

SEQ ID NO: 7571 - RNA, 20 nt, Artificial Sequence
  spacer sequence GTCN PAM
cagauuuuccaaaagagaga

SEQ ID NO: 7572 - RNA, 20 nt, Artificial Sequence
  spacer sequence GTCN PAM
cucuuuuggaaaaucugcga

SEQ ID NO: 7573 - RNA, 20 nt, Artificial Sequence
  spacer sequence GTCN PAM
cgccucaaggccucccacca

SEQ ID NO: 7574 - RNA, 20 nt, Artificial Sequence
  spacer sequence GTCN PAM
gugggggaagggaagggaga

SEQ ID NO: 7575 - RNA, 20 nt, Artificial Sequence
  spacer sequence GTCN PAM
cgccuucugccccaggccac

SEQ ID NO: 7576 - RNA, 20 nt, Artificial Sequence
  spacer sequence GTCN PAM
uggucccuggggcggcuuuc

SEQ ID NO: 7577 - RNA, 20 nt, Artificial Sequence
  spacer sequence GTCN PAM
cuggggcggcuuuccuagga

SEQ ID NO: 7578 - RNA, 20 nt, Artificial Sequence
  spacer sequence GTCN PAM
ggcugcugcacggcucuggc

SEQ ID NO: 7579 - RNA, 20 nt, Artificial Sequence
  spacer sequence GTCN PAM
cugcccacacagacggacac

SEQ ID NO: 7580 - RNA, 20 nt, Artificial Sequence
  spacer sequence GTCN PAM
gugugggcagggacucuccc

SEQ ID NO: 7581 - RNA, 20 nt, Artificial Sequence
  spacer sequence GTCN PAM
gucugugugggcagggacuc

SEQ ID NO: 7582 - RNA, 20 nt, Artificial Sequence
  spacer sequence GTCN PAM
ucccaaagcaaguguccguc

SEQ ID NO: 7583 - RNA, 20 nt, Artificial Sequence
  spacer sequence GTCN PAM
uuccagcacuuugggaagcu

SEQ ID NO: 7584 - RNA, 20 nt, Artificial Sequence
  spacer sequence GTCN PAM
cccuguugugagcuguggca

SEQ ID NO: 7585 - RNA, 20 nt, Artificial Sequence
  spacer sequence GTCN PAM
caaaaaaaaaaagggaugac

SEQ ID NO: 7586 - RNA, 20 nt, Artificial Sequence
  spacer sequence GTCN PAM
ucccuuuuuuuuuuugagac

SEQ ID NO: 7587 - RNA, 20 nt, Artificial Sequence
  spacer sequence GTCN PAM
cgugauuuugccuaaggaca

SEQ ID NO: 7588 - RNA, 20 nt, Artificial Sequence
  spacer sequence GTCN PAM
uuaggcaaaaucacgggacc

SEQ ID NO: 7589 - RNA, 20 nt, Artificial Sequence
  spacer sequence GTCN PAM
uaacuucuagguguccuuag

SEQ ID NO: 7590 - RNA, 20 nt, Artificial Sequence
  spacer sequence GTCN PAM
ccacggcuucauucaaacau

SEQ ID NO: 7591 - RNA, 20 nt, Artificial Sequence
  spacer sequence GTCN PAM
uugggcccugaugcacuuac

SEQ ID NO: 7592 - RNA, 20 nt, Artificial Sequence
  spacer sequence GTCN PAM
ugugguuagagguacaggcg

SEQ ID NO: 7593 - RNA, 20 nt, Artificial Sequence
  spacer sequence GTCN PAM
uagaggccaaccuggauuca

SEQ ID NO: 7594 - RNA, 20 nt, Artificial Sequence
  spacer sequence GTCN PAM
cgccacagcccaucagggau

SEQ ID NO: 7595 - RNA, 20 nt, Artificial Sequence
  spacer sequence GTCN PAM
caggaucccugaugggcugu

SEQ ID NO: 7596 - RNA, 20 nt, Artificial Sequence
  spacer sequence GTCN PAM
agucuuccaaaucugauugg

SEQ ID NO: 7597 - RNA, 20 nt, Artificial Sequence
  spacer sequence GTCN PAM
uccaaaucugauuggcaaau

SEQ ID NO: 7598 - RNA, 20 nt, Artificial Sequence
  spacer sequence GTCN PAM
guucgggccauccuagcauc

SEQ ID NO: 7599 - RNA, 20 nt, Artificial Sequence
  spacer sequence GTCN PAM
ccagcagccaccucugcacg

SEQ ID NO: 7600 - RNA, 20 nt, Artificial Sequence
  spacer sequence GTCN PAM
ccccaacacggguggggcag

SEQ ID NO: 7601 - RNA, 20 nt, Artificial Sequence
  spacer sequence GTCN PAM
caggccucgaacgugcaucc

SEQ ID NO: 7602 - RNA, 20 nt, Artificial Sequence
  spacer sequence GTCN PAM
ccacguagcaggaugcacgu

SEQ ID NO: 7603 - RNA, 20 nt, Artificial Sequence
  spacer sequence GTCN PAM
ggucuccacguagcaggaug

SEQ ID NO: 7604 - RNA, 20 nt, Artificial Sequence
  spacer sequence GTCN PAM
cgggaaauaagccuggggcc

SEQ ID NO: 7605 - RNA, 20 nt, Artificial Sequence
  spacer sequence GTCN PAM
uccugccccaugggguggua

SEQ ID NO: 7606 - RNA, 20 nt, Artificial Sequence
  spacer sequence GTCN PAM
guaccucgcacacugcauuu

SEQ ID NO: 7607 - RNA, 20 nt, Artificial Sequence
  spacer sequence GTCN PAM
ccuugugagaaggggcccgc

SEQ ID NO: 7608 - RNA, 20 nt, Artificial Sequence
  spacer sequence GTCN PAM
guucuggggcugcucugggc

SEQ ID NO: 7609 - RNA, 20 nt, Artificial Sequence
  spacer sequence GTCN PAM
cugggguagaugcacacauc

SEQ ID NO: 7610 - RNA, 20 nt, Artificial Sequence
  spacer sequence GTCN PAM
ccagaugugugcaucuaccc

SEQ ID NO: 7611 - RNA, 20 nt, Artificial Sequence
  spacer sequence GTCN PAM
ucccaagugggccauagccc

SEQ ID NO: 7612 - RNA, 20 nt, Artificial Sequence
  spacer sequence GTCN PAM
uaggucccagggcuuugcca

SEQ ID NO: 7613 - RNA, 20 nt, Artificial Sequence
  spacer sequence GTCN PAM
cagggcuuugccagcagaag

SEQ ID NO: 7614 - RNA, 20 nt, Artificial Sequence
  spacer sequence GTCN PAM
gugcuagaggccuccaaccg

SEQ ID NO: 7615 - RNA, 20 nt, Artificial Sequence
  spacer sequence GTCN PAM
acccguguggcagcacccgg

SEQ ID NO: 7616 - RNA, 20 nt, Artificial Sequence
  spacer sequence GTCN PAM
cugcagcgccugagacuccu

SEQ ID NO: 7617 - RNA, 20 nt, Artificial Sequence
  spacer sequence GTCN PAM
caggcgcugcagggacccgg

SEQ ID NO: 7618 - RNA, 20 nt, Artificial Sequence
  spacer sequence GTCN PAM
acugagugcgaggagucuca

SEQ ID NO: 7619 - RNA, 20 nt, Artificial Sequence
  spacer sequence GTCN PAM
ccacagaucaaucacuugau

SEQ ID NO: 7620 - RNA, 20 nt, Artificial Sequence
  spacer sequence GTCN PAM
aacaucaagugauugaucug

SEQ ID NO: 7621 - RNA, 20 nt, Artificial Sequence
  spacer sequence GTCN PAM
ugucaaacaucaagugauug

SEQ ID NO: 7622 - RNA, 20 nt, Artificial Sequence
  spacer sequence GTCN PAM
acucucuguauuuugcaaau

SEQ ID NO: 7623 - RNA, 20 nt, Artificial Sequence
  spacer sequence GTCN PAM
ucuacucucuguauuuugca

SEQ ID NO: 7624 - RNA, 20 nt, Artificial Sequence
  spacer sequence GTCN PAM
ccaacuccugagcucaaggg

SEQ ID NO: 7625 - RNA, 20 nt, Artificial Sequence
  spacer sequence GTCN PAM
aggcuggucuccaacuccug

SEQ ID NO: 7626 - RNA, 20 nt, Artificial Sequence
  spacer sequence GTCN PAM
cacuuuguuguccaggcugg

SEQ ID NO: 7627 - RNA, 20 nt, Artificial Sequence
  spacer sequence GTCN PAM
cuacaaaaaaauacaaaaau

SEQ ID NO: 7628 - RNA, 20 nt, Artificial Sequence
  spacer sequence GTCN PAM
cagcuauuggagaggcugag

SEQ ID NO: 7629 - RNA, 20 nt, Artificial Sequence
  spacer sequence GTCN PAM
cugcacuccagccugggcaa

SEQ ID NO: 7630 - RNA, 20 nt, Artificial Sequence
  spacer sequence GTCN PAM
cacucuguugcccaggcugg

SEQ ID NO: 7631 - RNA, 20 nt, Artificial Sequence
  spacer sequence GTCN PAM
caaaaaaaguugaggccggg

SEQ ID NO: 7632 - RNA, 20 nt, Artificial Sequence
  spacer sequence GTCN PAM
gcccacuuuggccucccaaa

SEQ ID NO: 7633 - RNA, 20 nt, Artificial Sequence
  spacer sequence GTCN PAM
cuacuaaaaauacaaaaauu

SEQ ID NO: 7634 - RNA, 20 nt, Artificial Sequence
  spacer sequence GTCN PAM
caguuacucgggaggcugag

SEQ ID NO: 7635 - RNA, 20 nt, Artificial Sequence
  spacer sequence GTCN PAM
cccucuguugcccaggcugg

SEQ ID NO: 7636 - RNA, 20 nt, Artificial Sequence
  spacer sequence GTCN PAM
ggagguugagaccauccugg

SEQ ID NO: 7637 - RNA, 20 nt, Artificial Sequence
  spacer sequence GTCN PAM
caaccuccugaccucgugau

SEQ ID NO: 7638 - RNA, 20 nt, Artificial Sequence
  spacer sequence GTCN PAM
cuacuaaaaaaaauauacaa

SEQ ID NO: 7639 - RNA, 20 nt, Artificial Sequence
  spacer sequence GTCN PAM
cagguacucgggaggcugag

SEQ ID NO: 7640 - RNA, 20 nt, Artificial Sequence
  spacer sequence GTCN PAM
cccaagcuggaguguagcgg

SEQ ID NO: 7641 - RNA, 20 nt, Artificial Sequence
  spacer sequence GTCN PAM
cgcucugucacccaagcugg

SEQ ID NO: 7642 - RNA, 20 nt, Artificial Sequence
  spacer sequence GTCN PAM
caaaaaacaaaacaaaacaa

SEQ ID NO: 7643 - RNA, 20 nt, Artificial Sequence
  spacer sequence GTCN PAM
uuaagaggcuuguggccgcg

SEQ ID NO: 7644 - RNA, 20 nt, Artificial Sequence
  spacer sequence GTCN PAM
ucccuauagccucuggaggg

SEQ ID NO: 7645 - RNA, 20 nt, Artificial Sequence
  spacer sequence GTCN PAM
ccucuccccgcggugugacc

SEQ ID NO: 7646 - RNA, 20 nt, Artificial Sequence
  spacer sequence GTCN PAM
caccgcggggagaggugaca

SEQ ID NO: 7647 - RNA, 20 nt, Artificial Sequence
  spacer sequence GTCN PAM
agcuuucgagggucacaccg

SEQ ID NO: 7648 - RNA, 20 nt, Artificial Sequence
  spacer sequence GTCN PAM
gggagcagcgcuggcugagg

SEQ ID NO: 7649 - RNA, 20 nt, Artificial Sequence
  spacer sequence GTCN PAM
cgccagcggccgucuucugu

SEQ ID NO: 7650 - RNA, 20 nt, Artificial Sequence
  spacer sequence GTCN PAM
ucugucccugcauuuagaga

SEQ ID NO: 7651 - RNA, 20 nt, Artificial Sequence
  spacer sequence GTCN PAM
cugcauuuagagaaggggga

SEQ ID NO: 7652 - RNA, 20 nt, Artificial Sequence
  spacer sequence GTCN PAM
cuuugccaucccccuucucu

SEQ ID NO: 7653 - RNA, 20 nt, Artificial Sequence
  spacer sequence GTCN PAM
uaccucaguuuccccaccug

SEQ ID NO: 7654 - RNA, 20 nt, Artificial Sequence
  spacer sequence GTCN PAM
gggcuggccccagggcgugg

SEQ ID NO: 7655 - RNA, 20 nt, Artificial Sequence
  spacer sequence GTCN PAM
cccagaccacccggacggcc

SEQ ID NO: 7656 - RNA, 20 nt, Artificial Sequence
  spacer sequence GTCN PAM
gggcgacugccccgagggcc

SEQ ID NO: 7657 - RNA, 20 nt, Artificial Sequence
  spacer sequence GTCN PAM
ggguggucugggcgacugcc

SEQ ID NO: 7658 - RNA, 20 nt, Artificial Sequence
  spacer sequence GTCN PAM
guugaaaaguuggccggggc

SEQ ID NO: 7659 - RNA, 20 nt, Artificial Sequence
  spacer sequence GTCN PAM
cgcgccguuuacuuccgccu

SEQ ID NO: 7660 - RNA, 20 nt, Artificial Sequence
  spacer sequence GTCN PAM
cggcaggaaagggucagccg

SEQ ID NO: 7661 - RNA, 20 nt, Artificial Sequence
  spacer sequence GTCN PAM
gccgcgcacgguggccgccc

SEQ ID NO: 7662 - RNA, 20 nt, Artificial Sequence
  spacer sequence GTCN PAM
cgcgggcggccaccgugcgc

SEQ ID NO: 7663 - RNA, 20 nt, Artificial Sequence
  spacer sequence GTCN PAM
gcgcucgucgcagccaucuu

SEQ ID NO: 7664 - RNA, 20 nt, Artificial Sequence
  spacer sequence GTCN PAM
cagccaucuuggcuccuggc

SEQ ID NO: 7665 - RNA, 20 nt, Artificial Sequence
  spacer sequence GTCN PAM
ugggcugggcggccauguug

SEQ ID NO: 7666 - RNA, 20 nt, Artificial Sequence
  spacer sequence GTCN PAM
ggcagggcucucauauccgg

SEQ ID NO: 7667 - RNA, 20 nt, Artificial Sequence
  spacer sequence GTCN PAM
cucuccacuggcgaugaucg

SEQ ID NO: 7668 - RNA, 20 nt, Artificial Sequence
  spacer sequence GTCN PAM
aaugcaaucgaucaucgcca

SEQ ID NO: 7669 - RNA, 20 nt, Artificial Sequence
  spacer sequence GTCN PAM
gucaaaugcaaucgaucauc

SEQ ID NO: 7670 - RNA, 20 nt, Artificial Sequence
  spacer sequence GTCN PAM
cguccgucaaaugcaaucga

SEQ ID NO: 7671 - RNA, 20 nt, Artificial Sequence
  spacer sequence GTCN PAM
agagucgcucgcguugcucg

SEQ ID NO: 7672 - RNA, 20 nt, Artificial Sequence
  spacer sequence GTCN PAM
cucgcguugcucgacguuuu

SEQ ID NO: 7673 - RNA, 20 nt, Artificial Sequence
  spacer sequence GTCN PAM
agcaacgcgagcgacucucg

SEQ ID NO: 7674 - RNA, 20 nt, Artificial Sequence
  spacer sequence GTCN PAM
uggaguugcagaaaacgucg

SEQ ID NO: 7675 - RNA, 20 nt, Artificial Sequence
  spacer sequence GTCN PAM
ucgagauauuuuacgguccu

SEQ ID NO: 7676 - RNA, 20 nt, Artificial Sequence
  spacer sequence GTCN PAM
cagaccccugcagaaucaga

SEQ ID NO: 7677 - RNA, 20 nt, Artificial Sequence
  spacer sequence GTCN PAM
gcgacuuucgccgucuucga

SEQ ID NO: 7678 - RNA, 20 nt, Artificial Sequence
  spacer sequence GTCN PAM
uuuugguccauuucaguugu

SEQ ID NO: 7679 - RNA, 20 nt, Artificial Sequence
  spacer sequence GTCN PAM
auuucaguuguaaaccaaga

SEQ ID NO: 7680 - RNA, 20 nt, Artificial Sequence
  spacer sequence GTCN PAM
cggcuacuucuugguuuaca

SEQ ID NO: 7681 - RNA, 20 nt, Artificial Sequence
  spacer sequence GTCN PAM
aggucgcgccuggggggaca

SEQ ID NO: 7682 - RNA, 20 nt, Artificial Sequence
  spacer sequence GTCN PAM
cgccuggggggacaggucga

SEQ ID NO: 7683 - RNA, 20 nt, Artificial Sequence
  spacer sequence GTCN PAM
ccccaggcgcgaccucgacc

SEQ ID NO: 7684 - RNA, 20 nt, Artificial Sequence
  spacer sequence GTCN PAM
augccuuucuccagagaugg

SEQ ID NO: 7685 - RNA, 20 nt, Artificial Sequence
  spacer sequence GTCN PAM
uguuucugagcccacggugg

SEQ ID NO: 7686 - RNA, 20 nt, Artificial Sequence
  spacer sequence GTCN PAM
ccgaugaugcguccgcaaga

SEQ ID NO: 7687 - RNA, 20 nt, Artificial Sequence
  spacer sequence GTCN PAM
gcaagaugagggcaauggag

SEQ ID NO: 7688 - RNA, 20 nt, Artificial Sequence
  spacer sequence GTCN PAM
gaucucacucuccauugccc

SEQ ID NO: 7689 - RNA, 20 nt, Artificial Sequence
  spacer sequence GTCN PAM
guaguuaccugcccaacaac

SEQ ID NO: 7690 - RNA, 20 nt, Artificial Sequence
  spacer sequence GTCN PAM
aguuacugccucucccugug

SEQ ID NO: 7691 - RNA, 20 nt, Artificial Sequence
  spacer sequence GTCN PAM
ucggcuucguucuguccuuu

SEQ ID NO: 7692 - RNA, 20 nt, Artificial Sequence
  spacer sequence GTCN PAM
uuuuggcagccugaauuggg

SEQ ID NO: 7693 - RNA, 20 nt, Artificial Sequence
  spacer sequence GTCN PAM
ugagcuuuuacuuucacacc

SEQ ID NO: 7694 - RNA, 20 nt, Artificial Sequence
  spacer sequence GTCN PAM
uccacaguuuccuaaauggg

SEQ ID NO: 7695 - RNA, 20 nt, Artificial Sequence
  spacer sequence GTCN PAM
caucaguaggcauucuccag

SEQ ID NO: 7696 - RNA, 20 nt, Artificial Sequence
  spacer sequence GTCN PAM
gccucuggagaaugccuacu

SEQ ID NO: 7697 - RNA, 20 nt, Artificial Sequence
  spacer sequence GTCN PAM
cuccaauauauuggucggcc

SEQ ID NO: 7698 - RNA, 20 nt, Artificial Sequence
  spacer sequence GTCN PAM
auuaauccgucucuccaaua

SEQ ID NO: 7699 - RNA, 20 nt, Artificial Sequence
  spacer sequence GTCN PAM
ggggaauuggcccaugcggu

SEQ ID NO: 7700 - RNA, 20 nt, Artificial Sequence
  spacer sequence GTCN PAM
cgggagggaugccaucugca

SEQ ID NO: 7701 - RNA, 20 nt, Artificial Sequence
  spacer sequence GTCN PAM
ccggcuugcagauggcaucc

SEQ ID NO: 7702 - RNA, 20 nt, Artificial Sequence
  spacer sequence GTCN PAM
aagucaggaaacggaagaac

SEQ ID NO: 7703 - RNA, 20 nt, Artificial Sequence
  spacer sequence GTCN PAM
ggaaacggaagaaccagggg

SEQ ID NO: 7704 - RNA, 20 nt, Artificial Sequence
  spacer sequence GTCN PAM
caccuuuagcuccccugguu

SEQ ID NO: 7705 - RNA, 20 nt, Artificial Sequence
  spacer sequence GTCN PAM
uggagucccaaggcuggggg

SEQ ID NO: 7706 - RNA, 20 nt, Artificial Sequence
  spacer sequence GTCN PAM
caaggcugggggcccugucc

SEQ ID NO: 7707 - RNA, 20 nt, Artificial Sequence
  spacer sequence GTCN PAM
aagggcaggaggaggaagag

SEQ ID NO: 7708 - RNA, 20 nt, Artificial Sequence
  spacer sequence GTCN PAM
cagcgccaggaacaagagca

SEQ ID NO: 7709 - RNA, 20 nt, Artificial Sequence
  spacer sequence GTCN PAM
aaaaaaaaaaaaaaaagagg

SEQ ID NO: 7710 - RNA, 20 nt, Artificial Sequence
  spacer sequence GTCN PAM
cgcucugucuccuaggcuag

SEQ ID NO: 7711 - RNA, 20 nt, Artificial Sequence
  spacer sequence GTCN PAM
ccuaggcuagagacagaaug

SEQ ID NO: 7712 - RNA, 20 nt, Artificial Sequence
  spacer sequence GTCN PAM
cuagccuaggagacagagcg

SEQ ID NO: 7713 - RNA, 20 nt, Artificial Sequence
  spacer sequence GTCN PAM
ugccacugcacugcauucug

SEQ ID NO: 7714 - RNA, 20 nt, Artificial Sequence
  spacer sequence GTCN PAM
ccugccucagucugcagagu

SEQ ID NO: 7715 - RNA, 20 nt, Artificial Sequence
  spacer sequence GTCN PAM
gcagaguagcugggacuaca

SEQ ID NO: 7716 - RNA, 20 nt, Artificial Sequence
  spacer sequence GTCN PAM
cagcuacucugcagacugag

SEQ ID NO: 7717 - RNA, 20 nt, Artificial Sequence
  spacer sequence GTCN PAM
cgaacuccugaccucaagug

SEQ ID NO: 7718 - RNA, 20 nt, Artificial Sequence
  spacer sequence GTCN PAM
ggaguucgcgacuagccugg

SEQ ID NO: 7719 - RNA, 20 nt, Artificial Sequence
  spacer sequence GTCN PAM
acgccuguaaucccagcacu

SEQ ID NO: 7720 - RNA, 20 nt, Artificial Sequence
  spacer sequence GTCN PAM
uccccuuggucccccgaccc

SEQ ID NO: 7721 - RNA, 20 nt, Artificial Sequence
  spacer sequence GTCN PAM
cccgacccccaggcaggcuc

SEQ ID NO: 7722 - RNA, 20 nt, Artificial Sequence
  spacer sequence GTCN PAM
ggggaccaaggggaagaccc

SEQ ID NO: 7723 - RNA, 20 nt, Artificial Sequence
  spacer sequence GTCN PAM
gcgaggggguuuccagagga

SEQ ID NO: 7724 - RNA, 20 nt, Artificial Sequence
  spacer sequence GTCN PAM
cuagggaucccuucacccag

SEQ ID NO: 7725 - RNA, 20 nt, Artificial Sequence
  spacer sequence GTCN PAM
ucucaagcaccuacuuggcu

SEQ ID NO: 7726 - RNA, 20 nt, Artificial Sequence
  spacer sequence GTCN PAM
gacaucucccuccucgucca

SEQ ID NO: 7727 - RNA, 20 nt, Artificial Sequence
  spacer sequence GTCN PAM
gaccugccgugggucaucuc

SEQ ID NO: 7728 - RNA, 20 nt, Artificial Sequence
  spacer sequence GTCN PAM
acuaggacagugucugauuu

SEQ ID NO: 7729 - RNA, 20 nt, Artificial Sequence
  spacer sequence GTCN PAM
uaguggacgaggagggagau

SEQ ID NO: 7730 - RNA, 20 nt, Artificial Sequence
  spacer sequence GTCN PAM
gauuugcccucuuucccucc

SEQ ID NO: 7731 - RNA, 20 nt, Artificial Sequence
  spacer sequence GTCN PAM
caagacagaguuacaaauuu

SEQ ID NO: 7732 - RNA, 20 nt, Artificial Sequence
  spacer sequence GTCN PAM
ugugacaauucucuggauca

SEQ ID NO: 7733 - RNA, 20 nt, Artificial Sequence
  spacer sequence GTCN PAM
agaaaaccagccuccucugu

SEQ ID NO: 7734 - RNA, 20 nt, Artificial Sequence
  spacer sequence GTCN PAM
ccaaacugaagcuaaguugu

SEQ ID NO: 7735 - RNA, 20 nt, Artificial Sequence
  spacer sequence GTCN PAM
cgcucugucgcccaggcugg

SEQ ID NO: 7736 - RNA, 20 nt, Artificial Sequence
  spacer sequence GTCN PAM
cccaggcuggagugcagcgg

SEQ ID NO: 7737 - RNA, 20 nt, Artificial Sequence
  spacer sequence GTCN PAM
cugcaaacuccgccucuccg

SEQ ID NO: 7738 - RNA, 20 nt, Artificial Sequence
  spacer sequence GTCN PAM
gagauuacaagcacgugcca

SEQ ID NO: 7739 - RNA, 20 nt, Artificial Sequence
  spacer sequence GTCN PAM
cgaacuccugaccucaagug

SEQ ID NO: 7740 - RNA, 20 nt, Artificial Sequence
  spacer sequence GTCN PAM
ggaguucgagaccagccugg

SEQ ID NO: 7741 - RNA, 20 nt, Artificial Sequence
  spacer sequence GTCN PAM
ccucugguucccugaggagg

SEQ ID NO: 7742 - RNA, 20 nt, Artificial Sequence
  spacer sequence GTCN PAM
uucugaugcaauuuucuaua

SEQ ID NO: 7743 - RNA, 20 nt, Artificial Sequence
  spacer sequence GTCN PAM
agauuugggcggcauuuuua

SEQ ID NO: 7744 - RNA, 20 nt, Artificial Sequence
  spacer sequence GTCN PAM
cagauggaucuugcagagac

SEQ ID NO: 7745 - RNA, 20 nt, Artificial Sequence
  spacer sequence GTCN PAM
cugcaagauccaucugggac

SEQ ID NO: 7746 - RNA, 20 nt, Artificial Sequence
  spacer sequence GTCN PAM
cuacugaggucucugcaaga

SEQ ID NO: 7747 - RNA, 20 nt, Artificial Sequence
  spacer sequence GTCN PAM
cacacccuccccgcugcacc

SEQ ID NO: 7748 - RNA, 20 nt, Artificial Sequence
  spacer sequence GTCN PAM
gggugacuugggacauggag

SEQ ID NO: 7749 - RNA, 20 nt, Artificial Sequence
  spacer sequence GTCN PAM
cccagaccugucccacaccc

SEQ ID NO: 7750 - RNA, 20 nt, Artificial Sequence
  spacer sequence GTCN PAM
caagucacccagaccugucc

SEQ ID NO: 7751 - RNA, 20 nt, Artificial Sequence
  spacer sequence GTCN PAM
cagggaaguagcacaaaccc

SEQ ID NO: 7752 - RNA, 20 nt, Artificial Sequence
  spacer sequence GTCN PAM
cggggaagcuccaaaggcaa

SEQ ID NO: 7753 - RNA, 20 nt, Artificial Sequence
  spacer sequence GTCN PAM
agugggcucugggcugcccc

SEQ ID NO: 7754 - RNA, 20 nt, Artificial Sequence
  spacer sequence GTCN PAM
gccuccccacagggcagugc

SEQ ID NO: 7755 - RNA, 20 nt, Artificial Sequence
  spacer sequence GTCN PAM
ggagaaccaggucugccucc

SEQ ID NO: 7756 - RNA, 20 nt, Artificial Sequence
  spacer sequence GTCN PAM
acaucaaguguccggagaac

SEQ ID NO: 7757 - RNA, 20 nt, Artificial Sequence
  spacer sequence GTCN PAM
ccguccacaucaaguguccg

SEQ ID NO: 7758 - RNA, 20 nt, Artificial Sequence
  spacer sequence GTCN PAM
cuccaugccacaccuccucc

SEQ ID NO: 7759 - RNA, 20 nt, Artificial Sequence
  spacer sequence GTCN PAM
acacggcuguguuuggcuug

SEQ ID NO: 7760 - RNA, 20 nt, Artificial Sequence
  spacer sequence GTCN PAM
gcucguuagaggacggggag

SEQ ID NO: 7761 - RNA, 20 nt, Artificial Sequence
  spacer sequence GTCN PAM
ucuaacgagcagaccucaga

SEQ ID NO: 7762 - RNA, 20 nt, Artificial Sequence
  spacer sequence GTCN PAM
uccccguccucuaacgagca

SEQ ID NO: 7763 - RNA, 20 nt, Artificial Sequence
  spacer sequence GTCN PAM
acccucccaaaagcccuggg

SEQ ID NO: 7764 - RNA, 20 nt, Artificial Sequence
  spacer sequence GTCN PAM
uccgggcuacucaggaggcu

SEQ ID NO: 7765 - RNA, 20 nt, Artificial Sequence
  spacer sequence GTCN PAM
gggcuacucaggaggcugag

SEQ ID NO: 7766 - RNA, 20 nt, Artificial Sequence
  spacer sequence GTCN PAM
caggcuggaaucagcucacu

SEQ ID NO: 7767 - RNA, 20 nt, Artificial Sequence
  spacer sequence GTCN PAM
cuaaacaaaccaaaaaacau

SEQ ID NO: 7768 - RNA, 20 nt, Artificial Sequence
  spacer sequence GTCN PAM
uaggugaacuuaaauggaaa

SEQ ID NO: 7769 - RNA, 20 nt, Artificial Sequence
  spacer sequence GTCN PAM
aggaguuugagaccagccua

SEQ ID NO: 7770 - RNA, 20 nt, Artificial Sequence
  spacer sequence GTCN PAM
caaacuccuggacucaagca

SEQ ID NO: 7771 - RNA, 20 nt, Artificial Sequence
  spacer sequence GTCN PAM
uguugccuaggcuggucuca

SEQ ID NO: 7772 - RNA, 20 nt, Artificial Sequence
  spacer sequence GTCN PAM
cuaccgaaaauacaaaaauu

SEQ ID NO: 7773 - RNA, 20 nt, Artificial Sequence
  spacer sequence GTCN PAM
cuuaacccagucucaaaaaa

SEQ ID NO: 7774 - RNA, 20 nt, Artificial Sequence
  spacer sequence GTCN PAM
caaaaaaaaaaaaaaauuaa

SEQ ID NO: 7775 - RNA, 20 nt, Artificial Sequence
  spacer sequence GTCN PAM
ugggaguacuuugcacuuuc

SEQ ID NO: 7776 - RNA, 20 nt, Artificial Sequence
  spacer sequence GTCN PAM
cacccucggucaugggagua

SEQ ID NO: 7777 - RNA, 20 nt, Artificial Sequence
  spacer sequence GTCN PAM
gauaccugcccagucccaug

SEQ ID NO: 7778 - RNA, 20 nt, Artificial Sequence
  spacer sequence GTCN PAM
caugcgagaggcugaggcug

SEQ ID NO: 7779 - RNA, 20 nt, Artificial Sequence
  spacer sequence GTCN PAM
cgccagcgccagccucagcc

SEQ ID NO: 7780 - RNA, 20 nt, Artificial Sequence
  spacer sequence GTCN PAM
ucaguuaccccuagagaugc

SEQ ID NO: 7781 - RNA, 20 nt, Artificial Sequence
  spacer sequence GTCN PAM
cacuccccagacggggaggu

SEQ ID NO: 7782 - RNA, 20 nt, Artificial Sequence
  spacer sequence GTCN PAM
ggggagugggacucagccca

SEQ ID NO: 7783 - RNA, 20 nt, Artificial Sequence
  spacer sequence GTCN PAM
uccaccuccccgucugggga

SEQ ID NO: 7784 - RNA, 20 nt, Artificial Sequence
  spacer sequence GTCN PAM
gagguccuccaccuccccgu

SEQ ID NO: 7785 - RNA, 20 nt, Artificial Sequence
  spacer sequence GTCN PAM
ugcucuuguggguacagugg

SEQ ID NO: 7786 - RNA, 20 nt, Artificial Sequence
  spacer sequence GTCN PAM
gagaagaggccacggucuug

SEQ ID NO: 7787 - RNA, 20 nt, Artificial Sequence
  spacer sequence GTCN PAM
ugcugcucgcaggugugggg

SEQ ID NO: 7788 - RNA, 20 nt, Artificial Sequence
  spacer sequence GTCN PAM
gagauguucaccccccacac

SEQ ID NO: 7789 - RNA, 20 nt, Artificial Sequence
  spacer sequence GTCN PAM
caagucugagauguucaccc

SEQ ID NO: 7790 - RNA, 20 nt, Artificial Sequence
  spacer sequence GTCN PAM
ucacaagagcgucucaaguc

SEQ ID NO: 7791 - RNA, 20 nt, Artificial Sequence
  spacer sequence GTCN PAM
uaagguuggucagagacaau

SEQ ID NO: 7792 - RNA, 20 nt, Artificial Sequence
  spacer sequence GTCN PAM
gagacaauccucaaaauccu

SEQ ID NO: 7793 - RNA, 20 nt, Artificial Sequence
  spacer sequence GTCN PAM
cugaccaaccuuacgacgug

SEQ ID NO: 7794 - RNA, 20 nt, Artificial Sequence
  spacer sequence GTCN PAM
caggcagaggauuuugagga

SEQ ID NO: 7795 - RNA, 20 nt, Artificial Sequence
  spacer sequence GTCN PAM
ggggucccaggcagaggauu

SEQ ID NO: 7796 - RNA, 20 nt, Artificial Sequence
  spacer sequence GTCN PAM
uccgaugcuggaauauauuu

SEQ ID NO: 7797 - RNA, 20 nt, Artificial Sequence
  spacer sequence GTCN PAM
gcccacagagcagcacgucg

SEQ ID NO: 7798 - RNA, 20 nt, Artificial Sequence
  spacer sequence GTCN PAM
gggguugcagccaaggaaua

SEQ ID NO: 7799 - RNA, 20 nt, Artificial Sequence
  spacer sequence GTCN PAM
ugaaagagcuguguuuacag

SEQ ID NO: 7800 - RNA, 20 nt, Artificial Sequence
  spacer sequence GTCN PAM
cagcacuuggggaagcugag

SEQ ID NO: 7801 - RNA, 20 nt, Artificial Sequence
  spacer sequence GTCN PAM
caaacucccaaccucaggug

SEQ ID NO: 7802 - RNA, 20 nt, Artificial Sequence
  spacer sequence GTCN PAM
ggcuggucucaaacucccaa

SEQ ID NO: 7803 - RNA, 20 nt, Artificial Sequence
  spacer sequence GTCN PAM
cuacuaaaaguacaaaauca

SEQ ID NO: 7804 - RNA, 20 nt, Artificial Sequence
  spacer sequence GTCN PAM
cccaggccggagugcagugg

SEQ ID NO: 7805 - RNA, 20 nt, Artificial Sequence
  spacer sequence GTCN PAM
cgcucugucgcccaggccgg

SEQ ID NO: 7806 - RNA, 20 nt, Artificial Sequence
  spacer sequence GTCN PAM
uucaacucaucggugagguu

SEQ ID NO: 7807 - RNA, 20 nt, Artificial Sequence
  spacer sequence GTCN PAM
ccgcucuggagugaaggagu

SEQ ID NO: 7808 - RNA, 20 nt, Artificial Sequence
  spacer sequence GTCN PAM
gggcucacuccuucacucca

SEQ ID NO: 7809 - RNA, 20 nt, Artificial Sequence
  spacer sequence GTCN PAM
gggguaaccucccugguucu

SEQ ID NO: 7810 - RNA, 20 nt, Artificial Sequence
  spacer sequence GTCN PAM
cucacuugaucaggugcggg

SEQ ID NO: 7811 - RNA, 20 nt, Artificial Sequence
  spacer sequence GTCN PAM
uaugaagccaaauguuuacg

SEQ ID NO: 7812 - RNA, 20 nt, Artificial Sequence
  spacer sequence GTCN PAM
uuucucauccuacuaaaaac

SEQ ID NO: 7813 - RNA, 20 nt, Artificial Sequence
  spacer sequence GTCN PAM
accaaaaaaugccaccauga

SEQ ID NO: 7814 - RNA, 20 nt, Artificial Sequence
  spacer sequence GTCN PAM
uugaggccccccacccacgg

SEQ ID NO: 7815 - RNA, 20 nt, Artificial Sequence
  spacer sequence GTCN PAM
ccggggucugugaggcccgc

SEQ ID NO: 7816 - RNA, 20 nt, Artificial Sequence
  spacer sequence GTCN PAM
gugaggcccgcaggaggcaa

SEQ ID NO: 7817 - RNA, 20 nt, Artificial Sequence
  spacer sequence GTCN PAM
cggccucuccuugccuccug

SEQ ID NO: 7818 - RNA, 20 nt, Artificial Sequence
  spacer sequence GTCN PAM
gcggcgcaggagggguucag

SEQ ID NO: 7819 - RNA, 20 nt, Artificial Sequence
  spacer sequence GTCN PAM
ccgcccacggcagcaucugc

SEQ ID NO: 7820 - RNA, 20 nt, Artificial Sequence
  spacer sequence GTCN PAM
gugcggucgccgcccacggc

SEQ ID NO: 7821 - RNA, 20 nt, Artificial Sequence
  spacer sequence GTCN PAM
cgcagcaauagcagagggga

SEQ ID NO: 7822 - RNA, 20 nt, Artificial Sequence
  spacer sequence GTCN PAM
uugccggucccgcagcaaua

SEQ ID NO: 7823 - RNA, 20 nt, Artificial Sequence
  spacer sequence GTCN PAM
ggcguccuugccggucccgc

SEQ ID NO: 7824 - RNA, 20 nt, Artificial Sequence
  spacer sequence GTCN PAM
guccggcguccuugccgguc

SEQ ID NO: 7825 - RNA, 20 nt, Artificial Sequence
  spacer sequence GTCN PAM
accccgacucccaugguggg

SEQ ID NO: 7826 - RNA, 20 nt, Artificial Sequence
  spacer sequence GTCN PAM
ggguggacccagggaugggg

SEQ ID NO: 7827 - RNA, 20 nt, Artificial Sequence
  spacer sequence GTCN PAM
cacaggggcuccaagccggc

SEQ ID NO: 7828 - RNA, 20 nt, Artificial Sequence
  spacer sequence GTCN PAM
gcacggagcaaaacauucgc

SEQ ID NO: 7829 - RNA, 20 nt, Artificial Sequence
  spacer sequence GTCN PAM
ugucuguguuguggacuggg

SEQ ID NO: 7830 - RNA, 20 nt, Artificial Sequence
  spacer sequence GTCN PAM
guguuguggacugggcagcu

SEQ ID NO: 7831 - RNA, 20 nt, Artificial Sequence
  spacer sequence GTCN PAM
acaacacagacaggacggug

SEQ ID NO: 7832 - RNA, 20 nt, Artificial Sequence
  spacer sequence GTCN PAM
cccgggggcagaagcgccca

SEQ ID NO: 7833 - RNA, 20 nt, Artificial Sequence
  spacer sequence GTCN PAM
ccagaugccggccagcgucc

SEQ ID NO: 7834 - RNA, 20 nt, Artificial Sequence
  spacer sequence GTCN PAM
gugaucuccgcugguguugc

SEQ ID NO: 7835 - RNA, 20 nt, Artificial Sequence
  spacer sequence GTCN PAM
ugggcggccuccccgggcuc

SEQ ID NO: 7836 - RNA, 20 nt, Artificial Sequence
  spacer sequence GTCN PAM
caggguccugggcggccucc

SEQ ID NO: 7837 - RNA, 20 nt, Artificial Sequence
  spacer sequence GTCN PAM
ugcgggucgcaggguccugg

SEQ ID NO: 7838 - RNA, 20 nt, Artificial Sequence
  spacer sequence GTCN PAM
uccgcggcggggcgguccug

SEQ ID NO: 7839 - RNA, 20 nt, Artificial Sequence
  spacer sequence GTCN PAM
cccgccguccucgccgucac

SEQ ID NO: 7840 - RNA, 20 nt, Artificial Sequence
  spacer sequence GTCN PAM
ucgccgucaccaccgggugg

SEQ ID NO: 7841 - RNA, 20 nt, Artificial Sequence
  spacer sequence GTCN PAM
ccaccggguggagccacagg

SEQ ID NO: 7842 - RNA, 20 nt, Artificial Sequence
  spacer sequence GTCN PAM
gugugaucguccccgugacc

SEQ ID NO: 7843 - RNA, 20 nt, Artificial Sequence
  spacer sequence GTCN PAM
ccgugaccccggguuccgga

SEQ ID NO: 7844 - RNA, 20 nt, Artificial Sequence
  spacer sequence GTCN PAM
cggggacgaucacacggacc

SEQ ID NO: 7845 - RNA, 20 nt, Artificial Sequence
  spacer sequence GTCN PAM
ugggagccgggcugggccag

SEQ ID NO: 7846 - RNA, 20 nt, Artificial Sequence
  spacer sequence GTCN PAM
acagcggccgcccacguaaa

SEQ ID NO: 7847 - RNA, 20 nt, Artificial Sequence
  spacer sequence GTCN PAM
cgccuucuuuuucuucccac

SEQ ID NO: 7848 - RNA, 20 nt, Artificial Sequence
  spacer sequence GTCN PAM
gcgucugcuugcaagccggu

SEQ ID NO: 7849 - RNA, 20 nt, Artificial Sequence
  spacer sequence GTCN PAM
gcuugcaagccgguggccuc

SEQ ID NO: 7850 - RNA, 20 nt, Artificial Sequence
  spacer sequence GTCN PAM
caaacucccgcccugaggug

SEQ ID NO: 7851 - RNA, 20 nt, Artificial Sequence
  spacer sequence GTCN PAM
acuaaaaugcaaaaauguag

SEQ ID NO: 7852 - RNA, 20 nt, Artificial Sequence
  spacer sequence GTCN PAM
gccaccacgccuggcuacau

SEQ ID NO: 7853 - RNA, 20 nt, Artificial Sequence
  spacer sequence GTCN PAM
cggcuccaugcaaccuccac

SEQ ID NO: 7854 - RNA, 20 nt, Artificial Sequence
  spacer sequence GTCN PAM
cgcucuguugcccaggcugg

SEQ ID NO: 7855 - RNA, 20 nt, Artificial Sequence
  spacer sequence GTCN PAM
caaaaaaaaaauaauaagaa

SEQ ID NO: 7856 - RNA, 20 nt, Artificial Sequence
  spacer sequence GTCN PAM
ggaaaacagguuugaccucg

SEQ ID NO: 7857 - RNA, 20 nt, Artificial Sequence
  spacer sequence GTCN PAM
aaccuguuuuccugacacuu

SEQ ID NO: 7858 - RNA, 20 nt, Artificial Sequence
  spacer sequence GTCN PAM
ccgaggucaaaccuguuuuc

SEQ ID NO: 7859 - RNA, 20 nt, Artificial Sequence
  spacer sequence GTCN PAM
ccuuugagaagcauggucug

SEQ ID NO: 7860 - RNA, 20 nt, Artificial Sequence
  spacer sequence GTCN PAM
ggacacagccgccagaugcc

SEQ ID NO: 7861 - RNA, 20 nt, Artificial Sequence
  spacer sequence GTCN PAM
agaccaugcuucucaaaggg

SEQ ID NO: 7862 - RNA, 20 nt, Artificial Sequence
  spacer sequence GTCN PAM
uuaccaacguugcuuugcuu

SEQ ID NO: 7863 - RNA, 20 nt, Artificial Sequence
  spacer sequence GTCN PAM
ugcucuguugcccaggcugg

SEQ ID NO: 7864 - RNA, 20 nt, Artificial Sequence
  spacer sequence GTCN PAM
ggcaccacgccgggcuaauu

SEQ ID NO: 7865 - RNA, 20 nt, Artificial Sequence
  spacer sequence GTCN PAM
ugaauuccugaucucaagug

SEQ ID NO: 7866 - RNA, 20 nt, Artificial Sequence
  spacer sequence GTCN PAM
ucaacaaaaagauuuaaaag

SEQ ID NO: 7867 - RNA, 20 nt, Artificial Sequence
  spacer sequence GTCN PAM
gauccucgucuucaacaaaa

SEQ ID NO: 7868 - RNA, 20 nt, Artificial Sequence
  spacer sequence GTCN PAM
cucugggaggugagacuccu

SEQ ID NO: 7869 - RNA, 20 nt, Artificial Sequence
  spacer sequence GTCN PAM
caccucccagagugacugug

SEQ ID NO: 7870 - RNA, 20 nt, Artificial Sequence
  spacer sequence GTCN PAM
agagucacugagguccgaau

SEQ ID NO: 7871 - RNA, 20 nt, Artificial Sequence
  spacer sequence GTCN PAM
cugagguccgaauuguuggg

SEQ ID NO: 7872 - RNA, 20 nt, Artificial Sequence
  spacer sequence GTCN PAM
gaauuguuggggaauuacuc

SEQ ID NO: 7873 - RNA, 20 nt, Artificial Sequence
  spacer sequence GTCN PAM
cuucucuuuugagguuggug

SEQ ID NO: 7874 - RNA, 20 nt, Artificial Sequence
  spacer sequence GTCN PAM
uuaugggugaaucgugcuac

SEQ ID NO: 7875 - RNA, 20 nt, Artificial Sequence
  spacer sequence GTCN PAM
caaaaaaaacuuuuuaaggu

SEQ ID NO: 7876 - RNA, 20 nt, Artificial Sequence
  spacer sequence GTCN PAM
ugcucugucacccaggcugg

SEQ ID NO: 7877 - RNA, 20 nt, Artificial Sequence
  spacer sequence GTCN PAM
cccaggcuggagugcagugg

SEQ ID NO: 7878 - RNA, 20 nt, Artificial Sequence
  spacer sequence GTCN PAM
ggccaacauggugaaacccc

SEQ ID NO: 7879 - RNA, 20 nt, Artificial Sequence
  spacer sequence GTCN PAM
ggaguucaauaccagucugg

SEQ ID NO: 7880 - RNA, 20 nt, Artificial Sequence
  spacer sequence GTCN PAM
ccacacccagccaaaaaaug

SEQ ID NO: 7881 - RNA, 20 nt, Artificial Sequence
  spacer sequence GTCN PAM
caaaaaaauacauuuuuugg

SEQ ID NO: 7882 - RNA, 20 nt, Artificial Sequence
  spacer sequence GTCN PAM
cccaggccagagugcacugg

SEQ ID NO: 7883 - RNA, 20 nt, Artificial Sequence
  spacer sequence GTCN PAM
aggcugcagugagcuaggau

SEQ ID NO: 7884 - RNA, 20 nt, Artificial Sequence
  spacer sequence GTCN PAM
ccugagaccacaggugggua

SEQ ID NO: 7885 - RNA, 20 nt, Artificial Sequence
  spacer sequence GTCN PAM
caggagacuggggcaggagg

SEQ ID NO: 7886 - RNA, 20 nt, Artificial Sequence
  spacer sequence GTCN PAM
cuaucaaaaaaaaaaaaaaa

SEQ ID NO: 7887 - RNA, 20 nt, Artificial Sequence
  spacer sequence GTCN PAM
uaaacuucuggucucaagcg

SEQ ID NO: 7888 - RNA, 20 nt, Artificial Sequence
  spacer sequence GTCN PAM
caagcgauccuccugccuug

SEQ ID NO: 7889 - RNA, 20 nt, Artificial Sequence
  spacer sequence GTCN PAM
ucccagcacuuugcgaggcc

SEQ ID NO: 7890 - RNA, 20 nt, Artificial Sequence
  spacer sequence GTCN PAM
ccucaguguuucagaaaacc

SEQ ID NO: 7891 - RNA, 20 nt, Artificial Sequence
  spacer sequence GTCN PAM
cguggaggugacaccccaca

SEQ ID NO: 7892 - RNA, 20 nt, Artificial Sequence
  spacer sequence GTCN PAM
ccuccacgggacccugcggg

SEQ ID NO: 7893 - RNA, 20 nt, Artificial Sequence
  spacer sequence GTCN PAM
auccugguucacgccagugu

SEQ ID NO: 7894 - RNA, 20 nt, Artificial Sequence
  spacer sequence GTCN PAM
ucggccuucaccgaggggcc

SEQ ID NO: 7895 - RNA, 20 nt, Artificial Sequence
  spacer sequence GTCN PAM
caggauggggaaaggccccu

SEQ ID NO: 7896 - RNA, 20 nt, Artificial Sequence
  spacer sequence GTCN PAM
ggcugccugagcaccccugg

SEQ ID NO: 7897 - RNA, 20 nt, Artificial Sequence
  spacer sequence GTCN PAM
aagaaauggccacagcccag

SEQ ID NO: 7898 - RNA, 20 nt, Artificial Sequence
  spacer sequence GTCN PAM
gggcgguuuugaggaggaag

SEQ ID NO: 7899 - RNA, 20 nt, Artificial Sequence
  spacer sequence GTCN PAM
ggauuuccuagaaggucccu

SEQ ID NO: 7900 - RNA, 20 nt, Artificial Sequence
  spacer sequence GTCN PAM
cucaaccggggcuuaccaua

SEQ ID NO: 7901 - RNA, 20 nt, Artificial Sequence
  spacer sequence GTCN PAM
cuucuagccucgagaaaagu

SEQ ID NO: 7902 - RNA, 20 nt, Artificial Sequence
  spacer sequence GTCN PAM
ccuucccuguaggcacccgu

SEQ ID NO: 7903 - RNA, 20 nt, Artificial Sequence
  spacer sequence GTCN PAM
cuccccuggcacugggagga

SEQ ID NO: 7904 - RNA, 20 nt, Artificial Sequence
  spacer sequence GTCN PAM
cguagggucaggccuggaag

SEQ ID NO: 7905 - RNA, 20 nt, Artificial Sequence
  spacer sequence GTCN PAM
ggccuggaagccaacaaggc

SEQ ID NO: 7906 - RNA, 20 nt, Artificial Sequence
  spacer sequence GTCN PAM
cgggagagagcugagcacca

SEQ ID NO: 7907 - RNA, 20 nt, Artificial Sequence
  spacer sequence GTCN PAM
acccagcgggaacacguggg

SEQ ID NO: 7908 - RNA, 20 nt, Artificial Sequence
  spacer sequence GTCN PAM
caaaaaaaaaaaaaaaaaaa

SEQ ID NO: 7909 - RNA, 20 nt, Artificial Sequence
  spacer sequence GTCN PAM
cgcucugucacccaggcugg

SEQ ID NO: 7910 - RNA, 20 nt, Artificial Sequence
  spacer sequence GTCN PAM
cccaggcuggagugcagugg

SEQ ID NO: 7911 - RNA, 20 nt, Artificial Sequence
  spacer sequence GTCN PAM
cagcuacucgggaggcugag

SEQ ID NO: 7912 - RNA, 20 nt, Artificial Sequence
  spacer sequence GTCN PAM
gccaggauggucucagucuc

SEQ ID NO: 7913 - RNA, 20 nt, Artificial Sequence
  spacer sequence GTCN PAM
cagucuccugaccucgugau

SEQ ID NO: 7914 - RNA, 20 nt, Artificial Sequence
  spacer sequence GTCN PAM
ccugaccucgugauccuccc

SEQ ID NO: 7915 - RNA, 20 nt, Artificial Sequence
  spacer sequence GTCN PAM
ggagacugagaccauccugg

SEQ ID NO: 7916 - RNA, 20 nt, Artificial Sequence
  spacer sequence GTCN PAM
cugguggcuggacucggcgg

SEQ ID NO: 7917 - RNA, 20 nt, Artificial Sequence
  spacer sequence GTCN PAM
agccaccagagacccagagc

SEQ ID NO: 7918 - RNA, 20 nt, Artificial Sequence
  spacer sequence GTCN PAM
agguguccucuuggcuucuc

SEQ ID NO: 7919 - RNA, 20 nt, Artificial Sequence
  spacer sequence GTCN PAM
ucuuggcuucucugcacagg

SEQ ID NO: 7920 - RNA, 20 nt, Artificial Sequence
  spacer sequence GTCN PAM
cacgggaaugcacguucagg

SEQ ID NO: 7921 - RNA, 20 nt, Artificial Sequence
  spacer sequence GTCN PAM
ccaagaagcagccuccagaa

SEQ ID NO: 7922 - RNA, 20 nt, Artificial Sequence
  spacer sequence GTCN PAM
ccagccucaagcggcugcau

SEQ ID NO: 7923 - RNA, 20 nt, Artificial Sequence
  spacer sequence GTCN PAM
cugagcugcaaugcagccgc

SEQ ID NO: 7924 - RNA, 20 nt, Artificial Sequence
  spacer sequence GTCN PAM
ucccuucggggucccugagc

SEQ ID NO: 7925 - RNA, 20 nt, Artificial Sequence
  spacer sequence GTCN PAM
ucagcggcagaacguggucc

SEQ ID NO: 7926 - RNA, 20 nt, Artificial Sequence
  spacer sequence GTCN PAM
ccuggcaagacggagcgaga

SEQ ID NO: 7927 - RNA, 20 nt, Artificial Sequence
  spacer sequence GTCN PAM
ugccaggcgacuccgagucu

SEQ ID NO: 7928 - RNA, 20 nt, Artificial Sequence
  spacer sequence GTCN PAM
ccaugccagccacccucccc

SEQ ID NO: 7929 - RNA, 20 nt, Artificial Sequence
  spacer sequence GTCN PAM
gcugccucgcaccgcaccuu

SEQ ID NO: 7930 - RNA, 20 nt, Artificial Sequence
  spacer sequence GTCN PAM
uccaaggugcggugcgaggc

SEQ ID NO: 7931 - RNA, 20 nt, Artificial Sequence
  spacer sequence GTCN PAM
gauccucacccucccucgcc

SEQ ID NO: 7932 - RNA, 20 nt, Artificial Sequence
  spacer sequence GTCN PAM
ugccagagccucccuccucg

SEQ ID NO: 7933 - RNA, 20 nt, Artificial Sequence
  spacer sequence GTCN PAM
uggcgacagccgguguguga

SEQ ID NO: 7934 - RNA, 20 nt, Artificial Sequence
  spacer sequence GTCN PAM
ccaggaccagguagguguga

SEQ ID NO: 7935 - RNA, 20 nt, Artificial Sequence
  spacer sequence GTCN PAM
guggagagcggagccaaacg

SEQ ID NO: 7936 - RNA, 20 nt, Artificial Sequence
  spacer sequence GTCN PAM
cucagcuaaaaacgugucag

SEQ ID NO: 7937 - RNA, 20 nt, Artificial Sequence
  spacer sequence GTCN PAM
guuaaaagccagcggcuucc

SEQ ID NO: 7938 - RNA, 20 nt, Artificial Sequence
  spacer sequence GTCN PAM
uaacgagccucugcuccccg

SEQ ID NO: 7939 - RNA, 20 nt, Artificial Sequence
  spacer sequence GTCN PAM
ccggggagcagaggcucguu

SEQ ID NO: 7940 - RNA, 20 nt, Artificial Sequence
  spacer sequence GTCN PAM
gcuggucgccggggagcaga

SEQ ID NO: 7941 - RNA, 20 nt, Artificial Sequence
  spacer sequence GTCN PAM
gcccgcgucugcuggucgcc

SEQ ID NO: 7942 - RNA, 20 nt, Artificial Sequence
  spacer sequence GTCN PAM
gcguggcggcggccgggcgg

SEQ ID NO: 7943 - RNA, 20 nt, Artificial Sequence
  spacer sequence GTCN PAM
ccuccugcccgggccccgug

SEQ ID NO: 7944 - RNA, 20 nt, Artificial Sequence
  spacer sequence GTCN PAM
acucgcggcuuccugcagac

SEQ ID NO: 7945 - RNA, 20 nt, Artificial Sequence
  spacer sequence GTCN PAM
acaggagagaggggaugaga

SEQ ID NO: 7946 - RNA, 20 nt, Artificial Sequence
  spacer sequence GTCN PAM
gcaggaagccgcgagucgac

SEQ ID NO: 7947 - RNA, 20 nt, Artificial Sequence
  spacer sequence GTCN PAM
gcggccccucgcccgcagcc

SEQ ID NO: 7948 - RNA, 20 nt, Artificial Sequence
  spacer sequence GTCN PAM
cucacccgcagcuggagcac

SEQ ID NO: 7949 - RNA, 20 nt, Artificial Sequence
  spacer sequence GTCN PAM
ggcucaugucacucacccgc

SEQ ID NO: 7950 - RNA, 20 nt, Artificial Sequence
  spacer sequence GTCN PAM
caaaaaaaaaaaaaaaaaaa

SEQ ID NO: 7951 - RNA, 20 nt, Artificial Sequence
  spacer sequence GTCN PAM
cagccacucaggaggcugag

SEQ ID NO: 7952 - RNA, 20 nt, Artificial Sequence
  spacer sequence GTCN PAM
caaacuccugagcucaugcc

SEQ ID NO: 7953 - RNA, 20 nt, Artificial Sequence
  spacer sequence GTCN PAM
gggggcaguggcucacaccu

SEQ ID NO: 7954 - RNA, 20 nt, Artificial Sequence
  spacer sequence GTCN PAM
caguccgggggcaguggcuc

SEQ ID NO: 7955 - RNA, 20 nt, Artificial Sequence
  spacer sequence GTCN PAM
uuccgcccccacggugccug

SEQ ID NO: 7956 - RNA, 20 nt, Artificial Sequence
  spacer sequence GTCN PAM
ugcacagagaaggcuccccc

SEQ ID NO: 7957 - RNA, 20 nt, Artificial Sequence
  spacer sequence GTCN PAM
uugcugacugggcacccacg

SEQ ID NO: 7958 - RNA, 20 nt, Artificial Sequence
  spacer sequence GTCN PAM
gcaaggacugccuugcuuuc

SEQ ID NO: 7959 - RNA, 20 nt, Artificial Sequence
  spacer sequence GTCN PAM
gaaugcuggcucaccuagag

SEQ ID NO: 7960 - RNA, 20 nt, Artificial Sequence
  spacer sequence GTCN PAM
cugagccccccaacucuagg

SEQ ID NO: 7961 - RNA, 20 nt, Artificial Sequence
  spacer sequence GTCN PAM
ugucccugagccccccaacu

SEQ ID NO: 7962 - RNA, 20 nt, Artificial Sequence
  spacer sequence GTCN PAM
gguuccagaauuaguccugu

SEQ ID NO: 7963 - RNA, 20 nt, Artificial Sequence
  spacer sequence GTCN PAM
gugccauguaagugucagcc

SEQ ID NO: 7964 - RNA, 20 nt, Artificial Sequence
  spacer sequence GTCN PAM
gccaaagaugauggugacaa

SEQ ID NO: 7965 - RNA, 20 nt, Artificial Sequence
  spacer sequence GTCN PAM
ccaucaucuuuggcugacac

SEQ ID NO: 7966 - RNA, 20 nt, Artificial Sequence
  spacer sequence GTCN PAM
ucaccaccauugucaccauc

SEQ ID NO: 7967 - RNA, 20 nt, Artificial Sequence
  spacer sequence GTCN PAM
ucaucaccaucacuacaguc

SEQ ID NO: 7968 - RNA, 20 nt, Artificial Sequence
  spacer sequence GTCN PAM
ucaccaucaucaucaccauc

SEQ ID NO: 7969 - RNA, 20 nt, Artificial Sequence
  spacer sequence GTCN PAM
ucaccaucaucaccaucacu

SEQ ID NO: 7970 - RNA, 20 nt, Artificial Sequence
  spacer sequence GTCN PAM
ucaccaucaucacuacaguc

SEQ ID NO: 7971 - RNA, 20 nt, Artificial Sequence
  spacer sequence GTCN PAM
ucaccaucaucaccaucacu

SEQ ID NO: 7972 - RNA, 20 nt, Artificial Sequence
  spacer sequence GTCN PAM
ucaccaucaucaccaucacu

SEQ ID NO: 7973 - RNA, 20 nt, Artificial Sequence
  spacer sequence GTCN PAM
ucaccaucaucaucaccauc

SEQ ID NO: 7974 - RNA, 20 nt, Artificial Sequence
  spacer sequence GTCN PAM
uuacuaccaucaucaccauc

SEQ ID NO: 7975 - RNA, 20 nt, Artificial Sequence
  spacer sequence GTCN PAM
aguuugcugucaggacacag

SEQ ID NO: 7976 - RNA, 20 nt, Artificial Sequence
  spacer sequence GTCN PAM
ggacacagccugaggaugcc

SEQ ID NO: 7977 - RNA, 20 nt, Artificial Sequence
  spacer sequence GTCN PAM
ugacagcaaacuggacgugg

SEQ ID NO: 7978 - RNA, 20 nt, Artificial Sequence
  spacer sequence GTCN PAM
ggcauccucaggcugugucc

SEQ ID NO: 7979 - RNA, 20 nt, Artificial Sequence
  spacer sequence GTCN PAM
ggugguucugcaacauggag

SEQ ID NO: 7980 - RNA, 20 nt, Artificial Sequence
  spacer sequence GTCN PAM
acguguauuccauaguaaaa

SEQ ID NO: 7981 - RNA, 20 nt, Artificial Sequence
  spacer sequence GTCN PAM
uuuccauuaaaucagaaaau

SEQ ID NO: 7982 - RNA, 20 nt, Artificial Sequence
  spacer sequence GTCN PAM
cacuuaaaaaagagcaaguu

SEQ ID NO: 7983 - RNA, 20 nt, Artificial Sequence
  spacer sequence GTCN PAM
uggaagggcucaccguuggg

SEQ ID NO: 7984 - RNA, 20 nt, Artificial Sequence
  spacer sequence GTCN PAM
ucccugguggccccagugca

SEQ ID NO: 7985 - RNA, 20 nt, Artificial Sequence
  spacer sequence GTCN PAM
ugugcuuucuaagcccaagu

SEQ ID NO: 7986 - RNA, 20 nt, Artificial Sequence
  spacer sequence GTCN PAM
cuuucagggaguuaagaaca

SEQ ID NO: 7987 - RNA, 20 nt, Artificial Sequence
  spacer sequence GTCN PAM
gguguaagacauuacgacaa

SEQ ID NO: 7988 - RNA, 20 nt, Artificial Sequence
  spacer sequence GTCN PAM
uacaccugacaccuggaaua

SEQ ID NO: 7989 - RNA, 20 nt, Artificial Sequence
  spacer sequence GTCN PAM
uaaugucuuacaccugacac

SEQ ID NO: 7990 - RNA, 20 nt, Artificial Sequence
  spacer sequence GTCN PAM
cuccaccccuucuccacccc

SEQ ID NO: 7991 - RNA, 20 nt, Artificial Sequence
  spacer sequence GTCN PAM
gauaagcaucgcgccuaccg

SEQ ID NO: 7992 - RNA, 20 nt, Artificial Sequence
  spacer sequence GTCN PAM
gcacugcggggcccucagga

SEQ ID NO: 7993 - RNA, 20 nt, Artificial Sequence
  spacer sequence GTCN PAM
uuguggccugcguuuauuua

SEQ ID NO: 7994 - RNA, 20 nt, Artificial Sequence
  spacer sequence GTCN PAM
ucacucugggaagccaccaa

SEQ ID NO: 7995 - RNA, 20 nt, Artificial Sequence
  spacer sequence GTCN PAM
cccaagugaggauguuucca

SEQ ID NO: 7996 - RNA, 20 nt, Artificial Sequence
  spacer sequence GTCN PAM
auaggacggggucgcagcac

SEQ ID NO: 7997 - RNA, 20 nt, Artificial Sequence
  spacer sequence GTCN PAM
uauggacgcagauccgcuuu

SEQ ID NO: 7998 - RNA, 20 nt, Artificial Sequence
  spacer sequence GTCN PAM
cagcacggagcaacgggccc

SEQ ID NO: 7999 - RNA, 20 nt, Artificial Sequence
  spacer sequence GTCN PAM
ugaaucucgcuccccuucga

SEQ ID NO: 8000 - RNA, 20 nt, Artificial Sequence
  spacer sequence GTCN PAM
gaagagaagcucugagaagc

SEQ ID NO: 8001 - RNA, 20 nt, Artificial Sequence
  spacer sequence GTCN PAM
caggaguugcugguuuuagu

SEQ ID NO: 8002 - RNA, 20 nt, Artificial Sequence
  spacer sequence GTCN PAM
ccccaagcagagauuugggg

SEQ ID NO: 8003 - RNA, 20 nt, Artificial Sequence
  spacer sequence GTCN PAM
ugguccccccaagcagagau

SEQ ID NO: 8004 - RNA, 20 nt, Artificial Sequence
  spacer sequence GTCN PAM
aaaaaaggaaggaaggaagg

SEQ ID NO: 8005 - RNA, 20 nt, Artificial Sequence
  spacer sequence GTCN PAM
cgcucuguugcccaggcuag

SEQ ID NO: 8006 - RNA, 20 nt, Artificial Sequence
  spacer sequence GTCN PAM
agugauucuccugccucagc

SEQ ID NO: 8007 - RNA, 20 nt, Artificial Sequence
  spacer sequence GTCN PAM
cacucugucaccgggcugga

SEQ ID NO: 8008 - RNA, 20 nt, Artificial Sequence
  spacer sequence GTCN PAM
ccgggcuggagugcaguggc

SEQ ID NO: 8009 - RNA, 20 nt, Artificial Sequence
  spacer sequence GTCN PAM
ggcuggucuugaacuccuga

SEQ ID NO: 8010 - RNA, 20 nt, Artificial Sequence
  spacer sequence GTCN PAM
ugaacuccugaccucgugau

SEQ ID NO: 8011 - RNA, 20 nt, Artificial Sequence
  spacer sequence GTCN PAM
ggaguucaagaccagccgga

SEQ ID NO: 8012 - RNA, 20 nt, Artificial Sequence
  spacer sequence GTCN PAM
ccccagcacuuugggaggcc

SEQ ID NO: 8013 - RNA, 20 nt, Artificial Sequence
  spacer sequence GTCN PAM
cuaggcuggucucaaacucc

SEQ ID NO: 8014 - RNA, 20 nt, Artificial Sequence
  spacer sequence GTCN PAM
caaacuccaaccuuagguga

SEQ ID NO: 8015 - RNA, 20 nt, Artificial Sequence
  spacer sequence GTCN PAM
gggcgccucacgccuguaau

SEQ ID NO: 8016 - RNA, 20 nt, Artificial Sequence
  spacer sequence GTCN PAM
uucuaaaagcccuuuugucu

SEQ ID NO: 8017 - RNA, 20 nt, Artificial Sequence
  spacer sequence GTCN PAM
uuuuugaagaaaccuauuug

SEQ ID NO: 8018 - RNA, 20 nt, Artificial Sequence
  spacer sequence GTCN PAM
gggaagggggcagcagaaaa

SEQ ID NO: 8019 - RNA, 20 nt, Artificial Sequence
  spacer sequence GTCN PAM
aucaaguuuuucauccuaug

SEQ ID NO: 8020 - RNA, 20 nt, Artificial Sequence
  spacer sequence GTCN PAM
uuugucaguuuaauuugcag

SEQ ID NO: 8021 - RNA, 20 nt, Artificial Sequence
  spacer sequence GTCN PAM
guuuaauuugcaggccccag

SEQ ID NO: 8022 - RNA, 20 nt, Artificial Sequence
  spacer sequence GTCN PAM
cagaauuuaagaggacagaa

SEQ ID NO: 8023 - RNA, 20 nt, Artificial Sequence
  spacer sequence GTCN PAM
ucuuaaauucugcgacuggg

SEQ ID NO: 8024 - RNA, 20 nt, Artificial Sequence
  spacer sequence GTCN PAM
uuuguucccaacagccuccu

SEQ ID NO: 8025 - RNA, 20 nt, Artificial Sequence
  spacer sequence GTCN PAM
cacguaaggugaggcagcca

SEQ ID NO: 8026 - RNA, 20 nt, Artificial Sequence
  spacer sequence GTCN PAM
aacuugccagcaaacccggg

SEQ ID NO: 8027 - RNA, 20 nt, Artificial Sequence
  spacer sequence GTCN PAM
gccugggcaucacacgcaau

SEQ ID NO: 8028 - RNA, 20 nt, Artificial Sequence
  spacer sequence GTCN PAM
ccgccccauaggugugcacc

SEQ ID NO: 8029 - RNA, 20 nt, Artificial Sequence
  spacer sequence GTCN PAM
caaaaaaaaaaaaagaaaga

SEQ ID NO: 8030 - RNA, 20 nt, Artificial Sequence
  spacer sequence GTCN PAM
cccaggcuggagcgcaaugg

SEQ ID NO: 8031 - RNA, 20 nt, Artificial Sequence
  spacer sequence GTCN PAM
ggcuggucuugaacucccga

SEQ ID NO: 8032 - RNA, 20 nt, Artificial Sequence
  spacer sequence GTCN PAM
ugaacucccgaucucaggug

SEQ ID NO: 8033 - RNA, 20 nt, Artificial Sequence
  spacer sequence GTCN PAM
cucaucccuguaaucccagc

SEQ ID NO: 8034 - RNA, 20 nt, Artificial Sequence
  spacer sequence GTCN PAM
cauguagaaucuuugguggg

SEQ ID NO: 8035 - RNA, 20 nt, Artificial Sequence
  spacer sequence GTCN PAM
cccacugcacccacagcugu

SEQ ID NO: 8036 - RNA, 20 nt, Artificial Sequence
  spacer sequence GTCN PAM
ccagagcaggagcggccugu

SEQ ID NO: 8037 - RNA, 20 nt, Artificial Sequence
  spacer sequence GTCN PAM
ccgccagcugggugcuaccu

SEQ ID NO: 8038 - RNA, 20 nt, Artificial Sequence
  spacer sequence GTCN PAM
gcagguagcacccagcuggc

SEQ ID NO: 8039 - RNA, 20 nt, Artificial Sequence
  spacer sequence GTCN PAM
uccaaugucagguuuucauu

SEQ ID NO: 8040 - RNA, 20 nt, Artificial Sequence
  spacer sequence GTCN PAM
gguuuucauugaaauaccuu

SEQ ID NO: 8041 - RNA, 20 nt, Artificial Sequence
  spacer sequence GTCN PAM
accccggaguuaaaagcuca

SEQ ID NO: 8042 - RNA, 20 nt, Artificial Sequence
  spacer sequence GTCN PAM
agaagggaggaaaggcggag

SEQ ID NO: 8043 - RNA, 20 nt, Artificial Sequence
  spacer sequence GTCN PAM
agagaggccacuuccgggca

SEQ ID NO: 8044 - RNA, 20 nt, Artificial Sequence
  spacer sequence GTCN PAM
ggccuagcgaugagaggcgg

SEQ ID NO: 8045 - RNA, 20 nt, Artificial Sequence
  spacer sequence GTCN PAM
cagcuuccccagguguucca

SEQ ID NO: 8046 - RNA, 20 nt, Artificial Sequence
  spacer sequence GTCN PAM
agcccuccccaagcuccugg

SEQ ID NO: 8047 - RNA, 20 nt, Artificial Sequence
  spacer sequence GTCN PAM
ccggcagcacugggacccag

SEQ ID NO: 8048 - RNA, 20 nt, Artificial Sequence
  spacer sequence GTCN PAM
cagugcugccggggacccuc

SEQ ID NO: 8049 - RNA, 20 nt, Artificial Sequence
  spacer sequence GTCN PAM
ccacccugggucccagugcu

SEQ ID NO: 8050 - RNA, 20 nt, Artificial Sequence
  spacer sequence GTCN PAM
uugcaggaggaauuacauua

SEQ ID NO: 8051 - RNA, 20 nt, Artificial Sequence
  spacer sequence GTCN PAM
gacuggagccagguggccuu

SEQ ID NO: 8052 - RNA, 20 nt, Artificial Sequence
  spacer sequence GTCN PAM
gaccucaucuuaauguaauu

SEQ ID NO: 8053 - RNA, 20 nt, Artificial Sequence
  spacer sequence GTCN PAM
cgugaccagcguccugguga

SEQ ID NO: 8054 - RNA, 20 nt, Artificial Sequence
  spacer sequence GTCN PAM
cgggaccaaggccaccuggc

SEQ ID NO: 8055 - RNA, 20 nt, Artificial Sequence
  spacer sequence GTCN PAM
uggugagaggaggaaugaga

SEQ ID NO: 8056 - RNA, 20 nt, Artificial Sequence
  spacer sequence GTCN PAM
cauuccuccucucaccagga

SEQ ID NO: 8057 - RNA, 20 nt, Artificial Sequence
  spacer sequence GTCN PAM
acauggccaacccgugucuc

SEQ ID NO: 8058 - RNA, 20 nt, Artificial Sequence
  spacer sequence GTCN PAM
acaagcccgggagcacugag

SEQ ID NO: 8059 - RNA, 20 nt, Artificial Sequence
  spacer sequence GTCN PAM
ccagagccaugagggaauga

SEQ ID NO: 8060 - RNA, 20 nt, Artificial Sequence
  spacer sequence GTCN PAM
caccugcaccugggggaggc

SEQ ID NO: 8061 - RNA, 20 nt, Artificial Sequence
  spacer sequence GTCN PAM
ugagggcugcagccacggug

SEQ ID NO: 8062 - RNA, 20 nt, Artificial Sequence
  spacer sequence GTCN PAM
cggcuccuucucauccagug

SEQ ID NO: 8063 - RNA, 20 nt, Artificial Sequence
  spacer sequence GTCN PAM
cacaggguggggacacccuu

SEQ ID NO: 8064 - RNA, 20 nt, Artificial Sequence
  spacer sequence GTCN PAM
ccacccugugggaccugcca

SEQ ID NO: 8065 - RNA, 20 nt, Artificial Sequence
  spacer sequence GTCN PAM
gggaaggguguccccacccu

SEQ ID NO: 8066 - RNA, 20 nt, Artificial Sequence
  spacer sequence GTCN PAM
ccaagucagggaaggguguc

SEQ ID NO: 8067 - RNA, 20 nt, Artificial Sequence
  spacer sequence GTCN PAM
ugccagagugcagucaccaa

SEQ ID NO: 8068 - RNA, 20 nt, Artificial Sequence
  spacer sequence GTCN PAM
uccagggggucuugccagag

SEQ ID NO: 8069 - RNA, 20 nt, Artificial Sequence
  spacer sequence GTCN PAM
gggggcuuuggcauccagac

SEQ ID NO: 8070 - RNA, 20 nt, Artificial Sequence
  spacer sequence GTCN PAM
ggaugccaaagcccccagac

SEQ ID NO: 8071 - RNA, 20 nt, Artificial Sequence
  spacer sequence GTCN PAM
gacccacgaaccgaggcuuc

SEQ ID NO: 8072 - RNA, 20 nt, Artificial Sequence
  spacer sequence GTCN PAM
gacaugcuccgugugggucu

SEQ ID NO: 8073 - RNA, 20 nt, Artificial Sequence
  spacer sequence GTCN PAM
gggccucacugaagccucgg

SEQ ID NO: 8074 - RNA, 20 nt, Artificial Sequence
  spacer sequence GTCN PAM
uucccccaccuccgcagcag

SEQ ID NO: 8075 - RNA, 20 nt, Artificial Sequence
  spacer sequence GTCN PAM
acaugaaaguguggguacaa

SEQ ID NO: 8076 - RNA, 20 nt, Artificial Sequence
  spacer sequence GTCN PAM
ccaucucaaaaaaaaaaaac

SEQ ID NO: 8077 - RNA, 20 nt, Artificial Sequence
  spacer sequence GTCN PAM
cccaggcuguagugcaguca

SEQ ID NO: 8078 - RNA, 20 nt, Artificial Sequence
  spacer sequence GTCN PAM
cgugaucucagcucacugca

SEQ ID NO: 8079 - RNA, 20 nt, Artificial Sequence
  spacer sequence GTCN PAM
auacuaaaaauacaaaauua

SEQ ID NO: 8080 - RNA, 20 nt, Artificial Sequence
  spacer sequence GTCN PAM
ggcuggucucaaacuccuga

SEQ ID NO: 8081 - RNA, 20 nt, Artificial Sequence
  spacer sequence GTCN PAM
caaacuccugaccucgugau

SEQ ID NO: 8082 - RNA, 20 nt, Artificial Sequence
  spacer sequence GTCN PAM
ggaguuugagaccagccuga

SEQ ID NO: 8083 - RNA, 20 nt, Artificial Sequence
  spacer sequence GTCN PAM
gccgagaaucauacgggccc

SEQ ID NO: 8084 - RNA, 20 nt, Artificial Sequence
  spacer sequence GTCN PAM
cgagccaccgugcggagagu

SEQ ID NO: 8085 - RNA, 20 nt, Artificial Sequence
  spacer sequence GTCN PAM
cgguaacgcgguggaaacgc

SEQ ID NO: 8086 - RNA, 20 nt, Artificial Sequence
  spacer sequence GTCN PAM
gucccgaugcuggguuucac

SEQ ID NO: 8087 - RNA, 20 nt, Artificial Sequence
  spacer sequence GTCN PAM
cgaugcuggguuucacggug

SEQ ID NO: 8088 - RNA, 20 nt, Artificial Sequence
  spacer sequence GTCN PAM
ggugucacucugcauugccu

SEQ ID NO: 8089 - RNA, 20 nt, Artificial Sequence
  spacer sequence GTCN PAM
cucugcauugccuggcuugg

SEQ ID NO: 8090 - RNA, 20 nt, Artificial Sequence
  spacer sequence GTCN PAM
gccuggccucugggcuaucc

SEQ ID NO: 8091 - RNA, 20 nt, Artificial Sequence
  spacer sequence GTCN PAM
guaucuucccaggagaaagu

SEQ ID NO: 8092 - RNA, 20 nt, Artificial Sequence
  spacer sequence GTCN PAM
uccaggauauuucacuuucu

SEQ ID NO: 8093 - RNA, 20 nt, Artificial Sequence
  spacer sequence GTCN PAM
ucugauccaagaagguccuu

SEQ ID NO: 8094 - RNA, 20 nt, Artificial Sequence
  spacer sequence GTCN PAM
gauccaagaagguccuuaaa

SEQ ID NO: 8095 - RNA, 20 nt, Artificial Sequence
  spacer sequence GTCN PAM
uuaaaaauggaaccuccaga

SEQ ID NO: 8096 - RNA, 20 nt, Artificial Sequence
  spacer sequence GTCN PAM
caggguuuuaauauccucug

SEQ ID NO: 8097 - RNA, 20 nt, Artificial Sequence
  spacer sequence GTCN PAM
cgggucugcuucagggagca

SEQ ID NO: 8098 - RNA, 20 nt, Artificial Sequence
  spacer sequence GTCN PAM
gcuucagggagcauuaacca

SEQ ID NO: 8099 - RNA, 20 nt, Artificial Sequence
  spacer sequence GTCN PAM
ugucauucuccaggggcugg

SEQ ID NO: 8100 - RNA, 20 nt, Artificial Sequence
  spacer sequence GTCN PAM
uucuccaggggcugggccag

SEQ ID NO: 8101 - RNA, 20 nt, Artificial Sequence
  spacer sequence GTCN PAM
ccggcacucggcugugaggc

SEQ ID NO: 8102 - RNA, 20 nt, Artificial Sequence
  spacer sequence GTCN PAM
cgugguauccccucaugucc

SEQ ID NO: 8103 - RNA, 20 nt, Artificial Sequence
  spacer sequence GTCN PAM
uucuugagccccuguguaua

SEQ ID NO: 8104 - RNA, 20 nt, Artificial Sequence
  spacer sequence GTCN PAM
guuaauugggcucuuugccu

SEQ ID NO: 8105 - RNA, 20 nt, Artificial Sequence
  spacer sequence GTCN PAM
ucugccugucuguuaauugg

SEQ ID NO: 8106 - RNA, 20 nt, Artificial Sequence
  spacer sequence GTCN PAM
gguccucugccugucuguua

SEQ ID NO: 8107 - RNA, 20 nt, Artificial Sequence
  spacer sequence GTCN PAM
ggucggguccucugccuguc

SEQ ID NO: 8108 - RNA, 20 nt, Artificial Sequence
  spacer sequence GTCN PAM
acagcaggcccacgacggcc

SEQ ID NO: 8109 - RNA, 20 nt, Artificial Sequence
  spacer sequence GTCN PAM
ugggccugcuguggacaggc

SEQ ID NO: 8110 - RNA, 20 nt, Artificial Sequence
  spacer sequence GTCN PAM
cacuaggcccacgacggcca

SEQ ID NO: 8111 - RNA, 20 nt, Artificial Sequence
  spacer sequence GTCN PAM
ugggccuagugugacgagcu

SEQ ID NO: 8112 - RNA, 20 nt, Artificial Sequence
  spacer sequence GTCN PAM
cacuaggcccacgacggcca

SEQ ID NO: 8113 - RNA, 20 nt, Artificial Sequence
  spacer sequence GTCN PAM
ugggccuagugugacggugu

SEQ ID NO: 8114 - RNA, 20 nt, Artificial Sequence
  spacer sequence GTCN PAM
cacuagggggacucuggucc

SEQ ID NO: 8115 - RNA, 20 nt, Artificial Sequence
  spacer sequence GTCN PAM
cccuagugugacgagcuccc

SEQ ID NO: 8116 - RNA, 20 nt, Artificial Sequence
  spacer sequence GTCN PAM
uccgccuugaccagccccca

SEQ ID NO: 8117 - RNA, 20 nt, Artificial Sequence
  spacer sequence GTCN PAM
aggcggaggaccagaguccc

SEQ ID NO: 8118 - RNA, 20 nt, Artificial Sequence
  spacer sequence GTCN PAM
cacguuggcagcuguccccu

SEQ ID NO: 8119 - RNA, 20 nt, Artificial Sequence
  spacer sequence GTCN PAM
ccuccccaggcccggcagcg

SEQ ID NO: 8120 - RNA, 20 nt, Artificial Sequence
  spacer sequence GTCN PAM
cccgagucuguggacaaaug

SEQ ID NO: 8121 - RNA, 20 nt, Artificial Sequence
  spacer sequence GTCN PAM
guggacaaaugugguuuggg

SEQ ID NO: 8122 - RNA, 20 nt, Artificial Sequence
  spacer sequence GTCN PAM
acagacucgggggacccagg

SEQ ID NO: 8123 - RNA, 20 nt, Artificial Sequence
  spacer sequence GTCN PAM
ccaaaccacauuuguccaca

SEQ ID NO: 8124 - RNA, 20 nt, Artificial Sequence
  spacer sequence GTCN PAM
ucgugcugugucgggaaagg

SEQ ID NO: 8125 - RNA, 20 nt, Artificial Sequence
  spacer sequence GTCN PAM
ggaaagggaugcuguggcag

SEQ ID NO: 8126 - RNA, 20 nt, Artificial Sequence
  spacer sequence GTCN PAM
cugccacagcaucccuuucc

SEQ ID NO: 8127 - RNA, 20 nt, Artificial Sequence
  spacer sequence GTCN PAM
aaccugguccuggggacggg

SEQ ID NO: 8128 - RNA, 20 nt, Artificial Sequence
  spacer sequence GTCN PAM
uggggacgggggcggggugg

SEQ ID NO: 8129 - RNA, 20 nt, Artificial Sequence
  spacer sequence GTCN PAM
ccaggaccagguuggacgcu

SEQ ID NO: 8130 - RNA, 20 nt, Artificial Sequence
  spacer sequence GTCN PAM
ggagcugugagcccguaaca

SEQ ID NO: 8131 - RNA, 20 nt, Artificial Sequence
  spacer sequence GTCN PAM
uuacgaugcuggcugagcgu

SEQ ID NO: 8132 - RNA, 20 nt, Artificial Sequence
  spacer sequence GTCN PAM
cguccauggcaccgccgucc

SEQ ID NO: 8133 - RNA, 20 nt, Artificial Sequence
  spacer sequence GTCN PAM
auggcaccgccgucccaucc

SEQ ID NO: 8134 - RNA, 20 nt, Artificial Sequence
  spacer sequence GTCN PAM
cauccgcggcaccaccaucu

SEQ ID NO: 8135 - RNA, 20 nt, Artificial Sequence
  spacer sequence GTCN PAM
cguccacggcacccucgucc

SEQ ID NO: 8136 - RNA, 20 nt, Artificial Sequence
  spacer sequence GTCN PAM
acggcacccucgucccaucc

SEQ ID NO: 8137 - RNA, 20 nt, Artificial Sequence
  spacer sequence GTCN PAM
cauccauggcaccacugcug

SEQ ID NO: 8138 - RNA, 20 nt, Artificial Sequence
  spacer sequence GTCN PAM
cccggggucuucucuggaca

SEQ ID NO: 8139 - RNA, 20 nt, Artificial Sequence
  spacer sequence GTCN PAM
ucucuggacagugagaagcc

SEQ ID NO: 8140 - RNA, 20 nt, Artificial Sequence
  spacer sequence GTCN PAM
agagaagaccccgggggacu

SEQ ID NO: 8141 - RNA, 20 nt, Artificial Sequence
  spacer sequence GTCN PAM
caaagcccugccucuuacca

SEQ ID NO: 8142 - RNA, 20 nt, Artificial Sequence
  spacer sequence GTCN PAM
gugggggagggaggaagggc

SEQ ID NO: 8143 - RNA, 20 nt, Artificial Sequence
  spacer sequence GTCN PAM
gcccacauucuggggugcac

SEQ ID NO: 8144 - RNA, 20 nt, Artificial Sequence
  spacer sequence GTCN PAM
cucuccgagcgggaggguga

SEQ ID NO: 8145 - RNA, 20 nt, Artificial Sequence
  spacer sequence GTCN PAM
gccaucacccucccgcucgg

SEQ ID NO: 8146 - RNA, 20 nt, Artificial Sequence
  spacer sequence GTCN PAM
uccucucagccucucaaagc

SEQ ID NO: 8147 - RNA, 20 nt, Artificial Sequence
  spacer sequence GTCN PAM
ggcucugggauccacggccg

SEQ ID NO: 8148 - RNA, 20 nt, Artificial Sequence
  spacer sequence GTCN PAM
gcccucccccugggcugggc

SEQ ID NO: 8149 - RNA, 20 nt, Artificial Sequence
  spacer sequence GTCN PAM
cugaaccgaggccgcgugcu

SEQ ID NO: 8150 - RNA, 20 nt, Artificial Sequence
  spacer sequence GTCN PAM
agcagccgugcaaaccuccc

SEQ ID NO: 8151 - RNA, 20 nt, Artificial Sequence
  spacer sequence GTCN PAM
cacucucuaaauuuucauua

SEQ ID NO: 8152 - RNA, 20 nt, Artificial Sequence
  spacer sequence GTCN PAM
aacaacaaaaucuaauccau

SEQ ID NO: 8153 - RNA, 20 nt, Artificial Sequence
  spacer sequence GTCN PAM
uuccacuuuuuaaaguccgg

SEQ ID NO: 8154 - RNA, 20 nt, Artificial Sequence
  spacer sequence GTCN PAM
gggauggcuuucggugucga

SEQ ID NO: 8155 - RNA, 20 nt, Artificial Sequence
  spacer sequence GTCN PAM
agcgcuguggguuugagagc

SEQ ID NO: 8156 - RNA, 20 nt, Artificial Sequence
  spacer sequence GTCN PAM
cuuuguccccuucaggaaag

SEQ ID NO: 8157 - RNA, 20 nt, Artificial Sequence
  spacer sequence GTCN PAM
ccuucaggaaagcgugucag

SEQ ID NO: 8158 - RNA, 20 nt, Artificial Sequence
  spacer sequence GTCN PAM
gaauuuuacagcucaaagcu

SEQ ID NO: 8159 - RNA, 20 nt, Artificial Sequence
  spacer sequence GTCN PAM
ccacugugccuguggauggu

SEQ ID NO: 8160 - RNA, 20 nt, Artificial Sequence
  spacer sequence GTCN PAM
gcccgggagcaguggcucac

SEQ ID NO: 8161 - RNA, 20 nt, Artificial Sequence
  spacer sequence GTCN PAM
ggaguuugaggccacccugg

SEQ ID NO: 8162 - RNA, 20 nt, Artificial Sequence
  spacer sequence GTCN PAM
cagcugcuugggaggcugag

SEQ ID NO: 8163 - RNA, 20 nt, Artificial Sequence
  spacer sequence GTCN PAM
cccaggcuggaguguagugg

SEQ ID NO: 8164 - RNA, 20 nt, Artificial Sequence
  spacer sequence GTCN PAM
cgcucugucgcccaggcugg

SEQ ID NO: 8165 - RNA, 20 nt, Artificial Sequence
  spacer sequence GTCN PAM
cacaaaaagaauaagagggu

SEQ ID NO: 8166 - RNA, 20 nt, Artificial Sequence
  spacer sequence GTCN PAM
gggaaaugugaguuuuuuuu

SEQ ID NO: 8167 - RNA, 20 nt, Artificial Sequence
  spacer sequence GTCN PAM
caaaaaaaaaaaaaaaaaaa

SEQ ID NO: 8168 - RNA, 20 nt, Artificial Sequence
  spacer sequence GTCN PAM
cgcucugucgcccaggcugg

SEQ ID NO: 8169 - RNA, 20 nt, Artificial Sequence
  spacer sequence GTCN PAM
cccaggcuggagugcagugg

SEQ ID NO: 8170 - RNA, 20 nt, Artificial Sequence
  spacer sequence GTCN PAM
cagcuacucgggaggcugag

SEQ ID NO: 8171 - RNA, 20 nt, Artificial Sequence
  spacer sequence GTCN PAM
cuacuaaaaauacaaaaaau

SEQ ID NO: 8172 - RNA, 20 nt, Artificial Sequence
  spacer sequence GTCN PAM
cgaucuccugaccucgugau

SEQ ID NO: 8173 - RNA, 20 nt, Artificial Sequence
  spacer sequence GTCN PAM
ggagaucgagaccauccugg

SEQ ID NO: 8174 - RNA, 20 nt, Artificial Sequence
  spacer sequence GTCN PAM
ugaaacggcuuuuacauuuu

SEQ ID NO: 8175 - RNA, 20 nt, Artificial Sequence
  spacer sequence GTCN PAM
cugugugucugugcgugucc

SEQ ID NO: 8176 - RNA, 20 nt, Artificial Sequence
  spacer sequence GTCN PAM
gugcguguccacgugugucu

SEQ ID NO: 8177 - RNA, 20 nt, Artificial Sequence
  spacer sequence GTCN PAM
acgugugucugugcguggua

SEQ ID NO: 8178 - RNA, 20 nt, Artificial Sequence
  spacer sequence GTCN PAM
gugcgugguagcacguguac

SEQ ID NO: 8179 - RNA, 20 nt, Artificial Sequence
  spacer sequence GTCN PAM
cccaaaaccaccucacacac

SEQ ID NO: 8180 - RNA, 20 nt, Artificial Sequence
  spacer sequence GTCN PAM
ucacaccuggccugagagcc

SEQ ID NO: 8181 - RNA, 20 nt, Artificial Sequence
  spacer sequence GTCN PAM
cccggaaggcagguggggag

SEQ ID NO: 8182 - RNA, 20 nt, Artificial Sequence
  spacer sequence GTCN PAM
cuuccaggccucagaccugg

SEQ ID NO: 8183 - RNA, 20 nt, Artificial Sequence
  spacer sequence GTCN PAM
gaggccuggaagcgaccuca

SEQ ID NO: 8184 - RNA, 20 nt, Artificial Sequence
  spacer sequence GTCN PAM
ggcagguggggagagcacca

SEQ ID NO: 8185 - RNA, 20 nt, Artificial Sequence
  spacer sequence GTCN PAM
cuuccaggccucagaccugg

SEQ ID NO: 8186 - RNA, 20 nt, Artificial Sequence
  spacer sequence GTCN PAM
gaggccuggaagcgacgggg

SEQ ID NO: 8187 - RNA, 20 nt, Artificial Sequence
  spacer sequence GTCN PAM
guuuucugaagcaccucugc

SEQ ID NO: 8188 - RNA, 20 nt, Artificial Sequence
  spacer sequence GTCN PAM
gucucauggguuucgccgcc

SEQ ID NO: 8189 - RNA, 20 nt, Artificial Sequence
  spacer sequence GTCN PAM
cauggguuucgccgccugau

SEQ ID NO: 8190 - RNA, 20 nt, Artificial Sequence
  spacer sequence GTCN PAM
uccgugcagguuggucuccc

SEQ ID NO: 8191 - RNA, 20 nt, Artificial Sequence
  spacer sequence GTCN PAM
cccagugguugcagagcugg

SEQ ID NO: 8192 - RNA, 20 nt, Artificial Sequence
  spacer sequence GTCN PAM
cugugcccagggauuucacg

SEQ ID NO: 8193 - RNA, 20 nt, Artificial Sequence
  spacer sequence GTCN PAM
gugaaaucccugggcacagu

SEQ ID NO: 8194 - RNA, 20 nt, Artificial Sequence
  spacer sequence GTCN PAM
cuacgcuccccggagucacc

SEQ ID NO: 8195 - RNA, 20 nt, Artificial Sequence
  spacer sequence GTCN PAM
ccccagggauucugggaggg

SEQ ID NO: 8196 - RNA, 20 nt, Artificial Sequence
  spacer sequence GTCN PAM
cuguugcacaaacaaggaaa

SEQ ID NO: 8197 - RNA, 20 nt, Artificial Sequence
  spacer sequence GTCN PAM
cgguuuccuuguuugugcaa

SEQ ID NO: 8198 - RNA, 20 nt, Artificial Sequence
  spacer sequence GTCN PAM
ugugucucgguuuccuuguu

SEQ ID NO: 8199 - RNA, 20 nt, Artificial Sequence
  spacer sequence GTCN PAM
caggguagcuguggaagcug

SEQ ID NO: 8200 - RNA, 20 nt, Artificial Sequence
  spacer sequence GTCN PAM
ccuuaugucauggcugcaac

SEQ ID NO: 8201 - RNA, 20 nt, Artificial Sequence
  spacer sequence GTCN PAM
uggcugcaacggcacgcaau

SEQ ID NO: 8202 - RNA, 20 nt, Artificial Sequence
  spacer sequence GTCN PAM
gcacacauguugugcgugca

SEQ ID NO: 8203 - RNA, 20 nt, Artificial Sequence
  spacer sequence GTCN PAM
guguaugcgcguguauugug

SEQ ID NO: 8204 - RNA, 20 nt, Artificial Sequence
  spacer sequence GTCN PAM
cguguguggcaugaggggag

SEQ ID NO: 8205 - RNA, 20 nt, Artificial Sequence
  spacer sequence GTCN PAM
ucacguguguggcaugaggg

SEQ ID NO: 8206 - RNA, 20 nt, Artificial Sequence
  spacer sequence GTCN PAM
gggcuccagucgucacgugu

SEQ ID NO: 8207 - RNA, 20 nt, Artificial Sequence
  spacer sequence GTCN PAM
uggggggacccugcuguuuc

SEQ ID NO: 8208 - RNA, 20 nt, Artificial Sequence
  spacer sequence GTCN PAM
ccccaggacgcacguccggg

SEQ ID NO: 8209 - RNA, 20 nt, Artificial Sequence
  spacer sequence GTCN PAM
ugggagaaugugcuccagga

SEQ ID NO: 8210 - RNA, 20 nt, Artificial Sequence
  spacer sequence GTCN PAM
gcugcaagguuccuggagca

SEQ ID NO: 8211 - RNA, 20 nt, Artificial Sequence
  spacer sequence GTCN PAM
ugucugcugcaagguuccug

SEQ ID NO: 8212 - RNA, 20 nt, Artificial Sequence
  spacer sequence GTCN PAM
gucccaggcccggggaacag

SEQ ID NO: 8213 - RNA, 20 nt, Artificial Sequence
  spacer sequence GTCN PAM
caggcccggggaacagccca

SEQ ID NO: 8214 - RNA, 20 nt, Artificial Sequence
  spacer sequence GTCN PAM
ggcccaguccuagccagggg

SEQ ID NO: 8215 - RNA, 20 nt, Artificial Sequence
  spacer sequence GTCN PAM
uagccaggggaaaugaacuc

SEQ ID NO: 8216 - RNA, 20 nt, Artificial Sequence
  spacer sequence GTCN PAM
aggcacggaggccccagcca

SEQ ID NO: 8217 - RNA, 20 nt, Artificial Sequence
  spacer sequence GTCN PAM
gacgagucacucacgcaucc

SEQ ID NO: 8218 - RNA, 20 nt, Artificial Sequence
  spacer sequence GTCN PAM
gaccuggguccaggcacgga

SEQ ID NO: 8219 - RNA, 20 nt, Artificial Sequence
  spacer sequence GTCN PAM
cucacgcaucccgaaauccu

SEQ ID NO: 8220 - RNA, 20 nt, Artificial Sequence
  spacer sequence GTCN PAM
ccagugcccugggcgcguaa

SEQ ID NO: 8221 - RNA, 20 nt, Artificial Sequence
  spacer sequence GTCN PAM
gcuuuugaacaaacuguugg

SEQ ID NO: 8222 - RNA, 20 nt, Artificial Sequence
  spacer sequence GTCN PAM
caguguuugaauccagcuuu

SEQ ID NO: 8223 - RNA, 20 nt, Artificial Sequence
  spacer sequence GTCN PAM
auuucaucgcacaagucuca

SEQ ID NO: 8224 - RNA, 20 nt, Artificial Sequence
  spacer sequence GTCN PAM
cucccugccuccugccucca

SEQ ID NO: 8225 - RNA, 20 nt, Artificial Sequence
  spacer sequence GTCN PAM
ccuggaggcucugaccccac

SEQ ID NO: 8226 - RNA, 20 nt, Artificial Sequence
  spacer sequence GTCN PAM
gagccuccaggagacgaggc

SEQ ID NO: 8227 - RNA, 20 nt, Artificial Sequence
  spacer sequence GTCN PAM
aaccuccccucccgaggugc

SEQ ID NO: 8228 - RNA, 20 nt, Artificial Sequence
  spacer sequence GTCN PAM
ucccacccaaagcggcuccc

SEQ ID NO: 8229 - RNA, 20 nt, Artificial Sequence
  spacer sequence GTCN PAM
ugagugccccucaggccucg

SEQ ID NO: 8230 - RNA, 20 nt, Artificial Sequence
  spacer sequence GTCN PAM
acuccccccauuccccacuc

SEQ ID NO: 8231 - RNA, 20 nt, Artificial Sequence
  spacer sequence GTCN PAM
gccgcccagaggcucccggu

SEQ ID NO: 8232 - RNA, 20 nt, Artificial Sequence
  spacer sequence GTCN PAM
ggggccuucccauugucggc

SEQ ID NO: 8233 - RNA, 20 nt, Artificial Sequence
  spacer sequence GTCN PAM
gggggccaucacuguggcag

SEQ ID NO: 8234 - RNA, 20 nt, Artificial Sequence
  spacer sequence GTCN PAM
ucugcucucugggugggguc

SEQ ID NO: 8235 - RNA, 20 nt, Artificial Sequence
  spacer sequence GTCN PAM
gugggacuguguuaugagca

SEQ ID NO: 8236 - RNA, 20 nt, Artificial Sequence
  spacer sequence GTCN PAM
cacggaccccacccagagag

SEQ ID NO: 8237 - RNA, 20 nt, Artificial Sequence
  spacer sequence GTCN PAM
ugucccuccguuccuaccca

SEQ ID NO: 8238 - RNA, 20 nt, Artificial Sequence
  spacer sequence GTCN PAM
cuccguuccuacccagccac

SEQ ID NO: 8239 - RNA, 20 nt, Artificial Sequence
  spacer sequence GTCN PAM
uccuccugcaucagccgaca

SEQ ID NO: 8240 - RNA, 20 nt, Artificial Sequence
  spacer sequence GTCN PAM
gcugaugcaggaggaagaca

SEQ ID NO: 8241 - RNA, 20 nt, Artificial Sequence
  spacer sequence GTCN PAM
gccugcugcuccggggccgc

SEQ ID NO: 8242 - RNA, 20 nt, Artificial Sequence
  spacer sequence GTCN PAM
ucaccccagcggccccggag

SEQ ID NO: 8243 - RNA, 20 nt, Artificial Sequence
  spacer sequence GTCN PAM
auaccagcaccgccacugcc

SEQ ID NO: 8244 - RNA, 20 nt, Artificial Sequence
  spacer sequence GTCN PAM
cagugggcgggaugugggcc

SEQ ID NO: 8245 - RNA, 20 nt, Artificial Sequence
  spacer sequence GTCN PAM
gucccagugggcgggaugug

SEQ ID NO: 8246 - RNA, 20 nt, Artificial Sequence
  spacer sequence GTCN PAM
cuggccgccgugggugggau

SEQ ID NO: 8247 - RNA, 20 nt, Artificial Sequence
  spacer sequence GTCN PAM
gucccuggccgccgugggug

SEQ ID NO: 8248 - RNA, 20 nt, Artificial Sequence
  spacer sequence GTCN PAM
uuccugugucuugugucccu

SEQ ID NO: 8249 - RNA, 20 nt, Artificial Sequence
  spacer sequence GTCN PAM
ugugucccuucaccacuacc

SEQ ID NO: 8250 - RNA, 20 nt, Artificial Sequence
  spacer sequence GTCN PAM
cuucaccacuaccagcccgg

SEQ ID NO: 8251 - RNA, 20 nt, Artificial Sequence
  spacer sequence GTCN PAM
uuugcccauucucacuccga

SEQ ID NO: 8252 - RNA, 20 nt, Artificial Sequence
  spacer sequence GTCN PAM
gagugagaaugggcaaagga

SEQ ID NO: 8253 - RNA, 20 nt, Artificial Sequence
  spacer sequence GTCN PAM
gugucggagugagaaugggc

SEQ ID NO: 8254 - RNA, 20 nt, Artificial Sequence
  spacer sequence GTCN PAM
cuacgaggugcucucagaga

SEQ ID NO: 8255 - RNA, 20 nt, Artificial Sequence
  spacer sequence GTCN PAM
cccucugucgcccaggcugg

SEQ ID NO: 8256 - RNA, 20 nt, Artificial Sequence
  spacer sequence GTCN PAM
cccaggcuggagugcggugg

SEQ ID NO: 8257 - RNA, 20 nt, Artificial Sequence
  spacer sequence GTCN PAM
gaucucagcucacugcaacc

SEQ ID NO: 8258 - RNA, 20 nt, Artificial Sequence
  spacer sequence GTCN PAM
cgaacuccugaccucaggug

SEQ ID NO: 8259 - RNA, 20 nt, Artificial Sequence
  spacer sequence GTCN PAM
ggaguucgagaccaaccugg

SEQ ID NO: 8260 - RNA, 20 nt, Artificial Sequence
  spacer sequence GTCN PAM
ucccagugcugugggaggcc

SEQ ID NO: 8261 - RNA, 20 nt, Artificial Sequence
  spacer sequence GTCN PAM
ggcggcccucaccucucucu

SEQ ID NO: 8262 - RNA, 20 nt, Artificial Sequence
  spacer sequence GTCN PAM
ugaauguccucaucacccca

SEQ ID NO: 8263 - RNA, 20 nt, Artificial Sequence
  spacer sequence GTCN PAM
ucaucaccccaaaaggaaac

SEQ ID NO: 8264 - RNA, 20 nt, Artificial Sequence
  spacer sequence GTCN PAM
ccaucagcacuggcucacca

SEQ ID NO: 8265 - RNA, 20 nt, Artificial Sequence
  spacer sequence GTCN PAM
uggaggcucucaggcuuggg

SEQ ID NO: 8266 - RNA, 20 nt, Artificial Sequence
  spacer sequence GTCN PAM
gaucccauuucuacgaaaca

SEQ ID NO: 8267 - RNA, 20 nt, Artificial Sequence
  spacer sequence GTCN PAM
cucugagccuccgucgcucg

SEQ ID NO: 8268 - RNA, 20 nt, Artificial Sequence
  spacer sequence GTCN PAM
cucgagguccugccucaggu

SEQ ID NO: 8269 - RNA, 20 nt, Artificial Sequence
  spacer sequence GTCN PAM
ugccucagguuucaucccgg

SEQ ID NO: 8270 - RNA, 20 nt, Artificial Sequence
  spacer sequence GTCN PAM
gugaguggacgcugggcugc

SEQ ID NO: 8271 - RNA, 20 nt, Artificial Sequence
  spacer sequence GTCN PAM
acucacagacgagccacgaa

SEQ ID NO: 8272 - RNA, 20 nt, Artificial Sequence
  spacer sequence GTCN PAM
augcaccggcucuuguugga

SEQ ID NO: 8273 - RNA, 20 nt, Artificial Sequence
  spacer sequence GTCN PAM
aacaagagccggugcaugga

SEQ ID NO: 8274 - RNA, 20 nt, Artificial Sequence
  spacer sequence GTCN PAM
aggcaccacaaaaaccucug

SEQ ID NO: 8275 - RNA, 20 nt, Artificial Sequence
  spacer sequence GTCN PAM
ccuucugucaugaaaugcuc

SEQ ID NO: 8276 - RNA, 20 nt, Artificial Sequence
  spacer sequence GTCN PAM
ugaaaugcucagugcccacg

SEQ ID NO: 8277 - RNA, 20 nt, Artificial Sequence
  spacer sequence GTCN PAM
auacugggguuugguaccgu

SEQ ID NO: 8278 - RNA, 20 nt, Artificial Sequence
  spacer sequence GTCN PAM
accuacggauuaaaaacguu

SEQ ID NO: 8279 - RNA, 20 nt, Artificial Sequence
  spacer sequence GTCN PAM
ugucggcagagccggucuca

SEQ ID NO: 8280 - RNA, 20 nt, Artificial Sequence
  spacer sequence GTCN PAM
gcagagccggucucaggcca

SEQ ID NO: 8281 - RNA, 20 nt, Artificial Sequence
  spacer sequence GTCN PAM
caggccaccuccucuuuucc

SEQ ID NO: 8282 - RNA, 20 nt, Artificial Sequence
  spacer sequence GTCN PAM
caccuaccucggaaaagagg

SEQ ID NO: 8283 - RNA, 20 nt, Artificial Sequence
  spacer sequence GTCN PAM
aggcuccaagccugccuccu

SEQ ID NO: 8284 - RNA, 20 nt, Artificial Sequence
  spacer sequence GTCN PAM
ccgaucucaggcuccugcag

SEQ ID NO: 8285 - RNA, 20 nt, Artificial Sequence
  spacer sequence GTCN PAM
ccagggggacgggacagccu

SEQ ID NO: 8286 - RNA, 20 nt, Artificial Sequence
  spacer sequence GTCN PAM
cccuggggacccuccguggc

SEQ ID NO: 8287 - RNA, 20 nt, Artificial Sequence
  spacer sequence GTCN PAM
cgucccccuggggacccucc

SEQ ID NO: 8288 - RNA, 20 nt, Artificial Sequence
  spacer sequence GTCN PAM
ucauggccgugucuucugac

SEQ ID NO: 8289 - RNA, 20 nt, Artificial Sequence
  spacer sequence GTCN PAM
uggccgugucuucugacuuu

SEQ ID NO: 8290 - RNA, 20 nt, Artificial Sequence
  spacer sequence GTCN PAM
ucugacuuuggauuuagggu

SEQ ID NO: 8291 - RNA, 20 nt, Artificial Sequence
  spacer sequence GTCN PAM
gaagacacggccaugacgac

SEQ ID NO: 8292 - RNA, 20 nt, Artificial Sequence
  spacer sequence GTCN PAM
gucuugauccgguaugaccg

SEQ ID NO: 8293 - RNA, 20 nt, Artificial Sequence
  spacer sequence GTCN PAM
ugauccgguaugaccgcauc

SEQ ID NO: 8294 - RNA, 20 nt, Artificial Sequence
  spacer sequence GTCN PAM
uaccggaucaagacggaccc

SEQ ID NO: 8295 - RNA, 20 nt, Artificial Sequence
  spacer sequence GTCN PAM
uugagaugcggucauaccgg

SEQ ID NO: 8296 - RNA, 20 nt, Artificial Sequence
  spacer sequence GTCN PAM
gcaaggacccuguuuccagg

SEQ ID NO: 8297 - RNA, 20 nt, Artificial Sequence
  spacer sequence GTCN PAM
uugccgacgucauugagaug

SEQ ID NO: 8298 - RNA, 20 nt, Artificial Sequence
  spacer sequence GTCN PAM
gaggcacuguuuagccaccu

SEQ ID NO: 8299 - RNA, 20 nt, Artificial Sequence
  spacer sequence GTCN PAM
uacgaggaggcagcaaggug

SEQ ID NO: 8300 - RNA, 20 nt, Artificial Sequence
  spacer sequence GTCN PAM
ccugcucaagggaaaaaugc

SEQ ID NO: 8301 - RNA, 20 nt, Artificial Sequence
  spacer sequence GTCN PAM
gcguguguggagucuccugc

SEQ ID NO: 8302 - RNA, 20 nt, Artificial Sequence
  spacer sequence GTCN PAM
guguccgcguguguggaguc

SEQ ID NO: 8303 - RNA, 20 nt, Artificial Sequence
  spacer sequence GTCN PAM
cuguccccgucccguggcac

SEQ ID NO: 8304 - RNA, 20 nt, Artificial Sequence
  spacer sequence GTCN PAM
ccgucccguggcaccgcacg

SEQ ID NO: 8305 - RNA, 20 nt, Artificial Sequence
  spacer sequence GTCN PAM
cguggcaccgcacgccaggg

SEQ ID NO: 8306 - RNA, 20 nt, Artificial Sequence
  spacer sequence GTCN PAM
cguggccuuggguccggccc

SEQ ID NO: 8307 - RNA, 20 nt, Artificial Sequence
  spacer sequence GTCN PAM
ggccccugccagaggcuggg

SEQ ID NO: 8308 - RNA, 20 nt, Artificial Sequence
  spacer sequence GTCN PAM
cuggggccccagccucuggc

SEQ ID NO: 8309 - RNA, 20 nt, Artificial Sequence
  spacer sequence GTCN PAM
gcagcaccuucuagcccaga

SEQ ID NO: 8310 - RNA, 20 nt, Artificial Sequence
  spacer sequence GTCN PAM
ggcuccagaagaaauauccg

SEQ ID NO: 8311 - RNA, 20 nt, Artificial Sequence
  spacer sequence GTCN PAM
caggcucagggccuuccucc

SEQ ID NO: 8312 - RNA, 20 nt, Artificial Sequence
  spacer sequence GTCN PAM
gcagucccugccugggccug

SEQ ID NO: 8313 - RNA, 20 nt, Artificial Sequence
  spacer sequence GTCN PAM
cugccugggccugugggccu

SEQ ID NO: 8314 - RNA, 20 nt, Artificial Sequence
  spacer sequence GTCN PAM
uggggcagggcucacagagc

SEQ ID NO: 8315 - RNA, 20 nt, Artificial Sequence
  spacer sequence GTCN PAM
ccgaagggcccccucuccuu

SEQ ID NO: 8316 - RNA, 20 nt, Artificial Sequence
  spacer sequence GTCN PAM
caccagguggguaaaguugg

SEQ ID NO: 8317 - RNA, 20 nt, Artificial Sequence
  spacer sequence GTCN PAM
ggaaagcccugccgagcccu

SEQ ID NO: 8318 - RNA, 20 nt, Artificial Sequence
  spacer sequence GTCN PAM
uucgacuucuggcccagcga

SEQ ID NO: 8319 - RNA, 20 nt, Artificial Sequence
  spacer sequence GTCN PAM
aaggacagagggcucggcag

SEQ ID NO: 8320 - RNA, 20 nt, Artificial Sequence
  spacer sequence GTCN PAM
cagaggcugccgggcacgug

SEQ ID NO: 8321 - RNA, 20 nt, Artificial Sequence
  spacer sequence GTCN PAM
ccacgugcccggcagccucu

SEQ ID NO: 8322 - RNA, 20 nt, Artificial Sequence
  spacer sequence GTCN PAM
gagcuggggcccccacaccu

SEQ ID NO: 8323 - RNA, 20 nt, Artificial Sequence
  spacer sequence GTCN PAM
aaggagaaccccccucccag

SEQ ID NO: 8324 - RNA, 20 nt, Artificial Sequence
  spacer sequence GTCN PAM
agaaccccuugugccacccc

SEQ ID NO: 8325 - RNA, 20 nt, Artificial Sequence
  spacer sequence GTCN PAM
cccagagggaaaaaacucac

SEQ ID NO: 8326 - RNA, 20 nt, Artificial Sequence
  spacer sequence GTCN PAM
uugcuucugcugagggcacg

SEQ ID NO: 8327 - RNA, 20 nt, Artificial Sequence
  spacer sequence GTCN PAM
cagaaucccgggccccagcc

SEQ ID NO: 8328 - RNA, 20 nt, Artificial Sequence
  spacer sequence GTCN PAM
cccgccccggcccugcccug

SEQ ID NO: 8329 - RNA, 20 nt, Artificial Sequence
  spacer sequence GTCN PAM
acaggccccacccauuggca

SEQ ID NO: 8330 - RNA, 20 nt, Artificial Sequence
  spacer sequence GTCN PAM
caccagggaaggagcugagg

SEQ ID NO: 8331 - RNA, 20 nt, Artificial Sequence
  spacer sequence GTCN PAM
uaccacugguggcauggggc

SEQ ID NO: 8332 - RNA, 20 nt, Artificial Sequence
  spacer sequence GTCN PAM
ugcuccuccccugcgucaua

SEQ ID NO: 8333 - RNA, 20 nt, Artificial Sequence
  spacer sequence GTCN PAM
ucccagcacuuugggaggcc

SEQ ID NO: 8334 - RNA, 20 nt, Artificial Sequence
  spacer sequence GTCN PAM
cuucguucagucuuauaaug

SEQ ID NO: 8335 - RNA, 20 nt, Artificial Sequence
  spacer sequence GTCN PAM
uauaaugacggucucaggca

SEQ ID NO: 8336 - RNA, 20 nt, Artificial Sequence
  spacer sequence GTCN PAM
uuauaagacugaacgaaggg

SEQ ID NO: 8337 - RNA, 20 nt, Artificial Sequence
  spacer sequence GTCN PAM
caggcaguaacuguggcggu

SEQ ID NO: 8338 - RNA, 20 nt, Artificial Sequence
  spacer sequence GTCN PAM
gccacagggugguugguggu

SEQ ID NO: 8339 - RNA, 20 nt, Artificial Sequence
  spacer sequence GTCN PAM
gcgaugugaacugggagguc

SEQ ID NO: 8340 - RNA, 20 nt, Artificial Sequence
  spacer sequence GTCN PAM
ggagccucgcggagaagguc

SEQ ID NO: 8341 - RNA, 20 nt, Artificial Sequence
  spacer sequence GTCN PAM
cgcuccagcagagaccagag

SEQ ID NO: 8342 - RNA, 20 nt, Artificial Sequence
  spacer sequence GTCN PAM
cugcuggagcgugaccuucu

SEQ ID NO: 8343 - RNA, 20 nt, Artificial Sequence
  spacer sequence GTCN PAM
gccuggaaugccucgcccgc

SEQ ID NO: 8344 - RNA, 20 nt, Artificial Sequence
  spacer sequence GTCN PAM
ugccccagggccucugugcg

SEQ ID NO: 8345 - RNA, 20 nt, Artificial Sequence
  spacer sequence GTCN PAM
cuguuucuccuacacaccag

SEQ ID NO: 8346 - RNA, 20 nt, Artificial Sequence
  spacer sequence GTCN PAM
ugcacggccuguggacugug

SEQ ID NO: 8347 - RNA, 20 nt, Artificial Sequence
  spacer sequence GTCN PAM
acaggccgugcaggacccgc

SEQ ID NO: 8348 - RNA, 20 nt, Artificial Sequence
  spacer sequence GTCN PAM
ccacaguccacaggccgugc

SEQ ID NO: 8349 - RNA, 20 nt, Artificial Sequence
  spacer sequence GTCN PAM
cccguguccccacaguccac

SEQ ID NO: 8350 - RNA, 20 nt, Artificial Sequence
  spacer sequence GTCN PAM
cugcucacacgucacccgug

SEQ ID NO: 8351 - RNA, 20 nt, Artificial Sequence
  spacer sequence GTCN PAM
caaucagagcucacaagcgc

SEQ ID NO: 8352 - RNA, 20 nt, Artificial Sequence
  spacer sequence GTCN PAM
ccagagggcgcuugugagcu

SEQ ID NO: 8353 - RNA, 20 nt, Artificial Sequence
  spacer sequence GTCN PAM
caugcugggaaggaugauga

SEQ ID NO: 8354 - RNA, 20 nt, Artificial Sequence
  spacer sequence GTCN PAM
uccauccucaucauccuucc

SEQ ID NO: 8355 - RNA, 20 nt, Artificial Sequence
  spacer sequence GTCN PAM
ccuuggcacuuaaaacaacg

SEQ ID NO: 8356 - RNA, 20 nt, Artificial Sequence
  spacer sequence GTCN PAM
ugcgcccugccagcacaucu

SEQ ID NO: 8357 - RNA, 20 nt, Artificial Sequence
  spacer sequence GTCN PAM
caacacuuuggaaggccgag

SEQ ID NO: 8358 - RNA, 20 nt, Artificial Sequence
  spacer sequence GTCN PAM
cacucuguggcccaggcugg

SEQ ID NO: 8359 - RNA, 20 nt, Artificial Sequence
  spacer sequence GTCN PAM
aaauaauaacaagcaugagg

SEQ ID NO: 8360 - RNA, 20 nt, Artificial Sequence
  spacer sequence GTCN PAM
ggaguucgagaccagccugg

SEQ ID NO: 8361 - RNA, 20 nt, Artificial Sequence
  spacer sequence GTCN PAM
cgaacuccugaccucagcug

SEQ ID NO: 8362 - RNA, 20 nt, Artificial Sequence
  spacer sequence GTCN PAM
ccucccuuaauagaguuuca

SEQ ID NO: 8363 - RNA, 20 nt, Artificial Sequence
  spacer sequence GTCN PAM
uaugcccaauuucugccucc

SEQ ID NO: 8364 - RNA, 20 nt, Artificial Sequence
  spacer sequence GTCN PAM
gccuguggauuucauuucug

SEQ ID NO: 8365 - RNA, 20 nt, Artificial Sequence
  spacer sequence GTCN PAM
cucuuuaacuaccaggccca

SEQ ID NO: 8366 - RNA, 20 nt, Artificial Sequence
  spacer sequence GTCN PAM
ggggucgcucuuuaacuacc

SEQ ID NO: 8367 - RNA, 20 nt, Artificial Sequence
  spacer sequence GTCN PAM
ggaaucuauagauaacguaa

SEQ ID NO: 8368 - RNA, 20 nt, Artificial Sequence
  spacer sequence GTCN PAM
uguucuguuccgaucugauu

SEQ ID NO: 8369 - RNA, 20 nt, Artificial Sequence
  spacer sequence GTCN PAM
cguacccccugcuuguucaa

SEQ ID NO: 8370 - RNA, 20 nt, Artificial Sequence
  spacer sequence GTCN PAM
ugaucgauugaacaagcagg

SEQ ID NO: 8371 - RNA, 20 nt, Artificial Sequence
  spacer sequence GTCN PAM
gcgugagagggucgugaucg

SEQ ID NO: 8372 - RNA, 20 nt, Artificial Sequence
  spacer sequence GTCN PAM
cucuucagggcucacaacuc

SEQ ID NO: 8373 - RNA, 20 nt, Artificial Sequence
  spacer sequence GTCN PAM
caagagccgagcuccccgag

SEQ ID NO: 8374 - RNA, 20 nt, Artificial Sequence
  spacer sequence GTCN PAM
ugccgauggccccggccgaa

SEQ ID NO: 8375 - RNA, 20 nt, Artificial Sequence
  spacer sequence GTCN PAM
gaggaguuuugucugcggcu

SEQ ID NO: 8376 - RNA, 20 nt, Artificial Sequence
  spacer sequence GTCN PAM
gcggcucuuccugcuacacu

SEQ ID NO: 8377 - RNA, 20 nt, Artificial Sequence
  spacer sequence GTCN PAM
ggagaucgagaccauccugg

SEQ ID NO: 8378 - RNA, 20 nt, Artificial Sequence
  spacer sequence GTCN PAM
cgaucuccugaccucgugau

SEQ ID NO: 8379 - RNA, 20 nt, Artificial Sequence
  spacer sequence GTCN PAM
cuacuaaaaauacaaacaau

SEQ ID NO: 8380 - RNA, 20 nt, Artificial Sequence
  spacer sequence GTCN PAM
cagcuacucgggaggcugag

SEQ ID NO: 8381 - RNA, 20 nt, Artificial Sequence
  spacer sequence GTCN PAM
cccaggcuggagugcagugg

SEQ ID NO: 8382 - RNA, 20 nt, Artificial Sequence
  spacer sequence GTCN PAM
cgcucugucgcccaggcugg

SEQ ID NO: 8383 - RNA, 20 nt, Artificial Sequence
  spacer sequence GTCN PAM
caaaaaaauaacaaguaaau

SEQ ID NO: 8384 - RNA, 20 nt, Artificial Sequence
  spacer sequence GTCN PAM
cucgcgcugcugggacugac

SEQ ID NO: 8385 - RNA, 20 nt, Artificial Sequence
  spacer sequence GTCN PAM
cagcagcgcgagggacgagg

SEQ ID NO: 8386 - RNA, 20 nt, Artificial Sequence
  spacer sequence GTCN PAM
gucccagcagcgcgagggac

SEQ ID NO: 8387 - RNA, 20 nt, Artificial Sequence
  spacer sequence GTCN PAM
ggguacccccaacgcaacca

SEQ ID NO: 8388 - RNA, 20 nt, Artificial Sequence
  spacer sequence GTCN PAM
ccgggaggccgugguugcgu

SEQ ID NO: 8389 - RNA, 20 nt, Artificial Sequence
  spacer sequence GTCN PAM
gggucaccgggaggccgugg

SEQ ID NO: 8390 - RNA, 20 nt, Artificial Sequence
  spacer sequence GTCN PAM
cggaaccuggauccccgacc

SEQ ID NO: 8391 - RNA, 20 nt, Artificial Sequence
  spacer sequence GTCN PAM
gggauccagguuccgggacg

SEQ ID NO: 8392 - RNA, 20 nt, Artificial Sequence
  spacer sequence GTCN PAM
gggccgcagggcccggucgg

SEQ ID NO: 8393 - RNA, 20 nt, Artificial Sequence
  spacer sequence GTCN PAM
uguuccccggcgcugggcuc

SEQ ID NO: 8394 - RNA, 20 nt, Artificial Sequence
  spacer sequence GTCN PAM
ccgcccggggacaccaggcu

SEQ ID NO: 8395 - RNA, 20 nt, Artificial Sequence
  spacer sequence GTCN PAM
ccgggcggagacugggaagc

SEQ ID NO: 8396 - RNA, 20 nt, Artificial Sequence
  spacer sequence GTCN PAM
cgggaggccuggccguucgc

SEQ ID NO: 8397 - RNA, 20 nt, Artificial Sequence
  spacer sequence GTCN PAM
uccagcgcgcuggucccggg

SEQ ID NO: 8398 - RNA, 20 nt, Artificial Sequence
  spacer sequence GTCN PAM
ccgccgcgagucuuccagcg

SEQ ID NO: 8399 - RNA, 20 nt, Artificial Sequence
  spacer sequence GTCN PAM
ccucgcguucccacugcggg

SEQ ID NO: 8400 - RNA, 20 nt, Artificial Sequence
  spacer sequence GTCN PAM
gucuccucgcguucccacug

SEQ ID NO: 8401 - RNA, 20 nt, Artificial Sequence
  spacer sequence GTCN PAM
cgccccguggucggucuccu

SEQ ID NO: 8402 - RNA, 20 nt, Artificial Sequence
  spacer sequence GTCN PAM
gcgccgcccgccccaagccc

SEQ ID NO: 8403 - RNA, 20 nt, Artificial Sequence
  spacer sequence GTCN PAM
uccgaguucguggcgggcug

SEQ ID NO: 8404 - RNA, 20 nt, Artificial Sequence
  spacer sequence GTCN PAM
gcugcgcccugcgggucgag

SEQ ID NO: 8405 - RNA, 20 nt, Artificial Sequence
  spacer sequence GTCN PAM
agaaugucaucagcagggau

SEQ ID NO: 8406 - RNA, 20 nt, Artificial Sequence
  spacer sequence GTCN PAM
ucagcagggauggcggcgcu

SEQ ID NO: 8407 - RNA, 20 nt, Artificial Sequence
  spacer sequence GTCN PAM
gggccgcgcucagcacucaa

SEQ ID NO: 8408 - RNA, 20 nt, Artificial Sequence
  spacer sequence GTCN PAM
cggucggggccgcgcucagc

SEQ ID NO: 8409 - RNA, 20 nt, Artificial Sequence
  spacer sequence GTCN PAM
aggguagggggucccggucg

SEQ ID NO: 8410 - RNA, 20 nt, Artificial Sequence
  spacer sequence GTCN PAM
gggcucggccugcgagggug

SEQ ID NO: 8411 - RNA, 20 nt, Artificial Sequence
  spacer sequence GTCN PAM
ggagucggggcucggccugc

SEQ ID NO: 8412 - RNA, 20 nt, Artificial Sequence
  spacer sequence GTCN PAM
cagcccgcggccccgaccuc

SEQ ID NO: 8413 - RNA, 20 nt, Artificial Sequence
  spacer sequence GTCN PAM
gggccgcgggcugcgacggc

SEQ ID NO: 8414 - RNA, 20 nt, Artificial Sequence
  spacer sequence GTCN PAM
gaggucggggccgcgggcug

SEQ ID NO: 8415 - RNA, 20 nt, Artificial Sequence
  spacer sequence GTCN PAM
gggccgcgggcugcgagggc

SEQ ID NO: 8416 - RNA, 20 nt, Artificial Sequence
  spacer sequence GTCN PAM
gaggucggggccgcgggcug

SEQ ID NO: 8417 - RNA, 20 nt, Artificial Sequence
  spacer sequence GTCN PAM
ggcugggagggcgggucaga

SEQ ID NO: 8418 - RNA, 20 nt, Artificial Sequence
  spacer sequence GTCN PAM
ggcguagagggucuggcugg

SEQ ID NO: 8419 - RNA, 20 nt, Artificial Sequence
  spacer sequence GTCN PAM
acugccgggccgaugggcca

SEQ ID NO: 8420 - RNA, 20 nt, Artificial Sequence
  spacer sequence GTCN PAM
ggggagggaacggggccgag

SEQ ID NO: 8421 - RNA, 20 nt, Artificial Sequence
  spacer sequence GTCN PAM
gggggguccggggagggaac

SEQ ID NO: 8422 - RNA, 20 nt, Artificial Sequence
  spacer sequence GTCN PAM
ucccugcagagccgagggcc

SEQ ID NO: 8423 - RNA, 20 nt, Artificial Sequence
  spacer sequence GTCN PAM
gggaggaugcggggcugggc

SEQ ID NO: 8424 - RNA, 20 nt, Artificial Sequence
  spacer sequence GTCN PAM
ggccugugggugaccgugca

SEQ ID NO: 8425 - RNA, 20 nt, Artificial Sequence
  spacer sequence GTCN PAM
cccacaggcccgacggcccc

SEQ ID NO: 8426 - RNA, 20 nt, Artificial Sequence
  spacer sequence GTCN PAM
ugacaaccacagauggcccc

SEQ ID NO: 8427 - RNA, 20 nt, Artificial Sequence
  spacer sequence GTCN PAM
cgacugggaagggggagauc

SEQ ID NO: 8428 - RNA, 20 nt, Artificial Sequence
  spacer sequence GTCN PAM
cugcaguuccuaacggguug

SEQ ID NO: 8429 - RNA, 20 nt, Artificial Sequence
  spacer sequence GTCN PAM
agcacucagcgcggguuggg

SEQ ID NO: 8430 - RNA, 20 nt, Artificial Sequence
  spacer sequence GTCN PAM
uccucagaggccgccggccu

SEQ ID NO: 8431 - RNA, 20 nt, Artificial Sequence
  spacer sequence GTCN PAM
ucagaggccgccggccugca

SEQ ID NO: 8432 - RNA, 20 nt, Artificial Sequence
  spacer sequence GTCN PAM
ggguucaggcagagccgcag

SEQ ID NO: 8433 - RNA, 20 nt, Artificial Sequence
  spacer sequence GTCN PAM
ccagaagcggagcgggagcc

SEQ ID NO: 8434 - RNA, 20 nt, Artificial Sequence
  spacer sequence GTCN PAM
ggcggccacgauagaaagaa

SEQ ID NO: 8435 - RNA, 20 nt, Artificial Sequence
  spacer sequence GTCN PAM
ggaguuugagaccagccugg

SEQ ID NO: 8436 - RNA, 20 nt, Artificial Sequence
  spacer sequence GTCN PAM
caaacuccugaccucaggug

SEQ ID NO: 8437 - RNA, 20 nt, Artificial Sequence
  spacer sequence GTCN PAM
cuacuaaaaauacaaaaauu

SEQ ID NO: 8438 - RNA, 20 nt, Artificial Sequence
  spacer sequence GTCN PAM
caccuacuuggaaggccguc

SEQ ID NO: 8439 - RNA, 20 nt, Artificial Sequence
  spacer sequence GTCN PAM
caguagaaucacuugaaccc

SEQ ID NO: 8440 - RNA, 20 nt, Artificial Sequence
  spacer sequence GTCN PAM
cccaggcuggaguacagugg

SEQ ID NO: 8441 - RNA, 20 nt, Artificial Sequence
  spacer sequence GTCN PAM
aaaauacuauccuuucgauu

SEQ ID NO: 8442 - RNA, 20 nt, Artificial Sequence
  spacer sequence GTCN PAM
acuuccuaauucucacagga

SEQ ID NO: 8443 - RNA, 20 nt, Artificial Sequence
  spacer sequence GTCN PAM
guuucuaaguugauauucgu

SEQ ID NO: 8444 - RNA, 20 nt, Artificial Sequence
  spacer sequence GTCN PAM
gccaccgcgccuggcccuga

SEQ ID NO: 8445 - RNA, 20 nt, Artificial Sequence
  spacer sequence GTCN PAM
ugaacuccccaccucaagug

SEQ ID NO: 8446 - RNA, 20 nt, Artificial Sequence
  spacer sequence GTCN PAM
ggcuggucuugaacucccca

SEQ ID NO: 8447 - RNA, 20 nt, Artificial Sequence
  spacer sequence GTCN PAM
cuauuaaaaauacaaaaauu

SEQ ID NO: 8448 - RNA, 20 nt, Artificial Sequence
  spacer sequence GTCN PAM
ggcguuugagacuagccuga

SEQ ID NO: 8449 - RNA, 20 nt, Artificial Sequence
  spacer sequence GTCN PAM
caaacgccugaccucaggug

SEQ ID NO: 8450 - RNA, 20 nt, Artificial Sequence
  spacer sequence GTCN PAM
ggcuagucucaaacgccuga

SEQ ID NO: 8451 - RNA, 20 nt, Artificial Sequence
  spacer sequence GTCN PAM
cuacuaaaaaugcaaaaguu

SEQ ID NO: 8452 - RNA, 20 nt, Artificial Sequence
  spacer sequence GTCN PAM
cagcuacuccggagucugag

SEQ ID NO: 8453 - RNA, 20 nt, Artificial Sequence
  spacer sequence GTCN PAM
gagacagaauugcuuaaacc

SEQ ID NO: 8454 - RNA, 20 nt, Artificial Sequence
  spacer sequence GTCN PAM
cagacuccggaguagcuggg

SEQ ID NO: 8455 - RNA, 20 nt, Artificial Sequence
  spacer sequence GTCN PAM
cccaggcuggagugcagugg

SEQ ID NO: 8456 - RNA, 20 nt, Artificial Sequence
  spacer sequence GTCN PAM
caaaaaaaaaaaaaaagucu

SEQ ID NO: 8457 - RNA, 20 nt, Artificial Sequence
  spacer sequence GTCN PAM
acaaauacaaaacuuaccug

SEQ ID NO: 8458 - RNA, 20 nt, Artificial Sequence
  spacer sequence GTCN PAM
auccuuccuccuuaaaccug

SEQ ID NO: 8459 - RNA, 20 nt, Artificial Sequence
  spacer sequence GTCN PAM
gugugcgugcaugcgugugu

SEQ ID NO: 8460 - RNA, 20 nt, Artificial Sequence
  spacer sequence GTCN PAM
caaggagagugggggaggaa

SEQ ID NO: 8461 - RNA, 20 nt, Artificial Sequence
  spacer sequence GTCN PAM
gggguccuuggacuggguuc

SEQ ID NO: 8462 - RNA, 20 nt, Artificial Sequence
  spacer sequence GTCN PAM
uuggacuggguucaagccuu

SEQ ID NO: 8463 - RNA, 20 nt, Artificial Sequence
  spacer sequence GTCN PAM
aaggaccccagaccugaggg

SEQ ID NO: 8464 - RNA, 20 nt, Artificial Sequence
  spacer sequence GTCN PAM
aacaaggaggcccugccgug

SEQ ID NO: 8465 - RNA, 20 nt, Artificial Sequence
  spacer sequence GTCN PAM
ucacuccaaagaaaaagcca

SEQ ID NO: 8466 - RNA, 20 nt, Artificial Sequence
  spacer sequence GTCN PAM
ucauggcuuuuucuuuggag

SEQ ID NO: 8467 - RNA, 20 nt, Artificial Sequence
  spacer sequence GTCN PAM
guucugggguccucauggcu

SEQ ID NO: 8468 - RNA, 20 nt, Artificial Sequence
  spacer sequence GTCN PAM
cccacccacuggucaguucu

SEQ ID NO: 8469 - RNA, 20 nt, Artificial Sequence
  spacer sequence GTCN PAM
agaagggucugucagggccu

SEQ ID NO: 8470 - RNA, 20 nt, Artificial Sequence
  spacer sequence GTCN PAM
gucagggccuggggcgugcu

SEQ ID NO: 8471 - RNA, 20 nt, Artificial Sequence
  spacer sequence GTCN PAM
gggccuggggcgugcuccgc

SEQ ID NO: 8472 - RNA, 20 nt, Artificial Sequence
  spacer sequence GTCN PAM
aggagcggagcacgccccag

SEQ ID NO: 8473 - RNA, 20 nt, Artificial Sequence
  spacer sequence GTCN PAM
ucuggaacgcucccucggca

SEQ ID NO: 8474 - RNA, 20 nt, Artificial Sequence
  spacer sequence GTCN PAM
acagcugccgagggagcguu

SEQ ID NO: 8475 - RNA, 20 nt, Artificial Sequence
  spacer sequence GTCN PAM
ggggcuggugggauggcugg

SEQ ID NO: 8476 - RNA, 20 nt, Artificial Sequence
  spacer sequence GTCN PAM
cagccaucccaccagcccca

SEQ ID NO: 8477 - RNA, 20 nt, Artificial Sequence
  spacer sequence GTCN PAM
cagccaggaagccccccuuc

SEQ ID NO: 8478 - RNA, 20 nt, Artificial Sequence
  spacer sequence GTCN PAM
ggaagcccccuucccaugga

SEQ ID NO: 8479 - RNA, 20 nt, Artificial Sequence
  spacer sequence GTCN PAM
ucggcggccuccgucaggaa

SEQ ID NO: 8480 - RNA, 20 nt, Artificial Sequence
  spacer sequence GTCN PAM
agucucccaaggacaaaaag

SEQ ID NO: 8481 - RNA, 20 nt, Artificial Sequence
  spacer sequence GTCN PAM
cccaaggacaaaaaggaggu

SEQ ID NO: 8482 - RNA, 20 nt, Artificial Sequence
  spacer sequence GTCN PAM
uugggagacucgaccccgcc

SEQ ID NO: 8483 - RNA, 20 nt, Artificial Sequence
  spacer sequence GTCN PAM
ccguugccggcggaagauac

SEQ ID NO: 8484 - RNA, 20 nt, Artificial Sequence
  spacer sequence GTCN PAM
cacaggaaggccuacaccgu

SEQ ID NO: 8485 - RNA, 20 nt, Artificial Sequence
  spacer sequence GTCN PAM
uagucccacaggaaggccua

SEQ ID NO: 8486 - RNA, 20 nt, Artificial Sequence
  spacer sequence GTCN PAM
gaguccuagucccacaggaa

SEQ ID NO: 8487 - RNA, 20 nt, Artificial Sequence
  spacer sequence GTCN PAM
caggguccuccccggcccuc

SEQ ID NO: 8488 - RNA, 20 nt, Artificial Sequence
  spacer sequence GTCN PAM
uccccggcccucaggcugcu

SEQ ID NO: 8489 - RNA, 20 nt, Artificial Sequence
  spacer sequence GTCN PAM
cuccaucccucugccucugc

SEQ ID NO: 8490 - RNA, 20 nt, Artificial Sequence
  spacer sequence GTCN PAM
cugucucugucucccugugu

SEQ ID NO: 8491 - RNA, 20 nt, Artificial Sequence
  spacer sequence GTCN PAM
cugucucccugugucucucu

SEQ ID NO: 8492 - RNA, 20 nt, Artificial Sequence
  spacer sequence GTCN PAM
cccugugucucucugccuuc

SEQ ID NO: 8493 - RNA, 20 nt, Artificial Sequence
  spacer sequence GTCN PAM
cucugccuucucucuuccuc

SEQ ID NO: 8494 - RNA, 20 nt, Artificial Sequence
  spacer sequence GTCN PAM
cugucucucugugucucuau

SEQ ID NO: 8495 - RNA, 20 nt, Artificial Sequence
  spacer sequence GTCN PAM
cucugugucucuaucucccu

SEQ ID NO: 8496 - RNA, 20 nt, Artificial Sequence
  spacer sequence GTCN PAM
cuaucucccugugucucucu

SEQ ID NO: 8497 - RNA, 20 nt, Artificial Sequence
  spacer sequence GTCN PAM
cucugccuugucucucuucc

SEQ ID NO: 8498 - RNA, 20 nt, Artificial Sequence
  spacer sequence GTCN PAM
cucuuccuugaucugucucu

SEQ ID NO: 8499 - RNA, 20 nt, Artificial Sequence
  spacer sequence GTCN PAM
cucccucucugugucucugu

SEQ ID NO: 8500 - RNA, 20 nt, Artificial Sequence
  spacer sequence GTCN PAM
cugucucccuaugucucucu

SEQ ID NO: 8501 - RNA, 20 nt, Artificial Sequence
  spacer sequence GTCN PAM
cccuaugucucucuuccuca

SEQ ID NO: 8502 - RNA, 20 nt, Artificial Sequence
  spacer sequence GTCN PAM
cucuuccucacucugucucu

SEQ ID NO: 8503 - RNA, 20 nt, Artificial Sequence
  spacer sequence GTCN PAM
cugucucucugugucucugu

SEQ ID NO: 8504 - RNA, 20 nt, Artificial Sequence
  spacer sequence GTCN PAM
cucugugucucugucucucu

SEQ ID NO: 8505 - RNA, 20 nt, Artificial Sequence
  spacer sequence GTCN PAM
cugucucucucucucugucu

SEQ ID NO: 8506 - RNA, 20 nt, Artificial Sequence
  spacer sequence GTCN PAM
cucucucucugucucugugu

SEQ ID NO: 8507 - RNA, 20 nt, Artificial Sequence
  spacer sequence GTCN PAM
cugugucucccucacccccg

SEQ ID NO: 8508 - RNA, 20 nt, Artificial Sequence
  spacer sequence GTCN PAM
cccucacccccgccuucccc

SEQ ID NO: 8509 - RNA, 20 nt, Artificial Sequence
  spacer sequence GTCN PAM
cucugccucugggaacccuc

SEQ ID NO: 8510 - RNA, 20 nt, Artificial Sequence
  spacer sequence GTCN PAM
aucccaccugcccuguccuc

SEQ ID NO: 8511 - RNA, 20 nt, Artificial Sequence
  spacer sequence GTCN PAM
ucagggggaccccagcuuug

SEQ ID NO: 8512 - RNA, 20 nt, Artificial Sequence
  spacer sequence GTCN PAM
cccugaggacagggcaggug

SEQ ID NO: 8513 - RNA, 20 nt, Artificial Sequence
  spacer sequence GTCN PAM
ccccgcccccacaagccugu

SEQ ID NO: 8514 - RNA, 20 nt, Artificial Sequence
  spacer sequence GTCN PAM
ccgugugccgagcccucaca

SEQ ID NO: 8515 - RNA, 20 nt, Artificial Sequence
  spacer sequence GTCN PAM
cgcguggugaucacgcugcu

SEQ ID NO: 8516 - RNA, 20 nt, Artificial Sequence
  spacer sequence GTCN PAM
cccgcccgcccgcuggguca

SEQ ID NO: 8517 - RNA, 20 nt, Artificial Sequence
  spacer sequence GTCN PAM
cagcucuccagggcccuguc

SEQ ID NO: 8518 - RNA, 20 nt, Artificial Sequence
  spacer sequence GTCN PAM
cuccccaccugcaggaagua

SEQ ID NO: 8519 - RNA, 20 nt, Artificial Sequence
  spacer sequence GTCN PAM
ggggcugggaaacagcccau

SEQ ID NO: 8520 - RNA, 20 nt, Artificial Sequence
  spacer sequence GTCN PAM
gcuuuccggugaggccuuuc

SEQ ID NO: 8521 - RNA, 20 nt, Artificial Sequence
  spacer sequence GTCN PAM
caucccccuccugcccaggc

SEQ ID NO: 8522 - RNA, 20 nt, Artificial Sequence
  spacer sequence GTCN PAM
cccugggucccaucccccuc

SEQ ID NO: 8523 - RNA, 20 nt, Artificial Sequence
  spacer sequence GTCN PAM
ccucagaggugagggcccag

SEQ ID NO: 8524 - RNA, 20 nt, Artificial Sequence
  spacer sequence GTCN PAM
cagccccaccccugggccuc

SEQ ID NO: 8525 - RNA, 20 nt, Artificial Sequence
  spacer sequence GTCN PAM
cagccccgccccugggccuc

SEQ ID NO: 8526 - RNA, 20 nt, Artificial Sequence
  spacer sequence GTCN PAM
cagccccgccccugggccuc

SEQ ID NO: 8527 - RNA, 20 nt, Artificial Sequence
  spacer sequence GTCN PAM
cagcccugccccugggccuc

SEQ ID NO: 8528 - RNA, 20 nt, Artificial Sequence
  spacer sequence GTCN PAM
gaggagggaaacugaggccc

SEQ ID NO: 8529 - RNA, 20 nt, Artificial Sequence
  spacer sequence GTCN PAM
augggguuccaagcauugcc

SEQ ID NO: 8530 - RNA, 20 nt, Artificial Sequence
  spacer sequence GTCN PAM
gugccucaguuucccuggcc

SEQ ID NO: 8531 - RNA, 20 nt, Artificial Sequence
  spacer sequence GTCN PAM
gucugugccucaguuucccu

SEQ ID NO: 8532 - RNA, 20 nt, Artificial Sequence
  spacer sequence GTCN PAM
gcaggaaugcuccaucauuu

SEQ ID NO: 8533 - RNA, 20 nt, Artificial Sequence
  spacer sequence GTCN PAM
agggucacaggaccggcccc

SEQ ID NO: 8534 - RNA, 20 nt, Artificial Sequence
  spacer sequence GTCN PAM
caggaccggccccugggugg

SEQ ID NO: 8535 - RNA, 20 nt, Artificial Sequence
  spacer sequence GTCN PAM
ugugacccuggaccccaugc

SEQ ID NO: 8536 - RNA, 20 nt, Artificial Sequence
  spacer sequence GTCN PAM
ugauggcuggcuccccucca

SEQ ID NO: 8537 - RNA, 20 nt, Artificial Sequence
  spacer sequence GTCN PAM
cagaggcccugggagggucc

SEQ ID NO: 8538 - RNA, 20 nt, Artificial Sequence
  spacer sequence GTCN PAM
cggugaugcagggggguaaa

SEQ ID NO: 8539 - RNA, 20 nt, Artificial Sequence
  spacer sequence GTCN PAM
ccgcugguggcuuguuuacc

SEQ ID NO: 8540 - RNA, 20 nt, Artificial Sequence
  spacer sequence GTCN PAM
ugggaaccucaucuuccaaa

SEQ ID NO: 8541 - RNA, 20 nt, Artificial Sequence
  spacer sequence GTCN PAM
agccagcaucccuuccagau

SEQ ID NO: 8542 - RNA, 20 nt, Artificial Sequence
  spacer sequence GTCN PAM
acaagagggaucuggaaggg

SEQ ID NO: 8543 - RNA, 20 nt, Artificial Sequence
  spacer sequence GTCN PAM
caguguagaccaaggaacag

SEQ ID NO: 8544 - RNA, 20 nt, Artificial Sequence
  spacer sequence GTCN PAM
acacugagaccuggaucucg

SEQ ID NO: 8545 - RNA, 20 nt, Artificial Sequence
  spacer sequence GTCN PAM
ccccaucucugagccuggcu

SEQ ID NO: 8546 - RNA, 20 nt, Artificial Sequence
  spacer sequence GTCN PAM
cacguccuggagggucucac

SEQ ID NO: 8547 - RNA, 20 nt, Artificial Sequence
  spacer sequence GTCN PAM
uggagggucucacagcucca

SEQ ID NO: 8548 - RNA, 20 nt, Artificial Sequence
  spacer sequence GTCN PAM
cacagcuccaccacggccag

SEQ ID NO: 8549 - RNA, 20 nt, Artificial Sequence
  spacer sequence GTCN PAM
ccuggccgugguggagcugu

SEQ ID NO: 8550 - RNA, 20 nt, Artificial Sequence
  spacer sequence GTCN PAM
agggggccuccauccccagc

SEQ ID NO: 8551 - RNA, 20 nt, Artificial Sequence
  spacer sequence GTCN PAM
cuggggauggaggcccccug

SEQ ID NO: 8552 - RNA, 20 nt, Artificial Sequence
  spacer sequence GTCN PAM
ggugaaggucgcuggggaug

SEQ ID NO: 8553 - RNA, 20 nt, Artificial Sequence
  spacer sequence GTCN PAM
ccugggggucaggugaaggu

SEQ ID NO: 8554 - RNA, 20 nt, Artificial Sequence
  spacer sequence GTCN PAM
uguuggcugggguccccugg

SEQ ID NO: 8555 - RNA, 20 nt, Artificial Sequence
  spacer sequence GTCN PAM
ggaguucgaggccagccugc

SEQ ID NO: 8556 - RNA, 20 nt, Artificial Sequence
  spacer sequence GTCN PAM
cuacuaaagauacaaaauua

SEQ ID NO: 8557 - RNA, 20 nt, Artificial Sequence
  spacer sequence GTCN PAM
ccacgccuggcuaauuuugu

SEQ ID NO: 8558 - RNA, 20 nt, Artificial Sequence
  spacer sequence GTCN PAM
cccgggcucaagcgauucuc

SEQ ID NO: 8559 - RNA, 20 nt, Artificial Sequence
  spacer sequence GTCN PAM
ccugcacuuucuuuucuuuu

SEQ ID NO: 8560 - RNA, 20 nt, Artificial Sequence
  spacer sequence GTCN PAM
gggugggggcggcgcugccc

SEQ ID NO: 8561 - RNA, 20 nt, Artificial Sequence
  spacer sequence GTCN PAM
cacuuccaugcacuugaccu

SEQ ID NO: 8562 - RNA, 20 nt, Artificial Sequence
  spacer sequence GTCN PAM
agugcauggaagugggacag

SEQ ID NO: 8563 - RNA, 20 nt, Artificial Sequence
  spacer sequence GTCN PAM
aggucaagugcauggaagug

SEQ ID NO: 8564 - RNA, 20 nt, Artificial Sequence
  spacer sequence GTCN PAM
gcgaucuucccgugccugaa

SEQ ID NO: 8565 - RNA, 20 nt, Artificial Sequence
  spacer sequence GTCN PAM
guuccaagccucauauucag

SEQ ID NO: 8566 - RNA, 20 nt, Artificial Sequence
  spacer sequence GTCN PAM
gggucuguuccaagccucau

SEQ ID NO: 8567 - RNA, 20 nt, Artificial Sequence
  spacer sequence GTCN PAM
ugaguggccccgggaccccg

SEQ ID NO: 8568 - RNA, 20 nt, Artificial Sequence
  spacer sequence GTCN PAM
cggggccacucaggacgggc

SEQ ID NO: 8569 - RNA, 20 nt, Artificial Sequence
  spacer sequence GTCN PAM
ggggucaggccaggaaagcc

SEQ ID NO: 8570 - RNA, 20 nt, Artificial Sequence
  spacer sequence GTCN PAM
ggccaggaaagccccuuggg

SEQ ID NO: 8571 - RNA, 20 nt, Artificial Sequence
  spacer sequence GTCN PAM
ccgggcggcgggaaggagug

SEQ ID NO: 8572 - RNA, 20 nt, Artificial Sequence
  spacer sequence GTCN PAM
cgaggccgcggggaagccgc

SEQ ID NO: 8573 - RNA, 20 nt, Artificial Sequence
  spacer sequence GTCN PAM
ccucugucccgaggccgcgg

SEQ ID NO: 8574 - RNA, 20 nt, Artificial Sequence
  spacer sequence GTCN PAM
gaaauccaugcucagucccc

SEQ ID NO: 8575 - RNA, 20 nt, Artificial Sequence
  spacer sequence GTCN PAM
cuccucucuccugagccccc

SEQ ID NO: 8576 - RNA, 20 nt, Artificial Sequence
  spacer sequence GTCN PAM
ccuccccgcucaccgcgccc

SEQ ID NO: 8577 - RNA, 20 nt, Artificial Sequence
  spacer sequence GTCN PAM
cuccucucuccugagccccc

SEQ ID NO: 8578 - RNA, 20 nt, Artificial Sequence
  spacer sequence GTCN PAM
ucuucacuuuacugcgcccc

SEQ ID NO: 8579 - RNA, 20 nt, Artificial Sequence
  spacer sequence GTCN PAM
ccuccccgcucaccgcgccc

SEQ ID NO: 8580 - RNA, 20 nt, Artificial Sequence
  spacer sequence GTCN PAM
cucccgcgcccccuccgagc

SEQ ID NO: 8581 - RNA, 20 nt, Artificial Sequence
  spacer sequence GTCN PAM
gggggccgcgcggagccccg

SEQ ID NO: 8582 - RNA, 20 nt, Artificial Sequence
  spacer sequence GTCN PAM
cccgaaccccagcugccugg

SEQ ID NO: 8583 - RNA, 20 nt, Artificial Sequence
  spacer sequence GTCN PAM
gggcgggguucagggaccga

SEQ ID NO: 8584 - RNA, 20 nt, Artificial Sequence
  spacer sequence GTCN PAM
cugaaccccgccccgaccgc

SEQ ID NO: 8585 - RNA, 20 nt, Artificial Sequence
  spacer sequence GTCN PAM
ggguagcggcggggcagggg

SEQ ID NO: 8586 - RNA, 20 nt, Artificial Sequence
  spacer sequence GTCN PAM
gggggugcagcggagggucc

SEQ ID NO: 8587 - RNA, 20 nt, Artificial Sequence
  spacer sequence GTCN PAM
gggaaccgggcagaggcggg

SEQ ID NO: 8588 - RNA, 20 nt, Artificial Sequence
  spacer sequence GTCN PAM
ggggguggagcgggacgcag

SEQ ID NO: 8589 - RNA, 20 nt, Artificial Sequence
  spacer sequence GTCN PAM
cgcuccacccccggaccccg

SEQ ID NO: 8590 - RNA, 20 nt, Artificial Sequence
  spacer sequence GTCN PAM
gggacuccgcggggcugagc

SEQ ID NO: 8591 - RNA, 20 nt, Artificial Sequence
  spacer sequence GTCN PAM
cggaccccgccccgccaccg

SEQ ID NO: 8592 - RNA, 20 nt, Artificial Sequence
  spacer sequence GTCN PAM
ccgcaggccagucccuccag

SEQ ID NO: 8593 - RNA, 20 nt, Artificial Sequence
  spacer sequence GTCN PAM
cuccaggugaagccccugca

SEQ ID NO: 8594 - RNA, 20 nt, Artificial Sequence
  spacer sequence GTCN PAM
gcgcaggccaggcggcaggu

SEQ ID NO: 8595 - RNA, 20 nt, Artificial Sequence
  spacer sequence GTCN PAM
aggccccgccacugcaccga

SEQ ID NO: 8596 - RNA, 20 nt, Artificial Sequence
  spacer sequence GTCN PAM
gacacgggccgcagcguccu

SEQ ID NO: 8597 - RNA, 20 nt, Artificial Sequence
  spacer sequence GTCN PAM
gacugcaccgcgcccaggcu

SEQ ID NO: 8598 - RNA, 20 nt, Artificial Sequence
  spacer sequence GTCN PAM
ucaccgugcgcaacgccucg

SEQ ID NO: 8599 - RNA, 20 nt, Artificial Sequence
  spacer sequence GTCN PAM
gcggccgggacccgcgugug

SEQ ID NO: 8600 - RNA, 20 nt, Artificial Sequence
  spacer sequence GTCN PAM
cggccgccgacagcgaggcg

SEQ ID NO: 8601 - RNA, 20 nt, Artificial Sequence
  spacer sequence GTCN PAM
ccccgcgcccugccucucug

SEQ ID NO: 8602 - RNA, 20 nt, Artificial Sequence
  spacer sequence GTCN PAM
gagaggcagggcgcgggggg

SEQ ID NO: 8603 - RNA, 20 nt, Artificial Sequence
  spacer sequence GTCN PAM
aagggucagagaggcagggc

SEQ ID NO: 8604 - RNA, 20 nt, Artificial Sequence
  spacer sequence GTCN PAM
cagcuccaugcacagcuccc

SEQ ID NO: 8605 - RNA, 20 nt, Artificial Sequence
  spacer sequence GTCN PAM
guagucccagcuacucggga

SEQ ID NO: 8606 - RNA, 20 nt, Artificial Sequence
  spacer sequence GTCN PAM
cgcuaauuuuuguauuuuua

SEQ ID NO: 8607 - RNA, 20 nt, Artificial Sequence
  spacer sequence GTCN PAM
agagauugaggccauccugg

SEQ ID NO: 8608 - RNA, 20 nt, Artificial Sequence
  spacer sequence GTCN PAM
uacaaccuaaacuuaucggu

SEQ ID NO: 8609 - RNA, 20 nt, Artificial Sequence
  spacer sequence GTCN PAM
caaaaccgauaaguuuaggu

SEQ ID NO: 8610 - RNA, 20 nt, Artificial Sequence
  spacer sequence GTCN PAM
acugacuacagagagaagac

SEQ ID NO: 8611 - RNA, 20 nt, Artificial Sequence
  spacer sequence GTCN PAM
guggaccuuaucuauacucu

SEQ ID NO: 8612 - RNA, 20 nt, Artificial Sequence
  spacer sequence GTCN PAM
ucucucuguagucaguggac

SEQ ID NO: 8613 - RNA, 20 nt, Artificial Sequence
  spacer sequence GTCN PAM
cacuuugcagcaacuuuaag

SEQ ID NO: 8614 - RNA, 20 nt, Artificial Sequence
  spacer sequence GTCN PAM
uagaaauuuuaaaauccucu

SEQ ID NO: 8615 - RNA, 20 nt, Artificial Sequence
  spacer sequence GTCN PAM
ggggcaucuggccccaguga

SEQ ID NO: 8616 - RNA, 20 nt, Artificial Sequence
  spacer sequence GTCN PAM
ugaaucaacggcaggcaucu

SEQ ID NO: 8617 - RNA, 20 nt, Artificial Sequence
  spacer sequence GTCN PAM
ugguuauagcccuggugccc

SEQ ID NO: 8618 - RNA, 20 nt, Artificial Sequence
  spacer sequence GTCN PAM
cccaccagugugagcaccug

SEQ ID NO: 8619 - RNA, 20 nt, Artificial Sequence
  spacer sequence GTCN PAM
cacaucccugugagcuucau

SEQ ID NO: 8620 - RNA, 20 nt, Artificial Sequence
  spacer sequence GTCN PAM
cacucgcugucccacauccc

SEQ ID NO: 8621 - RNA, 20 nt, Artificial Sequence
  spacer sequence GTCN PAM
uccugucucacucgcugucc

SEQ ID NO: 8622 - RNA, 20 nt, Artificial Sequence
  spacer sequence GTCN PAM
ggggaggcgacauuugagga

SEQ ID NO: 8623 - RNA, 20 nt, Artificial Sequence
  spacer sequence GTCN PAM
ccuccccugaccccuaacuc

SEQ ID NO: 8624 - RNA, 20 nt, Artificial Sequence
  spacer sequence GTCN PAM
cuccucaaaugucgccuccc

SEQ ID NO: 8625 - RNA, 20 nt, Artificial Sequence
  spacer sequence GTCN PAM
ccuccaggucucuccucaaa

SEQ ID NO: 8626 - RNA, 20 nt, Artificial Sequence
  spacer sequence GTCN PAM
cggcccuugcagaggcccug

SEQ ID NO: 8627 - RNA, 20 nt, Artificial Sequence
  spacer sequence GTCN PAM
aguuggagcugggaagccag

SEQ ID NO: 8628 - RNA, 20 nt, Artificial Sequence
  spacer sequence GTCN PAM
ucccagcaccccccagccug

SEQ ID NO: 8629 - RNA, 20 nt, Artificial Sequence
  spacer sequence GTCN PAM
ccccccuucuagcccccacc

SEQ ID NO: 8630 - RNA, 20 nt, Artificial Sequence
  spacer sequence GTCN PAM
ucccagcaccccccagccug

SEQ ID NO: 8631 - RNA, 20 nt, Artificial Sequence
  spacer sequence GTCN PAM
cagccccuacccagccucgg

SEQ ID NO: 8632 - RNA, 20 nt, Artificial Sequence
  spacer sequence GTCN PAM
cccucauccccgccuccacc

SEQ ID NO: 8633 - RNA, 20 nt, Artificial Sequence
  spacer sequence GTCN PAM
aggcuggguaggggcuggga

SEQ ID NO: 8634 - RNA, 20 nt, Artificial Sequence
  spacer sequence GTCN PAM
ccucccagcccaggccuccc

SEQ ID NO: 8635 - RNA, 20 nt, Artificial Sequence
  spacer sequence GTCN PAM
gggaggcuagggcauaggcc

SEQ ID NO: 8636 - RNA, 20 nt, Artificial Sequence
  spacer sequence GTCN PAM
cugccggcccccaacguccc

SEQ ID NO: 8637 - RNA, 20 nt, Artificial Sequence
  spacer sequence GTCN PAM
ccgucuccgcagggccgccu

SEQ ID NO: 8638 - RNA, 20 nt, Artificial Sequence
  spacer sequence GTCN PAM
ccgcagggccgccuucaaca

SEQ ID NO: 8639 - RNA, 20 nt, Artificial Sequence
  spacer sequence GTCN PAM
agccccggccucuuccugcg

SEQ ID NO: 8640 - RNA, 20 nt, Artificial Sequence
  spacer sequence GTCN PAM
cggcagaugcgccugagcag

SEQ ID NO: 8641 - RNA, 20 nt, Artificial Sequence
  spacer sequence GTCN PAM
cggcacugcaccuugcgcag

SEQ ID NO: 8642 - RNA, 20 nt, Artificial Sequence
  spacer sequence GTCN PAM
uccgcgcgggcacacucacc

SEQ ID NO: 8643 - RNA, 20 nt, Artificial Sequence
  spacer sequence GTCN PAM
uccagcagcuggaagagcgc

SEQ ID NO: 8644 - RNA, 20 nt, Artificial Sequence
  spacer sequence GTCN PAM
gccacggcggcggccgaguc

SEQ ID NO: 8645 - RNA, 20 nt, Artificial Sequence
  spacer sequence GTCN PAM
agcacggccuggcccacgcg

SEQ ID NO: 8646 - RNA, 20 nt, Artificial Sequence
  spacer sequence GTCN PAM
cuggccugcagcgcgcccuc

SEQ ID NO: 8647 - RNA, 20 nt, Artificial Sequence
  spacer sequence GTCN PAM
ggccccaagcgcgagccggc

SEQ ID NO: 8648 - RNA, 20 nt, Artificial Sequence
  spacer sequence GTCN PAM
agcgccagcgccaggcuguc

SEQ ID NO: 8649 - RNA, 20 nt, Artificial Sequence
  spacer sequence GTCN PAM
gggggcggcggcccagcgcg

SEQ ID NO: 8650 - RNA, 20 nt, Artificial Sequence
  spacer sequence GTCN PAM
ugggcgcgcugggccgccgc

SEQ ID NO: 8651 - RNA, 20 nt, Artificial Sequence
  spacer sequence GTCN PAM
agccggugggcugaggcccg

SEQ ID NO: 8652 - RNA, 20 nt, Artificial Sequence
  spacer sequence GTCN PAM
caaaaauaaauaaauuuagg

SEQ ID NO: 8653 - RNA, 20 nt, Artificial Sequence
  spacer sequence GTCN PAM
ugcucugucacccaggcuga

SEQ ID NO: 8654 - RNA, 20 nt, Artificial Sequence
  spacer sequence GTCN PAM
cccaggcugaagagcagugg

SEQ ID NO: 8655 - RNA, 20 nt, Artificial Sequence
  spacer sequence GTCN PAM
cucaaagugcugggauuaca

SEQ ID NO: 8656 - RNA, 20 nt, Artificial Sequence
  spacer sequence GTCN PAM
uuauucaugaagaccaaaaa

SEQ ID NO: 8657 - RNA, 20 nt, Artificial Sequence
  spacer sequence GTCN PAM
ucaugaauaaagacacuggc

SEQ ID NO: 8658 - RNA, 20 nt, Artificial Sequence
  spacer sequence GTCN PAM
gcuggugaaugcauaaacac

SEQ ID NO: 8659 - RNA, 20 nt, Artificial Sequence
  spacer sequence GTCN PAM
agccacacaaugggauguga

SEQ ID NO: 8660 - RNA, 20 nt, Artificial Sequence
  spacer sequence GTCN PAM
caucccauuguguggcugga

SEQ ID NO: 8661 - RNA, 20 nt, Artificial Sequence
  spacer sequence GTCN PAM
gagccucgcuccuuuuugug

SEQ ID NO: 8662 - RNA, 20 nt, Artificial Sequence
  spacer sequence GTCN PAM
ucaaggugcauccaggcugu

SEQ ID NO: 8663 - RNA, 20 nt, Artificial Sequence
  spacer sequence GTCN PAM
ugcugggagagacgccaacg

SEQ ID NO: 8664 - RNA, 20 nt, Artificial Sequence
  spacer sequence GTCN PAM
cucccagcaugacguccuca

SEQ ID NO: 8665 - RNA, 20 nt, Artificial Sequence
  spacer sequence GTCN PAM
ugugugauuccacuccuggg

SEQ ID NO: 8666 - RNA, 20 nt, Artificial Sequence
  spacer sequence GTCN PAM
cuagagaccaauucagaggc

SEQ ID NO: 8667 - RNA, 20 nt, Artificial Sequence
  spacer sequence GTCN PAM
cuagggaccucccaggagug

SEQ ID NO: 8668 - RNA, 20 nt, Artificial Sequence
  spacer sequence GTCN PAM
ggaguuugagaccagccugg

SEQ ID NO: 8669 - RNA, 20 nt, Artificial Sequence
  spacer sequence GTCN PAM
caaacucccgaccucaggug

SEQ ID NO: 8670 - RNA, 20 nt, Artificial Sequence
  spacer sequence GTCN PAM
acauggugaaaccucgucuc

SEQ ID NO: 8671 - RNA, 20 nt, Artificial Sequence
  spacer sequence GTCN PAM
cuacuaagaauacgaaaauu

SEQ ID NO: 8672 - RNA, 20 nt, Artificial Sequence
  spacer sequence GTCN PAM
cacuacucgggaggcugagg

SEQ ID NO: 8673 - RNA, 20 nt, Artificial Sequence
  spacer sequence GTCN PAM
cccaggcuggagugcggugg

SEQ ID NO: 8674 - RNA, 20 nt, Artificial Sequence
  spacer sequence GTCN PAM
cgcucugucgcccaggcugg

SEQ ID NO: 8675 - RNA, 20 nt, Artificial Sequence
  spacer sequence GTCN PAM
ggugugaugaugguagugug

SEQ ID NO: 8676 - RNA, 20 nt, Artificial Sequence
  spacer sequence GTCN PAM
ucuuugagaaacacuuucua

SEQ ID NO: 8677 - RNA, 20 nt, Artificial Sequence
  spacer sequence GTCN PAM
cagccccgcccaccgcugca

SEQ ID NO: 8678 - RNA, 20 nt, Artificial Sequence
  spacer sequence GTCN PAM
ccucaccucccccacaggaa

SEQ ID NO: 8679 - RNA, 20 nt, Artificial Sequence
  spacer sequence GTCN PAM
ccacagcggcauggaggccu

SEQ ID NO: 8680 - RNA, 20 nt, Artificial Sequence
  spacer sequence GTCN PAM
ucacugcuggugcuggcccu

SEQ ID NO: 8681 - RNA, 20 nt, Artificial Sequence
  spacer sequence GTCN PAM
guaggugagugggagccggg

SEQ ID NO: 8682 - RNA, 20 nt, Artificial Sequence
  spacer sequence GTCN PAM
ccccugcaucccggcuccca

SEQ ID NO: 8683 - RNA, 20 nt, Artificial Sequence
  spacer sequence GTCN PAM
cuggaugggaggggugggcg

SEQ ID NO: 8684 - RNA, 20 nt, Artificial Sequence
  spacer sequence GTCN PAM
gcgcccgcgcccaccccucc

SEQ ID NO: 8685 - RNA, 20 nt, Artificial Sequence
  spacer sequence GTCN PAM
cccuccaaacaaggaugaau

SEQ ID NO: 8686 - RNA, 20 nt, Artificial Sequence
  spacer sequence GTCN PAM
acucggggugaagcgugagg

SEQ ID NO: 8687 - RNA, 20 nt, Artificial Sequence
  spacer sequence GTCN PAM
cgggauguccacucggggug

SEQ ID NO: 8688 - RNA, 20 nt, Artificial Sequence
  spacer sequence GTCN PAM
accggcucaccucgcccauc

SEQ ID NO: 8689 - RNA, 20 nt, Artificial Sequence
  spacer sequence GTCN PAM
cgcucacacccgaggugcag

SEQ ID NO: 8690 - RNA, 20 nt, Artificial Sequence
  spacer sequence GTCN PAM
ccuacucugcaccucgggug

SEQ ID NO: 8691 - RNA, 20 nt, Artificial Sequence
  spacer sequence GTCN PAM
cagucuccuacucugcaccu

SEQ ID NO: 8692 - RNA, 20 nt, Artificial Sequence
  spacer sequence GTCN PAM
gcaucuccuucgccaagucu

SEQ ID NO: 8693 - RNA, 20 nt, Artificial Sequence
  spacer sequence GTCN PAM
uaggucagcaucuccuucgc

SEQ ID NO: 8694 - RNA, 20 nt, Artificial Sequence
  spacer sequence GTCN PAM
cagcucugcccucccagcug

SEQ ID NO: 8695 - RNA, 20 nt, Artificial Sequence
  spacer sequence GTCN PAM
cagccaagcccuugguggug

SEQ ID NO: 8696 - RNA, 20 nt, Artificial Sequence
  spacer sequence GTCN PAM
agcuggaaugcaggggagcc

SEQ ID NO: 8697 - RNA, 20 nt, Artificial Sequence
  spacer sequence GTCN PAM
cucaguccagcuggaaugca

SEQ ID NO: 8698 - RNA, 20 nt, Artificial Sequence
  spacer sequence GTCN PAM
ccaacucaucaagagccccu

SEQ ID NO: 8699 - RNA, 20 nt, Artificial Sequence
  spacer sequence GTCN PAM
aucuucuuggguccccaacu

SEQ ID NO: 8700 - RNA, 20 nt, Artificial Sequence
  spacer sequence GTCN PAM
gucaucaucauccuuccucc

SEQ ID NO: 8701 - RNA, 20 nt, Artificial Sequence
  spacer sequence GTCN PAM
ucaucauccuuccucccauu

SEQ ID NO: 8702 - RNA, 20 nt, Artificial Sequence
  spacer sequence GTCN PAM
aucaucccucccucccuccc

SEQ ID NO: 8703 - RNA, 20 nt, Artificial Sequence
  spacer sequence GTCN PAM
guccacccaucauuccuccu

SEQ ID NO: 8704 - RNA, 20 nt, Artificial Sequence
  spacer sequence GTCN PAM
acccaucauuccuccuucca

SEQ ID NO: 8705 - RNA, 20 nt, Artificial Sequence
  spacer sequence GTCN PAM
aucauccaucccucccuccc

SEQ ID NO: 8706 - RNA, 20 nt, Artificial Sequence
  spacer sequence GTCN PAM
auccacccaucauuccuccu

SEQ ID NO: 8707 - RNA, 20 nt, Artificial Sequence
  spacer sequence GTCN PAM
auccaucauccaucccuccu

SEQ ID NO: 8708 - RNA, 20 nt, Artificial Sequence
  spacer sequence GTCN PAM
uccuucccucccuccuucca

SEQ ID NO: 8709 - RNA, 20 nt, Artificial Sequence
  spacer sequence GTCN PAM
gacuggaagagacaggccag

SEQ ID NO: 8710 - RNA, 20 nt, Artificial Sequence
  spacer sequence GTCN PAM
gacaggagggcaggccuaga

SEQ ID NO: 8711 - RNA, 20 nt, Artificial Sequence
  spacer sequence GTCN PAM
cuuccagucagacaggaggg

SEQ ID NO: 8712 - RNA, 20 nt, Artificial Sequence
  spacer sequence GTCN PAM
caugccuggccugucucuuc

SEQ ID NO: 8713 - RNA, 20 nt, Artificial Sequence
  spacer sequence GTCN PAM
ccugcaacggccccccaccc

SEQ ID NO: 8714 - RNA, 20 nt, Artificial Sequence
  spacer sequence GTCN PAM
cacuuagcugccugcguacc

SEQ ID NO: 8715 - RNA, 20 nt, Artificial Sequence
  spacer sequence GTCN PAM
gucucacuuagcugccugcg

SEQ ID NO: 8716 - RNA, 20 nt, Artificial Sequence
  spacer sequence GTCN PAM
aggccccagggguggggcua

SEQ ID NO: 8717 - RNA, 20 nt, Artificial Sequence
  spacer sequence GTCN PAM
aggccccagggauggggcua

SEQ ID NO: 8718 - RNA, 20 nt, Artificial Sequence
  spacer sequence GTCN PAM
aggccccagggauggggcua

SEQ ID NO: 8719 - RNA, 20 nt, Artificial Sequence
  spacer sequence GTCN PAM
aggccccagggguggggcua

SEQ ID NO: 8720 - RNA, 20 nt, Artificial Sequence
  spacer sequence GTCN PAM
aggccccagggauggggcua

SEQ ID NO: 8721 - RNA, 20 nt, Artificial Sequence
  spacer sequence GTCN PAM
aggccccagggguggggcua

SEQ ID NO: 8722 - RNA, 20 nt, Artificial Sequence
  spacer sequence GTCN PAM
uggcucuaccacugcaccau

SEQ ID NO: 8723 - RNA, 20 nt, Artificial Sequence
  spacer sequence GTCN PAM
aggcagcaggggcagggcua

SEQ ID NO: 8724 - RNA, 20 nt, Artificial Sequence
  spacer sequence GTCN PAM
agcagcagggguggggccgu

SEQ ID NO: 8725 - RNA, 20 nt, Artificial Sequence
  spacer sequence GTCN PAM
aggagcaggggcagggcugu

SEQ ID NO: 8726 - RNA, 20 nt, Artificial Sequence
  spacer sequence GTCN PAM
aggcaucaggggcggggcua

SEQ ID NO: 8727 - RNA, 20 nt, Artificial Sequence
  spacer sequence GTCN PAM
gacauccgaguggagauaug

SEQ ID NO: 8728 - RNA, 20 nt, Artificial Sequence
  spacer sequence GTCN PAM
gaccccgcucagcacaaccc

SEQ ID NO: 8729 - RNA, 20 nt, Artificial Sequence
  spacer sequence GTCN PAM
ggcagcaagggcgggacuau

SEQ ID NO: 8730 - RNA, 20 nt, Artificial Sequence
  spacer sequence GTCN PAM
cgcccuugcugccugacccc

SEQ ID NO: 8731 - RNA, 20 nt, Artificial Sequence
  spacer sequence GTCN PAM
ggcagcaggggcggggcaau

SEQ ID NO: 8732 - RNA, 20 nt, Artificial Sequence
  spacer sequence GTCN PAM
ggcccugccccagcaaaacc

SEQ ID NO: 8733 - RNA, 20 nt, Artificial Sequence
  spacer sequence GTCN PAM
gacaucagggguggggagcu

SEQ ID NO: 8734 - RNA, 20 nt, Artificial Sequence
  spacer sequence GTCN PAM
gacaccgccccagcacaacc

SEQ ID NO: 8735 - RNA, 20 nt, Artificial Sequence
  spacer sequence GTCN PAM
uagggcgggggcuguggauu

SEQ ID NO: 8736 - RNA, 20 nt, Artificial Sequence
  spacer sequence GTCN PAM
ugcagugaaggcuguagagg

SEQ ID NO: 8737 - RNA, 20 nt, Artificial Sequence
  spacer sequence GTCN PAM
uggggugggggcuguggguu

SEQ ID NO: 8738 - RNA, 20 nt, Artificial Sequence
  spacer sequence GTCN PAM
cggggcagggcugcagggug

SEQ ID NO: 8739 - RNA, 20 nt, Artificial Sequence
  spacer sequence GTCN PAM
ugugcggggccuuggauuug

SEQ ID NO: 8740 - RNA, 20 nt, Artificial Sequence
  spacer sequence GTCN PAM
gcggguagggugggcucacg

SEQ ID NO: 8741 - RNA, 20 nt, Artificial Sequence
  spacer sequence GTCN PAM
uguggaagaucugcaggaag

SEQ ID NO: 8742 - RNA, 20 nt, Artificial Sequence
  spacer sequence GTCN PAM
uaggucauguggaagaucug

SEQ ID NO: 8743 - RNA, 20 nt, Artificial Sequence
  spacer sequence GTCN PAM
caguggcagagcagcagcau

SEQ ID NO: 8744 - RNA, 20 nt, Artificial Sequence
  spacer sequence GTCN PAM
ugcagcauaggcaccaggaa

SEQ ID NO: 8745 - RNA, 20 nt, Artificial Sequence
  spacer sequence GTCN PAM
aucaauggcaugguggugag

SEQ ID NO: 8746 - RNA, 20 nt, Artificial Sequence
  spacer sequence GTCN PAM
gggcccgcggcgcucaccac

SEQ ID NO: 8747 - RNA, 20 nt, Artificial Sequence
  spacer sequence GTCN PAM
cccccuccgucagggcccgc

SEQ ID NO: 8748 - RNA, 20 nt, Artificial Sequence
  spacer sequence GTCN PAM
ccccucuguaugggagccug

SEQ ID NO: 8749 - RNA, 20 nt, Artificial Sequence
  spacer sequence GTCN PAM
ccaccucugaaaggcuuggg

SEQ ID NO: 8750 - RNA, 20 nt, Artificial Sequence
  spacer sequence GTCN PAM
uccccuccauaagggggcgc

SEQ ID NO: 8751 - RNA, 20 nt, Artificial Sequence
  spacer sequence GTCN PAM
ccaccucuguaagggcccga

SEQ ID NO: 8752 - RNA, 20 nt, Artificial Sequence
  spacer sequence GTCN PAM
uccccuccauaagggggcgc

SEQ ID NO: 8753 - RNA, 20 nt, Artificial Sequence
  spacer sequence GTCN PAM
ccgccucugaaagggcccga

SEQ ID NO: 8754 - RNA, 20 nt, Artificial Sequence
  spacer sequence GTCN PAM
uccccuccauaagggggcgc

SEQ ID NO: 8755 - RNA, 20 nt, Artificial Sequence
  spacer sequence GTCN PAM
ccaccucuguaagggcccga

SEQ ID NO: 8756 - RNA, 20 nt, Artificial Sequence
  spacer sequence GTCN PAM
uccccuccauaagggggcgc

SEQ ID NO: 8757 - RNA, 20 nt, Artificial Sequence
  spacer sequence GTCN PAM
ccaccucugaaagggcccga

SEQ ID NO: 8758 - RNA, 20 nt, Artificial Sequence
  spacer sequence GTCN PAM
uccccuccauaagggggcgc

SEQ ID NO: 8759 - RNA, 20 nt, Artificial Sequence
  spacer sequence GTCN PAM
ccaccucugaaagggcccga

SEQ ID NO: 8760 - RNA, 20 nt, Artificial Sequence
  spacer sequence GTCN PAM
uccccuccauaagggggcgc

SEQ ID NO: 8761 - RNA, 20 nt, Artificial Sequence
  spacer sequence GTCN PAM
ccaccucuguaagggcccga

SEQ ID NO: 8762 - RNA, 20 nt, Artificial Sequence
  spacer sequence GTCN PAM
uccccuccauaagggggcgc

SEQ ID NO: 8763 - RNA, 20 nt, Artificial Sequence
  spacer sequence GTCN PAM
ccaccucuguaagggcccga

SEQ ID NO: 8764 - RNA, 20 nt, Artificial Sequence
  spacer sequence GTCN PAM
uccccuccauaagggggcgc

SEQ ID NO: 8765 - RNA, 20 nt, Artificial Sequence
  spacer sequence GTCN PAM
ccaccucuguaagggcccga

SEQ ID NO: 8766 - RNA, 20 nt, Artificial Sequence
  spacer sequence GTCN PAM
uucccuccauaagggggcgc

SEQ ID NO: 8767 - RNA, 20 nt, Artificial Sequence
  spacer sequence GTCN PAM
ccgccucuguaagggcccga

SEQ ID NO: 8768 - RNA, 20 nt, Artificial Sequence
  spacer sequence GTCN PAM
cucccucuguaaggcggccu

SEQ ID NO: 8769 - RNA, 20 nt, Artificial Sequence
  spacer sequence GTCN PAM
ccaccccugaagggccugug

SEQ ID NO: 8770 - RNA, 20 nt, Artificial Sequence
  spacer sequence GTCN PAM
uguccccaccccugaagggc

SEQ ID NO: 8771 - RNA, 20 nt, Artificial Sequence
  spacer sequence GTCN PAM
ucccguguaagggggucuug

SEQ ID NO: 8772 - RNA, 20 nt, Artificial Sequence
  spacer sequence GTCN PAM
cccucuguaaagaggccuga

SEQ ID NO: 8773 - RNA, 20 nt, Artificial Sequence
  spacer sequence GTCN PAM
ugggucccccucuguaaaga

SEQ ID NO: 8774 - RNA, 20 nt, Artificial Sequence
  spacer sequence GTCN PAM
cugggggucugaaacagcca

SEQ ID NO: 8775 - RNA, 20 nt, Artificial Sequence
  spacer sequence GTCN PAM
gaaacagccacuuggaaccu

SEQ ID NO: 8776 - RNA, 20 nt, Artificial Sequence
  spacer sequence GTCN PAM
ugucacccagacaucugcuu

SEQ ID NO: 8777 - RNA, 20 nt, Artificial Sequence
  spacer sequence GTCN PAM
cccagacaucugcuuagcgc

SEQ ID NO: 8778 - RNA, 20 nt, Artificial Sequence
  spacer sequence GTCN PAM
gggugacaggacucaucaua

SEQ ID NO: 8779 - RNA, 20 nt, Artificial Sequence
  spacer sequence GTCN PAM
caaaaaaaaauaaguaaaua

SEQ ID NO: 8780 - RNA, 20 nt, Artificial Sequence
  spacer sequence GTCN PAM
cccaggcuggagugcagugg

SEQ ID NO: 8781 - RNA, 20 nt, Artificial Sequence
  spacer sequence GTCN PAM
gaggggaggggcgggcccgg

SEQ ID NO: 8782 - RNA, 20 nt, Artificial Sequence
  spacer sequence GTCN PAM
gaggggagaggcagucucag

SEQ ID NO: 8783 - RNA, 20 nt, Artificial Sequence
  spacer sequence GTCN PAM
cagcccuucacucagcuuca

SEQ ID NO: 8784 - RNA, 20 nt, Artificial Sequence
  spacer sequence GTCN PAM
cugcccugagcgcgccacuu

SEQ ID NO: 8785 - RNA, 20 nt, Artificial Sequence
  spacer sequence GTCN PAM
ccugcuccccaucacgcggu

SEQ ID NO: 8786 - RNA, 20 nt, Artificial Sequence
  spacer sequence GTCN PAM
guggcugugauuaggaggag

SEQ ID NO: 8787 - RNA, 20 nt, Artificial Sequence
  spacer sequence GTCN PAM
gagaaccucucaccaccggc

SEQ ID NO: 8788 - RNA, 20 nt, Artificial Sequence
  spacer sequence GTCN PAM
cagggucagagaaccucuca

SEQ ID NO: 8789 - RNA, 20 nt, Artificial Sequence
  spacer sequence GTCN PAM
agagccuggagauggacgug

SEQ ID NO: 8790 - RNA, 20 nt, Artificial Sequence
  spacer sequence GTCN PAM
aucuccaggcucuggaccuc

SEQ ID NO: 8791 - RNA, 20 nt, Artificial Sequence
  spacer sequence GTCN PAM
ugcccugaucccaacucacc

SEQ ID NO: 8792 - RNA, 20 nt, Artificial Sequence
  spacer sequence GTCN PAM
gucuuuggacaucgggaagc

SEQ ID NO: 8793 - RNA, 20 nt, Artificial Sequence
  spacer sequence GTCN PAM
uuggacaucgggaagccccc

SEQ ID NO: 8794 - RNA, 20 nt, Artificial Sequence
  spacer sequence GTCN PAM
aaagacugacccuguccugc

SEQ ID NO: 8795 - RNA, 20 nt, Artificial Sequence
  spacer sequence GTCN PAM
cuaggccggcucaggauggg

SEQ ID NO: 8796 - RNA, 20 nt, Artificial Sequence
  spacer sequence GTCN PAM
gagaggccugggguugcuuc

SEQ ID NO: 8797 - RNA, 20 nt, Artificial Sequence
  spacer sequence GTCN PAM
ugaagcaaccccaggccucu

SEQ ID NO: 8798 - RNA, 20 nt, Artificial Sequence
  spacer sequence GTCN PAM
gggccaggcuucagggagag

SEQ ID NO: 8799 - RNA, 20 nt, Artificial Sequence
  spacer sequence GTCN PAM
auuggguuaauccuaggcuu

SEQ ID NO: 8800 - RNA, 20 nt, Artificial Sequence
  spacer sequence GTCN PAM
ccuccacugccaagccuagg

SEQ ID NO: 8801 - RNA, 20 nt, Artificial Sequence
  spacer sequence GTCN PAM
uggcugggagccaagugccc

SEQ ID NO: 8802 - RNA, 20 nt, Artificial Sequence
  spacer sequence GTCN PAM
gcugggccccgugccaggcg

SEQ ID NO: 8803 - RNA, 20 nt, Artificial Sequence
  spacer sequence GTCN PAM
ggaagccacgggccucacac

SEQ ID NO: 8804 - RNA, 20 nt, Artificial Sequence
  spacer sequence GTCN PAM
cggguuccgcugagcucagg

SEQ ID NO: 8805 - RNA, 20 nt, Artificial Sequence
  spacer sequence GTCN PAM
uggggacagcagggccuggc

SEQ ID NO: 8806 - RNA, 20 nt, Artificial Sequence
  spacer sequence GTCN PAM
ccaggacggugccccccggc

SEQ ID NO: 8807 - RNA, 20 nt, Artificial Sequence
  spacer sequence GTCN PAM
gccccuccugagcagggaag

SEQ ID NO: 8808 - RNA, 20 nt, Artificial Sequence
  spacer sequence GTCN PAM
ugugugucaggguaccuggg

SEQ ID NO: 8809 - RNA, 20 nt, Artificial Sequence
  spacer sequence GTCN PAM
ggguaccuggggccucuccu

SEQ ID NO: 8810 - RNA, 20 nt, Artificial Sequence
  spacer sequence GTCN PAM
ggugcccacccauuccucag

SEQ ID NO: 8811 - RNA, 20 nt, Artificial Sequence
  spacer sequence GTCN PAM
cggccucccagagugccggg

SEQ ID NO: 8812 - RNA, 20 nt, Artificial Sequence
  spacer sequence GTCN PAM
ggaguuuaagaccagccuga

SEQ ID NO: 8813 - RNA, 20 nt, Artificial Sequence
  spacer sequence GTCN PAM
uaaacuccugaccucaggcg

SEQ ID NO: 8814 - RNA, 20 nt, Artificial Sequence
  spacer sequence GTCN PAM
cgccguguugcucaggcugg

SEQ ID NO: 8815 - RNA, 20 nt, Artificial Sequence
  spacer sequence GTCN PAM
ugaacuccugggcucaaggg

SEQ ID NO: 8816 - RNA, 20 nt, Artificial Sequence
  spacer sequence GTCN PAM
cgccauauugcacaggcugg

SEQ ID NO: 8817 - RNA, 20 nt, Artificial Sequence
  spacer sequence GTCN PAM
cugcuacucaggaggcugag

SEQ ID NO: 8818 - RNA, 20 nt, Artificial Sequence
  spacer sequence GTCN PAM
cgcucuguggcccacgcugg

SEQ ID NO: 8819 - RNA, 20 nt, Artificial Sequence
  spacer sequence GTCN PAM
cagaaaaaaaaaauggaauu

SEQ ID NO: 8820 - RNA, 20 nt, Artificial Sequence
  spacer sequence GTCN PAM
ccccgcugugggcgggggcu

SEQ ID NO: 8821 - RNA, 20 nt, Artificial Sequence
  spacer sequence GTCN PAM
gacccagcccugacccccca

SEQ ID NO: 8822 - RNA, 20 nt, Artificial Sequence
  spacer sequence GTCN PAM
gacaaagcccccgcccacag

SEQ ID NO: 8823 - RNA, 20 nt, Artificial Sequence
  spacer sequence GTCN PAM
gggcugggucagacaaagcc

SEQ ID NO: 8824 - RNA, 20 nt, Artificial Sequence
  spacer sequence GTCN PAM
gacccacaagcaggugcccg

SEQ ID NO: 8825 - RNA, 20 nt, Artificial Sequence
  spacer sequence GTCN PAM
gacagccccccggccugugg

SEQ ID NO: 8826 - RNA, 20 nt, Artificial Sequence
  spacer sequence GTCN PAM
gacccagccucgccucccca

SEQ ID NO: 8827 - RNA, 20 nt, Artificial Sequence
  spacer sequence GTCN PAM
gacaccgcccccagccugca

SEQ ID NO: 8828 - RNA, 20 nt, Artificial Sequence
  spacer sequence GTCN PAM
gacccagccucgccuccucc

SEQ ID NO: 8829 - RNA, 20 nt, Artificial Sequence
  spacer sequence GTCN PAM
gacaccgcccccggccugca

SEQ ID NO: 8830 - RNA, 20 nt, Artificial Sequence
  spacer sequence GTCN PAM
uuccacaagcugccagcuga

SEQ ID NO: 8831 - RNA, 20 nt, Artificial Sequence
  spacer sequence GTCN PAM
gcuggcagcuuguggaagga

SEQ ID NO: 8832 - RNA, 20 nt, Artificial Sequence
  spacer sequence GTCN PAM
uggaucuucuggcggaaguc

SEQ ID NO: 8833 - RNA, 20 nt, Artificial Sequence
  spacer sequence GTCN PAM
aacaucuugcccugguaacg

SEQ ID NO: 8834 - RNA, 20 nt, Artificial Sequence
  spacer sequence GTCN PAM
ucgucaaacaucuugcccug

SEQ ID NO: 8835 - RNA, 20 nt, Artificial Sequence
  spacer sequence GTCN PAM
cugagggaggcgaggugccu

SEQ ID NO: 8836 - RNA, 20 nt, Artificial Sequence
  spacer sequence GTCN PAM
cuccugcugcagccuaggca

SEQ ID NO: 8837 - RNA, 20 nt, Artificial Sequence
  spacer sequence GTCN PAM
agcucgagucccuccugcug

SEQ ID NO: 8838 - RNA, 20 nt, Artificial Sequence
  spacer sequence GTCN PAM
ugggggugcagaggcucacg

SEQ ID NO: 8839 - RNA, 20 nt, Artificial Sequence
  spacer sequence GTCN PAM
gugccugacagggcggggca

SEQ ID NO: 8840 - RNA, 20 nt, Artificial Sequence
  spacer sequence GTCN PAM
ggcacagacccaggcaguuc

SEQ ID NO: 8841 - RNA, 20 nt, Artificial Sequence
  spacer sequence GTCN PAM
ugggggcacugaggcugauu

SEQ ID NO: 8842 - RNA, 20 nt, Artificial Sequence
  spacer sequence GTCN PAM
cucaggcuaccggaacagag

SEQ ID NO: 8843 - RNA, 20 nt, Artificial Sequence
  spacer sequence GTCN PAM
uggaggccggaagcccaaca

SEQ ID NO: 8844 - RNA, 20 nt, Artificial Sequence
  spacer sequence GTCN PAM
ggggcuccaggcgcccuugg

SEQ ID NO: 8845 - RNA, 20 nt, Artificial Sequence
  spacer sequence GTCN PAM
cugucucuucuuguaaauuc

SEQ ID NO: 8846 - RNA, 20 nt, Artificial Sequence
  spacer sequence GTCN PAM
cuucuuguaaauucauccgu

SEQ ID NO: 8847 - RNA, 20 nt, Artificial Sequence
  spacer sequence GTCN PAM
uuggaucagggcccacccgg

SEQ ID NO: 8848 - RNA, 20 nt, Artificial Sequence
  spacer sequence GTCN PAM
gcagagacccuauuuccaca

SEQ ID NO: 8849 - RNA, 20 nt, Artificial Sequence
  spacer sequence GTCN PAM
cugcagacauggcccaguua

SEQ ID NO: 8850 - RNA, 20 nt, Artificial Sequence
  spacer sequence GTCN PAM
uauucacaggaaccgggggu

SEQ ID NO: 8851 - RNA, 20 nt, Artificial Sequence
  spacer sequence GTCN PAM
ggaugucagccugucuuucu

SEQ ID NO: 8852 - RNA, 20 nt, Artificial Sequence
  spacer sequence GTCN PAM
gccugucuuucugggagaug

SEQ ID NO: 8853 - RNA, 20 nt, Artificial Sequence
  spacer sequence GTCN PAM
uucugggagauguaguucaa

SEQ ID NO: 8854 - RNA, 20 nt, Artificial Sequence
  spacer sequence GTCN PAM
gcgcucaauaacuguuugau

SEQ ID NO: 8855 - RNA, 20 nt, Artificial Sequence
  spacer sequence GTCN PAM
cacccucaggaagcggggcc

SEQ ID NO: 8856 - RNA, 20 nt, Artificial Sequence
  spacer sequence GTCN PAM
cuccccgcuucccagagcug

SEQ ID NO: 8857 - RNA, 20 nt, Artificial Sequence
  spacer sequence GTCN PAM
ucgucccuccccgcuuccca

SEQ ID NO: 8858 - RNA, 20 nt, Artificial Sequence
  spacer sequence GTCN PAM
ccuccccguccucgucccuc

SEQ ID NO: 8859 - RNA, 20 nt, Artificial Sequence
  spacer sequence GTCN PAM
ccgguguagcaccuggcucg

SEQ ID NO: 8860 - RNA, 20 nt, Artificial Sequence
  spacer sequence GTCN PAM
ugcccgccuccucgcccagc

SEQ ID NO: 8861 - RNA, 20 nt, Artificial Sequence
  spacer sequence GTCN PAM
ggcccguccugcccgccucc

SEQ ID NO: 8862 - RNA, 20 nt, Artificial Sequence
  spacer sequence GTCN PAM
cuagugucaggcccguccug

SEQ ID NO: 8863 - RNA, 20 nt, Artificial Sequence
  spacer sequence GTCN PAM
ucaaaugcaauuaaacauuc

SEQ ID NO: 8864 - RNA, 20 nt, Artificial Sequence
  spacer sequence GTCN PAM
gaguguuauaucucuacaaa

SEQ ID NO: 8865 - RNA, 20 nt, Artificial Sequence
  spacer sequence GTCN PAM
ccuuuugggcccaugagaau

SEQ ID NO: 8866 - RNA, 20 nt, Artificial Sequence
  spacer sequence GTCN PAM
ccagcucacuccccgucccc

SEQ ID NO: 8867 - RNA, 20 nt, Artificial Sequence
  spacer sequence GTCN PAM
ccagccccuggcaacccacg

SEQ ID NO: 8868 - RNA, 20 nt, Artificial Sequence
  spacer sequence GTCN PAM
uuauuuagguguuuaggagu

SEQ ID NO: 8869 - RNA, 20 nt, Artificial Sequence
  spacer sequence GTCN PAM
aaucuuuaaacccacauaug

SEQ ID NO: 8870 - RNA, 20 nt, Artificial Sequence
  spacer sequence GTCN PAM
cggccucugaaagugcuggg

SEQ ID NO: 8871 - RNA, 20 nt, Artificial Sequence
  spacer sequence GTCN PAM
ggaguucgagaccagccugg

SEQ ID NO: 8872 - RNA, 20 nt, Artificial Sequence
  spacer sequence GTCN PAM
cgaacuccugaccucaggug

SEQ ID NO: 8873 - RNA, 20 nt, Artificial Sequence
  spacer sequence GTCN PAM
ccacuaaaaauacaaaauua

SEQ ID NO: 8874 - RNA, 20 nt, Artificial Sequence
  spacer sequence GTCN PAM
cagccuccagaguagcuggg

SEQ ID NO: 8875 - RNA, 20 nt, Artificial Sequence
  spacer sequence GTCN PAM
aggcuggagugcaguggcac

SEQ ID NO: 8876 - RNA, 20 nt, Artificial Sequence
  spacer sequence GTCN PAM
cgcucuguuguccaggcugg

SEQ ID NO: 8877 - RNA, 20 nt, Artificial Sequence
  spacer sequence GTCN PAM
caaaaaaaaaaaaaguacca

SEQ ID NO: 8878 - RNA, 20 nt, Artificial Sequence
  spacer sequence GTCN PAM
uaagggcacagcucgauagc

SEQ ID NO: 8879 - RNA, 20 nt, Artificial Sequence
  spacer sequence GTCN PAM
cuaaagggaacgugguguaa

SEQ ID NO: 8880 - RNA, 20 nt, Artificial Sequence
  spacer sequence GTCN PAM
uuagaagcugccuuugcuaa

SEQ ID NO: 8881 - RNA, 20 nt, Artificial Sequence
  spacer sequence GTCN PAM
gggcaauuccccuuagcaaa

SEQ ID NO: 8882 - RNA, 20 nt, Artificial Sequence
  spacer sequence GTCN PAM
ggagaugaaucaauggugug

SEQ ID NO: 8883 - RNA, 20 nt, Artificial Sequence
  spacer sequence GTCN PAM
gaccgaauguagcuuuccac

SEQ ID NO: 8884 - RNA, 20 nt, Artificial Sequence
  spacer sequence GTCN PAM
gacuaucaggugauuuuuga

SEQ ID NO: 8885 - RNA, 20 nt, Artificial Sequence
  spacer sequence GTCN PAM
cgcucugucacccgggcucc

SEQ ID NO: 8886 - RNA, 20 nt, Artificial Sequence
  spacer sequence GTCN PAM
cccgggcuccagugcaguug

SEQ ID NO: 8887 - RNA, 20 nt, Artificial Sequence
  spacer sequence GTCN PAM
cuugaacccgggaggaggag

SEQ ID NO: 8888 - RNA, 20 nt, Artificial Sequence
  spacer sequence GTCN PAM
cuacuaaaaauacaaaaauu

SEQ ID NO: 8889 - RNA, 20 nt, Artificial Sequence
  spacer sequence GTCN PAM
ugaacucaugaccucuugau

SEQ ID NO: 8890 - RNA, 20 nt, Artificial Sequence
  spacer sequence GTCN PAM
ugaguucaagaccagccugg

SEQ ID NO: 8891 - RNA, 20 nt, Artificial Sequence
  spacer sequence GTCN PAM
gaggccuggugcgguggcuc

SEQ ID NO: 8892 - RNA, 20 nt, Artificial Sequence
  spacer sequence GTCN PAM
aggguccgaggccuggugcg

SEQ ID NO: 8893 - RNA, 20 nt, Artificial Sequence
  spacer sequence GTCN PAM
gggguucgaggccuggugcg

SEQ ID NO: 8894 - RNA, 20 nt, Artificial Sequence
  spacer sequence GTCN PAM
auuaggcagccgggaaggga

SEQ ID NO: 8895 - RNA, 20 nt, Artificial Sequence
  spacer sequence GTCN PAM
gcguccauuaggcagccggg

SEQ ID NO: 8896 - RNA, 20 nt, Artificial Sequence
  spacer sequence GTCN PAM
cacauccugucugcguccau

SEQ ID NO: 8897 - RNA, 20 nt, Artificial Sequence
  spacer sequence GTCN PAM
uggccuggcugguggugugg

SEQ ID NO: 8898 - RNA, 20 nt, Artificial Sequence
  spacer sequence GTCN PAM
cucccaaguuucgcagucau

SEQ ID NO: 8899 - RNA, 20 nt, Artificial Sequence
  spacer sequence GTCN PAM
uccagucuccauuaggcgcc

SEQ ID NO: 8900 - RNA, 20 nt, Artificial Sequence
  spacer sequence GTCN PAM
ccauuaggcgccuacccccc

SEQ ID NO: 8901 - RNA, 20 nt, Artificial Sequence
  spacer sequence GTCN PAM
uggcuuggcucuggggggua

SEQ ID NO: 8902 - RNA, 20 nt, Artificial Sequence
  spacer sequence GTCN PAM
guucaggguucacauccugg

SEQ ID NO: 8903 - RNA, 20 nt, Artificial Sequence
  spacer sequence GTCN PAM
cuccagacauaaucuugggc

SEQ ID NO: 8904 - RNA, 20 nt, Artificial Sequence
  spacer sequence GTCN PAM
ggagagaccccccccccggc

SEQ ID NO: 8905 - RNA, 20 nt, Artificial Sequence
  spacer sequence GTCN PAM
cuggaaagugggagcaccug

SEQ ID NO: 8906 - RNA, 20 nt, Artificial Sequence
  spacer sequence GTCN PAM
uugcugagcaggcuccuucc

SEQ ID NO: 8907 - RNA, 20 nt, Artificial Sequence
  spacer sequence GTCN PAM
gggcguguccugggacccga

SEQ ID NO: 8908 - RNA, 20 nt, Artificial Sequence
  spacer sequence GTCN PAM
ugggacccgagagguggaga

SEQ ID NO: 8909 - RNA, 20 nt, Artificial Sequence
  spacer sequence GTCN PAM
caggacacgcccagacggcg

SEQ ID NO: 8910 - RNA, 20 nt, Artificial Sequence
  spacer sequence GTCN PAM
ccaccucucgggucccagga

SEQ ID NO: 8911 - RNA, 20 nt, Artificial Sequence
  spacer sequence GTCN PAM
cagaaucugagccuuugccu

SEQ ID NO: 8912 - RNA, 20 nt, Artificial Sequence
  spacer sequence GTCN PAM
gcucccugcugccgggagaa

SEQ ID NO: 8913 - RNA, 20 nt, Artificial Sequence
  spacer sequence GTCN PAM
cgcucacccuccagcagcuc

SEQ ID NO: 8914 - RNA, 20 nt, Artificial Sequence
  spacer sequence GTCN PAM
uuccugcggucuuggucuug

SEQ ID NO: 8915 - RNA, 20 nt, Artificial Sequence
  spacer sequence GTCN PAM
uggucuugcuccugggggcu

SEQ ID NO: 8916 - RNA, 20 nt, Artificial Sequence
  spacer sequence GTCN PAM
ugcuccugggggcuggcgga

SEQ ID NO: 8917 - RNA, 20 nt, Artificial Sequence
  spacer sequence GTCN PAM
gccagcccccaggagcaaga

SEQ ID NO: 8918 - RNA, 20 nt, Artificial Sequence
  spacer sequence GTCN PAM
gcggccccaggaggagcucg

SEQ ID NO: 8919 - RNA, 20 nt, Artificial Sequence
  spacer sequence GTCN PAM
cugcgggaaagacgagagcg

SEQ ID NO: 8920 - RNA, 20 nt, Artificial Sequence
  spacer sequence GTCN PAM
uucccgcagggaccgccggu

SEQ ID NO: 8921 - RNA, 20 nt, Artificial Sequence
  spacer sequence GTCN PAM
aagggcaaaggagcccuaaa

SEQ ID NO: 8922 - RNA, 20 nt, Artificial Sequence
  spacer sequence GTCN PAM
uaguuucuuuccaacuuaag

SEQ ID NO: 8923 - RNA, 20 nt, Artificial Sequence
  spacer sequence GTCN PAM
aagguuaagagcccuaaaca

SEQ ID NO: 8924 - RNA, 20 nt, Artificial Sequence
  spacer sequence GTCN PAM
ggaggcugcauaagaaacca

SEQ ID NO: 8925 - RNA, 20 nt, Artificial Sequence
  spacer sequence GTCN PAM
aaggucagacugcacggagg

SEQ ID NO: 8926 - RNA, 20 nt, Artificial Sequence
  spacer sequence GTCN PAM
gacugcacggaggagccuca

SEQ ID NO: 8927 - RNA, 20 nt, Artificial Sequence
  spacer sequence GTCN PAM
gaccuuugacucgugguuuc

SEQ ID NO: 8928 - RNA, 20 nt, Artificial Sequence
  spacer sequence GTCN PAM
aaaagcgggcaagggcgagu

SEQ ID NO: 8929 - RNA, 20 nt, Artificial Sequence
  spacer sequence GTCN PAM
gugggcugcgcacgcccagg

SEQ ID NO: 8930 - RNA, 20 nt, Artificial Sequence
  spacer sequence GTCN PAM
aagcgccaaaggccccggcc

SEQ ID NO: 8931 - RNA, 20 nt, Artificial Sequence
  spacer sequence GTCN PAM
cccuuuguguuaccuucuuu

SEQ ID NO: 8932 - RNA, 20 nt, Artificial Sequence
  spacer sequence GTCN PAM
cgggcggccgcaaggccgua

SEQ ID NO: 8933 - RNA, 20 nt, Artificial Sequence
  spacer sequence GTCN PAM
gcacuuugcuggggccgcgg

SEQ ID NO: 8934 - RNA, 20 nt, Artificial Sequence
  spacer sequence GTCN PAM
acggaggcugcgaagggaaa

SEQ ID NO: 8935 - RNA, 20 nt, Artificial Sequence
  spacer sequence GTCN PAM
accaugaaaccacaacuccc

SEQ ID NO: 8936 - RNA, 20 nt, Artificial Sequence
  spacer sequence GTCN PAM
acuuccggcugggguuuccc

SEQ ID NO: 8937 - RNA, 20 nt, Artificial Sequence
  spacer sequence GTCN PAM
accggcgcaugccuucgcgc

SEQ ID NO: 8938 - RNA, 20 nt, Artificial Sequence
  spacer sequence GTCN PAM
cgcccccucccuuuaaaaac

SEQ ID NO: 8939 - RNA, 20 nt, Artificial Sequence
  spacer sequence GTCN PAM
ucgggaaaacagccugagag

SEQ ID NO: 8940 - RNA, 20 nt, Artificial Sequence
  spacer sequence GTCN PAM
ggauuugagguccucgggaa

SEQ ID NO: 8941 - RNA, 20 nt, Artificial Sequence
  spacer sequence GTCN PAM
aaaacaaaaccaaaaaagaa

SEQ ID NO: 8942 - RNA, 20 nt, Artificial Sequence
  spacer sequence GTCN PAM
gcaaucccagcgcuuuggga

SEQ ID NO: 8943 - RNA, 20 nt, Artificial Sequence
  spacer sequence GTCN PAM
ucguuauuagaugaguaugc

SEQ ID NO: 8944 - RNA, 20 nt, Artificial Sequence
  spacer sequence GTCN PAM
gcaaccuucauugcuccaac

SEQ ID NO: 8945 - RNA, 20 nt, Artificial Sequence
  spacer sequence GTCN PAM
uuggagcaaugaagguugcg

SEQ ID NO: 8946 - RNA, 20 nt, Artificial Sequence
  spacer sequence GTCN PAM
uuaggaugccgucuaucaug

SEQ ID NO: 8947 - RNA, 20 nt, Artificial Sequence
  spacer sequence GTCN PAM
aucauggaggaagcugaggc

SEQ ID NO: 8948 - RNA, 20 nt, Artificial Sequence
  spacer sequence GTCN PAM
uccagcaacuugguggcccu

SEQ ID NO: 8949 - RNA, 20 nt, Artificial Sequence
  spacer sequence GTCN PAM
cacgugcugugucuuccagc

SEQ ID NO: 8950 - RNA, 20 nt, Artificial Sequence
  spacer sequence GTCN PAM
gcgagacucccagccuccag

SEQ ID NO: 8951 - RNA, 20 nt, Artificial Sequence
  spacer sequence GTCN PAM
cgcggacuggggcuuucucu

SEQ ID NO: 8952 - RNA, 20 nt, Artificial Sequence
  spacer sequence GTCN PAM
agggaaugaaauaaaccucg

SEQ ID NO: 8953 - RNA, 20 nt, Artificial Sequence
  spacer sequence GTCN PAM
ccgcgugauccugccuagga

SEQ ID NO: 8954 - RNA, 20 nt, Artificial Sequence
  spacer sequence GTCN PAM
uucagccggggcagcaggcc

SEQ ID NO: 8955 - RNA, 20 nt, Artificial Sequence
  spacer sequence GTCN PAM
ucccagcacuuugggaggcu

SEQ ID NO: 8956 - RNA, 20 nt, Artificial Sequence
  spacer sequence GTCN PAM
gaguucgagaccagcuuggc

SEQ ID NO: 8957 - RNA, 20 nt, Artificial Sequence
  spacer sequence GTCN PAM
cgaacucugaccuuagguga

SEQ ID NO: 8958 - RNA, 20 nt, Artificial Sequence
  spacer sequence GTCN PAM
cuaguaaaaauacaaaaauu

SEQ ID NO: 8959 - RNA, 20 nt, Artificial Sequence
  spacer sequence GTCN PAM
cccaggcuggagugcagugg

SEQ ID NO: 8960 - RNA, 20 nt, Artificial Sequence
  spacer sequence GTCN PAM
caaaaaaaaaaaagugcaaa

SEQ ID NO: 8961 - RNA, 20 nt, Artificial Sequence
  spacer sequence GTCN PAM
guucagugccucaggccugu

SEQ ID NO: 8962 - RNA, 20 nt, Artificial Sequence
  spacer sequence GTCN PAM
ggaacuccugggcucaagcg

SEQ ID NO: 8963 - RNA, 20 nt, Artificial Sequence
  spacer sequence GTCN PAM
caguaucucgguugcccaag

SEQ ID NO: 8964 - RNA, 20 nt, Artificial Sequence
  spacer sequence GTCN PAM
ccaccaaaggaaaaaaagaa

SEQ ID NO: 8965 - RNA, 20 nt, Artificial Sequence
  spacer sequence GTCN PAM
ccaggcccuggaaacagcuu

SEQ ID NO: 8966 - RNA, 20 nt, Artificial Sequence
  spacer sequence GTCN PAM
caccuguccccaggcccugg

SEQ ID NO: 8967 - RNA, 20 nt, Artificial Sequence
  spacer sequence GTCN PAM
guguacuuggggaccauuuc

SEQ ID NO: 8968 - RNA, 20 nt, Artificial Sequence
  spacer sequence GTCN PAM
ccaaguacacggacccugag

SEQ ID NO: 8969 - RNA, 20 nt, Artificial Sequence
  spacer sequence GTCN PAM
acuggaccgucuggcaucgc

SEQ ID NO: 8970 - RNA, 20 nt, Artificial Sequence
  spacer sequence GTCN PAM
aguagaccacagcagagcag

SEQ ID NO: 8971 - RNA, 20 nt, Artificial Sequence
  spacer sequence GTCN PAM
ggcaucgcugugaccgcaug

SEQ ID NO: 8972 - RNA, 20 nt, Artificial Sequence
  spacer sequence GTCN PAM
cgagaggcagugggagcucc

SEQ ID NO: 8973 - RNA, 20 nt, Artificial Sequence
  spacer sequence GTCN PAM
uccagcgucucagaaaaccg

SEQ ID NO: 8974 - RNA, 20 nt, Artificial Sequence
  spacer sequence GTCN PAM
cagaaaaccgagcuccuggc

SEQ ID NO: 8975 - RNA, 20 nt, Artificial Sequence
  spacer sequence GTCN PAM
cagauacucaggaggcugag

SEQ ID NO: 8976 - RNA, 20 nt, Artificial Sequence
  spacer sequence GTCN PAM
aggcugcagugagccaagau

SEQ ID NO: 8977 - RNA, 20 nt, Artificial Sequence
  spacer sequence GTCN PAM
cugggugcccucgguacccu

SEQ ID NO: 8978 - RNA, 20 nt, Artificial Sequence
  spacer sequence GTCN PAM
aacagcaggugucuggaugg

SEQ ID NO: 8979 - RNA, 20 nt, Artificial Sequence
  spacer sequence GTCN PAM
ggauggcugaagcccaagcu

SEQ ID NO: 8980 - RNA, 20 nt, Artificial Sequence
  spacer sequence GTCN PAM
ggagaucgagaccauccugg

SEQ ID NO: 8981 - RNA, 20 nt, Artificial Sequence
  spacer sequence GTCN PAM
cgaucuccugaccucuugau

SEQ ID NO: 8982 - RNA, 20 nt, Artificial Sequence
  spacer sequence GTCN PAM
cccaggcuggagugcagugg

SEQ ID NO: 8983 - RNA, 20 nt, Artificial Sequence
  spacer sequence GTCN PAM
ucaccuccuggauucaagug

SEQ ID NO: 8984 - RNA, 20 nt, Artificial Sequence
  spacer sequence GTCN PAM
ccugaaguguugggauuaca

SEQ ID NO: 8985 - RNA, 20 nt, Artificial Sequence
  spacer sequence GTCN PAM
cuucauucacccugaaucau

SEQ ID NO: 8986 - RNA, 20 nt, Artificial Sequence
  spacer sequence GTCN PAM
acaccuuuucuuuauuccuc

SEQ ID NO: 8987 - RNA, 20 nt, Artificial Sequence
  spacer sequence GTCN PAM
cccuccccuccccucccccg

SEQ ID NO: 8988 - RNA, 20 nt, Artificial Sequence
  spacer sequence GTCN PAM
gcggugccgggcgggggcgg

SEQ ID NO: 8989 - RNA, 20 nt, Artificial Sequence
  spacer sequence GTCN PAM
ggguggguccgcggugccgg

SEQ ID NO: 8990 - RNA, 20 nt, Artificial Sequence
  spacer sequence GTCN PAM
ccagggcgagccucggcucu

SEQ ID NO: 8991 - RNA, 20 nt, Artificial Sequence
  spacer sequence GTCN PAM
cuccaucuccccggggccac

SEQ ID NO: 8992 - RNA, 20 nt, Artificial Sequence
  spacer sequence GTCN PAM
ggaggcuccuccugggguca

SEQ ID NO: 8993 - RNA, 20 nt, Artificial Sequence
  spacer sequence GTCN PAM
cgggugaauccccggggaaa

SEQ ID NO: 8994 - RNA, 20 nt, Artificial Sequence
  spacer sequence GTCN PAM
cgcuuucccagggagggagg

SEQ ID NO: 8995 - RNA, 20 nt, Artificial Sequence
  spacer sequence GTCN PAM
ucugcuuuugaaaacccaga

SEQ ID NO: 8996 - RNA, 20 nt, Artificial Sequence
  spacer sequence GTCN PAM
ggguuuucaaaagcagagga

SEQ ID NO: 8997 - RNA, 20 nt, Artificial Sequence
  spacer sequence GTCN PAM
ggccuuugucuggguuuuca

SEQ ID NO: 8998 - RNA, 20 nt, Artificial Sequence
  spacer sequence GTCN PAM
ccccgccccgggagcucagc

SEQ ID NO: 8999 - RNA, 20 nt, Artificial Sequence
  spacer sequence GTCN PAM
gggcccuggcuccccugagc

SEQ ID NO: 9000 - RNA, 20 nt, Artificial Sequence
  spacer sequence GTCN PAM
gaggcccagaggcuccuccg

SEQ ID NO: 9001 - RNA, 20 nt, Artificial Sequence
  spacer sequence GTCN PAM
uccuaggcagcccccucccc

SEQ ID NO: 9002 - RNA, 20 nt, Artificial Sequence
  spacer sequence GTCN PAM
uccuccuaggcagcccccuc

SEQ ID NO: 9003 - RNA, 20 nt, Artificial Sequence
  spacer sequence GTCN PAM
gcgagcagggaggagucugg

SEQ ID NO: 9004 - RNA, 20 nt, Artificial Sequence
  spacer sequence GTCN PAM
ccguugggugcuaacugggu

SEQ ID NO: 9005 - RNA, 20 nt, Artificial Sequence
  spacer sequence GTCN PAM
uuaacgcuccuucacacuug

SEQ ID NO: 9006 - RNA, 20 nt, Artificial Sequence
  spacer sequence GTCN PAM
aguggcacauguaaggacac

SEQ ID NO: 9007 - RNA, 20 nt, Artificial Sequence
  spacer sequence GTCN PAM
uuacaugugccacuggacca

SEQ ID NO: 9008 - RNA, 20 nt, Artificial Sequence
  spacer sequence GTCN PAM
uuccacaaggugcauccuuc

SEQ ID NO: 9009 - RNA, 20 nt, Artificial Sequence
  spacer sequence GTCN PAM
ggcgucucucacugagcgug

SEQ ID NO: 9010 - RNA, 20 nt, Artificial Sequence
  spacer sequence GTCN PAM
cucacugagcgugauguccu

SEQ ID NO: 9011 - RNA, 20 nt, Artificial Sequence
  spacer sequence GTCN PAM
ucaaggugcauccgcgccgu

SEQ ID NO: 9012 - RNA, 20 nt, Artificial Sequence
  spacer sequence GTCN PAM
uccccugagggcccgggcag

SEQ ID NO: 9013 - RNA, 20 nt, Artificial Sequence
  spacer sequence GTCN PAM
cuucccaccccagguuaaua

SEQ ID NO: 9014 - RNA, 20 nt, Artificial Sequence
  spacer sequence GTCN PAM
ccgucagcucuuuccuuuca

SEQ ID NO: 9015 - RNA, 20 nt, Artificial Sequence
  spacer sequence GTCN PAM
gcucuuuccuuucaauuagc

SEQ ID NO: 9016 - RNA, 20 nt, Artificial Sequence
  spacer sequence GTCN PAM
cugcccgggcaggcgccgag

SEQ ID NO: 9017 - RNA, 20 nt, Artificial Sequence
  spacer sequence GTCN PAM
gaggcgggaggggcgugugu

SEQ ID NO: 9018 - RNA, 20 nt, Artificial Sequence
  spacer sequence GTCN PAM
cccagcgagcagggcgggcc

SEQ ID NO: 9019 - RNA, 20 nt, Artificial Sequence
  spacer sequence GTCN PAM
ccgcgaugcuuuuuacggcg

SEQ ID NO: 9020 - RNA, 20 nt, Artificial Sequence
  spacer sequence GTCN PAM
ggcggggggcguggcgcucc

SEQ ID NO: 9021 - RNA, 20 nt, Artificial Sequence
  spacer sequence GTCN PAM
ccauggcaacgccgaggccc

SEQ ID NO: 9022 - RNA, 20 nt, Artificial Sequence
  spacer sequence GTCN PAM
ccguggcaaccgcgccgucc

SEQ ID NO: 9023 - RNA, 20 nt, Artificial Sequence
  spacer sequence GTCN PAM
ggggaggggcgaggggggcg

SEQ ID NO: 9024 - RNA, 20 nt, Artificial Sequence
  spacer sequence GTCN PAM
uggggaaaggcgagggggcg

SEQ ID NO: 9025 - RNA, 20 nt, Artificial Sequence
  spacer sequence GTCN PAM
aggcccggggaggggcgagg

SEQ ID NO: 9026 - RNA, 20 nt, Artificial Sequence
  spacer sequence GTCN PAM
ggggaggggcgaggggggcg

SEQ ID NO: 9027 - RNA, 20 nt, Artificial Sequence
  spacer sequence GTCN PAM
ggcgggcgggcagggaacgc

SEQ ID NO: 9028 - RNA, 20 nt, Artificial Sequence
  spacer sequence GTCN PAM
cugcccggccggccagggcg

SEQ ID NO: 9029 - RNA, 20 nt, Artificial Sequence
  spacer sequence GTCN PAM
ggggcagccugucccugccc

SEQ ID NO: 9030 - RNA, 20 nt, Artificial Sequence
  spacer sequence GTCN PAM
ccugccaggaagggaggagc

SEQ ID NO: 9031 - RNA, 20 nt, Artificial Sequence
  spacer sequence GTCN PAM
ccucuggggcaugggagcug

SEQ ID NO: 9032 - RNA, 20 nt, Artificial Sequence
  spacer sequence GTCN PAM
agcucccaugccccagaggu

SEQ ID NO: 9033 - RNA, 20 nt, Artificial Sequence
  spacer sequence GTCN PAM
cccaccccucaccccugguu

SEQ ID NO: 9034 - RNA, 20 nt, Artificial Sequence
  spacer sequence GTCN PAM
gccugggccucccccuguug

SEQ ID NO: 9035 - RNA, 20 nt, Artificial Sequence
  spacer sequence GTCN PAM
gggguugaauccggacuugg

SEQ ID NO: 9036 - RNA, 20 nt, Artificial Sequence
  spacer sequence GTCN PAM
ggauucaaccccagacucgc

SEQ ID NO: 9037 - RNA, 20 nt, Artificial Sequence
  spacer sequence GTCN PAM
uugggaggcucgucucccug

SEQ ID NO: 9038 - RNA, 20 nt, Artificial Sequence
  spacer sequence GTCN PAM
cccugucugggcuuuugcaa

SEQ ID NO: 9039 - RNA, 20 nt, Artificial Sequence
  spacer sequence GTCN PAM
gggcuuuugcaagcccaggc

SEQ ID NO: 9040 - RNA, 20 nt, Artificial Sequence
  spacer sequence GTCN PAM
uggugggcaggagggugcag

SEQ ID NO: 9041 - RNA, 20 nt, Artificial Sequence
  spacer sequence GTCN PAM
ucucugcacccuccugccca

SEQ ID NO: 9042 - RNA, 20 nt, Artificial Sequence
  spacer sequence GTCN PAM
ugaucugucuuauggucugg

SEQ ID NO: 9043 - RNA, 20 nt, Artificial Sequence
  spacer sequence GTCN PAM
uauggucugggccaggaggu

SEQ ID NO: 9044 - RNA, 20 nt, Artificial Sequence
  spacer sequence GTCN PAM
gggccaggaggugauacacu

SEQ ID NO: 9045 - RNA, 20 nt, Artificial Sequence
  spacer sequence GTCN PAM
agcucugguucacugagccc

SEQ ID NO: 9046 - RNA, 20 nt, Artificial Sequence
  spacer sequence GTCN PAM
uggcggcagagaccacgucc

SEQ ID NO: 9047 - RNA, 20 nt, Artificial Sequence
  spacer sequence GTCN PAM
cugccgccaggacccugcgg

SEQ ID NO: 9048 - RNA, 20 nt, Artificial Sequence
  spacer sequence GTCN PAM
cagcaggagcggcugcaggc

SEQ ID NO: 9049 - RNA, 20 nt, Artificial Sequence
  spacer sequence GTCN PAM
gcggggcggcggaaacucac

SEQ ID NO: 9050 - RNA, 20 nt, Artificial Sequence
  spacer sequence GTCN PAM
ggguggggaaguggggggac

SEQ ID NO: 9051 - RNA, 20 nt, Artificial Sequence
  spacer sequence GTCN PAM
gggaugggcguggggguccc

SEQ ID NO: 9052 - RNA, 20 nt, Artificial Sequence
  spacer sequence GTCN PAM
uccagcugccggcgcuuguu

SEQ ID NO: 9053 - RNA, 20 nt, Artificial Sequence
  spacer sequence GTCN PAM
cugccccgcucguaccuuca

SEQ ID NO: 9054 - RNA, 20 nt, Artificial Sequence
  spacer sequence GTCN PAM
gggagugcaggcggcuguga

SEQ ID NO: 9055 - RNA, 20 nt, Artificial Sequence
  spacer sequence GTCN PAM
ugggcaggaccagggccagg

SEQ ID NO: 9056 - RNA, 20 nt, Artificial Sequence
  spacer sequence GTCN PAM
gagucgugggcaggaccagg

SEQ ID NO: 9057 - RNA, 20 nt, Artificial Sequence
  spacer sequence GTCN PAM
aaggcacugcgggagcgcug

SEQ ID NO: 9058 - RNA, 20 nt, Artificial Sequence
  spacer sequence GTCN PAM
ccuccagcagccagcgcucc

SEQ ID NO: 9059 - RNA, 20 nt, Artificial Sequence
  spacer sequence GTCN PAM
ucggccucagagggggauga

SEQ ID NO: 9060 - RNA, 20 nt, Artificial Sequence
  spacer sequence GTCN PAM
ucaucccccucugaggccga

SEQ ID NO: 9061 - RNA, 20 nt, Artificial Sequence
  spacer sequence GTCN PAM
ugcaucugccuccucagguc

SEQ ID NO: 9062 - RNA, 20 nt, Artificial Sequence
  spacer sequence GTCN PAM
uccugcaucugccuccucag

SEQ ID NO: 9063 - RNA, 20 nt, Artificial Sequence
  spacer sequence GTCN PAM
ucugcucgucguccugcauc

SEQ ID NO: 9064 - RNA, 20 nt, Artificial Sequence
  spacer sequence GTCN PAM
uccagcagccgugucuucug

SEQ ID NO: 9065 - RNA, 20 nt, Artificial Sequence
  spacer sequence GTCN PAM
aggugggggcugcagcgugg

SEQ ID NO: 9066 - RNA, 20 nt, Artificial Sequence
  spacer sequence GTCN PAM
cagcccccacagggauugcc

SEQ ID NO: 9067 - RNA, 20 nt, Artificial Sequence
  spacer sequence GTCN PAM
gccuggagggcuuccugcag

SEQ ID NO: 9068 - RNA, 20 nt, Artificial Sequence
  spacer sequence GTCN PAM
gggagcccacagucagccug

SEQ ID NO: 9069 - RNA, 20 nt, Artificial Sequence
  spacer sequence GTCN PAM
cguuaucucuucuaauacuu

SEQ ID NO: 9070 - RNA, 20 nt, Artificial Sequence
  spacer sequence GTCN PAM
cuuuccaaguauuagaagag

SEQ ID NO: 9071 - RNA, 20 nt, Artificial Sequence
  spacer sequence GTCN PAM
cccucacaggcacacccucu

SEQ ID NO: 9072 - RNA, 20 nt, Artificial Sequence
  spacer sequence GTCN PAM
ccacgcuccagcaccucaau

SEQ ID NO: 9073 - RNA, 20 nt, Artificial Sequence
  spacer sequence GTCN PAM
gggccccagccccgagucca

SEQ ID NO: 9074 - RNA, 20 nt, Artificial Sequence
  spacer sequence GTCN PAM
agccaaggaggagcgcaaga

SEQ ID NO: 9075 - RNA, 20 nt, Artificial Sequence
  spacer sequence GTCN PAM
ugcgcuccuccuuggcugga

SEQ ID NO: 9076 - RNA, 20 nt, Artificial Sequence
  spacer sequence GTCN PAM
cccccuuaccugcugugaau

SEQ ID NO: 9077 - RNA, 20 nt, Artificial Sequence
  spacer sequence GTCN PAM
cagcuacuugggaggcugag

SEQ ID NO: 9078 - RNA, 20 nt, Artificial Sequence
  spacer sequence GTCN PAM
cagggcuguggugucugaug

SEQ ID NO: 9079 - RNA, 20 nt, Artificial Sequence
  spacer sequence GTCN PAM
cagaaacagcaagaagacca

SEQ ID NO: 9080 - RNA, 20 nt, Artificial Sequence
  spacer sequence GTCN PAM
ucuugcuguuucugggacac

SEQ ID NO: 9081 - RNA, 20 nt, Artificial Sequence
  spacer sequence GTCN PAM
gaccaugcagggcagaacgg

SEQ ID NO: 9082 - RNA, 20 nt, Artificial Sequence
  spacer sequence GTCN PAM
gacccugcacacaggccccu

SEQ ID NO: 9083 - RNA, 20 nt, Artificial Sequence
  spacer sequence GTCN PAM
gaacccguucugcccugcau

SEQ ID NO: 9084 - RNA, 20 nt, Artificial Sequence
  spacer sequence GTCN PAM
ccugucugaacccguucugc

SEQ ID NO: 9085 - RNA, 20 nt, Artificial Sequence
  spacer sequence GTCN PAM
agugucgccugucugaaccc

SEQ ID NO: 9086 - RNA, 20 nt, Artificial Sequence
  spacer sequence GTCN PAM
acuccugcucucaagcgauc

SEQ ID NO: 9087 - RNA, 20 nt, Artificial Sequence
  spacer sequence GTCN PAM
cguccacuccugcucucaag

SEQ ID NO: 9088 - RNA, 20 nt, Artificial Sequence
  spacer sequence GTCN PAM
gcuccaucucauuucuuccc

SEQ ID NO: 9089 - RNA, 20 nt, Artificial Sequence
  spacer sequence GTCN PAM
ggggaucgaaaccagccugg

SEQ ID NO: 9090 - RNA, 20 nt, Artificial Sequence
  spacer sequence GTCN PAM
gcauccccgggaagaggaag

SEQ ID NO: 9091 - RNA, 20 nt, Artificial Sequence
  spacer sequence GTCN PAM
ggggcgucagcauccccggg

SEQ ID NO: 9092 - RNA, 20 nt, Artificial Sequence
  spacer sequence GTCN PAM
gcaagaaagaagagagaagg

SEQ ID NO: 9093 - RNA, 20 nt, Artificial Sequence
  spacer sequence GTCN PAM
uaccuuugggcgugcccacc

SEQ ID NO: 9094 - RNA, 20 nt, Artificial Sequence
  spacer sequence GTCN PAM
gaagugcuucuggccugguu

SEQ ID NO: 9095 - RNA, 20 nt, Artificial Sequence
  spacer sequence GTCN PAM
ucuugucuuacuguagaauu

SEQ ID NO: 9096 - RNA, 20 nt, Artificial Sequence
  spacer sequence GTCN PAM
uacuguagaauuaaaaauua

SEQ ID NO: 9097 - RNA, 20 nt, Artificial Sequence
  spacer sequence GTCN PAM
ggauuuuuuuaaugauuaau

SEQ ID NO: 9098 - RNA, 20 nt, Artificial Sequence
  spacer sequence GTCN PAM
gaggagaggucacauggacc

SEQ ID NO: 9099 - RNA, 20 nt, Artificial Sequence
  spacer sequence GTCN PAM
gcacgggagguggaagcgga

SEQ ID NO: 9100 - RNA, 20 nt, Artificial Sequence
  spacer sequence GTCN PAM
ccaacacgccccugaggacg

SEQ ID NO: 9101 - RNA, 20 nt, Artificial Sequence
  spacer sequence GTCN PAM
ucaggggcguguuggagacu

SEQ ID NO: 9102 - RNA, 20 nt, Artificial Sequence
  spacer sequence GTCN PAM
accguccucaggggcguguu

SEQ ID NO: 9103 - RNA, 20 nt, Artificial Sequence
  spacer sequence GTCN PAM
cacgccggcccacgcuuccc

SEQ ID NO: 9104 - RNA, 20 nt, Artificial Sequence
  spacer sequence GTCN PAM
ucucggggaagcgugggccg

SEQ ID NO: 9105 - RNA, 20 nt, Artificial Sequence
  spacer sequence GTCN PAM
guuagagccgccaugcgugg

SEQ ID NO: 9106 - RNA, 20 nt, Artificial Sequence
  spacer sequence GTCN PAM
cgucgguuagagccgccaug

SEQ ID NO: 9107 - RNA, 20 nt, Artificial Sequence
  spacer sequence GTCN PAM
cuggaggcaaccaagccagg

SEQ ID NO: 9108 - RNA, 20 nt, Artificial Sequence
  spacer sequence GTCN PAM
ccagcaccgcugcgcuuccg

SEQ ID NO: 9109 - RNA, 20 nt, Artificial Sequence
  spacer sequence GTCN PAM
acccccaccuuccccugcuu

SEQ ID NO: 9110 - RNA, 20 nt, Artificial Sequence
  spacer sequence GTCN PAM
ugggcagccaccccagaguc

SEQ ID NO: 9111 - RNA, 20 nt, Artificial Sequence
  spacer sequence GTCN PAM
cguccugggcagccacccca

SEQ ID NO: 9112 - RNA, 20 nt, Artificial Sequence
  spacer sequence GTCN PAM
ccagcacgguccaggguggg

SEQ ID NO: 9113 - RNA, 20 nt, Artificial Sequence
  spacer sequence GTCN PAM
aggguggggguugccccagg

SEQ ID NO: 9114 - RNA, 20 nt, Artificial Sequence
  spacer sequence GTCN PAM
gcugcauccuggggcaaccc

SEQ ID NO: 9115 - RNA, 20 nt, Artificial Sequence
  spacer sequence GTCN PAM
gagcagguggugccuguggg

SEQ ID NO: 9116 - RNA, 20 nt, Artificial Sequence
  spacer sequence GTCN PAM
cacuggcacagaggcccaca

SEQ ID NO: 9117 - RNA, 20 nt, Artificial Sequence
  spacer sequence GTCN PAM
gccagggcuggucucacugg

SEQ ID NO: 9118 - RNA, 20 nt, Artificial Sequence
  spacer sequence GTCN PAM
cccgcugauccccguggcca

SEQ ID NO: 9119 - RNA, 20 nt, Artificial Sequence
  spacer sequence GTCN PAM
guggccacggggaucagcgg

SEQ ID NO: 9120 - RNA, 20 nt, Artificial Sequence
  spacer sequence GTCN PAM
agagcugcccacacuguuga

SEQ ID NO: 9121 - RNA, 20 nt, Artificial Sequence
  spacer sequence GTCN PAM
gggguggagggcugaggcug

SEQ ID NO: 9122 - RNA, 20 nt, Artificial Sequence
  spacer sequence GTCN PAM
ucccuucacccagaaugccu

SEQ ID NO: 9123 - RNA, 20 nt, Artificial Sequence
  spacer sequence GTCN PAM
cuucacccagaaugccuuuc

SEQ ID NO: 9124 - RNA, 20 nt, Artificial Sequence
  spacer sequence GTCN PAM
uuggccucacuuuucuaccg

SEQ ID NO: 9125 - RNA, 20 nt, Artificial Sequence
  spacer sequence GTCN PAM
ccucuuacguugaacgcucc

SEQ ID NO: 9126 - RNA, 20 nt, Artificial Sequence
  spacer sequence GTCN PAM
gagcaaagacccagaggugc

SEQ ID NO: 9127 - RNA, 20 nt, Artificial Sequence
  spacer sequence GTCN PAM
uugcucagacgucaccucuu

SEQ ID NO: 9128 - RNA, 20 nt, Artificial Sequence
  spacer sequence GTCN PAM
aaggcacgcagcuaucuggg

SEQ ID NO: 9129 - RNA, 20 nt, Artificial Sequence
  spacer sequence GTCN PAM
ugccccggggccuuugcacu

SEQ ID NO: 9130 - RNA, 20 nt, Artificial Sequence
  spacer sequence GTCN PAM
ccucccgccccugccacagg

SEQ ID NO: 9131 - RNA, 20 nt, Artificial Sequence
  spacer sequence GTCN PAM
cggcuuugccugcagccccc

SEQ ID NO: 9132 - RNA, 20 nt, Artificial Sequence
  spacer sequence GTCN PAM
gggcagucccggcuuugccu

SEQ ID NO: 9133 - RNA, 20 nt, Artificial Sequence
  spacer sequence GTCN PAM
ccagagggcgugggugagca

SEQ ID NO: 9134 - RNA, 20 nt, Artificial Sequence
  spacer sequence GTCN PAM
guucucccugcagucaccag

SEQ ID NO: 9135 - RNA, 20 nt, Artificial Sequence
  spacer sequence GTCN PAM
acggucuguucucccugcag

SEQ ID NO: 9136 - RNA, 20 nt, Artificial Sequence
  spacer sequence GTCN PAM
ccuccaccuggcaccgucca

SEQ ID NO: 9137 - RNA, 20 nt, Artificial Sequence
  spacer sequence GTCN PAM
gggaggacuggccaggcacg

SEQ ID NO: 9138 - RNA, 20 nt, Artificial Sequence
  spacer sequence GTCN PAM
ucccugacaccucguuucuc

SEQ ID NO: 9139 - RNA, 20 nt, Artificial Sequence
  spacer sequence GTCN PAM
ggaguucaagaccagccuga

SEQ ID NO: 9140 - RNA, 20 nt, Artificial Sequence
  spacer sequence GTCN PAM
ugaacuccugaccucaaaug

SEQ ID NO: 9141 - RNA, 20 nt, Artificial Sequence
  spacer sequence GTCN PAM
cuacuaaaaaauagaaaaau

SEQ ID NO: 9142 - RNA, 20 nt, Artificial Sequence
  spacer sequence GTCN PAM
ggagaucgagaccaucuugg

SEQ ID NO: 9143 - RNA, 20 nt, Artificial Sequence
  spacer sequence GTCN PAM
cgaucuccugaccucaugau

SEQ ID NO: 9144 - RNA, 20 nt, Artificial Sequence
  spacer sequence GTCN PAM
cuaguaaaaauacaaaaaau

SEQ ID NO: 9145 - RNA, 20 nt, Artificial Sequence
  spacer sequence GTCN PAM
caaaaaaaaaaagagggagg

SEQ ID NO: 9146 - RNA, 20 nt, Artificial Sequence
  spacer sequence GTCN PAM
ucccucuuuuuuuuuuugag

SEQ ID NO: 9147 - RNA, 20 nt, Artificial Sequence
  spacer sequence GTCN PAM
auaacacuacucccaaucug

SEQ ID NO: 9148 - RNA, 20 nt, Artificial Sequence
  spacer sequence GTCN PAM
aggucaagguccaggugggg

SEQ ID NO: 9149 - RNA, 20 nt, Artificial Sequence
  spacer sequence GTCN PAM
agguccagguggggaugggu

SEQ ID NO: 9150 - RNA, 20 nt, Artificial Sequence
  spacer sequence GTCN PAM
agguggggaugggugugcgg

SEQ ID NO: 9151 - RNA, 20 nt, Artificial Sequence
  spacer sequence GTCN PAM
ccggcgcagagcagagucca

SEQ ID NO: 9152 - RNA, 20 nt, Artificial Sequence
  spacer sequence GTCN PAM
agggccgcagccgggccuaa

SEQ ID NO: 9153 - RNA, 20 nt, Artificial Sequence
  spacer sequence GTCN PAM
agguugggugggaggaggga

SEQ ID NO: 9154 - RNA, 20 nt, Artificial Sequence
  spacer sequence GTCN PAM
ccaucgugggcagcccugcc

SEQ ID NO: 9155 - RNA, 20 nt, Artificial Sequence
  spacer sequence GTCN PAM
ucaccacuucugaggggcca

SEQ ID NO: 9156 - RNA, 20 nt, Artificial Sequence
  spacer sequence GTCN PAM
ugggucaggccaguccuggc

SEQ ID NO: 9157 - RNA, 20 nt, Artificial Sequence
  spacer sequence GTCN PAM
ggccaguccuggcagcccug

SEQ ID NO: 9158 - RNA, 20 nt, Artificial Sequence
  spacer sequence GTCN PAM
uggcagcccuguucagcucc

SEQ ID NO: 9159 - RNA, 20 nt, Artificial Sequence
  spacer sequence GTCN PAM
cagggaggugccuggugauc

SEQ ID NO: 9160 - RNA, 20 nt, Artificial Sequence
  spacer sequence GTCN PAM
ucuucaagcaggccuggggg

SEQ ID NO: 9161 - RNA, 20 nt, Artificial Sequence
  spacer sequence GTCN PAM
cuguuaggaugcaggcucug

SEQ ID NO: 9162 - RNA, 20 nt, Artificial Sequence
  spacer sequence GTCN PAM
aacuugcuacucaucagggc

SEQ ID NO: 9163 - RNA, 20 nt, Artificial Sequence
  spacer sequence GTCN PAM
aaauagaugacggcgugucc

SEQ ID NO: 9164 - RNA, 20 nt, Artificial Sequence
  spacer sequence GTCN PAM
ucuauuuagacucagaauga

SEQ ID NO: 9165 - RNA, 20 nt, Artificial Sequence
  spacer sequence GTCN PAM
aaccguuggcuggaaggagg

SEQ ID NO: 9166 - RNA, 20 nt, Artificial Sequence
  spacer sequence GTCN PAM
aguccugggagcuuggaugg

SEQ ID NO: 9167 - RNA, 20 nt, Artificial Sequence
  spacer sequence GTCN PAM
ugggagcuuggauggucggg

SEQ ID NO: 9168 - RNA, 20 nt, Artificial Sequence
  spacer sequence GTCN PAM
gggcgggggcugugggucug

SEQ ID NO: 9169 - RNA, 20 nt, Artificial Sequence
  spacer sequence GTCN PAM
gcagacugagccccagucuc

SEQ ID NO: 9170 - RNA, 20 nt, Artificial Sequence
  spacer sequence GTCN PAM
gcagacccacagcccccgcc

SEQ ID NO: 9171 - RNA, 20 nt, Artificial Sequence
  spacer sequence GTCN PAM
ccgccgugaccccgggcaag

SEQ ID NO: 9172 - RNA, 20 nt, Artificial Sequence
  spacer sequence GTCN PAM
cggcggagacuggggcucag

SEQ ID NO: 9173 - RNA, 20 nt, Artificial Sequence
  spacer sequence GTCN PAM
caaacuccugggcucaagca

SEQ ID NO: 9174 - RNA, 20 nt, Artificial Sequence
  spacer sequence GTCN PAM
cacuauguugcccaggcugg

SEQ ID NO: 9175 - RNA, 20 nt, Artificial Sequence
  spacer sequence GTCN PAM
cagcuacuugggaggcugag

SEQ ID NO: 9176 - RNA, 20 nt, Artificial Sequence
  spacer sequence GTCN PAM
ugacugcagugagcugugau

SEQ ID NO: 9177 - RNA, 20 nt, Artificial Sequence
  spacer sequence GTCN PAM
ugaccuuccuggcucacccc

SEQ ID NO: 9178 - RNA, 20 nt, Artificial Sequence
  spacer sequence GTCN PAM
cccucuguuggccaggcugg

SEQ ID NO: 9179 - RNA, 20 nt, Artificial Sequence
  spacer sequence GTCN PAM
ggaguuugagaccagccuga

SEQ ID NO: 9180 - RNA, 20 nt, Artificial Sequence
  spacer sequence GTCN PAM
caaacuccugaccucaggug

SEQ ID NO: 9181 - RNA, 20 nt, Artificial Sequence
  spacer sequence GTCN PAM
ggcuggucucaaacuccuga

SEQ ID NO: 9182 - RNA, 20 nt, Artificial Sequence
  spacer sequence GTCN PAM
cuacuaaaaauacaaaaauu

SEQ ID NO: 9183 - RNA, 20 nt, Artificial Sequence
  spacer sequence GTCN PAM
cagcuacguggaaggcugag

SEQ ID NO: 9184 - RNA, 20 nt, Artificial Sequence
  spacer sequence GTCN PAM
agaucacaccacugugcucc

SEQ ID NO: 9185 - RNA, 20 nt, Artificial Sequence
  spacer sequence GTCN PAM
ccccggcuggagcacagugg

SEQ ID NO: 9186 - RNA, 20 nt, Artificial Sequence
  spacer sequence GTCN PAM
agcucagguuccagcccagc

SEQ ID NO: 9187 - RNA, 20 nt, Artificial Sequence
  spacer sequence GTCN PAM
gucaagcucagguuccagcc

SEQ ID NO: 9188 - RNA, 20 nt, Artificial Sequence
  spacer sequence GTCN PAM
ucuguuucgccaccaaacua

SEQ ID NO: 9189 - RNA, 20 nt, Artificial Sequence
  spacer sequence GTCN PAM
cuguacucugcacugugucc

SEQ ID NO: 9190 - RNA, 20 nt, Artificial Sequence
  spacer sequence GTCN PAM
ucgucccuguacucugcacu

SEQ ID NO: 9191 - RNA, 20 nt, Artificial Sequence
  spacer sequence GTCN PAM
gcccagaugguccucguccc

SEQ ID NO: 9192 - RNA, 20 nt, Artificial Sequence
  spacer sequence GTCN PAM
gaacaccucuccuuggcauu

SEQ ID NO: 9193 - RNA, 20 nt, Artificial Sequence
  spacer sequence GTCN PAM
ucuccaggcacuggggagcu

SEQ ID NO: 9194 - RNA, 20 nt, Artificial Sequence
  spacer sequence GTCN PAM
ccaggcacuggggagcuaug

SEQ ID NO: 9195 - RNA, 20 nt, Artificial Sequence
  spacer sequence GTCN PAM
agaaggugcccaggcauccc

SEQ ID NO: 9196 - RNA, 20 nt, Artificial Sequence
  spacer sequence GTCN PAM
cgggguuacaccacggccug

SEQ ID NO: 9197 - RNA, 20 nt, Artificial Sequence
  spacer sequence GTCN PAM
uucuccacagugaucucaac

SEQ ID NO: 9198 - RNA, 20 nt, Artificial Sequence
  spacer sequence GTCN PAM
ccuuguccuucuccacagug

SEQ ID NO: 9199 - RNA, 20 nt, Artificial Sequence
  spacer sequence GTCN PAM
ccccugucaccuuguccuuc

SEQ ID NO: 9200 - RNA, 20 nt, Artificial Sequence
  spacer sequence GTCN PAM
agcaccacgcugcucccucg

SEQ ID NO: 9201 - RNA, 20 nt, Artificial Sequence
  spacer sequence GTCN PAM
acgaggacgagaccaaaggu

SEQ ID NO: 9202 - RNA, 20 nt, Artificial Sequence
  spacer sequence GTCN PAM
ucguagacuuugaugcccag

SEQ ID NO: 9203 - RNA, 20 nt, Artificial Sequence
  spacer sequence GTCN PAM
cguccucguagacuuugaug

SEQ ID NO: 9204 - RNA, 20 nt, Artificial Sequence
  spacer sequence GTCN PAM
ggcgucugccccggaaucag

SEQ ID NO: 9205 - RNA, 20 nt, Artificial Sequence
  spacer sequence GTCN PAM
gccccggaaucaggaccccg

SEQ ID NO: 9206 - RNA, 20 nt, Artificial Sequence
  spacer sequence GTCN PAM
ugauuccggggcagacgcca

SEQ ID NO: 9207 - RNA, 20 nt, Artificial Sequence
  spacer sequence GTCN PAM
ucugcuucacaucgaaucgg

SEQ ID NO: 9208 - RNA, 20 nt, Artificial Sequence
  spacer sequence GTCN PAM
uucagcccugggcucacugc

SEQ ID NO: 9209 - RNA, 20 nt, Artificial Sequence
  spacer sequence GTCN PAM
uugccggguggcaaaccggg

SEQ ID NO: 9210 - RNA, 20 nt, Artificial Sequence
  spacer sequence GTCN PAM
cagcacuuugggaggccgag

SEQ ID NO: 9211 - RNA, 20 nt, Artificial Sequence
  spacer sequence GTCN PAM
caaacuucugggcucaagcg

SEQ ID NO: 9212 - RNA, 20 nt, Artificial Sequence
  spacer sequence GTCN PAM
cuaccaaaaaaaaaaaaaaa

SEQ ID NO: 9213 - RNA, 20 nt, Artificial Sequence
  spacer sequence GTCN PAM
cagcuacuugggaggcugag

SEQ ID NO: 9214 - RNA, 20 nt, Artificial Sequence
  spacer sequence GTCN PAM
cacucuguugcccagguugg

SEQ ID NO: 9215 - RNA, 20 nt, Artificial Sequence
  spacer sequence GTCN PAM
cuuaagaauaaaaaauaaua

SEQ ID NO: 9216 - RNA, 20 nt, Artificial Sequence
  spacer sequence GTCN PAM
cgcuagcaauucuuuauuau

SEQ ID NO: 9217 - RNA, 20 nt, Artificial Sequence
  spacer sequence GTCN PAM
cacagggugaggauggggcc

SEQ ID NO: 9218 - RNA, 20 nt, Artificial Sequence
  spacer sequence GTCN PAM
cugaugagccccugcuugcc

SEQ ID NO: 9219 - RNA, 20 nt, Artificial Sequence
  spacer sequence GTCN PAM
gcugggcuggagggcugagg

SEQ ID NO: 9220 - RNA, 20 nt, Artificial Sequence
  spacer sequence GTCN PAM
ccccucacuccugcagccca

SEQ ID NO: 9221 - RNA, 20 nt, Artificial Sequence
  spacer sequence GTCN PAM
ccccucaccccugcagcccg

SEQ ID NO: 9222 - RNA, 20 nt, Artificial Sequence
  spacer sequence GTCN PAM
ccccucaccccugcagcccg

SEQ ID NO: 9223 - RNA, 20 nt, Artificial Sequence
  spacer sequence GTCN PAM
ccccucaccccugcagcccg

SEQ ID NO: 9224 - RNA, 20 nt, Artificial Sequence
  spacer sequence GTCN PAM
ccccucaccccugcagccca

SEQ ID NO: 9225 - RNA, 20 nt, Artificial Sequence
  spacer sequence GTCN PAM
ccccucaccccgucuccccu

SEQ ID NO: 9226 - RNA, 20 nt, Artificial Sequence
  spacer sequence GTCN PAM
ccccucaccccugcagcccg

SEQ ID NO: 9227 - RNA, 20 nt, Artificial Sequence
  spacer sequence GTCN PAM
gggaguugaggagcugggcu

SEQ ID NO: 9228 - RNA, 20 nt, Artificial Sequence
  spacer sequence GTCN PAM
cccugccuccaggcaaagca

SEQ ID NO: 9229 - RNA, 20 nt, Artificial Sequence
  spacer sequence GTCN PAM
ugagggcuuugggaagccuu

SEQ ID NO: 9230 - RNA, 20 nt, Artificial Sequence
  spacer sequence GTCN PAM
ugacggugcugaggucuaau

SEQ ID NO: 9231 - RNA, 20 nt, Artificial Sequence
  spacer sequence GTCN PAM
ggacccaacgcacccaaggc

SEQ ID NO: 9232 - RNA, 20 nt, Artificial Sequence
  spacer sequence GTCN PAM
aauuugguuuuaagggcucc

SEQ ID NO: 9233 - RNA, 20 nt, Artificial Sequence
  spacer sequence GTCN PAM
agaggcaaacaggcuguggg

SEQ ID NO: 9234 - RNA, 20 nt, Artificial Sequence
  spacer sequence GTCN PAM
cuggcaucucccacagccug

SEQ ID NO: 9235 - RNA, 20 nt, Artificial Sequence
  spacer sequence GTCN PAM
cccggcccgcagugcagcga

SEQ ID NO: 9236 - RNA, 20 nt, Artificial Sequence
  spacer sequence GTCN PAM
cagcauuucgggaggccgag

SEQ ID NO: 9237 - RNA, 20 nt, Artificial Sequence
  spacer sequence GTCN PAM
cugcacccggccucuuuuuc

SEQ ID NO: 9238 - RNA, 20 nt, Artificial Sequence
  spacer sequence GTCN PAM
gcgaauuauaucucauaaaa

SEQ ID NO: 9239 - RNA, 20 nt, Artificial Sequence
  spacer sequence GTCN PAM
cgggcccagaugagccuccc

SEQ ID NO: 9240 - RNA, 20 nt, Artificial Sequence
  spacer sequence GTCN PAM
guggcccaggcuggagugca

SEQ ID NO: 9241 - RNA, 20 nt, Artificial Sequence
  spacer sequence GTCN PAM
uggucuguggcccaggcugg

SEQ ID NO: 9242 - RNA, 20 nt, Artificial Sequence
  spacer sequence GTCN PAM
caaaaacaagaaagaggaga

SEQ ID NO: 9243 - RNA, 20 nt, Artificial Sequence
  spacer sequence GTCN PAM
cuuccuguccccuccccagu

SEQ ID NO: 9244 - RNA, 20 nt, Artificial Sequence
  spacer sequence GTCN PAM
ccuccccagucagcgucacu

SEQ ID NO: 9245 - RNA, 20 nt, Artificial Sequence
  spacer sequence GTCN PAM
gcgucacucccuauccccuc

SEQ ID NO: 9246 - RNA, 20 nt, Artificial Sequence
  spacer sequence GTCN PAM
cucccuauccccuccccagc

SEQ ID NO: 9247 - RNA, 20 nt, Artificial Sequence
  spacer sequence GTCN PAM
cucuggauuggccuguccug

SEQ ID NO: 9248 - RNA, 20 nt, Artificial Sequence
  spacer sequence GTCN PAM
uggacauuucauagaaauga

SEQ ID NO: 9249 - RNA, 20 nt, Artificial Sequence
  spacer sequence GTCN PAM
aggacaggccaauccagaga

SEQ ID NO: 9250 - RNA, 20 nt, Artificial Sequence
  spacer sequence GTCN PAM
ggaguucgagaccagccugg

SEQ ID NO: 9251 - RNA, 20 nt, Artificial Sequence
  spacer sequence GTCN PAM
cgaacuccugaccucaggug

SEQ ID NO: 9252 - RNA, 20 nt, Artificial Sequence
  spacer sequence GTCN PAM
cugcuaaaaauacaaaaauu

SEQ ID NO: 9253 - RNA, 20 nt, Artificial Sequence
  spacer sequence GTCN PAM
agcuaauuuuuguauuuuua

SEQ ID NO: 9254 - RNA, 20 nt, Artificial Sequence
  spacer sequence GTCN PAM
gccaccacguccagcuaauu

SEQ ID NO: 9255 - RNA, 20 nt, Artificial Sequence
  spacer sequence GTCN PAM
cacaggcuggagagcagugg

SEQ ID NO: 9256 - RNA, 20 nt, Artificial Sequence
  spacer sequence GTCN PAM
caaaaaaaaaaaaaagaaag

SEQ ID NO: 9257 - RNA, 20 nt, Artificial Sequence
  spacer sequence GTCN PAM
cacacugcacguggccuucu

SEQ ID NO: 9258 - RNA, 20 nt, Artificial Sequence
  spacer sequence GTCN PAM
ggcgucucucacugggcgug

SEQ ID NO: 9259 - RNA, 20 nt, Artificial Sequence
  spacer sequence GTCN PAM
cucacugggcgugacguccc

SEQ ID NO: 9260 - RNA, 20 nt, Artificial Sequence
  spacer sequence GTCN PAM
cgcccagugagagacgccag

SEQ ID NO: 9261 - RNA, 20 nt, Artificial Sequence
  spacer sequence GTCN PAM
ccaaggugcaucggcacugu

SEQ ID NO: 9262 - RNA, 20 nt, Artificial Sequence
  spacer sequence GTCN PAM
gagccugacuccuuuucaug

SEQ ID NO: 9263 - RNA, 20 nt, Artificial Sequence
  spacer sequence GTCN PAM
ggcuccgacccaggccacag

SEQ ID NO: 9264 - RNA, 20 nt, Artificial Sequence
  spacer sequence GTCN PAM
acagauggaagaagggauaa

SEQ ID NO: 9265 - RNA, 20 nt, Artificial Sequence
  spacer sequence GTCN PAM
ugaggcgacuguguggagcu

SEQ ID NO: 9266 - RNA, 20 nt, Artificial Sequence
  spacer sequence GTCN PAM
ccucaggacccagcaguuca

SEQ ID NO: 9267 - RNA, 20 nt, Artificial Sequence
  spacer sequence GTCN PAM
ucacggagcuccacacaguc

SEQ ID NO: 9268 - RNA, 20 nt, Artificial Sequence
  spacer sequence GTCN PAM
cguucccacaggucguggau

SEQ ID NO: 9269 - RNA, 20 nt, Artificial Sequence
  spacer sequence GTCN PAM
uggaugagggcccaguuucu

SEQ ID NO: 9270 - RNA, 20 nt, Artificial Sequence
  spacer sequence GTCN PAM
ucaccagcgcucguagccca

SEQ ID NO: 9271 - RNA, 20 nt, Artificial Sequence
  spacer sequence GTCN PAM
ugguggcgugacgugggguc

SEQ ID NO: 9272 - RNA, 20 nt, Artificial Sequence
  spacer sequence GTCN PAM
cgccaccaggacagccacga

SEQ ID NO: 9273 - RNA, 20 nt, Artificial Sequence
  spacer sequence GTCN PAM
cccugugguuuggauuccca

SEQ ID NO: 9274 - RNA, 20 nt, Artificial Sequence
  spacer sequence GTCN PAM
gagggguccccgcagcccag

SEQ ID NO: 9275 - RNA, 20 nt, Artificial Sequence
  spacer sequence GTCN PAM
ccgcagcccagcucuggagu

SEQ ID NO: 9276 - RNA, 20 nt, Artificial Sequence
  spacer sequence GTCN PAM
ccaugccucgucuuccggau

SEQ ID NO: 9277 - RNA, 20 nt, Artificial Sequence
  spacer sequence GTCN PAM
uccggaugagguccucaccc

SEQ ID NO: 9278 - RNA, 20 nt, Artificial Sequence
  spacer sequence GTCN PAM
ucacccccaucacuccaccc

SEQ ID NO: 9279 - RNA, 20 nt, Artificial Sequence
  spacer sequence GTCN PAM
cuggggauuccagaccugcc

SEQ ID NO: 9280 - RNA, 20 nt, Artificial Sequence
  spacer sequence GTCN PAM
ggaauccccagggaccaggu

SEQ ID NO: 9281 - RNA, 20 nt, Artificial Sequence
  spacer sequence GTCN PAM
agccuggcaggucuggaauc

SEQ ID NO: 9282 - RNA, 20 nt, Artificial Sequence
  spacer sequence GTCN PAM
uggggcagcggccaguggga

SEQ ID NO: 9283 - RNA, 20 nt, Artificial Sequence
  spacer sequence GTCN PAM
cacuggccgcugccccaaga

SEQ ID NO: 9284 - RNA, 20 nt, Artificial Sequence
  spacer sequence GTCN PAM
ggaucaggcggaacugaacu

SEQ ID NO: 9285 - RNA, 20 nt, Artificial Sequence
  spacer sequence GTCN PAM
uugagaugccuugaagcaug

SEQ ID NO: 9286 - RNA, 20 nt, Artificial Sequence
  spacer sequence GTCN PAM
augcuucaaggcaucucaau

SEQ ID NO: 9287 - RNA, 20 nt, Artificial Sequence
  spacer sequence GTCN PAM
guagccaggaacaggagccc

SEQ ID NO: 9288 - RNA, 20 nt, Artificial Sequence
  spacer sequence GTCN PAM
gggcuccuguuccuggcuac

SEQ ID NO: 9289 - RNA, 20 nt, Artificial Sequence
  spacer sequence GTCN PAM
cugggaccccccuugcgucc

SEQ ID NO: 9290 - RNA, 20 nt, Artificial Sequence
  spacer sequence GTCN PAM
cagggacucgccuccucucg

SEQ ID NO: 9291 - RNA, 20 nt, Artificial Sequence
  spacer sequence GTCN PAM
cucccaacucccagcguggc

SEQ ID NO: 9292 - RNA, 20 nt, Artificial Sequence
  spacer sequence GTCN PAM
uuggagaguccaacacaccu

SEQ ID NO: 9293 - RNA, 20 nt, Artificial Sequence
  spacer sequence GTCN PAM
aacacaccucaagaaauguc

SEQ ID NO: 9294 - RNA, 20 nt, Artificial Sequence
  spacer sequence GTCN PAM
agucagagacacacagauaa

SEQ ID NO: 9295 - RNA, 20 nt, Artificial Sequence
  spacer sequence GTCN PAM
gagacacacagauaaggaaa

SEQ ID NO: 9296 - RNA, 20 nt, Artificial Sequence
  spacer sequence GTCN PAM
cugacuugacauuucuugag

SEQ ID NO: 9297 - RNA, 20 nt, Artificial Sequence
  spacer sequence GTCN PAM
uuccaaauuuccuuaucugu

SEQ ID NO: 9298 - RNA, 20 nt, Artificial Sequence
  spacer sequence GTCN PAM
gaaagugaccaccguggccc

SEQ ID NO: 9299 - RNA, 20 nt, Artificial Sequence
  spacer sequence GTCN PAM
cuuucugacaauguucugug

SEQ ID NO: 9300 - RNA, 20 nt, Artificial Sequence
  spacer sequence GTCN PAM
uaaaaccuccuuggcagccu

SEQ ID NO: 9301 - RNA, 20 nt, Artificial Sequence
  spacer sequence GTCN PAM
ggagaucgagaccagccugg

SEQ ID NO: 9302 - RNA, 20 nt, Artificial Sequence
  spacer sequence GTCN PAM
cgaucuccugaccucgugau

SEQ ID NO: 9303 - RNA, 20 nt, Artificial Sequence
  spacer sequence GTCN PAM
cagcuacucaggaggcugag

SEQ ID NO: 9304 - RNA, 20 nt, Artificial Sequence
  spacer sequence GTCN PAM
uucucucugucucuccuugu

SEQ ID NO: 9305 - RNA, 20 nt, Artificial Sequence
  spacer sequence GTCN PAM
cuccuuguacagugguccau

SEQ ID NO: 9306 - RNA, 20 nt, Artificial Sequence
  spacer sequence GTCN PAM
augcuguggacggcaccgcc

SEQ ID NO: 9307 - RNA, 20 nt, Artificial Sequence
  spacer sequence GTCN PAM
acagcauggaccacuguaca

SEQ ID NO: 9308 - RNA, 20 nt, Artificial Sequence
  spacer sequence GTCN PAM
accucggaggagcucagggg

SEQ ID NO: 9309 - RNA, 20 nt, Artificial Sequence
  spacer sequence GTCN PAM
gcuuuguggaugaguucguc

SEQ ID NO: 9310 - RNA, 20 nt, Artificial Sequence
  spacer sequence GTCN PAM
cgcugagcgaggcagggucc

SEQ ID NO: 9311 - RNA, 20 nt, Artificial Sequence
  spacer sequence GTCN PAM
acggccggggcggcagagac

SEQ ID NO: 9312 - RNA, 20 nt, Artificial Sequence
  spacer sequence GTCN PAM
cugccgccccggccguggac

SEQ ID NO: 9313 - RNA, 20 nt, Artificial Sequence
  spacer sequence GTCN PAM
gggcugcccccuccacagcc

SEQ ID NO: 9314 - RNA, 20 nt, Artificial Sequence
  spacer sequence GTCN PAM
ggcccgccggggauccagcc

SEQ ID NO: 9315 - RNA, 20 nt, Artificial Sequence
  spacer sequence GTCN PAM
caaugaucuucauggguuac

SEQ ID NO: 9316 - RNA, 20 nt, Artificial Sequence
  spacer sequence GTCN PAM
cggccucauccuccacguuc

SEQ ID NO: 9317 - RNA, 20 nt, Artificial Sequence
  spacer sequence GTCN PAM
ucgaagacgcggcugagccc

SEQ ID NO: 9318 - RNA, 20 nt, Artificial Sequence
  spacer sequence GTCN PAM
ucgaugaccaccagcuccgc

SEQ ID NO: 9319 - RNA, 20 nt, Artificial Sequence
  spacer sequence GTCN PAM
cuggugguggccucgggccc

SEQ ID NO: 9320 - RNA, 20 nt, Artificial Sequence
  spacer sequence GTCN PAM
ugggggucgcuggugguggc

SEQ ID NO: 9321 - RNA, 20 nt, Artificial Sequence
  spacer sequence GTCN PAM
agguccugggggucgcuggu

SEQ ID NO: 9322 - RNA, 20 nt, Artificial Sequence
  spacer sequence GTCN PAM
cgggggccggcucacaugau

SEQ ID NO: 9323 - RNA, 20 nt, Artificial Sequence
  spacer sequence GTCN PAM
gugguguggggugggggccg

SEQ ID NO: 9324 - RNA, 20 nt, Artificial Sequence
  spacer sequence GTCN PAM
aggacuuggcguguuguuac

SEQ ID NO: 9325 - RNA, 20 nt, Artificial Sequence
  spacer sequence GTCN PAM
uggacccgugaggcuguggg

SEQ ID NO: 9326 - RNA, 20 nt, Artificial Sequence
  spacer sequence GTCN PAM
cucuuuccagcgaaagaaaa

SEQ ID NO: 9327 - RNA, 20 nt, Artificial Sequence
  spacer sequence GTCN PAM
ccacgccccaacacuccccc

SEQ ID NO: 9328 - RNA, 20 nt, Artificial Sequence
  spacer sequence GTCN PAM
cgggaaaagcgggucugucc

SEQ ID NO: 9329 - RNA, 20 nt, Artificial Sequence
  spacer sequence GTCN PAM
uugucucgggaaaagcgggu

SEQ ID NO: 9330 - RNA, 20 nt, Artificial Sequence
  spacer sequence GTCN PAM
cggcagcuucacagacgcgg

SEQ ID NO: 9331 - RNA, 20 nt, Artificial Sequence
  spacer sequence GTCN PAM
gugaagcugccgugacaugg

SEQ ID NO: 9332 - RNA, 20 nt, Artificial Sequence
  spacer sequence GTCN PAM
uggcgggugggacccgcagc

SEQ ID NO: 9333 - RNA, 20 nt, Artificial Sequence
  spacer sequence GTCN PAM
cacccgccaggaccccggug

SEQ ID NO: 9334 - RNA, 20 nt, Artificial Sequence
  spacer sequence GTCN PAM
ccucagagaaaggcacaggu

SEQ ID NO: 9335 - RNA, 20 nt, Artificial Sequence
  spacer sequence GTCN PAM
uggguggaggacaggccccu

SEQ ID NO: 9336 - RNA, 20 nt, Artificial Sequence
  spacer sequence GTCN PAM
uccacccaagaccuuuagcc

SEQ ID NO: 9337 - RNA, 20 nt, Artificial Sequence
  spacer sequence GTCN PAM
acugguugggcccacacagg

SEQ ID NO: 9338 - RNA, 20 nt, Artificial Sequence
  spacer sequence GTCN PAM
gggggagggggaaccccggg

SEQ ID NO: 9339 - RNA, 20 nt, Artificial Sequence
  spacer sequence GTCN PAM
ccgggguucccccuccccca

SEQ ID NO: 9340 - RNA, 20 nt, Artificial Sequence
  spacer sequence GTCN PAM
agaagauagcccagggguua

SEQ ID NO: 9341 - RNA, 20 nt, Artificial Sequence
  spacer sequence GTCN PAM
uugaccugcccccugcacag

SEQ ID NO: 9342 - RNA, 20 nt, Artificial Sequence
  spacer sequence GTCN PAM
augaccccugguucgccccg

SEQ ID NO: 9343 - RNA, 20 nt, Artificial Sequence
  spacer sequence GTCN PAM
cugcccugugcagggggcag

SEQ ID NO: 9344 - RNA, 20 nt, Artificial Sequence
  spacer sequence GTCN PAM
cgagcucccgcccccacugg

SEQ ID NO: 9345 - RNA, 20 nt, Artificial Sequence
  spacer sequence GTCN PAM
ccaaauuagcaccaggagga

SEQ ID NO: 9346 - RNA, 20 nt, Artificial Sequence
  spacer sequence GTCN PAM
aagcaggauggagaagaggc

SEQ ID NO: 9347 - RNA, 20 nt, Artificial Sequence
  spacer sequence GTCN PAM
ugggucuucccaaccauacc

SEQ ID NO: 9348 - RNA, 20 nt, Artificial Sequence
  spacer sequence GTCN PAM
ucccaaccauaccccgagau

SEQ ID NO: 9349 - RNA, 20 nt, Artificial Sequence
  spacer sequence GTCN PAM
gggcaguggagggagggaca

SEQ ID NO: 9350 - RNA, 20 nt, Artificial Sequence
  spacer sequence GTCN PAM
cucccuccacugcccggacg

SEQ ID NO: 9351 - RNA, 20 nt, Artificial Sequence
  spacer sequence GTCN PAM
caggcugugucccucccucc

SEQ ID NO: 9352 - RNA, 20 nt, Artificial Sequence
  spacer sequence GTCN PAM
ccugcuccaacccaagaggc

SEQ ID NO: 9353 - RNA, 20 nt, Artificial Sequence
  spacer sequence GTCN PAM
ggguggcaaaugagggucuc

SEQ ID NO: 9354 - RNA, 20 nt, Artificial Sequence
  spacer sequence GTCN PAM
ccagaggcacauucgugcac

SEQ ID NO: 9355 - RNA, 20 nt, Artificial Sequence
  spacer sequence GTCN PAM
gugagaaugugcacgaaugu

SEQ ID NO: 9356 - RNA, 20 nt, Artificial Sequence
  spacer sequence GTCN PAM
cacacguuggcuuuggacaa

SEQ ID NO: 9357 - RNA, 20 nt, Artificial Sequence
  spacer sequence GTCN PAM
aaagccaacgugugagacgg

SEQ ID NO: 9358 - RNA, 20 nt, Artificial Sequence
  spacer sequence GTCN PAM
cugcccuagggaccuccagc

SEQ ID NO: 9359 - RNA, 20 nt, Artificial Sequence
  spacer sequence GTCN PAM
cuagggcagggaccaaguug

SEQ ID NO: 9360 - RNA, 20 nt, Artificial Sequence
  spacer sequence GTCN PAM
agucaccaccugcagccucg

SEQ ID NO: 9361 - RNA, 20 nt, Artificial Sequence
  spacer sequence GTCN PAM
ccaccugcagccucggcagg

SEQ ID NO: 9362 - RNA, 20 nt, Artificial Sequence
  spacer sequence GTCN PAM
cugccuccgcucugccccug

SEQ ID NO: 9363 - RNA, 20 nt, Artificial Sequence
  spacer sequence GTCN PAM
cccccgagagggccucuccu

SEQ ID NO: 9364 - RNA, 20 nt, Artificial Sequence
  spacer sequence GTCN PAM
gccguggaacccccuccucc

SEQ ID NO: 9365 - RNA, 20 nt, Artificial Sequence
  spacer sequence GTCN PAM
gccugagucccucgagccgc

SEQ ID NO: 9366 - RNA, 20 nt, Artificial Sequence
  spacer sequence GTCN PAM
cucgagccgcgagccuucgc

SEQ ID NO: 9367 - RNA, 20 nt, Artificial Sequence
  spacer sequence GTCN PAM
cacaccagaagcagaggggg

SEQ ID NO: 9368 - RNA, 20 nt, Artificial Sequence
  spacer sequence GTCN PAM
ugcccccccacagcagcccc

SEQ ID NO: 9369 - RNA, 20 nt, Artificial Sequence
  spacer sequence GTCN PAM
uguccuuuguuccucccuuu

SEQ ID NO: 9370 - RNA, 20 nt, Artificial Sequence
  spacer sequence GTCN PAM
uuuguuccucccuuugcugg

SEQ ID NO: 9371 - RNA, 20 nt, Artificial Sequence
  spacer sequence GTCN PAM
ucacccaggggcugugagcc

SEQ ID NO: 9372 - RNA, 20 nt, Artificial Sequence
  spacer sequence GTCN PAM
ccuggacacccacaagcucu

SEQ ID NO: 9373 - RNA, 20 nt, Artificial Sequence
  spacer sequence GTCN PAM
aggggacccucugucaucac

SEQ ID NO: 9374 - RNA, 20 nt, Artificial Sequence
  spacer sequence GTCN PAM
guagagaccagugucaugcu

SEQ ID NO: 9375 - RNA, 20 nt, Artificial Sequence
  spacer sequence GTCN PAM
cuacagacaccuccucccca

SEQ ID NO: 9376 - RNA, 20 nt, Artificial Sequence
  spacer sequence GTCN PAM
ugcucacgggaaggugcugc

SEQ ID NO: 9377 - RNA, 20 nt, Artificial Sequence
  spacer sequence GTCN PAM
uggagaagucgcugccuccu

SEQ ID NO: 9378 - RNA, 20 nt, Artificial Sequence
  spacer sequence GTCN PAM
cugccuccucugggccucag

SEQ ID NO: 9379 - RNA, 20 nt, Artificial Sequence
  spacer sequence GTCN PAM
agagaucgauaccauccugg

SEQ ID NO: 9380 - RNA, 20 nt, Artificial Sequence
  spacer sequence GTCN PAM
cuacuaaaaauacaaaaacu

SEQ ID NO: 9381 - RNA, 20 nt, Artificial Sequence
  spacer sequence GTCN PAM
cccagguuggagugcagugg

SEQ ID NO: 9382 - RNA, 20 nt, Artificial Sequence
  spacer sequence GTCN PAM
cgcucugucgcccagguugg

SEQ ID NO: 9383 - RNA, 20 nt, Artificial Sequence
  spacer sequence GTCN PAM
caaauaaaauaaaauaggcc

SEQ ID NO: 9384 - RNA, 20 nt, Artificial Sequence
  spacer sequence GTCN PAM
cacgcccaggcugaggcugg

SEQ ID NO: 9385 - RNA, 20 nt, Artificial Sequence
  spacer sequence GTCN PAM
ccacagugcccccagcucau

SEQ ID NO: 9386 - RNA, 20 nt, Artificial Sequence
  spacer sequence GTCN PAM
uuuucucccuggcuuguaga

SEQ ID NO: 9387 - RNA, 20 nt, Artificial Sequence
  spacer sequence GTCN PAM
uuugggggcccuuuauccag

SEQ ID NO: 9388 - RNA, 20 nt, Artificial Sequence
  spacer sequence GTCN PAM
uuaaacacccccaucuuggc

SEQ ID NO: 9389 - RNA, 20 nt, Artificial Sequence
  spacer sequence GTCN PAM
ggaguucgagaccagccugg

SEQ ID NO: 9390 - RNA, 20 nt, Artificial Sequence
  spacer sequence GTCN PAM
cgaacuccugaccucaggug

SEQ ID NO: 9391 - RNA, 20 nt, Artificial Sequence
  spacer sequence GTCN PAM
cuacuaaaaauacaaaaaua

SEQ ID NO: 9392 - RNA, 20 nt, Artificial Sequence
  spacer sequence GTCN PAM
cccaggcuggagugcagugg

SEQ ID NO: 9393 - RNA, 20 nt, Artificial Sequence
  spacer sequence GTCN PAM
cgcucuugucacccaggcug

SEQ ID NO: 9394 - RNA, 20 nt, Artificial Sequence
  spacer sequence GTCN PAM
caaaaaaaaaacacaaaaaa

SEQ ID NO: 9395 - RNA, 20 nt, Artificial Sequence
  spacer sequence GTCN PAM
cuucuucgaguaaaaaggcc

SEQ ID NO: 9396 - RNA, 20 nt, Artificial Sequence
  spacer sequence GTCN PAM
ggacagagccccagccuggg

SEQ ID NO: 9397 - RNA, 20 nt, Artificial Sequence
  spacer sequence GTCN PAM
ugaccuacgccagaggggcu

SEQ ID NO: 9398 - RNA, 20 nt, Artificial Sequence
  spacer sequence GTCN PAM
cugcccccucagcuguguuc

SEQ ID NO: 9399 - RNA, 20 nt, Artificial Sequence
  spacer sequence GTCN PAM
augagggcagggaacacagc

SEQ ID NO: 9400 - RNA, 20 nt, Artificial Sequence
  spacer sequence GTCN PAM
ggccacugggccuagcgccg

SEQ ID NO: 9401 - RNA, 20 nt, Artificial Sequence
  spacer sequence GTCN PAM
cagcaaggccucugcaccuu

SEQ ID NO: 9402 - RNA, 20 nt, Artificial Sequence
  spacer sequence GTCN PAM
aggugcagaggccuugcugg

SEQ ID NO: 9403 - RNA, 20 nt, Artificial Sequence
  spacer sequence GTCN PAM
uccuggauucuuagucaagg

SEQ ID NO: 9404 - RNA, 20 nt, Artificial Sequence
  spacer sequence GTCN PAM
ccaucucucgggguggccug

SEQ ID NO: 9405 - RNA, 20 nt, Artificial Sequence
  spacer sequence GTCN PAM
uuugacggccucgugcgguu

SEQ ID NO: 9406 - RNA, 20 nt, Artificial Sequence
  spacer sequence GTCN PAM
aaagacccaggccaccccga

SEQ ID NO: 9407 - RNA, 20 nt, Artificial Sequence
  spacer sequence GTCN PAM
cccaggcuggagugcagugg

SEQ ID NO: 9408 - RNA, 20 nt, Artificial Sequence
  spacer sequence GTCN PAM
cuacuaaaaauacaaaauuu

SEQ ID NO: 9409 - RNA, 20 nt, Artificial Sequence
  spacer sequence GTCN PAM
cgaacuccuggccucaagug

SEQ ID NO: 9410 - RNA, 20 nt, Artificial Sequence
  spacer sequence GTCN PAM
ggcccccucguauggguuuu

SEQ ID NO: 9411 - RNA, 20 nt, Artificial Sequence
  spacer sequence GTCN PAM
cggaggagaaaacagggcua

SEQ ID NO: 9412 - RNA, 20 nt, Artificial Sequence
  spacer sequence GTCN PAM
ggugggaucagaacccaggc

SEQ ID NO: 9413 - RNA, 20 nt, Artificial Sequence
  spacer sequence GTCN PAM
gccaaaccugguuuaugcaa

SEQ ID NO: 9414 - RNA, 20 nt, Artificial Sequence
  spacer sequence GTCN PAM
gugccuucuggcccagccca

SEQ ID NO: 9415 - RNA, 20 nt, Artificial Sequence
  spacer sequence GTCN PAM
caaucccguccgugccuucu

SEQ ID NO: 9416 - RNA, 20 nt, Artificial Sequence
  spacer sequence GTCN PAM
ccuggggggccggaggggcu

SEQ ID NO: 9417 - RNA, 20 nt, Artificial Sequence
  spacer sequence GTCN PAM
agggccacacagcagcucag

SEQ ID NO: 9418 - RNA, 20 nt, Artificial Sequence
  spacer sequence GTCN PAM
gcagguguccagggccacac

SEQ ID NO: 9419 - RNA, 20 nt, Artificial Sequence
  spacer sequence GTCN PAM
agaggaggaggagggagaaa

SEQ ID NO: 9420 - RNA, 20 nt, Artificial Sequence
  spacer sequence GTCN PAM
gaguggaggcugcagacugu

SEQ ID NO: 9421 - RNA, 20 nt, Artificial Sequence
  spacer sequence GTCN PAM
gcagccuccacucugacucc

SEQ ID NO: 9422 - RNA, 20 nt, Artificial Sequence
  spacer sequence GTCN PAM
ugugucugugggcggggucu

SEQ ID NO: 9423 - RNA, 20 nt, Artificial Sequence
  spacer sequence GTCN PAM
gugggcggggucugcuugcc

SEQ ID NO: 9424 - RNA, 20 nt, Artificial Sequence
  spacer sequence GTCN PAM
gcuugccuggcggcacuugg

SEQ ID NO: 9425 - RNA, 20 nt, Artificial Sequence
  spacer sequence GTCN PAM
cccucggagccucccugagg

SEQ ID NO: 9426 - RNA, 20 nt, Artificial Sequence
  spacer sequence GTCN PAM
cugaacucugcuggggcuuu

SEQ ID NO: 9427 - RNA, 20 nt, Artificial Sequence
  spacer sequence GTCN PAM
gaggccagaggggccccucc

SEQ ID NO: 9428 - RNA, 20 nt, Artificial Sequence
  spacer sequence GTCN PAM
caccaggccccugacuggga

SEQ ID NO: 9429 - RNA, 20 nt, Artificial Sequence
  spacer sequence GTCN PAM
ggggccuggugggacggaua

SEQ ID NO: 9430 - RNA, 20 nt, Artificial Sequence
  spacer sequence GTCN PAM
ccaaaccagcccccagcccc

SEQ ID NO: 9431 - RNA, 20 nt, Artificial Sequence
  spacer sequence GTCN PAM
caggccggggcuggggacuu

SEQ ID NO: 9432 - RNA, 20 nt, Artificial Sequence
  spacer sequence GTCN PAM
ccagccccggccugagacuc

SEQ ID NO: 9433 - RNA, 20 nt, Artificial Sequence
  spacer sequence GTCN PAM
ucgggugggggugagguggu

SEQ ID NO: 9434 - RNA, 20 nt, Artificial Sequence
  spacer sequence GTCN PAM
cugcuggcugcccgggaucc

SEQ ID NO: 9435 - RNA, 20 nt, Artificial Sequence
  spacer sequence GTCN PAM
gccgguggagcuccgcccag

SEQ ID NO: 9436 - RNA, 20 nt, Artificial Sequence
  spacer sequence GTCN PAM
ucucagcuccuugggcuccu

SEQ ID NO: 9437 - RNA, 20 nt, Artificial Sequence
  spacer sequence GTCN PAM
cccuugagucaucucagcuc

SEQ ID NO: 9438 - RNA, 20 nt, Artificial Sequence
  spacer sequence GTCN PAM
gagucucggccccacaaggg

SEQ ID NO: 9439 - RNA, 20 nt, Artificial Sequence
  spacer sequence GTCN PAM
cggccccacaagggaaccuu

SEQ ID NO: 9440 - RNA, 20 nt, Artificial Sequence
  spacer sequence GTCN PAM
auaaacccaguuucauucug

SEQ ID NO: 9441 - RNA, 20 nt, Artificial Sequence
  spacer sequence GTCN PAM
gaaaacuggcuucagacacu

SEQ ID NO: 9442 - RNA, 20 nt, Artificial Sequence
  spacer sequence GTCN PAM
gaagccaguuuucagacuuu

SEQ ID NO: 9443 - RNA, 20 nt, Artificial Sequence
  spacer sequence GTCN PAM
ucgcugugugaccucagaug

SEQ ID NO: 9444 - RNA, 20 nt, Artificial Sequence
  spacer sequence GTCN PAM
cacagcgaugacagagcaag

SEQ ID NO: 9445 - RNA, 20 nt, Artificial Sequence
  spacer sequence GTCN PAM
cagcucccucucucgaaaac

SEQ ID NO: 9446 - RNA, 20 nt, Artificial Sequence
  spacer sequence GTCN PAM
aaaacgguuccaagguguug

SEQ ID NO: 9447 - RNA, 20 nt, Artificial Sequence
  spacer sequence GTCN PAM
caggacgccgagguccuuag

SEQ ID NO: 9448 - RNA, 20 nt, Artificial Sequence
  spacer sequence GTCN PAM
ugagacucuuccugcaacac

SEQ ID NO: 9449 - RNA, 20 nt, Artificial Sequence
  spacer sequence GTCN PAM
uuagccaccgccgggccuug

SEQ ID NO: 9450 - RNA, 20 nt, Artificial Sequence
  spacer sequence GTCN PAM
uggggcucuucccccgaggg

SEQ ID NO: 9451 - RNA, 20 nt, Artificial Sequence
  spacer sequence GTCN PAM
gccaaaaaaaccccuggauc

SEQ ID NO: 9452 - RNA, 20 nt, Artificial Sequence
  spacer sequence GTCN PAM
cagcuacuugggaggcugag

SEQ ID NO: 9453 - RNA, 20 nt, Artificial Sequence
  spacer sequence GTCN PAM
cccaggcuggagugcagugg

SEQ ID NO: 9454 - RNA, 20 nt, Artificial Sequence
  spacer sequence GTCN PAM
cccucugucgcccaggcugg

SEQ ID NO: 9455 - RNA, 20 nt, Artificial Sequence
  spacer sequence GTCN PAM
agcucuuggguucaaggcca

SEQ ID NO: 9456 - RNA, 20 nt, Artificial Sequence
  spacer sequence GTCN PAM
ggguuggguggggaugaagg

SEQ ID NO: 9457 - RNA, 20 nt, Artificial Sequence
  spacer sequence GTCN PAM
cccaguggggucgggguugg

SEQ ID NO: 9458 - RNA, 20 nt, Artificial Sequence
  spacer sequence GTCN PAM
gcccagccucgagcaggugc

SEQ ID NO: 9459 - RNA, 20 nt, Artificial Sequence
  spacer sequence GTCN PAM
acuccgggagaaagggagcu

SEQ ID NO: 9460 - RNA, 20 nt, Artificial Sequence
  spacer sequence GTCN PAM
gauguggguuauaaaucccg

SEQ ID NO: 9461 - RNA, 20 nt, Artificial Sequence
  spacer sequence GTCN PAM
guccacucacugggcaaaca

SEQ ID NO: 9462 - RNA, 20 nt, Artificial Sequence
  spacer sequence GTCN PAM
acucacugggcaaacauucc

SEQ ID NO: 9463 - RNA, 20 nt, Artificial Sequence
  spacer sequence GTCN PAM
acgcccugcacccuggagcu

SEQ ID NO: 9464 - RNA, 20 nt, Artificial Sequence
  spacer sequence GTCN PAM
gcauuccgcaaugagcccga

SEQ ID NO: 9465 - RNA, 20 nt, Artificial Sequence
  spacer sequence GTCN PAM
ggcucauugcggaaugcaga

SEQ ID NO: 9466 - RNA, 20 nt, Artificial Sequence
  spacer sequence GTCN PAM
gagcagcugggaugaguggu

SEQ ID NO: 9467 - RNA, 20 nt, Artificial Sequence
  spacer sequence GTCN PAM
gguauacagcaggcgccuaa

SEQ ID NO: 9468 - RNA, 20 nt, Artificial Sequence
  spacer sequence GTCN PAM
gcacccuuccugcagcccag

SEQ ID NO: 9469 - RNA, 20 nt, Artificial Sequence
  spacer sequence GTCN PAM
gcccaggccucgcucucgcc

SEQ ID NO: 9470 - RNA, 20 nt, Artificial Sequence
  spacer sequence GTCN PAM
acggaggaggaggccucggg

SEQ ID NO: 9471 - RNA, 20 nt, Artificial Sequence
  spacer sequence GTCN PAM
ggggagccaucugugcguca

SEQ ID NO: 9472 - RNA, 20 nt, Artificial Sequence
  spacer sequence GTCN PAM
cgcuuugggaggaagcucag

SEQ ID NO: 9473 - RNA, 20 nt, Artificial Sequence
  spacer sequence GTCN PAM
gaaacuaaaauaggggaaac

SEQ ID NO: 9474 - RNA, 20 nt, Artificial Sequence
  spacer sequence GTCN PAM
ugcaaucuuccgcgcguauc

SEQ ID NO: 9475 - RNA, 20 nt, Artificial Sequence
  spacer sequence GTCN PAM
cuccacuuuaugcuguuuga

SEQ ID NO: 9476 - RNA, 20 nt, Artificial Sequence
  spacer sequence GTCN PAM
agcucugucaccaggcugga

SEQ ID NO: 9477 - RNA, 20 nt, Artificial Sequence
  spacer sequence GTCN PAM
ccaggcuggagugcaauggu

SEQ ID NO: 9478 - RNA, 20 nt, Artificial Sequence
  spacer sequence GTCN PAM
cagcuacucaggaggcugag

SEQ ID NO: 9479 - RNA, 20 nt, Artificial Sequence
  spacer sequence GTCN PAM
cgaucuccugaccucgugau

SEQ ID NO: 9480 - RNA, 20 nt, Artificial Sequence
  spacer sequence GTCN PAM
ggagaucgagaccauccugg

SEQ ID NO: 9481 - RNA, 20 nt, Artificial Sequence
  spacer sequence GTCN PAM
gccaggcacaguggcucaca

SEQ ID NO: 9482 - RNA, 20 nt, Artificial Sequence
  spacer sequence GTCN PAM
guuuaaaaacaaaaaaaaau

SEQ ID NO: 9483 - RNA, 20 nt, Artificial Sequence
  spacer sequence GTCN PAM
cucccgggccaccaaggcua

SEQ ID NO: 9484 - RNA, 20 nt, Artificial Sequence
  spacer sequence GTCN PAM
ugcuuuguggggguuuguuu

SEQ ID NO: 9485 - RNA, 20 nt, Artificial Sequence
  spacer sequence GTCN PAM
caaaagaaaaacaaaccccc

SEQ ID NO: 9486 - RNA, 20 nt, Artificial Sequence
  spacer sequence GTCN PAM
uucucugucacccaggcugg

SEQ ID NO: 9487 - RNA, 20 nt, Artificial Sequence
  spacer sequence GTCN PAM
cccaggcuggagugcaaugg

SEQ ID NO: 9488 - RNA, 20 nt, Artificial Sequence
  spacer sequence GTCN PAM
gcugggcacaggggcucagg

SEQ ID NO: 9489 - RNA, 20 nt, Artificial Sequence
  spacer sequence GTCN PAM
ggagcucaagcuuuugagau

SEQ ID NO: 9490 - RNA, 20 nt, Artificial Sequence
  spacer sequence GTCN PAM
ucaggugaggcuuccuuucc

SEQ ID NO: 9491 - RNA, 20 nt, Artificial Sequence
  spacer sequence GTCN PAM
gcuggacacgguggcucacg

SEQ ID NO: 9492 - RNA, 20 nt, Artificial Sequence
  spacer sequence GTCN PAM
agcagacaucaucuuucaua

SEQ ID NO: 9493 - RNA, 20 nt, Artificial Sequence
  spacer sequence GTCN PAM
ggaguucaagaccagccugg

SEQ ID NO: 9494 - RNA, 20 nt, Artificial Sequence
  spacer sequence GTCN PAM
ugaacuccugacuucaggug

SEQ ID NO: 9495 - RNA, 20 nt, Artificial Sequence
  spacer sequence GTCN PAM
cuacuaacaauacaaaaauu

SEQ ID NO: 9496 - RNA, 20 nt, Artificial Sequence
  spacer sequence GTCN PAM
uggcugggcgcgguggcuca

SEQ ID NO: 9497 - RNA, 20 nt, Artificial Sequence
  spacer sequence GTCN PAM
ggagaucaagaccauccugg

SEQ ID NO: 9498 - RNA, 20 nt, Artificial Sequence
  spacer sequence GTCN PAM
ugaucuccugaccucgugau

SEQ ID NO: 9499 - RNA, 20 nt, Artificial Sequence
  spacer sequence GTCN PAM
cuacuaaaaauacaaaaaau

SEQ ID NO: 9500 - RNA, 20 nt, Artificial Sequence
  spacer sequence GTCN PAM
cagcucuagggaggcugagg

SEQ ID NO: 9501 - RNA, 20 nt, Artificial Sequence
  spacer sequence GTCN PAM
cccaggcuggagugcagugg

SEQ ID NO: 9502 - RNA, 20 nt, Artificial Sequence
  spacer sequence GTCN PAM
cacucugucgcccaggcugg

SEQ ID NO: 9503 - RNA, 20 nt, Artificial Sequence
  spacer sequence GTCN PAM
cagcuacucaggaggcugag

SEQ ID NO: 9504 - RNA, 20 nt, Artificial Sequence
  spacer sequence GTCN PAM
agccugugcaucgcagcgag

SEQ ID NO: 9505 - RNA, 20 nt, Artificial Sequence
  spacer sequence GTCN PAM
cgcugcgaugcacaggcugg

SEQ ID NO: 9506 - RNA, 20 nt, Artificial Sequence
  spacer sequence GTCN PAM
caaaacaaaagacaauaccu

SEQ ID NO: 9507 - RNA, 20 nt, Artificial Sequence
  spacer sequence GTCN PAM
uuuguuuugagacagagucu

SEQ ID NO: 9508 - RNA, 20 nt, Artificial Sequence
  spacer sequence GTCN PAM
uagguauugucuuuuguuuu

SEQ ID NO: 9509 - RNA, 20 nt, Artificial Sequence
  spacer sequence GTCN PAM
ggccuuguacccagcacccg

SEQ ID NO: 9510 - RNA, 20 nt, Artificial Sequence
  spacer sequence GTCN PAM
augggcuucagcagaggaag

SEQ ID NO: 9511 - RNA, 20 nt, Artificial Sequence
  spacer sequence GTCN PAM
cgaggcugccuguuucugcu

SEQ ID NO: 9512 - RNA, 20 nt, Artificial Sequence
  spacer sequence GTCN PAM
gguuuggguuggaggaagag

SEQ ID NO: 9513 - RNA, 20 nt, Artificial Sequence
  spacer sequence GTCN PAM
gguuuggguggaagaggagg

SEQ ID NO: 9514 - RNA, 20 nt, Artificial Sequence
  spacer sequence GTCN PAM
gguuugggguggaagaggag

SEQ ID NO: 9515 - RNA, 20 nt, Artificial Sequence
  spacer sequence GTCN PAM
gguuugggguagaagaggag

SEQ ID NO: 9516 - RNA, 20 nt, Artificial Sequence
  spacer sequence GTCN PAM
cacaccugcucgcaucgcuu

SEQ ID NO: 9517 - RNA, 20 nt, Artificial Sequence
  spacer sequence GTCN PAM
agguugcugcugggcucagu

SEQ ID NO: 9518 - RNA, 20 nt, Artificial Sequence
  spacer sequence GTCN PAM
gggugucacccgcucgcucc

SEQ ID NO: 9519 - RNA, 20 nt, Artificial Sequence
  spacer sequence GTCN PAM
cccgcucgcuccacggcccc

SEQ ID NO: 9520 - RNA, 20 nt, Artificial Sequence
  spacer sequence GTCN PAM
cgcugggcccagguggggcc

SEQ ID NO: 9521 - RNA, 20 nt, Artificial Sequence
  spacer sequence GTCN PAM
acgguguuccuuugcccauc

SEQ ID NO: 9522 - RNA, 20 nt, Artificial Sequence
  spacer sequence GTCN PAM
ccauaaagccaggaugggca

SEQ ID NO: 9523 - RNA, 20 nt, Artificial Sequence
  spacer sequence GTCN PAM
cagaugggacgaggugucca

SEQ ID NO: 9524 - RNA, 20 nt, Artificial Sequence
  spacer sequence GTCN PAM
caucugagacaacauccccg

SEQ ID NO: 9525 - RNA, 20 nt, Artificial Sequence
  spacer sequence GTCN PAM
agcugggcagggcagggugg

SEQ ID NO: 9526 - RNA, 20 nt, Artificial Sequence
  spacer sequence GTCN PAM
guccuucucucugggccuca

SEQ ID NO: 9527 - RNA, 20 nt, Artificial Sequence
  spacer sequence GTCN PAM
uucucucugggccucaguuu

SEQ ID NO: 9528 - RNA, 20 nt, Artificial Sequence
  spacer sequence GTCN PAM
aauggagaaacugaggccca

SEQ ID NO: 9529 - RNA, 20 nt, Artificial Sequence
  spacer sequence GTCN PAM
gauggaaaaaucccacacca

SEQ ID NO: 9530 - RNA, 20 nt, Artificial Sequence
  spacer sequence GTCN PAM
cagagugagcucagggugga

SEQ ID NO: 9531 - RNA, 20 nt, Artificial Sequence
  spacer sequence GTCN PAM
ccugugcacugagccuuucc

SEQ ID NO: 9532 - RNA, 20 nt, Artificial Sequence
  spacer sequence GTCN PAM
cgaacuccugagcucaggug

SEQ ID NO: 9533 - RNA, 20 nt, Artificial Sequence
  spacer sequence GTCN PAM
caccauguuggccagguugg

SEQ ID NO: 9534 - RNA, 20 nt, Artificial Sequence
  spacer sequence GTCN PAM
cuacuaaaaauacaaaaaau

SEQ ID NO: 9535 - RNA, 20 nt, Artificial Sequence
  spacer sequence GTCN PAM
ggcuaauuuuuuguauuuuu

SEQ ID NO: 9536 - RNA, 20 nt, Artificial Sequence
  spacer sequence GTCN PAM
gcucacugcaaccucugcuu

SEQ ID NO: 9537 - RNA, 20 nt, Artificial Sequence
  spacer sequence GTCN PAM
cgcucuguugcccagccugg

SEQ ID NO: 9538 - RNA, 20 nt, Artificial Sequence
  spacer sequence GTCN PAM
agcucagccuugauuuuuuu

SEQ ID NO: 9539 - RNA, 20 nt, Artificial Sequence
  spacer sequence GTCN PAM
gggagauaaggugggcaggg

SEQ ID NO: 9540 - RNA, 20 nt, Artificial Sequence
  spacer sequence GTCN PAM
cgguuacuaccccaacaacu

SEQ ID NO: 9541 - RNA, 20 nt, Artificial Sequence
  spacer sequence GTCN PAM
agcaagcuguacccacuggg

SEQ ID NO: 9542 - RNA, 20 nt, Artificial Sequence
  spacer sequence GTCN PAM
ccagcaauucacuaucucau

SEQ ID NO: 9543 - RNA, 20 nt, Artificial Sequence
  spacer sequence GTCN PAM
uguuaggcugauggaaugag

SEQ ID NO: 9544 - RNA, 20 nt, Artificial Sequence
  spacer sequence GTCN PAM
caucuucugcauuaauugua

SEQ ID NO: 9545 - RNA, 20 nt, Artificial Sequence
  spacer sequence GTCN PAM
cagggucucaugucauuggc

SEQ ID NO: 9546 - RNA, 20 nt, Artificial Sequence
  spacer sequence GTCN PAM
caugucauuggcuagacugg

SEQ ID NO: 9547 - RNA, 20 nt, Artificial Sequence
  spacer sequence GTCN PAM
uuggcuagacugggucacau

SEQ ID NO: 9548 - RNA, 20 nt, Artificial Sequence
  spacer sequence GTCN PAM
agccaaugacaugagacccu

SEQ ID NO: 9549 - RNA, 20 nt, Artificial Sequence
  spacer sequence GTCN PAM
caugcucaucucugaaccaa

SEQ ID NO: 9550 - RNA, 20 nt, Artificial Sequence
  spacer sequence GTCN PAM
agccagugagagcauuucac

SEQ ID NO: 9551 - RNA, 20 nt, Artificial Sequence
  spacer sequence GTCN PAM
cuuacccaucuuugaaccaa

SEQ ID NO: 9552 - RNA, 20 nt, Artificial Sequence
  spacer sequence GTCN PAM
cuuacccaucccugaaccaa

SEQ ID NO: 9553 - RNA, 20 nt, Artificial Sequence
  spacer sequence GTCN PAM
gaguagcccauucucuggcc

SEQ ID NO: 9554 - RNA, 20 nt, Artificial Sequence
  spacer sequence GTCN PAM
aaucucugugauuggcuaag

SEQ ID NO: 9555 - RNA, 20 nt, Artificial Sequence
  spacer sequence GTCN PAM
cccaaagggcaaagggucca

SEQ ID NO: 9556 - RNA, 20 nt, Artificial Sequence
  spacer sequence GTCN PAM
gagcaccuagggagaggaac

SEQ ID NO: 9557 - RNA, 20 nt, Artificial Sequence
  spacer sequence GTCN PAM
ccaccccacgggaggaaggc

SEQ ID NO: 9558 - RNA, 20 nt, Artificial Sequence
  spacer sequence GTCN PAM
uggccucagccuuccucccg

SEQ ID NO: 9559 - RNA, 20 nt, Artificial Sequence
  spacer sequence GTCN PAM
aucucuuccggggucuuggc

SEQ ID NO: 9560 - RNA, 20 nt, Artificial Sequence
  spacer sequence GTCN PAM
cgcgguccaucucuuccggg

SEQ ID NO: 9561 - RNA, 20 nt, Artificial Sequence
  spacer sequence GTCN PAM
ccauccagcaccaggccggu

SEQ ID NO: 9562 - RNA, 20 nt, Artificial Sequence
  spacer sequence GTCN PAM
gcggcucauccuggccccag

SEQ ID NO: 9563 - RNA, 20 nt, Artificial Sequence
  spacer sequence GTCN PAM
gugggccaugucugcggcuc

SEQ ID NO: 9564 - RNA, 20 nt, Artificial Sequence
  spacer sequence GTCN PAM
uacagcgugcaugccuacac

SEQ ID NO: 9565 - RNA, 20 nt, Artificial Sequence
  spacer sequence GTCN PAM
ccacgggggcuccacucgga

SEQ ID NO: 9566 - RNA, 20 nt, Artificial Sequence
  spacer sequence GTCN PAM
cuggugggcaucccuggcgc

SEQ ID NO: 9567 - RNA, 20 nt, Artificial Sequence
  spacer sequence GTCN PAM
aacaugggcacuccgcccag

SEQ ID NO: 9568 - RNA, 20 nt, Artificial Sequence
  spacer sequence GTCN PAM
ucugggcggagugcccaugu

SEQ ID NO: 9569 - RNA, 20 nt, Artificial Sequence
  spacer sequence GTCN PAM
uccccguccucugggcggag

SEQ ID NO: 9570 - RNA, 20 nt, Artificial Sequence
  spacer sequence GTCN PAM
ucaucuccuuguccuccccg

SEQ ID NO: 9571 - RNA, 20 nt, Artificial Sequence
  spacer sequence GTCN PAM
ccagcauccaggcgguaggu

SEQ ID NO: 9572 - RNA, 20 nt, Artificial Sequence
  spacer sequence GTCN PAM
gcguccccagcauccaggcg

SEQ ID NO: 9573 - RNA, 20 nt, Artificial Sequence
  spacer sequence GTCN PAM
cacagccuccuggggucagc

SEQ ID NO: 9574 - RNA, 20 nt, Artificial Sequence
  spacer sequence GTCN PAM
uccagggccaggcagucagg

SEQ ID NO: 9575 - RNA, 20 nt, Artificial Sequence
  spacer sequence GTCN PAM
ggaagagcagcaccguggcc

SEQ ID NO: 9576 - RNA, 20 nt, Artificial Sequence
  spacer sequence GTCN PAM
ggagugcccuggagcguggc

SEQ ID NO: 9577 - RNA, 20 nt, Artificial Sequence
  spacer sequence GTCN PAM
ccguggucaggagugcccug

SEQ ID NO: 9578 - RNA, 20 nt, Artificial Sequence
  spacer sequence GTCN PAM
uggggucuccguggucagga

SEQ ID NO: 9579 - RNA, 20 nt, Artificial Sequence
  spacer sequence GTCN PAM
acgccccuggaggagaacgu

SEQ ID NO: 9580 - RNA, 20 nt, Artificial Sequence
  spacer sequence GTCN PAM
accacguucuccuccagggg

SEQ ID NO: 9581 - RNA, 20 nt, Artificial Sequence
  spacer sequence GTCN PAM
aucugcucccugucaaccac

SEQ ID NO: 9582 - RNA, 20 nt, Artificial Sequence
  spacer sequence GTCN PAM
cgcugccaggaagucaaucu

SEQ ID NO: 9583 - RNA, 20 nt, Artificial Sequence
  spacer sequence GTCN PAM
ggagcaggcgaacaaggggg

SEQ ID NO: 9584 - RNA, 20 nt, Artificial Sequence
  spacer sequence GTCN PAM
cccuggccggggagcuauga

SEQ ID NO: 9585 - RNA, 20 nt, Artificial Sequence
  spacer sequence GTCN PAM
ccggggacccccaaggagac

SEQ ID NO: 9586 - RNA, 20 nt, Artificial Sequence
  spacer sequence GTCN PAM
ccggggacuccacugaggcc

SEQ ID NO: 9587 - RNA, 20 nt, Artificial Sequence
  spacer sequence GTCN PAM
ccuuggggguccccggggac

SEQ ID NO: 9588 - RNA, 20 nt, Artificial Sequence
  spacer sequence GTCN PAM
ggcucaggagcgugaggcag

SEQ ID NO: 9589 - RNA, 20 nt, Artificial Sequence
  spacer sequence GTCN PAM
gccucacgcuccugagccag

SEQ ID NO: 9590 - RNA, 20 nt, Artificial Sequence
  spacer sequence GTCN PAM
guugccugccgaagcccccu

SEQ ID NO: 9591 - RNA, 20 nt, Artificial Sequence
  spacer sequence GTCN PAM
gcagcggccugguggggauu

SEQ ID NO: 9592 - RNA, 20 nt, Artificial Sequence
  spacer sequence GTCN PAM
cucuacgugcagcgggacau

SEQ ID NO: 9593 - RNA, 20 nt, Artificial Sequence
  spacer sequence GTCN PAM
cgcugcacguagagggacgg

SEQ ID NO: 9594 - RNA, 20 nt, Artificial Sequence
  spacer sequence GTCN PAM
ccuguacuaugucccgcugc

SEQ ID NO: 9595 - RNA, 20 nt, Artificial Sequence
  spacer sequence GTCN PAM
uccucacgcugugucuccug

SEQ ID NO: 9596 - RNA, 20 nt, Artificial Sequence
  spacer sequence GTCN PAM
acacccgacugggucucgga

SEQ ID NO: 9597 - RNA, 20 nt, Artificial Sequence
  spacer sequence GTCN PAM
gguguggacgcccggcccac

SEQ ID NO: 9598 - RNA, 20 nt, Artificial Sequence
  spacer sequence GTCN PAM
cggaggguccccagcccgga

SEQ ID NO: 9599 - RNA, 20 nt, Artificial Sequence
  spacer sequence GTCN PAM
ccagcccggacuccggagag

SEQ ID NO: 9600 - RNA, 20 nt, Artificial Sequence
  spacer sequence GTCN PAM
gggcuggggacccuccgaga

SEQ ID NO: 9601 - RNA, 20 nt, Artificial Sequence
  spacer sequence GTCN PAM
ccgaggcaucucucagaauc

SEQ ID NO: 9602 - RNA, 20 nt, Artificial Sequence
  spacer sequence GTCN PAM
ugcggugggaguacuuccgc

SEQ ID NO: 9603 - RNA, 20 nt, Artificial Sequence
  spacer sequence GTCN PAM
ucugcgguucagggccccag

SEQ ID NO: 9604 - RNA, 20 nt, Artificial Sequence
  spacer sequence GTCN PAM
ggggcccugaaccgcagagg

SEQ ID NO: 9605 - RNA, 20 nt, Artificial Sequence
  spacer sequence GTCN PAM
cccaugucuggggcugggag

SEQ ID NO: 9606 - RNA, 20 nt, Artificial Sequence
  spacer sequence GTCN PAM
ggggcugggagguggcuggg

SEQ ID NO: 9607 - RNA, 20 nt, Artificial Sequence
  spacer sequence GTCN PAM
cagucaucugaucugcugga

SEQ ID NO: 9608 - RNA, 20 nt, Artificial Sequence
  spacer sequence GTCN PAM
ucugaucugcuggaaaggga

SEQ ID NO: 9609 - RNA, 20 nt, Artificial Sequence
  spacer sequence GTCN PAM
ugcgccgggagcaagaggug

SEQ ID NO: 9610 - RNA, 20 nt, Artificial Sequence
  spacer sequence GTCN PAM
ucuccccaacgccagaugag

SEQ ID NO: 9611 - RNA, 20 nt, Artificial Sequence
  spacer sequence GTCN PAM
gaguucucaucuggcguugg

SEQ ID NO: 9612 - RNA, 20 nt, Artificial Sequence
  spacer sequence GTCN PAM
gagucucccuucuucagccc

SEQ ID NO: 9613 - RNA, 20 nt, Artificial Sequence
  spacer sequence GTCN PAM
cccuucuucagccccaucca

SEQ ID NO: 9614 - RNA, 20 nt, Artificial Sequence
  spacer sequence GTCN PAM
acgccacguuugaguguagg

SEQ ID NO: 9615 - RNA, 20 nt, Artificial Sequence
  spacer sequence GTCN PAM
acuggaucuuccacugucca

SEQ ID NO: 9616 - RNA, 20 nt, Artificial Sequence
  spacer sequence GTCN PAM
ggaacccgucucugcagagg

SEQ ID NO: 9617 - RNA, 20 nt, Artificial Sequence
  spacer sequence GTCN PAM
cugcagaggccaggcugagg

SEQ ID NO: 9618 - RNA, 20 nt, Artificial Sequence
  spacer sequence GTCN PAM
gaccagagcucccacacagc

SEQ ID NO: 9619 - RNA, 20 nt, Artificial Sequence
  spacer sequence GTCN PAM
gcccaggccuuucugcccug

SEQ ID NO: 9620 - RNA, 20 nt, Artificial Sequence
  spacer sequence GTCN PAM
gagggguugaugccagcgua

SEQ ID NO: 9621 - RNA, 20 nt, Artificial Sequence
  spacer sequence GTCN PAM
ucgugcccaggagcauacuc

SEQ ID NO: 9622 - RNA, 20 nt, Artificial Sequence
  spacer sequence GTCN PAM
uucccccccacaucugugcc

SEQ ID NO: 9623 - RNA, 20 nt, Artificial Sequence
  spacer sequence GTCN PAM
ucucaauugguagugucugc

SEQ ID NO: 9624 - RNA, 20 nt, Artificial Sequence
  spacer sequence GTCN PAM
gcucaggguggauuuugcug

SEQ ID NO: 9625 - RNA, 20 nt, Artificial Sequence
  spacer sequence GTCN PAM
gccaugggcauggauuagga

SEQ ID NO: 9626 - RNA, 20 nt, Artificial Sequence
  spacer sequence GTCN PAM
cagcuacucgggaggcugag

SEQ ID NO: 9627 - RNA, 20 nt, Artificial Sequence
  spacer sequence GTCN PAM
gaaacagaggaggggauccu

SEQ ID NO: 9628 - RNA, 20 nt, Artificial Sequence
  spacer sequence GTCN PAM
uggaagccauacgggugacc

SEQ ID NO: 9629 - RNA, 20 nt, Artificial Sequence
  spacer sequence GTCN PAM
cccguauggcuuccaggacc

SEQ ID NO: 9630 - RNA, 20 nt, Artificial Sequence
  spacer sequence GTCN PAM
caagaacgccauggcagagc

SEQ ID NO: 9631 - RNA, 20 nt, Artificial Sequence
  spacer sequence GTCN PAM
uccuccucacuggcguagau

SEQ ID NO: 9632 - RNA, 20 nt, Artificial Sequence
  spacer sequence GTCN PAM
cauuucauccccaaaagcuu

SEQ ID NO: 9633 - RNA, 20 nt, Artificial Sequence
  spacer sequence GTCN PAM
uagaagcagaaagaaucagc

SEQ ID NO: 9634 - RNA, 20 nt, Artificial Sequence
  spacer sequence GTCN PAM
aagaaagaaagagacccgcu

SEQ ID NO: 9635 - RNA, 20 nt, Artificial Sequence
  spacer sequence GTCN PAM
cuuucuuucuuagacccagg

SEQ ID NO: 9636 - RNA, 20 nt, Artificial Sequence
  spacer sequence GTCN PAM
cucaacaagcaucagcuaag

SEQ ID NO: 9637 - RNA, 20 nt, Artificial Sequence
  spacer sequence GTCN PAM
gucacucaacaagcaucagc

SEQ ID NO: 9638 - RNA, 20 nt, Artificial Sequence
  spacer sequence GTCN PAM
cugcucugcccagauguagc

SEQ ID NO: 9639 - RNA, 20 nt, Artificial Sequence
  spacer sequence GTCN PAM
ucagggagaccccagucuga

SEQ ID NO: 9640 - RNA, 20 nt, Artificial Sequence
  spacer sequence GTCN PAM
cccugaagacaggggcucuc

SEQ ID NO: 9641 - RNA, 20 nt, Artificial Sequence
  spacer sequence GTCN PAM
gauggaggaggcaucugccu

SEQ ID NO: 9642 - RNA, 20 nt, Artificial Sequence
  spacer sequence GTCN PAM
cauccuaaauuuguuuuuuu

SEQ ID NO: 9643 - RNA, 20 nt, Artificial Sequence
  spacer sequence GTCN PAM
caaaaaaaaaacaaaauaca

SEQ ID NO: 9644 - RNA, 20 nt, Artificial Sequence
  spacer sequence GTCN PAM
cgcucugucgcccaggcugg

SEQ ID NO: 9645 - RNA, 20 nt, Artificial Sequence
  spacer sequence GTCN PAM
cccaggcuggagugcaguga

SEQ ID NO: 9646 - RNA, 20 nt, Artificial Sequence
  spacer sequence GTCN PAM
ggaguuugagaccagccugg

SEQ ID NO: 9647 - RNA, 20 nt, Artificial Sequence
  spacer sequence GTCN PAM
cuacuaaaaauacaaaaaau

SEQ ID NO: 9648 - RNA, 20 nt, Artificial Sequence
  spacer sequence GTCN PAM
ggugugguggugggcgccug

SEQ ID NO: 9649 - RNA, 20 nt, Artificial Sequence
  spacer sequence GTCN PAM
cuacuaaaaguacaaaauua

SEQ ID NO: 9650 - RNA, 20 nt, Artificial Sequence
  spacer sequence GTCN PAM
cgaacuccugacuccaggug

SEQ ID NO: 9651 - RNA, 20 nt, Artificial Sequence
  spacer sequence GTCN PAM
ggaguucgagaccagccugg

SEQ ID NO: 9652 - RNA, 20 nt, Artificial Sequence
  spacer sequence GTCN PAM
uguuuuuuuaagauuuaguu

SEQ ID NO: 9653 - RNA, 20 nt, Artificial Sequence
  spacer sequence GTCN PAM
cucacaccuguaaucccacc

SEQ ID NO: 9654 - RNA, 20 nt, Artificial Sequence
  spacer sequence GTCN PAM
ggagaucgagaccagccugg

SEQ ID NO: 9655 - RNA, 20 nt, Artificial Sequence
  spacer sequence GTCN PAM
cgaucuccugaccuugugau

SEQ ID NO: 9656 - RNA, 20 nt, Artificial Sequence
  spacer sequence GTCN PAM
cuacuaaaaauacaaaaauu

SEQ ID NO: 9657 - RNA, 20 nt, Artificial Sequence
  spacer sequence GTCN PAM
cccaggcuggagugccgugg

SEQ ID NO: 9658 - RNA, 20 nt, Artificial Sequence
  spacer sequence GTCN PAM
ugcucugucgcccaggcugg

SEQ ID NO: 9659 - RNA, 20 nt, Artificial Sequence
  spacer sequence GTCN PAM
gccccuuggaaaaucagaca

SEQ ID NO: 9660 - RNA, 20 nt, Artificial Sequence
  spacer sequence GTCN PAM
gauuuuccaaggggcugacu

SEQ ID NO: 9661 - RNA, 20 nt, Artificial Sequence
  spacer sequence GTCN PAM
gcucagcaggcagaauucug

SEQ ID NO: 9662 - RNA, 20 nt, Artificial Sequence
  spacer sequence GTCN PAM
aaaccucucacagaguaacu

SEQ ID NO: 9663 - RNA, 20 nt, Artificial Sequence
  spacer sequence GTCN PAM
ggaaggucugcggacaucac

SEQ ID NO: 9664 - RNA, 20 nt, Artificial Sequence
  spacer sequence GTCN PAM
gcggacaucacagcaaucac

SEQ ID NO: 9665 - RNA, 20 nt, Artificial Sequence
  spacer sequence GTCN PAM
gcagaccuuccagacacgcu

SEQ ID NO: 9666 - RNA, 20 nt, Artificial Sequence
  spacer sequence GTCN PAM
gcuggcgcucgcugcuagca

SEQ ID NO: 9667 - RNA, 20 nt, Artificial Sequence
  spacer sequence GTCN PAM
caaaaaaccaaacaaacaaa

SEQ ID NO: 9668 - RNA, 20 nt, Artificial Sequence
  spacer sequence GTCN PAM
cacgcuguugcccaggcugg

SEQ ID NO: 9669 - RNA, 20 nt, Artificial Sequence
  spacer sequence GTCN PAM
cuacuaaaaauacaaaaauu

SEQ ID NO: 9670 - RNA, 20 nt, Artificial Sequence
  spacer sequence GTCN PAM
ggaacuccagaccucagaug

SEQ ID NO: 9671 - RNA, 20 nt, Artificial Sequence
  spacer sequence GTCN PAM
ggaguuccagaccauccugc

SEQ ID NO: 9672 - RNA, 20 nt, Artificial Sequence
  spacer sequence GTCN PAM
cacgccuguaaccccagcac

SEQ ID NO: 9673 - RNA, 20 nt, Artificial Sequence
  spacer sequence GTCN PAM
ggaguuugagaccagcguga

SEQ ID NO: 9674 - RNA, 20 nt, Artificial Sequence
  spacer sequence GTCN PAM
caaacuccugaccucaggug

SEQ ID NO: 9675 - RNA, 20 nt, Artificial Sequence
  spacer sequence GTCN PAM
cgcuggucucaaacuccuga

SEQ ID NO: 9676 - RNA, 20 nt, Artificial Sequence
  spacer sequence GTCN PAM
cuaggaaauacaaaaaauua

SEQ ID NO: 9677 - RNA, 20 nt, Artificial Sequence
  spacer sequence GTCN PAM
guaaucccagcuacucggga

SEQ ID NO: 9678 - RNA, 20 nt, Artificial Sequence
  spacer sequence GTCN PAM
uuaucuguaagugaagucgc

SEQ ID NO: 9679 - RNA, 20 nt, Artificial Sequence
  spacer sequence GTCN PAM
ccacauugacaucccugccc

SEQ ID NO: 9680 - RNA, 20 nt, Artificial Sequence
  spacer sequence GTCN PAM
auguggcgacuucacuuaca

SEQ ID NO: 9681 - RNA, 20 nt, Artificial Sequence
  spacer sequence GTCN PAM
cccagggcagggaugucaau

SEQ ID NO: 9682 - RNA, 20 nt, Artificial Sequence
  spacer sequence GTCN PAM
ugagggucaccgggcaccug

SEQ ID NO: 9683 - RNA, 20 nt, Artificial Sequence
  spacer sequence GTCN PAM
ccgggcaccuggugaaaauc

SEQ ID NO: 9684 - RNA, 20 nt, Artificial Sequence
  spacer sequence GTCN PAM
ggagaucaagaccauccugg

SEQ ID NO: 9685 - RNA, 20 nt, Artificial Sequence
  spacer sequence GTCN PAM
ugaucuccugaccucgugau

SEQ ID NO: 9686 - RNA, 20 nt, Artificial Sequence
  spacer sequence GTCN PAM
cuacuaaaaauacaaacaau

SEQ ID NO: 9687 - RNA, 20 nt, Artificial Sequence
  spacer sequence GTCN PAM
gccucccgaguagcugggau

SEQ ID NO: 9688 - RNA, 20 nt, Artificial Sequence
  spacer sequence GTCN PAM
cccaggcuggagugcagugg

SEQ ID NO: 9689 - RNA, 20 nt, Artificial Sequence
  spacer sequence GTCN PAM
cgcucugucgcccaggcugg

SEQ ID NO: 9690 - RNA, 20 nt, Artificial Sequence
  spacer sequence GTCN PAM
caaaaaaaaaaaaaaaaaaa

SEQ ID NO: 9691 - RNA, 20 nt, Artificial Sequence
  spacer sequence GTCN PAM
gaaccaacauucauucuuuu

SEQ ID NO: 9692 - RNA, 20 nt, Artificial Sequence
  spacer sequence GTCN PAM
ccagacaaugacuuccaugu

SEQ ID NO: 9693 - RNA, 20 nt, Artificial Sequence
  spacer sequence GTCN PAM
ggugacaauucguuaauuua

SEQ ID NO: 9694 - RNA, 20 nt, Artificial Sequence
  spacer sequence GTCN PAM
uugucuggugacaauucguu

SEQ ID NO: 9695 - RNA, 20 nt, Artificial Sequence
  spacer sequence GTCN PAM
cauggaagucauugucuggu

SEQ ID NO: 9696 - RNA, 20 nt, Artificial Sequence
  spacer sequence GTCN PAM
aggcuuucaaggagcacuaa

SEQ ID NO: 9697 - RNA, 20 nt, Artificial Sequence
  spacer sequence GTCN PAM
uggccucccgaagugcuggg

SEQ ID NO: 9698 - RNA, 20 nt, Artificial Sequence
  spacer sequence GTCN PAM
ggaguucaagaccagccugg

SEQ ID NO: 9699 - RNA, 20 nt, Artificial Sequence
  spacer sequence GTCN PAM
ugaacuccugaccucaagug

SEQ ID NO: 9700 - RNA, 20 nt, Artificial Sequence
  spacer sequence GTCN PAM
cuacuuaaaaaaaaaaaaaa

SEQ ID NO: 9701 - RNA, 20 nt, Artificial Sequence
  spacer sequence GTCN PAM
cccaggcuggagugcaaugg

SEQ ID NO: 9702 - RNA, 20 nt, Artificial Sequence
  spacer sequence GTCN PAM
uccucugucacccaggcugg

SEQ ID NO: 9703 - RNA, 20 nt, Artificial Sequence
  spacer sequence GTCN PAM
ucucuacaaauaauuuuuuu

SEQ ID NO: 9704 - RNA, 20 nt, Artificial Sequence
  spacer sequence GTCN PAM
cacucugucaucucuacaaa

SEQ ID NO: 9705 - RNA, 20 nt, Artificial Sequence
  spacer sequence GTCN PAM
ugaacuccucaagugauccu

SEQ ID NO: 9706 - RNA, 20 nt, Artificial Sequence
  spacer sequence GTCN PAM
gggcugggcucgauggcuca

SEQ ID NO: 9707 - RNA, 20 nt, Artificial Sequence
  spacer sequence GTCN PAM
ggagauugagaccauccugg

SEQ ID NO: 9708 - RNA, 20 nt, Artificial Sequence
  spacer sequence GTCN PAM
caaucuccugaccucgugau

SEQ ID NO: 9709 - RNA, 20 nt, Artificial Sequence
  spacer sequence GTCN PAM
cuacuaaaaauacaaaaaaa

SEQ ID NO: 9710 - RNA, 20 nt, Artificial Sequence
  spacer sequence GTCN PAM
cagcuacucaggaggcugag

SEQ ID NO: 9711 - RNA, 20 nt, Artificial Sequence
  spacer sequence GTCN PAM
cccaggcuggagugcagugg

SEQ ID NO: 9712 - RNA, 20 nt, Artificial Sequence
  spacer sequence GTCN PAM
cacucugucgcccaggcugg

SEQ ID NO: 9713 - RNA, 20 nt, Artificial Sequence
  spacer sequence GTCN PAM
caaaaauaaaaauaaaaaua

SEQ ID NO: 9714 - RNA, 20 nt, Artificial Sequence
  spacer sequence GTCN PAM
gccucacaggcgcccucugg

SEQ ID NO: 9715 - RNA, 20 nt, Artificial Sequence
  spacer sequence GTCN PAM
cugcucugcccacagcccuc

SEQ ID NO: 9716 - RNA, 20 nt, Artificial Sequence
  spacer sequence GTCN PAM
uccgugcagcccacaaggcu

SEQ ID NO: 9717 - RNA, 20 nt, Artificial Sequence
  spacer sequence GTCN PAM
ccucucuccucucccuccuc

SEQ ID NO: 9718 - RNA, 20 nt, Artificial Sequence
  spacer sequence GTCN PAM
acucucccuccucccugucu

SEQ ID NO: 9719 - RNA, 20 nt, Artificial Sequence
  spacer sequence GTCN PAM
cccccuccuccucugcccag

SEQ ID NO: 9720 - RNA, 20 nt, Artificial Sequence
  spacer sequence GTCN PAM
ccucucuccucucccuccuc

SEQ ID NO: 9721 - RNA, 20 nt, Artificial Sequence
  spacer sequence GTCN PAM
ccucucuccucucccuccuc

SEQ ID NO: 9722 - RNA, 20 nt, Artificial Sequence
  spacer sequence GTCN PAM
ccucucuccucucccuccuc

SEQ ID NO: 9723 - RNA, 20 nt, Artificial Sequence
  spacer sequence GTCN PAM
ccucucuccucucccuccuc

SEQ ID NO: 9724 - RNA, 20 nt, Artificial Sequence
  spacer sequence GTCN PAM
cccccuccuccucugcccag

SEQ ID NO: 9725 - RNA, 20 nt, Artificial Sequence
  spacer sequence GTCN PAM
ccucuccucuccuuccuccc

SEQ ID NO: 9726 - RNA, 20 nt, Artificial Sequence
  spacer sequence GTCN PAM
cccccucccuccucccuguc

SEQ ID NO: 9727 - RNA, 20 nt, Artificial Sequence
  spacer sequence GTCN PAM
cccccuccuccucugcccag

SEQ ID NO: 9728 - RNA, 20 nt, Artificial Sequence
  spacer sequence GTCN PAM
ccaacuccugagcucaagug

SEQ ID NO: 9729 - RNA, 20 nt, Artificial Sequence
  spacer sequence GTCN PAM
cucuacguuggccaggcuag

SEQ ID NO: 9730 - RNA, 20 nt, Artificial Sequence
  spacer sequence GTCN PAM
cccuaaguagagauggaguc

SEQ ID NO: 9731 - RNA, 20 nt, Artificial Sequence
  spacer sequence GTCN PAM
ugcucugucgcacaggcuag

SEQ ID NO: 9732 - RNA, 20 nt, Artificial Sequence
  spacer sequence GTCN PAM
cacaggcuagagugcagugg

SEQ ID NO: 9733 - RNA, 20 nt, Artificial Sequence
  spacer sequence GTCN PAM
cuacuaaaaauacaaaauua

SEQ ID NO: 9734 - RNA, 20 nt, Artificial Sequence
  spacer sequence GTCN PAM
cgaacuccugacugcaggug

SEQ ID NO: 9735 - RNA, 20 nt, Artificial Sequence
  spacer sequence GTCN PAM
ggguccccaggacaccaacc

SEQ ID NO: 9736 - RNA, 20 nt, Artificial Sequence
  spacer sequence GTCN PAM
ccaggacaccaaccccaagc

SEQ ID NO: 9737 - RNA, 20 nt, Artificial Sequence
  spacer sequence GTCN PAM
uggggacccugacugggggg

SEQ ID NO: 9738 - RNA, 20 nt, Artificial Sequence
  spacer sequence GTCN PAM
cgcacggggcagguguggag

SEQ ID NO: 9739 - RNA, 20 nt, Artificial Sequence
  spacer sequence GTCN PAM
ggcccccagcuggccaugcc

SEQ ID NO: 9740 - RNA, 20 nt, Artificial Sequence
  spacer sequence GTCN PAM
ugaagagcuugaggacuggc

SEQ ID NO: 9741 - RNA, 20 nt, Artificial Sequence
  spacer sequence GTCN PAM
ucaagcucuucaggacuguc

SEQ ID NO: 9742 - RNA, 20 nt, Artificial Sequence
  spacer sequence GTCN PAM
cucccuggcagauccccaga

SEQ ID NO: 9743 - RNA, 20 nt, Artificial Sequence
  spacer sequence GTCN PAM
ccugauggccucggugcuau

SEQ ID NO: 9744 - RNA, 20 nt, Artificial Sequence
  spacer sequence GTCN PAM
ccuacucaggccaggaucac

SEQ ID NO: 9745 - RNA, 20 nt, Artificial Sequence
  spacer sequence GTCN PAM
cuacuaaaaauacaaaaauu

SEQ ID NO: 9746 - RNA, 20 nt, Artificial Sequence
  spacer sequence GTCN PAM
cagcuacucgggaggcugag

SEQ ID NO: 9747 - RNA, 20 nt, Artificial Sequence
  spacer sequence GTCN PAM
ggagauugagaccauccuga

SEQ ID NO: 9748 - RNA, 20 nt, Artificial Sequence
  spacer sequence GTCN PAM
caaucuccugaccuugugau

SEQ ID NO: 9749 - RNA, 20 nt, Artificial Sequence
  spacer sequence GTCN PAM
ggauggucucaaucuccuga

SEQ ID NO: 9750 - RNA, 20 nt, Artificial Sequence
  spacer sequence GTCN PAM
cuacuaaaauacaaaaaauu

SEQ ID NO: 9751 - RNA, 20 nt, Artificial Sequence
  spacer sequence GTCN PAM
ccaugcccagcuaauuuuuu

SEQ ID NO: 9752 - RNA, 20 nt, Artificial Sequence
  spacer sequence GTCN PAM
cgcucugucacccaggcugg

SEQ ID NO: 9753 - RNA, 20 nt, Artificial Sequence
  spacer sequence GTCN PAM
cccaggcuggagugcagcgg

SEQ ID NO: 9754 - RNA, 20 nt, Artificial Sequence
  spacer sequence GTCN PAM
ggcuuagcaggaaacagggu

SEQ ID NO: 9755 - RNA, 20 nt, Artificial Sequence
  spacer sequence GTCN PAM
acucugggugcugccuggac

SEQ ID NO: 9756 - RNA, 20 nt, Artificial Sequence
  spacer sequence GTCN PAM
aggcagcacccagaguggac

SEQ ID NO: 9757 - RNA, 20 nt, Artificial Sequence
  spacer sequence GTCN PAM
cucggguucaagcaauucuc

SEQ ID NO: 9758 - RNA, 20 nt, Artificial Sequence
  spacer sequence GTCN PAM
cagcuacuugggaggcugag

SEQ ID NO: 9759 - RNA, 20 nt, Artificial Sequence
  spacer sequence GTCN PAM
uucggcaggcgagcagauaa

SEQ ID NO: 9760 - RNA, 20 nt, Artificial Sequence
  spacer sequence GTCN PAM
caaacuccugaccucaagug

SEQ ID NO: 9761 - RNA, 20 nt, Artificial Sequence
  spacer sequence GTCN PAM
ggaguuugagaccagccugg

SEQ ID NO: 9762 - RNA, 20 nt, Artificial Sequence
  spacer sequence GTCN PAM
agaguucgagaccauccugg

SEQ ID NO: 9763 - RNA, 20 nt, Artificial Sequence
  spacer sequence GTCN PAM
cgaacucuugaccucaggug

SEQ ID NO: 9764 - RNA, 20 nt, Artificial Sequence
  spacer sequence GTCN PAM
cugcuaaaaacacaaaaauu

SEQ ID NO: 9765 - RNA, 20 nt, Artificial Sequence
  spacer sequence GTCN PAM
agauugugccacugugcucc

SEQ ID NO: 9766 - RNA, 20 nt, Artificial Sequence
  spacer sequence GTCN PAM
auguguggccgccuguggcu

SEQ ID NO: 9767 - RNA, 20 nt, Artificial Sequence
  spacer sequence GTCN PAM
cugaccuccuggagcuucuc

SEQ ID NO: 9768 - RNA, 20 nt, Artificial Sequence
  spacer sequence GTCN PAM
gugacggucuauguguggcc

SEQ ID NO: 9769 - RNA, 20 nt, Artificial Sequence
  spacer sequence GTCN PAM
ggaaguuccuuucccugaga

SEQ ID NO: 9770 - RNA, 20 nt, Artificial Sequence
  spacer sequence GTCN PAM
acaggaggagaagccacacu

SEQ ID NO: 9771 - RNA, 20 nt, Artificial Sequence
  spacer sequence GTCN PAM
ggcuuucugaagcacugauc

SEQ ID NO: 9772 - RNA, 20 nt, Artificial Sequence
  spacer sequence GTCN PAM
aaccccaccgugcggcuccg

SEQ ID NO: 9773 - RNA, 20 nt, Artificial Sequence
  spacer sequence GTCN PAM
accccuggcucccguggcuc

SEQ ID NO: 9774 - RNA, 20 nt, Artificial Sequence
  spacer sequence GTCN PAM
augccuggcucccgugaauc

SEQ ID NO: 9775 - RNA, 20 nt, Artificial Sequence
  spacer sequence GTCN PAM
acaggagccaggcguggaag

SEQ ID NO: 9776 - RNA, 20 nt, Artificial Sequence
  spacer sequence GTCN PAM
gagccuugcucucugcuccu

SEQ ID NO: 9777 - RNA, 20 nt, Artificial Sequence
  spacer sequence GTCN PAM
gagcccuacauccucagggu

SEQ ID NO: 9778 - RNA, 20 nt, Artificial Sequence
  spacer sequence GTCN PAM
ggcauccgucugagcccuac

SEQ ID NO: 9779 - RNA, 20 nt, Artificial Sequence
  spacer sequence GTCN PAM
agggccaggcgugguggcuc

SEQ ID NO: 9780 - RNA, 20 nt, Artificial Sequence
  spacer sequence GTCN PAM
ugcuauguugccacgcugga

SEQ ID NO: 9781 - RNA, 20 nt, Artificial Sequence
  spacer sequence GTCN PAM
cucuguguugcccaggcugg

SEQ ID NO: 9782 - RNA, 20 nt, Artificial Sequence
  spacer sequence GTCN PAM
agaucgugccgcugcacucc

SEQ ID NO: 9783 - RNA, 20 nt, Artificial Sequence
  spacer sequence GTCN PAM
aagucacaccguggggccag

SEQ ID NO: 9784 - RNA, 20 nt, Artificial Sequence
  spacer sequence GTCN PAM
caccguggggccaggcccgg

SEQ ID NO: 9785 - RNA, 20 nt, Artificial Sequence
  spacer sequence GTCN PAM
cagcuacucaggaggcugag

SEQ ID NO: 9786 - RNA, 20 nt, Artificial Sequence
  spacer sequence GTCN PAM
caaaaaauaaaaagaaaaga

SEQ ID NO: 9787 - RNA, 20 nt, Artificial Sequence
  spacer sequence GTCN PAM
cagcugcucgggaggcugag

SEQ ID NO: 9788 - RNA, 20 nt, Artificial Sequence
  spacer sequence GTCN PAM
ugcaguggcgcgaucucggc

SEQ ID NO: 9789 - RNA, 20 nt, Artificial Sequence
  spacer sequence GTCN PAM
cagaaaaacaaagucgcaca

SEQ ID NO: 9790 - RNA, 20 nt, Artificial Sequence
  spacer sequence GTCN PAM
cacaggagagucacguccac

SEQ ID NO: 9791 - RNA, 20 nt, Artificial Sequence
  spacer sequence GTCN PAM
cguccacccccugggccacc

SEQ ID NO: 9792 - RNA, 20 nt, Artificial Sequence
  spacer sequence GTCN PAM
acccccugggccaccggaca

SEQ ID NO: 9793 - RNA, 20 nt, Artificial Sequence
  spacer sequence GTCN PAM
gguggcccaggggguggacg

SEQ ID NO: 9794 - RNA, 20 nt, Artificial Sequence
  spacer sequence GTCN PAM
ccacagaccaggcagcugaa

SEQ ID NO: 9795 - RNA, 20 nt, Artificial Sequence
  spacer sequence GTCN PAM
guggcgacuguccgguggcc

SEQ ID NO: 9796 - RNA, 20 nt, Artificial Sequence
  spacer sequence GTCN PAM
guagagcggggauucagcug

SEQ ID NO: 9797 - RNA, 20 nt, Artificial Sequence
  spacer sequence GTCN PAM
cacugccccagccuugaugg

SEQ ID NO: 9798 - RNA, 20 nt, Artificial Sequence
  spacer sequence GTCN PAM
gucucucccucccugcuguc

SEQ ID NO: 9799 - RNA, 20 nt, Artificial Sequence
  spacer sequence GTCN PAM
cucccucccugcugucccuc

SEQ ID NO: 9800 - RNA, 20 nt, Artificial Sequence
  spacer sequence GTCN PAM
cucugugagccacacccugc

SEQ ID NO: 9801 - RNA, 20 nt, Artificial Sequence
  spacer sequence GTCN PAM
gcggcagugaugggggcugc

SEQ ID NO: 9802 - RNA, 20 nt, Artificial Sequence
  spacer sequence GTCN PAM
ccagccccugcagcccccau

SEQ ID NO: 9803 - RNA, 20 nt, Artificial Sequence
  spacer sequence GTCN PAM
uagaagcaguugcauggcug

SEQ ID NO: 9804 - RNA, 20 nt, Artificial Sequence
  spacer sequence GTCN PAM
aggguucaggcugagccacc

SEQ ID NO: 9805 - RNA, 20 nt, Artificial Sequence
  spacer sequence GTCN PAM
aggucuagacgucagugucc

SEQ ID NO: 9806 - RNA, 20 nt, Artificial Sequence
  spacer sequence GTCN PAM
agacgucaguguccaucagg

SEQ ID NO: 9807 - RNA, 20 nt, Artificial Sequence
  spacer sequence GTCN PAM
agaccuagacgguggcucag

SEQ ID NO: 9808 - RNA, 20 nt, Artificial Sequence
  spacer sequence GTCN PAM
guguccaucaggaccuggcg

SEQ ID NO: 9809 - RNA, 20 nt, Artificial Sequence
  spacer sequence GTCN PAM
aucaggaccuggcgugcccu

SEQ ID NO: 9810 - RNA, 20 nt, Artificial Sequence
  spacer sequence GTCN PAM
ugauggacacugacgucuag

SEQ ID NO: 9811 - RNA, 20 nt, Artificial Sequence
  spacer sequence GTCN PAM
gcuugcagggcacgccaggu

SEQ ID NO: 9812 - RNA, 20 nt, Artificial Sequence
  spacer sequence GTCN PAM
aaggagcacaugucugcuug

SEQ ID NO: 9813 - RNA, 20 nt, Artificial Sequence
  spacer sequence GTCN PAM
acccuggagaugaagcaggg

SEQ ID NO: 9814 - RNA, 20 nt, Artificial Sequence
  spacer sequence GTCN PAM
aagccuccagccagggcccc

SEQ ID NO: 9815 - RNA, 20 nt, Artificial Sequence
  spacer sequence GTCN PAM
ccggggaagaugcaggggac

SEQ ID NO: 9816 - RNA, 20 nt, Artificial Sequence
  spacer sequence GTCN PAM
ccugcaucuuccccggggac

SEQ ID NO: 9817 - RNA, 20 nt, Artificial Sequence
  spacer sequence GTCN PAM
cgcagccccccguggugugg

SEQ ID NO: 9818 - RNA, 20 nt, Artificial Sequence
  spacer sequence GTCN PAM
ucgaggaggacaagggaggg

SEQ ID NO: 9819 - RNA, 20 nt, Artificial Sequence
  spacer sequence GTCN PAM
uccucgaggaccccccaacu

SEQ ID NO: 9820 - RNA, 20 nt, Artificial Sequence
  spacer sequence GTCN PAM
uggcccccuucaguucccuc

SEQ ID NO: 9821 - RNA, 20 nt, Artificial Sequence
  spacer sequence GTCN PAM
cuccugcucaccacuaaacc

SEQ ID NO: 9822 - RNA, 20 nt, Artificial Sequence
  spacer sequence GTCN PAM
aauuuaaagucaacaaacaa

SEQ ID NO: 9823 - RNA, 20 nt, Artificial Sequence
  spacer sequence GTCN PAM
acaaacaaacaaugugggaa

SEQ ID NO: 9824 - RNA, 20 nt, Artificial Sequence
  spacer sequence GTCN PAM
uccucccgccggggccaccc

SEQ ID NO: 9825 - RNA, 20 nt, Artificial Sequence
  spacer sequence GTCN PAM
aggguggccccggcgggagg

SEQ ID NO: 9826 - RNA, 20 nt, Artificial Sequence
  spacer sequence GTCN PAM
cccaaggacccacguccagg

SEQ ID NO: 9827 - RNA, 20 nt, Artificial Sequence
  spacer sequence GTCN PAM
uugggggaccuucgauuucu

SEQ ID NO: 9828 - RNA, 20 nt, Artificial Sequence
  spacer sequence GTCN PAM
aggagccaacagccucucug

SEQ ID NO: 9829 - RNA, 20 nt, Artificial Sequence
  spacer sequence GTCN PAM
gguuugcacagagaggcugu

SEQ ID NO: 9830 - RNA, 20 nt, Artificial Sequence
  spacer sequence GTCN PAM
cuauuucuuucucuguuuua

SEQ ID NO: 9831 - RNA, 20 nt, Artificial Sequence
  spacer sequence GTCN PAM
uccagaaccaccuucucauu

SEQ ID NO: 9832 - RNA, 20 nt, Artificial Sequence
  spacer sequence GTCN PAM
gguccuccagaaccaccuuc

SEQ ID NO: 9833 - RNA, 20 nt, Artificial Sequence
  spacer sequence GTCN PAM
cgaaagcaaauucggucggg

SEQ ID NO: 9834 - RNA, 20 nt, Artificial Sequence
  spacer sequence GTCN PAM
agcgcccuuuccucgccggc

SEQ ID NO: 9835 - RNA, 20 nt, Artificial Sequence
  spacer sequence GTCN PAM
ggaggcccccaaauccccuu

SEQ ID NO: 9836 - RNA, 20 nt, Artificial Sequence
  spacer sequence GTCN PAM
ugaagguuuugaauuguuca

SEQ ID NO: 9837 - RNA, 20 nt, Artificial Sequence
  spacer sequence GTCN PAM
gcggugcucuuccggaauuc

SEQ ID NO: 9838 - RNA, 20 nt, Artificial Sequence
  spacer sequence GTCN PAM
cuuccagauauuguagagaa

SEQ ID NO: 9839 - RNA, 20 nt, Artificial Sequence
  spacer sequence GTCN PAM
uaacaauaaaaacaaacaua

SEQ ID NO: 9840 - RNA, 20 nt, Artificial Sequence
  spacer sequence GTCN PAM
agccaacaggguuaaaauuc

SEQ ID NO: 9841 - RNA, 20 nt, Artificial Sequence
  spacer sequence GTCN PAM
cugcgcuccagccugggcaa

SEQ ID NO: 9842 - RNA, 20 nt, Artificial Sequence
  spacer sequence GTCN PAM
gggccgcagcaaacuaugau

SEQ ID NO: 9843 - RNA, 20 nt, Artificial Sequence
  spacer sequence GTCN PAM
cagcuacuuaggagauugag

SEQ ID NO: 9844 - RNA, 20 nt, Artificial Sequence
  spacer sequence GTCN PAM
caaaaaaaaaaaaaaaaaaa

SEQ ID NO: 9845 - RNA, 20 nt, Artificial Sequence
  spacer sequence GTCN PAM
cccaggcuggagugcagugu

SEQ ID NO: 9846 - RNA, 20 nt, Artificial Sequence
  spacer sequence GTCN PAM
caacuucggcucaccacaac

SEQ ID NO: 9847 - RNA, 20 nt, Artificial Sequence
  spacer sequence GTCN PAM
ggcuaauuuuugcauuuuua

SEQ ID NO: 9848 - RNA, 20 nt, Artificial Sequence
  spacer sequence GTCN PAM
cuacuaaaaaugcaaaaauu

SEQ ID NO: 9849 - RNA, 20 nt, Artificial Sequence
  spacer sequence GTCN PAM
cgaacuccugaccuugugau

SEQ ID NO: 9850 - RNA, 20 nt, Artificial Sequence
  spacer sequence GTCN PAM
ggaguucgagaccagccugg

SEQ ID NO: 9851 - RNA, 20 nt, Artificial Sequence
  spacer sequence GTCN PAM
cuacaaaaauaaauaaauaa

SEQ ID NO: 9852 - RNA, 20 nt, Artificial Sequence
  spacer sequence GTCN PAM
cgcugugucacccaggcugg

SEQ ID NO: 9853 - RNA, 20 nt, Artificial Sequence
  spacer sequence GTCN PAM
cccaggcuggagugcagugg

SEQ ID NO: 9854 - RNA, 20 nt, Artificial Sequence
  spacer sequence GTCN PAM
aggcugcagugggaugugau

SEQ ID NO: 9855 - RNA, 20 nt, Artificial Sequence
  spacer sequence GTCN PAM
cagcuacucaggaggcugag

SEQ ID NO: 9856 - RNA, 20 nt, Artificial Sequence
  spacer sequence GTCN PAM
gccucagcuucccaaauugc

SEQ ID NO: 9857 - RNA, 20 nt, Artificial Sequence
  spacer sequence GTCN PAM
ggaguuugagacuaucccug

SEQ ID NO: 9858 - RNA, 20 nt, Artificial Sequence
  spacer sequence GTCN PAM
caaacuccugaccucuagug

SEQ ID NO: 9859 - RNA, 20 nt, Artificial Sequence
  spacer sequence GTCN PAM
cuacuaaaaauacaaaaauu

SEQ ID NO: 9860 - RNA, 20 nt, Artificial Sequence
  spacer sequence GTCN PAM
ugccucagccuccggaguag

SEQ ID NO: 9861 - RNA, 20 nt, Artificial Sequence
  spacer sequence GTCN PAM
cccaggggcacgaucucacc

SEQ ID NO: 9862 - RNA, 20 nt, Artificial Sequence
  spacer sequence GTCN PAM
cgccacguugcccaggcugg

SEQ ID NO: 9863 - RNA, 20 nt, Artificial Sequence
  spacer sequence GTCN PAM
ugaacuccugagcucaagug

SEQ ID NO: 9864 - RNA, 20 nt, Artificial Sequence
  spacer sequence GTCN PAM
aggugagagaaucacuugag

SEQ ID NO: 9865 - RNA, 20 nt, Artificial Sequence
  spacer sequence GTCN PAM
ggcucugcuguugugauagg

SEQ ID NO: 9866 - RNA, 20 nt, Artificial Sequence
  spacer sequence GTCN PAM
ucaagccuuccuaucacaac

SEQ ID NO: 9867 - RNA, 20 nt, Artificial Sequence
  spacer sequence GTCN PAM
ccaaccccgcacaccagccg

SEQ ID NO: 9868 - RNA, 20 nt, Artificial Sequence
  spacer sequence GTCN PAM
cugccaucguccccaacccc

SEQ ID NO: 9869 - RNA, 20 nt, Artificial Sequence
  spacer sequence GTCN PAM
auccagcgccaaugccacau

SEQ ID NO: 9870 - RNA, 20 nt, Artificial Sequence
  spacer sequence GTCN PAM
gugugcgcugacugcguguc

SEQ ID NO: 9871 - RNA, 20 nt, Artificial Sequence
  spacer sequence GTCN PAM
gcgcacacagacccguccau

SEQ ID NO: 9872 - RNA, 20 nt, Artificial Sequence
  spacer sequence GTCN PAM
gaugccagggccuguguucc

SEQ ID NO: 9873 - RNA, 20 nt, Artificial Sequence
  spacer sequence GTCN PAM
ccaggaaggaacugcuggac

SEQ ID NO: 9874 - RNA, 20 nt, Artificial Sequence
  spacer sequence GTCN PAM
agcaguuccuuccuggggac

SEQ ID NO: 9875 - RNA, 20 nt, Artificial Sequence
  spacer sequence GTCN PAM
ucuguggccgggcagugcug

SEQ ID NO: 9876 - RNA, 20 nt, Artificial Sequence
  spacer sequence GTCN PAM
ucuguggggccacaguccuc

SEQ ID NO: 9877 - RNA, 20 nt, Artificial Sequence
  spacer sequence GTCN PAM
ucuuccagaugcaggagcug

SEQ ID NO: 9878 - RNA, 20 nt, Artificial Sequence
  spacer sequence GTCN PAM
uuccuccuccuggucaucuu

SEQ ID NO: 9879 - RNA, 20 nt, Artificial Sequence
  spacer sequence GTCN PAM
gcaaguguucaaagugaugu

SEQ ID NO: 9880 - RNA, 20 nt, Artificial Sequence
  spacer sequence GTCN PAM
ggaguucgagaccagccuga

SEQ ID NO: 9881 - RNA, 20 nt, Artificial Sequence
  spacer sequence GTCN PAM
cgaacucccgaccucaggug

SEQ ID NO: 9882 - RNA, 20 nt, Artificial Sequence
  spacer sequence GTCN PAM
ggcuggucucgaacucccga

SEQ ID NO: 9883 - RNA, 20 nt, Artificial Sequence
  spacer sequence GTCN PAM
cuacuaaaaauacaaaauua

SEQ ID NO: 9884 - RNA, 20 nt, Artificial Sequence
  spacer sequence GTCN PAM
ugaggaccacuuaagaaaug

SEQ ID NO: 9885 - RNA, 20 nt, Artificial Sequence
  spacer sequence GTCN PAM
ucaagacuuuuguauccauu

SEQ ID NO: 9886 - RNA, 20 nt, Artificial Sequence
  spacer sequence GTCN PAM
caaacuccugaccucaagug

SEQ ID NO: 9887 - RNA, 20 nt, Artificial Sequence
  spacer sequence GTCN PAM
ggaguuugagaccagccugg

SEQ ID NO: 9888 - RNA, 20 nt, Artificial Sequence
  spacer sequence GTCN PAM
cuaaauaaauaggaaaagaa

SEQ ID NO: 9889 - RNA, 20 nt, Artificial Sequence
  spacer sequence GTCN PAM
gaacucccggacucaagcca

SEQ ID NO: 9890 - RNA, 20 nt, Artificial Sequence
  spacer sequence GTCN PAM
gggaguucagaccagccugg

SEQ ID NO: 9891 - RNA, 20 nt, Artificial Sequence
  spacer sequence GTCN PAM
caguggcuuccuccuguaau

SEQ ID NO: 9892 - RNA, 20 nt, Artificial Sequence
  spacer sequence GTCN PAM
cacuaugucacccaggcugg

SEQ ID NO: 9893 - RNA, 20 nt, Artificial Sequence
  spacer sequence GTCN PAM
cccaggcugguccgaaacuc

SEQ ID NO: 9894 - RNA, 20 nt, Artificial Sequence
  spacer sequence GTCN PAM
gaaacuccugggcucaaacc

SEQ ID NO: 9895 - RNA, 20 nt, Artificial Sequence
  spacer sequence GTCN PAM
cccacagccggcucgggugg

SEQ ID NO: 9896 - RNA, 20 nt, Artificial Sequence
  spacer sequence GTCN PAM
caggucacccacagccggcu

SEQ ID NO: 9897 - RNA, 20 nt, Artificial Sequence
  spacer sequence GTCN PAM
uuuccugcuauaaacuauug

SEQ ID NO: 9898 - RNA, 20 nt, Artificial Sequence
  spacer sequence GTCN PAM
ccuccaggagcuccgggcuu

SEQ ID NO: 9899 - RNA, 20 nt, Artificial Sequence
  spacer sequence GTCN PAM
uggguucccuguaaugaagc

SEQ ID NO: 9900 - RNA, 20 nt, Artificial Sequence
  spacer sequence GTCN PAM
gcuccgccuccauccugggc

SEQ ID NO: 9901 - RNA, 20 nt, Artificial Sequence
  spacer sequence GTCN PAM
ggccuccauugugaggggau

SEQ ID NO: 9902 - RNA, 20 nt, Artificial Sequence
  spacer sequence GTCN PAM
ccccagaggucaggccucca

SEQ ID NO: 9903 - RNA, 20 nt, Artificial Sequence
  spacer sequence GTCN PAM
gggucacugugagguuuuua

SEQ ID NO: 9904 - RNA, 20 nt, Artificial Sequence
  spacer sequence GTCN PAM
cugugagguuuuuauuuaug

SEQ ID NO: 9905 - RNA, 20 nt, Artificial Sequence
  spacer sequence GTCN PAM
cacuguguuguccaggcugg

SEQ ID NO: 9906 - RNA, 20 nt, Artificial Sequence
  spacer sequence GTCN PAM
aggcuggacugcauuagugu

SEQ ID NO: 9907 - RNA, 20 nt, Artificial Sequence
  spacer sequence GTCN PAM
agccuggacaacacagugag

SEQ ID NO: 9908 - RNA, 20 nt, Artificial Sequence
  spacer sequence GTCN PAM
cacucugucacccaggcugg

SEQ ID NO: 9909 - RNA, 20 nt, Artificial Sequence
  spacer sequence GTCN PAM
cccaggcuggagugcagugg

SEQ ID NO: 9910 - RNA, 20 nt, Artificial Sequence
  spacer sequence GTCN PAM
cuaccaaagauauaaaaauu

SEQ ID NO: 9911 - RNA, 20 nt, Artificial Sequence
  spacer sequence GTCN PAM
cgaacuccugaccucagggc

SEQ ID NO: 9912 - RNA, 20 nt, Artificial Sequence
  spacer sequence GTCN PAM
ggaguucgagaccagccugg

SEQ ID NO: 9913 - RNA, 20 nt, Artificial Sequence
  spacer sequence GTCN PAM
cccaacgugcugggaucaca

SEQ ID NO: 9914 - RNA, 20 nt, Artificial Sequence
  spacer sequence GTCN PAM
ggccaggcgcgguggcucac

SEQ ID NO: 9915 - RNA, 20 nt, Artificial Sequence
  spacer sequence GTCN PAM
gcucuuuguaaaacaauaau

SEQ ID NO: 9916 - RNA, 20 nt, Artificial Sequence
  spacer sequence GTCN PAM
ucuagaacucggcguuuuau

SEQ ID NO: 9917 - RNA, 20 nt, Artificial Sequence
  spacer sequence GTCN PAM
ccaguguccucuagaacucg

SEQ ID NO: 9918 - RNA, 20 nt, Artificial Sequence
  spacer sequence GTCN PAM
ccacucccgggggagcgugc

SEQ ID NO: 9919 - RNA, 20 nt, Artificial Sequence
  spacer sequence GTCN PAM
gcggccugcagagugggggu

SEQ ID NO: 9920 - RNA, 20 nt, Artificial Sequence
  spacer sequence GTCN PAM
ggcuggugagcagauggcug

SEQ ID NO: 9921 - RNA, 20 nt, Artificial Sequence
  spacer sequence GTCN PAM
gugauccagcagccaucugc

SEQ ID NO: 9922 - RNA, 20 nt, Artificial Sequence
  spacer sequence GTCN PAM
ccauagggagagggaacgug

SEQ ID NO: 9923 - RNA, 20 nt, Artificial Sequence
  spacer sequence GTCN PAM
gucucccauccccaucacca

SEQ ID NO: 9924 - RNA, 20 nt, Artificial Sequence
  spacer sequence GTCN PAM
cccauccccaucaccacacg

SEQ ID NO: 9925 - RNA, 20 nt, Artificial Sequence
  spacer sequence GTCN PAM
ccgcaggaugaaugggcuuc

SEQ ID NO: 9926 - RNA, 20 nt, Artificial Sequence
  spacer sequence GTCN PAM
cagcaggccccggaagccca

SEQ ID NO: 9927 - RNA, 20 nt, Artificial Sequence
  spacer sequence GTCN PAM
cuggaggccggaagucugaa

SEQ ID NO: 9928 - RNA, 20 nt, Artificial Sequence
  spacer sequence GTCN PAM
gaagugaaggugugcaaggu

SEQ ID NO: 9929 - RNA, 20 nt, Artificial Sequence
  spacer sequence GTCN PAM
gcaccaggagcuggaagagg

SEQ ID NO: 9930 - RNA, 20 nt, Artificial Sequence
  spacer sequence GTCN PAM
gagguggcugucggcaccag

SEQ ID NO: 9931 - RNA, 20 nt, Artificial Sequence
  spacer sequence GTCN PAM
aggagggucagagguggcug

SEQ ID NO: 9932 - RNA, 20 nt, Artificial Sequence
  spacer sequence GTCN PAM
ccucugcaucuguguccaaa

SEQ ID NO: 9933 - RNA, 20 nt, Artificial Sequence
  spacer sequence GTCN PAM
aaauuucccuugucucccga

SEQ ID NO: 9934 - RNA, 20 nt, Artificial Sequence
  spacer sequence GTCN PAM
cccgaagucgccugucacug

SEQ ID NO: 9935 - RNA, 20 nt, Artificial Sequence
  spacer sequence GTCN PAM
ccugucacugcgguggugcc

SEQ ID NO: 9936 - RNA, 20 nt, Artificial Sequence
  spacer sequence GTCN PAM
cugcgguggugcccgcccua

SEQ ID NO: 9937 - RNA, 20 nt, Artificial Sequence
  spacer sequence GTCN PAM
cauuuguaggugccuggggu

SEQ ID NO: 9938 - RNA, 20 nt, Artificial Sequence
  spacer sequence GTCN PAM
uugcgugaaccccaggcacc

SEQ ID NO: 9939 - RNA, 20 nt, Artificial Sequence
  spacer sequence GTCN PAM
ggaaggccucgcugaggagg

SEQ ID NO: 9940 - RNA, 20 nt, Artificial Sequence
  spacer sequence GTCN PAM
uguaccuguuucauguccau

SEQ ID NO: 9941 - RNA, 20 nt, Artificial Sequence
  spacer sequence GTCN PAM
aucgucggcaaccccuggcu

SEQ ID NO: 9942 - RNA, 20 nt, Artificial Sequence
  spacer sequence GTCN PAM
gcaaccccuggcuucuaaca

SEQ ID NO: 9943 - RNA, 20 nt, Artificial Sequence
  spacer sequence GTCN PAM
ugcgggcaaugagcuguguu

SEQ ID NO: 9944 - RNA, 20 nt, Artificial Sequence
  spacer sequence GTCN PAM
cugcuccugcugggaggucc

SEQ ID NO: 9945 - RNA, 20 nt, Artificial Sequence
  spacer sequence GTCN PAM
ccguccgaaccacaagcugc

SEQ ID NO: 9946 - RNA, 20 nt, Artificial Sequence
  spacer sequence GTCN PAM
gaaccacaagcugcuguggg

SEQ ID NO: 9947 - RNA, 20 nt, Artificial Sequence
  spacer sequence GTCN PAM
cuugacagaaagaccccugc

SEQ ID NO: 9948 - RNA, 20 nt, Artificial Sequence
  spacer sequence GTCN PAM
agugaccacccacagcagcu

SEQ ID NO: 9949 - RNA, 20 nt, Artificial Sequence
  spacer sequence GTCN PAM
uucugucaagugaccaccca

SEQ ID NO: 9950 - RNA, 20 nt, Artificial Sequence
  spacer sequence GTCN PAM
cuaaagcaacagaaaaagca

SEQ ID NO: 9951 - RNA, 20 nt, Artificial Sequence
  spacer sequence GTCN PAM
uccaggcuggagugcagugg

SEQ ID NO: 9952 - RNA, 20 nt, Artificial Sequence
  spacer sequence GTCN PAM
caccagagcccaggagaugg

SEQ ID NO: 9953 - RNA, 20 nt, Artificial Sequence
  spacer sequence GTCN PAM
cagcuauucaggaggcuaag

SEQ ID NO: 9954 - RNA, 20 nt, Artificial Sequence
  spacer sequence GTCN PAM
aagaaucagcugggcguggu

SEQ ID NO: 9955 - RNA, 20 nt, Artificial Sequence
  spacer sequence GTCN PAM
uggccucaagcaauccucgu

SEQ ID NO: 9956 - RNA, 20 nt, Artificial Sequence
  spacer sequence GTCN PAM
caaaaaaaaaaaaaaaggaa

SEQ ID NO: 9957 - RNA, 20 nt, Artificial Sequence
  spacer sequence GTCN PAM
uacucugucaccaggcugga

SEQ ID NO: 9958 - RNA, 20 nt, Artificial Sequence
  spacer sequence GTCN PAM
ccaggcuggagugcaauggu

SEQ ID NO: 9959 - RNA, 20 nt, Artificial Sequence
  spacer sequence GTCN PAM
cggccgggugugguggcuca

SEQ ID NO: 9960 - RNA, 20 nt, Artificial Sequence
  spacer sequence GTCN PAM
caaggagcugagauugcagg

SEQ ID NO: 9961 - RNA, 20 nt, Artificial Sequence
  spacer sequence GTCN PAM
cgaaaaaauaaaauaaaugg

SEQ ID NO: 9962 - RNA, 20 nt, Artificial Sequence
  spacer sequence GTCN PAM
uucugugucuggcgucucuc

SEQ ID NO: 9963 - RNA, 20 nt, Artificial Sequence
  spacer sequence GTCN PAM
ggcgucucucacggagcgug

SEQ ID NO: 9964 - RNA, 20 nt, Artificial Sequence
  spacer sequence GTCN PAM
cucacggagcgugacguccu

SEQ ID NO: 9965 - RNA, 20 nt, Artificial Sequence
  spacer sequence GTCN PAM
cgcuccgugagagacgccag

SEQ ID NO: 9966 - RNA, 20 nt, Artificial Sequence
  spacer sequence GTCN PAM
uuaaggugcauccgcgcugu

SEQ ID NO: 9967 - RNA, 20 nt, Artificial Sequence
  spacer sequence GTCN PAM
gagccuggauccuuuucacg

SEQ ID NO: 9968 - RNA, 20 nt, Artificial Sequence
  spacer sequence GTCN PAM
accgcggaacacaacucagc

SEQ ID NO: 9969 - RNA, 20 nt, Artificial Sequence
  spacer sequence GTCN PAM
uuucuuccacuaacgggaau

SEQ ID NO: 9970 - RNA, 20 nt, Artificial Sequence
  spacer sequence GTCN PAM
acacagaaacgcguacauga

SEQ ID NO: 9971 - RNA, 20 nt, Artificial Sequence
  spacer sequence GTCN PAM
caaaaaaaaaaaagaggggu

SEQ ID NO: 9972 - RNA, 20 nt, Artificial Sequence
  spacer sequence GTCN PAM
ugcuccgucacccaugcuag

SEQ ID NO: 9973 - RNA, 20 nt, Artificial Sequence
  spacer sequence GTCN PAM
cccaugcuagagugcaaugg

SEQ ID NO: 9974 - RNA, 20 nt, Artificial Sequence
  spacer sequence GTCN PAM
cccgaggagcugagguuaca

SEQ ID NO: 9975 - RNA, 20 nt, Artificial Sequence
  spacer sequence GTCN PAM
cccacuaaaaaaacaaaaau

SEQ ID NO: 9976 - RNA, 20 nt, Artificial Sequence
  spacer sequence GTCN PAM
gaacucaggcagagaacuug

SEQ ID NO: 9977 - RNA, 20 nt, Artificial Sequence
  spacer sequence GTCN PAM
ccuaagaggcccuguggguc

SEQ ID NO: 9978 - RNA, 20 nt, Artificial Sequence
  spacer sequence GTCN PAM
gggcccagcucuagcugaac

SEQ ID NO: 9979 - RNA, 20 nt, Artificial Sequence
  spacer sequence GTCN PAM
ugagccuccccccucccccc

SEQ ID NO: 9980 - RNA, 20 nt, Artificial Sequence
  spacer sequence GTCN PAM
gggcccagcuccagcugaac

SEQ ID NO: 9981 - RNA, 20 nt, Artificial Sequence
  spacer sequence GTCN PAM
ggcuggggaggggagcacag

SEQ ID NO: 9982 - RNA, 20 nt, Artificial Sequence
  spacer sequence GTCN PAM
gggcagauaacgcuguggcc

SEQ ID NO: 9983 - RNA, 20 nt, Artificial Sequence
  spacer sequence GTCN PAM
cccugaggucugggcauagg

SEQ ID NO: 9984 - RNA, 20 nt, Artificial Sequence
  spacer sequence GTCN PAM
gggcauagggagguguccug

SEQ ID NO: 9985 - RNA, 20 nt, Artificial Sequence
  spacer sequence GTCN PAM
ugggaugagaagacucuuga

SEQ ID NO: 9986 - RNA, 20 nt, Artificial Sequence
  spacer sequence GTCN PAM
ucucaucccaggacaccucc

SEQ ID NO: 9987 - RNA, 20 nt, Artificial Sequence
  spacer sequence GTCN PAM
cuucucaagagucuucucau

SEQ ID NO: 9988 - RNA, 20 nt, Artificial Sequence
  spacer sequence GTCN PAM
cugcaagggguggugggccc

SEQ ID NO: 9989 - RNA, 20 nt, Artificial Sequence
  spacer sequence GTCN PAM
uucuuggggugggggaugaa

SEQ ID NO: 9990 - RNA, 20 nt, Artificial Sequence
  spacer sequence GTCN PAM
cuguucaucccccaccccaa

SEQ ID NO: 9991 - RNA, 20 nt, Artificial Sequence
  spacer sequence GTCN PAM
uguaaauuagccccucaacu

SEQ ID NO: 9992 - RNA, 20 nt, Artificial Sequence
  spacer sequence GTCN PAM
ucccagcacacugggcagcu

SEQ ID NO: 9993 - RNA, 20 nt, Artificial Sequence
  spacer sequence GTCN PAM
uccugccucagcugcccagu

SEQ ID NO: 9994 - RNA, 20 nt, Artificial Sequence
  spacer sequence GTCN PAM
caaacuccugggcucaaggg

SEQ ID NO: 9995 - RNA, 20 nt, Artificial Sequence
  spacer sequence GTCN PAM
acaaaacauuuuuuaaaaug

SEQ ID NO: 9996 - RNA, 20 nt, Artificial Sequence
  spacer sequence GTCN PAM
cggcuccccacagccccaac

SEQ ID NO: 9997 - RNA, 20 nt, Artificial Sequence
  spacer sequence GTCN PAM
cacucuguugcccaggcugg

SEQ ID NO: 9998 - RNA, 20 nt, Artificial Sequence
  spacer sequence GTCN PAM
cagcuuggaggggcgggacc

SEQ ID NO: 9999 - RNA, 20 nt, Artificial Sequence
  spacer sequence GTCN PAM
cgccccuccaagcugggaca

SEQ ID NO: 10000 - RNA, 20 nt, Artificial Sequence
  spacer sequence GTCN PAM
ugugcucugugcucugggaa

SEQ ID NO: 10001 - RNA, 20 nt, Artificial Sequence
  spacer sequence GTCN PAM
gugaguccuggccaucaggc

SEQ ID NO: 10002 - RNA, 20 nt, Artificial Sequence
  spacer sequence GTCN PAM
uggccaucaggccuuggggu

SEQ ID NO: 10003 - RNA, 20 nt, Artificial Sequence
  spacer sequence GTCN PAM
cccagccucuccggcccauu

SEQ ID NO: 10004 - RNA, 20 nt, Artificial Sequence
  spacer sequence GTCN PAM
ccuggguggucucccagccu

SEQ ID NO: 10005 - RNA, 20 nt, Artificial Sequence
  spacer sequence GTCN PAM
ucccagcacuuugggagacc

SEQ ID NO: 10006 - RNA, 20 nt, Artificial Sequence
  spacer sequence GTCN PAM
cccaaagugcugggaugaca

SEQ ID NO: 10007 - RNA, 20 nt, Artificial Sequence
  spacer sequence GTCN PAM
ggaguucgagaccagccugg

SEQ ID NO: 10008 - RNA, 20 nt, Artificial Sequence
  spacer sequence GTCN PAM
cgaacuccugaccucaggug

SEQ ID NO: 10009 - RNA, 20 nt, Artificial Sequence
  spacer sequence GTCN PAM
agagaucgagaccauccugg

SEQ ID NO: 10010 - RNA, 20 nt, Artificial Sequence
  spacer sequence GTCN PAM
cgaucucuugaccuugugau

SEQ ID NO: 10011 - RNA, 20 nt, Artificial Sequence
  spacer sequence GTCN PAM
cuauuaaaaguauaaaaauu

SEQ ID NO: 10012 - RNA, 20 nt, Artificial Sequence
  spacer sequence GTCN PAM
cagcuacucgggaggcugag

SEQ ID NO: 10013 - RNA, 20 nt, Artificial Sequence
  spacer sequence GTCN PAM
ccugccucagccucccgagu

SEQ ID NO: 10014 - RNA, 20 nt, Artificial Sequence
  spacer sequence GTCN PAM
acaugaguggcagggccagg

SEQ ID NO: 10015 - RNA, 20 nt, Artificial Sequence
  spacer sequence GTCN PAM
cccaucccagcccgcaggcc

SEQ ID NO: 10016 - RNA, 20 nt, Artificial Sequence
  spacer sequence GTCN PAM
uuucuccucuccugucuccc

SEQ ID NO: 10017 - RNA, 20 nt, Artificial Sequence
  spacer sequence GTCN PAM
ucccgcgcuggcguucugca

SEQ ID NO: 10018 - RNA, 20 nt, Artificial Sequence
  spacer sequence GTCN PAM
uaugcagaacgccagcgcgg

SEQ ID NO: 10019 - RNA, 20 nt, Artificial Sequence
  spacer sequence GTCN PAM
gcugucauaugcagaacgcc

SEQ ID NO: 10020 - RNA, 20 nt, Artificial Sequence
  spacer sequence GTCN PAM
cccgaguagcugggauuaca

SEQ ID NO: 10021 - RNA, 20 nt, Artificial Sequence
  spacer sequence GTCN PAM
ugcucaaaguauaaacccaa

SEQ ID NO: 10022 - RNA, 20 nt, Artificial Sequence
  spacer sequence GTCN PAM
aacccuucggaaucguguua

SEQ ID NO: 10023 - RNA, 20 nt, Artificial Sequence
  spacer sequence GTCN PAM
cuacugcugccagcugccac

SEQ ID NO: 10024 - RNA, 20 nt, Artificial Sequence
  spacer sequence GTCN PAM
gaguggcagcuggcagcagu

SEQ ID NO: 10025 - RNA, 20 nt, Artificial Sequence
  spacer sequence GTCN PAM
gcuuucagggcggggcccau

SEQ ID NO: 10026 - RNA, 20 nt, Artificial Sequence
  spacer sequence GTCN PAM
guucgcggagugccugggau

SEQ ID NO: 10027 - RNA, 20 nt, Artificial Sequence
  spacer sequence GTCN PAM
ccaggggagcaaauccacag

SEQ ID NO: 10028 - RNA, 20 nt, Artificial Sequence
  spacer sequence GTCN PAM
gguggaucugggagaagccc

SEQ ID NO: 10029 - RNA, 20 nt, Artificial Sequence
  spacer sequence GTCN PAM
cucaucaggaauguccggug

SEQ ID NO: 10030 - RNA, 20 nt, Artificial Sequence
  spacer sequence GTCN PAM
ccguugaccgggugguucgg

SEQ ID NO: 10031 - RNA, 20 nt, Artificial Sequence
  spacer sequence GTCN PAM
acggagacucaccaagagcc

SEQ ID NO: 10032 - RNA, 20 nt, Artificial Sequence
  spacer sequence GTCN PAM
uuuggcccgaaccacccggu

SEQ ID NO: 10033 - RNA, 20 nt, Artificial Sequence
  spacer sequence GTCN PAM
ggugccagaggauuccagcc

SEQ ID NO: 10034 - RNA, 20 nt, Artificial Sequence
  spacer sequence GTCN PAM
ugucuucucccuccguaggu

SEQ ID NO: 10035 - RNA, 20 nt, Artificial Sequence
  spacer sequence GTCN PAM
ucucccuccguagguuggug

SEQ ID NO: 10036 - RNA, 20 nt, Artificial Sequence
  spacer sequence GTCN PAM
augcugaaaaggggguuuuu

SEQ ID NO: 10037 - RNA, 20 nt, Artificial Sequence
  spacer sequence GTCN PAM
acuccgggccgggaacugcu

SEQ ID NO: 10038 - RNA, 20 nt, Artificial Sequence
  spacer sequence GTCN PAM
caguguggagggccgggguc

SEQ ID NO: 10039 - RNA, 20 nt, Artificial Sequence
  spacer sequence GTCN PAM
uccccucacucugggauggc

SEQ ID NO: 10040 - RNA, 20 nt, Artificial Sequence
  spacer sequence GTCN PAM
gcggguugggagccauccca

SEQ ID NO: 10041 - RNA, 20 nt, Artificial Sequence
  spacer sequence GTCN PAM
ggcacccucacagcucuguc

SEQ ID NO: 10042 - RNA, 20 nt, Artificial Sequence
  spacer sequence GTCN PAM
gacucuucaugugaucagcg

SEQ ID NO: 10043 - RNA, 20 nt, Artificial Sequence
  spacer sequence GTCN PAM
gacagagcugugagggugcc

SEQ ID NO: 10044 - RNA, 20 nt, Artificial Sequence
  spacer sequence GTCN PAM
cucccgggccaccaucccag

SEQ ID NO: 10045 - RNA, 20 nt, Artificial Sequence
  spacer sequence GTCN PAM
ccaggagggucccucccggg

SEQ ID NO: 10046 - RNA, 20 nt, Artificial Sequence
  spacer sequence GTCN PAM
gugggccagggacuguaggg

SEQ ID NO: 10047 - RNA, 20 nt, Artificial Sequence
  spacer sequence GTCN PAM
cuggcccacugaccuacagc

SEQ ID NO: 10048 - RNA, 20 nt, Artificial Sequence
  spacer sequence GTCN PAM
acggccauccgccuacagcu

SEQ ID NO: 10049 - RNA, 20 nt, Artificial Sequence
  spacer sequence GTCN PAM
acggccaucugccuacagcg

SEQ ID NO: 10050 - RNA, 20 nt, Artificial Sequence
  spacer sequence GTCN PAM
acggccauccgccuacagcu

SEQ ID NO: 10051 - RNA, 20 nt, Artificial Sequence
  spacer sequence GTCN PAM
gggccacacacaguccacgg

SEQ ID NO: 10052 - RNA, 20 nt, Artificial Sequence
  spacer sequence GTCN PAM
gcggccaaccgccuaaagcu

SEQ ID NO: 10053 - RNA, 20 nt, Artificial Sequence
  spacer sequence GTCN PAM
aggccucaguuuccccagcu

SEQ ID NO: 10054 - RNA, 20 nt, Artificial Sequence
  spacer sequence GTCN PAM
aggccucaguuuccccagcu

SEQ ID NO: 10055 - RNA, 20 nt, Artificial Sequence
  spacer sequence GTCN PAM
gcggccucucaccuacagcu

SEQ ID NO: 10056 - RNA, 20 nt, Artificial Sequence
  spacer sequence GTCN PAM
aggccucaguuuccccagcu

SEQ ID NO: 10057 - RNA, 20 nt, Artificial Sequence
  spacer sequence GTCN PAM
uuggccgcccgccuacagcu

SEQ ID NO: 10058 - RNA, 20 nt, Artificial Sequence
  spacer sequence GTCN PAM
aggccucaguuuccccaccu

SEQ ID NO: 10059 - RNA, 20 nt, Artificial Sequence
  spacer sequence GTCN PAM
gcggccgcccgccuacaggu

SEQ ID NO: 10060 - RNA, 20 nt, Artificial Sequence
  spacer sequence GTCN PAM
aggccucaguuuccccagcu

SEQ ID NO: 10061 - RNA, 20 nt, Artificial Sequence
  spacer sequence GTCN PAM
gcggccucucaccuacagcu

SEQ ID NO: 10062 - RNA, 20 nt, Artificial Sequence
  spacer sequence GTCN PAM
aggccucaguuuccccagcu

SEQ ID NO: 10063 - RNA, 20 nt, Artificial Sequence
  spacer sequence GTCN PAM
aggccucaguuuccccagcu

SEQ ID NO: 10064 - RNA, 20 nt, Artificial Sequence
  spacer sequence GTCN PAM
gcggccgcccgccuacagcu

SEQ ID NO: 10065 - RNA, 20 nt, Artificial Sequence
  spacer sequence GTCN PAM
aggccucaguuuucccagcu

SEQ ID NO: 10066 - RNA, 20 nt, Artificial Sequence
  spacer sequence GTCN PAM
gcggccggcugccuacagcu

SEQ ID NO: 10067 - RNA, 20 nt, Artificial Sequence
  spacer sequence GTCN PAM
gggccccgcacaguccgcgg

SEQ ID NO: 10068 - RNA, 20 nt, Artificial Sequence
  spacer sequence GTCN PAM
ggauucgcuguuccggggcg

SEQ ID NO: 10069 - RNA, 20 nt, Artificial Sequence
  spacer sequence GTCN PAM
ggggugaccccggaucaugg

SEQ ID NO: 10070 - RNA, 20 nt, Artificial Sequence
  spacer sequence GTCN PAM
cccccgaccguucuuuguuc

SEQ ID NO: 10071 - RNA, 20 nt, Artificial Sequence
  spacer sequence GTCN PAM
gggacgcgacgcggccuuuc

SEQ ID NO: 10072 - RNA, 20 nt, Artificial Sequence
  spacer sequence GTCN PAM
cggacacgccagggcuguuu

SEQ ID NO: 10073 - RNA, 20 nt, Artificial Sequence
  spacer sequence GTCN PAM
cgucccggacacgccagggc

SEQ ID NO: 10074 - RNA, 20 nt, Artificial Sequence
  spacer sequence GTCN PAM
gauucaaacugagcgcucac

SEQ ID NO: 10075 - RNA, 20 nt, Artificial Sequence
  spacer sequence GTCN PAM
ggcaggaaacccucagggcu

SEQ ID NO: 10076 - RNA, 20 nt, Artificial Sequence
  spacer sequence GTCN PAM
caucgccaucuuggagucgg

SEQ ID NO: 10077 - RNA, 20 nt, Artificial Sequence
  spacer sequence GTCN PAM
ugcccacuugcaagauggcg

SEQ ID NO: 10078 - RNA, 20 nt, Artificial Sequence
  spacer sequence GTCN PAM
ggcggcgggaagcgugcuuu

SEQ ID NO: 10079 - RNA, 20 nt, Artificial Sequence
  spacer sequence GTCN PAM
cccgcaaagccacgcgccag

SEQ ID NO: 10080 - RNA, 20 nt, Artificial Sequence
  spacer sequence GTCN PAM
gcuggcgcguggcuuugcgg

SEQ ID NO: 10081 - RNA, 20 nt, Artificial Sequence
  spacer sequence GTCN PAM
gagccagucagcuggcgcgu

SEQ ID NO: 10082 - RNA, 20 nt, Artificial Sequence
  spacer sequence GTCN PAM
cgugaucccauuuucucccc

SEQ ID NO: 10083 - RNA, 20 nt, Artificial Sequence
  spacer sequence GTCN PAM
ggggagggggagaaaauggg

SEQ ID NO: 10084 - RNA, 20 nt, Artificial Sequence
  spacer sequence GTCN PAM
cgcccccgggcggccuucug

SEQ ID NO: 10085 - RNA, 20 nt, Artificial Sequence
  spacer sequence GTCN PAM
cccgcgcgcgcugcccauug

SEQ ID NO: 10086 - RNA, 20 nt, Artificial Sequence
  spacer sequence GTCN PAM
ccgccauuuugugagucuau

SEQ ID NO: 10087 - RNA, 20 nt, Artificial Sequence
  spacer sequence GTCN PAM
auaacucggagccguugggu

SEQ ID NO: 10088 - RNA, 20 nt, Artificial Sequence
  spacer sequence GTCN PAM
guuccugcuauuccggcgcc

SEQ ID NO: 10089 - RNA, 20 nt, Artificial Sequence
  spacer sequence GTCN PAM
cccgcgggucugcucugugu

SEQ ID NO: 10090 - RNA, 20 nt, Artificial Sequence
  spacer sequence GTCN PAM
gcucugugugccauggacgg

SEQ ID NO: 10091 - RNA, 20 nt, Artificial Sequence
  spacer sequence GTCN PAM
auggcacacagagcagaccc

SEQ ID NO: 10092 - RNA, 20 nt, Artificial Sequence
  spacer sequence GTCN PAM
cacgucgccccgcgccccac

SEQ ID NO: 10093 - RNA, 20 nt, Artificial Sequence
  spacer sequence GTCN PAM
ccccgcgccccaccgcccuc

SEQ ID NO: 10094 - RNA, 20 nt, Artificial Sequence
  spacer sequence GTCN PAM
ggggcuucccgggggucugg

SEQ ID NO: 10095 - RNA, 20 nt, Artificial Sequence
  spacer sequence GTCN PAM
ggccgcguccccaucccccg

SEQ ID NO: 10096 - RNA, 20 nt, Artificial Sequence
  spacer sequence GTCN PAM
ccaucccccguccggcccgc

SEQ ID NO: 10097 - RNA, 20 nt, Artificial Sequence
  spacer sequence GTCN PAM
ggcccgcuuccggcccccgc

SEQ ID NO: 10098 - RNA, 20 nt, Artificial Sequence
  spacer sequence GTCN PAM
cuagcgcacgcggccucccg

SEQ ID NO: 10099 - RNA, 20 nt, Artificial Sequence
  spacer sequence GTCN PAM
ccgcacuucgccuuugcccc

SEQ ID NO: 10100 - RNA, 20 nt, Artificial Sequence
  spacer sequence GTCN PAM
ggcccucgcgcgcccggaug

SEQ ID NO: 10101 - RNA, 20 nt, Artificial Sequence
  spacer sequence GTCN PAM
gcuccccucgugcgccugcg

SEQ ID NO: 10102 - RNA, 20 nt, Artificial Sequence
  spacer sequence GTCN PAM
cgcguccccguuggccccag

SEQ ID NO: 10103 - RNA, 20 nt, Artificial Sequence
  spacer sequence GTCN PAM
ccguuggccccagcgcgcgu

SEQ ID NO: 10104 - RNA, 20 nt, Artificial Sequence
  spacer sequence GTCN PAM
gggcggcgggaaaggcgcgc

SEQ ID NO: 10105 - RNA, 20 nt, Artificial Sequence
  spacer sequence GTCN PAM
cugcgcuccccgcccuaccc

SEQ ID NO: 10106 - RNA, 20 nt, Artificial Sequence
  spacer sequence GTCN PAM
guccuccgccccggggccgg

SEQ ID NO: 10107 - RNA, 20 nt, Artificial Sequence
  spacer sequence GTCN PAM
uccgccccggggccggaggg

SEQ ID NO: 10108 - RNA, 20 nt, Artificial Sequence
  spacer sequence GTCN PAM
cuggagaggccccuccggcc

SEQ ID NO: 10109 - RNA, 20 nt, Artificial Sequence
  spacer sequence GTCN PAM
uggggaggggccuucccggc

SEQ ID NO: 10110 - RNA, 20 nt, Artificial Sequence
  spacer sequence GTCN PAM
cgccgagcgcuuccugcgcg

SEQ ID NO: 10111 - RNA, 20 nt, Artificial Sequence
  spacer sequence GTCN PAM
cuuuuaaaagucuguuaaac

SEQ ID NO: 10112 - RNA, 20 nt, Artificial Sequence
  spacer sequence GTCN PAM
guuaaacgugguccgugcag

SEQ ID NO: 10113 - RNA, 20 nt, Artificial Sequence
  spacer sequence GTCN PAM
gugcagucuguggugucaga

SEQ ID NO: 10114 - RNA, 20 nt, Artificial Sequence
  spacer sequence GTCN PAM
guggugucagaagaggcgca

SEQ ID NO: 10115 - RNA, 20 nt, Artificial Sequence
  spacer sequence GTCN PAM
gaagaggcgcagcccuagag

SEQ ID NO: 10116 - RNA, 20 nt, Artificial Sequence
  spacer sequence GTCN PAM
ggaccccuuagcaugcgugc

SEQ ID NO: 10117 - RNA, 20 nt, Artificial Sequence
  spacer sequence GTCN PAM
agacccacucuagggcugcg

SEQ ID NO: 10118 - RNA, 20 nt, Artificial Sequence
  spacer sequence GTCN PAM
ugcagacggcgagacgaggg

SEQ ID NO: 10119 - RNA, 20 nt, Artificial Sequence
  spacer sequence GTCN PAM
gcaggacccaccugcccgca

SEQ ID NO: 10120 - RNA, 20 nt, Artificial Sequence
  spacer sequence GTCN PAM
cgccgucugcaggacccacc

SEQ ID NO: 10121 - RNA, 20 nt, Artificial Sequence
  spacer sequence GTCN PAM
gagagcggggagcccucguc

SEQ ID NO: 10122 - RNA, 20 nt, Artificial Sequence
  spacer sequence GTCN PAM
gaagggcagccuccgggccu

SEQ ID NO: 10123 - RNA, 20 nt, Artificial Sequence
  spacer sequence GTCN PAM
gucggaagggcagccuccgg

SEQ ID NO: 10124 - RNA, 20 nt, Artificial Sequence
  spacer sequence GTCN PAM
cuuagggccucgccgggagu

SEQ ID NO: 10125 - RNA, 20 nt, Artificial Sequence
  spacer sequence GTCN PAM
ggaccuggccggggcugaag

SEQ ID NO: 10126 - RNA, 20 nt, Artificial Sequence
  spacer sequence GTCN PAM
ugacccaacagugagcuccc

SEQ ID NO: 10127 - RNA, 20 nt, Artificial Sequence
  spacer sequence GTCN PAM
gaggcccucccuucagcccc

SEQ ID NO: 10128 - RNA, 20 nt, Artificial Sequence
  spacer sequence GTCN PAM
ggcuuucuauccaccuuccc

SEQ ID NO: 10129 - RNA, 20 nt, Artificial Sequence
  spacer sequence GTCN PAM
cgaggagggagagucggguc

SEQ ID NO: 10130 - RNA, 20 nt, Artificial Sequence
  spacer sequence GTCN PAM
ggucgggcggggcucggguu

SEQ ID NO: 10131 - RNA, 20 nt, Artificial Sequence
  spacer sequence GTCN PAM
ggcggggcucggguugauca

SEQ ID NO: 10132 - RNA, 20 nt, Artificial Sequence
  spacer sequence GTCN PAM
gucuguuaauuuuuauugac

SEQ ID NO: 10133 - RNA, 20 nt, Artificial Sequence
  spacer sequence GTCN PAM
guuaauuuuuauugacgguu

SEQ ID NO: 10134 - RNA, 20 nt, Artificial Sequence
  spacer sequence GTCN PAM
auaaaaauuaacagaccgac

SEQ ID NO: 10135 - RNA, 20 nt, Artificial Sequence
  spacer sequence GTCN PAM
uugucuuggaacgugugggg

SEQ ID NO: 10136 - RNA, 20 nt, Artificial Sequence
  spacer sequence GTCN PAM
uggaacguguggggccuggu

SEQ ID NO: 10137 - RNA, 20 nt, Artificial Sequence
  spacer sequence GTCN PAM
agagguggggccuggggucc

SEQ ID NO: 10138 - RNA, 20 nt, Artificial Sequence
  spacer sequence GTCN PAM
ugcugggagggaggggcgcc

SEQ ID NO: 10139 - RNA, 20 nt, Artificial Sequence
  spacer sequence GTCN PAM
uuuggcgccccucccuccca

SEQ ID NO: 10140 - RNA, 20 nt, Artificial Sequence
  spacer sequence GTCN PAM
aguggacggcucacuucccu

SEQ ID NO: 10141 - RNA, 20 nt, Artificial Sequence
  spacer sequence GTCN PAM
acuugacugcaacuugaaaa

SEQ ID NO: 10142 - RNA, 20 nt, Artificial Sequence
  spacer sequence GTCN PAM
cugcagcugccaccuccgca

SEQ ID NO: 10143 - RNA, 20 nt, Artificial Sequence
  spacer sequence GTCN PAM
ccgggccaggagagcccgua

SEQ ID NO: 10144 - RNA, 20 nt, Artificial Sequence
  spacer sequence GTCN PAM
ccuuucuuucucucuacagc

SEQ ID NO: 10145 - RNA, 20 nt, Artificial Sequence
  spacer sequence GTCN PAM
cagauauagccguugguaca

SEQ ID NO: 10146 - RNA, 20 nt, Artificial Sequence
  spacer sequence GTCN PAM
cggagaagcaaagugagaag

SEQ ID NO: 10147 - RNA, 20 nt, Artificial Sequence
  spacer sequence GTCN PAM
gaggagcgucacggagaagc

SEQ ID NO: 10148 - RNA, 20 nt, Artificial Sequence
  spacer sequence GTCN PAM
gcacaaggucagaggagcgu

SEQ ID NO: 10149 - RNA, 20 nt, Artificial Sequence
  spacer sequence GTCN PAM
ggaaucuggaguugggcggu

SEQ ID NO: 10150 - RNA, 20 nt, Artificial Sequence
  spacer sequence GTCN PAM
ggaaucugagcugcucuucg

SEQ ID NO: 10151 - RNA, 20 nt, Artificial Sequence
  spacer sequence GTCN PAM
gcagcgagggcucugugugc

SEQ ID NO: 10152 - RNA, 20 nt, Artificial Sequence
  spacer sequence GTCN PAM
cccaggcagccacaacauga

SEQ ID NO: 10153 - RNA, 20 nt, Artificial Sequence
  spacer sequence GTCN PAM
ccuccacagccagguggcuc

SEQ ID NO: 10154 - RNA, 20 nt, Artificial Sequence
  spacer sequence GTCN PAM
aaaucaaccaguaaaugccc

SEQ ID NO: 10155 - RNA, 20 nt, Artificial Sequence
  spacer sequence GTCN PAM
ugcuuugucaccaggcugga

SEQ ID NO: 10156 - RNA, 20 nt, Artificial Sequence
  spacer sequence GTCN PAM
ccaggcuggagugcaguggu

SEQ ID NO: 10157 - RNA, 20 nt, Artificial Sequence
  spacer sequence GTCN PAM
ggaacacaggugaugcaccc

SEQ ID NO: 10158 - RNA, 20 nt, Artificial Sequence
  spacer sequence GTCN PAM
ggcggcucacaacuguaauc

SEQ ID NO: 10159 - RNA, 20 nt, Artificial Sequence
  spacer sequence GTCN PAM
gccgggucuggcggcucaca

SEQ ID NO: 10160 - RNA, 20 nt, Artificial Sequence
  spacer sequence GTCN PAM
aaggugguguuuggggcaag

SEQ ID NO: 10161 - RNA, 20 nt, Artificial Sequence
  spacer sequence GTCN PAM
cuggggugugcgaaucuugc

SEQ ID NO: 10162 - RNA, 20 nt, Artificial Sequence
  spacer sequence GTCN PAM
gaaccuggagaagaagaagg

SEQ ID NO: 10163 - RNA, 20 nt, Artificial Sequence
  spacer sequence GTCN PAM
uggggaggcgauucucgagg

SEQ ID NO: 10164 - RNA, 20 nt, Artificial Sequence
  spacer sequence GTCN PAM
ucgcuuagcugggguaguug

SEQ ID NO: 10165 - RNA, 20 nt, Artificial Sequence
  spacer sequence GTCN PAM
uuguggguugagggggcucc

SEQ ID NO: 10166 - RNA, 20 nt, Artificial Sequence
  spacer sequence GTCN PAM
ggagcccccucaacccacaa

SEQ ID NO: 10167 - RNA, 20 nt, Artificial Sequence
  spacer sequence GTCN PAM
ugagccagcagccaguuggu

SEQ ID NO: 10168 - RNA, 20 nt, Artificial Sequence
  spacer sequence GTCN PAM
gucagcaguggugccugggc

SEQ ID NO: 10169 - RNA, 20 nt, Artificial Sequence
  spacer sequence GTCN PAM
gcaguggugccugggccagg

SEQ ID NO: 10170 - RNA, 20 nt, Artificial Sequence
  spacer sequence GTCN PAM
acuugggaaaaaccgaaacc

SEQ ID NO: 10171 - RNA, 20 nt, Artificial Sequence
  spacer sequence GTCN PAM
uuacgcgcugccugccccga

SEQ ID NO: 10172 - RNA, 20 nt, Artificial Sequence
  spacer sequence GTCN PAM
ggcuugcaggcagucgucuc

SEQ ID NO: 10173 - RNA, 20 nt, Artificial Sequence
  spacer sequence GTCN PAM
ucucuucccugcuucugugg

SEQ ID NO: 10174 - RNA, 20 nt, Artificial Sequence
  spacer sequence GTCN PAM
cuucccugcuucugugggcc

SEQ ID NO: 10175 - RNA, 20 nt, Artificial Sequence
  spacer sequence GTCN PAM
uugagcccuccucugcaguu

SEQ ID NO: 10176 - RNA, 20 nt, Artificial Sequence
  spacer sequence GTCN PAM
cagcccaggagcccccuagg

SEQ ID NO: 10177 - RNA, 20 nt, Artificial Sequence
  spacer sequence GTCN PAM
uggcugggcuucaacguccc

SEQ ID NO: 10178 - RNA, 20 nt, Artificial Sequence
  spacer sequence GTCN PAM
uccuaccagggccugcaccc

SEQ ID NO: 10179 - RNA, 20 nt, Artificial Sequence
  spacer sequence GTCN PAM
ggguacuaccccguccuccu

SEQ ID NO: 10180 - RNA, 20 nt, Artificial Sequence
  spacer sequence GTCN PAM
gcugagggcucccugguggu

SEQ ID NO: 10181 - RNA, 20 nt, Artificial Sequence
  spacer sequence GTCN PAM
uuuagcccaggacagagcaa

SEQ ID NO: 10182 - RNA, 20 nt, Artificial Sequence
  spacer sequence GTCN PAM
ugggcuaaaggacagcguag

SEQ ID NO: 10183 - RNA, 20 nt, Artificial Sequence
  spacer sequence GTCN PAM
uuaaccccacacugaacaag

SEQ ID NO: 10184 - RNA, 20 nt, Artificial Sequence
  spacer sequence GTCN PAM
gcagcuggggcccuacagca

SEQ ID NO: 10185 - RNA, 20 nt, Artificial Sequence
  spacer sequence GTCN PAM
uggggcguuuccugucaauc

SEQ ID NO: 10186 - RNA, 20 nt, Artificial Sequence
  spacer sequence GTCN PAM
aucugugugcuucaggacag

SEQ ID NO: 10187 - RNA, 20 nt, Artificial Sequence
  spacer sequence GTCN PAM
ugaagcacacagauugacag

SEQ ID NO: 10188 - RNA, 20 nt, Artificial Sequence
  spacer sequence GTCN PAM
cuucagggcaccuguccuga

SEQ ID NO: 10189 - RNA, 20 nt, Artificial Sequence
  spacer sequence GTCN PAM
ccugguugcugcccugugga

SEQ ID NO: 10190 - RNA, 20 nt, Artificial Sequence
  spacer sequence GTCN PAM
cuuccguucugcuggggcgc

SEQ ID NO: 10191 - RNA, 20 nt, Artificial Sequence
  spacer sequence GTCN PAM
gcggcagcaaacuccaugcc

SEQ ID NO: 10192 - RNA, 20 nt, Artificial Sequence
  spacer sequence GTCN PAM
ucuuggccgccugccugaag

SEQ ID NO: 10193 - RNA, 20 nt, Artificial Sequence
  spacer sequence GTCN PAM
aagacaggguccaagaugcc

SEQ ID NO: 10194 - RNA, 20 nt, Artificial Sequence
  spacer sequence GTCN PAM
uugacuggaguggugggcgg

SEQ ID NO: 10195 - RNA, 20 nt, Artificial Sequence
  spacer sequence GTCN PAM
aagaugcccuuuuuaagguu

SEQ ID NO: 10196 - RNA, 20 nt, Artificial Sequence
  spacer sequence GTCN PAM
ucccccaagcuggagagugg

SEQ ID NO: 10197 - RNA, 20 nt, Artificial Sequence
  spacer sequence GTCN PAM
uggacggggucggcuccugg

SEQ ID NO: 10198 - RNA, 20 nt, Artificial Sequence
  spacer sequence GTCN PAM
aggacaccagggcugguccu

SEQ ID NO: 10199 - RNA, 20 nt, Artificial Sequence
  spacer sequence GTCN PAM
gcuccugggcucccccagcc

SEQ ID NO: 10200 - RNA, 20 nt, Artificial Sequence
  spacer sequence GTCN PAM
gcucuccccuccagcucaga

SEQ ID NO: 10201 - RNA, 20 nt, Artificial Sequence
  spacer sequence GTCN PAM
cuuccugucugcucuccccu

SEQ ID NO: 10202 - RNA, 20 nt, Artificial Sequence
  spacer sequence GTCN PAM
caggugcacccauccucccu

SEQ ID NO: 10203 - RNA, 20 nt, Artificial Sequence
  spacer sequence GTCN PAM
ucccuuccuccgguccuggc

SEQ ID NO: 10204 - RNA, 20 nt, Artificial Sequence
  spacer sequence GTCN PAM
uggcacugcuguguuuucug

SEQ ID NO: 10205 - RNA, 20 nt, Artificial Sequence
  spacer sequence GTCN PAM
gagccagccgccucaggugg

SEQ ID NO: 10206 - RNA, 20 nt, Artificial Sequence
  spacer sequence GTCN PAM
ggggcccccuaugagcacaa

SEQ ID NO: 10207 - RNA, 20 nt, Artificial Sequence
  spacer sequence GTCN PAM
ucucgcuuucagagucuggg

SEQ ID NO: 10208 - RNA, 20 nt, Artificial Sequence
  spacer sequence GTCN PAM
guuuucaguauuuggcuuca

SEQ ID NO: 10209 - RNA, 20 nt, Artificial Sequence
  spacer sequence GTCN PAM
ggccggaaccucagggccgc

SEQ ID NO: 10210 - RNA, 20 nt, Artificial Sequence
  spacer sequence GTCN PAM
cggcggcccugagguuccgg

SEQ ID NO: 10211 - RNA, 20 nt, Artificial Sequence
  spacer sequence GTCN PAM
agugucacggcggcccugag

SEQ ID NO: 10212 - RNA, 20 nt, Artificial Sequence
  spacer sequence GTCN PAM
gagaaugaacaguguccagu

SEQ ID NO: 10213 - RNA, 20 nt, Artificial Sequence
  spacer sequence GTCN PAM
uggggacugaacaggugcca

SEQ ID NO: 10214 - RNA, 20 nt, Artificial Sequence
  spacer sequence GTCN PAM
ccaagacuuuagggucagag

SEQ ID NO: 10215 - RNA, 20 nt, Artificial Sequence
  spacer sequence GTCN PAM
acaggcccggcgcccaccca

SEQ ID NO: 10216 - RNA, 20 nt, Artificial Sequence
  spacer sequence GTCN PAM
ccaaacaagcaaucgagcag

SEQ ID NO: 10217 - RNA, 20 nt, Artificial Sequence
  spacer sequence GTCN PAM
cccaccaaucccacaagcac

SEQ ID NO: 10218 - RNA, 20 nt, Artificial Sequence
  spacer sequence GTCN PAM
cauuggcaagggccaguccc

SEQ ID NO: 10219 - RNA, 20 nt, Artificial Sequence
  spacer sequence GTCN PAM
cuguuccccauccuccuuga

SEQ ID NO: 10220 - RNA, 20 nt, Artificial Sequence
  spacer sequence GTCN PAM
cccgaggcucuugccguccg

SEQ ID NO: 10221 - RNA, 20 nt, Artificial Sequence
  spacer sequence GTCN PAM
gcgucgggaggaggcagcug

SEQ ID NO: 10222 - RNA, 20 nt, Artificial Sequence
  spacer sequence GTCN PAM
ggaggaggcagcuguggggc

SEQ ID NO: 10223 - RNA, 20 nt, Artificial Sequence
  spacer sequence GTCN PAM
uccuuccaggaagcucuuga

SEQ ID NO: 10224 - RNA, 20 nt, Artificial Sequence
  spacer sequence GTCN PAM
ucucuuaaggccgccucccc

SEQ ID NO: 10225 - RNA, 20 nt, Artificial Sequence
  spacer sequence GTCN PAM
aggagcugcccccacaccug

SEQ ID NO: 10226 - RNA, 20 nt, Artificial Sequence
  spacer sequence GTCN PAM
gaggggggacagggugugau

SEQ ID NO: 10227 - RNA, 20 nt, Artificial Sequence
  spacer sequence GTCN PAM
ccccucagacaacccccagc

SEQ ID NO: 10228 - RNA, 20 nt, Artificial Sequence
  spacer sequence GTCN PAM
uggggggccugggcguugcu

SEQ ID NO: 10229 - RNA, 20 nt, Artificial Sequence
  spacer sequence GTCN PAM
gcaaagcgagccucugcagg

SEQ ID NO: 10230 - RNA, 20 nt, Artificial Sequence
  spacer sequence GTCN PAM
ucagacccgagcuuuguuuu

SEQ ID NO: 10231 - RNA, 20 nt, Artificial Sequence
  spacer sequence GTCN PAM
gaggaccuuggagcacaggc

SEQ ID NO: 10232 - RNA, 20 nt, Artificial Sequence
  spacer sequence GTCN PAM
ccuccaauuucacucuuuga

SEQ ID NO: 10233 - RNA, 20 nt, Artificial Sequence
  spacer sequence GTCN PAM
ucaauccuugcagcgggggg

SEQ ID NO: 10234 - RNA, 20 nt, Artificial Sequence
  spacer sequence GTCN PAM
gccguccugagccuaggauc

SEQ ID NO: 10235 - RNA, 20 nt, Artificial Sequence
  spacer sequence GTCN PAM
ugagccuaggaucagucuag

SEQ ID NO: 10236 - RNA, 20 nt, Artificial Sequence
  spacer sequence GTCN PAM
agugcaauucuuagaaguug

SEQ ID NO: 10237 - RNA, 20 nt, Artificial Sequence
  spacer sequence GTCN PAM
auuuucucuccagaaacaau

SEQ ID NO: 10238 - RNA, 20 nt, Artificial Sequence
  spacer sequence GTCN PAM
gaagugauggagccgcugug

SEQ ID NO: 10239 - RNA, 20 nt, Artificial Sequence
  spacer sequence GTCN PAM
cggccgcgauaccagcggau

SEQ ID NO: 10240 - RNA, 20 nt, Artificial Sequence
  spacer sequence GTCN PAM
cuaguccucagucucgcgug

SEQ ID NO: 10241 - RNA, 20 nt, Artificial Sequence
  spacer sequence GTCN PAM
ucagucucgcgugugcagag

SEQ ID NO: 10242 - RNA, 20 nt, Artificial Sequence
  spacer sequence GTCN PAM
cgcgugugcagagacggagg

SEQ ID NO: 10243 - RNA, 20 nt, Artificial Sequence
  spacer sequence GTCN PAM
cugcacacgcgagacugagg

SEQ ID NO: 10244 - RNA, 20 nt, Artificial Sequence
  spacer sequence GTCN PAM
gguuucuuuuccgggcugga

SEQ ID NO: 10245 - RNA, 20 nt, Artificial Sequence
  spacer sequence GTCN PAM
ucacuucugguggccucgca

SEQ ID NO: 10246 - RNA, 20 nt, Artificial Sequence
  spacer sequence GTCN PAM
ucugcccugcuggcuggugg

SEQ ID NO: 10247 - RNA, 20 nt, Artificial Sequence
  spacer sequence GTCN PAM
acagcagaguuggccgugga

SEQ ID NO: 10248 - RNA, 20 nt, Artificial Sequence
  spacer sequence GTCN PAM
uggagcuguggggugccgug

SEQ ID NO: 10249 - RNA, 20 nt, Artificial Sequence
  spacer sequence GTCN PAM
augggcugggucugcgcuca

SEQ ID NO: 10250 - RNA, 20 nt, Artificial Sequence
  spacer sequence GTCN PAM
gcgcucaggcugcccugccg

SEQ ID NO: 10251 - RNA, 20 nt, Artificial Sequence
  spacer sequence GTCN PAM
gggaccccaggcagcccaag

SEQ ID NO: 10252 - RNA, 20 nt, Artificial Sequence
  spacer sequence GTCN PAM
cagacccccaacccauaccc

SEQ ID NO: 10253 - RNA, 20 nt, Artificial Sequence
  spacer sequence GTCN PAM
cuucucuugcagcggggauc

SEQ ID NO: 10254 - RNA, 20 nt, Artificial Sequence
  spacer sequence GTCN PAM
gauccccgcugcaagagaag

SEQ ID NO: 10255 - RNA, 20 nt, Artificial Sequence
  spacer sequence GTCN PAM
cuaacggaccguuuaucaug

SEQ ID NO: 10256 - RNA, 20 nt, Artificial Sequence
  spacer sequence GTCN PAM
guuagugacacaaguagaga

SEQ ID NO: 10257 - RNA, 20 nt, Artificial Sequence
  spacer sequence GTCN PAM
cggccuuaccugcagaagcc

SEQ ID NO: 10258 - RNA, 20 nt, Artificial Sequence
  spacer sequence GTCN PAM
ugcccugggccgagucccgg

SEQ ID NO: 10259 - RNA, 20 nt, Artificial Sequence
  spacer sequence GTCN PAM
uucccuggaacaacguuacg

SEQ ID NO: 10260 - RNA, 20 nt, Artificial Sequence
  spacer sequence GTCN PAM
cagaacaagaacguaacguu

SEQ ID NO: 10261 - RNA, 20 nt, Artificial Sequence
  spacer sequence GTCN PAM
acgcuacagacccaggucca

SEQ ID NO: 10262 - RNA, 20 nt, Artificial Sequence
  spacer sequence GTCN PAM
guagcguggaccaugggccc

SEQ ID NO: 10263 - RNA, 20 nt, Artificial Sequence
  spacer sequence GTCN PAM
aaguucucgcugcagagaau

SEQ ID NO: 10264 - RNA, 20 nt, Artificial Sequence
  spacer sequence GTCN PAM
aggcuggcacuuggaccugu

SEQ ID NO: 10265 - RNA, 20 nt, Artificial Sequence
  spacer sequence GTCN PAM
aagugccagccuggaccauc

SEQ ID NO: 10266 - RNA, 20 nt, Artificial Sequence
  spacer sequence GTCN PAM
ggagcugucgggagcagggg

SEQ ID NO: 10267 - RNA, 20 nt, Artificial Sequence
  spacer sequence GTCN PAM
ggagcagggguccugacugu

SEQ ID NO: 10268 - RNA, 20 nt, Artificial Sequence
  spacer sequence GTCN PAM
ugacugugcaggucuuggcc

SEQ ID NO: 10269 - RNA, 20 nt, Artificial Sequence
  spacer sequence GTCN PAM
ggaccccugcucccgacagc

SEQ ID NO: 10270 - RNA, 20 nt, Artificial Sequence
  spacer sequence GTCN PAM
uggccucucgcgcugcuggu

SEQ ID NO: 10271 - RNA, 20 nt, Artificial Sequence
  spacer sequence GTCN PAM
ccguagcaggcagggcucua

SEQ ID NO: 10272 - RNA, 20 nt, Artificial Sequence
  spacer sequence GTCN PAM
cugcuaucccccuagagccc

SEQ ID NO: 10273 - RNA, 20 nt, Artificial Sequence
  spacer sequence GTCN PAM
uuuccguuugcugaaaaggg

SEQ ID NO: 10274 - RNA, 20 nt, Artificial Sequence
  spacer sequence GTCN PAM
ccuuugaacuucuugcuguc

SEQ ID NO: 10275 - RNA, 20 nt, Artificial Sequence
  spacer sequence GTCN PAM
ccucuagagugauccacauc

SEQ ID NO: 10276 - RNA, 20 nt, Artificial Sequence
  spacer sequence GTCN PAM
auggggagcuuccggaugug

SEQ ID NO: 10277 - RNA, 20 nt, Artificial Sequence
  spacer sequence GTCN PAM
cggagggggaagucaucucc

SEQ ID NO: 10278 - RNA, 20 nt, Artificial Sequence
  spacer sequence GTCN PAM
ucucccuggggcugcccuuu

SEQ ID NO: 10279 - RNA, 20 nt, Artificial Sequence
  spacer sequence GTCN PAM
ccaaccuccugaugcugaag

SEQ ID NO: 10280 - RNA, 20 nt, Artificial Sequence
  spacer sequence GTCN PAM
ccgccugcacggugugagca

SEQ ID NO: 10281 - RNA, 20 nt, Artificial Sequence
  spacer sequence GTCN PAM
ccgagguguaguaguucacc

SEQ ID NO: 10282 - RNA, 20 nt, Artificial Sequence
  spacer sequence GTCN PAM
ucagcuccuugugguuggag

SEQ ID NO: 10283 - RNA, 20 nt, Artificial Sequence
  spacer sequence GTCN PAM
gucuucagcuccuugugguu

SEQ ID NO: 10284 - RNA, 20 nt, Artificial Sequence
  spacer sequence GTCN PAM
gccgcggggccacgcaccgc

SEQ ID NO: 10285 - RNA, 20 nt, Artificial Sequence
  spacer sequence GTCN PAM
ccgggcugcugggguccgcc

SEQ ID NO: 10286 - RNA, 20 nt, Artificial Sequence
  spacer sequence GTCN PAM
ccggccccugcggcugggcc

SEQ ID NO: 10287 - RNA, 20 nt, Artificial Sequence
  spacer sequence GTCN PAM
agucggggaaccuggccuug

SEQ ID NO: 10288 - RNA, 20 nt, Artificial Sequence
  spacer sequence GTCN PAM
gggaaccuggccuuggcugc

SEQ ID NO: 10289 - RNA, 20 nt, Artificial Sequence
  spacer sequence GTCN PAM
acggccgccgccgaggcagc

SEQ ID NO: 10290 - RNA, 20 nt, Artificial Sequence
  spacer sequence GTCN PAM
caggguagaagagguucucc

SEQ ID NO: 10291 - RNA, 20 nt, Artificial Sequence
  spacer sequence GTCN PAM
caucaccgccagggcagguc

SEQ ID NO: 10292 - RNA, 20 nt, Artificial Sequence
  spacer sequence GTCN PAM
gcugcuauugcugugggcac

SEQ ID NO: 10293 - RNA, 20 nt, Artificial Sequence
  spacer sequence GTCN PAM
cgggccacagcaugagcucc

SEQ ID NO: 10294 - RNA, 20 nt, Artificial Sequence
  spacer sequence GTCN PAM
gcauacugcagcagggccug

SEQ ID NO: 10295 - RNA, 20 nt, Artificial Sequence
  spacer sequence GTCN PAM
cgggagccccacucaccagc

SEQ ID NO: 10296 - RNA, 20 nt, Artificial Sequence
  spacer sequence GTCN PAM
ccgggccagggccagggcgg

SEQ ID NO: 10297 - RNA, 20 nt, Artificial Sequence
  spacer sequence GTCN PAM
cacggucccucuccccucag

SEQ ID NO: 10298 - RNA, 20 nt, Artificial Sequence
  spacer sequence GTCN PAM
cucuccccucagucgcugga

SEQ ID NO: 10299 - RNA, 20 nt, Artificial Sequence
  spacer sequence GTCN PAM
cuggacgggcagaacaucua

SEQ ID NO: 10300 - RNA, 20 nt, Artificial Sequence
  spacer sequence GTCN PAM
agcgacugaggggagaggga

SEQ ID NO: 10301 - RNA, 20 nt, Artificial Sequence
  spacer sequence GTCN PAM
augcgcagcgugcagcaggc

SEQ ID NO: 10302 - RNA, 20 nt, Artificial Sequence
  spacer sequence GTCN PAM
aguacaacaaugacaagagc

SEQ ID NO: 10303 - RNA, 20 nt, Artificial Sequence
  spacer sequence GTCN PAM
uuguuguacuugacguugag

SEQ ID NO: 10304 - RNA, 20 nt, Artificial Sequence
  spacer sequence GTCN PAM
cggcucuugucauuguugua

SEQ ID NO: 10305 - RNA, 20 nt, Artificial Sequence
  spacer sequence GTCN PAM
gggcguguguagucacggcu

SEQ ID NO: 10306 - RNA, 20 nt, Artificial Sequence
  spacer sequence GTCN PAM
ccggaaggcaggucugggcg

SEQ ID NO: 10307 - RNA, 20 nt, Artificial Sequence
  spacer sequence GTCN PAM
agcgagggcuggcugucccc

SEQ ID NO: 10308 - RNA, 20 nt, Artificial Sequence
  spacer sequence GTCN PAM
gguccagcgagggcuggcug

SEQ ID NO: 10309 - RNA, 20 nt, Artificial Sequence
  spacer sequence GTCN PAM
ggcagccucuuaccgaaggc

SEQ ID NO: 10310 - RNA, 20 nt, Artificial Sequence
  spacer sequence GTCN PAM
auuagggccgcucaguccgg

SEQ ID NO: 10311 - RNA, 20 nt, Artificial Sequence
  spacer sequence GTCN PAM
ggagccccggcggcacgggc

SEQ ID NO: 10312 - RNA, 20 nt, Artificial Sequence
  spacer sequence GTCN PAM
agugucccccacgucgggac

SEQ ID NO: 10313 - RNA, 20 nt, Artificial Sequence
  spacer sequence GTCN PAM
cccacgucgggaccacggcc

SEQ ID NO: 10314 - RNA, 20 nt, Artificial Sequence
  spacer sequence GTCN PAM
ggaccacggcccccccugga

SEQ ID NO: 10315 - RNA, 20 nt, Artificial Sequence
  spacer sequence GTCN PAM
cgacgugggggacacuggac

SEQ ID NO: 10316 - RNA, 20 nt, Artificial Sequence
  spacer sequence GTCN PAM
cauuuauuucuaggugcacc

SEQ ID NO: 10317 - RNA, 20 nt, Artificial Sequence
  spacer sequence GTCN PAM
ugguuccccagcgacugcau

SEQ ID NO: 10318 - RNA, 20 nt, Artificial Sequence
  spacer sequence GTCN PAM
cuggggaaccaagaccaagc

SEQ ID NO: 10319 - RNA, 20 nt, Artificial Sequence
  spacer sequence GTCN PAM
gcccaggcugccgccgugga

SEQ ID NO: 10320 - RNA, 20 nt, Artificial Sequence
  spacer sequence GTCN PAM
ggggcccuucccgggagagg

SEQ ID NO: 10321 - RNA, 20 nt, Artificial Sequence
  spacer sequence GTCN PAM
ccucucccgggaagggcccc

SEQ ID NO: 10322 - RNA, 20 nt, Artificial Sequence
  spacer sequence GTCN PAM
acagagcaggcuuggccagg

SEQ ID NO: 10323 - RNA, 20 nt, Artificial Sequence
  spacer sequence GTCN PAM
uaccacugcccuggccaagc

SEQ ID NO: 10324 - RNA, 20 nt, Artificial Sequence
  spacer sequence GTCN PAM
acacgugggccuccacagcc

SEQ ID NO: 10325 - RNA, 20 nt, Artificial Sequence
  spacer sequence GTCN PAM
uuguggucugguucccuuca

SEQ ID NO: 10326 - RNA, 20 nt, Artificial Sequence
  spacer sequence GTCN PAM
gguucccuucaagcaccucc

SEQ ID NO: 10327 - RNA, 20 nt, Artificial Sequence
  spacer sequence GTCN PAM
ucgcgcucgcccggaggugc

SEQ ID NO: 10328 - RNA, 20 nt, Artificial Sequence
  spacer sequence GTCN PAM
cuaguaguugaauuugagug

SEQ ID NO: 10329 - RNA, 20 nt, Artificial Sequence
  spacer sequence GTCN PAM
ugcugcucagccucgggccg

SEQ ID NO: 10330 - RNA, 20 nt, Artificial Sequence
  spacer sequence GTCN PAM
cgccgccggucaugcugcuc

SEQ ID NO: 10331 - RNA, 20 nt, Artificial Sequence
  spacer sequence GTCN PAM
ucccgcuucccuucugggac

SEQ ID NO: 10332 - RNA, 20 nt, Artificial Sequence
  spacer sequence GTCN PAM
cagaagggaagcgggaggac

SEQ ID NO: 10333 - RNA, 20 nt, Artificial Sequence
  spacer sequence GTCN PAM
acggccagcacuggggcggc

SEQ ID NO: 10334 - RNA, 20 nt, Artificial Sequence
  spacer sequence GTCN PAM
gcauggaggcaugggcgcgc

SEQ ID NO: 10335 - RNA, 20 nt, Artificial Sequence
  spacer sequence GTCN PAM
cgggacgggcccugcuugcc

SEQ ID NO: 10336 - RNA, 20 nt, Artificial Sequence
  spacer sequence GTCN PAM
cgggaccaccgcgcaugcgc

SEQ ID NO: 10337 - RNA, 20 nt, Artificial Sequence
  spacer sequence GTCN PAM
gugcuggcggagccggagcu

SEQ ID NO: 10338 - RNA, 20 nt, Artificial Sequence
  spacer sequence GTCN PAM
gacgaccccacaggcaccca

SEQ ID NO: 10339 - RNA, 20 nt, Artificial Sequence
  spacer sequence GTCN PAM
gacccccgcacagccacccg

SEQ ID NO: 10340 - RNA, 20 nt, Artificial Sequence
  spacer sequence GTCN PAM
uccgacccccgcacagccac

SEQ ID NO: 10341 - RNA, 20 nt, Artificial Sequence
  spacer sequence GTCN PAM
ucaugcaccgaggagccgag

SEQ ID NO: 10342 - RNA, 20 nt, Artificial Sequence
  spacer sequence GTCN PAM
gccucucccacucugcggug

SEQ ID NO: 10343 - RNA, 20 nt, Artificial Sequence
  spacer sequence GTCN PAM
ggggcgccgccgcucaucuc

SEQ ID NO: 10344 - RNA, 20 nt, Artificial Sequence
  spacer sequence GTCN PAM
acggcgcccuggccccccug

SEQ ID NO: 10345 - RNA, 20 nt, Artificial Sequence
  spacer sequence GTCN PAM
gaucgccaucccgggccugg

SEQ ID NO: 10346 - RNA, 20 nt, Artificial Sequence
  spacer sequence GTCN PAM
gcaaccucaacccagaggua

SEQ ID NO: 10347 - RNA, 20 nt, Artificial Sequence
  spacer sequence GTCN PAM
cggagcagcgccgccccucg

SEQ ID NO: 10348 - RNA, 20 nt, Artificial Sequence
  spacer sequence GTCN PAM
gcgccucugcccuggcagcc

SEQ ID NO: 10349 - RNA, 20 nt, Artificial Sequence
  spacer sequence GTCN PAM
cagcgcugcagcagaggggc

SEQ ID NO: 10350 - RNA, 20 nt, Artificial Sequence
  spacer sequence GTCN PAM
gcgggacacacaggguuagc

SEQ ID NO: 10351 - RNA, 20 nt, Artificial Sequence
  spacer sequence GTCN PAM
cgcugaccagcagggcggcc

SEQ ID NO: 10352 - RNA, 20 nt, Artificial Sequence
  spacer sequence GTCN PAM
cuuaacugguggauccguua

SEQ ID NO: 10353 - RNA, 20 nt, Artificial Sequence
  spacer sequence GTCN PAM
caggaguugccgggaaacag

SEQ ID NO: 10354 - RNA, 20 nt, Artificial Sequence
  spacer sequence GTCN PAM
ugggcccccgcgagggaggg

SEQ ID NO: 10355 - RNA, 20 nt, Artificial Sequence
  spacer sequence GTCN PAM
cuccagcuccuccugagcga

SEQ ID NO: 10356 - RNA, 20 nt, Artificial Sequence
  spacer sequence GTCN PAM
guuagugcacggccucgcuc

SEQ ID NO: 10357 - RNA, 20 nt, Artificial Sequence
  spacer sequence GTCN PAM
uuagagacugacuugugcca

SEQ ID NO: 10358 - RNA, 20 nt, Artificial Sequence
  spacer sequence GTCN PAM
cuaaggacgauuacaggcgu

SEQ ID NO: 10359 - RNA, 20 nt, Artificial Sequence
  spacer sequence GTCN PAM
gucucuaaggacgauuacag

SEQ ID NO: 10360 - RNA, 20 nt, Artificial Sequence
  spacer sequence GTCN PAM
cccgcagcuguggcacaagu

SEQ ID NO: 10361 - RNA, 20 nt, Artificial Sequence
  spacer sequence GTCN PAM
cugccggcaugugagugaag

SEQ ID NO: 10362 - RNA, 20 nt, Artificial Sequence
  spacer sequence GTCN PAM
agguaaaccuguaacuggaa

SEQ ID NO: 10363 - RNA, 20 nt, Artificial Sequence
  spacer sequence GTCN PAM
cacuccacacacauuccagu

SEQ ID NO: 10364 - RNA, 20 nt, Artificial Sequence
  spacer sequence GTCN PAM
guaaauacauaagaaucagg

SEQ ID NO: 10365 - RNA, 20 nt, Artificial Sequence
  spacer sequence GTCN PAM
guuggcaaagaaauuccgga

SEQ ID NO: 10366 - RNA, 20 nt, Artificial Sequence
  spacer sequence GTCN PAM
ggauguuaauauucaagggc

SEQ ID NO: 10367 - RNA, 20 nt, Artificial Sequence
  spacer sequence GTCN PAM
ccgcaggcgugcagugguug

SEQ ID NO: 10368 - RNA, 20 nt, Artificial Sequence
  spacer sequence GTCN PAM
uccucguguggacgauuggc

SEQ ID NO: 10369 - RNA, 20 nt, Artificial Sequence
  spacer sequence GTCN PAM
acacgaggaagacagucccc

SEQ ID NO: 10370 - RNA, 20 nt, Artificial Sequence
  spacer sequence GTCN PAM
aggggggcgaguugccaauc

SEQ ID NO: 10371 - RNA, 20 nt, Artificial Sequence
  spacer sequence GTCN PAM
cuccgcugccuugcucugcu

SEQ ID NO: 10372 - RNA, 20 nt, Artificial Sequence
  spacer sequence GTCN PAM
cuaaagagagucacacccca

SEQ ID NO: 10373 - RNA, 20 nt, Artificial Sequence
  spacer sequence GTCN PAM
caccccaaagccucuuuauu

SEQ ID NO: 10374 - RNA, 20 nt, Artificial Sequence
  spacer sequence GTCN PAM
cagggcaucaaaaucaucuc

SEQ ID NO: 10375 - RNA, 20 nt, Artificial Sequence
  spacer sequence GTCN PAM
cguagauacguacgcauggu

SEQ ID NO: 10376 - RNA, 20 nt, Artificial Sequence
  spacer sequence GTCN PAM
aacucugaaaagcaugcagg

SEQ ID NO: 10377 - RNA, 20 nt, Artificial Sequence
  spacer sequence GTCN PAM
guggcauaugccaccguggc

SEQ ID NO: 10378 - RNA, 20 nt, Artificial Sequence
  spacer sequence GTCN PAM
uggaugcuaugacuuugcug

SEQ ID NO: 10379 - RNA, 20 nt, Artificial Sequence
  spacer sequence GTCN PAM
uagcauccaggacagguaag

SEQ ID NO: 10380 - RNA, 20 nt, Artificial Sequence
  spacer sequence GTCN PAM
cgcagccacagggcgcgcua

SEQ ID NO: 10381 - RNA, 20 nt, Artificial Sequence
  spacer sequence GTCN PAM
gccccggccccgcgcacccc

SEQ ID NO: 10382 - RNA, 20 nt, Artificial Sequence
  spacer sequence GTCN PAM
ccugcugccugccccgccca

SEQ ID NO: 10383 - RNA, 20 nt, Artificial Sequence
  spacer sequence GTCN PAM
acggugacgugcagcgcgug

SEQ ID NO: 10384 - RNA, 20 nt, Artificial Sequence
  spacer sequence GTCN PAM
ccguagacgccuucaaaagc

SEQ ID NO: 10385 - RNA, 20 nt, Artificial Sequence
  spacer sequence GTCN PAM
gccaucugcacuagggcguu

SEQ ID NO: 10386 - RNA, 20 nt, Artificial Sequence
  spacer sequence GTCN PAM
cgcgggugcugcucccccag

SEQ ID NO: 10387 - RNA, 20 nt, Artificial Sequence
  spacer sequence GTCN PAM
uccuggcccucgcggggcag

SEQ ID NO: 10388 - RNA, 20 nt, Artificial Sequence
  spacer sequence GTCN PAM
ggcccugguccuccuggccc

SEQ ID NO: 10389 - RNA, 20 nt, Artificial Sequence
  spacer sequence GTCN PAM
uuggucaggcccugguccuc

SEQ ID NO: 10390 - RNA, 20 nt, Artificial Sequence
  spacer sequence GTCN PAM
uaccgcgucgguguguggac

SEQ ID NO: 10391 - RNA, 20 nt, Artificial Sequence
  spacer sequence GTCN PAM
guguguggacuucuggcguu

SEQ ID NO: 10392 - RNA, 20 nt, Artificial Sequence
  spacer sequence GTCN PAM
acacaccgacgcgguaggac

SEQ ID NO: 10393 - RNA, 20 nt, Artificial Sequence
  spacer sequence GTCN PAM
ggcaccucuuaccccaaacc

SEQ ID NO: 10394 - RNA, 20 nt, Artificial Sequence
  spacer sequence GTCN PAM
uuggacacuuuggagguuuu

SEQ ID NO: 10395 - RNA, 20 nt, Artificial Sequence
  spacer sequence GTCN PAM
aacgacccccucccuugagc

SEQ ID NO: 10396 - RNA, 20 nt, Artificial Sequence
  spacer sequence GTCN PAM
ugcuuugucacccaggcugg

SEQ ID NO: 10397 - RNA, 20 nt, Artificial Sequence
  spacer sequence GTCN PAM
cccaggcuggaguacagugg

SEQ ID NO: 10398 - RNA, 20 nt, Artificial Sequence
  spacer sequence GTCN PAM
cagcuacucgggaagcugag

SEQ ID NO: 10399 - RNA, 20 nt, Artificial Sequence
  spacer sequence GTCN PAM
cuacuaaaaauacaaaaauu

SEQ ID NO: 10400 - RNA, 20 nt, Artificial Sequence
  spacer sequence GTCN PAM
ggagaucaagaucagccugg

SEQ ID NO: 10401 - RNA, 20 nt, Artificial Sequence
  spacer sequence GTCN PAM
cgcucugucgcccaggcugg

SEQ ID NO: 10402 - RNA, 20 nt, Artificial Sequence
  spacer sequence GTCN PAM
cccaggcuggagugcagugg

SEQ ID NO: 10403 - RNA, 20 nt, Artificial Sequence
  spacer sequence GTCN PAM
cucccagcuacucgggaggc

SEQ ID NO: 10404 - RNA, 20 nt, Artificial Sequence
  spacer sequence GTCN PAM
aucuccugacuuugugauca

SEQ ID NO: 10405 - RNA, 20 nt, Artificial Sequence
  spacer sequence GTCN PAM
ggagaucgacaccauccugg

SEQ ID NO: 10406 - RNA, 20 nt, Artificial Sequence
  spacer sequence GTCN PAM
uaacucuuggguucaagcaa

SEQ ID NO: 10407 - RNA, 20 nt, Artificial Sequence
  spacer sequence GTCN PAM
cacuuuauugcucaggcugg

SEQ ID NO: 10408 - RNA, 20 nt, Artificial Sequence
  spacer sequence GTCN PAM
cuacaggaacaauugguuaa

SEQ ID NO: 10409 - RNA, 20 nt, Artificial Sequence
  spacer sequence GTCN PAM
ggucccagcucuuccggauu

SEQ ID NO: 10410 - RNA, 20 nt, Artificial Sequence
  spacer sequence GTCN PAM
cagcucuuccggauugggag

SEQ ID NO: 10411 - RNA, 20 nt, Artificial Sequence
  spacer sequence GTCN PAM
ggcagugcaaucacagcuca

SEQ ID NO: 10412 - RNA, 20 nt, Artificial Sequence
  spacer sequence GTCN PAM
uacucugccgcccagccugg

SEQ ID NO: 10413 - RNA, 20 nt, Artificial Sequence
  spacer sequence GTCN PAM
guaaaaauuacauaaugcaa

SEQ ID NO: 10414 - RNA, 20 nt, Artificial Sequence
  spacer sequence GTCN PAM
accaguaguaagcccuuuga

SEQ ID NO: 10415 - RNA, 20 nt, Artificial Sequence
  spacer sequence GTCN PAM
ggaguucaagaccaaccugg

SEQ ID NO: 10416 - RNA, 20 nt, Artificial Sequence
  spacer sequence GTCN PAM
ugaacuccugaccucaggug

SEQ ID NO: 10417 - RNA, 20 nt, Artificial Sequence
  spacer sequence GTCN PAM
cuacuaaaaauaaaaaaauu

SEQ ID NO: 10418 - RNA, 20 nt, Artificial Sequence
  spacer sequence GTCN PAM
cccaaguagcugggauuaca

SEQ ID NO: 10419 - RNA, 20 nt, Artificial Sequence
  spacer sequence GTCN PAM
cccaggcgggagcacagugg

SEQ ID NO: 10420 - RNA, 20 nt, Artificial Sequence
  spacer sequence GTCN PAM
gaagcagcuucuaacgaaac

SEQ ID NO: 10421 - RNA, 20 nt, Artificial Sequence
  spacer sequence GTCN PAM
acaauggucugaagcagcuu

SEQ ID NO: 10422 - RNA, 20 nt, Artificial Sequence
  spacer sequence GTCN PAM
ggggaaagccucgcggaccu

SEQ ID NO: 10423 - RNA, 20 nt, Artificial Sequence
  spacer sequence GTCN PAM
gcgaggcuuuccccagacua

SEQ ID NO: 10424 - RNA, 20 nt, Artificial Sequence
  spacer sequence GTCN PAM
gguccgcgaggcuuucccca

SEQ ID NO: 10425 - RNA, 20 nt, Artificial Sequence
  spacer sequence GTCN PAM
ccgaggaggaucucaagguc

SEQ ID NO: 10426 - RNA, 20 nt, Artificial Sequence
  spacer sequence GTCN PAM
uguuuuccagcaaugggggc

SEQ ID NO: 10427 - RNA, 20 nt, Artificial Sequence
  spacer sequence GTCN PAM
ucaaaggauucaaguucuuc

SEQ ID NO: 10428 - RNA, 20 nt, Artificial Sequence
  spacer sequence GTCN PAM
aaggauucaaguucuuccag

SEQ ID NO: 10429 - RNA, 20 nt, Artificial Sequence
  spacer sequence GTCN PAM
cuggcucuccccaggcugcc

SEQ ID NO: 10430 - RNA, 20 nt, Artificial Sequence
  spacer sequence GTCN PAM
gggccggccgcagggcagcc

SEQ ID NO: 10431 - RNA, 20 nt, Artificial Sequence
  spacer sequence GTCN PAM
ugcaggaaggaccgcaagau

SEQ ID NO: 10432 - RNA, 20 nt, Artificial Sequence
  spacer sequence GTCN PAM
uuccugcaagacaggggguc

SEQ ID NO: 10433 - RNA, 20 nt, Artificial Sequence
  spacer sequence GTCN PAM
aggcccucauugaccugcac

SEQ ID NO: 10434 - RNA, 20 nt, Artificial Sequence
  spacer sequence GTCN PAM
augagggccuggaccgccuc

SEQ ID NO: 10435 - RNA, 20 nt, Artificial Sequence
  spacer sequence GTCN PAM
ugguugugcaggucaaugag

SEQ ID NO: 10436 - RNA, 20 nt, Artificial Sequence
  spacer sequence GTCN PAM
ccuucuccaaguccaccauc

SEQ ID NO: 10437 - RNA, 20 nt, Artificial Sequence
  spacer sequence GTCN PAM
accaucuaggggcacaggcc

SEQ ID NO: 10438 - RNA, 20 nt, Artificial Sequence
  spacer sequence GTCN PAM
ccagggggcccggccguggg

SEQ ID NO: 10439 - RNA, 20 nt, Artificial Sequence
  spacer sequence GTCN PAM
cuucagcuguuuuuaaagug

SEQ ID NO: 10440 - RNA, 20 nt, Artificial Sequence
  spacer sequence GTCN PAM
gcuaaggucacuucagcugu

SEQ ID NO: 10441 - RNA, 20 nt, Artificial Sequence
  spacer sequence GTCN PAM
ccgcagggugagcaagguga

SEQ ID NO: 10442 - RNA, 20 nt, Artificial Sequence
  spacer sequence GTCN PAM
cugucaccgcagggugagca

SEQ ID NO: 10443 - RNA, 20 nt, Artificial Sequence
  spacer sequence GTCN PAM
ccaagagccugagcuguccc

SEQ ID NO: 10444 - RNA, 20 nt, Artificial Sequence
  spacer sequence GTCN PAM
ggccccggguguggagggcc

SEQ ID NO: 10445 - RNA, 20 nt, Artificial Sequence
  spacer sequence GTCN PAM
ggcguggggccugcaggugg

SEQ ID NO: 10446 - RNA, 20 nt, Artificial Sequence
  spacer sequence GTCN PAM
gggcgcccaccugcaggccc

SEQ ID NO: 10447 - RNA, 20 nt, Artificial Sequence
  spacer sequence GTCN PAM
uggucggggcgcccaccugc

SEQ ID NO: 10448 - RNA, 20 nt, Artificial Sequence
  spacer sequence GTCN PAM
uggggacccaaggggugggg

SEQ ID NO: 10449 - RNA, 20 nt, Artificial Sequence
  spacer sequence GTCN PAM
ccaggacaccccgggugggu

SEQ ID NO: 10450 - RNA, 20 nt, Artificial Sequence
  spacer sequence GTCN PAM
caccagagagaggcaggggg

SEQ ID NO: 10451 - RNA, 20 nt, Artificial Sequence
  spacer sequence GTCN PAM
cagccgcggccgccgcgccc

SEQ ID NO: 10452 - RNA, 20 nt, Artificial Sequence
  spacer sequence GTCN PAM
cgugauucucccuucacccc

SEQ ID NO: 10453 - RNA, 20 nt, Artificial Sequence
  spacer sequence GTCN PAM
acauaaucucuguauuauau

SEQ ID NO: 10454 - RNA, 20 nt, Artificial Sequence
  spacer sequence GTCN PAM
accagcuccgcagcuggagc

SEQ ID NO: 10455 - RNA, 20 nt, Artificial Sequence
  spacer sequence GTCN PAM
gcaacugcaaaguauauaau

SEQ ID NO: 10456 - RNA, 20 nt, Artificial Sequence
  spacer sequence GTCN PAM
gugccuagcaauauuuccag

SEQ ID NO: 10457 - RNA, 20 nt, Artificial Sequence
  spacer sequence GTCN PAM
acuggaaauauugcuaggca

SEQ ID NO: 10458 - RNA, 20 nt, Artificial Sequence
  spacer sequence GTCN PAM
caggcaggacccaguuucca

SEQ ID NO: 10459 - RNA, 20 nt, Artificial Sequence
  spacer sequence GTCN PAM
ugccugugacuuaauuacaa

SEQ ID NO: 10460 - RNA, 20 nt, Artificial Sequence
  spacer sequence GTCN PAM
ggcacagggagccccggucc

SEQ ID NO: 10461 - RNA, 20 nt, Artificial Sequence
  spacer sequence GTCN PAM
uaucuuagagccccugagcu

SEQ ID NO: 10462 - RNA, 20 nt, Artificial Sequence
  spacer sequence GTCN PAM
ccgccucuggcaucgccucc

SEQ ID NO: 10463 - RNA, 20 nt, Artificial Sequence
  spacer sequence GTCN PAM
ccuagaaaacuugcucucaa

SEQ ID NO: 10464 - RNA, 20 nt, Artificial Sequence
  spacer sequence GTCN PAM
aaaauuugaaggaagaaaaa

SEQ ID NO: 10465 - RNA, 20 nt, Artificial Sequence
  spacer sequence GTCN PAM
cauuucuguguuuugccugc

SEQ ID NO: 10466 - RNA, 20 nt, Artificial Sequence
  spacer sequence GTCN PAM
cagcaucagaggcaggcaaa

SEQ ID NO: 10467 - RNA, 20 nt, Artificial Sequence
  spacer sequence GTCN PAM
ucucugugcucuuucuaccg

SEQ ID NO: 10468 - RNA, 20 nt, Artificial Sequence
  spacer sequence GTCN PAM
ugucccgggggcucuccuag

SEQ ID NO: 10469 - RNA, 20 nt, Artificial Sequence
  spacer sequence GTCN PAM
cgggggcucuccuaggaucc

SEQ ID NO: 10470 - RNA, 20 nt, Artificial Sequence
  spacer sequence GTCN PAM
cacaacagguauaaaaaauu

SEQ ID NO: 10471 - RNA, 20 nt, Artificial Sequence
  spacer sequence GTCN PAM
ccauaaaaaaccgcgccgcc

SEQ ID NO: 10472 - RNA, 20 nt, Artificial Sequence
  spacer sequence GTCN PAM
caauacugagccuggaauug

SEQ ID NO: 10473 - RNA, 20 nt, Artificial Sequence
  spacer sequence GTCN PAM
ccuguggcuccgcggucaca

SEQ ID NO: 10474 - RNA, 20 nt, Artificial Sequence
  spacer sequence GTCN PAM
caagccaucggguaaggcaa

SEQ ID NO: 10475 - RNA, 20 nt, Artificial Sequence
  spacer sequence GTCN PAM
agcccuguguucgcugugga

SEQ ID NO: 10476 - RNA, 20 nt, Artificial Sequence
  spacer sequence GTCN PAM
acagcgaacacagggcuaga

SEQ ID NO: 10477 - RNA, 20 nt, Artificial Sequence
  spacer sequence GTCN PAM
guaccuggacuucgaauaaa

SEQ ID NO: 10478 - RNA, 20 nt, Artificial Sequence
  spacer sequence GTCN PAM
agguacagacuggccaaccu

SEQ ID NO: 10479 - RNA, 20 nt, Artificial Sequence
  spacer sequence GTCN PAM
gggaagcggcgcgccugcau

SEQ ID NO: 10480 - RNA, 20 nt, Artificial Sequence
  spacer sequence GTCN PAM
acgcugcggcgccacgcggg

SEQ ID NO: 10481 - RNA, 20 nt, Artificial Sequence
  spacer sequence GTCN PAM
accuggccacgggcgagggg

SEQ ID NO: 10482 - RNA, 20 nt, Artificial Sequence
  spacer sequence GTCN PAM
acgucgcugaccgacgagcc

SEQ ID NO: 10483 - RNA, 20 nt, Artificial Sequence
  spacer sequence GTCN PAM
cugaccgacgagccggggga

SEQ ID NO: 10484 - RNA, 20 nt, Artificial Sequence
  spacer sequence GTCN PAM
gcgacguggaccaggaggag

SEQ ID NO: 10485 - RNA, 20 nt, Artificial Sequence
  spacer sequence GTCN PAM
gucagcgacguggaccagga

SEQ ID NO: 10486 - RNA, 20 nt, Artificial Sequence
  spacer sequence GTCN PAM
cccggcucgucggucagcga

SEQ ID NO: 10487 - RNA, 20 nt, Artificial Sequence
  spacer sequence GTCN PAM
cccagcucguagccgccguc

SEQ ID NO: 10488 - RNA, 20 nt, Artificial Sequence
  spacer sequence GTCN PAM
gccuccgccuuggccccgcc

SEQ ID NO: 10489 - RNA, 20 nt, Artificial Sequence
  spacer sequence GTCN PAM
gccggcggcgcgcccuggga

SEQ ID NO: 10490 - RNA, 20 nt, Artificial Sequence
  spacer sequence GTCN PAM
auggucacgaugcuggcgga

SEQ ID NO: 10491 - RNA, 20 nt, Artificial Sequence
  spacer sequence GTCN PAM
cgaugcuggcggagucgcgg

SEQ ID NO: 10492 - RNA, 20 nt, Artificial Sequence
  spacer sequence GTCN PAM
cgguccgacggcgaccggua

SEQ ID NO: 10493 - RNA, 20 nt, Artificial Sequence
  spacer sequence GTCN PAM
gacggcgaccgguacugcga

SEQ ID NO: 10494 - RNA, 20 nt, Artificial Sequence
  spacer sequence GTCN PAM
gaccgcgacuccgccagcau

SEQ ID NO: 10495 - RNA, 20 nt, Artificial Sequence
  spacer sequence GTCN PAM
ccgucggaccgcgacuccgc

SEQ ID NO: 10496 - RNA, 20 nt, Artificial Sequence
  spacer sequence GTCN PAM
gagcuggcgcuggacgacga

SEQ ID NO: 10497 - RNA, 20 nt, Artificial Sequence
  spacer sequence GTCN PAM
agcgccagcuccgacuccuc

SEQ ID NO: 10498 - RNA, 20 nt, Artificial Sequence
  spacer sequence GTCN PAM
uccagcgccagcuccgacuc

SEQ ID NO: 10499 - RNA, 20 nt, Artificial Sequence
  spacer sequence GTCN PAM
ucguccagcgccagcuccga

SEQ ID NO: 10500 - RNA, 20 nt, Artificial Sequence
  spacer sequence GTCN PAM
cggccgccuuggggcccggc

SEQ ID NO: 10501 - RNA, 20 nt, Artificial Sequence
  spacer sequence GTCN PAM
aaggcuccgggcgcgccggg

SEQ ID NO: 10502 - RNA, 20 nt, Artificial Sequence
  spacer sequence GTCN PAM
ucgccauguccaaggcuccg

SEQ ID NO: 10503 - RNA, 20 nt, Artificial Sequence
  spacer sequence GTCN PAM
cccaaaagcggcgccggggu

SEQ ID NO: 10504 - RNA, 20 nt, Artificial Sequence
  spacer sequence GTCN PAM
gcgcgcccuccuccgggaug

SEQ ID NO: 10505 - RNA, 20 nt, Artificial Sequence
  spacer sequence GTCN PAM
uccucccaccgcgcgcgggg

SEQ ID NO: 10506 - RNA, 20 nt, Artificial Sequence
  spacer sequence GTCN PAM
uccuccucuuccuccuccuc

SEQ ID NO: 10507 - RNA, 20 nt, Artificial Sequence
  spacer sequence GTCN PAM
uccuccucuuccuccuccuc

SEQ ID NO: 10508 - RNA, 20 nt, Artificial Sequence
  spacer sequence GTCN PAM
ucgggcagccccaggccgcg

SEQ ID NO: 10509 - RNA, 20 nt, Artificial Sequence
  spacer sequence GTCN PAM
ggcagccccaggccgcggcc

SEQ ID NO: 10510 - RNA, 20 nt, Artificial Sequence
  spacer sequence GTCN PAM
agcggcacguggauggucau

SEQ ID NO: 10511 - RNA, 20 nt, Artificial Sequence
  spacer sequence GTCN PAM
uguggcggcgcgcggggucg

SEQ ID NO: 10512 - RNA, 20 nt, Artificial Sequence
  spacer sequence GTCN PAM
uccagcgagggcgcgcuggc

SEQ ID NO: 10513 - RNA, 20 nt, Artificial Sequence
  spacer sequence GTCN PAM
agcgagggcgcgcuggcccu

SEQ ID NO: 10514 - RNA, 20 nt, Artificial Sequence
  spacer sequence GTCN PAM
ccauguucuccuuggccaug

SEQ ID NO: 10515 - RNA, 20 nt, Artificial Sequence
  spacer sequence GTCN PAM
acguccacgcuggcgcgcuu

SEQ ID NO: 10516 - RNA, 20 nt, Artificial Sequence
  spacer sequence GTCN PAM
acgcuggcgcgcuucaggcu

SEQ ID NO: 10517 - RNA, 20 nt, Artificial Sequence
  spacer sequence GTCN PAM
ucucgcgggccacgggccgg

SEQ ID NO: 10518 - RNA, 20 nt, Artificial Sequence
  spacer sequence GTCN PAM
gugcucaccgacuuauucug

SEQ ID NO: 10519 - RNA, 20 nt, Artificial Sequence
  spacer sequence GTCN PAM
gugagcaccgacgagcuggg

SEQ ID NO: 10520 - RNA, 20 nt, Artificial Sequence
  spacer sequence GTCN PAM
uggccccgcugcgucagggc

SEQ ID NO: 10521 - RNA, 20 nt, Artificial Sequence
  spacer sequence GTCN PAM
gggcccgcagcgcguccuug

SEQ ID NO: 10522 - RNA, 20 nt, Artificial Sequence
  spacer sequence GTCN PAM
uuggcgggggccggggccgc

SEQ ID NO: 10523 - RNA, 20 nt, Artificial Sequence
  spacer sequence GTCN PAM
gggagaggggucugggggug

SEQ ID NO: 10524 - RNA, 20 nt, Artificial Sequence
  spacer sequence GTCN PAM
gggggugaggccuggggcuc

SEQ ID NO: 10525 - RNA, 20 nt, Artificial Sequence
  spacer sequence GTCN PAM
gcauggguucccaggggauc

SEQ ID NO: 10526 - RNA, 20 nt, Artificial Sequence
  spacer sequence GTCN PAM
acaggguggcugcgguacug

SEQ ID NO: 10527 - RNA, 20 nt, Artificial Sequence
  spacer sequence GTCN PAM
ucgccuuugccaucgccgcg

SEQ ID NO: 10528 - RNA, 20 nt, Artificial Sequence
  spacer sequence GTCN PAM
gagaugaccgaguugaagua

SEQ ID NO: 10529 - RNA, 20 nt, Artificial Sequence
  spacer sequence GTCN PAM
ucucggacaccaccaagcug

SEQ ID NO: 10530 - RNA, 20 nt, Artificial Sequence
  spacer sequence GTCN PAM
gggagggcuccccacggguc

SEQ ID NO: 10531 - RNA, 20 nt, Artificial Sequence
  spacer sequence GTCN PAM
gcaagagggccugggaaggg

SEQ ID NO: 10532 - RNA, 20 nt, Artificial Sequence
  spacer sequence GTCN PAM
ggccccucacugcccuuccc

SEQ ID NO: 10533 - RNA, 20 nt, Artificial Sequence
  spacer sequence GTCN PAM
gugaguccggccccucacug

SEQ ID NO: 10534 - RNA, 20 nt, Artificial Sequence
  spacer sequence GTCN PAM
augugucggugaguccggcc

SEQ ID NO: 10535 - RNA, 20 nt, Artificial Sequence
  spacer sequence GTCN PAM
gccuucgccgcggucuaugu

SEQ ID NO: 10536 - RNA, 20 nt, Artificial Sequence
  spacer sequence GTCN PAM
cagcacgccacgcugucagc

SEQ ID NO: 10537 - RNA, 20 nt, Artificial Sequence
  spacer sequence GTCN PAM
uccuguaagaggcguccagc

SEQ ID NO: 10538 - RNA, 20 nt, Artificial Sequence
  spacer sequence GTCN PAM
agcgugagccccgcccaccu

SEQ ID NO: 10539 - RNA, 20 nt, Artificial Sequence
  spacer sequence GTCN PAM
ccaggugggcggggcucacg

SEQ ID NO: 10540 - RNA, 20 nt, Artificial Sequence
  spacer sequence GTCN PAM
ggggaguuggggguccggcu

SEQ ID NO: 10541 - RNA, 20 nt, Artificial Sequence
  spacer sequence GTCN PAM
ggcucaccgugcagacagga

SEQ ID NO: 10542 - RNA, 20 nt, Artificial Sequence
  spacer sequence GTCN PAM
gcacggugagccggaccccc

SEQ ID NO: 10543 - RNA, 20 nt, Artificial Sequence
  spacer sequence GTCN PAM
uggccggagcagauguccug

SEQ ID NO: 10544 - RNA, 20 nt, Artificial Sequence
  spacer sequence GTCN PAM
ugcgugauguagggguugac

SEQ ID NO: 10545 - RNA, 20 nt, Artificial Sequence
  spacer sequence GTCN PAM
accccuacaucacgcaggac

SEQ ID NO: 10546 - RNA, 20 nt, Artificial Sequence
  spacer sequence GTCN PAM
ugcgaggucaaccccuacau

SEQ ID NO: 10547 - RNA, 20 nt, Artificial Sequence
  spacer sequence GTCN PAM
gcaagcccaacuacacucuc

SEQ ID NO: 10548 - RNA, 20 nt, Artificial Sequence
  spacer sequence GTCN PAM
gucaccagggcuguggcaca

SEQ ID NO: 10549 - RNA, 20 nt, Artificial Sequence
  spacer sequence GTCN PAM
ccagggcuguggcacacagg

SEQ ID NO: 10550 - RNA, 20 nt, Artificial Sequence
  spacer sequence GTCN PAM
acguguucggccugugugcc

SEQ ID NO: 10551 - RNA, 20 nt, Artificial Sequence
  spacer sequence GTCN PAM
ccagcuccccgccuggccga

SEQ ID NO: 10552 - RNA, 20 nt, Artificial Sequence
  spacer sequence GTCN PAM
gggcgcgucccgcaacucac

SEQ ID NO: 10553 - RNA, 20 nt, Artificial Sequence
  spacer sequence GTCN PAM
cgcaacucacccacaaaccg

SEQ ID NO: 10554 - RNA, 20 nt, Artificial Sequence
  spacer sequence GTCN PAM
cggcuguggggccgugccgg

SEQ ID NO: 10555 - RNA, 20 nt, Artificial Sequence
  spacer sequence GTCN PAM
gcagucccggcuguggggcc

SEQ ID NO: 10556 - RNA, 20 nt, Artificial Sequence
  spacer sequence GTCN PAM
ccacguagggcauggagaga

SEQ ID NO: 10557 - RNA, 20 nt, Artificial Sequence
  spacer sequence GTCN PAM
uagcacuggaagcccaccuu

SEQ ID NO: 10558 - RNA, 20 nt, Artificial Sequence
  spacer sequence GTCN PAM
gucagcuccaggaaguacaa

SEQ ID NO: 10559 - RNA, 20 nt, Artificial Sequence
  spacer sequence GTCN PAM
gcuccaggaaguacaaggau

SEQ ID NO: 10560 - RNA, 20 nt, Artificial Sequence
  spacer sequence GTCN PAM
ccacagcugcccauaguggc

SEQ ID NO: 10561 - RNA, 20 nt, Artificial Sequence
  spacer sequence GTCN PAM
ugcucucuugcccaagcugg

SEQ ID NO: 10562 - RNA, 20 nt, Artificial Sequence
  spacer sequence GTCN PAM
ugaacuccugcccucaggug

SEQ ID NO: 10563 - RNA, 20 nt, Artificial Sequence
  spacer sequence GTCN PAM
ugaacuccugaccuagguga

SEQ ID NO: 10564 - RNA, 20 nt, Artificial Sequence
  spacer sequence GTCN PAM
ggaguucaagaccagccuag

SEQ ID NO: 10565 - RNA, 20 nt, Artificial Sequence
  spacer sequence GTCN PAM
uaaacuccucacuaugugcc

SEQ ID NO: 10566 - RNA, 20 nt, Artificial Sequence
  spacer sequence GTCN PAM
gaguucaccucugcuaaugg

SEQ ID NO: 10567 - RNA, 20 nt, Artificial Sequence
  spacer sequence GTCN PAM
ggggcugggggccuggaggg

SEQ ID NO: 10568 - RNA, 20 nt, Artificial Sequence
  spacer sequence GTCN PAM
gaggggcugggggucggggg

SEQ ID NO: 10569 - RNA, 20 nt, Artificial Sequence
  spacer sequence GTCN PAM
gaagggcuccccuccuagca

SEQ ID NO: 10570 - RNA, 20 nt, Artificial Sequence
  spacer sequence GTCN PAM
aggccgugggaacugugggc

SEQ ID NO: 10571 - RNA, 20 nt, Artificial Sequence
  spacer sequence GTCN PAM
aguaggagcuccagaggaac

SEQ ID NO: 10572 - RNA, 20 nt, Artificial Sequence
  spacer sequence GTCN PAM
ucugccccaccccccauccg

SEQ ID NO: 10573 - RNA, 20 nt, Artificial Sequence
  spacer sequence GTCN PAM
ggcggaugggggguggggca

SEQ ID NO: 10574 - RNA, 20 nt, Artificial Sequence
  spacer sequence GTCN PAM
ugccccgccccgaggccacu

SEQ ID NO: 10575 - RNA, 20 nt, Artificial Sequence
  spacer sequence GTCN PAM
cccagcgcgggggucucugc

SEQ ID NO: 10576 - RNA, 20 nt, Artificial Sequence
  spacer sequence GTCN PAM
cugcgggcgggcggaaccga

SEQ ID NO: 10577 - RNA, 20 nt, Artificial Sequence
  spacer sequence GTCN PAM
cccccgggccccagcgcgac

SEQ ID NO: 10578 - RNA, 20 nt, Artificial Sequence
  spacer sequence GTCN PAM
cgcuggggcccgggggagac

SEQ ID NO: 10579 - RNA, 20 nt, Artificial Sequence
  spacer sequence GTCN PAM
ugcuguccuucgggaucuug

SEQ ID NO: 10580 - RNA, 20 nt, Artificial Sequence
  spacer sequence GTCN PAM
uucgggaucuuguucuucuc

SEQ ID NO: 10581 - RNA, 20 nt, Artificial Sequence
  spacer sequence GTCN PAM
cccccgggcuccgccugcgc

SEQ ID NO: 10582 - RNA, 20 nt, Artificial Sequence
  spacer sequence GTCN PAM
gggaaacugaggcugcagag

SEQ ID NO: 10583 - RNA, 20 nt, Artificial Sequence
  spacer sequence GTCN PAM
gcguggccuccccgcgcccc

SEQ ID NO: 10584 - RNA, 20 nt, Artificial Sequence
  spacer sequence GTCN PAM
gggccgggaucgccgaggag

SEQ ID NO: 10585 - RNA, 20 nt, Artificial Sequence
  spacer sequence GTCN PAM
ccgggcgggagccagucccc

SEQ ID NO: 10586 - RNA, 20 nt, Artificial Sequence
  spacer sequence GTCN PAM
ccgcguggugguggggggca

SEQ ID NO: 10587 - RNA, 20 nt, Artificial Sequence
  spacer sequence GTCN PAM
ccuccgccgcccggaacccc

SEQ ID NO: 10588 - RNA, 20 nt, Artificial Sequence
  spacer sequence GTCN PAM
gcgcccccagccccacagcc

SEQ ID NO: 10589 - RNA, 20 nt, Artificial Sequence
  spacer sequence GTCN PAM
ccuccguggggcggggccgg

SEQ ID NO: 10590 - RNA, 20 nt, Artificial Sequence
  spacer sequence GTCN PAM
cccuccccuucccggcuccc

SEQ ID NO: 10591 - RNA, 20 nt, Artificial Sequence
  spacer sequence GTCN PAM
ggcccggagacccccgcgcg

SEQ ID NO: 10592 - RNA, 20 nt, Artificial Sequence
  spacer sequence GTCN PAM
ccgggccggacccuccccuc

SEQ ID NO: 10593 - RNA, 20 nt, Artificial Sequence
  spacer sequence GTCN PAM
gggcgcgcgcgggggucucc

SEQ ID NO: 10594 - RNA, 20 nt, Artificial Sequence
  spacer sequence GTCN PAM
gggcugcggcgucugggcgc

SEQ ID NO: 10595 - RNA, 20 nt, Artificial Sequence
  spacer sequence GTCN PAM
gggcgcguccuccgcaggcc

SEQ ID NO: 10596 - RNA, 20 nt, Artificial Sequence
  spacer sequence GTCN PAM
uccgcaggccccgcgcaccg

SEQ ID NO: 10597 - RNA, 20 nt, Artificial Sequence
  spacer sequence GTCN PAM
ccgccucccuggcgccgccu

SEQ ID NO: 10598 - RNA, 20 nt, Artificial Sequence
  spacer sequence GTCN PAM
cgggggucucaggucugcgc

SEQ ID NO: 10599 - RNA, 20 nt, Artificial Sequence
  spacer sequence GTCN PAM
caggucugcgcgagcggcug

SEQ ID NO: 10600 - RNA, 20 nt, Artificial Sequence
  spacer sequence GTCN PAM
gcgcgagcggcuggcggggc

SEQ ID NO: 10601 - RNA, 20 nt, Artificial Sequence
  spacer sequence GTCN PAM
cguccuccucccuucgggcc

SEQ ID NO: 10602 - RNA, 20 nt, Artificial Sequence
  spacer sequence GTCN PAM
uccucccuucgggccugcgg

SEQ ID NO: 10603 - RNA, 20 nt, Artificial Sequence
  spacer sequence GTCN PAM
ccgccgcaggcccgaaggga

SEQ ID NO: 10604 - RNA, 20 nt, Artificial Sequence
  spacer sequence GTCN PAM
cguccuccccucccgggugg

SEQ ID NO: 10605 - RNA, 20 nt, Artificial Sequence
  spacer sequence GTCN PAM
uccccucccggguggcugcg

SEQ ID NO: 10606 - RNA, 20 nt, Artificial Sequence
  spacer sequence GTCN PAM
gcccggggggcgccaucgag

SEQ ID NO: 10607 - RNA, 20 nt, Artificial Sequence
  spacer sequence GTCN PAM
cgauggcgccccccgggccg

SEQ ID NO: 10608 - RNA, 20 nt, Artificial Sequence
  spacer sequence GTCN PAM
cugacugucuccgugucucu

SEQ ID NO: 10609 - RNA, 20 nt, Artificial Sequence
  spacer sequence GTCN PAM
gagaccccgaaaccccaacc

SEQ ID NO: 10610 - RNA, 20 nt, Artificial Sequence
  spacer sequence GTCN PAM
ccgugucucucacggucucu

SEQ ID NO: 10611 - RNA, 20 nt, Artificial Sequence
  spacer sequence GTCN PAM
cucacggucucucgccggcu

SEQ ID NO: 10612 - RNA, 20 nt, Artificial Sequence
  spacer sequence GTCN PAM
cucgccggcuccgacugccc

SEQ ID NO: 10613 - RNA, 20 nt, Artificial Sequence
  spacer sequence GTCN PAM
gagccggcgagagaccguga

SEQ ID NO: 10614 - RNA, 20 nt, Artificial Sequence
  spacer sequence GTCN PAM
ccgaugcuccgggcgcccug

SEQ ID NO: 10615 - RNA, 20 nt, Artificial Sequence
  spacer sequence GTCN PAM
cccucccccagcucuuuugu

SEQ ID NO: 10616 - RNA, 20 nt, Artificial Sequence
  spacer sequence GTCN PAM
cccggugccucccucccuuc

SEQ ID NO: 10617 - RNA, 20 nt, Artificial Sequence
  spacer sequence GTCN PAM
acccuccgccuggccgcagc

SEQ ID NO: 10618 - RNA, 20 nt, Artificial Sequence
  spacer sequence GTCN PAM
cgagggcccugcccgcaucc

SEQ ID NO: 10619 - RNA, 20 nt, Artificial Sequence
  spacer sequence GTCN PAM
gcgugcauuuccuccuccau

SEQ ID NO: 10620 - RNA, 20 nt, Artificial Sequence
  spacer sequence GTCN PAM
accagccccuaccccgcagg

SEQ ID NO: 10621 - RNA, 20 nt, Artificial Sequence
  spacer sequence GTCN PAM
caauccgaggucuccgggcc

SEQ ID NO: 10622 - RNA, 20 nt, Artificial Sequence
  spacer sequence GTCN PAM
ccgggccccaaacggcagga

SEQ ID NO: 10623 - RNA, 20 nt, Artificial Sequence
  spacer sequence GTCN PAM
aggcgggcggaucacgaggg

SEQ ID NO: 10624 - RNA, 20 nt, Artificial Sequence
  spacer sequence GTCN PAM
cgaacuccugcccucgugau

SEQ ID NO: 10625 - RNA, 20 nt, Artificial Sequence
  spacer sequence GTCN PAM
aggcuggucucgaacuccug

SEQ ID NO: 10626 - RNA, 20 nt, Artificial Sequence
  spacer sequence GTCN PAM
cuacuaaaaauacaaaaauu

SEQ ID NO: 10627 - RNA, 20 nt, Artificial Sequence
  spacer sequence GTCN PAM
ggaacuccuggccucaaggg

SEQ ID NO: 10628 - RNA, 20 nt, Artificial Sequence
  spacer sequence GTCN PAM
ggcuaauuuuuauauuuuua

SEQ ID NO: 10629 - RNA, 20 nt, Artificial Sequence
  spacer sequence GTCN PAM
cccaggcuggagggcaaugg

SEQ ID NO: 10630 - RNA, 20 nt, Artificial Sequence
  spacer sequence GTCN PAM
ccuucugucgcccaggcugg

SEQ ID NO: 10631 - RNA, 20 nt, Artificial Sequence
  spacer sequence GTCN PAM
cuguuuguuuguuuuuuuuu

SEQ ID NO: 10632 - RNA, 20 nt, Artificial Sequence
  spacer sequence GTCN PAM
ccugccauaaaugcggaaac

SEQ ID NO: 10633 - RNA, 20 nt, Artificial Sequence
  spacer sequence GTCN PAM
auccaaagguagcaacacca

SEQ ID NO: 10634 - RNA, 20 nt, Artificial Sequence
  spacer sequence GTCN PAM
caggaagcugggcugccucc

SEQ ID NO: 10635 - RNA, 20 nt, Artificial Sequence
  spacer sequence GTCN PAM
ugucccaggaagcugggcug

SEQ ID NO: 10636 - RNA, 20 nt, Artificial Sequence
  spacer sequence GTCN PAM
gugcaguccugucccaggaa

SEQ ID NO: 10637 - RNA, 20 nt, Artificial Sequence
  spacer sequence GTCN PAM
uuggccccccgguuccugca

SEQ ID NO: 10638 - RNA, 20 nt, Artificial Sequence
  spacer sequence GTCN PAM
caggugggucccauucgaug

SEQ ID NO: 10639 - RNA, 20 nt, Artificial Sequence
  spacer sequence GTCN PAM
cauucgaugcgauccuguuc

SEQ ID NO: 10640 - RNA, 20 nt, Artificial Sequence
  spacer sequence GTCN PAM
cccuucuccagggcuguugg

SEQ ID NO: 10641 - RNA, 20 nt, Artificial Sequence
  spacer sequence GTCN PAM
ccuugcaacacccagauucc

SEQ ID NO: 10642 - RNA, 20 nt, Artificial Sequence
  spacer sequence GTCN PAM
ggagugggagagugugcagg

SEQ ID NO: 10643 - RNA, 20 nt, Artificial Sequence
  spacer sequence GTCN PAM
cccugcacacucucccacuc

SEQ ID NO: 10644 - RNA, 20 nt, Artificial Sequence
  spacer sequence GTCN PAM
aacagaagaucugggggagu

SEQ ID NO: 10645 - RNA, 20 nt, Artificial Sequence
  spacer sequence GTCN PAM
cagggucuucucccccuagg

SEQ ID NO: 10646 - RNA, 20 nt, Artificial Sequence
  spacer sequence GTCN PAM
ucucccccuaggaucaccag

SEQ ID NO: 10647 - RNA, 20 nt, Artificial Sequence
  spacer sequence GTCN PAM
gguacgcucaaccccuccgg

SEQ ID NO: 10648 - RNA, 20 nt, Artificial Sequence
  spacer sequence GTCN PAM
aucucaaaauaauaguaaua

SEQ ID NO: 10649 - RNA, 20 nt, Artificial Sequence
  spacer sequence GTCN PAM
cccaggcuggagugcaaucg

SEQ ID NO: 10650 - RNA, 20 nt, Artificial Sequence
  spacer sequence GTCN PAM
ugguggcaggcgccuauaau

SEQ ID NO: 10651 - RNA, 20 nt, Artificial Sequence
  spacer sequence GTCN PAM
ggcugguguugaucuccuga

SEQ ID NO: 10652 - RNA, 20 nt, Artificial Sequence
  spacer sequence GTCN PAM
ggagaucaacaccagccuga

SEQ ID NO: 10653 - RNA, 20 nt, Artificial Sequence
  spacer sequence GTCN PAM
ucccaguacuuugggaggcu

SEQ ID NO: 10654 - RNA, 20 nt, Artificial Sequence
  spacer sequence GTCN PAM
cccaaaaaaaaaaaaaaagg

SEQ ID NO: 10655 - RNA, 20 nt, Artificial Sequence
  spacer sequence GTCN PAM
ucuaggcuggagugcagugg

SEQ ID NO: 10656 - RNA, 20 nt, Artificial Sequence
  spacer sequence GTCN PAM
aggcuggagugcaguggcgc

SEQ ID NO: 10657 - RNA, 20 nt, Artificial Sequence
  spacer sequence GTCN PAM
cagcuacucgggaggcugag

SEQ ID NO: 10658 - RNA, 20 nt, Artificial Sequence
  spacer sequence GTCN PAM
ugggcgccugcggucccagc

SEQ ID NO: 10659 - RNA, 20 nt, Artificial Sequence
  spacer sequence GTCN PAM
cuacuaaaaauacaaaagaa

SEQ ID NO: 10660 - RNA, 20 nt, Artificial Sequence
  spacer sequence GTCN PAM
ugaucuccugaccucgugau

SEQ ID NO: 10661 - RNA, 20 nt, Artificial Sequence
  spacer sequence GTCN PAM
ggagaucaagaccauccugg

SEQ ID NO: 10662 - RNA, 20 nt, Artificial Sequence
  spacer sequence GTCN PAM
uggccucccaaagugcuggg

SEQ ID NO: 10663 - RNA, 20 nt, Artificial Sequence
  spacer sequence GTCN PAM
uggccaaacgugggccucag

SEQ ID NO: 10664 - RNA, 20 nt, Artificial Sequence
  spacer sequence GTCN PAM
aagccagcucucccucucug

SEQ ID NO: 10665 - RNA, 20 nt, Artificial Sequence
  spacer sequence GTCN PAM
auggcacagcccccagaucc

SEQ ID NO: 10666 - RNA, 20 nt, Artificial Sequence
  spacer sequence GTCN PAM
cccacacccuuggggacacc

SEQ ID NO: 10667 - RNA, 20 nt, Artificial Sequence
  spacer sequence GTCN PAM
ggagcuuaccguguccccca

SEQ ID NO: 10668 - RNA, 20 nt, Artificial Sequence
  spacer sequence GTCN PAM
aaacucaccuccauuuuuua

SEQ ID NO: 10669 - RNA, 20 nt, Artificial Sequence
  spacer sequence GTCN PAM
guaugggugauuauuauuau

SEQ ID NO: 10670 - RNA, 20 nt, Artificial Sequence
  spacer sequence GTCN PAM
ugcgcgucuguaugggugau

SEQ ID NO: 10671 - RNA, 20 nt, Artificial Sequence
  spacer sequence GTCN PAM
ugcguugaguccugcgcguc

SEQ ID NO: 10672 - RNA, 20 nt, Artificial Sequence
  spacer sequence GTCN PAM
gaugggggaggcccagagaa

SEQ ID NO: 10673 - RNA, 20 nt, Artificial Sequence
  spacer sequence GTCN PAM
cggcucugcuucuguaaaag

SEQ ID NO: 10674 - RNA, 20 nt, Artificial Sequence
  spacer sequence GTCN PAM
gcaggcugggauccccccua

SEQ ID NO: 10675 - RNA, 20 nt, Artificial Sequence
  spacer sequence GTCN PAM
ucccucugcccuuuccuccg

SEQ ID NO: 10676 - RNA, 20 nt, Artificial Sequence
  spacer sequence GTCN PAM
uaggcacccagcaccacggu

SEQ ID NO: 10677 - RNA, 20 nt, Artificial Sequence
  spacer sequence GTCN PAM
cgccagacguuuuccaucag

SEQ ID NO: 10678 - RNA, 20 nt, Artificial Sequence
  spacer sequence GTCN PAM
uucagguucugcuggggguc

SEQ ID NO: 10679 - RNA, 20 nt, Artificial Sequence
  spacer sequence GTCN PAM
ggggaggguggcccugggga

SEQ ID NO: 10680 - RNA, 20 nt, Artificial Sequence
  spacer sequence GTCN PAM
agcuggggaaggaaauggag

SEQ ID NO: 10681 - RNA, 20 nt, Artificial Sequence
  spacer sequence GTCN PAM
cgcugcuggugagguuggcc

SEQ ID NO: 10682 - RNA, 20 nt, Artificial Sequence
  spacer sequence GTCN PAM
cucccguuuucccagguuug

SEQ ID NO: 10683 - RNA, 20 nt, Artificial Sequence
  spacer sequence GTCN PAM
cagucacguugacaaaccug

SEQ ID NO: 10684 - RNA, 20 nt, Artificial Sequence
  spacer sequence GTCN PAM
ucgggggucacagucacguu

SEQ ID NO: 10685 - RNA, 20 nt, Artificial Sequence
  spacer sequence GTCN PAM
ccccaacaacgugugcaccg

SEQ ID NO: 10686 - RNA, 20 nt, Artificial Sequence
  spacer sequence GTCN PAM
cagggccuggcucccacgcc

SEQ ID NO: 10687 - RNA, 20 nt, Artificial Sequence
  spacer sequence GTCN PAM
gggcgucccagggccuggcu

SEQ ID NO: 10688 - RNA, 20 nt, Artificial Sequence
  spacer sequence GTCN PAM
cccugggcaggcagcagcug

SEQ ID NO: 10689 - RNA, 20 nt, Artificial Sequence
  spacer sequence GTCN PAM
gcgagggccuggcccacggc

SEQ ID NO: 10690 - RNA, 20 nt, Artificial Sequence
  spacer sequence GTCN PAM
gggccucggccacagggccc

SEQ ID NO: 10691 - RNA, 20 nt, Artificial Sequence
  spacer sequence GTCN PAM
cggaagagcgccacucgggu

SEQ ID NO: 10692 - RNA, 20 nt, Artificial Sequence
  spacer sequence GTCN PAM
cggguuguugagaacaccau

SEQ ID NO: 10693 - RNA, 20 nt, Artificial Sequence
  spacer sequence GTCN PAM
ucacggugccuccgcgccgu

SEQ ID NO: 10694 - RNA, 20 nt, Artificial Sequence
  spacer sequence GTCN PAM
ggucacagcuggguccguuu

SEQ ID NO: 10695 - RNA, 20 nt, Artificial Sequence
  spacer sequence GTCN PAM
cagcuggguccguuucacgg

SEQ ID NO: 10696 - RNA, 20 nt, Artificial Sequence
  spacer sequence GTCN PAM
guuucacggcugcguccugu

SEQ ID NO: 10697 - RNA, 20 nt, Artificial Sequence
  spacer sequence GTCN PAM
uguugccacgccuggaggcc

SEQ ID NO: 10698 - RNA, 20 nt, Artificial Sequence
  spacer sequence GTCN PAM
cuccaucuuucuuguucucu

SEQ ID NO: 10699 - RNA, 20 nt, Artificial Sequence
  spacer sequence GTCN PAM
cugucucuccaucuuucuug

SEQ ID NO: 10700 - RNA, 20 nt, Artificial Sequence
  spacer sequence GTCN PAM
gucucugucucuccaucuuu

SEQ ID NO: 10701 - RNA, 20 nt, Artificial Sequence
  spacer sequence GTCN PAM
cuguccgucucugucucucc

SEQ ID NO: 10702 - RNA, 20 nt, Artificial Sequence
  spacer sequence GTCN PAM
cugugucucuguccgucucu

SEQ ID NO: 10703 - RNA, 20 nt, Artificial Sequence
  spacer sequence GTCN PAM
cucucugucucugugucucu

SEQ ID NO: 10704 - RNA, 20 nt, Artificial Sequence
  spacer sequence GTCN PAM
cucuggcucugucccucuuu

SEQ ID NO: 10705 - RNA, 20 nt, Artificial Sequence
  spacer sequence GTCN PAM
cccuuuuuuaaaacuaucuc

SEQ ID NO: 10706 - RNA, 20 nt, Artificial Sequence
  spacer sequence GTCN PAM
ucgcugucucccuuuuuuaa

SEQ ID NO: 10707 - RNA, 20 nt, Artificial Sequence
  spacer sequence GTCN PAM
cucugugucaucgcugucuc

SEQ ID NO: 10708 - RNA, 20 nt, Artificial Sequence
  spacer sequence GTCN PAM
gugucucucugugucaucgc

SEQ ID NO: 10709 - RNA, 20 nt, Artificial Sequence
  spacer sequence GTCN PAM
gugucugugucucucugugu

SEQ ID NO: 10710 - RNA, 20 nt, Artificial Sequence
  spacer sequence GTCN PAM
cuucaucucugugucugugu

SEQ ID NO: 10711 - RNA, 20 nt, Artificial Sequence
  spacer sequence GTCN PAM
gucucuucaucucugugucu

SEQ ID NO: 10712 - RNA, 20 nt, Artificial Sequence
  spacer sequence GTCN PAM
cccuauaucugucugucucu

SEQ ID NO: 10713 - RNA, 20 nt, Artificial Sequence
  spacer sequence GTCN PAM
cugucucccuauaucugucu

SEQ ID NO: 10714 - RNA, 20 nt, Artificial Sequence
  spacer sequence GTCN PAM
gucucugucucccuauaucu

SEQ ID NO: 10715 - RNA, 20 nt, Artificial Sequence
  spacer sequence GTCN PAM
cagucugucucugucucccu

SEQ ID NO: 10716 - RNA, 20 nt, Artificial Sequence
  spacer sequence GTCN PAM
cucugucucagucugucucu

SEQ ID NO: 10717 - RNA, 20 nt, Artificial Sequence
  spacer sequence GTCN PAM
cugucucucugucucagucu

SEQ ID NO: 10718 - RNA, 20 nt, Artificial Sequence
  spacer sequence GTCN PAM
cccucugucucugucucucu

SEQ ID NO: 10719 - RNA, 20 nt, Artificial Sequence
  spacer sequence GTCN PAM
cugucucccucugucucugu

SEQ ID NO: 10720 - RNA, 20 nt, Artificial Sequence
  spacer sequence GTCN PAM
cugucucugucucccucugu

SEQ ID NO: 10721 - RNA, 20 nt, Artificial Sequence
  spacer sequence GTCN PAM
ccuucucugucucugucucu

SEQ ID NO: 10722 - RNA, 20 nt, Artificial Sequence
  spacer sequence GTCN PAM
gccugggggcagagguagug

SEQ ID NO: 10723 - RNA, 20 nt, Artificial Sequence
  spacer sequence GTCN PAM
ccugaggucaggaguucgag

SEQ ID NO: 10724 - RNA, 20 nt, Artificial Sequence
  spacer sequence GTCN PAM
ggaguucgagaccagccugg

SEQ ID NO: 10725 - RNA, 20 nt, Artificial Sequence
  spacer sequence GTCN PAM
cgaacuccugaccucaggug

SEQ ID NO: 10726 - RNA, 20 nt, Artificial Sequence
  spacer sequence GTCN PAM
uuacuaaaaauacaaaaaaa

SEQ ID NO: 10727 - RNA, 20 nt, Artificial Sequence
  spacer sequence GTCN PAM
cugcggcggggccauccugg

SEQ ID NO: 10728 - RNA, 20 nt, Artificial Sequence
  spacer sequence GTCN PAM
ugacaaccacggaugucucc

SEQ ID NO: 10729 - RNA, 20 nt, Artificial Sequence
  spacer sequence GTCN PAM
cgacuuggagggagcuccug

SEQ ID NO: 10730 - RNA, 20 nt, Artificial Sequence
  spacer sequence GTCN PAM
ccaggccucacacagggacc

SEQ ID NO: 10731 - RNA, 20 nt, Artificial Sequence
  spacer sequence GTCN PAM
cugugugaggccuggagaca

SEQ ID NO: 10732 - RNA, 20 nt, Artificial Sequence
  spacer sequence GTCN PAM
guggaauccucuaacccugg

SEQ ID NO: 10733 - RNA, 20 nt, Artificial Sequence
  spacer sequence GTCN PAM
cuuggggucuguggaauccu

SEQ ID NO: 10734 - RNA, 20 nt, Artificial Sequence
  spacer sequence GTCN PAM
cgggagcuggggucccccgg

SEQ ID NO: 10735 - RNA, 20 nt, Artificial Sequence
  spacer sequence GTCN PAM
cccggguuuaugccguacgc

SEQ ID NO: 10736 - RNA, 20 nt, Artificial Sequence
  spacer sequence GTCN PAM
guucugacucccaggcuccc

SEQ ID NO: 10737 - RNA, 20 nt, Artificial Sequence
  spacer sequence GTCN PAM
gaacggacuccggggaggag

SEQ ID NO: 10738 - RNA, 20 nt, Artificial Sequence
  spacer sequence GTCN PAM
ccacuuccuccuuuugccuu

SEQ ID NO: 10739 - RNA, 20 nt, Artificial Sequence
  spacer sequence GTCN PAM
agcuccucuuauagcccaau

SEQ ID NO: 10740 - RNA, 20 nt, Artificial Sequence
  spacer sequence GTCN PAM
agggugcacccacggucaag

SEQ ID NO: 10741 - RNA, 20 nt, Artificial Sequence
  spacer sequence GTCN PAM
gugcugcuggccuugcugcu

SEQ ID NO: 10742 - RNA, 20 nt, Artificial Sequence
  spacer sequence GTCN PAM
auccaaagcccuucuggcac

SEQ ID NO: 10743 - RNA, 20 nt, Artificial Sequence
  spacer sequence GTCN PAM
ggggagacuccacucacugc

SEQ ID NO: 10744 - RNA, 20 nt, Artificial Sequence
  spacer sequence GTCN PAM
ccccugacccugccucaguu

SEQ ID NO: 10745 - RNA, 20 nt, Artificial Sequence
  spacer sequence GTCN PAM
cuauccugagggugauuuuc

SEQ ID NO: 10746 - RNA, 20 nt, Artificial Sequence
  spacer sequence GTCN PAM
caaaaaaaaaaaaaagaaaa

SEQ ID NO: 10747 - RNA, 20 nt, Artificial Sequence
  spacer sequence GTCN PAM
cgcccugucgcccaggcugg

SEQ ID NO: 10748 - RNA, 20 nt, Artificial Sequence
  spacer sequence GTCN PAM
cccaggcuggagugcagugg

SEQ ID NO: 10749 - RNA, 20 nt, Artificial Sequence
  spacer sequence GTCN PAM
cuacaaaaauuacaaaaaau

SEQ ID NO: 10750 - RNA, 20 nt, Artificial Sequence
  spacer sequence GTCN PAM
cgaucuccugacuucgugau

SEQ ID NO: 10751 - RNA, 20 nt, Artificial Sequence
  spacer sequence GTCN PAM
gggagcccccaggcugcagg

SEQ ID NO: 10752 - RNA, 20 nt, Artificial Sequence
  spacer sequence GTCN PAM
aggcgucagggagcccccag

SEQ ID NO: 10753 - RNA, 20 nt, Artificial Sequence
  spacer sequence GTCN PAM
gcacgaagcugggguggauc

SEQ ID NO: 10754 - RNA, 20 nt, Artificial Sequence
  spacer sequence GTCN PAM
cgcaggcagugcgcggccgu

SEQ ID NO: 10755 - RNA, 20 nt, Artificial Sequence
  spacer sequence GTCN PAM
gcacguugugggcuccgagc

SEQ ID NO: 10756 - RNA, 20 nt, Artificial Sequence
  spacer sequence GTCN PAM
uucaguuuguucuccgcguc

SEQ ID NO: 10757 - RNA, 20 nt, Artificial Sequence
  spacer sequence GTCN PAM
cguucuaagccacaugaguc

SEQ ID NO: 10758 - RNA, 20 nt, Artificial Sequence
  spacer sequence GTCN PAM
ggcugcucccaaacuccugg

SEQ ID NO: 10759 - RNA, 20 nt, Artificial Sequence
  spacer sequence GTCN PAM
cacuagguuggucaggcugc

SEQ ID NO: 10760 - RNA, 20 nt, Artificial Sequence
  spacer sequence GTCN PAM
uuuauagagauggggucuca

SEQ ID NO: 10761 - RNA, 20 nt, Artificial Sequence
  spacer sequence GTCN PAM
cuacuaaaaauacaaaaauu

SEQ ID NO: 10762 - RNA, 20 nt, Artificial Sequence
  spacer sequence GTCN PAM
cgaacuccugaccucaagug

SEQ ID NO: 10763 - RNA, 20 nt, Artificial Sequence
  spacer sequence GTCN PAM
ggaguucgagaccagccugg

SEQ ID NO: 10764 - RNA, 20 nt, Artificial Sequence
  spacer sequence GTCN PAM
cuauuguauucauucauuuu

SEQ ID NO: 10765 - RNA, 20 nt, Artificial Sequence
  spacer sequence GTCN PAM
cauuugucacuauuguauuc

SEQ ID NO: 10766 - RNA, 20 nt, Artificial Sequence
  spacer sequence GTCN PAM
uggggcccaggcggagggag

SEQ ID NO: 10767 - RNA, 20 nt, Artificial Sequence
  spacer sequence GTCN PAM
caccgccgccugccuucugc

SEQ ID NO: 10768 - RNA, 20 nt, Artificial Sequence
  spacer sequence GTCN PAM
ccacaguccagcugccacag

SEQ ID NO: 10769 - RNA, 20 nt, Artificial Sequence
  spacer sequence GTCN PAM
ugcuguggcagcuggacugu

SEQ ID NO: 10770 - RNA, 20 nt, Artificial Sequence
  spacer sequence GTCN PAM
ugggcacccacgcggcccca

SEQ ID NO: 10771 - RNA, 20 nt, Artificial Sequence
  spacer sequence GTCN PAM
ugcaggagcucaaugucacc

SEQ ID NO: 10772 - RNA, 20 nt, Artificial Sequence
  spacer sequence GTCN PAM
ccguggucaccuucuucugc

SEQ ID NO: 10773 - RNA, 20 nt, Artificial Sequence
  spacer sequence GTCN PAM
ccuucuucugccggccacau

SEQ ID NO: 10774 - RNA, 20 nt, Artificial Sequence
  spacer sequence GTCN PAM
cucgccgcaaggccggcauc

SEQ ID NO: 10775 - RNA, 20 nt, Artificial Sequence
  spacer sequence GTCN PAM
uucguaggaacugggcauuu

SEQ ID NO: 10776 - RNA, 20 nt, Artificial Sequence
  spacer sequence GTCN PAM
caaaaacaaacaaaaagugu

SEQ ID NO: 10777 - RNA, 20 nt, Artificial Sequence
  spacer sequence GTCN PAM
cucuguuguccaggcuggag

SEQ ID NO: 10778 - RNA, 20 nt, Artificial Sequence
  spacer sequence GTCN PAM
aggcuggagugcagugguga

SEQ ID NO: 10779 - RNA, 20 nt, Artificial Sequence
  spacer sequence GTCN PAM
uucucucgagacagggucuc

SEQ ID NO: 10780 - RNA, 20 nt, Artificial Sequence
  spacer sequence GTCN PAM
cccaucaggggccaccugag

SEQ ID NO: 10781 - RNA, 20 nt, Artificial Sequence
  spacer sequence GTCN PAM
cuguccuccagggagacuca

SEQ ID NO: 10782 - RNA, 20 nt, Artificial Sequence
  spacer sequence GTCN PAM
uccagggagacucagguggc

SEQ ID NO: 10783 - RNA, 20 nt, Artificial Sequence
  spacer sequence GTCN PAM
cccuggaggacagggacggc

SEQ ID NO: 10784 - RNA, 20 nt, Artificial Sequence
  spacer sequence GTCN PAM
auuccuuggaugaugccauc

SEQ ID NO: 10785 - RNA, 20 nt, Artificial Sequence
  spacer sequence GTCN PAM
gggaaaaggcggguggcaca

SEQ ID NO: 10786 - RNA, 20 nt, Artificial Sequence
  spacer sequence GTCN PAM
acguagagggcuacccgcgu

SEQ ID NO: 10787 - RNA, 20 nt, Artificial Sequence
  spacer sequence GTCN PAM
caaaaaaauauuaaaaagaa

SEQ ID NO: 10788 - RNA, 20 nt, Artificial Sequence
  spacer sequence GTCN PAM
cgcucugucacccaggcugg

SEQ ID NO: 10789 - RNA, 20 nt, Artificial Sequence
  spacer sequence GTCN PAM
cccaggcuggagugcagugg

SEQ ID NO: 10790 - RNA, 20 nt, Artificial Sequence
  spacer sequence GTCN PAM
caaaaauaaauaaguaggcc

SEQ ID NO: 10791 - RNA, 20 nt, Artificial Sequence
  spacer sequence GTCN PAM
cacucugucgcccagucugu

SEQ ID NO: 10792 - RNA, 20 nt, Artificial Sequence
  spacer sequence GTCN PAM
cccagucuguagugcagugg

SEQ ID NO: 10793 - RNA, 20 nt, Artificial Sequence
  spacer sequence GTCN PAM
guagugcaguggugcaaucu

SEQ ID NO: 10794 - RNA, 20 nt, Artificial Sequence
  spacer sequence GTCN PAM
cuacaaaaacuaagaaaaua

SEQ ID NO: 10795 - RNA, 20 nt, Artificial Sequence
  spacer sequence GTCN PAM
ggcuguguugcccagguggg

SEQ ID NO: 10796 - RNA, 20 nt, Artificial Sequence
  spacer sequence GTCN PAM
ucagugacucuuuacauaug

SEQ ID NO: 10797 - RNA, 20 nt, Artificial Sequence
  spacer sequence GTCN PAM
cugaggacccaccugggcaa

SEQ ID NO: 10798 - RNA, 20 nt, Artificial Sequence
  spacer sequence GTCN PAM
cggagaguuuauuucagggg

SEQ ID NO: 10799 - RNA, 20 nt, Artificial Sequence
  spacer sequence GTCN PAM
ucagcuuaaucagacacaca

SEQ ID NO: 10800 - RNA, 20 nt, Artificial Sequence
  spacer sequence GTCN PAM
gcccuguccucagcuuaauc

SEQ ID NO: 10801 - RNA, 20 nt, Artificial Sequence
  spacer sequence GTCN PAM
augucugcccuguccucagc

SEQ ID NO: 10802 - RNA, 20 nt, Artificial Sequence
  spacer sequence GTCN PAM
ccaggaauaggcggggcgag

SEQ ID NO: 10803 - RNA, 20 nt, Artificial Sequence
  spacer sequence GTCN PAM
uggagccaggaggacguugg

SEQ ID NO: 10804 - RNA, 20 nt, Artificial Sequence
  spacer sequence GTCN PAM
uccuggcuccaggacaaggg

SEQ ID NO: 10805 - RNA, 20 nt, Artificial Sequence
  spacer sequence GTCN PAM
caagaaccaacguccuccug

SEQ ID NO: 10806 - RNA, 20 nt, Artificial Sequence
  spacer sequence GTCN PAM
ccugccucaguuuacccagg

SEQ ID NO: 10807 - RNA, 20 nt, Artificial Sequence
  spacer sequence GTCN PAM
ugcucuaucgcccaggcugg

SEQ ID NO: 10808 - RNA, 20 nt, Artificial Sequence
  spacer sequence GTCN PAM
ccaaaaaaauaaauuaaaaa

SEQ ID NO: 10809 - RNA, 20 nt, Artificial Sequence
  spacer sequence GTCN PAM
cugccccuccgugcccgccc

SEQ ID NO: 10810 - RNA, 20 nt, Artificial Sequence
  spacer sequence GTCN PAM
ugguggggcuggggcuccgg

SEQ ID NO: 10811 - RNA, 20 nt, Artificial Sequence
  spacer sequence GTCN PAM
gcggccgagggucauggugg

SEQ ID NO: 10812 - RNA, 20 nt, Artificial Sequence
  spacer sequence GTCN PAM
uuuccucgccuguguccugc

SEQ ID NO: 10813 - RNA, 20 nt, Artificial Sequence
  spacer sequence GTCN PAM
ugccggccuugcugcugggg

SEQ ID NO: 10814 - RNA, 20 nt, Artificial Sequence
  spacer sequence GTCN PAM
aaccucccgcugcucccucu

SEQ ID NO: 10815 - RNA, 20 nt, Artificial Sequence
  spacer sequence GTCN PAM
ccaggcaccgcgcuggccuc

SEQ ID NO: 10816 - RNA, 20 nt, Artificial Sequence
  spacer sequence GTCN PAM
cugcagcugcgcggaggcca

SEQ ID NO: 10817 - RNA, 20 nt, Artificial Sequence
  spacer sequence GTCN PAM
ugucggccgcgcacugcgug

SEQ ID NO: 10818 - RNA, 20 nt, Artificial Sequence
  spacer sequence GTCN PAM
gccgcgcacugcguggcgaa

SEQ ID NO: 10819 - RNA, 20 nt, Artificial Sequence
  spacer sequence GTCN PAM
gagccgggcgcgcacacucc

SEQ ID NO: 10820 - RNA, 20 nt, Artificial Sequence
  spacer sequence GTCN PAM
gcgcggugcgggugguccug

SEQ ID NO: 10821 - RNA, 20 nt, Artificial Sequence
  spacer sequence GTCN PAM
ugggagcccauaaccucucg

SEQ ID NO: 10822 - RNA, 20 nt, Artificial Sequence
  spacer sequence GTCN PAM
uagccguuuucgaagaugcg

SEQ ID NO: 10823 - RNA, 20 nt, Artificial Sequence
  spacer sequence GTCN PAM
uugagcaaguuuacgggguc

SEQ ID NO: 10824 - RNA, 20 nt, Artificial Sequence
  spacer sequence GTCN PAM
aucaacaaacuuacugagaa

SEQ ID NO: 10825 - RNA, 20 nt, Artificial Sequence
  spacer sequence GTCN PAM
aucaacaaacuuacugagaa

SEQ ID NO: 10826 - RNA, 20 nt, Artificial Sequence
  spacer sequence GTCN PAM
aucaacaaacuuacugagaa

SEQ ID NO: 10827 - RNA, 20 nt, Artificial Sequence
  spacer sequence GTCN PAM
aucaacaaacuuacugagaa

SEQ ID NO: 10828 - RNA, 20 nt, Artificial Sequence
  spacer sequence GTCN PAM
aucaacaaacuuacugagaa

SEQ ID NO: 10829 - RNA, 20 nt, Artificial Sequence
  spacer sequence GTCN PAM
cacggggcagugaugaugac

SEQ ID NO: 10830 - RNA, 20 nt, Artificial Sequence
  spacer sequence GTCN PAM
gcgcgucacacggggcagug

SEQ ID NO: 10831 - RNA, 20 nt, Artificial Sequence
  spacer sequence GTCN PAM
ccaccgccacagcucaacgg

SEQ ID NO: 10832 - RNA, 20 nt, Artificial Sequence
  spacer sequence GTCN PAM
gccaccaucaacgccaacgu

SEQ ID NO: 10833 - RNA, 20 nt, Artificial Sequence
  spacer sequence GTCN PAM
cugagccggcagcugggcca

SEQ ID NO: 10834 - RNA, 20 nt, Artificial Sequence
  spacer sequence GTCN PAM
ugcaggagcucaacgugacg

SEQ ID NO: 10835 - RNA, 20 nt, Artificial Sequence
  spacer sequence GTCN PAM
cguugagcuccugcaggacg

SEQ ID NO: 10836 - RNA, 20 nt, Artificial Sequence
  spacer sequence GTCN PAM
ccaccgucacguugagcucc

SEQ ID NO: 10837 - RNA, 20 nt, Artificial Sequence
  spacer sequence GTCN PAM
cucugccgucgcagcaacgu

SEQ ID NO: 10838 - RNA, 20 nt, Artificial Sequence
  spacer sequence GTCN PAM
cagcaacgucugcacucucg

SEQ ID NO: 10839 - RNA, 20 nt, Artificial Sequence
  spacer sequence GTCN PAM
gcacucucgugaggggccgg

SEQ ID NO: 10840 - RNA, 20 nt, Artificial Sequence
  spacer sequence GTCN PAM
guuucguacgugcccugggu

SEQ ID NO: 10841 - RNA, 20 nt, Artificial Sequence
  spacer sequence GTCN PAM
cucugcuccccacccgcucc

SEQ ID NO: 10842 - RNA, 20 nt, Artificial Sequence
  spacer sequence GTCN PAM
agcuuccccaccuugucugc

SEQ ID NO: 10843 - RNA, 20 nt, Artificial Sequence
  spacer sequence GTCN PAM
gccuccacagggggacuccg

SEQ ID NO: 10844 - RNA, 20 nt, Artificial Sequence
  spacer sequence GTCN PAM
cccuguggaggcagacaagg

SEQ ID NO: 10845 - RNA, 20 nt, Artificial Sequence
  spacer sequence GTCN PAM
gcaacgggcuaauccacgga

SEQ ID NO: 10846 - RNA, 20 nt, Artificial Sequence
  spacer sequence GTCN PAM
ggggaggcugcgccucaggg

SEQ ID NO: 10847 - RNA, 20 nt, Artificial Sequence
  spacer sequence GTCN PAM
auccaguuuacaaacugugc

SEQ ID NO: 10848 - RNA, 20 nt, Artificial Sequence
  spacer sequence GTCN PAM
ucggagcguuggaugauaga

SEQ ID NO: 10849 - RNA, 20 nt, Artificial Sequence
  spacer sequence GTCN PAM
cuugggcaucucuggaguaa

SEQ ID NO: 10850 - RNA, 20 nt, Artificial Sequence
  spacer sequence GTCN PAM
cuucugcuccauugcccugg

SEQ ID NO: 10851 - RNA, 20 nt, Artificial Sequence
  spacer sequence GTCN PAM
cgcucugucgcccaggcugg

SEQ ID NO: 10852 - RNA, 20 nt, Artificial Sequence
  spacer sequence GTCN PAM
cccaggcuggagugcagugg

SEQ ID NO: 10853 - RNA, 20 nt, Artificial Sequence
  spacer sequence GTCN PAM
cagcuacucgggaggcugag

SEQ ID NO: 10854 - RNA, 20 nt, Artificial Sequence
  spacer sequence GTCN PAM
cuacuaaaaauacaaaaaau

SEQ ID NO: 10855 - RNA, 20 nt, Artificial Sequence
  spacer sequence GTCN PAM
cgaucuccugaacucgugau

SEQ ID NO: 10856 - RNA, 20 nt, Artificial Sequence
  spacer sequence GTCN PAM
aggcgggcggaucacgaguu

SEQ ID NO: 10857 - RNA, 20 nt, Artificial Sequence
  spacer sequence GTCN PAM
caagggugccuuggguuggu

SEQ ID NO: 10858 - RNA, 20 nt, Artificial Sequence
  spacer sequence GTCN PAM
cuggaaacacaccaggggag

SEQ ID NO: 10859 - RNA, 20 nt, Artificial Sequence
  spacer sequence GTCN PAM
gcuucuggcuucuccuuucu

SEQ ID NO: 10860 - RNA, 20 nt, Artificial Sequence
  spacer sequence GTCN PAM
agugucugcuucuggcuucu

SEQ ID NO: 10861 - RNA, 20 nt, Artificial Sequence
  spacer sequence GTCN PAM
gccuucagguguggcuugau

SEQ ID NO: 10862 - RNA, 20 nt, Artificial Sequence
  spacer sequence GTCN PAM
guuggggguaggaaggucac

SEQ ID NO: 10863 - RNA, 20 nt, Artificial Sequence
  spacer sequence GTCN PAM
ugcuacccucccuucuuuuc

SEQ ID NO: 10864 - RNA, 20 nt, Artificial Sequence
  spacer sequence GTCN PAM
uccuaggagcggccgccugc

SEQ ID NO: 10865 - RNA, 20 nt, Artificial Sequence
  spacer sequence GTCN PAM
cucaccccaggcccaggccu

SEQ ID NO: 10866 - RNA, 20 nt, Artificial Sequence
  spacer sequence GTCN PAM
gauccugggcggcagagagg

SEQ ID NO: 10867 - RNA, 20 nt, Artificial Sequence
  spacer sequence GTCN PAM
gugcagcugaacggcgcgca

SEQ ID NO: 10868 - RNA, 20 nt, Artificial Sequence
  spacer sequence GTCN PAM
ugguggcggagcagugggug

SEQ ID NO: 10869 - RNA, 20 nt, Artificial Sequence
  spacer sequence GTCN PAM
uccaggcagugcgccgcgcu

SEQ ID NO: 10870 - RNA, 20 nt, Artificial Sequence
  spacer sequence GTCN PAM
gugccagccgacucccccca

SEQ ID NO: 10871 - RNA, 20 nt, Artificial Sequence
  spacer sequence GTCN PAM
gcggucggugccagccgacu

SEQ ID NO: 10872 - RNA, 20 nt, Artificial Sequence
  spacer sequence GTCN PAM
gguccccagggccgacggga

SEQ ID NO: 10873 - RNA, 20 nt, Artificial Sequence
  spacer sequence GTCN PAM
ccagggccgacgggaaggug

SEQ ID NO: 10874 - RNA, 20 nt, Artificial Sequence
  spacer sequence GTCN PAM
gcccuggggaccggacggag

SEQ ID NO: 10875 - RNA, 20 nt, Artificial Sequence
  spacer sequence GTCN PAM
cagccggagcccuccaagcg

SEQ ID NO: 10876 - RNA, 20 nt, Artificial Sequence
  spacer sequence GTCN PAM
uacaggcgcuuggagggcuc

SEQ ID NO: 10877 - RNA, 20 nt, Artificial Sequence
  spacer sequence GTCN PAM
ggguggggcacugcgcggag

SEQ ID NO: 10878 - RNA, 20 nt, Artificial Sequence
  spacer sequence GTCN PAM
ggcuggcuguccgggugggg

SEQ ID NO: 10879 - RNA, 20 nt, Artificial Sequence
  spacer sequence GTCN PAM
auggugucgggcuggcuguc

SEQ ID NO: 10880 - RNA, 20 nt, Artificial Sequence
  spacer sequence GTCN PAM
uggucgauggugucgggcug

SEQ ID NO: 10881 - RNA, 20 nt, Artificial Sequence
  spacer sequence GTCN PAM
gccccguguagcgcaguccc

SEQ ID NO: 10882 - RNA, 20 nt, Artificial Sequence
  spacer sequence GTCN PAM
cuccugcggcgcugggaucc

SEQ ID NO: 10883 - RNA, 20 nt, Artificial Sequence
  spacer sequence GTCN PAM
ggguuggggugcgggggugc

SEQ ID NO: 10884 - RNA, 20 nt, Artificial Sequence
  spacer sequence GTCN PAM
gccuccacccucagcugucg

SEQ ID NO: 10885 - RNA, 20 nt, Artificial Sequence
  spacer sequence GTCN PAM
gagaaggccacacugggccc

SEQ ID NO: 10886 - RNA, 20 nt, Artificial Sequence
  spacer sequence GTCN PAM
acgcgcugccagggcagggg

SEQ ID NO: 10887 - RNA, 20 nt, Artificial Sequence
  spacer sequence GTCN PAM
cgguccacgcgcugccaggg

SEQ ID NO: 10888 - RNA, 20 nt, Artificial Sequence
  spacer sequence GTCN PAM
cagagaguucccggugccac

SEQ ID NO: 10889 - RNA, 20 nt, Artificial Sequence
  spacer sequence GTCN PAM
accacgcgggccgccgcccg

SEQ ID NO: 10890 - RNA, 20 nt, Artificial Sequence
  spacer sequence GTCN PAM
gggcggcggcccgcgugguu

SEQ ID NO: 10891 - RNA, 20 nt, Artificial Sequence
  spacer sequence GTCN PAM
agcacuggcaagagcacgug

SEQ ID NO: 10892 - RNA, 20 nt, Artificial Sequence
  spacer sequence GTCN PAM
uggugcgugcgccgguugca

SEQ ID NO: 10893 - RNA, 20 nt, Artificial Sequence
  spacer sequence GTCN PAM
cggcgauugcucuccgcgca

SEQ ID NO: 10894 - RNA, 20 nt, Artificial Sequence
  spacer sequence GTCN PAM
ccucccaggccugaaggcuc

SEQ ID NO: 10895 - RNA, 20 nt, Artificial Sequence
  spacer sequence GTCN PAM
uguuccggcagggugacucc

SEQ ID NO: 10896 - RNA, 20 nt, Artificial Sequence
  spacer sequence GTCN PAM
cccugccggaacaggacggg

SEQ ID NO: 10897 - RNA, 20 nt, Artificial Sequence
  spacer sequence GTCN PAM
ccucgggcucgcgcguuugc

SEQ ID NO: 10898 - RNA, 20 nt, Artificial Sequence
  spacer sequence GTCN PAM
auccaggccgcauagcucgc

SEQ ID NO: 10899 - RNA, 20 nt, Artificial Sequence
  spacer sequence GTCN PAM
uggccuagggugccggggcc

SEQ ID NO: 10900 - RNA, 20 nt, Artificial Sequence
  spacer sequence GTCN PAM
gggucacccaagcaacaaag

SEQ ID NO: 10901 - RNA, 20 nt, Artificial Sequence
  spacer sequence GTCN PAM
cccaagcaacaaagucccga

SEQ ID NO: 10902 - RNA, 20 nt, Artificial Sequence
  spacer sequence GTCN PAM
cgagcaaugaagucauccac

SEQ ID NO: 10903 - RNA, 20 nt, Artificial Sequence
  spacer sequence GTCN PAM
uccacuccugcaucugguug

SEQ ID NO: 10904 - RNA, 20 nt, Artificial Sequence
  spacer sequence GTCN PAM
uuauugagcaccuacuauau

SEQ ID NO: 10905 - RNA, 20 nt, Artificial Sequence
  spacer sequence GTCN PAM
gaguacaguggugcgaucuc

SEQ ID NO: 10906 - RNA, 20 nt, Artificial Sequence
  spacer sequence GTCN PAM
cccaggucggaguacagugg

SEQ ID NO: 10907 - RNA, 20 nt, Artificial Sequence
  spacer sequence GTCN PAM
cccagugcccgacucagaag

SEQ ID NO: 10908 - RNA, 20 nt, Artificial Sequence
  spacer sequence GTCN PAM
cacaacgcaugggcacccuc

SEQ ID NO: 10909 - RNA, 20 nt, Artificial Sequence
  spacer sequence GTCN PAM
cugcagagccacauggaaac

SEQ ID NO: 10910 - RNA, 20 nt, Artificial Sequence
  spacer sequence GTCN PAM
gcggcguuuccauguggcuc

SEQ ID NO: 10911 - RNA, 20 nt, Artificial Sequence
  spacer sequence GTCN PAM
caggaguggggccgggagcu

SEQ ID NO: 10912 - RNA, 20 nt, Artificial Sequence
  spacer sequence GTCN PAM
gucccucagaggauggccag

SEQ ID NO: 10913 - RNA, 20 nt, Artificial Sequence
  spacer sequence GTCN PAM
cucagaggauggccaggggg

SEQ ID NO: 10914 - RNA, 20 nt, Artificial Sequence
  spacer sequence GTCN PAM
uuaaauccuucagcauuuau

SEQ ID NO: 10915 - RNA, 20 nt, Artificial Sequence
  spacer sequence GTCN PAM
ucuuggccugucuuuaaauc

SEQ ID NO: 10916 - RNA, 20 nt, Artificial Sequence
  spacer sequence GTCN PAM
uggguggggucgggggcacc

SEQ ID NO: 10917 - RNA, 20 nt, Artificial Sequence
  spacer sequence GTCN PAM
cccaacagaaccacggcggu

SEQ ID NO: 10918 - RNA, 20 nt, Artificial Sequence
  spacer sequence GTCN PAM
ccaugcucaagucgcccaac

SEQ ID NO: 10919 - RNA, 20 nt, Artificial Sequence
  spacer sequence GTCN PAM
gcgguuccgggggccccuca

SEQ ID NO: 10920 - RNA, 20 nt, Artificial Sequence
  spacer sequence GTCN PAM
aucuugggcuggccuggggc

SEQ ID NO: 10921 - RNA, 20 nt, Artificial Sequence
  spacer sequence GTCN PAM
uguguuuggggaccaaugca

SEQ ID NO: 10922 - RNA, 20 nt, Artificial Sequence
  spacer sequence GTCN PAM
ccaaacacaggacuccuucc

SEQ ID NO: 10923 - RNA, 20 nt, Artificial Sequence
  spacer sequence GTCN PAM
cugcauugguccccaaacac

SEQ ID NO: 10924 - RNA, 20 nt, Artificial Sequence
  spacer sequence GTCN PAM
agcugcaggguggcagcacu

SEQ ID NO: 10925 - RNA, 20 nt, Artificial Sequence
  spacer sequence GTCN PAM
gcaguuuggccgggcgccca

SEQ ID NO: 10926 - RNA, 20 nt, Artificial Sequence
  spacer sequence GTCN PAM
cuggcuggcagccaguccag

SEQ ID NO: 10927 - RNA, 20 nt, Artificial Sequence
  spacer sequence GTCN PAM
aggcuggggauaagcagcug

SEQ ID NO: 10928 - RNA, 20 nt, Artificial Sequence
  spacer sequence GTCN PAM
ggcucgcucgcugggcccuc

SEQ ID NO: 10929 - RNA, 20 nt, Artificial Sequence
  spacer sequence GTCN PAM
cgaugagggcccagcgagcg

SEQ ID NO: 10930 - RNA, 20 nt, Artificial Sequence
  spacer sequence GTCN PAM
cagcaccccugacuggggca

SEQ ID NO: 10931 - RNA, 20 nt, Artificial Sequence
  spacer sequence GTCN PAM
ggggugcugagacuuccgcc

SEQ ID NO: 10932 - RNA, 20 nt, Artificial Sequence
  spacer sequence GTCN PAM
cugcucuuccgccugcucac

SEQ ID NO: 10933 - RNA, 20 nt, Artificial Sequence
  spacer sequence GTCN PAM
uggguauccgagguggccgu

SEQ ID NO: 10934 - RNA, 20 nt, Artificial Sequence
  spacer sequence GTCN PAM
uccgcaucuggggccuucug

SEQ ID NO: 10935 - RNA, 20 nt, Artificial Sequence
  spacer sequence GTCN PAM
cgcagaaagcuguggcccgg

SEQ ID NO: 10936 - RNA, 20 nt, Artificial Sequence
  spacer sequence GTCN PAM
ggggcgcacaagccgcagaa

SEQ ID NO: 10937 - RNA, 20 nt, Artificial Sequence
  spacer sequence GTCN PAM
cccacccacugcaagagcug

SEQ ID NO: 10938 - RNA, 20 nt, Artificial Sequence
  spacer sequence GTCN PAM
agcacaaauuccuccgucuu

SEQ ID NO: 10939 - RNA, 20 nt, Artificial Sequence
  spacer sequence GTCN PAM
ugagguugaucaugaccuug

SEQ ID NO: 10940 - RNA, 20 nt, Artificial Sequence
  spacer sequence GTCN PAM
ugaucaaccucaagacggag

SEQ ID NO: 10941 - RNA, 20 nt, Artificial Sequence
  spacer sequence GTCN PAM
augucuacaaggagacgugg

SEQ ID NO: 10942 - RNA, 20 nt, Artificial Sequence
  spacer sequence GTCN PAM
acaaggagacgugggucggg

SEQ ID NO: 10943 - RNA, 20 nt, Artificial Sequence
  spacer sequence GTCN PAM
ccuuguagacauugacaagg

SEQ ID NO: 10944 - RNA, 20 nt, Artificial Sequence
  spacer sequence GTCN PAM
ggucagcucgggccucuugu

SEQ ID NO: 10945 - RNA, 20 nt, Artificial Sequence
  spacer sequence GTCN PAM
gcucgggccucuuguacaca

SEQ ID NO: 10946 - RNA, 20 nt, Artificial Sequence
  spacer sequence GTCN PAM
uuuuccacgcccggggccuc

SEQ ID NO: 10947 - RNA, 20 nt, Artificial Sequence
  spacer sequence GTCN PAM
guggguccuuuuccacgccc

SEQ ID NO: 10948 - RNA, 20 nt, Artificial Sequence
  spacer sequence GTCN PAM
gugaucuuggugcagaucuc

SEQ ID NO: 10949 - RNA, 20 nt, Artificial Sequence
  spacer sequence GTCN PAM
gccggucgccggggcucuug

SEQ ID NO: 10950 - RNA, 20 nt, Artificial Sequence
  spacer sequence GTCN PAM
ccggggcucuugucaggcgu

SEQ ID NO: 10951 - RNA, 20 nt, Artificial Sequence
  spacer sequence GTCN PAM
ggcguguugagaaagugggg

SEQ ID NO: 10952 - RNA, 20 nt, Artificial Sequence
  spacer sequence GTCN PAM
cugcugcgcccccacuuucu

SEQ ID NO: 10953 - RNA, 20 nt, Artificial Sequence
  spacer sequence GTCN PAM
cacacgcgggucaccgugca

SEQ ID NO: 10954 - RNA, 20 nt, Artificial Sequence
  spacer sequence GTCN PAM
ccgugcagggcgacagcuug

SEQ ID NO: 10955 - RNA, 20 nt, Artificial Sequence
  spacer sequence GTCN PAM
cccugcacggugacccgcgu

SEQ ID NO: 10956 - RNA, 20 nt, Artificial Sequence
  spacer sequence GTCN PAM
ucuccacccggauccuggcc

SEQ ID NO: 10957 - RNA, 20 nt, Artificial Sequence
  spacer sequence GTCN PAM
ccccaaggggccggagcaga

SEQ ID NO: 10958 - RNA, 20 nt, Artificial Sequence
  spacer sequence GTCN PAM
aacugcucuucuccucagcu

SEQ ID NO: 10959 - RNA, 20 nt, Artificial Sequence
  spacer sequence GTCN PAM
gagucgaacugcucuucucc

SEQ ID NO: 10960 - RNA, 20 nt, Artificial Sequence
  spacer sequence GTCN PAM
ggcgcguguacuccucgugc

SEQ ID NO: 10961 - RNA, 20 nt, Artificial Sequence
  spacer sequence GTCN PAM
caccagucguagccggucac

SEQ ID NO: 10962 - RNA, 20 nt, Artificial Sequence
  spacer sequence GTCN PAM
uagccggucaccaugcagua

SEQ ID NO: 10963 - RNA, 20 nt, Artificial Sequence
  spacer sequence GTCN PAM
ccaugcaguacuccagcagg

SEQ ID NO: 10964 - RNA, 20 nt, Artificial Sequence
  spacer sequence GTCN PAM
cuggcagcugagcgugcucc

SEQ ID NO: 10965 - RNA, 20 nt, Artificial Sequence
  spacer sequence GTCN PAM
augcccaccgagcccagccc

SEQ ID NO: 10966 - RNA, 20 nt, Artificial Sequence
  spacer sequence GTCN PAM
augcccaccagccccagccc

SEQ ID NO: 10967 - RNA, 20 nt, Artificial Sequence
  spacer sequence GTCN PAM
augcccagcagcucaccuuc

SEQ ID NO: 10968 - RNA, 20 nt, Artificial Sequence
  spacer sequence GTCN PAM
augcccaccaagcccagccc

SEQ ID NO: 10969 - RNA, 20 nt, Artificial Sequence
  spacer sequence GTCN PAM
augcccaccagccccagccc

SEQ ID NO: 10970 - RNA, 20 nt, Artificial Sequence
  spacer sequence GTCN PAM
auccccaccagggccaguga

SEQ ID NO: 10971 - RNA, 20 nt, Artificial Sequence
  spacer sequence GTCN PAM
cuggcccugguggggauuga

SEQ ID NO: 10972 - RNA, 20 nt, Artificial Sequence
  spacer sequence GTCN PAM
acgauagcugcauagccuuu

SEQ ID NO: 10973 - RNA, 20 nt, Artificial Sequence
  spacer sequence GTCN PAM
acuuaaaggcuaugcagcua

SEQ ID NO: 10974 - RNA, 20 nt, Artificial Sequence
  spacer sequence GTCN PAM
ucuacagcuccgcggccccg

SEQ ID NO: 10975 - RNA, 20 nt, Artificial Sequence
  spacer sequence GTCN PAM
gcagugagagccggugcacg

SEQ ID NO: 10976 - RNA, 20 nt, Artificial Sequence
  spacer sequence GTCN PAM
acaucgugcaccggcucuca

SEQ ID NO: 10977 - RNA, 20 nt, Artificial Sequence
  spacer sequence GTCN PAM
uggaaggccagggccagccc

SEQ ID NO: 10978 - RNA, 20 nt, Artificial Sequence
  spacer sequence GTCN PAM
aagcagugccugugccccac

SEQ ID NO: 10979 - RNA, 20 nt, Artificial Sequence
  spacer sequence GTCN PAM
cuggccaccuugaggucggu

SEQ ID NO: 10980 - RNA, 20 nt, Artificial Sequence
  spacer sequence GTCN PAM
guguuggugagcgagauggg

SEQ ID NO: 10981 - RNA, 20 nt, Artificial Sequence
  spacer sequence GTCN PAM
gccguggcgcugcccaagcu

SEQ ID NO: 10982 - RNA, 20 nt, Artificial Sequence
  spacer sequence GTCN PAM
agaucguugguggccgauag

SEQ ID NO: 10983 - RNA, 20 nt, Artificial Sequence
  spacer sequence GTCN PAM
ccaacugaaaaaucaggggc

SEQ ID NO: 10984 - RNA, 20 nt, Artificial Sequence
  spacer sequence GTCN PAM
cccgccggcugcggaggccc

SEQ ID NO: 10985 - RNA, 20 nt, Artificial Sequence
  spacer sequence GTCN PAM
cuccuugcgcagggaccagc

SEQ ID NO: 10986 - RNA, 20 nt, Artificial Sequence
  spacer sequence GTCN PAM
cugcgcaaggagggacuccc

SEQ ID NO: 10987 - RNA, 20 nt, Artificial Sequence
  spacer sequence GTCN PAM
ggcuggacgcgcacaaaagc

SEQ ID NO: 10988 - RNA, 20 nt, Artificial Sequence
  spacer sequence GTCN PAM
agccagaccagcagcaucgu

SEQ ID NO: 10989 - RNA, 20 nt, Artificial Sequence
  spacer sequence GTCN PAM
gcccucacccccaccucccc

SEQ ID NO: 10990 - RNA, 20 nt, Artificial Sequence
  spacer sequence GTCN PAM
gagcaggugaacgggcgcag

SEQ ID NO: 10991 - RNA, 20 nt, Artificial Sequence
  spacer sequence GTCN PAM
cgggccaggaacuugaggug

SEQ ID NO: 10992 - RNA, 20 nt, Artificial Sequence
  spacer sequence GTCN PAM
uugcgguugaggucgguggu

SEQ ID NO: 10993 - RNA, 20 nt, Artificial Sequence
  spacer sequence GTCN PAM
guggugcagcgcaugaacag

SEQ ID NO: 10994 - RNA, 20 nt, Artificial Sequence
  spacer sequence GTCN PAM
auacggcacuucucgcucac

SEQ ID NO: 10995 - RNA, 20 nt, Artificial Sequence
  spacer sequence GTCN PAM
cccgugcaguucuacaaggu

SEQ ID NO: 10996 - RNA, 20 nt, Artificial Sequence
  spacer sequence GTCN PAM
gccguggccaccacgauguu

SEQ ID NO: 10997 - RNA, 20 nt, Artificial Sequence
  spacer sequence GTCN PAM
gccagggccacgcggccgcg

SEQ ID NO: 10998 - RNA, 20 nt, Artificial Sequence
  spacer sequence GTCN PAM
accgagagccugugccggcu

SEQ ID NO: 10999 - RNA, 20 nt, Artificial Sequence
  spacer sequence GTCN PAM
gcaccugcccgcugggcuuc

SEQ ID NO: 11000 - RNA, 20 nt, Artificial Sequence
  spacer sequence GTCN PAM
cugcugaagcccagcgggca

SEQ ID NO: 11001 - RNA, 20 nt, Artificial Sequence
  spacer sequence GTCN PAM
ccgugucccugcugaagccc

SEQ ID NO: 11002 - RNA, 20 nt, Artificial Sequence
  spacer sequence GTCN PAM
gcggccuggucaccgugucc

SEQ ID NO: 11003 - RNA, 20 nt, Artificial Sequence
  spacer sequence GTCN PAM
ccgcgauccagcccuccaug

SEQ ID NO: 11004 - RNA, 20 nt, Artificial Sequence
  spacer sequence GTCN PAM
cucacgcuguucggcggcaa

SEQ ID NO: 11005 - RNA, 20 nt, Artificial Sequence
  spacer sequence GTCN PAM
aguucucaccgucgcucacg

SEQ ID NO: 11006 - RNA, 20 nt, Artificial Sequence
  spacer sequence GTCN PAM
ggcgccuccagcuucgggga

SEQ ID NO: 11007 - RNA, 20 nt, Artificial Sequence
  spacer sequence GTCN PAM
ugcccgagugagcggaugag

SEQ ID NO: 11008 - RNA, 20 nt, Artificial Sequence
  spacer sequence GTCN PAM
uggcugcacaauggugugaa

SEQ ID NO: 11009 - RNA, 20 nt, Artificial Sequence
  spacer sequence GTCN PAM
cccuccacuaggcugcccac

SEQ ID NO: 11010 - RNA, 20 nt, Artificial Sequence
  spacer sequence GTCN PAM
gccaugcuccagcacuugau

SEQ ID NO: 11011 - RNA, 20 nt, Artificial Sequence
  spacer sequence GTCN PAM
gcaucugcugacaggagccg

SEQ ID NO: 11012 - RNA, 20 nt, Artificial Sequence
  spacer sequence GTCN PAM
gcagaugccgacgggcagau

SEQ ID NO: 11013 - RNA, 20 nt, Artificial Sequence
  spacer sequence GTCN PAM
ugcaacgcagugcucugccc

SEQ ID NO: 11014 - RNA, 20 nt, Artificial Sequence
  spacer sequence GTCN PAM
ccaccccuggccacguggga

SEQ ID NO: 11015 - RNA, 20 nt, Artificial Sequence
  spacer sequence GTCN PAM
cacguggccagggguggcga

SEQ ID NO: 11016 - RNA, 20 nt, Artificial Sequence
  spacer sequence GTCN PAM
ggugaggcgcuggucccacg

SEQ ID NO: 11017 - RNA, 20 nt, Artificial Sequence
  spacer sequence GTCN PAM
cacuccaggcaggugauggc

SEQ ID NO: 11018 - RNA, 20 nt, Artificial Sequence
  spacer sequence GTCN PAM
caggggugcuccguguccag

SEQ ID NO: 11019 - RNA, 20 nt, Artificial Sequence
  spacer sequence GTCN PAM
aggauguggaucaugcgggu

SEQ ID NO: 11020 - RNA, 20 nt, Artificial Sequence
  spacer sequence GTCN PAM
ggucuguggggacggggcau

SEQ ID NO: 11021 - RNA, 20 nt, Artificial Sequence
  spacer sequence GTCN PAM
guggggacggggcaugguca

SEQ ID NO: 11022 - RNA, 20 nt, Artificial Sequence
  spacer sequence GTCN PAM
ccacagaccugacccgcaug

SEQ ID NO: 11023 - RNA, 20 nt, Artificial Sequence
  spacer sequence GTCN PAM
gcacggccuggcaccacagc

SEQ ID NO: 11024 - RNA, 20 nt, Artificial Sequence
  spacer sequence GTCN PAM
cccucccaccugcuuccccu

SEQ ID NO: 11025 - RNA, 20 nt, Artificial Sequence
  spacer sequence GTCN PAM
ucgcugcgcagguccauggu

SEQ ID NO: 11026 - RNA, 20 nt, Artificial Sequence
  spacer sequence GTCN PAM
auggugaaggcgaugagauu

SEQ ID NO: 11027 - RNA, 20 nt, Artificial Sequence
  spacer sequence GTCN PAM
ugccgaaaucucaucgccuu

SEQ ID NO: 11028 - RNA, 20 nt, Artificial Sequence
  spacer sequence GTCN PAM
aagagcacccacugcccauc

SEQ ID NO: 11029 - RNA, 20 nt, Artificial Sequence
  spacer sequence GTCN PAM
gugagugggagaaauggucc

SEQ ID NO: 11030 - RNA, 20 nt, Artificial Sequence
  spacer sequence GTCN PAM
aucaucccaccugccgcugg

SEQ ID NO: 11031 - RNA, 20 nt, Artificial Sequence
  spacer sequence GTCN PAM
ccagcuccugcgggagggag

SEQ ID NO: 11032 - RNA, 20 nt, Artificial Sequence
  spacer sequence GTCN PAM
cucagccccgccucggcuac

SEQ ID NO: 11033 - RNA, 20 nt, Artificial Sequence
  spacer sequence GTCN PAM
cucagccccgccucggccac

SEQ ID NO: 11034 - RNA, 20 nt, Artificial Sequence
  spacer sequence GTCN PAM
gcccgugcgccaagcucagc

SEQ ID NO: 11035 - RNA, 20 nt, Artificial Sequence
  spacer sequence GTCN PAM
gcggugcgaucuucccuagc

SEQ ID NO: 11036 - RNA, 20 nt, Artificial Sequence
  spacer sequence GTCN PAM
uugggaggcggccccacgcc

SEQ ID NO: 11037 - RNA, 20 nt, Artificial Sequence
  spacer sequence GTCN PAM
uaugcaaauagccccggagg

SEQ ID NO: 11038 - RNA, 20 nt, Artificial Sequence
  spacer sequence GTCN PAM
guacacauaggccgacuucu

SEQ ID NO: 11039 - RNA, 20 nt, Artificial Sequence
  spacer sequence GTCN PAM
uccuugcgcaggggccaugc

SEQ ID NO: 11040 - RNA, 20 nt, Artificial Sequence
  spacer sequence GTCN PAM
ccccaucccguguccccucg

SEQ ID NO: 11041 - RNA, 20 nt, Artificial Sequence
  spacer sequence GTCN PAM
gucaccccaucccguguccc

SEQ ID NO: 11042 - RNA, 20 nt, Artificial Sequence
  spacer sequence GTCN PAM
uggacccccagcauaaagga

SEQ ID NO: 11043 - RNA, 20 nt, Artificial Sequence
  spacer sequence GTCN PAM
aggacuuccagccagaagcc

SEQ ID NO: 11044 - RNA, 20 nt, Artificial Sequence
  spacer sequence GTCN PAM
ucccccacgccaccuguguc

SEQ ID NO: 11045 - RNA, 20 nt, Artificial Sequence
  spacer sequence GTCN PAM
uucugcguguccucccccac

SEQ ID NO: 11046 - RNA, 20 nt, Artificial Sequence
  spacer sequence GTCN PAM
uaagagccgguuuuauccuc

SEQ ID NO: 11047 - RNA, 20 nt, Artificial Sequence
  spacer sequence GTCN PAM
ugggucucagggcacacgcg

SEQ ID NO: 11048 - RNA, 20 nt, Artificial Sequence
  spacer sequence GTCN PAM
cagggcacacgcgcgcacac

SEQ ID NO: 11049 - RNA, 20 nt, Artificial Sequence
  spacer sequence GTCN PAM
cagagaccccacccucauuc

SEQ ID NO: 11050 - RNA, 20 nt, Artificial Sequence
  spacer sequence GTCN PAM
cugggacccugccccucaug

SEQ ID NO: 11051 - RNA, 20 nt, Artificial Sequence
  spacer sequence GTCN PAM
uggucccagccccugcucag

SEQ ID NO: 11052 - RNA, 20 nt, Artificial Sequence
  spacer sequence GTCN PAM
gaagcucaagugaggagggg

SEQ ID NO: 11053 - RNA, 20 nt, Artificial Sequence
  spacer sequence GTCN PAM
cucucacucugcccccuccu

SEQ ID NO: 11054 - RNA, 20 nt, Artificial Sequence
  spacer sequence GTCN PAM
ucggaaaccuuuuucgcuug

SEQ ID NO: 11055 - RNA, 20 nt, Artificial Sequence
  spacer sequence GTCN PAM
ccgcggggccgccaucagcu

SEQ ID NO: 11056 - RNA, 20 nt, Artificial Sequence
  spacer sequence GTCN PAM
gccuaccuggagcagcacag

SEQ ID NO: 11057 - RNA, 20 nt, Artificial Sequence
  spacer sequence GTCN PAM
guaaucggcaccuggauuuc

SEQ ID NO: 11058 - RNA, 20 nt, Artificial Sequence
  spacer sequence GTCN PAM
gcaccugcagacgggaccag

SEQ ID NO: 11059 - RNA, 20 nt, Artificial Sequence
  spacer sequence GTCN PAM
gcaggugcugaccuggaggg

SEQ ID NO: 11060 - RNA, 20 nt, Artificial Sequence
  spacer sequence GTCN PAM
cgucugcaggugcugaccug

SEQ ID NO: 11061 - RNA, 20 nt, Artificial Sequence
  spacer sequence GTCN PAM
cccaugcuggagugcagugg

SEQ ID NO: 11062 - RNA, 20 nt, Artificial Sequence
  spacer sequence GTCN PAM
cgcucugucacccaugcugg

SEQ ID NO: 11063 - RNA, 20 nt, Artificial Sequence
  spacer sequence GTCN PAM
caaaaaaaaaaaaaaaaaag

SEQ ID NO: 11064 - RNA, 20 nt, Artificial Sequence
  spacer sequence GTCN PAM
cuacuaaaaauacaaaauua

SEQ ID NO: 11065 - RNA, 20 nt, Artificial Sequence
  spacer sequence GTCN PAM
cccacagagggaacagaggg

SEQ ID NO: 11066 - RNA, 20 nt, Artificial Sequence
  spacer sequence GTCN PAM
gguugccauggaaacuguca

SEQ ID NO: 11067 - RNA, 20 nt, Artificial Sequence
  spacer sequence GTCN PAM
ccucggcaacuccaggcggg

SEQ ID NO: 11068 - RNA, 20 nt, Artificial Sequence
  spacer sequence GTCN PAM
ugggggccaccggcacuuac

SEQ ID NO: 11069 - RNA, 20 nt, Artificial Sequence
  spacer sequence GTCN PAM
auguacuggcagacagcgug

SEQ ID NO: 11070 - RNA, 20 nt, Artificial Sequence
  spacer sequence GTCN PAM
gccaguacauggaccucauc

SEQ ID NO: 11071 - RNA, 20 nt, Artificial Sequence
  spacer sequence GTCN PAM
gcucgccuggccgccccccc

SEQ ID NO: 11072 - RNA, 20 nt, Artificial Sequence
  spacer sequence GTCN PAM
agcauugcuguguacacggc

SEQ ID NO: 11073 - RNA, 20 nt, Artificial Sequence
  spacer sequence GTCN PAM
ccccaggccguguacacagc

SEQ ID NO: 11074 - RNA, 20 nt, Artificial Sequence
  spacer sequence GTCN PAM
ccagcguuuccuggggagag

SEQ ID NO: 11075 - RNA, 20 nt, Artificial Sequence
  spacer sequence GTCN PAM
gggaacugcgggaccugugg

SEQ ID NO: 11076 - RNA, 20 nt, Artificial Sequence
  spacer sequence GTCN PAM
cgcaguucccugaccaccgg

SEQ ID NO: 11077 - RNA, 20 nt, Artificial Sequence
  spacer sequence GTCN PAM
ucaagcgcagccgcaucccc

SEQ ID NO: 11078 - RNA, 20 nt, Artificial Sequence
  spacer sequence GTCN PAM
gcgagccguccucaagcgca

SEQ ID NO: 11079 - RNA, 20 nt, Artificial Sequence
  spacer sequence GTCN PAM
ucugcaggagugggggaaca

SEQ ID NO: 11080 - RNA, 20 nt, Artificial Sequence
  spacer sequence GTCN PAM
uggggugcucguccuggccc

SEQ ID NO: 11081 - RNA, 20 nt, Artificial Sequence
  spacer sequence GTCN PAM
uccccacggccagggccccu

SEQ ID NO: 11082 - RNA, 20 nt, Artificial Sequence
  spacer sequence GTCN PAM
ggaacgauuucaugaaccgc

SEQ ID NO: 11083 - RNA, 20 nt, Artificial Sequence
  spacer sequence GTCN PAM
ccguguggagggagugaggg

SEQ ID NO: 11084 - RNA, 20 nt, Artificial Sequence
  spacer sequence GTCN PAM
ccauccuccaggccaggcag

SEQ ID NO: 11085 - RNA, 20 nt, Artificial Sequence
  spacer sequence GTCN PAM
gucuccagcagggucaggag

SEQ ID NO: 11086 - RNA, 20 nt, Artificial Sequence
  spacer sequence GTCN PAM
ccagcagggucaggagguac

SEQ ID NO: 11087 - RNA, 20 nt, Artificial Sequence
  spacer sequence GTCN PAM
ggagguacugggcuaggugg

SEQ ID NO: 11088 - RNA, 20 nt, Artificial Sequence
  spacer sequence GTCN PAM
ggaggcgccuccugggggcu

SEQ ID NO: 11089 - RNA, 20 nt, Artificial Sequence
  spacer sequence GTCN PAM
gaguuccgcacugccugguu

SEQ ID NO: 11090 - RNA, 20 nt, Artificial Sequence
  spacer sequence GTCN PAM
cuucaccugggagcuggcua

SEQ ID NO: 11091 - RNA, 20 nt, Artificial Sequence
  spacer sequence GTCN PAM
ucagggucaaggccggccag

SEQ ID NO: 11092 - RNA, 20 nt, Artificial Sequence
  spacer sequence GTCN PAM
aggccggccaggaucuccga

SEQ ID NO: 11093 - RNA, 20 nt, Artificial Sequence
  spacer sequence GTCN PAM
cacucuguugcccaggcugc

SEQ ID NO: 11094 - RNA, 20 nt, Artificial Sequence
  spacer sequence GTCN PAM
agcugcugggguggagaagu

SEQ ID NO: 11095 - RNA, 20 nt, Artificial Sequence
  spacer sequence GTCN PAM
cuucuguuaucggcccuguc

SEQ ID NO: 11096 - RNA, 20 nt, Artificial Sequence
  spacer sequence GTCN PAM
gagggggcggggcucgguga

SEQ ID NO: 11097 - RNA, 20 nt, Artificial Sequence
  spacer sequence GTCN PAM
cucccccaggaacccacuag

SEQ ID NO: 11098 - RNA, 20 nt, Artificial Sequence
  spacer sequence GTCN PAM
cuaguggguuccugggggag

SEQ ID NO: 11099 - RNA, 20 nt, Artificial Sequence
  spacer sequence GTCN PAM
guuccucucuugcugucucu

SEQ ID NO: 11100 - RNA, 20 nt, Artificial Sequence
  spacer sequence GTCN PAM
ccuccgcccugagcccuggc

SEQ ID NO: 11101 - RNA, 20 nt, Artificial Sequence
  spacer sequence GTCN PAM
gccccaccccaggcugaguc

SEQ ID NO: 11102 - RNA, 20 nt, Artificial Sequence
  spacer sequence GTCN PAM
ccaaccccccaccaggacac

SEQ ID NO: 11103 - RNA, 20 nt, Artificial Sequence
  spacer sequence GTCN PAM
gcccggaaaggcagggggcg

SEQ ID NO: 11104 - RNA, 20 nt, Artificial Sequence
  spacer sequence GTCN PAM
gcaccgcagcggcucccggc

SEQ ID NO: 11105 - RNA, 20 nt, Artificial Sequence
  spacer sequence GTCN PAM
gcacccgccccccgugugcc

SEQ ID NO: 11106 - RNA, 20 nt, Artificial Sequence
  spacer sequence GTCN PAM
ucuggccaugugcagccggc

SEQ ID NO: 11107 - RNA, 20 nt, Artificial Sequence
  spacer sequence GTCN PAM
caggguuaaacgcugacuaa

SEQ ID NO: 11108 - RNA, 20 nt, Artificial Sequence
  spacer sequence GTCN PAM
gcguuuaacccugugacccc

SEQ ID NO: 11109 - RNA, 20 nt, Artificial Sequence
  spacer sequence GTCN PAM
gggcugggcuggggguccgu

SEQ ID NO: 11110 - RNA, 20 nt, Artificial Sequence
  spacer sequence GTCN PAM
gugggcacaggugggugggc

SEQ ID NO: 11111 - RNA, 20 nt, Artificial Sequence
  spacer sequence GTCN PAM
ccagggagcucacuuccuga

SEQ ID NO: 11112 - RNA, 20 nt, Artificial Sequence
  spacer sequence GTCN PAM
agaagccacgcuggacauag

SEQ ID NO: 11113 - RNA, 20 nt, Artificial Sequence
  spacer sequence GTCN PAM
agcguggcuucuggacaugg

SEQ ID NO: 11114 - RNA, 20 nt, Artificial Sequence
  spacer sequence GTCN PAM
cugaggguggcagaggaggc

SEQ ID NO: 11115 - RNA, 20 nt, Artificial Sequence
  spacer sequence GTCN PAM
ggauuggauggcaucgccca

SEQ ID NO: 11116 - RNA, 20 nt, Artificial Sequence
  spacer sequence GTCN PAM
acccagaaccucaagauggg

SEQ ID NO: 11117 - RNA, 20 nt, Artificial Sequence
  spacer sequence GTCN PAM
caucuugagguucugggugg

SEQ ID NO: 11118 - RNA, 20 nt, Artificial Sequence
  spacer sequence GTCN PAM
cugaagauguuaguuucagu

SEQ ID NO: 11119 - RNA, 20 nt, Artificial Sequence
  spacer sequence GTCN PAM
ugcagcguacgguggcccca

SEQ ID NO: 11120 - RNA, 20 nt, Artificial Sequence
  spacer sequence GTCN PAM
guuguccucuaagggggagg

SEQ ID NO: 11121 - RNA, 20 nt, Artificial Sequence
  spacer sequence GTCN PAM
ucuaagggggaggucacacc

SEQ ID NO: 11122 - RNA, 20 nt, Artificial Sequence
  spacer sequence GTCN PAM
caccugugauccccgcgcuu

SEQ ID NO: 11123 - RNA, 20 nt, Artificial Sequence
  spacer sequence GTCN PAM
uggccuuccaaagcgcgggg

SEQ ID NO: 11124 - RNA, 20 nt, Artificial Sequence
  spacer sequence GTCN PAM
caagcuccugggcucaagcg

SEQ ID NO: 11125 - RNA, 20 nt, Artificial Sequence
  spacer sequence GTCN PAM
cacucuguugcugaggcugg

SEQ ID NO: 11126 - RNA, 20 nt, Artificial Sequence
  spacer sequence GTCN PAM
cuacacaaauuagcugggug

SEQ ID NO: 11127 - RNA, 20 nt, Artificial Sequence
  spacer sequence GTCN PAM
cagcuacucuggaggcuaag

SEQ ID NO: 11128 - RNA, 20 nt, Artificial Sequence
  spacer sequence GTCN PAM
aggcuguagugagcuauagu

SEQ ID NO: 11129 - RNA, 20 nt, Artificial Sequence
  spacer sequence GTCN PAM
ugccacuauagcucacuaca

SEQ ID NO: 11130 - RNA, 20 nt, Artificial Sequence
  spacer sequence GTCN PAM
ggagugcagucgugccacua

SEQ ID NO: 11131 - RNA, 20 nt, Artificial Sequence
  spacer sequence GTCN PAM
cccagucuggagugcagucg

SEQ ID NO: 11132 - RNA, 20 nt, Artificial Sequence
  spacer sequence GTCN PAM
ugcccugucgcccagucugg

SEQ ID NO: 11133 - RNA, 20 nt, Artificial Sequence
  spacer sequence GTCN PAM
aaaaaagaaaaaaaaaaaaa

SEQ ID NO: 11134 - RNA, 20 nt, Artificial Sequence
  spacer sequence GTCN PAM
uuuuuuuuuuuuuuuucuuu

SEQ ID NO: 11135 - RNA, 20 nt, Artificial Sequence
  spacer sequence GTCN PAM
caugccuguaaucccagcac

SEQ ID NO: 11136 - RNA, 20 nt, Artificial Sequence
  spacer sequence GTCN PAM
gaaguuugagaccagccuga

SEQ ID NO: 11137 - RNA, 20 nt, Artificial Sequence
  spacer sequence GTCN PAM
caaacuucugaccacaggug

SEQ ID NO: 11138 - RNA, 20 nt, Artificial Sequence
  spacer sequence GTCN PAM
ggcuggucucaaacuucuga

SEQ ID NO: 11139 - RNA, 20 nt, Artificial Sequence
  spacer sequence GTCN PAM
cuacuaaaaauacaaaauua

SEQ ID NO: 11140 - RNA, 20 nt, Artificial Sequence
  spacer sequence GTCN PAM
cccaggcuggaguguagugg

SEQ ID NO: 11141 - RNA, 20 nt, Artificial Sequence
  spacer sequence GTCN PAM
cgcucugucacccaggcugg

SEQ ID NO: 11142 - RNA, 20 nt, Artificial Sequence
  spacer sequence GTCN PAM
caaaaaaaaaaagaaaagaa

SEQ ID NO: 11143 - RNA, 20 nt, Artificial Sequence
  spacer sequence GTCN PAM
aaauuucucuuuuuucuuuu

SEQ ID NO: 11144 - RNA, 20 nt, Artificial Sequence
  spacer sequence GTCN PAM
guguccaaauuucucuuuuu

SEQ ID NO: 11145 - RNA, 20 nt, Artificial Sequence
  spacer sequence GTCN PAM
ccacacagcuaucucccuac

SEQ ID NO: 11146 - RNA, 20 nt, Artificial Sequence
  spacer sequence GTCN PAM
uuggcuuguggccacaucgc

SEQ ID NO: 11147 - RNA, 20 nt, Artificial Sequence
  spacer sequence GTCN PAM
uucccuccucucccagcuuc

SEQ ID NO: 11148 - RNA, 20 nt, Artificial Sequence
  spacer sequence GTCN PAM
cuggggcuccaggggagggu

SEQ ID NO: 11149 - RNA, 20 nt, Artificial Sequence
  spacer sequence GTCN PAM
gacuuguggagagaagaaac

SEQ ID NO: 11150 - RNA, 20 nt, Artificial Sequence
  spacer sequence GTCN PAM
gacaucagcgugucacuggg

SEQ ID NO: 11151 - RNA, 20 nt, Artificial Sequence
  spacer sequence GTCN PAM
gcagagguuucuucucucca

SEQ ID NO: 11152 - RNA, 20 nt, Artificial Sequence
  spacer sequence GTCN PAM
gagcccgacccuuucauggg

SEQ ID NO: 11153 - RNA, 20 nt, Artificial Sequence
  spacer sequence GTCN PAM
ggcucagacacaugugugcc

SEQ ID NO: 11154 - RNA, 20 nt, Artificial Sequence
  spacer sequence GTCN PAM
ggcuggcauacagcaggugc

SEQ ID NO: 11155 - RNA, 20 nt, Artificial Sequence
  spacer sequence GTCN PAM
ggcuggcauacagcaggugc

SEQ ID NO: 11156 - RNA, 20 nt, Artificial Sequence
  spacer sequence GTCN PAM
ggcuggcauacagcaggugc

SEQ ID NO: 11157 - RNA, 20 nt, Artificial Sequence
  spacer sequence GTCN PAM
ggcuggcauacaacaggugc

SEQ ID NO: 11158 - RNA, 20 nt, Artificial Sequence
  spacer sequence GTCN PAM
ggcuggcauacagaugcccc

SEQ ID NO: 11159 - RNA, 20 nt, Artificial Sequence
  spacer sequence GTCN PAM
ggcuggcauacagcagguac

SEQ ID NO: 11160 - RNA, 20 nt, Artificial Sequence
  spacer sequence GTCN PAM
ccaguacgcaggcaggcugg

SEQ ID NO: 11161 - RNA, 20 nt, Artificial Sequence
  spacer sequence GTCN PAM
ugacgucggcagcgcggugg

SEQ ID NO: 11162 - RNA, 20 nt, Artificial Sequence
  spacer sequence GTCN PAM
ggacuccagugccggcggca

SEQ ID NO: 11163 - RNA, 20 nt, Artificial Sequence
  spacer sequence GTCN PAM
gcagcgcgguggagggcggg

SEQ ID NO: 11164 - RNA, 20 nt, Artificial Sequence
  spacer sequence GTCN PAM
cgccguuaucucccaggcgu

SEQ ID NO: 11165 - RNA, 20 nt, Artificial Sequence
  spacer sequence GTCN PAM
gcuccccgugugucuggcug

SEQ ID NO: 11166 - RNA, 20 nt, Artificial Sequence
  spacer sequence GTCN PAM
ggcugcaggggcgcguccag

SEQ ID NO: 11167 - RNA, 20 nt, Artificial Sequence
  spacer sequence GTCN PAM
agggggugugugugugugug

SEQ ID NO: 11168 - RNA, 20 nt, Artificial Sequence
  spacer sequence GTCN PAM
gcgugggagugucuggcugu

SEQ ID NO: 11169 - RNA, 20 nt, Artificial Sequence
  spacer sequence GTCN PAM
ggcuguguggcugcacggag

SEQ ID NO: 11170 - RNA, 20 nt, Artificial Sequence
  spacer sequence GTCN PAM
ggguaggagugucggugggg

SEQ ID NO: 11171 - RNA, 20 nt, Artificial Sequence
  spacer sequence GTCN PAM
gugggggcggucccacacgg

SEQ ID NO: 11172 - RNA, 20 nt, Artificial Sequence
  spacer sequence GTCN PAM
cacacggccaugguuugugu

SEQ ID NO: 11173 - RNA, 20 nt, Artificial Sequence
  spacer sequence GTCN PAM
gccacggccucagccccguu

SEQ ID NO: 11174 - RNA, 20 nt, Artificial Sequence
  spacer sequence GTCN PAM
augcccccaaaccuugaccc

SEQ ID NO: 11175 - RNA, 20 nt, Artificial Sequence
  spacer sequence GTCN PAM
agguuugggggcaucgaccg

SEQ ID NO: 11176 - RNA, 20 nt, Artificial Sequence
  spacer sequence GTCN PAM
uccgggcaagugagcguccc

SEQ ID NO: 11177 - RNA, 20 nt, Artificial Sequence
  spacer sequence GTCN PAM
cccacccaggacccccgacc

SEQ ID NO: 11178 - RNA, 20 nt, Artificial Sequence
  spacer sequence GTCN PAM
ugggugggggacgcucacuu

SEQ ID NO: 11179 - RNA, 20 nt, Artificial Sequence
  spacer sequence GTCN PAM
gggguccugggugggggacg

SEQ ID NO: 11180 - RNA, 20 nt, Artificial Sequence
  spacer sequence GTCN PAM
ggcccucccagggccggggu

SEQ ID NO: 11181 - RNA, 20 nt, Artificial Sequence
  spacer sequence GTCN PAM
gguuuucggggguggauuuu

SEQ ID NO: 11182 - RNA, 20 nt, Artificial Sequence
  spacer sequence GTCN PAM
caaaauccacccccgaaaac

SEQ ID NO: 11183 - RNA, 20 nt, Artificial Sequence
  spacer sequence GTCN PAM
cgugcugucacccaggcugg

SEQ ID NO: 11184 - RNA, 20 nt, Artificial Sequence
  spacer sequence GTCN PAM
cccaggcuggagugccgcgg

SEQ ID NO: 11185 - RNA, 20 nt, Artificial Sequence
  spacer sequence GTCN PAM
uagcucacugcagccucgac

SEQ ID NO: 11186 - RNA, 20 nt, Artificial Sequence
  spacer sequence GTCN PAM
aggcugcagugagcuaugac

SEQ ID NO: 11187 - RNA, 20 nt, Artificial Sequence
  spacer sequence GTCN PAM
gccuccugaguagcugggac

SEQ ID NO: 11188 - RNA, 20 nt, Artificial Sequence
  spacer sequence GTCN PAM
cagcuacucaggaggcugac

SEQ ID NO: 11189 - RNA, 20 nt, Artificial Sequence
  spacer sequence GTCN PAM
guggucccagcuacucagga

SEQ ID NO: 11190 - RNA, 20 nt, Artificial Sequence
  spacer sequence GTCN PAM
ccaaaaaauaaaaugaaguu

SEQ ID NO: 11191 - RNA, 20 nt, Artificial Sequence
  spacer sequence GTCN PAM
ugcugcguugcccaggcuga

SEQ ID NO: 11192 - RNA, 20 nt, Artificial Sequence
  spacer sequence GTCN PAM
cuggguccugcggucgcucu

SEQ ID NO: 11193 - RNA, 20 nt, Artificial Sequence
  spacer sequence GTCN PAM
ugcggucgcucucugucucc

SEQ ID NO: 11194 - RNA, 20 nt, Artificial Sequence
  spacer sequence GTCN PAM
cucucugucuccaucucuuc

SEQ ID NO: 11195 - RNA, 20 nt, Artificial Sequence
  spacer sequence GTCN PAM
ccaucucuucuuucuccucu

SEQ ID NO: 11196 - RNA, 20 nt, Artificial Sequence
  spacer sequence GTCN PAM
cugccacccgccccgucccu

SEQ ID NO: 11197 - RNA, 20 nt, Artificial Sequence
  spacer sequence GTCN PAM
cuuccaccacgucgcccugu

SEQ ID NO: 11198 - RNA, 20 nt, Artificial Sequence
  spacer sequence GTCN PAM
cccuguaauucuucccugac

SEQ ID NO: 11199 - RNA, 20 nt, Artificial Sequence
  spacer sequence GTCN PAM
gggaagaauuacagggcgac

SEQ ID NO: 11200 - RNA, 20 nt, Artificial Sequence
  spacer sequence GTCN PAM
cugcccuagcuggcgcccug

SEQ ID NO: 11201 - RNA, 20 nt, Artificial Sequence
  spacer sequence GTCN PAM
aagggcccccacgagauggg

SEQ ID NO: 11202 - RNA, 20 nt, Artificial Sequence
  spacer sequence GTCN PAM
aguucuuccccaagaaccag

SEQ ID NO: 11203 - RNA, 20 nt, Artificial Sequence
  spacer sequence GTCN PAM
ggcagagcugggaucucugc

SEQ ID NO: 11204 - RNA, 20 nt, Artificial Sequence
  spacer sequence GTCN PAM
caggcaccaggcccaggucg

SEQ ID NO: 11205 - RNA, 20 nt, Artificial Sequence
  spacer sequence GTCN PAM
uacgggcggggaaacugagg

SEQ ID NO: 11206 - RNA, 20 nt, Artificial Sequence
  spacer sequence GTCN PAM
caagagcugcacuccuucug

SEQ ID NO: 11207 - RNA, 20 nt, Artificial Sequence
  spacer sequence GTCN PAM
ccucucuacaggaguuacag

SEQ ID NO: 11208 - RNA, 20 nt, Artificial Sequence
  spacer sequence GTCN PAM
ggcagcaggggccaugccac

SEQ ID NO: 11209 - RNA, 20 nt, Artificial Sequence
  spacer sequence GTCN PAM
gcucccuagcggggaggugu

SEQ ID NO: 11210 - RNA, 20 nt, Artificial Sequence
  spacer sequence GTCN PAM
agggcggccccagcccaccu

SEQ ID NO: 11211 - RNA, 20 nt, Artificial Sequence
  spacer sequence GTCN PAM
gcucccugcagcggguggga

SEQ ID NO: 11212 - RNA, 20 nt, Artificial Sequence
  spacer sequence GTCN PAM
cuggagcgggcagagccuug

SEQ ID NO: 11213 - RNA, 20 nt, Artificial Sequence
  spacer sequence GTCN PAM
cucaaggcucugcccgcucc

SEQ ID NO: 11214 - RNA, 20 nt, Artificial Sequence
  spacer sequence GTCN PAM
ugcccucagccuggggucug

SEQ ID NO: 11215 - RNA, 20 nt, Artificial Sequence
  spacer sequence GTCN PAM
ggcagaagcuccggccaggu

SEQ ID NO: 11216 - RNA, 20 nt, Artificial Sequence
  spacer sequence GTCN PAM
cuugggguacaccuggccgg

SEQ ID NO: 11217 - RNA, 20 nt, Artificial Sequence
  spacer sequence GTCN PAM
ggggucccuugggguacacc

SEQ ID NO: 11218 - RNA, 20 nt, Artificial Sequence
  spacer sequence GTCN PAM
agaggaagggcccucccugg

SEQ ID NO: 11219 - RNA, 20 nt, Artificial Sequence
  spacer sequence GTCN PAM
uugggcccggacuccaggca

SEQ ID NO: 11220 - RNA, 20 nt, Artificial Sequence
  spacer sequence GTCN PAM
gggcccaaagacggcugcag

SEQ ID NO: 11221 - RNA, 20 nt, Artificial Sequence
  spacer sequence GTCN PAM
cauuguggggacggcgucga

SEQ ID NO: 11222 - RNA, 20 nt, Artificial Sequence
  spacer sequence GTCN PAM
ccacaaugggacacgggccu

SEQ ID NO: 11223 - RNA, 20 nt, Artificial Sequence
  spacer sequence GTCN PAM
acauggccggggcaggcgug

SEQ ID NO: 11224 - RNA, 20 nt, Artificial Sequence
  spacer sequence GTCN PAM
acgccguccccacaauggga

SEQ ID NO: 11225 - RNA, 20 nt, Artificial Sequence
  spacer sequence GTCN PAM
caucacucccagcccagguu

SEQ ID NO: 11226 - RNA, 20 nt, Artificial Sequence
  spacer sequence GTCN PAM
cccaccaggugccucuuucc

SEQ ID NO: 11227 - RNA, 20 nt, Artificial Sequence
  spacer sequence GTCN PAM
auuuggaaagaggcaccugg

SEQ ID NO: 11228 - RNA, 20 nt, Artificial Sequence
  spacer sequence GTCN PAM
ugcccagcaggaguguccau

SEQ ID NO: 11229 - RNA, 20 nt, Artificial Sequence
  spacer sequence GTCN PAM
cagaaagccucagaaguguc

SEQ ID NO: 11230 - RNA, 20 nt, Artificial Sequence
  spacer sequence GTCN PAM
aggucccgucugcagggaac

SEQ ID NO: 11231 - RNA, 20 nt, Artificial Sequence
  spacer sequence GTCN PAM
cgucugcagggaaccccagg

SEQ ID NO: 11232 - RNA, 20 nt, Artificial Sequence
  spacer sequence GTCN PAM
gcagggaaccccaggacgga

SEQ ID NO: 11233 - RNA, 20 nt, Artificial Sequence
  spacer sequence GTCN PAM
ugggguucccugcagacggg

SEQ ID NO: 11234 - RNA, 20 nt, Artificial Sequence
  spacer sequence GTCN PAM
aagcacuuugcccagagcug

SEQ ID NO: 11235 - RNA, 20 nt, Artificial Sequence
  spacer sequence GTCN PAM
aggugggagcaugagggcgu

SEQ ID NO: 11236 - RNA, 20 nt, Artificial Sequence
  spacer sequence GTCN PAM
ggggggcggggacccuguac

SEQ ID NO: 11237 - RNA, 20 nt, Artificial Sequence
  spacer sequence GTCN PAM
ccgccccccagaccggccag

SEQ ID NO: 11238 - RNA, 20 nt, Artificial Sequence
  spacer sequence GTCN PAM
cugccugggggaggagaaca

SEQ ID NO: 11239 - RNA, 20 nt, Artificial Sequence
  spacer sequence GTCN PAM
cauaaauaaauacauaaaua

SEQ ID NO: 11240 - RNA, 20 nt, Artificial Sequence
  spacer sequence GTCN PAM
ugcuuugucacccaggcugg

SEQ ID NO: 11241 - RNA, 20 nt, Artificial Sequence
  spacer sequence GTCN PAM
cccaggcuggagugcagugg

SEQ ID NO: 11242 - RNA, 20 nt, Artificial Sequence
  spacer sequence GTCN PAM
caaaaaaaaaaaaaaaaaaa

SEQ ID NO: 11243 - RNA, 20 nt, Artificial Sequence
  spacer sequence GTCN PAM
cacugucucccaggcuagag

SEQ ID NO: 11244 - RNA, 20 nt, Artificial Sequence
  spacer sequence GTCN PAM
cccaggcuagagugcggugu

SEQ ID NO: 11245 - RNA, 20 nt, Artificial Sequence
  spacer sequence GTCN PAM
cggucuuggcucacugcaag

SEQ ID NO: 11246 - RNA, 20 nt, Artificial Sequence
  spacer sequence GTCN PAM
uggcucacugcaagcuccgc

SEQ ID NO: 11247 - RNA, 20 nt, Artificial Sequence
  spacer sequence GTCN PAM
cagcuacucgggaggcugag

SEQ ID NO: 11248 - RNA, 20 nt, Artificial Sequence
  spacer sequence GTCN PAM
caagcuccugaccucaagug

SEQ ID NO: 11249 - RNA, 20 nt, Artificial Sequence
  spacer sequence GTCN PAM
ggagcuugagaccagccugg

SEQ ID NO: 11250 - RNA, 20 nt, Artificial Sequence
  spacer sequence GTCN PAM
ccggcuaauguuuucuuucu

SEQ ID NO: 11251 - RNA, 20 nt, Artificial Sequence
  spacer sequence GTCN PAM
cacacacacacacacaaaca

SEQ ID NO: 11252 - RNA, 20 nt, Artificial Sequence
  spacer sequence GTCN PAM
cccucuguugcccaggcugg

SEQ ID NO: 11253 - RNA, 20 nt, Artificial Sequence
  spacer sequence GTCN PAM
ucucggcucacugcagccuc

SEQ ID NO: 11254 - RNA, 20 nt, Artificial Sequence
  spacer sequence GTCN PAM
uauugcccaggcgggucuca

SEQ ID NO: 11255 - RNA, 20 nt, Artificial Sequence
  spacer sequence GTCN PAM
caaacuccugggcucgagca

SEQ ID NO: 11256 - RNA, 20 nt, Artificial Sequence
  spacer sequence GTCN PAM
gcccaccucggccucccaca

SEQ ID NO: 11257 - RNA, 20 nt, Artificial Sequence
  spacer sequence GTCN PAM
guguguggccuggggcaccc

SEQ ID NO: 11258 - RNA, 20 nt, Artificial Sequence
  spacer sequence GTCN PAM
gcccagaucugugucugugu

SEQ ID NO: 11259 - RNA, 20 nt, Artificial Sequence
  spacer sequence GTCN PAM
gugucugcaucugugaaacg

SEQ ID NO: 11260 - RNA, 20 nt, Artificial Sequence
  spacer sequence GTCN PAM
gcaucugugaaacggguuuc

SEQ ID NO: 11261 - RNA, 20 nt, Artificial Sequence
  spacer sequence GTCN PAM
ccgccgagggcacuggccuu

SEQ ID NO: 11262 - RNA, 20 nt, Artificial Sequence
  spacer sequence GTCN PAM
cuaauagagucuccgccgag

SEQ ID NO: 11263 - RNA, 20 nt, Artificial Sequence
  spacer sequence GTCN PAM
uaucucgccgccauggggcu

SEQ ID NO: 11264 - RNA, 20 nt, Artificial Sequence
  spacer sequence GTCN PAM
gcugaucccaccccggccac

SEQ ID NO: 11265 - RNA, 20 nt, Artificial Sequence
  spacer sequence GTCN PAM
cugccguccuggacucgugg

SEQ ID NO: 11266 - RNA, 20 nt, Artificial Sequence
  spacer sequence GTCN PAM
uggacucgugggccucaguu

SEQ ID NO: 11267 - RNA, 20 nt, Artificial Sequence
  spacer sequence GTCN PAM
aggacggcagcgacaggccu

SEQ ID NO: 11268 - RNA, 20 nt, Artificial Sequence
  spacer sequence GTCN PAM
gcgucuccucccugagcaag

SEQ ID NO: 11269 - RNA, 20 nt, Artificial Sequence
  spacer sequence GTCN PAM
ccucccugagcaagggacuc

SEQ ID NO: 11270 - RNA, 20 nt, Artificial Sequence
  spacer sequence GTCN PAM
cuugcucagggaggagacgc

SEQ ID NO: 11271 - RNA, 20 nt, Artificial Sequence
  spacer sequence GTCN PAM
cagcccccacccagaugccc

SEQ ID NO: 11272 - RNA, 20 nt, Artificial Sequence
  spacer sequence GTCN PAM
cggggcaucugggugggggc

SEQ ID NO: 11273 - RNA, 20 nt, Artificial Sequence
  spacer sequence GTCN PAM
ucucaucugugaaacggucc

SEQ ID NO: 11274 - RNA, 20 nt, Artificial Sequence
  spacer sequence GTCN PAM
cgggagaaugaggagggucu

SEQ ID NO: 11275 - RNA, 20 nt, Artificial Sequence
  spacer sequence GTCN PAM
ggcgucagcaagcucccccg

SEQ ID NO: 11276 - RNA, 20 nt, Artificial Sequence
  spacer sequence GTCN PAM
gcaagcucccccggaaucuc

SEQ ID NO: 11277 - RNA, 20 nt, Artificial Sequence
  spacer sequence GTCN PAM
uuucuggagaguguuauuaa

SEQ ID NO: 11278 - RNA, 20 nt, Artificial Sequence
  spacer sequence GTCN PAM
ccucucuggaaauacacagc

SEQ ID NO: 11279 - RNA, 20 nt, Artificial Sequence
  spacer sequence GTCN PAM
gcacagccaggccucggcgg

SEQ ID NO: 11280 - RNA, 20 nt, Artificial Sequence
  spacer sequence GTCN PAM
uuucaauucccgucagcaca

SEQ ID NO: 11281 - RNA, 20 nt, Artificial Sequence
  spacer sequence GTCN PAM
ggugcacgaggagcaaccca

SEQ ID NO: 11282 - RNA, 20 nt, Artificial Sequence
  spacer sequence GTCN PAM
cacagcagacgcuagcuaag

SEQ ID NO: 11283 - RNA, 20 nt, Artificial Sequence
  spacer sequence GTCN PAM
gcugugugaccucaggcccu

SEQ ID NO: 11284 - RNA, 20 nt, Artificial Sequence
  spacer sequence GTCN PAM
cccacacccagcaggcgcuu

SEQ ID NO: 11285 - RNA, 20 nt, Artificial Sequence
  spacer sequence GTCN PAM
ggggagggcagggucaccca

SEQ ID NO: 11286 - RNA, 20 nt, Artificial Sequence
  spacer sequence GTCN PAM
aggucggucggggccgccug

SEQ ID NO: 11287 - RNA, 20 nt, Artificial Sequence
  spacer sequence GTCN PAM
gucggggccgccuguccccu

SEQ ID NO: 11288 - RNA, 20 nt, Artificial Sequence
  spacer sequence GTCN PAM
gggccgccuguccccuggug

SEQ ID NO: 11289 - RNA, 20 nt, Artificial Sequence
  spacer sequence GTCN PAM
ccugguguuucccuucacag

SEQ ID NO: 11290 - RNA, 20 nt, Artificial Sequence
  spacer sequence GTCN PAM
gcuggggcgggugggcugug

SEQ ID NO: 11291 - RNA, 20 nt, Artificial Sequence
  spacer sequence GTCN PAM
gggcccuuuuuggacacugc

SEQ ID NO: 11292 - RNA, 20 nt, Artificial Sequence
  spacer sequence GTCN PAM
aaaaagggcccggacuuccc

SEQ ID NO: 11293 - RNA, 20 nt, Artificial Sequence
  spacer sequence GTCN PAM
aggacacacaggaggugcuc

SEQ ID NO: 11294 - RNA, 20 nt, Artificial Sequence
  spacer sequence GTCN PAM
uggacuaucuuguaugcugg

SEQ ID NO: 11295 - RNA, 20 nt, Artificial Sequence
  spacer sequence GTCN PAM
uggcagaaacgcuguggacu

SEQ ID NO: 11296 - RNA, 20 nt, Artificial Sequence
  spacer sequence GTCN PAM
acagcguuucugccaggaca

SEQ ID NO: 11297 - RNA, 20 nt, Artificial Sequence
  spacer sequence GTCN PAM
guccacagcguuucugccag

SEQ ID NO: 11298 - RNA, 20 nt, Artificial Sequence
  spacer sequence GTCN PAM
acgcucagcucugcugccuc

SEQ ID NO: 11299 - RNA, 20 nt, Artificial Sequence
  spacer sequence GTCN PAM
guccugggaguuuccgggac

SEQ ID NO: 11300 - RNA, 20 nt, Artificial Sequence
  spacer sequence GTCN PAM
ugggaguuuccgggacggga

SEQ ID NO: 11301 - RNA, 20 nt, Artificial Sequence
  spacer sequence GTCN PAM
cggaaacucccaggacugac

SEQ ID NO: 11302 - RNA, 20 nt, Artificial Sequence
  spacer sequence GTCN PAM
ugcggggccacagcgccagc

SEQ ID NO: 11303 - RNA, 20 nt, Artificial Sequence
  spacer sequence GTCN PAM
gcccauucuccgggccucag

SEQ ID NO: 11304 - RNA, 20 nt, Artificial Sequence
  spacer sequence GTCN PAM
cgcgccccagucugcccauu

SEQ ID NO: 11305 - RNA, 20 nt, Artificial Sequence
  spacer sequence GTCN PAM
uccagguccuccugcccccc

SEQ ID NO: 11306 - RNA, 20 nt, Artificial Sequence
  spacer sequence GTCN PAM
uccugccccccgugcccucc

SEQ ID NO: 11307 - RNA, 20 nt, Artificial Sequence
  spacer sequence GTCN PAM
ucauuccuucuucauuccug

SEQ ID NO: 11308 - RNA, 20 nt, Artificial Sequence
  spacer sequence GTCN PAM
agcuguucauuccuggccuc

SEQ ID NO: 11309 - RNA, 20 nt, Artificial Sequence
  spacer sequence GTCN PAM
agaggccaggaaugaacagc

SEQ ID NO: 11310 - RNA, 20 nt, Artificial Sequence
  spacer sequence GTCN PAM
ccuccccacagaguccagag

SEQ ID NO: 11311 - RNA, 20 nt, Artificial Sequence
  spacer sequence GTCN PAM
uuuuuuuuuuuuuuuuuuuu

SEQ ID NO: 11312 - RNA, 20 nt, Artificial Sequence
  spacer sequence GTCN PAM
caaaaaaaaaaaaaaaaaaa

SEQ ID NO: 11313 - RNA, 20 nt, Artificial Sequence
  spacer sequence GTCN PAM
cccaggcuggagugcagugg

SEQ ID NO: 11314 - RNA, 20 nt, Artificial Sequence
  spacer sequence GTCN PAM
cagcuacucgggaggcugag

SEQ ID NO: 11315 - RNA, 20 nt, Artificial Sequence
  spacer sequence GTCN PAM
cuacuaaaauacaaaaauua

SEQ ID NO: 11316 - RNA, 20 nt, Artificial Sequence
  spacer sequence GTCN PAM
caaacuccugaccucaggug

SEQ ID NO: 11317 - RNA, 20 nt, Artificial Sequence
  spacer sequence GTCN PAM
ggaguuugagaccagcccgg

SEQ ID NO: 11318 - RNA, 20 nt, Artificial Sequence
  spacer sequence GTCN PAM
acagcagugauguggcugcg

SEQ ID NO: 11319 - RNA, 20 nt, Artificial Sequence
  spacer sequence GTCN PAM
ggagaggcgggaaggaggcg

SEQ ID NO: 11320 - RNA, 20 nt, Artificial Sequence
  spacer sequence GTCN PAM
acaguccggagaggcgggaa

SEQ ID NO: 11321 - RNA, 20 nt, Artificial Sequence
  spacer sequence GTCN PAM
acaccucucugguaaccagg

SEQ ID NO: 11322 - RNA, 20 nt, Artificial Sequence
  spacer sequence GTCN PAM
cgcccugcccaccccuccca

SEQ ID NO: 11323 - RNA, 20 nt, Artificial Sequence
  spacer sequence GTCN PAM
cugggggccuuggcaccucc

SEQ ID NO: 11324 - RNA, 20 nt, Artificial Sequence
  spacer sequence GTCN PAM
ucucagccucugccccgggc

SEQ ID NO: 11325 - RNA, 20 nt, Artificial Sequence
  spacer sequence GTCN PAM
guggaugggagcugccagga

SEQ ID NO: 11326 - RNA, 20 nt, Artificial Sequence
  spacer sequence GTCN PAM
ccuuuccggccccucucuga

SEQ ID NO: 11327 - RNA, 20 nt, Artificial Sequence
  spacer sequence GTCN PAM
guggggcacaguggcgggaa

SEQ ID NO: 11328 - RNA, 20 nt, Artificial Sequence
  spacer sequence GTCN PAM
uuuuuuuuuuuuuuuuugag

SEQ ID NO: 11329 - RNA, 20 nt, Artificial Sequence
  spacer sequence GTCN PAM
cgcucugucgcccaggcugg

SEQ ID NO: 11330 - RNA, 20 nt, Artificial Sequence
  spacer sequence GTCN PAM
cccaggcuggagugcagugg

SEQ ID NO: 11331 - RNA, 20 nt, Artificial Sequence
  spacer sequence GTCN PAM
cuacuaaaaauacaaaaauu

SEQ ID NO: 11332 - RNA, 20 nt, Artificial Sequence
  spacer sequence GTCN PAM
cagccuggccaacauggaga

SEQ ID NO: 11333 - RNA, 20 nt, Artificial Sequence
  spacer sequence GTCN PAM
ggagucccagccuggccaac

SEQ ID NO: 11334 - RNA, 20 nt, Artificial Sequence
  spacer sequence GTCN PAM
ucccagcacuuugggaggcc

SEQ ID NO: 11335 - RNA, 20 nt, Artificial Sequence
  spacer sequence GTCN PAM
ccgcaucugggcuagauuuu

SEQ ID NO: 11336 - RNA, 20 nt, Artificial Sequence
  spacer sequence GTCN PAM
ccagagugaacggauggaug

SEQ ID NO: 11337 - RNA, 20 nt, Artificial Sequence
  spacer sequence GTCN PAM
ccagagugaacggauggaug

SEQ ID NO: 11338 - RNA, 20 nt, Artificial Sequence
  spacer sequence GTCN PAM
ccagagugaacggauggaug

SEQ ID NO: 11339 - RNA, 20 nt, Artificial Sequence
  spacer sequence GTCN PAM
ccagagugaacggauggaug

SEQ ID NO: 11340 - RNA, 20 nt, Artificial Sequence
  spacer sequence GTCN PAM
ccagagugaacggauggaug

SEQ ID NO: 11341 - RNA, 20 nt, Artificial Sequence
  spacer sequence GTCN PAM
ccagagugaacggauggaug

SEQ ID NO: 11342 - RNA, 20 nt, Artificial Sequence
  spacer sequence GTCN PAM
ccagagggaacggauggaug

SEQ ID NO: 11343 - RNA, 20 nt, Artificial Sequence
  spacer sequence GTCN PAM
ccagagggaacggauggaug

SEQ ID NO: 11344 - RNA, 20 nt, Artificial Sequence
  spacer sequence GTCN PAM
ccagagggaacggauggaug

SEQ ID NO: 11345 - RNA, 20 nt, Artificial Sequence
  spacer sequence GTCN PAM
ccagagggaacggauggaug

SEQ ID NO: 11346 - RNA, 20 nt, Artificial Sequence
  spacer sequence GTCN PAM
ccagagggaacggauggaug

SEQ ID NO: 11347 - RNA, 20 nt, Artificial Sequence
  spacer sequence GTCN PAM
ccagagggaacggauggaug

SEQ ID NO: 11348 - RNA, 20 nt, Artificial Sequence
  spacer sequence GTCN PAM
ccagagggaauggauggaug

SEQ ID NO: 11349 - RNA, 20 nt, Artificial Sequence
  spacer sequence GTCN PAM
ccagagugaauggaugagca

SEQ ID NO: 11350 - RNA, 20 nt, Artificial Sequence
  spacer sequence GTCN PAM
ccacgcgcgccuccacaugg

SEQ ID NO: 11351 - RNA, 20 nt, Artificial Sequence
  spacer sequence GTCN PAM
accguggcucccuacugcuc

SEQ ID NO: 11352 - RNA, 20 nt, Artificial Sequence
  spacer sequence GTCN PAM
cuccccugcuccacggucaa

SEQ ID NO: 11353 - RNA, 20 nt, Artificial Sequence
  spacer sequence GTCN PAM
ugacuuccaagccccuuggu

SEQ ID NO: 11354 - RNA, 20 nt, Artificial Sequence
  spacer sequence GTCN PAM
agaccaagaucaaaccaggu

SEQ ID NO: 11355 - RNA, 20 nt, Artificial Sequence
  spacer sequence GTCN PAM
cuccgaccuuggaggcugcu

SEQ ID NO: 11356 - RNA, 20 nt, Artificial Sequence
  spacer sequence GTCN PAM
gagggaccaaggggcuugga

SEQ ID NO: 11357 - RNA, 20 nt, Artificial Sequence
  spacer sequence GTCN PAM
cagugaauuaguucuuuauu

SEQ ID NO: 11358 - RNA, 20 nt, Artificial Sequence
  spacer sequence GTCN PAM
ggcuggucucaaacuccuga

SEQ ID NO: 11359 - RNA, 20 nt, Artificial Sequence
  spacer sequence GTCN PAM
caaacuccugaccucaggug

SEQ ID NO: 11360 - RNA, 20 nt, Artificial Sequence
  spacer sequence GTCN PAM
ggaguuugagaccagccuga

SEQ ID NO: 11361 - RNA, 20 nt, Artificial Sequence
  spacer sequence GTCN PAM
cuucuuuaagaaagaauccu

SEQ ID NO: 11362 - RNA, 20 nt, Artificial Sequence
  spacer sequence GTCN PAM
cgcuguguugcugaggcuga

SEQ ID NO: 11363 - RNA, 20 nt, Artificial Sequence
  spacer sequence GTCN PAM
ggaguucaagaccagccugg

SEQ ID NO: 11364 - RNA, 20 nt, Artificial Sequence
  spacer sequence GTCN PAM
ugaacuccugaccuugugau

SEQ ID NO: 11365 - RNA, 20 nt, Artificial Sequence
  spacer sequence GTCN PAM
caccuaaucgggaggcugag

SEQ ID NO: 11366 - RNA, 20 nt, Artificial Sequence
  spacer sequence GTCN PAM
uagcucacugcagccuccug

SEQ ID NO: 11367 - RNA, 20 nt, Artificial Sequence
  spacer sequence GTCN PAM
cccaggcuggagugcaguga

SEQ ID NO: 11368 - RNA, 20 nt, Artificial Sequence
  spacer sequence GTCN PAM
uacucugucgcccaggcugg

SEQ ID NO: 11369 - RNA, 20 nt, Artificial Sequence
  spacer sequence GTCN PAM
caaaaaaaggaaaaaaaaca

SEQ ID NO: 11370 - RNA, 20 nt, Artificial Sequence
  spacer sequence GTCN PAM
acguuguuuuuuuuccuuuu

SEQ ID NO: 11371 - RNA, 20 nt, Artificial Sequence
  spacer sequence GTCN PAM
gggugggccuggcuguugga

SEQ ID NO: 11372 - RNA, 20 nt, Artificial Sequence
  spacer sequence GTCN PAM
gagggaaaaagagaauucau

SEQ ID NO: 11373 - RNA, 20 nt, Artificial Sequence
  spacer sequence GTCN PAM
gcagccgcccccuccgggca

SEQ ID NO: 11374 - RNA, 20 nt, Artificial Sequence
  spacer sequence GTCN PAM
gcggaugcucagaagcagca

SEQ ID NO: 11375 - RNA, 20 nt, Artificial Sequence
  spacer sequence GTCN PAM
aauauggcuucugggaaacu

SEQ ID NO: 11376 - RNA, 20 nt, Artificial Sequence
  spacer sequence GTCN PAM
ggaguucaagaccagcuugg

SEQ ID NO: 11377 - RNA, 20 nt, Artificial Sequence
  spacer sequence GTCN PAM
ugaacuccugaccucaggcc

SEQ ID NO: 11378 - RNA, 20 nt, Artificial Sequence
  spacer sequence GTCN PAM
cugcaaaaaauuuaaaaaaa

SEQ ID NO: 11379 - RNA, 20 nt, Artificial Sequence
  spacer sequence GTCN PAM
caccacuguacuccagccug

SEQ ID NO: 11380 - RNA, 20 nt, Artificial Sequence
  spacer sequence GTCN PAM
cucaggcuggaguacagugg

SEQ ID NO: 11381 - RNA, 20 nt, Artificial Sequence
  spacer sequence GTCN PAM
cgcucugucgcucaggcugg

SEQ ID NO: 11382 - RNA, 20 nt, Artificial Sequence
  spacer sequence GTCN PAM
caaaacaaaaacaaaguguc

SEQ ID NO: 11383 - RNA, 20 nt, Artificial Sequence
  spacer sequence GTCN PAM
caggcugggcguggugguuc

SEQ ID NO: 11384 - RNA, 20 nt, Artificial Sequence
  spacer sequence GTCN PAM
ugcuauguugcccaggcugg

SEQ ID NO: 11385 - RNA, 20 nt, Artificial Sequence
  spacer sequence GTCN PAM
caacuacuccagaggcugag

SEQ ID NO: 11386 - RNA, 20 nt, Artificial Sequence
  spacer sequence GTCN PAM
cgcucuguggcccaggcugg

SEQ ID NO: 11387 - RNA, 20 nt, Artificial Sequence
  spacer sequence GTCN PAM
caaaaaaaaaaaaaaaaaaa

SEQ ID NO: 11388 - RNA, 20 nt, Artificial Sequence
  spacer sequence GTCN PAM
gaagaagagaaauuuucuuu

SEQ ID NO: 11389 - RNA, 20 nt, Artificial Sequence
  spacer sequence GTCN PAM
cgggccaacccuccuggagg

SEQ ID NO: 11390 - RNA, 20 nt, Artificial Sequence
  spacer sequence GTCN PAM
ggccaacccuccuggaggcu

SEQ ID NO: 11391 - RNA, 20 nt, Artificial Sequence
  spacer sequence GTCN PAM
ccaaacgcuagacacuugga

SEQ ID NO: 11392 - RNA, 20 nt, Artificial Sequence
  spacer sequence GTCN PAM
agcguuuggggacugccgag

SEQ ID NO: 11393 - RNA, 20 nt, Artificial Sequence
  spacer sequence GTCN PAM
gaagggcugcagcugaccag

SEQ ID NO: 11394 - RNA, 20 nt, Artificial Sequence
  spacer sequence GTCN PAM
gcugcagcccuucagacgcu

SEQ ID NO: 11395 - RNA, 20 nt, Artificial Sequence
  spacer sequence GTCN PAM
augaggccccaccuggggau

SEQ ID NO: 11396 - RNA, 20 nt, Artificial Sequence
  spacer sequence GTCN PAM
cccaggaggcuccaaagucc

SEQ ID NO: 11397 - RNA, 20 nt, Artificial Sequence
  spacer sequence GTCN PAM
gcagggcccccugggagaac

SEQ ID NO: 11398 - RNA, 20 nt, Artificial Sequence
  spacer sequence GTCN PAM
uugggcccagaggcccaggc

SEQ ID NO: 11399 - RNA, 20 nt, Artificial Sequence
  spacer sequence GTCN PAM
cagcagcugcggggggccca

SEQ ID NO: 11400 - RNA, 20 nt, Artificial Sequence
  spacer sequence GTCN PAM
ccaggcaggccccaccuggg

SEQ ID NO: 11401 - RNA, 20 nt, Artificial Sequence
  spacer sequence GTCN PAM
caggggggcuaugguuuccc

SEQ ID NO: 11402 - RNA, 20 nt, Artificial Sequence
  spacer sequence GTCN PAM
caggugggcagugcccaagg

SEQ ID NO: 11403 - RNA, 20 nt, Artificial Sequence
  spacer sequence GTCN PAM
uggccaacccuuuccuugga

SEQ ID NO: 11404 - RNA, 20 nt, Artificial Sequence
  spacer sequence GTCN PAM
uuuucugaccuuccucccac

SEQ ID NO: 11405 - RNA, 20 nt, Artificial Sequence
  spacer sequence GTCN PAM
gaaaaagaccccagagguuu

SEQ ID NO: 11406 - RNA, 20 nt, Artificial Sequence
  spacer sequence GTCN PAM
ugagccggggcugaacuccc

SEQ ID NO: 11407 - RNA, 20 nt, Artificial Sequence
  spacer sequence GTCN PAM
gggcagccggggaacccccu

SEQ ID NO: 11408 - RNA, 20 nt, Artificial Sequence
  spacer sequence GTCN PAM
cagggccaccugggaguggg

SEQ ID NO: 11409 - RNA, 20 nt, Artificial Sequence
  spacer sequence GTCN PAM
gccagcagacuccacugacc

SEQ ID NO: 11410 - RNA, 20 nt, Artificial Sequence
  spacer sequence GTCN PAM
gcuggcggacagggugcaag

SEQ ID NO: 11411 - RNA, 20 nt, Artificial Sequence
  spacer sequence GTCN PAM
guggagucugcuggcggaca

SEQ ID NO: 11412 - RNA, 20 nt, Artificial Sequence
  spacer sequence GTCN PAM
uuucucugggagguggggug

SEQ ID NO: 11413 - RNA, 20 nt, Artificial Sequence
  spacer sequence GTCN PAM
ucaucaggugggggcggcac

SEQ ID NO: 11414 - RNA, 20 nt, Artificial Sequence
  spacer sequence GTCN PAM
gggucgggggccacagcguc

SEQ ID NO: 11415 - RNA, 20 nt, Artificial Sequence
  spacer sequence GTCN PAM
ggggccacagcgucuucccu

SEQ ID NO: 11416 - RNA, 20 nt, Artificial Sequence
  spacer sequence GTCN PAM
ucccuccauccccagagcca

SEQ ID NO: 11417 - RNA, 20 nt, Artificial Sequence
  spacer sequence GTCN PAM
ugcagauccguguaacgggg

SEQ ID NO: 11418 - RNA, 20 nt, Artificial Sequence
  spacer sequence GTCN PAM
gaggcugaggggggcugugg

SEQ ID NO: 11419 - RNA, 20 nt, Artificial Sequence
  spacer sequence GTCN PAM
gaaggcgacguuugggcggg

SEQ ID NO: 11420 - RNA, 20 nt, Artificial Sequence
  spacer sequence GTCN PAM
ccuucugacagagcccccuc

SEQ ID NO: 11421 - RNA, 20 nt, Artificial Sequence
  spacer sequence GTCN PAM
ccgcucggcuccugccuucc

SEQ ID NO: 11422 - RNA, 20 nt, Artificial Sequence
  spacer sequence GTCN PAM
uucuauguaaaacgcacagg

SEQ ID NO: 11423 - RNA, 20 nt, Artificial Sequence
  spacer sequence GTCN PAM
gggggcuccugccuguaauc

SEQ ID NO: 11424 - RNA, 20 nt, Artificial Sequence
  spacer sequence GTCN PAM
caaacuccuggccuuaagug

SEQ ID NO: 11425 - RNA, 20 nt, Artificial Sequence
  spacer sequence GTCN PAM
ugcuauauugcucaggcugg

SEQ ID NO: 11426 - RNA, 20 nt, Artificial Sequence
  spacer sequence GTCN PAM
cuauagaaauacaaaaauua

SEQ ID NO: 11427 - RNA, 20 nt, Artificial Sequence
  spacer sequence GTCN PAM
cauuggcucaggagaccgag

SEQ ID NO: 11428 - RNA, 20 nt, Artificial Sequence
  spacer sequence GTCN PAM
ccugagccaaugagaccaca

SEQ ID NO: 11429 - RNA, 20 nt, Artificial Sequence
  spacer sequence GTCN PAM
caccacugcacuccagccug

SEQ ID NO: 11430 - RNA, 20 nt, Artificial Sequence
  spacer sequence GTCN PAM
cucaggcuggagugcagugg

SEQ ID NO: 11431 - RNA, 20 nt, Artificial Sequence
  spacer sequence GTCN PAM
cgcucugucacucaggcugg

SEQ ID NO: 11432 - RNA, 20 nt, Artificial Sequence
  spacer sequence GTCN PAM
cuaaauagggcagcucaagg

SEQ ID NO: 11433 - RNA, 20 nt, Artificial Sequence
  spacer sequence GTCN PAM
ugcucagaugucugugaaaa

SEQ ID NO: 11434 - RNA, 20 nt, Artificial Sequence
  spacer sequence GTCN PAM
gugaaaaaccccccacccca

SEQ ID NO: 11435 - RNA, 20 nt, Artificial Sequence
  spacer sequence GTCN PAM
ggcaggaggggcggccgggg

SEQ ID NO: 11436 - RNA, 20 nt, Artificial Sequence
  spacer sequence GTCN PAM
cccggccgccccuccugcca

SEQ ID NO: 11437 - RNA, 20 nt, Artificial Sequence
  spacer sequence GTCN PAM
ccccuucccagcaccaccug

SEQ ID NO: 11438 - RNA, 20 nt, Artificial Sequence
  spacer sequence GTCN PAM
acaccuuccaucccccacag

SEQ ID NO: 11439 - RNA, 20 nt, Artificial Sequence
  spacer sequence GTCN PAM
acuuccugcugugggggaug

SEQ ID NO: 11440 - RNA, 20 nt, Artificial Sequence
  spacer sequence GTCN PAM
ccuccccucuguccacuucc

SEQ ID NO: 11441 - RNA, 20 nt, Artificial Sequence
  spacer sequence GTCN PAM
uucccugaggggguccccuc

SEQ ID NO: 11442 - RNA, 20 nt, Artificial Sequence
  spacer sequence GTCN PAM
gcccuggaacaugcggaauu

SEQ ID NO: 11443 - RNA, 20 nt, Artificial Sequence
  spacer sequence GTCN PAM
gucugcccuggaacaugcgg

SEQ ID NO: 11444 - RNA, 20 nt, Artificial Sequence
  spacer sequence GTCN PAM
cucgucugucugcccuggaa

SEQ ID NO: 11445 - RNA, 20 nt, Artificial Sequence
  spacer sequence GTCN PAM
aaggggggccgugagccaga

SEQ ID NO: 11446 - RNA, 20 nt, Artificial Sequence
  spacer sequence GTCN PAM
guaaaggugggugggagcag

SEQ ID NO: 11447 - RNA, 20 nt, Artificial Sequence
  spacer sequence GTCN PAM
ugggaggacggggggcuccc

SEQ ID NO: 11448 - RNA, 20 nt, Artificial Sequence
  spacer sequence GTCN PAM
ucccaggaccgauaucaccu

SEQ ID NO: 11449 - RNA, 20 nt, Artificial Sequence
  spacer sequence GTCN PAM
uucccucccuggaggggagc

SEQ ID NO: 11450 - RNA, 20 nt, Artificial Sequence
  spacer sequence GTCN PAM
ccuguggucauucccucccu

SEQ ID NO: 11451 - RNA, 20 nt, Artificial Sequence
  spacer sequence GTCN PAM
ggguccccuguggucauucc

SEQ ID NO: 11452 - RNA, 20 nt, Artificial Sequence
  spacer sequence GTCN PAM
gcgaggccuucucagccccu

SEQ ID NO: 11453 - RNA, 20 nt, Artificial Sequence
  spacer sequence GTCN PAM
cagcggaggggcaccuucag

SEQ ID NO: 11454 - RNA, 20 nt, Artificial Sequence
  spacer sequence GTCN PAM
ggugugaaguucugaaggug

SEQ ID NO: 11455 - RNA, 20 nt, Artificial Sequence
  spacer sequence GTCN PAM
ggcggcguggaggggagugc

SEQ ID NO: 11456 - RNA, 20 nt, Artificial Sequence
  spacer sequence GTCN PAM
accagaaagcucugaaauca

SEQ ID NO: 11457 - RNA, 20 nt, Artificial Sequence
  spacer sequence GTCN PAM
aggccccccuugugggccag

SEQ ID NO: 11458 - RNA, 20 nt, Artificial Sequence
  spacer sequence GTCN PAM
aggcugcccauggcgguguc

SEQ ID NO: 11459 - RNA, 20 nt, Artificial Sequence
  spacer sequence GTCN PAM
ccugcuuucccaucccuggg

SEQ ID NO: 11460 - RNA, 20 nt, Artificial Sequence
  spacer sequence GTCN PAM
cuggcccccgguuccgcucc

SEQ ID NO: 11461 - RNA, 20 nt, Artificial Sequence
  spacer sequence GTCN PAM
ucccuuuacugccacgcauc

SEQ ID NO: 11462 - RNA, 20 nt, Artificial Sequence
  spacer sequence GTCN PAM
gaccgugccucgccaccggc

SEQ ID NO: 11463 - RNA, 20 nt, Artificial Sequence
  spacer sequence GTCN PAM
gaccccuguggggccggggc

SEQ ID NO: 11464 - RNA, 20 nt, Artificial Sequence
  spacer sequence GTCN PAM
aggcaggguagaccccguaa

SEQ ID NO: 11465 - RNA, 20 nt, Artificial Sequence
  spacer sequence GTCN PAM
acccugccuggacccccccu

SEQ ID NO: 11466 - RNA, 20 nt, Artificial Sequence
  spacer sequence GTCN PAM
gaaucucagaggagaggacc

SEQ ID NO: 11467 - RNA, 20 nt, Artificial Sequence
  spacer sequence GTCN PAM
ucuccucugagauucugacc

SEQ ID NO: 11468 - RNA, 20 nt, Artificial Sequence
  spacer sequence GTCN PAM
uucguuacgcagccccccgg

SEQ ID NO: 11469 - RNA, 20 nt, Artificial Sequence
  spacer sequence GTCN PAM
uggagcccagaguccaaaau

SEQ ID NO: 11470 - RNA, 20 nt, Artificial Sequence
  spacer sequence GTCN PAM
aaaaucgaggcguccgcagg

SEQ ID NO: 11471 - RNA, 20 nt, Artificial Sequence
  spacer sequence GTCN PAM
gcagggcugcgcucccucca

SEQ ID NO: 11472 - RNA, 20 nt, Artificial Sequence
  spacer sequence GTCN PAM
cuugacauguggccggccuc

SEQ ID NO: 11473 - RNA, 20 nt, Artificial Sequence
  spacer sequence GTCN PAM
agggacuccuggagccccca

SEQ ID NO: 11474 - RNA, 20 nt, Artificial Sequence
  spacer sequence GTCN PAM
cugugcgaccgucuccagug

SEQ ID NO: 11475 - RNA, 20 nt, Artificial Sequence
  spacer sequence GTCN PAM
cacagagacagaggccggcc

SEQ ID NO: 11476 - RNA, 20 nt, Artificial Sequence
  spacer sequence GTCN PAM
ccagugcccaccggccuuca

SEQ ID NO: 11477 - RNA, 20 nt, Artificial Sequence
  spacer sequence GTCN PAM
cagugaaggccggugggcac

SEQ ID NO: 11478 - RNA, 20 nt, Artificial Sequence
  spacer sequence GTCN PAM
gcaaaggcccuuuuuccaaa

SEQ ID NO: 11479 - RNA, 20 nt, Artificial Sequence
  spacer sequence GTCN PAM
cguucugagguucugggccg

SEQ ID NO: 11480 - RNA, 20 nt, Artificial Sequence
  spacer sequence GTCN PAM
uggggugaacgccauccccc

SEQ ID NO: 11481 - RNA, 20 nt, Artificial Sequence
  spacer sequence GTCN PAM
uccccauuccaguaccugcu

SEQ ID NO: 11482 - RNA, 20 nt, Artificial Sequence
  spacer sequence GTCN PAM
ugucccccucuccgcccugu

SEQ ID NO: 11483 - RNA, 20 nt, Artificial Sequence
  spacer sequence GTCN PAM
cccucuccgcccuguccccc

SEQ ID NO: 11484 - RNA, 20 nt, Artificial Sequence
  spacer sequence GTCN PAM
cccucuccgcccugcccggc

SEQ ID NO: 11485 - RNA, 20 nt, Artificial Sequence
  spacer sequence GTCN PAM
ggaaucagccgagcacacag

SEQ ID NO: 11486 - RNA, 20 nt, Artificial Sequence
  spacer sequence GTCN PAM
guuuuguucccagagucugg

SEQ ID NO: 11487 - RNA, 20 nt, Artificial Sequence
  spacer sequence GTCN PAM
cggaucuaggaguguaucug

SEQ ID NO: 11488 - RNA, 20 nt, Artificial Sequence
  spacer sequence GTCN PAM
aucaccgagucacggaucua

SEQ ID NO: 11489 - RNA, 20 nt, Artificial Sequence
  spacer sequence GTCN PAM
cggaggaagaacguggaggg

SEQ ID NO: 11490 - RNA, 20 nt, Artificial Sequence
  spacer sequence GTCN PAM
gaggacgaggccgggcgugu

SEQ ID NO: 11491 - RNA, 20 nt, Artificial Sequence
  spacer sequence GTCN PAM
ucugaccccggcccggcugc

SEQ ID NO: 11492 - RNA, 20 nt, Artificial Sequence
  spacer sequence GTCN PAM
caugagcacaggcacgcaca

SEQ ID NO: 11493 - RNA, 20 nt, Artificial Sequence
  spacer sequence GTCN PAM
accugagggccccacacccc

SEQ ID NO: 11494 - RNA, 20 nt, Artificial Sequence
  spacer sequence GTCN PAM
ggcgcuggccggguuggggc

SEQ ID NO: 11495 - RNA, 20 nt, Artificial Sequence
  spacer sequence GTCN PAM
ccgccccaacccggccagcg

SEQ ID NO: 11496 - RNA, 20 nt, Artificial Sequence
  spacer sequence GTCN PAM
uugucuccgccccaacccgg

SEQ ID NO: 11497 - RNA, 20 nt, Artificial Sequence
  spacer sequence GTCN PAM
agcugccuggucuuugucuc

SEQ ID NO: 11498 - RNA, 20 nt, Artificial Sequence
  spacer sequence GTCN PAM
aggcugcccgagguccagcu

SEQ ID NO: 11499 - RNA, 20 nt, Artificial Sequence
  spacer sequence GTCN PAM
ggacuccuggcugccccccc

SEQ ID NO: 11500 - RNA, 20 nt, Artificial Sequence
  spacer sequence GTCN PAM
ugaccucugcccuggguggu

SEQ ID NO: 11501 - RNA, 20 nt, Artificial Sequence
  spacer sequence GTCN PAM
guguauuggaggcccaguga

SEQ ID NO: 11502 - RNA, 20 nt, Artificial Sequence
  spacer sequence GTCN PAM
ugccccucucugggccucag

SEQ ID NO: 11503 - RNA, 20 nt, Artificial Sequence
  spacer sequence GTCN PAM
ccgcagcagcaggggcuggg

SEQ ID NO: 11504 - RNA, 20 nt, Artificial Sequence
  spacer sequence GTCN PAM
ccuucugggcccuaaugacc

SEQ ID NO: 11505 - RNA, 20 nt, Artificial Sequence
  spacer sequence GTCN PAM
uuagggcccagaaggagacc

SEQ ID NO: 11506 - RNA, 20 nt, Artificial Sequence
  spacer sequence GTCN PAM
cagcuccuccucggcaaauu

SEQ ID NO: 11507 - RNA, 20 nt, Artificial Sequence
  spacer sequence GTCN PAM
cccagcgcccccccccaccc

SEQ ID NO: 11508 - RNA, 20 nt, Artificial Sequence
  spacer sequence GTCN PAM
gggguacaaggagccaggag

SEQ ID NO: 11509 - RNA, 20 nt, Artificial Sequence
  spacer sequence GTCN PAM
uccagaggggaaagaggcuc

SEQ ID NO: 11510 - RNA, 20 nt, Artificial Sequence
  spacer sequence GTCN PAM
guggcucauuucauagcugg

SEQ ID NO: 11511 - RNA, 20 nt, Artificial Sequence
  spacer sequence GTCN PAM
cagccuccagcuaugaaaug

SEQ ID NO: 11512 - RNA, 20 nt, Artificial Sequence
  spacer sequence GTCN PAM
ccugcuggcuuccccgcacc

SEQ ID NO: 11513 - RNA, 20 nt, Artificial Sequence
  spacer sequence GTCN PAM
uccugucuccugcuggcuuc

SEQ ID NO: 11514 - RNA, 20 nt, Artificial Sequence
  spacer sequence GTCN PAM
ccagcagcccccaggcucug

SEQ ID NO: 11515 - RNA, 20 nt, Artificial Sequence
  spacer sequence GTCN PAM
cgcacucgccgcugugucuc

SEQ ID NO: 11516 - RNA, 20 nt, Artificial Sequence
  spacer sequence GTCN PAM
caguuuccucaccugcaaag

SEQ ID NO: 11517 - RNA, 20 nt, Artificial Sequence
  spacer sequence GTCN PAM
gacccucaggacagccccgg

SEQ ID NO: 11518 - RNA, 20 nt, Artificial Sequence
  spacer sequence GTCN PAM
gacgggagcgcauuuguucc

SEQ ID NO: 11519 - RNA, 20 nt, Artificial Sequence
  spacer sequence GTCN PAM
ugagggucggacgggagcgc

SEQ ID NO: 11520 - RNA, 20 nt, Artificial Sequence
  spacer sequence GTCN PAM
uaggguaaauuguguccccc

SEQ ID NO: 11521 - RNA, 20 nt, Artificial Sequence
  spacer sequence GTCN PAM
cccaaagaaaagguggaggg

SEQ ID NO: 11522 - RNA, 20 nt, Artificial Sequence
  spacer sequence GTCN PAM
caggcgggagccaccgcccu

SEQ ID NO: 11523 - RNA, 20 nt, Artificial Sequence
  spacer sequence GTCN PAM
agaccagccagggcaacaua

SEQ ID NO: 11524 - RNA, 20 nt, Artificial Sequence
  spacer sequence GTCN PAM
cgaccuccugggcucccucg

SEQ ID NO: 11525 - RNA, 20 nt, Artificial Sequence
  spacer sequence GTCN PAM
uucuauguugcccuggcugg

SEQ ID NO: 11526 - RNA, 20 nt, Artificial Sequence
  spacer sequence GTCN PAM
cagccacuugggcagcugag

SEQ ID NO: 11527 - RNA, 20 nt, Artificial Sequence
  spacer sequence GTCN PAM
cacucuguugcccagccugg

SEQ ID NO: 11528 - RNA, 20 nt, Artificial Sequence
  spacer sequence GTCN PAM
ccaaaaacaaacaaaaaaaa

SEQ ID NO: 11529 - RNA, 20 nt, Artificial Sequence
  spacer sequence GTCN PAM
uuuuuuuguuuguuuuugga

SEQ ID NO: 11530 - RNA, 20 nt, Artificial Sequence
  spacer sequence GTCN PAM
ggaguucaagaccagccucg

SEQ ID NO: 11531 - RNA, 20 nt, Artificial Sequence
  spacer sequence GTCN PAM
ugaacuccugaccucaagug

SEQ ID NO: 11532 - RNA, 20 nt, Artificial Sequence
  spacer sequence GTCN PAM
cuacccaaaaaauacaaaaa

SEQ ID NO: 11533 - RNA, 20 nt, Artificial Sequence
  spacer sequence GTCN PAM
ccggggcucaagcaauucuc

SEQ ID NO: 11534 - RNA, 20 nt, Artificial Sequence
  spacer sequence GTCN PAM
cccaggcuggagugcaaugg

SEQ ID NO: 11535 - RNA, 20 nt, Artificial Sequence
  spacer sequence GTCN PAM
cgcucugucgcccaggcugg

SEQ ID NO: 11536 - RNA, 20 nt, Artificial Sequence
  spacer sequence GTCN PAM
ccuaaagugcugggauuaug

SEQ ID NO: 11537 - RNA, 20 nt, Artificial Sequence
  spacer sequence GTCN PAM
gaucacgaggucaggagacc

SEQ ID NO: 11538 - RNA, 20 nt, Artificial Sequence
  spacer sequence GTCN PAM
ggagaccauccuggccaaau

SEQ ID NO: 11539 - RNA, 20 nt, Artificial Sequence
  spacer sequence GTCN PAM
ccugaccucgugauccgacu

SEQ ID NO: 11540 - RNA, 20 nt, Artificial Sequence
  spacer sequence GTCN PAM
cuacuaaaaauacaaaaaaa

SEQ ID NO: 11541 - RNA, 20 nt, Artificial Sequence
  spacer sequence GTCN PAM
cagcuacuccaagaggcuga

SEQ ID NO: 11542 - RNA, 20 nt, Artificial Sequence
  spacer sequence GTCN PAM
cccaggcuggagugcagugg

SEQ ID NO: 11543 - RNA, 20 nt, Artificial Sequence
  spacer sequence GTCN PAM
cgcucugucgcccaggcugg

SEQ ID NO: 11544 - RNA, 20 nt, Artificial Sequence
  spacer sequence GTCN PAM
ucuucuuuucuuuuucuuuc

SEQ ID NO: 11545 - RNA, 20 nt, Artificial Sequence
  spacer sequence GTCN PAM
cagguacugggaauccagug

SEQ ID NO: 11546 - RNA, 20 nt, Artificial Sequence
  spacer sequence GTCN PAM
ugucacagguacugggaauc

SEQ ID NO: 11547 - RNA, 20 nt, Artificial Sequence
  spacer sequence GTCN PAM
guaaguucccccguuuccaa

SEQ ID NO: 11548 - RNA, 20 nt, Artificial Sequence
  spacer sequence GTCN PAM
acacgugauuguaugucagu

SEQ ID NO: 11549 - RNA, 20 nt, Artificial Sequence
  spacer sequence GTCN PAM
accucagaccgcagauggga

SEQ ID NO: 11550 - RNA, 20 nt, Artificial Sequence
  spacer sequence GTCN PAM
gagguugaccaaagugucaa

SEQ ID NO: 11551 - RNA, 20 nt, Artificial Sequence
  spacer sequence GTCN PAM
caucugcggucugagguuga

SEQ ID NO: 11552 - RNA, 20 nt, Artificial Sequence
  spacer sequence GTCN PAM
cacaggauuagaauuccaua

SEQ ID NO: 11553 - RNA, 20 nt, Artificial Sequence
  spacer sequence GTCN PAM
ggagaucgagaccauccugg

SEQ ID NO: 11554 - RNA, 20 nt, Artificial Sequence
  spacer sequence GTCN PAM
cgaucuccugaccucgugau

SEQ ID NO: 11555 - RNA, 20 nt, Artificial Sequence
  spacer sequence GTCN PAM
cuacuaaaaauacaaaaaau

SEQ ID NO: 11556 - RNA, 20 nt, Artificial Sequence
  spacer sequence GTCN PAM
cagcuacucgggaggcugag

SEQ ID NO: 11557 - RNA, 20 nt, Artificial Sequence
  spacer sequence GTCN PAM
ccaggcuggagugcaggggu

SEQ ID NO: 11558 - RNA, 20 nt, Artificial Sequence
  spacer sequence GTCN PAM
cgcuguccccaggcuggagu

SEQ ID NO: 11559 - RNA, 20 nt, Artificial Sequence
  spacer sequence GTCN PAM
caaaaaaaaaaaaauuccau

SEQ ID NO: 11560 - RNA, 20 nt, Artificial Sequence
  spacer sequence GTCN PAM
aacacagcugaacacagaaa

SEQ ID NO: 11561 - RNA, 20 nt, Artificial Sequence
  spacer sequence GTCN PAM
gugcgucuaacacagcugaa

SEQ ID NO: 11562 - RNA, 20 nt, Artificial Sequence
  spacer sequence GTCN PAM
cguaggcaguggcaacguga

SEQ ID NO: 11563 - RNA, 20 nt, Artificial Sequence
  spacer sequence GTCN PAM
ugggucccguaggcaguggc

SEQ ID NO: 11564 - RNA, 20 nt, Artificial Sequence
  spacer sequence GTCN PAM
cacacaccucacggguggag

SEQ ID NO: 11565 - RNA, 20 nt, Artificial Sequence
  spacer sequence GTCN PAM
gugugaacaucaaacaguga

SEQ ID NO: 11566 - RNA, 20 nt, Artificial Sequence
  spacer sequence GTCN PAM
guuggugauuucgucagugu

SEQ ID NO: 11567 - RNA, 20 nt, Artificial Sequence
  spacer sequence GTCN PAM
ugauaaaugucuguugguga

SEQ ID NO: 11568 - RNA, 20 nt, Artificial Sequence
  spacer sequence GTCN PAM
ucgugcaggaugcguccuga

SEQ ID NO: 11569 - RNA, 20 nt, Artificial Sequence
  spacer sequence GTCN PAM
cuccagccucugccucuguc

SEQ ID NO: 11570 - RNA, 20 nt, Artificial Sequence
  spacer sequence GTCN PAM
ccaagggaggaaccuuccug

SEQ ID NO: 11571 - RNA, 20 nt, Artificial Sequence
  spacer sequence GTCN PAM
gcaggguugcguucccuccg

SEQ ID NO: 11572 - RNA, 20 nt, Artificial Sequence
  spacer sequence GTCN PAM
cuaaaaacaaaacaaaacaa

SEQ ID NO: 11573 - RNA, 20 nt, Artificial Sequence
  spacer sequence GTCN PAM
cccaggcuggagugcagugg

SEQ ID NO: 11574 - RNA, 20 nt, Artificial Sequence
  spacer sequence GTCN PAM
cggcucacuucagccuccac

SEQ ID NO: 11575 - RNA, 20 nt, Artificial Sequence
  spacer sequence GTCN PAM
cggcuacucgggaggcugag

SEQ ID NO: 11576 - RNA, 20 nt, Artificial Sequence
  spacer sequence GTCN PAM
cacuauguugcccaggcugg

SEQ ID NO: 11577 - RNA, 20 nt, Artificial Sequence
  spacer sequence GTCN PAM
ugaauucccgggcucaagcg

SEQ ID NO: 11578 - RNA, 20 nt, Artificial Sequence
  spacer sequence GTCN PAM
aaaaccaacuucucuucagg

SEQ ID NO: 11579 - RNA, 20 nt, Artificial Sequence
  spacer sequence GTCN PAM
cggagcccagaaguccaaaa

SEQ ID NO: 11580 - RNA, 20 nt, Artificial Sequence
  spacer sequence GTCN PAM
ugagaagaggagagagagac

SEQ ID NO: 11581 - RNA, 20 nt, Artificial Sequence
  spacer sequence GTCN PAM
cucucuccucuucucaggac

SEQ ID NO: 11582 - RNA, 20 nt, Artificial Sequence
  spacer sequence GTCN PAM
ccccgucucucucuccucuu

SEQ ID NO: 11583 - RNA, 20 nt, Artificial Sequence
  spacer sequence GTCN PAM
uguggagacggaggcagaga

SEQ ID NO: 11584 - RNA, 20 nt, Artificial Sequence
  spacer sequence GTCN PAM
ccacaagaccgucuccccgu

SEQ ID NO: 11585 - RNA, 20 nt, Artificial Sequence
  spacer sequence GTCN PAM
cugccuccgucuccacaaga

SEQ ID NO: 11586 - RNA, 20 nt, Artificial Sequence
  spacer sequence GTCN PAM
uggcuuguggccgcagcgcu

SEQ ID NO: 11587 - RNA, 20 nt, Artificial Sequence
  spacer sequence GTCN PAM
aggggcccgggaaccccaga

SEQ ID NO: 11588 - RNA, 20 nt, Artificial Sequence
  spacer sequence GTCN PAM
ucucccgguccaggggcccg

SEQ ID NO: 11589 - RNA, 20 nt, Artificial Sequence
  spacer sequence GTCN PAM
ugucccaggccaccugguuu

SEQ ID NO: 11590 - RNA, 20 nt, Artificial Sequence
  spacer sequence GTCN PAM
caggccaccugguuucuggu

SEQ ID NO: 11591 - RNA, 20 nt, Artificial Sequence
  spacer sequence GTCN PAM
gcaaggaggcaccagaaacc

SEQ ID NO: 11592 - RNA, 20 nt, Artificial Sequence
  spacer sequence GTCN PAM
ugcagccuugugguucuuca

SEQ ID NO: 11593 - RNA, 20 nt, Artificial Sequence
  spacer sequence GTCN PAM
ucggcucuggcagcggcuug

SEQ ID NO: 11594 - RNA, 20 nt, Artificial Sequence
  spacer sequence GTCN PAM
uagggguggugaccccugcu

SEQ ID NO: 11595 - RNA, 20 nt, Artificial Sequence
  spacer sequence GTCN PAM
ccaccccuaggacccucaag

SEQ ID NO: 11596 - RNA, 20 nt, Artificial Sequence
  spacer sequence GTCN PAM
uccugaccuggccuccagug

SEQ ID NO: 11597 - RNA, 20 nt, Artificial Sequence
  spacer sequence GTCN PAM
ggaggacaggagcagggguc

SEQ ID NO: 11598 - RNA, 20 nt, Artificial Sequence
  spacer sequence GTCN PAM
cuccugcacuggaggccagg

SEQ ID NO: 11599 - RNA, 20 nt, Artificial Sequence
  spacer sequence GTCN PAM
aguucguagagcugugaggg

SEQ ID NO: 11600 - RNA, 20 nt, Artificial Sequence
  spacer sequence GTCN PAM
ccgucgaguucguagagcug

SEQ ID NO: 11601 - RNA, 20 nt, Artificial Sequence
  spacer sequence GTCN PAM
uccaggaauuccuuccucuu

SEQ ID NO: 11602 - RNA, 20 nt, Artificial Sequence
  spacer sequence GTCN PAM
cagaaacagggcuguaggag

SEQ ID NO: 11603 - RNA, 20 nt, Artificial Sequence
  spacer sequence GTCN PAM
gggcgguggugagcaccccg

SEQ ID NO: 11604 - RNA, 20 nt, Artificial Sequence
  spacer sequence GTCN PAM
cucccgauuuaggagccuug

SEQ ID NO: 11605 - RNA, 20 nt, Artificial Sequence
  spacer sequence GTCN PAM
uggggggaaacacauccugc

SEQ ID NO: 11606 - RNA, 20 nt, Artificial Sequence
  spacer sequence GTCN PAM
aaccuccauggcaggaugug

SEQ ID NO: 11607 - RNA, 20 nt, Artificial Sequence
  spacer sequence GTCN PAM
aagggguaggucccuuggug

SEQ ID NO: 11608 - RNA, 20 nt, Artificial Sequence
  spacer sequence GTCN PAM
cuugguggggggcagggcag

SEQ ID NO: 11609 - RNA, 20 nt, Artificial Sequence
  spacer sequence GTCN PAM
cagggccccaacccagaaca

SEQ ID NO: 11610 - RNA, 20 nt, Artificial Sequence
  spacer sequence GTCN PAM
guucuggguuggggcccuga

SEQ ID NO: 11611 - RNA, 20 nt, Artificial Sequence
  spacer sequence GTCN PAM
aggucaucuccuuagcaucc

SEQ ID NO: 11612 - RNA, 20 nt, Artificial Sequence
  spacer sequence GTCN PAM
ucuccuuagcauccagggug

SEQ ID NO: 11613 - RNA, 20 nt, Artificial Sequence
  spacer sequence GTCN PAM
ccacuacuggguaauggggg

SEQ ID NO: 11614 - RNA, 20 nt, Artificial Sequence
  spacer sequence GTCN PAM
gauucgggcuggccaggugg

SEQ ID NO: 11615 - RNA, 20 nt, Artificial Sequence
  spacer sequence GTCN PAM
ugccgcaccugcacccaccu

SEQ ID NO: 11616 - RNA, 20 nt, Artificial Sequence
  spacer sequence GTCN PAM
aaugaucucauggcggccaa

SEQ ID NO: 11617 - RNA, 20 nt, Artificial Sequence
  spacer sequence GTCN PAM
cauuggccgccaugagauca

SEQ ID NO: 11618 - RNA, 20 nt, Artificial Sequence
  spacer sequence GTCN PAM
uggccccuccccucuuccca

SEQ ID NO: 11619 - RNA, 20 nt, Artificial Sequence
  spacer sequence GTCN PAM
cugcccaaaacucaguggcc

SEQ ID NO: 11620 - RNA, 20 nt, Artificial Sequence
  spacer sequence GTCN PAM
ccuggccuagagagggcagg

SEQ ID NO: 11621 - RNA, 20 nt, Artificial Sequence
  spacer sequence GTCN PAM
gggcugguguccaggugggg

SEQ ID NO: 11622 - RNA, 20 nt, Artificial Sequence
  spacer sequence GTCN PAM
agguggggaaacugaggucc

SEQ ID NO: 11623 - RNA, 20 nt, Artificial Sequence
  spacer sequence GTCN PAM
agacacaagacagacucaga

SEQ ID NO: 11624 - RNA, 20 nt, Artificial Sequence
  spacer sequence GTCN PAM
ggaccucaguuuccccaccu

SEQ ID NO: 11625 - RNA, 20 nt, Artificial Sequence
  spacer sequence GTCN PAM
ugugucuggaccucaguuuc

SEQ ID NO: 11626 - RNA, 20 nt, Artificial Sequence
  spacer sequence GTCN PAM
gucuugugucuggaccucag

SEQ ID NO: 11627 - RNA, 20 nt, Artificial Sequence
  spacer sequence GTCN PAM
gagucugucuugugucugga

SEQ ID NO: 11628 - RNA, 20 nt, Artificial Sequence
  spacer sequence GTCN PAM
ucugagucugucuugugucu

SEQ ID NO: 11629 - RNA, 20 nt, Artificial Sequence
  spacer sequence GTCN PAM
cagcggccauucccaggccc

SEQ ID NO: 11630 - RNA, 20 nt, Artificial Sequence
  spacer sequence GTCN PAM
cucuaagcugggguggggcc

SEQ ID NO: 11631 - RNA, 20 nt, Artificial Sequence
  spacer sequence GTCN PAM
cgccuccaaguccucgucgg

SEQ ID NO: 11632 - RNA, 20 nt, Artificial Sequence
  spacer sequence GTCN PAM
ucgucggccggagagggucc

SEQ ID NO: 11633 - RNA, 20 nt, Artificial Sequence
  spacer sequence GTCN PAM
gccggagaggguccuaggag

SEQ ID NO: 11634 - RNA, 20 nt, Artificial Sequence
  spacer sequence GTCN PAM
uaggagcgucugcugccagg

SEQ ID NO: 11635 - RNA, 20 nt, Artificial Sequence
  spacer sequence GTCN PAM
gcugccagguaggagccgcc

SEQ ID NO: 11636 - RNA, 20 nt, Artificial Sequence
  spacer sequence GTCN PAM
agggggguuggggcggcucc

SEQ ID NO: 11637 - RNA, 20 nt, Artificial Sequence
  spacer sequence GTCN PAM
gaacaguggggaucggagcu

SEQ ID NO: 11638 - RNA, 20 nt, Artificial Sequence
  spacer sequence GTCN PAM
gaagggguggggcagagggc

SEQ ID NO: 11639 - RNA, 20 nt, Artificial Sequence
  spacer sequence GTCN PAM
cugcacuuggggccgucaca

SEQ ID NO: 11640 - RNA, 20 nt, Artificial Sequence
  spacer sequence GTCN PAM
caggggcccgcuguguccca

SEQ ID NO: 11641 - RNA, 20 nt, Artificial Sequence
  spacer sequence GTCN PAM
cagccuccgcccaccccucc

SEQ ID NO: 11642 - RNA, 20 nt, Artificial Sequence
  spacer sequence GTCN PAM
ggggccuguguuuauagaag

SEQ ID NO: 11643 - RNA, 20 nt, Artificial Sequence
  spacer sequence GTCN PAM
ggauccucuguucccagcac

SEQ ID NO: 11644 - RNA, 20 nt, Artificial Sequence
  spacer sequence GTCN PAM
cgggucuggauccucuguuc

SEQ ID NO: 11645 - RNA, 20 nt, Artificial Sequence
  spacer sequence GTCN PAM
agccuggccuuggaggauaa

SEQ ID NO: 11646 - RNA, 20 nt, Artificial Sequence
  spacer sequence GTCN PAM
agccucacagggggcagugg

SEQ ID NO: 11647 - RNA, 20 nt, Artificial Sequence
  spacer sequence GTCN PAM
uggggaggaucuguccagcc

SEQ ID NO: 11648 - RNA, 20 nt, Artificial Sequence
  spacer sequence GTCN PAM
gggcugagcaggugcgaaca

SEQ ID NO: 11649 - RNA, 20 nt, Artificial Sequence
  spacer sequence GTCN PAM
aaagccaacccguuuugcug

SEQ ID NO: 11650 - RNA, 20 nt, Artificial Sequence
  spacer sequence GTCN PAM
uggggguacuuagaaagcac

SEQ ID NO: 11651 - RNA, 20 nt, Artificial Sequence
  spacer sequence GTCN PAM
ggaguucaagaccagccugg

SEQ ID NO: 11652 - RNA, 20 nt, Artificial Sequence
  spacer sequence GTCN PAM
ugaacuccugaccucaagug

SEQ ID NO: 11653 - RNA, 20 nt, Artificial Sequence
  spacer sequence GTCN PAM
cuacuaaaaguacaaaaauu

SEQ ID NO: 11654 - RNA, 20 nt, Artificial Sequence
  spacer sequence GTCN PAM
auuuuuguacuuuuaguaga

SEQ ID NO: 11655 - RNA, 20 nt, Artificial Sequence
  spacer sequence GTCN PAM
cccaggcuagagugcagugc

SEQ ID NO: 11656 - RNA, 20 nt, Artificial Sequence
  spacer sequence GTCN PAM
caaacaaacaaaaagcaggc

SEQ ID NO: 11657 - RNA, 20 nt, Artificial Sequence
  spacer sequence GTCN PAM
agcuuuaccucccucuccaa

SEQ ID NO: 11658 - RNA, 20 nt, Artificial Sequence
  spacer sequence GTCN PAM
uguaggaauucccagcuugg

SEQ ID NO: 11659 - RNA, 20 nt, Artificial Sequence
  spacer sequence GTCN PAM
ccuguccuguaggaauuccc

SEQ ID NO: 11660 - RNA, 20 nt, Artificial Sequence
  spacer sequence GTCN PAM
cucaaaacccagccucaaag

SEQ ID NO: 11661 - RNA, 20 nt, Artificial Sequence
  spacer sequence GTCN PAM
ggugaaccugcccaucaccc

SEQ ID NO: 11662 - RNA, 20 nt, Artificial Sequence
  spacer sequence GTCN PAM
agggugaugggcagguucac

SEQ ID NO: 11663 - RNA, 20 nt, Artificial Sequence
  spacer sequence GTCN PAM
ggagugaaggagaggaagau

SEQ ID NO: 11664 - RNA, 20 nt, Artificial Sequence
  spacer sequence GTCN PAM
caaaguaaaaaacucuaacu

SEQ ID NO: 11665 - RNA, 20 nt, Artificial Sequence
  spacer sequence GTCN PAM
ugaccacacccucuccccuc

SEQ ID NO: 11666 - RNA, 20 nt, Artificial Sequence
  spacer sequence GTCN PAM
ggaccccucccucacuucua

SEQ ID NO: 11667 - RNA, 20 nt, Artificial Sequence
  spacer sequence GTCN PAM
agcugcugcugcugagggga

SEQ ID NO: 11668 - RNA, 20 nt, Artificial Sequence
  spacer sequence GTCN PAM
ggugguccagcugcugcugc

SEQ ID NO: 11669 - RNA, 20 nt, Artificial Sequence
  spacer sequence GTCN PAM
gggaacagcaggucaggugg

SEQ ID NO: 11670 - RNA, 20 nt, Artificial Sequence
  spacer sequence GTCN PAM
uggggcccagauaaggaagg

SEQ ID NO: 11671 - RNA, 20 nt, Artificial Sequence
  spacer sequence GTCN PAM
caaaaaaaaaaaaaaaaaag

SEQ ID NO: 11672 - RNA, 20 nt, Artificial Sequence
  spacer sequence GTCN PAM
cggcucucugcaaccuccac

SEQ ID NO: 11673 - RNA, 20 nt, Artificial Sequence
  spacer sequence GTCN PAM
cuacuaaaaauacaaaaauu

SEQ ID NO: 11674 - RNA, 20 nt, Artificial Sequence
  spacer sequence GTCN PAM
cgaacuccugaccuugggug

SEQ ID NO: 11675 - RNA, 20 nt, Artificial Sequence
  spacer sequence GTCN PAM
ggaguucgagaccagccugg

SEQ ID NO: 11676 - RNA, 20 nt, Artificial Sequence
  spacer sequence GTCN PAM
uuccagcacuuugggaggcu

SEQ ID NO: 11677 - RNA, 20 nt, Artificial Sequence
  spacer sequence GTCN PAM
cgaguggggccgggcggagg

SEQ ID NO: 11678 - RNA, 20 nt, Artificial Sequence
  spacer sequence GTCN PAM
gaggcccgucuuccuccaac

SEQ ID NO: 11679 - RNA, 20 nt, Artificial Sequence
  spacer sequence GTCN PAM
uccuccaaccugggaucucc

SEQ ID NO: 11680 - RNA, 20 nt, Artificial Sequence
  spacer sequence GTCN PAM
gacaccggggguuccggggg

SEQ ID NO: 11681 - RNA, 20 nt, Artificial Sequence
  spacer sequence GTCN PAM
gaccuuccagaaacaccucc

SEQ ID NO: 11682 - RNA, 20 nt, Artificial Sequence
  spacer sequence GTCN PAM
aggccugcuacccccggaac

SEQ ID NO: 11683 - RNA, 20 nt, Artificial Sequence
  spacer sequence GTCN PAM
caucccagaaccucgauguc

SEQ ID NO: 11684 - RNA, 20 nt, Artificial Sequence
  spacer sequence GTCN PAM
acguccccaucccuaacagg

SEQ ID NO: 11685 - RNA, 20 nt, Artificial Sequence
  spacer sequence GTCN PAM
ccaucccuaacagggcgaug

SEQ ID NO: 11686 - RNA, 20 nt, Artificial Sequence
  spacer sequence GTCN PAM
ccucccaccccauggugagu

SEQ ID NO: 11687 - RNA, 20 nt, Artificial Sequence
  spacer sequence GTCN PAM
ucacugagcgccuacuguau

SEQ ID NO: 11688 - RNA, 20 nt, Artificial Sequence
  spacer sequence GTCN PAM
cagcacucaguggcauacag

SEQ ID NO: 11689 - RNA, 20 nt, Artificial Sequence
  spacer sequence GTCN PAM
guggcccccaccccauguuc

SEQ ID NO: 11690 - RNA, 20 nt, Artificial Sequence
  spacer sequence GTCN PAM
gugaaauucugcacuuagga

SEQ ID NO: 11691 - RNA, 20 nt, Artificial Sequence
  spacer sequence GTCN PAM
ugccuacugucaggccaggg

SEQ ID NO: 11692 - RNA, 20 nt, Artificial Sequence
  spacer sequence GTCN PAM
ggccagggaggggcugggca

SEQ ID NO: 11693 - RNA, 20 nt, Artificial Sequence
  spacer sequence GTCN PAM
gcuccaccucugcccagccc

SEQ ID NO: 11694 - RNA, 20 nt, Artificial Sequence
  spacer sequence GTCN PAM
gcagccggcuccaggaguug

SEQ ID NO: 11695 - RNA, 20 nt, Artificial Sequence
  spacer sequence GTCN PAM
gcccagccgccucuucuucc

SEQ ID NO: 11696 - RNA, 20 nt, Artificial Sequence
  spacer sequence GTCN PAM
gggcuagcccauccccuucc

SEQ ID NO: 11697 - RNA, 20 nt, Artificial Sequence
  spacer sequence GTCN PAM
acagcccuccauucuccaga

SEQ ID NO: 11698 - RNA, 20 nt, Artificial Sequence
  spacer sequence GTCN PAM
ggagaauggagggcugugga

SEQ ID NO: 11699 - RNA, 20 nt, Artificial Sequence
  spacer sequence GTCN PAM
guguggagggaacaggccuc

SEQ ID NO: 11700 - RNA, 20 nt, Artificial Sequence
  spacer sequence GTCN PAM
cccgcacgucccuccucuca

SEQ ID NO: 11701 - RNA, 20 nt, Artificial Sequence
  spacer sequence GTCN PAM
cuccucucaguaacccuccu

SEQ ID NO: 11702 - RNA, 20 nt, Artificial Sequence
  spacer sequence GTCN PAM
cuaagcccagguuacuggug

SEQ ID NO: 11703 - RNA, 20 nt, Artificial Sequence
  spacer sequence GTCN PAM
ggagacaucugugguuguca

SEQ ID NO: 11704 - RNA, 20 nt, Artificial Sequence
  spacer sequence GTCN PAM
ccagacauugcccagggccc

SEQ ID NO: 11705 - RNA, 20 nt, Artificial Sequence
  spacer sequence GTCN PAM
cagccugggcgggggagugc

SEQ ID NO: 11706 - RNA, 20 nt, Artificial Sequence
  spacer sequence GTCN PAM
uggccuccgcccucuccaug

SEQ ID NO: 11707 - RNA, 20 nt, Artificial Sequence
  spacer sequence GTCN PAM
cugggggaaggggcgagagg

SEQ ID NO: 11708 - RNA, 20 nt, Artificial Sequence
  spacer sequence GTCN PAM
acccaccgccgggaggccgg

SEQ ID NO: 11709 - RNA, 20 nt, Artificial Sequence
  spacer sequence GTCN PAM
ucugaguuagaauccagguc

SEQ ID NO: 11710 - RNA, 20 nt, Artificial Sequence
  spacer sequence GTCN PAM
cuacaaucaucggaguuaac

SEQ ID NO: 11711 - RNA, 20 nt, Artificial Sequence
  spacer sequence GTCN PAM
cggcccaggagaaggaaguc

SEQ ID NO: 11712 - RNA, 20 nt, Artificial Sequence
  spacer sequence GTCN PAM
cugaaggcaguggccaugcu

SEQ ID NO: 11713 - RNA, 20 nt, Artificial Sequence
  spacer sequence GTCN PAM
auggggcccgguccuggaua

SEQ ID NO: 11714 - RNA, 20 nt, Artificial Sequence
  spacer sequence GTCN PAM
uggauacucggcaggaagcc

SEQ ID NO: 11715 - RNA, 20 nt, Artificial Sequence
  spacer sequence GTCN PAM
gcagaggcuccucccugccu

SEQ ID NO: 11716 - RNA, 20 nt, Artificial Sequence
  spacer sequence GTCN PAM
ggggaaugagcacugggguu

SEQ ID NO: 11717 - RNA, 20 nt, Artificial Sequence
  spacer sequence GTCN PAM
gcuucugcgcacuucuauuc

SEQ ID NO: 11718 - RNA, 20 nt, Artificial Sequence
  spacer sequence GTCN PAM
cugccucccaaccuggcucc

SEQ ID NO: 11719 - RNA, 20 nt, Artificial Sequence
  spacer sequence GTCN PAM
cguaauggcaggccccuggg

SEQ ID NO: 11720 - RNA, 20 nt, Artificial Sequence
  spacer sequence GTCN PAM
gggggcaacacagcaggagc

SEQ ID NO: 11721 - RNA, 20 nt, Artificial Sequence
  spacer sequence GTCN PAM
gucuggggucuuagaaaauc

SEQ ID NO: 11722 - RNA, 20 nt, Artificial Sequence
  spacer sequence GTCN PAM
ggggucuuagaaaauccacc

SEQ ID NO: 11723 - RNA, 20 nt, Artificial Sequence
  spacer sequence GTCN PAM
uagaaaauccaccgcgcccu

SEQ ID NO: 11724 - RNA, 20 nt, Artificial Sequence
  spacer sequence GTCN PAM
aaggaggagacggcagaggc

SEQ ID NO: 11725 - RNA, 20 nt, Artificial Sequence
  spacer sequence GTCN PAM
ccuccuucgaccccucuggu

SEQ ID NO: 11726 - RNA, 20 nt, Artificial Sequence
  spacer sequence GTCN PAM
gggcggaccacgaugcagga

SEQ ID NO: 11727 - RNA, 20 nt, Artificial Sequence
  spacer sequence GTCN PAM
gccccgaccaccacuuaccu

SEQ ID NO: 11728 - RNA, 20 nt, Artificial Sequence
  spacer sequence GTCN PAM
ugcaucgugguccgccccga

SEQ ID NO: 11729 - RNA, 20 nt, Artificial Sequence
  spacer sequence GTCN PAM
gggugguccugcaucguggu

SEQ ID NO: 11730 - RNA, 20 nt, Artificial Sequence
  spacer sequence GTCN PAM
cccgcccacccccggacgug

SEQ ID NO: 11731 - RNA, 20 nt, Artificial Sequence
  spacer sequence GTCN PAM
gggggugggcgggggaccuc

SEQ ID NO: 11732 - RNA, 20 nt, Artificial Sequence
  spacer sequence GTCN PAM
gccauccucugccgucagcg

SEQ ID NO: 11733 - RNA, 20 nt, Artificial Sequence
  spacer sequence GTCN PAM
gcggccucugcagaggccca

SEQ ID NO: 11734 - RNA, 20 nt, Artificial Sequence
  spacer sequence GTCN PAM
cgcgcccugggccucugcag

SEQ ID NO: 11735 - RNA, 20 nt, Artificial Sequence
  spacer sequence GTCN PAM
gccggggcagccgucucgcg

SEQ ID NO: 11736 - RNA, 20 nt, Artificial Sequence
  spacer sequence GTCN PAM
guguccgccggggcagccgu

SEQ ID NO: 11737 - RNA, 20 nt, Artificial Sequence
  spacer sequence GTCN PAM
ccagcggccccgagguggag

SEQ ID NO: 11738 - RNA, 20 nt, Artificial Sequence
  spacer sequence GTCN PAM
ugcugcugcugcugcugcuc

SEQ ID NO: 11739 - RNA, 20 nt, Artificial Sequence
  spacer sequence GTCN PAM
acggcccggcgcgcccguuu

SEQ ID NO: 11740 - RNA, 20 nt, Artificial Sequence
  spacer sequence GTCN PAM
gcuucgggugccacaaccac

SEQ ID NO: 11741 - RNA, 20 nt, Artificial Sequence
  spacer sequence GTCN PAM
ggcugugcuccuacggccgc

SEQ ID NO: 11742 - RNA, 20 nt, Artificial Sequence
  spacer sequence GTCN PAM
cgcgugagcggcuccgccag

SEQ ID NO: 11743 - RNA, 20 nt, Artificial Sequence
  spacer sequence GTCN PAM
ccgagcugugccaggagcug

SEQ ID NO: 11744 - RNA, 20 nt, Artificial Sequence
  spacer sequence GTCN PAM
ccggccucggcgcuugcuuc

SEQ ID NO: 11745 - RNA, 20 nt, Artificial Sequence
  spacer sequence GTCN PAM
gccagagugugguggggccu

SEQ ID NO: 11746 - RNA, 20 nt, Artificial Sequence
  spacer sequence GTCN PAM
ugagcccaaacggcccggcu

SEQ ID NO: 11747 - RNA, 20 nt, Artificial Sequence
  spacer sequence GTCN PAM
acagacaguuuauucuauau

SEQ ID NO: 11748 - RNA, 20 nt, Artificial Sequence
  spacer sequence GTCN PAM
guugacagcggcucacugcg

SEQ ID NO: 11749 - RNA, 20 nt, Artificial Sequence
  spacer sequence GTCN PAM
cucggggaggaaugcggagg

SEQ ID NO: 11750 - RNA, 20 nt, Artificial Sequence
  spacer sequence GTCN PAM
cacucggggauggagugggc

SEQ ID NO: 11751 - RNA, 20 nt, Artificial Sequence
  spacer sequence GTCN PAM
agucccacucggggauggag

SEQ ID NO: 11752 - RNA, 20 nt, Artificial Sequence
  spacer sequence GTCN PAM
cuaugcccgaggcgcaagcu

SEQ ID NO: 11753 - RNA, 20 nt, Artificial Sequence
  spacer sequence GTCN PAM
ccgggagagcagagcuugcg

SEQ ID NO: 11754 - RNA, 20 nt, Artificial Sequence
  spacer sequence GTCN PAM
cugagcaaggcggaggugug

SEQ ID NO: 11755 - RNA, 20 nt, Artificial Sequence
  spacer sequence GTCN PAM
cauggugcaggucucugagc

SEQ ID NO: 11756 - RNA, 20 nt, Artificial Sequence
  spacer sequence GTCN PAM
ugaggauggagugggguccc

SEQ ID NO: 11757 - RNA, 20 nt, Artificial Sequence
  spacer sequence GTCN PAM
gcagugaaccguccugagga

SEQ ID NO: 11758 - RNA, 20 nt, Artificial Sequence
  spacer sequence GTCN PAM
ugguaggucugcagugaacc

SEQ ID NO: 11759 - RNA, 20 nt, Artificial Sequence
  spacer sequence GTCN PAM
gcaaggagaggggguggggu

SEQ ID NO: 11760 - RNA, 20 nt, Artificial Sequence
  spacer sequence GTCN PAM
cgcccgaggcuuguacccgc

SEQ ID NO: 11761 - RNA, 20 nt, Artificial Sequence
  spacer sequence GTCN PAM
ggggcuuucaggguuucgug

SEQ ID NO: 11762 - RNA, 20 nt, Artificial Sequence
  spacer sequence GTCN PAM
cagaggaaggagguggcugg

SEQ ID NO: 11763 - RNA, 20 nt, Artificial Sequence
  spacer sequence GTCN PAM
ggcccagccagcagggguca

SEQ ID NO: 11764 - RNA, 20 nt, Artificial Sequence
  spacer sequence GTCN PAM
gaggcggcucagcugugcgg

SEQ ID NO: 11765 - RNA, 20 nt, Artificial Sequence
  spacer sequence GTCN PAM
ugagccgcacagcugagccg

SEQ ID NO: 11766 - RNA, 20 nt, Artificial Sequence
  spacer sequence GTCN PAM
gaagcugcggagucacucgg

SEQ ID NO: 11767 - RNA, 20 nt, Artificial Sequence
  spacer sequence GTCN PAM
cucggggggacacuguccug

SEQ ID NO: 11768 - RNA, 20 nt, Artificial Sequence
  spacer sequence GTCN PAM
ccccgagugacuccgcagcu

SEQ ID NO: 11769 - RNA, 20 nt, Artificial Sequence
  spacer sequence GTCN PAM
uggggggcgugggggaggcc

SEQ ID NO: 11770 - RNA, 20 nt, Artificial Sequence
  spacer sequence GTCN PAM
agccagcccgcugggcccug

SEQ ID NO: 11771 - RNA, 20 nt, Artificial Sequence
  spacer sequence GTCN PAM
ggccugagcgccucccuccu

SEQ ID NO: 11772 - RNA, 20 nt, Artificial Sequence
  spacer sequence GTCN PAM
gugaugauggcagcggucuc

SEQ ID NO: 11773 - RNA, 20 nt, Artificial Sequence
  spacer sequence GTCN PAM
cugccauccaacccagguca

SEQ ID NO: 11774 - RNA, 20 nt, Artificial Sequence
  spacer sequence GTCN PAM
ccaccggcagcugcugccac

SEQ ID NO: 11775 - RNA, 20 nt, Artificial Sequence
  spacer sequence GTCN PAM
cgggccuguggcagcggcgc

SEQ ID NO: 11776 - RNA, 20 nt, Artificial Sequence
  spacer sequence GTCN PAM
cgccuggggccagcgggagu

SEQ ID NO: 11777 - RNA, 20 nt, Artificial Sequence
  spacer sequence GTCN PAM
caaacugcugauuucaggug

SEQ ID NO: 11778 - RNA, 20 nt, Artificial Sequence
  spacer sequence GTCN PAM
cuacuaaaaagacaaaaaaa

SEQ ID NO: 11779 - RNA, 20 nt, Artificial Sequence
  spacer sequence GTCN PAM
uuuuaguagagacuggguuu

SEQ ID NO: 11780 - RNA, 20 nt, Artificial Sequence
  spacer sequence GTCN PAM
cccaggcuggagugcagugg

SEQ ID NO: 11781 - RNA, 20 nt, Artificial Sequence
  spacer sequence GTCN PAM
ugcucugucacccaggcugg

SEQ ID NO: 11782 - RNA, 20 nt, Artificial Sequence
  spacer sequence GTCN PAM
aaagcccucugcugagagag

SEQ ID NO: 11783 - RNA, 20 nt, Artificial Sequence
  spacer sequence GTCN PAM
ccacccuacacagaagacgg

SEQ ID NO: 11784 - RNA, 20 nt, Artificial Sequence
  spacer sequence GTCN PAM
ucuguguaggguggagacuc

SEQ ID NO: 11785 - RNA, 20 nt, Artificial Sequence
  spacer sequence GTCN PAM
gauggggcugggccagagcu

SEQ ID NO: 11786 - RNA, 20 nt, Artificial Sequence
  spacer sequence GTCN PAM
cgguuuggaaagggaucaag

SEQ ID NO: 11787 - RNA, 20 nt, Artificial Sequence
  spacer sequence GTCN PAM
caccaugucccgguuuggaa

SEQ ID NO: 11788 - RNA, 20 nt, Artificial Sequence
  spacer sequence GTCN PAM
ccugggcccuggucccacca

SEQ ID NO: 11789 - RNA, 20 nt, Artificial Sequence
  spacer sequence GTCN PAM
ggggaaccuggccuggcacc

SEQ ID NO: 11790 - RNA, 20 nt, Artificial Sequence
  spacer sequence GTCN PAM
uuaggcuuguggagggugug

SEQ ID NO: 11791 - RNA, 20 nt, Artificial Sequence
  spacer sequence GTCN PAM
acagaccagccuccguccac

SEQ ID NO: 11792 - RNA, 20 nt, Artificial Sequence
  spacer sequence GTCN PAM
guggacguggguuuuccuuc

SEQ ID NO: 11793 - RNA, 20 nt, Artificial Sequence
  spacer sequence GTCN PAM
acaguuucaggccccgucug

SEQ ID NO: 11794 - RNA, 20 nt, Artificial Sequence
  spacer sequence GTCN PAM
guggaccccagagccgggaa

SEQ ID NO: 11795 - RNA, 20 nt, Artificial Sequence
  spacer sequence GTCN PAM
acagacggggccugaaacug

SEQ ID NO: 11796 - RNA, 20 nt, Artificial Sequence
  spacer sequence GTCN PAM
ccucaguaggcaccugagca

SEQ ID NO: 11797 - RNA, 20 nt, Artificial Sequence
  spacer sequence GTCN PAM
cagccugcugccacuucacg

SEQ ID NO: 11798 - RNA, 20 nt, Artificial Sequence
  spacer sequence GTCN PAM
gcaggacggccaagguccag

SEQ ID NO: 11799 - RNA, 20 nt, Artificial Sequence
  spacer sequence GTCN PAM
ugcggaccuggguguggguc

SEQ ID NO: 11800 - RNA, 20 nt, Artificial Sequence
  spacer sequence GTCN PAM
agcuccacuugccgagccca

SEQ ID NO: 11801 - RNA, 20 nt, Artificial Sequence
  spacer sequence GTCN PAM
ggagcuggcugcuuuuuugg

SEQ ID NO: 11802 - RNA, 20 nt, Artificial Sequence
  spacer sequence GTCN PAM
ggcugggaacuugcccacga

SEQ ID NO: 11803 - RNA, 20 nt, Artificial Sequence
  spacer sequence GTCN PAM
gaugcuggcgggccaggcug

SEQ ID NO: 11804 - RNA, 20 nt, Artificial Sequence
  spacer sequence GTCN PAM
ccauuucgccagguggccca

SEQ ID NO: 11805 - RNA, 20 nt, Artificial Sequence
  spacer sequence GTCN PAM
ugggccaccuggcgaaaugg

SEQ ID NO: 11806 - RNA, 20 nt, Artificial Sequence
  spacer sequence GTCN PAM
cccaagcaagacuccuucuc

SEQ ID NO: 11807 - RNA, 20 nt, Artificial Sequence
  spacer sequence GTCN PAM
ugcuugggugacaagagggg

SEQ ID NO: 11808 - RNA, 20 nt, Artificial Sequence
  spacer sequence GTCN PAM
ggccgaugccuguccugcac

SEQ ID NO: 11809 - RNA, 20 nt, Artificial Sequence
  spacer sequence GTCN PAM
ugcacggcugagaccucugc

SEQ ID NO: 11810 - RNA, 20 nt, Artificial Sequence
  spacer sequence GTCN PAM
cagccgugcaggacaggcau

SEQ ID NO: 11811 - RNA, 20 nt, Artificial Sequence
  spacer sequence GTCN PAM
cccucccgcccuccucagau

SEQ ID NO: 11812 - RNA, 20 nt, Artificial Sequence
  spacer sequence GTCN PAM
ugggcucugucccccucccg

SEQ ID NO: 11813 - RNA, 20 nt, Artificial Sequence
  spacer sequence GTCN PAM
cccgugccuccccuaugagg

SEQ ID NO: 11814 - RNA, 20 nt, Artificial Sequence
  spacer sequence GTCN PAM
gucgcccgugccuccccuau

SEQ ID NO: 11815 - RNA, 20 nt, Artificial Sequence
  spacer sequence GTCN PAM
ccacucccuuccugcuucag

SEQ ID NO: 11816 - RNA, 20 nt, Artificial Sequence
  spacer sequence GTCN PAM
ccggcagcagcguaccaccc

SEQ ID NO: 11817 - RNA, 20 nt, Artificial Sequence
  spacer sequence GTCN PAM
ccucgcuaggguuagcggca

SEQ ID NO: 11818 - RNA, 20 nt, Artificial Sequence
  spacer sequence GTCN PAM
cauuccccugaggcucagga

SEQ ID NO: 11819 - RNA, 20 nt, Artificial Sequence
  spacer sequence GTCN PAM
acuuccaggacagggguugg

SEQ ID NO: 11820 - RNA, 20 nt, Artificial Sequence
  spacer sequence GTCN PAM
acuccccacuccccucucuc

SEQ ID NO: 11821 - RNA, 20 nt, Artificial Sequence
  spacer sequence GTCN PAM
uggaagucgacuccccacuc

SEQ ID NO: 11822 - RNA, 20 nt, Artificial Sequence
  spacer sequence GTCN PAM
gagggagaccugcgucaggc

SEQ ID NO: 11823 - RNA, 20 nt, Artificial Sequence
  spacer sequence GTCN PAM
cccucggaccaaccccuguc

SEQ ID NO: 11824 - RNA, 20 nt, Artificial Sequence
  spacer sequence GTCN PAM
ggcuggguucugggccagca

SEQ ID NO: 11825 - RNA, 20 nt, Artificial Sequence
  spacer sequence GTCN PAM
caggcggcacagucaggggu

SEQ ID NO: 11826 - RNA, 20 nt, Artificial Sequence
  spacer sequence GTCN PAM
ggggucaaagggcgggaggu

SEQ ID NO: 11827 - RNA, 20 nt, Artificial Sequence
  spacer sequence GTCN PAM
aagggcgggaggugcuaccu

SEQ ID NO: 11828 - RNA, 20 nt, Artificial Sequence
  spacer sequence GTCN PAM
uggccugcgagguagcaccu

SEQ ID NO: 11829 - RNA, 20 nt, Artificial Sequence
  spacer sequence GTCN PAM
gguccuggccugcgagguag

SEQ ID NO: 11830 - RNA, 20 nt, Artificial Sequence
  spacer sequence GTCN PAM
ccaccuacccaggcuuggag

SEQ ID NO: 11831 - RNA, 20 nt, Artificial Sequence
  spacer sequence GTCN PAM
ccggggacaggaugggcccu

SEQ ID NO: 11832 - RNA, 20 nt, Artificial Sequence
  spacer sequence GTCN PAM
ccggcgaccgccuuucccag

SEQ ID NO: 11833 - RNA, 20 nt, Artificial Sequence
  spacer sequence GTCN PAM
gcucccuccagggcccaucc

SEQ ID NO: 11834 - RNA, 20 nt, Artificial Sequence
  spacer sequence GTCN PAM
acccgggaaggccggauccc

SEQ ID NO: 11835 - RNA, 20 nt, Artificial Sequence
  spacer sequence GTCN PAM
ccgggcgggauggggucacg

SEQ ID NO: 11836 - RNA, 20 nt, Artificial Sequence
  spacer sequence GTCN PAM
cgagacggugucccuggcca

SEQ ID NO: 11837 - RNA, 20 nt, Artificial Sequence
  spacer sequence GTCN PAM
cgugaccccaucccgcccgg

SEQ ID NO: 11838 - RNA, 20 nt, Artificial Sequence
  spacer sequence GTCN PAM
cuggccaaucccagggucag

SEQ ID NO: 11839 - RNA, 20 nt, Artificial Sequence
  spacer sequence GTCN PAM
gaggucgcgagggagagccc

SEQ ID NO: 11840 - RNA, 20 nt, Artificial Sequence
  spacer sequence GTCN PAM
cgagggagagcccuaaucgg

SEQ ID NO: 11841 - RNA, 20 nt, Artificial Sequence
  spacer sequence GTCN PAM
ccagcggggccaggggucgc

SEQ ID NO: 11842 - RNA, 20 nt, Artificial Sequence
  spacer sequence GTCN PAM
cggucggagguagcagacuu

SEQ ID NO: 11843 - RNA, 20 nt, Artificial Sequence
  spacer sequence GTCN PAM
gagguagcagacuugggggu

SEQ ID NO: 11844 - RNA, 20 nt, Artificial Sequence
  spacer sequence GTCN PAM
gcuaccuccgaccgcgaccc

SEQ ID NO: 11845 - RNA, 20 nt, Artificial Sequence
  spacer sequence GTCN PAM
ggacagccgcuggggucaag

SEQ ID NO: 11846 - RNA, 20 nt, Artificial Sequence
  spacer sequence GTCN PAM
cgacccccaagucugcuacc

SEQ ID NO: 11847 - RNA, 20 nt, Artificial Sequence
  spacer sequence GTCN PAM
agggucgggggucggggccg

SEQ ID NO: 11848 - RNA, 20 nt, Artificial Sequence
  spacer sequence GTCN PAM
ggggucggggccgcggucac

SEQ ID NO: 11849 - RNA, 20 nt, Artificial Sequence
  spacer sequence GTCN PAM
gggccgcggucaccuugagc

SEQ ID NO: 11850 - RNA, 20 nt, Artificial Sequence
  spacer sequence GTCN PAM
ccuugagcagcacgaagaac

SEQ ID NO: 11851 - RNA, 20 nt, Artificial Sequence
  spacer sequence GTCN PAM
cuucgaguucuucgugcugc

SEQ ID NO: 11852 - RNA, 20 nt, Artificial Sequence
  spacer sequence GTCN PAM
ccuauucgcggcucuucccg

SEQ ID NO: 11853 - RNA, 20 nt, Artificial Sequence
  spacer sequence GTCN PAM
cgcacguugaugaggggguu

SEQ ID NO: 11854 - RNA, 20 nt, Artificial Sequence
  spacer sequence GTCN PAM
gagcacguggagcccgcagc

SEQ ID NO: 11855 - RNA, 20 nt, Artificial Sequence
  spacer sequence GTCN PAM
cgcccuaacgacccgcaagu

SEQ ID NO: 11856 - RNA, 20 nt, Artificial Sequence
  spacer sequence GTCN PAM
uuagggcgcgacgcugggag

SEQ ID NO: 11857 - RNA, 20 nt, Artificial Sequence
  spacer sequence GTCN PAM
gagggcgccucccggccgcc

SEQ ID NO: 11858 - RNA, 20 nt, Artificial Sequence
  spacer sequence GTCN PAM
ggcugcggcgcugcugacgc

SEQ ID NO: 11859 - RNA, 20 nt, Artificial Sequence
  spacer sequence GTCN PAM
gcagcgccgcagccggacga

SEQ ID NO: 11860 - RNA, 20 nt, Artificial Sequence
  spacer sequence GTCN PAM
ccacgccgggcaagagcggc

SEQ ID NO: 11861 - RNA, 20 nt, Artificial Sequence
  spacer sequence GTCN PAM
ucgaucacguaaaaucccau

SEQ ID NO: 11862 - RNA, 20 nt, Artificial Sequence
  spacer sequence GTCN PAM
guuucauauuuagcauaauu

SEQ ID NO: 11863 - RNA, 20 nt, Artificial Sequence
  spacer sequence GTCN PAM
caccuauuuuaagcccuuca

SEQ ID NO: 11864 - RNA, 20 nt, Artificial Sequence
  spacer sequence GTCN PAM
ugcucgcuucggcagcacau

SEQ ID NO: 11865 - RNA, 20 nt, Artificial Sequence
  spacer sequence GTCN PAM
uccuugcgcaggggccaugc

SEQ ID NO: 11866 - RNA, 20 nt, Artificial Sequence
  spacer sequence GTCN PAM
acagcucgucaccucguuug

SEQ ID NO: 11867 - RNA, 20 nt, Artificial Sequence
  spacer sequence GTCN PAM
ccucguuuggcuucucuugc

SEQ ID NO: 11868 - RNA, 20 nt, Artificial Sequence
  spacer sequence GTCN PAM
uggcaggauccgggcaagag

SEQ ID NO: 11869 - RNA, 20 nt, Artificial Sequence
  spacer sequence GTCN PAM
cagggccaguaacgucauag

SEQ ID NO: 11870 - RNA, 20 nt, Artificial Sequence
  spacer sequence GTCN PAM
uagucuucccguguccaucu

SEQ ID NO: 11871 - RNA, 20 nt, Artificial Sequence
  spacer sequence GTCN PAM
ucccguguccaucuccugug

SEQ ID NO: 11872 - RNA, 20 nt, Artificial Sequence
  spacer sequence GTCN PAM
aucuccuguggcgccacuaa

SEQ ID NO: 11873 - RNA, 20 nt, Artificial Sequence
  spacer sequence GTCN PAM
cuacuccugcguggcgcugu

SEQ ID NO: 11874 - RNA, 20 nt, Artificial Sequence
  spacer sequence GTCN PAM
cccaggcuggagcgcagaag

SEQ ID NO: 11875 - RNA, 20 nt, Artificial Sequence
  spacer sequence GTCN PAM
cuacuaaaaauauaaaauua

SEQ ID NO: 11876 - RNA, 20 nt, Artificial Sequence
  spacer sequence GTCN PAM
ggcuggucucgaacuccuaa

SEQ ID NO: 11877 - RNA, 20 nt, Artificial Sequence
  spacer sequence GTCN PAM
cgaacuccuaacuuuaggug

SEQ ID NO: 11878 - RNA, 20 nt, Artificial Sequence
  spacer sequence GTCN PAM
caccuguaaucccagcacuu

SEQ ID NO: 11879 - RNA, 20 nt, Artificial Sequence
  spacer sequence GTCN PAM
caaaaaaaaaaaacaacaca

SEQ ID NO: 11880 - RNA, 20 nt, Artificial Sequence
  spacer sequence GTCN PAM
cacucugucgcccaggcugg

SEQ ID NO: 11881 - RNA, 20 nt, Artificial Sequence
  spacer sequence GTCN PAM
cccaggcuggagugcagugg

SEQ ID NO: 11882 - RNA, 20 nt, Artificial Sequence
  spacer sequence GTCN PAM
ccacuaaaaauacaaaaaaa

SEQ ID NO: 11883 - RNA, 20 nt, Artificial Sequence
  spacer sequence GTCN PAM
ggaguucaauaccaaccugg

SEQ ID NO: 11884 - RNA, 20 nt, Artificial Sequence
  spacer sequence GTCN PAM
gccucccaaagugcuggagu

SEQ ID NO: 11885 - RNA, 20 nt, Artificial Sequence
  spacer sequence GTCN PAM
ucaguuaacuuuuaaaaaca

SEQ ID NO: 11886 - RNA, 20 nt, Artificial Sequence
  spacer sequence GTCN PAM
ucccaccucagccucccaag

SEQ ID NO: 11887 - RNA, 20 nt, Artificial Sequence
  spacer sequence GTCN PAM
uccaaccuggagcgcaggga

SEQ ID NO: 11888 - RNA, 20 nt, Artificial Sequence
  spacer sequence GTCN PAM
cacuuagucauccaaccugg

SEQ ID NO: 11889 - RNA, 20 nt, Artificial Sequence
  spacer sequence GTCN PAM
cuaaaaaauaaaguguaaaa

SEQ ID NO: 11890 - RNA, 20 nt, Artificial Sequence
  spacer sequence GTCN PAM
guauuuuuagcuuuuuuggg

SEQ ID NO: 11891 - RNA, 20 nt, Artificial Sequence
  spacer sequence GTCN PAM
gcagacacuggaauuugaau

SEQ ID NO: 11892 - RNA, 20 nt, Artificial Sequence
  spacer sequence GTCN PAM
gcagacaaagcuuuauuggc

SEQ ID NO: 11893 - RNA, 20 nt, Artificial Sequence
  spacer sequence GTCN PAM
agaacacagcuuuccaagag

SEQ ID NO: 11894 - RNA, 20 nt, Artificial Sequence
  spacer sequence GTCN PAM
ggcgcgguggcucaugccug

SEQ ID NO: 11895 - RNA, 20 nt, Artificial Sequence
  spacer sequence GTCN PAM
ugaacaccugggcugaaaug

SEQ ID NO: 11896 - RNA, 20 nt, Artificial Sequence
  spacer sequence GTCN PAM
cuacgaaaaauaccaaaaau

SEQ ID NO: 11897 - RNA, 20 nt, Artificial Sequence
  spacer sequence GTCN PAM
cagcuacuugggaggcugag

SEQ ID NO: 11898 - RNA, 20 nt, Artificial Sequence
  spacer sequence GTCN PAM
ugcucuguugcccaggcugg

SEQ ID NO: 11899 - RNA, 20 nt, Artificial Sequence
  spacer sequence GTCN PAM
gccaccgcgcccggccacuu

SEQ ID NO: 11900 - RNA, 20 nt, Artificial Sequence
  spacer sequence GTCN PAM
ggagaucgagaccacccugg

SEQ ID NO: 11901 - RNA, 20 nt, Artificial Sequence
  spacer sequence GTCN PAM
cgaucuccugaccucgugau

SEQ ID NO: 11902 - RNA, 20 nt, Artificial Sequence
  spacer sequence GTCN PAM
cuacuaaaaauacaaaaaua

SEQ ID NO: 11903 - RNA, 20 nt, Artificial Sequence
  spacer sequence GTCN PAM
cagcugcucgggaggcugag

SEQ ID NO: 11904 - RNA, 20 nt, Artificial Sequence
  spacer sequence GTCN PAM
cccaggcuggggugcagugg

SEQ ID NO: 11905 - RNA, 20 nt, Artificial Sequence
  spacer sequence GTCN PAM
cgcucugucacccaggcugg

SEQ ID NO: 11906 - RNA, 20 nt, Artificial Sequence
  spacer sequence GTCN PAM
ucagaaucugguguguuucc

SEQ ID NO: 11907 - RNA, 20 nt, Artificial Sequence
  spacer sequence GTCN PAM
ggauucaagugauccucccg

SEQ ID NO: 11908 - RNA, 20 nt, Artificial Sequence
  spacer sequence GTCN PAM
cccuauguugcccagucugg

SEQ ID NO: 11909 - RNA, 20 nt, Artificial Sequence
  spacer sequence GTCN PAM
cagauacucaggaggcugag

SEQ ID NO: 11910 - RNA, 20 nt, Artificial Sequence
  spacer sequence GTCN PAM
aggaggucgaggcugcagug

SEQ ID NO: 11911 - RNA, 20 nt, Artificial Sequence
  spacer sequence GTCN PAM
aggcugcagugaacuauauu

SEQ ID NO: 11912 - RNA, 20 nt, Artificial Sequence
  spacer sequence GTCN PAM
cccaggcuggagugcagugg

SEQ ID NO: 11913 - RNA, 20 nt, Artificial Sequence
  spacer sequence GTCN PAM
ugcucugucacccaggcugg

SEQ ID NO: 11914 - RNA, 20 nt, Artificial Sequence
  spacer sequence GTCN PAM
aaaacggaaaucaugucagu

SEQ ID NO: 11915 - RNA, 20 nt, Artificial Sequence
  spacer sequence GTCN PAM
guuuuuaauuuuuaacugaa

SEQ ID NO: 11916 - RNA, 20 nt, Artificial Sequence
  spacer sequence GTCN PAM
gcugccguggccgggcuauu

SEQ ID NO: 11917 - RNA, 20 nt, Artificial Sequence
  spacer sequence GTCN PAM
ggaguucaagaccagccugg

SEQ ID NO: 11918 - RNA, 20 nt, Artificial Sequence
  spacer sequence GTCN PAM
ugaacuccugaccucaagug

SEQ ID NO: 11919 - RNA, 20 nt, Artificial Sequence
  spacer sequence GTCN PAM
acggucccagcuacucggag

SEQ ID NO: 11920 - RNA, 20 nt, Artificial Sequence
  spacer sequence GTCN PAM
cagcuacucggagucccagc

SEQ ID NO: 11921 - RNA, 20 nt, Artificial Sequence
  spacer sequence GTCN PAM
cagcuacauauauaugugua

SEQ ID NO: 11922 - RNA, 20 nt, Artificial Sequence
  spacer sequence GTCN PAM
ucaaaaaauggaaucuagug

SEQ ID NO: 11923 - RNA, 20 nt, Artificial Sequence
  spacer sequence GTCN PAM
ggagaucgagaccauccugg

SEQ ID NO: 11924 - RNA, 20 nt, Artificial Sequence
  spacer sequence GTCN PAM
cgaucuccugaccucgugau

SEQ ID NO: 11925 - RNA, 20 nt, Artificial Sequence
  spacer sequence GTCN PAM
cuacuaaaaauacaaaaauu

SEQ ID NO: 11926 - RNA, 20 nt, Artificial Sequence
  spacer sequence GTCN PAM
cagcugcuggggaggcugag

SEQ ID NO: 11927 - RNA, 20 nt, Artificial Sequence
  spacer sequence GTCN PAM
cccaggcuggagugcagugg

SEQ ID NO: 11928 - RNA, 20 nt, Artificial Sequence
  spacer sequence GTCN PAM
cgcucugucacccaggcugg

SEQ ID NO: 11929 - RNA, 20 nt, Artificial Sequence
  spacer sequence GTCN PAM
caaaaaauaauaauaaaaua

SEQ ID NO: 11930 - RNA, 20 nt, Artificial Sequence
  spacer sequence GTCN PAM
gcacuggucuaaaaugacau

SEQ ID NO: 11931 - RNA, 20 nt, Artificial Sequence
  spacer sequence GTCN PAM
aaaaugacaugggucggcca

SEQ ID NO: 11932 - RNA, 20 nt, Artificial Sequence
  spacer sequence GTCN PAM
uuuuagaccagugcugacca

SEQ ID NO: 11933 - RNA, 20 nt, Artificial Sequence
  spacer sequence GTCN PAM
gccaggugcagugguucaag

SEQ ID NO: 11934 - RNA, 20 nt, Artificial Sequence
  spacer sequence GTCN PAM
gggguucgagaccagccugg

SEQ ID NO: 11935 - RNA, 20 nt, Artificial Sequence
  spacer sequence GTCN PAM
cgaaccccugaccucaggug

SEQ ID NO: 11936 - RNA, 20 nt, Artificial Sequence
  spacer sequence GTCN PAM
aacuccuauugaugcuucaa

SEQ ID NO: 11937 - RNA, 20 nt, Artificial Sequence
  spacer sequence GTCN PAM
gaggaaucaaggaaagcugc

SEQ ID NO: 11938 - RNA, 20 nt, Artificial Sequence
  spacer sequence GTCN PAM
uguacuugcucauauaggga

SEQ ID NO: 11939 - RNA, 20 nt, Artificial Sequence
  spacer sequence GTCN PAM
gugccagcucugucuuccug

SEQ ID NO: 11940 - RNA, 20 nt, Artificial Sequence
  spacer sequence GTCN PAM
uccugggcaugggcugggcc

SEQ ID NO: 11941 - RNA, 20 nt, Artificial Sequence
  spacer sequence GTCN PAM
ccugagagccagcacugccu

SEQ ID NO: 11942 - RNA, 20 nt, Artificial Sequence
  spacer sequence GTCN PAM
ccugccaggcagugcuggcu

SEQ ID NO: 11943 - RNA, 20 nt, Artificial Sequence
  spacer sequence GTCN PAM
cggagacuuuuuaauaauuu

SEQ ID NO: 11944 - RNA, 20 nt, Artificial Sequence
  spacer sequence GTCN PAM
ccgggacagucuccugccag

SEQ ID NO: 11945 - RNA, 20 nt, Artificial Sequence
  spacer sequence GTCN PAM
uaaaaaaaaaaacaaaaaaa

SEQ ID NO: 11946 - RNA, 20 nt, Artificial Sequence
  spacer sequence GTCN PAM
ugcucugucgcccaggcugg

SEQ ID NO: 11947 - RNA, 20 nt, Artificial Sequence
  spacer sequence GTCN PAM
cccaggcuggagugcagugg

SEQ ID NO: 11948 - RNA, 20 nt, Artificial Sequence
  spacer sequence GTCN PAM
agaucgcgccacugcacucc

SEQ ID NO: 11949 - RNA, 20 nt, Artificial Sequence
  spacer sequence GTCN PAM
cuacuaaaaauacaaaaauu

SEQ ID NO: 11950 - RNA, 20 nt, Artificial Sequence
  spacer sequence GTCN PAM
ggaacuccugaccucaagug

SEQ ID NO: 11951 - RNA, 20 nt, Artificial Sequence
  spacer sequence GTCN PAM
ggaguuccagaccagcuugg

SEQ ID NO: 11952 - RNA, 20 nt, Artificial Sequence
  spacer sequence GTCN PAM
uguugugaugauaacucacu

SEQ ID NO: 11953 - RNA, 20 nt, Artificial Sequence
  spacer sequence GTCN PAM
aagcugcagugaguuaucau

SEQ ID NO: 11954 - RNA, 20 nt, Artificial Sequence
  spacer sequence GTCN PAM
aaaagagaauaggauucuua

SEQ ID NO: 11955 - RNA, 20 nt, Artificial Sequence
  spacer sequence GTCN PAM
guccaaaagagaauaggauu

SEQ ID NO: 11956 - RNA, 20 nt, Artificial Sequence
  spacer sequence GTCN PAM
accucccagcuaguagaguu

SEQ ID NO: 11957 - RNA, 20 nt, Artificial Sequence
  spacer sequence GTCN PAM
aaccccuucccagggaacuc

SEQ ID NO: 11958 - RNA, 20 nt, Artificial Sequence
  spacer sequence GTCN PAM
gagauggagaaagagugaga

SEQ ID NO: 11959 - RNA, 20 nt, Artificial Sequence
  spacer sequence GTCN PAM
cggcggccucggccccuccc

SEQ ID NO: 11960 - RNA, 20 nt, Artificial Sequence
  spacer sequence GTCN PAM
ccagaggccuggaggggccc

SEQ ID NO: 11961 - RNA, 20 nt, Artificial Sequence
  spacer sequence GTCN PAM
gggggcgaccgagggggcuc

SEQ ID NO: 11962 - RNA, 20 nt, Artificial Sequence
  spacer sequence GTCN PAM
cccccggacccccgccuggg

SEQ ID NO: 11963 - RNA, 20 nt, Artificial Sequence
  spacer sequence GTCN PAM
gcggccgcaggaauucggcg

SEQ ID NO: 11964 - RNA, 20 nt, Artificial Sequence
  spacer sequence GTCN PAM
uuauaaggccuggaggcgcc

SEQ ID NO: 11965 - RNA, 20 nt, Artificial Sequence
  spacer sequence GTCN PAM
caaccccgcgccagcccggc

SEQ ID NO: 11966 - RNA, 20 nt, Artificial Sequence
  spacer sequence GTCN PAM
cgucccgucccguccugugc

SEQ ID NO: 11967 - RNA, 20 nt, Artificial Sequence
  spacer sequence GTCN PAM
cgucccguccugugcggccc

SEQ ID NO: 11968 - RNA, 20 nt, Artificial Sequence
  spacer sequence GTCN PAM
cguccugugcggccccgucc

SEQ ID NO: 11969 - RNA, 20 nt, Artificial Sequence
  spacer sequence GTCN PAM
ugugcggccccgucccgccg

SEQ ID NO: 11970 - RNA, 20 nt, Artificial Sequence
  spacer sequence GTCN PAM
cgccgcccgcccgccagcca

SEQ ID NO: 11971 - RNA, 20 nt, Artificial Sequence
  spacer sequence GTCN PAM
gccgaggucaagaaccgggu

SEQ ID NO: 11972 - RNA, 20 nt, Artificial Sequence
  spacer sequence GTCN PAM
agaaccgggugagugagggg

SEQ ID NO: 11973 - RNA, 20 nt, Artificial Sequence
  spacer sequence GTCN PAM
ccccgacagcgcggccgucg

SEQ ID NO: 11974 - RNA, 20 nt, Artificial Sequence
  spacer sequence GTCN PAM
gggggacaaggggcgccccu

SEQ ID NO: 11975 - RNA, 20 nt, Artificial Sequence
  spacer sequence GTCN PAM
cacgcuccgaccggugcagg

SEQ ID NO: 11976 - RNA, 20 nt, Artificial Sequence
  spacer sequence GTCN PAM
gagcgugcgacggccgcgcu

SEQ ID NO: 11977 - RNA, 20 nt, Artificial Sequence
  spacer sequence GTCN PAM
ccaagcucccugcccgggag

SEQ ID NO: 11978 - RNA, 20 nt, Artificial Sequence
  spacer sequence GTCN PAM
gccccgggucuccaagcucc

SEQ ID NO: 11979 - RNA, 20 nt, Artificial Sequence
  spacer sequence GTCN PAM
gggagaacaagggcccgucc

SEQ ID NO: 11980 - RNA, 20 nt, Artificial Sequence
  spacer sequence GTCN PAM
gcgggcacccccugaggcuc

SEQ ID NO: 11981 - RNA, 20 nt, Artificial Sequence
  spacer sequence GTCN PAM
gagaucugggggacgaguga

SEQ ID NO: 11982 - RNA, 20 nt, Artificial Sequence
  spacer sequence GTCN PAM
cccagaucucagaccugggu

SEQ ID NO: 11983 - RNA, 20 nt, Artificial Sequence
  spacer sequence GTCN PAM
cucgucccccagaucucaga

SEQ ID NO: 11984 - RNA, 20 nt, Artificial Sequence
  spacer sequence GTCN PAM
gacuucguccccucgccaug

SEQ ID NO: 11985 - RNA, 20 nt, Artificial Sequence
  spacer sequence GTCN PAM
gacccaacuaccccuagaug

SEQ ID NO: 11986 - RNA, 20 nt, Artificial Sequence
  spacer sequence GTCN PAM
ccucgccauggccccaggac

SEQ ID NO: 11987 - RNA, 20 nt, Artificial Sequence
  spacer sequence GTCN PAM
uggggccauggcgaggggac

SEQ ID NO: 11988 - RNA, 20 nt, Artificial Sequence
  spacer sequence GTCN PAM
guucaagguccgacaacgcu

SEQ ID NO: 11989 - RNA, 20 nt, Artificial Sequence
  spacer sequence GTCN PAM
gacaacgcucugggggucug

SEQ ID NO: 11990 - RNA, 20 nt, Artificial Sequence
  spacer sequence GTCN PAM
gaccuugaacggaccuucuc

SEQ ID NO: 11991 - RNA, 20 nt, Artificial Sequence
  spacer sequence GTCN PAM
gggggggaccccagcaaccc

SEQ ID NO: 11992 - RNA, 20 nt, Artificial Sequence
  spacer sequence GTCN PAM
cccccagacccccagagcgu

SEQ ID NO: 11993 - RNA, 20 nt, Artificial Sequence
  spacer sequence GTCN PAM
ucuccuggccacacuucugc

SEQ ID NO: 11994 - RNA, 20 nt, Artificial Sequence
  spacer sequence GTCN PAM
cagaggccaggaaauuccug

SEQ ID NO: 11995 - RNA, 20 nt, Artificial Sequence
  spacer sequence GTCN PAM
uggggggaggggcgguagcc

SEQ ID NO: 11996 - RNA, 20 nt, Artificial Sequence
  spacer sequence GTCN PAM
uugucucccaucugacuaau

SEQ ID NO: 11997 - RNA, 20 nt, Artificial Sequence
  spacer sequence GTCN PAM
cccaucugacuaauuuaaac

SEQ ID NO: 11998 - RNA, 20 nt, Artificial Sequence
  spacer sequence GTCN PAM
gaugggagacaaagaccgug

SEQ ID NO: 11999 - RNA, 20 nt, Artificial Sequence
  spacer sequence GTCN PAM
cgaacucgcugggcucaagc

SEQ ID NO: 12000 - RNA, 20 nt, Artificial Sequence
  spacer sequence GTCN PAM
gggcaacauggcgaaacccc

SEQ ID NO: 12001 - RNA, 20 nt, Artificial Sequence
  spacer sequence GTCN PAM
ccccuagcccuggcuuguuu

SEQ ID NO: 12002 - RNA, 20 nt, Artificial Sequence
  spacer sequence GTCN PAM
ucucugagcuagaaccacaa

SEQ ID NO: 12003 - RNA, 20 nt, Artificial Sequence
  spacer sequence GTCN PAM
gguccucucugagcuagaac

SEQ ID NO: 12004 - RNA, 20 nt, Artificial Sequence
  spacer sequence GTCN PAM
cacagcaggguccuggacag

SEQ ID NO: 12005 - RNA, 20 nt, Artificial Sequence
  spacer sequence GTCN PAM
uggacaggauucccagggaa

SEQ ID NO: 12006 - RNA, 20 nt, Artificial Sequence
  spacer sequence GTCN PAM
aggacccugcugugugaccc

SEQ ID NO: 12007 - RNA, 20 nt, Artificial Sequence
  spacer sequence GTCN PAM
cgcaucacaacccccgcccc

SEQ ID NO: 12008 - RNA, 20 nt, Artificial Sequence
  spacer sequence GTCN PAM
gugggucucgcaucacaacc

SEQ ID NO: 12009 - RNA, 20 nt, Artificial Sequence
  spacer sequence GTCN PAM
uguccgugggucucgcauca

SEQ ID NO: 12010 - RNA, 20 nt, Artificial Sequence
  spacer sequence GTCN PAM
cgguccuguccgugggucuc

SEQ ID NO: 12011 - RNA, 20 nt, Artificial Sequence
  spacer sequence GTCN PAM
ggucccgguccuguccgugg

SEQ ID NO: 12012 - RNA, 20 nt, Artificial Sequence
  spacer sequence GTCN PAM
uggagggucaggucccgguc

SEQ ID NO: 12013 - RNA, 20 nt, Artificial Sequence
  spacer sequence GTCN PAM
uccccgcccacccccucccc

SEQ ID NO: 12014 - RNA, 20 nt, Artificial Sequence
  spacer sequence GTCN PAM
ccgcccacccccucccccga

SEQ ID NO: 12015 - RNA, 20 nt, Artificial Sequence
  spacer sequence GTCN PAM
ggggagggggugggcgggga

SEQ ID NO: 12016 - RNA, 20 nt, Artificial Sequence
  spacer sequence GTCN PAM
uuacagcugacuucugcagg

SEQ ID NO: 12017 - RNA, 20 nt, Artificial Sequence
  spacer sequence GTCN PAM
gcuguaaggacaccuuccca

SEQ ID NO: 12018 - RNA, 20 nt, Artificial Sequence
  spacer sequence GTCN PAM
gccggcccuggagugccgcc

SEQ ID NO: 12019 - RNA, 20 nt, Artificial Sequence
  spacer sequence GTCN PAM
gaaggcuugcaggggcucac

SEQ ID NO: 12020 - RNA, 20 nt, Artificial Sequence
  spacer sequence GTCN PAM
aggccugagccagggucccc

SEQ ID NO: 12021 - RNA, 20 nt, Artificial Sequence
  spacer sequence GTCN PAM
ccagcccggggcucacgacu

SEQ ID NO: 12022 - RNA, 20 nt, Artificial Sequence
  spacer sequence GTCN PAM
ugagccccgggcuggggacc

SEQ ID NO: 12023 - RNA, 20 nt, Artificial Sequence
  spacer sequence GTCN PAM
acagggacccagagacgucg

SEQ ID NO: 12024 - RNA, 20 nt, Artificial Sequence
  spacer sequence GTCN PAM
cuguggacaccggugcccuu

SEQ ID NO: 12025 - RNA, 20 nt, Artificial Sequence
  spacer sequence GTCN PAM
cugggucccuguggacaccg

SEQ ID NO: 12026 - RNA, 20 nt, Artificial Sequence
  spacer sequence GTCN PAM
uuccagcugcccagggccac

SEQ ID NO: 12027 - RNA, 20 nt, Artificial Sequence
  spacer sequence GTCN PAM
cuugugggcuguguggcccu

SEQ ID NO: 12028 - RNA, 20 nt, Artificial Sequence
  spacer sequence GTCN PAM
uggcccugucacuugugggc

SEQ ID NO: 12029 - RNA, 20 nt, Artificial Sequence
  spacer sequence GTCN PAM
ccggaagccgccccacccuc

SEQ ID NO: 12030 - RNA, 20 nt, Artificial Sequence
  spacer sequence GTCN PAM
ucacccccgccagggcaggu

SEQ ID NO: 12031 - RNA, 20 nt, Artificial Sequence
  spacer sequence GTCN PAM
guccguuuggagggugggcg

SEQ ID NO: 12032 - RNA, 20 nt, Artificial Sequence
  spacer sequence GTCN PAM
guuuggagggugggcgaggc

SEQ ID NO: 12033 - RNA, 20 nt, Artificial Sequence
  spacer sequence GTCN PAM
gccagcuugccagggucacg

SEQ ID NO: 12034 - RNA, 20 nt, Artificial Sequence
  spacer sequence GTCN PAM
cggaagggucgccucccaau

SEQ ID NO: 12035 - RNA, 20 nt, Artificial Sequence
  spacer sequence GTCN PAM
ccucccaauuagaaaccagc

SEQ ID NO: 12036 - RNA, 20 nt, Artificial Sequence
  spacer sequence GTCN PAM
cuggcuguuucaagcagccg

SEQ ID NO: 12037 - RNA, 20 nt, Artificial Sequence
  spacer sequence GTCN PAM
acugagccacggggaagcgg

SEQ ID NO: 12038 - RNA, 20 nt, Artificial Sequence
  spacer sequence GTCN PAM
agccgggagucaacugagcc

SEQ ID NO: 12039 - RNA, 20 nt, Artificial Sequence
  spacer sequence GTCN PAM
gcggccuugcaucccggcuu

SEQ ID NO: 12040 - RNA, 20 nt, Artificial Sequence
  spacer sequence GTCN PAM
ggacccgcugggaacagcug

SEQ ID NO: 12041 - RNA, 20 nt, Artificial Sequence
  spacer sequence GTCN PAM
ggacccccaagccgggaugc

SEQ ID NO: 12042 - RNA, 20 nt, Artificial Sequence
  spacer sequence GTCN PAM
ucccccacccccgccccccc

SEQ ID NO: 12043 - RNA, 20 nt, Artificial Sequence
  spacer sequence GTCN PAM
ccuggccccacccccagccg

SEQ ID NO: 12044 - RNA, 20 nt, Artificial Sequence
  spacer sequence GTCN PAM
cugccggcucaggggcccag

SEQ ID NO: 12045 - RNA, 20 nt, Artificial Sequence
  spacer sequence GTCN PAM
ggggacccuaacccaaauaa

SEQ ID NO: 12046 - RNA, 20 nt, Artificial Sequence
  spacer sequence GTCN PAM
ccugaccuggcaccugccug

SEQ ID NO: 12047 - RNA, 20 nt, Artificial Sequence
  spacer sequence GTCN PAM
aggucaggggacccuauccc

SEQ ID NO: 12048 - RNA, 20 nt, Artificial Sequence
  spacer sequence GTCN PAM
ggggacccuaucccaaauaa

SEQ ID NO: 12049 - RNA, 20 nt, Artificial Sequence
  spacer sequence GTCN PAM
ccugaccuggaccugccugg

SEQ ID NO: 12050 - RNA, 20 nt, Artificial Sequence
  spacer sequence GTCN PAM
agcucaggggacccuaaccc

SEQ ID NO: 12051 - RNA, 20 nt, Artificial Sequence
  spacer sequence GTCN PAM
ccugagcuggaccugccugg

SEQ ID NO: 12052 - RNA, 20 nt, Artificial Sequence
  spacer sequence GTCN PAM
agcucaggggacccuaaccc

SEQ ID NO: 12053 - RNA, 20 nt, Artificial Sequence
  spacer sequence GTCN PAM
ccugagcuggaccugccugg

SEQ ID NO: 12054 - RNA, 20 nt, Artificial Sequence
  spacer sequence GTCN PAM
agcucaggggacccuaaccc

SEQ ID NO: 12055 - RNA, 20 nt, Artificial Sequence
  spacer sequence GTCN PAM
ccugagcuggaccugccugg

SEQ ID NO: 12056 - RNA, 20 nt, Artificial Sequence
  spacer sequence GTCN PAM
agcucaggggacccuaccca

SEQ ID NO: 12057 - RNA, 20 nt, Artificial Sequence
  spacer sequence GTCN PAM
ccugagcuggaccugccugg

SEQ ID NO: 12058 - RNA, 20 nt, Artificial Sequence
  spacer sequence GTCN PAM
ccugagcuagaucugccugg

SEQ ID NO: 12059 - RNA, 20 nt, Artificial Sequence
  spacer sequence GTCN PAM
agcucaggggacccuaaccc

SEQ ID NO: 12060 - RNA, 20 nt, Artificial Sequence
  spacer sequence GTCN PAM
ccugagcuggaccugccugg

SEQ ID NO: 12061 - RNA, 20 nt, Artificial Sequence
  spacer sequence GTCN PAM
agcucaggggacccuaaccc

SEQ ID NO: 12062 - RNA, 20 nt, Artificial Sequence
  spacer sequence GTCN PAM
ccugagcuggaccugccugg

SEQ ID NO: 12063 - RNA, 20 nt, Artificial Sequence
  spacer sequence GTCN PAM
aggucaggggacccuaccca

SEQ ID NO: 12064 - RNA, 20 nt, Artificial Sequence
  spacer sequence GTCN PAM
ggggacccuacccaaaucau

SEQ ID NO: 12065 - RNA, 20 nt, Artificial Sequence
  spacer sequence GTCN PAM
ccugaccuggaccugccugg

SEQ ID NO: 12066 - RNA, 20 nt, Artificial Sequence
  spacer sequence GTCN PAM
agcucaggggacccuaaccc

SEQ ID NO: 12067 - RNA, 20 nt, Artificial Sequence
  spacer sequence GTCN PAM
ccugagcuagaccugccugg

SEQ ID NO: 12068 - RNA, 20 nt, Artificial Sequence
  spacer sequence GTCN PAM
agcucaggggacccuaaccc

SEQ ID NO: 12069 - RNA, 20 nt, Artificial Sequence
  spacer sequence GTCN PAM
ccugagcuggaccugccugg

SEQ ID NO: 12070 - RNA, 20 nt, Artificial Sequence
  spacer sequence GTCN PAM
agcucaggggacccuaaccc

SEQ ID NO: 12071 - RNA, 20 nt, Artificial Sequence
  spacer sequence GTCN PAM
ccugagcuggaccugccugg

SEQ ID NO: 12072 - RNA, 20 nt, Artificial Sequence
  spacer sequence GTCN PAM
agcucaggggacccuaaccc

SEQ ID NO: 12073 - RNA, 20 nt, Artificial Sequence
  spacer sequence GTCN PAM
ccugagcuggaccugccuag

SEQ ID NO: 12074 - RNA, 20 nt, Artificial Sequence
  spacer sequence GTCN PAM
agcucaggggacccuaaccc

SEQ ID NO: 12075 - RNA, 20 nt, Artificial Sequence
  spacer sequence GTCN PAM
ccugagcuggaccugccugg

SEQ ID NO: 12076 - RNA, 20 nt, Artificial Sequence
  spacer sequence GTCN PAM
aggucaggggacccuaaccc

SEQ ID NO: 12077 - RNA, 20 nt, Artificial Sequence
  spacer sequence GTCN PAM
ggggacccuaacccaaauaa

SEQ ID NO: 12078 - RNA, 20 nt, Artificial Sequence
  spacer sequence GTCN PAM
ccugaccuggaccugccugg

SEQ ID NO: 12079 - RNA, 20 nt, Artificial Sequence
  spacer sequence GTCN PAM
gcgggaaccuggggagaugg

SEQ ID NO: 12080 - RNA, 20 nt, Artificial Sequence
  spacer sequence GTCN PAM
uaaaaaaaaaaagaaagaaa

SEQ ID NO: 12081 - RNA, 20 nt, Artificial Sequence
  spacer sequence GTCN PAM
cagcuacuugggaggcugag

SEQ ID NO: 12082 - RNA, 20 nt, Artificial Sequence
  spacer sequence GTCN PAM
guacuaaaauacaaaaauga

SEQ ID NO: 12083 - RNA, 20 nt, Artificial Sequence
  spacer sequence GTCN PAM
cgaacuccugaccucagaug

SEQ ID NO: 12084 - RNA, 20 nt, Artificial Sequence
  spacer sequence GTCN PAM
ggaguucgagacuggccuag

SEQ ID NO: 12085 - RNA, 20 nt, Artificial Sequence
  spacer sequence GTCN PAM
uguagcgggagcgggagaua

SEQ ID NO: 12086 - RNA, 20 nt, Artificial Sequence
  spacer sequence GTCN PAM
gccucagugcugucuccgcg

SEQ ID NO: 12087 - RNA, 20 nt, Artificial Sequence
  spacer sequence GTCN PAM
ccgcggucacuaguggcugg

SEQ ID NO: 12088 - RNA, 20 nt, Artificial Sequence
  spacer sequence GTCN PAM
cuaguggcuggauagggaca

SEQ ID NO: 12089 - RNA, 20 nt, Artificial Sequence
  spacer sequence GTCN PAM
cuauccagccacuagugacc

SEQ ID NO: 12090 - RNA, 20 nt, Artificial Sequence
  spacer sequence GTCN PAM
ccacuggugcacacccacug

SEQ ID NO: 12091 - RNA, 20 nt, Artificial Sequence
  spacer sequence GTCN PAM
cagagcaccgaaggccaaga

SEQ ID NO: 12092 - RNA, 20 nt, Artificial Sequence
  spacer sequence GTCN PAM
cgcaccuggcuccuugccac

SEQ ID NO: 12093 - RNA, 20 nt, Artificial Sequence
  spacer sequence GTCN PAM
gccucgggggcagcuccuuc

SEQ ID NO: 12094 - RNA, 20 nt, Artificial Sequence
  spacer sequence GTCN PAM
cagcccuccaaagugcuggg

SEQ ID NO: 12095 - RNA, 20 nt, Artificial Sequence
  spacer sequence GTCN PAM
ggagauggagaccaucuugg

SEQ ID NO: 12096 - RNA, 20 nt, Artificial Sequence
  spacer sequence GTCN PAM
ccaucuccugaccucgugau

SEQ ID NO: 12097 - RNA, 20 nt, Artificial Sequence
  spacer sequence GTCN PAM
cuauuaaaaauacaaaaaau

SEQ ID NO: 12098 - RNA, 20 nt, Artificial Sequence
  spacer sequence GTCN PAM
cagcuacucgggaggcugag

SEQ ID NO: 12099 - RNA, 20 nt, Artificial Sequence
  spacer sequence GTCN PAM
cccaggcuggagugcagugg

SEQ ID NO: 12100 - RNA, 20 nt, Artificial Sequence
  spacer sequence GTCN PAM
cacucugucgcccaggcugg

SEQ ID NO: 12101 - RNA, 20 nt, Artificial Sequence
  spacer sequence GTCN PAM
caaaaaaaauaaaaaagaaa

SEQ ID NO: 12102 - RNA, 20 nt, Artificial Sequence
  spacer sequence GTCN PAM
gcaauguugugcaaccauca

SEQ ID NO: 12103 - RNA, 20 nt, Artificial Sequence
  spacer sequence GTCN PAM
ggugugauauagcggggagg

SEQ ID NO: 12104 - RNA, 20 nt, Artificial Sequence
  spacer sequence GTCN PAM
ugcaccgggaguggauuaga

SEQ ID NO: 12105 - RNA, 20 nt, Artificial Sequence
  spacer sequence GTCN PAM
gccugcuuggagggcgguuu

SEQ ID NO: 12106 - RNA, 20 nt, Artificial Sequence
  spacer sequence GTCN PAM
ccccucaccacacccacgca

SEQ ID NO: 12107 - RNA, 20 nt, Artificial Sequence
  spacer sequence GTCN PAM
ccggccccacccucugcaga

SEQ ID NO: 12108 - RNA, 20 nt, Artificial Sequence
  spacer sequence GTCN PAM
cgugcccuuugcuccaccag

SEQ ID NO: 12109 - RNA, 20 nt, Artificial Sequence
  spacer sequence GTCN PAM
aaauaugacccccagaagga

SEQ ID NO: 12110 - RNA, 20 nt, Artificial Sequence
  spacer sequence GTCN PAM
uauuuggacaggagcuggug

SEQ ID NO: 12111 - RNA, 20 nt, Artificial Sequence
  spacer sequence GTCN PAM
cucgauccaggugcggagcu

SEQ ID NO: 12112 - RNA, 20 nt, Artificial Sequence
  spacer sequence GTCN PAM
gggccgauggagaggccggu

SEQ ID NO: 12113 - RNA, 20 nt, Artificial Sequence
  spacer sequence GTCN PAM
cugcguguacucacgugcau

SEQ ID NO: 12114 - RNA, 20 nt, Artificial Sequence
  spacer sequence GTCN PAM
cacacuuaacaaaucuuggu

SEQ ID NO: 12115 - RNA, 20 nt, Artificial Sequence
  spacer sequence GTCN PAM
cucccaaaaauacaaaauua

SEQ ID NO: 12116 - RNA, 20 nt, Artificial Sequence
  spacer sequence GTCN PAM
agccuggccaacacggugaa

SEQ ID NO: 12117 - RNA, 20 nt, Artificial Sequence
  spacer sequence GTCN PAM
ggaguuccaguccagccugg

SEQ ID NO: 12118 - RNA, 20 nt, Artificial Sequence
  spacer sequence GTCN PAM
ccucuucucuccaccaugac

SEQ ID NO: 12119 - RNA, 20 nt, Artificial Sequence
  spacer sequence GTCN PAM
ugguggagagaagaggggac

SEQ ID NO: 12120 - RNA, 20 nt, Artificial Sequence
  spacer sequence GTCN PAM
ugcccaccuggagaggaagg

SEQ ID NO: 12121 - RNA, 20 nt, Artificial Sequence
  spacer sequence GTCN PAM
cgggagccgucaugcccacc

SEQ ID NO: 12122 - RNA, 20 nt, Artificial Sequence
  spacer sequence GTCN PAM
guucccagcuugguaucaua

SEQ ID NO: 12123 - RNA, 20 nt, Artificial Sequence
  spacer sequence GTCN PAM
cacuugucgguucccagcuu

SEQ ID NO: 12124 - RNA, 20 nt, Artificial Sequence
  spacer sequence GTCN PAM
cugcagaugggcuacacgca

SEQ ID NO: 12125 - RNA, 20 nt, Artificial Sequence
  spacer sequence GTCN PAM
ucggccugggccggcagaua

SEQ ID NO: 12126 - RNA, 20 nt, Artificial Sequence
  spacer sequence GTCN PAM
uauaucugccggcccaggcc

SEQ ID NO: 12127 - RNA, 20 nt, Artificial Sequence
  spacer sequence GTCN PAM
ccggugcccgagggagcccc

SEQ ID NO: 12128 - RNA, 20 nt, Artificial Sequence
  spacer sequence GTCN PAM
gggcagucgccggugcccga

SEQ ID NO: 12129 - RNA, 20 nt, Artificial Sequence
  spacer sequence GTCN PAM
cugaauaucccccuuacuac

SEQ ID NO: 12130 - RNA, 20 nt, Artificial Sequence
  spacer sequence GTCN PAM
gcccaucuggguuuuugggu

SEQ ID NO: 12131 - RNA, 20 nt, Artificial Sequence
  spacer sequence GTCN PAM
accaagggucugugaguguc

SEQ ID NO: 12132 - RNA, 20 nt, Artificial Sequence
  spacer sequence GTCN PAM
gugagugucagcgugggauc

SEQ ID NO: 12133 - RNA, 20 nt, Artificial Sequence
  spacer sequence GTCN PAM
gcgugggaucaggcagcaga

SEQ ID NO: 12134 - RNA, 20 nt, Artificial Sequence
  spacer sequence GTCN PAM
aggccauaucccaauacgug

SEQ ID NO: 12135 - RNA, 20 nt, Artificial Sequence
  spacer sequence GTCN PAM
cugcuggcacauucaggcug

SEQ ID NO: 12136 - RNA, 20 nt, Artificial Sequence
  spacer sequence GTCN PAM
cuucuucccagcacagccug

SEQ ID NO: 12137 - RNA, 20 nt, Artificial Sequence
  spacer sequence GTCN PAM
ccgacgguuucugcuugccu

SEQ ID NO: 12138 - RNA, 20 nt, Artificial Sequence
  spacer sequence GTCN PAM
gggaccgguuccuuccaagc

SEQ ID NO: 12139 - RNA, 20 nt, Artificial Sequence
  spacer sequence GTCN PAM
gcugagcaguuugugguuuc

SEQ ID NO: 12140 - RNA, 20 nt, Artificial Sequence
  spacer sequence GTCN PAM
uugccccaccccugggggaa

SEQ ID NO: 12141 - RNA, 20 nt, Artificial Sequence
  spacer sequence GTCN PAM
ccugggaaaggggaccgggc

SEQ ID NO: 12142 - RNA, 20 nt, Artificial Sequence
  spacer sequence GTCN PAM
ccuuucccaggggacucauu

SEQ ID NO: 12143 - RNA, 20 nt, Artificial Sequence
  spacer sequence GTCN PAM
cuugggagccggagauauuu

SEQ ID NO: 12144 - RNA, 20 nt, Artificial Sequence
  spacer sequence GTCN PAM
uaggcaaauccagucacuug

SEQ ID NO: 12145 - RNA, 20 nt, Artificial Sequence
  spacer sequence GTCN PAM
gaagguccuaggcaaaucca

SEQ ID NO: 12146 - RNA, 20 nt, Artificial Sequence
  spacer sequence GTCN PAM
guuggucugaagguccuagg

SEQ ID NO: 12147 - RNA, 20 nt, Artificial Sequence
  spacer sequence GTCN PAM
gaagucuguuggucugaagg

SEQ ID NO: 12148 - RNA, 20 nt, Artificial Sequence
  spacer sequence GTCN PAM
gagggucugaagucuguugg

SEQ ID NO: 12149 - RNA, 20 nt, Artificial Sequence
  spacer sequence GTCN PAM
ggcuuagccccaacaacuca

SEQ ID NO: 12150 - RNA, 20 nt, Artificial Sequence
  spacer sequence GTCN PAM
uagcuacucaggaggcugag

SEQ ID NO: 12151 - RNA, 20 nt, Artificial Sequence
  spacer sequence GTCN PAM
cgaacuccuggccucaggug

SEQ ID NO: 12152 - RNA, 20 nt, Artificial Sequence
  spacer sequence GTCN PAM
ggcccagaagggaggagggc

SEQ ID NO: 12153 - RNA, 20 nt, Artificial Sequence
  spacer sequence GTCN PAM
cugugcaguacuuggcgggg

SEQ ID NO: 12154 - RNA, 20 nt, Artificial Sequence
  spacer sequence GTCN PAM
ccuggguggggggucccugu

SEQ ID NO: 12155 - RNA, 20 nt, Artificial Sequence
  spacer sequence GTCN PAM
uauuucacauuaucucacgg

SEQ ID NO: 12156 - RNA, 20 nt, Artificial Sequence
  spacer sequence GTCN PAM
acagucguauuucacauuau

SEQ ID NO: 12157 - RNA, 20 nt, Artificial Sequence
  spacer sequence GTCN PAM
augagggcgugcuuugcuuu

SEQ ID NO: 12158 - RNA, 20 nt, Artificial Sequence
  spacer sequence GTCN PAM
ugggggauggggggaucaag

SEQ ID NO: 12159 - RNA, 20 nt, Artificial Sequence
  spacer sequence GTCN PAM
accucaccauugggaggagg

SEQ ID NO: 12160 - RNA, 20 nt, Artificial Sequence
  spacer sequence GTCN PAM
ggguggaaugaaugauuuga

SEQ ID NO: 12161 - RNA, 20 nt, Artificial Sequence
  spacer sequence GTCN PAM
cggcccuucaaaucauucau

SEQ ID NO: 12162 - RNA, 20 nt, Artificial Sequence
  spacer sequence GTCN PAM
cguggccucagccuggaugu

SEQ ID NO: 12163 - RNA, 20 nt, Artificial Sequence
  spacer sequence GTCN PAM
ccccguuggcgaacuccuau

SEQ ID NO: 12164 - RNA, 20 nt, Artificial Sequence
  spacer sequence GTCN PAM
ccacgccucucacucucccc

SEQ ID NO: 12165 - RNA, 20 nt, Artificial Sequence
  spacer sequence GTCN PAM
acagcuuugaaggcgcuggg

SEQ ID NO: 12166 - RNA, 20 nt, Artificial Sequence
  spacer sequence GTCN PAM
ccgauuauaguggcuacccu

SEQ ID NO: 12167 - RNA, 20 nt, Artificial Sequence
  spacer sequence GTCN PAM
guaaaguagggguuccacua

SEQ ID NO: 12168 - RNA, 20 nt, Artificial Sequence
  spacer sequence GTCN PAM
gucuguaaaguagggguucc

SEQ ID NO: 12169 - RNA, 20 nt, Artificial Sequence
  spacer sequence GTCN PAM
cagagucuggacuaaacuag

SEQ ID NO: 12170 - RNA, 20 nt, Artificial Sequence
  spacer sequence GTCN PAM
ggacuaaacuagagggagcc

SEQ ID NO: 12171 - RNA, 20 nt, Artificial Sequence
  spacer sequence GTCN PAM
agacucugggacuacacucg

SEQ ID NO: 12172 - RNA, 20 nt, Artificial Sequence
  spacer sequence GTCN PAM
ccggggcuggccaggcuccc

SEQ ID NO: 12173 - RNA, 20 nt, Artificial Sequence
  spacer sequence GTCN PAM
ccgcuguccccggggcuggc

SEQ ID NO: 12174 - RNA, 20 nt, Artificial Sequence
  spacer sequence GTCN PAM
uuggggagccaggcugccuc

SEQ ID NO: 12175 - RNA, 20 nt, Artificial Sequence
  spacer sequence GTCN PAM
caggcaggccgcccuccggg

SEQ ID NO: 12176 - RNA, 20 nt, Artificial Sequence
  spacer sequence GTCN PAM
cuuuaagaaacccggcuagg

SEQ ID NO: 12177 - RNA, 20 nt, Artificial Sequence
  spacer sequence GTCN PAM
ccucccuuggcccgcgcagc

SEQ ID NO: 12178 - RNA, 20 nt, Artificial Sequence
  spacer sequence GTCN PAM
gagcugcgcgggccaaggga

SEQ ID NO: 12179 - RNA, 20 nt, Artificial Sequence
  spacer sequence GTCN PAM
cucacuggccugcuccgucg

SEQ ID NO: 12180 - RNA, 20 nt, Artificial Sequence
  spacer sequence GTCN PAM
cccaauagcagcgugcagag

SEQ ID NO: 12181 - RNA, 20 nt, Artificial Sequence
  spacer sequence GTCN PAM
uucucaccuuccaggggcuc

SEQ ID NO: 12182 - RNA, 20 nt, Artificial Sequence
  spacer sequence GTCN PAM
cgggccuucuucccucuccg

SEQ ID NO: 12183 - RNA, 20 nt, Artificial Sequence
  spacer sequence GTCN PAM
agccucugaccuccuuccgg

SEQ ID NO: 12184 - RNA, 20 nt, Artificial Sequence
  spacer sequence GTCN PAM
gaggcuggacccccuaauuc

SEQ ID NO: 12185 - RNA, 20 nt, Artificial Sequence
  spacer sequence GTCN PAM
acauucaccggaaggagguc

SEQ ID NO: 12186 - RNA, 20 nt, Artificial Sequence
  spacer sequence GTCN PAM
ucaacauucaccggaaggag

SEQ ID NO: 12187 - RNA, 20 nt, Artificial Sequence
  spacer sequence GTCN PAM
gaugccccccuugagaauca

SEQ ID NO: 12188 - RNA, 20 nt, Artificial Sequence
  spacer sequence GTCN PAM
cagauguccgaugccccccu

SEQ ID NO: 12189 - RNA, 20 nt, Artificial Sequence
  spacer sequence GTCN PAM
uacaaauggagaaacugagc

SEQ ID NO: 12190 - RNA, 20 nt, Artificial Sequence
  spacer sequence GTCN PAM
cgcuugauguaaaggaaaga

SEQ ID NO: 12191 - RNA, 20 nt, Artificial Sequence
  spacer sequence GTCN PAM
gggucugaggucccaguucc

SEQ ID NO: 12192 - RNA, 20 nt, Artificial Sequence
  spacer sequence GTCN PAM
gaggucccaguuccggccug

SEQ ID NO: 12193 - RNA, 20 nt, Artificial Sequence
  spacer sequence GTCN PAM
caguuccggccuggucaccu

SEQ ID NO: 12194 - RNA, 20 nt, Artificial Sequence
  spacer sequence GTCN PAM
ccuuuagcaacuuccugccc

SEQ ID NO: 12195 - RNA, 20 nt, Artificial Sequence
  spacer sequence GTCN PAM
gcgucagauucuccaucugu

SEQ ID NO: 12196 - RNA, 20 nt, Artificial Sequence
  spacer sequence GTCN PAM
gauucuccaucugugucaga

SEQ ID NO: 12197 - RNA, 20 nt, Artificial Sequence
  spacer sequence GTCN PAM
gagguggaccggcccaagga

SEQ ID NO: 12198 - RNA, 20 nt, Artificial Sequence
  spacer sequence GTCN PAM
accucugacacagauggaga

SEQ ID NO: 12199 - RNA, 20 nt, Artificial Sequence
  spacer sequence GTCN PAM
gcgauuccugaucuauuuuc

SEQ ID NO: 12200 - RNA, 20 nt, Artificial Sequence
  spacer sequence GTCN PAM
cuaucccagccccuucgccu

SEQ ID NO: 12201 - RNA, 20 nt, Artificial Sequence
  spacer sequence GTCN PAM
ggcgaaggggcugggauaga

SEQ ID NO: 12202 - RNA, 20 nt, Artificial Sequence
  spacer sequence GTCN PAM
cucugagcgauuaaugcuac

SEQ ID NO: 12203 - RNA, 20 nt, Artificial Sequence
  spacer sequence GTCN PAM
ugccuccagcugggcaacug

SEQ ID NO: 12204 - RNA, 20 nt, Artificial Sequence
  spacer sequence GTCN PAM
cucugggugccuggguuugc

SEQ ID NO: 12205 - RNA, 20 nt, Artificial Sequence
  spacer sequence GTCN PAM
agcacuuccccugggcgugu

SEQ ID NO: 12206 - RNA, 20 nt, Artificial Sequence
  spacer sequence GTCN PAM
agcacugccaauauucguug

SEQ ID NO: 12207 - RNA, 20 nt, Artificial Sequence
  spacer sequence GTCN PAM
ggaccuggaagaggcuucca

SEQ ID NO: 12208 - RNA, 20 nt, Artificial Sequence
  spacer sequence GTCN PAM
ugacccccagccuccugccu

SEQ ID NO: 12209 - RNA, 20 nt, Artificial Sequence
  spacer sequence GTCN PAM
ccaggcuccaccccaagccu

SEQ ID NO: 12210 - RNA, 20 nt, Artificial Sequence
  spacer sequence GTCN PAM
cuggaggauuagaggaugau

SEQ ID NO: 12211 - RNA, 20 nt, Artificial Sequence
  spacer sequence GTCN PAM
ccagcugucagcccugcuca

SEQ ID NO: 12212 - RNA, 20 nt, Artificial Sequence
  spacer sequence GTCN PAM
gcccugcucagagcgacagu

SEQ ID NO: 12213 - RNA, 20 nt, Artificial Sequence
  spacer sequence GTCN PAM
cucugagcagggcugacagc

SEQ ID NO: 12214 - RNA, 20 nt, Artificial Sequence
  spacer sequence GTCN PAM
uggcagccaaucagaugcga

SEQ ID NO: 12215 - RNA, 20 nt, Artificial Sequence
  spacer sequence GTCN PAM
ucgcaucugauuggcugcca

SEQ ID NO: 12216 - RNA, 20 nt, Artificial Sequence
  spacer sequence GTCN PAM
cucgauaaagaggcuccgcu

SEQ ID NO: 12217 - RNA, 20 nt, Artificial Sequence
  spacer sequence GTCN PAM
ucagcccgaccguuguccug

SEQ ID NO: 12218 - RNA, 20 nt, Artificial Sequence
  spacer sequence GTCN PAM
ggcugaagacgugcggugcg

SEQ ID NO: 12219 - RNA, 20 nt, Artificial Sequence
  spacer sequence GTCN PAM
ugaccucucugucccguccc

SEQ ID NO: 12220 - RNA, 20 nt, Artificial Sequence
  spacer sequence GTCN PAM
ggacaacggucgggcugaag

SEQ ID NO: 12221 - RNA, 20 nt, Artificial Sequence
  spacer sequence GTCN PAM
cguccccugcccagucucac

SEQ ID NO: 12222 - RNA, 20 nt, Artificial Sequence
  spacer sequence GTCN PAM
ccugcccagucucaccaugg

SEQ ID NO: 12223 - RNA, 20 nt, Artificial Sequence
  spacer sequence GTCN PAM
caccauggccuucuggacac

SEQ ID NO: 12224 - RNA, 20 nt, Artificial Sequence
  spacer sequence GTCN PAM
agaaggccauggugagacug

SEQ ID NO: 12225 - RNA, 20 nt, Artificial Sequence
  spacer sequence GTCN PAM
ccggcgauacaugaaauucu

SEQ ID NO: 12226 - RNA, 20 nt, Artificial Sequence
  spacer sequence GTCN PAM
cacacuggggcguuaccggc

SEQ ID NO: 12227 - RNA, 20 nt, Artificial Sequence
  spacer sequence GTCN PAM
cccaccgucucccaccuauu

SEQ ID NO: 12228 - RNA, 20 nt, Artificial Sequence
  spacer sequence GTCN PAM
cccaccuauucucccccagg

SEQ ID NO: 12229 - RNA, 20 nt, Artificial Sequence
  spacer sequence GTCN PAM
agcuccuggucgaauugcug

SEQ ID NO: 12230 - RNA, 20 nt, Artificial Sequence
  spacer sequence GTCN PAM
aauugcuguggccucucuuc

SEQ ID NO: 12231 - RNA, 20 nt, Artificial Sequence
  spacer sequence GTCN PAM
cugggggggcucacauucau

SEQ ID NO: 12232 - RNA, 20 nt, Artificial Sequence
  spacer sequence GTCN PAM
gggagccuucaccaggccgc

SEQ ID NO: 12233 - RNA, 20 nt, Artificial Sequence
  spacer sequence GTCN PAM
cccggcaccgcuugcaugcc

SEQ ID NO: 12234 - RNA, 20 nt, Artificial Sequence
  spacer sequence GTCN PAM
ggcagaguccacagggccuc

SEQ ID NO: 12235 - RNA, 20 nt, Artificial Sequence
  spacer sequence GTCN PAM
acagggccucagcaccaggc

SEQ ID NO: 12236 - RNA, 20 nt, Artificial Sequence
  spacer sequence GTCN PAM
ccccgcaggccacuucccaa

SEQ ID NO: 12237 - RNA, 20 nt, Artificial Sequence
  spacer sequence GTCN PAM
caucuguaaugugaacaaca

SEQ ID NO: 12238 - RNA, 20 nt, Artificial Sequence
  spacer sequence GTCN PAM
gcugcggaaagcagguguug

SEQ ID NO: 12239 - RNA, 20 nt, Artificial Sequence
  spacer sequence GTCN PAM
uugaaguugcucaggcgccc

SEQ ID NO: 12240 - RNA, 20 nt, Artificial Sequence
  spacer sequence GTCN PAM
ccagggucucccggcugcua

SEQ ID NO: 12241 - RNA, 20 nt, Artificial Sequence
  spacer sequence GTCN PAM
cccggcugcuagccgaugcc

SEQ ID NO: 12242 - RNA, 20 nt, Artificial Sequence
  spacer sequence GTCN PAM
ugugggcacuggccccuccc

SEQ ID NO: 12243 - RNA, 20 nt, Artificial Sequence
  spacer sequence GTCN PAM
gaggcacccacccccacccu

SEQ ID NO: 12244 - RNA, 20 nt, Artificial Sequence
  spacer sequence GTCN PAM
ccccagccccaugcucccgu

SEQ ID NO: 12245 - RNA, 20 nt, Artificial Sequence
  spacer sequence GTCN PAM
ccacuggaaccacccaugcu

SEQ ID NO: 12246 - RNA, 20 nt, Artificial Sequence
  spacer sequence GTCN PAM
cggagcugcugacgucacug

SEQ ID NO: 12247 - RNA, 20 nt, Artificial Sequence
  spacer sequence GTCN PAM
gcagcuccgcgacauccagc

SEQ ID NO: 12248 - RNA, 20 nt, Artificial Sequence
  spacer sequence GTCN PAM
cugcugcgcacgguagggug

SEQ ID NO: 12249 - RNA, 20 nt, Artificial Sequence
  spacer sequence GTCN PAM
gggcgggaccgcgcugacuu

SEQ ID NO: 12250 - RNA, 20 nt, Artificial Sequence
  spacer sequence GTCN PAM
cgccccgacacccuaccgug

SEQ ID NO: 12251 - RNA, 20 nt, Artificial Sequence
  spacer sequence GTCN PAM
gcgcggucccgccccgacac

SEQ ID NO: 12252 - RNA, 20 nt, Artificial Sequence
  spacer sequence GTCN PAM
caggaagucagcgcgguccc

SEQ ID NO: 12253 - RNA, 20 nt, Artificial Sequence
  spacer sequence GTCN PAM
uggcacugccccaccccggg

SEQ ID NO: 12254 - RNA, 20 nt, Artificial Sequence
  spacer sequence GTCN PAM
uuggcccgggguggggcagu

SEQ ID NO: 12255 - RNA, 20 nt, Artificial Sequence
  spacer sequence GTCN PAM
cuggucucugcggugaugcu

SEQ ID NO: 12256 - RNA, 20 nt, Artificial Sequence
  spacer sequence GTCN PAM
cugcggugaugcugcuuguc

SEQ ID NO: 12257 - RNA, 20 nt, Artificial Sequence
  spacer sequence GTCN PAM
gucugggcccccagacagag

SEQ ID NO: 12258 - RNA, 20 nt, Artificial Sequence
  spacer sequence GTCN PAM
gggcccccagacagagugug

SEQ ID NO: 12259 - RNA, 20 nt, Artificial Sequence
  spacer sequence GTCN PAM
gggggcccagacggacaagc

SEQ ID NO: 12260 - RNA, 20 nt, Artificial Sequence
  spacer sequence GTCN PAM
gacccagugaggaagacucg

SEQ ID NO: 12261 - RNA, 20 nt, Artificial Sequence
  spacer sequence GTCN PAM
gacacacucugucugggggc

SEQ ID NO: 12262 - RNA, 20 nt, Artificial Sequence
  spacer sequence GTCN PAM
uccucacugggucagacaca

SEQ ID NO: 12263 - RNA, 20 nt, Artificial Sequence
  spacer sequence GTCN PAM
gugagaucuccaaugagucc

SEQ ID NO: 12264 - RNA, 20 nt, Artificial Sequence
  spacer sequence GTCN PAM
cuuugccucucagagccuca

SEQ ID NO: 12265 - RNA, 20 nt, Artificial Sequence
  spacer sequence GTCN PAM
gccugggaacuggccagagc

SEQ ID NO: 12266 - RNA, 20 nt, Artificial Sequence
  spacer sequence GTCN PAM
agcgcucuggccaguuccca

SEQ ID NO: 12267 - RNA, 20 nt, Artificial Sequence
  spacer sequence GTCN PAM
cccuuguggucuuucucccc

SEQ ID NO: 12268 - RNA, 20 nt, Artificial Sequence
  spacer sequence GTCN PAM
uucuccccaggaaucccugg

SEQ ID NO: 12269 - RNA, 20 nt, Artificial Sequence
  spacer sequence GTCN PAM
ucagcggccuccaacaagcu

SEQ ID NO: 12270 - RNA, 20 nt, Artificial Sequence
  spacer sequence GTCN PAM
ggggcagcccgggcacuucc

SEQ ID NO: 12271 - RNA, 20 nt, Artificial Sequence
  spacer sequence GTCN PAM
aauccuccugaaaacccacc

SEQ ID NO: 12272 - RNA, 20 nt, Artificial Sequence
  spacer sequence GTCN PAM
gguaaccucucucuagcucc

SEQ ID NO: 12273 - RNA, 20 nt, Artificial Sequence
  spacer sequence GTCN PAM
cugcagcagugcccgaagcu

SEQ ID NO: 12274 - RNA, 20 nt, Artificial Sequence
  spacer sequence GTCN PAM
cucggggucucugcagcagu

SEQ ID NO: 12275 - RNA, 20 nt, Artificial Sequence
  spacer sequence GTCN PAM
gaggcccucugcagugucag

SEQ ID NO: 12276 - RNA, 20 nt, Artificial Sequence
  spacer sequence GTCN PAM
ggggaccuagcagcacagug

SEQ ID NO: 12277 - RNA, 20 nt, Artificial Sequence
  spacer sequence GTCN PAM
ccugacacugcagagggccu

SEQ ID NO: 12278 - RNA, 20 nt, Artificial Sequence
  spacer sequence GTCN PAM
cuagccucguaccaguugag

SEQ ID NO: 12279 - RNA, 20 nt, Artificial Sequence
  spacer sequence GTCN PAM
ggcagggcggauucuggcuc

SEQ ID NO: 12280 - RNA, 20 nt, Artificial Sequence
  spacer sequence GTCN PAM
cucacucaggcugcugucug

SEQ ID NO: 12281 - RNA, 20 nt, Artificial Sequence
  spacer sequence GTCN PAM
gucacucacucaggcugcug

SEQ ID NO: 12282 - RNA, 20 nt, Artificial Sequence
  spacer sequence GTCN PAM
agggcuccaaucagcuccga

SEQ ID NO: 12283 - RNA, 20 nt, Artificial Sequence
  spacer sequence GTCN PAM
cgccugcucuggagacgccu

SEQ ID NO: 12284 - RNA, 20 nt, Artificial Sequence
  spacer sequence GTCN PAM
ccagagcaggcgggacagcg

SEQ ID NO: 12285 - RNA, 20 nt, Artificial Sequence
  spacer sequence GTCN PAM
ugaggauugugggagacuuu

SEQ ID NO: 12286 - RNA, 20 nt, Artificial Sequence
  spacer sequence GTCN PAM
cccacaauccucaagacuuu

SEQ ID NO: 12287 - RNA, 20 nt, Artificial Sequence
  spacer sequence GTCN PAM
gggugggaacagggcugagg

SEQ ID NO: 12288 - RNA, 20 nt, Artificial Sequence
  spacer sequence GTCN PAM
cucagggccuauucuuacug

SEQ ID NO: 12289 - RNA, 20 nt, Artificial Sequence
  spacer sequence GTCN PAM
guaagaauaggcccugaggg

SEQ ID NO: 12290 - RNA, 20 nt, Artificial Sequence
  spacer sequence GTCN PAM
cugcagaguucuaucucagc

SEQ ID NO: 12291 - RNA, 20 nt, Artificial Sequence
  spacer sequence GTCN PAM
gaggugaugccgugugugau

SEQ ID NO: 12292 - RNA, 20 nt, Artificial Sequence
  spacer sequence GTCN PAM
ggauaagaugagcuuuuaag

SEQ ID NO: 12293 - RNA, 20 nt, Artificial Sequence
  spacer sequence GTCN PAM
uccugccucggccucccaaa

SEQ ID NO: 12294 - RNA, 20 nt, Artificial Sequence
  spacer sequence GTCN PAM
caaacuccuggccacaagca

SEQ ID NO: 12295 - RNA, 20 nt, Artificial Sequence
  spacer sequence GTCN PAM
cucuauguuucccaggcugg

SEQ ID NO: 12296 - RNA, 20 nt, Artificial Sequence
  spacer sequence GTCN PAM
aggucuaaggcagagaagau

SEQ ID NO: 12297 - RNA, 20 nt, Artificial Sequence
  spacer sequence GTCN PAM
aaggcagagaagaugggaau

SEQ ID NO: 12298 - RNA, 20 nt, Artificial Sequence
  spacer sequence GTCN PAM
gagugguuacuccagugacu

SEQ ID NO: 12299 - RNA, 20 nt, Artificial Sequence
  spacer sequence GTCN PAM
cuggaguaaccacucagacu

SEQ ID NO: 12300 - RNA, 20 nt, Artificial Sequence
  spacer sequence GTCN PAM
cuucagcuggucgaucacac

SEQ ID NO: 12301 - RNA, 20 nt, Artificial Sequence
  spacer sequence GTCN PAM
aucacaccgcucauguaccc

SEQ ID NO: 12302 - RNA, 20 nt, Artificial Sequence
  spacer sequence GTCN PAM
uuggacucagccccugacca

SEQ ID NO: 12303 - RNA, 20 nt, Artificial Sequence
  spacer sequence GTCN PAM
aacgacccaacccagcccaa

SEQ ID NO: 12304 - RNA, 20 nt, Artificial Sequence
  spacer sequence GTCN PAM
ggggcugaguccaacgaccc

SEQ ID NO: 12305 - RNA, 20 nt, Artificial Sequence
  spacer sequence GTCN PAM
cccacccuugagcagaagcu

SEQ ID NO: 12306 - RNA, 20 nt, Artificial Sequence
  spacer sequence GTCN PAM
uccuuaucuucccccacuuc

SEQ ID NO: 12307 - RNA, 20 nt, Artificial Sequence
  spacer sequence GTCN PAM
augagcccccggcccaagca

SEQ ID NO: 12308 - RNA, 20 nt, Artificial Sequence
  spacer sequence GTCN PAM
gguggggccauggcuacaga

SEQ ID NO: 12309 - RNA, 20 nt, Artificial Sequence
  spacer sequence GTCN PAM
ccaagggugcuagcuaucug

SEQ ID NO: 12310 - RNA, 20 nt, Artificial Sequence
  spacer sequence GTCN PAM
cccuggggggcuguuuuucu

SEQ ID NO: 12311 - RNA, 20 nt, Artificial Sequence
  spacer sequence GTCN PAM
aauuggcauagaaaacagaa

SEQ ID NO: 12312 - RNA, 20 nt, Artificial Sequence
  spacer sequence GTCN PAM
cucuggauucuuaagggaaa

SEQ ID NO: 12313 - RNA, 20 nt, Artificial Sequence
  spacer sequence GTCN PAM
ugguuucuggcccuuucucc

SEQ ID NO: 12314 - RNA, 20 nt, Artificial Sequence
  spacer sequence GTCN PAM
augagagucuugguuucugg

SEQ ID NO: 12315 - RNA, 20 nt, Artificial Sequence
  spacer sequence GTCN PAM
cuccuuucuauauccacagg

SEQ ID NO: 12316 - RNA, 20 nt, Artificial Sequence
  spacer sequence GTCN PAM
ccuguggauauagaaaggag

SEQ ID NO: 12317 - RNA, 20 nt, Artificial Sequence
  spacer sequence GTCN PAM
uuccugggcuguucucauga

SEQ ID NO: 12318 - RNA, 20 nt, Artificial Sequence
  spacer sequence GTCN PAM
ccacccaaaccucaucuugu

SEQ ID NO: 12319 - RNA, 20 nt, Artificial Sequence
  spacer sequence GTCN PAM
ggcucuguguccccacccaa

SEQ ID NO: 12320 - RNA, 20 nt, Artificial Sequence
  spacer sequence GTCN PAM
cucucuccuccuccccgcca

SEQ ID NO: 12321 - RNA, 20 nt, Artificial Sequence
  spacer sequence GTCN PAM
gugcaggcuuucuuaucuaa

SEQ ID NO: 12322 - RNA, 20 nt, Artificial Sequence
  spacer sequence GTCN PAM
caaacuccuggccucaaggu

SEQ ID NO: 12323 - RNA, 20 nt, Artificial Sequence
  spacer sequence GTCN PAM
uccuauguugccuaggcuug

SEQ ID NO: 12324 - RNA, 20 nt, Artificial Sequence
  spacer sequence GTCN PAM
caaaaaacaacaacaacaac

SEQ ID NO: 12325 - RNA, 20 nt, Artificial Sequence
  spacer sequence GTCN PAM
cgcucuguugcccaggcugg

SEQ ID NO: 12326 - RNA, 20 nt, Artificial Sequence
  spacer sequence GTCN PAM
ugaacuucugaccucagauc

SEQ ID NO: 12327 - RNA, 20 nt, Artificial Sequence
  spacer sequence GTCN PAM
gaaguucaagaccagccugg

SEQ ID NO: 12328 - RNA, 20 nt, Artificial Sequence
  spacer sequence GTCN PAM
uccuggccgggugcgguggc

SEQ ID NO: 12329 - RNA, 20 nt, Artificial Sequence
  spacer sequence GTCN PAM
caguuacucgggaggcugag

SEQ ID NO: 12330 - RNA, 20 nt, Artificial Sequence
  spacer sequence GTCN PAM
cccaggcuagagugcagugg

SEQ ID NO: 12331 - RNA, 20 nt, Artificial Sequence
  spacer sequence GTCN PAM
ugcucugucgcccaggcuag

SEQ ID NO: 12332 - RNA, 20 nt, Artificial Sequence
  spacer sequence GTCN PAM
ccaaacaaacagaaaacaaa

SEQ ID NO: 12333 - RNA, 20 nt, Artificial Sequence
  spacer sequence GTCN PAM
gccugauacagcuaucccca

SEQ ID NO: 12334 - RNA, 20 nt, Artificial Sequence
  spacer sequence GTCN PAM
gagggcaagguggggcaggu

SEQ ID NO: 12335 - RNA, 20 nt, Artificial Sequence
  spacer sequence GTCN PAM
caugaagccuugcuggucag

SEQ ID NO: 12336 - RNA, 20 nt, Artificial Sequence
  spacer sequence GTCN PAM
ggguaaaaugucuggagcug

SEQ ID NO: 12337 - RNA, 20 nt, Artificial Sequence
  spacer sequence GTCN PAM
ggagcugcuguguugggaaa

SEQ ID NO: 12338 - RNA, 20 nt, Artificial Sequence
  spacer sequence GTCN PAM
uuucccaacacagcagcucc

SEQ ID NO: 12339 - RNA, 20 nt, Artificial Sequence
  spacer sequence GTCN PAM
cuugcuucugcccuggcucc

SEQ ID NO: 12340 - RNA, 20 nt, Artificial Sequence
  spacer sequence GTCN PAM
cugugagcagugaaaagagg

SEQ ID NO: 12341 - RNA, 20 nt, Artificial Sequence
  spacer sequence GTCN PAM
aggugagcucuggaguucag

SEQ ID NO: 12342 - RNA, 20 nt, Artificial Sequence
  spacer sequence GTCN PAM
gggggauggacgugcaggca

SEQ ID NO: 12343 - RNA, 20 nt, Artificial Sequence
  spacer sequence GTCN PAM
aucccccagaccuugcccug

SEQ ID NO: 12344 - RNA, 20 nt, Artificial Sequence
  spacer sequence GTCN PAM
aggcucccggcucuaaucuu

SEQ ID NO: 12345 - RNA, 20 nt, Artificial Sequence
  spacer sequence GTCN PAM
ugggagcagagcagagucca

SEQ ID NO: 12346 - RNA, 20 nt, Artificial Sequence
  spacer sequence GTCN PAM
aggagaguaaguccagcccu

SEQ ID NO: 12347 - RNA, 20 nt, Artificial Sequence
  spacer sequence GTCN PAM
agcccugcugguguucagaa

SEQ ID NO: 12348 - RNA, 20 nt, Artificial Sequence
  spacer sequence GTCN PAM
gugcugagccucccuccccu

SEQ ID NO: 12349 - RNA, 20 nt, Artificial Sequence
  spacer sequence GTCN PAM
gcagcucaggggcugcucca

SEQ ID NO: 12350 - RNA, 20 nt, Artificial Sequence
  spacer sequence GTCN PAM
ccucuccccucccuuguaaa

SEQ ID NO: 12351 - RNA, 20 nt, Artificial Sequence
  spacer sequence GTCN PAM
cuguuuuacaagggagggga

SEQ ID NO: 12352 - RNA, 20 nt, Artificial Sequence
  spacer sequence GTCN PAM
ggcgccacucuguguacauu

SEQ ID NO: 12353 - RNA, 20 nt, Artificial Sequence
  spacer sequence GTCN PAM
ccuggaaaccuggugaggaa

SEQ ID NO: 12354 - RNA, 20 nt, Artificial Sequence
  spacer sequence GTCN PAM
aggggcagagggaagggagu

SEQ ID NO: 12355 - RNA, 20 nt, Artificial Sequence
  spacer sequence GTCN PAM
gccugaggacugagcaggga

SEQ ID NO: 12356 - RNA, 20 nt, Artificial Sequence
  spacer sequence GTCN PAM
ucaggcugacuuggcggugg

SEQ ID NO: 12357 - RNA, 20 nt, Artificial Sequence
  spacer sequence GTCN PAM
gcuaggcgaaucccugcuca

SEQ ID NO: 12358 - RNA, 20 nt, Artificial Sequence
  spacer sequence GTCN PAM
caagcaaugucugcuaggcg

SEQ ID NO: 12359 - RNA, 20 nt, Artificial Sequence
  spacer sequence GTCN PAM
ugccaggcacuggcccccuu

SEQ ID NO: 12360 - RNA, 20 nt, Artificial Sequence
  spacer sequence GTCN PAM
ggagacggacaggccucagg

SEQ ID NO: 12361 - RNA, 20 nt, Artificial Sequence
  spacer sequence GTCN PAM
ccugacccuccccgccccau

SEQ ID NO: 12362 - RNA, 20 nt, Artificial Sequence
  spacer sequence GTCN PAM
gucuccugacccuccccgcc

SEQ ID NO: 12363 - RNA, 20 nt, Artificial Sequence
  spacer sequence GTCN PAM
uaaaauccacuccugaggcc

SEQ ID NO: 12364 - RNA, 20 nt, Artificial Sequence
  spacer sequence GTCN PAM
uuacuccagaugcccuuucu

SEQ ID NO: 12365 - RNA, 20 nt, Artificial Sequence
  spacer sequence GTCN PAM
cugcuuggucuuuacuccag

SEQ ID NO: 12366 - RNA, 20 nt, Artificial Sequence
  spacer sequence GTCN PAM
accccugcccccagauuugc

SEQ ID NO: 12367 - RNA, 20 nt, Artificial Sequence
  spacer sequence GTCN PAM
ggccaugauccacacacagg

SEQ ID NO: 12368 - RNA, 20 nt, Artificial Sequence
  spacer sequence GTCN PAM
ggucggccaggcgcaguggc

SEQ ID NO: 12369 - RNA, 20 nt, Artificial Sequence
  spacer sequence GTCN PAM
gccaggcgcaguggcucacg

SEQ ID NO: 12370 - RNA, 20 nt, Artificial Sequence
  spacer sequence GTCN PAM
gggguucgagaccagccugg

SEQ ID NO: 12371 - RNA, 20 nt, Artificial Sequence
  spacer sequence GTCN PAM
cgaaccccugaccucaguug

SEQ ID NO: 12372 - RNA, 20 nt, Artificial Sequence
  spacer sequence GTCN PAM
cuacugaaaauaccaaaauu

SEQ ID NO: 12373 - RNA, 20 nt, Artificial Sequence
  spacer sequence GTCN PAM
gguggauccucaaacuguua

SEQ ID NO: 12374 - RNA, 20 nt, Artificial Sequence
  spacer sequence GTCN PAM
ccauaugacucagcaauucc

SEQ ID NO: 12375 - RNA, 20 nt, Artificial Sequence
  spacer sequence GTCN PAM
uauggugacucuuuguguaa

SEQ ID NO: 12376 - RNA, 20 nt, Artificial Sequence
  spacer sequence GTCN PAM
cugcaaccuccgccucccag

SEQ ID NO: 12377 - RNA, 20 nt, Artificial Sequence
  spacer sequence GTCN PAM
cacucuguuacccaggcugg

SEQ ID NO: 12378 - RNA, 20 nt, Artificial Sequence
  spacer sequence GTCN PAM
caaaaaaaaaaaccccagau

SEQ ID NO: 12379 - RNA, 20 nt, Artificial Sequence
  spacer sequence GTCN PAM
auccacagaugaauaaauaa

SEQ ID NO: 12380 - RNA, 20 nt, Artificial Sequence
  spacer sequence GTCN PAM
gagccucaucauuccuuuuc

SEQ ID NO: 12381 - RNA, 20 nt, Artificial Sequence
  spacer sequence GTCN PAM
ucaggcuacauccacauugu

SEQ ID NO: 12382 - RNA, 20 nt, Artificial Sequence
  spacer sequence GTCN PAM
aggacaggccaauccacaga

SEQ ID NO: 12383 - RNA, 20 nt, Artificial Sequence
  spacer sequence GTCN PAM
uggacauuucauggaaaugg

SEQ ID NO: 12384 - RNA, 20 nt, Artificial Sequence
  spacer sequence GTCN PAM
cuguggauuggccuguccug

SEQ ID NO: 12385 - RNA, 20 nt, Artificial Sequence
  spacer sequence GTCN PAM
uaggggaggagauggagagu

SEQ ID NO: 12386 - RNA, 20 nt, Artificial Sequence
  spacer sequence GTCN PAM
gggcuuccuuuggggacaau

SEQ ID NO: 12387 - RNA, 20 nt, Artificial Sequence
  spacer sequence GTCN PAM
ccaaaggaagcccagacccc

SEQ ID NO: 12388 - RNA, 20 nt, Artificial Sequence
  spacer sequence GTCN PAM
ggaguuugagaccagccuga

SEQ ID NO: 12389 - RNA, 20 nt, Artificial Sequence
  spacer sequence GTCN PAM
caaacucccgaccucaggug

SEQ ID NO: 12390 - RNA, 20 nt, Artificial Sequence
  spacer sequence GTCN PAM
ggcuggucucaaacucccga

SEQ ID NO: 12391 - RNA, 20 nt, Artificial Sequence
  spacer sequence GTCN PAM
cuacuaaaaauacaaaacua

SEQ ID NO: 12392 - RNA, 20 nt, Artificial Sequence
  spacer sequence GTCN PAM
caagagaaaaaaaaaauucu

SEQ ID NO: 12393 - RNA, 20 nt, Artificial Sequence
  spacer sequence GTCN PAM
cauaacauuguacacguccu

SEQ ID NO: 12394 - RNA, 20 nt, Artificial Sequence
  spacer sequence GTCN PAM
uaaaaacacugaauuguaca

SEQ ID NO: 12395 - RNA, 20 nt, Artificial Sequence
  spacer sequence GTCN PAM
caaaaaaaaaaaaaguuuuu

SEQ ID NO: 12396 - RNA, 20 nt, Artificial Sequence
  spacer sequence GTCN PAM
ugcuguauccccccaggcug

SEQ ID NO: 12397 - RNA, 20 nt, Artificial Sequence
  spacer sequence GTCN PAM
cugcacuccagccugggggg

SEQ ID NO: 12398 - RNA, 20 nt, Artificial Sequence
  spacer sequence GTCN PAM
ggcuggucuugaacuccuga

SEQ ID NO: 12399 - RNA, 20 nt, Artificial Sequence
  spacer sequence GTCN PAM
ugaacuccugaccucgugau

SEQ ID NO: 12400 - RNA, 20 nt, Artificial Sequence
  spacer sequence GTCN PAM
ggaguucaagaccagccuga

SEQ ID NO: 12401 - RNA, 20 nt, Artificial Sequence
  spacer sequence GTCN PAM
cuacuaaaaguacaaaaauu

SEQ ID NO: 12402 - RNA, 20 nt, Artificial Sequence
  spacer sequence GTCN PAM
caaaaaaaacuuuuuggcug

SEQ ID NO: 12403 - RNA, 20 nt, Artificial Sequence
  spacer sequence GTCN PAM
cgcucucuugcccaggcugg

SEQ ID NO: 12404 - RNA, 20 nt, Artificial Sequence
  spacer sequence GTCN PAM
cagcuacuacucgggaggcu

SEQ ID NO: 12405 - RNA, 20 nt, Artificial Sequence
  spacer sequence GTCN PAM
agggcuccuguagucccagc

SEQ ID NO: 12406 - RNA, 20 nt, Artificial Sequence
  spacer sequence GTCN PAM
cuacuaaaauuacaaaaaau

SEQ ID NO: 12407 - RNA, 20 nt, Artificial Sequence
  spacer sequence GTCN PAM
cgaucuccugaccucgugau

SEQ ID NO: 12408 - RNA, 20 nt, Artificial Sequence
  spacer sequence GTCN PAM
ggagaucgagaccauccugg

SEQ ID NO: 12409 - RNA, 20 nt, Artificial Sequence
  spacer sequence GTCN PAM
cagccucccaaagugcuggg

SEQ ID NO: 12410 - RNA, 20 nt, Artificial Sequence
  spacer sequence GTCN PAM
uguggcuucauuucuuuuuu

SEQ ID NO: 12411 - RNA, 20 nt, Artificial Sequence
  spacer sequence GTCN PAM
uuccuggagccaggggcugc

SEQ ID NO: 12412 - RNA, 20 nt, Artificial Sequence
  spacer sequence GTCN PAM
cugcaggaagcuguguugcc

SEQ ID NO: 12413 - RNA, 20 nt, Artificial Sequence
  spacer sequence GTCN PAM
ccgagacuccauuuccccgu

SEQ ID NO: 12414 - RNA, 20 nt, Artificial Sequence
  spacer sequence GTCN PAM
cggggaccucucaaggcucc

SEQ ID NO: 12415 - RNA, 20 nt, Artificial Sequence
  spacer sequence GTCN PAM
ccauuucacgaacggggaaa

SEQ ID NO: 12416 - RNA, 20 nt, Artificial Sequence
  spacer sequence GTCN PAM
cgaccccguguuuuccccac

SEQ ID NO: 12417 - RNA, 20 nt, Artificial Sequence
  spacer sequence GTCN PAM
cgaccucggaucugagaacg

SEQ ID NO: 12418 - RNA, 20 nt, Artificial Sequence
  spacer sequence GTCN PAM
gaaguggggaaaacacgggg

SEQ ID NO: 12419 - RNA, 20 nt, Artificial Sequence
  spacer sequence GTCN PAM
ggaaugggaucaagucucuc

SEQ ID NO: 12420 - RNA, 20 nt, Artificial Sequence
  spacer sequence GTCN PAM
cuccgcggagcugugggugc

SEQ ID NO: 12421 - RNA, 20 nt, Artificial Sequence
  spacer sequence GTCN PAM
ccaguguggcccugucaccc

SEQ ID NO: 12422 - RNA, 20 nt, Artificial Sequence
  spacer sequence GTCN PAM
cccggcacugccagggcggg

SEQ ID NO: 12423 - RNA, 20 nt, Artificial Sequence
  spacer sequence GTCN PAM
gacaaugggaguugacucca

SEQ ID NO: 12424 - RNA, 20 nt, Artificial Sequence
  spacer sequence GTCN PAM
gacuucucaggaaacccccc

SEQ ID NO: 12425 - RNA, 20 nt, Artificial Sequence
  spacer sequence GTCN PAM
acucccauugucugacuucu

SEQ ID NO: 12426 - RNA, 20 nt, Artificial Sequence
  spacer sequence GTCN PAM
guucacauggcuuugcuccc

SEQ ID NO: 12427 - RNA, 20 nt, Artificial Sequence
  spacer sequence GTCN PAM
ugcauaagucuguucacaug

SEQ ID NO: 12428 - RNA, 20 nt, Artificial Sequence
  spacer sequence GTCN PAM
uggaugguuugguggcagag

SEQ ID NO: 12429 - RNA, 20 nt, Artificial Sequence
  spacer sequence GTCN PAM
ggggcaguggcgggggcagg

SEQ ID NO: 12430 - RNA, 20 nt, Artificial Sequence
  spacer sequence GTCN PAM
acccggcccugagucugucu

SEQ ID NO: 12431 - RNA, 20 nt, Artificial Sequence
  spacer sequence GTCN PAM
gucucugaagaaauacucag

SEQ ID NO: 12432 - RNA, 20 nt, Artificial Sequence
  spacer sequence GTCN PAM
cugaagaaauacucagugca

SEQ ID NO: 12433 - RNA, 20 nt, Artificial Sequence
  spacer sequence GTCN PAM
gaaaagguuaagaccuugag

SEQ ID NO: 12434 - RNA, 20 nt, Artificial Sequence
  spacer sequence GTCN PAM
uaaccuuuucugacccugca

SEQ ID NO: 12435 - RNA, 20 nt, Artificial Sequence
  spacer sequence GTCN PAM
ucaaggucuuaaccuuuucu

SEQ ID NO: 12436 - RNA, 20 nt, Artificial Sequence
  spacer sequence GTCN PAM
ggaguucgagaccagccuga

SEQ ID NO: 12437 - RNA, 20 nt, Artificial Sequence
  spacer sequence GTCN PAM
cgaacucccgaccucaggug

SEQ ID NO: 12438 - RNA, 20 nt, Artificial Sequence
  spacer sequence GTCN PAM
ggcuggucucgaacucccga

SEQ ID NO: 12439 - RNA, 20 nt, Artificial Sequence
  spacer sequence GTCN PAM
ccugaguagcugggauuaca

SEQ ID NO: 12440 - RNA, 20 nt, Artificial Sequence
  spacer sequence GTCN PAM
cccaggcuggagugcagugg

SEQ ID NO: 12441 - RNA, 20 nt, Artificial Sequence
  spacer sequence GTCN PAM
gucacccaggcuggagugca

SEQ ID NO: 12442 - RNA, 20 nt, Artificial Sequence
  spacer sequence GTCN PAM
uggucugucacccaggcugg

SEQ ID NO: 12443 - RNA, 20 nt, Artificial Sequence
  spacer sequence GTCN PAM
aaguccaaucacggugacuc

SEQ ID NO: 12444 - RNA, 20 nt, Artificial Sequence
  spacer sequence GTCN PAM
aaucacggugacucaguucc

SEQ ID NO: 12445 - RNA, 20 nt, Artificial Sequence
  spacer sequence GTCN PAM
ccgugauuggacuuugaccc

SEQ ID NO: 12446 - RNA, 20 nt, Artificial Sequence
  spacer sequence GTCN PAM
aagccacgaagugaaaaaca

SEQ ID NO: 12447 - RNA, 20 nt, Artificial Sequence
  spacer sequence GTCN PAM
ggaggguuuucuuacacuuc

SEQ ID NO: 12448 - RNA, 20 nt, Artificial Sequence
  spacer sequence GTCN PAM
cugcgugggcagcugccccu

SEQ ID NO: 12449 - RNA, 20 nt, Artificial Sequence
  spacer sequence GTCN PAM
ugaugacucucaggucucag

SEQ ID NO: 12450 - RNA, 20 nt, Artificial Sequence
  spacer sequence GTCN PAM
ucaagacaguuaccacuuaa

SEQ ID NO: 12451 - RNA, 20 nt, Artificial Sequence
  spacer sequence GTCN PAM
cagugcccacauuauacaag

SEQ ID NO: 12452 - RNA, 20 nt, Artificial Sequence
  spacer sequence GTCN PAM
gguugcugagccgcuuguau

SEQ ID NO: 12453 - RNA, 20 nt, Artificial Sequence
  spacer sequence GTCN PAM
cugacccccugcgcccaugg

SEQ ID NO: 12454 - RNA, 20 nt, Artificial Sequence
  spacer sequence GTCN PAM
gugacuccccauccuggguc

SEQ ID NO: 12455 - RNA, 20 nt, Artificial Sequence
  spacer sequence GTCN PAM
cuacccucaccccugccaug

SEQ ID NO: 12456 - RNA, 20 nt, Artificial Sequence
  spacer sequence GTCN PAM
ggaguucgagaucagccugg

SEQ ID NO: 12457 - RNA, 20 nt, Artificial Sequence
  spacer sequence GTCN PAM
cuacuaaaaauacaaaaaaa

SEQ ID NO: 12458 - RNA, 20 nt, Artificial Sequence
  spacer sequence GTCN PAM
ggagaaucgcuugaacccgg

SEQ ID NO: 12459 - RNA, 20 nt, Artificial Sequence
  spacer sequence GTCN PAM
cggaaaaaaaaaaaaaaaaa

SEQ ID NO: 12460 - RNA, 20 nt, Artificial Sequence
  spacer sequence GTCN PAM
gaaguuugagaccagccuag

SEQ ID NO: 12461 - RNA, 20 nt, Artificial Sequence
  spacer sequence GTCN PAM
caaacuucugaccucaagug

SEQ ID NO: 12462 - RNA, 20 nt, Artificial Sequence
  spacer sequence GTCN PAM
cgcuauguugccuaggcugg

SEQ ID NO: 12463 - RNA, 20 nt, Artificial Sequence
  spacer sequence GTCN PAM
acaaaacaauaauuagccag

SEQ ID NO: 12464 - RNA, 20 nt, Artificial Sequence
  spacer sequence GTCN PAM
cagcuacucgggaagcagag

SEQ ID NO: 12465 - RNA, 20 nt, Artificial Sequence
  spacer sequence GTCN PAM
cugcuucccgaguagcuggg

SEQ ID NO: 12466 - RNA, 20 nt, Artificial Sequence
  spacer sequence GTCN PAM
aggcugcagugugcccugau

SEQ ID NO: 12467 - RNA, 20 nt, Artificial Sequence
  spacer sequence GTCN PAM
ugcuguguugcccaggcuaa

SEQ ID NO: 12468 - RNA, 20 nt, Artificial Sequence
  spacer sequence GTCN PAM
uaaaaaaaaaaagguaaaua

SEQ ID NO: 12469 - RNA, 20 nt, Artificial Sequence
  spacer sequence GTCN PAM
ccaacucuuauuuaccuuuu

SEQ ID NO: 12470 - RNA, 20 nt, Artificial Sequence
  spacer sequence GTCN PAM
aggggguuugguuucuccaa

SEQ ID NO: 12471 - RNA, 20 nt, Artificial Sequence
  spacer sequence GTCN PAM
uaaguaguauucucagguug

SEQ ID NO: 12472 - RNA, 20 nt, Artificial Sequence
  spacer sequence GTCN PAM
ggccugcggccgcgcugcug

SEQ ID NO: 12473 - RNA, 20 nt, Artificial Sequence
  spacer sequence GTCN PAM
accagccggauaacugcgcu

SEQ ID NO: 12474 - RNA, 20 nt, Artificial Sequence
  spacer sequence GTCN PAM
ggaggcagcgcaguuauccg

SEQ ID NO: 12475 - RNA, 20 nt, Artificial Sequence
  spacer sequence GTCN PAM
aggaggccguggccuggcug

SEQ ID NO: 12476 - RNA, 20 nt, Artificial Sequence
  spacer sequence GTCN PAM
ccaacaacaaguccgcacgu

SEQ ID NO: 12477 - RNA, 20 nt, Artificial Sequence
  spacer sequence GTCN PAM
gcacguccggucccgccccc

SEQ ID NO: 12478 - RNA, 20 nt, Artificial Sequence
  spacer sequence GTCN PAM
ggucccgcccccccuucccc

SEQ ID NO: 12479 - RNA, 20 nt, Artificial Sequence
  spacer sequence GTCN PAM
cgcccccccuuccccgccuu

SEQ ID NO: 12480 - RNA, 20 nt, Artificial Sequence
  spacer sequence GTCN PAM
gccaaugggaggccggagug

SEQ ID NO: 12481 - RNA, 20 nt, Artificial Sequence
  spacer sequence GTCN PAM
gcgcgagcgcucaacaccga

SEQ ID NO: 12482 - RNA, 20 nt, Artificial Sequence
  spacer sequence GTCN PAM
guguugagcgcucgcgccga

SEQ ID NO: 12483 - RNA, 20 nt, Artificial Sequence
  spacer sequence GTCN PAM
gaccaaugagcgcucuggag

SEQ ID NO: 12484 - RNA, 20 nt, Artificial Sequence
  spacer sequence GTCN PAM
gacgcgucgguguugagcgc

SEQ ID NO: 12485 - RNA, 20 nt, Artificial Sequence
  spacer sequence GTCN PAM
gcuuuccgcgccuccuuucc

SEQ ID NO: 12486 - RNA, 20 nt, Artificial Sequence
  spacer sequence GTCN PAM
auuggucggcuggacgaggg

SEQ ID NO: 12487 - RNA, 20 nt, Artificial Sequence
  spacer sequence GTCN PAM
gcuggacgaggggaggagcc

SEQ ID NO: 12488 - RNA, 20 nt, Artificial Sequence
  spacer sequence GTCN PAM
agccgaccaauggacgcgcg

SEQ ID NO: 12489 - RNA, 20 nt, Artificial Sequence
  spacer sequence GTCN PAM
cggccaggccaggcgcggcc

SEQ ID NO: 12490 - RNA, 20 nt, Artificial Sequence
  spacer sequence GTCN PAM
ccgggccggcaacggccgcg

SEQ ID NO: 12491 - RNA, 20 nt, Artificial Sequence
  spacer sequence GTCN PAM
cuggagccugaggguucccc

SEQ ID NO: 12492 - RNA, 20 nt, Artificial Sequence
  spacer sequence GTCN PAM
gggggcucccccuccccacc

SEQ ID NO: 12493 - RNA, 20 nt, Artificial Sequence
  spacer sequence GTCN PAM
gugcccggccgggggugggg

SEQ ID NO: 12494 - RNA, 20 nt, Artificial Sequence
  spacer sequence GTCN PAM
cccgcguccgugcccggccg

SEQ ID NO: 12495 - RNA, 20 nt, Artificial Sequence
  spacer sequence GTCN PAM
caguacggucacccgcgucc

SEQ ID NO: 12496 - RNA, 20 nt, Artificial Sequence
  spacer sequence GTCN PAM
gggaaggggaagggguuguu

SEQ ID NO: 12497 - RNA, 20 nt, Artificial Sequence
  spacer sequence GTCN PAM
uggucggggaaggggccguc

SEQ ID NO: 12498 - RNA, 20 nt, Artificial Sequence
  spacer sequence GTCN PAM
gggaaggggccguccaggcc

SEQ ID NO: 12499 - RNA, 20 nt, Artificial Sequence
  spacer sequence GTCN PAM
aggccguugcaggcgcgcgu

SEQ ID NO: 12500 - RNA, 20 nt, Artificial Sequence
  spacer sequence GTCN PAM
gggguccaggcuugcagggg

SEQ ID NO: 12501 - RNA, 20 nt, Artificial Sequence
  spacer sequence GTCN PAM
aggcuugcagggggcggggu

SEQ ID NO: 12502 - RNA, 20 nt, Artificial Sequence
  spacer sequence GTCN PAM
gggacggcuggggcggagcu

SEQ ID NO: 12503 - RNA, 20 nt, Artificial Sequence
  spacer sequence GTCN PAM
cggaccccgcccccugcaag

SEQ ID NO: 12504 - RNA, 20 nt, Artificial Sequence
  spacer sequence GTCN PAM
agcuccgccccagccguccc

SEQ ID NO: 12505 - RNA, 20 nt, Artificial Sequence
  spacer sequence GTCN PAM
ccgggccgagcggggcugcu

SEQ ID NO: 12506 - RNA, 20 nt, Artificial Sequence
  spacer sequence GTCN PAM
cagucgcgcaguccugacua

SEQ ID NO: 12507 - RNA, 20 nt, Artificial Sequence
  spacer sequence GTCN PAM
cgcaguccugacuacggccu

SEQ ID NO: 12508 - RNA, 20 nt, Artificial Sequence
  spacer sequence GTCN PAM
ugacuacggccuccgggccc

SEQ ID NO: 12509 - RNA, 20 nt, Artificial Sequence
  spacer sequence GTCN PAM
ggacugcgcgacugugacgc

SEQ ID NO: 12510 - RNA, 20 nt, Artificial Sequence
  spacer sequence GTCN PAM
ccgcuagcggcgcucggggu

SEQ ID NO: 12511 - RNA, 20 nt, Artificial Sequence
  spacer sequence GTCN PAM
cccgccccuccuggcucccc

SEQ ID NO: 12512 - RNA, 20 nt, Artificial Sequence
  spacer sequence GTCN PAM
ccgcagcuugcgaccggaga

SEQ ID NO: 12513 - RNA, 20 nt, Artificial Sequence
  spacer sequence GTCN PAM
caagcugcggggacagggcu

SEQ ID NO: 12514 - RNA, 20 nt, Artificial Sequence
  spacer sequence GTCN PAM
caagucccaggacccggugc

SEQ ID NO: 12515 - RNA, 20 nt, Artificial Sequence
  spacer sequence GTCN PAM
caggacccggugcgcgcggg

SEQ ID NO: 12516 - RNA, 20 nt, Artificial Sequence
  spacer sequence GTCN PAM
ugggacuugggacauucgug

SEQ ID NO: 12517 - RNA, 20 nt, Artificial Sequence
  spacer sequence GTCN PAM
ccgguaaaaccggaccagaa

SEQ ID NO: 12518 - RNA, 20 nt, Artificial Sequence
  spacer sequence GTCN PAM
gguuuuaccggagacccgga

SEQ ID NO: 12519 - RNA, 20 nt, Artificial Sequence
  spacer sequence GTCN PAM
ucagggccgcagggccucgg

SEQ ID NO: 12520 - RNA, 20 nt, Artificial Sequence
  spacer sequence GTCN PAM
ccgccaccgacccgcucccg

SEQ ID NO: 12521 - RNA, 20 nt, Artificial Sequence
  spacer sequence GTCN PAM
guggcggggacaccgaggcc

SEQ ID NO: 12522 - RNA, 20 nt, Artificial Sequence
  spacer sequence GTCN PAM
cgggcucagccucccgucca

SEQ ID NO: 12523 - RNA, 20 nt, Artificial Sequence
  spacer sequence GTCN PAM
acgcucccugcucagcuucc

SEQ ID NO: 12524 - RNA, 20 nt, Artificial Sequence
  spacer sequence GTCN PAM
cgggacgacuggcgcugugc

SEQ ID NO: 12525 - RNA, 20 nt, Artificial Sequence
  spacer sequence GTCN PAM
cgggacgcgcacugcaaggc

SEQ ID NO: 12526 - RNA, 20 nt, Artificial Sequence
  spacer sequence GTCN PAM
ucccgggacgcgcacugcaa

SEQ ID NO: 12527 - RNA, 20 nt, Artificial Sequence
  spacer sequence GTCN PAM
uuggcggaaaacucgugcau

SEQ ID NO: 12528 - RNA, 20 nt, Artificial Sequence
  spacer sequence GTCN PAM
auguccuuggcggaaaacuc

SEQ ID NO: 12529 - RNA, 20 nt, Artificial Sequence
  spacer sequence GTCN PAM
agguuaaccaugugcccguc

SEQ ID NO: 12530 - RNA, 20 nt, Artificial Sequence
  spacer sequence GTCN PAM
ggcccugggagggggccgug

SEQ ID NO: 12531 - RNA, 20 nt, Artificial Sequence
  spacer sequence GTCN PAM
gcgcagaagaacacggcccc

SEQ ID NO: 12532 - RNA, 20 nt, Artificial Sequence
  spacer sequence GTCN PAM
ccaacguggccucccaguga

SEQ ID NO: 12533 - RNA, 20 nt, Artificial Sequence
  spacer sequence GTCN PAM
ugccucacugggaggccacg

SEQ ID NO: 12534 - RNA, 20 nt, Artificial Sequence
  spacer sequence GTCN PAM
accugcacgcccgauacgcu

SEQ ID NO: 12535 - RNA, 20 nt, Artificial Sequence
  spacer sequence GTCN PAM
acgagcugaguguaguuuac

SEQ ID NO: 12536 - RNA, 20 nt, Artificial Sequence
  spacer sequence GTCN PAM
ccggggcccgcagaggcggg

SEQ ID NO: 12537 - RNA, 20 nt, Artificial Sequence
  spacer sequence GTCN PAM
gggugggcuccagccuggag

SEQ ID NO: 12538 - RNA, 20 nt, Artificial Sequence
  spacer sequence GTCN PAM
gggcccccugcacacuccca

SEQ ID NO: 12539 - RNA, 20 nt, Artificial Sequence
  spacer sequence GTCN PAM
ggggcuggcacccccucagu

SEQ ID NO: 12540 - RNA, 20 nt, Artificial Sequence
  spacer sequence GTCN PAM
aauucgauauguucagcaag

SEQ ID NO: 12541 - RNA, 20 nt, Artificial Sequence
  spacer sequence GTCN PAM
ccguucacgcagaucuugcu

SEQ ID NO: 12542 - RNA, 20 nt, Artificial Sequence
  spacer sequence GTCN PAM
uccccguucacgcagaucuu

SEQ ID NO: 12543 - RNA, 20 nt, Artificial Sequence
  spacer sequence GTCN PAM
cgcacuuucccaggaugccc

SEQ ID NO: 12544 - RNA, 20 nt, Artificial Sequence
  spacer sequence GTCN PAM
ccagaggucacgcacuuucc

SEQ ID NO: 12545 - RNA, 20 nt, Artificial Sequence
  spacer sequence GTCN PAM
cagcaccuccccgcaaccgc

SEQ ID NO: 12546 - RNA, 20 nt, Artificial Sequence
  spacer sequence GTCN PAM
cccugagccaucuuaccccc

SEQ ID NO: 12547 - RNA, 20 nt, Artificial Sequence
  spacer sequence GTCN PAM
ccaggaggccacaaaggugu

SEQ ID NO: 12548 - RNA, 20 nt, Artificial Sequence
  spacer sequence GTCN PAM
caacagccccccacaggccc

SEQ ID NO: 12549 - RNA, 20 nt, Artificial Sequence
  spacer sequence GTCN PAM
ccaggaggccacaagggugu

SEQ ID NO: 12550 - RNA, 20 nt, Artificial Sequence
  spacer sequence GTCN PAM
ugucuccaggaggccacaag

SEQ ID NO: 12551 - RNA, 20 nt, Artificial Sequence
  spacer sequence GTCN PAM
ccaagcuguccugucuccag

SEQ ID NO: 12552 - RNA, 20 nt, Artificial Sequence
  spacer sequence GTCN PAM
ccagcagccccccacagucc

SEQ ID NO: 12553 - RNA, 20 nt, Artificial Sequence
  spacer sequence GTCN PAM
augugcuucuuuuccagugc

SEQ ID NO: 12554 - RNA, 20 nt, Artificial Sequence
  spacer sequence GTCN PAM
ccuaccccccacagcccccu

SEQ ID NO: 12555 - RNA, 20 nt, Artificial Sequence
  spacer sequence GTCN PAM
gcugcccaucugggccacgg

SEQ ID NO: 12556 - RNA, 20 nt, Artificial Sequence
  spacer sequence GTCN PAM
aaacuguggggccaccccug

SEQ ID NO: 12557 - RNA, 20 nt, Artificial Sequence
  spacer sequence GTCN PAM
cuccacaguuccucaucgac

SEQ ID NO: 12558 - RNA, 20 nt, Artificial Sequence
  spacer sequence GTCN PAM
augaggaacuguggagagac

SEQ ID NO: 12559 - RNA, 20 nt, Artificial Sequence
  spacer sequence GTCN PAM
guagcgcuucaccacgcagc

SEQ ID NO: 12560 - RNA, 20 nt, Artificial Sequence
  spacer sequence GTCN PAM
ucucuagggagcccgcuuga

SEQ ID NO: 12561 - RNA, 20 nt, Artificial Sequence
  spacer sequence GTCN PAM
gggaggaaagcuggguuagg

SEQ ID NO: 12562 - RNA, 20 nt, Artificial Sequence
  spacer sequence GTCN PAM
uucucuaucaccugucgggg

SEQ ID NO: 12563 - RNA, 20 nt, Artificial Sequence
  spacer sequence GTCN PAM
ugagugccgguggaaggcuc

SEQ ID NO: 12564 - RNA, 20 nt, Artificial Sequence
  spacer sequence GTCN PAM
gccccaccagcagguuugca

SEQ ID NO: 12565 - RNA, 20 nt, Artificial Sequence
  spacer sequence GTCN PAM
cauggccugcugggcuuggc

SEQ ID NO: 12566 - RNA, 20 nt, Artificial Sequence
  spacer sequence GTCN PAM
guuuauucccacaagguagc

SEQ ID NO: 12567 - RNA, 20 nt, Artificial Sequence
  spacer sequence GTCN PAM
gggccaguugccgucagcug

SEQ ID NO: 12568 - RNA, 20 nt, Artificial Sequence
  spacer sequence GTCN PAM
gcugccaggcugggggugcc

SEQ ID NO: 12569 - RNA, 20 nt, Artificial Sequence
  spacer sequence GTCN PAM
aacgggcccagaucucacug

SEQ ID NO: 12570 - RNA, 20 nt, Artificial Sequence
  spacer sequence GTCN PAM
uggaggagauaauucuaagu

SEQ ID NO: 12571 - RNA, 20 nt, Artificial Sequence
  spacer sequence GTCN PAM
cuccgugagggcuggggaug

SEQ ID NO: 12572 - RNA, 20 nt, Artificial Sequence
  spacer sequence GTCN PAM
auccccagcccucacggagg

SEQ ID NO: 12573 - RNA, 20 nt, Artificial Sequence
  spacer sequence GTCN PAM
caugaacgguggcugguacu

SEQ ID NO: 12574 - RNA, 20 nt, Artificial Sequence
  spacer sequence GTCN PAM
ggacacggccuggcugccca

SEQ ID NO: 12575 - RNA, 20 nt, Artificial Sequence
  spacer sequence GTCN PAM
agacagcccccgggucccau

SEQ ID NO: 12576 - RNA, 20 nt, Artificial Sequence
  spacer sequence GTCN PAM
cucuagcugugcaggugggc

SEQ ID NO: 12577 - RNA, 20 nt, Artificial Sequence
  spacer sequence GTCN PAM
guggaauggacgguccaugg

SEQ ID NO: 12578 - RNA, 20 nt, Artificial Sequence
  spacer sequence GTCN PAM
auuccacagacccccagugg

SEQ ID NO: 12579 - RNA, 20 nt, Artificial Sequence
  spacer sequence GTCN PAM
auggcaccugccccagacac

SEQ ID NO: 12580 - RNA, 20 nt, Artificial Sequence
  spacer sequence GTCN PAM
ggggcaggugccauggaccg

SEQ ID NO: 12581 - RNA, 20 nt, Artificial Sequence
  spacer sequence GTCN PAM
gucucucccagcccucgucc

SEQ ID NO: 12582 - RNA, 20 nt, Artificial Sequence
  spacer sequence GTCN PAM
cucccagcccucguccccuc

SEQ ID NO: 12583 - RNA, 20 nt, Artificial Sequence
  spacer sequence GTCN PAM
ccucucauccacauggggcc

SEQ ID NO: 12584 - RNA, 20 nt, Artificial Sequence
  spacer sequence GTCN PAM
cacaggcugaggagcagacu

SEQ ID NO: 12585 - RNA, 20 nt, Artificial Sequence
  spacer sequence GTCN PAM
gcuccucagccugugggaca

SEQ ID NO: 12586 - RNA, 20 nt, Artificial Sequence
  spacer sequence GTCN PAM
uuuacauauguacaucagaa

SEQ ID NO: 12587 - RNA, 20 nt, Artificial Sequence
  spacer sequence GTCN PAM
gggaagggcugggggaggga

SEQ ID NO: 12588 - RNA, 20 nt, Artificial Sequence
  spacer sequence GTCN PAM
gccccacggagcccccgaga

SEQ ID NO: 12589 - RNA, 20 nt, Artificial Sequence
  spacer sequence GTCN PAM
cgggggcuccguggggcaga

SEQ ID NO: 12590 - RNA, 20 nt, Artificial Sequence
  spacer sequence GTCN PAM
caagagcuagaaacucagga

SEQ ID NO: 12591 - RNA, 20 nt, Artificial Sequence
  spacer sequence GTCN PAM
cagagcagccacccggagcc

SEQ ID NO: 12592 - RNA, 20 nt, Artificial Sequence
  spacer sequence GTCN PAM
ugagugggccccgccagggc

SEQ ID NO: 12593 - RNA, 20 nt, Artificial Sequence
  spacer sequence GTCN PAM
gcccuggcggggcccacuca

SEQ ID NO: 12594 - RNA, 20 nt, Artificial Sequence
  spacer sequence GTCN PAM
ggcgcugaaggcacugcggc

SEQ ID NO: 12595 - RNA, 20 nt, Artificial Sequence
  spacer sequence GTCN PAM
ggggaccuuggcccugcucc

SEQ ID NO: 12596 - RNA, 20 nt, Artificial Sequence
  spacer sequence GTCN PAM
ccugaccacugcucagagga

SEQ ID NO: 12597 - RNA, 20 nt, Artificial Sequence
  spacer sequence GTCN PAM
cugugucuuggggcauguuu

SEQ ID NO: 12598 - RNA, 20 nt, Artificial Sequence
  spacer sequence GTCN PAM
uggggcauguuucgccuaaa

SEQ ID NO: 12599 - RNA, 20 nt, Artificial Sequence
  spacer sequence GTCN PAM
gagaggagccugggcgccgg

SEQ ID NO: 12600 - RNA, 20 nt, Artificial Sequence
  spacer sequence GTCN PAM
ggcucaggaugguggugagg

SEQ ID NO: 12601 - RNA, 20 nt, Artificial Sequence
  spacer sequence GTCN PAM
ucaccaccauccugagccag

SEQ ID NO: 12602 - RNA, 20 nt, Artificial Sequence
  spacer sequence GTCN PAM
ccuucucccccuaguauggc

SEQ ID NO: 12603 - RNA, 20 nt, Artificial Sequence
  spacer sequence GTCN PAM
agggaaagccagccuccucc

SEQ ID NO: 12604 - RNA, 20 nt, Artificial Sequence
  spacer sequence GTCN PAM
aggggccuaggggagggugg

SEQ ID NO: 12605 - RNA, 20 nt, Artificial Sequence
  spacer sequence GTCN PAM
aggggagggcaggguccagg

SEQ ID NO: 12606 - RNA, 20 nt, Artificial Sequence
  spacer sequence GTCN PAM
aggagucuaggggagggcag

SEQ ID NO: 12607 - RNA, 20 nt, Artificial Sequence
  spacer sequence GTCN PAM
uagacuggguccucccccag

SEQ ID NO: 12608 - RNA, 20 nt, Artificial Sequence
  spacer sequence GTCN PAM
aggacccccggggaggaggu

SEQ ID NO: 12609 - RNA, 20 nt, Artificial Sequence
  spacer sequence GTCN PAM
ucccccagaccccuggaugc

SEQ ID NO: 12610 - RNA, 20 nt, Artificial Sequence
  spacer sequence GTCN PAM
gggggaggacccagucuagg

SEQ ID NO: 12611 - RNA, 20 nt, Artificial Sequence
  spacer sequence GTCN PAM
uagacccggcccuccuccag

SEQ ID NO: 12612 - RNA, 20 nt, Artificial Sequence
  spacer sequence GTCN PAM
aggacccccaggggggaagg

SEQ ID NO: 12613 - RNA, 20 nt, Artificial Sequence
  spacer sequence GTCN PAM
ggaggagggccgggucuagg

SEQ ID NO: 12614 - RNA, 20 nt, Artificial Sequence
  spacer sequence GTCN PAM
agggagggccggaucuaaga

SEQ ID NO: 12615 - RNA, 20 nt, Artificial Sequence
  spacer sequence GTCN PAM
cgggacuccguggcgcggcg

SEQ ID NO: 12616 - RNA, 20 nt, Artificial Sequence
  spacer sequence GTCN PAM
cgugaccucagcaaguacaa

SEQ ID NO: 12617 - RNA, 20 nt, Artificial Sequence
  spacer sequence GTCN PAM
ccgugggucagggcccccug

SEQ ID NO: 12618 - RNA, 20 nt, Artificial Sequence
  spacer sequence GTCN PAM
gggcccccugccaggggugg

SEQ ID NO: 12619 - RNA, 20 nt, Artificial Sequence
  spacer sequence GTCN PAM
ccuggggucuggccucuagc

SEQ ID NO: 12620 - RNA, 20 nt, Artificial Sequence
  spacer sequence GTCN PAM
ggccucuagcaccccacaaa

SEQ ID NO: 12621 - RNA, 20 nt, Artificial Sequence
  spacer sequence GTCN PAM
cugguucucagccccacccc

SEQ ID NO: 12622 - RNA, 20 nt, Artificial Sequence
  spacer sequence GTCN PAM
ggugagcagguggggguggg

SEQ ID NO: 12623 - RNA, 20 nt, Artificial Sequence
  spacer sequence GTCN PAM
uccucaucucggagcuggcc

SEQ ID NO: 12624 - RNA, 20 nt, Artificial Sequence
  spacer sequence GTCN PAM
ccgcgccagaguaugucuuc

SEQ ID NO: 12625 - RNA, 20 nt, Artificial Sequence
  spacer sequence GTCN PAM
aaccaggucuccgcgccaga

SEQ ID NO: 12626 - RNA, 20 nt, Artificial Sequence
  spacer sequence GTCN PAM
cggccccgcccccgccuggc

SEQ ID NO: 12627 - RNA, 20 nt, Artificial Sequence
  spacer sequence GTCN PAM
ggccccgcccccagcgcugc

SEQ ID NO: 12628 - RNA, 20 nt, Artificial Sequence
  spacer sequence GTCN PAM
gcgcuccacggcagcuccaa

SEQ ID NO: 12629 - RNA, 20 nt, Artificial Sequence
  spacer sequence GTCN PAM
ugugcacgcggcgccgcugg

SEQ ID NO: 12630 - RNA, 20 nt, Artificial Sequence
  spacer sequence GTCN PAM
agaaccagcggcgccgcgug

SEQ ID NO: 12631 - RNA, 20 nt, Artificial Sequence
  spacer sequence GTCN PAM
gcuuggagggagacacccga

SEQ ID NO: 12632 - RNA, 20 nt, Artificial Sequence
  spacer sequence GTCN PAM
cccuccaagccgaccgccgu

SEQ ID NO: 12633 - RNA, 20 nt, Artificial Sequence
  spacer sequence GTCN PAM
cggccccuucuuucccccua

SEQ ID NO: 12634 - RNA, 20 nt, Artificial Sequence
  spacer sequence GTCN PAM
ccaggacgucccggggcagc

SEQ ID NO: 12635 - RNA, 20 nt, Artificial Sequence
  spacer sequence GTCN PAM
uggugaccuggagcgggggc

SEQ ID NO: 12636 - RNA, 20 nt, Artificial Sequence
  spacer sequence GTCN PAM
cggggcagcgagaggccugc

SEQ ID NO: 12637 - RNA, 20 nt, Artificial Sequence
  spacer sequence GTCN PAM
gcgccccgcaggccucucgc

SEQ ID NO: 12638 - RNA, 20 nt, Artificial Sequence
  spacer sequence GTCN PAM
acaguccccggggacccuug

SEQ ID NO: 12639 - RNA, 20 nt, Artificial Sequence
  spacer sequence GTCN PAM
ccggggacccuugggccccu

SEQ ID NO: 12640 - RNA, 20 nt, Artificial Sequence
  spacer sequence GTCN PAM
ccggggacuguggacccgcg

SEQ ID NO: 12641 - RNA, 20 nt, Artificial Sequence
  spacer sequence GTCN PAM
cgugggccgcgcccagugca

SEQ ID NO: 12642 - RNA, 20 nt, Artificial Sequence
  spacer sequence GTCN PAM
auggacagacccugcucugc

SEQ ID NO: 12643 - RNA, 20 nt, Artificial Sequence
  spacer sequence GTCN PAM
aucgaccacgugaaccucag

SEQ ID NO: 12644 - RNA, 20 nt, Artificial Sequence
  spacer sequence GTCN PAM
guccaucgaccacgugaacc

SEQ ID NO: 12645 - RNA, 20 nt, Artificial Sequence
  spacer sequence GTCN PAM
cgggcagagcagggucuguc

SEQ ID NO: 12646 - RNA, 20 nt, Artificial Sequence
  spacer sequence GTCN PAM
cgucgggccuggacaccacg

SEQ ID NO: 12647 - RNA, 20 nt, Artificial Sequence
  spacer sequence GTCN PAM
ggccuggacaccacgcggcc

SEQ ID NO: 12648 - RNA, 20 nt, Artificial Sequence
  spacer sequence GTCN PAM
aggcccgacgggacgguggc

SEQ ID NO: 12649 - RNA, 20 nt, Artificial Sequence
  spacer sequence GTCN PAM
ucugcagccgagacagggac

SEQ ID NO: 12650 - RNA, 20 nt, Artificial Sequence
  spacer sequence GTCN PAM
cggcugcagaugaccggcag

SEQ ID NO: 12651 - RNA, 20 nt, Artificial Sequence
  spacer sequence GTCN PAM
cugucucggcugcagaugac

SEQ ID NO: 12652 - RNA, 20 nt, Artificial Sequence
  spacer sequence GTCN PAM
guguuguggccucgcaggag

SEQ ID NO: 12653 - RNA, 20 nt, Artificial Sequence
  spacer sequence GTCN PAM
ggccacccgugucucagcuu

SEQ ID NO: 12654 - RNA, 20 nt, Artificial Sequence
  spacer sequence GTCN PAM
cagcuucccuauguccuaca

SEQ ID NO: 12655 - RNA, 20 nt, Artificial Sequence
  spacer sequence GTCN PAM
uacaguggucaugggcuccc

SEQ ID NO: 12656 - RNA, 20 nt, Artificial Sequence
  spacer sequence GTCN PAM
ugggcucccagcugugcacg

SEQ ID NO: 12657 - RNA, 20 nt, Artificial Sequence
  spacer sequence GTCN PAM
cgcccucccuuucccagcac

SEQ ID NO: 12658 - RNA, 20 nt, Artificial Sequence
  spacer sequence GTCN PAM
agcagucccgcccucccuuu

SEQ ID NO: 12659 - RNA, 20 nt, Artificial Sequence
  spacer sequence GTCN PAM
aaggccugguauuaucagcc

SEQ ID NO: 12660 - RNA, 20 nt, Artificial Sequence
  spacer sequence GTCN PAM
uggcccugggcaccccaagg

SEQ ID NO: 12661 - RNA, 20 nt, Artificial Sequence
  spacer sequence GTCN PAM
acaggaggucguggccuccc

SEQ ID NO: 12662 - RNA, 20 nt, Artificial Sequence
  spacer sequence GTCN PAM
uggccucccgggccgagcug

SEQ ID NO: 12663 - RNA, 20 nt, Artificial Sequence
  spacer sequence GTCN PAM
agcucggcccgggaggccac

SEQ ID NO: 12664 - RNA, 20 nt, Artificial Sequence
  spacer sequence GTCN PAM
ccgcggcccugcgaggaggg

SEQ ID NO: 12665 - RNA, 20 nt, Artificial Sequence
  spacer sequence GTCN PAM
cucugcgucuccgcggcccu

SEQ ID NO: 12666 - RNA, 20 nt, Artificial Sequence
  spacer sequence GTCN PAM
cacccaccuccgccacccgc

SEQ ID NO: 12667 - RNA, 20 nt, Artificial Sequence
  spacer sequence GTCN PAM
augagcucguccaggguguu

SEQ ID NO: 12668 - RNA, 20 nt, Artificial Sequence
  spacer sequence GTCN PAM
aggguguugacuggcaguuc

SEQ ID NO: 12669 - RNA, 20 nt, Artificial Sequence
  spacer sequence GTCN PAM
acacccuggacgagcucauc

SEQ ID NO: 12670 - RNA, 20 nt, Artificial Sequence
  spacer sequence GTCN PAM
agcagauccugcuucagccg

SEQ ID NO: 12671 - RNA, 20 nt, Artificial Sequence
  spacer sequence GTCN PAM
uggagcggguggagcggcug

SEQ ID NO: 12672 - RNA, 20 nt, Artificial Sequence
  spacer sequence GTCN PAM
cucugcaggaggcacagggg

SEQ ID NO: 12673 - RNA, 20 nt, Artificial Sequence
  spacer sequence GTCN PAM
uagggaggagguggaggguc

SEQ ID NO: 12674 - RNA, 20 nt, Artificial Sequence
  spacer sequence GTCN PAM
gggcaggacauguuggcugc

SEQ ID NO: 12675 - RNA, 20 nt, Artificial Sequence
  spacer sequence GTCN PAM
ugcccugacccuccaccucc

SEQ ID NO: 12676 - RNA, 20 nt, Artificial Sequence
  spacer sequence GTCN PAM
uugcccuccaggggccagcc

SEQ ID NO: 12677 - RNA, 20 nt, Artificial Sequence
  spacer sequence GTCN PAM
cucaggguugccccgggccc

SEQ ID NO: 12678 - RNA, 20 nt, Artificial Sequence
  spacer sequence GTCN PAM
ugggccacggugccgggcuu

SEQ ID NO: 12679 - RNA, 20 nt, Artificial Sequence
  spacer sequence GTCN PAM
cccugagaccagcuggggcg

SEQ ID NO: 12680 - RNA, 20 nt, Artificial Sequence
  spacer sequence GTCN PAM
cagggagacaagugcagaaa

SEQ ID NO: 12681 - RNA, 20 nt, Artificial Sequence
  spacer sequence GTCN PAM
cgccccagcuggucucaggg

SEQ ID NO: 12682 - RNA, 20 nt, Artificial Sequence
  spacer sequence GTCN PAM
cggaccaaacacugugaccu

SEQ ID NO: 12683 - RNA, 20 nt, Artificial Sequence
  spacer sequence GTCN PAM
gcgacaggaggcuuagucuc

SEQ ID NO: 12684 - RNA, 20 nt, Artificial Sequence
  spacer sequence GTCN PAM
caguguuugguccgcgacag

SEQ ID NO: 12685 - RNA, 20 nt, Artificial Sequence
  spacer sequence GTCN PAM
cuaccccuguggaggcagug

SEQ ID NO: 12686 - RNA, 20 nt, Artificial Sequence
  spacer sequence GTCN PAM
gaggcagagcuggggcuugg

SEQ ID NO: 12687 - RNA, 20 nt, Artificial Sequence
  spacer sequence GTCN PAM
gggguuauaccacuggucag

SEQ ID NO: 12688 - RNA, 20 nt, Artificial Sequence
  spacer sequence GTCN PAM
agcccaccugagcccagcug

SEQ ID NO: 12689 - RNA, 20 nt, Artificial Sequence
  spacer sequence GTCN PAM
ccacccaccccagguuguag

SEQ ID NO: 12690 - RNA, 20 nt, Artificial Sequence
  spacer sequence GTCN PAM
ggauuccagccugaggcucc

SEQ ID NO: 12691 - RNA, 20 nt, Artificial Sequence
  spacer sequence GTCN PAM
aggcugagcagccaccucug

SEQ ID NO: 12692 - RNA, 20 nt, Artificial Sequence
  spacer sequence GTCN PAM
ggauuccaguccaggcugag

SEQ ID NO: 12693 - RNA, 20 nt, Artificial Sequence
  spacer sequence GTCN PAM
ucacuggggagcccgacugc

SEQ ID NO: 12694 - RNA, 20 nt, Artificial Sequence
  spacer sequence GTCN PAM
cuggggagcccgacugcauc

SEQ ID NO: 12695 - RNA, 20 nt, Artificial Sequence
  spacer sequence GTCN PAM
ggcuccccagugacgaccgg

SEQ ID NO: 12696 - RNA, 20 nt, Artificial Sequence
  spacer sequence GTCN PAM
ucguugaugcagucgggcuc

SEQ ID NO: 12697 - RNA, 20 nt, Artificial Sequence
  spacer sequence GTCN PAM
ucauccaccagggacucggg

SEQ ID NO: 12698 - RNA, 20 nt, Artificial Sequence
  spacer sequence GTCN PAM
uccaccagggacucggggga

SEQ ID NO: 12699 - RNA, 20 nt, Artificial Sequence
  spacer sequence GTCN PAM
cugguggaugacgacguugu

SEQ ID NO: 12700 - RNA, 20 nt, Artificial Sequence
  spacer sequence GTCN PAM
cuguccaggccaggguccga

SEQ ID NO: 12701 - RNA, 20 nt, Artificial Sequence
  spacer sequence GTCN PAM
aggccaggguccgacuccgu

SEQ ID NO: 12702 - RNA, 20 nt, Artificial Sequence
  spacer sequence GTCN PAM
gacuccgugcugcugucguc

SEQ ID NO: 12703 - RNA, 20 nt, Artificial Sequence
  spacer sequence GTCN PAM
gacccuggccuggacagcga

SEQ ID NO: 12704 - RNA, 20 nt, Artificial Sequence
  spacer sequence GTCN PAM
ucacugaugcggaugacgcc

SEQ ID NO: 12705 - RNA, 20 nt, Artificial Sequence
  spacer sequence GTCN PAM
cugaugcggaugacgcccgc

SEQ ID NO: 12706 - RNA, 20 nt, Artificial Sequence
  spacer sequence GTCN PAM
uccgcaucagugacgacagc

SEQ ID NO: 12707 - RNA, 20 nt, Artificial Sequence
  spacer sequence GTCN PAM
cgcacgccagccggggggcu

SEQ ID NO: 12708 - RNA, 20 nt, Artificial Sequence
  spacer sequence GTCN PAM
ccgaggucgcccugcaggga

SEQ ID NO: 12709 - RNA, 20 nt, Artificial Sequence
  spacer sequence GTCN PAM
cccugcagggaaggacaggg

SEQ ID NO: 12710 - RNA, 20 nt, Artificial Sequence
  spacer sequence GTCN PAM
uucccugcagggcgaccucg

SEQ ID NO: 12711 - RNA, 20 nt, Artificial Sequence
  spacer sequence GTCN PAM
ccgagggccagaccgcagca

SEQ ID NO: 12712 - RNA, 20 nt, Artificial Sequence
  spacer sequence GTCN PAM
ggcccucggugacccugucc

SEQ ID NO: 12713 - RNA, 20 nt, Artificial Sequence
  spacer sequence GTCN PAM
ccuccaccugcuccuccacc

SEQ ID NO: 12714 - RNA, 20 nt, Artificial Sequence
  spacer sequence GTCN PAM
ugcugcgucuccuccaccug

SEQ ID NO: 12715 - RNA, 20 nt, Artificial Sequence
  spacer sequence GTCN PAM
gagcuggggagguccauccg

SEQ ID NO: 12716 - RNA, 20 nt, Artificial Sequence
  spacer sequence GTCN PAM
auccgagaacccccugccuc

SEQ ID NO: 12717 - RNA, 20 nt, Artificial Sequence
  spacer sequence GTCN PAM
cuggagaacagcugagcugc

SEQ ID NO: 12718 - RNA, 20 nt, Artificial Sequence
  spacer sequence GTCN PAM
uccacagggugugcccggag

SEQ ID NO: 12719 - RNA, 20 nt, Artificial Sequence
  spacer sequence GTCN PAM
agacuccacugcccugaagc

SEQ ID NO: 12720 - RNA, 20 nt, Artificial Sequence
  spacer sequence GTCN PAM
ugaccuccuccgggcacacc

SEQ ID NO: 12721 - RNA, 20 nt, Artificial Sequence
  spacer sequence GTCN PAM
agcccgagccagggucacac

SEQ ID NO: 12722 - RNA, 20 nt, Artificial Sequence
  spacer sequence GTCN PAM
cacgcccaacagguaggauc

SEQ ID NO: 12723 - RNA, 20 nt, Artificial Sequence
  spacer sequence GTCN PAM
ucccucgcauggcgggggcu

SEQ ID NO: 12724 - RNA, 20 nt, Artificial Sequence
  spacer sequence GTCN PAM
ggcagggccacgcucaacuc

SEQ ID NO: 12725 - RNA, 20 nt, Artificial Sequence
  spacer sequence GTCN PAM
gaugucaggcagggccacgc

SEQ ID NO: 12726 - RNA, 20 nt, Artificial Sequence
  spacer sequence GTCN PAM
ggagcuccaccaggucaggg

SEQ ID NO: 12727 - RNA, 20 nt, Artificial Sequence
  spacer sequence GTCN PAM
gggcugcucagcugacccca

SEQ ID NO: 12728 - RNA, 20 nt, Artificial Sequence
  spacer sequence GTCN PAM
gcugagcagcccugaccugg

SEQ ID NO: 12729 - RNA, 20 nt, Artificial Sequence
  spacer sequence GTCN PAM
gcacggugccgaaugcaggc

SEQ ID NO: 12730 - RNA, 20 nt, Artificial Sequence
  spacer sequence GTCN PAM
cccuggcccuguggcuucca

SEQ ID NO: 12731 - RNA, 20 nt, Artificial Sequence
  spacer sequence GTCN PAM
uggcugagaugcgagcaggg

SEQ ID NO: 12732 - RNA, 20 nt, Artificial Sequence
  spacer sequence GTCN PAM
cugagaacagaaggaagucc

SEQ ID NO: 12733 - RNA, 20 nt, Artificial Sequence
  spacer sequence GTCN PAM
aggcccagagucagagccaa

SEQ ID NO: 12734 - RNA, 20 nt, Artificial Sequence
  spacer sequence GTCN PAM
gagccaaguggaguaguggu

SEQ ID NO: 12735 - RNA, 20 nt, Artificial Sequence
  spacer sequence GTCN PAM
cguacccuuggacagagcaa

SEQ ID NO: 12736 - RNA, 20 nt, Artificial Sequence
  spacer sequence GTCN PAM
aaggguacgggacugagugc

SEQ ID NO: 12737 - RNA, 20 nt, Artificial Sequence
  spacer sequence GTCN PAM
caagccaggaaugugaggcc

SEQ ID NO: 12738 - RNA, 20 nt, Artificial Sequence
  spacer sequence GTCN PAM
gguuccccagaugugguuuc

SEQ ID NO: 12739 - RNA, 20 nt, Artificial Sequence
  spacer sequence GTCN PAM
ggguucugggaucugggguc

SEQ ID NO: 12740 - RNA, 20 nt, Artificial Sequence
  spacer sequence GTCN PAM
gagaucugggaucugggauc

SEQ ID NO: 12741 - RNA, 20 nt, Artificial Sequence
  spacer sequence GTCN PAM
gggaucuggggucugagauc

SEQ ID NO: 12742 - RNA, 20 nt, Artificial Sequence
  spacer sequence GTCN PAM
gggaucuagggaucugaagu

SEQ ID NO: 12743 - RNA, 20 nt, Artificial Sequence
  spacer sequence GTCN PAM
ggggucugggaucuagggau

SEQ ID NO: 12744 - RNA, 20 nt, Artificial Sequence
  spacer sequence GTCN PAM
ggguacuggggucugggguc

SEQ ID NO: 12745 - RNA, 20 nt, Artificial Sequence
  spacer sequence GTCN PAM
gagaucuggggucuggguac

SEQ ID NO: 12746 - RNA, 20 nt, Artificial Sequence
  spacer sequence GTCN PAM
ggggucugagaucugggguc

SEQ ID NO: 12747 - RNA, 20 nt, Artificial Sequence
  spacer sequence GTCN PAM
gagaucuggggucugggguc

SEQ ID NO: 12748 - RNA, 20 nt, Artificial Sequence
  spacer sequence GTCN PAM
gagaucuggggucugagauc

SEQ ID NO: 12749 - RNA, 20 nt, Artificial Sequence
  spacer sequence GTCN PAM
ggagucugagaucugggguc

SEQ ID NO: 12750 - RNA, 20 nt, Artificial Sequence
  spacer sequence GTCN PAM
gagaucuggggucuggaguc

SEQ ID NO: 12751 - RNA, 20 nt, Artificial Sequence
  spacer sequence GTCN PAM
ggggucugagaucugggguc

SEQ ID NO: 12752 - RNA, 20 nt, Artificial Sequence
  spacer sequence GTCN PAM
gagaucuggggucugggguc

SEQ ID NO: 12753 - RNA, 20 nt, Artificial Sequence
  spacer sequence GTCN PAM
gggaucuggggucugagauc

SEQ ID NO: 12754 - RNA, 20 nt, Artificial Sequence
  spacer sequence GTCN PAM
ggggucugggaucugggguc

SEQ ID NO: 12755 - RNA, 20 nt, Artificial Sequence
  spacer sequence GTCN PAM
gggaucuggggucugggguc

SEQ ID NO: 12756 - RNA, 20 nt, Artificial Sequence
  spacer sequence GTCN PAM
gagaucuggggucugggauc

SEQ ID NO: 12757 - RNA, 20 nt, Artificial Sequence
  spacer sequence GTCN PAM
gggggucugagaucuggggu

SEQ ID NO: 12758 - RNA, 20 nt, Artificial Sequence
  spacer sequence GTCN PAM
gagaucugggaucugggguc

SEQ ID NO: 12759 - RNA, 20 nt, Artificial Sequence
  spacer sequence GTCN PAM
gggaucuggggucugagauc

SEQ ID NO: 12760 - RNA, 20 nt, Artificial Sequence
  spacer sequence GTCN PAM
ggggucugggaucugggguc

SEQ ID NO: 12761 - RNA, 20 nt, Artificial Sequence
  spacer sequence GTCN PAM
gggaucuggggucugggguc

SEQ ID NO: 12762 - RNA, 20 nt, Artificial Sequence
  spacer sequence GTCN PAM
gagaucuggggucugggauc

SEQ ID NO: 12763 - RNA, 20 nt, Artificial Sequence
  spacer sequence GTCN PAM
gggggucugagaucuggggu

SEQ ID NO: 12764 - RNA, 20 nt, Artificial Sequence
  spacer sequence GTCN PAM
gagaucugggaucugggguc

SEQ ID NO: 12765 - RNA, 20 nt, Artificial Sequence
  spacer sequence GTCN PAM
gagaucuaggaucugggguu

SEQ ID NO: 12766 - RNA, 20 nt, Artificial Sequence
  spacer sequence GTCN PAM
gggaucugggaucugggguc

SEQ ID NO: 12767 - RNA, 20 nt, Artificial Sequence
  spacer sequence GTCN PAM
gggaucuugcggucugggau

SEQ ID NO: 12768 - RNA, 20 nt, Artificial Sequence
  spacer sequence GTCN PAM
gggaucuaggaucugggguc

SEQ ID NO: 12769 - RNA, 20 nt, Artificial Sequence
  spacer sequence GTCN PAM
gaggucugggaucuaggauc

SEQ ID NO: 12770 - RNA, 20 nt, Artificial Sequence
  spacer sequence GTCN PAM
ggggucugaggucugggauc

SEQ ID NO: 12771 - RNA, 20 nt, Artificial Sequence
  spacer sequence GTCN PAM
ggggucuggggucugagguc

SEQ ID NO: 12772 - RNA, 20 nt, Artificial Sequence
  spacer sequence GTCN PAM
gggaucugggaucugggguc

SEQ ID NO: 12773 - RNA, 20 nt, Artificial Sequence
  spacer sequence GTCN PAM
ggggucugggaucugggauc

SEQ ID NO: 12774 - RNA, 20 nt, Artificial Sequence
  spacer sequence GTCN PAM
gggaucugagaucugggggu

SEQ ID NO: 12775 - RNA, 20 nt, Artificial Sequence
  spacer sequence GTCN PAM
gagaucugggguuugggauc

SEQ ID NO: 12776 - RNA, 20 nt, Artificial Sequence
  spacer sequence GTCN PAM
gggaucuggggucugagauc

SEQ ID NO: 12777 - RNA, 20 nt, Artificial Sequence
  spacer sequence GTCN PAM
ggggaucugaagucugggau

SEQ ID NO: 12778 - RNA, 20 nt, Artificial Sequence
  spacer sequence GTCN PAM
gggaucuggggucuggggau

SEQ ID NO: 12779 - RNA, 20 nt, Artificial Sequence
  spacer sequence GTCN PAM
ggggaucugaagucugggau

SEQ ID NO: 12780 - RNA, 20 nt, Artificial Sequence
  spacer sequence GTCN PAM
gggaucuggggucuggggau

SEQ ID NO: 12781 - RNA, 20 nt, Artificial Sequence
  spacer sequence GTCN PAM
gggaucuggggauccgggga

SEQ ID NO: 12782 - RNA, 20 nt, Artificial Sequence
  spacer sequence GTCN PAM
ggaaucucgggucugggauc

SEQ ID NO: 12783 - RNA, 20 nt, Artificial Sequence
  spacer sequence GTCN PAM
gggaucuggggucuggaauc

SEQ ID NO: 12784 - RNA, 20 nt, Artificial Sequence
  spacer sequence GTCN PAM
uggaaucuccuuuccacucc

SEQ ID NO: 12785 - RNA, 20 nt, Artificial Sequence
  spacer sequence GTCN PAM
ccaugcuccgagcgggccuc

SEQ ID NO: 12786 - RNA, 20 nt, Artificial Sequence
  spacer sequence GTCN PAM
gccuggacaggguggugcgg

SEQ ID NO: 12787 - RNA, 20 nt, Artificial Sequence
  spacer sequence GTCN PAM
aggcggacaggccuuuaacc

SEQ ID NO: 12788 - RNA, 20 nt, Artificial Sequence
  spacer sequence GTCN PAM
uguguuuauuuucagucuuu

SEQ ID NO: 12789 - RNA, 20 nt, Artificial Sequence
  spacer sequence GTCN PAM
uuuggggccagugcgguggc

SEQ ID NO: 12790 - RNA, 20 nt, Artificial Sequence
  spacer sequence GTCN PAM
ucccagcacugggauuacag

SEQ ID NO: 12791 - RNA, 20 nt, Artificial Sequence
  spacer sequence GTCN PAM
ccaccuccugggcucacgca

SEQ ID NO: 12792 - RNA, 20 nt, Artificial Sequence
  spacer sequence GTCN PAM
cgcucuguugcccaggcugg

SEQ ID NO: 12793 - RNA, 20 nt, Artificial Sequence
  spacer sequence GTCN PAM
ccucuaaccuacacgucuuu

SEQ ID NO: 12794 - RNA, 20 nt, Artificial Sequence
  spacer sequence GTCN PAM
uuuucuccugagcagacguu

SEQ ID NO: 12795 - RNA, 20 nt, Artificial Sequence
  spacer sequence GTCN PAM
gcucaggagaaaaagacgug

SEQ ID NO: 12796 - RNA, 20 nt, Artificial Sequence
  spacer sequence GTCN PAM
ggagugaguggggauuuagc

SEQ ID NO: 12797 - RNA, 20 nt, Artificial Sequence
  spacer sequence GTCN PAM
uuugaaauggaggugcccuu

SEQ ID NO: 12798 - RNA, 20 nt, Artificial Sequence
  spacer sequence GTCN PAM
ucaauccauguggaggguag

SEQ ID NO: 12799 - RNA, 20 nt, Artificial Sequence
  spacer sequence GTCN PAM
ggcccaucccacaccugcua

SEQ ID NO: 12800 - RNA, 20 nt, Artificial Sequence
  spacer sequence GTCN PAM
cugccucacaucagcggccu

SEQ ID NO: 12801 - RNA, 20 nt, Artificial Sequence
  spacer sequence GTCN PAM
ccccaccuggcuccuugggg

SEQ ID NO: 12802 - RNA, 20 nt, Artificial Sequence
  spacer sequence GTCN PAM
gggaucagcauagcccggcu

SEQ ID NO: 12803 - RNA, 20 nt, Artificial Sequence
  spacer sequence GTCN PAM
agccacuugucugggaucag

SEQ ID NO: 12804 - RNA, 20 nt, Artificial Sequence
  spacer sequence GTCN PAM
ccacuguccuugagcuuaag

SEQ ID NO: 12805 - RNA, 20 nt, Artificial Sequence
  spacer sequence GTCN PAM
uugagcuuaaguccagccuu

SEQ ID NO: 12806 - RNA, 20 nt, Artificial Sequence
  spacer sequence GTCN PAM
agccuuggugacaaaaaugu

SEQ ID NO: 12807 - RNA, 20 nt, Artificial Sequence
  spacer sequence GTCN PAM
ccaaggcuggacuuaagcuc

SEQ ID NO: 12808 - RNA, 20 nt, Artificial Sequence
  spacer sequence GTCN PAM
caaggaccugcauccgagcc

SEQ ID NO: 12809 - RNA, 20 nt, Artificial Sequence
  spacer sequence GTCN PAM
uugugacauuuuugucacca

SEQ ID NO: 12810 - RNA, 20 nt, Artificial Sequence
  spacer sequence GTCN PAM
uggaggaggaggaagagucc

SEQ ID NO: 12811 - RNA, 20 nt, Artificial Sequence
  spacer sequence GTCN PAM
cuucuggcuucgggcugggc

SEQ ID NO: 12812 - RNA, 20 nt, Artificial Sequence
  spacer sequence GTCN PAM
ucaagcccagcccgaagcca

SEQ ID NO: 12813 - RNA, 20 nt, Artificial Sequence
  spacer sequence GTCN PAM
uggagcugccguccucaagc

SEQ ID NO: 12814 - RNA, 20 nt, Artificial Sequence
  spacer sequence GTCN PAM
cgcucuaagcggucuuggag

SEQ ID NO: 12815 - RNA, 20 nt, Artificial Sequence
  spacer sequence GTCN PAM
gcgcugaagucucgcucuaa

SEQ ID NO: 12816 - RNA, 20 nt, Artificial Sequence
  spacer sequence GTCN PAM
ugacaauggccgcacaguua

SEQ ID NO: 12817 - RNA, 20 nt, Artificial Sequence
  spacer sequence GTCN PAM
ggacagggugcguagcucca

SEQ ID NO: 12818 - RNA, 20 nt, Artificial Sequence
  spacer sequence GTCN PAM
gcagcuacguuugagggaag

SEQ ID NO: 12819 - RNA, 20 nt, Artificial Sequence
  spacer sequence GTCN PAM
uugucagcagcuacguuuga

SEQ ID NO: 12820 - RNA, 20 nt, Artificial Sequence
  spacer sequence GTCN PAM
gagguccaggugggcuggcu

SEQ ID NO: 12821 - RNA, 20 nt, Artificial Sequence
  spacer sequence GTCN PAM
aggugggcuggcugcuccac

SEQ ID NO: 12822 - RNA, 20 nt, Artificial Sequence
  spacer sequence GTCN PAM
aggcacugcuguccugggcc

SEQ ID NO: 12823 - RNA, 20 nt, Artificial Sequence
  spacer sequence GTCN PAM
ugggcccuggucuggguucu

SEQ ID NO: 12824 - RNA, 20 nt, Artificial Sequence
  spacer sequence GTCN PAM
ggguucuccgggagaguccg

SEQ ID NO: 12825 - RNA, 20 nt, Artificial Sequence
  spacer sequence GTCN PAM
gcgccugagcucggccgggg

SEQ ID NO: 12826 - RNA, 20 nt, Artificial Sequence
  spacer sequence GTCN PAM
cccaucacgccaucccuccc

SEQ ID NO: 12827 - RNA, 20 nt, Artificial Sequence
  spacer sequence GTCN PAM
cucuuaggcuucugaccuga

SEQ ID NO: 12828 - RNA, 20 nt, Artificial Sequence
  spacer sequence GTCN PAM
gaagccuaagagggaccuug

SEQ ID NO: 12829 - RNA, 20 nt, Artificial Sequence
  spacer sequence GTCN PAM
ggucagaagccuaagaggga

SEQ ID NO: 12830 - RNA, 20 nt, Artificial Sequence
  spacer sequence GTCN PAM
cacgcaugaggacauuugug

SEQ ID NO: 12831 - RNA, 20 nt, Artificial Sequence
  spacer sequence GTCN PAM
ucaugcgugggacccuucuc

SEQ ID NO: 12832 - RNA, 20 nt, Artificial Sequence
  spacer sequence GTCN PAM
caaauguccucaugcguggg

SEQ ID NO: 12833 - RNA, 20 nt, Artificial Sequence
  spacer sequence GTCN PAM
cggcaucgucacaaaugucc

SEQ ID NO: 12834 - RNA, 20 nt, Artificial Sequence
  spacer sequence GTCN PAM
uggauuccucgggucccggc

SEQ ID NO: 12835 - RNA, 20 nt, Artificial Sequence
  spacer sequence GTCN PAM
uccuggauuccucggguccc

SEQ ID NO: 12836 - RNA, 20 nt, Artificial Sequence
  spacer sequence GTCN PAM
cccccacccccuggagccgu

SEQ ID NO: 12837 - RNA, 20 nt, Artificial Sequence
  spacer sequence GTCN PAM
gccccagagaagccaccguc

SEQ ID NO: 12838 - RNA, 20 nt, Artificial Sequence
  spacer sequence GTCN PAM
gggucagccccagagaagcc

SEQ ID NO: 12839 - RNA, 20 nt, Artificial Sequence
  spacer sequence GTCN PAM
cagccugcggucaggccgcg

SEQ ID NO: 12840 - RNA, 20 nt, Artificial Sequence
  spacer sequence GTCN PAM
ggccgcgugcacggaaaccc

SEQ ID NO: 12841 - RNA, 20 nt, Artificial Sequence
  spacer sequence GTCN PAM
ccggagccugcucccguacu

SEQ ID NO: 12842 - RNA, 20 nt, Artificial Sequence
  spacer sequence GTCN PAM
ccgcugccccuccccagggg

SEQ ID NO: 12843 - RNA, 20 nt, Artificial Sequence
  spacer sequence GTCN PAM
gcguuugaggguggcagccc

SEQ ID NO: 12844 - RNA, 20 nt, Artificial Sequence
  spacer sequence GTCN PAM
gcaagcaauucaagcaucca

SEQ ID NO: 12845 - RNA, 20 nt, Artificial Sequence
  spacer sequence GTCN PAM
gggcacccaacgcugccccg

SEQ ID NO: 12846 - RNA, 20 nt, Artificial Sequence
  spacer sequence GTCN PAM
uuccaggaucugauaaaagc

SEQ ID NO: 12847 - RNA, 20 nt, Artificial Sequence
  spacer sequence GTCN PAM
gcccagccacacccgggcaa

SEQ ID NO: 12848 - RNA, 20 nt, Artificial Sequence
  spacer sequence GTCN PAM
guguugcccggguguggcug

SEQ ID NO: 12849 - RNA, 20 nt, Artificial Sequence
  spacer sequence GTCN PAM
cacucagcugggcgcugggg

SEQ ID NO: 12850 - RNA, 20 nt, Artificial Sequence
  spacer sequence GTCN PAM
cagugaugccgcccugagaa

SEQ ID NO: 12851 - RNA, 20 nt, Artificial Sequence
  spacer sequence GTCN PAM
cccguggccuuggaaccccc

SEQ ID NO: 12852 - RNA, 20 nt, Artificial Sequence
  spacer sequence GTCN PAM
guccccacgaagccuggccc

SEQ ID NO: 12853 - RNA, 20 nt, Artificial Sequence
  spacer sequence GTCN PAM
ccacgaagccuggcccucuc

SEQ ID NO: 12854 - RNA, 20 nt, Artificial Sequence
  spacer sequence GTCN PAM
ccagcgugggucccgcgacc

SEQ ID NO: 12855 - RNA, 20 nt, Artificial Sequence
  spacer sequence GTCN PAM
cgcgacccauuccacccggc

SEQ ID NO: 12856 - RNA, 20 nt, Artificial Sequence
  spacer sequence GTCN PAM
cgggacccacgcuggugacc

SEQ ID NO: 12857 - RNA, 20 nt, Artificial Sequence
  spacer sequence GTCN PAM
gcugcgcucgccgccuggcu

SEQ ID NO: 12858 - RNA, 20 nt, Artificial Sequence
  spacer sequence GTCN PAM
gguaaacugaggaaagcugc

SEQ ID NO: 12859 - RNA, 20 nt, Artificial Sequence
  spacer sequence GTCN PAM
uccuuugcaugucagguaaa

SEQ ID NO: 12860 - RNA, 20 nt, Artificial Sequence
  spacer sequence GTCN PAM
agccuggagugaggaggcgu

SEQ ID NO: 12861 - RNA, 20 nt, Artificial Sequence
  spacer sequence GTCN PAM
gcugcccguccagccuggag

SEQ ID NO: 12862 - RNA, 20 nt, Artificial Sequence
  spacer sequence GTCN PAM
ggggccauggcgggcaggga

SEQ ID NO: 12863 - RNA, 20 nt, Artificial Sequence
  spacer sequence GTCN PAM
cugcccgccauggccccgga

SEQ ID NO: 12864 - RNA, 20 nt, Artificial Sequence
  spacer sequence GTCN PAM
cggagaaagucccugcccgc

SEQ ID NO: 12865 - RNA, 20 nt, Artificial Sequence
  spacer sequence GTCN PAM
guuccagaaacguuuacugc

SEQ ID NO: 12866 - RNA, 20 nt, Artificial Sequence
  spacer sequence GTCN PAM
cugccgcugugggcuccugg

SEQ ID NO: 12867 - RNA, 20 nt, Artificial Sequence
  spacer sequence GTCN PAM
aagugaaaccgaaagaggcg

SEQ ID NO: 12868 - RNA, 20 nt, Artificial Sequence
  spacer sequence GTCN PAM
aucacaaggcuccgggaagc

SEQ ID NO: 12869 - RNA, 20 nt, Artificial Sequence
  spacer sequence GTCN PAM
caaagcaggucacugagaca

SEQ ID NO: 12870 - RNA, 20 nt, Artificial Sequence
  spacer sequence GTCN PAM
cugagacagcggcaccaggc

SEQ ID NO: 12871 - RNA, 20 nt, Artificial Sequence
  spacer sequence GTCN PAM
cagugaccugcuuugugacu

SEQ ID NO: 12872 - RNA, 20 nt, Artificial Sequence
  spacer sequence GTCN PAM
gaucugcugaccccagccag

SEQ ID NO: 12873 - RNA, 20 nt, Artificial Sequence
  spacer sequence GTCN PAM
gcagaucggacuggcgggcc

SEQ ID NO: 12874 - RNA, 20 nt, Artificial Sequence
  spacer sequence GTCN PAM
cgggcagccucgugcagugc

SEQ ID NO: 12875 - RNA, 20 nt, Artificial Sequence
  spacer sequence GTCN PAM
ucuccccugcaggcacuguc

SEQ ID NO: 12876 - RNA, 20 nt, Artificial Sequence
  spacer sequence GTCN PAM
uugccgagucaucuccccug

SEQ ID NO: 12877 - RNA, 20 nt, Artificial Sequence
  spacer sequence GTCN PAM
agggcaagaggcccagggga

SEQ ID NO: 12878 - RNA, 20 nt, Artificial Sequence
  spacer sequence GTCN PAM
cacggaggccucagccuggg

SEQ ID NO: 12879 - RNA, 20 nt, Artificial Sequence
  spacer sequence GTCN PAM
aggcggaggccccgugagag

SEQ ID NO: 12880 - RNA, 20 nt, Artificial Sequence
  spacer sequence GTCN PAM
gccugagggugccugguggu

SEQ ID NO: 12881 - RNA, 20 nt, Artificial Sequence
  spacer sequence GTCN PAM
cccucaugccaagagccccg

SEQ ID NO: 12882 - RNA, 20 nt, Artificial Sequence
  spacer sequence GTCN PAM
uacggguugagacaggacag

SEQ ID NO: 12883 - RNA, 20 nt, Artificial Sequence
  spacer sequence GTCN PAM
caacccguaggacggcaaca

SEQ ID NO: 12884 - RNA, 20 nt, Artificial Sequence
  spacer sequence GTCN PAM
ugucucaacccguaggacgg

SEQ ID NO: 12885 - RNA, 20 nt, Artificial Sequence
  spacer sequence GTCN PAM
ggcagccugcagccagcuug

SEQ ID NO: 12886 - RNA, 20 nt, Artificial Sequence
  spacer sequence GTCN PAM
ccgggaacuggucaggcagc

SEQ ID NO: 12887 - RNA, 20 nt, Artificial Sequence
  spacer sequence GTCN PAM
ccacaggguugagcacggug

SEQ ID NO: 12888 - RNA, 20 nt, Artificial Sequence
  spacer sequence GTCN PAM
uucggaauccccaguuguca

SEQ ID NO: 12889 - RNA, 20 nt, Artificial Sequence
  spacer sequence GTCN PAM
uacuuucuguuaaacacuuu

SEQ ID NO: 12890 - RNA, 20 nt, Artificial Sequence
  spacer sequence GTCN PAM
ggagcauaugacucaacggu

SEQ ID NO: 12891 - RNA, 20 nt, Artificial Sequence
  spacer sequence GTCN PAM
uaugcuccggacaggugccc

SEQ ID NO: 12892 - RNA, 20 nt, Artificial Sequence
  spacer sequence GTCN PAM
gccuuagaauacguugaaac

SEQ ID NO: 12893 - RNA, 20 nt, Artificial Sequence
  spacer sequence GTCN PAM
ccaacagcagucacuccccc

SEQ ID NO: 12894 - RNA, 20 nt, Artificial Sequence
  spacer sequence GTCN PAM
cucccccgccucuacagccc

SEQ ID NO: 12895 - RNA, 20 nt, Artificial Sequence
  spacer sequence GTCN PAM
acagaagagaagugggcgug

SEQ ID NO: 12896 - RNA, 20 nt, Artificial Sequence
  spacer sequence GTCN PAM
agagcaggccaguccacaga

SEQ ID NO: 12897 - RNA, 20 nt, Artificial Sequence
  spacer sequence GTCN PAM
cguguccagagcaggccagu

SEQ ID NO: 12898 - RNA, 20 nt, Artificial Sequence
  spacer sequence GTCN PAM
accccccaucuguggacugc

SEQ ID NO: 12899 - RNA, 20 nt, Artificial Sequence
  spacer sequence GTCN PAM
acagaugggggguagacgug

SEQ ID NO: 12900 - RNA, 20 nt, Artificial Sequence
  spacer sequence GTCN PAM
caugaacggagucacgugcc

SEQ ID NO: 12901 - RNA, 20 nt, Artificial Sequence
  spacer sequence GTCN PAM
cgugccguggccuuuugcgu

SEQ ID NO: 12902 - RNA, 20 nt, Artificial Sequence
  spacer sequence GTCN PAM
ggcgucucuccgcaagcacg

SEQ ID NO: 12903 - RNA, 20 nt, Artificial Sequence
  spacer sequence GTCN PAM
cuccgcaagcacgucuccgc

SEQ ID NO: 12904 - RNA, 20 nt, Artificial Sequence
  spacer sequence GTCN PAM
ccgcagagcauccaugccgg

SEQ ID NO: 12905 - RNA, 20 nt, Artificial Sequence
  spacer sequence GTCN PAM
gugcgcccggcauggaugcu

SEQ ID NO: 12906 - RNA, 20 nt, Artificial Sequence
  spacer sequence GTCN PAM
ucugugcgcccggcauggau

SEQ ID NO: 12907 - RNA, 20 nt, Artificial Sequence
  spacer sequence GTCN PAM
uggccagaaccccagguuug

SEQ ID NO: 12908 - RNA, 20 nt, Artificial Sequence
  spacer sequence GTCN PAM
ugggcccugugacgggugac

SEQ ID NO: 12909 - RNA, 20 nt, Artificial Sequence
  spacer sequence GTCN PAM
cagggcccaggacucaggag

SEQ ID NO: 12910 - RNA, 20 nt, Artificial Sequence
  spacer sequence GTCN PAM
cccgucacagggcccaggac

SEQ ID NO: 12911 - RNA, 20 nt, Artificial Sequence
  spacer sequence GTCN PAM
ccuugccucccugcugggag

SEQ ID NO: 12912 - RNA, 20 nt, Artificial Sequence
  spacer sequence GTCN PAM
gcucuucgucccagcccgag

SEQ ID NO: 12913 - RNA, 20 nt, Artificial Sequence
  spacer sequence GTCN PAM
cagcccgagggugcaggugc

SEQ ID NO: 12914 - RNA, 20 nt, Artificial Sequence
  spacer sequence GTCN PAM
acccacacugccgggcggac

SEQ ID NO: 12915 - RNA, 20 nt, Artificial Sequence
  spacer sequence GTCN PAM
gcccggcaguguggguggac

SEQ ID NO: 12916 - RNA, 20 nt, Artificial Sequence
  spacer sequence GTCN PAM
uggccugcccgcuguccgcc

SEQ ID NO: 12917 - RNA, 20 nt, Artificial Sequence
  spacer sequence GTCN PAM
ccccaaccugguucucgucc

SEQ ID NO: 12918 - RNA, 20 nt, Artificial Sequence
  spacer sequence GTCN PAM
agcugccggguugaagccua

SEQ ID NO: 12919 - RNA, 20 nt, Artificial Sequence
  spacer sequence GTCN PAM
gaccacacagcccucggcug

SEQ ID NO: 12920 - RNA, 20 nt, Artificial Sequence
  spacer sequence GTCN PAM
gacagcacacggggagggcu

SEQ ID NO: 12921 - RNA, 20 nt, Artificial Sequence
  spacer sequence GTCN PAM
cuuuuuccacagccgagggc

SEQ ID NO: 12922 - RNA, 20 nt, Artificial Sequence
  spacer sequence GTCN PAM
cugugugcauguguguguga

SEQ ID NO: 12923 - RNA, 20 nt, Artificial Sequence
  spacer sequence GTCN PAM
ugugcacguguguuuuguau

SEQ ID NO: 12924 - RNA, 20 nt, Artificial Sequence
  spacer sequence GTCN PAM
guuguguguguugugugcgu

SEQ ID NO: 12925 - RNA, 20 nt, Artificial Sequence
  spacer sequence GTCN PAM
guuaugcacguguccguugu

SEQ ID NO: 12926 - RNA, 20 nt, Artificial Sequence
  spacer sequence GTCN PAM
uacacaugcacccacaacac

SEQ ID NO: 12927 - RNA, 20 nt, Artificial Sequence
  spacer sequence GTCN PAM
ucguauguugugugugugua

SEQ ID NO: 12928 - RNA, 20 nt, Artificial Sequence
  spacer sequence GTCN PAM
guauuuuguguguugcccgu

SEQ ID NO: 12929 - RNA, 20 nt, Artificial Sequence
  spacer sequence GTCN PAM
guuaugugugucuguauuuu

SEQ ID NO: 12930 - RNA, 20 nt, Artificial Sequence
  spacer sequence GTCN PAM
gugcauccguguuugugugu

SEQ ID NO: 12931 - RNA, 20 nt, Artificial Sequence
  spacer sequence GTCN PAM
guacgacgcacacacagaau

SEQ ID NO: 12932 - RNA, 20 nt, Artificial Sequence
  spacer sequence GTCN PAM
uacggacgugugcgcguucu

SEQ ID NO: 12933 - RNA, 20 nt, Artificial Sequence
  spacer sequence GTCN PAM
uuguguaucuguauguugcg

SEQ ID NO: 12934 - RNA, 20 nt, Artificial Sequence
  spacer sequence GTCN PAM
ccagggcagcgcuggcguca

SEQ ID NO: 12935 - RNA, 20 nt, Artificial Sequence
  spacer sequence GTCN PAM
uggggggcugccuccacacc

SEQ ID NO: 12936 - RNA, 20 nt, Artificial Sequence
  spacer sequence GTCN PAM
ggcucccagaggcccccucc

SEQ ID NO: 12937 - RNA, 20 nt, Artificial Sequence
  spacer sequence GTCN PAM
acacagucgccucuuuguuc

SEQ ID NO: 12938 - RNA, 20 nt, Artificial Sequence
  spacer sequence GTCN PAM
acagaaccaguccggcuccc

SEQ ID NO: 12939 - RNA, 20 nt, Artificial Sequence
  spacer sequence GTCN PAM
ccucuuuguucggggcagag

SEQ ID NO: 12940 - RNA, 20 nt, Artificial Sequence
  spacer sequence GTCN PAM
cggaugccccuccggcaggg

SEQ ID NO: 12941 - RNA, 20 nt, Artificial Sequence
  spacer sequence GTCN PAM
caccccucacaccccugggg

SEQ ID NO: 12942 - RNA, 20 nt, Artificial Sequence
  spacer sequence GTCN PAM
agggguggcuggcgcaaccu

SEQ ID NO: 12943 - RNA, 20 nt, Artificial Sequence
  spacer sequence GTCN PAM
cugcccucucaccuggcggg

SEQ ID NO: 12944 - RNA, 20 nt, Artificial Sequence
  spacer sequence GTCN PAM
cgcggcuggagaacaugcac

SEQ ID NO: 12945 - RNA, 20 nt, Artificial Sequence
  spacer sequence GTCN PAM
agcccagacuccaaagccaa

SEQ ID NO: 12946 - RNA, 20 nt, Artificial Sequence
  spacer sequence GTCN PAM
gggcuagacaggaggcaccc

SEQ ID NO: 12947 - RNA, 20 nt, Artificial Sequence
  spacer sequence GTCN PAM
ggccucuccguucauccauu

SEQ ID NO: 12948 - RNA, 20 nt, Artificial Sequence
  spacer sequence GTCN PAM
gagcacagaagaggcagcag

SEQ ID NO: 12949 - RNA, 20 nt, Artificial Sequence
  spacer sequence GTCN PAM
agccccugccugcacagccc

SEQ ID NO: 12950 - RNA, 20 nt, Artificial Sequence
  spacer sequence GTCN PAM
gccgggauccucagaguuaa

SEQ ID NO: 12951 - RNA, 20 nt, Artificial Sequence
  spacer sequence GTCN PAM
uucccucuccaaggacgaga

SEQ ID NO: 12952 - RNA, 20 nt, Artificial Sequence
  spacer sequence GTCN PAM
uuggagagggaaggacuugg

SEQ ID NO: 12953 - RNA, 20 nt, Artificial Sequence
  spacer sequence GTCN PAM
ccucugccgucuccccugcc

SEQ ID NO: 12954 - RNA, 20 nt, Artificial Sequence
  spacer sequence GTCN PAM
ccccugccgugggaggcccu

SEQ ID NO: 12955 - RNA, 20 nt, Artificial Sequence
  spacer sequence GTCN PAM
agaucucaaauucgcccuuu

SEQ ID NO: 12956 - RNA, 20 nt, Artificial Sequence
  spacer sequence GTCN PAM
uggggugauggcuucucaca

SEQ ID NO: 12957 - RNA, 20 nt, Artificial Sequence
  spacer sequence GTCN PAM
ccccugggaaaaucuggggc

SEQ ID NO: 12958 - RNA, 20 nt, Artificial Sequence
  spacer sequence GTCN PAM
gggaagaaagggcguggacg

SEQ ID NO: 12959 - RNA, 20 nt, Artificial Sequence
  spacer sequence GTCN PAM
acgcccuuucuucccagaca

SEQ ID NO: 12960 - RNA, 20 nt, Artificial Sequence
  spacer sequence GTCN PAM
cauguccccgcugcuccucu

SEQ ID NO: 12961 - RNA, 20 nt, Artificial Sequence
  spacer sequence GTCN PAM
ccgcugcuccucuuccaggg

SEQ ID NO: 12962 - RNA, 20 nt, Artificial Sequence
  spacer sequence GTCN PAM
gggagagacaucccagggag

SEQ ID NO: 12963 - RNA, 20 nt, Artificial Sequence
  spacer sequence GTCN PAM
cucccugacucggcccugga

SEQ ID NO: 12964 - RNA, 20 nt, Artificial Sequence
  spacer sequence GTCN PAM
ggaagcagugccggcugccc

SEQ ID NO: 12965 - RNA, 20 nt, Artificial Sequence
  spacer sequence GTCN PAM
gcggcccuggguccucggcc

SEQ ID NO: 12966 - RNA, 20 nt, Artificial Sequence
  spacer sequence GTCN PAM
ucggccccucccaugcucuu

SEQ ID NO: 12967 - RNA, 20 nt, Artificial Sequence
  spacer sequence GTCN PAM
gcgagagugcccggccucgg

SEQ ID NO: 12968 - RNA, 20 nt, Artificial Sequence
  spacer sequence GTCN PAM
cgucccagcagucacaggca

SEQ ID NO: 12969 - RNA, 20 nt, Artificial Sequence
  spacer sequence GTCN PAM
cagcagucacaggcaggaag

SEQ ID NO: 12970 - RNA, 20 nt, Artificial Sequence
  spacer sequence GTCN PAM
caggcaggaaggacguucug

SEQ ID NO: 12971 - RNA, 20 nt, Artificial Sequence
  spacer sequence GTCN PAM
uuccugccugugacugcugg

SEQ ID NO: 12972 - RNA, 20 nt, Artificial Sequence
  spacer sequence GTCN PAM
cccuggaugaacugauuaac

SEQ ID NO: 12973 - RNA, 20 nt, Artificial Sequence
  spacer sequence GTCN PAM
cugccccagcaccauccgug

SEQ ID NO: 12974 - RNA, 20 nt, Artificial Sequence
  spacer sequence GTCN PAM
cuggaggcgcugggugggcu

SEQ ID NO: 12975 - RNA, 20 nt, Artificial Sequence
  spacer sequence GTCN PAM
gucuggggauuggucccucc

SEQ ID NO: 12976 - RNA, 20 nt, Artificial Sequence
  spacer sequence GTCN PAM
ggggauuggucccuccaggc

SEQ ID NO: 12977 - RNA, 20 nt, Artificial Sequence
  spacer sequence GTCN PAM
cuccaggccccaccugccuu

SEQ ID NO: 12978 - RNA, 20 nt, Artificial Sequence
  spacer sequence GTCN PAM
cgaagaauaaggcagguggg

SEQ ID NO: 12979 - RNA, 20 nt, Artificial Sequence
  spacer sequence GTCN PAM
cccguagggcacucuuccca

SEQ ID NO: 12980 - RNA, 20 nt, Artificial Sequence
  spacer sequence GTCN PAM
ugucccccguagggcacucu

SEQ ID NO: 12981 - RNA, 20 nt, Artificial Sequence
  spacer sequence GTCN PAM
gugaaggggaagcgcaggcc

SEQ ID NO: 12982 - RNA, 20 nt, Artificial Sequence
  spacer sequence GTCN PAM
cuggaagccggguuugaaug

SEQ ID NO: 12983 - RNA, 20 nt, Artificial Sequence
  spacer sequence GTCN PAM
cauucaaacccggcuuccag

SEQ ID NO: 12984 - RNA, 20 nt, Artificial Sequence
  spacer sequence GTCN PAM
gcagagcguguugggggugg

SEQ ID NO: 12985 - RNA, 20 nt, Artificial Sequence
  spacer sequence GTCN PAM
gggcggagucugcagagcgu

SEQ ID NO: 12986 - RNA, 20 nt, Artificial Sequence
  spacer sequence GTCN PAM
ccuaauaucagcaagccccc

SEQ ID NO: 12987 - RNA, 20 nt, Artificial Sequence
  spacer sequence GTCN PAM
cccgguuugggaugggggcu

SEQ ID NO: 12988 - RNA, 20 nt, Artificial Sequence
  spacer sequence GTCN PAM
gaggccccaggagcgggagg

SEQ ID NO: 12989 - RNA, 20 nt, Artificial Sequence
  spacer sequence GTCN PAM
cccucccuccccuugcuccc

SEQ ID NO: 12990 - RNA, 20 nt, Artificial Sequence
  spacer sequence GTCN PAM
ugggaccggggacaaggagg

SEQ ID NO: 12991 - RNA, 20 nt, Artificial Sequence
  spacer sequence GTCN PAM
caggacccuugccuucucgg

SEQ ID NO: 12992 - RNA, 20 nt, Artificial Sequence
  spacer sequence GTCN PAM
ccggucccaggacccuugcc

SEQ ID NO: 12993 - RNA, 20 nt, Artificial Sequence
  spacer sequence GTCN PAM
ggaaucggggcggcgggaga

SEQ ID NO: 12994 - RNA, 20 nt, Artificial Sequence
  spacer sequence GTCN PAM
cucccgccgccccgauuccu

SEQ ID NO: 12995 - RNA, 20 nt, Artificial Sequence
  spacer sequence GTCN PAM
cucccaggaaggggucgagg

SEQ ID NO: 12996 - RNA, 20 nt, Artificial Sequence
  spacer sequence GTCN PAM
aggucacgaggcgcauggag

SEQ ID NO: 12997 - RNA, 20 nt, Artificial Sequence
  spacer sequence GTCN PAM
cgaggcgcauggagucgaga

SEQ ID NO: 12998 - RNA, 20 nt, Artificial Sequence
  spacer sequence GTCN PAM
agaguccccaaaagggaagg

SEQ ID NO: 12999 - RNA, 20 nt, Artificial Sequence
  spacer sequence GTCN PAM
ccaaaagggaaggccaggau

SEQ ID NO: 13000 - RNA, 20 nt, Artificial Sequence
  spacer sequence GTCN PAM
ccaaggggcucgggggcacc

SEQ ID NO: 13001 - RNA, 20 nt, Artificial Sequence
  spacer sequence GTCN PAM
aggguuaccagaaaacgaaa

SEQ ID NO: 13002 - RNA, 20 nt, Artificial Sequence
  spacer sequence GTCN PAM
ggggucaccaagcugcgcgg

SEQ ID NO: 13003 - RNA, 20 nt, Artificial Sequence
  spacer sequence GTCN PAM
ccaagcugcgcgguacaggg

SEQ ID NO: 13004 - RNA, 20 nt, Artificial Sequence
  spacer sequence GTCN PAM
cccggaagagcgggaaggaa

SEQ ID NO: 13005 - RNA, 20 nt, Artificial Sequence
  spacer sequence GTCN PAM
uggaagguaggguuaagguu

SEQ ID NO: 13006 - RNA, 20 nt, Artificial Sequence
  spacer sequence GTCN PAM
ccggggggcgggggggcagg

SEQ ID NO: 13007 - RNA, 20 nt, Artificial Sequence
  spacer sequence GTCN PAM
agguucacggcgguggucgc

SEQ ID NO: 13008 - RNA, 20 nt, Artificial Sequence
  spacer sequence GTCN PAM
cggggcagcgcggggucaac

SEQ ID NO: 13009 - RNA, 20 nt, Artificial Sequence
  spacer sequence GTCN PAM
acguuggcggcgaagggcgg

SEQ ID NO: 13010 - RNA, 20 nt, Artificial Sequence
  spacer sequence GTCN PAM
gaaggggucgcggcggaggg

SEQ ID NO: 13011 - RNA, 20 nt, Artificial Sequence
  spacer sequence GTCN PAM
cggcggagggcggggguccc

SEQ ID NO: 13012 - RNA, 20 nt, Artificial Sequence
  spacer sequence GTCN PAM
cgccgcgcucgcccccgccc

SEQ ID NO: 13013 - RNA, 20 nt, Artificial Sequence
  spacer sequence GTCN PAM
gcggggagcgccggacccac

SEQ ID NO: 13014 - RNA, 20 nt, Artificial Sequence
  spacer sequence GTCN PAM
ggcgcuccccgcggaccccu

SEQ ID NO: 13015 - RNA, 20 nt, Artificial Sequence
  spacer sequence GTCN PAM
ggccaggcaggggucgcggu

SEQ ID NO: 13016 - RNA, 20 nt, Artificial Sequence
  spacer sequence GTCN PAM
cgguggagccggggcggggg

SEQ ID NO: 13017 - RNA, 20 nt, Artificial Sequence
  spacer sequence GTCN PAM
caaccagagccucaccucgg

SEQ ID NO: 13018 - RNA, 20 nt, Artificial Sequence
  spacer sequence GTCN PAM
ggccgggcgcggagcccgcg

SEQ ID NO: 13019 - RNA, 20 nt, Artificial Sequence
  spacer sequence GTCN PAM
ugccgcggggcggggccucc

SEQ ID NO: 13020 - RNA, 20 nt, Artificial Sequence
  spacer sequence GTCN PAM
cgguucgggggcggggccac

SEQ ID NO: 13021 - RNA, 20 nt, Artificial Sequence
  spacer sequence GTCN PAM
uuccgcuauucggaaggggc

SEQ ID NO: 13022 - RNA, 20 nt, Artificial Sequence
  spacer sequence GTCN PAM
cagccccuuccgaauagcgg

SEQ ID NO: 13023 - RNA, 20 nt, Artificial Sequence
  spacer sequence GTCN PAM
caagagaaccaggcagggcg

SEQ ID NO: 13024 - RNA, 20 nt, Artificial Sequence
  spacer sequence GTCN PAM
cccacuggggcucacucacc

SEQ ID NO: 13025 - RNA, 20 nt, Artificial Sequence
  spacer sequence GTCN PAM
cgggugagugagccccagug

SEQ ID NO: 13026 - RNA, 20 nt, Artificial Sequence
  spacer sequence GTCN PAM
caguuuaaaagucucgggug

SEQ ID NO: 13027 - RNA, 20 nt, Artificial Sequence
  spacer sequence GTCN PAM
uaguagcuuuugagggaguc

SEQ ID NO: 13028 - RNA, 20 nt, Artificial Sequence
  spacer sequence GTCN PAM
ggaguuugaggccaaccugg

SEQ ID NO: 13029 - RNA, 20 nt, Artificial Sequence
  spacer sequence GTCN PAM
agguuggccucaaacucccg

SEQ ID NO: 13030 - RNA, 20 nt, Artificial Sequence
  spacer sequence GTCN PAM
cuacuaaauauacaaaaauu

SEQ ID NO: 13031 - RNA, 20 nt, Artificial Sequence
  spacer sequence GTCN PAM
cacucuguugcccgggcugg

SEQ ID NO: 13032 - RNA, 20 nt, Artificial Sequence
  spacer sequence GTCN PAM
gacauacucucucacgaaaa

SEQ ID NO: 13033 - RNA, 20 nt, Artificial Sequence
  spacer sequence GTCN PAM
gacaggcccagaggugauga

SEQ ID NO: 13034 - RNA, 20 nt, Artificial Sequence
  spacer sequence GTCN PAM
agaacuguauuugguuaggg

SEQ ID NO: 13035 - RNA, 20 nt, Artificial Sequence
  spacer sequence GTCN PAM
ccaugcugaagcguccagaa

SEQ ID NO: 13036 - RNA, 20 nt, Artificial Sequence
  spacer sequence GTCN PAM
caggggcuacccccaagaga

SEQ ID NO: 13037 - RNA, 20 nt, Artificial Sequence
  spacer sequence GTCN PAM
cagggcacuuuuccugugac

SEQ ID NO: 13038 - RNA, 20 nt, Artificial Sequence
  spacer sequence GTCN PAM
caggaaaagugcccugagac

SEQ ID NO: 13039 - RNA, 20 nt, Artificial Sequence
  spacer sequence GTCN PAM
uggcugaaauugggcugggg

SEQ ID NO: 13040 - RNA, 20 nt, Artificial Sequence
  spacer sequence GTCN PAM
agggagcuguaucaguauug

SEQ ID NO: 13041 - RNA, 20 nt, Artificial Sequence
  spacer sequence GTCN PAM
uggagaaaucaacucuaguu

SEQ ID NO: 13042 - RNA, 20 nt, Artificial Sequence
  spacer sequence GTCN PAM
cugaaugaauuaacaaaguc

SEQ ID NO: 13043 - RNA, 20 nt, Artificial Sequence
  spacer sequence GTCN PAM
ugagcugggaaaacccaggg

SEQ ID NO: 13044 - RNA, 20 nt, Artificial Sequence
  spacer sequence GTCN PAM
cacagaggacucagcugucu

SEQ ID NO: 13045 - RNA, 20 nt, Artificial Sequence
  spacer sequence GTCN PAM
ucugugagacccuggguuuu

SEQ ID NO: 13046 - RNA, 20 nt, Artificial Sequence
  spacer sequence GTCN PAM
gucccaacaucagaaagccc

SEQ ID NO: 13047 - RNA, 20 nt, Artificial Sequence
  spacer sequence GTCN PAM
caacaucagaaagccccugg

SEQ ID NO: 13048 - RNA, 20 nt, Artificial Sequence
  spacer sequence GTCN PAM
aggggagagagaaccaggac

SEQ ID NO: 13049 - RNA, 20 nt, Artificial Sequence
  spacer sequence GTCN PAM
ugguucucucuccccuagac

SEQ ID NO: 13050 - RNA, 20 nt, Artificial Sequence
  spacer sequence GTCN PAM
gguccugguucucucucccc

SEQ ID NO: 13051 - RNA, 20 nt, Artificial Sequence
  spacer sequence GTCN PAM
gccuagggcuucauagaggg

SEQ ID NO: 13052 - RNA, 20 nt, Artificial Sequence
  spacer sequence GTCN PAM
accugguacacuccuacuug

SEQ ID NO: 13053 - RNA, 20 nt, Artificial Sequence
  spacer sequence GTCN PAM
gggcaaagaaggccugguaa

SEQ ID NO: 13054 - RNA, 20 nt, Artificial Sequence
  spacer sequence GTCN PAM
gaggcaggaggaacaccuga

SEQ ID NO: 13055 - RNA, 20 nt, Artificial Sequence
  spacer sequence GTCN PAM
gcgguuugagaccagccugg

SEQ ID NO: 13056 - RNA, 20 nt, Artificial Sequence
  spacer sequence GTCN PAM
caaaccgcugaccucaggug

SEQ ID NO: 13057 - RNA, 20 nt, Artificial Sequence
  spacer sequence GTCN PAM
caaaaaaacaaacaaacaaa

SEQ ID NO: 13058 - RNA, 20 nt, Artificial Sequence
  spacer sequence GTCN PAM
gaaguucaacaccagccuga

SEQ ID NO: 13059 - RNA, 20 nt, Artificial Sequence
  spacer sequence GTCN PAM
ggcugguguugaacuucuga

SEQ ID NO: 13060 - RNA, 20 nt, Artificial Sequence
  spacer sequence GTCN PAM
cuacuaaaaauacaaaaauu

SEQ ID NO: 13061 - RNA, 20 nt, Artificial Sequence
  spacer sequence GTCN PAM
ggauuacaggcacccacuac

SEQ ID NO: 13062 - RNA, 20 nt, Artificial Sequence
  spacer sequence GTCN PAM
cccaggcuggagugcaaugg

SEQ ID NO: 13063 - RNA, 20 nt, Artificial Sequence
  spacer sequence GTCN PAM
ugucacccaggcuggagugc

SEQ ID NO: 13064 - RNA, 20 nt, Artificial Sequence
  spacer sequence GTCN PAM
ugucaugucacccaggcugg

SEQ ID NO: 13065 - RNA, 20 nt, Artificial Sequence
  spacer sequence GTCN PAM
aaaaaaaaaaaaaaaaaaaa

SEQ ID NO: 13066 - RNA, 20 nt, Artificial Sequence
  spacer sequence GTCN PAM
uuggccugaaauuuuuuuuu

SEQ ID NO: 13067 - RNA, 20 nt, Artificial Sequence
  spacer sequence GTCN PAM
ucaaacccaaaagcacaagg

SEQ ID NO: 13068 - RNA, 20 nt, Artificial Sequence
  spacer sequence GTCN PAM
gaguuuccccaucugccccc

SEQ ID NO: 13069 - RNA, 20 nt, Artificial Sequence
  spacer sequence GTCN PAM
agagugagaugcagaaggcg

SEQ ID NO: 13070 - RNA, 20 nt, Artificial Sequence
  spacer sequence GTCN PAM
uugugcgccuucugcaucuc

SEQ ID NO: 13071 - RNA, 20 nt, Artificial Sequence
  spacer sequence GTCN PAM
uucagcucauugggggucuc

SEQ ID NO: 13072 - RNA, 20 nt, Artificial Sequence
  spacer sequence GTCN PAM
ccuuuacccauggugacaga

SEQ ID NO: 13073 - RNA, 20 nt, Artificial Sequence
  spacer sequence GTCN PAM
ccauggguaaaggagacccc

SEQ ID NO: 13074 - RNA, 20 nt, Artificial Sequence
  spacer sequence GTCN PAM
accuguugugagcuuuuccu

SEQ ID NO: 13075 - RNA, 20 nt, Artificial Sequence
  spacer sequence GTCN PAM
cgcagagcagccggacccga

SEQ ID NO: 13076 - RNA, 20 nt, Artificial Sequence
  spacer sequence GTCN PAM
ggcugcucugcgggacucug

SEQ ID NO: 13077 - RNA, 20 nt, Artificial Sequence
  spacer sequence GTCN PAM
gguccggcugcucugcggga

SEQ ID NO: 13078 - RNA, 20 nt, Artificial Sequence
  spacer sequence GTCN PAM
caaaaaaaaaaaaaaaaaaa

SEQ ID NO: 13079 - RNA, 20 nt, Artificial Sequence
  spacer sequence GTCN PAM
ggcucugucgcccaggcugg

SEQ ID NO: 13080 - RNA, 20 nt, Artificial Sequence
  spacer sequence GTCN PAM
cccaggcuggagugcagugg

SEQ ID NO: 13081 - RNA, 20 nt, Artificial Sequence
  spacer sequence GTCN PAM
cagcuacucaggaggcugag

SEQ ID NO: 13082 - RNA, 20 nt, Artificial Sequence
  spacer sequence GTCN PAM
cuacuaaaaauacaaaaaau

SEQ ID NO: 13083 - RNA, 20 nt, Artificial Sequence
  spacer sequence GTCN PAM
cgaucuccugaccucgugau

SEQ ID NO: 13084 - RNA, 20 nt, Artificial Sequence
  spacer sequence GTCN PAM
ggagaucgagaccauccugg

SEQ ID NO: 13085 - RNA, 20 nt, Artificial Sequence
  spacer sequence GTCN PAM
ugcugugucucccaggccgg

SEQ ID NO: 13086 - RNA, 20 nt, Artificial Sequence
  spacer sequence GTCN PAM
cccaggccggagugcaaugg

SEQ ID NO: 13087 - RNA, 20 nt, Artificial Sequence
  spacer sequence GTCN PAM
ugccauugcacuccggccug

SEQ ID NO: 13088 - RNA, 20 nt, Artificial Sequence
  spacer sequence GTCN PAM
caaaguugagaugagcaccc

SEQ ID NO: 13089 - RNA, 20 nt, Artificial Sequence
  spacer sequence GTCN PAM
ggcuggucucaaacuccuga

SEQ ID NO: 13090 - RNA, 20 nt, Artificial Sequence
  spacer sequence GTCN PAM
caaacuccugaccucaggug

SEQ ID NO: 13091 - RNA, 20 nt, Artificial Sequence
  spacer sequence GTCN PAM
ggaguuugagaccagccuga

SEQ ID NO: 13092 - RNA, 20 nt, Artificial Sequence
  spacer sequence GTCN PAM
cagccaggcacgguggcuca

SEQ ID NO: 13093 - RNA, 20 nt, Artificial Sequence
  spacer sequence GTCN PAM
ccaggcuggcuuccucaccc

SEQ ID NO: 13094 - RNA, 20 nt, Artificial Sequence
  spacer sequence GTCN PAM
agugugggaggaaaugagca

SEQ ID NO: 13095 - RNA, 20 nt, Artificial Sequence
  spacer sequence GTCN PAM
cggcgcucagcgugaugcuu

SEQ ID NO: 13096 - RNA, 20 nt, Artificial Sequence
  spacer sequence GTCN PAM
cacacacccacgacgccggc

SEQ ID NO: 13097 - RNA, 20 nt, Artificial Sequence
  spacer sequence GTCN PAM
ugggugugugugacucgggg

SEQ ID NO: 13098 - RNA, 20 nt, Artificial Sequence
  spacer sequence GTCN PAM
cuaccccagagggccgcugu

SEQ ID NO: 13099 - RNA, 20 nt, Artificial Sequence
  spacer sequence GTCN PAM
ccaagugagcuaggaagagg

SEQ ID NO: 13100 - RNA, 20 nt, Artificial Sequence
  spacer sequence GTCN PAM
cgaugggugauuuugccuaa

SEQ ID NO: 13101 - RNA, 20 nt, Artificial Sequence
  spacer sequence GTCN PAM
agccaucucagcaggcagga

SEQ ID NO: 13102 - RNA, 20 nt, Artificial Sequence
  spacer sequence GTCN PAM
gaugcggggauuuccaggga

SEQ ID NO: 13103 - RNA, 20 nt, Artificial Sequence
  spacer sequence GTCN PAM
cugcugcuuuccggagccac

SEQ ID NO: 13104 - RNA, 20 nt, Artificial Sequence
  spacer sequence GTCN PAM
cacagcagauucacagcacu

SEQ ID NO: 13105 - RNA, 20 nt, Artificial Sequence
  spacer sequence GTCN PAM
cagccucccaaagugcuggg

SEQ ID NO: 13106 - RNA, 20 nt, Artificial Sequence
  spacer sequence GTCN PAM
agagauugagaccauccugg

SEQ ID NO: 13107 - RNA, 20 nt, Artificial Sequence
  spacer sequence GTCN PAM
caaucucuugaccucgugau

SEQ ID NO: 13108 - RNA, 20 nt, Artificial Sequence
  spacer sequence GTCN PAM
cuacuaaaaauacaaaaaua

SEQ ID NO: 13109 - RNA, 20 nt, Artificial Sequence
  spacer sequence GTCN PAM
ggcuuauuuuuguauuuuua

SEQ ID NO: 13110 - RNA, 20 nt, Artificial Sequence
  spacer sequence GTCN PAM
caaccacuccggaggcugag

SEQ ID NO: 13111 - RNA, 20 nt, Artificial Sequence
  spacer sequence GTCN PAM
ugcucuguugcccaggcugg

SEQ ID NO: 13112 - RNA, 20 nt, Artificial Sequence
  spacer sequence GTCN PAM
caaaaaaaauaauaauaaug

SEQ ID NO: 13113 - RNA, 20 nt, Artificial Sequence
  spacer sequence GTCN PAM
gaacaaccuagcagcuaguu

SEQ ID NO: 13114 - RNA, 20 nt, Artificial Sequence
  spacer sequence GTCN PAM
auugaguugucugaacaacc

SEQ ID NO: 13115 - RNA, 20 nt, Artificial Sequence
  spacer sequence GTCN PAM
guccauugaguugucugaac

SEQ ID NO: 13116 - RNA, 20 nt, Artificial Sequence
  spacer sequence GTCN PAM
caaaaaaaaaaaaaaaaaga

SEQ ID NO: 13117 - RNA, 20 nt, Artificial Sequence
  spacer sequence GTCN PAM
ggcccuuucacccaggcugg

SEQ ID NO: 13118 - RNA, 20 nt, Artificial Sequence
  spacer sequence GTCN PAM
aagugauuaucuugccucag

SEQ ID NO: 13119 - RNA, 20 nt, Artificial Sequence
  spacer sequence GTCN PAM
acauggugaaacccugccuc

SEQ ID NO: 13120 - RNA, 20 nt, Artificial Sequence
  spacer sequence GTCN PAM
cgagcucuugaccucgugau

SEQ ID NO: 13121 - RNA, 20 nt, Artificial Sequence
  spacer sequence GTCN PAM
agagcucgagaccauccugg

SEQ ID NO: 13122 - RNA, 20 nt, Artificial Sequence
  spacer sequence GTCN PAM
auggcgucacugaaguggau

SEQ ID NO: 13123 - RNA, 20 nt, Artificial Sequence
  spacer sequence GTCN PAM
cugaaguggauguucaauga

SEQ ID NO: 13124 - RNA, 20 nt, Artificial Sequence
  spacer sequence GTCN PAM
aaaaugccuccucucuugaa

SEQ ID NO: 13125 - RNA, 20 nt, Artificial Sequence
  spacer sequence GTCN PAM
gagccaggagagcuggugcc

SEQ ID NO: 13126 - RNA, 20 nt, Artificial Sequence
  spacer sequence GTCN PAM
ccccuggggggcggcuucca

SEQ ID NO: 13127 - RNA, 20 nt, Artificial Sequence
  spacer sequence GTCN PAM
gagguguggauagccccguc

SEQ ID NO: 13128 - RNA, 20 nt, Artificial Sequence
  spacer sequence GTCN PAM
cccaguagucccaccccgca

SEQ ID NO: 13129 - RNA, 20 nt, Artificial Sequence
  spacer sequence GTCN PAM
caccccgcagagagcucuca

SEQ ID NO: 13130 - RNA, 20 nt, Artificial Sequence
  spacer sequence GTCN PAM
cccaggcuggagugcagugg

SEQ ID NO: 13131 - RNA, 20 nt, Artificial Sequence
  spacer sequence GTCN PAM
cagcccacugcagccucugc

SEQ ID NO: 13132 - RNA, 20 nt, Artificial Sequence
  spacer sequence GTCN PAM
gccuccuaaguagcugggac

SEQ ID NO: 13133 - RNA, 20 nt, Artificial Sequence
  spacer sequence GTCN PAM
cagcuacuuaggaggcugac

SEQ ID NO: 13134 - RNA, 20 nt, Artificial Sequence
  spacer sequence GTCN PAM
cuauaaaaaguaaaaaaauu

SEQ ID NO: 13135 - RNA, 20 nt, Artificial Sequence
  spacer sequence GTCN PAM
ugaacuccugagcucaagca

SEQ ID NO: 13136 - RNA, 20 nt, Artificial Sequence
  spacer sequence GTCN PAM
ucccaccuuggccucccaaa

SEQ ID NO: 13137 - RNA, 20 nt, Artificial Sequence
  spacer sequence GTCN PAM
uacugugucgcccagccugg

SEQ ID NO: 13138 - RNA, 20 nt, Artificial Sequence
  spacer sequence GTCN PAM
cccagccuggucucaaacuc

SEQ ID NO: 13139 - RNA, 20 nt, Artificial Sequence
  spacer sequence GTCN PAM
caaacuccuggccucaagca

SEQ ID NO: 13140 - RNA, 20 nt, Artificial Sequence
  spacer sequence GTCN PAM
agccugucuuaauuauuuca

SEQ ID NO: 13141 - RNA, 20 nt, Artificial Sequence
  spacer sequence GTCN PAM
uaauuauuucaaauugcaga

SEQ ID NO: 13142 - RNA, 20 nt, Artificial Sequence
  spacer sequence GTCN PAM
gaaguuuucugcaauuugaa

SEQ ID NO: 13143 - RNA, 20 nt, Artificial Sequence
  spacer sequence GTCN PAM
uuacaaacaaccuucauguu

SEQ ID NO: 13144 - RNA, 20 nt, Artificial Sequence
  spacer sequence GTCN PAM
cuccugggcggcaagaagga

SEQ ID NO: 13145 - RNA, 20 nt, Artificial Sequence
  spacer sequence GTCN PAM
uucuugccgcccaggagaga

SEQ ID NO: 13146 - RNA, 20 nt, Artificial Sequence
  spacer sequence GTCN PAM
caggguccuucuugccgccc

SEQ ID NO: 13147 - RNA, 20 nt, Artificial Sequence
  spacer sequence GTCN PAM
agggggccgagggaggugcc

SEQ ID NO: 13148 - RNA, 20 nt, Artificial Sequence
  spacer sequence GTCN PAM
ccaccacgcaccucccccuc

SEQ ID NO: 13149 - RNA, 20 nt, Artificial Sequence
  spacer sequence GTCN PAM
gaggcucugugcgggagccg

SEQ ID NO: 13150 - RNA, 20 nt, Artificial Sequence
  spacer sequence GTCN PAM
ggcccggcgcggcccgaugc

SEQ ID NO: 13151 - RNA, 20 nt, Artificial Sequence
  spacer sequence GTCN PAM
cuguguucccaggcagaggg

SEQ ID NO: 13152 - RNA, 20 nt, Artificial Sequence
  spacer sequence GTCN PAM
gcuggggaaguggguggagg

SEQ ID NO: 13153 - RNA, 20 nt, Artificial Sequence
  spacer sequence GTCN PAM
caggcccguccgcuggggaa

SEQ ID NO: 13154 - RNA, 20 nt, Artificial Sequence
  spacer sequence GTCN PAM
ggcaggcccagcugcugugg

SEQ ID NO: 13155 - RNA, 20 nt, Artificial Sequence
  spacer sequence GTCN PAM
ccccucugucugucucuguc

SEQ ID NO: 13156 - RNA, 20 nt, Artificial Sequence
  spacer sequence GTCN PAM
gucucugucucugucucuau

SEQ ID NO: 13157 - RNA, 20 nt, Artificial Sequence
  spacer sequence GTCN PAM
cugucucugucucuaucugu

SEQ ID NO: 13158 - RNA, 20 nt, Artificial Sequence
  spacer sequence GTCN PAM
cugucucuaucugucucucu

SEQ ID NO: 13159 - RNA, 20 nt, Artificial Sequence
  spacer sequence GTCN PAM
cuaucugucucucugucucu

SEQ ID NO: 13160 - RNA, 20 nt, Artificial Sequence
  spacer sequence GTCN PAM
cucugucucucucugucucu

SEQ ID NO: 13161 - RNA, 20 nt, Artificial Sequence
  spacer sequence GTCN PAM
cucucugucucuuucucugu

SEQ ID NO: 13162 - RNA, 20 nt, Artificial Sequence
  spacer sequence GTCN PAM
cuuucucugucuccuugucu

SEQ ID NO: 13163 - RNA, 20 nt, Artificial Sequence
  spacer sequence GTCN PAM
ccuugucugucugucucucu

SEQ ID NO: 13164 - RNA, 20 nt, Artificial Sequence
  spacer sequence GTCN PAM
gucugucucucugucuccau

SEQ ID NO: 13165 - RNA, 20 nt, Artificial Sequence
  spacer sequence GTCN PAM
gucucucugucuccaugucu

SEQ ID NO: 13166 - RNA, 20 nt, Artificial Sequence
  spacer sequence GTCN PAM
cucugucuccaugucucucu

SEQ ID NO: 13167 - RNA, 20 nt, Artificial Sequence
  spacer sequence GTCN PAM
ccaugucucucugucucucu

SEQ ID NO: 13168 - RNA, 20 nt, Artificial Sequence
  spacer sequence GTCN PAM
cucugucucucugucuucgu

SEQ ID NO: 13169 - RNA, 20 nt, Artificial Sequence
  spacer sequence GTCN PAM
cucugucuucgucucucugu

SEQ ID NO: 13170 - RNA, 20 nt, Artificial Sequence
  spacer sequence GTCN PAM
ucgucucucuguuucuggcu

SEQ ID NO: 13171 - RNA, 20 nt, Artificial Sequence
  spacer sequence GTCN PAM
cucuguuucuggcucucuuu

SEQ ID NO: 13172 - RNA, 20 nt, Artificial Sequence
  spacer sequence GTCN PAM
cucugugucucaguuuauuu

SEQ ID NO: 13173 - RNA, 20 nt, Artificial Sequence
  spacer sequence GTCN PAM
caguuuauuucugucucuuu

SEQ ID NO: 13174 - RNA, 20 nt, Artificial Sequence
  spacer sequence GTCN PAM
cuuucugugucucuuugucu

SEQ ID NO: 13175 - RNA, 20 nt, Artificial Sequence
  spacer sequence GTCN PAM
cuuugucugugucucugugu

SEQ ID NO: 13176 - RNA, 20 nt, Artificial Sequence
  spacer sequence GTCN PAM
gugucucugugucccucugu

SEQ ID NO: 13177 - RNA, 20 nt, Artificial Sequence
  spacer sequence GTCN PAM
cugugucccucugucucugu

SEQ ID NO: 13178 - RNA, 20 nt, Artificial Sequence
  spacer sequence GTCN PAM
cucugucucuguuucucugg

SEQ ID NO: 13179 - RNA, 20 nt, Artificial Sequence
  spacer sequence GTCN PAM
cuguuucucuggcucuggcu

SEQ ID NO: 13180 - RNA, 20 nt, Artificial Sequence
  spacer sequence GTCN PAM
cugucuguuucuuuuuuuuu

SEQ ID NO: 13181 - RNA, 20 nt, Artificial Sequence
  spacer sequence GTCN PAM
guuucuuuuuuuuuuuuuuu

SEQ ID NO: 13182 - RNA, 20 nt, Artificial Sequence
  spacer sequence GTCN PAM
cgcucugucccccaggcugg

SEQ ID NO: 13183 - RNA, 20 nt, Artificial Sequence
  spacer sequence GTCN PAM
cccaggcuggggugcaaugg

SEQ ID NO: 13184 - RNA, 20 nt, Artificial Sequence
  spacer sequence GTCN PAM
cuacuaaaaaaugcaaaaaa

SEQ ID NO: 13185 - RNA, 20 nt, Artificial Sequence
  spacer sequence GTCN PAM
cgaucuccugaccucgugau

SEQ ID NO: 13186 - RNA, 20 nt, Artificial Sequence
  spacer sequence GTCN PAM
ggagaucgagaccauccugg

SEQ ID NO: 13187 - RNA, 20 nt, Artificial Sequence
  spacer sequence GTCN PAM
cucuguuucucugucucucu

SEQ ID NO: 13188 - RNA, 20 nt, Artificial Sequence
  spacer sequence GTCN PAM
cucucuuugucucugucucu

SEQ ID NO: 13189 - RNA, 20 nt, Artificial Sequence
  spacer sequence GTCN PAM
cugucucucugucucugucu

SEQ ID NO: 13190 - RNA, 20 nt, Artificial Sequence
  spacer sequence GTCN PAM
cucugucucugucucugugu

SEQ ID NO: 13191 - RNA, 20 nt, Artificial Sequence
  spacer sequence GTCN PAM
cugucucugugucccucugu

SEQ ID NO: 13192 - RNA, 20 nt, Artificial Sequence
  spacer sequence GTCN PAM
cugugucccucugucucucu

SEQ ID NO: 13193 - RNA, 20 nt, Artificial Sequence
  spacer sequence GTCN PAM
cucugucucucuguuugucu

SEQ ID NO: 13194 - RNA, 20 nt, Artificial Sequence
  spacer sequence GTCN PAM
cucuguuugucucucucugu

SEQ ID NO: 13195 - RNA, 20 nt, Artificial Sequence
  spacer sequence GTCN PAM
cucucugugucugucucugu

SEQ ID NO: 13196 - RNA, 20 nt, Artificial Sequence
  spacer sequence GTCN PAM
gucucugucuccgugucucu

SEQ ID NO: 13197 - RNA, 20 nt, Artificial Sequence
  spacer sequence GTCN PAM
cugucuccgugucucucugu

SEQ ID NO: 13198 - RNA, 20 nt, Artificial Sequence
  spacer sequence GTCN PAM
ccgugucucucugucucugu

SEQ ID NO: 13199 - RNA, 20 nt, Artificial Sequence
  spacer sequence GTCN PAM
cucugucucugucuuugucu

SEQ ID NO: 13200 - RNA, 20 nt, Artificial Sequence
  spacer sequence GTCN PAM
cugucuuugucucccugucu

SEQ ID NO: 13201 - RNA, 20 nt, Artificial Sequence
  spacer sequence GTCN PAM
uugucucccugucucugucu

SEQ ID NO: 13202 - RNA, 20 nt, Artificial Sequence
  spacer sequence GTCN PAM
cccugucucugucucuggau

SEQ ID NO: 13203 - RNA, 20 nt, Artificial Sequence
  spacer sequence GTCN PAM
cugucucuggaucccucugu

SEQ ID NO: 13204 - RNA, 20 nt, Artificial Sequence
  spacer sequence GTCN PAM
cuggaucccucugucuguuu

SEQ ID NO: 13205 - RNA, 20 nt, Artificial Sequence
  spacer sequence GTCN PAM
guuucucuagcucucucuuu

SEQ ID NO: 13206 - RNA, 20 nt, Artificial Sequence
  spacer sequence GTCN PAM
cugucucuguuucucuaucu

SEQ ID NO: 13207 - RNA, 20 nt, Artificial Sequence
  spacer sequence GTCN PAM
cuguuucucuaucucugucu

SEQ ID NO: 13208 - RNA, 20 nt, Artificial Sequence
  spacer sequence GTCN PAM
aucucugucucagucccuuc

SEQ ID NO: 13209 - RNA, 20 nt, Artificial Sequence
  spacer sequence GTCN PAM
cagucccuucuuuugccacc

SEQ ID NO: 13210 - RNA, 20 nt, Artificial Sequence
  spacer sequence GTCN PAM
cuucuuuugccaccaucccc

SEQ ID NO: 13211 - RNA, 20 nt, Artificial Sequence
  spacer sequence GTCN PAM
gcaccauacccucccugugg

SEQ ID NO: 13212 - RNA, 20 nt, Artificial Sequence
  spacer sequence GTCN PAM
gggccaccugcuccagggug

SEQ ID NO: 13213 - RNA, 20 nt, Artificial Sequence
  spacer sequence GTCN PAM
ucaggucggugcuggccggc

SEQ ID NO: 13214 - RNA, 20 nt, Artificial Sequence
  spacer sequence GTCN PAM
gugcuggccggcguguuccc

SEQ ID NO: 13215 - RNA, 20 nt, Artificial Sequence
  spacer sequence GTCN PAM
agcagguggcugcagggccc

SEQ ID NO: 13216 - RNA, 20 nt, Artificial Sequence
  spacer sequence GTCN PAM
gggcagccucugugccaaga

SEQ ID NO: 13217 - RNA, 20 nt, Artificial Sequence
  spacer sequence GTCN PAM
uggcacagaggcugccccga

SEQ ID NO: 13218 - RNA, 20 nt, Artificial Sequence
  spacer sequence GTCN PAM
gacggguuugagauuccaca

SEQ ID NO: 13219 - RNA, 20 nt, Artificial Sequence
  spacer sequence GTCN PAM
gacagguuuguuguucccua

SEQ ID NO: 13220 - RNA, 20 nt, Artificial Sequence
  spacer sequence GTCN PAM
cauguggaaucucaaacccg

SEQ ID NO: 13221 - RNA, 20 nt, Artificial Sequence
  spacer sequence GTCN PAM
gugcggaggugagaaagccu

SEQ ID NO: 13222 - RNA, 20 nt, Artificial Sequence
  spacer sequence GTCN PAM
uagcgucagugcggagguga

SEQ ID NO: 13223 - RNA, 20 nt, Artificial Sequence
  spacer sequence GTCN PAM
cugggccccuucaacccagc

SEQ ID NO: 13224 - RNA, 20 nt, Artificial Sequence
  spacer sequence GTCN PAM
ggggugucacugggccccuu

SEQ ID NO: 13225 - RNA, 20 nt, Artificial Sequence
  spacer sequence GTCN PAM
gggucagggcuguguccuga

SEQ ID NO: 13226 - RNA, 20 nt, Artificial Sequence
  spacer sequence GTCN PAM
gggcuguguccugagguugg

SEQ ID NO: 13227 - RNA, 20 nt, Artificial Sequence
  spacer sequence GTCN PAM
ugagguuggggcacccaggg

SEQ ID NO: 13228 - RNA, 20 nt, Artificial Sequence
  spacer sequence GTCN PAM
cccugugcagggaggauaaa

SEQ ID NO: 13229 - RNA, 20 nt, Artificial Sequence
  spacer sequence GTCN PAM
cagcggggacaaagacucag

SEQ ID NO: 13230 - RNA, 20 nt, Artificial Sequence
  spacer sequence GTCN PAM
ccgcugagacuuugcaugug

SEQ ID NO: 13231 - RNA, 20 nt, Artificial Sequence
  spacer sequence GTCN PAM
uuguccccgcugagacuuug

SEQ ID NO: 13232 - RNA, 20 nt, Artificial Sequence
  spacer sequence GTCN PAM
aucuauccucacaccccagg

SEQ ID NO: 13233 - RNA, 20 nt, Artificial Sequence
  spacer sequence GTCN PAM
ccucucucucucccagucca

SEQ ID NO: 13234 - RNA, 20 nt, Artificial Sequence
  spacer sequence GTCN PAM
agcuuccaggcccuccaggg

SEQ ID NO: 13235 - RNA, 20 nt, Artificial Sequence
  spacer sequence GTCN PAM
ugguggggcuagcgguguac

SEQ ID NO: 13236 - RNA, 20 nt, Artificial Sequence
  spacer sequence GTCN PAM
cugugccucaccccauccag

SEQ ID NO: 13237 - RNA, 20 nt, Artificial Sequence
  spacer sequence GTCN PAM
gacugaggccggaggaggcu

SEQ ID NO: 13238 - RNA, 20 nt, Artificial Sequence
  spacer sequence GTCN PAM
gacuaccagaugagccuucu

SEQ ID NO: 13239 - RNA, 20 nt, Artificial Sequence
  spacer sequence GTCN PAM
ucccagcacuuugggaggcc

SEQ ID NO: 13240 - RNA, 20 nt, Artificial Sequence
  spacer sequence GTCN PAM
accugccuuggccucccaaa

SEQ ID NO: 13241 - RNA, 20 nt, Artificial Sequence
  spacer sequence GTCN PAM
ggaguuugagaccaaccugc

SEQ ID NO: 13242 - RNA, 20 nt, Artificial Sequence
  spacer sequence GTCN PAM
caaacuccugaccucaggca

SEQ ID NO: 13243 - RNA, 20 nt, Artificial Sequence
  spacer sequence GTCN PAM
cuacugaauauacaaaaaaa

SEQ ID NO: 13244 - RNA, 20 nt, Artificial Sequence
  spacer sequence GTCN PAM
cccaggguggagugcagugg

SEQ ID NO: 13245 - RNA, 20 nt, Artificial Sequence
  spacer sequence GTCN PAM
caaaaaaaaaagagccaaac

SEQ ID NO: 13246 - RNA, 20 nt, Artificial Sequence
  spacer sequence GTCN PAM
caaaauagaaaaaaaaaaga

SEQ ID NO: 13247 - RNA, 20 nt, Artificial Sequence
  spacer sequence GTCN PAM
cccaggcuggagugcagugg

SEQ ID NO: 13248 - RNA, 20 nt, Artificial Sequence
  spacer sequence GTCN PAM
ucccagcuacucuggaggcu

SEQ ID NO: 13249 - RNA, 20 nt, Artificial Sequence
  spacer sequence GTCN PAM
cccaaagugcugggauuaca

SEQ ID NO: 13250 - RNA, 20 nt, Artificial Sequence
  spacer sequence GTCN PAM
ccugagaucaggaguucgag

SEQ ID NO: 13251 - RNA, 20 nt, Artificial Sequence
  spacer sequence GTCN PAM
cgaacuccugaucucaggug

SEQ ID NO: 13252 - RNA, 20 nt, Artificial Sequence
  spacer sequence GTCN PAM
gggcgaaagagcgagacucc

SEQ ID NO: 13253 - RNA, 20 nt, Artificial Sequence
  spacer sequence GTCN PAM
cgcucuuucgcccagacugg

SEQ ID NO: 13254 - RNA, 20 nt, Artificial Sequence
  spacer sequence GTCN PAM
cgacaaacaaacaaacaaac

SEQ ID NO: 13255 - RNA, 20 nt, Artificial Sequence
  spacer sequence GTCN PAM
agacggagucucgcucuuuc

SEQ ID NO: 13256 - RNA, 20 nt, Artificial Sequence
  spacer sequence GTCN PAM
cacuggguuacccaggcuaa

SEQ ID NO: 13257 - RNA, 20 nt, Artificial Sequence
  spacer sequence GTCN PAM
cccaaagugcugagaugaca

SEQ ID NO: 13258 - RNA, 20 nt, Artificial Sequence
  spacer sequence GTCN PAM
ucucagcacuuugggagacc

SEQ ID NO: 13259 - RNA, 20 nt, Artificial Sequence
  spacer sequence GTCN PAM
ccccucccucgcauuuucug

SEQ ID NO: 13260 - RNA, 20 nt, Artificial Sequence
  spacer sequence GTCN PAM
uuagaugugggcccaggggg

SEQ ID NO: 13261 - RNA, 20 nt, Artificial Sequence
  spacer sequence GTCN PAM
uccuuagaugugggcccagg

SEQ ID NO: 13262 - RNA, 20 nt, Artificial Sequence
  spacer sequence GTCN PAM
uguggcuuuguccccggggc

SEQ ID NO: 13263 - RNA, 20 nt, Artificial Sequence
  spacer sequence GTCN PAM
ccggggcgguggggagccac

SEQ ID NO: 13264 - RNA, 20 nt, Artificial Sequence
  spacer sequence GTCN PAM
guucucuguaguggcccugg

SEQ ID NO: 13265 - RNA, 20 nt, Artificial Sequence
  spacer sequence GTCN PAM
ccaggccacgaagaagccgg

SEQ ID NO: 13266 - RNA, 20 nt, Artificial Sequence
  spacer sequence GTCN PAM
uaggcugcuccagcauccgg

SEQ ID NO: 13267 - RNA, 20 nt, Artificial Sequence
  spacer sequence GTCN PAM
guguccuaggcugcuccagc

SEQ ID NO: 13268 - RNA, 20 nt, Artificial Sequence
  spacer sequence GTCN PAM
caggagggggaacgggcucc

SEQ ID NO: 13269 - RNA, 20 nt, Artificial Sequence
  spacer sequence GTCN PAM
gcccagugcugaugucaccu

SEQ ID NO: 13270 - RNA, 20 nt, Artificial Sequence
  spacer sequence GTCN PAM
ccuguguggggacuuccugg

SEQ ID NO: 13271 - RNA, 20 nt, Artificial Sequence
  spacer sequence GTCN PAM
ccacacaggugacaucagca

SEQ ID NO: 13272 - RNA, 20 nt, Artificial Sequence
  spacer sequence GTCN PAM
aggaaguccccacacaggug

SEQ ID NO: 13273 - RNA, 20 nt, Artificial Sequence
  spacer sequence GTCN PAM
gccaggagcggcccuggcuu

SEQ ID NO: 13274 - RNA, 20 nt, Artificial Sequence
  spacer sequence GTCN PAM
gaccaccuccucugagggcc

SEQ ID NO: 13275 - RNA, 20 nt, Artificial Sequence
  spacer sequence GTCN PAM
gacuccucacaguucuccaa

SEQ ID NO: 13276 - RNA, 20 nt, Artificial Sequence
  spacer sequence GTCN PAM
cacggggacuuggggaaaac

SEQ ID NO: 13277 - RNA, 20 nt, Artificial Sequence
  spacer sequence GTCN PAM
ccgugggacgcagcagaaac

SEQ ID NO: 13278 - RNA, 20 nt, Artificial Sequence
  spacer sequence GTCN PAM
aaguuuuccccaaguccccg

SEQ ID NO: 13279 - RNA, 20 nt, Artificial Sequence
  spacer sequence GTCN PAM
caaaaaaaaaaaaaaaauga

SEQ ID NO: 13280 - RNA, 20 nt, Artificial Sequence
  spacer sequence GTCN PAM
ccucagccuccccaguagcu

SEQ ID NO: 13281 - RNA, 20 nt, Artificial Sequence
  spacer sequence GTCN PAM
guacuaaaaauacaaaauuu

SEQ ID NO: 13282 - RNA, 20 nt, Artificial Sequence
  spacer sequence GTCN PAM
ugaacuccugaccucaggug

SEQ ID NO: 13283 - RNA, 20 nt, Artificial Sequence
  spacer sequence GTCN PAM
ggaguucaagaccagccugg

SEQ ID NO: 13284 - RNA, 20 nt, Artificial Sequence
  spacer sequence GTCN PAM
ucccagcacuuugggaggcu

SEQ ID NO: 13285 - RNA, 20 nt, Artificial Sequence
  spacer sequence GTCN PAM
acaggguugcaagcgggacu

SEQ ID NO: 13286 - RNA, 20 nt, Artificial Sequence
  spacer sequence GTCN PAM
cgcuugcaacccuguggacg

SEQ ID NO: 13287 - RNA, 20 nt, Artificial Sequence
  spacer sequence GTCN PAM
gggagcagggcugggcgcag

SEQ ID NO: 13288 - RNA, 20 nt, Artificial Sequence
  spacer sequence GTCN PAM
ggaguucgagaccagccugg

SEQ ID NO: 13289 - RNA, 20 nt, Artificial Sequence
  spacer sequence GTCN PAM
cgaacuccugaccucaggug

SEQ ID NO: 13290 - RNA, 20 nt, Artificial Sequence
  spacer sequence GTCN PAM
cuacaaaaaauacaaaaauu

SEQ ID NO: 13291 - RNA, 20 nt, Artificial Sequence
  spacer sequence GTCN PAM
caccacugcacuccagccug

SEQ ID NO: 13292 - RNA, 20 nt, Artificial Sequence
  spacer sequence GTCN PAM
cccaggcuggagugcagugg

SEQ ID NO: 13293 - RNA, 20 nt, Artificial Sequence
  spacer sequence GTCN PAM
ugcucugucacccaggcugg

SEQ ID NO: 13294 - RNA, 20 nt, Artificial Sequence
  spacer sequence GTCN PAM
cagagccccgggggggagug

SEQ ID NO: 13295 - RNA, 20 nt, Artificial Sequence
  spacer sequence GTCN PAM
ugugccuuccugaggucaca

SEQ ID NO: 13296 - RNA, 20 nt, Artificial Sequence
  spacer sequence GTCN PAM
ggaguuugagauccaccugg

SEQ ID NO: 13297 - RNA, 20 nt, Artificial Sequence
  spacer sequence GTCN PAM
cuaguauaaauacaaaaauu

SEQ ID NO: 13298 - RNA, 20 nt, Artificial Sequence
  spacer sequence GTCN PAM
cagcuacugaagaggcugag

SEQ ID NO: 13299 - RNA, 20 nt, Artificial Sequence
  spacer sequence GTCN PAM
cccaggcuggagugcaaugg

SEQ ID NO: 13300 - RNA, 20 nt, Artificial Sequence
  spacer sequence GTCN PAM
ggcucugucgcccaggcugg

SEQ ID NO: 13301 - RNA, 20 nt, Artificial Sequence
  spacer sequence GTCN PAM
gcugcaaccaaacgauucuu

SEQ ID NO: 13302 - RNA, 20 nt, Artificial Sequence
  spacer sequence GTCN PAM
uuuccagaacaucaacggug

SEQ ID NO: 13303 - RNA, 20 nt, Artificial Sequence
  spacer sequence GTCN PAM
ugggcacacagggugcucag

SEQ ID NO: 13304 - RNA, 20 nt, Artificial Sequence
  spacer sequence GTCN PAM
uugcugagcacccugugugc

SEQ ID NO: 13305 - RNA, 20 nt, Artificial Sequence
  spacer sequence GTCN PAM
acgucuguagcguccccacc

SEQ ID NO: 13306 - RNA, 20 nt, Artificial Sequence
  spacer sequence GTCN PAM
guagcguccccacccgguca

SEQ ID NO: 13307 - RNA, 20 nt, Artificial Sequence
  spacer sequence GTCN PAM
ccacccggucauggugacca

SEQ ID NO: 13308 - RNA, 20 nt, Artificial Sequence
  spacer sequence GTCN PAM
uggugaccaaaaacaucucc

SEQ ID NO: 13309 - RNA, 20 nt, Artificial Sequence
  spacer sequence GTCN PAM
ccaugaccggguggggacgc

SEQ ID NO: 13310 - RNA, 20 nt, Artificial Sequence
  spacer sequence GTCN PAM
ggagauguuuuuggucacca

SEQ ID NO: 13311 - RNA, 20 nt, Artificial Sequence
  spacer sequence GTCN PAM
ccuggggguguaaucacccu

SEQ ID NO: 13312 - RNA, 20 nt, Artificial Sequence
  spacer sequence GTCN PAM
ggcggguuucagacacagcu

SEQ ID NO: 13313 - RNA, 20 nt, Artificial Sequence
  spacer sequence GTCN PAM
gaaacccgccagaccaguag

SEQ ID NO: 13314 - RNA, 20 nt, Artificial Sequence
  spacer sequence GTCN PAM
uggauccagcugugucugaa

SEQ ID NO: 13315 - RNA, 20 nt, Artificial Sequence
  spacer sequence GTCN PAM
gugucacaaggaugugucca

SEQ ID NO: 13316 - RNA, 20 nt, Artificial Sequence
  spacer sequence GTCN PAM
caaggauguguccaauucuc

SEQ ID NO: 13317 - RNA, 20 nt, Artificial Sequence
  spacer sequence GTCN PAM
aauucuccaucucuuagcau

SEQ ID NO: 13318 - RNA, 20 nt, Artificial Sequence
  spacer sequence GTCN PAM
caaaaaaaaaaaaaaaaaaa

SEQ ID NO: 13319 - RNA, 20 nt, Artificial Sequence
  spacer sequence GTCN PAM
cgcucugucaccucugcugg

SEQ ID NO: 13320 - RNA, 20 nt, Artificial Sequence
  spacer sequence GTCN PAM
ccucugcuggagcccaauaa

SEQ ID NO: 13321 - RNA, 20 nt, Artificial Sequence
  spacer sequence GTCN PAM
cauuauugggcuccagcaga

SEQ ID NO: 13322 - RNA, 20 nt, Artificial Sequence
  spacer sequence GTCN PAM
cagcuacucgggaggcugag

SEQ ID NO: 13323 - RNA, 20 nt, Artificial Sequence
  spacer sequence GTCN PAM
cacgcccguagucccagcua

SEQ ID NO: 13324 - RNA, 20 nt, Artificial Sequence
  spacer sequence GTCN PAM
ggcuaauuuacguauuuuua

SEQ ID NO: 13325 - RNA, 20 nt, Artificial Sequence
  spacer sequence GTCN PAM
ggucuugaacuccugaccuc

SEQ ID NO: 13326 - RNA, 20 nt, Artificial Sequence
  spacer sequence GTCN PAM
ugaacuccugaccucaggug

SEQ ID NO: 13327 - RNA, 20 nt, Artificial Sequence
  spacer sequence GTCN PAM
ggaguucaagaccagacugg

SEQ ID NO: 13328 - RNA, 20 nt, Artificial Sequence
  spacer sequence GTCN PAM
uggcggguggaucaccugag

SEQ ID NO: 13329 - RNA, 20 nt, Artificial Sequence
  spacer sequence GTCN PAM
cucuuauuuuuuuuuucuuc

SEQ ID NO: 13330 - RNA, 20 nt, Artificial Sequence
  spacer sequence GTCN PAM
guugaagaaaaaaaaaauaa

SEQ ID NO: 13331 - RNA, 20 nt, Artificial Sequence
  spacer sequence GTCN PAM
acaccucuucccaagguggg

SEQ ID NO: 13332 - RNA, 20 nt, Artificial Sequence
  spacer sequence GTCN PAM
cauguccuggugggcugugg

SEQ ID NO: 13333 - RNA, 20 nt, Artificial Sequence
  spacer sequence GTCN PAM
uggugggcuguggccuggua

SEQ ID NO: 13334 - RNA, 20 nt, Artificial Sequence
  spacer sequence GTCN PAM
ggaugggcacggcggcucac

SEQ ID NO: 13335 - RNA, 20 nt, Artificial Sequence
  spacer sequence GTCN PAM
ucccagcacuuugggaggcc

SEQ ID NO: 13336 - RNA, 20 nt, Artificial Sequence
  spacer sequence GTCN PAM
cgaacuccuaaccucaggug

SEQ ID NO: 13337 - RNA, 20 nt, Artificial Sequence
  spacer sequence GTCN PAM
cuauugaaaauccaaaaauu

SEQ ID NO: 13338 - RNA, 20 nt, Artificial Sequence
  spacer sequence GTCN PAM
cagcuacuccagaggcugag

SEQ ID NO: 13339 - RNA, 20 nt, Artificial Sequence
  spacer sequence GTCN PAM
cagccucuggaguagcuggg

SEQ ID NO: 13340 - RNA, 20 nt, Artificial Sequence
  spacer sequence GTCN PAM
cgcucuguugcccgggcugg

SEQ ID NO: 13341 - RNA, 20 nt, Artificial Sequence
  spacer sequence GTCN PAM
caaaaaaaaaaaaagagagu

SEQ ID NO: 13342 - RNA, 20 nt, Artificial Sequence
  spacer sequence GTCN PAM
guguggagggaagugucucu

SEQ ID NO: 13343 - RNA, 20 nt, Artificial Sequence
  spacer sequence GTCN PAM
cuguuggguccgggugcucu

SEQ ID NO: 13344 - RNA, 20 nt, Artificial Sequence
  spacer sequence GTCN PAM
gggugcucugugggacucug

SEQ ID NO: 13345 - RNA, 20 nt, Artificial Sequence
  spacer sequence GTCN PAM
cacagagcacccggacccaa

SEQ ID NO: 13346 - RNA, 20 nt, Artificial Sequence
  spacer sequence GTCN PAM
ccauggguaaaggacacccc

SEQ ID NO: 13347 - RNA, 20 nt, Artificial Sequence
  spacer sequence GTCN PAM
uuuacccauggggacagaac

SEQ ID NO: 13348 - RNA, 20 nt, Artificial Sequence
  spacer sequence GTCN PAM
ucguaugcccucuucgcgca

SEQ ID NO: 13349 - RNA, 20 nt, Artificial Sequence
  spacer sequence GTCN PAM
gcgcgaagagggcauacgag

SEQ ID NO: 13350 - RNA, 20 nt, Artificial Sequence
  spacer sequence GTCN PAM
ggguguuucuucuugugcuc

SEQ ID NO: 13351 - RNA, 20 nt, Artificial Sequence
  spacer sequence GTCN PAM
auuucguggaauucuccaag

SEQ ID NO: 13352 - RNA, 20 nt, Artificial Sequence
  spacer sequence GTCN PAM
uccaucucuccaaacacuuc

SEQ ID NO: 13353 - RNA, 20 nt, Artificial Sequence
  spacer sequence GTCN PAM
gcaaaggagaagugaaguuu

SEQ ID NO: 13354 - RNA, 20 nt, Artificial Sequence
  spacer sequence GTCN PAM
cuuuuugccuucucuucaaa

SEQ ID NO: 13355 - RNA, 20 nt, Artificial Sequence
  spacer sequence GTCN PAM
cagcgagcuuugucacuuuu

SEQ ID NO: 13356 - RNA, 20 nt, Artificial Sequence
  spacer sequence GTCN PAM
acuuuugaucuuugggcgau

SEQ ID NO: 13357 - RNA, 20 nt, Artificial Sequence
  spacer sequence GTCN PAM
uggaaacugcaaagaaacug

SEQ ID NO: 13358 - RNA, 20 nt, Artificial Sequence
  spacer sequence GTCN PAM
gggcagucagccaaagauaa

SEQ ID NO: 13359 - RNA, 20 nt, Artificial Sequence
  spacer sequence GTCN PAM
gccaaagauaaacaaccaua

SEQ ID NO: 13360 - RNA, 20 nt, Artificial Sequence
  spacer sequence GTCN PAM
caaaaaaaagaaaagaaaag

SEQ ID NO: 13361 - RNA, 20 nt, Artificial Sequence
  spacer sequence GTCN PAM
ugguucaagcaguucuccug

SEQ ID NO: 13362 - RNA, 20 nt, Artificial Sequence
  spacer sequence GTCN PAM
ggaguuugaaagcagccugg

SEQ ID NO: 13363 - RNA, 20 nt, Artificial Sequence
  spacer sequence GTCN PAM
cuaaauauuuaaugguuuuu

SEQ ID NO: 13364 - RNA, 20 nt, Artificial Sequence
  spacer sequence GTCN PAM
aggcacuugagagaaugacu

SEQ ID NO: 13365 - RNA, 20 nt, Artificial Sequence
  spacer sequence GTCN PAM
uucucucaagugccuggacg

SEQ ID NO: 13366 - RNA, 20 nt, Artificial Sequence
  spacer sequence GTCN PAM
uugaacggagaauccaucuu

SEQ ID NO: 13367 - RNA, 20 nt, Artificial Sequence
  spacer sequence GTCN PAM
guaauggucaccaaguauuu

SEQ ID NO: 13368 - RNA, 20 nt, Artificial Sequence
  spacer sequence GTCN PAM
ccaaguauuuccugagucac

SEQ ID NO: 13369 - RNA, 20 nt, Artificial Sequence
  spacer sequence GTCN PAM
cuuccauguguccugcaguu

SEQ ID NO: 13370 - RNA, 20 nt, Artificial Sequence
  spacer sequence GTCN PAM
ugcaguucucugaaggggcg

SEQ ID NO: 13371 - RNA, 20 nt, Artificial Sequence
  spacer sequence GTCN PAM
cacgccccuucagagaacug

SEQ ID NO: 13372 - RNA, 20 nt, Artificial Sequence
  spacer sequence GTCN PAM
caaaaaaaaaaaaaagaucu

SEQ ID NO: 13373 - RNA, 20 nt, Artificial Sequence
  spacer sequence GTCN PAM
guaaucccagcuacucagaa

SEQ ID NO: 13374 - RNA, 20 nt, Artificial Sequence
  spacer sequence GTCN PAM
cagcgcuguccugaggcuuc

SEQ ID NO: 13375 - RNA, 20 nt, Artificial Sequence
  spacer sequence GTCN PAM
ugaggcuucccccaugaguu

SEQ ID NO: 13376 - RNA, 20 nt, Artificial Sequence
  spacer sequence GTCN PAM
aagaguggcucaaaagaagg

SEQ ID NO: 13377 - RNA, 20 nt, Artificial Sequence
  spacer sequence GTCN PAM
aaaauccuucuuuugagcca

SEQ ID NO: 13378 - RNA, 20 nt, Artificial Sequence
  spacer sequence GTCN PAM
aaaaguaacacaaaguggcc

SEQ ID NO: 13379 - RNA, 20 nt, Artificial Sequence
  spacer sequence GTCN PAM
agggucaaaaaguaacacaa

SEQ ID NO: 13380 - RNA, 20 nt, Artificial Sequence
  spacer sequence GTCN PAM
gcaagcccagguucccgccc

SEQ ID NO: 13381 - RNA, 20 nt, Artificial Sequence
  spacer sequence GTCN PAM
cgggugccaacggccucccu

SEQ ID NO: 13382 - RNA, 20 nt, Artificial Sequence
  spacer sequence GTCN PAM
uaggucacgggugccaacgg

SEQ ID NO: 13383 - RNA, 20 nt, Artificial Sequence
  spacer sequence GTCN PAM
cagccguggccucgucuccc

SEQ ID NO: 13384 - RNA, 20 nt, Artificial Sequence
  spacer sequence GTCN PAM
ccccaugccugcuucccgcc

SEQ ID NO: 13385 - RNA, 20 nt, Artificial Sequence
  spacer sequence GTCN PAM
cgggcagggggcgggaagca

SEQ ID NO: 13386 - RNA, 20 nt, Artificial Sequence
  spacer sequence GTCN PAM
ccgaggaccaaugagcgcgc

SEQ ID NO: 13387 - RNA, 20 nt, Artificial Sequence
  spacer sequence GTCN PAM
ucggagacgcccgucacggg

SEQ ID NO: 13388 - RNA, 20 nt, Artificial Sequence
  spacer sequence GTCN PAM
gcgcuuggccccgcccgagg

SEQ ID NO: 13389 - RNA, 20 nt, Artificial Sequence
  spacer sequence GTCN PAM
aaacgcuccaaucgucagcg

SEQ ID NO: 13390 - RNA, 20 nt, Artificial Sequence
  spacer sequence GTCN PAM
gcggcggcggggcgggcaga

SEQ ID NO: 13391 - RNA, 20 nt, Artificial Sequence
  spacer sequence GTCN PAM
uccucgcgaggaggcgugcc

SEQ ID NO: 13392 - RNA, 20 nt, Artificial Sequence
  spacer sequence GTCN PAM
ucgcgaggaggcgugcccug

SEQ ID NO: 13393 - RNA, 20 nt, Artificial Sequence
  spacer sequence GTCN PAM
gcggcggcgcagggaggggg

SEQ ID NO: 13394 - RNA, 20 nt, Artificial Sequence
  spacer sequence GTCN PAM
ggcgcggaagggggaggcgg

SEQ ID NO: 13395 - RNA, 20 nt, Artificial Sequence
  spacer sequence GTCN PAM
cccucgccgcggccgccgcg

SEQ ID NO: 13396 - RNA, 20 nt, Artificial Sequence
  spacer sequence GTCN PAM
gcggggcggcgcggcggcgg

SEQ ID NO: 13397 - RNA, 20 nt, Artificial Sequence
  spacer sequence GTCN PAM
gguccgcggggcggcgcggc

SEQ ID NO: 13398 - RNA, 20 nt, Artificial Sequence
  spacer sequence GTCN PAM
gcccgagcgcgcgccccgcc

SEQ ID NO: 13399 - RNA, 20 nt, Artificial Sequence
  spacer sequence GTCN PAM
ccggggcccggcaggcgccc

SEQ ID NO: 13400 - RNA, 20 nt, Artificial Sequence
  spacer sequence GTCN PAM
cgggccggcucggggggcgc

SEQ ID NO: 13401 - RNA, 20 nt, Artificial Sequence
  spacer sequence GTCN PAM
cugcccggcgcccgcgaggg

SEQ ID NO: 13402 - RNA, 20 nt, Artificial Sequence
  spacer sequence GTCN PAM
gggaggccucccgccgcggc

SEQ ID NO: 13403 - RNA, 20 nt, Artificial Sequence
  spacer sequence GTCN PAM
gcgccccccgggagguccgc

SEQ ID NO: 13404 - RNA, 20 nt, Artificial Sequence
  spacer sequence GTCN PAM
gcucggucguccgcggcgga

SEQ ID NO: 13405 - RNA, 20 nt, Artificial Sequence
  spacer sequence GTCN PAM
uccgcggcggagcguuugcu

SEQ ID NO: 13406 - RNA, 20 nt, Artificial Sequence
  spacer sequence GTCN PAM
gcggcggagcguuugcuccu

SEQ ID NO: 13407 - RNA, 20 nt, Artificial Sequence
  spacer sequence GTCN PAM
caggagcaaacgcuccgccg

SEQ ID NO: 13408 - RNA, 20 nt, Artificial Sequence
  spacer sequence GTCN PAM
caccgccugucccaggagca

SEQ ID NO: 13409 - RNA, 20 nt, Artificial Sequence
  spacer sequence GTCN PAM
ccggagacgcccccagcgaa

SEQ ID NO: 13410 - RNA, 20 nt, Artificial Sequence
  spacer sequence GTCN PAM
ccggcgacgccccgguccca

SEQ ID NO: 13411 - RNA, 20 nt, Artificial Sequence
  spacer sequence GTCN PAM
cgggggguagcgacgucgcg

SEQ ID NO: 13412 - RNA, 20 nt, Artificial Sequence
  spacer sequence GTCN PAM
cuaccccccgggacccccac

SEQ ID NO: 13413 - RNA, 20 nt, Artificial Sequence
  spacer sequence GTCN PAM
cggacccggccugugggaug

SEQ ID NO: 13414 - RNA, 20 nt, Artificial Sequence
  spacer sequence GTCN PAM
gcgacgucgcuaccccccgg

SEQ ID NO: 13415 - RNA, 20 nt, Artificial Sequence
  spacer sequence GTCN PAM
ucuccgggccgcccauccca

SEQ ID NO: 13416 - RNA, 20 nt, Artificial Sequence
  spacer sequence GTCN PAM
gugggccugagguccccgga

SEQ ID NO: 13417 - RNA, 20 nt, Artificial Sequence
  spacer sequence GTCN PAM
ccggaggaugaccuagcacu

SEQ ID NO: 13418 - RNA, 20 nt, Artificial Sequence
  spacer sequence GTCN PAM
uccuccggggaccucaggcc

SEQ ID NO: 13419 - RNA, 20 nt, Artificial Sequence
  spacer sequence GTCN PAM
ccgaggacgaaguugacccu

SEQ ID NO: 13420 - RNA, 20 nt, Artificial Sequence
  spacer sequence GTCN PAM
ucggggacccuggggaggcc

SEQ ID NO: 13421 - RNA, 20 nt, Artificial Sequence
  spacer sequence GTCN PAM
acuucguccucggggacccu

SEQ ID NO: 13422 - RNA, 20 nt, Artificial Sequence
  spacer sequence GTCN PAM
gggucaacuucguccucggg

SEQ ID NO: 13423 - RNA, 20 nt, Artificial Sequence
  spacer sequence GTCN PAM
cccaguucugaggcccgggu

SEQ ID NO: 13424 - RNA, 20 nt, Artificial Sequence
  spacer sequence GTCN PAM
cacuggaacucgcgucugag

SEQ ID NO: 13425 - RNA, 20 nt, Artificial Sequence
  spacer sequence GTCN PAM
gagccgccgucccggacccc

SEQ ID NO: 13426 - RNA, 20 nt, Artificial Sequence
  spacer sequence GTCN PAM
cggacccccggugcccgccg

SEQ ID NO: 13427 - RNA, 20 nt, Artificial Sequence
  spacer sequence GTCN PAM
gggacggcggcucagacgcg

SEQ ID NO: 13428 - RNA, 20 nt, Artificial Sequence
  spacer sequence GTCN PAM
gcagacccugcaccgggcuu

SEQ ID NO: 13429 - RNA, 20 nt, Artificial Sequence
  spacer sequence GTCN PAM
gcggaccggcgggcaccggg

SEQ ID NO: 13430 - RNA, 20 nt, Artificial Sequence
  spacer sequence GTCN PAM
aagcccggugcagggucugc

SEQ ID NO: 13431 - RNA, 20 nt, Artificial Sequence
  spacer sequence GTCN PAM
cggcugcgaguccaagcccg

SEQ ID NO: 13432 - RNA, 20 nt, Artificial Sequence
  spacer sequence GTCN PAM
gucccggcugcgaguccaag

SEQ ID NO: 13433 - RNA, 20 nt, Artificial Sequence
  spacer sequence GTCN PAM
gaacacaaggaaggaccgcu

SEQ ID NO: 13434 - RNA, 20 nt, Artificial Sequence
  spacer sequence GTCN PAM
uuccuuguguuccgacuucc

SEQ ID NO: 13435 - RNA, 20 nt, Artificial Sequence
  spacer sequence GTCN PAM
gcgggugagcgguccuuccu

SEQ ID NO: 13436 - RNA, 20 nt, Artificial Sequence
  spacer sequence GTCN PAM
cgccgccagcccugaguccg

SEQ ID NO: 13437 - RNA, 20 nt, Artificial Sequence
  spacer sequence GTCN PAM
uggagucccgccgccagccc

SEQ ID NO: 13438 - RNA, 20 nt, Artificial Sequence
  spacer sequence GTCN PAM
agcauggaggugguggaccc

SEQ ID NO: 13439 - RNA, 20 nt, Artificial Sequence
  spacer sequence GTCN PAM
accaccuccaugcuggaccc

SEQ ID NO: 13440 - RNA, 20 nt, Artificial Sequence
  spacer sequence GTCN PAM
guggguauggacacguucau

SEQ ID NO: 13441 - RNA, 20 nt, Artificial Sequence
  spacer sequence GTCN PAM
auacccaccgacaucagcuc

SEQ ID NO: 13442 - RNA, 20 nt, Artificial Sequence
  spacer sequence GTCN PAM
augcgguggaugaacguguc

SEQ ID NO: 13443 - RNA, 20 nt, Artificial Sequence
  spacer sequence GTCN PAM
ucuaccagccgcgccgcaag

SEQ ID NO: 13444 - RNA, 20 nt, Artificial Sequence
  spacer sequence GTCN PAM
cccaucagguacuugccgau

SEQ ID NO: 13445 - RNA, 20 nt, Artificial Sequence
  spacer sequence GTCN PAM
agcaccuccuucaccuugcc

SEQ ID NO: 13446 - RNA, 20 nt, Artificial Sequence
  spacer sequence GTCN PAM
ccgaguccagcaccuccuuc

SEQ ID NO: 13447 - RNA, 20 nt, Artificial Sequence
  spacer sequence GTCN PAM
agauccucaagaagaagaag

SEQ ID NO: 13448 - RNA, 20 nt, Artificial Sequence
  spacer sequence GTCN PAM
gggccgggccgggccaguca

SEQ ID NO: 13449 - RNA, 20 nt, Artificial Sequence
  spacer sequence GTCN PAM
cggugcugaugguucugucu

SEQ ID NO: 13450 - RNA, 20 nt, Artificial Sequence
  spacer sequence GTCN PAM
uccuuccuucucuccucccu

SEQ ID NO: 13451 - RNA, 20 nt, Artificial Sequence
  spacer sequence GTCN PAM
agcucaggguguuaagagga

SEQ ID NO: 13452 - RNA, 20 nt, Artificial Sequence
  spacer sequence GTCN PAM
ggcgccuguguccuccgugc

SEQ ID NO: 13453 - RNA, 20 nt, Artificial Sequence
  spacer sequence GTCN PAM
uccgugccagggagagcgug

SEQ ID NO: 13454 - RNA, 20 nt, Artificial Sequence
  spacer sequence GTCN PAM
guaacgcaggcccccaacca

SEQ ID NO: 13455 - RNA, 20 nt, Artificial Sequence
  spacer sequence GTCN PAM
cagcggggcgugcguuugca

SEQ ID NO: 13456 - RNA, 20 nt, Artificial Sequence
  spacer sequence GTCN PAM
aagagcccaugcaaacgcac

SEQ ID NO: 13457 - RNA, 20 nt, Artificial Sequence
  spacer sequence GTCN PAM
uaggggauugggggccgcuc

SEQ ID NO: 13458 - RNA, 20 nt, Artificial Sequence
  spacer sequence GTCN PAM
aaggagcagaggcgcccagu

SEQ ID NO: 13459 - RNA, 20 nt, Artificial Sequence
  spacer sequence GTCN PAM
gaggggaacccugggcugcc

SEQ ID NO: 13460 - RNA, 20 nt, Artificial Sequence
  spacer sequence GTCN PAM
gcaggagggaaacguagccu

SEQ ID NO: 13461 - RNA, 20 nt, Artificial Sequence
  spacer sequence GTCN PAM
caucccuggcaaaugaggaa

SEQ ID NO: 13462 - RNA, 20 nt, Artificial Sequence
  spacer sequence GTCN PAM
cccucgggcagggcuuccag

SEQ ID NO: 13463 - RNA, 20 nt, Artificial Sequence
  spacer sequence GTCN PAM
uccggaugcaauucgggagg

SEQ ID NO: 13464 - RNA, 20 nt, Artificial Sequence
  spacer sequence GTCN PAM
guuggaaaaguaaggucuuc

SEQ ID NO: 13465 - RNA, 20 nt, Artificial Sequence
  spacer sequence GTCN PAM
gggaugcccagcggcagccc

SEQ ID NO: 13466 - RNA, 20 nt, Artificial Sequence
  spacer sequence GTCN PAM
cugccuuaucgcagccagac

SEQ ID NO: 13467 - RNA, 20 nt, Artificial Sequence
  spacer sequence GTCN PAM
ggcugcgauaaggcagggac

SEQ ID NO: 13468 - RNA, 20 nt, Artificial Sequence
  spacer sequence GTCN PAM
uuucuuggaaacaggaggca

SEQ ID NO: 13469 - RNA, 20 nt, Artificial Sequence
  spacer sequence GTCN PAM
cucgaggccuagcccagcag

SEQ ID NO: 13470 - RNA, 20 nt, Artificial Sequence
  spacer sequence GTCN PAM
uugccagucccucgaggccu

SEQ ID NO: 13471 - RNA, 20 nt, Artificial Sequence
  spacer sequence GTCN PAM
uggugcccugcgcagggugu

SEQ ID NO: 13472 - RNA, 20 nt, Artificial Sequence
  spacer sequence GTCN PAM
ggggaggggcugcugcggug

SEQ ID NO: 13473 - RNA, 20 nt, Artificial Sequence
  spacer sequence GTCN PAM
gcucucaccuuccuccugcu

SEQ ID NO: 13474 - RNA, 20 nt, Artificial Sequence
  spacer sequence GTCN PAM
gcucucaccucucuccugcu

SEQ ID NO: 13475 - RNA, 20 nt, Artificial Sequence
  spacer sequence GTCN PAM
caaaaaaaaaaaaaaaaaaa

SEQ ID NO: 13476 - RNA, 20 nt, Artificial Sequence
  spacer sequence GTCN PAM
cgcucuguuccccaggcugg

SEQ ID NO: 13477 - RNA, 20 nt, Artificial Sequence
  spacer sequence GTCN PAM
cagcuacucgggaggcugag

SEQ ID NO: 13478 - RNA, 20 nt, Artificial Sequence
  spacer sequence GTCN PAM
cuacugaaaaauacaaaaaa

SEQ ID NO: 13479 - RNA, 20 nt, Artificial Sequence
  spacer sequence GTCN PAM
caaucuccugaccucgugau

SEQ ID NO: 13480 - RNA, 20 nt, Artificial Sequence
  spacer sequence GTCN PAM
ggagauugagaccauccugg

SEQ ID NO: 13481 - RNA, 20 nt, Artificial Sequence
  spacer sequence GTCN PAM
acgcgugcggccuuuuuuuu

SEQ ID NO: 13482 - RNA, 20 nt, Artificial Sequence
  spacer sequence GTCN PAM
caaaaaaaaaaaaaaaaaaa

SEQ ID NO: 13483 - RNA, 20 nt, Artificial Sequence
  spacer sequence GTCN PAM
uggcucacugcaaucuccgc

SEQ ID NO: 13484 - RNA, 20 nt, Artificial Sequence
  spacer sequence GTCN PAM
cuacuaaaaaaaaaaaaaaa

SEQ ID NO: 13485 - RNA, 20 nt, Artificial Sequence
  spacer sequence GTCN PAM
ugaacuucugaccucgugau

SEQ ID NO: 13486 - RNA, 20 nt, Artificial Sequence
  spacer sequence GTCN PAM
gaaguucaagaccaaccugg

SEQ ID NO: 13487 - RNA, 20 nt, Artificial Sequence
  spacer sequence GTCN PAM
cagccugcaugcugauuaag

SEQ ID NO: 13488 - RNA, 20 nt, Artificial Sequence
  spacer sequence GTCN PAM
ggguuaaaugggagcggcug

SEQ ID NO: 13489 - RNA, 20 nt, Artificial Sequence
  spacer sequence GTCN PAM
cagugcccagucuggacccg

SEQ ID NO: 13490 - RNA, 20 nt, Artificial Sequence
  spacer sequence GTCN PAM
ggacccggguagaaggugug

SEQ ID NO: 13491 - RNA, 20 nt, Artificial Sequence
  spacer sequence GTCN PAM
agacugggcacugagacauc

SEQ ID NO: 13492 - RNA, 20 nt, Artificial Sequence
  spacer sequence GTCN PAM
guggagcaguugccugugcc

SEQ ID NO: 13493 - RNA, 20 nt, Artificial Sequence
  spacer sequence GTCN PAM
cugugagauggguuggucag

SEQ ID NO: 13494 - RNA, 20 nt, Artificial Sequence
  spacer sequence GTCN PAM
ggggcuaggcagagccugug

SEQ ID NO: 13495 - RNA, 20 nt, Artificial Sequence
  spacer sequence GTCN PAM
cugugagauggguuggucag

SEQ ID NO: 13496 - RNA, 20 nt, Artificial Sequence
  spacer sequence GTCN PAM
ggggcuaggcagagccugug

SEQ ID NO: 13497 - RNA, 20 nt, Artificial Sequence
  spacer sequence GTCN PAM
cuggccccuuuagagggcac

SEQ ID NO: 13498 - RNA, 20 nt, Artificial Sequence
  spacer sequence GTCN PAM
cucucccagcagugagaaac

SEQ ID NO: 13499 - RNA, 20 nt, Artificial Sequence
  spacer sequence GTCN PAM
ggaguucgagaccagccugg

SEQ ID NO: 13500 - RNA, 20 nt, Artificial Sequence
  spacer sequence GTCN PAM
cgaacuccugaccucaggcg

SEQ ID NO: 13501 - RNA, 20 nt, Artificial Sequence
  spacer sequence GTCN PAM
ccgcaagcuccgccucccag

SEQ ID NO: 13502 - RNA, 20 nt, Artificial Sequence
  spacer sequence GTCN PAM
cccaggcuggagcgcaaugg

SEQ ID NO: 13503 - RNA, 20 nt, Artificial Sequence
  spacer sequence GTCN PAM
cgcugugucgcccaggcugg

SEQ ID NO: 13504 - RNA, 20 nt, Artificial Sequence
  spacer sequence GTCN PAM
caaaaauaaauaaauaaaua

SEQ ID NO: 13505 - RNA, 20 nt, Artificial Sequence
  spacer sequence GTCN PAM
aaacucaagccagauuuauu

SEQ ID NO: 13506 - RNA, 20 nt, Artificial Sequence
  spacer sequence GTCN PAM
augggaagacagacgcugga

SEQ ID NO: 13507 - RNA, 20 nt, Artificial Sequence
  spacer sequence GTCN PAM
ucccauugacccugcauaua

SEQ ID NO: 13508 - RNA, 20 nt, Artificial Sequence
  spacer sequence GTCN PAM
gucuucccauugacccugca

SEQ ID NO: 13509 - RNA, 20 nt, Artificial Sequence
  spacer sequence GTCN PAM
ggcuuccacccuccagcguc

SEQ ID NO: 13510 - RNA, 20 nt, Artificial Sequence
  spacer sequence GTCN PAM
guggaggagguccugggagc

SEQ ID NO: 13511 - RNA, 20 nt, Artificial Sequence
  spacer sequence GTCN PAM
ugggagcucaggugagcacc

SEQ ID NO: 13512 - RNA, 20 nt, Artificial Sequence
  spacer sequence GTCN PAM
ugguggagacaggcaagaag

SEQ ID NO: 13513 - RNA, 20 nt, Artificial Sequence
  spacer sequence GTCN PAM
ccaccaagacccucaggcuc

SEQ ID NO: 13514 - RNA, 20 nt, Artificial Sequence
  spacer sequence GTCN PAM
ggcccagugccugggagaac

SEQ ID NO: 13515 - RNA, 20 nt, Artificial Sequence
  spacer sequence GTCN PAM
ugccaaccccucugccuccc

SEQ ID NO: 13516 - RNA, 20 nt, Artificial Sequence
  spacer sequence GTCN PAM
agguccugccaaccccucug

SEQ ID NO: 13517 - RNA, 20 nt, Artificial Sequence
  spacer sequence GTCN PAM
aguccagguccugccaaccc

SEQ ID NO: 13518 - RNA, 20 nt, Artificial Sequence
  spacer sequence GTCN PAM
cagcuacccacagcuugacc

SEQ ID NO: 13519 - RNA, 20 nt, Artificial Sequence
  spacer sequence GTCN PAM
agcuguggguagcugcgacg

SEQ ID NO: 13520 - RNA, 20 nt, Artificial Sequence
  spacer sequence GTCN PAM
aauuucauccuggcccugag

SEQ ID NO: 13521 - RNA, 20 nt, Artificial Sequence
  spacer sequence GTCN PAM
cuuccuggucacugucugcc

SEQ ID NO: 13522 - RNA, 20 nt, Artificial Sequence
  spacer sequence GTCN PAM
cugucugccaucaggagcug

SEQ ID NO: 13523 - RNA, 20 nt, Artificial Sequence
  spacer sequence GTCN PAM
gccaucaggagcugccccgc

SEQ ID NO: 13524 - RNA, 20 nt, Artificial Sequence
  spacer sequence GTCN PAM
uccuauucugggagcuggug

SEQ ID NO: 13525 - RNA, 20 nt, Artificial Sequence
  spacer sequence GTCN PAM
gaacacaccagcucccagaa

SEQ ID NO: 13526 - RNA, 20 nt, Artificial Sequence
  spacer sequence GTCN PAM
aggagaagggguguccacug

SEQ ID NO: 13527 - RNA, 20 nt, Artificial Sequence
  spacer sequence GTCN PAM
acugcccagcccugaggccc

SEQ ID NO: 13528 - RNA, 20 nt, Artificial Sequence
  spacer sequence GTCN PAM
cgcagcgagugucuggaacc

SEQ ID NO: 13529 - RNA, 20 nt, Artificial Sequence
  spacer sequence GTCN PAM
ggaaccuuccagacaagccu

SEQ ID NO: 13530 - RNA, 20 nt, Artificial Sequence
  spacer sequence GTCN PAM
ggaagguuccagacacucgc

SEQ ID NO: 13531 - RNA, 20 nt, Artificial Sequence
  spacer sequence GTCN PAM
gguccuccaguuggugugga

SEQ ID NO: 13532 - RNA, 20 nt, Artificial Sequence
  spacer sequence GTCN PAM
uccaguugguguggaaagcg

SEQ ID NO: 13533 - RNA, 20 nt, Artificial Sequence
  spacer sequence GTCN PAM
cgucucuucccuuccuuccc

SEQ ID NO: 13534 - RNA, 20 nt, Artificial Sequence
  spacer sequence GTCN PAM
cuucccuuccuucccagaaa

SEQ ID NO: 13535 - RNA, 20 nt, Artificial Sequence
  spacer sequence GTCN PAM
augccuugucccgcucucac

SEQ ID NO: 13536 - RNA, 20 nt, Artificial Sequence
  spacer sequence GTCN PAM
cgcucucaccggcaaaaagu

SEQ ID NO: 13537 - RNA, 20 nt, Artificial Sequence
  spacer sequence GTCN PAM
ugccuguaaucccagcacuu

SEQ ID NO: 13538 - RNA, 20 nt, Artificial Sequence
  spacer sequence GTCN PAM
ggcuaacucccaaccucggg

SEQ ID NO: 13539 - RNA, 20 nt, Artificial Sequence
  spacer sequence GTCN PAM
cuacuaaaaauacaaaauua

SEQ ID NO: 13540 - RNA, 20 nt, Artificial Sequence
  spacer sequence GTCN PAM
acaugcuucucuccgggagu

SEQ ID NO: 13541 - RNA, 20 nt, Artificial Sequence
  spacer sequence GTCN PAM
cguuuucccagccucccagu

SEQ ID NO: 13542 - RNA, 20 nt, Artificial Sequence
  spacer sequence GTCN PAM
acugggaggcugggaaaacg

SEQ ID NO: 13543 - RNA, 20 nt, Artificial Sequence
  spacer sequence GTCN PAM
auccccugcggcucccacgu

SEQ ID NO: 13544 - RNA, 20 nt, Artificial Sequence
  spacer sequence GTCN PAM
aguccauccccugcggcucc

SEQ ID NO: 13545 - RNA, 20 nt, Artificial Sequence
  spacer sequence GTCN PAM
agcucagccccugcuccagg

SEQ ID NO: 13546 - RNA, 20 nt, Artificial Sequence
  spacer sequence GTCN PAM
uccugcugguuauccagcau

SEQ ID NO: 13547 - RNA, 20 nt, Artificial Sequence
  spacer sequence GTCN PAM
gugcacuguccuccugcugg

SEQ ID NO: 13548 - RNA, 20 nt, Artificial Sequence
  spacer sequence GTCN PAM
cccgccauaccagggcugcc

SEQ ID NO: 13549 - RNA, 20 nt, Artificial Sequence
  spacer sequence GTCN PAM
gugggaugggaauggggcgu

SEQ ID NO: 13550 - RNA, 20 nt, Artificial Sequence
  spacer sequence GTCN PAM
cagcagcuucugagaggagu

SEQ ID NO: 13551 - RNA, 20 nt, Artificial Sequence
  spacer sequence GTCN PAM
gcccagccuugggagcaugg

SEQ ID NO: 13552 - RNA, 20 nt, Artificial Sequence
  spacer sequence GTCN PAM
caggcccucucccacccccg

SEQ ID NO: 13553 - RNA, 20 nt, Artificial Sequence
  spacer sequence GTCN PAM
gaggccugaaggguucugcu

SEQ ID NO: 13554 - RNA, 20 nt, Artificial Sequence
  spacer sequence GTCN PAM
cucccugcuucccuccucug

SEQ ID NO: 13555 - RNA, 20 nt, Artificial Sequence
  spacer sequence GTCN PAM
augcuggagagguggcccca

SEQ ID NO: 13556 - RNA, 20 nt, Artificial Sequence
  spacer sequence GTCN PAM
gccucugggaggggccuugc

SEQ ID NO: 13557 - RNA, 20 nt, Artificial Sequence
  spacer sequence GTCN PAM
acggggccuggagagcgcuc

SEQ ID NO: 13558 - RNA, 20 nt, Artificial Sequence
  spacer sequence GTCN PAM
accccuagcaccuccaucua

SEQ ID NO: 13559 - RNA, 20 nt, Artificial Sequence
  spacer sequence GTCN PAM
cccgcccgggcaauguacug

SEQ ID NO: 13560 - RNA, 20 nt, Artificial Sequence
  spacer sequence GTCN PAM
uccuggggggcaucccccuc

SEQ ID NO: 13561 - RNA, 20 nt, Artificial Sequence
  spacer sequence GTCN PAM
gccggcaugugccuccaccc

SEQ ID NO: 13562 - RNA, 20 nt, Artificial Sequence
  spacer sequence GTCN PAM
acaggcguuguguguggcgg

SEQ ID NO: 13563 - RNA, 20 nt, Artificial Sequence
  spacer sequence GTCN PAM
cugucucacacacacaggag

SEQ ID NO: 13564 - RNA, 20 nt, Artificial Sequence
  spacer sequence GTCN PAM
cacacacacaggagugggcc

SEQ ID NO: 13565 - RNA, 20 nt, Artificial Sequence
  spacer sequence GTCN PAM
ggcccaagccagggcccacu

SEQ ID NO: 13566 - RNA, 20 nt, Artificial Sequence
  spacer sequence GTCN PAM
ggugggugcggacaguggcu

SEQ ID NO: 13567 - RNA, 20 nt, Artificial Sequence
  spacer sequence GTCN PAM
gcacccaccugacccgggga

SEQ ID NO: 13568 - RNA, 20 nt, Artificial Sequence
  spacer sequence GTCN PAM
cagcaccucuucccuccgug

SEQ ID NO: 13569 - RNA, 20 nt, Artificial Sequence
  spacer sequence GTCN PAM
acauguggccacucauaagg

SEQ ID NO: 13570 - RNA, 20 nt, Artificial Sequence
  spacer sequence GTCN PAM
uggacaccugguggccugca

SEQ ID NO: 13571 - RNA, 20 nt, Artificial Sequence
  spacer sequence GTCN PAM
aggacacgcccuuaugagug

SEQ ID NO: 13572 - RNA, 20 nt, Artificial Sequence
  spacer sequence GTCN PAM
cauacaggcuggugggggcc

SEQ ID NO: 13573 - RNA, 20 nt, Artificial Sequence
  spacer sequence GTCN PAM
ggagagcgcugggggacugc

SEQ ID NO: 13574 - RNA, 20 nt, Artificial Sequence
  spacer sequence GTCN PAM
cccagcgcucuccagaccag

SEQ ID NO: 13575 - RNA, 20 nt, Artificial Sequence
  spacer sequence GTCN PAM
aaugugguugcagcacaucc

SEQ ID NO: 13576 - RNA, 20 nt, Artificial Sequence
  spacer sequence GTCN PAM
cuagucaccccugggcccca

SEQ ID NO: 13577 - RNA, 20 nt, Artificial Sequence
  spacer sequence GTCN PAM
ccccugggccccauucauuu

SEQ ID NO: 13578 - RNA, 20 nt, Artificial Sequence
  spacer sequence GTCN PAM
cccacugucugaugaugugu

SEQ ID NO: 13579 - RNA, 20 nt, Artificial Sequence
  spacer sequence GTCN PAM
gaugauguguccucugucau

SEQ ID NO: 13580 - RNA, 20 nt, Artificial Sequence
  spacer sequence GTCN PAM
ucugucaugcugacagcacc

SEQ ID NO: 13581 - RNA, 20 nt, Artificial Sequence
  spacer sequence GTCN PAM
ugcugacagcaccuucucuc

SEQ ID NO: 13582 - RNA, 20 nt, Artificial Sequence
  spacer sequence GTCN PAM
gcaugacagaggacacauca

SEQ ID NO: 13583 - RNA, 20 nt, Artificial Sequence
  spacer sequence GTCN PAM
ccuauccuggccucaccuga

SEQ ID NO: 13584 - RNA, 20 nt, Artificial Sequence
  spacer sequence GTCN PAM
ggugaggccaggauagggga

SEQ ID NO: 13585 - RNA, 20 nt, Artificial Sequence
  spacer sequence GTCN PAM
ucaggugaggccaggauagg

SEQ ID NO: 13586 - RNA, 20 nt, Artificial Sequence
  spacer sequence GTCN PAM
ugucgucaggugaggccagg

SEQ ID NO: 13587 - RNA, 20 nt, Artificial Sequence
  spacer sequence GTCN PAM
acaaggcagagcgggcccca

SEQ ID NO: 13588 - RNA, 20 nt, Artificial Sequence
  spacer sequence GTCN PAM
caucuguagcacuggcagca

SEQ ID NO: 13589 - RNA, 20 nt, Artificial Sequence
  spacer sequence GTCN PAM
ccaggauccugccugaccca

SEQ ID NO: 13590 - RNA, 20 nt, Artificial Sequence
  spacer sequence GTCN PAM
ggcaggauccuggagacagg

SEQ ID NO: 13591 - RNA, 20 nt, Artificial Sequence
  spacer sequence GTCN PAM
aacaguccagggaucuaugu

SEQ ID NO: 13592 - RNA, 20 nt, Artificial Sequence
  spacer sequence GTCN PAM
agggaucuaugugcuacagc

SEQ ID NO: 13593 - RNA, 20 nt, Artificial Sequence
  spacer sequence GTCN PAM
ugcagcgccucugacugcuu

SEQ ID NO: 13594 - RNA, 20 nt, Artificial Sequence
  spacer sequence GTCN PAM
gaggcgcugcaugacgaaug

SEQ ID NO: 13595 - RNA, 20 nt, Artificial Sequence
  spacer sequence GTCN PAM
ccacaacucugcugcuguug

SEQ ID NO: 13596 - RNA, 20 nt, Artificial Sequence
  spacer sequence GTCN PAM
gagaggcugugucuccacaa

SEQ ID NO: 13597 - RNA, 20 nt, Artificial Sequence
  spacer sequence GTCN PAM
gcugaccccuggcccagucc

SEQ ID NO: 13598 - RNA, 20 nt, Artificial Sequence
  spacer sequence GTCN PAM
gcagacuuuucccaucaggc

SEQ ID NO: 13599 - RNA, 20 nt, Artificial Sequence
  spacer sequence GTCN PAM
aacacuuacuucguguuaga

SEQ ID NO: 13600 - RNA, 20 nt, Artificial Sequence
  spacer sequence GTCN PAM
gagcccagacaggcagaggg

SEQ ID NO: 13601 - RNA, 20 nt, Artificial Sequence
  spacer sequence GTCN PAM
gggcucugacuuccucuaac

SEQ ID NO: 13602 - RNA, 20 nt, Artificial Sequence
  spacer sequence GTCN PAM
cacagcagcugauggucugc

SEQ ID NO: 13603 - RNA, 20 nt, Artificial Sequence
  spacer sequence GTCN PAM
gccagcgggcgagggagggg

SEQ ID NO: 13604 - RNA, 20 nt, Artificial Sequence
  spacer sequence GTCN PAM
cuguggagcgcagagggugg

SEQ ID NO: 13605 - RNA, 20 nt, Artificial Sequence
  spacer sequence GTCN PAM
ggggccaccuggucacugug

SEQ ID NO: 13606 - RNA, 20 nt, Artificial Sequence
  spacer sequence GTCN PAM
gggcgcgcaaagccuucccg

SEQ ID NO: 13607 - RNA, 20 nt, Artificial Sequence
  spacer sequence GTCN PAM
ggcucaggccgcccgcacac

SEQ ID NO: 13608 - RNA, 20 nt, Artificial Sequence
  spacer sequence GTCN PAM
gccagcgggcgugcugccug

SEQ ID NO: 13609 - RNA, 20 nt, Artificial Sequence
  spacer sequence GTCN PAM
ugcccagucugccagcgggc

SEQ ID NO: 13610 - RNA, 20 nt, Artificial Sequence
  spacer sequence GTCN PAM
agggcagccccuggcagcca

SEQ ID NO: 13611 - RNA, 20 nt, Artificial Sequence
  spacer sequence GTCN PAM
agacuggcugcccgcuggcu

SEQ ID NO: 13612 - RNA, 20 nt, Artificial Sequence
  spacer sequence GTCN PAM
ggacacgagaggugagcugu

SEQ ID NO: 13613 - RNA, 20 nt, Artificial Sequence
  spacer sequence GTCN PAM
agaaguggaagcuggagccc

SEQ ID NO: 13614 - RNA, 20 nt, Artificial Sequence
  spacer sequence GTCN PAM
uagccugagcgccaucucug

SEQ ID NO: 13615 - RNA, 20 nt, Artificial Sequence
  spacer sequence GTCN PAM
gagagacagucccaagggcc

SEQ ID NO: 13616 - RNA, 20 nt, Artificial Sequence
  spacer sequence GTCN PAM
cucagaccuacggccaccug

SEQ ID NO: 13617 - RNA, 20 nt, Artificial Sequence
  spacer sequence GTCN PAM
caagggccccccaucacugg

SEQ ID NO: 13618 - RNA, 20 nt, Artificial Sequence
  spacer sequence GTCN PAM
cagugauggggggcccuugg

SEQ ID NO: 13619 - RNA, 20 nt, Artificial Sequence
  spacer sequence GTCN PAM
cuggauaugggguuuggaga

SEQ ID NO: 13620 - RNA, 20 nt, Artificial Sequence
  spacer sequence GTCN PAM
agaaggucucucgcccacgg

SEQ ID NO: 13621 - RNA, 20 nt, Artificial Sequence
  spacer sequence GTCN PAM
cucgcccacggcgugggcug

SEQ ID NO: 13622 - RNA, 20 nt, Artificial Sequence
  spacer sequence GTCN PAM
aaugaggugggagccugggg

SEQ ID NO: 13623 - RNA, 20 nt, Artificial Sequence
  spacer sequence GTCN PAM
ucacacaugcagggggcacc

SEQ ID NO: 13624 - RNA, 20 nt, Artificial Sequence
  spacer sequence GTCN PAM
ggugugcggccggcucccuc

SEQ ID NO: 13625 - RNA, 20 nt, Artificial Sequence
  spacer sequence GTCN PAM
uugcacacgggagaaagagg

SEQ ID NO: 13626 - RNA, 20 nt, Artificial Sequence
  spacer sequence GTCN PAM
uagguugaccuugguccugg

SEQ ID NO: 13627 - RNA, 20 nt, Artificial Sequence
  spacer sequence GTCN PAM
accuaugaccugccagccac

SEQ ID NO: 13628 - RNA, 20 nt, Artificial Sequence
  spacer sequence GTCN PAM
uggacuggggacagggaggg

SEQ ID NO: 13629 - RNA, 20 nt, Artificial Sequence
  spacer sequence GTCN PAM
aggaccaaggucaaccuaug

SEQ ID NO: 13630 - RNA, 20 nt, Artificial Sequence
  spacer sequence GTCN PAM
ccaguccaggaccaagguca

SEQ ID NO: 13631 - RNA, 20 nt, Artificial Sequence
  spacer sequence GTCN PAM
acagccggggaggcuccuuc

SEQ ID NO: 13632 - RNA, 20 nt, Artificial Sequence
  spacer sequence GTCN PAM
cccaugguguccacagccgg

SEQ ID NO: 13633 - RNA, 20 nt, Artificial Sequence
  spacer sequence GTCN PAM
cuagaugccgaggggcugau

SEQ ID NO: 13634 - RNA, 20 nt, Artificial Sequence
  spacer sequence GTCN PAM
ccugcacccaccguggggcg

SEQ ID NO: 13635 - RNA, 20 nt, Artificial Sequence
  spacer sequence GTCN PAM
aguggcauugucccacgacg

SEQ ID NO: 13636 - RNA, 20 nt, Artificial Sequence
  spacer sequence GTCN PAM
cacgacgucgucagggcuac

SEQ ID NO: 13637 - RNA, 20 nt, Artificial Sequence
  spacer sequence GTCN PAM
ugggacaaugccacuggacg

SEQ ID NO: 13638 - RNA, 20 nt, Artificial Sequence
  spacer sequence GTCN PAM
ucagggcuacuguggcagug

SEQ ID NO: 13639 - RNA, 20 nt, Artificial Sequence
  spacer sequence GTCN PAM
gggcuacuguggcaguggug

SEQ ID NO: 13640 - RNA, 20 nt, Artificial Sequence
  spacer sequence GTCN PAM
gcuccagcuagaccuacuuc

SEQ ID NO: 13641 - RNA, 20 nt, Artificial Sequence
  spacer sequence GTCN PAM
agcuggagcugaccaggcuu

SEQ ID NO: 13642 - RNA, 20 nt, Artificial Sequence
  spacer sequence GTCN PAM
gcaguggcuccugcaggaga

SEQ ID NO: 13643 - RNA, 20 nt, Artificial Sequence
  spacer sequence GTCN PAM
ucccugcaggagcaggagcc

SEQ ID NO: 13644 - RNA, 20 nt, Artificial Sequence
  spacer sequence GTCN PAM
cugcccccugugugggcucc

SEQ ID NO: 13645 - RNA, 20 nt, Artificial Sequence
  spacer sequence GTCN PAM
agagagagcccccggggccc

SEQ ID NO: 13646 - RNA, 20 nt, Artificial Sequence
  spacer sequence GTCN PAM
ugcaagguagcgccaggccc

SEQ ID NO: 13647 - RNA, 20 nt, Artificial Sequence
  spacer sequence GTCN PAM
ccauuccuccgagugcuugc

SEQ ID NO: 13648 - RNA, 20 nt, Artificial Sequence
  spacer sequence GTCN PAM
uucucgagccggcugcaccg

SEQ ID NO: 13649 - RNA, 20 nt, Artificial Sequence
  spacer sequence GTCN PAM
ggaguccuucucgagccggc

SEQ ID NO: 13650 - RNA, 20 nt, Artificial Sequence
  spacer sequence GTCN PAM
gccccaucacgggggugggg

SEQ ID NO: 13651 - RNA, 20 nt, Artificial Sequence
  spacer sequence GTCN PAM
cccucuacccaaccauggcc

SEQ ID NO: 13652 - RNA, 20 nt, Artificial Sequence
  spacer sequence GTCN PAM
cgacuccgggagguggaggu

SEQ ID NO: 13653 - RNA, 20 nt, Artificial Sequence
  spacer sequence GTCN PAM
ugacccgggagcacgcgccc

SEQ ID NO: 13654 - RNA, 20 nt, Artificial Sequence
  spacer sequence GTCN PAM
ccccggugcugagugcuggu

SEQ ID NO: 13655 - RNA, 20 nt, Artificial Sequence
  spacer sequence GTCN PAM
cuugcacucccaccagcacu

SEQ ID NO: 13656 - RNA, 20 nt, Artificial Sequence
  spacer sequence GTCN PAM
ccaugggaaccagcuucucc

SEQ ID NO: 13657 - RNA, 20 nt, Artificial Sequence
  spacer sequence GTCN PAM
aggcggcuccuuucccuggu

SEQ ID NO: 13658 - RNA, 20 nt, Artificial Sequence
  spacer sequence GTCN PAM
gggcuggcgccggggugcuc

SEQ ID NO: 13659 - RNA, 20 nt, Artificial Sequence
  spacer sequence GTCN PAM
gcaccgcacgcgcgagaccu

SEQ ID NO: 13660 - RNA, 20 nt, Artificial Sequence
  spacer sequence GTCN PAM
cgcgcgugcggugcugaccu

SEQ ID NO: 13661 - RNA, 20 nt, Artificial Sequence
  spacer sequence GTCN PAM
gggaagggcaggagcggcug

SEQ ID NO: 13662 - RNA, 20 nt, Artificial Sequence
  spacer sequence GTCN PAM
cgugugggcggaaguccggg

SEQ ID NO: 13663 - RNA, 20 nt, Artificial Sequence
  spacer sequence GTCN PAM
cggcgggggcugguguccuc

SEQ ID NO: 13664 - RNA, 20 nt, Artificial Sequence
  spacer sequence GTCN PAM
ucagcgcucccggucacagg

SEQ ID NO: 13665 - RNA, 20 nt, Artificial Sequence
  spacer sequence GTCN PAM
caggcugcccgggcccuggu

SEQ ID NO: 13666 - RNA, 20 nt, Artificial Sequence
  spacer sequence GTCN PAM
ggaaaugaguucaggcugga

SEQ ID NO: 13667 - RNA, 20 nt, Artificial Sequence
  spacer sequence GTCN PAM
ccacccccuccagccugaac

SEQ ID NO: 13668 - RNA, 20 nt, Artificial Sequence
  spacer sequence GTCN PAM
ccauccugcgccugucccca

SEQ ID NO: 13669 - RNA, 20 nt, Artificial Sequence
  spacer sequence GTCN PAM
cugccuccccuggcucgcca

SEQ ID NO: 13670 - RNA, 20 nt, Artificial Sequence
  spacer sequence GTCN PAM
ggucccugccuccccuggcu

SEQ ID NO: 13671 - RNA, 20 nt, Artificial Sequence
  spacer sequence GTCN PAM
cggcucagcccuggcgucgg

SEQ ID NO: 13672 - RNA, 20 nt, Artificial Sequence
  spacer sequence GTCN PAM
ucgcccgaccucacagggag

SEQ ID NO: 13673 - RNA, 20 nt, Artificial Sequence
  spacer sequence GTCN PAM
ggcgaggacgauggcgucuc

SEQ ID NO: 13674 - RNA, 20 nt, Artificial Sequence
  spacer sequence GTCN PAM
cucuggaggcagccgggugg

SEQ ID NO: 13675 - RNA, 20 nt, Artificial Sequence
  spacer sequence GTCN PAM
ccacgcccgccggacuccuc

SEQ ID NO: 13676 - RNA, 20 nt, Artificial Sequence
  spacer sequence GTCN PAM
ggcgggcguggggaccgaga

SEQ ID NO: 13677 - RNA, 20 nt, Artificial Sequence
  spacer sequence GTCN PAM
cccguccgccccccgcagcc

SEQ ID NO: 13678 - RNA, 20 nt, Artificial Sequence
  spacer sequence GTCN PAM
gccccccgcagccccgagcc

SEQ ID NO: 13679 - RNA, 20 nt, Artificial Sequence
  spacer sequence GTCN PAM
cggcgcugagguaggcgcgg

SEQ ID NO: 13680 - RNA, 20 nt, Artificial Sequence
  spacer sequence GTCN PAM
cgugcgcggccccuccucuc

SEQ ID NO: 13681 - RNA, 20 nt, Artificial Sequence
  spacer sequence GTCN PAM
ccggcccgccgcccccgcug

SEQ ID NO: 13682 - RNA, 20 nt, Artificial Sequence
  spacer sequence GTCN PAM
ggcuggcuccgcgccggcca

SEQ ID NO: 13683 - RNA, 20 nt, Artificial Sequence
  spacer sequence GTCN PAM
ugaggucccagggacgcagc

SEQ ID NO: 13684 - RNA, 20 nt, Artificial Sequence
  spacer sequence GTCN PAM
cagggacgcagcugggggug

SEQ ID NO: 13685 - RNA, 20 nt, Artificial Sequence
  spacer sequence GTCN PAM
cugggaccucaggaccgggc

SEQ ID NO: 13686 - RNA, 20 nt, Artificial Sequence
  spacer sequence GTCN PAM
uggaauucacgacucugcag

SEQ ID NO: 13687 - RNA, 20 nt, Artificial Sequence
  spacer sequence GTCN PAM
ugaauuccaggacaccccca

SEQ ID NO: 13688 - RNA, 20 nt, Artificial Sequence
  spacer sequence GTCN PAM
gggggggcacggacuccccu

SEQ ID NO: 13689 - RNA, 20 nt, Artificial Sequence
  spacer sequence GTCN PAM
gugcccccccggaccccacc

SEQ ID NO: 13690 - RNA, 20 nt, Artificial Sequence
  spacer sequence GTCN PAM
guggggguucuggggcggca

SEQ ID NO: 13691 - RNA, 20 nt, Artificial Sequence
  spacer sequence GTCN PAM
cuggacacaggcgccccgcc

SEQ ID NO: 13692 - RNA, 20 nt, Artificial Sequence
  spacer sequence GTCN PAM
agagacccugggcugugcag

SEQ ID NO: 13693 - RNA, 20 nt, Artificial Sequence
  spacer sequence GTCN PAM
ccucuggcacuguggaggac

SEQ ID NO: 13694 - RNA, 20 nt, Artificial Sequence
  spacer sequence GTCN PAM
uccacagugccagaggggac

SEQ ID NO: 13695 - RNA, 20 nt, Artificial Sequence
  spacer sequence GTCN PAM
cacaggggagggggcaggag

SEQ ID NO: 13696 - RNA, 20 nt, Artificial Sequence
  spacer sequence GTCN PAM
gugaucgcugucacacaggg

SEQ ID NO: 13697 - RNA, 20 nt, Artificial Sequence
  spacer sequence GTCN PAM
ccccacgaggagcaggccuc

SEQ ID NO: 13698 - RNA, 20 nt, Artificial Sequence
  spacer sequence GTCN PAM
uucugaugucaccccacgag

SEQ ID NO: 13699 - RNA, 20 nt, Artificial Sequence
  spacer sequence GTCN PAM
aagagggagaagcgggggca

SEQ ID NO: 13700 - RNA, 20 nt, Artificial Sequence
  spacer sequence GTCN PAM
caaagaaaggcugacaccgc

SEQ ID NO: 13701 - RNA, 20 nt, Artificial Sequence
  spacer sequence GTCN PAM
gccuuucuuugggacgagaa

SEQ ID NO: 13702 - RNA, 20 nt, Artificial Sequence
  spacer sequence GTCN PAM
augcagccagagauucaccc

SEQ ID NO: 13703 - RNA, 20 nt, Artificial Sequence
  spacer sequence GTCN PAM
cggcgcuucugcucuuggcu

SEQ ID NO: 13704 - RNA, 20 nt, Artificial Sequence
  spacer sequence GTCN PAM
ccuccucugcuacgucccuc

SEQ ID NO: 13705 - RNA, 20 nt, Artificial Sequence
  spacer sequence GTCN PAM
cuccaaggcccuaugccuug

SEQ ID NO: 13706 - RNA, 20 nt, Artificial Sequence
  spacer sequence GTCN PAM
augccugugaaggaagcaga

SEQ ID NO: 13707 - RNA, 20 nt, Artificial Sequence
  spacer sequence GTCN PAM
uguucccagcaggaccauga

SEQ ID NO: 13708 - RNA, 20 nt, Artificial Sequence
  spacer sequence GTCN PAM
ugcugggaacaagacgauuu

SEQ ID NO: 13709 - RNA, 20 nt, Artificial Sequence
  spacer sequence GTCN PAM
ugguccugcugggaacaaga

SEQ ID NO: 13710 - RNA, 20 nt, Artificial Sequence
  spacer sequence GTCN PAM
cuccaaaaagcaaaaccgaa

SEQ ID NO: 13711 - RNA, 20 nt, Artificial Sequence
  spacer sequence GTCN PAM
cgcacugucgcccaggcugg

SEQ ID NO: 13712 - RNA, 20 nt, Artificial Sequence
  spacer sequence GTCN PAM
cccaggcuggagugcagugg

SEQ ID NO: 13713 - RNA, 20 nt, Artificial Sequence
  spacer sequence GTCN PAM
caacuaccuuccgggcugag

SEQ ID NO: 13714 - RNA, 20 nt, Artificial Sequence
  spacer sequence GTCN PAM
gggcuggucucgaacuucug

SEQ ID NO: 13715 - RNA, 20 nt, Artificial Sequence
  spacer sequence GTCN PAM
cgaacuucugggcucaagag

SEQ ID NO: 13716 - RNA, 20 nt, Artificial Sequence
  spacer sequence GTCN PAM
cagucuccuaaauuguuggg

SEQ ID NO: 13717 - RNA, 20 nt, Artificial Sequence
  spacer sequence GTCN PAM
ccuaaauuguugggacuaca

SEQ ID NO: 13718 - RNA, 20 nt, Artificial Sequence
  spacer sequence GTCN PAM
caacaauuuaggagacugag

SEQ ID NO: 13719 - RNA, 20 nt, Artificial Sequence
  spacer sequence GTCN PAM
uuauuaaaaaucagaaaccu

SEQ ID NO: 13720 - RNA, 20 nt, Artificial Sequence
  spacer sequence GTCN PAM
cggccugugcacccagcaug

SEQ ID NO: 13721 - RNA, 20 nt, Artificial Sequence
  spacer sequence GTCN PAM
cccacgggugagggcgccau

SEQ ID NO: 13722 - RNA, 20 nt, Artificial Sequence
  spacer sequence GTCN PAM
ccacuccagggucgcccacg

SEQ ID NO: 13723 - RNA, 20 nt, Artificial Sequence
  spacer sequence GTCN PAM
cacucguggaaccacuuccc

SEQ ID NO: 13724 - RNA, 20 nt, Artificial Sequence
  spacer sequence GTCN PAM
auuaggccucccaguuuccu

SEQ ID NO: 13725 - RNA, 20 nt, Artificial Sequence
  spacer sequence GTCN PAM
ugagagccaggaggugcaca

SEQ ID NO: 13726 - RNA, 20 nt, Artificial Sequence
  spacer sequence GTCN PAM
cgacucgaaaagugaacagg

SEQ ID NO: 13727 - RNA, 20 nt, Artificial Sequence
  spacer sequence GTCN PAM
ugaccugugcaccuccuggc

SEQ ID NO: 13728 - RNA, 20 nt, Artificial Sequence
  spacer sequence GTCN PAM
uccuggcccuggcucggggg

SEQ ID NO: 13729 - RNA, 20 nt, Artificial Sequence
  spacer sequence GTCN PAM
cuuggagccuggucauccug

SEQ ID NO: 13730 - RNA, 20 nt, Artificial Sequence
  spacer sequence GTCN PAM
cagcgcuggcccggugggag

SEQ ID NO: 13731 - RNA, 20 nt, Artificial Sequence
  spacer sequence GTCN PAM
gaccagcagggccuucuuca

SEQ ID NO: 13732 - RNA, 20 nt, Artificial Sequence
  spacer sequence GTCN PAM
gacucaggaugaaggcgugg

SEQ ID NO: 13733 - RNA, 20 nt, Artificial Sequence
  spacer sequence GTCN PAM
ccuggaacccaagcaccuga

SEQ ID NO: 13734 - RNA, 20 nt, Artificial Sequence
  spacer sequence GTCN PAM
gauucgcccacagcaggagg

SEQ ID NO: 13735 - RNA, 20 nt, Artificial Sequence
  spacer sequence GTCN PAM
agcccaccgcgccaggcuca

SEQ ID NO: 13736 - RNA, 20 nt, Artificial Sequence
  spacer sequence GTCN PAM
gcggcacccggccgggcccc

SEQ ID NO: 13737 - RNA, 20 nt, Artificial Sequence
  spacer sequence GTCN PAM
ccgccccgcccccgcgcuca

SEQ ID NO: 13738 - RNA, 20 nt, Artificial Sequence
  spacer sequence GTCN PAM
uagccgcgagcgaggcugcg

SEQ ID NO: 13739 - RNA, 20 nt, Artificial Sequence
  spacer sequence GTCN PAM
gccagcggcccgcgcagccu

SEQ ID NO: 13740 - RNA, 20 nt, Artificial Sequence
  spacer sequence GTCN PAM
gaggcgcacgggggcgacgg

SEQ ID NO: 13741 - RNA, 20 nt, Artificial Sequence
  spacer sequence GTCN PAM
cccccgugcgccucugacgc

SEQ ID NO: 13742 - RNA, 20 nt, Artificial Sequence
  spacer sequence GTCN PAM
gcgagcgcaucuccgggcgc

SEQ ID NO: 13743 - RNA, 20 nt, Artificial Sequence
  spacer sequence GTCN PAM
aggagcagcgcgccgggguc

SEQ ID NO: 13744 - RNA, 20 nt, Artificial Sequence
  spacer sequence GTCN PAM
gggauccccagcgagcccuc

SEQ ID NO: 13745 - RNA, 20 nt, Artificial Sequence
  spacer sequence GTCN PAM
cccgcgcugugccccucgcc

SEQ ID NO: 13746 - RNA, 20 nt, Artificial Sequence
  spacer sequence GTCN PAM
ccguuuccuagaacagcugc

SEQ ID NO: 13747 - RNA, 20 nt, Artificial Sequence
  spacer sequence GTCN PAM
cguccugcacacuuucucgg

SEQ ID NO: 13748 - RNA, 20 nt, Artificial Sequence
  spacer sequence GTCN PAM
ugcacacuuucucggcuuuu

SEQ ID NO: 13749 - RNA, 20 nt, Artificial Sequence
  spacer sequence GTCN PAM
uagugguaggugguggcaaa

SEQ ID NO: 13750 - RNA, 20 nt, Artificial Sequence
  spacer sequence GTCN PAM
caaacaaaaaaauaaauaaa

SEQ ID NO: 13751 - RNA, 20 nt, Artificial Sequence
  spacer sequence GTCN PAM
ugcucagucgcccaggcugg

SEQ ID NO: 13752 - RNA, 20 nt, Artificial Sequence
  spacer sequence GTCN PAM
cccaggcuggagugcagugg

SEQ ID NO: 13753 - RNA, 20 nt, Artificial Sequence
  spacer sequence GTCN PAM
cuacuaaauauacaaaaauu

SEQ ID NO: 13754 - RNA, 20 nt, Artificial Sequence
  spacer sequence GTCN PAM
acauggcgaaaccucgucuc

SEQ ID NO: 13755 - RNA, 20 nt, Artificial Sequence
  spacer sequence GTCN PAM
ggaguuugaaaccagccugg

SEQ ID NO: 13756 - RNA, 20 nt, Artificial Sequence
  spacer sequence GTCN PAM
ggccgggcgcgguggcucac

SEQ ID NO: 13757 - RNA, 20 nt, Artificial Sequence
  spacer sequence GTCN PAM
gcuaaauaacccccggcccc

SEQ ID NO: 13758 - RNA, 20 nt, Artificial Sequence
  spacer sequence GTCN PAM
cagcuacuggggaggcugag

SEQ ID NO: 13759 - RNA, 20 nt, Artificial Sequence
  spacer sequence GTCN PAM
cuacaaauaaucaaaauuag

SEQ ID NO: 13760 - RNA, 20 nt, Artificial Sequence
  spacer sequence GTCN PAM
cccucuguugcccagacugg

SEQ ID NO: 13761 - RNA, 20 nt, Artificial Sequence
  spacer sequence GTCN PAM
gggcaacagagggagacccc

SEQ ID NO: 13762 - RNA, 20 nt, Artificial Sequence
  spacer sequence GTCN PAM
ccaucuccuggggucaagug

SEQ ID NO: 13763 - RNA, 20 nt, Artificial Sequence
  spacer sequence GTCN PAM
agugauucuccugccuuggc

SEQ ID NO: 13764 - RNA, 20 nt, Artificial Sequence
  spacer sequence GTCN PAM
auccagggcccugcauccaa

SEQ ID NO: 13765 - RNA, 20 nt, Artificial Sequence
  spacer sequence GTCN PAM
guacaaaaaaaaaaaaaaag

SEQ ID NO: 13766 - RNA, 20 nt, Artificial Sequence
  spacer sequence GTCN PAM
ggggugggggcgaucuacac

SEQ ID NO: 13767 - RNA, 20 nt, Artificial Sequence
  spacer sequence GTCN PAM
ugagccaccacgcagccgaa

SEQ ID NO: 13768 - RNA, 20 nt, Artificial Sequence
  spacer sequence GTCN PAM
ugggagguggaguaaaacga

SEQ ID NO: 13769 - RNA, 20 nt, Artificial Sequence
  spacer sequence GTCN PAM
gauaagggcggugaaaccgu

SEQ ID NO: 13770 - RNA, 20 nt, Artificial Sequence
  spacer sequence GTCN PAM
ugagguauucuggggguugc

SEQ ID NO: 13771 - RNA, 20 nt, Artificial Sequence
  spacer sequence GTCN PAM
ucaacgucgcgugcgcccug

SEQ ID NO: 13772 - RNA, 20 nt, Artificial Sequence
  spacer sequence GTCN PAM
acgucgcgugcgcccugccg

SEQ ID NO: 13773 - RNA, 20 nt, Artificial Sequence
  spacer sequence GTCN PAM
cgugcgcccugccgggaguc

SEQ ID NO: 13774 - RNA, 20 nt, Artificial Sequence
  spacer sequence GTCN PAM
uaguucgcgcuugcgcucuc

SEQ ID NO: 13775 - RNA, 20 nt, Artificial Sequence
  spacer sequence GTCN PAM
cggcgagagcgcaagcgcga

SEQ ID NO: 13776 - RNA, 20 nt, Artificial Sequence
  spacer sequence GTCN PAM
gggaggaggagucccggcga

SEQ ID NO: 13777 - RNA, 20 nt, Artificial Sequence
  spacer sequence GTCN PAM
cugcgcgucguccuccucgc

SEQ ID NO: 13778 - RNA, 20 nt, Artificial Sequence
  spacer sequence GTCN PAM
uccuccucgcccuccaggcc

SEQ ID NO: 13779 - RNA, 20 nt, Artificial Sequence
  spacer sequence GTCN PAM
uccucgcccuccaggccgcc

SEQ ID NO: 13780 - RNA, 20 nt, Artificial Sequence
  spacer sequence GTCN PAM
gcuguccgccagcuacccgc

SEQ ID NO: 13781 - RNA, 20 nt, Artificial Sequence
  spacer sequence GTCN PAM
gccagcuacccgcuuccugc

SEQ ID NO: 13782 - RNA, 20 nt, Artificial Sequence
  spacer sequence GTCN PAM
cgggcggcggagcagcgcgg

SEQ ID NO: 13783 - RNA, 20 nt, Artificial Sequence
  spacer sequence GTCN PAM
gccacgcccgugccuaugcc

SEQ ID NO: 13784 - RNA, 20 nt, Artificial Sequence
  spacer sequence GTCN PAM
uucaccuucgccucucccac

SEQ ID NO: 13785 - RNA, 20 nt, Artificial Sequence
  spacer sequence GTCN PAM
ggacccuccguggccgccgc

SEQ ID NO: 13786 - RNA, 20 nt, Artificial Sequence
  spacer sequence GTCN PAM
cgacccgcagcgcccgaacc

SEQ ID NO: 13787 - RNA, 20 nt, Artificial Sequence
  spacer sequence GTCN PAM
aggguccccacccccagggc

SEQ ID NO: 13788 - RNA, 20 nt, Artificial Sequence
  spacer sequence GTCN PAM
ccacccccagggcgcgaccc

SEQ ID NO: 13789 - RNA, 20 nt, Artificial Sequence
  spacer sequence GTCN PAM
cgcccuggggguggggaccc

SEQ ID NO: 13790 - RNA, 20 nt, Artificial Sequence
  spacer sequence GTCN PAM
gggggcccggaagcgggggu

SEQ ID NO: 13791 - RNA, 20 nt, Artificial Sequence
  spacer sequence GTCN PAM
agggcugaguagccucggcu

SEQ ID NO: 13792 - RNA, 20 nt, Artificial Sequence
  spacer sequence GTCN PAM
cgggcaccuccccgagauaa

SEQ ID NO: 13793 - RNA, 20 nt, Artificial Sequence
  spacer sequence GTCN PAM
ccugggugcccuccccgauc

SEQ ID NO: 13794 - RNA, 20 nt, Artificial Sequence
  spacer sequence GTCN PAM
ccggaucguugcauucccau

SEQ ID NO: 13795 - RNA, 20 nt, Artificial Sequence
  spacer sequence GTCN PAM
ucaacaguugcgccucauuc

SEQ ID NO: 13796 - RNA, 20 nt, Artificial Sequence
  spacer sequence GTCN PAM
cagugccucacaucagcgcc

SEQ ID NO: 13797 - RNA, 20 nt, Artificial Sequence
  spacer sequence GTCN PAM
ugcccugacccauuacuuag

SEQ ID NO: 13798 - RNA, 20 nt, Artificial Sequence
  spacer sequence GTCN PAM
gggcaggaccuggcgcugau

SEQ ID NO: 13799 - RNA, 20 nt, Artificial Sequence
  spacer sequence GTCN PAM
ugcuaaguaaugggucaggg

SEQ ID NO: 13800 - RNA, 20 nt, Artificial Sequence
  spacer sequence GTCN PAM
gcagguguucuucaacggug

SEQ ID NO: 13801 - RNA, 20 nt, Artificial Sequence
  spacer sequence GTCN PAM
ggcagguggacgugcccacg

SEQ ID NO: 13802 - RNA, 20 nt, Artificial Sequence
  spacer sequence GTCN PAM
accugccggacguuggcacc

SEQ ID NO: 13803 - RNA, 20 nt, Artificial Sequence
  spacer sequence GTCN PAM
gcgugggcacguccaccugc

SEQ ID NO: 13804 - RNA, 20 nt, Artificial Sequence
  spacer sequence GTCN PAM
ugcggccggggcuggucgug

SEQ ID NO: 13805 - RNA, 20 nt, Artificial Sequence
  spacer sequence GTCN PAM
uggugcaugcagaggacggc

SEQ ID NO: 13806 - RNA, 20 nt, Artificial Sequence
  spacer sequence GTCN PAM
ucugcaugcaccacgaccag

SEQ ID NO: 13807 - RNA, 20 nt, Artificial Sequence
  spacer sequence GTCN PAM
gguggagggcugcagggcca

SEQ ID NO: 13808 - RNA, 20 nt, Artificial Sequence
  spacer sequence GTCN PAM
gucuccgucucaguugaggc

SEQ ID NO: 13809 - RNA, 20 nt, Artificial Sequence
  spacer sequence GTCN PAM
ccgucucaguugaggcugcg

SEQ ID NO: 13810 - RNA, 20 nt, Artificial Sequence
  spacer sequence GTCN PAM
caguugaggcugcgagaaaa

SEQ ID NO: 13811 - RNA, 20 nt, Artificial Sequence
  spacer sequence GTCN PAM
gaaguucggagaccagccug

SEQ ID NO: 13812 - RNA, 20 nt, Artificial Sequence
  spacer sequence GTCN PAM
ccgaacuucugaccucaggu

SEQ ID NO: 13813 - RNA, 20 nt, Artificial Sequence
  spacer sequence GTCN PAM
cuucuaaaaauacagaaaac

SEQ ID NO: 13814 - RNA, 20 nt, Artificial Sequence
  spacer sequence GTCN PAM
ggagaucgagaccauccugg

SEQ ID NO: 13815 - RNA, 20 nt, Artificial Sequence
  spacer sequence GTCN PAM
cgaucuccugaccucgugau

SEQ ID NO: 13816 - RNA, 20 nt, Artificial Sequence
  spacer sequence GTCN PAM
cuacuaaaaauacaaaaaau

SEQ ID NO: 13817 - RNA, 20 nt, Artificial Sequence
  spacer sequence GTCN PAM
cagcuagucaggaggcugag

SEQ ID NO: 13818 - RNA, 20 nt, Artificial Sequence
  spacer sequence GTCN PAM
ggaggcugaggagauugugc

SEQ ID NO: 13819 - RNA, 20 nt, Artificial Sequence
  spacer sequence GTCN PAM
acugaggagccugggcuggc

SEQ ID NO: 13820 - RNA, 20 nt, Artificial Sequence
  spacer sequence GTCN PAM
ccucugguucgcuuucauca

SEQ ID NO: 13821 - RNA, 20 nt, Artificial Sequence
  spacer sequence GTCN PAM
uaaaccggcugagagcaggg

SEQ ID NO: 13822 - RNA, 20 nt, Artificial Sequence
  spacer sequence GTCN PAM
agagccagucauaaaccggc

SEQ ID NO: 13823 - RNA, 20 nt, Artificial Sequence
  spacer sequence GTCN PAM
aagcaagagauguaaaacca

SEQ ID NO: 13824 - RNA, 20 nt, Artificial Sequence
  spacer sequence GTCN PAM
cccaaagugcugagauuaca

SEQ ID NO: 13825 - RNA, 20 nt, Artificial Sequence
  spacer sequence GTCN PAM
caaacuccugggcuuaagcg

SEQ ID NO: 13826 - RNA, 20 nt, Artificial Sequence
  spacer sequence GTCN PAM
cacuauguugccaaggcuag

SEQ ID NO: 13827 - RNA, 20 nt, Artificial Sequence
  spacer sequence GTCN PAM
cuacaaaaaauaaaaagaaa

SEQ ID NO: 13828 - RNA, 20 nt, Artificial Sequence
  spacer sequence GTCN PAM
guuucuuuuuauuuuuugua

SEQ ID NO: 13829 - RNA, 20 nt, Artificial Sequence
  spacer sequence GTCN PAM
cuugagcccaggaguuugag

SEQ ID NO: 13830 - RNA, 20 nt, Artificial Sequence
  spacer sequence GTCN PAM
caaacuccugggcucaagag

SEQ ID NO: 13831 - RNA, 20 nt, Artificial Sequence
  spacer sequence GTCN PAM
cagcuacucgggaggcugaa

SEQ ID NO: 13832 - RNA, 20 nt, Artificial Sequence
  spacer sequence GTCN PAM
ucuugcuucagccucccgag

SEQ ID NO: 13833 - RNA, 20 nt, Artificial Sequence
  spacer sequence GTCN PAM
aggcugcagugagccaagau

SEQ ID NO: 13834 - RNA, 20 nt, Artificial Sequence
  spacer sequence GTCN PAM
cacucuuguugcucaggcug

SEQ ID NO: 13835 - RNA, 20 nt, Artificial Sequence
  spacer sequence GTCN PAM
uuugugcaggaaaaaaagca

SEQ ID NO: 13836 - RNA, 20 nt, Artificial Sequence
  spacer sequence GTCN PAM
gggccaaaggcaagcugagu

SEQ ID NO: 13837 - RNA, 20 nt, Artificial Sequence
  spacer sequence GTCN PAM
gagggagggccucugucccc

SEQ ID NO: 13838 - RNA, 20 nt, Artificial Sequence
  spacer sequence GTCN PAM
ccaggcagugcuuuuggggg

SEQ ID NO: 13839 - RNA, 20 nt, Artificial Sequence
  spacer sequence GTCN PAM
uuucuugcggccccuguuuu

SEQ ID NO: 13840 - RNA, 20 nt, Artificial Sequence
  spacer sequence GTCN PAM
ugugggucuguuugcacacu

SEQ ID NO: 13841 - RNA, 20 nt, Artificial Sequence
  spacer sequence GTCN PAM
guuugcacacucaggacaca

SEQ ID NO: 13842 - RNA, 20 nt, Artificial Sequence
  spacer sequence GTCN PAM
ugagugugcaaacagaccca

SEQ ID NO: 13843 - RNA, 20 nt, Artificial Sequence
  spacer sequence GTCN PAM
guguccugagugugcaaaca

SEQ ID NO: 13844 - RNA, 20 nt, Artificial Sequence
  spacer sequence GTCN PAM
agagcccccugugaaccagg

SEQ ID NO: 13845 - RNA, 20 nt, Artificial Sequence
  spacer sequence GTCN PAM
aguccagagcccccugugaa

SEQ ID NO: 13846 - RNA, 20 nt, Artificial Sequence
  spacer sequence GTCN PAM
cugaggcugugcagcccuuu

SEQ ID NO: 13847 - RNA, 20 nt, Artificial Sequence
  spacer sequence GTCN PAM
cacgccuuccccccgcccca

SEQ ID NO: 13848 - RNA, 20 nt, Artificial Sequence
  spacer sequence GTCN PAM
gcguucacugcgauggaacc

SEQ ID NO: 13849 - RNA, 20 nt, Artificial Sequence
  spacer sequence GTCN PAM
cggccucuucggccaacaac

SEQ ID NO: 13850 - RNA, 20 nt, Artificial Sequence
  spacer sequence GTCN PAM
agcgucacggccucuucggc

SEQ ID NO: 13851 - RNA, 20 nt, Artificial Sequence
  spacer sequence GTCN PAM
aacauguccagcgucacggc

SEQ ID NO: 13852 - RNA, 20 nt, Artificial Sequence
  spacer sequence GTCN PAM
gaggggaccugaggcucagc

SEQ ID NO: 13853 - RNA, 20 nt, Artificial Sequence
  spacer sequence GTCN PAM
ccucugacacucacccccag

SEQ ID NO: 13854 - RNA, 20 nt, Artificial Sequence
  spacer sequence GTCN PAM
aggcugcgggggagggagcg

SEQ ID NO: 13855 - RNA, 20 nt, Artificial Sequence
  spacer sequence GTCN PAM
cccagcgcucccucccccgc

SEQ ID NO: 13856 - RNA, 20 nt, Artificial Sequence
  spacer sequence GTCN PAM
cugcuggccccucaccgccc

SEQ ID NO: 13857 - RNA, 20 nt, Artificial Sequence
  spacer sequence GTCN PAM
ccaccagcuccgccugggcc

SEQ ID NO: 13858 - RNA, 20 nt, Artificial Sequence
  spacer sequence GTCN PAM
gcuguccccaccagcuccgc

SEQ ID NO: 13859 - RNA, 20 nt, Artificial Sequence
  spacer sequence GTCN PAM
cgaggcccggccaggggcug

SEQ ID NO: 13860 - RNA, 20 nt, Artificial Sequence
  spacer sequence GTCN PAM
cggccaccuggggaagccgc

SEQ ID NO: 13861 - RNA, 20 nt, Artificial Sequence
  spacer sequence GTCN PAM
ccagagcuuucaacacaggc

SEQ ID NO: 13862 - RNA, 20 nt, Artificial Sequence
  spacer sequence GTCN PAM
ggcuggggggaucuugagag

SEQ ID NO: 13863 - RNA, 20 nt, Artificial Sequence
  spacer sequence GTCN PAM
accuuggcggcuggcucugc

SEQ ID NO: 13864 - RNA, 20 nt, Artificial Sequence
  spacer sequence GTCN PAM
uuaauggggcgggggcuggg

SEQ ID NO: 13865 - RNA, 20 nt, Artificial Sequence
  spacer sequence GTCN PAM
ggcuuccgggucuuuaaugg

SEQ ID NO: 13866 - RNA, 20 nt, Artificial Sequence
  spacer sequence GTCN PAM
ugggccccugcucacguccu

SEQ ID NO: 13867 - RNA, 20 nt, Artificial Sequence
  spacer sequence GTCN PAM
uccaugucccuugcaaauag

SEQ ID NO: 13868 - RNA, 20 nt, Artificial Sequence
  spacer sequence GTCN PAM
cuugcaaauagggccuuuga

SEQ ID NO: 13869 - RNA, 20 nt, Artificial Sequence
  spacer sequence GTCN PAM
aggggagcucaaaggcccua

SEQ ID NO: 13870 - RNA, 20 nt, Artificial Sequence
  spacer sequence GTCN PAM
cuuagggcaccuggaggucc

SEQ ID NO: 13871 - RNA, 20 nt, Artificial Sequence
  spacer sequence GTCN PAM
guaggaagcaggcucgaggg

SEQ ID NO: 13872 - RNA, 20 nt, Artificial Sequence
  spacer sequence GTCN PAM
gcagccugcccgccuggcug

SEQ ID NO: 13873 - RNA, 20 nt, Artificial Sequence
  spacer sequence GTCN PAM
ccagugauggggacaucggu

SEQ ID NO: 13874 - RNA, 20 nt, Artificial Sequence
  spacer sequence GTCN PAM
ccaucacuggugaccuucac

SEQ ID NO: 13875 - RNA, 20 nt, Artificial Sequence
  spacer sequence GTCN PAM
gggaggggugucccugcugc

SEQ ID NO: 13876 - RNA, 20 nt, Artificial Sequence
  spacer sequence GTCN PAM
cugcugcuccuggcgccucu

SEQ ID NO: 13877 - RNA, 20 nt, Artificial Sequence
  spacer sequence GTCN PAM
ccaggccuugacccugagcc

SEQ ID NO: 13878 - RNA, 20 nt, Artificial Sequence
  spacer sequence GTCN PAM
aggccuggagaccaggaacu

SEQ ID NO: 13879 - RNA, 20 nt, Artificial Sequence
  spacer sequence GTCN PAM
uguggguggcccugccuggc

SEQ ID NO: 13880 - RNA, 20 nt, Artificial Sequence
  spacer sequence GTCN PAM
acacaccagcuggagccagu

SEQ ID NO: 13881 - RNA, 20 nt, Artificial Sequence
  spacer sequence GTCN PAM
ccugaccuccucccuuccuu

SEQ ID NO: 13882 - RNA, 20 nt, Artificial Sequence
  spacer sequence GTCN PAM
ggagaccccagcccccgccg

SEQ ID NO: 13883 - RNA, 20 nt, Artificial Sequence
  spacer sequence GTCN PAM
caaggaagggaggaggucag

SEQ ID NO: 13884 - RNA, 20 nt, Artificial Sequence
  spacer sequence GTCN PAM
cuggagcugggauggugaca

SEQ ID NO: 13885 - RNA, 20 nt, Artificial Sequence
  spacer sequence GTCN PAM
ccaucccagcuccagugaca

SEQ ID NO: 13886 - RNA, 20 nt, Artificial Sequence
  spacer sequence GTCN PAM
gcacggacgggcagcucacu

SEQ ID NO: 13887 - RNA, 20 nt, Artificial Sequence
  spacer sequence GTCN PAM
gugcugacaggcccggggcg

SEQ ID NO: 13888 - RNA, 20 nt, Artificial Sequence
  spacer sequence GTCN PAM
uggcacuaugcgggugacuu

SEQ ID NO: 13889 - RNA, 20 nt, Artificial Sequence
  spacer sequence GTCN PAM
cccgcauagugccaugacgu

SEQ ID NO: 13890 - RNA, 20 nt, Artificial Sequence
  spacer sequence GTCN PAM
caaggcccccaacggcaccu

SEQ ID NO: 13891 - RNA, 20 nt, Artificial Sequence
  spacer sequence GTCN PAM
gcagaucagguauucuggaa

SEQ ID NO: 13892 - RNA, 20 nt, Artificial Sequence
  spacer sequence GTCN PAM
ccugccuggcucccccucca

SEQ ID NO: 13893 - RNA, 20 nt, Artificial Sequence
  spacer sequence GTCN PAM
cgaggcccaaguggaggggg

SEQ ID NO: 13894 - RNA, 20 nt, Artificial Sequence
  spacer sequence GTCN PAM
cucgugucccgaggcccaag

SEQ ID NO: 13895 - RNA, 20 nt, Artificial Sequence
  spacer sequence GTCN PAM
gccaccaggccacaggagca

SEQ ID NO: 13896 - RNA, 20 nt, Artificial Sequence
  spacer sequence GTCN PAM
ucaaguuccugccaggccac

SEQ ID NO: 13897 - RNA, 20 nt, Artificial Sequence
  spacer sequence GTCN PAM
ugguggccuggcaggaacuu

SEQ ID NO: 13898 - RNA, 20 nt, Artificial Sequence
  spacer sequence GTCN PAM
uauuuauaggguccuggugg

SEQ ID NO: 13899 - RNA, 20 nt, Artificial Sequence
  spacer sequence GTCN PAM
cagcugugcccuuggucuua

SEQ ID NO: 13900 - RNA, 20 nt, Artificial Sequence
  spacer sequence GTCN PAM
ccggagugagcagcuccucc

SEQ ID NO: 13901 - RNA, 20 nt, Artificial Sequence
  spacer sequence GTCN PAM
ugaggccuggcuccaagguu

SEQ ID NO: 13902 - RNA, 20 nt, Artificial Sequence
  spacer sequence GTCN PAM
cggguguccugaggccuggc

SEQ ID NO: 13903 - RNA, 20 nt, Artificial Sequence
  spacer sequence GTCN PAM
ggugucucggguguccugag

SEQ ID NO: 13904 - RNA, 20 nt, Artificial Sequence
  spacer sequence GTCN PAM
uggagcaggaggcagucagg

SEQ ID NO: 13905 - RNA, 20 nt, Artificial Sequence
  spacer sequence GTCN PAM
ggguggggccgggaaccagg

SEQ ID NO: 13906 - RNA, 20 nt, Artificial Sequence
  spacer sequence GTCN PAM
aggcccuucagugagggcag

SEQ ID NO: 13907 - RNA, 20 nt, Artificial Sequence
  spacer sequence GTCN PAM
ccaucacacccaggaacaac

SEQ ID NO: 13908 - RNA, 20 nt, Artificial Sequence
  spacer sequence GTCN PAM
ccaugguugaguggguuguu

SEQ ID NO: 13909 - RNA, 20 nt, Artificial Sequence
  spacer sequence GTCN PAM
aaaugaauaaacaugcuaaa

SEQ ID NO: 13910 - RNA, 20 nt, Artificial Sequence
  spacer sequence GTCN PAM
ccaaagggccacacaguggc

SEQ ID NO: 13911 - RNA, 20 nt, Artificial Sequence
  spacer sequence GTCN PAM
gaacuugcugggcuucacag

SEQ ID NO: 13912 - RNA, 20 nt, Artificial Sequence
  spacer sequence GTCN PAM
cauuccacucccgaccagac

SEQ ID NO: 13913 - RNA, 20 nt, Artificial Sequence
  spacer sequence GTCN PAM
ggaguggaaugggacacggg

SEQ ID NO: 13914 - RNA, 20 nt, Artificial Sequence
  spacer sequence GTCN PAM
ggucgggaguggaaugggac

SEQ ID NO: 13915 - RNA, 20 nt, Artificial Sequence
  spacer sequence GTCN PAM
auuccacucccgaccagacu

SEQ ID NO: 13916 - RNA, 20 nt, Artificial Sequence
  spacer sequence GTCN PAM
ggaguggaauggacaccauc

SEQ ID NO: 13917 - RNA, 20 nt, Artificial Sequence
  spacer sequence GTCN PAM
ggucgggaguggaauggaca

SEQ ID NO: 13918 - RNA, 20 nt, Artificial Sequence
  spacer sequence GTCN PAM
ccucagucuggucgggagug

SEQ ID NO: 13919 - RNA, 20 nt, Artificial Sequence
  spacer sequence GTCN PAM
auuccacucccgaccagacu

SEQ ID NO: 13920 - RNA, 20 nt, Artificial Sequence
  spacer sequence GTCN PAM
ggaguggaauggacaccguc

SEQ ID NO: 13921 - RNA, 20 nt, Artificial Sequence
  spacer sequence GTCN PAM
ggucgggaguggaauggaca

SEQ ID NO: 13922 - RNA, 20 nt, Artificial Sequence
  spacer sequence GTCN PAM
ccucagucuggucgggagug

SEQ ID NO: 13923 - RNA, 20 nt, Artificial Sequence
  spacer sequence GTCN PAM
auuccacucccgaccagacu

SEQ ID NO: 13924 - RNA, 20 nt, Artificial Sequence
  spacer sequence GTCN PAM
ggaguggaauggacaccguc

SEQ ID NO: 13925 - RNA, 20 nt, Artificial Sequence
  spacer sequence GTCN PAM
ggucgggaguggaauggaca

SEQ ID NO: 13926 - RNA, 20 nt, Artificial Sequence
  spacer sequence GTCN PAM
ccucagucuggucgggagug

SEQ ID NO: 13927 - RNA, 20 nt, Artificial Sequence
  spacer sequence GTCN PAM
ugcuugggcugcucauuugg

SEQ ID NO: 13928 - RNA, 20 nt, Artificial Sequence
  spacer sequence GTCN PAM
acggcucccuccgccaccuu

SEQ ID NO: 13929 - RNA, 20 nt, Artificial Sequence
  spacer sequence GTCN PAM
augaauggggcuuggaugaa

SEQ ID NO: 13930 - RNA, 20 nt, Artificial Sequence
  spacer sequence GTCN PAM
aguucacuaagcucccagaa

SEQ ID NO: 13931 - RNA, 20 nt, Artificial Sequence
  spacer sequence GTCN PAM
aggaagugggaauggcuuga

SEQ ID NO: 13932 - RNA, 20 nt, Artificial Sequence
  spacer sequence GTCN PAM
uuuuuuuuuuuuuuuuuuuu

SEQ ID NO: 13933 - RNA, 20 nt, Artificial Sequence
  spacer sequence GTCN PAM
cccggguucgagcaaugcuc

SEQ ID NO: 13934 - RNA, 20 nt, Artificial Sequence
  spacer sequence GTCN PAM
guacuaaaaacacaaaaauu

SEQ ID NO: 13935 - RNA, 20 nt, Artificial Sequence
  spacer sequence GTCN PAM
cgaacuccugaccucgugau

SEQ ID NO: 13936 - RNA, 20 nt, Artificial Sequence
  spacer sequence GTCN PAM
ggaguucgagaccagccuga

SEQ ID NO: 13937 - RNA, 20 nt, Artificial Sequence
  spacer sequence GTCN PAM
caaaaaaaaaaaaaaaaaaa

SEQ ID NO: 13938 - RNA, 20 nt, Artificial Sequence
  spacer sequence GTCN PAM
cucaggcuggagugcccugg

SEQ ID NO: 13939 - RNA, 20 nt, Artificial Sequence
  spacer sequence GTCN PAM
cagcuacucaggaggcugag

SEQ ID NO: 13940 - RNA, 20 nt, Artificial Sequence
  spacer sequence GTCN PAM
guagucccagcuacucagga

SEQ ID NO: 13941 - RNA, 20 nt, Artificial Sequence
  spacer sequence GTCN PAM
cuacuaaaaauacaaaaauu

SEQ ID NO: 13942 - RNA, 20 nt, Artificial Sequence
  spacer sequence GTCN PAM
caaucucuugaccuugugau

SEQ ID NO: 13943 - RNA, 20 nt, Artificial Sequence
  spacer sequence GTCN PAM
agagauugagaccagccugg

SEQ ID NO: 13944 - RNA, 20 nt, Artificial Sequence
  spacer sequence GTCN PAM
ggcgcgguggcucacgccug

SEQ ID NO: 13945 - RNA, 20 nt, Artificial Sequence
  spacer sequence GTCN PAM
cauaaaaaagaugaugcggu

SEQ ID NO: 13946 - RNA, 20 nt, Artificial Sequence
  spacer sequence GTCN PAM
uuccucaaaccgcagccccu

SEQ ID NO: 13947 - RNA, 20 nt, Artificial Sequence
  spacer sequence GTCN PAM
caggggcugcgguuugagga

SEQ ID NO: 13948 - RNA, 20 nt, Artificial Sequence
  spacer sequence GTCN PAM
gggcuaggccagagagggag

SEQ ID NO: 13949 - RNA, 20 nt, Artificial Sequence
  spacer sequence GTCN PAM
aggugggggccacggcugcc

SEQ ID NO: 13950 - RNA, 20 nt, Artificial Sequence
  spacer sequence GTCN PAM
ccuuccggcugccacccaug

SEQ ID NO: 13951 - RNA, 20 nt, Artificial Sequence
  spacer sequence GTCN PAM
ggccagauaaagggaggggc

SEQ ID NO: 13952 - RNA, 20 nt, Artificial Sequence
  spacer sequence GTCN PAM
acucaucuggccccucccuu

SEQ ID NO: 13953 - RNA, 20 nt, Artificial Sequence
  spacer sequence GTCN PAM
ccuucucuaaauagaggggc

SEQ ID NO: 13954 - RNA, 20 nt, Artificial Sequence
  spacer sequence GTCN PAM
ugccccucuauuuagagaag

SEQ ID NO: 13955 - RNA, 20 nt, Artificial Sequence
  spacer sequence GTCN PAM
ugguugaggugggccccguc

SEQ ID NO: 13956 - RNA, 20 nt, Artificial Sequence
  spacer sequence GTCN PAM
gcuuuuugaggaugguccug

SEQ ID NO: 13957 - RNA, 20 nt, Artificial Sequence
  spacer sequence GTCN PAM
cauuggcuguggccucaguu

SEQ ID NO: 13958 - RNA, 20 nt, Artificial Sequence
  spacer sequence GTCN PAM
ugcauuaauggggggugaug

SEQ ID NO: 13959 - RNA, 20 nt, Artificial Sequence
  spacer sequence GTCN PAM
cagcauagccggcuggugac

SEQ ID NO: 13960 - RNA, 20 nt, Artificial Sequence
  spacer sequence GTCN PAM
ccagccggcuaugcugugac

SEQ ID NO: 13961 - RNA, 20 nt, Artificial Sequence
  spacer sequence GTCN PAM
ccauugacagaugcaggagg

SEQ ID NO: 13962 - RNA, 20 nt, Artificial Sequence
  spacer sequence GTCN PAM
auggugaccucagagggcau

SEQ ID NO: 13963 - RNA, 20 nt, Artificial Sequence
  spacer sequence GTCN PAM
ccugccguagagugggggug

SEQ ID NO: 13964 - RNA, 20 nt, Artificial Sequence
  spacer sequence GTCN PAM
aggaaaacaggcuggaguca

SEQ ID NO: 13965 - RNA, 20 nt, Artificial Sequence
  spacer sequence GTCN PAM
uccaggaaaacaggcuggag

SEQ ID NO: 13966 - RNA, 20 nt, Artificial Sequence
  spacer sequence GTCN PAM
gcggcugucguccaggaaaa

SEQ ID NO: 13967 - RNA, 20 nt, Artificial Sequence
  spacer sequence GTCN PAM
cccccacgcgggcgccccca

SEQ ID NO: 13968 - RNA, 20 nt, Artificial Sequence
  spacer sequence GTCN PAM
ccccaggcccggugcuuccg

SEQ ID NO: 13969 - RNA, 20 nt, Artificial Sequence
  spacer sequence GTCN PAM
cgcuguacaccccaaaaccc

SEQ ID NO: 13970 - RNA, 20 nt, Artificial Sequence
  spacer sequence GTCN PAM
cgcugacgauucggggugca

SEQ ID NO: 13971 - RNA, 20 nt, Artificial Sequence
  spacer sequence GTCN PAM
gcgggacaggguuuuggggu

SEQ ID NO: 13972 - RNA, 20 nt, Artificial Sequence
  spacer sequence GTCN PAM
cggcccgccucgccgcgggc

SEQ ID NO: 13973 - RNA, 20 nt, Artificial Sequence
  spacer sequence GTCN PAM
ccccaugaacugcgccaagc

SEQ ID NO: 13974 - RNA, 20 nt, Artificial Sequence
  spacer sequence GTCN PAM
cggguggcccagccgucaag

SEQ ID NO: 13975 - RNA, 20 nt, Artificial Sequence
  spacer sequence GTCN PAM
aggcgccccagggccagggc

SEQ ID NO: 13976 - RNA, 20 nt, Artificial Sequence
  spacer sequence GTCN PAM
gcgucaccgcccgcccggcc

SEQ ID NO: 13977 - RNA, 20 nt, Artificial Sequence
  spacer sequence GTCN PAM
ccgcccgcccggccccccgc

SEQ ID NO: 13978 - RNA, 20 nt, Artificial Sequence
  spacer sequence GTCN PAM
gggccaagcgcgcggcccuc

SEQ ID NO: 13979 - RNA, 20 nt, Artificial Sequence
  spacer sequence GTCN PAM
ggggccgaaugcgcgcuggc

SEQ ID NO: 13980 - RNA, 20 nt, Artificial Sequence
  spacer sequence GTCN PAM
ccccccuccacacucaccgg

SEQ ID NO: 13981 - RNA, 20 nt, Artificial Sequence
  spacer sequence GTCN PAM
caagaacaaagaaaagugcg

SEQ ID NO: 13982 - RNA, 20 nt, Artificial Sequence
  spacer sequence GTCN PAM
ugggaagccccccggggugc

SEQ ID NO: 13983 - RNA, 20 nt, Artificial Sequence
  spacer sequence GTCN PAM
ggccagggcggcgcuggcug

SEQ ID NO: 13984 - RNA, 20 nt, Artificial Sequence
  spacer sequence GTCN PAM
cccgcggugaagggggagug

SEQ ID NO: 13985 - RNA, 20 nt, Artificial Sequence
  spacer sequence GTCN PAM
cagucucccgacuacagucu

SEQ ID NO: 13986 - RNA, 20 nt, Artificial Sequence
  spacer sequence GTCN PAM
cccgacuacagucuuucguu

SEQ ID NO: 13987 - RNA, 20 nt, Artificial Sequence
  spacer sequence GTCN PAM
ggagacugggaccguguggc

SEQ ID NO: 13988 - RNA, 20 nt, Artificial Sequence
  spacer sequence GTCN PAM
uucguucccgaucgggguuc

SEQ ID NO: 13989 - RNA, 20 nt, Artificial Sequence
  spacer sequence GTCN PAM
ucuuccuccccugccagggg

SEQ ID NO: 13990 - RNA, 20 nt, Artificial Sequence
  spacer sequence GTCN PAM
uccuccccugccaggggcag

SEQ ID NO: 13991 - RNA, 20 nt, Artificial Sequence
  spacer sequence GTCN PAM
cggggagggggcgccgcgcu

SEQ ID NO: 13992 - RNA, 20 nt, Artificial Sequence
  spacer sequence GTCN PAM
gcagcucgggcgcgcccucu

SEQ ID NO: 13993 - RNA, 20 nt, Artificial Sequence
  spacer sequence GTCN PAM
ccggcugcgcccgcgcgcgc

SEQ ID NO: 13994 - RNA, 20 nt, Artificial Sequence
  spacer sequence GTCN PAM
cgucacggcucgagcgggcg

SEQ ID NO: 13995 - RNA, 20 nt, Artificial Sequence
  spacer sequence GTCN PAM
cggcucgagcgggcgcgccu

SEQ ID NO: 13996 - RNA, 20 nt, Artificial Sequence
  spacer sequence GTCN PAM
ccgaggugcgggcgccccgc

SEQ ID NO: 13997 - RNA, 20 nt, Artificial Sequence
  spacer sequence GTCN PAM
cccgcccgccccgggacccc

SEQ ID NO: 13998 - RNA, 20 nt, Artificial Sequence
  spacer sequence GTCN PAM
cggggcgggcgggcgacggu

SEQ ID NO: 13999 - RNA, 20 nt, Artificial Sequence
  spacer sequence GTCN PAM
gcgccucguggccggggucc

SEQ ID NO: 14000 - RNA, 20 nt, Artificial Sequence
  spacer sequence GTCN PAM
gggaaaagccgcgagcggaa

SEQ ID NO: 14001 - RNA, 20 nt, Artificial Sequence
  spacer sequence GTCN PAM
uggggccaccccgccgccuu

SEQ ID NO: 14002 - RNA, 20 nt, Artificial Sequence
  spacer sequence GTCN PAM
gguaccccucgcgaucccaa

SEQ ID NO: 14003 - RNA, 20 nt, Artificial Sequence
  spacer sequence GTCN PAM
ccagaccugggucccgcgcc

SEQ ID NO: 14004 - RNA, 20 nt, Artificial Sequence
  spacer sequence GTCN PAM
ggagacgggucugguacccc

SEQ ID NO: 14005 - RNA, 20 nt, Artificial Sequence
  spacer sequence GTCN PAM
cgcgccccccggggcgcgcc

SEQ ID NO: 14006 - RNA, 20 nt, Artificial Sequence
  spacer sequence GTCN PAM
ccugggcgcugggggcgggg

SEQ ID NO: 14007 - RNA, 20 nt, Artificial Sequence
  spacer sequence GTCN PAM
gccgcgagcccgggccuaug

SEQ ID NO: 14008 - RNA, 20 nt, Artificial Sequence
  spacer sequence GTCN PAM
ccgccgcucggaggaucugg

SEQ ID NO: 14009 - RNA, 20 nt, Artificial Sequence
  spacer sequence GTCN PAM
ccucccuuagcaacagccgu

SEQ ID NO: 14010 - RNA, 20 nt, Artificial Sequence
  spacer sequence GTCN PAM
cgcuuccucgcgcguccccu

SEQ ID NO: 14011 - RNA, 20 nt, Artificial Sequence
  spacer sequence GTCN PAM
gccgcccgggucgcgcuucc

SEQ ID NO: 14012 - RNA, 20 nt, Artificial Sequence
  spacer sequence GTCN PAM
uggggagggggcgccgcucg

SEQ ID NO: 14013 - RNA, 20 nt, Artificial Sequence
  spacer sequence GTCN PAM
cggucgcgcccgccgcccuu

SEQ ID NO: 14014 - RNA, 20 nt, Artificial Sequence
  spacer sequence GTCN PAM
cgcccgccgcccuuugaagg

SEQ ID NO: 14015 - RNA, 20 nt, Artificial Sequence
  spacer sequence GTCN PAM
ccacccccggaaggcgcccc

SEQ ID NO: 14016 - RNA, 20 nt, Artificial Sequence
  spacer sequence GTCN PAM
cuccggcuccugggggcgcc

SEQ ID NO: 14017 - RNA, 20 nt, Artificial Sequence
  spacer sequence GTCN PAM
cgcauuccgcggccgggacu

SEQ ID NO: 14018 - RNA, 20 nt, Artificial Sequence
  spacer sequence GTCN PAM
cggccgcggaaugcgagacc

SEQ ID NO: 14019 - RNA, 20 nt, Artificial Sequence
  spacer sequence GTCN PAM
uccucgagaaagucccggcc

SEQ ID NO: 14020 - RNA, 20 nt, Artificial Sequence
  spacer sequence GTCN PAM
uccgggcacucgggggcgcg

SEQ ID NO: 14021 - RNA, 20 nt, Artificial Sequence
  spacer sequence GTCN PAM
cggaggcgcggcgaggauug

SEQ ID NO: 14022 - RNA, 20 nt, Artificial Sequence
  spacer sequence GTCN PAM
uagcgggugcccguggugcu

SEQ ID NO: 14023 - RNA, 20 nt, Artificial Sequence
  spacer sequence GTCN PAM
ggcggcacggccaggucgua

SEQ ID NO: 14024 - RNA, 20 nt, Artificial Sequence
  spacer sequence GTCN PAM
cgucgggcggcacggccagg

SEQ ID NO: 14025 - RNA, 20 nt, Artificial Sequence
  spacer sequence GTCN PAM
cagcgccucaaagugcccaa

SEQ ID NO: 14026 - RNA, 20 nt, Artificial Sequence
  spacer sequence GTCN PAM
uuguggagaagagccaggcg

SEQ ID NO: 14027 - RNA, 20 nt, Artificial Sequence
  spacer sequence GTCN PAM
ggccgcccccugccuucccc

SEQ ID NO: 14028 - RNA, 20 nt, Artificial Sequence
  spacer sequence GTCN PAM
ccgcacaaaggcggcugcga

SEQ ID NO: 14029 - RNA, 20 nt, Artificial Sequence
  spacer sequence GTCN PAM
cgggccgggcuucggcggcc

SEQ ID NO: 14030 - RNA, 20 nt, Artificial Sequence
  spacer sequence GTCN PAM
cggcugcgggugugggggcc

SEQ ID NO: 14031 - RNA, 20 nt, Artificial Sequence
  spacer sequence GTCN PAM
gcgccggcuuccgcaucugc

SEQ ID NO: 14032 - RNA, 20 nt, Artificial Sequence
  spacer sequence GTCN PAM
ggcugucuccccccacuugc

SEQ ID NO: 14033 - RNA, 20 nt, Artificial Sequence
  spacer sequence GTCN PAM
ccccccacuugcgucucucu

SEQ ID NO: 14034 - RNA, 20 nt, Artificial Sequence
  spacer sequence GTCN PAM
cucucccccccuuuguucuc

SEQ ID NO: 14035 - RNA, 20 nt, Artificial Sequence
  spacer sequence GTCN PAM
ccggaggcccgcggggggag

SEQ ID NO: 14036 - RNA, 20 nt, Artificial Sequence
  spacer sequence GTCN PAM
aucccaguggaggggcccau

SEQ ID NO: 14037 - RNA, 20 nt, Artificial Sequence
  spacer sequence GTCN PAM
ccuuugucugcgcggcggcg

SEQ ID NO: 14038 - RNA, 20 nt, Artificial Sequence
  spacer sequence GTCN PAM
gcgcggcggcggccgccugc

SEQ ID NO: 14039 - RNA, 20 nt, Artificial Sequence
  spacer sequence GTCN PAM
uggcuccucuuuguaggaac

SEQ ID NO: 14040 - RNA, 20 nt, Artificial Sequence
  spacer sequence GTCN PAM
ugggggaagguggcauagag

SEQ ID NO: 14041 - RNA, 20 nt, Artificial Sequence
  spacer sequence GTCN PAM
agggcggggguuccacugga

SEQ ID NO: 14042 - RNA, 20 nt, Artificial Sequence
  spacer sequence GTCN PAM
gaaucgccaggauggggcuc

SEQ ID NO: 14043 - RNA, 20 nt, Artificial Sequence
  spacer sequence GTCN PAM
ggugcugggagccccauccu

SEQ ID NO: 14044 - RNA, 20 nt, Artificial Sequence
  spacer sequence GTCN PAM
ccgucuggugcugggagccc

SEQ ID NO: 14045 - RNA, 20 nt, Artificial Sequence
  spacer sequence GTCN PAM
cuccccacacaagcacagcc

SEQ ID NO: 14046 - RNA, 20 nt, Artificial Sequence
  spacer sequence GTCN PAM
cugugucgucuccgcggagu

SEQ ID NO: 14047 - RNA, 20 nt, Artificial Sequence
  spacer sequence GTCN PAM
ucuccgcggagucucaugcu

SEQ ID NO: 14048 - RNA, 20 nt, Artificial Sequence
  spacer sequence GTCN PAM
ccgcggagucucaugcucuu

SEQ ID NO: 14049 - RNA, 20 nt, Artificial Sequence
  spacer sequence GTCN PAM
caugcucuuccuuccucccc

SEQ ID NO: 14050 - RNA, 20 nt, Artificial Sequence
  spacer sequence GTCN PAM
gcuugcugccaucacccacg

SEQ ID NO: 14051 - RNA, 20 nt, Artificial Sequence
  spacer sequence GTCN PAM
gcacacacacuaccuggggc

SEQ ID NO: 14052 - RNA, 20 nt, Artificial Sequence
  spacer sequence GTCN PAM
gaauccugggcuggaauagg

SEQ ID NO: 14053 - RNA, 20 nt, Artificial Sequence
  spacer sequence GTCN PAM
caggccucaaggccggaaca

SEQ ID NO: 14054 - RNA, 20 nt, Artificial Sequence
  spacer sequence GTCN PAM
gugaugcaagcucucgagag

SEQ ID NO: 14055 - RNA, 20 nt, Artificial Sequence
  spacer sequence GTCN PAM
cacggagacgcagguaagac

SEQ ID NO: 14056 - RNA, 20 nt, Artificial Sequence
  spacer sequence GTCN PAM
ccgugagacucucgagagcu

SEQ ID NO: 14057 - RNA, 20 nt, Artificial Sequence
  spacer sequence GTCN PAM
uaccugcgucuccgugagac

SEQ ID NO: 14058 - RNA, 20 nt, Artificial Sequence
  spacer sequence GTCN PAM
guggccaaggcacccugcuc

SEQ ID NO: 14059 - RNA, 20 nt, Artificial Sequence
  spacer sequence GTCN PAM
gugcucccaggaggcugggg

SEQ ID NO: 14060 - RNA, 20 nt, Artificial Sequence
  spacer sequence GTCN PAM
ccuccccucccccagccucc

SEQ ID NO: 14061 - RNA, 20 nt, Artificial Sequence
  spacer sequence GTCN PAM
gguggugaaucuugggggag

SEQ ID NO: 14062 - RNA, 20 nt, Artificial Sequence
  spacer sequence GTCN PAM
ugugaaagccaggcccccuu

SEQ ID NO: 14063 - RNA, 20 nt, Artificial Sequence
  spacer sequence GTCN PAM
uccugcaggcagucuuguga

SEQ ID NO: 14064 - RNA, 20 nt, Artificial Sequence
  spacer sequence GTCN PAM
cccaagccgccacccccagc

SEQ ID NO: 14065 - RNA, 20 nt, Artificial Sequence
  spacer sequence GTCN PAM
cggaaggcggaaggaguguc

SEQ ID NO: 14066 - RNA, 20 nt, Artificial Sequence
  spacer sequence GTCN PAM
cccuccccuccucucucugg

SEQ ID NO: 14067 - RNA, 20 nt, Artificial Sequence
  spacer sequence GTCN PAM
aggccucacuggccccaggg

SEQ ID NO: 14068 - RNA, 20 nt, Artificial Sequence
  spacer sequence GTCN PAM
gcagcaaaaccgggaaccgg

SEQ ID NO: 14069 - RNA, 20 nt, Artificial Sequence
  spacer sequence GTCN PAM
gaggaaggcuuggccgcagc

SEQ ID NO: 14070 - RNA, 20 nt, Artificial Sequence
  spacer sequence GTCN PAM
cccuccugggagguggccag

SEQ ID NO: 14071 - RNA, 20 nt, Artificial Sequence
  spacer sequence GTCN PAM
cccacccuggcagcgggcgg

SEQ ID NO: 14072 - RNA, 20 nt, Artificial Sequence
  spacer sequence GTCN PAM
ugcccuuucccuacaucgcg

SEQ ID NO: 14073 - RNA, 20 nt, Artificial Sequence
  spacer sequence GTCN PAM
gccauggggguggccacagc

SEQ ID NO: 14074 - RNA, 20 nt, Artificial Sequence
  spacer sequence GTCN PAM
cgagccagggcgggggcugc

SEQ ID NO: 14075 - RNA, 20 nt, Artificial Sequence
  spacer sequence GTCN PAM
ggaaggagcuggguuggggg

SEQ ID NO: 14076 - RNA, 20 nt, Artificial Sequence
  spacer sequence GTCN PAM
ccgcccagcacccccuccag

SEQ ID NO: 14077 - RNA, 20 nt, Artificial Sequence
  spacer sequence GTCN PAM
ugcccgcccauuagccuucc

SEQ ID NO: 14078 - RNA, 20 nt, Artificial Sequence
  spacer sequence GTCN PAM
ccaccaccacccgcccugca

SEQ ID NO: 14079 - RNA, 20 nt, Artificial Sequence
  spacer sequence GTCN PAM
uggggcagggggguaggggg

SEQ ID NO: 14080 - RNA, 20 nt, Artificial Sequence
  spacer sequence GTCN PAM
guucugagucaucccagccu

SEQ ID NO: 14081 - RNA, 20 nt, Artificial Sequence
  spacer sequence GTCN PAM
ucccagccuaugucacuucu

SEQ ID NO: 14082 - RNA, 20 nt, Artificial Sequence
  spacer sequence GTCN PAM
cuucucagaaaccuccgcca

SEQ ID NO: 14083 - RNA, 20 nt, Artificial Sequence
  spacer sequence GTCN PAM
ucgccaagcccccugcucug

SEQ ID NO: 14084 - RNA, 20 nt, Artificial Sequence
  spacer sequence GTCN PAM
cggagggcacaaccugcucc

SEQ ID NO: 14085 - RNA, 20 nt, Artificial Sequence
  spacer sequence GTCN PAM
gggccccuuccugcagccuu

SEQ ID NO: 14086 - RNA, 20 nt, Artificial Sequence
  spacer sequence GTCN PAM
ugggcggggcggaggccuag

SEQ ID NO: 14087 - RNA, 20 nt, Artificial Sequence
  spacer sequence GTCN PAM
uaaccuuugcuuucucaaga

SEQ ID NO: 14088 - RNA, 20 nt, Artificial Sequence
  spacer sequence GTCN PAM
ccagggccagcaagugggug

SEQ ID NO: 14089 - RNA, 20 nt, Artificial Sequence
  spacer sequence GTCN PAM
gugacugccagcugggcccc

SEQ ID NO: 14090 - RNA, 20 nt, Artificial Sequence
  spacer sequence GTCN PAM
cugaccucaaacaaccuuca

SEQ ID NO: 14091 - RNA, 20 nt, Artificial Sequence
  spacer sequence GTCN PAM
ugcaaggggaaacugaggcc

SEQ ID NO: 14092 - RNA, 20 nt, Artificial Sequence
  spacer sequence GTCN PAM
gucuugcaaggggaaacuga

SEQ ID NO: 14093 - RNA, 20 nt, Artificial Sequence
  spacer sequence GTCN PAM
gacccgccucuguccccaca

SEQ ID NO: 14094 - RNA, 20 nt, Artificial Sequence
  spacer sequence GTCN PAM
gacgggggccugccccuccc

SEQ ID NO: 14095 - RNA, 20 nt, Artificial Sequence
  spacer sequence GTCN PAM
ccacagcccccagcggcgcc

SEQ ID NO: 14096 - RNA, 20 nt, Artificial Sequence
  spacer sequence GTCN PAM
guggcaccgacagggacccc

SEQ ID NO: 14097 - RNA, 20 nt, Artificial Sequence
  spacer sequence GTCN PAM
gugccacggacgcuuaaaua

SEQ ID NO: 14098 - RNA, 20 nt, Artificial Sequence
  spacer sequence GTCN PAM
cugucggugccacggacgcu

SEQ ID NO: 14099 - RNA, 20 nt, Artificial Sequence
  spacer sequence GTCN PAM
cagcgcggggggacugggcc

SEQ ID NO: 14100 - RNA, 20 nt, Artificial Sequence
  spacer sequence GTCN PAM
ccccgcgcugugaccugggg

SEQ ID NO: 14101 - RNA, 20 nt, Artificial Sequence
  spacer sequence GTCN PAM
gcugggagccccagcuugcg

SEQ ID NO: 14102 - RNA, 20 nt, Artificial Sequence
  spacer sequence GTCN PAM
gucagcugggagccccagcu

SEQ ID NO: 14103 - RNA, 20 nt, Artificial Sequence
  spacer sequence GTCN PAM
gugacuuccugucgggccgu

SEQ ID NO: 14104 - RNA, 20 nt, Artificial Sequence
  spacer sequence GTCN PAM
cugaccugcaaggagagcgg

SEQ ID NO: 14105 - RNA, 20 nt, Artificial Sequence
  spacer sequence GTCN PAM
ggccguucgccacugacacu

SEQ ID NO: 14106 - RNA, 20 nt, Artificial Sequence
  spacer sequence GTCN PAM
guggcgaacggcccgacagg

SEQ ID NO: 14107 - RNA, 20 nt, Artificial Sequence
  spacer sequence GTCN PAM
cccacacgcaaggccagugu

SEQ ID NO: 14108 - RNA, 20 nt, Artificial Sequence
  spacer sequence GTCN PAM
ccccgcgcagcagcggcggc

SEQ ID NO: 14109 - RNA, 20 nt, Artificial Sequence
  spacer sequence GTCN PAM
ucgcccugccggccgguguc

SEQ ID NO: 14110 - RNA, 20 nt, Artificial Sequence
  spacer sequence GTCN PAM
agugccgcccgagucccccc

SEQ ID NO: 14111 - RNA, 20 nt, Artificial Sequence
  spacer sequence GTCN PAM
ccccggugcccaccagcccg

SEQ ID NO: 14112 - RNA, 20 nt, Artificial Sequence
  spacer sequence GTCN PAM
ccugcaucucccucgcccau

SEQ ID NO: 14113 - RNA, 20 nt, Artificial Sequence
  spacer sequence GTCN PAM
cacgcagccuccaccaccug

SEQ ID NO: 14114 - RNA, 20 nt, Artificial Sequence
  spacer sequence GTCN PAM
cccuucccuuccccaggcuc

SEQ ID NO: 14115 - RNA, 20 nt, Artificial Sequence
  spacer sequence GTCN PAM
uggggaggucuuggggagga

SEQ ID NO: 14116 - RNA, 20 nt, Artificial Sequence
  spacer sequence GTCN PAM
uggggaggacaaggacucuu

SEQ ID NO: 14117 - RNA, 20 nt, Artificial Sequence
  spacer sequence GTCN PAM
uccccaagaccuccccagga

SEQ ID NO: 14118 - RNA, 20 nt, Artificial Sequence
  spacer sequence GTCN PAM
uuguccuccccaagaccucc

SEQ ID NO: 14119 - RNA, 20 nt, Artificial Sequence
  spacer sequence GTCN PAM
caggugagucccuuguauua

SEQ ID NO: 14120 - RNA, 20 nt, Artificial Sequence
  spacer sequence GTCN PAM
cuuguauuaagggcuauccu

SEQ ID NO: 14121 - RNA, 20 nt, Artificial Sequence
  spacer sequence GTCN PAM
caggauagcccuuaauacaa

SEQ ID NO: 14122 - RNA, 20 nt, Artificial Sequence
  spacer sequence GTCN PAM
acucaggaucuagaaauacc

SEQ ID NO: 14123 - RNA, 20 nt, Artificial Sequence
  spacer sequence GTCN PAM
ucgccugacaugaccuggac

SEQ ID NO: 14124 - RNA, 20 nt, Artificial Sequence
  spacer sequence GTCN PAM
ggcgaugaccgucaacucag

SEQ ID NO: 14125 - RNA, 20 nt, Artificial Sequence
  spacer sequence GTCN PAM
ugucaggcgaugaccgucaa

SEQ ID NO: 14126 - RNA, 20 nt, Artificial Sequence
  spacer sequence GTCN PAM
aggucaugucaggcgaugac

SEQ ID NO: 14127 - RNA, 20 nt, Artificial Sequence
  spacer sequence GTCN PAM
aagaucaagagaucaucuac

SEQ ID NO: 14128 - RNA, 20 nt, Artificial Sequence
  spacer sequence GTCN PAM
ucucuguguccuggguuggu

SEQ ID NO: 14129 - RNA, 20 nt, Artificial Sequence
  spacer sequence GTCN PAM
uggguugguugugaccucgu

SEQ ID NO: 14130 - RNA, 20 nt, Artificial Sequence
  spacer sequence GTCN PAM
caaccaacccaggacacaga

SEQ ID NO: 14131 - RNA, 20 nt, Artificial Sequence
  spacer sequence GTCN PAM
cgaggucacaaccaacccag

SEQ ID NO: 14132 - RNA, 20 nt, Artificial Sequence
  spacer sequence GTCN PAM
acacaggguuuagagauaaa

SEQ ID NO: 14133 - RNA, 20 nt, Artificial Sequence
  spacer sequence GTCN PAM
ucuccugaccugggcuggug

SEQ ID NO: 14134 - RNA, 20 nt, Artificial Sequence
  spacer sequence GTCN PAM
ggagaugaccugucaacaca

SEQ ID NO: 14135 - RNA, 20 nt, Artificial Sequence
  spacer sequence GTCN PAM
cuggguugcuggugaucccc

SEQ ID NO: 14136 - RNA, 20 nt, Artificial Sequence
  spacer sequence GTCN PAM
aggaucaggggaucaccagc

SEQ ID NO: 14137 - RNA, 20 nt, Artificial Sequence
  spacer sequence GTCN PAM
aucugcugaugggaggaagg

SEQ ID NO: 14138 - RNA, 20 nt, Artificial Sequence
  spacer sequence GTCN PAM
uggugccagcaccacgucua

SEQ ID NO: 14139 - RNA, 20 nt, Artificial Sequence
  spacer sequence GTCN PAM
accccaggggccagcccugc

SEQ ID NO: 14140 - RNA, 20 nt, Artificial Sequence
  spacer sequence GTCN PAM
ucgagagcuuugugaaucac

SEQ ID NO: 14141 - RNA, 20 nt, Artificial Sequence
  spacer sequence GTCN PAM
ucucagggaccuucucuggu

SEQ ID NO: 14142 - RNA, 20 nt, Artificial Sequence
  spacer sequence GTCN PAM
cugagaagacccccggggcg

SEQ ID NO: 14143 - RNA, 20 nt, Artificial Sequence
  spacer sequence GTCN PAM
cagcacaugugugagcucac

SEQ ID NO: 14144 - RNA, 20 nt, Artificial Sequence
  spacer sequence GTCN PAM
cgugacccugugcauuuggg

SEQ ID NO: 14145 - RNA, 20 nt, Artificial Sequence
  spacer sequence GTCN PAM
cgggacacacgugagcucac

SEQ ID NO: 14146 - RNA, 20 nt, Artificial Sequence
  spacer sequence GTCN PAM
acauccacccacaggcgacu

SEQ ID NO: 14147 - RNA, 20 nt, Artificial Sequence
  spacer sequence GTCN PAM
ccuguggguggauguagacc

SEQ ID NO: 14148 - RNA, 20 nt, Artificial Sequence
  spacer sequence GTCN PAM
gucugcucacuucacauguc

SEQ ID NO: 14149 - RNA, 20 nt, Artificial Sequence
  spacer sequence GTCN PAM
gcucacuucacauguccccc

SEQ ID NO: 14150 - RNA, 20 nt, Artificial Sequence
  spacer sequence GTCN PAM
cccaggaaucccccacacac

SEQ ID NO: 14151 - RNA, 20 nt, Artificial Sequence
  spacer sequence GTCN PAM
ccaggcgccugcauacuggg

SEQ ID NO: 14152 - RNA, 20 nt, Artificial Sequence
  spacer sequence GTCN PAM
ccaguaugcaggcgccuggu

SEQ ID NO: 14153 - RNA, 20 nt, Artificial Sequence
  spacer sequence GTCN PAM
cgcucccgccccgugguccc

SEQ ID NO: 14154 - RNA, 20 nt, Artificial Sequence
  spacer sequence GTCN PAM
cucgugcacaucagcccaca

SEQ ID NO: 14155 - RNA, 20 nt, Artificial Sequence
  spacer sequence GTCN PAM
acgccauugccugagcucau

SEQ ID NO: 14156 - RNA, 20 nt, Artificial Sequence
  spacer sequence GTCN PAM
acgggugugagcucaugagc

SEQ ID NO: 14157 - RNA, 20 nt, Artificial Sequence
  spacer sequence GTCN PAM
uggacaugcgggacugugcc

SEQ ID NO: 14158 - RNA, 20 nt, Artificial Sequence
  spacer sequence GTCN PAM
aggacgggcguccacgggug

SEQ ID NO: 14159 - RNA, 20 nt, Artificial Sequence
  spacer sequence GTCN PAM
cgcauguccaggacgggcgu

SEQ ID NO: 14160 - RNA, 20 nt, Artificial Sequence
  spacer sequence GTCN PAM
uggcaguugggguguagcgu

SEQ ID NO: 14161 - RNA, 20 nt, Artificial Sequence
  spacer sequence GTCN PAM
cgccgcggccgcccgcugcu

SEQ ID NO: 14162 - RNA, 20 nt, Artificial Sequence
  spacer sequence GTCN PAM
uucaggaucugcaggauggu

SEQ ID NO: 14163 - RNA, 20 nt, Artificial Sequence
  spacer sequence GTCN PAM
ggggccggugaggccgggga

SEQ ID NO: 14164 - RNA, 20 nt, Artificial Sequence
  spacer sequence GTCN PAM
uaccuuccccgcccgccugg

SEQ ID NO: 14165 - RNA, 20 nt, Artificial Sequence
  spacer sequence GTCN PAM
gcugcuccugagcccaccag

SEQ ID NO: 14166 - RNA, 20 nt, Artificial Sequence
  spacer sequence GTCN PAM
gggcacaaaguguccuugug

SEQ ID NO: 14167 - RNA, 20 nt, Artificial Sequence
  spacer sequence GTCN PAM
uugugugcucccggggggcc

SEQ ID NO: 14168 - RNA, 20 nt, Artificial Sequence
  spacer sequence GTCN PAM
ggccuggcaggccgaggcgg

SEQ ID NO: 14169 - RNA, 20 nt, Artificial Sequence
  spacer sequence GTCN PAM
cugaaaugcuuagggguggg

SEQ ID NO: 14170 - RNA, 20 nt, Artificial Sequence
  spacer sequence GTCN PAM
caccagaagauggcuacugu

SEQ ID NO: 14171 - RNA, 20 nt, Artificial Sequence
  spacer sequence GTCN PAM
cgggggcuccucccagcuca

SEQ ID NO: 14172 - RNA, 20 nt, Artificial Sequence
  spacer sequence GTCN PAM
gccucccaaagugcugggau

SEQ ID NO: 14173 - RNA, 20 nt, Artificial Sequence
  spacer sequence GTCN PAM
ggagaucgagaccaucuugg

SEQ ID NO: 14174 - RNA, 20 nt, Artificial Sequence
  spacer sequence GTCN PAM
cgaucuccugaccucgugau

SEQ ID NO: 14175 - RNA, 20 nt, Artificial Sequence
  spacer sequence GTCN PAM
cagcuacucgggaggcugag

SEQ ID NO: 14176 - RNA, 20 nt, Artificial Sequence
  spacer sequence GTCN PAM
cagccucccgaguagcuggg

SEQ ID NO: 14177 - RNA, 20 nt, Artificial Sequence
  spacer sequence GTCN PAM
cccaggcuggagugcagugg

SEQ ID NO: 14178 - RNA, 20 nt, Artificial Sequence
  spacer sequence GTCN PAM
cgcucugucgcccaggcugg

SEQ ID NO: 14179 - RNA, 20 nt, Artificial Sequence
  spacer sequence GTCN PAM
caaaaaaaaaaaaaaaaaac

SEQ ID NO: 14180 - RNA, 20 nt, Artificial Sequence
  spacer sequence GTCN PAM
uacauggagggggcuuggcc

SEQ ID NO: 14181 - RNA, 20 nt, Artificial Sequence
  spacer sequence GTCN PAM
ugccucauucuuccuggagu

SEQ ID NO: 14182 - RNA, 20 nt, Artificial Sequence
  spacer sequence GTCN PAM
ugaccuccccagcucauggc

SEQ ID NO: 14183 - RNA, 20 nt, Artificial Sequence
  spacer sequence GTCN PAM
ggacuguccugccucauucu

SEQ ID NO: 14184 - RNA, 20 nt, Artificial Sequence
  spacer sequence GTCN PAM
cagcuacgcagcuggcuucu

SEQ ID NO: 14185 - RNA, 20 nt, Artificial Sequence
  spacer sequence GTCN PAM
cgcucuguggcucaggccug

SEQ ID NO: 14186 - RNA, 20 nt, Artificial Sequence
  spacer sequence GTCN PAM
cgaacuccugagguugccca

SEQ ID NO: 14187 - RNA, 20 nt, Artificial Sequence
  spacer sequence GTCN PAM
cgaacuccugagcucaagcg

SEQ ID NO: 14188 - RNA, 20 nt, Artificial Sequence
  spacer sequence GTCN PAM
uugacuguuuccuuugcuga

SEQ ID NO: 14189 - RNA, 20 nt, Artificial Sequence
  spacer sequence GTCN PAM
aggacauccaccaugccggg

SEQ ID NO: 14190 - RNA, 20 nt, Artificial Sequence
  spacer sequence GTCN PAM
gcaaaggaaacagucaagga

SEQ ID NO: 14191 - RNA, 20 nt, Artificial Sequence
  spacer sequence GTCN PAM
ugcccucccuggagggaggu

SEQ ID NO: 14192 - RNA, 20 nt, Artificial Sequence
  spacer sequence GTCN PAM
gaccucaggggcauuugcug

SEQ ID NO: 14193 - RNA, 20 nt, Artificial Sequence
  spacer sequence GTCN PAM
gacacaguccugcccucccu

SEQ ID NO: 14194 - RNA, 20 nt, Artificial Sequence
  spacer sequence GTCN PAM
ggggugguccucuguguuca

SEQ ID NO: 14195 - RNA, 20 nt, Artificial Sequence
  spacer sequence GTCN PAM
ucuguguucagcagguggag

SEQ ID NO: 14196 - RNA, 20 nt, Artificial Sequence
  spacer sequence GTCN PAM
caggccacuaccuccuuugc

SEQ ID NO: 14197 - RNA, 20 nt, Artificial Sequence
  spacer sequence GTCN PAM
ccugcaaaggagguaguggc

SEQ ID NO: 14198 - RNA, 20 nt, Artificial Sequence
  spacer sequence GTCN PAM
gccgaagccgguccccugca

SEQ ID NO: 14199 - RNA, 20 nt, Artificial Sequence
  spacer sequence GTCN PAM
cgccgggccuuucuacggag

SEQ ID NO: 14200 - RNA, 20 nt, Artificial Sequence
  spacer sequence GTCN PAM
guaccacuggucacccagcc

SEQ ID NO: 14201 - RNA, 20 nt, Artificial Sequence
  spacer sequence GTCN PAM
cccagccgcaaggccggccg

SEQ ID NO: 14202 - RNA, 20 nt, Artificial Sequence
  spacer sequence GTCN PAM
cugcggccggccuugcggcu

SEQ ID NO: 14203 - RNA, 20 nt, Artificial Sequence
  spacer sequence GTCN PAM
aggcccaagccggaggccuc

SEQ ID NO: 14204 - RNA, 20 nt, Artificial Sequence
  spacer sequence GTCN PAM
ucgaagucgaggcccaagcc

SEQ ID NO: 14205 - RNA, 20 nt, Artificial Sequence
  spacer sequence GTCN PAM
acccugacaucaagucagag

SEQ ID NO: 14206 - RNA, 20 nt, Artificial Sequence
  spacer sequence GTCN PAM
ggguugacuucuggcuucca

SEQ ID NO: 14207 - RNA, 20 nt, Artificial Sequence
  spacer sequence GTCN PAM
gaguucgugguggcuuagga

SEQ ID NO: 14208 - RNA, 20 nt, Artificial Sequence
  spacer sequence GTCN PAM
ccgccgcccugggcuggggu

SEQ ID NO: 14209 - RNA, 20 nt, Artificial Sequence
  spacer sequence GTCN PAM
uuuuuucuuuucuucuuuuu

SEQ ID NO: 14210 - RNA, 20 nt, Artificial Sequence
  spacer sequence GTCN PAM
gaacuuuuuaaaaaaagaaa

SEQ ID NO: 14211 - RNA, 20 nt, Artificial Sequence
  spacer sequence GTCN PAM
aggaaaccacggucagaacu

SEQ ID NO: 14212 - RNA, 20 nt, Artificial Sequence
  spacer sequence GTCN PAM
gucuccuuucaccucugcgc

SEQ ID NO: 14213 - RNA, 20 nt, Artificial Sequence
  spacer sequence GTCN PAM
ccuuucaccucugcgccagg

SEQ ID NO: 14214 - RNA, 20 nt, Artificial Sequence
  spacer sequence GTCN PAM
guccucccugccaaccuucc

SEQ ID NO: 14215 - RNA, 20 nt, Artificial Sequence
  spacer sequence GTCN PAM
ucccugccaaccuuccccag

SEQ ID NO: 14216 - RNA, 20 nt, Artificial Sequence
  spacer sequence GTCN PAM
cucuggauggcggagaguga

SEQ ID NO: 14217 - RNA, 20 nt, Artificial Sequence
  spacer sequence GTCN PAM
ccuucacucuccgccaucca

SEQ ID NO: 14218 - RNA, 20 nt, Artificial Sequence
  spacer sequence GTCN PAM
ggggggaaaggaggcggcgg

SEQ ID NO: 14219 - RNA, 20 nt, Artificial Sequence
  spacer sequence GTCN PAM
aaaaugucgauaugucauua

SEQ ID NO: 14220 - RNA, 20 nt, Artificial Sequence
  spacer sequence GTCN PAM
auaugucauuaugcacuuua

SEQ ID NO: 14221 - RNA, 20 nt, Artificial Sequence
  spacer sequence GTCN PAM
uuaugcacuuuacagaugag

SEQ ID NO: 14222 - RNA, 20 nt, Artificial Sequence
  spacer sequence GTCN PAM
gcacuggggggugggguggg

SEQ ID NO: 14223 - RNA, 20 nt, Artificial Sequence
  spacer sequence GTCN PAM
ccaccccaggccagcagcgc

SEQ ID NO: 14224 - RNA, 20 nt, Artificial Sequence
  spacer sequence GTCN PAM
cagaagccaacgaggggacu

SEQ ID NO: 14225 - RNA, 20 nt, Artificial Sequence
  spacer sequence GTCN PAM
ccucguuggcuucugugacc

SEQ ID NO: 14226 - RNA, 20 nt, Artificial Sequence
  spacer sequence GTCN PAM
ccaugggguuugggugcagg

SEQ ID NO: 14227 - RNA, 20 nt, Artificial Sequence
  spacer sequence GTCN PAM
ggaagggagaggggaacuac

SEQ ID NO: 14228 - RNA, 20 nt, Artificial Sequence
  spacer sequence GTCN PAM
gccggcuggggcggggcgga

SEQ ID NO: 14229 - RNA, 20 nt, Artificial Sequence
  spacer sequence GTCN PAM
gaaaacacgggagugggggc

SEQ ID NO: 14230 - RNA, 20 nt, Artificial Sequence
  spacer sequence GTCN PAM
auaaauaccccaaacucagg

SEQ ID NO: 14231 - RNA, 20 nt, Artificial Sequence
  spacer sequence GTCN PAM
gaaaauuaauagucuauaaa

SEQ ID NO: 14232 - RNA, 20 nt, Artificial Sequence
  spacer sequence GTCN PAM
caaauccacaucccucaggu

SEQ ID NO: 14233 - RNA, 20 nt, Artificial Sequence
  spacer sequence GTCN PAM
gggggccccuccugcagcga

SEQ ID NO: 14234 - RNA, 20 nt, Artificial Sequence
  spacer sequence GTCN PAM
cccccugcccaggggauuca

SEQ ID NO: 14235 - RNA, 20 nt, Artificial Sequence
  spacer sequence GTCN PAM
gcugcuggucuaauuuggac

SEQ ID NO: 14236 - RNA, 20 nt, Artificial Sequence
  spacer sequence GTCN PAM
aauuuggacccccugccucu

SEQ ID NO: 14237 - RNA, 20 nt, Artificial Sequence
  spacer sequence GTCN PAM
aaauuagaccagcagcggac

SEQ ID NO: 14238 - RNA, 20 nt, Artificial Sequence
  spacer sequence GTCN PAM
gucuccagaggggagggaca

SEQ ID NO: 14239 - RNA, 20 nt, Artificial Sequence
  spacer sequence GTCN PAM
ccagaggggagggacaaauc

SEQ ID NO: 14240 - RNA, 20 nt, Artificial Sequence
  spacer sequence GTCN PAM
cuccccucuggagacagaca

SEQ ID NO: 14241 - RNA, 20 nt, Artificial Sequence
  spacer sequence GTCN PAM
ggacccuuccucaccccacc

SEQ ID NO: 14242 - RNA, 20 nt, Artificial Sequence
  spacer sequence GTCN PAM
agacaucuccauuaucauua

SEQ ID NO: 14243 - RNA, 20 nt, Artificial Sequence
  spacer sequence GTCN PAM
gucuuguccuggcucugccu

SEQ ID NO: 14244 - RNA, 20 nt, Artificial Sequence
  spacer sequence GTCN PAM
uguccuggcucugccugucc

SEQ ID NO: 14245 - RNA, 20 nt, Artificial Sequence
  spacer sequence GTCN PAM
uggcucugccugucccccac

SEQ ID NO: 14246 - RNA, 20 nt, Artificial Sequence
  spacer sequence GTCN PAM
cccaccguuguucucguagg

SEQ ID NO: 14247 - RNA, 20 nt, Artificial Sequence
  spacer sequence GTCN PAM
ucaacucccccccuuuaugu

SEQ ID NO: 14248 - RNA, 20 nt, Artificial Sequence
  spacer sequence GTCN PAM
cagaggguagagcucaagga

SEQ ID NO: 14249 - RNA, 20 nt, Artificial Sequence
  spacer sequence GTCN PAM
uggauaccuauuuaaaugug

SEQ ID NO: 14250 - RNA, 20 nt, Artificial Sequence
  spacer sequence GTCN PAM
gugccuccacugguugaggg

SEQ ID NO: 14251 - RNA, 20 nt, Artificial Sequence
  spacer sequence GTCN PAM
ggcugugggggucccggcac

SEQ ID NO: 14252 - RNA, 20 nt, Artificial Sequence
  spacer sequence GTCN PAM
cggcaccuggcgugaguuuc

SEQ ID NO: 14253 - RNA, 20 nt, Artificial Sequence
  spacer sequence GTCN PAM
auguguguuucauuuucugu

SEQ ID NO: 14254 - RNA, 20 nt, Artificial Sequence
  spacer sequence GTCN PAM
gcucagggagucagagggac

SEQ ID NO: 14255 - RNA, 20 nt, Artificial Sequence
  spacer sequence GTCN PAM
gagggacugaccuggguccc

SEQ ID NO: 14256 - RNA, 20 nt, Artificial Sequence
  spacer sequence GTCN PAM
cucugacucccugagcugac

SEQ ID NO: 14257 - RNA, 20 nt, Artificial Sequence
  spacer sequence GTCN PAM
gucccucugacucccugagc

SEQ ID NO: 14258 - RNA, 20 nt, Artificial Sequence
  spacer sequence GTCN PAM
caaggccccgaagagggggu

SEQ ID NO: 14259 - RNA, 20 nt, Artificial Sequence
  spacer sequence GTCN PAM
gggcccugagaauuucccac

SEQ ID NO: 14260 - RNA, 20 nt, Artificial Sequence
  spacer sequence GTCN PAM
cuuaggguguggggcgaggg

SEQ ID NO: 14261 - RNA, 20 nt, Artificial Sequence
  spacer sequence GTCN PAM
ugcccaggccacgaagcagg

SEQ ID NO: 14262 - RNA, 20 nt, Artificial Sequence
  spacer sequence GTCN PAM
ugagggggccaggguccugc

SEQ ID NO: 14263 - RNA, 20 nt, Artificial Sequence
  spacer sequence GTCN PAM
cccccauacuggcagguccu

SEQ ID NO: 14264 - RNA, 20 nt, Artificial Sequence
  spacer sequence GTCN PAM
cgucucccccauacuggcag

SEQ ID NO: 14265 - RNA, 20 nt, Artificial Sequence
  spacer sequence GTCN PAM
gggacucccacucugccaca

SEQ ID NO: 14266 - RNA, 20 nt, Artificial Sequence
  spacer sequence GTCN PAM
ccgacuccuguggcugggga

SEQ ID NO: 14267 - RNA, 20 nt, Artificial Sequence
  spacer sequence GTCN PAM
cacaucuguguggcuugcug

SEQ ID NO: 14268 - RNA, 20 nt, Artificial Sequence
  spacer sequence GTCN PAM
gccuggugaucucccugcag

SEQ ID NO: 14269 - RNA, 20 nt, Artificial Sequence
  spacer sequence GTCN PAM
ucccagucggccuggugauc

SEQ ID NO: 14270 - RNA, 20 nt, Artificial Sequence
  spacer sequence GTCN PAM
uagguccucccagucggccu

SEQ ID NO: 14271 - RNA, 20 nt, Artificial Sequence
  spacer sequence GTCN PAM
agccaggccuguaucaccug

SEQ ID NO: 14272 - RNA, 20 nt, Artificial Sequence
  spacer sequence GTCN PAM
ggagguguggccagagaggc

SEQ ID NO: 14273 - RNA, 20 nt, Artificial Sequence
  spacer sequence GTCN PAM
gggaagggcuggaaugucag

SEQ ID NO: 14274 - RNA, 20 nt, Artificial Sequence
  spacer sequence GTCN PAM
aggaacaccccugguccggc

SEQ ID NO: 14275 - RNA, 20 nt, Artificial Sequence
  spacer sequence GTCN PAM
ggcugucccuugcugucugg

SEQ ID NO: 14276 - RNA, 20 nt, Artificial Sequence
  spacer sequence GTCN PAM
cuugcugucugggaacuucc

SEQ ID NO: 14277 - RNA, 20 nt, Artificial Sequence
  spacer sequence GTCN PAM
gggaacuuccccagccugcg

SEQ ID NO: 14278 - RNA, 20 nt, Artificial Sequence
  spacer sequence GTCN PAM
accccgucccgcagacccca

SEQ ID NO: 14279 - RNA, 20 nt, Artificial Sequence
  spacer sequence GTCN PAM
cgcagaccccacccuucccu

SEQ ID NO: 14280 - RNA, 20 nt, Artificial Sequence
  spacer sequence GTCN PAM
gcgggacgggguggacaggg

SEQ ID NO: 14281 - RNA, 20 nt, Artificial Sequence
  spacer sequence GTCN PAM
cuagccuggagcuccccgug

SEQ ID NO: 14282 - RNA, 20 nt, Artificial Sequence
  spacer sequence GTCN PAM
uggugaggcucacggggagc

SEQ ID NO: 14283 - RNA, 20 nt, Artificial Sequence
  spacer sequence GTCN PAM
ucucuggggucccaccucca

SEQ ID NO: 14284 - RNA, 20 nt, Artificial Sequence
  spacer sequence GTCN PAM
caccuccacccauguccggg

SEQ ID NO: 14285 - RNA, 20 nt, Artificial Sequence
  spacer sequence GTCN PAM
gggcugggcagagaugaggc

SEQ ID NO: 14286 - RNA, 20 nt, Artificial Sequence
  spacer sequence GTCN PAM
uuuuuuaaauuuuguaaccu

SEQ ID NO: 14287 - RNA, 20 nt, Artificial Sequence
  spacer sequence GTCN PAM
caucauugaacaaacacccc

SEQ ID NO: 14288 - RNA, 20 nt, Artificial Sequence
  spacer sequence GTCN PAM
caggaaggugcucccaggcc

SEQ ID NO: 14289 - RNA, 20 nt, Artificial Sequence
  spacer sequence GTCN PAM
accccaaaucaucgcacgcc

SEQ ID NO: 14290 - RNA, 20 nt, Artificial Sequence
  spacer sequence GTCN PAM
ggcggcacccaccccccgcc

SEQ ID NO: 14291 - RNA, 20 nt, Artificial Sequence
  spacer sequence GTCN PAM
cuggugcggauguccccucg

SEQ ID NO: 14292 - RNA, 20 nt, Artificial Sequence
  spacer sequence GTCN PAM
ccucggggcucagggugggg

SEQ ID NO: 14293 - RNA, 20 nt, Artificial Sequence
  spacer sequence GTCN PAM
ccgacgccaggccugggguc

SEQ ID NO: 14294 - RNA, 20 nt, Artificial Sequence
  spacer sequence GTCN PAM
gugacccgcacccccacccu

SEQ ID NO: 14295 - RNA, 20 nt, Artificial Sequence
  spacer sequence GTCN PAM
aggcgagggccccagggcgc

SEQ ID NO: 14296 - RNA, 20 nt, Artificial Sequence
  spacer sequence GTCN PAM
gaagcaccugcugaaucaca

SEQ ID NO: 14297 - RNA, 20 nt, Artificial Sequence
  spacer sequence GTCN PAM
guagccugcagggugggggg

SEQ ID NO: 14298 - RNA, 20 nt, Artificial Sequence
  spacer sequence GTCN PAM
ccugcacuccaggacccgcc

SEQ ID NO: 14299 - RNA, 20 nt, Artificial Sequence
  spacer sequence GTCN PAM
uggagugcaggggacgcgcc

SEQ ID NO: 14300 - RNA, 20 nt, Artificial Sequence
  spacer sequence GTCN PAM
gcaucccgaggggcgggucc

SEQ ID NO: 14301 - RNA, 20 nt, Artificial Sequence
  spacer sequence GTCN PAM
ggggugggggucggcauccc

SEQ ID NO: 14302 - RNA, 20 nt, Artificial Sequence
  spacer sequence GTCN PAM
aggcugugcccugggggcgu

SEQ ID NO: 14303 - RNA, 20 nt, Artificial Sequence
  spacer sequence GTCN PAM
gcccaaccaggggugcagcg

SEQ ID NO: 14304 - RNA, 20 nt, Artificial Sequence
  spacer sequence GTCN PAM
cugcccucuuugugccucag

SEQ ID NO: 14305 - RNA, 20 nt, Artificial Sequence
  spacer sequence GTCN PAM
gcccuggaucgcucccuucc

SEQ ID NO: 14306 - RNA, 20 nt, Artificial Sequence
  spacer sequence GTCN PAM
ggcuccuuucgcggcgcguu

SEQ ID NO: 14307 - RNA, 20 nt, Artificial Sequence
  spacer sequence GTCN PAM
ccccggguagggcgcccugc

SEQ ID NO: 14308 - RNA, 20 nt, Artificial Sequence
  spacer sequence GTCN PAM
gcgcgucgcgcggcccaggc

SEQ ID NO: 14309 - RNA, 20 nt, Artificial Sequence
  spacer sequence GTCN PAM
cgcggcccaggccccgccca

SEQ ID NO: 14310 - RNA, 20 nt, Artificial Sequence
  spacer sequence GTCN PAM
cgcugcuacuggggcacgcc

SEQ ID NO: 14311 - RNA, 20 nt, Artificial Sequence
  spacer sequence GTCN PAM
cgccuucuggaggcuucguc

SEQ ID NO: 14312 - RNA, 20 nt, Artificial Sequence
  spacer sequence GTCN PAM
gcaaaguugggggcgggagg

SEQ ID NO: 14313 - RNA, 20 nt, Artificial Sequence
  spacer sequence GTCN PAM
gacggcugcggcggggccug

SEQ ID NO: 14314 - RNA, 20 nt, Artificial Sequence
  spacer sequence GTCN PAM
gacccucggcugcgccuccc

SEQ ID NO: 14315 - RNA, 20 nt, Artificial Sequence
  spacer sequence GTCN PAM
aggccccgccgcagccguca

SEQ ID NO: 14316 - RNA, 20 nt, Artificial Sequence
  spacer sequence GTCN PAM
acgugcggcgccccggggcu

SEQ ID NO: 14317 - RNA, 20 nt, Artificial Sequence
  spacer sequence GTCN PAM
uuucacgccaacgcguuucc

SEQ ID NO: 14318 - RNA, 20 nt, Artificial Sequence
  spacer sequence GTCN PAM
cagaccccggcccagccucc

SEQ ID NO: 14319 - RNA, 20 nt, Artificial Sequence
  spacer sequence GTCN PAM
gggacgugcaguggugcagg

SEQ ID NO: 14320 - RNA, 20 nt, Artificial Sequence
  spacer sequence GTCN PAM
cuaggcugggggagcucaga

SEQ ID NO: 14321 - RNA, 20 nt, Artificial Sequence
  spacer sequence GTCN PAM
gagcucccccagccuaggga

SEQ ID NO: 14322 - RNA, 20 nt, Artificial Sequence
  spacer sequence GTCN PAM
cccuccuccuagccuccugu

SEQ ID NO: 14323 - RNA, 20 nt, Artificial Sequence
  spacer sequence GTCN PAM
guugguggagaaaaaucaaa

SEQ ID NO: 14324 - RNA, 20 nt, Artificial Sequence
  spacer sequence GTCN PAM
gccucgccuuuccucccauc

SEQ ID NO: 14325 - RNA, 20 nt, Artificial Sequence
  spacer sequence GTCN PAM
uugucagccucgccuuuccu

SEQ ID NO: 14326 - RNA, 20 nt, Artificial Sequence
  spacer sequence GTCN PAM
gccacuggagggaugacuug

SEQ ID NO: 14327 - RNA, 20 nt, Artificial Sequence
  spacer sequence GTCN PAM
ucccuccaguggccgacuug

SEQ ID NO: 14328 - RNA, 20 nt, Artificial Sequence
  spacer sequence GTCN PAM
cccaagucaucccuccagug

SEQ ID NO: 14329 - RNA, 20 nt, Artificial Sequence
  spacer sequence GTCN PAM
uggccgccgcucccccucac

SEQ ID NO: 14330 - RNA, 20 nt, Artificial Sequence
  spacer sequence GTCN PAM
agccaccucccagauguccu

SEQ ID NO: 14331 - RNA, 20 nt, Artificial Sequence
  spacer sequence GTCN PAM
aggccacgggucuagccacc

SEQ ID NO: 14332 - RNA, 20 nt, Artificial Sequence
  spacer sequence GTCN PAM
aguuggaucgaugaucgaug

SEQ ID NO: 14333 - RNA, 20 nt, Artificial Sequence
  spacer sequence GTCN PAM
ccaucgaucaucgauccaac

SEQ ID NO: 14334 - RNA, 20 nt, Artificial Sequence
  spacer sequence GTCN PAM
cuaccucccccagggugagg

SEQ ID NO: 14335 - RNA, 20 nt, Artificial Sequence
  spacer sequence GTCN PAM
acagggaggugguuggcaag

SEQ ID NO: 14336 - RNA, 20 nt, Artificial Sequence
  spacer sequence GTCN PAM
ucaacucucuuggcccggag

SEQ ID NO: 14337 - RNA, 20 nt, Artificial Sequence
  spacer sequence GTCN PAM
ccccaccuggcacaggcccu

SEQ ID NO: 14338 - RNA, 20 nt, Artificial Sequence
  spacer sequence GTCN PAM
cugccaggcggugaucucac

SEQ ID NO: 14339 - RNA, 20 nt, Artificial Sequence
  spacer sequence GTCN PAM
ccccaagcaccgcucaccug

SEQ ID NO: 14340 - RNA, 20 nt, Artificial Sequence
  spacer sequence GTCN PAM
guggaggucauggcuuuugg

SEQ ID NO: 14341 - RNA, 20 nt, Artificial Sequence
  spacer sequence GTCN PAM
uggcuuuuggcuugaggccg

SEQ ID NO: 14342 - RNA, 20 nt, Artificial Sequence
  spacer sequence GTCN PAM
ucuggggguggccgaaugcg

SEQ ID NO: 14343 - RNA, 20 nt, Artificial Sequence
  spacer sequence GTCN PAM
acccuagccaccucccaagg

SEQ ID NO: 14344 - RNA, 20 nt, Artificial Sequence
  spacer sequence GTCN PAM
ccagccuccagcccgguaac

SEQ ID NO: 14345 - RNA, 20 nt, Artificial Sequence
  spacer sequence GTCN PAM
cuugggacaggugagcagcc

SEQ ID NO: 14346 - RNA, 20 nt, Artificial Sequence
  spacer sequence GTCN PAM
caagugaccccagaggcagc

SEQ ID NO: 14347 - RNA, 20 nt, Artificial Sequence
  spacer sequence GTCN PAM
ccugggcccugccuccaccc

SEQ ID NO: 14348 - RNA, 20 nt, Artificial Sequence
  spacer sequence GTCN PAM
cgaucucuggcgcucucccc

SEQ ID NO: 14349 - RNA, 20 nt, Artificial Sequence
  spacer sequence GTCN PAM
cuccccugcuuccgcccccu

SEQ ID NO: 14350 - RNA, 20 nt, Artificial Sequence
  spacer sequence GTCN PAM
cucccuggagccagcugccu

SEQ ID NO: 14351 - RNA, 20 nt, Artificial Sequence
  spacer sequence GTCN PAM
gaggucgaggagcgggcggg

SEQ ID NO: 14352 - RNA, 20 nt, Artificial Sequence
  spacer sequence GTCN PAM
aggagcgggcgggagccugg

SEQ ID NO: 14353 - RNA, 20 nt, Artificial Sequence
  spacer sequence GTCN PAM
cccuugccccgcuccaccca

SEQ ID NO: 14354 - RNA, 20 nt, Artificial Sequence
  spacer sequence GTCN PAM
uggguauggggcaugugccc

SEQ ID NO: 14355 - RNA, 20 nt, Artificial Sequence
  spacer sequence GTCN PAM
ggggugugggauggcugugc

SEQ ID NO: 14356 - RNA, 20 nt, Artificial Sequence
  spacer sequence GTCN PAM
cgggcgugcuggucgggggu

SEQ ID NO: 14357 - RNA, 20 nt, Artificial Sequence
  spacer sequence GTCN PAM
ggggggggggguuguguauc

SEQ ID NO: 14358 - RNA, 20 nt, Artificial Sequence
  spacer sequence GTCN PAM
ccaaccucaauccacugugu

SEQ ID NO: 14359 - RNA, 20 nt, Artificial Sequence
  spacer sequence GTCN PAM
cacaguggauugagguuggg

SEQ ID NO: 14360 - RNA, 20 nt, Artificial Sequence
  spacer sequence GTCN PAM
caccacacaccgcagcuguc

SEQ ID NO: 14361 - RNA, 20 nt, Artificial Sequence
  spacer sequence GTCN PAM
ccagauacaaagagggcccu

SEQ ID NO: 14362 - RNA, 20 nt, Artificial Sequence
  spacer sequence GTCN PAM
gggcccucuuuguaucuggu

SEQ ID NO: 14363 - RNA, 20 nt, Artificial Sequence
  spacer sequence GTCN PAM
guggcuggaggcccuggggg

SEQ ID NO: 14364 - RNA, 20 nt, Artificial Sequence
  spacer sequence GTCN PAM
agcuuggcugggcagcggag

SEQ ID NO: 14365 - RNA, 20 nt, Artificial Sequence
  spacer sequence GTCN PAM
gggugggggauggagagggg

SEQ ID NO: 14366 - RNA, 20 nt, Artificial Sequence
  spacer sequence GTCN PAM
uucugugcauguuggaaaua

SEQ ID NO: 14367 - RNA, 20 nt, Artificial Sequence
  spacer sequence GTCN PAM
cguaugcuaacucuccuguu

SEQ ID NO: 14368 - RNA, 20 nt, Artificial Sequence
  spacer sequence GTCN PAM
caaaacaaaaacaaacaaaa

SEQ ID NO: 14369 - RNA, 20 nt, Artificial Sequence
  spacer sequence GTCN PAM
cgcucugucgcccuggcugg

SEQ ID NO: 14370 - RNA, 20 nt, Artificial Sequence
  spacer sequence GTCN PAM
cccuggcuggagugcauugg

SEQ ID NO: 14371 - RNA, 20 nt, Artificial Sequence
  spacer sequence GTCN PAM
cuacuaaaaaaauacaaaaa

SEQ ID NO: 14372 - RNA, 20 nt, Artificial Sequence
  spacer sequence GTCN PAM
cgaacuccugaucucaagug

SEQ ID NO: 14373 - RNA, 20 nt, Artificial Sequence
  spacer sequence GTCN PAM
cggccuccuaaagugcuggg

SEQ ID NO: 14374 - RNA, 20 nt, Artificial Sequence
  spacer sequence GTCN PAM
ggcuggucucaaacuccugc

SEQ ID NO: 14375 - RNA, 20 nt, Artificial Sequence
  spacer sequence GTCN PAM
caaacuccugcccucaaaug

SEQ ID NO: 14376 - RNA, 20 nt, Artificial Sequence
  spacer sequence GTCN PAM
cgaaaauacuaauaacuggg

SEQ ID NO: 14377 - RNA, 20 nt, Artificial Sequence
  spacer sequence GTCN PAM
cacucucuuuccaggcugga

SEQ ID NO: 14378 - RNA, 20 nt, Artificial Sequence
  spacer sequence GTCN PAM
cagcuacucaggaggcugag

SEQ ID NO: 14379 - RNA, 20 nt, Artificial Sequence
  spacer sequence GTCN PAM
cuacaaaaaaaaaaaaaaag

SEQ ID NO: 14380 - RNA, 20 nt, Artificial Sequence
  spacer sequence GTCN PAM
agcuauguugccccggcugg

SEQ ID NO: 14381 - RNA, 20 nt, Artificial Sequence
  spacer sequence GTCN PAM
aggaguuugauaccagccgg

SEQ ID NO: 14382 - RNA, 20 nt, Artificial Sequence
  spacer sequence GTCN PAM
acauggaaucaucccguaug

SEQ ID NO: 14383 - RNA, 20 nt, Artificial Sequence
  spacer sequence GTCN PAM
uuugcugcuaacugcccuug

SEQ ID NO: 14384 - RNA, 20 nt, Artificial Sequence
  spacer sequence GTCN PAM
agggcaguuagcagcaaaag

SEQ ID NO: 14385 - RNA, 20 nt, Artificial Sequence
  spacer sequence GTCN PAM
gucaagggcaguuagcagca

SEQ ID NO: 14386 - RNA, 20 nt, Artificial Sequence
  spacer sequence GTCN PAM
ucccugugcgccucuaaccc

SEQ ID NO: 14387 - RNA, 20 nt, Artificial Sequence
  spacer sequence GTCN PAM
agagagcgucuugggcaccg

SEQ ID NO: 14388 - RNA, 20 nt, Artificial Sequence
  spacer sequence GTCN PAM
ugggcaccgccugccucaca

SEQ ID NO: 14389 - RNA, 20 nt, Artificial Sequence
  spacer sequence GTCN PAM
ggggcccagcugugaggcag

SEQ ID NO: 14390 - RNA, 20 nt, Artificial Sequence
  spacer sequence GTCN PAM
cuggagggucaggggcccag

SEQ ID NO: 14391 - RNA, 20 nt, Artificial Sequence
  spacer sequence GTCN PAM
aggcagccauggcugcucag

SEQ ID NO: 14392 - RNA, 20 nt, Artificial Sequence
  spacer sequence GTCN PAM
ccuggcccgucuguccgucu

SEQ ID NO: 14393 - RNA, 20 nt, Artificial Sequence
  spacer sequence GTCN PAM
guccgucuggaugugggaac

SEQ ID NO: 14394 - RNA, 20 nt, Artificial Sequence
  spacer sequence GTCN PAM
gucuggaugugggaacccuc

SEQ ID NO: 14395 - RNA, 20 nt, Artificial Sequence
  spacer sequence GTCN PAM
ggaugugggaacccuccagg

SEQ ID NO: 14396 - RNA, 20 nt, Artificial Sequence
  spacer sequence GTCN PAM
ucacuugcacuccguagguc

SEQ ID NO: 14397 - RNA, 20 nt, Artificial Sequence
  spacer sequence GTCN PAM
ugagccccugcagcugccug

SEQ ID NO: 14398 - RNA, 20 nt, Artificial Sequence
  spacer sequence GTCN PAM
cacuccacuguugccaugga

SEQ ID NO: 14399 - RNA, 20 nt, Artificial Sequence
  spacer sequence GTCN PAM
aagaguggggauuuccugca

SEQ ID NO: 14400 - RNA, 20 nt, Artificial Sequence
  spacer sequence GTCN PAM
ugugccuaacagagagguca

SEQ ID NO: 14401 - RNA, 20 nt, Artificial Sequence
  spacer sequence GTCN PAM
caugagagggaacugggccc

SEQ ID NO: 14402 - RNA, 20 nt, Artificial Sequence
  spacer sequence GTCN PAM
gggggcuccggagcccccac

SEQ ID NO: 14403 - RNA, 20 nt, Artificial Sequence
  spacer sequence GTCN PAM
acgcaggcgagccuaagccu

SEQ ID NO: 14404 - RNA, 20 nt, Artificial Sequence
  spacer sequence GTCN PAM
gcuuuaggguguccgugggc

SEQ ID NO: 14405 - RNA, 20 nt, Artificial Sequence
  spacer sequence GTCN PAM
gugggccaugcagggucuug

SEQ ID NO: 14406 - RNA, 20 nt, Artificial Sequence
  spacer sequence GTCN PAM
ugggccuuucacagacaccu

SEQ ID NO: 14407 - RNA, 20 nt, Artificial Sequence
  spacer sequence GTCN PAM
gugaaaggcccaagacccug

SEQ ID NO: 14408 - RNA, 20 nt, Artificial Sequence
  spacer sequence GTCN PAM
cagacacgcaugggugcacg

SEQ ID NO: 14409 - RNA, 20 nt, Artificial Sequence
  spacer sequence GTCN PAM
gugacgugcagaucaggugu

SEQ ID NO: 14410 - RNA, 20 nt, Artificial Sequence
  spacer sequence GTCN PAM
cuacacguccgccacaugug

SEQ ID NO: 14411 - RNA, 20 nt, Artificial Sequence
  spacer sequence GTCN PAM
gccacaugugcuuggcuggu

SEQ ID NO: 14412 - RNA, 20 nt, Artificial Sequence
  spacer sequence GTCN PAM
gcgccccagcagaagggguc

SEQ ID NO: 14413 - RNA, 20 nt, Artificial Sequence
  spacer sequence GTCN PAM
ccuaugucucugcaguaucc

SEQ ID NO: 14414 - RNA, 20 nt, Artificial Sequence
  spacer sequence GTCN PAM
cugcaguauccuguguacug

SEQ ID NO: 14415 - RNA, 20 nt, Artificial Sequence
  spacer sequence GTCN PAM
cacaccuguuugcucuuuca

SEQ ID NO: 14416 - RNA, 20 nt, Artificial Sequence
  spacer sequence GTCN PAM
ggguccguccuguccccagc

SEQ ID NO: 14417 - RNA, 20 nt, Artificial Sequence
  spacer sequence GTCN PAM
guccuguccccagccugucu

SEQ ID NO: 14418 - RNA, 20 nt, Artificial Sequence
  spacer sequence GTCN PAM
uguccccagccugucuacug

SEQ ID NO: 14419 - RNA, 20 nt, Artificial Sequence
  spacer sequence GTCN PAM
ccagccugucuacugcgugu

SEQ ID NO: 14420 - RNA, 20 nt, Artificial Sequence
  spacer sequence GTCN PAM
acugcgugugccuguggcag

SEQ ID NO: 14421 - RNA, 20 nt, Artificial Sequence
  spacer sequence GTCN PAM
ccggaugccgagugcauggu

SEQ ID NO: 14422 - RNA, 20 nt, Artificial Sequence
  spacer sequence GTCN PAM
uacaccaugcacucggcauc

SEQ ID NO: 14423 - RNA, 20 nt, Artificial Sequence
  spacer sequence GTCN PAM
aguggguacgaagcaggggu

SEQ ID NO: 14424 - RNA, 20 nt, Artificial Sequence
  spacer sequence GTCN PAM
cucuguggcccaggccuggc

SEQ ID NO: 14425 - RNA, 20 nt, Artificial Sequence
  spacer sequence GTCN PAM
acuccugccccggccaggcc

SEQ ID NO: 14426 - RNA, 20 nt, Artificial Sequence
  spacer sequence GTCN PAM
cagcucaggaauguggaggc

SEQ ID NO: 14427 - RNA, 20 nt, Artificial Sequence
  spacer sequence GTCN PAM
cagggaagggaagccgaccc

SEQ ID NO: 14428 - RNA, 20 nt, Artificial Sequence
  spacer sequence GTCN PAM
gcuucccuucccugugacuc

SEQ ID NO: 14429 - RNA, 20 nt, Artificial Sequence
  spacer sequence GTCN PAM
ggcuuuccuguguagcagcc

SEQ ID NO: 14430 - RNA, 20 nt, Artificial Sequence
  spacer sequence GTCN PAM
ccugggaggccccgcgcgcc

SEQ ID NO: 14431 - RNA, 20 nt, Artificial Sequence
  spacer sequence GTCN PAM
agggcugggaucucaggucc

SEQ ID NO: 14432 - RNA, 20 nt, Artificial Sequence
  spacer sequence GTCN PAM
gcgggagccgcgccucccag

SEQ ID NO: 14433 - RNA, 20 nt, Artificial Sequence
  spacer sequence GTCN PAM
cuggggugggcacgcgugcu

SEQ ID NO: 14434 - RNA, 20 nt, Artificial Sequence
  spacer sequence GTCN PAM
cagcaccaggcauggacaca

SEQ ID NO: 14435 - RNA, 20 nt, Artificial Sequence
  spacer sequence GTCN PAM
augccuggugcugugacuca

SEQ ID NO: 14436 - RNA, 20 nt, Artificial Sequence
  spacer sequence GTCN PAM
cggcacacccgagucacgca

SEQ ID NO: 14437 - RNA, 20 nt, Artificial Sequence
  spacer sequence GTCN PAM
cgcacacccagcccuguccc

SEQ ID NO: 14438 - RNA, 20 nt, Artificial Sequence
  spacer sequence GTCN PAM
ccggcugcccccacauccac

SEQ ID NO: 14439 - RNA, 20 nt, Artificial Sequence
  spacer sequence GTCN PAM
aagcgcccaccuccuugggu

SEQ ID NO: 14440 - RNA, 20 nt, Artificial Sequence
  spacer sequence GTCN PAM
gcguggcgcugugugugcaa

SEQ ID NO: 14441 - RNA, 20 nt, Artificial Sequence
  spacer sequence GTCN PAM
uugcacacacgcgggugccg

SEQ ID NO: 14442 - RNA, 20 nt, Artificial Sequence
  spacer sequence GTCN PAM
uggaggugugugcacagagc

SEQ ID NO: 14443 - RNA, 20 nt, Artificial Sequence
  spacer sequence GTCN PAM
gugcgcagggcauauagggg

SEQ ID NO: 14444 - RNA, 20 nt, Artificial Sequence
  spacer sequence GTCN PAM
cugcacucaccacgccgugu

SEQ ID NO: 14445 - RNA, 20 nt, Artificial Sequence
  spacer sequence GTCN PAM
acacaagcuugugucucugu

SEQ ID NO: 14446 - RNA, 20 nt, Artificial Sequence
  spacer sequence GTCN PAM
cuguacucugcccacgggca

SEQ ID NO: 14447 - RNA, 20 nt, Artificial Sequence
  spacer sequence GTCN PAM
cugcaucccccacccuggcu

SEQ ID NO: 14448 - RNA, 20 nt, Artificial Sequence
  spacer sequence GTCN PAM
gcugcagccucugccaggac

SEQ ID NO: 14449 - RNA, 20 nt, Artificial Sequence
  spacer sequence GTCN PAM
uggcagaggcugcagccgac

SEQ ID NO: 14450 - RNA, 20 nt, Artificial Sequence
  spacer sequence GTCN PAM
uauuucugcgcccccgcggg

SEQ ID NO: 14451 - RNA, 20 nt, Artificial Sequence
  spacer sequence GTCN PAM
cggcccccgccuggcuagga

SEQ ID NO: 14452 - RNA, 20 nt, Artificial Sequence
  spacer sequence GTCN PAM
cccccacgcgccuuucaucc

SEQ ID NO: 14453 - RNA, 20 nt, Artificial Sequence
  spacer sequence GTCN PAM
caggccuagacgcucucuac

SEQ ID NO: 14454 - RNA, 20 nt, Artificial Sequence
  spacer sequence GTCN PAM
aggccugcgacgggcguggc

SEQ ID NO: 14455 - RNA, 20 nt, Artificial Sequence
  spacer sequence GTCN PAM
uuagucggggucgggggagg

SEQ ID NO: 14456 - RNA, 20 nt, Artificial Sequence
  spacer sequence GTCN PAM
gggucgggggaggaccuggc

SEQ ID NO: 14457 - RNA, 20 nt, Artificial Sequence
  spacer sequence GTCN PAM
ggggaggaccuggcguccgg

SEQ ID NO: 14458 - RNA, 20 nt, Artificial Sequence
  spacer sequence GTCN PAM
ucccccgaccccgacuaaug

SEQ ID NO: 14459 - RNA, 20 nt, Artificial Sequence
  spacer sequence GTCN PAM
ggcgggcggggccccguggg

SEQ ID NO: 14460 - RNA, 20 nt, Artificial Sequence
  spacer sequence GTCN PAM
ccauggcgacgccccgcagg

SEQ ID NO: 14461 - RNA, 20 nt, Artificial Sequence
  spacer sequence GTCN PAM
ccauggagacgagggcggag

SEQ ID NO: 14462 - RNA, 20 nt, Artificial Sequence
  spacer sequence GTCN PAM
cggaaggggcgcgcaccucc

SEQ ID NO: 14463 - RNA, 20 nt, Artificial Sequence
  spacer sequence GTCN PAM
ugggccccgugggcccauuc

SEQ ID NO: 14464 - RNA, 20 nt, Artificial Sequence
  spacer sequence GTCN PAM
gucuugggccccgugggccc

SEQ ID NO: 14465 - RNA, 20 nt, Artificial Sequence
  spacer sequence GTCN PAM
ccgaaccugcuccccgcgcg

SEQ ID NO: 14466 - RNA, 20 nt, Artificial Sequence
  spacer sequence GTCN PAM
gaguccccgaaccugcuccc

SEQ ID NO: 14467 - RNA, 20 nt, Artificial Sequence
  spacer sequence GTCN PAM
ggcccggaauagcagucucg

SEQ ID NO: 14468 - RNA, 20 nt, Artificial Sequence
  spacer sequence GTCN PAM
cgcccccgcccggcgcggcu

SEQ ID NO: 14469 - RNA, 20 nt, Artificial Sequence
  spacer sequence GTCN PAM
acacgcaggcugcguccucg

SEQ ID NO: 14470 - RNA, 20 nt, Artificial Sequence
  spacer sequence GTCN PAM
acccccagccucccgccgcc

SEQ ID NO: 14471 - RNA, 20 nt, Artificial Sequence
  spacer sequence GTCN PAM
ucgccccgcgagauuggacc

SEQ ID NO: 14472 - RNA, 20 nt, Artificial Sequence
  spacer sequence GTCN PAM
aaucucgcggggcgaggacg

SEQ ID NO: 14473 - RNA, 20 nt, Artificial Sequence
  spacer sequence GTCN PAM
ucgagggguccaaucucgcg

SEQ ID NO: 14474 - RNA, 20 nt, Artificial Sequence
  spacer sequence GTCN PAM
gcguggagcggcggcaccgg

SEQ ID NO: 14475 - RNA, 20 nt, Artificial Sequence
  spacer sequence GTCN PAM
gcggcguuuggcucgagcgg

SEQ ID NO: 14476 - RNA, 20 nt, Artificial Sequence
  spacer sequence GTCN PAM
gcaacgggcagcgcgucccg

SEQ ID NO: 14477 - RNA, 20 nt, Artificial Sequence
  spacer sequence GTCN PAM
cggucgggucccgcaugguc

SEQ ID NO: 14478 - RNA, 20 nt, Artificial Sequence
  spacer sequence GTCN PAM
ggucccgcauggucaguggc

SEQ ID NO: 14479 - RNA, 20 nt, Artificial Sequence
  spacer sequence GTCN PAM
cgcauggucaguggccagca

SEQ ID NO: 14480 - RNA, 20 nt, Artificial Sequence
  spacer sequence GTCN PAM
guggccagcagggguggaug

SEQ ID NO: 14481 - RNA, 20 nt, Artificial Sequence
  spacer sequence GTCN PAM
cagccgccugagacccccgg

SEQ ID NO: 14482 - RNA, 20 nt, Artificial Sequence
  spacer sequence GTCN PAM
caggcggcugggaccccuuc

SEQ ID NO: 14483 - RNA, 20 nt, Artificial Sequence
  spacer sequence GTCN PAM
ccaccgggggucucaggcgg

SEQ ID NO: 14484 - RNA, 20 nt, Artificial Sequence
  spacer sequence GTCN PAM
cgggugcucgcagacgcagc

SEQ ID NO: 14485 - RNA, 20 nt, Artificial Sequence
  spacer sequence GTCN PAM
gcgagcacccgugacuccca

SEQ ID NO: 14486 - RNA, 20 nt, Artificial Sequence
  spacer sequence GTCN PAM
gcugcgucugcgagcacccg

SEQ ID NO: 14487 - RNA, 20 nt, Artificial Sequence
  spacer sequence GTCN PAM
guaccugugccucugggguc

SEQ ID NO: 14488 - RNA, 20 nt, Artificial Sequence
  spacer sequence GTCN PAM
acaccuggaagccggugcac

SEQ ID NO: 14489 - RNA, 20 nt, Artificial Sequence
  spacer sequence GTCN PAM
acgccacccugggaacccag

SEQ ID NO: 14490 - RNA, 20 nt, Artificial Sequence
  spacer sequence GTCN PAM
gcagccauccuggguuccca

SEQ ID NO: 14491 - RNA, 20 nt, Artificial Sequence
  spacer sequence GTCN PAM
cagcggccccugcauaauug

SEQ ID NO: 14492 - RNA, 20 nt, Artificial Sequence
  spacer sequence GTCN PAM
gagaacguccaccgcgcuga

SEQ ID NO: 14493 - RNA, 20 nt, Artificial Sequence
  spacer sequence GTCN PAM
accgcgcugacugcuggggc

SEQ ID NO: 14494 - RNA, 20 nt, Artificial Sequence
  spacer sequence GTCN PAM
gcgcgguggacguucucuga

SEQ ID NO: 14495 - RNA, 20 nt, Artificial Sequence
  spacer sequence GTCN PAM
ggggcuccagugggugggug

SEQ ID NO: 14496 - RNA, 20 nt, Artificial Sequence
  spacer sequence GTCN PAM
augcgggaggggccacccac

SEQ ID NO: 14497 - RNA, 20 nt, Artificial Sequence
  spacer sequence GTCN PAM
cucuccuuuaauaaccaccc

SEQ ID NO: 14498 - RNA, 20 nt, Artificial Sequence
  spacer sequence GTCN PAM
gccacucacgcagggugguu

SEQ ID NO: 14499 - RNA, 20 nt, Artificial Sequence
  spacer sequence GTCN PAM
gcggcagccggcugcugcgu

SEQ ID NO: 14500 - RNA, 20 nt, Artificial Sequence
  spacer sequence GTCN PAM
ugagcccaugagggguccca

SEQ ID NO: 14501 - RNA, 20 nt, Artificial Sequence
  spacer sequence GTCN PAM
cagagaccuugucacuggag

SEQ ID NO: 14502 - RNA, 20 nt, Artificial Sequence
  spacer sequence GTCN PAM
cugggaccccucaugggcuc

SEQ ID NO: 14503 - RNA, 20 nt, Artificial Sequence
  spacer sequence GTCN PAM
cuggagacagcgccccuggc

SEQ ID NO: 14504 - RNA, 20 nt, Artificial Sequence
  spacer sequence GTCN PAM
ccagugacaaggucucuggg

SEQ ID NO: 14505 - RNA, 20 nt, Artificial Sequence
  spacer sequence GTCN PAM
gaggucaggaguggggccgg

SEQ ID NO: 14506 - RNA, 20 nt, Artificial Sequence
  spacer sequence GTCN PAM
ggaguggggccgggauuucc

SEQ ID NO: 14507 - RNA, 20 nt, Artificial Sequence
  spacer sequence GTCN PAM
cuguacgccaacuuccccca

SEQ ID NO: 14508 - RNA, 20 nt, Artificial Sequence
  spacer sequence GTCN PAM
gcagagggucaucccuccga

SEQ ID NO: 14509 - RNA, 20 nt, Artificial Sequence
  spacer sequence GTCN PAM
ucccuccgaagacuuucugg

SEQ ID NO: 14510 - RNA, 20 nt, Artificial Sequence
  spacer sequence GTCN PAM
ucggagggaugacccucugc

SEQ ID NO: 14511 - RNA, 20 nt, Artificial Sequence
  spacer sequence GTCN PAM
gcgcuggcuucuuccaccag

SEQ ID NO: 14512 - RNA, 20 nt, Artificial Sequence
  spacer sequence GTCN PAM
ucucaugccgccgccucccc

SEQ ID NO: 14513 - RNA, 20 nt, Artificial Sequence
  spacer sequence GTCN PAM
uuguaaagcugguucuccag

SEQ ID NO: 14514 - RNA, 20 nt, Artificial Sequence
  spacer sequence GTCN PAM
uaaagccgccgccaucugga

SEQ ID NO: 14515 - RNA, 20 nt, Artificial Sequence
  spacer sequence GTCN PAM
ccacugcaccccagcacucc

SEQ ID NO: 14516 - RNA, 20 nt, Artificial Sequence
  spacer sequence GTCN PAM
gccugcacccgacagcaggg

SEQ ID NO: 14517 - RNA, 20 nt, Artificial Sequence
  spacer sequence GTCN PAM
ggugcaggcggacaccccga

SEQ ID NO: 14518 - RNA, 20 nt, Artificial Sequence
  spacer sequence GTCN PAM
cugcugucgggugcaggcgg

SEQ ID NO: 14519 - RNA, 20 nt, Artificial Sequence
  spacer sequence GTCN PAM
cuguugggguuuuggugggc

SEQ ID NO: 14520 - RNA, 20 nt, Artificial Sequence
  spacer sequence GTCN PAM
caguuuucccagcaccccag

SEQ ID NO: 14521 - RNA, 20 nt, Artificial Sequence
  spacer sequence GTCN PAM
guuguauuggcaagaauauc

SEQ ID NO: 14522 - RNA, 20 nt, Artificial Sequence
  spacer sequence GTCN PAM
ugauauucuugccaauacaa

SEQ ID NO: 14523 - RNA, 20 nt, Artificial Sequence
  spacer sequence GTCN PAM
ggguucagaugaaguuggga

SEQ ID NO: 14524 - RNA, 20 nt, Artificial Sequence
  spacer sequence GTCN PAM
gacagccgggucuugguugg

SEQ ID NO: 14525 - RNA, 20 nt, Artificial Sequence
  spacer sequence GTCN PAM
gacaucccaacuucaucuga

SEQ ID NO: 14526 - RNA, 20 nt, Artificial Sequence
  spacer sequence GTCN PAM
ugguuggguaggggaucugg

SEQ ID NO: 14527 - RNA, 20 nt, Artificial Sequence
  spacer sequence GTCN PAM
ggacugcuggagcacaggca

SEQ ID NO: 14528 - RNA, 20 nt, Artificial Sequence
  spacer sequence GTCN PAM
cgacauaacaaccuagccca

SEQ ID NO: 14529 - RNA, 20 nt, Artificial Sequence
  spacer sequence GTCN PAM
gggucccagugacacccaga

SEQ ID NO: 14530 - RNA, 20 nt, Artificial Sequence
  spacer sequence GTCN PAM
cagugacacccagaaguccc

SEQ ID NO: 14531 - RNA, 20 nt, Artificial Sequence
  spacer sequence GTCN PAM
cugggaccccgacuuugccu

SEQ ID NO: 14532 - RNA, 20 nt, Artificial Sequence
  spacer sequence GTCN PAM
ccaugaggccugaggccugg

SEQ ID NO: 14533 - RNA, 20 nt, Artificial Sequence
  spacer sequence GTCN PAM
gccccgccccgccccgccgc

SEQ ID NO: 14534 - RNA, 20 nt, Artificial Sequence
  spacer sequence GTCN PAM
cgcccccucgagcgcgggug

SEQ ID NO: 14535 - RNA, 20 nt, Artificial Sequence
  spacer sequence GTCN PAM
uccacccgcgcucgaggggg

SEQ ID NO: 14536 - RNA, 20 nt, Artificial Sequence
  spacer sequence GTCN PAM
gcaguccuccacccgcgcuc

SEQ ID NO: 14537 - RNA, 20 nt, Artificial Sequence
  spacer sequence GTCN PAM
cggccaauagucgagcccga

SEQ ID NO: 14538 - RNA, 20 nt, Artificial Sequence
  spacer sequence GTCN PAM
agcccgacaccaguccgcgg

SEQ ID NO: 14539 - RNA, 20 nt, Artificial Sequence
  spacer sequence GTCN PAM
ggcucgacuauuggccgaga

SEQ ID NO: 14540 - RNA, 20 nt, Artificial Sequence
  spacer sequence GTCN PAM
gcgggagggggcggaaccga

SEQ ID NO: 14541 - RNA, 20 nt, Artificial Sequence
  spacer sequence GTCN PAM
aucucgguuccgcccccucc

SEQ ID NO: 14542 - RNA, 20 nt, Artificial Sequence
  spacer sequence GTCN PAM
uauauucaugagcugggggc

SEQ ID NO: 14543 - RNA, 20 nt, Artificial Sequence
  spacer sequence GTCN PAM
ccgagcccggccuuauauac

SEQ ID NO: 14544 - RNA, 20 nt, Artificial Sequence
  spacer sequence GTCN PAM
uuguggugcgcugucuuccc

SEQ ID NO: 14545 - RNA, 20 nt, Artificial Sequence
  spacer sequence GTCN PAM
ucccgcuugcgucagggacc

SEQ ID NO: 14546 - RNA, 20 nt, Artificial Sequence
  spacer sequence GTCN PAM
gggaccugcccgacucagug

SEQ ID NO: 14547 - RNA, 20 nt, Artificial Sequence
  spacer sequence GTCN PAM
cugacgcaagcgggaagaca

SEQ ID NO: 14548 - RNA, 20 nt, Artificial Sequence
  spacer sequence GTCN PAM
ggcaggucccugacgcaagc

SEQ ID NO: 14549 - RNA, 20 nt, Artificial Sequence
  spacer sequence GTCN PAM
gccccgccggcggcgaggga

SEQ ID NO: 14550 - RNA, 20 nt, Artificial Sequence
  spacer sequence GTCN PAM
cucgccgccggcggggcgga

SEQ ID NO: 14551 - RNA, 20 nt, Artificial Sequence
  spacer sequence GTCN PAM
gggccgccggcgacccgguu

SEQ ID NO: 14552 - RNA, 20 nt, Artificial Sequence
  spacer sequence GTCN PAM
ccggcggcccggaccggcgg

SEQ ID NO: 14553 - RNA, 20 nt, Artificial Sequence
  spacer sequence GTCN PAM
ccagggccgcuuucccggcc

SEQ ID NO: 14554 - RNA, 20 nt, Artificial Sequence
  spacer sequence GTCN PAM
uuucccucaugcaaucgcaa

SEQ ID NO: 14555 - RNA, 20 nt, Artificial Sequence
  spacer sequence GTCN PAM
gccacgucgugcuuugcgcc

SEQ ID NO: 14556 - RNA, 20 nt, Artificial Sequence
  spacer sequence GTCN PAM
ugcuuugcgcccaaaguuug

SEQ ID NO: 14557 - RNA, 20 nt, Artificial Sequence
  spacer sequence GTCN PAM
aaguuggcacagcucccagu

SEQ ID NO: 14558 - RNA, 20 nt, Artificial Sequence
  spacer sequence GTCN PAM
ggcacugggagcugugccaa

SEQ ID NO: 14559 - RNA, 20 nt, Artificial Sequence
  spacer sequence GTCN PAM
aguucucagagccacugggu

SEQ ID NO: 14560 - RNA, 20 nt, Artificial Sequence
  spacer sequence GTCN PAM
gugucagcacugaccgcccc

SEQ ID NO: 14561 - RNA, 20 nt, Artificial Sequence
  spacer sequence GTCN PAM
gcacugaccgcccccuuaaa

SEQ ID NO: 14562 - RNA, 20 nt, Artificial Sequence
  spacer sequence GTCN PAM
gugcugacacagacaaagca

SEQ ID NO: 14563 - RNA, 20 nt, Artificial Sequence
  spacer sequence GTCN PAM
uggcuauggaagucaguacc

SEQ ID NO: 14564 - RNA, 20 nt, Artificial Sequence
  spacer sequence GTCN PAM
guaccugcccugaggugccc

SEQ ID NO: 14565 - RNA, 20 nt, Artificial Sequence
  spacer sequence GTCN PAM
uggggggcaccucagggcag

SEQ ID NO: 14566 - RNA, 20 nt, Artificial Sequence
  spacer sequence GTCN PAM
gggaggccgccccguccugg

SEQ ID NO: 14567 - RNA, 20 nt, Artificial Sequence
  spacer sequence GTCN PAM
caggaggcauuuuacaguga

SEQ ID NO: 14568 - RNA, 20 nt, Artificial Sequence
  spacer sequence GTCN PAM
agcaacaaguagaugucagu

SEQ ID NO: 14569 - RNA, 20 nt, Artificial Sequence
  spacer sequence GTCN PAM
guugguuaggguaggaguug

SEQ ID NO: 14570 - RNA, 20 nt, Artificial Sequence
  spacer sequence GTCN PAM
ugcccagggcacaacuggaa

SEQ ID NO: 14571 - RNA, 20 nt, Artificial Sequence
  spacer sequence GTCN PAM
cccuucccccacagccuucc

SEQ ID NO: 14572 - RNA, 20 nt, Artificial Sequence
  spacer sequence GTCN PAM
uggggguggauggaguaaau

SEQ ID NO: 14573 - RNA, 20 nt, Artificial Sequence
  spacer sequence GTCN PAM
uagguggcugggugcggugg

SEQ ID NO: 14574 - RNA, 20 nt, Artificial Sequence
  spacer sequence GTCN PAM
gaaacuccugggcucaagca

SEQ ID NO: 14575 - RNA, 20 nt, Artificial Sequence
  spacer sequence GTCN PAM
ugcucuguugcccaggcugg

SEQ ID NO: 14576 - RNA, 20 nt, Artificial Sequence
  spacer sequence GTCN PAM
caguuucuugggaggcugag

SEQ ID NO: 14577 - RNA, 20 nt, Artificial Sequence
  spacer sequence GTCN PAM
cugcagccuccaccuccugg

SEQ ID NO: 14578 - RNA, 20 nt, Artificial Sequence
  spacer sequence GTCN PAM
gggugacaguuagacacacu

SEQ ID NO: 14579 - RNA, 20 nt, Artificial Sequence
  spacer sequence GTCN PAM
cccagacuggagugcagggg

SEQ ID NO: 14580 - RNA, 20 nt, Artificial Sequence
  spacer sequence GTCN PAM
aacugucacccagacuggag

SEQ ID NO: 14581 - RNA, 20 nt, Artificial Sequence
  spacer sequence GTCN PAM
ggggcagugugucuaacugu

SEQ ID NO: 14582 - RNA, 20 nt, Artificial Sequence
  spacer sequence GTCN PAM
uagguaugaguuugagauaa

SEQ ID NO: 14583 - RNA, 20 nt, Artificial Sequence
  spacer sequence GTCN PAM
uuuacauaaaauaggaagcg

SEQ ID NO: 14584 - RNA, 20 nt, Artificial Sequence
  spacer sequence GTCN PAM
ucucucaccaccucuccccg

SEQ ID NO: 14585 - RNA, 20 nt, Artificial Sequence
  spacer sequence GTCN PAM
gccacaggccgccauggcau

SEQ ID NO: 14586 - RNA, 20 nt, Artificial Sequence
  spacer sequence GTCN PAM
aaacucagcccuccaacaaa

SEQ ID NO: 14587 - RNA, 20 nt, Artificial Sequence
  spacer sequence GTCN PAM
cuggagcaggucuucucaaa

SEQ ID NO: 14588 - RNA, 20 nt, Artificial Sequence
  spacer sequence GTCN PAM
ucucaaaguacggacagauc

SEQ ID NO: 14589 - RNA, 20 nt, Artificial Sequence
  spacer sequence GTCN PAM
guacuuugagaagaccugcu

SEQ ID NO: 14590 - RNA, 20 nt, Artificial Sequence
  spacer sequence GTCN PAM
gcacccagcuguacuuccag

SEQ ID NO: 14591 - RNA, 20 nt, Artificial Sequence
  spacer sequence GTCN PAM
gcagucagcacccagcugua

SEQ ID NO: 14592 - RNA, 20 nt, Artificial Sequence
  spacer sequence GTCN PAM
uucacaaccaccacugugca

SEQ ID NO: 14593 - RNA, 20 nt, Artificial Sequence
  spacer sequence GTCN PAM
cccugucuuucacaaccacc

SEQ ID NO: 14594 - RNA, 20 nt, Artificial Sequence
  spacer sequence GTCN PAM
ccuuugagaacauugacgac

SEQ ID NO: 14595 - RNA, 20 nt, Artificial Sequence
  spacer sequence GTCN PAM
auguucucaaaggugacaaa

SEQ ID NO: 14596 - RNA, 20 nt, Artificial Sequence
  spacer sequence GTCN PAM
ucaauguucucaaaggugac

SEQ ID NO: 14597 - RNA, 20 nt, Artificial Sequence
  spacer sequence GTCN PAM
cgucucgaggauggggcacc

SEQ ID NO: 14598 - RNA, 20 nt, Artificial Sequence
  spacer sequence GTCN PAM
cgaggauggggcacccaccu

SEQ ID NO: 14599 - RNA, 20 nt, Artificial Sequence
  spacer sequence GTCN PAM
cgcccucugucuccagucug

SEQ ID NO: 14600 - RNA, 20 nt, Artificial Sequence
  spacer sequence GTCN PAM
ccagucuguagauggacggc

SEQ ID NO: 14601 - RNA, 20 nt, Artificial Sequence
  spacer sequence GTCN PAM
guagauggacggcagauccg

SEQ ID NO: 14602 - RNA, 20 nt, Artificial Sequence
  spacer sequence GTCN PAM
aucuacagacuggagacaga

SEQ ID NO: 14603 - RNA, 20 nt, Artificial Sequence
  spacer sequence GTCN PAM
acucggaucugccguccauc

SEQ ID NO: 14604 - RNA, 20 nt, Artificial Sequence
  spacer sequence GTCN PAM
ucagacaaccgaucccgugg

SEQ ID NO: 14605 - RNA, 20 nt, Artificial Sequence
  spacer sequence GTCN PAM
gacaaccgaucccgugggua

SEQ ID NO: 14606 - RNA, 20 nt, Artificial Sequence
  spacer sequence GTCN PAM
gacgacuugccugccugguc

SEQ ID NO: 14607 - RNA, 20 nt, Artificial Sequence
  spacer sequence GTCN PAM
ucggcccccacggaagaagc

SEQ ID NO: 14608 - RNA, 20 nt, Artificial Sequence
  spacer sequence GTCN PAM
cuuggggaugcugugaggua

SEQ ID NO: 14609 - RNA, 20 nt, Artificial Sequence
  spacer sequence GTCN PAM
ccuccuccugcacauacagg

SEQ ID NO: 14610 - RNA, 20 nt, Artificial Sequence
  spacer sequence GTCN PAM
aggagugggggcuacggagg

SEQ ID NO: 14611 - RNA, 20 nt, Artificial Sequence
  spacer sequence GTCN PAM
cuggagccuccguagccccc

SEQ ID NO: 14612 - RNA, 20 nt, Artificial Sequence
  spacer sequence GTCN PAM
cgggucccaggucccugggg

SEQ ID NO: 14613 - RNA, 20 nt, Artificial Sequence
  spacer sequence GTCN PAM
caggucccugggggagcuga

SEQ ID NO: 14614 - RNA, 20 nt, Artificial Sequence
  spacer sequence GTCN PAM
cugggggagcugagaugaga

SEQ ID NO: 14615 - RNA, 20 nt, Artificial Sequence
  spacer sequence GTCN PAM
caucucagcucccccaggga

SEQ ID NO: 14616 - RNA, 20 nt, Artificial Sequence
  spacer sequence GTCN PAM
ccaccugccucugcuccuug

SEQ ID NO: 14617 - RNA, 20 nt, Artificial Sequence
  spacer sequence GTCN PAM
ccucuccucuuggccugggu

SEQ ID NO: 14618 - RNA, 20 nt, Artificial Sequence
  spacer sequence GTCN PAM
ugagcagucuccucuccucu

SEQ ID NO: 14619 - RNA, 20 nt, Artificial Sequence
  spacer sequence GTCN PAM
cccaggcccucccgcuucug

SEQ ID NO: 14620 - RNA, 20 nt, Artificial Sequence
  spacer sequence GTCN PAM
uuguuguguccccagaaggg

SEQ ID NO: 14621 - RNA, 20 nt, Artificial Sequence
  spacer sequence GTCN PAM
ccagaagggacggcuggcau

SEQ ID NO: 14622 - RNA, 20 nt, Artificial Sequence
  spacer sequence GTCN PAM
cuucuggggacacaacaagg

SEQ ID NO: 14623 - RNA, 20 nt, Artificial Sequence
  spacer sequence GTCN PAM
acuucugcucugccacaaca

SEQ ID NO: 14624 - RNA, 20 nt, Artificial Sequence
  spacer sequence GTCN PAM
gucuugcagccggagucaga

SEQ ID NO: 14625 - RNA, 20 nt, Artificial Sequence
  spacer sequence GTCN PAM
ugcagccggagucagagugg

SEQ ID NO: 14626 - RNA, 20 nt, Artificial Sequence
  spacer sequence GTCN PAM
gagugguggcuacagugacc

SEQ ID NO: 14627 - RNA, 20 nt, Artificial Sequence
  spacer sequence GTCN PAM
cuguagccaccacucugacu

SEQ ID NO: 14628 - RNA, 20 nt, Artificial Sequence
  spacer sequence GTCN PAM
uacagagacaguuaugacag

SEQ ID NO: 14629 - RNA, 20 nt, Artificial Sequence
  spacer sequence GTCN PAM
cuguaggacccgcccgagcu

SEQ ID NO: 14630 - RNA, 20 nt, Artificial Sequence
  spacer sequence GTCN PAM
uaacugucucuguaggaccc

SEQ ID NO: 14631 - RNA, 20 nt, Artificial Sequence
  spacer sequence GTCN PAM
cacuccgagggcgccacgcu

SEQ ID NO: 14632 - RNA, 20 nt, Artificial Sequence
  spacer sequence GTCN PAM
agccuaaagugcuuggagag

SEQ ID NO: 14633 - RNA, 20 nt, Artificial Sequence
  spacer sequence GTCN PAM
gaguguccagccuaaagugc

SEQ ID NO: 14634 - RNA, 20 nt, Artificial Sequence
  spacer sequence GTCN PAM
cugugcuugcccagaagagg

SEQ ID NO: 14635 - RNA, 20 nt, Artificial Sequence
  spacer sequence GTCN PAM
ucucagagccauuucuaucg

SEQ ID NO: 14636 - RNA, 20 nt, Artificial Sequence
  spacer sequence GTCN PAM
ugcgauagaaauggcucuga

SEQ ID NO: 14637 - RNA, 20 nt, Artificial Sequence
  spacer sequence GTCN PAM
cauuuggcuuuugcguccug

SEQ ID NO: 14638 - RNA, 20 nt, Artificial Sequence
  spacer sequence GTCN PAM
gucucauuuggcuuuugcgu

SEQ ID NO: 14639 - RNA, 20 nt, Artificial Sequence
  spacer sequence GTCN PAM
gcuaggugcauguguggccg

SEQ ID NO: 14640 - RNA, 20 nt, Artificial Sequence
  spacer sequence GTCN PAM
ggccucuggggugaagcugc

SEQ ID NO: 14641 - RNA, 20 nt, Artificial Sequence
  spacer sequence GTCN PAM
ucagcuacacacaacgagua

SEQ ID NO: 14642 - RNA, 20 nt, Artificial Sequence
  spacer sequence GTCN PAM
uuccaauggcuguguguuua

SEQ ID NO: 14643 - RNA, 20 nt, Artificial Sequence
  spacer sequence GTCN PAM
uuucgguucugaucuuguca

SEQ ID NO: 14644 - RNA, 20 nt, Artificial Sequence
  spacer sequence GTCN PAM
aacccagccugaccgcuucu

SEQ ID NO: 14645 - RNA, 20 nt, Artificial Sequence
  spacer sequence GTCN PAM
ggcuggguuugacaagauca

SEQ ID NO: 14646 - RNA, 20 nt, Artificial Sequence
  spacer sequence GTCN PAM
gaagcggucaggcuggguuu

SEQ ID NO: 14647 - RNA, 20 nt, Artificial Sequence
  spacer sequence GTCN PAM
aguaacgaggccaucccggc

SEQ ID NO: 14648 - RNA, 20 nt, Artificial Sequence
  spacer sequence GTCN PAM
aaaaaguaaaugcuuuucaa

SEQ ID NO: 14649 - RNA, 20 nt, Artificial Sequence
  spacer sequence GTCN PAM
guucgaucucagagaaguga

SEQ ID NO: 14650 - RNA, 20 nt, Artificial Sequence
  spacer sequence GTCN PAM
gaagcugagcaagcuguggc

SEQ ID NO: 14651 - RNA, 20 nt, Artificial Sequence
  spacer sequence GTCN PAM
cacggaguuggaaaaaagcc

SEQ ID NO: 14652 - RNA, 20 nt, Artificial Sequence
  spacer sequence GTCN PAM
uaccacacuacacucagaaa

SEQ ID NO: 14653 - RNA, 20 nt, Artificial Sequence
  spacer sequence GTCN PAM
aucugugcugugcgccccac

SEQ ID NO: 14654 - RNA, 20 nt, Artificial Sequence
  spacer sequence GTCN PAM
acuguggggcgcacagcaca

SEQ ID NO: 14655 - RNA, 20 nt, Artificial Sequence
  spacer sequence GTCN PAM
gcacgucuacuguggggcgc

SEQ ID NO: 14656 - RNA, 20 nt, Artificial Sequence
  spacer sequence GTCN PAM
cugagagguucuugaagaug

SEQ ID NO: 14657 - RNA, 20 nt, Artificial Sequence
  spacer sequence GTCN PAM
uuuuuuacuggaagacguac

SEQ ID NO: 14658 - RNA, 20 nt, Artificial Sequence
  spacer sequence GTCN PAM
uccaguaaaaaaggacaaua

SEQ ID NO: 14659 - RNA, 20 nt, Artificial Sequence
  spacer sequence GTCN PAM
uuuaaucggcuucguaaagc

SEQ ID NO: 14660 - RNA, 20 nt, Artificial Sequence
  spacer sequence GTCN PAM
gagcaagguucauuucacac

SEQ ID NO: 14661 - RNA, 20 nt, Artificial Sequence
  spacer sequence GTCN PAM
ggcugcaggagcccgcagca

SEQ ID NO: 14662 - RNA, 20 nt, Artificial Sequence
  spacer sequence GTCN PAM
gcaagccuucccuggggccu

SEQ ID NO: 14663 - RNA, 20 nt, Artificial Sequence
  spacer sequence GTCN PAM
gcugggccucccuuucuagc

SEQ ID NO: 14664 - RNA, 20 nt, Artificial Sequence
  spacer sequence GTCN PAM
ggguaggggagccaggcggg

SEQ ID NO: 14665 - RNA, 20 nt, Artificial Sequence
  spacer sequence GTCN PAM
cccgccuggcuccccuaccc

SEQ ID NO: 14666 - RNA, 20 nt, Artificial Sequence
  spacer sequence GTCN PAM
agcccucuggccaccacugc

SEQ ID NO: 14667 - RNA, 20 nt, Artificial Sequence
  spacer sequence GTCN PAM
cugcuaagcugcccgcacag

SEQ ID NO: 14668 - RNA, 20 nt, Artificial Sequence
  spacer sequence GTCN PAM
acugucccugcuaagcugcc

SEQ ID NO: 14669 - RNA, 20 nt, Artificial Sequence
  spacer sequence GTCN PAM
ggugcacguccacugucccu

SEQ ID NO: 14670 - RNA, 20 nt, Artificial Sequence
  spacer sequence GTCN PAM
gcgucaggugcacguccacu

SEQ ID NO: 14671 - RNA, 20 nt, Artificial Sequence
  spacer sequence GTCN PAM
aggucagcgucaggugcacg

SEQ ID NO: 14672 - RNA, 20 nt, Artificial Sequence
  spacer sequence GTCN PAM
agaagcaggccagagagcag

SEQ ID NO: 14673 - RNA, 20 nt, Artificial Sequence
  spacer sequence GTCN PAM
cccugggaugccacgugccu

SEQ ID NO: 14674 - RNA, 20 nt, Artificial Sequence
  spacer sequence GTCN PAM
gaggucgcccugggaugcca

SEQ ID NO: 14675 - RNA, 20 nt, Artificial Sequence
  spacer sequence GTCN PAM
uccgagggcugcagcuucca

SEQ ID NO: 14676 - RNA, 20 nt, Artificial Sequence
  spacer sequence GTCN PAM
cagaggguucuguugggcgc

SEQ ID NO: 14677 - RNA, 20 nt, Artificial Sequence
  spacer sequence GTCN PAM
acaucccucuuguugagagc

SEQ ID NO: 14678 - RNA, 20 nt, Artificial Sequence
  spacer sequence GTCN PAM
ugugcccggggaauguuccu

SEQ ID NO: 14679 - RNA, 20 nt, Artificial Sequence
  spacer sequence GTCN PAM
caggaacauuccccgggcac

SEQ ID NO: 14680 - RNA, 20 nt, Artificial Sequence
  spacer sequence GTCN PAM
ggcccagccauuacgcuccc

SEQ ID NO: 14681 - RNA, 20 nt, Artificial Sequence
  spacer sequence GTCN PAM
ugccuggcucauagaugaaa

SEQ ID NO: 14682 - RNA, 20 nt, Artificial Sequence
  spacer sequence GTCN PAM
ucaauccugcuuaagggauu

SEQ ID NO: 14683 - RNA, 20 nt, Artificial Sequence
  spacer sequence GTCN PAM
auugagcaaaaaauccaaaa

SEQ ID NO: 14684 - RNA, 20 nt, Artificial Sequence
  spacer sequence GTCN PAM
uuuccagaccucuuuaaguc

SEQ ID NO: 14685 - RNA, 20 nt, Artificial Sequence
  spacer sequence GTCN PAM
ggaaaagacggucaauugag

SEQ ID NO: 14686 - RNA, 20 nt, Artificial Sequence
  spacer sequence GTCN PAM
cacucuuaacuuagcuuucu

SEQ ID NO: 14687 - RNA, 20 nt, Artificial Sequence
  spacer sequence GTCN PAM
guugccgccauuaguuuuuu

SEQ ID NO: 14688 - RNA, 20 nt, Artificial Sequence
  spacer sequence GTCN PAM
gcaccuuggcgcagcuggag

SEQ ID NO: 14689 - RNA, 20 nt, Artificial Sequence
  spacer sequence GTCN PAM
caggccagcaugcccagggc

SEQ ID NO: 14690 - RNA, 20 nt, Artificial Sequence
  spacer sequence GTCN PAM
cagcccccugacuagccuga

SEQ ID NO: 14691 - RNA, 20 nt, Artificial Sequence
  spacer sequence GTCN PAM
gggggcugugaccucaggcu

SEQ ID NO: 14692 - RNA, 20 nt, Artificial Sequence
  spacer sequence GTCN PAM
caggcuagucagggggcugu

SEQ ID NO: 14693 - RNA, 20 nt, Artificial Sequence
  spacer sequence GTCN PAM
uccacagggcucacagcugc

SEQ ID NO: 14694 - RNA, 20 nt, Artificial Sequence
  spacer sequence GTCN PAM
uggccgggccccuucaaccu

SEQ ID NO: 14695 - RNA, 20 nt, Artificial Sequence
  spacer sequence GTCN PAM
ucgcugcucucaggccaccc

SEQ ID NO: 14696 - RNA, 20 nt, Artificial Sequence
  spacer sequence GTCN PAM
cugucccaggagggacuuca

SEQ ID NO: 14697 - RNA, 20 nt, Artificial Sequence
  spacer sequence GTCN PAM
caggagggacuucaccugga

SEQ ID NO: 14698 - RNA, 20 nt, Artificial Sequence
  spacer sequence GTCN PAM
cuccugggacagugacccca

SEQ ID NO: 14699 - RNA, 20 nt, Artificial Sequence
  spacer sequence GTCN PAM
ccuguaagugcuuucgggaa

SEQ ID NO: 14700 - RNA, 20 nt, Artificial Sequence
  spacer sequence GTCN PAM
cgggcggcaccugggcguuu

SEQ ID NO: 14701 - RNA, 20 nt, Artificial Sequence
  spacer sequence GTCN PAM
ugcucucccgcaccuauggc

SEQ ID NO: 14702 - RNA, 20 nt, Artificial Sequence
  spacer sequence GTCN PAM
cccgccuggagcccgcgccu

SEQ ID NO: 14703 - RNA, 20 nt, Artificial Sequence
  spacer sequence GTCN PAM
cuccuggagcacgggcugcg

SEQ ID NO: 14704 - RNA, 20 nt, Artificial Sequence
  spacer sequence GTCN PAM
uugcccacaacgauguggag

SEQ ID NO: 14705 - RNA, 20 nt, Artificial Sequence
  spacer sequence GTCN PAM
gauucgaauaaagggccacg

SEQ ID NO: 14706 - RNA, 20 nt, Artificial Sequence
  spacer sequence GTCN PAM
gugguucaggggggucuguc

SEQ ID NO: 14707 - RNA, 20 nt, Artificial Sequence
  spacer sequence GTCN PAM
gucggcggagcggggccacu

SEQ ID NO: 14708 - RNA, 20 nt, Artificial Sequence
  spacer sequence GTCN PAM
gcggagcggggccacuggaa

SEQ ID NO: 14709 - RNA, 20 nt, Artificial Sequence
  spacer sequence GTCN PAM
gcaggcuuuucuuccagugg

SEQ ID NO: 14710 - RNA, 20 nt, Artificial Sequence
  spacer sequence GTCN PAM
uacucgugcgcugaaccgag

SEQ ID NO: 14711 - RNA, 20 nt, Artificial Sequence
  spacer sequence GTCN PAM
gguccuacucgugcgcugaa

SEQ ID NO: 14712 - RNA, 20 nt, Artificial Sequence
  spacer sequence GTCN PAM
ucccugucggguccuacucg

SEQ ID NO: 14713 - RNA, 20 nt, Artificial Sequence
  spacer sequence GTCN PAM
uuguccgagcagugaccgcg

SEQ ID NO: 14714 - RNA, 20 nt, Artificial Sequence
  spacer sequence GTCN PAM
gagcagugaccgcggggggc

SEQ ID NO: 14715 - RNA, 20 nt, Artificial Sequence
  spacer sequence GTCN PAM
cugcucggacaaugacccuu

SEQ ID NO: 14716 - RNA, 20 nt, Artificial Sequence
  spacer sequence GTCN PAM
ccgcgcugcgaacccccuca

SEQ ID NO: 14717 - RNA, 20 nt, Artificial Sequence
  spacer sequence GTCN PAM
cgcgggaucugaggcgcacu

SEQ ID NO: 14718 - RNA, 20 nt, Artificial Sequence
  spacer sequence GTCN PAM
ggccccgucuugggccgagu

SEQ ID NO: 14719 - RNA, 20 nt, Artificial Sequence
  spacer sequence GTCN PAM
ugggccgagucccggguucc

SEQ ID NO: 14720 - RNA, 20 nt, Artificial Sequence
  spacer sequence GTCN PAM
cggguucccuguagcaggcu

SEQ ID NO: 14721 - RNA, 20 nt, Artificial Sequence
  spacer sequence GTCN PAM
agggcccaggaagguggcgc

SEQ ID NO: 14722 - RNA, 20 nt, Artificial Sequence
  spacer sequence GTCN PAM
gccacguccagggcccagga

SEQ ID NO: 14723 - RNA, 20 nt, Artificial Sequence
  spacer sequence GTCN PAM
gugaggccggggcaggagug

SEQ ID NO: 14724 - RNA, 20 nt, Artificial Sequence
  spacer sequence GTCN PAM
ccccgaagugggugggaaug

SEQ ID NO: 14725 - RNA, 20 nt, Artificial Sequence
  spacer sequence GTCN PAM
ugaagucgggguccgccccg

SEQ ID NO: 14726 - RNA, 20 nt, Artificial Sequence
  spacer sequence GTCN PAM
ggguccgccccgucuccccg

SEQ ID NO: 14727 - RNA, 20 nt, Artificial Sequence
  spacer sequence GTCN PAM
gccccgucuccccgcugcca

SEQ ID NO: 14728 - RNA, 20 nt, Artificial Sequence
  spacer sequence GTCN PAM
ccccgcugccagcccgauuu

SEQ ID NO: 14729 - RNA, 20 nt, Artificial Sequence
  spacer sequence GTCN PAM
cggcuuccgaggaaaucggg

SEQ ID NO: 14730 - RNA, 20 nt, Artificial Sequence
  spacer sequence GTCN PAM
cggcaaggcgcagccggcag

SEQ ID NO: 14731 - RNA, 20 nt, Artificial Sequence
  spacer sequence GTCN PAM
ugaucccuuggagcgguucg

SEQ ID NO: 14732 - RNA, 20 nt, Artificial Sequence
  spacer sequence GTCN PAM
aaccgcuccaagggaucagg

SEQ ID NO: 14733 - RNA, 20 nt, Artificial Sequence
  spacer sequence GTCN PAM
agcuccgccuccgcgcccca

SEQ ID NO: 14734 - RNA, 20 nt, Artificial Sequence
  spacer sequence GTCN PAM
ggcgcgcggaggugaugcca

SEQ ID NO: 14735 - RNA, 20 nt, Artificial Sequence
  spacer sequence GTCN PAM
gucaggcgcgcggaggugau

SEQ ID NO: 14736 - RNA, 20 nt, Artificial Sequence
  spacer sequence GTCN PAM
cguugucgccgccgccggcc

SEQ ID NO: 14737 - RNA, 20 nt, Artificial Sequence
  spacer sequence GTCN PAM
ccgccgccggccgugacgaa

SEQ ID NO: 14738 - RNA, 20 nt, Artificial Sequence
  spacer sequence GTCN PAM
cggccggcggcggcgacaac

SEQ ID NO: 14739 - RNA, 20 nt, Artificial Sequence
  spacer sequence GTCN PAM
gccgggggcgucgggcucgg

SEQ ID NO: 14740 - RNA, 20 nt, Artificial Sequence
  spacer sequence GTCN PAM
ggcucggcgcugacgcgcuc

SEQ ID NO: 14741 - RNA, 20 nt, Artificial Sequence
  spacer sequence GTCN PAM
gcgccgagcccgacgccccc

SEQ ID NO: 14742 - RNA, 20 nt, Artificial Sequence
  spacer sequence GTCN PAM
ggccgcagaagcccaggauc

SEQ ID NO: 14743 - RNA, 20 nt, Artificial Sequence
  spacer sequence GTCN PAM
ggcgcacgugggcgccgucu

SEQ ID NO: 14744 - RNA, 20 nt, Artificial Sequence
  spacer sequence GTCN PAM
cucagccuuggccaauuagc

SEQ ID NO: 14745 - RNA, 20 nt, Artificial Sequence
  spacer sequence GTCN PAM
cgugccgggccgcggggucc

SEQ ID NO: 14746 - RNA, 20 nt, Artificial Sequence
  spacer sequence GTCN PAM
uccccucccucccucccucc

SEQ ID NO: 14747 - RNA, 20 nt, Artificial Sequence
  spacer sequence GTCN PAM
ucacguggugugggcggugc

SEQ ID NO: 14748 - RNA, 20 nt, Artificial Sequence
  spacer sequence GTCN PAM
cguggugugggcggugcagg

SEQ ID NO: 14749 - RNA, 20 nt, Artificial Sequence
  spacer sequence GTCN PAM
cguggccccugcaccgccca

SEQ ID NO: 14750 - RNA, 20 nt, Artificial Sequence
  spacer sequence GTCN PAM
cccccgaguuaagaggcggc

SEQ ID NO: 14751 - RNA, 20 nt, Artificial Sequence
  spacer sequence GTCN PAM
ggcccuggcggggcgagggg

SEQ ID NO: 14752 - RNA, 20 nt, Artificial Sequence
  spacer sequence GTCN PAM
ccggaugcccguccucguuc

SEQ ID NO: 14753 - RNA, 20 nt, Artificial Sequence
  spacer sequence GTCN PAM
ucguucucaucuucccgccu

SEQ ID NO: 14754 - RNA, 20 nt, Artificial Sequence
  spacer sequence GTCN PAM
cgauauuuuccuuucugcuu

SEQ ID NO: 14755 - RNA, 20 nt, Artificial Sequence
  spacer sequence GTCN PAM
ccagggucggccacgugccc

SEQ ID NO: 14756 - RNA, 20 nt, Artificial Sequence
  spacer sequence GTCN PAM
gccacgugcccgccuugggu

SEQ ID NO: 14757 - RNA, 20 nt, Artificial Sequence
  spacer sequence GTCN PAM
ccagacccucgcgggggucu

SEQ ID NO: 14758 - RNA, 20 nt, Artificial Sequence
  spacer sequence GTCN PAM
ggggacgcagcugcaccucc

SEQ ID NO: 14759 - RNA, 20 nt, Artificial Sequence
  spacer sequence GTCN PAM
ccagcuguaggcagccccug

SEQ ID NO: 14760 - RNA, 20 nt, Artificial Sequence
  spacer sequence GTCN PAM
ccucugggcuccugacuacc

SEQ ID NO: 14761 - RNA, 20 nt, Artificial Sequence
  spacer sequence GTCN PAM
ggagcccagaggagacugga

SEQ ID NO: 14762 - RNA, 20 nt, Artificial Sequence
  spacer sequence GTCN PAM
cucccacccgggagaagcag

SEQ ID NO: 14763 - RNA, 20 nt, Artificial Sequence
  spacer sequence GTCN PAM
ucgcugugucucucccaccc

SEQ ID NO: 14764 - RNA, 20 nt, Artificial Sequence
  spacer sequence GTCN PAM
agccgcuuuuuauuuuuuau

SEQ ID NO: 14765 - RNA, 20 nt, Artificial Sequence
  spacer sequence GTCN PAM
cgccauguuacccgcgcugg

SEQ ID NO: 14766 - RNA, 20 nt, Artificial Sequence
  spacer sequence GTCN PAM
gaacuccugggcucaaguga

SEQ ID NO: 14767 - RNA, 20 nt, Artificial Sequence
  spacer sequence GTCN PAM
cagggccaagccccuggugg

SEQ ID NO: 14768 - RNA, 20 nt, Artificial Sequence
  spacer sequence GTCN PAM
uuggcaaagucucaccccug

SEQ ID NO: 14769 - RNA, 20 nt, Artificial Sequence
  spacer sequence GTCN PAM
caccccugugugagccucag

SEQ ID NO: 14770 - RNA, 20 nt, Artificial Sequence
  spacer sequence GTCN PAM
uuucaucagugcaaugggag

SEQ ID NO: 14771 - RNA, 20 nt, Artificial Sequence
  spacer sequence GTCN PAM
cucccauugcacugaugaaa

SEQ ID NO: 14772 - RNA, 20 nt, Artificial Sequence
  spacer sequence GTCN PAM
uggcgcaggggagaugggag

SEQ ID NO: 14773 - RNA, 20 nt, Artificial Sequence
  spacer sequence GTCN PAM
ucuuacugucaucgccaugg

SEQ ID NO: 14774 - RNA, 20 nt, Artificial Sequence
  spacer sequence GTCN PAM
ucgccaugggagugaauggu

SEQ ID NO: 14775 - RNA, 20 nt, Artificial Sequence
  spacer sequence GTCN PAM
uaaucgccaagugauuacca

SEQ ID NO: 14776 - RNA, 20 nt, Artificial Sequence
  spacer sequence GTCN PAM
gcagcagggcucggggcucc

SEQ ID NO: 14777 - RNA, 20 nt, Artificial Sequence
  spacer sequence GTCN PAM
ucuacuggagccccgagccc

SEQ ID NO: 14778 - RNA, 20 nt, Artificial Sequence
  spacer sequence GTCN PAM
ugagggaaggaggaggcagg

SEQ ID NO: 14779 - RNA, 20 nt, Artificial Sequence
  spacer sequence GTCN PAM
guggccccuccccgccaacc

SEQ ID NO: 14780 - RNA, 20 nt, Artificial Sequence
  spacer sequence GTCN PAM
aggcauagucaguggccccu

SEQ ID NO: 14781 - RNA, 20 nt, Artificial Sequence
  spacer sequence GTCN PAM
ucaguguuggcgaggaggcc

SEQ ID NO: 14782 - RNA, 20 nt, Artificial Sequence
  spacer sequence GTCN PAM
agcgaggccaucuccguggg

SEQ ID NO: 14783 - RNA, 20 nt, Artificial Sequence
  spacer sequence GTCN PAM
cuguccagcgaggccaucuc

SEQ ID NO: 14784 - RNA, 20 nt, Artificial Sequence
  spacer sequence GTCN PAM
ccucgucgcuguccagcgag

SEQ ID NO: 14785 - RNA, 20 nt, Artificial Sequence
  spacer sequence GTCN PAM
cggaaucugagauggugugc

SEQ ID NO: 14786 - RNA, 20 nt, Artificial Sequence
  spacer sequence GTCN PAM
ccagcccagccugcccaccg

SEQ ID NO: 14787 - RNA, 20 nt, Artificial Sequence
  spacer sequence GTCN PAM
ugcugagucuccagcccagc

SEQ ID NO: 14788 - RNA, 20 nt, Artificial Sequence
  spacer sequence GTCN PAM
ccaggguccugcugagucuc

SEQ ID NO: 14789 - RNA, 20 nt, Artificial Sequence
  spacer sequence GTCN PAM
cugcaaucacagcugacagc

SEQ ID NO: 14790 - RNA, 20 nt, Artificial Sequence
  spacer sequence GTCN PAM
gcugugauugcagggaccac

SEQ ID NO: 14791 - RNA, 20 nt, Artificial Sequence
  spacer sequence GTCN PAM
ggccauggccccacugggca

SEQ ID NO: 14792 - RNA, 20 nt, Artificial Sequence
  spacer sequence GTCN PAM
aucgccccccaccugcgaag

SEQ ID NO: 14793 - RNA, 20 nt, Artificial Sequence
  spacer sequence GTCN PAM
caggcuccacucagggcggg

SEQ ID NO: 14794 - RNA, 20 nt, Artificial Sequence
  spacer sequence GTCN PAM
cggggcgcuggggcccgggc

SEQ ID NO: 14795 - RNA, 20 nt, Artificial Sequence
  spacer sequence GTCN PAM
aauuuauucuguaaugagaa

SEQ ID NO: 14796 - RNA, 20 nt, Artificial Sequence
  spacer sequence GTCN PAM
cggccuuugaaggcugaggg

SEQ ID NO: 14797 - RNA, 20 nt, Artificial Sequence
  spacer sequence GTCN PAM
cgcagccccucagccuucaa

SEQ ID NO: 14798 - RNA, 20 nt, Artificial Sequence
  spacer sequence GTCN PAM
agcccgugcccagcacccac

SEQ ID NO: 14799 - RNA, 20 nt, Artificial Sequence
  spacer sequence GTCN PAM
cuuccugagucuggguagac

SEQ ID NO: 14800 - RNA, 20 nt, Artificial Sequence
  spacer sequence GTCN PAM
ggguagaccccagucccagc

SEQ ID NO: 14801 - RNA, 20 nt, Artificial Sequence
  spacer sequence GTCN PAM
acccagacucaggaagggac

SEQ ID NO: 14802 - RNA, 20 nt, Artificial Sequence
  spacer sequence GTCN PAM
cagcagugcagagcaggggg

SEQ ID NO: 14803 - RNA, 20 nt, Artificial Sequence
  spacer sequence GTCN PAM
ggccccgcccccugcucugc

SEQ ID NO: 14804 - RNA, 20 nt, Artificial Sequence
  spacer sequence GTCN PAM
ggagccaguacagggcuuga

SEQ ID NO: 14805 - RNA, 20 nt, Artificial Sequence
  spacer sequence GTCN PAM
cuggucuggagccaguacag

SEQ ID NO: 14806 - RNA, 20 nt, Artificial Sequence
  spacer sequence GTCN PAM
cccucagucccuggucugga

SEQ ID NO: 14807 - RNA, 20 nt, Artificial Sequence
  spacer sequence GTCN PAM
gggguuauccagggucgccc

SEQ ID NO: 14808 - RNA, 20 nt, Artificial Sequence
  spacer sequence GTCN PAM
gccaaggucagggguuaucc

SEQ ID NO: 14809 - RNA, 20 nt, Artificial Sequence
  spacer sequence GTCN PAM
gaaaucaggcucacucuggg

SEQ ID NO: 14810 - RNA, 20 nt, Artificial Sequence
  spacer sequence GTCN PAM
cucuagaguaagcuuccugu

SEQ ID NO: 14811 - RNA, 20 nt, Artificial Sequence
  spacer sequence GTCN PAM
caaagccgggacagcuccca

SEQ ID NO: 14812 - RNA, 20 nt, Artificial Sequence
  spacer sequence GTCN PAM
cggcuuugggacgcagccgc

SEQ ID NO: 14813 - RNA, 20 nt, Artificial Sequence
  spacer sequence GTCN PAM
aagaagcccuguucccuccu

SEQ ID NO: 14814 - RNA, 20 nt, Artificial Sequence
  spacer sequence GTCN PAM
ccgaggccuggcccugggcg

SEQ ID NO: 14815 - RNA, 20 nt, Artificial Sequence
  spacer sequence GTCN PAM
uuccucuaggagcggccagc

SEQ ID NO: 14816 - RNA, 20 nt, Artificial Sequence
  spacer sequence GTCN PAM
cccauucaaccuccccgcgc

SEQ ID NO: 14817 - RNA, 20 nt, Artificial Sequence
  spacer sequence GTCN PAM
cugcuugggcucugaccuug

SEQ ID NO: 14818 - RNA, 20 nt, Artificial Sequence
  spacer sequence GTCN PAM
gagcccaagcagggacggga

SEQ ID NO: 14819 - RNA, 20 nt, Artificial Sequence
  spacer sequence GTCN PAM
cucucaaggucagagcccaa

SEQ ID NO: 14820 - RNA, 20 nt, Artificial Sequence
  spacer sequence GTCN PAM
caguccugguuugagaagag

SEQ ID NO: 14821 - RNA, 20 nt, Artificial Sequence
  spacer sequence GTCN PAM
ugguuugagaagagaccccc

SEQ ID NO: 14822 - RNA, 20 nt, Artificial Sequence
  spacer sequence GTCN PAM
cuucucaaaccaggacuggg

SEQ ID NO: 14823 - RNA, 20 nt, Artificial Sequence
  spacer sequence GTCN PAM
ggaggagggggucucuucuc

SEQ ID NO: 14824 - RNA, 20 nt, Artificial Sequence
  spacer sequence GTCN PAM
caggguagaaggaagcuucc

SEQ ID NO: 14825 - RNA, 20 nt, Artificial Sequence
  spacer sequence GTCN PAM
uggcgugcccggccccagca

SEQ ID NO: 14826 - RNA, 20 nt, Artificial Sequence
  spacer sequence GTCN PAM
ugugcuugggugcagccgcc

SEQ ID NO: 14827 - RNA, 20 nt, Artificial Sequence
  spacer sequence GTCN PAM
cccucccuaaaagagccccc

SEQ ID NO: 14828 - RNA, 20 nt, Artificial Sequence
  spacer sequence GTCN PAM
gguggggggcucuuuuaggg

SEQ ID NO: 14829 - RNA, 20 nt, Artificial Sequence
  spacer sequence GTCN PAM
gggcuacagagccuugugug

SEQ ID NO: 14830 - RNA, 20 nt, Artificial Sequence
  spacer sequence GTCN PAM
agagggccugccucagccac

SEQ ID NO: 14831 - RNA, 20 nt, Artificial Sequence
  spacer sequence GTCN PAM
caggugguggcugaggcagg

SEQ ID NO: 14832 - RNA, 20 nt, Artificial Sequence
  spacer sequence GTCN PAM
cuucaguggagggcgugaac

SEQ ID NO: 14833 - RNA, 20 nt, Artificial Sequence
  spacer sequence GTCN PAM
aaggcccagggcuggccggg

SEQ ID NO: 14834 - RNA, 20 nt, Artificial Sequence
  spacer sequence GTCN PAM
caggucgaaggcccagggcu

SEQ ID NO: 14835 - RNA, 20 nt, Artificial Sequence
  spacer sequence GTCN PAM
guaguggggucaggggauga

SEQ ID NO: 14836 - RNA, 20 nt, Artificial Sequence
  spacer sequence GTCN PAM
ggggaugagaccuggagcuc

SEQ ID NO: 14837 - RNA, 20 nt, Artificial Sequence
  spacer sequence GTCN PAM
cauccccugaccccacuaca

SEQ ID NO: 14838 - RNA, 20 nt, Artificial Sequence
  spacer sequence GTCN PAM
guucugagcuccaggucuca

SEQ ID NO: 14839 - RNA, 20 nt, Artificial Sequence
  spacer sequence GTCN PAM
uggcagggacgcuagagcac

SEQ ID NO: 14840 - RNA, 20 nt, Artificial Sequence
  spacer sequence GTCN PAM
cugccaggacaagguucuca

SEQ ID NO: 14841 - RNA, 20 nt, Artificial Sequence
  spacer sequence GTCN PAM
cacccagugcucuagcgucc

SEQ ID NO: 14842 - RNA, 20 nt, Artificial Sequence
  spacer sequence GTCN PAM
gucccacccagugcucuagc

SEQ ID NO: 14843 - RNA, 20 nt, Artificial Sequence
  spacer sequence GTCN PAM
uuccacuuuuucuuccuguu

SEQ ID NO: 14844 - RNA, 20 nt, Artificial Sequence
  spacer sequence GTCN PAM
ugcugggaaguccuuccacu

SEQ ID NO: 14845 - RNA, 20 nt, Artificial Sequence
  spacer sequence GTCN PAM
ggugguguggcccgcguggc

SEQ ID NO: 14846 - RNA, 20 nt, Artificial Sequence
  spacer sequence GTCN PAM
ccugcgugcccuccuccccc

SEQ ID NO: 14847 - RNA, 20 nt, Artificial Sequence
  spacer sequence GTCN PAM
ugugucuccugcgugcccuc

SEQ ID NO: 14848 - RNA, 20 nt, Artificial Sequence
  spacer sequence GTCN PAM
cagagcugugggacgguggu

SEQ ID NO: 14849 - RNA, 20 nt, Artificial Sequence
  spacer sequence GTCN PAM
cacagcucugagacguggug

SEQ ID NO: 14850 - RNA, 20 nt, Artificial Sequence
  spacer sequence GTCN PAM
gguccccaccccaccuugcu

SEQ ID NO: 14851 - RNA, 20 nt, Artificial Sequence
  spacer sequence GTCN PAM
ccaccccaccuugcuggggc

SEQ ID NO: 14852 - RNA, 20 nt, Artificial Sequence
  spacer sequence GTCN PAM
cugccaggaguuuggguaau

SEQ ID NO: 14853 - RNA, 20 nt, Artificial Sequence
  spacer sequence GTCN PAM
cugugugaggcauuacccaa

SEQ ID NO: 14854 - RNA, 20 nt, Artificial Sequence
  spacer sequence GTCN PAM
aagggcuguuggugcuugcc

SEQ ID NO: 14855 - RNA, 20 nt, Artificial Sequence
  spacer sequence GTCN PAM
uucaccaggcccagugcagg

SEQ ID NO: 14856 - RNA, 20 nt, Artificial Sequence
  spacer sequence GTCN PAM
cugaauuagugucauucacc

SEQ ID NO: 14857 - RNA, 20 nt, Artificial Sequence
  spacer sequence GTCN PAM
agccagcguuugaugacagc

SEQ ID NO: 14858 - RNA, 20 nt, Artificial Sequence
  spacer sequence GTCN PAM
ucaaacgcuggcuggacuuu

SEQ ID NO: 14859 - RNA, 20 nt, Artificial Sequence
  spacer sequence GTCN PAM
ggugagggaggcuguggcau

SEQ ID NO: 14860 - RNA, 20 nt, Artificial Sequence
  spacer sequence GTCN PAM
ugaacuccugggcucaggcg

SEQ ID NO: 14861 - RNA, 20 nt, Artificial Sequence
  spacer sequence GTCN PAM
ggccauguuggccacgcugg

SEQ ID NO: 14862 - RNA, 20 nt, Artificial Sequence
  spacer sequence GTCN PAM
cuauagauuggaaaaaagac

SEQ ID NO: 14863 - RNA, 20 nt, Artificial Sequence
  spacer sequence GTCN PAM
uuuuuccaaucuauagagac

SEQ ID NO: 14864 - RNA, 20 nt, Artificial Sequence
  spacer sequence GTCN PAM
gccuaccaggaggagaaauc

SEQ ID NO: 14865 - RNA, 20 nt, Artificial Sequence
  spacer sequence GTCN PAM
gaucuguucagggaacgccg

SEQ ID NO: 14866 - RNA, 20 nt, Artificial Sequence
  spacer sequence GTCN PAM
uugcacaagcugugcccccg

SEQ ID NO: 14867 - RNA, 20 nt, Artificial Sequence
  spacer sequence GTCN PAM
ccacgcacgaauccugcagg

SEQ ID NO: 14868 - RNA, 20 nt, Artificial Sequence
  spacer sequence GTCN PAM
gccggggcuucacucugggc

SEQ ID NO: 14869 - RNA, 20 nt, Artificial Sequence
  spacer sequence GTCN PAM
accuacuaugcucccggcac

SEQ ID NO: 14870 - RNA, 20 nt, Artificial Sequence
  spacer sequence GTCN PAM
cuacaccucagcccuaaggg

SEQ ID NO: 14871 - RNA, 20 nt, Artificial Sequence
  spacer sequence GTCN PAM
ggagaggcgacucccaggag

SEQ ID NO: 14872 - RNA, 20 nt, Artificial Sequence
  spacer sequence GTCN PAM
ccucuccggacccacgcugu

SEQ ID NO: 14873 - RNA, 20 nt, Artificial Sequence
  spacer sequence GTCN PAM
cagcccgagcagcuuuggac

SEQ ID NO: 14874 - RNA, 20 nt, Artificial Sequence
  spacer sequence GTCN PAM
aaagcugcucgggcugcgac

SEQ ID NO: 14875 - RNA, 20 nt, Artificial Sequence
  spacer sequence GTCN PAM
cccugcgggggccggggcag

SEQ ID NO: 14876 - RNA, 20 nt, Artificial Sequence
  spacer sequence GTCN PAM
caaaucgggcucggccaacu

SEQ ID NO: 14877 - RNA, 20 nt, Artificial Sequence
  spacer sequence GTCN PAM
ggguuggugaggcugcggau

SEQ ID NO: 14878 - RNA, 20 nt, Artificial Sequence
  spacer sequence GTCN PAM
cgggccucucaccugcccgg

SEQ ID NO: 14879 - RNA, 20 nt, Artificial Sequence
  spacer sequence GTCN PAM
ccgaggggcgggggcgcacc

SEQ ID NO: 14880 - RNA, 20 nt, Artificial Sequence
  spacer sequence GTCN PAM
cugggggcaggccccggggg

SEQ ID NO: 14881 - RNA, 20 nt, Artificial Sequence
  spacer sequence GTCN PAM
cccggggccugcccccagcg

SEQ ID NO: 14882 - RNA, 20 nt, Artificial Sequence
  spacer sequence GTCN PAM
caggcucgucccccggggcc

SEQ ID NO: 14883 - RNA, 20 nt, Artificial Sequence
  spacer sequence GTCN PAM
ccagccugcgcccgcccccu

SEQ ID NO: 14884 - RNA, 20 nt, Artificial Sequence
  spacer sequence GTCN PAM
ccgcgcggccggggcacggc

SEQ ID NO: 14885 - RNA, 20 nt, Artificial Sequence
  spacer sequence GTCN PAM
ggagggccgcgggcgccccc

SEQ ID NO: 14886 - RNA, 20 nt, Artificial Sequence
  spacer sequence GTCN PAM
cgcccgagcgucgggagggc

SEQ ID NO: 14887 - RNA, 20 nt, Artificial Sequence
  spacer sequence GTCN PAM
gagcgcgggccgccgccgcc

SEQ ID NO: 14888 - RNA, 20 nt, Artificial Sequence
  spacer sequence GTCN PAM
gcgcggccggguccugcgcc

SEQ ID NO: 14889 - RNA, 20 nt, Artificial Sequence
  spacer sequence GTCN PAM
ugcgcccggggcgaccccgg

SEQ ID NO: 14890 - RNA, 20 nt, Artificial Sequence
  spacer sequence GTCN PAM
ccccgggcgcaggacccggc

SEQ ID NO: 14891 - RNA, 20 nt, Artificial Sequence
  spacer sequence GTCN PAM
ggcggcggcggggcggggcg

SEQ ID NO: 14892 - RNA, 20 nt, Artificial Sequence
  spacer sequence GTCN PAM
cgcgcgcggaggcgggggcg

SEQ ID NO: 14893 - RNA, 20 nt, Artificial Sequence
  spacer sequence GTCN PAM
ggccgccgcgcucgcucucc

SEQ ID NO: 14894 - RNA, 20 nt, Artificial Sequence
  spacer sequence GTCN PAM
ucggcgcgcgcgaagggcgg

SEQ ID NO: 14895 - RNA, 20 nt, Artificial Sequence
  spacer sequence GTCN PAM
gaguuggcgcgggcggcguc

SEQ ID NO: 14896 - RNA, 20 nt, Artificial Sequence
  spacer sequence GTCN PAM
acuggaaccgcagcaacccc

SEQ ID NO: 14897 - RNA, 20 nt, Artificial Sequence
  spacer sequence GTCN PAM
ccgggcgccccccgcgcgcg

SEQ ID NO: 14898 - RNA, 20 nt, Artificial Sequence
  spacer sequence GTCN PAM
cccaaacuccggggggccgg

SEQ ID NO: 14899 - RNA, 20 nt, Artificial Sequence
  spacer sequence GTCN PAM
guagggcaauggggcgcccc

SEQ ID NO: 14900 - RNA, 20 nt, Artificial Sequence
  spacer sequence GTCN PAM
ccacaguccguagggcaaug

SEQ ID NO: 14901 - RNA, 20 nt, Artificial Sequence
  spacer sequence GTCN PAM
gcgcucugggggaugugggg

SEQ ID NO: 14902 - RNA, 20 nt, Artificial Sequence
  spacer sequence GTCN PAM
ccuggaguuuggggaacccc

SEQ ID NO: 14903 - RNA, 20 nt, Artificial Sequence
  spacer sequence GTCN PAM
aggcaggcaacucaggggcu

SEQ ID NO: 14904 - RNA, 20 nt, Artificial Sequence
  spacer sequence GTCN PAM
ccccaaguccaggcaggcaa

SEQ ID NO: 14905 - RNA, 20 nt, Artificial Sequence
  spacer sequence GTCN PAM
ccggggauccccaccaaaug

SEQ ID NO: 14906 - RNA, 20 nt, Artificial Sequence
  spacer sequence GTCN PAM
cccaccuccggugccaaggu

SEQ ID NO: 14907 - RNA, 20 nt, Artificial Sequence
  spacer sequence GTCN PAM
ugcccgcagguccccagaug

SEQ ID NO: 14908 - RNA, 20 nt, Artificial Sequence
  spacer sequence GTCN PAM
ccagaugaacuuggggaagu

SEQ ID NO: 14909 - RNA, 20 nt, Artificial Sequence
  spacer sequence GTCN PAM
cucccucaggacccagcauc

SEQ ID NO: 14910 - RNA, 20 nt, Artificial Sequence
  spacer sequence GTCN PAM
ugagggagggacacuccaac

SEQ ID NO: 14911 - RNA, 20 nt, Artificial Sequence
  spacer sequence GTCN PAM
ccuuucaaagcugggcccuu

SEQ ID NO: 14912 - RNA, 20 nt, Artificial Sequence
  spacer sequence GTCN PAM
gccccgggaggggcaguggg

SEQ ID NO: 14913 - RNA, 20 nt, Artificial Sequence
  spacer sequence GTCN PAM
ucucuuguccucugggcgcu

SEQ ID NO: 14914 - RNA, 20 nt, Artificial Sequence
  spacer sequence GTCN PAM
ucugggcgcugaccaggaaa

SEQ ID NO: 14915 - RNA, 20 nt, Artificial Sequence
  spacer sequence GTCN PAM
gcgcccagaggacaagagag

SEQ ID NO: 14916 - RNA, 20 nt, Artificial Sequence
  spacer sequence GTCN PAM
ugcaagggggggacuugggg

SEQ ID NO: 14917 - RNA, 20 nt, Artificial Sequence
  spacer sequence GTCN PAM
cccccuugcaugaccuugag

SEQ ID NO: 14918 - RNA, 20 nt, Artificial Sequence
  spacer sequence GTCN PAM
ugcccccaagucccccccuu

SEQ ID NO: 14919 - RNA, 20 nt, Artificial Sequence
  spacer sequence GTCN PAM
gggccaggcacaacgugggg

SEQ ID NO: 14920 - RNA, 20 nt, Artificial Sequence
  spacer sequence GTCN PAM
cccacguugugccuggcccg

SEQ ID NO: 14921 - RNA, 20 nt, Artificial Sequence
  spacer sequence GTCN PAM
gagcaaaaaaaguuugccgg

SEQ ID NO: 14922 - RNA, 20 nt, Artificial Sequence
  spacer sequence GTCN PAM
aggccauggccaggccccgg

SEQ ID NO: 14923 - RNA, 20 nt, Artificial Sequence
  spacer sequence GTCN PAM
ccaagacaggagcaggcugc

SEQ ID NO: 14924 - RNA, 20 nt, Artificial Sequence
  spacer sequence GTCN PAM
uggagacccugggaugguuc

SEQ ID NO: 14925 - RNA, 20 nt, Artificial Sequence
  spacer sequence GTCN PAM
cgugggagccggggcuuugg

SEQ ID NO: 14926 - RNA, 20 nt, Artificial Sequence
  spacer sequence GTCN PAM
uggggcucgggagggaguca

SEQ ID NO: 14927 - RNA, 20 nt, Artificial Sequence
  spacer sequence GTCN PAM
gccccagcacucaggguguc

SEQ ID NO: 14928 - RNA, 20 nt, Artificial Sequence
  spacer sequence GTCN PAM
ccgucuuccuaaggcacacg

SEQ ID NO: 14929 - RNA, 20 nt, Artificial Sequence
  spacer sequence GTCN PAM
uccuaaggcacacggagcug

SEQ ID NO: 14930 - RNA, 20 nt, Artificial Sequence
  spacer sequence GTCN PAM
cuuucucuccguuuuccagc

SEQ ID NO: 14931 - RNA, 20 nt, Artificial Sequence
  spacer sequence GTCN PAM
gcacaggaagcggcuggaaa

SEQ ID NO: 14932 - RNA, 20 nt, Artificial Sequence
  spacer sequence GTCN PAM
ccucugucuccugcuguccu

SEQ ID NO: 14933 - RNA, 20 nt, Artificial Sequence
  spacer sequence GTCN PAM
ccugcuguccucgguccccg

SEQ ID NO: 14934 - RNA, 20 nt, Artificial Sequence
  spacer sequence GTCN PAM
ucgguccccgggaggaaagu

SEQ ID NO: 14935 - RNA, 20 nt, Artificial Sequence
  spacer sequence GTCN PAM
ccgggaggaaaguugcauga

SEQ ID NO: 14936 - RNA, 20 nt, Artificial Sequence
  spacer sequence GTCN PAM
cuuugaggcgggcucgggga

SEQ ID NO: 14937 - RNA, 20 nt, Artificial Sequence
  spacer sequence GTCN PAM
ccgagcccgccucaaagaga

SEQ ID NO: 14938 - RNA, 20 nt, Artificial Sequence
  spacer sequence GTCN PAM
acggccucgggucgggcccu

SEQ ID NO: 14939 - RNA, 20 nt, Artificial Sequence
  spacer sequence GTCN PAM
ggcccugggggcugagggca

SEQ ID NO: 14940 - RNA, 20 nt, Artificial Sequence
  spacer sequence GTCN PAM
cugcccucagcccccagggc

SEQ ID NO: 14941 - RNA, 20 nt, Artificial Sequence
  spacer sequence GTCN PAM
cccagcggcccggggucccu

SEQ ID NO: 14942 - RNA, 20 nt, Artificial Sequence
  spacer sequence GTCN PAM
ccgagccgcccgcugugcug

SEQ ID NO: 14943 - RNA, 20 nt, Artificial Sequence
  spacer sequence GTCN PAM
cauguggguuugauuaaggc

SEQ ID NO: 14944 - RNA, 20 nt, Artificial Sequence
  spacer sequence GTCN PAM
cuggccgugcggggagucca

SEQ ID NO: 14945 - RNA, 20 nt, Artificial Sequence
  spacer sequence GTCN PAM
agcgggcagcgcuuccccgg

SEQ ID NO: 14946 - RNA, 20 nt, Artificial Sequence
  spacer sequence GTCN PAM
ccagcguggccuguccuuug

SEQ ID NO: 14947 - RNA, 20 nt, Artificial Sequence
  spacer sequence GTCN PAM
uuuguucuagcaaacgccaa

SEQ ID NO: 14948 - RNA, 20 nt, Artificial Sequence
  spacer sequence GTCN PAM
ucguguguuuggcguuugcu

SEQ ID NO: 14949 - RNA, 20 nt, Artificial Sequence
  spacer sequence GTCN PAM
ccagggccguccugcugccc

SEQ ID NO: 14950 - RNA, 20 nt, Artificial Sequence
  spacer sequence GTCN PAM
ugcugccccaccugccacag

SEQ ID NO: 14951 - RNA, 20 nt, Artificial Sequence
  spacer sequence GTCN PAM
ggcccgcagcccacagcccu

SEQ ID NO: 14952 - RNA, 20 nt, Artificial Sequence
  spacer sequence GTCN PAM
gaccugguugcccagcucaa

SEQ ID NO: 14953 - RNA, 20 nt, Artificial Sequence
  spacer sequence GTCN PAM
gacccggagcaacaggaggu

SEQ ID NO: 14954 - RNA, 20 nt, Artificial Sequence
  spacer sequence GTCN PAM
gcagagccgaccugggcagc

SEQ ID NO: 14955 - RNA, 20 nt, Artificial Sequence
  spacer sequence GTCN PAM
gcucugcggaccagcaaggc

SEQ ID NO: 14956 - RNA, 20 nt, Artificial Sequence
  spacer sequence GTCN PAM
ccagcaacccuggauaccgc

SEQ ID NO: 14957 - RNA, 20 nt, Artificial Sequence
  spacer sequence GTCN PAM
gcuccguccccagcaacccu

SEQ ID NO: 14958 - RNA, 20 nt, Artificial Sequence
  spacer sequence GTCN PAM
cggacaucaggggucucugc

SEQ ID NO: 14959 - RNA, 20 nt, Artificial Sequence
  spacer sequence GTCN PAM
gcgacaaagcccugauucug

SEQ ID NO: 14960 - RNA, 20 nt, Artificial Sequence
  spacer sequence GTCN PAM
cugcaguucucagauuuggu

SEQ ID NO: 14961 - RNA, 20 nt, Artificial Sequence
  spacer sequence GTCN PAM
aggggcaccugcccgggacc

SEQ ID NO: 14962 - RNA, 20 nt, Artificial Sequence
  spacer sequence GTCN PAM
cgggcaggugccccuggaca

SEQ ID NO: 14963 - RNA, 20 nt, Artificial Sequence
  spacer sequence GTCN PAM
ggcacagcaggggguggugc

SEQ ID NO: 14964 - RNA, 20 nt, Artificial Sequence
  spacer sequence GTCN PAM
ccuuggauacggaggcccag

SEQ ID NO: 14965 - RNA, 20 nt, Artificial Sequence
  spacer sequence GTCN PAM
ccuccacaggguccccuugg

SEQ ID NO: 14966 - RNA, 20 nt, Artificial Sequence
  spacer sequence GTCN PAM
gccggcaggccuaaggugug

SEQ ID NO: 14967 - RNA, 20 nt, Artificial Sequence
  spacer sequence GTCN PAM
uuccuucagggacagcagaa

SEQ ID NO: 14968 - RNA, 20 nt, Artificial Sequence
  spacer sequence GTCN PAM
cugaaggaaugacauguucu

SEQ ID NO: 14969 - RNA, 20 nt, Artificial Sequence
  spacer sequence GTCN PAM
gacaucagagggacagagac

SEQ ID NO: 14970 - RNA, 20 nt, Artificial Sequence
  spacer sequence GTCN PAM
gacccaggugggcaguaccu

SEQ ID NO: 14971 - RNA, 20 nt, Artificial Sequence
  spacer sequence GTCN PAM
cucugaugucugacccaggu

SEQ ID NO: 14972 - RNA, 20 nt, Artificial Sequence
  spacer sequence GTCN PAM
cugucccucugaugucugac

SEQ ID NO: 14973 - RNA, 20 nt, Artificial Sequence
  spacer sequence GTCN PAM
cucugucucugucccucuga

SEQ ID NO: 14974 - RNA, 20 nt, Artificial Sequence
  spacer sequence GTCN PAM
cugucucucugucucugucc

SEQ ID NO: 14975 - RNA, 20 nt, Artificial Sequence
  spacer sequence GTCN PAM
gagacagagagacaaaggga

SEQ ID NO: 14976 - RNA, 20 nt, Artificial Sequence
  spacer sequence GTCN PAM
cugacugucucugucucucu

SEQ ID NO: 14977 - RNA, 20 nt, Artificial Sequence
  spacer sequence GTCN PAM
cucugucucugacugucucu

SEQ ID NO: 14978 - RNA, 20 nt, Artificial Sequence
  spacer sequence GTCN PAM
cccuuugucucucugucucu

SEQ ID NO: 14979 - RNA, 20 nt, Artificial Sequence
  spacer sequence GTCN PAM
cucucugucucccuuugucu

SEQ ID NO: 14980 - RNA, 20 nt, Artificial Sequence
  spacer sequence GTCN PAM
gucucucucugucucccuuu

SEQ ID NO: 14981 - RNA, 20 nt, Artificial Sequence
  spacer sequence GTCN PAM
gccugcgucugucucucucu

SEQ ID NO: 14982 - RNA, 20 nt, Artificial Sequence
  spacer sequence GTCN PAM
gagauggagggaggaagaga

SEQ ID NO: 14983 - RNA, 20 nt, Artificial Sequence
  spacer sequence GTCN PAM
cuuccucccuccaucucuga

SEQ ID NO: 14984 - RNA, 20 nt, Artificial Sequence
  spacer sequence GTCN PAM
cuccgucucuuccucccucc

SEQ ID NO: 14985 - RNA, 20 nt, Artificial Sequence
  spacer sequence GTCN PAM
cugucucuccgucucuuccu

SEQ ID NO: 14986 - RNA, 20 nt, Artificial Sequence
  spacer sequence GTCN PAM
cugucacugucucuccgucu

SEQ ID NO: 14987 - RNA, 20 nt, Artificial Sequence
  spacer sequence GTCN PAM
ccuucugucucugucacugu

SEQ ID NO: 14988 - RNA, 20 nt, Artificial Sequence
  spacer sequence GTCN PAM
cugucuccuucugucucugu

SEQ ID NO: 14989 - RNA, 20 nt, Artificial Sequence
  spacer sequence GTCN PAM
cucugucucugucuccuucu

SEQ ID NO: 14990 - RNA, 20 nt, Artificial Sequence
  spacer sequence GTCN PAM
cugucucucugucucugucu

SEQ ID NO: 14991 - RNA, 20 nt, Artificial Sequence
  spacer sequence GTCN PAM
cccucugucucugucucucu

SEQ ID NO: 14992 - RNA, 20 nt, Artificial Sequence
  spacer sequence GTCN PAM
guccccgggggggcccagug

SEQ ID NO: 14993 - RNA, 20 nt, Artificial Sequence
  spacer sequence GTCN PAM
ccgggggggcccagugguga

SEQ ID NO: 14994 - RNA, 20 nt, Artificial Sequence
  spacer sequence GTCN PAM
ccacugggcccccccgggga

SEQ ID NO: 14995 - RNA, 20 nt, Artificial Sequence
  spacer sequence GTCN PAM
ggauguuccccgaggcccaa

SEQ ID NO: 14996 - RNA, 20 nt, Artificial Sequence
  spacer sequence GTCN PAM
guggccucggcaagugcccg

SEQ ID NO: 14997 - RNA, 20 nt, Artificial Sequence
  spacer sequence GTCN PAM
ccgugccaguuuccacagcg

SEQ ID NO: 14998 - RNA, 20 nt, Artificial Sequence
  spacer sequence GTCN PAM
cgcuguggaaacuggcacgg

SEQ ID NO: 14999 - RNA, 20 nt, Artificial Sequence
  spacer sequence GTCN PAM
cgggggccgggaguccgcag

SEQ ID NO: 15000 - RNA, 20 nt, Artificial Sequence
  spacer sequence GTCN PAM
gcagccccgaagaccuacgc

SEQ ID NO: 15001 - RNA, 20 nt, Artificial Sequence
  spacer sequence GTCN PAM
ucggggcugcggacucccgg

SEQ ID NO: 15002 - RNA, 20 nt, Artificial Sequence
  spacer sequence GTCN PAM
gacccuccugggucccacuu

SEQ ID NO: 15003 - RNA, 20 nt, Artificial Sequence
  spacer sequence GTCN PAM
gacccccagggguguggcug

SEQ ID NO: 15004 - RNA, 20 nt, Artificial Sequence
  spacer sequence GTCN PAM
cacuuuacagauggaggaac

SEQ ID NO: 15005 - RNA, 20 nt, Artificial Sequence
  spacer sequence GTCN PAM
ccgccucaguuccuccaucu

SEQ ID NO: 15006 - RNA, 20 nt, Artificial Sequence
  spacer sequence GTCN PAM
cggggcuggaacccgcagcg

SEQ ID NO: 15007 - RNA, 20 nt, Artificial Sequence
  spacer sequence GTCN PAM
agggagagggcguuacacac

SEQ ID NO: 15008 - RNA, 20 nt, Artificial Sequence
  spacer sequence GTCN PAM
uggauuucuccgccgggcgu

SEQ ID NO: 15009 - RNA, 20 nt, Artificial Sequence
  spacer sequence GTCN PAM
aaacaaugcgucauggauuu

SEQ ID NO: 15010 - RNA, 20 nt, Artificial Sequence
  spacer sequence GTCN PAM
gucuaaacaaugcgucaugg

SEQ ID NO: 15011 - RNA, 20 nt, Artificial Sequence
  spacer sequence GTCN PAM
cccuuuuuuucugcacaaag

SEQ ID NO: 15012 - RNA, 20 nt, Artificial Sequence
  spacer sequence GTCN PAM
gccguagaccguugccaaga

SEQ ID NO: 15013 - RNA, 20 nt, Artificial Sequence
  spacer sequence GTCN PAM
acggcugaccuuugugcaga

SEQ ID NO: 15014 - RNA, 20 nt, Artificial Sequence
  spacer sequence GTCN PAM
uggcaacggucuacggcuga

SEQ ID NO: 15015 - RNA, 20 nt, Artificial Sequence
  spacer sequence GTCN PAM
guucuccuuaagccuccauc

SEQ ID NO: 15016 - RNA, 20 nt, Artificial Sequence
  spacer sequence GTCN PAM
ucaaaccaaugagccucagg

SEQ ID NO: 15017 - RNA, 20 nt, Artificial Sequence
  spacer sequence GTCN PAM
gcccuucaggguaggcaucu

SEQ ID NO: 15018 - RNA, 20 nt, Artificial Sequence
  spacer sequence GTCN PAM
ggugugggaaccgcuguguu

SEQ ID NO: 15019 - RNA, 20 nt, Artificial Sequence
  spacer sequence GTCN PAM
gcauguuuaacacagcgguu

SEQ ID NO: 15020 - RNA, 20 nt, Artificial Sequence
  spacer sequence GTCN PAM
gccuguuuuaugauuacaaa

SEQ ID NO: 15021 - RNA, 20 nt, Artificial Sequence
  spacer sequence GTCN PAM
gggaagggggaaguuugagc

SEQ ID NO: 15022 - RNA, 20 nt, Artificial Sequence
  spacer sequence GTCN PAM
uaauuucagcucaaacuucc

SEQ ID NO: 15023 - RNA, 20 nt, Artificial Sequence
  spacer sequence GTCN PAM
gagcccccuuacuuugggau

SEQ ID NO: 15024 - RNA, 20 nt, Artificial Sequence
  spacer sequence GTCN PAM
acaucgcggcgacuccucug

SEQ ID NO: 15025 - RNA, 20 nt, Artificial Sequence
  spacer sequence GTCN PAM
ccgcgauguggacucauccc

SEQ ID NO: 15026 - RNA, 20 nt, Artificial Sequence
  spacer sequence GTCN PAM
gggauagcugcgaggcagcu

SEQ ID NO: 15027 - RNA, 20 nt, Artificial Sequence
  spacer sequence GTCN PAM
agcugccucgcagcuauccc

SEQ ID NO: 15028 - RNA, 20 nt, Artificial Sequence
  spacer sequence GTCN PAM
uucguucaggauugguccag

SEQ ID NO: 15029 - RNA, 20 nt, Artificial Sequence
  spacer sequence GTCN PAM
cugguucgaucccggguuuc

SEQ ID NO: 15030 - RNA, 20 nt, Artificial Sequence
  spacer sequence GTCN PAM
aacgcucucccaacugagcu

SEQ ID NO: 15031 - RNA, 20 nt, Artificial Sequence
  spacer sequence GTCN PAM
cucucgccgggacuccgucc

SEQ ID NO: 15032 - RNA, 20 nt, Artificial Sequence
  spacer sequence GTCN PAM
cggcgagagcgacucugccg

SEQ ID NO: 15033 - RNA, 20 nt, Artificial Sequence
  spacer sequence GTCN PAM
cgcgcugcgccuucccugcg

SEQ ID NO: 15034 - RNA, 20 nt, Artificial Sequence
  spacer sequence GTCN PAM
uuucgcgucagcaggcccca

SEQ ID NO: 15035 - RNA, 20 nt, Artificial Sequence
  spacer sequence GTCN PAM
gcaggccccacauccuuugu

SEQ ID NO: 15036 - RNA, 20 nt, Artificial Sequence
  spacer sequence GTCN PAM
cccagggcgccggagcgcag

SEQ ID NO: 15037 - RNA, 20 nt, Artificial Sequence
  spacer sequence GTCN PAM
ucucuguggcgcaaucgguu

SEQ ID NO: 15038 - RNA, 20 nt, Artificial Sequence
  spacer sequence GTCN PAM
cuguggcgcaaucgguuagc

SEQ ID NO: 15039 - RNA, 20 nt, Artificial Sequence
  spacer sequence GTCN PAM
cugggugggcucgaaccacc

SEQ ID NO: 15040 - RNA, 20 nt, Artificial Sequence
  spacer sequence GTCN PAM
ccacgcgucccugggugggc

SEQ ID NO: 15041 - RNA, 20 nt, Artificial Sequence
  spacer sequence GTCN PAM
ccucuguuuuugucgguccg

SEQ ID NO: 15042 - RNA, 20 nt, Artificial Sequence
  spacer sequence GTCN PAM
guccgccgcagacccgcggc

SEQ ID NO: 15043 - RNA, 20 nt, Artificial Sequence
  spacer sequence GTCN PAM
gccgcagacccgcggccccc

SEQ ID NO: 15044 - RNA, 20 nt, Artificial Sequence
  spacer sequence GTCN PAM
gcggcggaccgacaaaaaca

SEQ ID NO: 15045 - RNA, 20 nt, Artificial Sequence
  spacer sequence GTCN PAM
ucggagugcgcacguggggg

SEQ ID NO: 15046 - RNA, 20 nt, Artificial Sequence
  spacer sequence GTCN PAM
uguugcgccgugcaccccca

SEQ ID NO: 15047 - RNA, 20 nt, Artificial Sequence
  spacer sequence GTCN PAM
guucuccuuagcgcuccggg

SEQ ID NO: 15048 - RNA, 20 nt, Artificial Sequence
  spacer sequence GTCN PAM
gaaggccgaggccaagaugg

SEQ ID NO: 15049 - RNA, 20 nt, Artificial Sequence
  spacer sequence GTCN PAM
ggugagcgcggcaccggcgg

SEQ ID NO: 15050 - RNA, 20 nt, Artificial Sequence
  spacer sequence GTCN PAM
ggggccgugggagccucggg

SEQ ID NO: 15051 - RNA, 20 nt, Artificial Sequence
  spacer sequence GTCN PAM
ugguggcgucgggggucggu

SEQ ID NO: 15052 - RNA, 20 nt, Artificial Sequence
  spacer sequence GTCN PAM
ggggucggugccggcgucgu

SEQ ID NO: 15053 - RNA, 20 nt, Artificial Sequence
  spacer sequence GTCN PAM
gugccggcgucguggccgcg

SEQ ID NO: 15054 - RNA, 20 nt, Artificial Sequence
  spacer sequence GTCN PAM
uggccgcgguccucuccggg

SEQ ID NO: 15055 - RNA, 20 nt, Artificial Sequence
  spacer sequence GTCN PAM
ucuccgggcuucuccgagcc

SEQ ID NO: 15056 - RNA, 20 nt, Artificial Sequence
  spacer sequence GTCN PAM
ccguuauugcguccagagua

SEQ ID NO: 15057 - RNA, 20 nt, Artificial Sequence
  spacer sequence GTCN PAM
agaguacagucggggaaacc

SEQ ID NO: 15058 - RNA, 20 nt, Artificial Sequence
  spacer sequence GTCN PAM
gggaaaccgaggcccgguag

SEQ ID NO: 15059 - RNA, 20 nt, Artificial Sequence
  spacer sequence GTCN PAM
ugacgcaagccuccagccuc

SEQ ID NO: 15060 - RNA, 20 nt, Artificial Sequence
  spacer sequence GTCN PAM
ugaccuaccgggccucgguu

SEQ ID NO: 15061 - RNA, 20 nt, Artificial Sequence
  spacer sequence GTCN PAM
ccgagaccagggcacggccc

SEQ ID NO: 15062 - RNA, 20 nt, Artificial Sequence
  spacer sequence GTCN PAM
cggggacgugaauggggccc

SEQ ID NO: 15063 - RNA, 20 nt, Artificial Sequence
  spacer sequence GTCN PAM
ggcaggccccgcucucucca

SEQ ID NO: 15064 - RNA, 20 nt, Artificial Sequence
  spacer sequence GTCN PAM
ucgaggucacagggccgggc

SEQ ID NO: 15065 - RNA, 20 nt, Artificial Sequence
  spacer sequence GTCN PAM
cagggccgggccugggaagg

SEQ ID NO: 15066 - RNA, 20 nt, Artificial Sequence
  spacer sequence GTCN PAM
uguuccuucccaggcccggc

SEQ ID NO: 15067 - RNA, 20 nt, Artificial Sequence
  spacer sequence GTCN PAM
uggguccuguuccuucccag

SEQ ID NO: 15068 - RNA, 20 nt, Artificial Sequence
  spacer sequence GTCN PAM
agcaggguggcguggauguc

SEQ ID NO: 15069 - RNA, 20 nt, Artificial Sequence
  spacer sequence GTCN PAM
ugcuccagggacuuuuuugg

SEQ ID NO: 15070 - RNA, 20 nt, Artificial Sequence
  spacer sequence GTCN PAM
cuggagcaggacaggcucug

SEQ ID NO: 15071 - RNA, 20 nt, Artificial Sequence
  spacer sequence GTCN PAM
gcaggcuucagcugauccca

SEQ ID NO: 15072 - RNA, 20 nt, Artificial Sequence
  spacer sequence GTCN PAM
ugaaaccugauuggcgacuu

SEQ ID NO: 15073 - RNA, 20 nt, Artificial Sequence
  spacer sequence GTCN PAM
ccaaucagguuucaagacaa

SEQ ID NO: 15074 - RNA, 20 nt, Artificial Sequence
  spacer sequence GTCN PAM
aauugcgacugugauuugga

SEQ ID NO: 15075 - RNA, 20 nt, Artificial Sequence
  spacer sequence GTCN PAM
caauuagaccugccgcuaga

SEQ ID NO: 15076 - RNA, 20 nt, Artificial Sequence
  spacer sequence GTCN PAM
gcagccccugcaccauagcu

SEQ ID NO: 15077 - RNA, 20 nt, Artificial Sequence
  spacer sequence GTCN PAM
ugcuaauacugccguauuuu

SEQ ID NO: 15078 - RNA, 20 nt, Artificial Sequence
  spacer sequence GTCN PAM
augcuaagaauuuuuuauuu

SEQ ID NO: 15079 - RNA, 20 nt, Artificial Sequence
  spacer sequence GTCN PAM
uaauaaauaaauaaaaaauu

SEQ ID NO: 15080 - RNA, 20 nt, Artificial Sequence
  spacer sequence GTCN PAM
gccucugucgcucagacugg

SEQ ID NO: 15081 - RNA, 20 nt, Artificial Sequence
  spacer sequence GTCN PAM
cucagacuggagugcagugg

SEQ ID NO: 15082 - RNA, 20 nt, Artificial Sequence
  spacer sequence GTCN PAM
gagcgacagaggcagacccu

SEQ ID NO: 15083 - RNA, 20 nt, Artificial Sequence
  spacer sequence GTCN PAM
uguguagcugggaccacagg

SEQ ID NO: 15084 - RNA, 20 nt, Artificial Sequence
  spacer sequence GTCN PAM
cagcuacacaggacacugaa

SEQ ID NO: 15085 - RNA, 20 nt, Artificial Sequence
  spacer sequence GTCN PAM
ugcccuguugcccaggcugg

SEQ ID NO: 15086 - RNA, 20 nt, Artificial Sequence
  spacer sequence GTCN PAM
cgaacuucugaguucaagca

SEQ ID NO: 15087 - RNA, 20 nt, Artificial Sequence
  spacer sequence GTCN PAM
ccagcaucuuauggaaaauu

SEQ ID NO: 15088 - RNA, 20 nt, Artificial Sequence
  spacer sequence GTCN PAM
uuguugucaccagcaucuua

SEQ ID NO: 15089 - RNA, 20 nt, Artificial Sequence
  spacer sequence GTCN PAM
ggaguucgagaccagccugg

SEQ ID NO: 15090 - RNA, 20 nt, Artificial Sequence
  spacer sequence GTCN PAM
cgaacuccggaccucaggug

SEQ ID NO: 15091 - RNA, 20 nt, Artificial Sequence
  spacer sequence GTCN PAM
cuacuaaaaauacaaaauca

SEQ ID NO: 15092 - RNA, 20 nt, Artificial Sequence
  spacer sequence GTCN PAM
uuccucuguacauguuugug

SEQ ID NO: 15093 - RNA, 20 nt, Artificial Sequence
  spacer sequence GTCN PAM
ugaucgccuuuucuuacaag

SEQ ID NO: 15094 - RNA, 20 nt, Artificial Sequence
  spacer sequence GTCN PAM
uuguaagaaaaggcgaucag

SEQ ID NO: 15095 - RNA, 20 nt, Artificial Sequence
  spacer sequence GTCN PAM
uaucggaugagggcccaccc

SEQ ID NO: 15096 - RNA, 20 nt, Artificial Sequence
  spacer sequence GTCN PAM
cgagggugggcccucauccg

SEQ ID NO: 15097 - RNA, 20 nt, Artificial Sequence
  spacer sequence GTCN PAM
uuuauaaugacccuuuauuu

SEQ ID NO: 15098 - RNA, 20 nt, Artificial Sequence
  spacer sequence GTCN PAM
uuauaaaggacagugagguc

SEQ ID NO: 15099 - RNA, 20 nt, Artificial Sequence
  spacer sequence GTCN PAM
cccucugucacccaagcugg

SEQ ID NO: 15100 - RNA, 20 nt, Artificial Sequence
  spacer sequence GTCN PAM
cccaagcuggagugcagugg

SEQ ID NO: 15101 - RNA, 20 nt, Artificial Sequence
  spacer sequence GTCN PAM
cuacuaaaaauacaaaaauu

SEQ ID NO: 15102 - RNA, 20 nt, Artificial Sequence
  spacer sequence GTCN PAM
cgaacuccugaccucaggug

SEQ ID NO: 15103 - RNA, 20 nt, Artificial Sequence
  spacer sequence GTCN PAM
ggaguucgagaccagccugg

SEQ ID NO: 15104 - RNA, 20 nt, Artificial Sequence
  spacer sequence GTCN PAM
uuaaagggaucauuaaugcc

SEQ ID NO: 15105 - RNA, 20 nt, Artificial Sequence
  spacer sequence GTCN PAM
cauucugagguccugggguu

SEQ ID NO: 15106 - RNA, 20 nt, Artificial Sequence
  spacer sequence GTCN PAM
ugggguuagggcuucagaug

SEQ ID NO: 15107 - RNA, 20 nt, Artificial Sequence
  spacer sequence GTCN PAM
gguggagggucacaguucag

SEQ ID NO: 15108 - RNA, 20 nt, Artificial Sequence
  spacer sequence GTCN PAM
caguucagccgucaccagca

SEQ ID NO: 15109 - RNA, 20 nt, Artificial Sequence
  spacer sequence GTCN PAM
ccagcaccaagccugccuuu

SEQ ID NO: 15110 - RNA, 20 nt, Artificial Sequence
  spacer sequence GTCN PAM
ucgccucgggaaggcucucc

SEQ ID NO: 15111 - RNA, 20 nt, Artificial Sequence
  spacer sequence GTCN PAM
ccugggagagccuucccgag

SEQ ID NO: 15112 - RNA, 20 nt, Artificial Sequence
  spacer sequence GTCN PAM
aucuacacagaaaagcaccc

SEQ ID NO: 15113 - RNA, 20 nt, Artificial Sequence
  spacer sequence GTCN PAM
gcuaagcggggagggcgcug

SEQ ID NO: 15114 - RNA, 20 nt, Artificial Sequence
  spacer sequence GTCN PAM
ggcacagcugaggccaggac

SEQ ID NO: 15115 - RNA, 20 nt, Artificial Sequence
  spacer sequence GTCN PAM
uggccucagcugugccugac

SEQ ID NO: 15116 - RNA, 20 nt, Artificial Sequence
  spacer sequence GTCN PAM
uccgguugccggcacccggu

SEQ ID NO: 15117 - RNA, 20 nt, Artificial Sequence
  spacer sequence GTCN PAM
ugguguaggcgggacgcccc

SEQ ID NO: 15118 - RNA, 20 nt, Artificial Sequence
  spacer sequence GTCN PAM
cgccuacaccaggaccccag

SEQ ID NO: 15119 - RNA, 20 nt, Artificial Sequence
  spacer sequence GTCN PAM
cccgcagggcagcagccagu

SEQ ID NO: 15120 - RNA, 20 nt, Artificial Sequence
  spacer sequence GTCN PAM
cccacagggcagcagccagu

SEQ ID NO: 15121 - RNA, 20 nt, Artificial Sequence
  spacer sequence GTCN PAM
ccccgcccuggcgaucuuca

SEQ ID NO: 15122 - RNA, 20 nt, Artificial Sequence
  spacer sequence GTCN PAM
caagcaggggacuaagacuc

SEQ ID NO: 15123 - RNA, 20 nt, Artificial Sequence
  spacer sequence GTCN PAM
ccugcuugagacugcauggc

SEQ ID NO: 15124 - RNA, 20 nt, Artificial Sequence
  spacer sequence GTCN PAM
uaguccccugcuugagacug

SEQ ID NO: 15125 - RNA, 20 nt, Artificial Sequence
  spacer sequence GTCN PAM
ucucugcagcuccuggccug

SEQ ID NO: 15126 - RNA, 20 nt, Artificial Sequence
  spacer sequence GTCN PAM
cagggaggcccaggcugccc

SEQ ID NO: 15127 - RNA, 20 nt, Artificial Sequence
  spacer sequence GTCN PAM
agucacagggaggcccaggc

SEQ ID NO: 15128 - RNA, 20 nt, Artificial Sequence
  spacer sequence GTCN PAM
auccuggggucaggagcucu

SEQ ID NO: 15129 - RNA, 20 nt, Artificial Sequence
  spacer sequence GTCN PAM
ggagcucugcccaugccccu

SEQ ID NO: 15130 - RNA, 20 nt, Artificial Sequence
  spacer sequence GTCN PAM
uccccugcagugcagaccaa

SEQ ID NO: 15131 - RNA, 20 nt, Artificial Sequence
  spacer sequence GTCN PAM
gcacugcaggggaagacgcc

SEQ ID NO: 15132 - RNA, 20 nt, Artificial Sequence
  spacer sequence GTCN PAM
acacucgcaacuugccccau

SEQ ID NO: 15133 - RNA, 20 nt, Artificial Sequence
  spacer sequence GTCN PAM
gcaaggagggaggaguacag

SEQ ID NO: 15134 - RNA, 20 nt, Artificial Sequence
  spacer sequence GTCN PAM
ccagggagggaggagcucag

SEQ ID NO: 15135 - RNA, 20 nt, Artificial Sequence
  spacer sequence GTCN PAM
gcagggagggaggagcgcgg

SEQ ID NO: 15136 - RNA, 20 nt, Artificial Sequence
  spacer sequence GTCN PAM
ggggacugcgcuccucccuc

SEQ ID NO: 15137 - RNA, 20 nt, Artificial Sequence
  spacer sequence GTCN PAM
ccagacagggagcacagucc

SEQ ID NO: 15138 - RNA, 20 nt, Artificial Sequence
  spacer sequence GTCN PAM
ccaaggagggaggagcgcag

SEQ ID NO: 15139 - RNA, 20 nt, Artificial Sequence
  spacer sequence GTCN PAM
gcagggagggagggaggagc

SEQ ID NO: 15140 - RNA, 20 nt, Artificial Sequence
  spacer sequence GTCN PAM
ccagggagggaggagcgcgg

SEQ ID NO: 15141 - RNA, 20 nt, Artificial Sequence
  spacer sequence GTCN PAM
gcagggagggaggagcgcgg

SEQ ID NO: 15142 - RNA, 20 nt, Artificial Sequence
  spacer sequence GTCN PAM
ccagggagggccgagcgcgg

SEQ ID NO: 15143 - RNA, 20 nt, Artificial Sequence
  spacer sequence GTCN PAM
gcugggagggaggggcgcgg

SEQ ID NO: 15144 - RNA, 20 nt, Artificial Sequence
  spacer sequence GTCN PAM
ccagggagggaggagcgcgg

SEQ ID NO: 15145 - RNA, 20 nt, Artificial Sequence
  spacer sequence GTCN PAM
gcagggagggagggaggagc

SEQ ID NO: 15146 - RNA, 20 nt, Artificial Sequence
  spacer sequence GTCN PAM
gcagggagggagcagcacag

SEQ ID NO: 15147 - RNA, 20 nt, Artificial Sequence
  spacer sequence GTCN PAM
aggcugcuccaagggaggga

SEQ ID NO: 15148 - RNA, 20 nt, Artificial Sequence
  spacer sequence GTCN PAM
uuucucaccuguuuccacuc

SEQ ID NO: 15149 - RNA, 20 nt, Artificial Sequence
  spacer sequence GTCN PAM
ccguugggcccugggcuucg

SEQ ID NO: 15150 - RNA, 20 nt, Artificial Sequence
  spacer sequence GTCN PAM
ucuugcucaagcccuuuguu

SEQ ID NO: 15151 - RNA, 20 nt, Artificial Sequence
  spacer sequence GTCN PAM
cggcugccacgcagguucag

SEQ ID NO: 15152 - RNA, 20 nt, Artificial Sequence
  spacer sequence GTCN PAM
ucggguccucgugggaugcc

SEQ ID NO: 15153 - RNA, 20 nt, Artificial Sequence
  spacer sequence GTCN PAM
ucgugggaugcccgggcucu

SEQ ID NO: 15154 - RNA, 20 nt, Artificial Sequence
  spacer sequence GTCN PAM
agggcagccccgggcccugc

SEQ ID NO: 15155 - RNA, 20 nt, Artificial Sequence
  spacer sequence GTCN PAM
gcugagcgcuggcccccauu

SEQ ID NO: 15156 - RNA, 20 nt, Artificial Sequence
  spacer sequence GTCN PAM
ugagggcuggggccgggggc

SEQ ID NO: 15157 - RNA, 20 nt, Artificial Sequence
  spacer sequence GTCN PAM
gcgucuuguccgagaggucc

SEQ ID NO: 15158 - RNA, 20 nt, Artificial Sequence
  spacer sequence GTCN PAM
uguccgagaggucccuguga

SEQ ID NO: 15159 - RNA, 20 nt, Artificial Sequence
  spacer sequence GTCN PAM
gagaggucccugugacagcc

SEQ ID NO: 15160 - RNA, 20 nt, Artificial Sequence
  spacer sequence GTCN PAM
cugugacagcccgggaugag

SEQ ID NO: 15161 - RNA, 20 nt, Artificial Sequence
  spacer sequence GTCN PAM
cagggaccucucggacaaga

SEQ ID NO: 15162 - RNA, 20 nt, Artificial Sequence
  spacer sequence GTCN PAM
uccccugggcaaggccccac

SEQ ID NO: 15163 - RNA, 20 nt, Artificial Sequence
  spacer sequence GTCN PAM
cugcaggaagaguggggucc

SEQ ID NO: 15164 - RNA, 20 nt, Artificial Sequence
  spacer sequence GTCN PAM
cuggcacugcgcccacccag

SEQ ID NO: 15165 - RNA, 20 nt, Artificial Sequence
  spacer sequence GTCN PAM
gccuccaccuucagaggccg

SEQ ID NO: 15166 - RNA, 20 nt, Artificial Sequence
  spacer sequence GTCN PAM
cgcgggcuccggcugcggga

SEQ ID NO: 15167 - RNA, 20 nt, Artificial Sequence
  spacer sequence GTCN PAM
cgcuucccgcagccggagcc

SEQ ID NO: 15168 - RNA, 20 nt, Artificial Sequence
  spacer sequence GTCN PAM
cugcaggcugcccaccuacg

SEQ ID NO: 15169 - RNA, 20 nt, Artificial Sequence
  spacer sequence GTCN PAM
ccguccuguccccagccugc

SEQ ID NO: 15170 - RNA, 20 nt, Artificial Sequence
  spacer sequence GTCN PAM
uguccccagccugcuugugu

SEQ ID NO: 15171 - RNA, 20 nt, Artificial Sequence
  spacer sequence GTCN PAM
ccagccugcuugugucccgu

SEQ ID NO: 15172 - RNA, 20 nt, Artificial Sequence
  spacer sequence GTCN PAM
cgugagguugucaauaaacc

SEQ ID NO: 15173 - RNA, 20 nt, Artificial Sequence
  spacer sequence GTCN PAM
auaaaccugcccucgggcug

SEQ ID NO: 15174 - RNA, 20 nt, Artificial Sequence
  spacer sequence GTCN PAM
ccggcuccuuucacccacac

SEQ ID NO: 15175 - RNA, 20 nt, Artificial Sequence
  spacer sequence GTCN PAM
gugauccccccacguccccg

SEQ ID NO: 15176 - RNA, 20 nt, Artificial Sequence
  spacer sequence GTCN PAM
cugcccccggcucugcucca

SEQ ID NO: 15177 - RNA, 20 nt, Artificial Sequence
  spacer sequence GTCN PAM
uuucccgcugcucugcgaag

SEQ ID NO: 15178 - RNA, 20 nt, Artificial Sequence
  spacer sequence GTCN PAM
ucgcagagcagcgggaaagg

SEQ ID NO: 15179 - RNA, 20 nt, Artificial Sequence
  spacer sequence GTCN PAM
accccagggucuucgcagag

SEQ ID NO: 15180 - RNA, 20 nt, Artificial Sequence
  spacer sequence GTCN PAM
cgagcguggaaggccgcaca

SEQ ID NO: 15181 - RNA, 20 nt, Artificial Sequence
  spacer sequence GTCN PAM
gggcccucccaggaaggaug

SEQ ID NO: 15182 - RNA, 20 nt, Artificial Sequence
  spacer sequence GTCN PAM
cccucuaugcccuaaggcag

SEQ ID NO: 15183 - RNA, 20 nt, Artificial Sequence
  spacer sequence GTCN PAM
gagccugccccgggguucag

SEQ ID NO: 15184 - RNA, 20 nt, Artificial Sequence
  spacer sequence GTCN PAM
acacgcaggccacaggccac

SEQ ID NO: 15185 - RNA, 20 nt, Artificial Sequence
  spacer sequence GTCN PAM
ccacugcccucuggcccauu

SEQ ID NO: 15186 - RNA, 20 nt, Artificial Sequence
  spacer sequence GTCN PAM
aaaccaaagggcugcagggc

SEQ ID NO: 15187 - RNA, 20 nt, Artificial Sequence
  spacer sequence GTCN PAM
ugcccugcagcccuuugguu

SEQ ID NO: 15188 - RNA, 20 nt, Artificial Sequence
  spacer sequence GTCN PAM
gaccccacuuuggggacccu

SEQ ID NO: 15189 - RNA, 20 nt, Artificial Sequence
  spacer sequence GTCN PAM
gacagccugugaggcucaca

SEQ ID NO: 15190 - RNA, 20 nt, Artificial Sequence
  spacer sequence GTCN PAM
ccaaaguggggucagacagc

SEQ ID NO: 15191 - RNA, 20 nt, Artificial Sequence
  spacer sequence GTCN PAM
ggguuccccgaaagcccugg

SEQ ID NO: 15192 - RNA, 20 nt, Artificial Sequence
  spacer sequence GTCN PAM
aaguccaggccucaucaggg

SEQ ID NO: 15193 - RNA, 20 nt, Artificial Sequence
  spacer sequence GTCN PAM
aggccucaucagggacgugc

SEQ ID NO: 15194 - RNA, 20 nt, Artificial Sequence
  spacer sequence GTCN PAM
cugaugaggccuggacuucg

SEQ ID NO: 15195 - RNA, 20 nt, Artificial Sequence
  spacer sequence GTCN PAM
caucuuccuguguucagcgc

SEQ ID NO: 15196 - RNA, 20 nt, Artificial Sequence
  spacer sequence GTCN PAM
cagcaccggcggcaucuggc

SEQ ID NO: 15197 - RNA, 20 nt, Artificial Sequence
  spacer sequence GTCN PAM
cuggugugcagcaggcaugc

SEQ ID NO: 15198 - RNA, 20 nt, Artificial Sequence
  spacer sequence GTCN PAM
uaacugccgauccccagaac

SEQ ID NO: 15199 - RNA, 20 nt, Artificial Sequence
  spacer sequence GTCN PAM
cccgggccccaucccagccu

SEQ ID NO: 15200 - RNA, 20 nt, Artificial Sequence
  spacer sequence GTCN PAM
agcagccuggaagcaggaca

SEQ ID NO: 15201 - RNA, 20 nt, Artificial Sequence
  spacer sequence GTCN PAM
ugcuuccaggcugcuugacc

SEQ ID NO: 15202 - RNA, 20 nt, Artificial Sequence
  spacer sequence GTCN PAM
ccaccccagcauguccugcu

SEQ ID NO: 15203 - RNA, 20 nt, Artificial Sequence
  spacer sequence GTCN PAM
gccagcggaacagcagcccu

SEQ ID NO: 15204 - RNA, 20 nt, Artificial Sequence
  spacer sequence GTCN PAM
guggagggggcgagcaggac

SEQ ID NO: 15205 - RNA, 20 nt, Artificial Sequence
  spacer sequence GTCN PAM
ugcucgcccccuccacugac

SEQ ID NO: 15206 - RNA, 20 nt, Artificial Sequence
  spacer sequence GTCN PAM
ccccaugccucccacuuugc

SEQ ID NO: 15207 - RNA, 20 nt, Artificial Sequence
  spacer sequence GTCN PAM
gugcccuugugcccagcugg

SEQ ID NO: 15208 - RNA, 20 nt, Artificial Sequence
  spacer sequence GTCN PAM
ugccugucugugcccuugug

SEQ ID NO: 15209 - RNA, 20 nt, Artificial Sequence
  spacer sequence GTCN PAM
gcagccacgccccuccuggg

SEQ ID NO: 15210 - RNA, 20 nt, Artificial Sequence
  spacer sequence GTCN PAM
cacccacaccccggccgugg

SEQ ID NO: 15211 - RNA, 20 nt, Artificial Sequence
  spacer sequence GTCN PAM
caggggguggcagcaccacg

SEQ ID NO: 15212 - RNA, 20 nt, Artificial Sequence
  spacer sequence GTCN PAM
gggucucaggggguggcagc

SEQ ID NO: 15213 - RNA, 20 nt, Artificial Sequence
  spacer sequence GTCN PAM
gggaaggggguaacuagguc

SEQ ID NO: 15214 - RNA, 20 nt, Artificial Sequence
  spacer sequence GTCN PAM
gguggcuuucaucugaggaa

SEQ ID NO: 15215 - RNA, 20 nt, Artificial Sequence
  spacer sequence GTCN PAM
cuuccucagaugaaagccac

SEQ ID NO: 15216 - RNA, 20 nt, Artificial Sequence
  spacer sequence GTCN PAM
gcuaugggcaagacaguggg

SEQ ID NO: 15217 - RNA, 20 nt, Artificial Sequence
  spacer sequence GTCN PAM
ugcccauagcagacaucucc

SEQ ID NO: 15218 - RNA, 20 nt, Artificial Sequence
  spacer sequence GTCN PAM
cccacuuuuccuguguccau

SEQ ID NO: 15219 - RNA, 20 nt, Artificial Sequence
  spacer sequence GTCN PAM
augggaugggcgggagguga

SEQ ID NO: 15220 - RNA, 20 nt, Artificial Sequence
  spacer sequence GTCN PAM
cacgcucacugccgacuggc

SEQ ID NO: 15221 - RNA, 20 nt, Artificial Sequence
  spacer sequence GTCN PAM
gcagugagcgugcgacuguu

SEQ ID NO: 15222 - RNA, 20 nt, Artificial Sequence
  spacer sequence GTCN PAM
cugaggugaaguaaacgccg

SEQ ID NO: 15223 - RNA, 20 nt, Artificial Sequence
  spacer sequence GTCN PAM
cugcugcccacugcaggguc

SEQ ID NO: 15224 - RNA, 20 nt, Artificial Sequence
  spacer sequence GTCN PAM
ccagcagcuuucccagcuuc

SEQ ID NO: 15225 - RNA, 20 nt, Artificial Sequence
  spacer sequence GTCN PAM
caccagcccagggcugaucc

SEQ ID NO: 15226 - RNA, 20 nt, Artificial Sequence
  spacer sequence GTCN PAM
ccagaagcuuucccggcuuc

SEQ ID NO: 15227 - RNA, 20 nt, Artificial Sequence
  spacer sequence GTCN PAM
caccagcccugggcugaucc

SEQ ID NO: 15228 - RNA, 20 nt, Artificial Sequence
  spacer sequence GTCN PAM
agggugucgcaccagcccug

SEQ ID NO: 15229 - RNA, 20 nt, Artificial Sequence
  spacer sequence GTCN PAM
ccaggggcgugaucaucugu

SEQ ID NO: 15230 - RNA, 20 nt, Artificial Sequence
  spacer sequence GTCN PAM
gccggugggaccagcgccau

SEQ ID NO: 15231 - RNA, 20 nt, Artificial Sequence
  spacer sequence GTCN PAM
ccucaccccucaccaucaaa

SEQ ID NO: 15232 - RNA, 20 nt, Artificial Sequence
  spacer sequence GTCN PAM
cuuugauggugaggggugag

SEQ ID NO: 15233 - RNA, 20 nt, Artificial Sequence
  spacer sequence GTCN PAM
ggcagggugggugccacauc

SEQ ID NO: 15234 - RNA, 20 nt, Artificial Sequence
  spacer sequence GTCN PAM
uccccuugaaaggccugugg

SEQ ID NO: 15235 - RNA, 20 nt, Artificial Sequence
  spacer sequence GTCN PAM
ucucuuuuucuuuuccccuc

SEQ ID NO: 15236 - RNA, 20 nt, Artificial Sequence
  spacer sequence GTCN PAM
ccaggaucuccccaccugca

SEQ ID NO: 15237 - RNA, 20 nt, Artificial Sequence
  spacer sequence GTCN PAM
cccuggccgcucccuuucug

SEQ ID NO: 15238 - RNA, 20 nt, Artificial Sequence
  spacer sequence GTCN PAM
ucucucucgggagucccccu

SEQ ID NO: 15239 - RNA, 20 nt, Artificial Sequence
  spacer sequence GTCN PAM
gagguggaggagguggucuu

SEQ ID NO: 15240 - RNA, 20 nt, Artificial Sequence
  spacer sequence GTCN PAM
uggagggccugcgggcagag

SEQ ID NO: 15241 - RNA, 20 nt, Artificial Sequence
  spacer sequence GTCN PAM
gccguggggcccagucccgg

SEQ ID NO: 15242 - RNA, 20 nt, Artificial Sequence
  spacer sequence GTCN PAM
cggagccgcuggaagacgcc

SEQ ID NO: 15243 - RNA, 20 nt, Artificial Sequence
  spacer sequence GTCN PAM
uccagcggcuccgggacugg

SEQ ID NO: 15244 - RNA, 20 nt, Artificial Sequence
  spacer sequence GTCN PAM
uugcacucgaugauccaaug

SEQ ID NO: 15245 - RNA, 20 nt, Artificial Sequence
  spacer sequence GTCN PAM
aaggugcaggaggcgcccau

SEQ ID NO: 15246 - RNA, 20 nt, Artificial Sequence
  spacer sequence GTCN PAM
uggaggugggcuuuggcaug

SEQ ID NO: 15247 - RNA, 20 nt, Artificial Sequence
  spacer sequence GTCN PAM
gcccagggggccggguccug

SEQ ID NO: 15248 - RNA, 20 nt, Artificial Sequence
  spacer sequence GTCN PAM
ccccagcccugcccugcccu

SEQ ID NO: 15249 - RNA, 20 nt, Artificial Sequence
  spacer sequence GTCN PAM
gccuggaggggggcgugcag

SEQ ID NO: 15250 - RNA, 20 nt, Artificial Sequence
  spacer sequence GTCN PAM
ggaagagggggugcagagca

SEQ ID NO: 15251 - RNA, 20 nt, Artificial Sequence
  spacer sequence GTCN PAM
gcuuggaggagggggugcag

SEQ ID NO: 15252 - RNA, 20 nt, Artificial Sequence
  spacer sequence GTCN PAM
cauuugccacaggacgggag

SEQ ID NO: 15253 - RNA, 20 nt, Artificial Sequence
  spacer sequence GTCN PAM
uguggcaaaugugacucaca

SEQ ID NO: 15254 - RNA, 20 nt, Artificial Sequence
  spacer sequence GTCN PAM
augcuggcccagggugcccu

SEQ ID NO: 15255 - RNA, 20 nt, Artificial Sequence
  spacer sequence GTCN PAM
ugagcgggaacagcgugggc

SEQ ID NO: 15256 - RNA, 20 nt, Artificial Sequence
  spacer sequence GTCN PAM
uccucucucuggccgcuggc

SEQ ID NO: 15257 - RNA, 20 nt, Artificial Sequence
  spacer sequence GTCN PAM
ucggccucccuggcugguca

SEQ ID NO: 15258 - RNA, 20 nt, Artificial Sequence
  spacer sequence GTCN PAM
aaggcucucgccuccccaca

SEQ ID NO: 15259 - RNA, 20 nt, Artificial Sequence
  spacer sequence GTCN PAM
cgggucccuuaucucucggg

SEQ ID NO: 15260 - RNA, 20 nt, Artificial Sequence
  spacer sequence GTCN PAM
cuuaucucucggguuaguua

SEQ ID NO: 15261 - RNA, 20 nt, Artificial Sequence
  spacer sequence GTCN PAM
ugccuggccacucuugcaaa

SEQ ID NO: 15262 - RNA, 20 nt, Artificial Sequence
  spacer sequence GTCN PAM
aggucuugccuggccacucu

SEQ ID NO: 15263 - RNA, 20 nt, Artificial Sequence
  spacer sequence GTCN PAM
caaguccaggucuugccugg

SEQ ID NO: 15264 - RNA, 20 nt, Artificial Sequence
  spacer sequence GTCN PAM
uuccccucccagauagucuc

SEQ ID NO: 15265 - RNA, 20 nt, Artificial Sequence
  spacer sequence GTCN PAM
ccagugggccacacaugggc

SEQ ID NO: 15266 - RNA, 20 nt, Artificial Sequence
  spacer sequence GTCN PAM
agugccaaucaggauugagc

SEQ ID NO: 15267 - RNA, 20 nt, Artificial Sequence
  spacer sequence GTCN PAM
aguguccagugccaaucagg

SEQ ID NO: 15268 - RNA, 20 nt, Artificial Sequence
  spacer sequence GTCN PAM
ggccucaguguucccacccu

SEQ ID NO: 15269 - RNA, 20 nt, Artificial Sequence
  spacer sequence GTCN PAM
aggggucgggccucaguguu

SEQ ID NO: 15270 - RNA, 20 nt, Artificial Sequence
  spacer sequence GTCN PAM
uuucuuagcagcccuuagcg

SEQ ID NO: 15271 - RNA, 20 nt, Artificial Sequence
  spacer sequence GTCN PAM
gacgccaggcaggccagggc

SEQ ID NO: 15272 - RNA, 20 nt, Artificial Sequence
  spacer sequence GTCN PAM
gacgcuaagggcugcuaaga

SEQ ID NO: 15273 - RNA, 20 nt, Artificial Sequence
  spacer sequence GTCN PAM
ccgggguggcccuggccugc

SEQ ID NO: 15274 - RNA, 20 nt, Artificial Sequence
  spacer sequence GTCN PAM
cccugagcucagcuuuccga

SEQ ID NO: 15275 - RNA, 20 nt, Artificial Sequence
  spacer sequence GTCN PAM
gggcugcucucccaggcagg

SEQ ID NO: 15276 - RNA, 20 nt, Artificial Sequence
  spacer sequence GTCN PAM
ugccagggagaggcugcccu

SEQ ID NO: 15277 - RNA, 20 nt, Artificial Sequence
  spacer sequence GTCN PAM
ggaggaaggggucgugccag

SEQ ID NO: 15278 - RNA, 20 nt, Artificial Sequence
  spacer sequence GTCN PAM
gaggucgggaggaagggguc

SEQ ID NO: 15279 - RNA, 20 nt, Artificial Sequence
  spacer sequence GTCN PAM
ccagcucccugucugagguc

SEQ ID NO: 15280 - RNA, 20 nt, Artificial Sequence
  spacer sequence GTCN PAM
cacguuugagguccccaucu

SEQ ID NO: 15281 - RNA, 20 nt, Artificial Sequence
  spacer sequence GTCN PAM
ccaucuggagagcggggggc

SEQ ID NO: 15282 - RNA, 20 nt, Artificial Sequence
  spacer sequence GTCN PAM
ccucgccugggaaguggggc

SEQ ID NO: 15283 - RNA, 20 nt, Artificial Sequence
  spacer sequence GTCN PAM
ccgggucggggcagccccgg

SEQ ID NO: 15284 - RNA, 20 nt, Artificial Sequence
  spacer sequence GTCN PAM
gggcagccccggccucaguu

SEQ ID NO: 15285 - RNA, 20 nt, Artificial Sequence
  spacer sequence GTCN PAM
cccagcgcuccaucaccggc

SEQ ID NO: 15286 - RNA, 20 nt, Artificial Sequence
  spacer sequence GTCN PAM
gcugcgucguaggccgcggg

SEQ ID NO: 15287 - RNA, 20 nt, Artificial Sequence
  spacer sequence GTCN PAM
uaggccgcgggcgccgcccc

SEQ ID NO: 15288 - RNA, 20 nt, Artificial Sequence
  spacer sequence GTCN PAM
cgcugggggcgcucaugcug

SEQ ID NO: 15289 - RNA, 20 nt, Artificial Sequence
  spacer sequence GTCN PAM
agccugcagcaugagcgccc

SEQ ID NO: 15290 - RNA, 20 nt, Artificial Sequence
  spacer sequence GTCN PAM
ccguccagccugcagcauga

SEQ ID NO: 15291 - RNA, 20 nt, Artificial Sequence
  spacer sequence GTCN PAM
ggucgccguccagccugcag

SEQ ID NO: 15292 - RNA, 20 nt, Artificial Sequence
  spacer sequence GTCN PAM
aacaggcccggggggcggac

SEQ ID NO: 15293 - RNA, 20 nt, Artificial Sequence
  spacer sequence GTCN PAM
gccccccgggccuguuggac

SEQ ID NO: 15294 - RNA, 20 nt, Artificial Sequence
  spacer sequence GTCN PAM
ucucgcggguccgccccccg

SEQ ID NO: 15295 - RNA, 20 nt, Artificial Sequence
  spacer sequence GTCN PAM
gggccccggccgcccccucc

SEQ ID NO: 15296 - RNA, 20 nt, Artificial Sequence
  spacer sequence GTCN PAM
ccgggcgcggggcugcggug

SEQ ID NO: 15297 - RNA, 20 nt, Artificial Sequence
  spacer sequence GTCN PAM
ccagccugcagguucgcguc

SEQ ID NO: 15298 - RNA, 20 nt, Artificial Sequence
  spacer sequence GTCN PAM
gcaccgcagaaaggcccccu

SEQ ID NO: 15299 - RNA, 20 nt, Artificial Sequence
  spacer sequence GTCN PAM
uuuuuuaauagagacggggu

SEQ ID NO: 15300 - RNA, 20 nt, Artificial Sequence
  spacer sequence GTCN PAM
cuauuaaaaaaagacagaac

SEQ ID NO: 15301 - RNA, 20 nt, Artificial Sequence
  spacer sequence GTCN PAM
ugcuauguugcccagguugg

SEQ ID NO: 15302 - RNA, 20 nt, Artificial Sequence
  spacer sequence GTCN PAM
caaacuccugggcgcaagcg

SEQ ID NO: 15303 - RNA, 20 nt, Artificial Sequence
  spacer sequence GTCN PAM
ucauagaaccuggcgggcgc

SEQ ID NO: 15304 - RNA, 20 nt, Artificial Sequence
  spacer sequence GTCN PAM
uuuuuccuuccuuccuuccu

SEQ ID NO: 15305 - RNA, 20 nt, Artificial Sequence
  spacer sequence GTCN PAM
gcugcucuauggaguagcca

SEQ ID NO: 15306 - RNA, 20 nt, Artificial Sequence
  spacer sequence GTCN PAM
uuuuacagauguggaaacug

SEQ ID NO: 15307 - RNA, 20 nt, Artificial Sequence
  spacer sequence GTCN PAM
gguggccacgagggugggga

SEQ ID NO: 15308 - RNA, 20 nt, Artificial Sequence
  spacer sequence GTCN PAM
ccacccucguggccaccaga

SEQ ID NO: 15309 - RNA, 20 nt, Artificial Sequence
  spacer sequence GTCN PAM
cacccccauaggcugggggu

SEQ ID NO: 15310 - RNA, 20 nt, Artificial Sequence
  spacer sequence GTCN PAM
ucugagaccccgggucccua

SEQ ID NO: 15311 - RNA, 20 nt, Artificial Sequence
  spacer sequence GTCN PAM
cagaugacccccagccuaug

SEQ ID NO: 15312 - RNA, 20 nt, Artificial Sequence
  spacer sequence GTCN PAM
cuaaugggggauuccgccca

SEQ ID NO: 15313 - RNA, 20 nt, Artificial Sequence
  spacer sequence GTCN PAM
uugggcggaaucccccauua

SEQ ID NO: 15314 - RNA, 20 nt, Artificial Sequence
  spacer sequence GTCN PAM
ccagaacuggaggcgucuuu

SEQ ID NO: 15315 - RNA, 20 nt, Artificial Sequence
  spacer sequence GTCN PAM
uggucuccagaacuggaggc

SEQ ID NO: 15316 - RNA, 20 nt, Artificial Sequence
  spacer sequence GTCN PAM
agcacaccccccgccuguuu

SEQ ID NO: 15317 - RNA, 20 nt, Artificial Sequence
  spacer sequence GTCN PAM
uggcucugauagccgguuuc

SEQ ID NO: 15318 - RNA, 20 nt, Artificial Sequence
  spacer sequence GTCN PAM
ugagcccugagcacugccug

SEQ ID NO: 15319 - RNA, 20 nt, Artificial Sequence
  spacer sequence GTCN PAM
ggguagcugccugccccauc

SEQ ID NO: 15320 - RNA, 20 nt, Artificial Sequence
  spacer sequence GTCN PAM
gggcaaggggaagagcgugu

SEQ ID NO: 15321 - RNA, 20 nt, Artificial Sequence
  spacer sequence GTCN PAM
ggccgcuuucucguucuguc

SEQ ID NO: 15322 - RNA, 20 nt, Artificial Sequence
  spacer sequence GTCN PAM
caagcugagcccacgugucc

SEQ ID NO: 15323 - RNA, 20 nt, Artificial Sequence
  spacer sequence GTCN PAM
ucuaggagacacccccauuc

SEQ ID NO: 15324 - RNA, 20 nt, Artificial Sequence
  spacer sequence GTCN PAM
ccuagaggacacgugggcuc

SEQ ID NO: 15325 - RNA, 20 nt, Artificial Sequence
  spacer sequence GTCN PAM
uggggcagaauggggguguc

SEQ ID NO: 15326 - RNA, 20 nt, Artificial Sequence
  spacer sequence GTCN PAM
uggucagaagcuguuuuguu

SEQ ID NO: 15327 - RNA, 20 nt, Artificial Sequence
  spacer sequence GTCN PAM
gaagcuguuuuguuuguuuu

SEQ ID NO: 15328 - RNA, 20 nt, Artificial Sequence
  spacer sequence GTCN PAM
cagaaaaacaaaaacaaaca

SEQ ID NO: 15329 - RNA, 20 nt, Artificial Sequence
  spacer sequence GTCN PAM
cacucuguugcucagguugg

SEQ ID NO: 15330 - RNA, 20 nt, Artificial Sequence
  spacer sequence GTCN PAM
ucacagcuacccaggaggcu

SEQ ID NO: 15331 - RNA, 20 nt, Artificial Sequence
  spacer sequence GTCN PAM
ugaucuccugaccucgugau

SEQ ID NO: 15332 - RNA, 20 nt, Artificial Sequence
  spacer sequence GTCN PAM
ggagaucaagaccauccugg

SEQ ID NO: 15333 - RNA, 20 nt, Artificial Sequence
  spacer sequence GTCN PAM
uagcgucccucucacagggc

SEQ ID NO: 15334 - RNA, 20 nt, Artificial Sequence
  spacer sequence GTCN PAM
cucucacagggcugucagug

SEQ ID NO: 15335 - RNA, 20 nt, Artificial Sequence
  spacer sequence GTCN PAM
gugauccuggcacacagaac

SEQ ID NO: 15336 - RNA, 20 nt, Artificial Sequence
  spacer sequence GTCN PAM
cagcuacucaggaggcugag

SEQ ID NO: 15337 - RNA, 20 nt, Artificial Sequence
  spacer sequence GTCN PAM
cuacuaaaaguacaaaaaau

SEQ ID NO: 15338 - RNA, 20 nt, Artificial Sequence
  spacer sequence GTCN PAM
cgaucuccugaccucgugau

SEQ ID NO: 15339 - RNA, 20 nt, Artificial Sequence
  spacer sequence GTCN PAM
ggagaucgagaccauccugg

SEQ ID NO: 15340 - RNA, 20 nt, Artificial Sequence
  spacer sequence GTCN PAM
ugcucuguugcccagguugg

SEQ ID NO: 15341 - RNA, 20 nt, Artificial Sequence
  spacer sequence GTCN PAM
cuacuaaaaauacaaaagaa

SEQ ID NO: 15342 - RNA, 20 nt, Artificial Sequence
  spacer sequence GTCN PAM
cgaucuccugaccuaaauug

SEQ ID NO: 15343 - RNA, 20 nt, Artificial Sequence
  spacer sequence GTCN PAM
ggagaucgagaccagccuag

SEQ ID NO: 15344 - RNA, 20 nt, Artificial Sequence
  spacer sequence GTCN PAM
augugcugugagauuaagga

SEQ ID NO: 15345 - RNA, 20 nt, Artificial Sequence
  spacer sequence GTCN PAM
ccuguuuacuaccgucagcc

SEQ ID NO: 15346 - RNA, 20 nt, Artificial Sequence
  spacer sequence GTCN PAM
gccuagaccgguuuuuccac

SEQ ID NO: 15347 - RNA, 20 nt, Artificial Sequence
  spacer sequence GTCN PAM
aggcugacgguaguaaacag

SEQ ID NO: 15348 - RNA, 20 nt, Artificial Sequence
  spacer sequence GTCN PAM
gcagaaggagguggaaaaac

SEQ ID NO: 15349 - RNA, 20 nt, Artificial Sequence
  spacer sequence GTCN PAM
uccaaugucagcagaaggag

SEQ ID NO: 15350 - RNA, 20 nt, Artificial Sequence
  spacer sequence GTCN PAM
ucgugugcacugcagggugc

SEQ ID NO: 15351 - RNA, 20 nt, Artificial Sequence
  spacer sequence GTCN PAM
ugugcacugcagggugcuga

SEQ ID NO: 15352 - RNA, 20 nt, Artificial Sequence
  spacer sequence GTCN PAM
ggucuggacccacucgaugc

SEQ ID NO: 15353 - RNA, 20 nt, Artificial Sequence
  spacer sequence GTCN PAM
ggacccacucgaugccagca

SEQ ID NO: 15354 - RNA, 20 nt, Artificial Sequence
  spacer sequence GTCN PAM
agaccagacaugccgcucag

SEQ ID NO: 15355 - RNA, 20 nt, Artificial Sequence
  spacer sequence GTCN PAM
caacuugagugcggggugcu

SEQ ID NO: 15356 - RNA, 20 nt, Artificial Sequence
  spacer sequence GTCN PAM
gaaaacacgguuuugguugu

SEQ ID NO: 15357 - RNA, 20 nt, Artificial Sequence
  spacer sequence GTCN PAM
cccagaagaagaaccacuga

SEQ ID NO: 15358 - RNA, 20 nt, Artificial Sequence
  spacer sequence GTCN PAM
auaauaucuuuucauaguca

SEQ ID NO: 15359 - RNA, 20 nt, Artificial Sequence
  spacer sequence GTCN PAM
uugaauuuaguuaauuguuu

SEQ ID NO: 15360 - RNA, 20 nt, Artificial Sequence
  spacer sequence GTCN PAM
cccaguucggggcugaacug

SEQ ID NO: 15361 - RNA, 20 nt, Artificial Sequence
  spacer sequence GTCN PAM
cuuggccaaggucacccagu

SEQ ID NO: 15362 - RNA, 20 nt, Artificial Sequence
  spacer sequence GTCN PAM
gagaggcugagucacuuggc

SEQ ID NO: 15363 - RNA, 20 nt, Artificial Sequence
  spacer sequence GTCN PAM
gcauuucacagaagaggauc

SEQ ID NO: 15364 - RNA, 20 nt, Artificial Sequence
  spacer sequence GTCN PAM
cgcgcgaggcuccuuccccu

SEQ ID NO: 15365 - RNA, 20 nt, Artificial Sequence
  spacer sequence GTCN PAM
gcccgccuggggugcgggcg

SEQ ID NO: 15366 - RNA, 20 nt, Artificial Sequence
  spacer sequence GTCN PAM
cgcaagcgcgcacgcgcacg

SEQ ID NO: 15367 - RNA, 20 nt, Artificial Sequence
  spacer sequence GTCN PAM
cugcgcuggccccgccccug

SEQ ID NO: 15368 - RNA, 20 nt, Artificial Sequence
  spacer sequence GTCN PAM
cgcguuuuccuuucuccucg

SEQ ID NO: 15369 - RNA, 20 nt, Artificial Sequence
  spacer sequence GTCN PAM
gggccgucgcgcguuuuccu

SEQ ID NO: 15370 - RNA, 20 nt, Artificial Sequence
  spacer sequence GTCN PAM
cugaggcggauuucgcgccg

SEQ ID NO: 15371 - RNA, 20 nt, Artificial Sequence
  spacer sequence GTCN PAM
gugcgugcgucccugaggcg

SEQ ID NO: 15372 - RNA, 20 nt, Artificial Sequence
  spacer sequence GTCN PAM
agggguacuccgucugugcg

SEQ ID NO: 15373 - RNA, 20 nt, Artificial Sequence
  spacer sequence GTCN PAM
ccgggggcggguccaggggu

SEQ ID NO: 15374 - RNA, 20 nt, Artificial Sequence
  spacer sequence GTCN PAM
ccgcgccgccgcgccgccgc

SEQ ID NO: 15375 - RNA, 20 nt, Artificial Sequence
  spacer sequence GTCN PAM
ccgcgcguccccgcgccgcc

SEQ ID NO: 15376 - RNA, 20 nt, Artificial Sequence
  spacer sequence GTCN PAM
cccuccccacagccgcggcc

SEQ ID NO: 15377 - RNA, 20 nt, Artificial Sequence
  spacer sequence GTCN PAM
cccgcuccgucgcccucccc

SEQ ID NO: 15378 - RNA, 20 nt, Artificial Sequence
  spacer sequence GTCN PAM
ccgccgccgccgccaugaac

SEQ ID NO: 15379 - RNA, 20 nt, Artificial Sequence
  spacer sequence GTCN PAM
gcgcccgaguuguucauggc

SEQ ID NO: 15380 - RNA, 20 nt, Artificial Sequence
  spacer sequence GTCN PAM
ucacccgaucucgucggcgc

SEQ ID NO: 15381 - RNA, 20 nt, Artificial Sequence
  spacer sequence GTCN PAM
ccgccccgagcccggcccgc

SEQ ID NO: 15382 - RNA, 20 nt, Artificial Sequence
  spacer sequence GTCN PAM
gaggccgggcggcggggagc

SEQ ID NO: 15383 - RNA, 20 nt, Artificial Sequence
  spacer sequence GTCN PAM
aggucacgccggccgggggc

SEQ ID NO: 15384 - RNA, 20 nt, Artificial Sequence
  spacer sequence GTCN PAM
cgccggccgggggcggacuc

SEQ ID NO: 15385 - RNA, 20 nt, Artificial Sequence
  spacer sequence GTCN PAM
gcccccggccggcgugaccu

SEQ ID NO: 15386 - RNA, 20 nt, Artificial Sequence
  spacer sequence GTCN PAM
cgaguccgcccccggccggc

SEQ ID NO: 15387 - RNA, 20 nt, Artificial Sequence
  spacer sequence GTCN PAM
gggucccgaguccgcccccg

SEQ ID NO: 15388 - RNA, 20 nt, Artificial Sequence
  spacer sequence GTCN PAM
agggcccccggcgcgaagcc

SEQ ID NO: 15389 - RNA, 20 nt, Artificial Sequence
  spacer sequence GTCN PAM
ggggggguccuggcgccccc

SEQ ID NO: 15390 - RNA, 20 nt, Artificial Sequence
  spacer sequence GTCN PAM
uggcgcccccgccgccgcuu

SEQ ID NO: 15391 - RNA, 20 nt, Artificial Sequence
  spacer sequence GTCN PAM
ugggggauccugaaggagag

SEQ ID NO: 15392 - RNA, 20 nt, Artificial Sequence
  spacer sequence GTCN PAM
ggggggccccgccgccgccu

SEQ ID NO: 15393 - RNA, 20 nt, Artificial Sequence
  spacer sequence GTCN PAM
ggaggcggcggcggggcccc

SEQ ID NO: 15394 - RNA, 20 nt, Artificial Sequence
  spacer sequence GTCN PAM
ggggaaccccgaacggcaac

SEQ ID NO: 15395 - RNA, 20 nt, Artificial Sequence
  spacer sequence GTCN PAM
uggggcgcccgugccgccgc

SEQ ID NO: 15396 - RNA, 20 nt, Artificial Sequence
  spacer sequence GTCN PAM
ggaagcggcggcacgggcgc

SEQ ID NO: 15397 - RNA, 20 nt, Artificial Sequence
  spacer sequence GTCN PAM
ugagggaccccgaaugggag

SEQ ID NO: 15398 - RNA, 20 nt, Artificial Sequence
  spacer sequence GTCN PAM
cucaggacgcgcagucggga

SEQ ID NO: 15399 - RNA, 20 nt, Artificial Sequence
  spacer sequence GTCN PAM
ggagcguccccguugccgcc

SEQ ID NO: 15400 - RNA, 20 nt, Artificial Sequence
  spacer sequence GTCN PAM
ccguugccgccuguagggcu

SEQ ID NO: 15401 - RNA, 20 nt, Artificial Sequence
  spacer sequence GTCN PAM
cccaggccaggaagcccuac

SEQ ID NO: 15402 - RNA, 20 nt, Artificial Sequence
  spacer sequence GTCN PAM
gcggggaguccagggcgccg

SEQ ID NO: 15403 - RNA, 20 nt, Artificial Sequence
  spacer sequence GTCN PAM
agggcgccgucgccgccgcc

SEQ ID NO: 15404 - RNA, 20 nt, Artificial Sequence
  spacer sequence GTCN PAM
ccgccgccucccggcuuccu

SEQ ID NO: 15405 - RNA, 20 nt, Artificial Sequence
  spacer sequence GTCN PAM
cccuggccaggaagccggga

SEQ ID NO: 15406 - RNA, 20 nt, Artificial Sequence
  spacer sequence GTCN PAM
ggggcgcccccagcgcgcgc

SEQ ID NO: 15407 - RNA, 20 nt, Artificial Sequence
  spacer sequence GTCN PAM
ggagggguucgcaaacccag

SEQ ID NO: 15408 - RNA, 20 nt, Artificial Sequence
  spacer sequence GTCN PAM
gccggggccugcuguguuua

SEQ ID NO: 15409 - RNA, 20 nt, Artificial Sequence
  spacer sequence GTCN PAM
gcgcuuccgaggcggcgacg

SEQ ID NO: 15410 - RNA, 20 nt, Artificial Sequence
  spacer sequence GTCN PAM
ccgccucggaagcgcugacu

SEQ ID NO: 15411 - RNA, 20 nt, Artificial Sequence
  spacer sequence GTCN PAM
ccuccuauaggagccugacc

SEQ ID NO: 15412 - RNA, 20 nt, Artificial Sequence
  spacer sequence GTCN PAM
ggcuccuauaggaggggacg

SEQ ID NO: 15413 - RNA, 20 nt, Artificial Sequence
  spacer sequence GTCN PAM
ggagcaggucaggcuccuau

SEQ ID NO: 15414 - RNA, 20 nt, Artificial Sequence
  spacer sequence GTCN PAM
cugcggcaggagccgcuccu

SEQ ID NO: 15415 - RNA, 20 nt, Artificial Sequence
  spacer sequence GTCN PAM
uuuuagaguugcauucuucc

SEQ ID NO: 15416 - RNA, 20 nt, Artificial Sequence
  spacer sequence GTCN PAM
ggguuggguuuccuaguggu

SEQ ID NO: 15417 - RNA, 20 nt, Artificial Sequence
  spacer sequence GTCN PAM
gguguaaauuucucggugcc

SEQ ID NO: 15418 - RNA, 20 nt, Artificial Sequence
  spacer sequence GTCN PAM
cacuuguggaugggaaaugc

SEQ ID NO: 15419 - RNA, 20 nt, Artificial Sequence
  spacer sequence GTCN PAM
ggggagggggagagcccaca

SEQ ID NO: 15420 - RNA, 20 nt, Artificial Sequence
  spacer sequence GTCN PAM
ucuccaggcacuuugacuug

SEQ ID NO: 15421 - RNA, 20 nt, Artificial Sequence
  spacer sequence GTCN PAM
aagugccuggagaggacuca

SEQ ID NO: 15422 - RNA, 20 nt, Artificial Sequence
  spacer sequence GTCN PAM
gugugccugugugagggaca

SEQ ID NO: 15423 - RNA, 20 nt, Artificial Sequence
  spacer sequence GTCN PAM
cucacacaggcacacggacc

SEQ ID NO: 15424 - RNA, 20 nt, Artificial Sequence
  spacer sequence GTCN PAM
accggccaugggggauggag

SEQ ID NO: 15425 - RNA, 20 nt, Artificial Sequence
  spacer sequence GTCN PAM
auggcuccaucccccauggc

SEQ ID NO: 15426 - RNA, 20 nt, Artificial Sequence
  spacer sequence GTCN PAM
auucaagccgcgggugaacg

SEQ ID NO: 15427 - RNA, 20 nt, Artificial Sequence
  spacer sequence GTCN PAM
ccucccugcauggacacccu

SEQ ID NO: 15428 - RNA, 20 nt, Artificial Sequence
  spacer sequence GTCN PAM
augcagggaggggacaggag

SEQ ID NO: 15429 - RNA, 20 nt, Artificial Sequence
  spacer sequence GTCN PAM
cagccugggucuggaggggu

SEQ ID NO: 15430 - RNA, 20 nt, Artificial Sequence
  spacer sequence GTCN PAM
ggaggggucccacccacagc

SEQ ID NO: 15431 - RNA, 20 nt, Artificial Sequence
  spacer sequence GTCN PAM
cacccacagcacaaauaggc

SEQ ID NO: 15432 - RNA, 20 nt, Artificial Sequence
  spacer sequence GTCN PAM
ggguggccugcgagccuauu

SEQ ID NO: 15433 - RNA, 20 nt, Artificial Sequence
  spacer sequence GTCN PAM
augcacuccaguucuccucc

SEQ ID NO: 15434 - RNA, 20 nt, Artificial Sequence
  spacer sequence GTCN PAM
acugcuuucuaagucagacu

SEQ ID NO: 15435 - RNA, 20 nt, Artificial Sequence
  spacer sequence GTCN PAM
gacuccuugggcaagaagug

SEQ ID NO: 15436 - RNA, 20 nt, Artificial Sequence
  spacer sequence GTCN PAM
gacuuagaaagcaguggaca

SEQ ID NO: 15437 - RNA, 20 nt, Artificial Sequence
  spacer sequence GTCN PAM
caugggagaccggcuuccau

SEQ ID NO: 15438 - RNA, 20 nt, Artificial Sequence
  spacer sequence GTCN PAM
cccaugcgacgggcggcugu

SEQ ID NO: 15439 - RNA, 20 nt, Artificial Sequence
  spacer sequence GTCN PAM
acggucugcucugaucuugc

SEQ ID NO: 15440 - RNA, 20 nt, Artificial Sequence
  spacer sequence GTCN PAM
gcucugaucuugcugugugg

SEQ ID NO: 15441 - RNA, 20 nt, Artificial Sequence
  spacer sequence GTCN PAM
caagcauuucacgcacacaa

SEQ ID NO: 15442 - RNA, 20 nt, Artificial Sequence
  spacer sequence GTCN PAM
ccugcaggugcggugggugc

SEQ ID NO: 15443 - RNA, 20 nt, Artificial Sequence
  spacer sequence GTCN PAM
ugagagccgccaucugccgc

SEQ ID NO: 15444 - RNA, 20 nt, Artificial Sequence
  spacer sequence GTCN PAM
gcggugucccuuacccacug

SEQ ID NO: 15445 - RNA, 20 nt, Artificial Sequence
  spacer sequence GTCN PAM
cuuacccacugggggggcuc

SEQ ID NO: 15446 - RNA, 20 nt, Artificial Sequence
  spacer sequence GTCN PAM
ggcgggaucuccugccuccu

SEQ ID NO: 15447 - RNA, 20 nt, Artificial Sequence
  spacer sequence GTCN PAM
acgccucaggagacuuggag

SEQ ID NO: 15448 - RNA, 20 nt, Artificial Sequence
  spacer sequence GTCN PAM
ccugaggcguugaccccgca

SEQ ID NO: 15449 - RNA, 20 nt, Artificial Sequence
  spacer sequence GTCN PAM
cagaacagggggcucccaag

SEQ ID NO: 15450 - RNA, 20 nt, Artificial Sequence
  spacer sequence GTCN PAM
agcugcugcccugggaaucc

SEQ ID NO: 15451 - RNA, 20 nt, Artificial Sequence
  spacer sequence GTCN PAM
gagaagucgucccaaguuuu

SEQ ID NO: 15452 - RNA, 20 nt, Artificial Sequence
  spacer sequence GTCN PAM
ucccaaguuuugaggguccc

SEQ ID NO: 15453 - RNA, 20 nt, Artificial Sequence
  spacer sequence GTCN PAM
caaguuuugagggucccugu

SEQ ID NO: 15454 - RNA, 20 nt, Artificial Sequence
  spacer sequence GTCN PAM
cugugcuggcuuagaagucc

SEQ ID NO: 15455 - RNA, 20 nt, Artificial Sequence
  spacer sequence GTCN PAM
auguaaagcuugauggggga

SEQ ID NO: 15456 - RNA, 20 nt, Artificial Sequence
  spacer sequence GTCN PAM
gcugaggccugccggugaua

SEQ ID NO: 15457 - RNA, 20 nt, Artificial Sequence
  spacer sequence GTCN PAM
guguguguaaggcauccguu

SEQ ID NO: 15458 - RNA, 20 nt, Artificial Sequence
  spacer sequence GTCN PAM
gcuugaggggggcuucaugc

SEQ ID NO: 15459 - RNA, 20 nt, Artificial Sequence
  spacer sequence GTCN PAM
cucucuggauccuggugggu

SEQ ID NO: 15460 - RNA, 20 nt, Artificial Sequence
  spacer sequence GTCN PAM
gcgugccaaacccaccagga

SEQ ID NO: 15461 - RNA, 20 nt, Artificial Sequence
  spacer sequence GTCN PAM
aucacauccaccauguaggg

SEQ ID NO: 15462 - RNA, 20 nt, Artificial Sequence
  spacer sequence GTCN PAM
uccuuugggagcggggccug

SEQ ID NO: 15463 - RNA, 20 nt, Artificial Sequence
  spacer sequence GTCN PAM
ugguccucuugugaagggug

SEQ ID NO: 15464 - RNA, 20 nt, Artificial Sequence
  spacer sequence GTCN PAM
ucuugugaagggugggggac

SEQ ID NO: 15465 - RNA, 20 nt, Artificial Sequence
  spacer sequence GTCN PAM
cccacccuucacaagaggac

SEQ ID NO: 15466 - RNA, 20 nt, Artificial Sequence
  spacer sequence GTCN PAM
gugccugucccccacccuuc

SEQ ID NO: 15467 - RNA, 20 nt, Artificial Sequence
  spacer sequence GTCN PAM
ggaggguuagaggguuggca

SEQ ID NO: 15468 - RNA, 20 nt, Artificial Sequence
  spacer sequence GTCN PAM
ccagugugcccucccuggcc

SEQ ID NO: 15469 - RNA, 20 nt, Artificial Sequence
  spacer sequence GTCN PAM
ucuuaaagucuggcuugagc

SEQ ID NO: 15470 - RNA, 20 nt, Artificial Sequence
  spacer sequence GTCN PAM
ggcuugagcgccucugacuu

SEQ ID NO: 15471 - RNA, 20 nt, Artificial Sequence
  spacer sequence GTCN PAM
gaggcgcucaagccagacuu

SEQ ID NO: 15472 - RNA, 20 nt, Artificial Sequence
  spacer sequence GTCN PAM
gcuucccagaauccaaguca

SEQ ID NO: 15473 - RNA, 20 nt, Artificial Sequence
  spacer sequence GTCN PAM
ccacauccuguugaguagcc

SEQ ID NO: 15474 - RNA, 20 nt, Artificial Sequence
  spacer sequence GTCN PAM
accacccaggcgccuagcac

SEQ ID NO: 15475 - RNA, 20 nt, Artificial Sequence
  spacer sequence GTCN PAM
gggauagggcccaugccugg

SEQ ID NO: 15476 - RNA, 20 nt, Artificial Sequence
  spacer sequence GTCN PAM
ucuccccaguaggccaggca

SEQ ID NO: 15477 - RNA, 20 nt, Artificial Sequence
  spacer sequence GTCN PAM
ccucgagcgcccaggccauu

SEQ ID NO: 15478 - RNA, 20 nt, Artificial Sequence
  spacer sequence GTCN PAM
uggaacuggagagagagguu

SEQ ID NO: 15479 - RNA, 20 nt, Artificial Sequence
  spacer sequence GTCN PAM
uaccauuccccaguguacca

SEQ ID NO: 15480 - RNA, 20 nt, Artificial Sequence
  spacer sequence GTCN PAM
cugucuuaccauuccccagu

SEQ ID NO: 15481 - RNA, 20 nt, Artificial Sequence
  spacer sequence GTCN PAM
cagagggaggaaggacucag

SEQ ID NO: 15482 - RNA, 20 nt, Artificial Sequence
  spacer sequence GTCN PAM
uuccucccucugugacuuuc

SEQ ID NO: 15483 - RNA, 20 nt, Artificial Sequence
  spacer sequence GTCN PAM
uggguauccucgaagcugcc

SEQ ID NO: 15484 - RNA, 20 nt, Artificial Sequence
  spacer sequence GTCN PAM
cuggguuuauuggguggcug

SEQ ID NO: 15485 - RNA, 20 nt, Artificial Sequence
  spacer sequence GTCN PAM
ccuuccacagccacccaaua

SEQ ID NO: 15486 - RNA, 20 nt, Artificial Sequence
  spacer sequence GTCN PAM
cggccucuaggggcccagcc

SEQ ID NO: 15487 - RNA, 20 nt, Artificial Sequence
  spacer sequence GTCN PAM
ggccagagagggccgugauc

SEQ ID NO: 15488 - RNA, 20 nt, Artificial Sequence
  spacer sequence GTCN PAM
ccugggcucugucagcacuc

SEQ ID NO: 15489 - RNA, 20 nt, Artificial Sequence
  spacer sequence GTCN PAM
gcacucuggccuggaucacu

SEQ ID NO: 15490 - RNA, 20 nt, Artificial Sequence
  spacer sequence GTCN PAM
ggaguacccccagucgugac

SEQ ID NO: 15491 - RNA, 20 nt, Artificial Sequence
  spacer sequence GTCN PAM
ugacaaccacaaauguuccc

SEQ ID NO: 15492 - RNA, 20 nt, Artificial Sequence
  spacer sequence GTCN PAM
cgacuggggguacuccugac

SEQ ID NO: 15493 - RNA, 20 nt, Artificial Sequence
  spacer sequence GTCN PAM
gggaacauuugugguuguca

SEQ ID NO: 15494 - RNA, 20 nt, Artificial Sequence
  spacer sequence GTCN PAM
ugcuggggggagagccacug

SEQ ID NO: 15495 - RNA, 20 nt, Artificial Sequence
  spacer sequence GTCN PAM
gggagcaucugugcuuuugg

SEQ ID NO: 15496 - RNA, 20 nt, Artificial Sequence
  spacer sequence GTCN PAM
ugugucggcuccuuugauuc

SEQ ID NO: 15497 - RNA, 20 nt, Artificial Sequence
  spacer sequence GTCN PAM
gcuccuuugauuccugugaa

SEQ ID NO: 15498 - RNA, 20 nt, Artificial Sequence
  spacer sequence GTCN PAM
ggagcacauccacccucaag

SEQ ID NO: 15499 - RNA, 20 nt, Artificial Sequence
  spacer sequence GTCN PAM
ggagcaggccggugucuaga

SEQ ID NO: 15500 - RNA, 20 nt, Artificial Sequence
  spacer sequence GTCN PAM
agaaaggcagcagcauggac

SEQ ID NO: 15501 - RNA, 20 nt, Artificial Sequence
  spacer sequence GTCN PAM
augcugcugccuuucuagac

SEQ ID NO: 15502 - RNA, 20 nt, Artificial Sequence
  spacer sequence GTCN PAM
cucuggcaaagccaaggguu

SEQ ID NO: 15503 - RNA, 20 nt, Artificial Sequence
  spacer sequence GTCN PAM
ccccaggggguggaagaucc

SEQ ID NO: 15504 - RNA, 20 nt, Artificial Sequence
  spacer sequence GTCN PAM
acacuccuccacugcccgcc

SEQ ID NO: 15505 - RNA, 20 nt, Artificial Sequence
  spacer sequence GTCN PAM
ggcggcuauguucauggugc

SEQ ID NO: 15506 - RNA, 20 nt, Artificial Sequence
  spacer sequence GTCN PAM
caccaugaacauagccgccu

SEQ ID NO: 15507 - RNA, 20 nt, Artificial Sequence
  spacer sequence GTCN PAM
aucugagguugugcugucuu

SEQ ID NO: 15508 - RNA, 20 nt, Artificial Sequence
  spacer sequence GTCN PAM
ucugugaacugaggccuuuu

SEQ ID NO: 15509 - RNA, 20 nt, Artificial Sequence
  spacer sequence GTCN PAM
ccgugacaccaugucaugau

SEQ ID NO: 15510 - RNA, 20 nt, Artificial Sequence
  spacer sequence GTCN PAM
cggggaccaggccuggaugg

SEQ ID NO: 15511 - RNA, 20 nt, Artificial Sequence
  spacer sequence GTCN PAM
ugaugucagaaucccugaga

SEQ ID NO: 15512 - RNA, 20 nt, Artificial Sequence
  spacer sequence GTCN PAM
gaaucccugagagcugugac

SEQ ID NO: 15513 - RNA, 20 nt, Artificial Sequence
  spacer sequence GTCN PAM
cagcucucagggauucugac

SEQ ID NO: 15514 - RNA, 20 nt, Artificial Sequence
  spacer sequence GTCN PAM
uucgacagaugcuuauaggc

SEQ ID NO: 15515 - RNA, 20 nt, Artificial Sequence
  spacer sequence GTCN PAM
aaugacuggccucugccaaa

SEQ ID NO: 15516 - RNA, 20 nt, Artificial Sequence
  spacer sequence GTCN PAM
gccugggagggcggggcugg

SEQ ID NO: 15517 - RNA, 20 nt, Artificial Sequence
  spacer sequence GTCN PAM
cccucauccucucccugcca

SEQ ID NO: 15518 - RNA, 20 nt, Artificial Sequence
  spacer sequence GTCN PAM
gugaacuggaacgcgcugcu

SEQ ID NO: 15519 - RNA, 20 nt, Artificial Sequence
  spacer sequence GTCN PAM
acagaacacaggagcggucc

SEQ ID NO: 15520 - RNA, 20 nt, Artificial Sequence
  spacer sequence GTCN PAM
gaugcccccccuccagccca

SEQ ID NO: 15521 - RNA, 20 nt, Artificial Sequence
  spacer sequence GTCN PAM
aggcuauggaggggcgggcu

SEQ ID NO: 15522 - RNA, 20 nt, Artificial Sequence
  spacer sequence GTCN PAM
ugguuucccaccuggucuua

SEQ ID NO: 15523 - RNA, 20 nt, Artificial Sequence
  spacer sequence GTCN PAM
uaggggcaggaaagucccua

SEQ ID NO: 15524 - RNA, 20 nt, Artificial Sequence
  spacer sequence GTCN PAM
cuagaggcucuuccugaugc

SEQ ID NO: 15525 - RNA, 20 nt, Artificial Sequence
  spacer sequence GTCN PAM
aggcccaguggcggcugaug

SEQ ID NO: 15526 - RNA, 20 nt, Artificial Sequence
  spacer sequence GTCN PAM
cacucagcuccgugcacaau

SEQ ID NO: 15527 - RNA, 20 nt, Artificial Sequence
  spacer sequence GTCN PAM
guggggaggcaggcuccucc

SEQ ID NO: 15528 - RNA, 20 nt, Artificial Sequence
  spacer sequence GTCN PAM
cccggcccagcaggaaggga

SEQ ID NO: 15529 - RNA, 20 nt, Artificial Sequence
  spacer sequence GTCN PAM
ccugccaacugcccccauug

SEQ ID NO: 15530 - RNA, 20 nt, Artificial Sequence
  spacer sequence GTCN PAM
gggcucuuuguggucagccu

SEQ ID NO: 15531 - RNA, 20 nt, Artificial Sequence
  spacer sequence GTCN PAM
gccuaggccagaggaagccu

SEQ ID NO: 15532 - RNA, 20 nt, Artificial Sequence
  spacer sequence GTCN PAM
aucugcagaggcuuccucug

SEQ ID NO: 15533 - RNA, 20 nt, Artificial Sequence
  spacer sequence GTCN PAM
agcugcaggcccugggugcc

SEQ ID NO: 15534 - RNA, 20 nt, Artificial Sequence
  spacer sequence GTCN PAM
ugaugaacaucucccaggau

SEQ ID NO: 15535 - RNA, 20 nt, Artificial Sequence
  spacer sequence GTCN PAM
gcccaucaaaggucaugaug

SEQ ID NO: 15536 - RNA, 20 nt, Artificial Sequence
  spacer sequence GTCN PAM
agcgugcagucugcccauca

SEQ ID NO: 15537 - RNA, 20 nt, Artificial Sequence
  spacer sequence GTCN PAM
cacgccucccccacuaauga

SEQ ID NO: 15538 - RNA, 20 nt, Artificial Sequence
  spacer sequence GTCN PAM
guaggagccacgacuuccag

SEQ ID NO: 15539 - RNA, 20 nt, Artificial Sequence
  spacer sequence GTCN PAM
uggcuccuacagaccucaca

SEQ ID NO: 15540 - RNA, 20 nt, Artificial Sequence
  spacer sequence GTCN PAM
gagaugccgucagcugggug

SEQ ID NO: 15541 - RNA, 20 nt, Artificial Sequence
  spacer sequence GTCN PAM
gcugggugaugacucuccca

SEQ ID NO: 15542 - RNA, 20 nt, Artificial Sequence
  spacer sequence GTCN PAM
ucacccagcugacggcaucu

SEQ ID NO: 15543 - RNA, 20 nt, Artificial Sequence
  spacer sequence GTCN PAM
gugagcaauguggcuccugc

SEQ ID NO: 15544 - RNA, 20 nt, Artificial Sequence
  spacer sequence GTCN PAM
ucaguccacacgccgccagc

SEQ ID NO: 15545 - RNA, 20 nt, Artificial Sequence
  spacer sequence GTCN PAM
acacgccgccagccaaggug

SEQ ID NO: 15546 - RNA, 20 nt, Artificial Sequence
  spacer sequence GTCN PAM
ucagcuccaggcuugcucag

SEQ ID NO: 15547 - RNA, 20 nt, Artificial Sequence
  spacer sequence GTCN PAM
gcuuguccucagcuccaggc

SEQ ID NO: 15548 - RNA, 20 nt, Artificial Sequence
  spacer sequence GTCN PAM
aggaagccgggcgcgggcag

SEQ ID NO: 15549 - RNA, 20 nt, Artificial Sequence
  spacer sequence GTCN PAM
gaguccaggaagccgggcgc

SEQ ID NO: 15550 - RNA, 20 nt, Artificial Sequence
  spacer sequence GTCN PAM
aucaacugcccaggcagcag

SEQ ID NO: 15551 - RNA, 20 nt, Artificial Sequence
  spacer sequence GTCN PAM
gggaggugccugcccagggc

SEQ ID NO: 15552 - RNA, 20 nt, Artificial Sequence
  spacer sequence GTCN PAM
ugagugagaagccggcacau

SEQ ID NO: 15553 - RNA, 20 nt, Artificial Sequence
  spacer sequence GTCN PAM
cuacuucugaaucucaggau

SEQ ID NO: 15554 - RNA, 20 nt, Artificial Sequence
  spacer sequence GTCN PAM
cugccacugaagagaugacc

SEQ ID NO: 15555 - RNA, 20 nt, Artificial Sequence
  spacer sequence GTCN PAM
ucucuucaguggcagggacu

SEQ ID NO: 15556 - RNA, 20 nt, Artificial Sequence
  spacer sequence GTCN PAM
cggaaagcagggucaucucu

SEQ ID NO: 15557 - RNA, 20 nt, Artificial Sequence
  spacer sequence GTCN PAM
guagaccagggagaaggugu

SEQ ID NO: 15558 - RNA, 20 nt, Artificial Sequence
  spacer sequence GTCN PAM
acagacagaagccuccggga

SEQ ID NO: 15559 - RNA, 20 nt, Artificial Sequence
  spacer sequence GTCN PAM
uuuacuaccacucaggagcc

SEQ ID NO: 15560 - RNA, 20 nt, Artificial Sequence
  spacer sequence GTCN PAM
augugucuuuuacuaccacu

SEQ ID NO: 15561 - RNA, 20 nt, Artificial Sequence
  spacer sequence GTCN PAM
uccuagcacuuugggaggcc

SEQ ID NO: 15562 - RNA, 20 nt, Artificial Sequence
  spacer sequence GTCN PAM
ccugcgguggggagcuccag

SEQ ID NO: 15563 - RNA, 20 nt, Artificial Sequence
  spacer sequence GTCN PAM
ggagcuccccaccgcaggug

SEQ ID NO: 15564 - RNA, 20 nt, Artificial Sequence
  spacer sequence GTCN PAM
cagauuccauaaggacugag

SEQ ID NO: 15565 - RNA, 20 nt, Artificial Sequence
  spacer sequence GTCN PAM
uuauggaaucugagacagca

SEQ ID NO: 15566 - RNA, 20 nt, Artificial Sequence
  spacer sequence GTCN PAM
caguccuuauggaaucugag

SEQ ID NO: 15567 - RNA, 20 nt, Artificial Sequence
  spacer sequence GTCN PAM
uguucucaguaaugaaaguc

SEQ ID NO: 15568 - RNA, 20 nt, Artificial Sequence
  spacer sequence GTCN PAM
uuuauaccauaauuguauau

SEQ ID NO: 15569 - RNA, 20 nt, Artificial Sequence
  spacer sequence GTCN PAM
gaaguuauauauacaauuau

SEQ ID NO: 15570 - RNA, 20 nt, Artificial Sequence
  spacer sequence GTCN PAM
ggcagggccaagaggauaug

SEQ ID NO: 15571 - RNA, 20 nt, Artificial Sequence
  spacer sequence GTCN PAM
gccaauggugagucuggcag

SEQ ID NO: 15572 - RNA, 20 nt, Artificial Sequence
  spacer sequence GTCN PAM
aucuaaacacacacacacac

SEQ ID NO: 15573 - RNA, 20 nt, Artificial Sequence
  spacer sequence GTCN PAM
cccaggcuggagugcagugg

SEQ ID NO: 15574 - RNA, 20 nt, Artificial Sequence
  spacer sequence GTCN PAM
cgaacuccugaccucaggug

SEQ ID NO: 15575 - RNA, 20 nt, Artificial Sequence
  spacer sequence GTCN PAM
ggaguucgagaccagccugg

SEQ ID NO: 15576 - RNA, 20 nt, Artificial Sequence
  spacer sequence GTCN PAM
ccagcuacucucaaauauuu

SEQ ID NO: 15577 - RNA, 20 nt, Artificial Sequence
  spacer sequence GTCN PAM
ccuuuauguguacacugaga

SEQ ID NO: 15578 - RNA, 20 nt, Artificial Sequence
  spacer sequence GTCN PAM
uuguucuugggaaacaauag

SEQ ID NO: 15579 - RNA, 20 nt, Artificial Sequence
  spacer sequence GTCN PAM
ucccagcacuuugagaggcc

SEQ ID NO: 15580 - RNA, 20 nt, Artificial Sequence
  spacer sequence GTCN PAM
agagauugagaccauccugg

SEQ ID NO: 15581 - RNA, 20 nt, Artificial Sequence
  spacer sequence GTCN PAM
caaucucuugaccucgugau

SEQ ID NO: 15582 - RNA, 20 nt, Artificial Sequence
  spacer sequence GTCN PAM
cuacuaaaaauacaaaaauu

SEQ ID NO: 15583 - RNA, 20 nt, Artificial Sequence
  spacer sequence GTCN PAM
cagcuacucgggaggcugag

SEQ ID NO: 15584 - RNA, 20 nt, Artificial Sequence
  spacer sequence GTCN PAM
cgcuguguugcccaggcugg

SEQ ID NO: 15585 - RNA, 20 nt, Artificial Sequence
  spacer sequence GTCN PAM
ccccugcuggagugcaguga

SEQ ID NO: 15586 - RNA, 20 nt, Artificial Sequence
  spacer sequence GTCN PAM
cugcacuccagcagggguga

SEQ ID NO: 15587 - RNA, 20 nt, Artificial Sequence
  spacer sequence GTCN PAM
aggcugcagugagccgugau

SEQ ID NO: 15588 - RNA, 20 nt, Artificial Sequence
  spacer sequence GTCN PAM
aggucgaggcugcagugagc

SEQ ID NO: 15589 - RNA, 20 nt, Artificial Sequence
  spacer sequence GTCN PAM
cagcuacuugggaggcugag

SEQ ID NO: 15590 - RNA, 20 nt, Artificial Sequence
  spacer sequence GTCN PAM
cguuacguugcccaggcugg

SEQ ID NO: 15591 - RNA, 20 nt, Artificial Sequence
  spacer sequence GTCN PAM
ugaacuccuggccucccgua

SEQ ID NO: 15592 - RNA, 20 nt, Artificial Sequence
  spacer sequence GTCN PAM
uucucagcugggcgcagauc

SEQ ID NO: 15593 - RNA, 20 nt, Artificial Sequence
  spacer sequence GTCN PAM
ucauuuaaauuucaaaaauu

SEQ ID NO: 15594 - RNA, 20 nt, Artificial Sequence
  spacer sequence GTCN PAM
aguuucggucuucauuuaaa

SEQ ID NO: 15595 - RNA, 20 nt, Artificial Sequence
  spacer sequence GTCN PAM
gacgaguuccuucugccagu

SEQ ID NO: 15596 - RNA, 20 nt, Artificial Sequence
  spacer sequence GTCN PAM
gaccaguccaguuucggucu

SEQ ID NO: 15597 - RNA, 20 nt, Artificial Sequence
  spacer sequence GTCN PAM
uccaagcagcccaguacccc

SEQ ID NO: 15598 - RNA, 20 nt, Artificial Sequence
  spacer sequence GTCN PAM
gcacugcacccacccaacag

SEQ ID NO: 15599 - RNA, 20 nt, Artificial Sequence
  spacer sequence GTCN PAM
cuugaagaaacagcagccug

SEQ ID NO: 15600 - RNA, 20 nt, Artificial Sequence
  spacer sequence GTCN PAM
guuccagccaggcuuggggg

SEQ ID NO: 15601 - RNA, 20 nt, Artificial Sequence
  spacer sequence GTCN PAM
gggccagccccgcccacauc

SEQ ID NO: 15602 - RNA, 20 nt, Artificial Sequence
  spacer sequence GTCN PAM
cuaggccugaccucaacgcu

SEQ ID NO: 15603 - RNA, 20 nt, Artificial Sequence
  spacer sequence GTCN PAM
ggccuagagaccgugggagg

SEQ ID NO: 15604 - RNA, 20 nt, Artificial Sequence
  spacer sequence GTCN PAM
cccacgcacccuucgcaauc

SEQ ID NO: 15605 - RNA, 20 nt, Artificial Sequence
  spacer sequence GTCN PAM
cuaagggucaggaagcacag

SEQ ID NO: 15606 - RNA, 20 nt, Artificial Sequence
  spacer sequence GTCN PAM
ggaagcacagggcggcuggc

SEQ ID NO: 15607 - RNA, 20 nt, Artificial Sequence
  spacer sequence GTCN PAM
acaagcaaccccccagcccc

SEQ ID NO: 15608 - RNA, 20 nt, Artificial Sequence
  spacer sequence GTCN PAM
ucaaaacgucaacaagcaac

SEQ ID NO: 15609 - RNA, 20 nt, Artificial Sequence
  spacer sequence GTCN PAM
uucuuagggaaaaaagaagg

SEQ ID NO: 15610 - RNA, 20 nt, Artificial Sequence
  spacer sequence GTCN PAM
cuguuccuucuuuuuucccu

SEQ ID NO: 15611 - RNA, 20 nt, Artificial Sequence
  spacer sequence GTCN PAM
gccacagccaaccgccagga

SEQ ID NO: 15612 - RNA, 20 nt, Artificial Sequence
  spacer sequence GTCN PAM
gccccuggugaagugucugc

SEQ ID NO: 15613 - RNA, 20 nt, Artificial Sequence
  spacer sequence GTCN PAM
uuccuggcgagcuggcagga

SEQ ID NO: 15614 - RNA, 20 nt, Artificial Sequence
  spacer sequence GTCN PAM
gguugaacacguuacugccc

SEQ ID NO: 15615 - RNA, 20 nt, Artificial Sequence
  spacer sequence GTCN PAM
cugucagguugaacacguua

SEQ ID NO: 15616 - RNA, 20 nt, Artificial Sequence
  spacer sequence GTCN PAM
gggauacagggccccgcgug

SEQ ID NO: 15617 - RNA, 20 nt, Artificial Sequence
  spacer sequence GTCN PAM
ccagagagcaaaacaccgug

SEQ ID NO: 15618 - RNA, 20 nt, Artificial Sequence
  spacer sequence GTCN PAM
cagcugagauucagcucagg

SEQ ID NO: 15619 - RNA, 20 nt, Artificial Sequence
  spacer sequence GTCN PAM
cugagcugaaucucagcugu

SEQ ID NO: 15620 - RNA, 20 nt, Artificial Sequence
  spacer sequence GTCN PAM
ucuuucccagggaaagcagg

SEQ ID NO: 15621 - RNA, 20 nt, Artificial Sequence
  spacer sequence GTCN PAM
ccgauagaaccaccucuucc

SEQ ID NO: 15622 - RNA, 20 nt, Artificial Sequence
  spacer sequence GTCN PAM
uucaagcuucccccaagccc

SEQ ID NO: 15623 - RNA, 20 nt, Artificial Sequence
  spacer sequence GTCN PAM
cagacaugcccagugggugc

SEQ ID NO: 15624 - RNA, 20 nt, Artificial Sequence
  spacer sequence GTCN PAM
gagacaccacaaggcuuacc

SEQ ID NO: 15625 - RNA, 20 nt, Artificial Sequence
  spacer sequence GTCN PAM
gccauggcacccacugggca

SEQ ID NO: 15626 - RNA, 20 nt, Artificial Sequence
  spacer sequence GTCN PAM
ccauugggaguuggcacagu

SEQ ID NO: 15627 - RNA, 20 nt, Artificial Sequence
  spacer sequence GTCN PAM
ccauugggaguuggcacagc

SEQ ID NO: 15628 - RNA, 20 nt, Artificial Sequence
  spacer sequence GTCN PAM
cugcagggucgauggcggac

SEQ ID NO: 15629 - RNA, 20 nt, Artificial Sequence
  spacer sequence GTCN PAM
auggcggacgccuugggaga

SEQ ID NO: 15630 - RNA, 20 nt, Artificial Sequence
  spacer sequence GTCN PAM
gccaucgacccugcagcgac

SEQ ID NO: 15631 - RNA, 20 nt, Artificial Sequence
  spacer sequence GTCN PAM
ccuccgggcagaagagcugg

SEQ ID NO: 15632 - RNA, 20 nt, Artificial Sequence
  spacer sequence GTCN PAM
uggggcugucuccuccgggc

SEQ ID NO: 15633 - RNA, 20 nt, Artificial Sequence
  spacer sequence GTCN PAM
uuggugggggcaggcaggaa

SEQ ID NO: 15634 - RNA, 20 nt, Artificial Sequence
  spacer sequence GTCN PAM
cagcacuggcacuuccugcc

SEQ ID NO: 15635 - RNA, 20 nt, Artificial Sequence
  spacer sequence GTCN PAM
cuuauuggcagaugagaagg

SEQ ID NO: 15636 - RNA, 20 nt, Artificial Sequence
  spacer sequence GTCN PAM
gggguaaguaaguggggcca

SEQ ID NO: 15637 - RNA, 20 nt, Artificial Sequence
  spacer sequence GTCN PAM
cagcacuggccccacuuacu

SEQ ID NO: 15638 - RNA, 20 nt, Artificial Sequence
  spacer sequence GTCN PAM
guguccccccacccccgccc

SEQ ID NO: 15639 - RNA, 20 nt, Artificial Sequence
  spacer sequence GTCN PAM
ccccacccccgccccaggcu

SEQ ID NO: 15640 - RNA, 20 nt, Artificial Sequence
  spacer sequence GTCN PAM
acaucugaaaugaugcacag

SEQ ID NO: 15641 - RNA, 20 nt, Artificial Sequence
  spacer sequence GTCN PAM
cacuuggcagcagugcaggu

SEQ ID NO: 15642 - RNA, 20 nt, Artificial Sequence
  spacer sequence GTCN PAM
ccacuggccugucccaggaa

SEQ ID NO: 15643 - RNA, 20 nt, Artificial Sequence
  spacer sequence GTCN PAM
caggaacucaucgcccgcca

SEQ ID NO: 15644 - RNA, 20 nt, Artificial Sequence
  spacer sequence GTCN PAM
gcgugcggcucuguggcacg

SEQ ID NO: 15645 - RNA, 20 nt, Artificial Sequence
  spacer sequence GTCN PAM
ucuccccauggcaaggauug

SEQ ID NO: 15646 - RNA, 20 nt, Artificial Sequence
  spacer sequence GTCN PAM
gcagacagcaugggcgaggc

SEQ ID NO: 15647 - RNA, 20 nt, Artificial Sequence
  spacer sequence GTCN PAM
gcagacaugaaagaugaucc

SEQ ID NO: 15648 - RNA, 20 nt, Artificial Sequence
  spacer sequence GTCN PAM
gccucgcccaugcugucugc

SEQ ID NO: 15649 - RNA, 20 nt, Artificial Sequence
  spacer sequence GTCN PAM
cgugcacaaggacguuugcg

SEQ ID NO: 15650 - RNA, 20 nt, Artificial Sequence
  spacer sequence GTCN PAM
uugugcacgugacggcauac

SEQ ID NO: 15651 - RNA, 20 nt, Artificial Sequence
  spacer sequence GTCN PAM
gcugcuucugugguuugaau

SEQ ID NO: 15652 - RNA, 20 nt, Artificial Sequence
  spacer sequence GTCN PAM
uaauucaaaccacagaagca

SEQ ID NO: 15653 - RNA, 20 nt, Artificial Sequence
  spacer sequence GTCN PAM
ugauccugaauguuuucuca

SEQ ID NO: 15654 - RNA, 20 nt, Artificial Sequence
  spacer sequence GTCN PAM
ugacuggagcacgacccaag

SEQ ID NO: 15655 - RNA, 20 nt, Artificial Sequence
  spacer sequence GTCN PAM
agaccgcccacgaagagcuu

SEQ ID NO: 15656 - RNA, 20 nt, Artificial Sequence
  spacer sequence GTCN PAM
ugcuccagucaagaccgccc

SEQ ID NO: 15657 - RNA, 20 nt, Artificial Sequence
  spacer sequence GTCN PAM
gguggguacugcagaugggc

SEQ ID NO: 15658 - RNA, 20 nt, Artificial Sequence
  spacer sequence GTCN PAM
uagagcccaucugcaguacc

SEQ ID NO: 15659 - RNA, 20 nt, Artificial Sequence
  spacer sequence GTCN PAM
gcccgccucuugcuacuguc

SEQ ID NO: 15660 - RNA, 20 nt, Artificial Sequence
  spacer sequence GTCN PAM
uggauauuuuaaaguccuuu

SEQ ID NO: 15661 - RNA, 20 nt, Artificial Sequence
  spacer sequence GTCN PAM
uuuugacguuguucugauuu

SEQ ID NO: 15662 - RNA, 20 nt, Artificial Sequence
  spacer sequence GTCN PAM
aaaggacuuuaaaauaucca

SEQ ID NO: 15663 - RNA, 20 nt, Artificial Sequence
  spacer sequence GTCN PAM
ccugcccagaaaucagaaca

SEQ ID NO: 15664 - RNA, 20 nt, Artificial Sequence
  spacer sequence GTCN PAM
cagagcaaauacacacuuac

SEQ ID NO: 15665 - RNA, 20 nt, Artificial Sequence
  spacer sequence GTCN PAM
ucccuguaacuugggaugga

SEQ ID NO: 15666 - RNA, 20 nt, Artificial Sequence
  spacer sequence GTCN PAM
gccuccacaagccaccucag

SEQ ID NO: 15667 - RNA, 20 nt, Artificial Sequence
  spacer sequence GTCN PAM
ggaagugcagagggcugggg

SEQ ID NO: 15668 - RNA, 20 nt, Artificial Sequence
  spacer sequence GTCN PAM
gcgcuccuuggccacugcca

SEQ ID NO: 15669 - RNA, 20 nt, Artificial Sequence
  spacer sequence GTCN PAM
uguuugccuugccuuaaacg

SEQ ID NO: 15670 - RNA, 20 nt, Artificial Sequence
  spacer sequence GTCN PAM
aggaaggcaacguuuaaggc

SEQ ID NO: 15671 - RNA, 20 nt, Artificial Sequence
  spacer sequence GTCN PAM
gguuguaaccgcuggccacu

SEQ ID NO: 15672 - RNA, 20 nt, Artificial Sequence
  spacer sequence GTCN PAM
ucacguaaaucaggggcugc

SEQ ID NO: 15673 - RNA, 20 nt, Artificial Sequence
  spacer sequence GTCN PAM
accagccacgcaccgagcga

SEQ ID NO: 15674 - RNA, 20 nt, Artificial Sequence
  spacer sequence GTCN PAM
cugcucagaaaucgggaaga

SEQ ID NO: 15675 - RNA, 20 nt, Artificial Sequence
  spacer sequence GTCN PAM
uagauuguguuaucaugaaa

SEQ ID NO: 15676 - RNA, 20 nt, Artificial Sequence
  spacer sequence GTCN PAM
cgaggcuuuggguuugucaa

SEQ ID NO: 15677 - RNA, 20 nt, Artificial Sequence
  spacer sequence GTCN PAM
aauuuaaagacccaaacugu

SEQ ID NO: 15678 - RNA, 20 nt, Artificial Sequence
  spacer sequence GTCN PAM
uuaaauuugacaaacccaaa

SEQ ID NO: 15679 - RNA, 20 nt, Artificial Sequence
  spacer sequence GTCN PAM
ccacacaguuugggucuuua

SEQ ID NO: 15680 - RNA, 20 nt, Artificial Sequence
  spacer sequence GTCN PAM
gcuggccagcaccgucccca

SEQ ID NO: 15681 - RNA, 20 nt, Artificial Sequence
  spacer sequence GTCN PAM
ccccuguccuuccucugcuu

SEQ ID NO: 15682 - RNA, 20 nt, Artificial Sequence
  spacer sequence GTCN PAM
uuccucugcuucauuuuuuc

SEQ ID NO: 15683 - RNA, 20 nt, Artificial Sequence
  spacer sequence GTCN PAM
aggaaaaaaugaagcagagg

SEQ ID NO: 15684 - RNA, 20 nt, Artificial Sequence
  spacer sequence GTCN PAM
gaguccaggaaaaaaugaag

SEQ ID NO: 15685 - RNA, 20 nt, Artificial Sequence
  spacer sequence GTCN PAM
auugggaaggauuaagccuu

SEQ ID NO: 15686 - RNA, 20 nt, Artificial Sequence
  spacer sequence GTCN PAM
gcacaacagcagccacggca

SEQ ID NO: 15687 - RNA, 20 nt, Artificial Sequence
  spacer sequence GTCN PAM
aucugcaggaaauuucaaau

SEQ ID NO: 15688 - RNA, 20 nt, Artificial Sequence
  spacer sequence GTCN PAM
cucguuaagauugagggcga

SEQ ID NO: 15689 - RNA, 20 nt, Artificial Sequence
  spacer sequence GTCN PAM
cccucaaucuuaacgagcga

SEQ ID NO: 15690 - RNA, 20 nt, Artificial Sequence
  spacer sequence GTCN PAM
ucuggguuggcacucgagca

SEQ ID NO: 15691 - RNA, 20 nt, Artificial Sequence
  spacer sequence GTCN PAM
uuuuuuuuuucccuaagaua

SEQ ID NO: 15692 - RNA, 20 nt, Artificial Sequence
  spacer sequence GTCN PAM
gcuucccucugugcccugug

SEQ ID NO: 15693 - RNA, 20 nt, Artificial Sequence
  spacer sequence GTCN PAM
gcucgugcuggccacuuuac

SEQ ID NO: 15694 - RNA, 20 nt, Artificial Sequence
  spacer sequence GTCN PAM
ggggaucucaaguggagcag

SEQ ID NO: 15695 - RNA, 20 nt, Artificial Sequence
  spacer sequence GTCN PAM
gagaacccaaguugccacgu

SEQ ID NO: 15696 - RNA, 20 nt, Artificial Sequence
  spacer sequence GTCN PAM
gccaggcaagcaccagggcg

SEQ ID NO: 15697 - RNA, 20 nt, Artificial Sequence
  spacer sequence GTCN PAM
uggcauggggucuccuuggc

SEQ ID NO: 15698 - RNA, 20 nt, Artificial Sequence
  spacer sequence GTCN PAM
ccuuggcauuugggucucac

SEQ ID NO: 15699 - RNA, 20 nt, Artificial Sequence
  spacer sequence GTCN PAM
caccaccacccacaccucac

SEQ ID NO: 15700 - RNA, 20 nt, Artificial Sequence
  spacer sequence GTCN PAM
agcacguucuauggggcuaa

SEQ ID NO: 15701 - RNA, 20 nt, Artificial Sequence
  spacer sequence GTCN PAM
gcacuguccagcacguucua

SEQ ID NO: 15702 - RNA, 20 nt, Artificial Sequence
  spacer sequence GTCN PAM
auauguauuuacauccaucu

SEQ ID NO: 15703 - RNA, 20 nt, Artificial Sequence
  spacer sequence GTCN PAM
acauacaccauuccuaagga

SEQ ID NO: 15704 - RNA, 20 nt, Artificial Sequence
  spacer sequence GTCN PAM
uuaggaaugguguaugugga

SEQ ID NO: 15705 - RNA, 20 nt, Artificial Sequence
  spacer sequence GTCN PAM
ccuaaaaugacggccacccc

SEQ ID NO: 15706 - RNA, 20 nt, Artificial Sequence
  spacer sequence GTCN PAM
uuuuaggagacgcacccucc

SEQ ID NO: 15707 - RNA, 20 nt, Artificial Sequence
  spacer sequence GTCN PAM
gcacgcuggaaagcggcugc

SEQ ID NO: 15708 - RNA, 20 nt, Artificial Sequence
  spacer sequence GTCN PAM
ucuguguccaggccguguuc

SEQ ID NO: 15709 - RNA, 20 nt, Artificial Sequence
  spacer sequence GTCN PAM
aggccguguucccagcucca

SEQ ID NO: 15710 - RNA, 20 nt, Artificial Sequence
  spacer sequence GTCN PAM
cucauagcugguuuuuuuca

SEQ ID NO: 15711 - RNA, 20 nt, Artificial Sequence
  spacer sequence GTCN PAM
cguauuuccccaacgccugc

SEQ ID NO: 15712 - RNA, 20 nt, Artificial Sequence
  spacer sequence GTCN PAM
caguagggugguugggcggu

SEQ ID NO: 15713 - RNA, 20 nt, Artificial Sequence
  spacer sequence GTCN PAM
ggcugguucaccgcccaacc

SEQ ID NO: 15714 - RNA, 20 nt, Artificial Sequence
  spacer sequence GTCN PAM
agugucagagaagggcaguu

SEQ ID NO: 15715 - RNA, 20 nt, Artificial Sequence
  spacer sequence GTCN PAM
gagaagggcaguuacacaga

SEQ ID NO: 15716 - RNA, 20 nt, Artificial Sequence
  spacer sequence GTCN PAM
gcucuguggggcuggcucgc

SEQ ID NO: 15717 - RNA, 20 nt, Artificial Sequence
  spacer sequence GTCN PAM
cagcucccucuggcacuggg

SEQ ID NO: 15718 - RNA, 20 nt, Artificial Sequence
  spacer sequence GTCN PAM
cccaaggcaggggcgugugg

SEQ ID NO: 15719 - RNA, 20 nt, Artificial Sequence
  spacer sequence GTCN PAM
ccccaagguccugcugggac

SEQ ID NO: 15720 - RNA, 20 nt, Artificial Sequence
  spacer sequence GTCN PAM
ugcugggacuccugccgugc

SEQ ID NO: 15721 - RNA, 20 nt, Artificial Sequence
  spacer sequence GTCN PAM
cagcaggaccuuggggugac

SEQ ID NO: 15722 - RNA, 20 nt, Artificial Sequence
  spacer sequence GTCN PAM
cacuccgagccccgccagca

SEQ ID NO: 15723 - RNA, 20 nt, Artificial Sequence
  spacer sequence GTCN PAM
ugcuggcggggcucggagug

SEQ ID NO: 15724 - RNA, 20 nt, Artificial Sequence
  spacer sequence GTCN PAM
gcagaggagcuguguguggc

SEQ ID NO: 15725 - RNA, 20 nt, Artificial Sequence
  spacer sequence GTCN PAM
ccuggcucccacguccccug

SEQ ID NO: 15726 - RNA, 20 nt, Artificial Sequence
  spacer sequence GTCN PAM
ccugcuaggaugcguggucg

SEQ ID NO: 15727 - RNA, 20 nt, Artificial Sequence
  spacer sequence GTCN PAM
gcguuguuggcccuucaugu

SEQ ID NO: 15728 - RNA, 20 nt, Artificial Sequence
  spacer sequence GTCN PAM
gucagcacacacgugagcgg

SEQ ID NO: 15729 - RNA, 20 nt, Artificial Sequence
  spacer sequence GTCN PAM
gcacacacgugagcggggcc

SEQ ID NO: 15730 - RNA, 20 nt, Artificial Sequence
  spacer sequence GTCN PAM
ggauacccgccuccgggcug

SEQ ID NO: 15731 - RNA, 20 nt, Artificial Sequence
  spacer sequence GTCN PAM
ggcccugggaguguuggggc

SEQ ID NO: 15732 - RNA, 20 nt, Artificial Sequence
  spacer sequence GTCN PAM
gagaaaggcuggagccccaa

SEQ ID NO: 15733 - RNA, 20 nt, Artificial Sequence
  spacer sequence GTCN PAM
uccgagggcacagccuguuc

SEQ ID NO: 15734 - RNA, 20 nt, Artificial Sequence
  spacer sequence GTCN PAM
gugcugacgccacccucucc

SEQ ID NO: 15735 - RNA, 20 nt, Artificial Sequence
  spacer sequence GTCN PAM
gcacggacaccagggccagc

SEQ ID NO: 15736 - RNA, 20 nt, Artificial Sequence
  spacer sequence GTCN PAM
cggagguagucaugaucuau

SEQ ID NO: 15737 - RNA, 20 nt, Artificial Sequence
  spacer sequence GTCN PAM
ugaucuaugacgccgagaag

SEQ ID NO: 15738 - RNA, 20 nt, Artificial Sequence
  spacer sequence GTCN PAM
uagaucaugacuaccuccgu

SEQ ID NO: 15739 - RNA, 20 nt, Artificial Sequence
  spacer sequence GTCN PAM
aacuagaucugcccuuaccu

SEQ ID NO: 15740 - RNA, 20 nt, Artificial Sequence
  spacer sequence GTCN PAM
cuuccugaggcuguuugcua

SEQ ID NO: 15741 - RNA, 20 nt, Artificial Sequence
  spacer sequence GTCN PAM
ccaaaucgucccuuccugag

SEQ ID NO: 15742 - RNA, 20 nt, Artificial Sequence
  spacer sequence GTCN PAM
uuugucuccaaaucgucccu

SEQ ID NO: 15743 - RNA, 20 nt, Artificial Sequence
  spacer sequence GTCN PAM
gugcuucccgaggucagacg

SEQ ID NO: 15744 - RNA, 20 nt, Artificial Sequence
  spacer sequence GTCN PAM
gacgucacacauuguuuuuu

SEQ ID NO: 15745 - RNA, 20 nt, Artificial Sequence
  spacer sequence GTCN PAM
gaccucgggaagcacagaca

SEQ ID NO: 15746 - RNA, 20 nt, Artificial Sequence
  spacer sequence GTCN PAM
cacauuguuuuuuggcuugu

SEQ ID NO: 15747 - RNA, 20 nt, Artificial Sequence
  spacer sequence GTCN PAM
uaaaaacuucaaaagaacaa

SEQ ID NO: 15748 - RNA, 20 nt, Artificial Sequence
  spacer sequence GTCN PAM
ugagucucggccuggcuucu

SEQ ID NO: 15749 - RNA, 20 nt, Artificial Sequence
  spacer sequence GTCN PAM
cggccuggcuucuguuuuuc

SEQ ID NO: 15750 - RNA, 20 nt, Artificial Sequence
  spacer sequence GTCN PAM
ggaagagugugguccuucug

SEQ ID NO: 15751 - RNA, 20 nt, Artificial Sequence
  spacer sequence GTCN PAM
uucugcauuugaccuuccuu

SEQ ID NO: 15752 - RNA, 20 nt, Artificial Sequence
  spacer sequence GTCN PAM
aaugcagaaggaccacacuc

SEQ ID NO: 15753 - RNA, 20 nt, Artificial Sequence
  spacer sequence GTCN PAM
ucccaguguggccggucuca

SEQ ID NO: 15754 - RNA, 20 nt, Artificial Sequence
  spacer sequence GTCN PAM
cauuucgugucgucagcugg

SEQ ID NO: 15755 - RNA, 20 nt, Artificial Sequence
  spacer sequence GTCN PAM
ucagcugggucagcuggcuc

SEQ ID NO: 15756 - RNA, 20 nt, Artificial Sequence
  spacer sequence GTCN PAM
gcugggucagcuggcucggu

SEQ ID NO: 15757 - RNA, 20 nt, Artificial Sequence
  spacer sequence GTCN PAM
gcuggcucgguguggaguuu

SEQ ID NO: 15758 - RNA, 20 nt, Artificial Sequence
  spacer sequence GTCN PAM
gcagggcaggugggaggagg

SEQ ID NO: 15759 - RNA, 20 nt, Artificial Sequence
  spacer sequence GTCN PAM
ccucagggccuccccucauu

SEQ ID NO: 15760 - RNA, 20 nt, Artificial Sequence
  spacer sequence GTCN PAM
cagcuccacaaaccagcaug

SEQ ID NO: 15761 - RNA, 20 nt, Artificial Sequence
  spacer sequence GTCN PAM
gucccgcccgcccgcauggu

SEQ ID NO: 15762 - RNA, 20 nt, Artificial Sequence
  spacer sequence GTCN PAM
cgcccgcccgcaugguuuug

SEQ ID NO: 15763 - RNA, 20 nt, Artificial Sequence
  spacer sequence GTCN PAM
gcucacguggccggccaaaa

SEQ ID NO: 15764 - RNA, 20 nt, Artificial Sequence
  spacer sequence GTCN PAM
gcccgccacguccgugccgc

SEQ ID NO: 15765 - RNA, 20 nt, Artificial Sequence
  spacer sequence GTCN PAM
gugccgcccccgcaccaccg

SEQ ID NO: 15766 - RNA, 20 nt, Artificial Sequence
  spacer sequence GTCN PAM
gucggggcagccccgagcgc

SEQ ID NO: 15767 - RNA, 20 nt, Artificial Sequence
  spacer sequence GTCN PAM
gggcagccccgagcgccagg

SEQ ID NO: 15768 - RNA, 20 nt, Artificial Sequence
  spacer sequence GTCN PAM
guuacgcuguuaagucuuag

SEQ ID NO: 15769 - RNA, 20 nt, Artificial Sequence
  spacer sequence GTCN PAM
uagucguaacuuaauuuaga

SEQ ID NO: 15770 - RNA, 20 nt, Artificial Sequence
  spacer sequence GTCN PAM
uaacuuaauuuagacauaca

SEQ ID NO: 15771 - RNA, 20 nt, Artificial Sequence
  spacer sequence GTCN PAM
aaauuaaguuacgacuaaga

SEQ ID NO: 15772 - RNA, 20 nt, Artificial Sequence
  spacer sequence GTCN PAM
cuaagcauguaugucuaaau

SEQ ID NO: 15773 - RNA, 20 nt, Artificial Sequence
  spacer sequence GTCN PAM
cgcagucagaggagggagcg

SEQ ID NO: 15774 - RNA, 20 nt, Artificial Sequence
  spacer sequence GTCN PAM
gaggagggagcggcuuugcu

SEQ ID NO: 15775 - RNA, 20 nt, Artificial Sequence
  spacer sequence GTCN PAM
cgcuuccucaguggugaugu

SEQ ID NO: 15776 - RNA, 20 nt, Artificial Sequence
  spacer sequence GTCN PAM
ccucuugacagccgcauucc

SEQ ID NO: 15777 - RNA, 20 nt, Artificial Sequence
  spacer sequence GTCN PAM
agaggcgacaucaccacuga

SEQ ID NO: 15778 - RNA, 20 nt, Artificial Sequence
  spacer sequence GTCN PAM
aggaaugcggcugucaagag

SEQ ID NO: 15779 - RNA, 20 nt, Artificial Sequence
  spacer sequence GTCN PAM
ugggggaggcgcccugagcg

SEQ ID NO: 15780 - RNA, 20 nt, Artificial Sequence
  spacer sequence GTCN PAM
gggcacagugcaagaggcgc

SEQ ID NO: 15781 - RNA, 20 nt, Artificial Sequence
  spacer sequence GTCN PAM
gaaaccacagggcucgccug

SEQ ID NO: 15782 - RNA, 20 nt, Artificial Sequence
  spacer sequence GTCN PAM
acuucuaaauacguuguuuc

SEQ ID NO: 15783 - RNA, 20 nt, Artificial Sequence
  spacer sequence GTCN PAM
cccuccggcugcccagagcu

SEQ ID NO: 15784 - RNA, 20 nt, Artificial Sequence
  spacer sequence GTCN PAM
uguccugucccguguggacg

SEQ ID NO: 15785 - RNA, 20 nt, Artificial Sequence
  spacer sequence GTCN PAM
ugucccguguggacgggacg

SEQ ID NO: 15786 - RNA, 20 nt, Artificial Sequence
  spacer sequence GTCN PAM
cguguggacgggacguggcg

SEQ ID NO: 15787 - RNA, 20 nt, Artificial Sequence
  spacer sequence GTCN PAM
acacgggacaggacaggacg

SEQ ID NO: 15788 - RNA, 20 nt, Artificial Sequence
  spacer sequence GTCN PAM
cguccacacgggacaggaca

SEQ ID NO: 15789 - RNA, 20 nt, Artificial Sequence
  spacer sequence GTCN PAM
cugaguccacacugguguac

SEQ ID NO: 15790 - RNA, 20 nt, Artificial Sequence
  spacer sequence GTCN PAM
acacugguguacagagcacu

SEQ ID NO: 15791 - RNA, 20 nt, Artificial Sequence
  spacer sequence GTCN PAM
uuagcuguugggcuuugaaa

SEQ ID NO: 15792 - RNA, 20 nt, Artificial Sequence
  spacer sequence GTCN PAM
cuugggugucaggcgagugg

SEQ ID NO: 15793 - RNA, 20 nt, Artificial Sequence
  spacer sequence GTCN PAM
ggcgaguggagggccggaga

SEQ ID NO: 15794 - RNA, 20 nt, Artificial Sequence
  spacer sequence GTCN PAM
cuccggcccuccacucgccu

SEQ ID NO: 15795 - RNA, 20 nt, Artificial Sequence
  spacer sequence GTCN PAM
ucccagagaguguguccccu

SEQ ID NO: 15796 - RNA, 20 nt, Artificial Sequence
  spacer sequence GTCN PAM
ccuucccuuggccuuucugc

SEQ ID NO: 15797 - RNA, 20 nt, Artificial Sequence
  spacer sequence GTCN PAM
cagaagaugcagaaaggcca

SEQ ID NO: 15798 - RNA, 20 nt, Artificial Sequence
  spacer sequence GTCN PAM
gugucccccuccccgccacc

SEQ ID NO: 15799 - RNA, 20 nt, Artificial Sequence
  spacer sequence GTCN PAM
cccuccccgccaccuccucc

SEQ ID NO: 15800 - RNA, 20 nt, Artificial Sequence
  spacer sequence GTCN PAM
guggagaggaagagggagga

SEQ ID NO: 15801 - RNA, 20 nt, Artificial Sequence
  spacer sequence GTCN PAM
uggccaugucccugucaggg

SEQ ID NO: 15802 - RNA, 20 nt, Artificial Sequence
  spacer sequence GTCN PAM
cugucagggaccccgccugu

SEQ ID NO: 15803 - RNA, 20 nt, Artificial Sequence
  spacer sequence GTCN PAM
gggaccccgccugugucucg

SEQ ID NO: 15804 - RNA, 20 nt, Artificial Sequence
  spacer sequence GTCN PAM
cugacagggacauggccaug

SEQ ID NO: 15805 - RNA, 20 nt, Artificial Sequence
  spacer sequence GTCN PAM
cgggcacacagugucugugc

SEQ ID NO: 15806 - RNA, 20 nt, Artificial Sequence
  spacer sequence GTCN PAM
gugcgggucccugcuuggcc

SEQ ID NO: 15807 - RNA, 20 nt, Artificial Sequence
  spacer sequence GTCN PAM
cugcuuggcccucccacguc

SEQ ID NO: 15808 - RNA, 20 nt, Artificial Sequence
  spacer sequence GTCN PAM
acccucggcccgcccgcucc

SEQ ID NO: 15809 - RNA, 20 nt, Artificial Sequence
  spacer sequence GTCN PAM
ccucaggucuucuccauccu

SEQ ID NO: 15810 - RNA, 20 nt, Artificial Sequence
  spacer sequence GTCN PAM
ucuccauccugcgcuccucu

SEQ ID NO: 15811 - RNA, 20 nt, Artificial Sequence
  spacer sequence GTCN PAM
cuccuccucuuccuccuccu

SEQ ID NO: 15812 - RNA, 20 nt, Artificial Sequence
  spacer sequence GTCN PAM
gguugcagacacugcgugca

SEQ ID NO: 15813 - RNA, 20 nt, Artificial Sequence
  spacer sequence GTCN PAM
gcaaccagacggagggggag

SEQ ID NO: 15814 - RNA, 20 nt, Artificial Sequence
  spacer sequence GTCN PAM
cgcucaggugcacacgugug

SEQ ID NO: 15815 - RNA, 20 nt, Artificial Sequence
  spacer sequence GTCN PAM
ugagcacacgugugcaccug

SEQ ID NO: 15816 - RNA, 20 nt, Artificial Sequence
  spacer sequence GTCN PAM
cugugguucaggagccuccc

SEQ ID NO: 15817 - RNA, 20 nt, Artificial Sequence
  spacer sequence GTCN PAM
ccucacagucugagcugccc

SEQ ID NO: 15818 - RNA, 20 nt, Artificial Sequence
  spacer sequence GTCN PAM
gagcugcccuuucugccccg

SEQ ID NO: 15819 - RNA, 20 nt, Artificial Sequence
  spacer sequence GTCN PAM
uguuucugccuggucccagc

SEQ ID NO: 15820 - RNA, 20 nt, Artificial Sequence
  spacer sequence GTCN PAM
cagcuacagcagcccuggcc

SEQ ID NO: 15821 - RNA, 20 nt, Artificial Sequence
  spacer sequence GTCN PAM
cuucagcuugagaggcccca

SEQ ID NO: 15822 - RNA, 20 nt, Artificial Sequence
  spacer sequence GTCN PAM
ccugcuguguggugccuugu

SEQ ID NO: 15823 - RNA, 20 nt, Artificial Sequence
  spacer sequence GTCN PAM
cgcacccugugccucuggcg

SEQ ID NO: 15824 - RNA, 20 nt, Artificial Sequence
  spacer sequence GTCN PAM
cagcucuucccauguccauc

SEQ ID NO: 15825 - RNA, 20 nt, Artificial Sequence
  spacer sequence GTCN PAM
aucuuuguucugugaggucu

SEQ ID NO: 15826 - RNA, 20 nt, Artificial Sequence
  spacer sequence GTCN PAM
ugggcagcugucugccgggc

SEQ ID NO: 15827 - RNA, 20 nt, Artificial Sequence
  spacer sequence GTCN PAM
gccgggcacuuccaucuggg

SEQ ID NO: 15828 - RNA, 20 nt, Artificial Sequence
  spacer sequence GTCN PAM
ucccgaggcggggcccaggc

SEQ ID NO: 15829 - RNA, 20 nt, Artificial Sequence
  spacer sequence GTCN PAM
cgcuccaccuagccggggag

SEQ ID NO: 15830 - RNA, 20 nt, Artificial Sequence
  spacer sequence GTCN PAM
ccuccucuaggcgcaggagu

SEQ ID NO: 15831 - RNA, 20 nt, Artificial Sequence
  spacer sequence GTCN PAM
ggggugggcgcggcccccgg

SEQ ID NO: 15832 - RNA, 20 nt, Artificial Sequence
  spacer sequence GTCN PAM
gaccugcuggaacccguugu

SEQ ID NO: 15833 - RNA, 20 nt, Artificial Sequence
  spacer sequence GTCN PAM
gacucugcugccagcagcaa

SEQ ID NO: 15834 - RNA, 20 nt, Artificial Sequence
  spacer sequence GTCN PAM
acgauaugaccucuucuagg

SEQ ID NO: 15835 - RNA, 20 nt, Artificial Sequence
  spacer sequence GTCN PAM
uaucguagacaucuaugcau

SEQ ID NO: 15836 - RNA, 20 nt, Artificial Sequence
  spacer sequence GTCN PAM
uagaagaggucauaucguag

SEQ ID NO: 15837 - RNA, 20 nt, Artificial Sequence
  spacer sequence GTCN PAM
gcacuagcugcaaagcaaau

SEQ ID NO: 15838 - RNA, 20 nt, Artificial Sequence
  spacer sequence GTCN PAM
ggggugugcaccguggaugu

SEQ ID NO: 15839 - RNA, 20 nt, Artificial Sequence
  spacer sequence GTCN PAM
gaggcccgugcuugaauauu

SEQ ID NO: 15840 - RNA, 20 nt, Artificial Sequence
  spacer sequence GTCN PAM
gccaguagcgauggaggccc

SEQ ID NO: 15841 - RNA, 20 nt, Artificial Sequence
  spacer sequence GTCN PAM
ccgcugcuguuuuauaagau

SEQ ID NO: 15842 - RNA, 20 nt, Artificial Sequence
  spacer sequence GTCN PAM
caaagauuuggaacaaggag

SEQ ID NO: 15843 - RNA, 20 nt, Artificial Sequence
  spacer sequence GTCN PAM
ggggcggaggcuugacucag

SEQ ID NO: 15844 - RNA, 20 nt, Artificial Sequence
  spacer sequence GTCN PAM
agccuccgccccagacaccc

SEQ ID NO: 15845 - RNA, 20 nt, Artificial Sequence
  spacer sequence GTCN PAM
gcagagccgucaccgggagu

SEQ ID NO: 15846 - RNA, 20 nt, Artificial Sequence
  spacer sequence GTCN PAM
ccgggagugcggacgucacc

SEQ ID NO: 15847 - RNA, 20 nt, Artificial Sequence
  spacer sequence GTCN PAM
gcacucccggugacggcucu

SEQ ID NO: 15848 - RNA, 20 nt, Artificial Sequence
  spacer sequence GTCN PAM
ccgucuguccacuccgugug

SEQ ID NO: 15849 - RNA, 20 nt, Artificial Sequence
  spacer sequence GTCN PAM
guccacuccgugugcagucg

SEQ ID NO: 15850 - RNA, 20 nt, Artificial Sequence
  spacer sequence GTCN PAM
acuccgugugcagucgagug

SEQ ID NO: 15851 - RNA, 20 nt, Artificial Sequence
  spacer sequence GTCN PAM
agugguggcuccuggggagg

SEQ ID NO: 15852 - RNA, 20 nt, Artificial Sequence
  spacer sequence GTCN PAM
aucccucggcccgucccuaa

SEQ ID NO: 15853 - RNA, 20 nt, Artificial Sequence
  spacer sequence GTCN PAM
cuaauacuguucaucauccu

SEQ ID NO: 15854 - RNA, 20 nt, Artificial Sequence
  spacer sequence GTCN PAM
caacacccugcuaccuugau

SEQ ID NO: 15855 - RNA, 20 nt, Artificial Sequence
  spacer sequence GTCN PAM
uuggcuagguuuuggauuua

SEQ ID NO: 15856 - RNA, 20 nt, Artificial Sequence
  spacer sequence GTCN PAM
ucgaaaguaauaaauccaaa

SEQ ID NO: 15857 - RNA, 20 nt, Artificial Sequence
  spacer sequence GTCN PAM
acugauuguucguccucgaa

SEQ ID NO: 15858 - RNA, 20 nt, Artificial Sequence
  spacer sequence GTCN PAM
acaugcauuuucacgacauc

SEQ ID NO: 15859 - RNA, 20 nt, Artificial Sequence
  spacer sequence GTCN PAM
ugaaaaugcauguugacagc

SEQ ID NO: 15860 - RNA, 20 nt, Artificial Sequence
  spacer sequence GTCN PAM
uaagguaaaauaaaacuaca

SEQ ID NO: 15861 - RNA, 20 nt, Artificial Sequence
  spacer sequence GTCN PAM
uaggcaacuuagggguuuca

SEQ ID NO: 15862 - RNA, 20 nt, Artificial Sequence
  spacer sequence GTCN PAM
ggcgaguucguccugugaac

SEQ ID NO: 15863 - RNA, 20 nt, Artificial Sequence
  spacer sequence GTCN PAM
ugugaaccuuugcugcguga

SEQ ID NO: 15864 - RNA, 20 nt, Artificial Sequence
  spacer sequence GTCN PAM
guagacgugaggaggguccc

SEQ ID NO: 15865 - RNA, 20 nt, Artificial Sequence
  spacer sequence GTCN PAM
acagacccaggcccaccuca

SEQ ID NO: 15866 - RNA, 20 nt, Artificial Sequence
  spacer sequence GTCN PAM
cauccuuccccagcacccuu

SEQ ID NO: 15867 - RNA, 20 nt, Artificial Sequence
  spacer sequence GTCN PAM
cccagagggaggggcuccag

SEQ ID NO: 15868 - RNA, 20 nt, Artificial Sequence
  spacer sequence GTCN PAM
caggucacccagagggaggg

SEQ ID NO: 15869 - RNA, 20 nt, Artificial Sequence
  spacer sequence GTCN PAM
ggaguucgagaccaacaugg

SEQ ID NO: 15870 - RNA, 20 nt, Artificial Sequence
  spacer sequence GTCN PAM
cgaacuccugaccucaggug

SEQ ID NO: 15871 - RNA, 20 nt, Artificial Sequence
  spacer sequence GTCN PAM
uuacuaaaaauacaaaauua

SEQ ID NO: 15872 - RNA, 20 nt, Artificial Sequence
  spacer sequence GTCN PAM
caaaaaaaaaaaaaagucac

SEQ ID NO: 15873 - RNA, 20 nt, Artificial Sequence
  spacer sequence GTCN PAM
cuccuacauaguucuaguua

SEQ ID NO: 15874 - RNA, 20 nt, Artificial Sequence
  spacer sequence GTCN PAM
ugcucugucgcccaggcugg

SEQ ID NO: 15875 - RNA, 20 nt, Artificial Sequence
  spacer sequence GTCN PAM
cccaggcuggagugccguug

SEQ ID NO: 15876 - RNA, 20 nt, Artificial Sequence
  spacer sequence GTCN PAM
aggcugcagugagccgugau

SEQ ID NO: 15877 - RNA, 20 nt, Artificial Sequence
  spacer sequence GTCN PAM
guguguacacaaauuuuugu

SEQ ID NO: 15878 - RNA, 20 nt, Artificial Sequence
  spacer sequence GTCN PAM
cacuguguuguccuuacuaa

SEQ ID NO: 15879 - RNA, 20 nt, Artificial Sequence
  spacer sequence GTCN PAM
uuacuaacuuuauauacaaa

SEQ ID NO: 15880 - RNA, 20 nt, Artificial Sequence
  spacer sequence GTCN PAM
cugcuccaguaucuguaaug

SEQ ID NO: 15881 - RNA, 20 nt, Artificial Sequence
  spacer sequence GTCN PAM
cacugugggaggaacacgag

SEQ ID NO: 15882 - RNA, 20 nt, Artificial Sequence
  spacer sequence GTCN PAM
ucuacacgauggcacccaca

SEQ ID NO: 15883 - RNA, 20 nt, Artificial Sequence
  spacer sequence GTCN PAM
gagccucggguucgugcucc

SEQ ID NO: 15884 - RNA, 20 nt, Artificial Sequence
  spacer sequence GTCN PAM
ccgccccugucugagccucg

SEQ ID NO: 15885 - RNA, 20 nt, Artificial Sequence
  spacer sequence GTCN PAM
aaagucccacuccguggagg

SEQ ID NO: 15886 - RNA, 20 nt, Artificial Sequence
  spacer sequence GTCN PAM
cacuccguggaggaagcggc

SEQ ID NO: 15887 - RNA, 20 nt, Artificial Sequence
  spacer sequence GTCN PAM
gcagagccgcuuccuccacg

SEQ ID NO: 15888 - RNA, 20 nt, Artificial Sequence
  spacer sequence GTCN PAM
ggagggcaaaacacaggcug

SEQ ID NO: 15889 - RNA, 20 nt, Artificial Sequence
  spacer sequence GTCN PAM
cgcccccucggccgugcgcg

SEQ ID NO: 15890 - RNA, 20 nt, Artificial Sequence
  spacer sequence GTCN PAM
cgcgauaacugcgcaggcgc

SEQ ID NO: 15891 - RNA, 20 nt, Artificial Sequence
  spacer sequence GTCN PAM
gcgccugcgcaguuaucgcg

SEQ ID NO: 15892 - RNA, 20 nt, Artificial Sequence
  spacer sequence GTCN PAM
cugccgggccuauccggcuc

SEQ ID NO: 15893 - RNA, 20 nt, Artificial Sequence
  spacer sequence GTCN PAM
gagguuggauggagccggau

SEQ ID NO: 15894 - RNA, 20 nt, Artificial Sequence
  spacer sequence GTCN PAM
cgcgggggccgcaguucguc

SEQ ID NO: 15895 - RNA, 20 nt, Artificial Sequence
  spacer sequence GTCN PAM
ccgcggcuacggcggcuugc

SEQ ID NO: 15896 - RNA, 20 nt, Artificial Sequence
  spacer sequence GTCN PAM
ggagcaagccgccguagccg

SEQ ID NO: 15897 - RNA, 20 nt, Artificial Sequence
  spacer sequence GTCN PAM
gccccucgccccaacaucca

SEQ ID NO: 15898 - RNA, 20 nt, Artificial Sequence
  spacer sequence GTCN PAM
ggacgacgcggggcugggaa

SEQ ID NO: 15899 - RNA, 20 nt, Artificial Sequence
  spacer sequence GTCN PAM
cgacacccaccaaguccgcc

SEQ ID NO: 15900 - RNA, 20 nt, Artificial Sequence
  spacer sequence GTCN PAM
ucccgacacccaccaagucc

SEQ ID NO: 15901 - RNA, 20 nt, Artificial Sequence
  spacer sequence GTCN PAM
gggccuucauguccgggucc

SEQ ID NO: 15902 - RNA, 20 nt, Artificial Sequence
  spacer sequence GTCN PAM
ggguccucguaacccggagc

SEQ ID NO: 15903 - RNA, 20 nt, Artificial Sequence
  spacer sequence GTCN PAM
ucguaacccggagccgcgag

SEQ ID NO: 15904 - RNA, 20 nt, Artificial Sequence
  spacer sequence GTCN PAM
ccggggaucacucgcggcuc

SEQ ID NO: 15905 - RNA, 20 nt, Artificial Sequence
  spacer sequence GTCN PAM
aagcggugugucccugucgg

SEQ ID NO: 15906 - RNA, 20 nt, Artificial Sequence
  spacer sequence GTCN PAM
cugucgggcuucuguccccg

SEQ ID NO: 15907 - RNA, 20 nt, Artificial Sequence
  spacer sequence GTCN PAM
ggcuucuguccccggcggcg

SEQ ID NO: 15908 - RNA, 20 nt, Artificial Sequence
  spacer sequence GTCN PAM
ccggcggcgccgcgcgucuu

SEQ ID NO: 15909 - RNA, 20 nt, Artificial Sequence
  spacer sequence GTCN PAM
uccgcgguguccucgggccc

SEQ ID NO: 15910 - RNA, 20 nt, Artificial Sequence
  spacer sequence GTCN PAM
ucgggcccgguggccccggg

SEQ ID NO: 15911 - RNA, 20 nt, Artificial Sequence
  spacer sequence GTCN PAM
ggaucccgcugacgcccgau

SEQ ID NO: 15912 - RNA, 20 nt, Artificial Sequence
  spacer sequence GTCN PAM
gcgggaucccgacacccauc

SEQ ID NO: 15913 - RNA, 20 nt, Artificial Sequence
  spacer sequence GTCN PAM
gcuucuucuucugcucuacu

SEQ ID NO: 15914 - RNA, 20 nt, Artificial Sequence
  spacer sequence GTCN PAM
acgccgcgguaggugaacuu

SEQ ID NO: 15915 - RNA, 20 nt, Artificial Sequence
  spacer sequence GTCN PAM
agguccacgccgcgguaggu

SEQ ID NO: 15916 - RNA, 20 nt, Artificial Sequence
  spacer sequence GTCN PAM
agcagcuggucgagguccac

SEQ ID NO: 15917 - RNA, 20 nt, Artificial Sequence
  spacer sequence GTCN PAM
uaguaagggcggccgcgggg

SEQ ID NO: 15918 - RNA, 20 nt, Artificial Sequence
  spacer sequence GTCN PAM
cgggcaggggcugggccagc

SEQ ID NO: 15919 - RNA, 20 nt, Artificial Sequence
  spacer sequence GTCN PAM
gggugagggcggcggggcgg

SEQ ID NO: 15920 - RNA, 20 nt, Artificial Sequence
  spacer sequence GTCN PAM
aagcgccucugcggcggugg

SEQ ID NO: 15921 - RNA, 20 nt, Artificial Sequence
  spacer sequence GTCN PAM
ccgcgcggguuuggaacuga

SEQ ID NO: 15922 - RNA, 20 nt, Artificial Sequence
  spacer sequence GTCN PAM
ugcgcccagaaaacugucca

SEQ ID NO: 15923 - RNA, 20 nt, Artificial Sequence
  spacer sequence GTCN PAM
agagacguugagguuuuugc

SEQ ID NO: 15924 - RNA, 20 nt, Artificial Sequence
  spacer sequence GTCN PAM
cuggacaguuuucugggcgc

SEQ ID NO: 15925 - RNA, 20 nt, Artificial Sequence
  spacer sequence GTCN PAM
guagcccacgugacuuagaa

SEQ ID NO: 15926 - RNA, 20 nt, Artificial Sequence
  spacer sequence GTCN PAM
cgugggcuacagacaggggc

SEQ ID NO: 15927 - RNA, 20 nt, Artificial Sequence
  spacer sequence GTCN PAM
aacgcagccccuuauucuaa

SEQ ID NO: 15928 - RNA, 20 nt, Artificial Sequence
  spacer sequence GTCN PAM
cuggguccuuuccaggcagg

SEQ ID NO: 15929 - RNA, 20 nt, Artificial Sequence
  spacer sequence GTCN PAM
uuuccaggcagggugguggu

SEQ ID NO: 15930 - RNA, 20 nt, Artificial Sequence
  spacer sequence GTCN PAM
cauccugucgcccaggcugg

SEQ ID NO: 15931 - RNA, 20 nt, Artificial Sequence
  spacer sequence GTCN PAM
cccaggcuggagugcaaugg

SEQ ID NO: 15932 - RNA, 20 nt, Artificial Sequence
  spacer sequence GTCN PAM
cagcucacugcagccuccca

SEQ ID NO: 15933 - RNA, 20 nt, Artificial Sequence
  spacer sequence GTCN PAM
ggcuaauuuuuguauuuuua

SEQ ID NO: 15934 - RNA, 20 nt, Artificial Sequence
  spacer sequence GTCN PAM
cuacuaaaaauacaaaaauu

SEQ ID NO: 15935 - RNA, 20 nt, Artificial Sequence
  spacer sequence GTCN PAM
caaacuccugaccucaggug

SEQ ID NO: 15936 - RNA, 20 nt, Artificial Sequence
  spacer sequence GTCN PAM
ggaguuugagaccagccugg

SEQ ID NO: 15937 - RNA, 20 nt, Artificial Sequence
  spacer sequence GTCN PAM
ggcgcgguguucacgccugu

SEQ ID NO: 15938 - RNA, 20 nt, Artificial Sequence
  spacer sequence GTCN PAM
uccagguuggucuugaacuc

SEQ ID NO: 15939 - RNA, 20 nt, Artificial Sequence
  spacer sequence GTCN PAM
agguuggucuugaacuccug

SEQ ID NO: 15940 - RNA, 20 nt, Artificial Sequence
  spacer sequence GTCN PAM
ugaacuccugggcucaagcg

SEQ ID NO: 15941 - RNA, 20 nt, Artificial Sequence
  spacer sequence GTCN PAM
cuugagcccaggaguucaag

SEQ ID NO: 15942 - RNA, 20 nt, Artificial Sequence
  spacer sequence GTCN PAM
gaggcuguggucuccgggcc

SEQ ID NO: 15943 - RNA, 20 nt, Artificial Sequence
  spacer sequence GTCN PAM
ccgggccgcuuguucucucu

SEQ ID NO: 15944 - RNA, 20 nt, Artificial Sequence
  spacer sequence GTCN PAM
cacgguggcucuugcaugug

SEQ ID NO: 15945 - RNA, 20 nt, Artificial Sequence
  spacer sequence GTCN PAM
cgcauaucuggcgggggugc

SEQ ID NO: 15946 - RNA, 20 nt, Artificial Sequence
  spacer sequence GTCN PAM
cucuggcacccccgccagau

SEQ ID NO: 15947 - RNA, 20 nt, Artificial Sequence
  spacer sequence GTCN PAM
cuacaauggacagugacagg

SEQ ID NO: 15948 - RNA, 20 nt, Artificial Sequence
  spacer sequence GTCN PAM
auuguagugacuacaaugaa

SEQ ID NO: 15949 - RNA, 20 nt, Artificial Sequence
  spacer sequence GTCN PAM
cuguccauuguagugacuac

SEQ ID NO: 15950 - RNA, 20 nt, Artificial Sequence
  spacer sequence GTCN PAM
acugcggcucugucccugga

SEQ ID NO: 15951 - RNA, 20 nt, Artificial Sequence
  spacer sequence GTCN PAM
cuggagagaaccaagccuua

SEQ ID NO: 15952 - RNA, 20 nt, Artificial Sequence
  spacer sequence GTCN PAM
gccggagugcguagggucuc

SEQ ID NO: 15953 - RNA, 20 nt, Artificial Sequence
  spacer sequence GTCN PAM
ccccaggccgggccgcucac

SEQ ID NO: 15954 - RNA, 20 nt, Artificial Sequence
  spacer sequence GTCN PAM
ucaccacuuccggcuucucc

SEQ ID NO: 15955 - RNA, 20 nt, Artificial Sequence
  spacer sequence GTCN PAM
cgcaggugcgucuucaccac

SEQ ID NO: 15956 - RNA, 20 nt, Artificial Sequence
  spacer sequence GTCN PAM
acaacggcaagaccuucaac

SEQ ID NO: 15957 - RNA, 20 nt, Artificial Sequence
  spacer sequence GTCN PAM
ugccguuguagacgcccacc

SEQ ID NO: 15958 - RNA, 20 nt, Artificial Sequence
  spacer sequence GTCN PAM
cugccggcuggggugggcug

SEQ ID NO: 15959 - RNA, 20 nt, Artificial Sequence
  spacer sequence GTCN PAM
ccugaugcaggcgggaucag

SEQ ID NO: 15960 - RNA, 20 nt, Artificial Sequence
  spacer sequence GTCN PAM
gcugaucccgccugcaucag

SEQ ID NO: 15961 - RNA, 20 nt, Artificial Sequence
  spacer sequence GTCN PAM
cccgcagcccgagaugaucg

SEQ ID NO: 15962 - RNA, 20 nt, Artificial Sequence
  spacer sequence GTCN PAM
ugugcgccuuuauuagcuga

SEQ ID NO: 15963 - RNA, 20 nt, Artificial Sequence
  spacer sequence GTCN PAM
uuugcgcagcuuguucuucc

SEQ ID NO: 15964 - RNA, 20 nt, Artificial Sequence
  spacer sequence GTCN PAM
cgagcucugggaggggccug

SEQ ID NO: 15965 - RNA, 20 nt, Artificial Sequence
  spacer sequence GTCN PAM
aaccugaaccuccucacacc

SEQ ID NO: 15966 - RNA, 20 nt, Artificial Sequence
  spacer sequence GTCN PAM
cuuggugucgaagacugaca

SEQ ID NO: 15967 - RNA, 20 nt, Artificial Sequence
  spacer sequence GTCN PAM
aagacugacagcugugcggg

SEQ ID NO: 15968 - RNA, 20 nt, Artificial Sequence
  spacer sequence GTCN PAM
ucgacaccaagagaccaucc

SEQ ID NO: 15969 - RNA, 20 nt, Artificial Sequence
  spacer sequence GTCN PAM
gucuucgacaccaagagacc

SEQ ID NO: 15970 - RNA, 20 nt, Artificial Sequence
  spacer sequence GTCN PAM
gcagggacagcuguggagcu

SEQ ID NO: 15971 - RNA, 20 nt, Artificial Sequence
  spacer sequence GTCN PAM
cugcagacaggagcaggggc

SEQ ID NO: 15972 - RNA, 20 nt, Artificial Sequence
  spacer sequence GTCN PAM
cuuuuggcccccucagcguu

SEQ ID NO: 15973 - RNA, 20 nt, Artificial Sequence
  spacer sequence GTCN PAM
agaacgcugagggggccaaa

SEQ ID NO: 15974 - RNA, 20 nt, Artificial Sequence
  spacer sequence GTCN PAM
ucuggguaccucacguagag

SEQ ID NO: 15975 - RNA, 20 nt, Artificial Sequence
  spacer sequence GTCN PAM
ggagcuucuaagaagccaag

SEQ ID NO: 15976 - RNA, 20 nt, Artificial Sequence
  spacer sequence GTCN PAM
ggaggagagucaggagcuuc

SEQ ID NO: 15977 - RNA, 20 nt, Artificial Sequence
  spacer sequence GTCN PAM
gggacagagccgugucccgu

SEQ ID NO: 15978 - RNA, 20 nt, Artificial Sequence
  spacer sequence GTCN PAM
cggacacaaagccccaggcu

SEQ ID NO: 15979 - RNA, 20 nt, Artificial Sequence
  spacer sequence GTCN PAM
cgugguuaggcugcaccauc

SEQ ID NO: 15980 - RNA, 20 nt, Artificial Sequence
  spacer sequence GTCN PAM
ccuuugcacagaaugcuuga

SEQ ID NO: 15981 - RNA, 20 nt, Artificial Sequence
  spacer sequence GTCN PAM
uguucuuucaagcauucugu

SEQ ID NO: 15982 - RNA, 20 nt, Artificial Sequence
  spacer sequence GTCN PAM
agcccuccaugggcucucug

SEQ ID NO: 15983 - RNA, 20 nt, Artificial Sequence
  spacer sequence GTCN PAM
ccucagcccagaagguggua

SEQ ID NO: 15984 - RNA, 20 nt, Artificial Sequence
  spacer sequence GTCN PAM
acugcccaaggggaggccca

SEQ ID NO: 15985 - RNA, 20 nt, Artificial Sequence
  spacer sequence GTCN PAM
caugccugugaucccagcac

SEQ ID NO: 15986 - RNA, 20 nt, Artificial Sequence
  spacer sequence GTCN PAM
cagcuacucaggaggcuggg

SEQ ID NO: 15987 - RNA, 20 nt, Artificial Sequence
  spacer sequence GTCN PAM
cccaggcuggagugcagugg

SEQ ID NO: 15988 - RNA, 20 nt, Artificial Sequence
  spacer sequence GTCN PAM
ugcucugucgcccaggcugg

SEQ ID NO: 15989 - RNA, 20 nt, Artificial Sequence
  spacer sequence GTCN PAM
caaaaaaaaaaauauuguug

SEQ ID NO: 15990 - RNA, 20 nt, Artificial Sequence
  spacer sequence GTCN PAM
cuuccuuccuuccuucucuc

SEQ ID NO: 15991 - RNA, 20 nt, Artificial Sequence
  spacer sequence GTCN PAM
ggagaucgagaccauccugg

SEQ ID NO: 15992 - RNA, 20 nt, Artificial Sequence
  spacer sequence GTCN PAM
cgaucuccugaccucgugau

SEQ ID NO: 15993 - RNA, 20 nt, Artificial Sequence
  spacer sequence GTCN PAM
cagcuauucaggaggcuuag

SEQ ID NO: 15994 - RNA, 20 nt, Artificial Sequence
  spacer sequence GTCN PAM
cuacugaaaauacaaaaaaa

SEQ ID NO: 15995 - RNA, 20 nt, Artificial Sequence
  spacer sequence GTCN PAM
cgauuuccugaccuugugau

SEQ ID NO: 15996 - RNA, 20 nt, Artificial Sequence
  spacer sequence GTCN PAM
ggaaaucgagacgagauccu

SEQ ID NO: 15997 - RNA, 20 nt, Artificial Sequence
  spacer sequence GTCN PAM
gaucacaaggucaggaaauc

SEQ ID NO: 15998 - RNA, 20 nt, Artificial Sequence
  spacer sequence GTCN PAM
uaaaauccccuucccuccau

SEQ ID NO: 15999 - RNA, 20 nt, Artificial Sequence
  spacer sequence GTCN PAM
ugggauggagggaaggggau

SEQ ID NO: 16000 - RNA, 20 nt, Artificial Sequence
  spacer sequence GTCN PAM
aggucaugggauggagggaa

SEQ ID NO: 16001 - RNA, 20 nt, Artificial Sequence
  spacer sequence GTCN PAM
cgccgucugucccuccuuac

SEQ ID NO: 16002 - RNA, 20 nt, Artificial Sequence
  spacer sequence GTCN PAM
gucccuccuuaccagagccc

SEQ ID NO: 16003 - RNA, 20 nt, Artificial Sequence
  spacer sequence GTCN PAM
cuccuuaccagagccccugg

SEQ ID NO: 16004 - RNA, 20 nt, Artificial Sequence
  spacer sequence GTCN PAM
ucccccucccuccucugggc

SEQ ID NO: 16005 - RNA, 20 nt, Artificial Sequence
  spacer sequence GTCN PAM
uccugccuccucuugcugua

SEQ ID NO: 16006 - RNA, 20 nt, Artificial Sequence
  spacer sequence GTCN PAM
auacagcaagaggaggcagg

SEQ ID NO: 16007 - RNA, 20 nt, Artificial Sequence
  spacer sequence GTCN PAM
gagccacagaaagcacacag

SEQ ID NO: 16008 - RNA, 20 nt, Artificial Sequence
  spacer sequence GTCN PAM
cagcugccuccuggggccac

SEQ ID NO: 16009 - RNA, 20 nt, Artificial Sequence
  spacer sequence GTCN PAM
gggacugcuggaccacgccc

SEQ ID NO: 16010 - RNA, 20 nt, Artificial Sequence
  spacer sequence GTCN PAM
cugaccccgcacuggggcca

SEQ ID NO: 16011 - RNA, 20 nt, Artificial Sequence
  spacer sequence GTCN PAM
agcagucccugaccccgcac

SEQ ID NO: 16012 - RNA, 20 nt, Artificial Sequence
  spacer sequence GTCN PAM
gggaagaucuggggaugugg

SEQ ID NO: 16013 - RNA, 20 nt, Artificial Sequence
  spacer sequence GTCN PAM
caucggugcggccgcuuccc

SEQ ID NO: 16014 - RNA, 20 nt, Artificial Sequence
  spacer sequence GTCN PAM
uuccccagcaggugcucucu

SEQ ID NO: 16015 - RNA, 20 nt, Artificial Sequence
  spacer sequence GTCN PAM
cagaagcugagcuuggcuga

SEQ ID NO: 16016 - RNA, 20 nt, Artificial Sequence
  spacer sequence GTCN PAM
cagcccaccccugccucagc

SEQ ID NO: 16017 - RNA, 20 nt, Artificial Sequence
  spacer sequence GTCN PAM
ucuaaauaucaagaguccca

SEQ ID NO: 16018 - RNA, 20 nt, Artificial Sequence
  spacer sequence GTCN PAM
gggucuaggguuguucaguc

SEQ ID NO: 16019 - RNA, 20 nt, Artificial Sequence
  spacer sequence GTCN PAM
aggguuguucaguccccucc

SEQ ID NO: 16020 - RNA, 20 nt, Artificial Sequence
  spacer sequence GTCN PAM
ccuccaagcccccacuuccc

SEQ ID NO: 16021 - RNA, 20 nt, Artificial Sequence
  spacer sequence GTCN PAM
aucccggucccacccaccgg

SEQ ID NO: 16022 - RNA, 20 nt, Artificial Sequence
  spacer sequence GTCN PAM
cacccaccggccccagguug

SEQ ID NO: 16023 - RNA, 20 nt, Artificial Sequence
  spacer sequence GTCN PAM
accuggggccgguggguggg

SEQ ID NO: 16024 - RNA, 20 nt, Artificial Sequence
  spacer sequence GTCN PAM
agcgccuggcacgcaaauuc

SEQ ID NO: 16025 - RNA, 20 nt, Artificial Sequence
  spacer sequence GTCN PAM
caggguaaccgggaggucga

SEQ ID NO: 16026 - RNA, 20 nt, Artificial Sequence
  spacer sequence GTCN PAM
aggugucccaggguaaccgg

SEQ ID NO: 16027 - RNA, 20 nt, Artificial Sequence
  spacer sequence GTCN PAM
gcagcugggccguccaggug

SEQ ID NO: 16028 - RNA, 20 nt, Artificial Sequence
  spacer sequence GTCN PAM
gagcccccaucuaugucagc

SEQ ID NO: 16029 - RNA, 20 nt, Artificial Sequence
  spacer sequence GTCN PAM
gcccccgggcuguggggugg

SEQ ID NO: 16030 - RNA, 20 nt, Artificial Sequence
  spacer sequence GTCN PAM
uggcccuggcccuuguccgc

SEQ ID NO: 16031 - RNA, 20 nt, Artificial Sequence
  spacer sequence GTCN PAM
gacccgcccccggcgccaua

SEQ ID NO: 16032 - RNA, 20 nt, Artificial Sequence
  spacer sequence GTCN PAM
gacgccugggcccacucggc

SEQ ID NO: 16033 - RNA, 20 nt, Artificial Sequence
  spacer sequence GTCN PAM
aagccuucugcguugcuaug

SEQ ID NO: 16034 - RNA, 20 nt, Artificial Sequence
  spacer sequence GTCN PAM
cucucccgcuucuguuagau

SEQ ID NO: 16035 - RNA, 20 nt, Artificial Sequence
  spacer sequence GTCN PAM
uccgcagacccacacccucg

SEQ ID NO: 16036 - RNA, 20 nt, Artificial Sequence
  spacer sequence GTCN PAM
gcggaagacgggcaggcgug

SEQ ID NO: 16037 - RNA, 20 nt, Artificial Sequence
  spacer sequence GTCN PAM
uuguacaaaugggaaaacug

SEQ ID NO: 16038 - RNA, 20 nt, Artificial Sequence
  spacer sequence GTCN PAM
ugucguuguacaaaugggaa

SEQ ID NO: 16039 - RNA, 20 nt, Artificial Sequence
  spacer sequence GTCN PAM
uacccuuuguuugaccucuc

SEQ ID NO: 16040 - RNA, 20 nt, Artificial Sequence
  spacer sequence GTCN PAM
aacaaaggguaggacgcguu

SEQ ID NO: 16041 - RNA, 20 nt, Artificial Sequence
  spacer sequence GTCN PAM
ggccuaaucagaaucauucu

SEQ ID NO: 16042 - RNA, 20 nt, Artificial Sequence
  spacer sequence GTCN PAM
cgccaaugaaucgcgucccg

SEQ ID NO: 16043 - RNA, 20 nt, Artificial Sequence
  spacer sequence GTCN PAM
cguuucuccaaucggcucgg

SEQ ID NO: 16044 - RNA, 20 nt, Artificial Sequence
  spacer sequence GTCN PAM
gaggaugggauuauuggcug

SEQ ID NO: 16045 - RNA, 20 nt, Artificial Sequence
  spacer sequence GTCN PAM
cgcuccggcccggccaaucg

SEQ ID NO: 16046 - RNA, 20 nt, Artificial Sequence
  spacer sequence GTCN PAM
gggcagcggcggccguggcg

SEQ ID NO: 16047 - RNA, 20 nt, Artificial Sequence
  spacer sequence GTCN PAM
cccccgccgcauagcccucc

SEQ ID NO: 16048 - RNA, 20 nt, Artificial Sequence
  spacer sequence GTCN PAM
gcccugcccucccauugguc

SEQ ID NO: 16049 - RNA, 20 nt, Artificial Sequence
  spacer sequence GTCN PAM
uagcggggggccgggggcgg

SEQ ID NO: 16050 - RNA, 20 nt, Artificial Sequence
  spacer sequence GTCN PAM
gcccccggccccccgcuagg

SEQ ID NO: 16051 - RNA, 20 nt, Artificial Sequence
  spacer sequence GTCN PAM
gcgggcgagcucgagcagcc

SEQ ID NO: 16052 - RNA, 20 nt, Artificial Sequence
  spacer sequence GTCN PAM
gggccauggacggccugagg

SEQ ID NO: 16053 - RNA, 20 nt, Artificial Sequence
  spacer sequence GTCN PAM
auggccccgacgcgcccggg

SEQ ID NO: 16054 - RNA, 20 nt, Artificial Sequence
  spacer sequence GTCN PAM
ccgaagugcugggggcgcug

SEQ ID NO: 16055 - RNA, 20 nt, Artificial Sequence
  spacer sequence GTCN PAM
uggccuccagcgcccccagc

SEQ ID NO: 16056 - RNA, 20 nt, Artificial Sequence
  spacer sequence GTCN PAM
gcgcuagcccguuucgccga

SEQ ID NO: 16057 - RNA, 20 nt, Artificial Sequence
  spacer sequence GTCN PAM
gcgaaacgggcuagcgccga

SEQ ID NO: 16058 - RNA, 20 nt, Artificial Sequence
  spacer sequence GTCN PAM
cagaccggacuccuuccccg

SEQ ID NO: 16059 - RNA, 20 nt, Artificial Sequence
  spacer sequence GTCN PAM
gcgacccccaggcccauggc

SEQ ID NO: 16060 - RNA, 20 nt, Artificial Sequence
  spacer sequence GTCN PAM
ggucugcgacccccaggccc

SEQ ID NO: 16061 - RNA, 20 nt, Artificial Sequence
  spacer sequence GTCN PAM
gguccggccgguggagcgcg

SEQ ID NO: 16062 - RNA, 20 nt, Artificial Sequence
  spacer sequence GTCN PAM
ggccgguggagcgcgcgagg

SEQ ID NO: 16063 - RNA, 20 nt, Artificial Sequence
  spacer sequence GTCN PAM
ccucgcgcgcuccaccggcc

SEQ ID NO: 16064 - RNA, 20 nt, Artificial Sequence
  spacer sequence GTCN PAM
cagucaccucgcgcgcucca

SEQ ID NO: 16065 - RNA, 20 nt, Artificial Sequence
  spacer sequence GTCN PAM
gcccgcagcccuucccuugc

SEQ ID NO: 16066 - RNA, 20 nt, Artificial Sequence
  spacer sequence GTCN PAM
cagggcgcgggcaagggaag

SEQ ID NO: 16067 - RNA, 20 nt, Artificial Sequence
  spacer sequence GTCN PAM
gggggcggccaggggcggaa

SEQ ID NO: 16068 - RNA, 20 nt, Artificial Sequence
  spacer sequence GTCN PAM
gguucuuccaguugcccagu

SEQ ID NO: 16069 - RNA, 20 nt, Artificial Sequence
  spacer sequence GTCN PAM
ggaugccaguguccugcgcg

SEQ ID NO: 16070 - RNA, 20 nt, Artificial Sequence
  spacer sequence GTCN PAM
ugcgcguuucgccguccccc

SEQ ID NO: 16071 - RNA, 20 nt, Artificial Sequence
  spacer sequence GTCN PAM
cccuucccccguggaccccg

SEQ ID NO: 16072 - RNA, 20 nt, Artificial Sequence
  spacer sequence GTCN PAM
acgggggaagggggacggcg

SEQ ID NO: 16073 - RNA, 20 nt, Artificial Sequence
  spacer sequence GTCN PAM
guuccccuucccgccaggag

SEQ ID NO: 16074 - RNA, 20 nt, Artificial Sequence
  spacer sequence GTCN PAM
ugggggccugcccaggaccc

SEQ ID NO: 16075 - RNA, 20 nt, Artificial Sequence
  spacer sequence GTCN PAM
ugggcaggcccccaggacgg

SEQ ID NO: 16076 - RNA, 20 nt, Artificial Sequence
  spacer sequence GTCN PAM
uaacaaacauuuacgcucgg

SEQ ID NO: 16077 - RNA, 20 nt, Artificial Sequence
  spacer sequence GTCN PAM
gacggcugugauguggggag

SEQ ID NO: 16078 - RNA, 20 nt, Artificial Sequence
  spacer sequence GTCN PAM
gacaacccaacuccgucuua

SEQ ID NO: 16079 - RNA, 20 nt, Artificial Sequence
  spacer sequence GTCN PAM
agccuccccacaucacagcc

SEQ ID NO: 16080 - RNA, 20 nt, Artificial Sequence
  spacer sequence GTCN PAM
caaucggggugccuggaucu

SEQ ID NO: 16081 - RNA, 20 nt, Artificial Sequence
  spacer sequence GTCN PAM
cggaagaacuguaauggagu

SEQ ID NO: 16082 - RNA, 20 nt, Artificial Sequence
  spacer sequence GTCN PAM
ccaagggugaaagucacgga

SEQ ID NO: 16083 - RNA, 20 nt, Artificial Sequence
  spacer sequence GTCN PAM
caaaaaaaaguuuuaaaggu

SEQ ID NO: 16084 - RNA, 20 nt, Artificial Sequence
  spacer sequence GTCN PAM
ugcucugcugcccaggcugg

SEQ ID NO: 16085 - RNA, 20 nt, Artificial Sequence
  spacer sequence GTCN PAM
accaaguagcugggauuaca

SEQ ID NO: 16086 - RNA, 20 nt, Artificial Sequence
  spacer sequence GTCN PAM
ugaacuccuggccucaggug

SEQ ID NO: 16087 - RNA, 20 nt, Artificial Sequence
  spacer sequence GTCN PAM
cuuaaaaaaguuaauuuuaa

SEQ ID NO: 16088 - RNA, 20 nt, Artificial Sequence
  spacer sequence GTCN PAM
cacuauguuacccagacuag

SEQ ID NO: 16089 - RNA, 20 nt, Artificial Sequence
  spacer sequence GTCN PAM
ggguaacauagugagacccu

SEQ ID NO: 16090 - RNA, 20 nt, Artificial Sequence
  spacer sequence GTCN PAM
uaaacuucugggcucaagcg

SEQ ID NO: 16091 - RNA, 20 nt, Artificial Sequence
  spacer sequence GTCN PAM
uucugcggagcuuccuggaa

SEQ ID NO: 16092 - RNA, 20 nt, Artificial Sequence
  spacer sequence GTCN PAM
uugugagucauucugcggag

SEQ ID NO: 16093 - RNA, 20 nt, Artificial Sequence
  spacer sequence GTCN PAM
ucuacccagaauaccccagg

SEQ ID NO: 16094 - RNA, 20 nt, Artificial Sequence
  spacer sequence GTCN PAM
aguucccccccaauuuuccc

SEQ ID NO: 16095 - RNA, 20 nt, Artificial Sequence
  spacer sequence GTCN PAM
gaagucugugcccacacccu

SEQ ID NO: 16096 - RNA, 20 nt, Artificial Sequence
  spacer sequence GTCN PAM
gugcccacacccuggagguc

SEQ ID NO: 16097 - RNA, 20 nt, Artificial Sequence
  spacer sequence GTCN PAM
ccaggugccuggucccaugu

SEQ ID NO: 16098 - RNA, 20 nt, Artificial Sequence
  spacer sequence GTCN PAM
caugugcagcgcagcaggug

SEQ ID NO: 16099 - RNA, 20 nt, Artificial Sequence
  spacer sequence GTCN PAM
cugaccucugcccucccuuu

SEQ ID NO: 16100 - RNA, 20 nt, Artificial Sequence
  spacer sequence GTCN PAM
gggaccugcucccgggggca

SEQ ID NO: 16101 - RNA, 20 nt, Artificial Sequence
  spacer sequence GTCN PAM
uagagcgcccaggaggcagg

SEQ ID NO: 16102 - RNA, 20 nt, Artificial Sequence
  spacer sequence GTCN PAM
ccagagacgaaacugaggca

SEQ ID NO: 16103 - RNA, 20 nt, Artificial Sequence
  spacer sequence GTCN PAM
cuggugacacggugccccag

SEQ ID NO: 16104 - RNA, 20 nt, Artificial Sequence
  spacer sequence GTCN PAM
gaagcauacaguccuccacc

SEQ ID NO: 16105 - RNA, 20 nt, Artificial Sequence
  spacer sequence GTCN PAM
uccacccugcccacccccag

SEQ ID NO: 16106 - RNA, 20 nt, Artificial Sequence
  spacer sequence GTCN PAM
caucugcugcuaaucuuggg

SEQ ID NO: 16107 - RNA, 20 nt, Artificial Sequence
  spacer sequence GTCN PAM
aaggucauccucccgucgcu

SEQ ID NO: 16108 - RNA, 20 nt, Artificial Sequence
  spacer sequence GTCN PAM
uccucccgucgcugaagcug

SEQ ID NO: 16109 - RNA, 20 nt, Artificial Sequence
  spacer sequence GTCN PAM
cugaagcugcaggaaaaggg

SEQ ID NO: 16110 - RNA, 20 nt, Artificial Sequence
  spacer sequence GTCN PAM
cuccccuaaaucccuuuucc

SEQ ID NO: 16111 - RNA, 20 nt, Artificial Sequence
  spacer sequence GTCN PAM
uuccuccccacgagccaggc

SEQ ID NO: 16112 - RNA, 20 nt, Artificial Sequence
  spacer sequence GTCN PAM
cucauccccaucucccaccu

SEQ ID NO: 16113 - RNA, 20 nt, Artificial Sequence
  spacer sequence GTCN PAM
auuuaaaggaggugggagau

SEQ ID NO: 16114 - RNA, 20 nt, Artificial Sequence
  spacer sequence GTCN PAM
ccucugaguuucuucguaug

SEQ ID NO: 16115 - RNA, 20 nt, Artificial Sequence
  spacer sequence GTCN PAM
cuguccccucugaguuucuu

SEQ ID NO: 16116 - RNA, 20 nt, Artificial Sequence
  spacer sequence GTCN PAM
caggaguggccucccaguca

SEQ ID NO: 16117 - RNA, 20 nt, Artificial Sequence
  spacer sequence GTCN PAM
cccagcuggucccaggagug

SEQ ID NO: 16118 - RNA, 20 nt, Artificial Sequence
  spacer sequence GTCN PAM
gggguaggaggaguccccca

SEQ ID NO: 16119 - RNA, 20 nt, Artificial Sequence
  spacer sequence GTCN PAM
uuauccaaaagcacccaagg

SEQ ID NO: 16120 - RNA, 20 nt, Artificial Sequence
  spacer sequence GTCN PAM
ccccagccccucccaccugc

SEQ ID NO: 16121 - RNA, 20 nt, Artificial Sequence
  spacer sequence GTCN PAM
agaaguggccucuaucucac

SEQ ID NO: 16122 - RNA, 20 nt, Artificial Sequence
  spacer sequence GTCN PAM
aagcucucuggagcacauag

SEQ ID NO: 16123 - RNA, 20 nt, Artificial Sequence
  spacer sequence GTCN PAM
cacagggaaccuaugugcuc

SEQ ID NO: 16124 - RNA, 20 nt, Artificial Sequence
  spacer sequence GTCN PAM
uagucauucuuuucagagcc

SEQ ID NO: 16125 - RNA, 20 nt, Artificial Sequence
  spacer sequence GTCN PAM
uucuuuucagagccagguuc

SEQ ID NO: 16126 - RNA, 20 nt, Artificial Sequence
  spacer sequence GTCN PAM
agcucagccccaauccugaa

SEQ ID NO: 16127 - RNA, 20 nt, Artificial Sequence
  spacer sequence GTCN PAM
cagcaaggaggguguucaga

SEQ ID NO: 16128 - RNA, 20 nt, Artificial Sequence
  spacer sequence GTCN PAM
ggaguuugagaccagccugg

SEQ ID NO: 16129 - RNA, 20 nt, Artificial Sequence
  spacer sequence GTCN PAM
caaacuccugaccucaggug

SEQ ID NO: 16130 - RNA, 20 nt, Artificial Sequence
  spacer sequence GTCN PAM
cuacuaaaaauacaaaaauc

SEQ ID NO: 16131 - RNA, 20 nt, Artificial Sequence
  spacer sequence GTCN PAM
cuacaagcucgccucccagg

SEQ ID NO: 16132 - RNA, 20 nt, Artificial Sequence
  spacer sequence GTCN PAM
cccaggcuggagugcagugg

SEQ ID NO: 16133 - RNA, 20 nt, Artificial Sequence
  spacer sequence GTCN PAM
ugcucugucacccaggcugg

SEQ ID NO: 16134 - RNA, 20 nt, Artificial Sequence
  spacer sequence GTCN PAM
ggugugcacucaccagccgg

SEQ ID NO: 16135 - RNA, 20 nt, Artificial Sequence
  spacer sequence GTCN PAM
uggaggcagcaaaccccagc

SEQ ID NO: 16136 - RNA, 20 nt, Artificial Sequence
  spacer sequence GTCN PAM
ccuggggcgggguggggggc

SEQ ID NO: 16137 - RNA, 20 nt, Artificial Sequence
  spacer sequence GTCN PAM
ggagauaccuguagucguca

SEQ ID NO: 16138 - RNA, 20 nt, Artificial Sequence
  spacer sequence GTCN PAM
ucaugacuugggggcugaug

SEQ ID NO: 16139 - RNA, 20 nt, Artificial Sequence
  spacer sequence GTCN PAM
ugacuugggggcugauggca

SEQ ID NO: 16140 - RNA, 20 nt, Artificial Sequence
  spacer sequence GTCN PAM
ugacgacuacagguaucucc

SEQ ID NO: 16141 - RNA, 20 nt, Artificial Sequence
  spacer sequence GTCN PAM
cuggccucugcccacuccau

SEQ ID NO: 16142 - RNA, 20 nt, Artificial Sequence
  spacer sequence GTCN PAM
aggacagccacuucccccuc

SEQ ID NO: 16143 - RNA, 20 nt, Artificial Sequence
  spacer sequence GTCN PAM
uggacacugcagggugcuga

SEQ ID NO: 16144 - RNA, 20 nt, Artificial Sequence
  spacer sequence GTCN PAM
uucuugguuguuuucggugg

SEQ ID NO: 16145 - RNA, 20 nt, Artificial Sequence
  spacer sequence GTCN PAM
ucaugacagccuggccuccc

SEQ ID NO: 16146 - RNA, 20 nt, Artificial Sequence
  spacer sequence GTCN PAM
ugaagacuugauucuagagc

SEQ ID NO: 16147 - RNA, 20 nt, Artificial Sequence
  spacer sequence GTCN PAM
caaaaaaaaaaaaguguaau

SEQ ID NO: 16148 - RNA, 20 nt, Artificial Sequence
  spacer sequence GTCN PAM
cagcugcuggggaggcugag

SEQ ID NO: 16149 - RNA, 20 nt, Artificial Sequence
  spacer sequence GTCN PAM
ccaucuccugaccucgugau

SEQ ID NO: 16150 - RNA, 20 nt, Artificial Sequence
  spacer sequence GTCN PAM
ggagauggagaccauccugg

SEQ ID NO: 16151 - RNA, 20 nt, Artificial Sequence
  spacer sequence GTCN PAM
agcuccugccugcccuuggg

SEQ ID NO: 16152 - RNA, 20 nt, Artificial Sequence
  spacer sequence GTCN PAM
cccaccgggguugagagcuc

SEQ ID NO: 16153 - RNA, 20 nt, Artificial Sequence
  spacer sequence GTCN PAM
augucccccaccgggguuga

SEQ ID NO: 16154 - RNA, 20 nt, Artificial Sequence
  spacer sequence GTCN PAM
acguguccaugucccccacc

SEQ ID NO: 16155 - RNA, 20 nt, Artificial Sequence
  spacer sequence GTCN PAM
acugccccugaugugccugu

SEQ ID NO: 16156 - RNA, 20 nt, Artificial Sequence
  spacer sequence GTCN PAM
ccuccucccaggagccgccu

SEQ ID NO: 16157 - RNA, 20 nt, Artificial Sequence
  spacer sequence GTCN PAM
aggaaugcagugagcuguga

SEQ ID NO: 16158 - RNA, 20 nt, Artificial Sequence
  spacer sequence GTCN PAM
cagcucacugcauuccuuga

SEQ ID NO: 16159 - RNA, 20 nt, Artificial Sequence
  spacer sequence GTCN PAM
cccaggcuggagugcagugg

SEQ ID NO: 16160 - RNA, 20 nt, Artificial Sequence
  spacer sequence GTCN PAM
uguucugucacccaggcugg

SEQ ID NO: 16161 - RNA, 20 nt, Artificial Sequence
  spacer sequence GTCN PAM
cacaaugaauaaaugaauga

SEQ ID NO: 16162 - RNA, 20 nt, Artificial Sequence
  spacer sequence GTCN PAM
cuccccacuuguuacucccc

SEQ ID NO: 16163 - RNA, 20 nt, Artificial Sequence
  spacer sequence GTCN PAM
ucauuagcagucacucccca

SEQ ID NO: 16164 - RNA, 20 nt, Artificial Sequence
  spacer sequence GTCN PAM
auguacuaaaaaccacuggg

SEQ ID NO: 16165 - RNA, 20 nt, Artificial Sequence
  spacer sequence GTCN PAM
ggaguucgagaccagucugg

SEQ ID NO: 16166 - RNA, 20 nt, Artificial Sequence
  spacer sequence GTCN PAM
cgaacuccugaccccagcac

SEQ ID NO: 16167 - RNA, 20 nt, Artificial Sequence
  spacer sequence GTCN PAM
ggccaacauggcgaaacccc

SEQ ID NO: 16168 - RNA, 20 nt, Artificial Sequence
  spacer sequence GTCN PAM
gccaccaugcccggcuaauu

SEQ ID NO: 16169 - RNA, 20 nt, Artificial Sequence
  spacer sequence GTCN PAM
cugcacuguggccugggcca

SEQ ID NO: 16170 - RNA, 20 nt, Artificial Sequence
  spacer sequence GTCN PAM
aggaauucgagaccagucua

SEQ ID NO: 16171 - RNA, 20 nt, Artificial Sequence
  spacer sequence GTCN PAM
cgaauuccuggacucaagca

SEQ ID NO: 16172 - RNA, 20 nt, Artificial Sequence
  spacer sequence GTCN PAM
agucuaggcaacacagcaaa

SEQ ID NO: 16173 - RNA, 20 nt, Artificial Sequence
  spacer sequence GTCN PAM
aggcaacacagcaaaacccc

SEQ ID NO: 16174 - RNA, 20 nt, Artificial Sequence
  spacer sequence GTCN PAM
ccugagccugggaggucaag

SEQ ID NO: 16175 - RNA, 20 nt, Artificial Sequence
  spacer sequence GTCN PAM
agaaugcguaagccgugauu

SEQ ID NO: 16176 - RNA, 20 nt, Artificial Sequence
  spacer sequence GTCN PAM
cacccaggcuggagugcagu

SEQ ID NO: 16177 - RNA, 20 nt, Artificial Sequence
  spacer sequence GTCN PAM
caaagaaaaaaaacaaaaaa

SEQ ID NO: 16178 - RNA, 20 nt, Artificial Sequence
  spacer sequence GTCN PAM
auagaugggcauaaccuuua

SEQ ID NO: 16179 - RNA, 20 nt, Artificial Sequence
  spacer sequence GTCN PAM
cugagauuuuauucaaugaa

SEQ ID NO: 16180 - RNA, 20 nt, Artificial Sequence
  spacer sequence GTCN PAM
gggagccugcagccucagau

SEQ ID NO: 16181 - RNA, 20 nt, Artificial Sequence
  spacer sequence GTCN PAM
ggggccucaacccagcccuu

SEQ ID NO: 16182 - RNA, 20 nt, Artificial Sequence
  spacer sequence GTCN PAM
agcaguggagaaaagcaggg

SEQ ID NO: 16183 - RNA, 20 nt, Artificial Sequence
  spacer sequence GTCN PAM
ucaccccaccucucucauuc

SEQ ID NO: 16184 - RNA, 20 nt, Artificial Sequence
  spacer sequence GTCN PAM
aggcagcaggaacccccuaa

SEQ ID NO: 16185 - RNA, 20 nt, Artificial Sequence
  spacer sequence GTCN PAM
cucaaugucacguccucaga

SEQ ID NO: 16186 - RNA, 20 nt, Artificial Sequence
  spacer sequence GTCN PAM
cguccucagagaagcccucc

SEQ ID NO: 16187 - RNA, 20 nt, Artificial Sequence
  spacer sequence GTCN PAM
ucagagaagcccucccugac

SEQ ID NO: 16188 - RNA, 20 nt, Artificial Sequence
  spacer sequence GTCN PAM
gggagggcuucucugaggac

SEQ ID NO: 16189 - RNA, 20 nt, Artificial Sequence
  spacer sequence GTCN PAM
cauucaggccccgucaucug

SEQ ID NO: 16190 - RNA, 20 nt, Artificial Sequence
  spacer sequence GTCN PAM
ucugcccucccagauuucag

SEQ ID NO: 16191 - RNA, 20 nt, Artificial Sequence
  spacer sequence GTCN PAM
cugcagaucucaggacgugu

SEQ ID NO: 16192 - RNA, 20 nt, Artificial Sequence
  spacer sequence GTCN PAM
ugagaucugcagugacacau

SEQ ID NO: 16193 - RNA, 20 nt, Artificial Sequence
  spacer sequence GTCN PAM
ccaaauguguacccuuauga

SEQ ID NO: 16194 - RNA, 20 nt, Artificial Sequence
  spacer sequence GTCN PAM
uccaacuuuccaggaaccag

SEQ ID NO: 16195 - RNA, 20 nt, Artificial Sequence
  spacer sequence GTCN PAM
cugagcuccuccugcaggac

SEQ ID NO: 16196 - RNA, 20 nt, Artificial Sequence
  spacer sequence GTCN PAM
ugcaggaggagcucagggac

SEQ ID NO: 16197 - RNA, 20 nt, Artificial Sequence
  spacer sequence GTCN PAM
cgguuuggggagauaaagug

SEQ ID NO: 16198 - RNA, 20 nt, Artificial Sequence
  spacer sequence GTCN PAM
agaaccacagaggaccgaag

SEQ ID NO: 16199 - RNA, 20 nt, Artificial Sequence
  spacer sequence GTCN PAM
ucugugguucuugacugucc

SEQ ID NO: 16200 - RNA, 20 nt, Artificial Sequence
  spacer sequence GTCN PAM
acugugcacuucgguccucu

SEQ ID NO: 16201 - RNA, 20 nt, Artificial Sequence
  spacer sequence GTCN PAM
uucugccccuccuuggcucg

SEQ ID NO: 16202 - RNA, 20 nt, Artificial Sequence
  spacer sequence GTCN PAM
ccugcccacgaccccgagcu

SEQ ID NO: 16203 - RNA, 20 nt, Artificial Sequence
  spacer sequence GTCN PAM
ugggcaggagaccgcccagg

SEQ ID NO: 16204 - RNA, 20 nt, Artificial Sequence
  spacer sequence GTCN PAM
cccuuuuucccacagcucgg

SEQ ID NO: 16205 - RNA, 20 nt, Artificial Sequence
  spacer sequence GTCN PAM
uccgcuuuccccuccugggg

SEQ ID NO: 16206 - RNA, 20 nt, Artificial Sequence
  spacer sequence GTCN PAM
cccaggaggggaaagcggag

SEQ ID NO: 16207 - RNA, 20 nt, Artificial Sequence
  spacer sequence GTCN PAM
cguggcgccuucaggucccc

SEQ ID NO: 16208 - RNA, 20 nt, Artificial Sequence
  spacer sequence GTCN PAM
ucuuuuuuuuuuuuuuccug

SEQ ID NO: 16209 - RNA, 20 nt, Artificial Sequence
  spacer sequence GTCN PAM
gccaccugcuguuuguccuc

SEQ ID NO: 16210 - RNA, 20 nt, Artificial Sequence
  spacer sequence GTCN PAM
gggacuuggcugcagcaggc

SEQ ID NO: 16211 - RNA, 20 nt, Artificial Sequence
  spacer sequence GTCN PAM
cagacagucggccaccugcu

SEQ ID NO: 16212 - RNA, 20 nt, Artificial Sequence
  spacer sequence GTCN PAM
ccugcugcagccaaguccca

SEQ ID NO: 16213 - RNA, 20 nt, Artificial Sequence
  spacer sequence GTCN PAM
uuguuccacggaggggguuc

SEQ ID NO: 16214 - RNA, 20 nt, Artificial Sequence
  spacer sequence GTCN PAM
cagggaacccccuccgugga

SEQ ID NO: 16215 - RNA, 20 nt, Artificial Sequence
  spacer sequence GTCN PAM
ccaaauuggaacaaggcgcu

SEQ ID NO: 16216 - RNA, 20 nt, Artificial Sequence
  spacer sequence GTCN PAM
cugaaagccuuccaccacca

SEQ ID NO: 16217 - RNA, 20 nt, Artificial Sequence
  spacer sequence GTCN PAM
uugcguggauguuacuggug

SEQ ID NO: 16218 - RNA, 20 nt, Artificial Sequence
  spacer sequence GTCN PAM
aaagccucaggucuccaccc

SEQ ID NO: 16219 - RNA, 20 nt, Artificial Sequence
  spacer sequence GTCN PAM
ccacccugagggggccacga

SEQ ID NO: 16220 - RNA, 20 nt, Artificial Sequence
  spacer sequence GTCN PAM
uggcccccucaggguggaga

SEQ ID NO: 16221 - RNA, 20 nt, Artificial Sequence
  spacer sequence GTCN PAM
ucuugggucguggcccccuc

SEQ ID NO: 16222 - RNA, 20 nt, Artificial Sequence
  spacer sequence GTCN PAM
aggggaauaccuuuaaaaaa

SEQ ID NO: 16223 - RNA, 20 nt, Artificial Sequence
  spacer sequence GTCN PAM
cccacgcagcguugcuuuuu

SEQ ID NO: 16224 - RNA, 20 nt, Artificial Sequence
  spacer sequence GTCN PAM
cccugaggcgcuuauuccca

SEQ ID NO: 16225 - RNA, 20 nt, Artificial Sequence
  spacer sequence GTCN PAM
ugggaauaagcgccucaggg

SEQ ID NO: 16226 - RNA, 20 nt, Artificial Sequence
  spacer sequence GTCN PAM
cacgggaaccaaagggacag

SEQ ID NO: 16227 - RNA, 20 nt, Artificial Sequence
  spacer sequence GTCN PAM
cuuugguucccgugagacgc

SEQ ID NO: 16228 - RNA, 20 nt, Artificial Sequence
  spacer sequence GTCN PAM
ccguccggcagccagucccu

SEQ ID NO: 16229 - RNA, 20 nt, Artificial Sequence
  spacer sequence GTCN PAM
ggcagccagucccugaacgg

SEQ ID NO: 16230 - RNA, 20 nt, Artificial Sequence
  spacer sequence GTCN PAM
cugaacggccggccgaaagc

SEQ ID NO: 16231 - RNA, 20 nt, Artificial Sequence
  spacer sequence GTCN PAM
ugcgugcgugugcgcccggc

SEQ ID NO: 16232 - RNA, 20 nt, Artificial Sequence
  spacer sequence GTCN PAM
ugcgugcgugcgugcgucuu

SEQ ID NO: 16233 - RNA, 20 nt, Artificial Sequence
  spacer sequence GTCN PAM
uuuacuauaggugaaugagc

SEQ ID NO: 16234 - RNA, 20 nt, Artificial Sequence
  spacer sequence GTCN PAM
gccggccacagggaugucuu

SEQ ID NO: 16235 - RNA, 20 nt, Artificial Sequence
  spacer sequence GTCN PAM
gggcugucggccggccacag

SEQ ID NO: 16236 - RNA, 20 nt, Artificial Sequence
  spacer sequence GTCN PAM
gggcggcggcggcgggcccg

SEQ ID NO: 16237 - RNA, 20 nt, Artificial Sequence
  spacer sequence GTCN PAM
gcgcggcuccuuuuacugug

SEQ ID NO: 16238 - RNA, 20 nt, Artificial Sequence
  spacer sequence GTCN PAM
cugccggccgccuggugcgc

SEQ ID NO: 16239 - RNA, 20 nt, Artificial Sequence
  spacer sequence GTCN PAM
ccgcgcacgcgcaccaggcg

SEQ ID NO: 16240 - RNA, 20 nt, Artificial Sequence
  spacer sequence GTCN PAM
gaaagcauguccccgcgcac

SEQ ID NO: 16241 - RNA, 20 nt, Artificial Sequence
  spacer sequence GTCN PAM
uuuccuccgaccuuucucca

SEQ ID NO: 16242 - RNA, 20 nt, Artificial Sequence
  spacer sequence GTCN PAM
gaggaaaggaccccacuagu

SEQ ID NO: 16243 - RNA, 20 nt, Artificial Sequence
  spacer sequence GTCN PAM
uggggacucuggcccaguga

SEQ ID NO: 16244 - RNA, 20 nt, Artificial Sequence
  spacer sequence GTCN PAM
ccaagacuugggcuggagaa

SEQ ID NO: 16245 - RNA, 20 nt, Artificial Sequence
  spacer sequence GTCN PAM
cugggccagaguccccaaga

SEQ ID NO: 16246 - RNA, 20 nt, Artificial Sequence
  spacer sequence GTCN PAM
agucacugggccagaguccc

SEQ ID NO: 16247 - RNA, 20 nt, Artificial Sequence
  spacer sequence GTCN PAM
agguccagucacugggccag

SEQ ID NO: 16248 - RNA, 20 nt, Artificial Sequence
  spacer sequence GTCN PAM
cccagcuuccgagcuuuuua

SEQ ID NO: 16249 - RNA, 20 nt, Artificial Sequence
  spacer sequence GTCN PAM
aaaucugggggacuuccccc

SEQ ID NO: 16250 - RNA, 20 nt, Artificial Sequence
  spacer sequence GTCN PAM
cccagauuuggacgcucgua

SEQ ID NO: 16251 - RNA, 20 nt, Artificial Sequence
  spacer sequence GTCN PAM
cgggggaagucccccagauu

SEQ ID NO: 16252 - RNA, 20 nt, Artificial Sequence
  spacer sequence GTCN PAM
caaaaaaaaaaaagcuacug

SEQ ID NO: 16253 - RNA, 20 nt, Artificial Sequence
  spacer sequence GTCN PAM
cugucacccaggcuggagug

SEQ ID NO: 16254 - RNA, 20 nt, Artificial Sequence
  spacer sequence GTCN PAM
cccaggcuggagugcagagg

SEQ ID NO: 16255 - RNA, 20 nt, Artificial Sequence
  spacer sequence GTCN PAM
guggaaccagcuacuuggga

SEQ ID NO: 16256 - RNA, 20 nt, Artificial Sequence
  spacer sequence GTCN PAM
cuacuaaaacuacaaaaauu

SEQ ID NO: 16257 - RNA, 20 nt, Artificial Sequence
  spacer sequence GTCN PAM
agccuggccaacauggugaa

SEQ ID NO: 16258 - RNA, 20 nt, Artificial Sequence
  spacer sequence GTCN PAM
agcugcuuuuugaacccuca

SEQ ID NO: 16259 - RNA, 20 nt, Artificial Sequence
  spacer sequence GTCN PAM
gggagcugggggggggugcu

SEQ ID NO: 16260 - RNA, 20 nt, Artificial Sequence
  spacer sequence GTCN PAM
agccaccaucucuggccggg

SEQ ID NO: 16261 - RNA, 20 nt, Artificial Sequence
  spacer sequence GTCN PAM
uggaacucucccggccagag

SEQ ID NO: 16262 - RNA, 20 nt, Artificial Sequence
  spacer sequence GTCN PAM
ccccuuaaccccuuccccag

SEQ ID NO: 16263 - RNA, 20 nt, Artificial Sequence
  spacer sequence GTCN PAM
gggggaacugauggggggca

SEQ ID NO: 16264 - RNA, 20 nt, Artificial Sequence
  spacer sequence GTCN PAM
cucccaaggcuagggcuggg

SEQ ID NO: 16265 - RNA, 20 nt, Artificial Sequence
  spacer sequence GTCN PAM
ccccggcuggagugcagugg

SEQ ID NO: 16266 - RNA, 20 nt, Artificial Sequence
  spacer sequence GTCN PAM
ugcucugucgccccggcugg

SEQ ID NO: 16267 - RNA, 20 nt, Artificial Sequence
  spacer sequence GTCN PAM
cuaaauaaauaaaugaauaa

SEQ ID NO: 16268 - RNA, 20 nt, Artificial Sequence
  spacer sequence GTCN PAM
uccgugcuuucauccaacag

SEQ ID NO: 16269 - RNA, 20 nt, Artificial Sequence
  spacer sequence GTCN PAM
ccgcugugacugaacacaga

SEQ ID NO: 16270 - RNA, 20 nt, Artificial Sequence
  spacer sequence GTCN PAM
cagcggggaccacccgucau

SEQ ID NO: 16271 - RNA, 20 nt, Artificial Sequence
  spacer sequence GTCN PAM
gcuucuucuguguucaguca

SEQ ID NO: 16272 - RNA, 20 nt, Artificial Sequence
  spacer sequence GTCN PAM
cagucagcuccaccgugcag

SEQ ID NO: 16273 - RNA, 20 nt, Artificial Sequence
  spacer sequence GTCN PAM
gcuccaccgugcagacccug

SEQ ID NO: 16274 - RNA, 20 nt, Artificial Sequence
  spacer sequence GTCN PAM
gcacgguggagcugacuggg

SEQ ID NO: 16275 - RNA, 20 nt, Artificial Sequence
  spacer sequence GTCN PAM
ccgaccugucccccagucug

SEQ ID NO: 16276 - RNA, 20 nt, Artificial Sequence
  spacer sequence GTCN PAM
gggacagggucugcacggug

SEQ ID NO: 16277 - RNA, 20 nt, Artificial Sequence
  spacer sequence GTCN PAM
cccagucugggauagaggaa

SEQ ID NO: 16278 - RNA, 20 nt, Artificial Sequence
  spacer sequence GTCN PAM
gggauagaggaaguauguuc

SEQ ID NO: 16279 - RNA, 20 nt, Artificial Sequence
  spacer sequence GTCN PAM
ccggaagccagaacauacuu

SEQ ID NO: 16280 - RNA, 20 nt, Artificial Sequence
  spacer sequence GTCN PAM
cuacugaaaauacaaaauua

SEQ ID NO: 16281 - RNA, 20 nt, Artificial Sequence
  spacer sequence GTCN PAM
gguuggucucaaacuccuga

SEQ ID NO: 16282 - RNA, 20 nt, Artificial Sequence
  spacer sequence GTCN PAM
caaacuccugaccucgggug

SEQ ID NO: 16283 - RNA, 20 nt, Artificial Sequence
  spacer sequence GTCN PAM
ggaguuugagaccaaccuga

SEQ ID NO: 16284 - RNA, 20 nt, Artificial Sequence
  spacer sequence GTCN PAM
cugcgcccagcagcucuaaa

SEQ ID NO: 16285 - RNA, 20 nt, Artificial Sequence
  spacer sequence GTCN PAM
ugcuguguugcccaggcugg

SEQ ID NO: 16286 - RNA, 20 nt, Artificial Sequence
  spacer sequence GTCN PAM
caaauucccaggcucaaacg

SEQ ID NO: 16287 - RNA, 20 nt, Artificial Sequence
  spacer sequence GTCN PAM
cagcuacuggggaggcuaag

SEQ ID NO: 16288 - RNA, 20 nt, Artificial Sequence
  spacer sequence GTCN PAM
guagucccagcuacugggga

SEQ ID NO: 16289 - RNA, 20 nt, Artificial Sequence
  spacer sequence GTCN PAM
aggauggucuugaacuccca

SEQ ID NO: 16290 - RNA, 20 nt, Artificial Sequence
  spacer sequence GTCN PAM
ugaacucccaggcucaagug

SEQ ID NO: 16291 - RNA, 20 nt, Artificial Sequence
  spacer sequence GTCN PAM
uagccgggugcaguggcucc

SEQ ID NO: 16292 - RNA, 20 nt, Artificial Sequence
  spacer sequence GTCN PAM
caaaaagagaaaagaaaaaa

SEQ ID NO: 16293 - RNA, 20 nt, Artificial Sequence
  spacer sequence GTCN PAM
cauucugucacccaggcugg

SEQ ID NO: 16294 - RNA, 20 nt, Artificial Sequence
  spacer sequence GTCN PAM
cccaggcuggagugcaaugg

SEQ ID NO: 16295 - RNA, 20 nt, Artificial Sequence
  spacer sequence GTCN PAM
cuacuaaaaaugcaaaaauu

SEQ ID NO: 16296 - RNA, 20 nt, Artificial Sequence
  spacer sequence GTCN PAM
cgaacuccugaccucaggug

SEQ ID NO: 16297 - RNA, 20 nt, Artificial Sequence
  spacer sequence GTCN PAM
ggaguucgagaccagccugg

SEQ ID NO: 16298 - RNA, 20 nt, Artificial Sequence
  spacer sequence GTCN PAM
gguguuuccacguggggugc

SEQ ID NO: 16299 - RNA, 20 nt, Artificial Sequence
  spacer sequence GTCN PAM
cgcugcccacgugggcucag

SEQ ID NO: 16300 - RNA, 20 nt, Artificial Sequence
  spacer sequence GTCN PAM
cgauccccagcccagcacuc

SEQ ID NO: 16301 - RNA, 20 nt, Artificial Sequence
  spacer sequence GTCN PAM
agggggucaccauucggauc

SEQ ID NO: 16302 - RNA, 20 nt, Artificial Sequence
  spacer sequence GTCN PAM
ccauucggaucccccgguag

SEQ ID NO: 16303 - RNA, 20 nt, Artificial Sequence
  spacer sequence GTCN PAM
gucacgucccguucacgccg

SEQ ID NO: 16304 - RNA, 20 nt, Artificial Sequence
  spacer sequence GTCN PAM
cgucccguucacgccgggac

SEQ ID NO: 16305 - RNA, 20 nt, Artificial Sequence
  spacer sequence GTCN PAM
cguucacgccgggacgcgcc

SEQ ID NO: 16306 - RNA, 20 nt, Artificial Sequence
  spacer sequence GTCN PAM
cggcgugaacgggacgugac

SEQ ID NO: 16307 - RNA, 20 nt, Artificial Sequence
  spacer sequence GTCN PAM
ccgggaacaacaagggaccu

SEQ ID NO: 16308 - RNA, 20 nt, Artificial Sequence
  spacer sequence GTCN PAM
cuuguuguucccggugacag

SEQ ID NO: 16309 - RNA, 20 nt, Artificial Sequence
  spacer sequence GTCN PAM
gcguccucaccaguucuuga

SEQ ID NO: 16310 - RNA, 20 nt, Artificial Sequence
  spacer sequence GTCN PAM
ucaccaguucuugaccagcu

SEQ ID NO: 16311 - RNA, 20 nt, Artificial Sequence
  spacer sequence GTCN PAM
agaacuggugaggacgccga

SEQ ID NO: 16312 - RNA, 20 nt, Artificial Sequence
  spacer sequence GTCN PAM
ccaucgcggcggagucgcac

SEQ ID NO: 16313 - RNA, 20 nt, Artificial Sequence
  spacer sequence GTCN PAM
cacccucaggaugacccugu

SEQ ID NO: 16314 - RNA, 20 nt, Artificial Sequence
  spacer sequence GTCN PAM
uccugagggugcgacuccgc

SEQ ID NO: 16315 - RNA, 20 nt, Artificial Sequence
  spacer sequence GTCN PAM
agcugacccggcuacacugc

SEQ ID NO: 16316 - RNA, 20 nt, Artificial Sequence
  spacer sequence GTCN PAM
gcuggacagggucauccuga

SEQ ID NO: 16317 - RNA, 20 nt, Artificial Sequence
  spacer sequence GTCN PAM
gcgcgcacaguggcggauga

SEQ ID NO: 16318 - RNA, 20 nt, Artificial Sequence
  spacer sequence GTCN PAM
aacccucgccggaaguuacu

SEQ ID NO: 16319 - RNA, 20 nt, Artificial Sequence
  spacer sequence GTCN PAM
uccaacccucgccggaaguu

SEQ ID NO: 16320 - RNA, 20 nt, Artificial Sequence
  spacer sequence GTCN PAM
ggagugggcggcguuagggc

SEQ ID NO: 16321 - RNA, 20 nt, Artificial Sequence
  spacer sequence GTCN PAM
ggcggccgauugugcuucug

SEQ ID NO: 16322 - RNA, 20 nt, Artificial Sequence
  spacer sequence GTCN PAM
agcggggaagggucuugcuc

SEQ ID NO: 16323 - RNA, 20 nt, Artificial Sequence
  spacer sequence GTCN PAM
ugcucagagucacacagagg

SEQ ID NO: 16324 - RNA, 20 nt, Artificial Sequence
  spacer sequence GTCN PAM
cacagaggggaagagcuggg

SEQ ID NO: 16325 - RNA, 20 nt, Artificial Sequence
  spacer sequence GTCN PAM
ggcguuguuccugauucgcu

SEQ ID NO: 16326 - RNA, 20 nt, Artificial Sequence
  spacer sequence GTCN PAM
uacagcgaaucaggaacaac

SEQ ID NO: 16327 - RNA, 20 nt, Artificial Sequence
  spacer sequence GTCN PAM
agcggcagugcuucccugag

SEQ ID NO: 16328 - RNA, 20 nt, Artificial Sequence
  spacer sequence GTCN PAM
gaaaucucuuugcaggauuc

SEQ ID NO: 16329 - RNA, 20 nt, Artificial Sequence
  spacer sequence GTCN PAM
cuggaugcucuuagcugaug

SEQ ID NO: 16330 - RNA, 20 nt, Artificial Sequence
  spacer sequence GTCN PAM
ucagcuaagagcauccagag

SEQ ID NO: 16331 - RNA, 20 nt, Artificial Sequence
  spacer sequence GTCN PAM
uucugccuccugcuuuccac

SEQ ID NO: 16332 - RNA, 20 nt, Artificial Sequence
  spacer sequence GTCN PAM
cugcuuccucugcucuccca

SEQ ID NO: 16333 - RNA, 20 nt, Artificial Sequence
  spacer sequence GTCN PAM
gggaauaugccccucuuccu

SEQ ID NO: 16334 - RNA, 20 nt, Artificial Sequence
  spacer sequence GTCN PAM
aggagggcuuccugagggag

SEQ ID NO: 16335 - RNA, 20 nt, Artificial Sequence
  spacer sequence GTCN PAM
ggcaguccaggagggcuucc

SEQ ID NO: 16336 - RNA, 20 nt, Artificial Sequence
  spacer sequence GTCN PAM
aggcuauggccuuuccguuc

SEQ ID NO: 16337 - RNA, 20 nt, Artificial Sequence
  spacer sequence GTCN PAM
cucgggcgccagcgucacuu

SEQ ID NO: 16338 - RNA, 20 nt, Artificial Sequence
  spacer sequence GTCN PAM
cuugcaggccucgugauaag

SEQ ID NO: 16339 - RNA, 20 nt, Artificial Sequence
  spacer sequence GTCN PAM
auuccuuaucacgaggccug

SEQ ID NO: 16340 - RNA, 20 nt, Artificial Sequence
  spacer sequence GTCN PAM
uccuggggucagccccucag

SEQ ID NO: 16341 - RNA, 20 nt, Artificial Sequence
  spacer sequence GTCN PAM
gccccucaguacaccccaag

SEQ ID NO: 16342 - RNA, 20 nt, Artificial Sequence
  spacer sequence GTCN PAM
ccagagagcugcaggcuugg

SEQ ID NO: 16343 - RNA, 20 nt, Artificial Sequence
  spacer sequence GTCN PAM
uuaaccagggauagggaugg

SEQ ID NO: 16344 - RNA, 20 nt, Artificial Sequence
  spacer sequence GTCN PAM
aaaaccuauuuccggcuccc

SEQ ID NO: 16345 - RNA, 20 nt, Artificial Sequence
  spacer sequence GTCN PAM
gggcacuguuuuucuuucuu

SEQ ID NO: 16346 - RNA, 20 nt, Artificial Sequence
  spacer sequence GTCN PAM
caaaaaaaaaaagaaagaaa

SEQ ID NO: 16347 - RNA, 20 nt, Artificial Sequence
  spacer sequence GTCN PAM
cgcucuguggcccaggcugg

SEQ ID NO: 16348 - RNA, 20 nt, Artificial Sequence
  spacer sequence GTCN PAM
uugcacuccagccugggcca

SEQ ID NO: 16349 - RNA, 20 nt, Artificial Sequence
  spacer sequence GTCN PAM
cagcuacuugggaggcugag

SEQ ID NO: 16350 - RNA, 20 nt, Artificial Sequence
  spacer sequence GTCN PAM
ugaauuccugaccucaagug

SEQ ID NO: 16351 - RNA, 20 nt, Artificial Sequence
  spacer sequence GTCN PAM
ggaauucaagacaagccugg

SEQ ID NO: 16352 - RNA, 20 nt, Artificial Sequence
  spacer sequence GTCN PAM
uauucaggugcucucugauc

SEQ ID NO: 16353 - RNA, 20 nt, Artificial Sequence
  spacer sequence GTCN PAM
gccccugcaucccacuuuuu

SEQ ID NO: 16354 - RNA, 20 nt, Artificial Sequence
  spacer sequence GTCN PAM
cugugucagccccugcaucc

SEQ ID NO: 16355 - RNA, 20 nt, Artificial Sequence
  spacer sequence GTCN PAM
uuucucuuaauagucucugu

SEQ ID NO: 16356 - RNA, 20 nt, Artificial Sequence
  spacer sequence GTCN PAM
gcccagaguuuccagaugcc

SEQ ID NO: 16357 - RNA, 20 nt, Artificial Sequence
  spacer sequence GTCN PAM
cacaccccuagcacccagga

SEQ ID NO: 16358 - RNA, 20 nt, Artificial Sequence
  spacer sequence GTCN PAM
cuaaagauuaacgggcucag

SEQ ID NO: 16359 - RNA, 20 nt, Artificial Sequence
  spacer sequence GTCN PAM
aaaggggacccaggaagcgg

SEQ ID NO: 16360 - RNA, 20 nt, Artificial Sequence
  spacer sequence GTCN PAM
ccuuuggaccuguggaucgu

SEQ ID NO: 16361 - RNA, 20 nt, Artificial Sequence
  spacer sequence GTCN PAM
cccacucccugguccugcag

SEQ ID NO: 16362 - RNA, 20 nt, Artificial Sequence
  spacer sequence GTCN PAM
ugcagaaggggaaacggagg

SEQ ID NO: 16363 - RNA, 20 nt, Artificial Sequence
  spacer sequence GTCN PAM
ugcggguagggguggcaccc

SEQ ID NO: 16364 - RNA, 20 nt, Artificial Sequence
  spacer sequence GTCN PAM
agggcgaacacugccuucag

SEQ ID NO: 16365 - RNA, 20 nt, Artificial Sequence
  spacer sequence GTCN PAM
aggggaggcugggugcaccg

SEQ ID NO: 16366 - RNA, 20 nt, Artificial Sequence
  spacer sequence GTCN PAM
ggguccaggggaggcugggu

SEQ ID NO: 16367 - RNA, 20 nt, Artificial Sequence
  spacer sequence GTCN PAM
cccacagcaggccuuuguuu

SEQ ID NO: 16368 - RNA, 20 nt, Artificial Sequence
  spacer sequence GTCN PAM
ccuaggacaccagggcugca

SEQ ID NO: 16369 - RNA, 20 nt, Artificial Sequence
  spacer sequence GTCN PAM
uaggggacaaagcagauaga

SEQ ID NO: 16370 - RNA, 20 nt, Artificial Sequence
  spacer sequence GTCN PAM
cauggguaccgggcuguguc

SEQ ID NO: 16371 - RNA, 20 nt, Artificial Sequence
  spacer sequence GTCN PAM
ugugggcucugcaggccuca

SEQ ID NO: 16372 - RNA, 20 nt, Artificial Sequence
  spacer sequence GTCN PAM
auuucucagaagaggaaacu

SEQ ID NO: 16373 - RNA, 20 nt, Artificial Sequence
  spacer sequence GTCN PAM
cacacagccagagcccucgg

SEQ ID NO: 16374 - RNA, 20 nt, Artificial Sequence
  spacer sequence GTCN PAM
cgcacgcggcagggccuggg

SEQ ID NO: 16375 - RNA, 20 nt, Artificial Sequence
  spacer sequence GTCN PAM
uagggacucgcucccccuuc

SEQ ID NO: 16376 - RNA, 20 nt, Artificial Sequence
  spacer sequence GTCN PAM
cuaggaccgaggcuguugga

SEQ ID NO: 16377 - RNA, 20 nt, Artificial Sequence
  spacer sequence GTCN PAM
ggggcuucaggaaugaaggg

SEQ ID NO: 16378 - RNA, 20 nt, Artificial Sequence
  spacer sequence GTCN PAM
cugggccugagucaggggcu

SEQ ID NO: 16379 - RNA, 20 nt, Artificial Sequence
  spacer sequence GTCN PAM
caggcagucccugggccuga

SEQ ID NO: 16380 - RNA, 20 nt, Artificial Sequence
  spacer sequence GTCN PAM
gcccaggccagugcuggcgg

SEQ ID NO: 16381 - RNA, 20 nt, Artificial Sequence
  spacer sequence GTCN PAM
uucguucccgaccaaagcua

SEQ ID NO: 16382 - RNA, 20 nt, Artificial Sequence
  spacer sequence GTCN PAM
ggaacgaaggacccgccagc

SEQ ID NO: 16383 - RNA, 20 nt, Artificial Sequence
  spacer sequence GTCN PAM
gggcaggacaaaggcgcgcu

SEQ ID NO: 16384 - RNA, 20 nt, Artificial Sequence
  spacer sequence GTCN PAM
ugcccugacccaggcuagcu

SEQ ID NO: 16385 - RNA, 20 nt, Artificial Sequence
  spacer sequence GTCN PAM
agggaaguaagugcuucccc

SEQ ID NO: 16386 - RNA, 20 nt, Artificial Sequence
  spacer sequence GTCN PAM
uaggggaagcacuuacuucc

SEQ ID NO: 16387 - RNA, 20 nt, Artificial Sequence
  spacer sequence GTCN PAM
caggggcugccucugccucc

SEQ ID NO: 16388 - RNA, 20 nt, Artificial Sequence
  spacer sequence GTCN PAM
uggccagggagguggaacuc

SEQ ID NO: 16389 - RNA, 20 nt, Artificial Sequence
  spacer sequence GTCN PAM
ccccucgggcuuuacccaga

SEQ ID NO: 16390 - RNA, 20 nt, Artificial Sequence
  spacer sequence GTCN PAM
ucuccgggcguccccccucg

SEQ ID NO: 16391 - RNA, 20 nt, Artificial Sequence
  spacer sequence GTCN PAM
gagccguucccagaugagga

SEQ ID NO: 16392 - RNA, 20 nt, Artificial Sequence
  spacer sequence GTCN PAM
ccccaucccgggucggagcc

SEQ ID NO: 16393 - RNA, 20 nt, Artificial Sequence
  spacer sequence GTCN PAM
gguccuggggcugaaccugu

SEQ ID NO: 16394 - RNA, 20 nt, Artificial Sequence
  spacer sequence GTCN PAM
uggggcugaaccugugcccc

SEQ ID NO: 16395 - RNA, 20 nt, Artificial Sequence
  spacer sequence GTCN PAM
guuccagcccagcggucugu

SEQ ID NO: 16396 - RNA, 20 nt, Artificial Sequence
  spacer sequence GTCN PAM
gugacuugucaguuuaacaa

SEQ ID NO: 16397 - RNA, 20 nt, Artificial Sequence
  spacer sequence GTCN PAM
cagaccgcugggcuggaaca

SEQ ID NO: 16398 - RNA, 20 nt, Artificial Sequence
  spacer sequence GTCN PAM
guuuaacaaaaaacaaccca

SEQ ID NO: 16399 - RNA, 20 nt, Artificial Sequence
  spacer sequence GTCN PAM
ccaaacugaaacaacaccgg

SEQ ID NO: 16400 - RNA, 20 nt, Artificial Sequence
  spacer sequence GTCN PAM
aaaacaaaaguccccaaacu

SEQ ID NO: 16401 - RNA, 20 nt, Artificial Sequence
  spacer sequence GTCN PAM
gucaaaaacaaaagucccca

SEQ ID NO: 16402 - RNA, 20 nt, Artificial Sequence
  spacer sequence GTCN PAM
gaauuuaacccucccgccua

SEQ ID NO: 16403 - RNA, 20 nt, Artificial Sequence
  spacer sequence GTCN PAM
uuaaauucugcucccccccc

SEQ ID NO: 16404 - RNA, 20 nt, Artificial Sequence
  spacer sequence GTCN PAM
acagauguccuuaaauucug

SEQ ID NO: 16405 - RNA, 20 nt, Artificial Sequence
  spacer sequence GTCN PAM
cugggcuucuccaggaaccc

SEQ ID NO: 16406 - RNA, 20 nt, Artificial Sequence
  spacer sequence GTCN PAM
gcggccgguaccccaggggg

SEQ ID NO: 16407 - RNA, 20 nt, Artificial Sequence
  spacer sequence GTCN PAM
cacaguucaggcaggugcag

SEQ ID NO: 16408 - RNA, 20 nt, Artificial Sequence
  spacer sequence GTCN PAM
ucagaagucacacaguucag

SEQ ID NO: 16409 - RNA, 20 nt, Artificial Sequence
  spacer sequence GTCN PAM
cuguacggcccauucuccac

SEQ ID NO: 16410 - RNA, 20 nt, Artificial Sequence
  spacer sequence GTCN PAM
uaggugguuggaucuguccc

SEQ ID NO: 16411 - RNA, 20 nt, Artificial Sequence
  spacer sequence GTCN PAM
caaugguggcgcugcugucu

SEQ ID NO: 16412 - RNA, 20 nt, Artificial Sequence
  spacer sequence GTCN PAM
gcucgguggcccaugaauuc

SEQ ID NO: 16413 - RNA, 20 nt, Artificial Sequence
  spacer sequence GTCN PAM
cacgugggugcugaaguuaa

SEQ ID NO: 16414 - RNA, 20 nt, Artificial Sequence
  spacer sequence GTCN PAM
guuucaugcccgcauccucu

SEQ ID NO: 16415 - RNA, 20 nt, Artificial Sequence
  spacer sequence GTCN PAM
cguauggggcagguuguguc

SEQ ID NO: 16416 - RNA, 20 nt, Artificial Sequence
  spacer sequence GTCN PAM
gcccuguucacggagggugg

SEQ ID NO: 16417 - RNA, 20 nt, Artificial Sequence
  spacer sequence GTCN PAM
gcucagcacugggcaccccc

SEQ ID NO: 16418 - RNA, 20 nt, Artificial Sequence
  spacer sequence GTCN PAM
cagcuacuugggaggcugag

SEQ ID NO: 16419 - RNA, 20 nt, Artificial Sequence
  spacer sequence GTCN PAM
uuuugagaaauggggccuca

SEQ ID NO: 16420 - RNA, 20 nt, Artificial Sequence
  spacer sequence GTCN PAM
agcccaggaaacauagugag

SEQ ID NO: 16421 - RNA, 20 nt, Artificial Sequence
  spacer sequence GTCN PAM
uuccagcacuuugggaggcu

SEQ ID NO: 16422 - RNA, 20 nt, Artificial Sequence
  spacer sequence GTCN PAM
ccagggucucacugucaacc

SEQ ID NO: 16423 - RNA, 20 nt, Artificial Sequence
  spacer sequence GTCN PAM
cacugucaaccagacuggag

SEQ ID NO: 16424 - RNA, 20 nt, Artificial Sequence
  spacer sequence GTCN PAM
accagacuggagugcaguga

SEQ ID NO: 16425 - RNA, 20 nt, Artificial Sequence
  spacer sequence GTCN PAM
gguugacagugagacccugg

SEQ ID NO: 16426 - RNA, 20 nt, Artificial Sequence
  spacer sequence GTCN PAM
cuuaccucauuguagauaca

SEQ ID NO: 16427 - RNA, 20 nt, Artificial Sequence
  spacer sequence GTCN PAM
ugggcccccagcuuggcugg

SEQ ID NO: 16428 - RNA, 20 nt, Artificial Sequence
  spacer sequence GTCN PAM
ucaggggcaugguccugggc

SEQ ID NO: 16429 - RNA, 20 nt, Artificial Sequence
  spacer sequence GTCN PAM
gggcaaaagccccauagcac

SEQ ID NO: 16430 - RNA, 20 nt, Artificial Sequence
  spacer sequence GTCN PAM
gccuccugccagagagcggc

SEQ ID NO: 16431 - RNA, 20 nt, Artificial Sequence
  spacer sequence GTCN PAM
ggggcugggcggggguccug

SEQ ID NO: 16432 - RNA, 20 nt, Artificial Sequence
  spacer sequence GTCN PAM
uggcucaccaugcugaaguc

SEQ ID NO: 16433 - RNA, 20 nt, Artificial Sequence
  spacer sequence GTCN PAM
aggaggucacugagcuccuu

SEQ ID NO: 16434 - RNA, 20 nt, Artificial Sequence
  spacer sequence GTCN PAM
cugagcuccuugucugugcc

SEQ ID NO: 16435 - RNA, 20 nt, Artificial Sequence
  spacer sequence GTCN PAM
gugcccacaggcgccauccu

SEQ ID NO: 16436 - RNA, 20 nt, Artificial Sequence
  spacer sequence GTCN PAM
ccacauccaccaagcagggu

SEQ ID NO: 16437 - RNA, 20 nt, Artificial Sequence
  spacer sequence GTCN PAM
aucuguccccacauccacca

SEQ ID NO: 16438 - RNA, 20 nt, Artificial Sequence
  spacer sequence GTCN PAM
aagcacagagugcuaaaagc

SEQ ID NO: 16439 - RNA, 20 nt, Artificial Sequence
  spacer sequence GTCN PAM
gaguuccagcagagcccugg

SEQ ID NO: 16440 - RNA, 20 nt, Artificial Sequence
  spacer sequence GTCN PAM
aggucccugcagaguccucc

SEQ ID NO: 16441 - RNA, 20 nt, Artificial Sequence
  spacer sequence GTCN PAM
cugcagaguccuccccagag

SEQ ID NO: 16442 - RNA, 20 nt, Artificial Sequence
  spacer sequence GTCN PAM
uccccagagaccacagggag

SEQ ID NO: 16443 - RNA, 20 nt, Artificial Sequence
  spacer sequence GTCN PAM
cuggggaggacucugcaggg

SEQ ID NO: 16444 - RNA, 20 nt, Artificial Sequence
  spacer sequence GTCN PAM
gaaaaauggggggagggugu

SEQ ID NO: 16445 - RNA, 20 nt, Artificial Sequence
  spacer sequence GTCN PAM
ucaacgggcugugccaucug

SEQ ID NO: 16446 - RNA, 20 nt, Artificial Sequence
  spacer sequence GTCN PAM
cccccaaauucaacaugaag

SEQ ID NO: 16447 - RNA, 20 nt, Artificial Sequence
  spacer sequence GTCN PAM
gaaaaccacgaaacucuuuu

SEQ ID NO: 16448 - RNA, 20 nt, Artificial Sequence
  spacer sequence GTCN PAM
ugaagcuuguaaaagaguuu

SEQ ID NO: 16449 - RNA, 20 nt, Artificial Sequence
  spacer sequence GTCN PAM
cccccacccccggcacuuua

SEQ ID NO: 16450 - RNA, 20 nt, Artificial Sequence
  spacer sequence GTCN PAM
cugcauaggaugcgcguccc

SEQ ID NO: 16451 - RNA, 20 nt, Artificial Sequence
  spacer sequence GTCN PAM
cgauguauccgggaauuauu

SEQ ID NO: 16452 - RNA, 20 nt, Artificial Sequence
  spacer sequence GTCN PAM
aaguuuugcuuaaaaauaau

SEQ ID NO: 16453 - RNA, 20 nt, Artificial Sequence
  spacer sequence GTCN PAM
caagaccagggugcucccgc

SEQ ID NO: 16454 - RNA, 20 nt, Artificial Sequence
  spacer sequence GTCN PAM
ugagacgcucuccccgcuca

SEQ ID NO: 16455 - RNA, 20 nt, Artificial Sequence
  spacer sequence GTCN PAM
cagggggcuccauucuaaga

SEQ ID NO: 16456 - RNA, 20 nt, Artificial Sequence
  spacer sequence GTCN PAM
uggcagguggaucccccauc

SEQ ID NO: 16457 - RNA, 20 nt, Artificial Sequence
  spacer sequence GTCN PAM
cgacuuuccccagggguccc

SEQ ID NO: 16458 - RNA, 20 nt, Artificial Sequence
  spacer sequence GTCN PAM
agacuggaggggccuggagu

SEQ ID NO: 16459 - RNA, 20 nt, Artificial Sequence
  spacer sequence GTCN PAM
ccagguggggacgggggcag

SEQ ID NO: 16460 - RNA, 20 nt, Artificial Sequence
  spacer sequence GTCN PAM
ccaccuggggaccccugggg

SEQ ID NO: 16461 - RNA, 20 nt, Artificial Sequence
  spacer sequence GTCN PAM
cccgggcugcccccgucccc

SEQ ID NO: 16462 - RNA, 20 nt, Artificial Sequence
  spacer sequence GTCN PAM
agggagacccaacuucagaa

SEQ ID NO: 16463 - RNA, 20 nt, Artificial Sequence
  spacer sequence GTCN PAM
cccucgaccucggaggcucc

SEQ ID NO: 16464 - RNA, 20 nt, Artificial Sequence
  spacer sequence GTCN PAM
gccaacuggaggccgggugu

SEQ ID NO: 16465 - RNA, 20 nt, Artificial Sequence
  spacer sequence GTCN PAM
guuucacacgcccuccaaaa

SEQ ID NO: 16466 - RNA, 20 nt, Artificial Sequence
  spacer sequence GTCN PAM
ucaaaaaaagucaguuucac

SEQ ID NO: 16467 - RNA, 20 nt, Artificial Sequence
  spacer sequence GTCN PAM
uaaaaucgguuucagcuacc

SEQ ID NO: 16468 - RNA, 20 nt, Artificial Sequence
  spacer sequence GTCN PAM
gucuuaaaaucgguuucagc

SEQ ID NO: 16469 - RNA, 20 nt, Artificial Sequence
  spacer sequence GTCN PAM
uccagcucccguagaaugcc

SEQ ID NO: 16470 - RNA, 20 nt, Artificial Sequence
  spacer sequence GTCN PAM
caaggacuuugagagacuug

SEQ ID NO: 16471 - RNA, 20 nt, Artificial Sequence
  spacer sequence GTCN PAM
uugggacgccccagaagucu

SEQ ID NO: 16472 - RNA, 20 nt, Artificial Sequence
  spacer sequence GTCN PAM
cucaaaguccuugggacgcc

SEQ ID NO: 16473 - RNA, 20 nt, Artificial Sequence
  spacer sequence GTCN PAM
ggcuucccgggccgccuccc

SEQ ID NO: 16474 - RNA, 20 nt, Artificial Sequence
  spacer sequence GTCN PAM
gggccgggcgggccgggggg

SEQ ID NO: 16475 - RNA, 20 nt, Artificial Sequence
  spacer sequence GTCN PAM
gcgcggggaaggugccgcgc

SEQ ID NO: 16476 - RNA, 20 nt, Artificial Sequence
  spacer sequence GTCN PAM
uuuugucugcgcggggaagg

SEQ ID NO: 16477 - RNA, 20 nt, Artificial Sequence
  spacer sequence GTCN PAM
cucccgcgcgcuccccaccc

SEQ ID NO: 16478 - RNA, 20 nt, Artificial Sequence
  spacer sequence GTCN PAM
ccgugcgcccgggcuggggg

SEQ ID NO: 16479 - RNA, 20 nt, Artificial Sequence
  spacer sequence GTCN PAM
cccccagcccgggcgcacgg

SEQ ID NO: 16480 - RNA, 20 nt, Artificial Sequence
  spacer sequence GTCN PAM
ucgcgccuaaguugcacagc

SEQ ID NO: 16481 - RNA, 20 nt, Artificial Sequence
  spacer sequence GTCN PAM
ggcgccccccgcgcccccgc

SEQ ID NO: 16482 - RNA, 20 nt, Artificial Sequence
  spacer sequence GTCN PAM
ggccgggcacuucgggaaac

SEQ ID NO: 16483 - RNA, 20 nt, Artificial Sequence
  spacer sequence GTCN PAM
cccccgucgggccgggcacu

SEQ ID NO: 16484 - RNA, 20 nt, Artificial Sequence
  spacer sequence GTCN PAM
ccgcccccccggcgccgcgc

SEQ ID NO: 16485 - RNA, 20 nt, Artificial Sequence
  spacer sequence GTCN PAM
uuguucuccaacuucgcgcg

SEQ ID NO: 16486 - RNA, 20 nt, Artificial Sequence
  spacer sequence GTCN PAM
gggggcgccccgcggcccgg

SEQ ID NO: 16487 - RNA, 20 nt, Artificial Sequence
  spacer sequence GTCN PAM
gggggggggcccccccgcuu

SEQ ID NO: 16488 - RNA, 20 nt, Artificial Sequence
  spacer sequence GTCN PAM
cggccgggcccccgaggguc

SEQ ID NO: 16489 - RNA, 20 nt, Artificial Sequence
  spacer sequence GTCN PAM
cgcgugggcggcggcggcgg

SEQ ID NO: 16490 - RNA, 20 nt, Artificial Sequence
  spacer sequence GTCN PAM
cgcggggcccgugcgcgcgg

SEQ ID NO: 16491 - RNA, 20 nt, Artificial Sequence
  spacer sequence GTCN PAM
gcuccggcccgcuacgcccg

SEQ ID NO: 16492 - RNA, 20 nt, Artificial Sequence
  spacer sequence GTCN PAM
cccgccgcaggaagaugagg

SEQ ID NO: 16493 - RNA, 20 nt, Artificial Sequence
  spacer sequence GTCN PAM
ucacgagggugcucgagagg

SEQ ID NO: 16494 - RNA, 20 nt, Artificial Sequence
  spacer sequence GTCN PAM
agagccugggagcggggacg

SEQ ID NO: 16495 - RNA, 20 nt, Artificial Sequence
  spacer sequence GTCN PAM
ccgcucccaggcucuggacc

SEQ ID NO: 16496 - RNA, 20 nt, Artificial Sequence
  spacer sequence GTCN PAM
ggccacggcgcggggagaaa

SEQ ID NO: 16497 - RNA, 20 nt, Artificial Sequence
  spacer sequence GTCN PAM
gugauuucuccccgcgccgu

SEQ ID NO: 16498 - RNA, 20 nt, Artificial Sequence
  spacer sequence GTCN PAM
gcggaagcacacacgagcug

SEQ ID NO: 16499 - RNA, 20 nt, Artificial Sequence
  spacer sequence GTCN PAM
augacgcaagcgaguaaggc

SEQ ID NO: 16500 - RNA, 20 nt, Artificial Sequence
  spacer sequence GTCN PAM
uggacuaagcgcacagcucg

SEQ ID NO: 16501 - RNA, 20 nt, Artificial Sequence
  spacer sequence GTCN PAM
ggucaaucggaagccgcgaa

SEQ ID NO: 16502 - RNA, 20 nt, Artificial Sequence
  spacer sequence GTCN PAM
aucggaagccgcgaaagucu

SEQ ID NO: 16503 - RNA, 20 nt, Artificial Sequence
  spacer sequence GTCN PAM
gaugggcggggauccuagcc

SEQ ID NO: 16504 - RNA, 20 nt, Artificial Sequence
  spacer sequence GTCN PAM
cgccucugcugaggggcggg

SEQ ID NO: 16505 - RNA, 20 nt, Artificial Sequence
  spacer sequence GTCN PAM
uggaguuuuguucucagguu

SEQ ID NO: 16506 - RNA, 20 nt, Artificial Sequence
  spacer sequence GTCN PAM
gacccauuuucccggcggga

SEQ ID NO: 16507 - RNA, 20 nt, Artificial Sequence
  spacer sequence GTCN PAM
gacguagcccccucggggcc

SEQ ID NO: 16508 - RNA, 20 nt, Artificial Sequence
  spacer sequence GTCN PAM
guuuucccgccgggaaaaug

SEQ ID NO: 16509 - RNA, 20 nt, Artificial Sequence
  spacer sequence GTCN PAM
gagagccccgcggggagucu

SEQ ID NO: 16510 - RNA, 20 nt, Artificial Sequence
  spacer sequence GTCN PAM
cagcggugccuuugccgacu

SEQ ID NO: 16511 - RNA, 20 nt, Artificial Sequence
  spacer sequence GTCN PAM
gcaaaggcaccgcugagacu

SEQ ID NO: 16512 - RNA, 20 nt, Artificial Sequence
  spacer sequence GTCN PAM
ccgucucggcaucugugaau

SEQ ID NO: 16513 - RNA, 20 nt, Artificial Sequence
  spacer sequence GTCN PAM
cggcaucugugaauuuggac

SEQ ID NO: 16514 - RNA, 20 nt, Artificial Sequence
  spacer sequence GTCN PAM
aaauucacagaugccgagac

SEQ ID NO: 16515 - RNA, 20 nt, Artificial Sequence
  spacer sequence GTCN PAM
gguccaaauucacagaugcc

SEQ ID NO: 16516 - RNA, 20 nt, Artificial Sequence
  spacer sequence GTCN PAM
aaagucagguccaaauucac

SEQ ID NO: 16517 - RNA, 20 nt, Artificial Sequence
  spacer sequence GTCN PAM
gugucuacauuuuaguaaaa

SEQ ID NO: 16518 - RNA, 20 nt, Artificial Sequence
  spacer sequence GTCN PAM
acauuuuaguaaaaagugac

SEQ ID NO: 16519 - RNA, 20 nt, Artificial Sequence
  spacer sequence GTCN PAM
cuuuuuacuaaaauguagac

SEQ ID NO: 16520 - RNA, 20 nt, Artificial Sequence
  spacer sequence GTCN PAM
cuaaaaauauuuaaaauaau

SEQ ID NO: 16521 - RNA, 20 nt, Artificial Sequence
  spacer sequence GTCN PAM
acuuuuuaaauuauuauuuu

SEQ ID NO: 16522 - RNA, 20 nt, Artificial Sequence
  spacer sequence GTCN PAM
ggucaacuuuuuaaauuauu

SEQ ID NO: 16523 - RNA, 20 nt, Artificial Sequence
  spacer sequence GTCN PAM
ggaguucgagaccucucugg

SEQ ID NO: 16524 - RNA, 20 nt, Artificial Sequence
  spacer sequence GTCN PAM
cgaacuccugacuucaggug

SEQ ID NO: 16525 - RNA, 20 nt, Artificial Sequence
  spacer sequence GTCN PAM
uagcuacucgggaggcugag

SEQ ID NO: 16526 - RNA, 20 nt, Artificial Sequence
  spacer sequence GTCN PAM
uuguugcccaggcuggagua

SEQ ID NO: 16527 - RNA, 20 nt, Artificial Sequence
  spacer sequence GTCN PAM
caaaauaaauaaauaaauaa

SEQ ID NO: 16528 - RNA, 20 nt, Artificial Sequence
  spacer sequence GTCN PAM
cccagccuggagugcagugc

SEQ ID NO: 16529 - RNA, 20 nt, Artificial Sequence
  spacer sequence GTCN PAM
caaaaaaaaaaguaaaauaa

SEQ ID NO: 16530 - RNA, 20 nt, Artificial Sequence
  spacer sequence GTCN PAM
agaacuugcuaagcucaucc

SEQ ID NO: 16531 - RNA, 20 nt, Artificial Sequence
  spacer sequence GTCN PAM
ucuaccugggaggcuuuucc

SEQ ID NO: 16532 - RNA, 20 nt, Artificial Sequence
  spacer sequence GTCN PAM
ucacaguucaaugcugcacc

SEQ ID NO: 16533 - RNA, 20 nt, Artificial Sequence
  spacer sequence GTCN PAM
acaguccgacccuccgugcc

SEQ ID NO: 16534 - RNA, 20 nt, Artificial Sequence
  spacer sequence GTCN PAM
gacccuccgugcccagagag

SEQ ID NO: 16535 - RNA, 20 nt, Artificial Sequence
  spacer sequence GTCN PAM
gacuguggacagcccaguuu

SEQ ID NO: 16536 - RNA, 20 nt, Artificial Sequence
  spacer sequence GTCN PAM
ggggagagggcugugggucc

SEQ ID NO: 16537 - RNA, 20 nt, Artificial Sequence
  spacer sequence GTCN PAM
cagggucugugcugcaaauc

SEQ ID NO: 16538 - RNA, 20 nt, Artificial Sequence
  spacer sequence GTCN PAM
gugcugcaaaucccucaucc

SEQ ID NO: 16539 - RNA, 20 nt, Artificial Sequence
  spacer sequence GTCN PAM
cagugagguggagagggaug

SEQ ID NO: 16540 - RNA, 20 nt, Artificial Sequence
  spacer sequence GTCN PAM
agauggagaaaccgaggccc

SEQ ID NO: 16541 - RNA, 20 nt, Artificial Sequence
  spacer sequence GTCN PAM
cgaucuccugaccucgugau

SEQ ID NO: 16542 - RNA, 20 nt, Artificial Sequence
  spacer sequence GTCN PAM
ggagaucgagaccauccugg

SEQ ID NO: 16543 - RNA, 20 nt, Artificial Sequence
  spacer sequence GTCN PAM
gccgggcacggcggcucacg

SEQ ID NO: 16544 - RNA, 20 nt, Artificial Sequence
  spacer sequence GTCN PAM
cggaggacuccacugcccuc

SEQ ID NO: 16545 - RNA, 20 nt, Artificial Sequence
  spacer sequence GTCN PAM
uccgagacaaaauaaagcuc

SEQ ID NO: 16546 - RNA, 20 nt, Artificial Sequence
  spacer sequence GTCN PAM
ggccucccgagcccccucug

SEQ ID NO: 16547 - RNA, 20 nt, Artificial Sequence
  spacer sequence GTCN PAM
aagcagcagcgaggaggugg

SEQ ID NO: 16548 - RNA, 20 nt, Artificial Sequence
  spacer sequence GTCN PAM
cagggagaaaacggugucca

SEQ ID NO: 16549 - RNA, 20 nt, Artificial Sequence
  spacer sequence GTCN PAM
gugcccaggaugucccucgg

SEQ ID NO: 16550 - RNA, 20 nt, Artificial Sequence
  spacer sequence GTCN PAM
cucggccgggagccguuccu

SEQ ID NO: 16551 - RNA, 20 nt, Artificial Sequence
  spacer sequence GTCN PAM
ggccccagauggaugcugga

SEQ ID NO: 16552 - RNA, 20 nt, Artificial Sequence
  spacer sequence GTCN PAM
ggccgcccucuucggagccu

SEQ ID NO: 16553 - RNA, 20 nt, Artificial Sequence
  spacer sequence GTCN PAM
cggggcagcugguggggccg

SEQ ID NO: 16554 - RNA, 20 nt, Artificial Sequence
  spacer sequence GTCN PAM
gcucacgcugccucuggguc

SEQ ID NO: 16555 - RNA, 20 nt, Artificial Sequence
  spacer sequence GTCN PAM
ccuucugagucccccucagc

SEQ ID NO: 16556 - RNA, 20 nt, Artificial Sequence
  spacer sequence GTCN PAM
cccucagccuuucucgguug

SEQ ID NO: 16557 - RNA, 20 nt, Artificial Sequence
  spacer sequence GTCN PAM
ccaucucugucuuugucucu

SEQ ID NO: 16558 - RNA, 20 nt, Artificial Sequence
  spacer sequence GTCN PAM
uugucucucugucucugucu

SEQ ID NO: 16559 - RNA, 20 nt, Artificial Sequence
  spacer sequence GTCN PAM
cucugucucugucucuuucu

SEQ ID NO: 16560 - RNA, 20 nt, Artificial Sequence
  spacer sequence GTCN PAM
cugucucuuucugucuguuu

SEQ ID NO: 16561 - RNA, 20 nt, Artificial Sequence
  spacer sequence GTCN PAM
cuuucugucuguuucucucu

SEQ ID NO: 16562 - RNA, 20 nt, Artificial Sequence
  spacer sequence GTCN PAM
guuucucucugucuucuuuc

SEQ ID NO: 16563 - RNA, 20 nt, Artificial Sequence
  spacer sequence GTCN PAM
ucuuucucugugcucucucu

SEQ ID NO: 16564 - RNA, 20 nt, Artificial Sequence
  spacer sequence GTCN PAM
gccucccugucucugucucu

SEQ ID NO: 16565 - RNA, 20 nt, Artificial Sequence
  spacer sequence GTCN PAM
cugucucuuucucuucccca

SEQ ID NO: 16566 - RNA, 20 nt, Artificial Sequence
  spacer sequence GTCN PAM
cuuucucuuccccaucucug

SEQ ID NO: 16567 - RNA, 20 nt, Artificial Sequence
  spacer sequence GTCN PAM
gucuuuuugucucugucucu

SEQ ID NO: 16568 - RNA, 20 nt, Artificial Sequence
  spacer sequence GTCN PAM
uuuugucucugucucuguuu

SEQ ID NO: 16569 - RNA, 20 nt, Artificial Sequence
  spacer sequence GTCN PAM
cugucucuguuucuuucugu

SEQ ID NO: 16570 - RNA, 20 nt, Artificial Sequence
  spacer sequence GTCN PAM
cuguuucuuucugucucugc

SEQ ID NO: 16571 - RNA, 20 nt, Artificial Sequence
  spacer sequence GTCN PAM
cugcguaucucuuucugucc

SEQ ID NO: 16572 - RNA, 20 nt, Artificial Sequence
  spacer sequence GTCN PAM
cucugucucugucagucucu

SEQ ID NO: 16573 - RNA, 20 nt, Artificial Sequence
  spacer sequence GTCN PAM
cugucagucucucugugucu

SEQ ID NO: 16574 - RNA, 20 nt, Artificial Sequence
  spacer sequence GTCN PAM
gucucucugugucugugugu

SEQ ID NO: 16575 - RNA, 20 nt, Artificial Sequence
  spacer sequence GTCN PAM
cucugugucugugugugucu

SEQ ID NO: 16576 - RNA, 20 nt, Artificial Sequence
  spacer sequence GTCN PAM
gugugugucuccaucucucu

SEQ ID NO: 16577 - RNA, 20 nt, Artificial Sequence
  spacer sequence GTCN PAM
ccaucucucucugucuccau

SEQ ID NO: 16578 - RNA, 20 nt, Artificial Sequence
  spacer sequence GTCN PAM
ccaucucucucguugucucu

SEQ ID NO: 16579 - RNA, 20 nt, Artificial Sequence
  spacer sequence GTCN PAM
cucuguuucucuuuaucucu

SEQ ID NO: 16580 - RNA, 20 nt, Artificial Sequence
  spacer sequence GTCN PAM
cucucugccugucucucugc

SEQ ID NO: 16581 - RNA, 20 nt, Artificial Sequence
  spacer sequence GTCN PAM
cucugccucucugucucucu

SEQ ID NO: 16582 - RNA, 20 nt, Artificial Sequence
  spacer sequence GTCN PAM
cucuguuucucugccugucu

SEQ ID NO: 16583 - RNA, 20 nt, Artificial Sequence
  spacer sequence GTCN PAM
cucucucugccucucuguau

SEQ ID NO: 16584 - RNA, 20 nt, Artificial Sequence
  spacer sequence GTCN PAM
cuuugucuguuucuguucuu

SEQ ID NO: 16585 - RNA, 20 nt, Artificial Sequence
  spacer sequence GTCN PAM
guuucuguucuucucugucu

SEQ ID NO: 16586 - RNA, 20 nt, Artificial Sequence
  spacer sequence GTCN PAM
ccuucucugcuucucugucu

SEQ ID NO: 16587 - RNA, 20 nt, Artificial Sequence
  spacer sequence GTCN PAM
ccuucucuuucuguuccuau

SEQ ID NO: 16588 - RNA, 20 nt, Artificial Sequence
  spacer sequence GTCN PAM
uuuucucugucucucucugc

SEQ ID NO: 16589 - RNA, 20 nt, Artificial Sequence
  spacer sequence GTCN PAM
cucucugccucucugucucc

SEQ ID NO: 16590 - RNA, 20 nt, Artificial Sequence
  spacer sequence GTCN PAM
cccucugucucugccucucu

SEQ ID NO: 16591 - RNA, 20 nt, Artificial Sequence
  spacer sequence GTCN PAM
cugccucucucuccuucccc

SEQ ID NO: 16592 - RNA, 20 nt, Artificial Sequence
  spacer sequence GTCN PAM
ccagugugaaggggaaggag

SEQ ID NO: 16593 - RNA, 20 nt, Artificial Sequence
  spacer sequence GTCN PAM
ggggaguccccagugugaag

SEQ ID NO: 16594 - RNA, 20 nt, Artificial Sequence
  spacer sequence GTCN PAM
gggccagucaggggaguccc

SEQ ID NO: 16595 - RNA, 20 nt, Artificial Sequence
  spacer sequence GTCN PAM
ggaagagagggugcagcagu

SEQ ID NO: 16596 - RNA, 20 nt, Artificial Sequence
  spacer sequence GTCN PAM
gccagcaccucugugcuggc

SEQ ID NO: 16597 - RNA, 20 nt, Artificial Sequence
  spacer sequence GTCN PAM
cuacccaccgggaggagccc

SEQ ID NO: 16598 - RNA, 20 nt, Artificial Sequence
  spacer sequence GTCN PAM
ugggcuccucccggugggua

SEQ ID NO: 16599 - RNA, 20 nt, Artificial Sequence
  spacer sequence GTCN PAM
ccagcccgugagaggguccu

SEQ ID NO: 16600 - RNA, 20 nt, Artificial Sequence
  spacer sequence GTCN PAM
cagcccgucggggcucccag

SEQ ID NO: 16601 - RNA, 20 nt, Artificial Sequence
  spacer sequence GTCN PAM
gggcucccagccagaugggg

SEQ ID NO: 16602 - RNA, 20 nt, Artificial Sequence
  spacer sequence GTCN PAM
cuccccggguuaggagcagg

SEQ ID NO: 16603 - RNA, 20 nt, Artificial Sequence
  spacer sequence GTCN PAM
cuccccgggccacccccagc

SEQ ID NO: 16604 - RNA, 20 nt, Artificial Sequence
  spacer sequence GTCN PAM
cacagggaaccuggcccagu

SEQ ID NO: 16605 - RNA, 20 nt, Artificial Sequence
  spacer sequence GTCN PAM
uggggagggcagcugggagg

SEQ ID NO: 16606 - RNA, 20 nt, Artificial Sequence
  spacer sequence GTCN PAM
cagcuccgccccccuagugc

SEQ ID NO: 16607 - RNA, 20 nt, Artificial Sequence
  spacer sequence GTCN PAM
uuggggggagucccagcucc

SEQ ID NO: 16608 - RNA, 20 nt, Artificial Sequence
  spacer sequence GTCN PAM
gcgagggugguggguggaug

SEQ ID NO: 16609 - RNA, 20 nt, Artificial Sequence
  spacer sequence GTCN PAM
uuaauaugcaaaaaugcaaa

SEQ ID NO: 16610 - RNA, 20 nt, Artificial Sequence
  spacer sequence GTCN PAM
ucacccccucaccgccuccg

SEQ ID NO: 16611 - RNA, 20 nt, Artificial Sequence
  spacer sequence GTCN PAM
cugcccugggagcggccccu

SEQ ID NO: 16612 - RNA, 20 nt, Artificial Sequence
  spacer sequence GTCN PAM
cugcagcucccagaggcagg

SEQ ID NO: 16613 - RNA, 20 nt, Artificial Sequence
  spacer sequence GTCN PAM
cugccucuggggcucacagg

SEQ ID NO: 16614 - RNA, 20 nt, Artificial Sequence
  spacer sequence GTCN PAM
uugacucucugucucucucu

SEQ ID NO: 16615 - RNA, 20 nt, Artificial Sequence
  spacer sequence GTCN PAM
aagacagagauagagagaua

SEQ ID NO: 16616 - RNA, 20 nt, Artificial Sequence
  spacer sequence GTCN PAM
cucucugccucuaucucugu

SEQ ID NO: 16617 - RNA, 20 nt, Artificial Sequence
  spacer sequence GTCN PAM
cucugugucucucucugucu

SEQ ID NO: 16618 - RNA, 20 nt, Artificial Sequence
  spacer sequence GTCN PAM
cucucugucucuaucucuuc

SEQ ID NO: 16619 - RNA, 20 nt, Artificial Sequence
  spacer sequence GTCN PAM
cuaucucuucucuauuucac

SEQ ID NO: 16620 - RNA, 20 nt, Artificial Sequence
  spacer sequence GTCN PAM
gugucucugucuuuuucugu

SEQ ID NO: 16621 - RNA, 20 nt, Artificial Sequence
  spacer sequence GTCN PAM
cugucuuuuucugucucuuu

SEQ ID NO: 16622 - RNA, 20 nt, Artificial Sequence
  spacer sequence GTCN PAM
uuuucugucucuuucucugu

SEQ ID NO: 16623 - RNA, 20 nt, Artificial Sequence
  spacer sequence GTCN PAM
cuuucucugucucucugugu

SEQ ID NO: 16624 - RNA, 20 nt, Artificial Sequence
  spacer sequence GTCN PAM
cucugugucucucucugccu

SEQ ID NO: 16625 - RNA, 20 nt, Artificial Sequence
  spacer sequence GTCN PAM
cucucugccucuaucuuucu

SEQ ID NO: 16626 - RNA, 20 nt, Artificial Sequence
  spacer sequence GTCN PAM
cugugucugucucugucucu

SEQ ID NO: 16627 - RNA, 20 nt, Artificial Sequence
  spacer sequence GTCN PAM
gucucugucucucugucucu

SEQ ID NO: 16628 - RNA, 20 nt, Artificial Sequence
  spacer sequence GTCN PAM
cugucucucugucucugccu

SEQ ID NO: 16629 - RNA, 20 nt, Artificial Sequence
  spacer sequence GTCN PAM
cucugucucugccucucucu

SEQ ID NO: 16630 - RNA, 20 nt, Artificial Sequence
  spacer sequence GTCN PAM
cugccucucucucucucugu

SEQ ID NO: 16631 - RNA, 20 nt, Artificial Sequence
  spacer sequence GTCN PAM
cuaucucauucucugucucu

SEQ ID NO: 16632 - RNA, 20 nt, Artificial Sequence
  spacer sequence GTCN PAM
cucugucucccucucuccuc

SEQ ID NO: 16633 - RNA, 20 nt, Artificial Sequence
  spacer sequence GTCN PAM
cccucucuccuccucccucu

SEQ ID NO: 16634 - RNA, 20 nt, Artificial Sequence
  spacer sequence GTCN PAM
ugcuuuggguucugugaugg

SEQ ID NO: 16635 - RNA, 20 nt, Artificial Sequence
  spacer sequence GTCN PAM
ucagcugugaugggggcucc

SEQ ID NO: 16636 - RNA, 20 nt, Artificial Sequence
  spacer sequence GTCN PAM
gcccguccucagcugugaug

SEQ ID NO: 16637 - RNA, 20 nt, Artificial Sequence
  spacer sequence GTCN PAM
ccuguccacccagccuuugu

SEQ ID NO: 16638 - RNA, 20 nt, Artificial Sequence
  spacer sequence GTCN PAM
acccagccuuuguucaaguu

SEQ ID NO: 16639 - RNA, 20 nt, Artificial Sequence
  spacer sequence GTCN PAM
gaguggcccaaaucggauuc

SEQ ID NO: 16640 - RNA, 20 nt, Artificial Sequence
  spacer sequence GTCN PAM
guauuccgggcgggucccgg

SEQ ID NO: 16641 - RNA, 20 nt, Artificial Sequence
  spacer sequence GTCN PAM
cggccccacagacuucccgc

SEQ ID NO: 16642 - RNA, 20 nt, Artificial Sequence
  spacer sequence GTCN PAM
guggggccgggacccgcccg

SEQ ID NO: 16643 - RNA, 20 nt, Artificial Sequence
  spacer sequence GTCN PAM
cucgccagugggcagaugaa

SEQ ID NO: 16644 - RNA, 20 nt, Artificial Sequence
  spacer sequence GTCN PAM
ccccuccuuuccccagcccc

SEQ ID NO: 16645 - RNA, 20 nt, Artificial Sequence
  spacer sequence GTCN PAM
cacccucccagguuggagug

SEQ ID NO: 16646 - RNA, 20 nt, Artificial Sequence
  spacer sequence GTCN PAM
cucacagugggacccuggag

SEQ ID NO: 16647 - RNA, 20 nt, Artificial Sequence
  spacer sequence GTCN PAM
cacugugagggacacuccaa

SEQ ID NO: 16648 - RNA, 20 nt, Artificial Sequence
  spacer sequence GTCN PAM
gcaaagugggggugaguuug

SEQ ID NO: 16649 - RNA, 20 nt, Artificial Sequence
  spacer sequence GTCN PAM
ccaggaaaugguguuguuuc

SEQ ID NO: 16650 - RNA, 20 nt, Artificial Sequence
  spacer sequence GTCN PAM
uggccguuaaggggcccuug

SEQ ID NO: 16651 - RNA, 20 nt, Artificial Sequence
  spacer sequence GTCN PAM
cucacaccugucaucccggc

SEQ ID NO: 16652 - RNA, 20 nt, Artificial Sequence
  spacer sequence GTCN PAM
ucccggcgcuuugggaggcc

SEQ ID NO: 16653 - RNA, 20 nt, Artificial Sequence
  spacer sequence GTCN PAM
ggaguucgagaccagucugu

SEQ ID NO: 16654 - RNA, 20 nt, Artificial Sequence
  spacer sequence GTCN PAM
cgaacuccugaccucaggug

SEQ ID NO: 16655 - RNA, 20 nt, Artificial Sequence
  spacer sequence GTCN PAM
guucaagaccaaccuggcca

SEQ ID NO: 16656 - RNA, 20 nt, Artificial Sequence
  spacer sequence GTCN PAM
ugaacagacuggucucgaac

SEQ ID NO: 16657 - RNA, 20 nt, Artificial Sequence
  spacer sequence GTCN PAM
cuacuaaaaauacaaaaauu

SEQ ID NO: 16658 - RNA, 20 nt, Artificial Sequence
  spacer sequence GTCN PAM
cggcucacugcaaccuccau

SEQ ID NO: 16659 - RNA, 20 nt, Artificial Sequence
  spacer sequence GTCN PAM
cgcuguguugcccaggcugg

SEQ ID NO: 16660 - RNA, 20 nt, Artificial Sequence
  spacer sequence GTCN PAM
cuucaggaaggcuggcuuau

SEQ ID NO: 16661 - RNA, 20 nt, Artificial Sequence
  spacer sequence GTCN PAM
ucuucgaacgcuugcacagg

SEQ ID NO: 16662 - RNA, 20 nt, Artificial Sequence
  spacer sequence GTCN PAM
gcgcccuugguguacaggca

SEQ ID NO: 16663 - RNA, 20 nt, Artificial Sequence
  spacer sequence GTCN PAM
gcccgccccaccuugggggg

SEQ ID NO: 16664 - RNA, 20 nt, Artificial Sequence
  spacer sequence GTCN PAM
gugcugggugagccccgcca

SEQ ID NO: 16665 - RNA, 20 nt, Artificial Sequence
  spacer sequence GTCN PAM
auuauggccaggaccuggua

SEQ ID NO: 16666 - RNA, 20 nt, Artificial Sequence
  spacer sequence GTCN PAM
uggccauaauggacuucaac

SEQ ID NO: 16667 - RNA, 20 nt, Artificial Sequence
  spacer sequence GTCN PAM
accagguccuggccauaaug

SEQ ID NO: 16668 - RNA, 20 nt, Artificial Sequence
  spacer sequence GTCN PAM
cgaucauggagcugggggag

SEQ ID NO: 16669 - RNA, 20 nt, Artificial Sequence
  spacer sequence GTCN PAM
ugggugcgggacaggaacac

SEQ ID NO: 16670 - RNA, 20 nt, Artificial Sequence
  spacer sequence GTCN PAM
cgcacccaggacaccgucac

SEQ ID NO: 16671 - RNA, 20 nt, Artificial Sequence
  spacer sequence GTCN PAM
ccgcagcccggaacuucggc

SEQ ID NO: 16672 - RNA, 20 nt, Artificial Sequence
  spacer sequence GTCN PAM
ggggaggccgccugguacaa

SEQ ID NO: 16673 - RNA, 20 nt, Artificial Sequence
  spacer sequence GTCN PAM
gguagggaggggggccauuu

SEQ ID NO: 16674 - RNA, 20 nt, Artificial Sequence
  spacer sequence GTCN PAM
cgugguggagcccgucucca

SEQ ID NO: 16675 - RNA, 20 nt, Artificial Sequence
  spacer sequence GTCN PAM
ccaucuccacagugcaggga

SEQ ID NO: 16676 - RNA, 20 nt, Artificial Sequence
  spacer sequence CTCN PAM
caaaguacugggauuacagc

SEQ ID NO: 16677 - RNA, 20 nt, Artificial Sequence
  spacer sequence CTCN PAM
gccucacaaaguacugggau

SEQ ID NO: 16678 - RNA, 20 nt, Artificial Sequence
  spacer sequence CTCN PAM
agugacccgcccgucucggc

SEQ ID NO: 16679 - RNA, 20 nt, Artificial Sequence
  spacer sequence CTCN PAM
uggccucaagugacccgccc

SEQ ID NO: 16680 - RNA, 20 nt, Artificial Sequence
  spacer sequence CTCN PAM
aacuccuggccucaagugac

SEQ ID NO: 16681 - RNA, 20 nt, Artificial Sequence
  spacer sequence CTCN PAM
ucuguauuaaaaauucaaaa

SEQ ID NO: 16682 - RNA, 20 nt, Artificial Sequence
  spacer sequence CTCN PAM
cagauagcugggauugcagg

SEQ ID NO: 16683 - RNA, 20 nt, Artificial Sequence
  spacer sequence CTCN PAM
ucccagauagcugggauugc

SEQ ID NO: 16684 - RNA, 20 nt, Artificial Sequence
  spacer sequence CTCN PAM
gccuccucccagauagcugg

SEQ ID NO: 16685 - RNA, 20 nt, Artificial Sequence
  spacer sequence CTCN PAM
ugccucagccuccucccaga

SEQ ID NO: 16686 - RNA, 20 nt, Artificial Sequence
  spacer sequence CTCN PAM
cggauucaaacaauucuccu

SEQ ID NO: 16687 - RNA, 20 nt, Artificial Sequence
  spacer sequence CTCN PAM
gccucccggauucaaacaau

SEQ ID NO: 16688 - RNA, 20 nt, Artificial Sequence
  spacer sequence CTCN PAM
cugcaaccucugccucccgg

SEQ ID NO: 16689 - RNA, 20 nt, Artificial Sequence
  spacer sequence CTCN PAM
gcucacugcaaccucugccu

SEQ ID NO: 16690 - RNA, 20 nt, Artificial Sequence
  spacer sequence CTCN PAM
agccugggugacagagugag

SEQ ID NO: 16691 - RNA, 20 nt, Artificial Sequence
  spacer sequence CTCN PAM
gucacccaggcuggagugca

SEQ ID NO: 16692 - RNA, 20 nt, Artificial Sequence
  spacer sequence CTCN PAM
cucugucacccaggcuggag

SEQ ID NO: 16693 - RNA, 20 nt, Artificial Sequence
  spacer sequence CTCN PAM
gucucaaaaauaaauaaaua

SEQ ID NO: 16694 - RNA, 20 nt, Artificial Sequence
  spacer sequence CTCN PAM
aaaauaaauaaauaggcugg

SEQ ID NO: 16695 - RNA, 20 nt, Artificial Sequence
  spacer sequence CTCN PAM
agccuguaaucccagcacuu

SEQ ID NO: 16696 - RNA, 20 nt, Artificial Sequence
  spacer sequence CTCN PAM
caaagugcugggauuacagg

SEQ ID NO: 16697 - RNA, 20 nt, Artificial Sequence
  spacer sequence CTCN PAM
gccucccaaagugcugggau

SEQ ID NO: 16698 - RNA, 20 nt, Artificial Sequence
  spacer sequence CTCN PAM
ugauucgcccaccucggccu

SEQ ID NO: 16699 - RNA, 20 nt, Artificial Sequence
  spacer sequence CTCN PAM
aucuucugaccucgugauuc

SEQ ID NO: 16700 - RNA, 20 nt, Artificial Sequence
  spacer sequence CTCN PAM
acuaaaaauagaaaaaauua

SEQ ID NO: 16701 - RNA, 20 nt, Artificial Sequence
  spacer sequence CTCN PAM
gcuaauuuuuucuauuuuua

SEQ ID NO: 16702 - RNA, 20 nt, Artificial Sequence
  spacer sequence CTCN PAM
ggaagcugaggcaggagaau

SEQ ID NO: 16703 - RNA, 20 nt, Artificial Sequence
  spacer sequence CTCN PAM
gcuuccugaguagcuggaac

SEQ ID NO: 16704 - RNA, 20 nt, Artificial Sequence
  spacer sequence CTCN PAM
ugccucagcuuccugaguag

SEQ ID NO: 16705 - RNA, 20 nt, Artificial Sequence
  spacer sequence CTCN PAM
cagguucaugccauucuccu

SEQ ID NO: 16706 - RNA, 20 nt, Artificial Sequence
  spacer sequence CTCN PAM
gccucccagguucaugccau

SEQ ID NO: 16707 - RNA, 20 nt, Artificial Sequence
  spacer sequence CTCN PAM
gcuuacugcaaacucugccu

SEQ ID NO: 16708 - RNA, 20 nt, Artificial Sequence
  spacer sequence CTCN PAM
agccugggcgacagagcgag

SEQ ID NO: 16709 - RNA, 20 nt, Artificial Sequence
  spacer sequence CTCN PAM
gucgcccaggcuggaguuca

SEQ ID NO: 16710 - RNA, 20 nt, Artificial Sequence
  spacer sequence CTCN PAM
cucugucgcccaggcuggag

SEQ ID NO: 16711 - RNA, 20 nt, Artificial Sequence
  spacer sequence CTCN PAM
aagaaaaaaaaaaauaaaua

SEQ ID NO: 16712 - RNA, 20 nt, Artificial Sequence
  spacer sequence CTCN PAM
uuuauuuauuuauuuauuua

SEQ ID NO: 16713 - RNA, 20 nt, Artificial Sequence
  spacer sequence CTCN PAM
uuuauaauuugguaucuuau

SEQ ID NO: 16714 - RNA, 20 nt, Artificial Sequence
  spacer sequence CTCN PAM
gccuggcacggccguagguc

SEQ ID NO: 16715 - RNA, 20 nt, Artificial Sequence
  spacer sequence CTCN PAM
ccucugccuggcacggccgu

SEQ ID NO: 16716 - RNA, 20 nt, Artificial Sequence
  spacer sequence CTCN PAM
gucccuccuguggccuccuu

SEQ ID NO: 16717 - RNA, 20 nt, Artificial Sequence
  spacer sequence CTCN PAM
uguggccuccuugucugagu

SEQ ID NO: 16718 - RNA, 20 nt, Artificial Sequence
  spacer sequence CTCN PAM
uugucugaguugaaagcauu

SEQ ID NO: 16719 - RNA, 20 nt, Artificial Sequence
  spacer sequence CTCN PAM
gacaaggaggccacaggagg

SEQ ID NO: 16720 - RNA, 20 nt, Artificial Sequence
  spacer sequence CTCN PAM
gcaauagggaaugcuuucaa

SEQ ID NO: 16721 - RNA, 20 nt, Artificial Sequence
  spacer sequence CTCN PAM
uucguuuguaaccgguuaaa

SEQ ID NO: 16722 - RNA, 20 nt, Artificial Sequence
  spacer sequence CTCN PAM
gaauccaccuaugacuuaua

SEQ ID NO: 16723 - RNA, 20 nt, Artificial Sequence
  spacer sequence CTCN PAM
aauugggggcuuauaaguca

SEQ ID NO: 16724 - RNA, 20 nt, Artificial Sequence
  spacer sequence CTCN PAM
cugaaaaggcaggauaucuc

SEQ ID NO: 16725 - RNA, 20 nt, Artificial Sequence
  spacer sequence CTCN PAM
uugccuguaacuccugcuuc

SEQ ID NO: 16726 - RNA, 20 nt, Artificial Sequence
  spacer sequence CTCN PAM
ugcuuccuggaugccuagaa

SEQ ID NO: 16727 - RNA, 20 nt, Artificial Sequence
  spacer sequence CTCN PAM
gggcgcucacaccucuugag

SEQ ID NO: 16728 - RNA, 20 nt, Artificial Sequence
  spacer sequence CTCN PAM
caccucuugagucuguuucc

SEQ ID NO: 16729 - RNA, 20 nt, Artificial Sequence
  spacer sequence CTCN PAM
ugagucuguuuccucgggcc

SEQ ID NO: 16730 - RNA, 20 nt, Artificial Sequence
  spacer sequence CTCN PAM
agaggugugagcgcccugag

SEQ ID NO: 16731 - RNA, 20 nt, Artificial Sequence
  spacer sequence CTCN PAM
ggccgggaucacucauaccg

SEQ ID NO: 16732 - RNA, 20 nt, Artificial Sequence
  spacer sequence CTCN PAM
uaccgcucagauaacucuaa

SEQ ID NO: 16733 - RNA, 20 nt, Artificial Sequence
  spacer sequence CTCN PAM
gauaacucuaaacuauguca

SEQ ID NO: 16734 - RNA, 20 nt, Artificial Sequence
  spacer sequence CTCN PAM
aaacuaugucacuguguggu

SEQ ID NO: 16735 - RNA, 20 nt, Artificial Sequence
  spacer sequence CTCN PAM
accccuucacgggaaaacca

SEQ ID NO: 16736 - RNA, 20 nt, Artificial Sequence
  spacer sequence CTCN PAM
cugcacgggcugcaggaucc

SEQ ID NO: 16737 - RNA, 20 nt, Artificial Sequence
  spacer sequence CTCN PAM
gggggccccgaguaugcacc

SEQ ID NO: 16738 - RNA, 20 nt, Artificial Sequence
  spacer sequence CTCN PAM
gggcccccagagcggauuuu

SEQ ID NO: 16739 - RNA, 20 nt, Artificial Sequence
  spacer sequence CTCN PAM
gcggggaauggugcccaacu

SEQ ID NO: 16740 - RNA, 20 nt, Artificial Sequence
  spacer sequence CTCN PAM
ccacccaccuccgcggggaa

SEQ ID NO: 16741 - RNA, 20 nt, Artificial Sequence
  spacer sequence CTCN PAM
ccuccccacccaccuccgcg

SEQ ID NO: 16742 - RNA, 20 nt, Artificial Sequence
  spacer sequence CTCN PAM
uccucacuggggacacagug

SEQ ID NO: 16743 - RNA, 20 nt, Artificial Sequence
  spacer sequence CTCN PAM
cuggggacacaguggggagc

SEQ ID NO: 16744 - RNA, 20 nt, Artificial Sequence
  spacer sequence CTCN PAM
ccacuguguccccagugagg

SEQ ID NO: 16745 - RNA, 20 nt, Artificial Sequence
  spacer sequence CTCN PAM
ugguggaccucccguccugg

SEQ ID NO: 16746 - RNA, 20 nt, Artificial Sequence
  spacer sequence CTCN PAM
cguccuggggggccgcagag

SEQ ID NO: 16747 - RNA, 20 nt, Artificial Sequence
  spacer sequence CTCN PAM
gcggccccccaggacgggag

SEQ ID NO: 16748 - RNA, 20 nt, Artificial Sequence
  spacer sequence CTCN PAM
agguggcucugaaguuggug

SEQ ID NO: 16749 - RNA, 20 nt, Artificial Sequence
  spacer sequence CTCN PAM
gaaguugguggguuggcuuc

SEQ ID NO: 16750 - RNA, 20 nt, Artificial Sequence
  spacer sequence CTCN PAM
ugcucuagggggccacacac

SEQ ID NO: 16751 - RNA, 20 nt, Artificial Sequence
  spacer sequence CTCN PAM
agggggccacacacccuguc

SEQ ID NO: 16752 - RNA, 20 nt, Artificial Sequence
  spacer sequence CTCN PAM
cgcuuagccguccuucgccu

SEQ ID NO: 16753 - RNA, 20 nt, Artificial Sequence
  spacer sequence CTCN PAM
cuuagccguccuucgccucu

SEQ ID NO: 16754 - RNA, 20 nt, Artificial Sequence
  spacer sequence CTCN PAM
cacaccugagcccaugugcc

SEQ ID NO: 16755 - RNA, 20 nt, Artificial Sequence
  spacer sequence CTCN PAM
caccugagcccaugugcccu

SEQ ID NO: 16756 - RNA, 20 nt, Artificial Sequence
  spacer sequence CTCN PAM
ggugugagaggcgaaggacg

SEQ ID NO: 16757 - RNA, 20 nt, Artificial Sequence
  spacer sequence CTCN PAM
gagccuggccucggucaccc

SEQ ID NO: 16758 - RNA, 20 nt, Artificial Sequence
  spacer sequence CTCN PAM
gagggaugggcccggauagg

SEQ ID NO: 16759 - RNA, 20 nt, Artificial Sequence
  spacer sequence CTCN PAM
gucacccgcccacccacuca

SEQ ID NO: 16760 - RNA, 20 nt, Artificial Sequence
  spacer sequence CTCN PAM
cacuccuucccgcucaccug

SEQ ID NO: 16761 - RNA, 20 nt, Artificial Sequence
  spacer sequence CTCN PAM
uucccgcucaccugccaggc

SEQ ID NO: 16762 - RNA, 20 nt, Artificial Sequence
  spacer sequence CTCN PAM
ccugccaggccuggaggggg

SEQ ID NO: 16763 - RNA, 20 nt, Artificial Sequence
  spacer sequence CTCN PAM
aggccuggcaggugagcggg

SEQ ID NO: 16764 - RNA, 20 nt, Artificial Sequence
  spacer sequence CTCN PAM
ggauuagggcugagagcugg

SEQ ID NO: 16765 - RNA, 20 nt, Artificial Sequence
  spacer sequence CTCN PAM
gcccuaauccagaggcuggc

SEQ ID NO: 16766 - RNA, 20 nt, Artificial Sequence
  spacer sequence CTCN PAM
cagcccuaauccagaggcug

SEQ ID NO: 16767 - RNA, 20 nt, Artificial Sequence
  spacer sequence CTCN PAM
cugcugcaaggcuucuggug

SEQ ID NO: 16768 - RNA, 20 nt, Artificial Sequence
  spacer sequence CTCN PAM
gcccagugccaacugcuccc

SEQ ID NO: 16769 - RNA, 20 nt, Artificial Sequence
  spacer sequence CTCN PAM
cugcccagugccaacugcuc

SEQ ID NO: 16770 - RNA, 20 nt, Artificial Sequence
  spacer sequence CTCN PAM
ucucugcccagugccaacug

SEQ ID NO: 16771 - RNA, 20 nt, Artificial Sequence
  spacer sequence CTCN PAM
uccucucugcccagugccaa

SEQ ID NO: 16772 - RNA, 20 nt, Artificial Sequence
  spacer sequence CTCN PAM
cugccccugucuccuccucu

SEQ ID NO: 16773 - RNA, 20 nt, Artificial Sequence
  spacer sequence CTCN PAM
uggacccucccugccccugu

SEQ ID NO: 16774 - RNA, 20 nt, Artificial Sequence
  spacer sequence CTCN PAM
gcugcuuccaccccuccugg

SEQ ID NO: 16775 - RNA, 20 nt, Artificial Sequence
  spacer sequence CTCN PAM
accgcuccccagcacugaag

SEQ ID NO: 16776 - RNA, 20 nt, Artificial Sequence
  spacer sequence CTCN PAM
ccagcacugaaggagggaga

SEQ ID NO: 16777 - RNA, 20 nt, Artificial Sequence
  spacer sequence CTCN PAM
uucagugcuggggagcggug

SEQ ID NO: 16778 - RNA, 20 nt, Artificial Sequence
  spacer sequence CTCN PAM
cuccuucagugcuggggagc

SEQ ID NO: 16779 - RNA, 20 nt, Artificial Sequence
  spacer sequence CTCN PAM
cccuccuucagugcugggga

SEQ ID NO: 16780 - RNA, 20 nt, Artificial Sequence
  spacer sequence CTCN PAM
cacucucccuccuucagugc

SEQ ID NO: 16781 - RNA, 20 nt, Artificial Sequence
  spacer sequence CTCN PAM
cucacucauucacucauuga

SEQ ID NO: 16782 - RNA, 20 nt, Artificial Sequence
  spacer sequence CTCN PAM
cucauucacucauugacuca

SEQ ID NO: 16783 - RNA, 20 nt, Artificial Sequence
  spacer sequence CTCN PAM
uucacucauugacucauuca

SEQ ID NO: 16784 - RNA, 20 nt, Artificial Sequence
  spacer sequence CTCN PAM
uugacucauucauucauuca

SEQ ID NO: 16785 - RNA, 20 nt, Artificial Sequence
  spacer sequence CTCN PAM
uucauucauucacucauuca

SEQ ID NO: 16786 - RNA, 20 nt, Artificial Sequence
  spacer sequence CTCN PAM
uucauucacucacucacuca

SEQ ID NO: 16787 - RNA, 20 nt, Artificial Sequence
  spacer sequence CTCN PAM
cucacucauucacucacuca

SEQ ID NO: 16788 - RNA, 20 nt, Artificial Sequence
  spacer sequence CTCN PAM
cucauucacucacucacuca

SEQ ID NO: 16789 - RNA, 20 nt, Artificial Sequence
  spacer sequence CTCN PAM
uucacucacucacucauuca

SEQ ID NO: 16790 - RNA, 20 nt, Artificial Sequence
  spacer sequence CTCN PAM
cucacucauucacucacuca

SEQ ID NO: 16791 - RNA, 20 nt, Artificial Sequence
  spacer sequence CTCN PAM
cucauucacucacucauuca

SEQ ID NO: 16792 - RNA, 20 nt, Artificial Sequence
  spacer sequence CTCN PAM
uucacucacucauucacuca

SEQ ID NO: 16793 - RNA, 20 nt, Artificial Sequence
  spacer sequence CTCN PAM
cucauucacucauucauuca

SEQ ID NO: 16794 - RNA, 20 nt, Artificial Sequence
  spacer sequence CTCN PAM
uucacucauucauucacaca

SEQ ID NO: 16795 - RNA, 20 nt, Artificial Sequence
  spacer sequence CTCN PAM
uucauucacacacucauuuu

SEQ ID NO: 16796 - RNA, 20 nt, Artificial Sequence
  spacer sequence CTCN PAM
uuuuuacucauucacucauu

SEQ ID NO: 16797 - RNA, 20 nt, Artificial Sequence
  spacer sequence CTCN PAM
uucacucauuuucacucacu

SEQ ID NO: 16798 - RNA, 20 nt, Artificial Sequence
  spacer sequence CTCN PAM
uuuucacucacucauucacu

SEQ ID NO: 16799 - RNA, 20 nt, Artificial Sequence
  spacer sequence CTCN PAM
cucauucacucauucauuca

SEQ ID NO: 16800 - RNA, 20 nt, Artificial Sequence
  spacer sequence CTCN PAM
uucacucauucauucacuca

SEQ ID NO: 16801 - RNA, 20 nt, Artificial Sequence
  spacer sequence CTCN PAM
uucauucacucauucacuca

SEQ ID NO: 16802 - RNA, 20 nt, Artificial Sequence
  spacer sequence CTCN PAM
uucacucauuuuuacucauu

SEQ ID NO: 16803 - RNA, 20 nt, Artificial Sequence
  spacer sequence CTCN PAM
uuuuuacucauuuucacuca

SEQ ID NO: 16804 - RNA, 20 nt, Artificial Sequence
  spacer sequence CTCN PAM
uuuucacucauucacucauu

SEQ ID NO: 16805 - RNA, 20 nt, Artificial Sequence
  spacer sequence CTCN PAM
uucacucauuuucacucauu

SEQ ID NO: 16806 - RNA, 20 nt, Artificial Sequence
  spacer sequence CTCN PAM
uuuucacucauucacucacu

SEQ ID NO: 16807 - RNA, 20 nt, Artificial Sequence
  spacer sequence CTCN PAM
uucacucacucuuuacucau

SEQ ID NO: 16808 - RNA, 20 nt, Artificial Sequence
  spacer sequence CTCN PAM
cucuuuacucauuuuacuca

SEQ ID NO: 16809 - RNA, 20 nt, Artificial Sequence
  spacer sequence CTCN PAM
uuacucauuuuacucauuca

SEQ ID NO: 16810 - RNA, 20 nt, Artificial Sequence
  spacer sequence CTCN PAM
uuuuacucauucauucacuc

SEQ ID NO: 16811 - RNA, 20 nt, Artificial Sequence
  spacer sequence CTCN PAM
uucauucacucacucauuuu

SEQ ID NO: 16812 - RNA, 20 nt, Artificial Sequence
  spacer sequence CTCN PAM
cucauuuucacuuauucauu

SEQ ID NO: 16813 - RNA, 20 nt, Artificial Sequence
  spacer sequence CTCN PAM
uuuucacuuauucauucauu

SEQ ID NO: 16814 - RNA, 20 nt, Artificial Sequence
  spacer sequence CTCN PAM
cucauucacucauuuucacu

SEQ ID NO: 16815 - RNA, 20 nt, Artificial Sequence
  spacer sequence CTCN PAM
uucacucauuuucacucacu

SEQ ID NO: 16816 - RNA, 20 nt, Artificial Sequence
  spacer sequence CTCN PAM
uuuucacucacucguucacu

SEQ ID NO: 16817 - RNA, 20 nt, Artificial Sequence
  spacer sequence CTCN PAM
cucguucacucauuuuucac

SEQ ID NO: 16818 - RNA, 20 nt, Artificial Sequence
  spacer sequence CTCN PAM
uucacucauuuuucacucau

SEQ ID NO: 16819 - RNA, 20 nt, Artificial Sequence
  spacer sequence CTCN PAM
uuuuucacucauucauucac

SEQ ID NO: 16820 - RNA, 20 nt, Artificial Sequence
  spacer sequence CTCN PAM
uucauucacucauucauucg

SEQ ID NO: 16821 - RNA, 20 nt, Artificial Sequence
  spacer sequence CTCN PAM
uucauucggucacucauuca

SEQ ID NO: 16822 - RNA, 20 nt, Artificial Sequence
  spacer sequence CTCN PAM
uucacucauucacucacuca

SEQ ID NO: 16823 - RNA, 20 nt, Artificial Sequence
  spacer sequence CTCN PAM
uucacucacucacucauuca

SEQ ID NO: 16824 - RNA, 20 nt, Artificial Sequence
  spacer sequence CTCN PAM
cucacucauucauucauucu

SEQ ID NO: 16825 - RNA, 20 nt, Artificial Sequence
  spacer sequence CTCN PAM
cucauucauucauucugucu

SEQ ID NO: 16826 - RNA, 20 nt, Artificial Sequence
  spacer sequence CTCN PAM
uucauucauucugucuuuca

SEQ ID NO: 16827 - RNA, 20 nt, Artificial Sequence
  spacer sequence CTCN PAM
ccagaacacccuguggggcc

SEQ ID NO: 16828 - RNA, 20 nt, Artificial Sequence
  spacer sequence CTCN PAM
agaacacccuguggggccag

SEQ ID NO: 16829 - RNA, 20 nt, Artificial Sequence
  spacer sequence CTCN PAM
gggcugcacacagagccuua

SEQ ID NO: 16830 - RNA, 20 nt, Artificial Sequence
  spacer sequence CTCN PAM
gugugcagcccagagccugg

SEQ ID NO: 16831 - RNA, 20 nt, Artificial Sequence
  spacer sequence CTCN PAM
ugaggcugggucccagccgg

SEQ ID NO: 16832 - RNA, 20 nt, Artificial Sequence
  spacer sequence CTCN PAM
ggaggaagugcugucccagg

SEQ ID NO: 16833 - RNA, 20 nt, Artificial Sequence
  spacer sequence CTCN PAM
cggccggcugggacccagcc

SEQ ID NO: 16834 - RNA, 20 nt, Artificial Sequence
  spacer sequence CTCN PAM
gguggcucccugaacauccc

SEQ ID NO: 16835 - RNA, 20 nt, Artificial Sequence
  spacer sequence CTCN PAM
cugaacauccccgcuggcug

SEQ ID NO: 16836 - RNA, 20 nt, Artificial Sequence
  spacer sequence CTCN PAM
gcagccagcggggauguuca

SEQ ID NO: 16837 - RNA, 20 nt, Artificial Sequence
  spacer sequence CTCN PAM
ggugccucagcagccagcgg

SEQ ID NO: 16838 - RNA, 20 nt, Artificial Sequence
  spacer sequence CTCN PAM
ucaggugccucagcagccag

SEQ ID NO: 16839 - RNA, 20 nt, Artificial Sequence
  spacer sequence CTCN PAM
uccucaggugccucagcagc

SEQ ID NO: 16840 - RNA, 20 nt, Artificial Sequence
  spacer sequence CTCN PAM
ccagccuuccuuguggugug

SEQ ID NO: 16841 - RNA, 20 nt, Artificial Sequence
  spacer sequence CTCN PAM
caccacaaggaaggcugggg

SEQ ID NO: 16842 - RNA, 20 nt, Artificial Sequence
  spacer sequence CTCN PAM
guguuggacuggauuagacu

SEQ ID NO: 16843 - RNA, 20 nt, Artificial Sequence
  spacer sequence CTCN PAM
ggaccccagcccugccucac

SEQ ID NO: 16844 - RNA, 20 nt, Artificial Sequence
  spacer sequence CTCN PAM
cagacgcccugguuagucaa

SEQ ID NO: 16845 - RNA, 20 nt, Artificial Sequence
  spacer sequence CTCN PAM
gaaggauggggaggagggcc

SEQ ID NO: 16846 - RNA, 20 nt, Artificial Sequence
  spacer sequence CTCN PAM
ccauccuucagaguuaguga

SEQ ID NO: 16847 - RNA, 20 nt, Artificial Sequence
  spacer sequence CTCN PAM
uccccauccuucagaguuag

SEQ ID NO: 16848 - RNA, 20 nt, Artificial Sequence
  spacer sequence CTCN PAM
gcccuccuccccauccuuca

SEQ ID NO: 16849 - RNA, 20 nt, Artificial Sequence
  spacer sequence CTCN PAM
ugcugggcucggcccuccuc

SEQ ID NO: 16850 - RNA, 20 nt, Artificial Sequence
  spacer sequence CTCN PAM
gguuccccgcacugccugga

SEQ ID NO: 16851 - RNA, 20 nt, Artificial Sequence
  spacer sequence CTCN PAM
ggggugggcagaggcggcag

SEQ ID NO: 16852 - RNA, 20 nt, Artificial Sequence
  spacer sequence CTCN PAM
gcccaccccagaggacacuc

SEQ ID NO: 16853 - RNA, 20 nt, Artificial Sequence
  spacer sequence CTCN PAM
accgucaggcccugccgccu

SEQ ID NO: 16854 - RNA, 20 nt, Artificial Sequence
  spacer sequence CTCN PAM
gcaguggcugaaggacccac

SEQ ID NO: 16855 - RNA, 20 nt, Artificial Sequence
  spacer sequence CTCN PAM
gcguccaguguccagcuuug

SEQ ID NO: 16856 - RNA, 20 nt, Artificial Sequence
  spacer sequence CTCN PAM
gggccccccaagguggagca

SEQ ID NO: 16857 - RNA, 20 nt, Artificial Sequence
  spacer sequence CTCN PAM
accuuggggggcccugagau

SEQ ID NO: 16858 - RNA, 20 nt, Artificial Sequence
  spacer sequence CTCN PAM
ugcuccaccuuggggggccc

SEQ ID NO: 16859 - RNA, 20 nt, Artificial Sequence
  spacer sequence CTCN PAM
gcgugcagacugcuggcggc

SEQ ID NO: 16860 - RNA, 20 nt, Artificial Sequence
  spacer sequence CTCN PAM
ccauccccucgucugacccc

SEQ ID NO: 16861 - RNA, 20 nt, Artificial Sequence
  spacer sequence CTCN PAM
ucugaccccuccccuggccu

SEQ ID NO: 16862 - RNA, 20 nt, Artificial Sequence
  spacer sequence CTCN PAM
ccuggccugaccaagaagca

SEQ ID NO: 16863 - RNA, 20 nt, Artificial Sequence
  spacer sequence CTCN PAM
ugcaguaggggucugcuucu

SEQ ID NO: 16864 - RNA, 20 nt, Artificial Sequence
  spacer sequence CTCN PAM
ccuggcccacagguuggccc

SEQ ID NO: 16865 - RNA, 20 nt, Artificial Sequence
  spacer sequence CTCN PAM
uggggaaagaaccuuggccu

SEQ ID NO: 16866 - RNA, 20 nt, Artificial Sequence
  spacer sequence CTCN PAM
gggccccaggccaagguucu

SEQ ID NO: 16867 - RNA, 20 nt, Artificial Sequence
  spacer sequence CTCN PAM
ugcugucccuugcugcccac

SEQ ID NO: 16868 - RNA, 20 nt, Artificial Sequence
  spacer sequence CTCN PAM
cccuccugcugucccuugcu

SEQ ID NO: 16869 - RNA, 20 nt, Artificial Sequence
  spacer sequence CTCN PAM
ggccucacccuccugcuguc

SEQ ID NO: 16870 - RNA, 20 nt, Artificial Sequence
  spacer sequence CTCN PAM
gcagggcaccuggaauaagg

SEQ ID NO: 16871 - RNA, 20 nt, Artificial Sequence
  spacer sequence CTCN PAM
cagcccaccuuauuccaggu

SEQ ID NO: 16872 - RNA, 20 nt, Artificial Sequence
  spacer sequence CTCN PAM
cgccgggacccucacagccc

SEQ ID NO: 16873 - RNA, 20 nt, Artificial Sequence
  spacer sequence CTCN PAM
agcagacccccauggugggg

SEQ ID NO: 16874 - RNA, 20 nt, Artificial Sequence
  spacer sequence CTCN PAM
ggccucaagcagacccccau

SEQ ID NO: 16875 - RNA, 20 nt, Artificial Sequence
  spacer sequence CTCN PAM
auguccucuggccucaagca

SEQ ID NO: 16876 - RNA, 20 nt, Artificial Sequence
  spacer sequence CTCN PAM
agaaguuccuccauguccuc

SEQ ID NO: 16877 - RNA, 20 nt, Artificial Sequence
  spacer sequence CTCN PAM
accagacacguccugcgcuu

SEQ ID NO: 16878 - RNA, 20 nt, Artificial Sequence
  spacer sequence CTCN PAM
ugccugugcuguauaccugu

SEQ ID NO: 16879 - RNA, 20 nt, Artificial Sequence
  spacer sequence CTCN PAM
ugccugugcuguauacccgu

SEQ ID NO: 16880 - RNA, 20 nt, Artificial Sequence
  spacer sequence CTCN PAM
cugugcacacagcuuucacc

SEQ ID NO: 16881 - RNA, 20 nt, Artificial Sequence
  spacer sequence CTCN PAM
cugugcacacaacugucacc

SEQ ID NO: 16882 - RNA, 20 nt, Artificial Sequence
  spacer sequence CTCN PAM
ccgugcacauaacugucacc

SEQ ID NO: 16883 - RNA, 20 nt, Artificial Sequence
  spacer sequence CTCN PAM
ccaugcacacagcugucacc

SEQ ID NO: 16884 - RNA, 20 nt, Artificial Sequence
  spacer sequence CTCN PAM
gcacaccgucaccuccccau

SEQ ID NO: 16885 - RNA, 20 nt, Artificial Sequence
  spacer sequence CTCN PAM
ccgugcacacagcugucacc

SEQ ID NO: 16886 - RNA, 20 nt, Artificial Sequence
  spacer sequence CTCN PAM
ggcagcgugugcgcaugucc

SEQ ID NO: 16887 - RNA, 20 nt, Artificial Sequence
  spacer sequence CTCN PAM
cacaugugcaacacaggugg

SEQ ID NO: 16888 - RNA, 20 nt, Artificial Sequence
  spacer sequence CTCN PAM
cacacaugcaccugccaucu

SEQ ID NO: 16889 - RNA, 20 nt, Artificial Sequence
  spacer sequence CTCN PAM
uucuaccucccuccagacgc

SEQ ID NO: 16890 - RNA, 20 nt, Artificial Sequence
  spacer sequence CTCN PAM
cuccagacgccccauggcuc

SEQ ID NO: 16891 - RNA, 20 nt, Artificial Sequence
  spacer sequence CTCN PAM
agacgccccauggcucugug

SEQ ID NO: 16892 - RNA, 20 nt, Artificial Sequence
  spacer sequence CTCN PAM
guguucucacaguggagccc

SEQ ID NO: 16893 - RNA, 20 nt, Artificial Sequence
  spacer sequence CTCN PAM
caguggagcccugagacccc

SEQ ID NO: 16894 - RNA, 20 nt, Artificial Sequence
  spacer sequence CTCN PAM
acugugagaacacagagcca

SEQ ID NO: 16895 - RNA, 20 nt, Artificial Sequence
  spacer sequence CTCN PAM
gggcuccacugugagaacac

SEQ ID NO: 16896 - RNA, 20 nt, Artificial Sequence
  spacer sequence CTCN PAM
gcugccuuaggggucucagg

SEQ ID NO: 16897 - RNA, 20 nt, Artificial Sequence
  spacer sequence CTCN PAM
gcucugcagugggggucacg

SEQ ID NO: 16898 - RNA, 20 nt, Artificial Sequence
  spacer sequence CTCN PAM
gcagugggggucacggcagg

SEQ ID NO: 16899 - RNA, 20 nt, Artificial Sequence
  spacer sequence CTCN PAM
cagcaggaacugggagccca

SEQ ID NO: 16900 - RNA, 20 nt, Artificial Sequence
  spacer sequence CTCN PAM
caguuccugcugggaggccc

SEQ ID NO: 16901 - RNA, 20 nt, Artificial Sequence
  spacer sequence CTCN PAM
ccugcacccaaacccccuuc

SEQ ID NO: 16902 - RNA, 20 nt, Artificial Sequence
  spacer sequence CTCN PAM
ccagggccagcaagauaagg

SEQ ID NO: 16903 - RNA, 20 nt, Artificial Sequence
  spacer sequence CTCN PAM
ucuccggcaggcgucaagca

SEQ ID NO: 16904 - RNA, 20 nt, Artificial Sequence
  spacer sequence CTCN PAM
ggcaggcgucaagcaggggu

SEQ ID NO: 16905 - RNA, 20 nt, Artificial Sequence
  spacer sequence CTCN PAM
ugggcugcuggggcccggcc

SEQ ID NO: 16906 - RNA, 20 nt, Artificial Sequence
  spacer sequence CTCN PAM
cagggagggugaggcauugg

SEQ ID NO: 16907 - RNA, 20 nt, Artificial Sequence
  spacer sequence CTCN PAM
gggagggugaggcauugggc

SEQ ID NO: 16908 - RNA, 20 nt, Artificial Sequence
  spacer sequence CTCN PAM
cugagaggggugggccgggc

SEQ ID NO: 16909 - RNA, 20 nt, Artificial Sequence
  spacer sequence CTCN PAM
cccucccugagagggguggg

SEQ ID NO: 16910 - RNA, 20 nt, Artificial Sequence
  spacer sequence CTCN PAM
gagcccagcccugccugugg

SEQ ID NO: 16911 - RNA, 20 nt, Artificial Sequence
  spacer sequence CTCN PAM
gaggccaggguugcccaaug

SEQ ID NO: 16912 - RNA, 20 nt, Artificial Sequence
  spacer sequence CTCN PAM
ggcaguccggccacaggcag

SEQ ID NO: 16913 - RNA, 20 nt, Artificial Sequence
  spacer sequence CTCN PAM
cgggcaguccggccacaggc

SEQ ID NO: 16914 - RNA, 20 nt, Artificial Sequence
  spacer sequence CTCN PAM
acucacccccacaccguuuc

SEQ ID NO: 16915 - RNA, 20 nt, Artificial Sequence
  spacer sequence CTCN PAM
cccccacaccguuuccccag

SEQ ID NO: 16916 - RNA, 20 nt, Artificial Sequence
  spacer sequence CTCN PAM
uggcccaggcagcuggacau

SEQ ID NO: 16917 - RNA, 20 nt, Artificial Sequence
  spacer sequence CTCN PAM
agccaaacuugccugcccug

SEQ ID NO: 16918 - RNA, 20 nt, Artificial Sequence
  spacer sequence CTCN PAM
cccucccaggacccccaugc

SEQ ID NO: 16919 - RNA, 20 nt, Artificial Sequence
  spacer sequence CTCN PAM
caggacccccaugccugcug

SEQ ID NO: 16920 - RNA, 20 nt, Artificial Sequence
  spacer sequence CTCN PAM
ccagcaggcauggggguccu

SEQ ID NO: 16921 - RNA, 20 nt, Artificial Sequence
  spacer sequence CTCN PAM
cagugcccuggcagcccgac

SEQ ID NO: 16922 - RNA, 20 nt, Artificial Sequence
  spacer sequence CTCN PAM
uuccuuggcuugggacagac

SEQ ID NO: 16923 - RNA, 20 nt, Artificial Sequence
  spacer sequence CTCN PAM
cucaggagaaugggguggcc

SEQ ID NO: 16924 - RNA, 20 nt, Artificial Sequence
  spacer sequence CTCN PAM
ggagaaugggguggccaggg

SEQ ID NO: 16925 - RNA, 20 nt, Artificial Sequence
  spacer sequence CTCN PAM
ugagcgagggucugucccaa

SEQ ID NO: 16926 - RNA, 20 nt, Artificial Sequence
  spacer sequence CTCN PAM
caugucuacgggauggcuuu

SEQ ID NO: 16927 - RNA, 20 nt, Artificial Sequence
  spacer sequence CTCN PAM
uggcaaagccaucccguaga

SEQ ID NO: 16928 - RNA, 20 nt, Artificial Sequence
  spacer sequence CTCN PAM
ggaggcccccuuucugcaug

SEQ ID NO: 16929 - RNA, 20 nt, Artificial Sequence
  spacer sequence CTCN PAM
agagugccaggcccucaugg

SEQ ID NO: 16930 - RNA, 20 nt, Artificial Sequence
  spacer sequence CTCN PAM
augcagaaagggggccucca

SEQ ID NO: 16931 - RNA, 20 nt, Artificial Sequence
  spacer sequence CTCN PAM
ucucacccacucuggggccc

SEQ ID NO: 16932 - RNA, 20 nt, Artificial Sequence
  spacer sequence CTCN PAM
cccacucuggggcccacguc

SEQ ID NO: 16933 - RNA, 20 nt, Artificial Sequence
  spacer sequence CTCN PAM
ggggcccacgucugugcggc

SEQ ID NO: 16934 - RNA, 20 nt, Artificial Sequence
  spacer sequence CTCN PAM
gccaggaugaccagugcacg

SEQ ID NO: 16935 - RNA, 20 nt, Artificial Sequence
  spacer sequence CTCN PAM
agcuaguccuggacccacug

SEQ ID NO: 16936 - RNA, 20 nt, Artificial Sequence
  spacer sequence CTCN PAM
ccagcuaguccuggacccac

SEQ ID NO: 16937 - RNA, 20 nt, Artificial Sequence
  spacer sequence CTCN PAM
gucacgccucuccagcuagu

SEQ ID NO: 16938 - RNA, 20 nt, Artificial Sequence
  spacer sequence CTCN PAM
ccucugucacgccucuccag

SEQ ID NO: 16939 - RNA, 20 nt, Artificial Sequence
  spacer sequence CTCN PAM
ccugugucucgccucuguca

SEQ ID NO: 16940 - RNA, 20 nt, Artificial Sequence
  spacer sequence CTCN PAM
cacccccugggguguggaga

SEQ ID NO: 16941 - RNA, 20 nt, Artificial Sequence
  spacer sequence CTCN PAM
acaccccagggggugggagg

SEQ ID NO: 16942 - RNA, 20 nt, Artificial Sequence
  spacer sequence CTCN PAM
ccacaccccaggggguggga

SEQ ID NO: 16943 - RNA, 20 nt, Artificial Sequence
  spacer sequence CTCN PAM
cucuccacaccccagggggu

SEQ ID NO: 16944 - RNA, 20 nt, Artificial Sequence
  spacer sequence CTCN PAM
ggccccgcugcccuggguga

SEQ ID NO: 16945 - RNA, 20 nt, Artificial Sequence
  spacer sequence CTCN PAM
cccaccuucgaggggaaagg

SEQ ID NO: 16946 - RNA, 20 nt, Artificial Sequence
  spacer sequence CTCN PAM
caccuucgaggggaaaggau

SEQ ID NO: 16947 - RNA, 20 nt, Artificial Sequence
  spacer sequence CTCN PAM
aaggugggagaggcgcagcu

SEQ ID NO: 16948 - RNA, 20 nt, Artificial Sequence
  spacer sequence CTCN PAM
ugccuuuuacuguuuauggg

SEQ ID NO: 16949 - RNA, 20 nt, Artificial Sequence
  spacer sequence CTCN PAM
cugcuccugccuuuuacugu

SEQ ID NO: 16950 - RNA, 20 nt, Artificial Sequence
  spacer sequence CTCN PAM
cgcucccugcuccugccuuu

SEQ ID NO: 16951 - RNA, 20 nt, Artificial Sequence
  spacer sequence CTCN PAM
aaugaacagauuuccaacaa

SEQ ID NO: 16952 - RNA, 20 nt, Artificial Sequence
  spacer sequence CTCN PAM
cuguuuguuggaaaucuguu

SEQ ID NO: 16953 - RNA, 20 nt, Artificial Sequence
  spacer sequence CTCN PAM
ugcagcccuggcuucauccc

SEQ ID NO: 16954 - RNA, 20 nt, Artificial Sequence
  spacer sequence CTCN PAM
cuuucccucuuugagcccca

SEQ ID NO: 16955 - RNA, 20 nt, Artificial Sequence
  spacer sequence CTCN PAM
uugagccccagcuguugggc

SEQ ID NO: 16956 - RNA, 20 nt, Artificial Sequence
  spacer sequence CTCN PAM
aagagggaaagggagcugcc

SEQ ID NO: 16957 - RNA, 20 nt, Artificial Sequence
  spacer sequence CTCN PAM
uucgcugacauccagccccc

SEQ ID NO: 16958 - RNA, 20 nt, Artificial Sequence
  spacer sequence CTCN PAM
accaugcuggaaauggaagc

SEQ ID NO: 16959 - RNA, 20 nt, Artificial Sequence
  spacer sequence CTCN PAM
agggucccuggccuugcagc

SEQ ID NO: 16960 - RNA, 20 nt, Artificial Sequence
  spacer sequence CTCN PAM
ucuagggucccuggccuugc

SEQ ID NO: 16961 - RNA, 20 nt, Artificial Sequence
  spacer sequence CTCN PAM
uccuggagccagccugaugg

SEQ ID NO: 16962 - RNA, 20 nt, Artificial Sequence
  spacer sequence CTCN PAM
uggagccagccugauggcuu

SEQ ID NO: 16963 - RNA, 20 nt, Artificial Sequence
  spacer sequence CTCN PAM
aggaggaggcagugacccac

SEQ ID NO: 16964 - RNA, 20 nt, Artificial Sequence
  spacer sequence CTCN PAM
gggccuccugacuguggccc

SEQ ID NO: 16965 - RNA, 20 nt, Artificial Sequence
  spacer sequence CTCN PAM
ugacuguggcccaggaggga

SEQ ID NO: 16966 - RNA, 20 nt, Artificial Sequence
  spacer sequence CTCN PAM
ugggccacagucaggaggcc

SEQ ID NO: 16967 - RNA, 20 nt, Artificial Sequence
  spacer sequence CTCN PAM
cuccugggccacagucagga

SEQ ID NO: 16968 - RNA, 20 nt, Artificial Sequence
  spacer sequence CTCN PAM
cugucucccuccugggccac

SEQ ID NO: 16969 - RNA, 20 nt, Artificial Sequence
  spacer sequence CTCN PAM
gcauggggcagccucccugu

SEQ ID NO: 16970 - RNA, 20 nt, Artificial Sequence
  spacer sequence CTCN PAM
gcauuugccucugcaugggg

SEQ ID NO: 16971 - RNA, 20 nt, Artificial Sequence
  spacer sequence CTCN PAM
cgccagcguuucucaccuga

SEQ ID NO: 16972 - RNA, 20 nt, Artificial Sequence
  spacer sequence CTCN PAM
ccugagcagaaacccugggu

SEQ ID NO: 16973 - RNA, 20 nt, Artificial Sequence
  spacer sequence CTCN PAM
ggugagaaacgcuggcggga

SEQ ID NO: 16974 - RNA, 20 nt, Artificial Sequence
  spacer sequence CTCN PAM
accacacccaggguuucugc

SEQ ID NO: 16975 - RNA, 20 nt, Artificial Sequence
  spacer sequence CTCN PAM
cuccaccacacccaggguuu

SEQ ID NO: 16976 - RNA, 20 nt, Artificial Sequence
  spacer sequence CTCN PAM
uggcagggaguuguggacca

SEQ ID NO: 16977 - RNA, 20 nt, Artificial Sequence
  spacer sequence CTCN PAM
cugccaggagcagccacccc

SEQ ID NO: 16978 - RNA, 20 nt, Artificial Sequence
  spacer sequence CTCN PAM
gugguagcggcugacgcacu

SEQ ID NO: 16979 - RNA, 20 nt, Artificial Sequence
  spacer sequence CTCN PAM
gcacccgggcgcucaguggu

SEQ ID NO: 16980 - RNA, 20 nt, Artificial Sequence
  spacer sequence CTCN PAM
ccuccaugccuggccuggca

SEQ ID NO: 16981 - RNA, 20 nt, Artificial Sequence
  spacer sequence CTCN PAM
augccuggccuggcaggcgg

SEQ ID NO: 16982 - RNA, 20 nt, Artificial Sequence
  spacer sequence CTCN PAM
ugccgccugccaggccaggc

SEQ ID NO: 16983 - RNA, 20 nt, Artificial Sequence
  spacer sequence CTCN PAM
ccccgcccagucccacuccc

SEQ ID NO: 16984 - RNA, 20 nt, Artificial Sequence
  spacer sequence CTCN PAM
cacggugacgcccgccaggc

SEQ ID NO: 16985 - RNA, 20 nt, Artificial Sequence
  spacer sequence CTCN PAM
cccacaggacugccuggcgg

SEQ ID NO: 16986 - RNA, 20 nt, Artificial Sequence
  spacer sequence CTCN PAM
ggcacaaugggcaccuacuc

SEQ ID NO: 16987 - RNA, 20 nt, Artificial Sequence
  spacer sequence CTCN PAM
cuuccccuagagcaaaggcu

SEQ ID NO: 16988 - RNA, 20 nt, Artificial Sequence
  spacer sequence CTCN PAM
aggggaagggaguaggugcc

SEQ ID NO: 16989 - RNA, 20 nt, Artificial Sequence
  spacer sequence CTCN PAM
gccuuugcucuaggggaagg

SEQ ID NO: 16990 - RNA, 20 nt, Artificial Sequence
  spacer sequence CTCN PAM
cggcuggcagcugcccagcu

SEQ ID NO: 16991 - RNA, 20 nt, Artificial Sequence
  spacer sequence CTCN PAM
caccccuccccacccacugg

SEQ ID NO: 16992 - RNA, 20 nt, Artificial Sequence
  spacer sequence CTCN PAM
ccacccacuggggcccugcu

SEQ ID NO: 16993 - RNA, 20 nt, Artificial Sequence
  spacer sequence CTCN PAM
gcagcgucugugccccaggg

SEQ ID NO: 16994 - RNA, 20 nt, Artificial Sequence
  spacer sequence CTCN PAM
ggugcaggcgcacgacauga

SEQ ID NO: 16995 - RNA, 20 nt, Artificial Sequence
  spacer sequence CTCN PAM
cgggccuccuggucugugug

SEQ ID NO: 16996 - RNA, 20 nt, Artificial Sequence
  spacer sequence CTCN PAM
ggccuccuggucugugugcc

SEQ ID NO: 16997 - RNA, 20 nt, Artificial Sequence
  spacer sequence CTCN PAM
uggucugugugcccgggagc

SEQ ID NO: 16998 - RNA, 20 nt, Artificial Sequence
  spacer sequence CTCN PAM
cgggcacacagaccaggagg

SEQ ID NO: 16999 - RNA, 20 nt, Artificial Sequence
  spacer sequence CTCN PAM
gcggggacaucaggcagacg

SEQ ID NO: 17000 - RNA, 20 nt, Artificial Sequence
  spacer sequence CTCN PAM
ucugccugauguccccgcag

SEQ ID NO: 17001 - RNA, 20 nt, Artificial Sequence
  spacer sequence CTCN PAM
gaggugggcaggcaagagca

SEQ ID NO: 17002 - RNA, 20 nt, Artificial Sequence
  spacer sequence CTCN PAM
gagcugcggcacccacggaa

SEQ ID NO: 17003 - RNA, 20 nt, Artificial Sequence
  spacer sequence CTCN PAM
ugccugcccaccucugagcu

SEQ ID NO: 17004 - RNA, 20 nt, Artificial Sequence
  spacer sequence CTCN PAM
accaggcaggccagggcagg

SEQ ID NO: 17005 - RNA, 20 nt, Artificial Sequence
  spacer sequence CTCN PAM
ugcccuggccugccuggugg

SEQ ID NO: 17006 - RNA, 20 nt, Artificial Sequence
  spacer sequence CTCN PAM
ugugucuucuccugcccugg

SEQ ID NO: 17007 - RNA, 20 nt, Artificial Sequence
  spacer sequence CTCN PAM
ccucacugggacagggugcu

SEQ ID NO: 17008 - RNA, 20 nt, Artificial Sequence
  spacer sequence CTCN PAM
cugggacagggugcugggug

SEQ ID NO: 17009 - RNA, 20 nt, Artificial Sequence
  spacer sequence CTCN PAM
gccugggucacccagcaccc

SEQ ID NO: 17010 - RNA, 20 nt, Artificial Sequence
  spacer sequence CTCN PAM
caucuugggagagacucagc

SEQ ID NO: 17011 - RNA, 20 nt, Artificial Sequence
  spacer sequence CTCN PAM
ucuugggagagacucagccc

SEQ ID NO: 17012 - RNA, 20 nt, Artificial Sequence
  spacer sequence CTCN PAM
caagaugagagcugggguag

SEQ ID NO: 17013 - RNA, 20 nt, Artificial Sequence
  spacer sequence CTCN PAM
cccaagaugagagcuggggu

SEQ ID NO: 17014 - RNA, 20 nt, Artificial Sequence
  spacer sequence CTCN PAM
gccccugcuuggcaggaccu

SEQ ID NO: 17015 - RNA, 20 nt, Artificial Sequence
  spacer sequence CTCN PAM
gguucagcuguggaaccacc

SEQ ID NO: 17016 - RNA, 20 nt, Artificial Sequence
  spacer sequence CTCN PAM
auggccaagcugagacuuga

SEQ ID NO: 17017 - RNA, 20 nt, Artificial Sequence
  spacer sequence CTCN PAM
gcuuggccauggagcuggcu

SEQ ID NO: 17018 - RNA, 20 nt, Artificial Sequence
  spacer sequence CTCN PAM
agaagacccagaucgggggu

SEQ ID NO: 17019 - RNA, 20 nt, Artificial Sequence
  spacer sequence CTCN PAM
ccaggccugcacaagcccac

SEQ ID NO: 17020 - RNA, 20 nt, Artificial Sequence
  spacer sequence CTCN PAM
aaggggcaccuggguuccug

SEQ ID NO: 17021 - RNA, 20 nt, Artificial Sequence
  spacer sequence CTCN PAM
caaaggggcaccuggguucc

SEQ ID NO: 17022 - RNA, 20 nt, Artificial Sequence
  spacer sequence CTCN PAM
aggcugacaacgaggcacgg

SEQ ID NO: 17023 - RNA, 20 nt, Artificial Sequence
  spacer sequence CTCN PAM
uugucagccuagagcucuca

SEQ ID NO: 17024 - RNA, 20 nt, Artificial Sequence
  spacer sequence CTCN PAM
uggugcccgugccucguugu

SEQ ID NO: 17025 - RNA, 20 nt, Artificial Sequence
  spacer sequence CTCN PAM
ggccuggcuuguugaugagg

SEQ ID NO: 17026 - RNA, 20 nt, Artificial Sequence
  spacer sequence CTCN PAM
ucaacaagccaggccugagc

SEQ ID NO: 17027 - RNA, 20 nt, Artificial Sequence
  spacer sequence CTCN PAM
ggucaggccuugaaggcccc

SEQ ID NO: 17028 - RNA, 20 nt, Artificial Sequence
  spacer sequence CTCN PAM
aacagcugcuguuggggcag

SEQ ID NO: 17029 - RNA, 20 nt, Artificial Sequence
  spacer sequence CTCN PAM
cugccccaacagcagcuguu

SEQ ID NO: 17030 - RNA, 20 nt, Artificial Sequence
  spacer sequence CTCN PAM
agacugggggcugccgaccu

SEQ ID NO: 17031 - RNA, 20 nt, Artificial Sequence
  spacer sequence CTCN PAM
ccacccugccccacggggcc

SEQ ID NO: 17032 - RNA, 20 nt, Artificial Sequence
  spacer sequence CTCN PAM
ggcugggacagucuccccac

SEQ ID NO: 17033 - RNA, 20 nt, Artificial Sequence
  spacer sequence CTCN PAM
cuggcugggacagucucccc

SEQ ID NO: 17034 - RNA, 20 nt, Artificial Sequence
  spacer sequence CTCN PAM
ccucucuggcugggacaguc

SEQ ID NO: 17035 - RNA, 20 nt, Artificial Sequence
  spacer sequence CTCN PAM
ugguccuugucugaaucagc

SEQ ID NO: 17036 - RNA, 20 nt, Artificial Sequence
  spacer sequence CTCN PAM
uccugguccuugucugaauc

SEQ ID NO: 17037 - RNA, 20 nt, Artificial Sequence
  spacer sequence CTCN PAM
aggccuccuccugguccuug

SEQ ID NO: 17038 - RNA, 20 nt, Artificial Sequence
  spacer sequence CTCN PAM
cccagggcuggcuuaucucc

SEQ ID NO: 17039 - RNA, 20 nt, Artificial Sequence
  spacer sequence CTCN PAM
ccucccccagggcuggcuua

SEQ ID NO: 17040 - RNA, 20 nt, Artificial Sequence
  spacer sequence CTCN PAM
ggcaccuggccccggccucc

SEQ ID NO: 17041 - RNA, 20 nt, Artificial Sequence
  spacer sequence CTCN PAM
cuggccagccccgggacgug

SEQ ID NO: 17042 - RNA, 20 nt, Artificial Sequence
  spacer sequence CTCN PAM
ucccuggccagccccgggac

SEQ ID NO: 17043 - RNA, 20 nt, Artificial Sequence
  spacer sequence CTCN PAM
agagugaugggcgugcuggc

SEQ ID NO: 17044 - RNA, 20 nt, Artificial Sequence
  spacer sequence CTCN PAM
aggcuccucccuggccagcc

SEQ ID NO: 17045 - RNA, 20 nt, Artificial Sequence
  spacer sequence CTCN PAM
cgaggcuccucccuggccag

SEQ ID NO: 17046 - RNA, 20 nt, Artificial Sequence
  spacer sequence CTCN PAM
cggccagcacgcccaucacu

SEQ ID NO: 17047 - RNA, 20 nt, Artificial Sequence
  spacer sequence CTCN PAM
guugggguggccgacuggug

SEQ ID NO: 17048 - RNA, 20 nt, Artificial Sequence
  spacer sequence CTCN PAM
aguagcaccagucggccacc

SEQ ID NO: 17049 - RNA, 20 nt, Artificial Sequence
  spacer sequence CTCN PAM
ucuguaaaggaaggggcugg

SEQ ID NO: 17050 - RNA, 20 nt, Artificial Sequence
  spacer sequence CTCN PAM
guuuccucaucuguaaagga

SEQ ID NO: 17051 - RNA, 20 nt, Artificial Sequence
  spacer sequence CTCN PAM
caugacucaguuuccucauc

SEQ ID NO: 17052 - RNA, 20 nt, Artificial Sequence
  spacer sequence CTCN PAM
cugcugcugcucccaugacu

SEQ ID NO: 17053 - RNA, 20 nt, Artificial Sequence
  spacer sequence CTCN PAM
ccucagggacucuggggcug

SEQ ID NO: 17054 - RNA, 20 nt, Artificial Sequence
  spacer sequence CTCN PAM
gggacucuggggcuggaacc

SEQ ID NO: 17055 - RNA, 20 nt, Artificial Sequence
  spacer sequence CTCN PAM
ggggcuggaacccacgucuc

SEQ ID NO: 17056 - RNA, 20 nt, Artificial Sequence
  spacer sequence CTCN PAM
gcugagggcacgguggcagc

SEQ ID NO: 17057 - RNA, 20 nt, Artificial Sequence
  spacer sequence CTCN PAM
gccgagacguggguuccagc

SEQ ID NO: 17058 - RNA, 20 nt, Artificial Sequence
  spacer sequence CTCN PAM
agucgggccccgguggggac

SEQ ID NO: 17059 - RNA, 20 nt, Artificial Sequence
  spacer sequence CTCN PAM
gggucuggaacccgcgucuc

SEQ ID NO: 17060 - RNA, 20 nt, Artificial Sequence
  spacer sequence CTCN PAM
gcugaggacacgguggcagc

SEQ ID NO: 17061 - RNA, 20 nt, Artificial Sequence
  spacer sequence CTCN PAM
gccgagacgcggguuccaga

SEQ ID NO: 17062 - RNA, 20 nt, Artificial Sequence
  spacer sequence CTCN PAM
ggucugggccccggugggga

SEQ ID NO: 17063 - RNA, 20 nt, Artificial Sequence
  spacer sequence CTCN PAM
gggucuggaacccgcaucuc

SEQ ID NO: 17064 - RNA, 20 nt, Artificial Sequence
  spacer sequence CTCN PAM
gcugagggcacgguggcagc

SEQ ID NO: 17065 - RNA, 20 nt, Artificial Sequence
  spacer sequence CTCN PAM
gccgagaugcggguuccaga

SEQ ID NO: 17066 - RNA, 20 nt, Artificial Sequence
  spacer sequence CTCN PAM
gguccaggcccugcugcugu

SEQ ID NO: 17067 - RNA, 20 nt, Artificial Sequence
  spacer sequence CTCN PAM
ggggccagcccugaaacccu

SEQ ID NO: 17068 - RNA, 20 nt, Artificial Sequence
  spacer sequence CTCN PAM
gguccgccuggccccugccu

SEQ ID NO: 17069 - RNA, 20 nt, Artificial Sequence
  spacer sequence CTCN PAM
ugggccagcacuuggucuca

SEQ ID NO: 17070 - RNA, 20 nt, Artificial Sequence
  spacer sequence CTCN PAM
guggaaggggcaucucaugg

SEQ ID NO: 17071 - RNA, 20 nt, Artificial Sequence
  spacer sequence CTCN PAM
gagacuugggcucuacgaag

SEQ ID NO: 17072 - RNA, 20 nt, Artificial Sequence
  spacer sequence CTCN PAM
gagcucuguggaaggggcau

SEQ ID NO: 17073 - RNA, 20 nt, Artificial Sequence
  spacer sequence CTCN PAM
acgaagaucccuggcuggac

SEQ ID NO: 17074 - RNA, 20 nt, Artificial Sequence
  spacer sequence CTCN PAM
gguugugggggcuggggguu

SEQ ID NO: 17075 - RNA, 20 nt, Artificial Sequence
  spacer sequence CTCN PAM
ugcagacagcaagcaccgug

SEQ ID NO: 17076 - RNA, 20 nt, Artificial Sequence
  spacer sequence CTCN PAM
ccugcagacagcaagcaccg

SEQ ID NO: 17077 - RNA, 20 nt, Artificial Sequence
  spacer sequence CTCN PAM
uaucggccucuccugcagac

SEQ ID NO: 17078 - RNA, 20 nt, Artificial Sequence
  spacer sequence CTCN PAM
gggcagggaagagagcuagg

SEQ ID NO: 17079 - RNA, 20 nt, Artificial Sequence
  spacer sequence CTCN PAM
ucccugcccugaggccccag

SEQ ID NO: 17080 - RNA, 20 nt, Artificial Sequence
  spacer sequence CTCN PAM
cuucccugcccugaggcccc

SEQ ID NO: 17081 - RNA, 20 nt, Artificial Sequence
  spacer sequence CTCN PAM
aaggaugaccgugaacgugu

SEQ ID NO: 17082 - RNA, 20 nt, Artificial Sequence
  spacer sequence CTCN PAM
aaauaaauguucagugacug

SEQ ID NO: 17083 - RNA, 20 nt, Artificial Sequence
  spacer sequence CTCN PAM
agggacuccaaauaaauguu

SEQ ID NO: 17084 - RNA, 20 nt, Artificial Sequence
  spacer sequence CTCN PAM
uggcuacagcagggcuccag

SEQ ID NO: 17085 - RNA, 20 nt, Artificial Sequence
  spacer sequence CTCN PAM
gucccccaugccacaaccug

SEQ ID NO: 17086 - RNA, 20 nt, Artificial Sequence
  spacer sequence CTCN PAM
ucugucccccaugccacaac

SEQ ID NO: 17087 - RNA, 20 nt, Artificial Sequence
  spacer sequence CTCN PAM
caagcuggggucccggaggc

SEQ ID NO: 17088 - RNA, 20 nt, Artificial Sequence
  spacer sequence CTCN PAM
gggaccccagcuugggagcu

SEQ ID NO: 17089 - RNA, 20 nt, Artificial Sequence
  spacer sequence CTCN PAM
gccuccgggaccccagcuug

SEQ ID NO: 17090 - RNA, 20 nt, Artificial Sequence
  spacer sequence CTCN PAM
cacacagccaugcauuguca

SEQ ID NO: 17091 - RNA, 20 nt, Artificial Sequence
  spacer sequence CTCN PAM
gccacgucaccgccugccug

SEQ ID NO: 17092 - RNA, 20 nt, Artificial Sequence
  spacer sequence CTCN PAM
ugggccccugcuggcagcuc

SEQ ID NO: 17093 - RNA, 20 nt, Artificial Sequence
  spacer sequence CTCN PAM
caguggaucugagggauggg

SEQ ID NO: 17094 - RNA, 20 nt, Artificial Sequence
  spacer sequence CTCN PAM
gauccacugugagcaccaac

SEQ ID NO: 17095 - RNA, 20 nt, Artificial Sequence
  spacer sequence CTCN PAM
gugugguguuuggugcacag

SEQ ID NO: 17096 - RNA, 20 nt, Artificial Sequence
  spacer sequence CTCN PAM
gaauccgggcagagagggaa

SEQ ID NO: 17097 - RNA, 20 nt, Artificial Sequence
  spacer sequence CTCN PAM
gcccggauucugagcucagu

SEQ ID NO: 17098 - RNA, 20 nt, Artificial Sequence
  spacer sequence CTCN PAM
cugcccggauucugagcuca

SEQ ID NO: 17099 - RNA, 20 nt, Artificial Sequence
  spacer sequence CTCN PAM
cuguaccagugguucccucu

SEQ ID NO: 17100 - RNA, 20 nt, Artificial Sequence
  spacer sequence CTCN PAM
agcccagcagggaccauuag

SEQ ID NO: 17101 - RNA, 20 nt, Artificial Sequence
  spacer sequence CTCN PAM
agucugcaggcccggcugcg

SEQ ID NO: 17102 - RNA, 20 nt, Artificial Sequence
  spacer sequence CTCN PAM
ggaggaggcagcugagggcg

SEQ ID NO: 17103 - RNA, 20 nt, Artificial Sequence
  spacer sequence CTCN PAM
cgagaccuaauggucccugc

SEQ ID NO: 17104 - RNA, 20 nt, Artificial Sequence
  spacer sequence CTCN PAM
ucccgagaccuaaugguccc

SEQ ID NO: 17105 - RNA, 20 nt, Artificial Sequence
  spacer sequence CTCN PAM
gcugccuccucccgagaccu

SEQ ID NO: 17106 - RNA, 20 nt, Artificial Sequence
  spacer sequence CTCN PAM
gugcagauccugucgcccuc

SEQ ID NO: 17107 - RNA, 20 nt, Artificial Sequence
  spacer sequence CTCN PAM
cugcucugugcagauccugu

SEQ ID NO: 17108 - RNA, 20 nt, Artificial Sequence
  spacer sequence CTCN PAM
gccccucacugcucugugca

SEQ ID NO: 17109 - RNA, 20 nt, Artificial Sequence
  spacer sequence CTCN PAM
caggccaggugagcccagaa

SEQ ID NO: 17110 - RNA, 20 nt, Artificial Sequence
  spacer sequence CTCN PAM
ccuggccugggagacccauc

SEQ ID NO: 17111 - RNA, 20 nt, Artificial Sequence
  spacer sequence CTCN PAM
agaggguagguugggggcag

SEQ ID NO: 17112 - RNA, 20 nt, Artificial Sequence
  spacer sequence CTCN PAM
agaggggcugggaagggccg

SEQ ID NO: 17113 - RNA, 20 nt, Artificial Sequence
  spacer sequence CTCN PAM
ccaggcccaggagcagccca

SEQ ID NO: 17114 - RNA, 20 nt, Artificial Sequence
  spacer sequence CTCN PAM
ugggccuggugagcuacugc

SEQ ID NO: 17115 - RNA, 20 nt, Artificial Sequence
  spacer sequence CTCN PAM
aggaugggcugcuccugggc

SEQ ID NO: 17116 - RNA, 20 nt, Artificial Sequence
  spacer sequence CTCN PAM
uccugaggugaccuugaguc

SEQ ID NO: 17117 - RNA, 20 nt, Artificial Sequence
  spacer sequence CTCN PAM
ggaagaggcagggccagguu

SEQ ID NO: 17118 - RNA, 20 nt, Artificial Sequence
  spacer sequence CTCN PAM
aggucaccucaggaagaggc

SEQ ID NO: 17119 - RNA, 20 nt, Artificial Sequence
  spacer sequence CTCN PAM
agcgucaccccaggggcguc

SEQ ID NO: 17120 - RNA, 20 nt, Artificial Sequence
  spacer sequence CTCN PAM
caagcgucaccccaggggcg

SEQ ID NO: 17121 - RNA, 20 nt, Artificial Sequence
  spacer sequence CTCN PAM
uggaacagcuuccggcucuc

SEQ ID NO: 17122 - RNA, 20 nt, Artificial Sequence
  spacer sequence CTCN PAM
uccuggaacagcuuccggcu

SEQ ID NO: 17123 - RNA, 20 nt, Artificial Sequence
  spacer sequence CTCN PAM
cuccuccuggaacagcuucc

SEQ ID NO: 17124 - RNA, 20 nt, Artificial Sequence
  spacer sequence CTCN PAM
guuucucccggggcaugugg

SEQ ID NO: 17125 - RNA, 20 nt, Artificial Sequence
  spacer sequence CTCN PAM
cggggcaugugggcaggaag

SEQ ID NO: 17126 - RNA, 20 nt, Artificial Sequence
  spacer sequence CTCN PAM
ggaucccgcaucagucccac

SEQ ID NO: 17127 - RNA, 20 nt, Artificial Sequence
  spacer sequence CTCN PAM
gcccuuccucgcaggccugg

SEQ ID NO: 17128 - RNA, 20 nt, Artificial Sequence
  spacer sequence CTCN PAM
caggccuggccggggcaacc

SEQ ID NO: 17129 - RNA, 20 nt, Artificial Sequence
  spacer sequence CTCN PAM
aggccccagagccagugagc

SEQ ID NO: 17130 - RNA, 20 nt, Artificial Sequence
  spacer sequence CTCN PAM
aggugccaggcagcaucagg

SEQ ID NO: 17131 - RNA, 20 nt, Artificial Sequence
  spacer sequence CTCN PAM
ggggccucgaggugccaggc

SEQ ID NO: 17132 - RNA, 20 nt, Artificial Sequence
  spacer sequence CTCN PAM
cuggcucuggggccucgagg

SEQ ID NO: 17133 - RNA, 20 nt, Artificial Sequence
  spacer sequence CTCN PAM
cucgcccaucucccuagagu

SEQ ID NO: 17134 - RNA, 20 nt, Artificial Sequence
  spacer sequence CTCN PAM
cccaucucccuagagucccg

SEQ ID NO: 17135 - RNA, 20 nt, Artificial Sequence
  spacer sequence CTCN PAM
cuagagucccgcugugcagc

SEQ ID NO: 17136 - RNA, 20 nt, Artificial Sequence
  spacer sequence CTCN PAM
agggagaugggcgagcgagc

SEQ ID NO: 17137 - RNA, 20 nt, Artificial Sequence
  spacer sequence CTCN PAM
cagcuguccgguuccagcgu

SEQ ID NO: 17138 - RNA, 20 nt, Artificial Sequence
  spacer sequence CTCN PAM
gcuguccgguuccagcgucc

SEQ ID NO: 17139 - RNA, 20 nt, Artificial Sequence
  spacer sequence CTCN PAM
gacagccacugcaggcaggg

SEQ ID NO: 17140 - RNA, 20 nt, Artificial Sequence
  spacer sequence CTCN PAM
gucucagggggcuugguugg

SEQ ID NO: 17141 - RNA, 20 nt, Artificial Sequence
  spacer sequence CTCN PAM
gggggcuugguugggggugg

SEQ ID NO: 17142 - RNA, 20 nt, Artificial Sequence
  spacer sequence CTCN PAM
acccccaaccaagcccccug

SEQ ID NO: 17143 - RNA, 20 nt, Artificial Sequence
  spacer sequence CTCN PAM
uccacccccaaccaagcccc

SEQ ID NO: 17144 - RNA, 20 nt, Artificial Sequence
  spacer sequence CTCN PAM
ugccugggcccggccggccu

SEQ ID NO: 17145 - RNA, 20 nt, Artificial Sequence
  spacer sequence CTCN PAM
gcacuccugccugggcccgg

SEQ ID NO: 17146 - RNA, 20 nt, Artificial Sequence
  spacer sequence CTCN PAM
gggucagggucggggguggc

SEQ ID NO: 17147 - RNA, 20 nt, Artificial Sequence
  spacer sequence CTCN PAM
ugcaggccuuacgggccacc

SEQ ID NO: 17148 - RNA, 20 nt, Artificial Sequence
  spacer sequence CTCN PAM
agcaggcauccagggagggc

SEQ ID NO: 17149 - RNA, 20 nt, Artificial Sequence
  spacer sequence CTCN PAM
cuggaugccugcuggagccc

SEQ ID NO: 17150 - RNA, 20 nt, Artificial Sequence
  spacer sequence CTCN PAM
acacacucgguguccguggg

SEQ ID NO: 17151 - RNA, 20 nt, Artificial Sequence
  spacer sequence CTCN PAM
guguccguggggaugcgcag

SEQ ID NO: 17152 - RNA, 20 nt, Artificial Sequence
  spacer sequence CTCN PAM
cggcccgagacuucuccgua

SEQ ID NO: 17153 - RNA, 20 nt, Artificial Sequence
  spacer sequence CTCN PAM
ggccgggaggaccggccguu

SEQ ID NO: 17154 - RNA, 20 nt, Artificial Sequence
  spacer sequence CTCN PAM
guaggucaggucgcccacca

SEQ ID NO: 17155 - RNA, 20 nt, Artificial Sequence
  spacer sequence CTCN PAM
ucccgcaggccggacacacc

SEQ ID NO: 17156 - RNA, 20 nt, Artificial Sequence
  spacer sequence CTCN PAM
cagcuugauccggcaccgcc

SEQ ID NO: 17157 - RNA, 20 nt, Artificial Sequence
  spacer sequence CTCN PAM
cugaccaggacccaccuccc

SEQ ID NO: 17158 - RNA, 20 nt, Artificial Sequence
  spacer sequence CTCN PAM
cgucaugaccccgcugcagu

SEQ ID NO: 17159 - RNA, 20 nt, Artificial Sequence
  spacer sequence CTCN PAM
ugggguggaacucucccugu

SEQ ID NO: 17160 - RNA, 20 nt, Artificial Sequence
  spacer sequence CTCN PAM
cccuguccccugccaugagu

SEQ ID NO: 17161 - RNA, 20 nt, Artificial Sequence
  spacer sequence CTCN PAM
cuguccccugccaugaguga

SEQ ID NO: 17162 - RNA, 20 nt, Artificial Sequence
  spacer sequence CTCN PAM
uggcaggggacagggagagu

SEQ ID NO: 17163 - RNA, 20 nt, Artificial Sequence
  spacer sequence CTCN PAM
cucauggcaggggacaggga

SEQ ID NO: 17164 - RNA, 20 nt, Artificial Sequence
  spacer sequence CTCN PAM
ccaguggugaccugaacaca

SEQ ID NO: 17165 - RNA, 20 nt, Artificial Sequence
  spacer sequence CTCN PAM
guccuggagaaucuaggcca

SEQ ID NO: 17166 - RNA, 20 nt, Artificial Sequence
  spacer sequence CTCN PAM
aggaccgagcaccacccugg

SEQ ID NO: 17167 - RNA, 20 nt, Artificial Sequence
  spacer sequence CTCN PAM
ugacugauuccuuggggguc

SEQ ID NO: 17168 - RNA, 20 nt, Artificial Sequence
  spacer sequence CTCN PAM
ccugacacagggucccugcu

SEQ ID NO: 17169 - RNA, 20 nt, Artificial Sequence
  spacer sequence CTCN PAM
gcuucucaccugacacaggg

SEQ ID NO: 17170 - RNA, 20 nt, Artificial Sequence
  spacer sequence CTCN PAM
cagcuucucaccugacacag

SEQ ID NO: 17171 - RNA, 20 nt, Artificial Sequence
  spacer sequence CTCN PAM
acgcccugcagccucucagc

SEQ ID NO: 17172 - RNA, 20 nt, Artificial Sequence
  spacer sequence CTCN PAM
ugcguucuuaacuccacgcc

SEQ ID NO: 17173 - RNA, 20 nt, Artificial Sequence
  spacer sequence CTCN PAM
gcccugaugcucaggguggc

SEQ ID NO: 17174 - RNA, 20 nt, Artificial Sequence
  spacer sequence CTCN PAM
ggguggcccaacauaagcuu

SEQ ID NO: 17175 - RNA, 20 nt, Artificial Sequence
  spacer sequence CTCN PAM
guuucccuucugucaccacc

SEQ ID NO: 17176 - RNA, 20 nt, Artificial Sequence
  spacer sequence CTCN PAM
cgggugugucuggggugggc

SEQ ID NO: 17177 - RNA, 20 nt, Artificial Sequence
  spacer sequence CTCN PAM
aaagugcugcugaagccgcu

SEQ ID NO: 17178 - RNA, 20 nt, Artificial Sequence
  spacer sequence CTCN PAM
ugguucuggaacacgggcug

SEQ ID NO: 17179 - RNA, 20 nt, Artificial Sequence
  spacer sequence CTCN PAM
cagaucucgugguucuggaa

SEQ ID NO: 17180 - RNA, 20 nt, Artificial Sequence
  spacer sequence CTCN PAM
caaccuggggcgcagaaggc

SEQ ID NO: 17181 - RNA, 20 nt, Artificial Sequence
  spacer sequence CTCN PAM
caccugccuucugcgcccca

SEQ ID NO: 17182 - RNA, 20 nt, Artificial Sequence
  spacer sequence CTCN PAM
caggguguggcaggcaggga

SEQ ID NO: 17183 - RNA, 20 nt, Artificial Sequence
  spacer sequence CTCN PAM
augcacauggugugggcccg

SEQ ID NO: 17184 - RNA, 20 nt, Artificial Sequence
  spacer sequence CTCN PAM
gugcuguuccugccaauggc

SEQ ID NO: 17185 - RNA, 20 nt, Artificial Sequence
  spacer sequence CTCN PAM
ccuggaugugcccccgcagc

SEQ ID NO: 17186 - RNA, 20 nt, Artificial Sequence
  spacer sequence CTCN PAM
uggaugugcccccgcagcug

SEQ ID NO: 17187 - RNA, 20 nt, Artificial Sequence
  spacer sequence CTCN PAM
ugcagcugcgggggcacauc

SEQ ID NO: 17188 - RNA, 20 nt, Artificial Sequence
  spacer sequence CTCN PAM
ccugcagcugcgggggcaca

SEQ ID NO: 17189 - RNA, 20 nt, Artificial Sequence
  spacer sequence CTCN PAM
cucuccugcagcugcggggg

SEQ ID NO: 17190 - RNA, 20 nt, Artificial Sequence
  spacer sequence CTCN PAM
ccggcagcacugggcugccc

SEQ ID NO: 17191 - RNA, 20 nt, Artificial Sequence
  spacer sequence CTCN PAM
acgugguugcuugguguuag

SEQ ID NO: 17192 - RNA, 20 nt, Artificial Sequence
  spacer sequence CTCN PAM
caccacgcucuacgugguug

SEQ ID NO: 17193 - RNA, 20 nt, Artificial Sequence
  spacer sequence CTCN PAM
gagccagggcugcccaagug

SEQ ID NO: 17194 - RNA, 20 nt, Artificial Sequence
  spacer sequence CTCN PAM
gagccucccaccacgcucua

SEQ ID NO: 17195 - RNA, 20 nt, Artificial Sequence
  spacer sequence CTCN PAM
ggauucccaccccacuuggg

SEQ ID NO: 17196 - RNA, 20 nt, Artificial Sequence
  spacer sequence CTCN PAM
uugaagcaccuguacgcgcu

SEQ ID NO: 17197 - RNA, 20 nt, Artificial Sequence
  spacer sequence CTCN PAM
accagcggggcgcugugcgu

SEQ ID NO: 17198 - RNA, 20 nt, Artificial Sequence
  spacer sequence CTCN PAM
agguucugccaccagcugga

SEQ ID NO: 17199 - RNA, 20 nt, Artificial Sequence
  spacer sequence CTCN PAM
gucccacuccagguucugcc

SEQ ID NO: 17200 - RNA, 20 nt, Artificial Sequence
  spacer sequence CTCN PAM
ggacucugucccacuccagg

SEQ ID NO: 17201 - RNA, 20 nt, Artificial Sequence
  spacer sequence CTCN PAM
gacucuggacucugucccac

SEQ ID NO: 17202 - RNA, 20 nt, Artificial Sequence
  spacer sequence CTCN PAM
acagacgccaccguggggcu

SEQ ID NO: 17203 - RNA, 20 nt, Artificial Sequence
  spacer sequence CTCN PAM
ggccgcccccccuaccugaa

SEQ ID NO: 17204 - RNA, 20 nt, Artificial Sequence
  spacer sequence CTCN PAM
ggaaagcgguaccgcagcug

SEQ ID NO: 17205 - RNA, 20 nt, Artificial Sequence
  spacer sequence CTCN PAM
gacccugcagaagcagcugc

SEQ ID NO: 17206 - RNA, 20 nt, Artificial Sequence
  spacer sequence CTCN PAM
cgccacgccuugcugucaau

SEQ ID NO: 17207 - RNA, 20 nt, Artificial Sequence
  spacer sequence CTCN PAM
gguacacgauggacagguuc

SEQ ID NO: 17208 - RNA, 20 nt, Artificial Sequence
  spacer sequence CTCN PAM
acgcugccuggcuccauggc

SEQ ID NO: 17209 - RNA, 20 nt, Artificial Sequence
  spacer sequence CTCN PAM
auggccggccugccgagcca

SEQ ID NO: 17210 - RNA, 20 nt, Artificial Sequence
  spacer sequence CTCN PAM
gcaggccggccauggagcca

SEQ ID NO: 17211 - RNA, 20 nt, Artificial Sequence
  spacer sequence CTCN PAM
cagcacacgcacccacgcgu

SEQ ID NO: 17212 - RNA, 20 nt, Artificial Sequence
  spacer sequence CTCN PAM
guaugcugggcugggggcgc

SEQ ID NO: 17213 - RNA, 20 nt, Artificial Sequence
  spacer sequence CTCN PAM
ggugcgaagccaccgagccg

SEQ ID NO: 17214 - RNA, 20 nt, Artificial Sequence
  spacer sequence CTCN PAM
guggcuucgcaccggagccc

SEQ ID NO: 17215 - RNA, 20 nt, Artificial Sequence
  spacer sequence CTCN PAM
guccccgagaucagucccca

SEQ ID NO: 17216 - RNA, 20 nt, Artificial Sequence
  spacer sequence CTCN PAM
gggacugaggaugcaggugc

SEQ ID NO: 17217 - RNA, 20 nt, Artificial Sequence
  spacer sequence CTCN PAM
ccagcugacgcccuggggac

SEQ ID NO: 17218 - RNA, 20 nt, Artificial Sequence
  spacer sequence CTCN PAM
uugacuccccagcugacgcc

SEQ ID NO: 17219 - RNA, 20 nt, Artificial Sequence
  spacer sequence CTCN PAM
gggcugaccugaagggcccu

SEQ ID NO: 17220 - RNA, 20 nt, Artificial Sequence
  spacer sequence CTCN PAM
aggcuuaggucaggcagggc

SEQ ID NO: 17221 - RNA, 20 nt, Artificial Sequence
  spacer sequence CTCN PAM
uucuccaggcuuaggucagg

SEQ ID NO: 17222 - RNA, 20 nt, Artificial Sequence
  spacer sequence CTCN PAM
ccacagacccuccccuccag

SEQ ID NO: 17223 - RNA, 20 nt, Artificial Sequence
  spacer sequence CTCN PAM
ccuccaggggaugcacguga

SEQ ID NO: 17224 - RNA, 20 nt, Artificial Sequence
  spacer sequence CTCN PAM
aggggaugcacgugaaugcc

SEQ ID NO: 17225 - RNA, 20 nt, Artificial Sequence
  spacer sequence CTCN PAM
gcccgacggugggggcgggg

SEQ ID NO: 17226 - RNA, 20 nt, Artificial Sequence
  spacer sequence CTCN PAM
ccgcccccaccgucgggcag

SEQ ID NO: 17227 - RNA, 20 nt, Artificial Sequence
  spacer sequence CTCN PAM
ucgcuccccgcaguccgcgc

SEQ ID NO: 17228 - RNA, 20 nt, Artificial Sequence
  spacer sequence CTCN PAM
cuccccgcaguccgcgcaga

SEQ ID NO: 17229 - RNA, 20 nt, Artificial Sequence
  spacer sequence CTCN PAM
ccgcaguccgcgcagacccg

SEQ ID NO: 17230 - RNA, 20 nt, Artificial Sequence
  spacer sequence CTCN PAM
gagccccucccgcgcccacg

SEQ ID NO: 17231 - RNA, 20 nt, Artificial Sequence
  spacer sequence CTCN PAM
gagccagggucggccugccc

SEQ ID NO: 17232 - RNA, 20 nt, Artificial Sequence
  spacer sequence CTCN PAM
cgcgcccacgcccacgccaa

SEQ ID NO: 17233 - RNA, 20 nt, Artificial Sequence
  spacer sequence CTCN PAM
agccgcgcgcccgcgcgcug

SEQ ID NO: 17234 - RNA, 20 nt, Artificial Sequence
  spacer sequence CTCN PAM
gggucgccagcgcgcgggcg

SEQ ID NO: 17235 - RNA, 20 nt, Artificial Sequence
  spacer sequence CTCN PAM
gcuccggacgccuggcagcg

SEQ ID NO: 17236 - RNA, 20 nt, Artificial Sequence
  spacer sequence CTCN PAM
ggacgccuggcagcgcuucc

SEQ ID NO: 17237 - RNA, 20 nt, Artificial Sequence
  spacer sequence CTCN PAM
ccauuggccgccgcagccgc

SEQ ID NO: 17238 - RNA, 20 nt, Artificial Sequence
  spacer sequence CTCN PAM
ccaggacaggacgcgggggc

SEQ ID NO: 17239 - RNA, 20 nt, Artificial Sequence
  spacer sequence CTCN PAM
gcagcccccgcguccugucc

SEQ ID NO: 17240 - RNA, 20 nt, Artificial Sequence
  spacer sequence CTCN PAM
ccccgcccaccccucgcgca

SEQ ID NO: 17241 - RNA, 20 nt, Artificial Sequence
  spacer sequence CTCN PAM
cgcagccccgccuccgccac

SEQ ID NO: 17242 - RNA, 20 nt, Artificial Sequence
  spacer sequence CTCN PAM
gccacgccaaccaauggcgc

SEQ ID NO: 17243 - RNA, 20 nt, Artificial Sequence
  spacer sequence CTCN PAM
gggcgggcagugcgcgacgg

SEQ ID NO: 17244 - RNA, 20 nt, Artificial Sequence
  spacer sequence CTCN PAM
cgcgccgccgccgccgucgc

SEQ ID NO: 17245 - RNA, 20 nt, Artificial Sequence
  spacer sequence CTCN PAM
gaaccucccgcgccgccgcc

SEQ ID NO: 17246 - RNA, 20 nt, Artificial Sequence
  spacer sequence CTCN PAM
cgcuccgaaccucccgcgcc

SEQ ID NO: 17247 - RNA, 20 nt, Artificial Sequence
  spacer sequence CTCN PAM
ggcucgcggacgguauggag

SEQ ID NO: 17248 - RNA, 20 nt, Artificial Sequence
  spacer sequence CTCN PAM
cggacgguauggaggacuac

SEQ ID NO: 17249 - RNA, 20 nt, Artificial Sequence
  spacer sequence CTCN PAM
auaccguccgcgagcccgag

SEQ ID NO: 17250 - RNA, 20 nt, Artificial Sequence
  spacer sequence CTCN PAM
uaguccuccauaccguccgc

SEQ ID NO: 17251 - RNA, 20 nt, Artificial Sequence
  spacer sequence CTCN PAM
ugcucguaguccuccauacc

SEQ ID NO: 17252 - RNA, 20 nt, Artificial Sequence
  spacer sequence CTCN PAM
acgccgcacagcuccugcuc

SEQ ID NO: 17253 - RNA, 20 nt, Artificial Sequence
  spacer sequence CTCN PAM
gccgcgaacugguuguggaa

SEQ ID NO: 17254 - RNA, 20 nt, Artificial Sequence
  spacer sequence CTCN PAM
agcucggccgcgaacugguu

SEQ ID NO: 17255 - RNA, 20 nt, Artificial Sequence
  spacer sequence CTCN PAM
gccagcaccuccagcucggc

SEQ ID NO: 17256 - RNA, 20 nt, Artificial Sequence
  spacer sequence CTCN PAM
ccaacggccgggggccgcgc

SEQ ID NO: 17257 - RNA, 20 nt, Artificial Sequence
  spacer sequence CTCN PAM
uccccaacggccgggggccg

SEQ ID NO: 17258 - RNA, 20 nt, Artificial Sequence
  spacer sequence CTCN PAM
gggagggcgugccgggggcc

SEQ ID NO: 17259 - RNA, 20 nt, Artificial Sequence
  spacer sequence CTCN PAM
ccgaggucgccacugucccg

SEQ ID NO: 17260 - RNA, 20 nt, Artificial Sequence
  spacer sequence CTCN PAM
acgucgccgcuggcgggauc

SEQ ID NO: 17261 - RNA, 20 nt, Artificial Sequence
  spacer sequence CTCN PAM
gggcggccgcugacaaucuc

SEQ ID NO: 17262 - RNA, 20 nt, Artificial Sequence
  spacer sequence CTCN PAM
ucucccagcaggggcgucga

SEQ ID NO: 17263 - RNA, 20 nt, Artificial Sequence
  spacer sequence CTCN PAM
cccagcaggggcgucgacuc

SEQ ID NO: 17264 - RNA, 20 nt, Artificial Sequence
  spacer sequence CTCN PAM
cagcaggggcgucgacuccg

SEQ ID NO: 17265 - RNA, 20 nt, Artificial Sequence
  spacer sequence CTCN PAM
gucgcccuccgggguccccc

SEQ ID NO: 17266 - RNA, 20 nt, Artificial Sequence
  spacer sequence CTCN PAM
ggggucccccuguucaccgc

SEQ ID NO: 17267 - RNA, 20 nt, Artificial Sequence
  spacer sequence CTCN PAM
aacguccgcgggggucggcc

SEQ ID NO: 17268 - RNA, 20 nt, Artificial Sequence
  spacer sequence CTCN PAM
ucgaacguccgcgggggucg

SEQ ID NO: 17269 - RNA, 20 nt, Artificial Sequence
  spacer sequence CTCN PAM
ggcaagggccuccucgaacg

SEQ ID NO: 17270 - RNA, 20 nt, Artificial Sequence
  spacer sequence CTCN PAM
agucccgccccagccgcauc

SEQ ID NO: 17271 - RNA, 20 nt, Artificial Sequence
  spacer sequence CTCN PAM
uccuggcgccgcccuggcug

SEQ ID NO: 17272 - RNA, 20 nt, Artificial Sequence
  spacer sequence CTCN PAM
ggagugggcgcgaggcugag

SEQ ID NO: 17273 - RNA, 20 nt, Artificial Sequence
  spacer sequence CTCN PAM
ggaggcccuggggcaaugcc

SEQ ID NO: 17274 - RNA, 20 nt, Artificial Sequence
  spacer sequence CTCN PAM
cgcccacuccggaggcccug

SEQ ID NO: 17275 - RNA, 20 nt, Artificial Sequence
  spacer sequence CTCN PAM
gccucgcgcccacuccggag

SEQ ID NO: 17276 - RNA, 20 nt, Artificial Sequence
  spacer sequence CTCN PAM
ucagccucgcgcccacuccg

SEQ ID NO: 17277 - RNA, 20 nt, Artificial Sequence
  spacer sequence CTCN PAM
gguucccugcaugugucucc

SEQ ID NO: 17278 - RNA, 20 nt, Artificial Sequence
  spacer sequence CTCN PAM
cccagcccccaggaucaaac

SEQ ID NO: 17279 - RNA, 20 nt, Artificial Sequence
  spacer sequence CTCN PAM
ugaccaccugcagccuaggc

SEQ ID NO: 17280 - RNA, 20 nt, Artificial Sequence
  spacer sequence CTCN PAM
gaucugaaguucagccucuu

SEQ ID NO: 17281 - RNA, 20 nt, Artificial Sequence
  spacer sequence CTCN PAM
uccgaucugaaguucagccu

SEQ ID NO: 17282 - RNA, 20 nt, Artificial Sequence
  spacer sequence CTCN PAM
aucuccuccgaucugaaguu

SEQ ID NO: 17283 - RNA, 20 nt, Artificial Sequence
  spacer sequence CTCN PAM
uccaucuccuccgaucugaa

SEQ ID NO: 17284 - RNA, 20 nt, Artificial Sequence
  spacer sequence CTCN PAM
cgacuccucgccgacggaca

SEQ ID NO: 17285 - RNA, 20 nt, Artificial Sequence
  spacer sequence CTCN PAM
ucgccgacggacaucacccc

SEQ ID NO: 17286 - RNA, 20 nt, Artificial Sequence
  spacer sequence CTCN PAM
ccgacggacaucaccccgcc

SEQ ID NO: 17287 - RNA, 20 nt, Artificial Sequence
  spacer sequence CTCN PAM
gcggcggggugauguccguc

SEQ ID NO: 17288 - RNA, 20 nt, Artificial Sequence
  spacer sequence CTCN PAM
gggcucggcggcggggugau

SEQ ID NO: 17289 - RNA, 20 nt, Artificial Sequence
  spacer sequence CTCN PAM
cagagcuuuggggccacggg

SEQ ID NO: 17290 - RNA, 20 nt, Artificial Sequence
  spacer sequence CTCN PAM
gcgagguccucagggcucgg

SEQ ID NO: 17291 - RNA, 20 nt, Artificial Sequence
  spacer sequence CTCN PAM
gauggagcccaucccgugcc

SEQ ID NO: 17292 - RNA, 20 nt, Artificial Sequence
  spacer sequence CTCN PAM
aucugagucccacuggacag

SEQ ID NO: 17293 - RNA, 20 nt, Artificial Sequence
  spacer sequence CTCN PAM
uccagggcacgggaugggcu

SEQ ID NO: 17294 - RNA, 20 nt, Artificial Sequence
  spacer sequence CTCN PAM
ccaccccccaggccucaucc

SEQ ID NO: 17295 - RNA, 20 nt, Artificial Sequence
  spacer sequence CTCN PAM
gccauggaacccuccccacc

SEQ ID NO: 17296 - RNA, 20 nt, Artificial Sequence
  spacer sequence CTCN PAM
cagccauggaacccucccca

SEQ ID NO: 17297 - RNA, 20 nt, Artificial Sequence
  spacer sequence CTCN PAM
gacacccauauccaagggug

SEQ ID NO: 17298 - RNA, 20 nt, Artificial Sequence
  spacer sequence CTCN PAM
agcguggggucacccuugga

SEQ ID NO: 17299 - RNA, 20 nt, Artificial Sequence
  spacer sequence CTCN PAM
guggcagaaacucaagcgug

SEQ ID NO: 17300 - RNA, 20 nt, Artificial Sequence
  spacer sequence CTCN PAM
cuccagagucucagaagcug

SEQ ID NO: 17301 - RNA, 20 nt, Artificial Sequence
  spacer sequence CTCN PAM
ccagagucucagaagcugcu

SEQ ID NO: 17302 - RNA, 20 nt, Artificial Sequence
  spacer sequence CTCN PAM
agagucucagaagcugcugc

SEQ ID NO: 17303 - RNA, 20 nt, Artificial Sequence
  spacer sequence CTCN PAM
ggagagagaccggggcucag

SEQ ID NO: 17304 - RNA, 20 nt, Artificial Sequence
  spacer sequence CTCN PAM
gaagcugcugccgacguggg

SEQ ID NO: 17305 - RNA, 20 nt, Artificial Sequence
  spacer sequence CTCN PAM
cacgggccucaccagcugcc

SEQ ID NO: 17306 - RNA, 20 nt, Artificial Sequence
  spacer sequence CTCN PAM
ccagcugcccgcaaucccgu

SEQ ID NO: 17307 - RNA, 20 nt, Artificial Sequence
  spacer sequence CTCN PAM
ggacgggauugcgggcagcu

SEQ ID NO: 17308 - RNA, 20 nt, Artificial Sequence
  spacer sequence CTCN PAM
aagauggggggccgccucag

SEQ ID NO: 17309 - RNA, 20 nt, Artificial Sequence
  spacer sequence CTCN PAM
guggaugucacguggacgua

SEQ ID NO: 17310 - RNA, 20 nt, Artificial Sequence
  spacer sequence CTCN PAM
ggaaaggguccuuggagccc

SEQ ID NO: 17311 - RNA, 20 nt, Artificial Sequence
  spacer sequence CTCN PAM
aaggacccuuuccugagcag

SEQ ID NO: 17312 - RNA, 20 nt, Artificial Sequence
  spacer sequence CTCN PAM
ccccugccauuugcuuaaag

SEQ ID NO: 17313 - RNA, 20 nt, Artificial Sequence
  spacer sequence CTCN PAM
gcacaggacccgcuuuaagc

SEQ ID NO: 17314 - RNA, 20 nt, Artificial Sequence
  spacer sequence CTCN PAM
gcaccccuggggcucugcac

SEQ ID NO: 17315 - RNA, 20 nt, Artificial Sequence
  spacer sequence CTCN PAM
cccucugcaccccuggggcu

SEQ ID NO: 17316 - RNA, 20 nt, Artificial Sequence
  spacer sequence CTCN PAM
aagucuacgccccaugacgc

SEQ ID NO: 17317 - RNA, 20 nt, Artificial Sequence
  spacer sequence CTCN PAM
ccacagcagguugcugucca

SEQ ID NO: 17318 - RNA, 20 nt, Artificial Sequence
  spacer sequence CTCN PAM
gguggagagggccuccuugc

SEQ ID NO: 17319 - RNA, 20 nt, Artificial Sequence
  spacer sequence CTCN PAM
acccgaggccauacaaacag

SEQ ID NO: 17320 - RNA, 20 nt, Artificial Sequence
  spacer sequence CTCN PAM
ccacccgaggccauacaaac

SEQ ID NO: 17321 - RNA, 20 nt, Artificial Sequence
  spacer sequence CTCN PAM
uugcuuccccuccugcuuuu

SEQ ID NO: 17322 - RNA, 20 nt, Artificial Sequence
  spacer sequence CTCN PAM
ugcuuuugcccuuuccuccu

SEQ ID NO: 17323 - RNA, 20 nt, Artificial Sequence
  spacer sequence CTCN PAM
uuucuccuaaagcugccccc

SEQ ID NO: 17324 - RNA, 20 nt, Artificial Sequence
  spacer sequence CTCN PAM
uaaagcugcccccaauuucc

SEQ ID NO: 17325 - RNA, 20 nt, Artificial Sequence
  spacer sequence CTCN PAM
caccccucacuggccagcuu

SEQ ID NO: 17326 - RNA, 20 nt, Artificial Sequence
  spacer sequence CTCN PAM
cuggccagcuuacugggguu

SEQ ID NO: 17327 - RNA, 20 nt, Artificial Sequence
  spacer sequence CTCN PAM
gggacccgggugggacaacc

SEQ ID NO: 17328 - RNA, 20 nt, Artificial Sequence
  spacer sequence CTCN PAM
uaggucacaggauucacguc

SEQ ID NO: 17329 - RNA, 20 nt, Artificial Sequence
  spacer sequence CTCN PAM
gggccccuccuaggucacag

SEQ ID NO: 17330 - RNA, 20 nt, Artificial Sequence
  spacer sequence CTCN PAM
cuuccccacagggcucucuc

SEQ ID NO: 17331 - RNA, 20 nt, Artificial Sequence
  spacer sequence CTCN PAM
cuccuccacgucccauggcg

SEQ ID NO: 17332 - RNA, 20 nt, Artificial Sequence
  spacer sequence CTCN PAM
ccuccacgucccauggcgag

SEQ ID NO: 17333 - RNA, 20 nt, Artificial Sequence
  spacer sequence CTCN PAM
uccacgucccauggcgaggc

SEQ ID NO: 17334 - RNA, 20 nt, Artificial Sequence
  spacer sequence CTCN PAM
acgucccauggcgaggcggu

SEQ ID NO: 17335 - RNA, 20 nt, Artificial Sequence
  spacer sequence CTCN PAM
ccaugggacguggaggagag

SEQ ID NO: 17336 - RNA, 20 nt, Artificial Sequence
  spacer sequence CTCN PAM
cugaagaagcaggucgacgg

SEQ ID NO: 17337 - RNA, 20 nt, Artificial Sequence
  spacer sequence CTCN PAM
ccgucgaccugcuucuucag

SEQ ID NO: 17338 - RNA, 20 nt, Artificial Sequence
  spacer sequence CTCN PAM
ggcggccccgccaccgcccc

SEQ ID NO: 17339 - RNA, 20 nt, Artificial Sequence
  spacer sequence CTCN PAM
ugauuccagccuguuguuug

SEQ ID NO: 17340 - RNA, 20 nt, Artificial Sequence
  spacer sequence CTCN PAM
cgccgcugugcaaacaacag

SEQ ID NO: 17341 - RNA, 20 nt, Artificial Sequence
  spacer sequence CTCN PAM
ugaagcagccgcucccgccg

SEQ ID NO: 17342 - RNA, 20 nt, Artificial Sequence
  spacer sequence CTCN PAM
ugcaccaacuccuagcuccu

SEQ ID NO: 17343 - RNA, 20 nt, Artificial Sequence
  spacer sequence CTCN PAM
uagcuccuagcguguggguu

SEQ ID NO: 17344 - RNA, 20 nt, Artificial Sequence
  spacer sequence CTCN PAM
uagcguguggguuggcaugg

SEQ ID NO: 17345 - RNA, 20 nt, Artificial Sequence
  spacer sequence CTCN PAM
cagggaccaugccaacccac

SEQ ID NO: 17346 - RNA, 20 nt, Artificial Sequence
  spacer sequence CTCN PAM
ggacgugguccucuccaguc

SEQ ID NO: 17347 - RNA, 20 nt, Artificial Sequence
  spacer sequence CTCN PAM
ccagucucaggucgggggag

SEQ ID NO: 17348 - RNA, 20 nt, Artificial Sequence
  spacer sequence CTCN PAM
agucucaggucgggggagga

SEQ ID NO: 17349 - RNA, 20 nt, Artificial Sequence
  spacer sequence CTCN PAM
ggucgggggaggaggaggca

SEQ ID NO: 17350 - RNA, 20 nt, Artificial Sequence
  spacer sequence CTCN PAM
cccgaccugagacuggagag

SEQ ID NO: 17351 - RNA, 20 nt, Artificial Sequence
  spacer sequence CTCN PAM
ucccccgaccugagacugga

SEQ ID NO: 17352 - RNA, 20 nt, Artificial Sequence
  spacer sequence CTCN PAM
uccucccccgaccugagacu

SEQ ID NO: 17353 - RNA, 20 nt, Artificial Sequence
  spacer sequence CTCN PAM
ggggcccccaagggcugggc

SEQ ID NO: 17354 - RNA, 20 nt, Artificial Sequence
  spacer sequence CTCN PAM
ucaggggcccccaagggcug

SEQ ID NO: 17355 - RNA, 20 nt, Artificial Sequence
  spacer sequence CTCN PAM
uccucaggggcccccaaggg

SEQ ID NO: 17356 - RNA, 20 nt, Artificial Sequence
  spacer sequence CTCN PAM
agucacugccucugggugga

SEQ ID NO: 17357 - RNA, 20 nt, Artificial Sequence
  spacer sequence CTCN PAM
ggguggaugaguuugcaccc

SEQ ID NO: 17358 - RNA, 20 nt, Artificial Sequence
  spacer sequence CTCN PAM
uccacccagaggcagugacu

SEQ ID NO: 17359 - RNA, 20 nt, Artificial Sequence
  spacer sequence CTCN PAM
guguaguggcggggugcaaa

SEQ ID NO: 17360 - RNA, 20 nt, Artificial Sequence
  spacer sequence CTCN PAM
gugaugacgugaggucuugu

SEQ ID NO: 17361 - RNA, 20 nt, Artificial Sequence
  spacer sequence CTCN PAM
cgucaucacugagcagcucc

SEQ ID NO: 17362 - RNA, 20 nt, Artificial Sequence
  spacer sequence CTCN PAM
cucaaguguggcuggcuucc

SEQ ID NO: 17363 - RNA, 20 nt, Artificial Sequence
  spacer sequence CTCN PAM
aguguggcuggcuuccucug

SEQ ID NO: 17364 - RNA, 20 nt, Artificial Sequence
  spacer sequence CTCN PAM
guucccaagauggaagaacc

SEQ ID NO: 17365 - RNA, 20 nt, Artificial Sequence
  spacer sequence CTCN PAM
gagacggagugggcucuggu

SEQ ID NO: 17366 - RNA, 20 nt, Artificial Sequence
  spacer sequence CTCN PAM
gaggcccaguggauuggcug

SEQ ID NO: 17367 - RNA, 20 nt, Artificial Sequence
  spacer sequence CTCN PAM
gucuccgaggcccaguggau

SEQ ID NO: 17368 - RNA, 20 nt, Artificial Sequence
  spacer sequence CTCN PAM
gguuugcccuuuugaguugu

SEQ ID NO: 17369 - RNA, 20 nt, Artificial Sequence
  spacer sequence CTCN PAM
aaagggcaaaccagagccca

SEQ ID NO: 17370 - RNA, 20 nt, Artificial Sequence
  spacer sequence CTCN PAM
guucaccaccuacaacucaa

SEQ ID NO: 17371 - RNA, 20 nt, Artificial Sequence
  spacer sequence CTCN PAM
caggucacaggggaccagua

SEQ ID NO: 17372 - RNA, 20 nt, Artificial Sequence
  spacer sequence CTCN PAM
guucccuuuccuaccuucac

SEQ ID NO: 17373 - RNA, 20 nt, Artificial Sequence
  spacer sequence CTCN PAM
agugucagcugcugugaagg

SEQ ID NO: 17374 - RNA, 20 nt, Artificial Sequence
  spacer sequence CTCN PAM
ccaggggcacuccaguguca

SEQ ID NO: 17375 - RNA, 20 nt, Artificial Sequence
  spacer sequence CTCN PAM
cagauggguuguggccagag

SEQ ID NO: 17376 - RNA, 20 nt, Artificial Sequence
  spacer sequence CTCN PAM
ggccacaacccaucugggag

SEQ ID NO: 17377 - RNA, 20 nt, Artificial Sequence
  spacer sequence CTCN PAM
acccccacggcucuggccac

SEQ ID NO: 17378 - RNA, 20 nt, Artificial Sequence
  spacer sequence CTCN PAM
caccaggggcuccaccccca

SEQ ID NO: 17379 - RNA, 20 nt, Artificial Sequence
  spacer sequence CTCN PAM
cuggcaggaagacgggggug

SEQ ID NO: 17380 - RNA, 20 nt, Artificial Sequence
  spacer sequence CTCN PAM
ugguggcagguggacugucc

SEQ ID NO: 17381 - RNA, 20 nt, Artificial Sequence
  spacer sequence CTCN PAM
aggcacggacaguccaccug

SEQ ID NO: 17382 - RNA, 20 nt, Artificial Sequence
  spacer sequence CTCN PAM
ggcugugcuucccuucccgu

SEQ ID NO: 17383 - RNA, 20 nt, Artificial Sequence
  spacer sequence CTCN PAM
aguggcugaaguugugggac

SEQ ID NO: 17384 - RNA, 20 nt, Artificial Sequence
  spacer sequence CTCN PAM
uggccaaacaccaccagguc

SEQ ID NO: 17385 - RNA, 20 nt, Artificial Sequence
  spacer sequence CTCN PAM
cguggccaaacaccaccagg

SEQ ID NO: 17386 - RNA, 20 nt, Artificial Sequence
  spacer sequence CTCN PAM
acacugggccugggcuuccg

SEQ ID NO: 17387 - RNA, 20 nt, Artificial Sequence
  spacer sequence CTCN PAM
uugcugacccgggccggcuc

SEQ ID NO: 17388 - RNA, 20 nt, Artificial Sequence
  spacer sequence CTCN PAM
uccacuugccuggggcugug

SEQ ID NO: 17389 - RNA, 20 nt, Artificial Sequence
  spacer sequence CTCN PAM
agcaccuguucguggcucuu

SEQ ID NO: 17390 - RNA, 20 nt, Artificial Sequence
  spacer sequence CTCN PAM
uccagcaccuguucguggcu

SEQ ID NO: 17391 - RNA, 20 nt, Artificial Sequence
  spacer sequence CTCN PAM
agcaucuccuccagcaccug

SEQ ID NO: 17392 - RNA, 20 nt, Artificial Sequence
  spacer sequence CTCN PAM
gguccagcccagccuccagc

SEQ ID NO: 17393 - RNA, 20 nt, Artificial Sequence
  spacer sequence CTCN PAM
ccuucugcuucggucgcugg

SEQ ID NO: 17394 - RNA, 20 nt, Artificial Sequence
  spacer sequence CTCN PAM
ggcuuguucccggcggcaca

SEQ ID NO: 17395 - RNA, 20 nt, Artificial Sequence
  spacer sequence CTCN PAM
gcgccggcacccuugcagcc

SEQ ID NO: 17396 - RNA, 20 nt, Artificial Sequence
  spacer sequence CTCN PAM
aggagccgugggugugguga

SEQ ID NO: 17397 - RNA, 20 nt, Artificial Sequence
  spacer sequence CTCN PAM
uggagaaagucaacaggcug

SEQ ID NO: 17398 - RNA, 20 nt, Artificial Sequence
  spacer sequence CTCN PAM
cgcuaauggcgcuucacgcc

SEQ ID NO: 17399 - RNA, 20 nt, Artificial Sequence
  spacer sequence CTCN PAM
aguucuaacucacgcuaaug

SEQ ID NO: 17400 - RNA, 20 nt, Artificial Sequence
  spacer sequence CTCN PAM
ggggaagucguugucccuga

SEQ ID NO: 17401 - RNA, 20 nt, Artificial Sequence
  spacer sequence CTCN PAM
gcggcuggccaggaugaucu

SEQ ID NO: 17402 - RNA, 20 nt, Artificial Sequence
  spacer sequence CTCN PAM
auuuuguucuuauuugaugg

SEQ ID NO: 17403 - RNA, 20 nt, Artificial Sequence
  spacer sequence CTCN PAM
agccaucaaauaagaacaaa

SEQ ID NO: 17404 - RNA, 20 nt, Artificial Sequence
  spacer sequence CTCN PAM
accccacuccagccaucaaa

SEQ ID NO: 17405 - RNA, 20 nt, Artificial Sequence
  spacer sequence CTCN PAM
cuccaccccacuccagccau

SEQ ID NO: 17406 - RNA, 20 nt, Artificial Sequence
  spacer sequence CTCN PAM
cggccuagcagccagggacu

SEQ ID NO: 17407 - RNA, 20 nt, Artificial Sequence
  spacer sequence CTCN PAM
gugggcccccggggcugggg

SEQ ID NO: 17408 - RNA, 20 nt, Artificial Sequence
  spacer sequence CTCN PAM
gugguggagaugaacgccag

SEQ ID NO: 17409 - RNA, 20 nt, Artificial Sequence
  spacer sequence CTCN PAM
accacagaguaccccgcgug

SEQ ID NO: 17410 - RNA, 20 nt, Artificial Sequence
  spacer sequence CTCN PAM
ccuggcguucaucuccacca

SEQ ID NO: 17411 - RNA, 20 nt, Artificial Sequence
  spacer sequence CTCN PAM
caucacucaccuggcguuca

SEQ ID NO: 17412 - RNA, 20 nt, Artificial Sequence
  spacer sequence CTCN PAM
ggcucgccuucuguccugac

SEQ ID NO: 17413 - RNA, 20 nt, Artificial Sequence
  spacer sequence CTCN PAM
ccuucuguccugacguguuu

SEQ ID NO: 17414 - RNA, 20 nt, Artificial Sequence
  spacer sequence CTCN PAM
aacacgucaggacagaaggc

SEQ ID NO: 17415 - RNA, 20 nt, Artificial Sequence
  spacer sequence CTCN PAM
agacgggaacauccacaccc

SEQ ID NO: 17416 - RNA, 20 nt, Artificial Sequence
  spacer sequence CTCN PAM
ggguucacgggaucggcagc

SEQ ID NO: 17417 - RNA, 20 nt, Artificial Sequence
  spacer sequence CTCN PAM
acgcaaaugcggcagccccg

SEQ ID NO: 17418 - RNA, 20 nt, Artificial Sequence
  spacer sequence CTCN PAM
caaggccggggcugccgcau

SEQ ID NO: 17419 - RNA, 20 nt, Artificial Sequence
  spacer sequence CTCN PAM
ccauugcagugacgaccgua

SEQ ID NO: 17420 - RNA, 20 nt, Artificial Sequence
  spacer sequence CTCN PAM
gggcuacggucgucacugca

SEQ ID NO: 17421 - RNA, 20 nt, Artificial Sequence
  spacer sequence CTCN PAM
augcgugugcggaagaccuc

SEQ ID NO: 17422 - RNA, 20 nt, Artificial Sequence
  spacer sequence CTCN PAM
aucuggguggccgccucgau

SEQ ID NO: 17423 - RNA, 20 nt, Artificial Sequence
  spacer sequence CTCN PAM
ucgaugaccaggcaguuggg

SEQ ID NO: 17424 - RNA, 20 nt, Artificial Sequence
  spacer sequence CTCN PAM
uugaugccuggguagguggg

SEQ ID NO: 17425 - RNA, 20 nt, Artificial Sequence
  spacer sequence CTCN PAM
ccguguccucugaccucccc

SEQ ID NO: 17426 - RNA, 20 nt, Artificial Sequence
  spacer sequence CTCN PAM
gaccucccccaaggccgcca

SEQ ID NO: 17427 - RNA, 20 nt, Artificial Sequence
  spacer sequence CTCN PAM
cccaaggccgccaucaacgu

SEQ ID NO: 17428 - RNA, 20 nt, Artificial Sequence
  spacer sequence CTCN PAM
ugagcauccugaaccgcaag

SEQ ID NO: 17429 - RNA, 20 nt, Artificial Sequence
  spacer sequence CTCN PAM
ggaggacguugauggcggcc

SEQ ID NO: 17430 - RNA, 20 nt, Artificial Sequence
  spacer sequence CTCN PAM
uguggccccuugcgguucag

SEQ ID NO: 17431 - RNA, 20 nt, Artificial Sequence
  spacer sequence CTCN PAM
cgaaggcacagccgggcccu

SEQ ID NO: 17432 - RNA, 20 nt, Artificial Sequence
  spacer sequence CTCN PAM
gcccggcgccgucggccgcc

SEQ ID NO: 17433 - RNA, 20 nt, Artificial Sequence
  spacer sequence CTCN PAM
ucaugaggcccauuaucugc

SEQ ID NO: 17434 - RNA, 20 nt, Artificial Sequence
  spacer sequence CTCN PAM
ugaggcccauuaucugcauu

SEQ ID NO: 17435 - RNA, 20 nt, Artificial Sequence
  spacer sequence CTCN PAM
ugaggagcccccccucugcc

SEQ ID NO: 17436 - RNA, 20 nt, Artificial Sequence
  spacer sequence CTCN PAM
cuggucauugcaaaugcaga

SEQ ID NO: 17437 - RNA, 20 nt, Artificial Sequence
  spacer sequence CTCN PAM
ugacuguggcgcccgcccau

SEQ ID NO: 17438 - RNA, 20 nt, Artificial Sequence
  spacer sequence CTCN PAM
ccugacuguggcgcccgccc

SEQ ID NO: 17439 - RNA, 20 nt, Artificial Sequence
  spacer sequence CTCN PAM
ggugccuggagggaggguuc

SEQ ID NO: 17440 - RNA, 20 nt, Artificial Sequence
  spacer sequence CTCN PAM
aggcaccagagccucuccug

SEQ ID NO: 17441 - RNA, 20 nt, Artificial Sequence
  spacer sequence CTCN PAM
cuccaggcaccagagccucu

SEQ ID NO: 17442 - RNA, 20 nt, Artificial Sequence
  spacer sequence CTCN PAM
ccucagguucgcaccguccc

SEQ ID NO: 17443 - RNA, 20 nt, Artificial Sequence
  spacer sequence CTCN PAM
ucagguucgcaccgucccug

SEQ ID NO: 17444 - RNA, 20 nt, Artificial Sequence
  spacer sequence CTCN PAM
gguucgcaccgucccugcgg

SEQ ID NO: 17445 - RNA, 20 nt, Artificial Sequence
  spacer sequence CTCN PAM
acuucccgccgacucugccc

SEQ ID NO: 17446 - RNA, 20 nt, Artificial Sequence
  spacer sequence CTCN PAM
gcccucgaggcuggugcagc

SEQ ID NO: 17447 - RNA, 20 nt, Artificial Sequence
  spacer sequence CTCN PAM
aggcuggugcagcggcucca

SEQ ID NO: 17448 - RNA, 20 nt, Artificial Sequence
  spacer sequence CTCN PAM
agggcagagucggcgggaag

SEQ ID NO: 17449 - RNA, 20 nt, Artificial Sequence
  spacer sequence CTCN PAM
aggaggucgguggagcccca

SEQ ID NO: 17450 - RNA, 20 nt, Artificial Sequence
  spacer sequence CTCN PAM
uggagccgcugcaccagccu

SEQ ID NO: 17451 - RNA, 20 nt, Artificial Sequence
  spacer sequence CTCN PAM
accgaccuccuggagccgcu

SEQ ID NO: 17452 - RNA, 20 nt, Artificial Sequence
  spacer sequence CTCN PAM
uggggcuccaccgaccuccu

SEQ ID NO: 17453 - RNA, 20 nt, Artificial Sequence
  spacer sequence CTCN PAM
uucuggccccuguuucccug

SEQ ID NO: 17454 - RNA, 20 nt, Artificial Sequence
  spacer sequence CTCN PAM
ccauggaacccugguaaccc

SEQ ID NO: 17455 - RNA, 20 nt, Artificial Sequence
  spacer sequence CTCN PAM
agcagcccuucuccaccagg

SEQ ID NO: 17456 - RNA, 20 nt, Artificial Sequence
  spacer sequence CTCN PAM
accaggucucccugcggcag

SEQ ID NO: 17457 - RNA, 20 nt, Artificial Sequence
  spacer sequence CTCN PAM
cugcggcagggcaugagggc

SEQ ID NO: 17458 - RNA, 20 nt, Artificial Sequence
  spacer sequence CTCN PAM
ugcccugccgcagggagacc

SEQ ID NO: 17459 - RNA, 20 nt, Artificial Sequence
  spacer sequence CTCN PAM
gugagaaaacugacaaugac

SEQ ID NO: 17460 - RNA, 20 nt, Artificial Sequence
  spacer sequence CTCN PAM
cagagggcggccagcacccc

SEQ ID NO: 17461 - RNA, 20 nt, Artificial Sequence
  spacer sequence CTCN PAM
ugaccccaccccaccccacc

SEQ ID NO: 17462 - RNA, 20 nt, Artificial Sequence
  spacer sequence CTCN PAM
ugcccccgcccuaugucuag

SEQ ID NO: 17463 - RNA, 20 nt, Artificial Sequence
  spacer sequence CTCN PAM
cgcuggccccggcuguacag

SEQ ID NO: 17464 - RNA, 20 nt, Artificial Sequence
  spacer sequence CTCN PAM
gcucccgcuggccccggcug

SEQ ID NO: 17465 - RNA, 20 nt, Artificial Sequence
  spacer sequence CTCN PAM
aggaccagcgcagagggcuc

SEQ ID NO: 17466 - RNA, 20 nt, Artificial Sequence
  spacer sequence CTCN PAM
gcgcugguccuugaggccca

SEQ ID NO: 17467 - RNA, 20 nt, Artificial Sequence
  spacer sequence CTCN PAM
ucucgguguggcaggagguc

SEQ ID NO: 17468 - RNA, 20 nt, Artificial Sequence
  spacer sequence CTCN PAM
guguggcaggaggucuucca

SEQ ID NO: 17469 - RNA, 20 nt, Artificial Sequence
  spacer sequence CTCN PAM
ugccacaccgagaagagccc

SEQ ID NO: 17470 - RNA, 20 nt, Artificial Sequence
  spacer sequence CTCN PAM
agcccagagguaggcggugg

SEQ ID NO: 17471 - RNA, 20 nt, Artificial Sequence
  spacer sequence CTCN PAM
aggcagcuggaagaccuccu

SEQ ID NO: 17472 - RNA, 20 nt, Artificial Sequence
  spacer sequence CTCN PAM
gggcucgaggcagcuggaag

SEQ ID NO: 17473 - RNA, 20 nt, Artificial Sequence
  spacer sequence CTCN PAM
gcccagaugcucacggugcc

SEQ ID NO: 17474 - RNA, 20 nt, Artificial Sequence
  spacer sequence CTCN PAM
cggugcccggaccucaggac

SEQ ID NO: 17475 - RNA, 20 nt, Artificial Sequence
  spacer sequence CTCN PAM
ggacgcuagcccugugugca

SEQ ID NO: 17476 - RNA, 20 nt, Artificial Sequence
  spacer sequence CTCN PAM
aagguagugcuggccugcac

SEQ ID NO: 17477 - RNA, 20 nt, Artificial Sequence
  spacer sequence CTCN PAM
guguccugagcccgcgguug

SEQ ID NO: 17478 - RNA, 20 nt, Artificial Sequence
  spacer sequence CTCN PAM
ggacacugaguccccgccuc

SEQ ID NO: 17479 - RNA, 20 nt, Artificial Sequence
  spacer sequence CTCN PAM
agggcccuccucagccuuuu

SEQ ID NO: 17480 - RNA, 20 nt, Artificial Sequence
  spacer sequence CTCN PAM
ucagccuuuuccuggcuugu

SEQ ID NO: 17481 - RNA, 20 nt, Artificial Sequence
  spacer sequence CTCN PAM
gccuuuuccuggcuuguucu

SEQ ID NO: 17482 - RNA, 20 nt, Artificial Sequence
  spacer sequence CTCN PAM
ccccuacagccuuggggggu

SEQ ID NO: 17483 - RNA, 20 nt, Artificial Sequence
  spacer sequence CTCN PAM
agcugaccccccaaggcugu

SEQ ID NO: 17484 - RNA, 20 nt, Artificial Sequence
  spacer sequence CTCN PAM
agggcccccugugggaagga

SEQ ID NO: 17485 - RNA, 20 nt, Artificial Sequence
  spacer sequence CTCN PAM
agggcgucccucuccagggc

SEQ ID NO: 17486 - RNA, 20 nt, Artificial Sequence
  spacer sequence CTCN PAM
ccagggcgccccuugacuca

SEQ ID NO: 17487 - RNA, 20 nt, Artificial Sequence
  spacer sequence CTCN PAM
agggcgccccuugacucagc

SEQ ID NO: 17488 - RNA, 20 nt, Artificial Sequence
  spacer sequence CTCN PAM
gcugcugucccaguugcacc

SEQ ID NO: 17489 - RNA, 20 nt, Artificial Sequence
  spacer sequence CTCN PAM
uuuuugccacauuuggccug

SEQ ID NO: 17490 - RNA, 20 nt, Artificial Sequence
  spacer sequence CTCN PAM
gagccccugccugcccacac

SEQ ID NO: 17491 - RNA, 20 nt, Artificial Sequence
  spacer sequence CTCN PAM
gagaccacagcccaggccaa

SEQ ID NO: 17492 - RNA, 20 nt, Artificial Sequence
  spacer sequence CTCN PAM
cgugggcaggagcagccagc

SEQ ID NO: 17493 - RNA, 20 nt, Artificial Sequence
  spacer sequence CTCN PAM
ugcccacgggaggccaagca

SEQ ID NO: 17494 - RNA, 20 nt, Artificial Sequence
  spacer sequence CTCN PAM
guccugacgugccaugggac

SEQ ID NO: 17495 - RNA, 20 nt, Artificial Sequence
  spacer sequence CTCN PAM
cauauccugcagcacgacca

SEQ ID NO: 17496 - RNA, 20 nt, Artificial Sequence
  spacer sequence CTCN PAM
uggccuggacccggaggggg

SEQ ID NO: 17497 - RNA, 20 nt, Artificial Sequence
  spacer sequence CTCN PAM
ggguccaggccaggagcagc

SEQ ID NO: 17498 - RNA, 20 nt, Artificial Sequence
  spacer sequence CTCN PAM
gggguuaggggaccccaggg

SEQ ID NO: 17499 - RNA, 20 nt, Artificial Sequence
  spacer sequence CTCN PAM
ucucagaguggggcuccucg

SEQ ID NO: 17500 - RNA, 20 nt, Artificial Sequence
  spacer sequence CTCN PAM
cagaguggggcuccucggcu

SEQ ID NO: 17501 - RNA, 20 nt, Artificial Sequence
  spacer sequence CTCN PAM
gaguggggcuccucggcuua

SEQ ID NO: 17502 - RNA, 20 nt, Artificial Sequence
  spacer sequence CTCN PAM
gagaggagcccugcccugac

SEQ ID NO: 17503 - RNA, 20 nt, Artificial Sequence
  spacer sequence CTCN PAM
ucggcuuaagggaauguuuc

SEQ ID NO: 17504 - RNA, 20 nt, Artificial Sequence
  spacer sequence CTCN PAM
gcuuaagggaauguuucagg

SEQ ID NO: 17505 - RNA, 20 nt, Artificial Sequence
  spacer sequence CTCN PAM
acccccugaaacauucccuu

SEQ ID NO: 17506 - RNA, 20 nt, Artificial Sequence
  spacer sequence CTCN PAM
accugagcgaggcagcaagg

SEQ ID NO: 17507 - RNA, 20 nt, Artificial Sequence
  spacer sequence CTCN PAM
gguggagacagccaaagaca

SEQ ID NO: 17508 - RNA, 20 nt, Artificial Sequence
  spacer sequence CTCN PAM
cucagguggagacagccaaa

SEQ ID NO: 17509 - RNA, 20 nt, Artificial Sequence
  spacer sequence CTCN PAM
gcagggcccuugcugccucg

SEQ ID NO: 17510 - RNA, 20 nt, Artificial Sequence
  spacer sequence CTCN PAM
gauggggccucugagugucc

SEQ ID NO: 17511 - RNA, 20 nt, Artificial Sequence
  spacer sequence CTCN PAM
gagugucccggggagacggg

SEQ ID NO: 17512 - RNA, 20 nt, Artificial Sequence
  spacer sequence CTCN PAM
gaggccccaucagagcugcc

SEQ ID NO: 17513 - RNA, 20 nt, Artificial Sequence
  spacer sequence CTCN PAM
ccgggacacucagaggcccc

SEQ ID NO: 17514 - RNA, 20 nt, Artificial Sequence
  spacer sequence CTCN PAM
ugcugggugacggggacgcg

SEQ ID NO: 17515 - RNA, 20 nt, Artificial Sequence
  spacer sequence CTCN PAM
cucaccuccgccucacagcg

SEQ ID NO: 17516 - RNA, 20 nt, Artificial Sequence
  spacer sequence CTCN PAM
ccuccgccucacagcgauuc

SEQ ID NO: 17517 - RNA, 20 nt, Artificial Sequence
  spacer sequence CTCN PAM
gccucacagcgauucuaccg

SEQ ID NO: 17518 - RNA, 20 nt, Artificial Sequence
  spacer sequence CTCN PAM
cagcgauucuaccguguccu

SEQ ID NO: 17519 - RNA, 20 nt, Artificial Sequence
  spacer sequence CTCN PAM
gcgggcgagcacgagaaggu

SEQ ID NO: 17520 - RNA, 20 nt, Artificial Sequence
  spacer sequence CTCN PAM
cccgcagaggcagcggcaug

SEQ ID NO: 17521 - RNA, 20 nt, Artificial Sequence
  spacer sequence CTCN PAM
ugcucgcccgcagaggcagc

SEQ ID NO: 17522 - RNA, 20 nt, Artificial Sequence
  spacer sequence CTCN PAM
cguauggacggggaggcgcu

SEQ ID NO: 17523 - RNA, 20 nt, Artificial Sequence
  spacer sequence CTCN PAM
ccguccauacgggaggaccg

SEQ ID NO: 17524 - RNA, 20 nt, Artificial Sequence
  spacer sequence CTCN PAM
gcacccccaaagcgccuccc

SEQ ID NO: 17525 - RNA, 20 nt, Artificial Sequence
  spacer sequence CTCN PAM
cagcacccccaaagcgccuc

SEQ ID NO: 17526 - RNA, 20 nt, Artificial Sequence
  spacer sequence CTCN PAM
cucagcacccccaaagcgcc

SEQ ID NO: 17527 - RNA, 20 nt, Artificial Sequence
  spacer sequence CTCN PAM
gagguggggagcaggagcca

SEQ ID NO: 17528 - RNA, 20 nt, Artificial Sequence
  spacer sequence CTCN PAM
gagacuuccuggcaccccau

SEQ ID NO: 17529 - RNA, 20 nt, Artificial Sequence
  spacer sequence CTCN PAM
ccaccucagagacuuccugg

SEQ ID NO: 17530 - RNA, 20 nt, Artificial Sequence
  spacer sequence CTCN PAM
ugcuccccaccucagagacu

SEQ ID NO: 17531 - RNA, 20 nt, Artificial Sequence
  spacer sequence CTCN PAM
uggcuccugcuccccaccuc

SEQ ID NO: 17532 - RNA, 20 nt, Artificial Sequence
  spacer sequence CTCN PAM
cacccuccuggcuccugcuc

SEQ ID NO: 17533 - RNA, 20 nt, Artificial Sequence
  spacer sequence CTCN PAM
uugccugccggcccgugccc

SEQ ID NO: 17534 - RNA, 20 nt, Artificial Sequence
  spacer sequence CTCN PAM
cccgucagacggccgccccu

SEQ ID NO: 17535 - RNA, 20 nt, Artificial Sequence
  spacer sequence CTCN PAM
gguggcugcuugggacucuc

SEQ ID NO: 17536 - RNA, 20 nt, Artificial Sequence
  spacer sequence CTCN PAM
cagcggguugggguggagcc

SEQ ID NO: 17537 - RNA, 20 nt, Artificial Sequence
  spacer sequence CTCN PAM
gcggguugggguggagcccc

SEQ ID NO: 17538 - RNA, 20 nt, Artificial Sequence
  spacer sequence CTCN PAM
accccaacccgcugagaguc

SEQ ID NO: 17539 - RNA, 20 nt, Artificial Sequence
  spacer sequence CTCN PAM
cagccccaggccaggcuguc

SEQ ID NO: 17540 - RNA, 20 nt, Artificial Sequence
  spacer sequence CTCN PAM
accccaugugcaucuuaagu

SEQ ID NO: 17541 - RNA, 20 nt, Artificial Sequence
  spacer sequence CTCN PAM
ccaccccaugugcaucuuaa

SEQ ID NO: 17542 - RNA, 20 nt, Artificial Sequence
  spacer sequence CTCN PAM
ccgcacugcucuccacccca

SEQ ID NO: 17543 - RNA, 20 nt, Artificial Sequence
  spacer sequence CTCN PAM
cgcgggcagggcggcaggaa

SEQ ID NO: 17544 - RNA, 20 nt, Artificial Sequence
  spacer sequence CTCN PAM
aagcggcuuuggauuagcag

SEQ ID NO: 17545 - RNA, 20 nt, Artificial Sequence
  spacer sequence CTCN PAM
acaucgcggcuuuugggauu

SEQ ID NO: 17546 - RNA, 20 nt, Artificial Sequence
  spacer sequence CTCN PAM
acgcugccccuccacaucgc

SEQ ID NO: 17547 - RNA, 20 nt, Artificial Sequence
  spacer sequence CTCN PAM
cccacggaacaggggugggg

SEQ ID NO: 17548 - RNA, 20 nt, Artificial Sequence
  spacer sequence CTCN PAM
ggugggcggaacuuccucag

SEQ ID NO: 17549 - RNA, 20 nt, Artificial Sequence
  spacer sequence CTCN PAM
ggcagucuaaggaggggcug

SEQ ID NO: 17550 - RNA, 20 nt, Artificial Sequence
  spacer sequence CTCN PAM
uuagacugccugaggaaguu

SEQ ID NO: 17551 - RNA, 20 nt, Artificial Sequence
  spacer sequence CTCN PAM
gccccuccuuagacugccug

SEQ ID NO: 17552 - RNA, 20 nt, Artificial Sequence
  spacer sequence CTCN PAM
cucagccccuccuuagacug

SEQ ID NO: 17553 - RNA, 20 nt, Artificial Sequence
  spacer sequence CTCN PAM
aggaaccaaagggauccagc

SEQ ID NO: 17554 - RNA, 20 nt, Artificial Sequence
  spacer sequence CTCN PAM
uggugggucacccccucgug

SEQ ID NO: 17555 - RNA, 20 nt, Artificial Sequence
  spacer sequence CTCN PAM
ugucagucucugucaaguca

SEQ ID NO: 17556 - RNA, 20 nt, Artificial Sequence
  spacer sequence CTCN PAM
gucaagucagucucugucaa

SEQ ID NO: 17557 - RNA, 20 nt, Artificial Sequence
  spacer sequence CTCN PAM
gucaagcuguagcgaggaug

SEQ ID NO: 17558 - RNA, 20 nt, Artificial Sequence
  spacer sequence CTCN PAM
cuacagcuugacagagacug

SEQ ID NO: 17559 - RNA, 20 nt, Artificial Sequence
  spacer sequence CTCN PAM
ggguggacccucccccgacc

SEQ ID NO: 17560 - RNA, 20 nt, Artificial Sequence
  spacer sequence CTCN PAM
cccgaccccuugggcccagu

SEQ ID NO: 17561 - RNA, 20 nt, Artificial Sequence
  spacer sequence CTCN PAM
gacgcccagcgucgugggga

SEQ ID NO: 17562 - RNA, 20 nt, Artificial Sequence
  spacer sequence CTCN PAM
acaaggguccccacgacgcu

SEQ ID NO: 17563 - RNA, 20 nt, Artificial Sequence
  spacer sequence CTCN PAM
uggggcaggcggcaggcagg

SEQ ID NO: 17564 - RNA, 20 nt, Artificial Sequence
  spacer sequence CTCN PAM
ugccugccgccugccccacg

SEQ ID NO: 17565 - RNA, 20 nt, Artificial Sequence
  spacer sequence CTCN PAM
acuccugccugccgccugcc

SEQ ID NO: 17566 - RNA, 20 nt, Artificial Sequence
  spacer sequence CTCN PAM
cgccacagacccuccacucc

SEQ ID NO: 17567 - RNA, 20 nt, Artificial Sequence
  spacer sequence CTCN PAM
accucccgccacagacccuc

SEQ ID NO: 17568 - RNA, 20 nt, Artificial Sequence
  spacer sequence CTCN PAM
ugcccaccccagggaaggug

SEQ ID NO: 17569 - RNA, 20 nt, Artificial Sequence
  spacer sequence CTCN PAM
gggguugccggccgccugca

SEQ ID NO: 17570 - RNA, 20 nt, Artificial Sequence
  spacer sequence CTCN PAM
cagccgcagacgcaggaagu

SEQ ID NO: 17571 - RNA, 20 nt, Artificial Sequence
  spacer sequence CTCN PAM
agccugggugcugugugugu

SEQ ID NO: 17572 - RNA, 20 nt, Artificial Sequence
  spacer sequence CTCN PAM
acuggcuggccuucgaugac

SEQ ID NO: 17573 - RNA, 20 nt, Artificial Sequence
  spacer sequence CTCN PAM
ucacagccagagcuuccagc

SEQ ID NO: 17574 - RNA, 20 nt, Artificial Sequence
  spacer sequence CTCN PAM
ggcugugaugagcagccccc

SEQ ID NO: 17575 - RNA, 20 nt, Artificial Sequence
  spacer sequence CTCN PAM
ugcuggcugcuggggaaggu

SEQ ID NO: 17576 - RNA, 20 nt, Artificial Sequence
  spacer sequence CTCN PAM
ucccugcaccacgccugccc

SEQ ID NO: 17577 - RNA, 20 nt, Artificial Sequence
  spacer sequence CTCN PAM
cccgggaggcccaggugacc

SEQ ID NO: 17578 - RNA, 20 nt, Artificial Sequence
  spacer sequence CTCN PAM
cgggcgaggggggaauggug

SEQ ID NO: 17579 - RNA, 20 nt, Artificial Sequence
  spacer sequence CTCN PAM
cccccugccccaggcccaga

SEQ ID NO: 17580 - RNA, 20 nt, Artificial Sequence
  spacer sequence CTCN PAM
uccgguucugggccuggggc

SEQ ID NO: 17581 - RNA, 20 nt, Artificial Sequence
  spacer sequence CTCN PAM
ucuggcucauccgguucugg

SEQ ID NO: 17582 - RNA, 20 nt, Artificial Sequence
  spacer sequence CTCN PAM
ucgaugcccucugccugcuc

SEQ ID NO: 17583 - RNA, 20 nt, Artificial Sequence
  spacer sequence CTCN PAM
augcccucugccugcuccug

SEQ ID NO: 17584 - RNA, 20 nt, Artificial Sequence
  spacer sequence CTCN PAM
gccugcuccuggacauucuu

SEQ ID NO: 17585 - RNA, 20 nt, Artificial Sequence
  spacer sequence CTCN PAM
uggacauucuugcacccaag

SEQ ID NO: 17586 - RNA, 20 nt, Artificial Sequence
  spacer sequence CTCN PAM
gccccgugagugccgucccc

SEQ ID NO: 17587 - RNA, 20 nt, Artificial Sequence
  spacer sequence CTCN PAM
cggggcggagcuugggugca

SEQ ID NO: 17588 - RNA, 20 nt, Artificial Sequence
  spacer sequence CTCN PAM
uguccuaggugagcacacau

SEQ ID NO: 17589 - RNA, 20 nt, Artificial Sequence
  spacer sequence CTCN PAM
ccuaggacaggagggcagca

SEQ ID NO: 17590 - RNA, 20 nt, Artificial Sequence
  spacer sequence CTCN PAM
gcucccugucugcugccucc

SEQ ID NO: 17591 - RNA, 20 nt, Artificial Sequence
  spacer sequence CTCN PAM
cugucugcugccucccaucc

SEQ ID NO: 17592 - RNA, 20 nt, Artificial Sequence
  spacer sequence CTCN PAM
cauccccuaggugagcacac

SEQ ID NO: 17593 - RNA, 20 nt, Artificial Sequence
  spacer sequence CTCN PAM
ccuaggggaugggaggcagc

SEQ ID NO: 17594 - RNA, 20 nt, Artificial Sequence
  spacer sequence CTCN PAM
cuuacagccugaccuaccgc

SEQ ID NO: 17595 - RNA, 20 nt, Artificial Sequence
  spacer sequence CTCN PAM
uggcgguaggucaggcugua

SEQ ID NO: 17596 - RNA, 20 nt, Artificial Sequence
  spacer sequence CTCN PAM
agccuguagauguacuggcc

SEQ ID NO: 17597 - RNA, 20 nt, Artificial Sequence
  spacer sequence CTCN PAM
cggcuccagccuguagaugu

SEQ ID NO: 17598 - RNA, 20 nt, Artificial Sequence
  spacer sequence CTCN PAM
agggucaugcuccccggcug

SEQ ID NO: 17599 - RNA, 20 nt, Artificial Sequence
  spacer sequence CTCN PAM
ccggcugugcuccauguuca

SEQ ID NO: 17600 - RNA, 20 nt, Artificial Sequence
  spacer sequence CTCN PAM
auguucagggcccgcauggg

SEQ ID NO: 17601 - RNA, 20 nt, Artificial Sequence
  spacer sequence CTCN PAM
uggccccaugcgggcccuga

SEQ ID NO: 17602 - RNA, 20 nt, Artificial Sequence
  spacer sequence CTCN PAM
gauguaaccgugaagggggg

SEQ ID NO: 17603 - RNA, 20 nt, Artificial Sequence
  spacer sequence CTCN PAM
aguagcuggaagugaccccc

SEQ ID NO: 17604 - RNA, 20 nt, Artificial Sequence
  spacer sequence CTCN PAM
gggaccugaguuuugcugca

SEQ ID NO: 17605 - RNA, 20 nt, Artificial Sequence
  spacer sequence CTCN PAM
ggucccagagccaaucucaa

SEQ ID NO: 17606 - RNA, 20 nt, Artificial Sequence
  spacer sequence CTCN PAM
gcagcaaaacucagguccca

SEQ ID NO: 17607 - RNA, 20 nt, Artificial Sequence
  spacer sequence CTCN PAM
cagccuuagcacccccacau

SEQ ID NO: 17608 - RNA, 20 nt, Artificial Sequence
  spacer sequence CTCN PAM
aguuccaugugggggugcua

SEQ ID NO: 17609 - RNA, 20 nt, Artificial Sequence
  spacer sequence CTCN PAM
gggcccccggcuccaguucc

SEQ ID NO: 17610 - RNA, 20 nt, Artificial Sequence
  spacer sequence CTCN PAM
cggggcccccggcuccaguu

SEQ ID NO: 17611 - RNA, 20 nt, Artificial Sequence
  spacer sequence CTCN PAM
guuucccgcugugggauggc

SEQ ID NO: 17612 - RNA, 20 nt, Artificial Sequence
  spacer sequence CTCN PAM
cccccaccacccccauggcc

SEQ ID NO: 17613 - RNA, 20 nt, Artificial Sequence
  spacer sequence CTCN PAM
gcguccugcaaguuggugcc

SEQ ID NO: 17614 - RNA, 20 nt, Artificial Sequence
  spacer sequence CTCN PAM
ccguggcagccaucggcagg

SEQ ID NO: 17615 - RNA, 20 nt, Artificial Sequence
  spacer sequence CTCN PAM
guggcagccaucggcagguu

SEQ ID NO: 17616 - RNA, 20 nt, Artificial Sequence
  spacer sequence CTCN PAM
guuuccccaacugcaagugu

SEQ ID NO: 17617 - RNA, 20 nt, Artificial Sequence
  spacer sequence CTCN PAM
gggcaguuaaaccuggcugc

SEQ ID NO: 17618 - RNA, 20 nt, Artificial Sequence
  spacer sequence CTCN PAM
gccccacauuccugcucugg

SEQ ID NO: 17619 - RNA, 20 nt, Artificial Sequence
  spacer sequence CTCN PAM
ggccuuguggcuuuuggggu

SEQ ID NO: 17620 - RNA, 20 nt, Artificial Sequence
  spacer sequence CTCN PAM
aaccgcaaaccccaaaagcc

SEQ ID NO: 17621 - RNA, 20 nt, Artificial Sequence
  spacer sequence CTCN PAM
cuggcccugagccuggcccc

SEQ ID NO: 17622 - RNA, 20 nt, Artificial Sequence
  spacer sequence CTCN PAM
ggcccugagccuggccccgc

SEQ ID NO: 17623 - RNA, 20 nt, Artificial Sequence
  spacer sequence CTCN PAM
gggccagagagccgccgggc

SEQ ID NO: 17624 - RNA, 20 nt, Artificial Sequence
  spacer sequence CTCN PAM
gcacagggggacaccagggc

SEQ ID NO: 17625 - RNA, 20 nt, Artificial Sequence
  spacer sequence CTCN PAM
acguuccugcucagcacagg

SEQ ID NO: 17626 - RNA, 20 nt, Artificial Sequence
  spacer sequence CTCN PAM
gccgcuucccugagcugccu

SEQ ID NO: 17627 - RNA, 20 nt, Artificial Sequence
  spacer sequence CTCN PAM
gggaagcggcagaguuccuc

SEQ ID NO: 17628 - RNA, 20 nt, Artificial Sequence
  spacer sequence CTCN PAM
ccuaccagacgaagcagcuc

SEQ ID NO: 17629 - RNA, 20 nt, Artificial Sequence
  spacer sequence CTCN PAM
ucgcccgcgagaucgaggug

SEQ ID NO: 17630 - RNA, 20 nt, Artificial Sequence
  spacer sequence CTCN PAM
cgggcgaugagcugcuucgu

SEQ ID NO: 17631 - RNA, 20 nt, Artificial Sequence
  spacer sequence CTCN PAM
aucucgcgggcgaugagcug

SEQ ID NO: 17632 - RNA, 20 nt, Artificial Sequence
  spacer sequence CTCN PAM
accucgaucucgcgggcgau

SEQ ID NO: 17633 - RNA, 20 nt, Artificial Sequence
  spacer sequence CTCN PAM
gcccgccgcaucuucuccac

SEQ ID NO: 17634 - RNA, 20 nt, Artificial Sequence
  spacer sequence CTCN PAM
acccgggcagaagccuccgc

SEQ ID NO: 17635 - RNA, 20 nt, Artificial Sequence
  spacer sequence CTCN PAM
ccugggggcuguucucuacc

SEQ ID NO: 17636 - RNA, 20 nt, Artificial Sequence
  spacer sequence CTCN PAM
ggagcagguugcagucuggg

SEQ ID NO: 17637 - RNA, 20 nt, Artificial Sequence
  spacer sequence CTCN PAM
agagccugggugggcucacc

SEQ ID NO: 17638 - RNA, 20 nt, Artificial Sequence
  spacer sequence CTCN PAM
caaugccugcucccuacagg

SEQ ID NO: 17639 - RNA, 20 nt, Artificial Sequence
  spacer sequence CTCN PAM
cuacagguggaugggagccc

SEQ ID NO: 17640 - RNA, 20 nt, Artificial Sequence
  spacer sequence CTCN PAM
cauccaccuguagggagcag

SEQ ID NO: 17641 - RNA, 20 nt, Artificial Sequence
  spacer sequence CTCN PAM
agggucugcuggggggcauu

SEQ ID NO: 17642 - RNA, 20 nt, Artificial Sequence
  spacer sequence CTCN PAM
agcccuggggggcucccauc

SEQ ID NO: 17643 - RNA, 20 nt, Artificial Sequence
  spacer sequence CTCN PAM
ccaaugccccccagcagacc

SEQ ID NO: 17644 - RNA, 20 nt, Artificial Sequence
  spacer sequence CTCN PAM
ugguugcguggggcaggucg

SEQ ID NO: 17645 - RNA, 20 nt, Artificial Sequence
  spacer sequence CTCN PAM
agccgcugcucaugguugcg

SEQ ID NO: 17646 - RNA, 20 nt, Artificial Sequence
  spacer sequence CTCN PAM
ugaugugcuccagccgcugc

SEQ ID NO: 17647 - RNA, 20 nt, Artificial Sequence
  spacer sequence CTCN PAM
ccucaugaugugcuccagcc

SEQ ID NO: 17648 - RNA, 20 nt, Artificial Sequence
  spacer sequence CTCN PAM
cgggccgcucgccucaugau

SEQ ID NO: 17649 - RNA, 20 nt, Artificial Sequence
  spacer sequence CTCN PAM
ugacugcccuagccacaccc

SEQ ID NO: 17650 - RNA, 20 nt, Artificial Sequence
  spacer sequence CTCN PAM
ugaggcagggccaggguacc

SEQ ID NO: 17651 - RNA, 20 nt, Artificial Sequence
  spacer sequence CTCN PAM
ugaggggcccuagccacacc

SEQ ID NO: 17652 - RNA, 20 nt, Artificial Sequence
  spacer sequence CTCN PAM
ugacugcccuagccacagcc

SEQ ID NO: 17653 - RNA, 20 nt, Artificial Sequence
  spacer sequence CTCN PAM
gccccacccccaaagguacc

SEQ ID NO: 17654 - RNA, 20 nt, Artificial Sequence
  spacer sequence CTCN PAM
uguggcucagccccaccccc

SEQ ID NO: 17655 - RNA, 20 nt, Artificial Sequence
  spacer sequence CTCN PAM
uccuguggcucagccccacc

SEQ ID NO: 17656 - RNA, 20 nt, Artificial Sequence
  spacer sequence CTCN PAM
gccagacuccuccuguggcu

SEQ ID NO: 17657 - RNA, 20 nt, Artificial Sequence
  spacer sequence CTCN PAM
gugcccuaaggggggcucug

SEQ ID NO: 17658 - RNA, 20 nt, Artificial Sequence
  spacer sequence CTCN PAM
gaaggaccagcuccuuaccc

SEQ ID NO: 17659 - RNA, 20 nt, Artificial Sequence
  spacer sequence CTCN PAM
uuacccucagcaugaccagg

SEQ ID NO: 17660 - RNA, 20 nt, Artificial Sequence
  spacer sequence CTCN PAM
gcaugaccaggguucuaccc

SEQ ID NO: 17661 - RNA, 20 nt, Artificial Sequence
  spacer sequence CTCN PAM
guuucccaucugggcagaag

SEQ ID NO: 17662 - RNA, 20 nt, Artificial Sequence
  spacer sequence CTCN PAM
ucugcccagaugggaaacug

SEQ ID NO: 17663 - RNA, 20 nt, Artificial Sequence
  spacer sequence CTCN PAM
ucuugauuggcaccuggugg

SEQ ID NO: 17664 - RNA, 20 nt, Artificial Sequence
  spacer sequence CTCN PAM
ccaccaggugccaaucaaga

SEQ ID NO: 17665 - RNA, 20 nt, Artificial Sequence
  spacer sequence CTCN PAM
cugccaucugcuccccacca

SEQ ID NO: 17666 - RNA, 20 nt, Artificial Sequence
  spacer sequence CTCN PAM
ccccucacugccaucugcuc

SEQ ID NO: 17667 - RNA, 20 nt, Artificial Sequence
  spacer sequence CTCN PAM
gagguguucuggucccuccu

SEQ ID NO: 17668 - RNA, 20 nt, Artificial Sequence
  spacer sequence CTCN PAM
gagacaccuuucggaaccug

SEQ ID NO: 17669 - RNA, 20 nt, Artificial Sequence
  spacer sequence CTCN PAM
ucccugggaaggcucucggu

SEQ ID NO: 17670 - RNA, 20 nt, Artificial Sequence
  spacer sequence CTCN PAM
cugggaaggcucucgguccu

SEQ ID NO: 17671 - RNA, 20 nt, Artificial Sequence
  spacer sequence CTCN PAM
cgguccuccugucuugggua

SEQ ID NO: 17672 - RNA, 20 nt, Artificial Sequence
  spacer sequence CTCN PAM
guccuccugucuuggguagg

SEQ ID NO: 17673 - RNA, 20 nt, Artificial Sequence
  spacer sequence CTCN PAM
ugucuuggguaggggcugga

SEQ ID NO: 17674 - RNA, 20 nt, Artificial Sequence
  spacer sequence CTCN PAM
caucagccugagaaggacuu

SEQ ID NO: 17675 - RNA, 20 nt, Artificial Sequence
  spacer sequence CTCN PAM
ggcugaugggaggaaggacu

SEQ ID NO: 17676 - RNA, 20 nt, Artificial Sequence
  spacer sequence CTCN PAM
ugacgaccacacguccaaag

SEQ ID NO: 17677 - RNA, 20 nt, Artificial Sequence
  spacer sequence CTCN PAM
ggacugcugugcuccugacg

SEQ ID NO: 17678 - RNA, 20 nt, Artificial Sequence
  spacer sequence CTCN PAM
gcuguaaggcccccccacaa

SEQ ID NO: 17679 - RNA, 20 nt, Artificial Sequence
  spacer sequence CTCN PAM
ucagcuguaaggccccccca

SEQ ID NO: 17680 - RNA, 20 nt, Artificial Sequence
  spacer sequence CTCN PAM
ggggccguguccccugcggg

SEQ ID NO: 17681 - RNA, 20 nt, Artificial Sequence
  spacer sequence CTCN PAM
guggagcggcgcaugggcac

SEQ ID NO: 17682 - RNA, 20 nt, Artificial Sequence
  spacer sequence CTCN PAM
acugaguccugcuccggggc

SEQ ID NO: 17683 - RNA, 20 nt, Artificial Sequence
  spacer sequence CTCN PAM
ugcccaccgcugugcccaug

SEQ ID NO: 17684 - RNA, 20 nt, Artificial Sequence
  spacer sequence CTCN PAM
cuccugcccaccgcugugcc

SEQ ID NO: 17685 - RNA, 20 nt, Artificial Sequence
  spacer sequence CTCN PAM
uugaagcggaaccagaccuc

SEQ ID NO: 17686 - RNA, 20 nt, Artificial Sequence
  spacer sequence CTCN PAM
aacgccgugcggcgcagccu

SEQ ID NO: 17687 - RNA, 20 nt, Artificial Sequence
  spacer sequence CTCN PAM
aguucucugagccgcggaca

SEQ ID NO: 17688 - RNA, 20 nt, Artificial Sequence
  spacer sequence CTCN PAM
gagccgcggacaugcccucg

SEQ ID NO: 17689 - RNA, 20 nt, Artificial Sequence
  spacer sequence CTCN PAM
gagaacuagagcaagucccu

SEQ ID NO: 17690 - RNA, 20 nt, Artificial Sequence
  spacer sequence CTCN PAM
cauugcuucccgcagagugc

SEQ ID NO: 17691 - RNA, 20 nt, Artificial Sequence
  spacer sequence CTCN PAM
gcgggaagcaaugcgagggc

SEQ ID NO: 17692 - RNA, 20 nt, Artificial Sequence
  spacer sequence CTCN PAM
gcacucugcgggaagcaaug

SEQ ID NO: 17693 - RNA, 20 nt, Artificial Sequence
  spacer sequence CTCN PAM
agcuuccugucucugcacuc

SEQ ID NO: 17694 - RNA, 20 nt, Artificial Sequence
  spacer sequence CTCN PAM
cacgugauuacagucuguaa

SEQ ID NO: 17695 - RNA, 20 nt, Artificial Sequence
  spacer sequence CTCN PAM
acucgcacgugauuacaguc

SEQ ID NO: 17696 - RNA, 20 nt, Artificial Sequence
  spacer sequence CTCN PAM
caccauccugugaaccccac

SEQ ID NO: 17697 - RNA, 20 nt, Artificial Sequence
  spacer sequence CTCN PAM
uaggauggugugaguggggc

SEQ ID NO: 17698 - RNA, 20 nt, Artificial Sequence
  spacer sequence CTCN PAM
caccauccuaugagcccacg

SEQ ID NO: 17699 - RNA, 20 nt, Artificial Sequence
  spacer sequence CTCN PAM
uggccccacucacaccaucc

SEQ ID NO: 17700 - RNA, 20 nt, Artificial Sequence
  spacer sequence CTCN PAM
caggauggugggaguggggc

SEQ ID NO: 17701 - RNA, 20 nt, Artificial Sequence
  spacer sequence CTCN PAM
caccauccugugagccccac

SEQ ID NO: 17702 - RNA, 20 nt, Artificial Sequence
  spacer sequence CTCN PAM
caggauagagugaguggggc

SEQ ID NO: 17703 - RNA, 20 nt, Artificial Sequence
  spacer sequence CTCN PAM
auccugugagaccacgccug

SEQ ID NO: 17704 - RNA, 20 nt, Artificial Sequence
  spacer sequence CTCN PAM
cucuauccugugagaccacg

SEQ ID NO: 17705 - RNA, 20 nt, Artificial Sequence
  spacer sequence CTCN PAM
caggauggagugaauggggc

SEQ ID NO: 17706 - RNA, 20 nt, Artificial Sequence
  spacer sequence CTCN PAM
auccugugagaccacgcccg

SEQ ID NO: 17707 - RNA, 20 nt, Artificial Sequence
  spacer sequence CTCN PAM
caacaucuuguaagacugug

SEQ ID NO: 17708 - RNA, 20 nt, Artificial Sequence
  spacer sequence CTCN PAM
cggccccacucacaacaucu

SEQ ID NO: 17709 - RNA, 20 nt, Artificial Sequence
  spacer sequence CTCN PAM
cagguuggugugaguggggc

SEQ ID NO: 17710 - RNA, 20 nt, Artificial Sequence
  spacer sequence CTCN PAM
caccaaccugugagccccac

SEQ ID NO: 17711 - RNA, 20 nt, Artificial Sequence
  spacer sequence CTCN PAM
cagccccacucacaccaacc

SEQ ID NO: 17712 - RNA, 20 nt, Artificial Sequence
  spacer sequence CTCN PAM
caggauggagugaguggggc

SEQ ID NO: 17713 - RNA, 20 nt, Artificial Sequence
  spacer sequence CTCN PAM
auccugugagccccacuccc

SEQ ID NO: 17714 - RNA, 20 nt, Artificial Sequence
  spacer sequence CTCN PAM
cuccauccugugagccccac

SEQ ID NO: 17715 - RNA, 20 nt, Artificial Sequence
  spacer sequence CTCN PAM
cggccccacucacuccaucc

SEQ ID NO: 17716 - RNA, 20 nt, Artificial Sequence
  spacer sequence CTCN PAM
caggauggugggaguggggc

SEQ ID NO: 17717 - RNA, 20 nt, Artificial Sequence
  spacer sequence CTCN PAM
caccauccugugagccccac

SEQ ID NO: 17718 - RNA, 20 nt, Artificial Sequence
  spacer sequence CTCN PAM
cagccccacucccaccaucc

SEQ ID NO: 17719 - RNA, 20 nt, Artificial Sequence
  spacer sequence CTCN PAM
caggauggugggaguggggc

SEQ ID NO: 17720 - RNA, 20 nt, Artificial Sequence
  spacer sequence CTCN PAM
caccauccugugagccccac

SEQ ID NO: 17721 - RNA, 20 nt, Artificial Sequence
  spacer sequence CTCN PAM
caggauggugggaguggggc

SEQ ID NO: 17722 - RNA, 20 nt, Artificial Sequence
  spacer sequence CTCN PAM
caccauccugugagccccac

SEQ ID NO: 17723 - RNA, 20 nt, Artificial Sequence
  spacer sequence CTCN PAM
cagccccacucccaccaucc

SEQ ID NO: 17724 - RNA, 20 nt, Artificial Sequence
  spacer sequence CTCN PAM
caggauggagugaauggggc

SEQ ID NO: 17725 - RNA, 20 nt, Artificial Sequence
  spacer sequence CTCN PAM
auccugugagucccacuccc

SEQ ID NO: 17726 - RNA, 20 nt, Artificial Sequence
  spacer sequence CTCN PAM
aucuuguaagacuaugccca

SEQ ID NO: 17727 - RNA, 20 nt, Artificial Sequence
  spacer sequence CTCN PAM
cuccaucuuguaagacuaug

SEQ ID NO: 17728 - RNA, 20 nt, Artificial Sequence
  spacer sequence CTCN PAM
cggccccacucacuccaucu

SEQ ID NO: 17729 - RNA, 20 nt, Artificial Sequence
  spacer sequence CTCN PAM
cagguuggugugaguggggc

SEQ ID NO: 17730 - RNA, 20 nt, Artificial Sequence
  spacer sequence CTCN PAM
caccaaccugugagccccac

SEQ ID NO: 17731 - RNA, 20 nt, Artificial Sequence
  spacer sequence CTCN PAM
caggauggugggaguggggc

SEQ ID NO: 17732 - RNA, 20 nt, Artificial Sequence
  spacer sequence CTCN PAM
caccauccugugagcccaug

SEQ ID NO: 17733 - RNA, 20 nt, Artificial Sequence
  spacer sequence CTCN PAM
cagccccacucccaccaucc

SEQ ID NO: 17734 - RNA, 20 nt, Artificial Sequence
  spacer sequence CTCN PAM
caggauggagugaguggggc

SEQ ID NO: 17735 - RNA, 20 nt, Artificial Sequence
  spacer sequence CTCN PAM
auccugugagucccacuccc

SEQ ID NO: 17736 - RNA, 20 nt, Artificial Sequence
  spacer sequence CTCN PAM
cuccauccugugagucccac

SEQ ID NO: 17737 - RNA, 20 nt, Artificial Sequence
  spacer sequence CTCN PAM
caccaucuuguaagacugug

SEQ ID NO: 17738 - RNA, 20 nt, Artificial Sequence
  spacer sequence CTCN PAM
caggauggugugagaggggc

SEQ ID NO: 17739 - RNA, 20 nt, Artificial Sequence
  spacer sequence CTCN PAM
caccauccugugagaccacg

SEQ ID NO: 17740 - RNA, 20 nt, Artificial Sequence
  spacer sequence CTCN PAM
cacaccauccugugagacca

SEQ ID NO: 17741 - RNA, 20 nt, Artificial Sequence
  spacer sequence CTCN PAM
caggauggugcauuugcccu

SEQ ID NO: 17742 - RNA, 20 nt, Artificial Sequence
  spacer sequence CTCN PAM
auccacuucagcagccugcg

SEQ ID NO: 17743 - RNA, 20 nt, Artificial Sequence
  spacer sequence CTCN PAM
ccugccacccgcccacccgc

SEQ ID NO: 17744 - RNA, 20 nt, Artificial Sequence
  spacer sequence CTCN PAM
ggggucaggugccaccacuc

SEQ ID NO: 17745 - RNA, 20 nt, Artificial Sequence
  spacer sequence CTCN PAM
ugcugcaccugccugucggc

SEQ ID NO: 17746 - RNA, 20 nt, Artificial Sequence
  spacer sequence CTCN PAM
uuuccauagccacgaccacc

SEQ ID NO: 17747 - RNA, 20 nt, Artificial Sequence
  spacer sequence CTCN PAM
uuugucugcccugcgcuggc

SEQ ID NO: 17748 - RNA, 20 nt, Artificial Sequence
  spacer sequence CTCN PAM
cauuugucugcccugcgcug

SEQ ID NO: 17749 - RNA, 20 nt, Artificial Sequence
  spacer sequence CTCN PAM
cucggggauggucuuggacg

SEQ ID NO: 17750 - RNA, 20 nt, Artificial Sequence
  spacer sequence CTCN PAM
gggauggucuuggacgccau

SEQ ID NO: 17751 - RNA, 20 nt, Artificial Sequence
  spacer sequence CTCN PAM
cgcuggaaggccagcuggua

SEQ ID NO: 17752 - RNA, 20 nt, Artificial Sequence
  spacer sequence CTCN PAM
aguaccagcuggccuuccag

SEQ ID NO: 17753 - RNA, 20 nt, Artificial Sequence
  spacer sequence CTCN PAM
ccaccucuuucuucaucugu

SEQ ID NO: 17754 - RNA, 20 nt, Artificial Sequence
  spacer sequence CTCN PAM
accucuuucuucaucugugg

SEQ ID NO: 17755 - RNA, 20 nt, Artificial Sequence
  spacer sequence CTCN PAM
uucuucaucuguggcacguc

SEQ ID NO: 17756 - RNA, 20 nt, Artificial Sequence
  spacer sequence CTCN PAM
uccauggggucaggggcuuc

SEQ ID NO: 17757 - RNA, 20 nt, Artificial Sequence
  spacer sequence CTCN PAM
auggggucaggggcuucuga

SEQ ID NO: 17758 - RNA, 20 nt, Artificial Sequence
  spacer sequence CTCN PAM
agccccaggcuggcugcuuc

SEQ ID NO: 17759 - RNA, 20 nt, Artificial Sequence
  spacer sequence CTCN PAM
ugugcccuccagccccaggc

SEQ ID NO: 17760 - RNA, 20 nt, Artificial Sequence
  spacer sequence CTCN PAM
gcccuguggcuuccuccugu

SEQ ID NO: 17761 - RNA, 20 nt, Artificial Sequence
  spacer sequence CTCN PAM
ccgcaggccugagcugaacc

SEQ ID NO: 17762 - RNA, 20 nt, Artificial Sequence
  spacer sequence CTCN PAM
ggccugcggggagcagcggg

SEQ ID NO: 17763 - RNA, 20 nt, Artificial Sequence
  spacer sequence CTCN PAM
ccgcuucauccugcgggguu

SEQ ID NO: 17764 - RNA, 20 nt, Artificial Sequence
  spacer sequence CTCN PAM
ccccgcuucauccugcgggg

SEQ ID NO: 17765 - RNA, 20 nt, Artificial Sequence
  spacer sequence CTCN PAM
gugcccugcacccuagcaac

SEQ ID NO: 17766 - RNA, 20 nt, Artificial Sequence
  spacer sequence CTCN PAM
cucugugcccugcacccuag

SEQ ID NO: 17767 - RNA, 20 nt, Artificial Sequence
  spacer sequence CTCN PAM
cgccuccugcacugggacua

SEQ ID NO: 17768 - RNA, 20 nt, Artificial Sequence
  spacer sequence CTCN PAM
ugcacugggacuaauuaacu

SEQ ID NO: 17769 - RNA, 20 nt, Artificial Sequence
  spacer sequence CTCN PAM
gcuacucccccauaggcccc

SEQ ID NO: 17770 - RNA, 20 nt, Artificial Sequence
  spacer sequence CTCN PAM
cccauaggcccccacaccuu

SEQ ID NO: 17771 - RNA, 20 nt, Artificial Sequence
  spacer sequence CTCN PAM
ugccugcaagggaucuucgu

SEQ ID NO: 17772 - RNA, 20 nt, Artificial Sequence
  spacer sequence CTCN PAM
gcacggcaggcccccagcuc

SEQ ID NO: 17773 - RNA, 20 nt, Artificial Sequence
  spacer sequence CTCN PAM
uacccucccacugaggccca

SEQ ID NO: 17774 - RNA, 20 nt, Artificial Sequence
  spacer sequence CTCN PAM
cacugaggcccacgcaggcu

SEQ ID NO: 17775 - RNA, 20 nt, Artificial Sequence
  spacer sequence CTCN PAM
gugggaggguaggagcuggg

SEQ ID NO: 17776 - RNA, 20 nt, Artificial Sequence
  spacer sequence CTCN PAM
caccguggucugggucagcc

SEQ ID NO: 17777 - RNA, 20 nt, Artificial Sequence
  spacer sequence CTCN PAM
ccccacaccucacaccgugg

SEQ ID NO: 17778 - RNA, 20 nt, Artificial Sequence
  spacer sequence CTCN PAM
ggagguggccccugccccgc

SEQ ID NO: 17779 - RNA, 20 nt, Artificial Sequence
  spacer sequence CTCN PAM
ugaggaccucgccccacacc

SEQ ID NO: 17780 - RNA, 20 nt, Artificial Sequence
  spacer sequence CTCN PAM
gccaugcaaagcaaaggggc

SEQ ID NO: 17781 - RNA, 20 nt, Artificial Sequence
  spacer sequence CTCN PAM
ggacugggcucugccaugca

SEQ ID NO: 17782 - RNA, 20 nt, Artificial Sequence
  spacer sequence CTCN PAM
uggacaggaauguucugcug

SEQ ID NO: 17783 - RNA, 20 nt, Artificial Sequence
  spacer sequence CTCN PAM
ggcagguggggugugugcuc

SEQ ID NO: 17784 - RNA, 20 nt, Artificial Sequence
  spacer sequence CTCN PAM
ggaucuugggggcucaggcu

SEQ ID NO: 17785 - RNA, 20 nt, Artificial Sequence
  spacer sequence CTCN PAM
ggcuauacuacccgagucug

SEQ ID NO: 17786 - RNA, 20 nt, Artificial Sequence
  spacer sequence CTCN PAM
gguaguauagccugagcccc

SEQ ID NO: 17787 - RNA, 20 nt, Artificial Sequence
  spacer sequence CTCN PAM
gaacugccacaaguucgagg

SEQ ID NO: 17788 - RNA, 20 nt, Artificial Sequence
  spacer sequence CTCN PAM
aacuuguggcaguucugagg

SEQ ID NO: 17789 - RNA, 20 nt, Artificial Sequence
  spacer sequence CTCN PAM
cccccuacccacuccagggg

SEQ ID NO: 17790 - RNA, 20 nt, Artificial Sequence
  spacer sequence CTCN PAM
cccuacccacuccaggggcc

SEQ ID NO: 17791 - RNA, 20 nt, Artificial Sequence
  spacer sequence CTCN PAM
aggggcccagggagucccuc

SEQ ID NO: 17792 - RNA, 20 nt, Artificial Sequence
  spacer sequence CTCN PAM
cugggccccuggagugggua

SEQ ID NO: 17793 - RNA, 20 nt, Artificial Sequence
  spacer sequence CTCN PAM
cuccgucccaacucuggccc

SEQ ID NO: 17794 - RNA, 20 nt, Artificial Sequence
  spacer sequence CTCN PAM
gucccaacucuggcccccgu

SEQ ID NO: 17795 - RNA, 20 nt, Artificial Sequence
  spacer sequence CTCN PAM
ggcccccguccccaagguug

SEQ ID NO: 17796 - RNA, 20 nt, Artificial Sequence
  spacer sequence CTCN PAM
caaccuuggggacgggggcc

SEQ ID NO: 17797 - RNA, 20 nt, Artificial Sequence
  spacer sequence CTCN PAM
caagguucagcccugucucc

SEQ ID NO: 17798 - RNA, 20 nt, Artificial Sequence
  spacer sequence CTCN PAM
ccgaaacuugacgccaaccc

SEQ ID NO: 17799 - RNA, 20 nt, Artificial Sequence
  spacer sequence CTCN PAM
ggcugugaagggggcuccug

SEQ ID NO: 17800 - RNA, 20 nt, Artificial Sequence
  spacer sequence CTCN PAM
uggcccaacagucuccccau

SEQ ID NO: 17801 - RNA, 20 nt, Artificial Sequence
  spacer sequence CTCN PAM
ccauccuuuggucgugcagc

SEQ ID NO: 17802 - RNA, 20 nt, Artificial Sequence
  spacer sequence CTCN PAM
cuagguggccggugcagcug

SEQ ID NO: 17803 - RNA, 20 nt, Artificial Sequence
  spacer sequence CTCN PAM
ggcccugggccccucccuag

SEQ ID NO: 17804 - RNA, 20 nt, Artificial Sequence
  spacer sequence CTCN PAM
cagcagccagcagagggucu

SEQ ID NO: 17805 - RNA, 20 nt, Artificial Sequence
  spacer sequence CTCN PAM
gcuggcugcugggagucugc

SEQ ID NO: 17806 - RNA, 20 nt, Artificial Sequence
  spacer sequence CTCN PAM
caccccacuacgggcagacc

SEQ ID NO: 17807 - RNA, 20 nt, Artificial Sequence
  spacer sequence CTCN PAM
ccggccucccaccccacuac

SEQ ID NO: 17808 - RNA, 20 nt, Artificial Sequence
  spacer sequence CTCN PAM
cuccccggccucccacccca

SEQ ID NO: 17809 - RNA, 20 nt, Artificial Sequence
  spacer sequence CTCN PAM
cccagaaaccugcccccgcu

SEQ ID NO: 17810 - RNA, 20 nt, Artificial Sequence
  spacer sequence CTCN PAM
gcaugacccugaucacuccc

SEQ ID NO: 17811 - RNA, 20 nt, Artificial Sequence
  spacer sequence CTCN PAM
cggagacucuggaguuccag

SEQ ID NO: 17812 - RNA, 20 nt, Artificial Sequence
  spacer sequence CTCN PAM
gggagggaauccucugcaug

SEQ ID NO: 17813 - RNA, 20 nt, Artificial Sequence
  spacer sequence CTCN PAM
ggaguuccagcaccccuacc

SEQ ID NO: 17814 - RNA, 20 nt, Artificial Sequence
  spacer sequence CTCN PAM
agagucuccgggagggaauc

SEQ ID NO: 17815 - RNA, 20 nt, Artificial Sequence
  spacer sequence CTCN PAM
gagacccuacacucagcccc

SEQ ID NO: 17816 - RNA, 20 nt, Artificial Sequence
  spacer sequence CTCN PAM
gagaaaaggccugcaccggg

SEQ ID NO: 17817 - RNA, 20 nt, Artificial Sequence
  spacer sequence CTCN PAM
gccccgugggcgcaggacua

SEQ ID NO: 17818 - RNA, 20 nt, Artificial Sequence
  spacer sequence CTCN PAM
caggcccgggguguuggcgc

SEQ ID NO: 17819 - RNA, 20 nt, Artificial Sequence
  spacer sequence CTCN PAM
gugggcacugcaggcggcgc

SEQ ID NO: 17820 - RNA, 20 nt, Artificial Sequence
  spacer sequence CTCN PAM
gauggacacagcucccccgc

SEQ ID NO: 17821 - RNA, 20 nt, Artificial Sequence
  spacer sequence CTCN PAM
cccgcaccgcgagagccgcc

SEQ ID NO: 17822 - RNA, 20 nt, Artificial Sequence
  spacer sequence CTCN PAM
cggugcgggggagcuguguc

SEQ ID NO: 17823 - RNA, 20 nt, Artificial Sequence
  spacer sequence CTCN PAM
cgcggugcgggggagcugug

SEQ ID NO: 17824 - RNA, 20 nt, Artificial Sequence
  spacer sequence CTCN PAM
cugccugcagcaccggcucg

SEQ ID NO: 17825 - RNA, 20 nt, Artificial Sequence
  spacer sequence CTCN PAM
gguuggguuuugcugccugc

SEQ ID NO: 17826 - RNA, 20 nt, Artificial Sequence
  spacer sequence CTCN PAM
ccccgggaguuagggugagc

SEQ ID NO: 17827 - RNA, 20 nt, Artificial Sequence
  spacer sequence CTCN PAM
cggggcgagggcagcugccc

SEQ ID NO: 17828 - RNA, 20 nt, Artificial Sequence
  spacer sequence CTCN PAM
cccuaacucccggggcgagg

SEQ ID NO: 17829 - RNA, 20 nt, Artificial Sequence
  spacer sequence CTCN PAM
gcuggcccaggucagucccc

SEQ ID NO: 17830 - RNA, 20 nt, Artificial Sequence
  spacer sequence CTCN PAM
cagcuggcccaggucagucc

SEQ ID NO: 17831 - RNA, 20 nt, Artificial Sequence
  spacer sequence CTCN PAM
acucucagcuggcccagguc

SEQ ID NO: 17832 - RNA, 20 nt, Artificial Sequence
  spacer sequence CTCN PAM
gggcccucccuagccccggg

SEQ ID NO: 17833 - RNA, 20 nt, Artificial Sequence
  spacer sequence CTCN PAM
cuagccccgggcgccuguuc

SEQ ID NO: 17834 - RNA, 20 nt, Artificial Sequence
  spacer sequence CTCN PAM
gcugucaccuuuucaaggua

SEQ ID NO: 17835 - RNA, 20 nt, Artificial Sequence
  spacer sequence CTCN PAM
cggucgccuggccguuguca

SEQ ID NO: 17836 - RNA, 20 nt, Artificial Sequence
  spacer sequence CTCN PAM
cucgcggucgccuggccguu

SEQ ID NO: 17837 - RNA, 20 nt, Artificial Sequence
  spacer sequence CTCN PAM
cacucgcggucgccuggccg

SEQ ID NO: 17838 - RNA, 20 nt, Artificial Sequence
  spacer sequence CTCN PAM
cucucacucgcggucgccug

SEQ ID NO: 17839 - RNA, 20 nt, Artificial Sequence
  spacer sequence CTCN PAM
cggaacaucacuuggcccuc

SEQ ID NO: 17840 - RNA, 20 nt, Artificial Sequence
  spacer sequence CTCN PAM
gccuggcggacucccggaac

SEQ ID NO: 17841 - RNA, 20 nt, Artificial Sequence
  spacer sequence CTCN PAM
cgccaccugggcccuggcgc

SEQ ID NO: 17842 - RNA, 20 nt, Artificial Sequence
  spacer sequence CTCN PAM
ucagggcugggcugacccca

SEQ ID NO: 17843 - RNA, 20 nt, Artificial Sequence
  spacer sequence CTCN PAM
gggcugggcugaccccagag

SEQ ID NO: 17844 - RNA, 20 nt, Artificial Sequence
  spacer sequence CTCN PAM
ggggucagcccagcccugag

SEQ ID NO: 17845 - RNA, 20 nt, Artificial Sequence
  spacer sequence CTCN PAM
ccugggcucacccagcggau

SEQ ID NO: 17846 - RNA, 20 nt, Artificial Sequence
  spacer sequence CTCN PAM
cccagcggauggacaugcag

SEQ ID NO: 17847 - RNA, 20 nt, Artificial Sequence
  spacer sequence CTCN PAM
gggaaaauggaccagcccca

SEQ ID NO: 17848 - RNA, 20 nt, Artificial Sequence
  spacer sequence CTCN PAM
accagggcccaagcuggccc

SEQ ID NO: 17849 - RNA, 20 nt, Artificial Sequence
  spacer sequence CTCN PAM
ccaccagggcccaagcuggc

SEQ ID NO: 17850 - RNA, 20 nt, Artificial Sequence
  spacer sequence CTCN PAM
uuccacuugagggggugggu

SEQ ID NO: 17851 - RNA, 20 nt, Artificial Sequence
  spacer sequence CTCN PAM
aguggaaggagaccucucca

SEQ ID NO: 17852 - RNA, 20 nt, Artificial Sequence
  spacer sequence CTCN PAM
aguguccugggccagccggg

SEQ ID NO: 17853 - RNA, 20 nt, Artificial Sequence
  spacer sequence CTCN PAM
cggcuggcccaggacacugg

SEQ ID NO: 17854 - RNA, 20 nt, Artificial Sequence
  spacer sequence CTCN PAM
ucccggcuggcccaggacac

SEQ ID NO: 17855 - RNA, 20 nt, Artificial Sequence
  spacer sequence CTCN PAM
gaagccucugcagccugcag

SEQ ID NO: 17856 - RNA, 20 nt, Artificial Sequence
  spacer sequence CTCN PAM
gcagccugcaggguucaggu

SEQ ID NO: 17857 - RNA, 20 nt, Artificial Sequence
  spacer sequence CTCN PAM
gcugugccccccugacagag

SEQ ID NO: 17858 - RNA, 20 nt, Artificial Sequence
  spacer sequence CTCN PAM
gucaggggggcacagcugag

SEQ ID NO: 17859 - RNA, 20 nt, Artificial Sequence
  spacer sequence CTCN PAM
cccugggaugugagccucuu

SEQ ID NO: 17860 - RNA, 20 nt, Artificial Sequence
  spacer sequence CTCN PAM
caucccagggugagccacau

SEQ ID NO: 17861 - RNA, 20 nt, Artificial Sequence
  spacer sequence CTCN PAM
uacugcuaggggccccgggg

SEQ ID NO: 17862 - RNA, 20 nt, Artificial Sequence
  spacer sequence CTCN PAM
guggagcucccugcuccagc

SEQ ID NO: 17863 - RNA, 20 nt, Artificial Sequence
  spacer sequence CTCN PAM
acagagccccggggccccua

SEQ ID NO: 17864 - RNA, 20 nt, Artificial Sequence
  spacer sequence CTCN PAM
cugcuccagcccgauccccu

SEQ ID NO: 17865 - RNA, 20 nt, Artificial Sequence
  spacer sequence CTCN PAM
agcccgauccccuguuccca

SEQ ID NO: 17866 - RNA, 20 nt, Artificial Sequence
  spacer sequence CTCN PAM
cgagggcaggagagugccgu

SEQ ID NO: 17867 - RNA, 20 nt, Artificial Sequence
  spacer sequence CTCN PAM
ggagcugccccgugccggcc

SEQ ID NO: 17868 - RNA, 20 nt, Artificial Sequence
  spacer sequence CTCN PAM
ugcccucgggagcugccccg

SEQ ID NO: 17869 - RNA, 20 nt, Artificial Sequence
  spacer sequence CTCN PAM
ccugcccucgggagcugccc

SEQ ID NO: 17870 - RNA, 20 nt, Artificial Sequence
  spacer sequence CTCN PAM
gaucagacugaaaagcacgg

SEQ ID NO: 17871 - RNA, 20 nt, Artificial Sequence
  spacer sequence CTCN PAM
gcucagaucagacugaaaag

SEQ ID NO: 17872 - RNA, 20 nt, Artificial Sequence
  spacer sequence CTCN PAM
cagcucagaucagacugaaa

SEQ ID NO: 17873 - RNA, 20 nt, Artificial Sequence
  spacer sequence CTCN PAM
ggccgccacucucagcucag

SEQ ID NO: 17874 - RNA, 20 nt, Artificial Sequence
  spacer sequence CTCN PAM
ggggcacgcugccucgggag

SEQ ID NO: 17875 - RNA, 20 nt, Artificial Sequence
  spacer sequence CTCN PAM
ggagaggugcccccagcugc

SEQ ID NO: 17876 - RNA, 20 nt, Artificial Sequence
  spacer sequence CTCN PAM
cgaggcagcgugccccagag

SEQ ID NO: 17877 - RNA, 20 nt, Artificial Sequence
  spacer sequence CTCN PAM
cccgaggcagcgugccccag

SEQ ID NO: 17878 - RNA, 20 nt, Artificial Sequence
  spacer sequence CTCN PAM
gguugugugaccucaaggcu

SEQ ID NO: 17879 - RNA, 20 nt, Artificial Sequence
  spacer sequence CTCN PAM
aggcucuggggagagggcuu

SEQ ID NO: 17880 - RNA, 20 nt, Artificial Sequence
  spacer sequence CTCN PAM
ggggagagggcuucccuuug

SEQ ID NO: 17881 - RNA, 20 nt, Artificial Sequence
  spacer sequence CTCN PAM
ccagagccuugaggucacac

SEQ ID NO: 17882 - RNA, 20 nt, Artificial Sequence
  spacer sequence CTCN PAM
ccccagagccuugaggucac

SEQ ID NO: 17883 - RNA, 20 nt, Artificial Sequence
  spacer sequence CTCN PAM
gcaccugucagccugcagag

SEQ ID NO: 17884 - RNA, 20 nt, Artificial Sequence
  spacer sequence CTCN PAM
gcaggcugacaggugcggag

SEQ ID NO: 17885 - RNA, 20 nt, Artificial Sequence
  spacer sequence CTCN PAM
gcucugcaggcugacaggug

SEQ ID NO: 17886 - RNA, 20 nt, Artificial Sequence
  spacer sequence CTCN PAM
gacacguuuccccgugucuc

SEQ ID NO: 17887 - RNA, 20 nt, Artificial Sequence
  spacer sequence CTCN PAM
ucccacccugcccuugggug

SEQ ID NO: 17888 - RNA, 20 nt, Artificial Sequence
  spacer sequence CTCN PAM
cacccugcccuuggguguac

SEQ ID NO: 17889 - RNA, 20 nt, Artificial Sequence
  spacer sequence CTCN PAM
ugugggagcugugcccuaug

SEQ ID NO: 17890 - RNA, 20 nt, Artificial Sequence
  spacer sequence CTCN PAM
cacaggagcccaagggguac

SEQ ID NO: 17891 - RNA, 20 nt, Artificial Sequence
  spacer sequence CTCN PAM
gggggcacagggccaagcuc

SEQ ID NO: 17892 - RNA, 20 nt, Artificial Sequence
  spacer sequence CTCN PAM
ccaaacagucccugcagaag

SEQ ID NO: 17893 - RNA, 20 nt, Artificial Sequence
  spacer sequence CTCN PAM
gugggugcuggcagggccag

SEQ ID NO: 17894 - RNA, 20 nt, Artificial Sequence
  spacer sequence CTCN PAM
caggccccuggcccugccag

SEQ ID NO: 17895 - RNA, 20 nt, Artificial Sequence
  spacer sequence CTCN PAM
gccuuccccagugucacagg

SEQ ID NO: 17896 - RNA, 20 nt, Artificial Sequence
  spacer sequence CTCN PAM
gcagggguugucggggagag

SEQ ID NO: 17897 - RNA, 20 nt, Artificial Sequence
  spacer sequence CTCN PAM
ccgacaaccccugcagaggu

SEQ ID NO: 17898 - RNA, 20 nt, Artificial Sequence
  spacer sequence CTCN PAM
ccccgacaaccccugcagag

SEQ ID NO: 17899 - RNA, 20 nt, Artificial Sequence
  spacer sequence CTCN PAM
caggcgcucaggucccugaa

SEQ ID NO: 17900 - RNA, 20 nt, Artificial Sequence
  spacer sequence CTCN PAM
ggcgcucaggucccugaagu

SEQ ID NO: 17901 - RNA, 20 nt, Artificial Sequence
  spacer sequence CTCN PAM
ggucccugaagucacucagc

SEQ ID NO: 17902 - RNA, 20 nt, Artificial Sequence
  spacer sequence CTCN PAM
gcaggacucccugccagugu

SEQ ID NO: 17903 - RNA, 20 nt, Artificial Sequence
  spacer sequence CTCN PAM
cugccagugugacuccguga

SEQ ID NO: 17904 - RNA, 20 nt, Artificial Sequence
  spacer sequence CTCN PAM
gugaaucggggccaccugca

SEQ ID NO: 17905 - RNA, 20 nt, Artificial Sequence
  spacer sequence CTCN PAM
cgcccugaugugugucggcu

SEQ ID NO: 17906 - RNA, 20 nt, Artificial Sequence
  spacer sequence CTCN PAM
gauccagccgacacacauca

SEQ ID NO: 17907 - RNA, 20 nt, Artificial Sequence
  spacer sequence CTCN PAM
ggaacuggggcacauuaggg

SEQ ID NO: 17908 - RNA, 20 nt, Artificial Sequence
  spacer sequence CTCN PAM
ugcccugggcuuuaagcugc

SEQ ID NO: 17909 - RNA, 20 nt, Artificial Sequence
  spacer sequence CTCN PAM
uccucagggcagaugguugc

SEQ ID NO: 17910 - RNA, 20 nt, Artificial Sequence
  spacer sequence CTCN PAM
ucagggcagaugguugcccc

SEQ ID NO: 17911 - RNA, 20 nt, Artificial Sequence
  spacer sequence CTCN PAM
gggcagaugguugccccucu

SEQ ID NO: 17912 - RNA, 20 nt, Artificial Sequence
  spacer sequence CTCN PAM
uggcauggugggggcuagac

SEQ ID NO: 17913 - RNA, 20 nt, Artificial Sequence
  spacer sequence CTCN PAM
cugaucccagugcccgcccu

SEQ ID NO: 17914 - RNA, 20 nt, Artificial Sequence
  spacer sequence CTCN PAM
gcagcccagaaacuaaggug

SEQ ID NO: 17915 - RNA, 20 nt, Artificial Sequence
  spacer sequence CTCN PAM
cccuguggcugggggcacca

SEQ ID NO: 17916 - RNA, 20 nt, Artificial Sequence
  spacer sequence CTCN PAM
cuguggcugggggcaccacu

SEQ ID NO: 17917 - RNA, 20 nt, Artificial Sequence
  spacer sequence CTCN PAM
ggcgcccaaaguggugcccc

SEQ ID NO: 17918 - RNA, 20 nt, Artificial Sequence
  spacer sequence CTCN PAM
cuggcgcccaaaguggugcc

SEQ ID NO: 17919 - RNA, 20 nt, Artificial Sequence
  spacer sequence CTCN PAM
ccuaacagccauuccacucu

SEQ ID NO: 17920 - RNA, 20 nt, Artificial Sequence
  spacer sequence CTCN PAM
aagccaccugcugucccagg

SEQ ID NO: 17921 - RNA, 20 nt, Artificial Sequence
  spacer sequence CTCN PAM
ggguguucccccgccuggcc

SEQ ID NO: 17922 - RNA, 20 nt, Artificial Sequence
  spacer sequence CTCN PAM
gcugcggaccucaggguguu

SEQ ID NO: 17923 - RNA, 20 nt, Artificial Sequence
  spacer sequence CTCN PAM
caacucagcugcggaccuca

SEQ ID NO: 17924 - RNA, 20 nt, Artificial Sequence
  spacer sequence CTCN PAM
cacaacucagcugcggaccu

SEQ ID NO: 17925 - RNA, 20 nt, Artificial Sequence
  spacer sequence CTCN PAM
caggaccccaagcggccuuu

SEQ ID NO: 17926 - RNA, 20 nt, Artificial Sequence
  spacer sequence CTCN PAM
ggaccccaagcggccuuugc

SEQ ID NO: 17927 - RNA, 20 nt, Artificial Sequence
  spacer sequence CTCN PAM
ucuggaaggaccuaggaggu

SEQ ID NO: 17928 - RNA, 20 nt, Artificial Sequence
  spacer sequence CTCN PAM
uagguccuuccagaugagca

SEQ ID NO: 17929 - RNA, 20 nt, Artificial Sequence
  spacer sequence CTCN PAM
uaauggggucgccaaggcuc

SEQ ID NO: 17930 - RNA, 20 nt, Artificial Sequence
  spacer sequence CTCN PAM
agguucuggcuuuuggucaa

SEQ ID NO: 17931 - RNA, 20 nt, Artificial Sequence
  spacer sequence CTCN PAM
gggaccuuacuggguccagu

SEQ ID NO: 17932 - RNA, 20 nt, Artificial Sequence
  spacer sequence CTCN PAM
ggcacccucagggaccuuac

SEQ ID NO: 17933 - RNA, 20 nt, Artificial Sequence
  spacer sequence CTCN PAM
guccaacacggccagugccc

SEQ ID NO: 17934 - RNA, 20 nt, Artificial Sequence
  spacer sequence CTCN PAM
aaccuguguccugauucacu

SEQ ID NO: 17935 - RNA, 20 nt, Artificial Sequence
  spacer sequence CTCN PAM
ccuguccugguggcccacac

SEQ ID NO: 17936 - RNA, 20 nt, Artificial Sequence
  spacer sequence CTCN PAM
aggacgugaccccacggccc

SEQ ID NO: 17937 - RNA, 20 nt, Artificial Sequence
  spacer sequence CTCN PAM
cuccaggacgugaccccacg

SEQ ID NO: 17938 - RNA, 20 nt, Artificial Sequence
  spacer sequence CTCN PAM
gcaucucagcagagaagugg

SEQ ID NO: 17939 - RNA, 20 nt, Artificial Sequence
  spacer sequence CTCN PAM
gcagagaaguggcugugugu

SEQ ID NO: 17940 - RNA, 20 nt, Artificial Sequence
  spacer sequence CTCN PAM
gcugagaugcugaggacugg

SEQ ID NO: 17941 - RNA, 20 nt, Artificial Sequence
  spacer sequence CTCN PAM
gguaggcaggccggguccac

SEQ ID NO: 17942 - RNA, 20 nt, Artificial Sequence
  spacer sequence CTCN PAM
ugcccuuggccuuggggguc

SEQ ID NO: 17943 - RNA, 20 nt, Artificial Sequence
  spacer sequence CTCN PAM
uccugcccuuggccuugggg

SEQ ID NO: 17944 - RNA, 20 nt, Artificial Sequence
  spacer sequence CTCN PAM
accuccuccugcccuuggcc

SEQ ID NO: 17945 - RNA, 20 nt, Artificial Sequence
  spacer sequence CTCN PAM
gcuugcccuggcccugcccc

SEQ ID NO: 17946 - RNA, 20 nt, Artificial Sequence
  spacer sequence CTCN PAM
caccccacuucuguggcguu

SEQ ID NO: 17947 - RNA, 20 nt, Artificial Sequence
  spacer sequence CTCN PAM
ccccacuucuguggcguuuc

SEQ ID NO: 17948 - RNA, 20 nt, Artificial Sequence
  spacer sequence CTCN PAM
gugucguguggacccccaga

SEQ ID NO: 17949 - RNA, 20 nt, Artificial Sequence
  spacer sequence CTCN PAM
gcucccgugugaggggcugu

SEQ ID NO: 17950 - RNA, 20 nt, Artificial Sequence
  spacer sequence CTCN PAM
cgugugaggggcugugaggu

SEQ ID NO: 17951 - RNA, 20 nt, Artificial Sequence
  spacer sequence CTCN PAM
cacgggagcagagguuacug

SEQ ID NO: 17952 - RNA, 20 nt, Artificial Sequence
  spacer sequence CTCN PAM
cagccccucacacgggagca

SEQ ID NO: 17953 - RNA, 20 nt, Artificial Sequence
  spacer sequence CTCN PAM
guaagacgggggucuugaag

SEQ ID NO: 17954 - RNA, 20 nt, Artificial Sequence
  spacer sequence CTCN PAM
gaaacccccaaacacauccg

SEQ ID NO: 17955 - RNA, 20 nt, Artificial Sequence
  spacer sequence CTCN PAM
aggcgucagcgcccggaugu

SEQ ID NO: 17956 - RNA, 20 nt, Artificial Sequence
  spacer sequence CTCN PAM
agcucaaggcgucagcgccc

SEQ ID NO: 17957 - RNA, 20 nt, Artificial Sequence
  spacer sequence CTCN PAM
ggucuggaaucugccucccc

SEQ ID NO: 17958 - RNA, 20 nt, Artificial Sequence
  spacer sequence CTCN PAM
cccggcccuacagcuggacc

SEQ ID NO: 17959 - RNA, 20 nt, Artificial Sequence
  spacer sequence CTCN PAM
uugggaggaauggcagccag

SEQ ID NO: 17960 - RNA, 20 nt, Artificial Sequence
  spacer sequence CTCN PAM
caaugagaaucgcugaagcc

SEQ ID NO: 17961 - RNA, 20 nt, Artificial Sequence
  spacer sequence CTCN PAM
guugggggacuggcugccau

SEQ ID NO: 17962 - RNA, 20 nt, Artificial Sequence
  spacer sequence CTCN PAM
cgaggccaggggcuccuuuc

SEQ ID NO: 17963 - RNA, 20 nt, Artificial Sequence
  spacer sequence CTCN PAM
ggaggcuguggucacuccgu

SEQ ID NO: 17964 - RNA, 20 nt, Artificial Sequence
  spacer sequence CTCN PAM
uuucugaaauuaggccacua

SEQ ID NO: 17965 - RNA, 20 nt, Artificial Sequence
  spacer sequence CTCN PAM
gccagcggcccaauuagugg

SEQ ID NO: 17966 - RNA, 20 nt, Artificial Sequence
  spacer sequence CTCN PAM
uuccgcugcccuagaaauag

SEQ ID NO: 17967 - RNA, 20 nt, Artificial Sequence
  spacer sequence CTCN PAM
ggccagggacagcuauuucu

SEQ ID NO: 17968 - RNA, 20 nt, Artificial Sequence
  spacer sequence CTCN PAM
ugacccaccaggcguggggc

SEQ ID NO: 17969 - RNA, 20 nt, Artificial Sequence
  spacer sequence CTCN PAM
ugccccaagccaggcccagc

SEQ ID NO: 17970 - RNA, 20 nt, Artificial Sequence
  spacer sequence CTCN PAM
augcuccugccccaagccag

SEQ ID NO: 17971 - RNA, 20 nt, Artificial Sequence
  spacer sequence CTCN PAM
cauuuacagccaaccaagac

SEQ ID NO: 17972 - RNA, 20 nt, Artificial Sequence
  spacer sequence CTCN PAM
ugugcuucccccacggucuu

SEQ ID NO: 17973 - RNA, 20 nt, Artificial Sequence
  spacer sequence CTCN PAM
ggccuccugugcuuccccca

SEQ ID NO: 17974 - RNA, 20 nt, Artificial Sequence
  spacer sequence CTCN PAM
gaucccuuccuagcgggaag

SEQ ID NO: 17975 - RNA, 20 nt, Artificial Sequence
  spacer sequence CTCN PAM
cgggacuggccucucgcugc

SEQ ID NO: 17976 - RNA, 20 nt, Artificial Sequence
  spacer sequence CTCN PAM
cgcugcggccucaacuccga

SEQ ID NO: 17977 - RNA, 20 nt, Artificial Sequence
  spacer sequence CTCN PAM
cugcggccucaacuccgaau

SEQ ID NO: 17978 - RNA, 20 nt, Artificial Sequence
  spacer sequence CTCN PAM
acuccgaaugggugggggag

SEQ ID NO: 17979 - RNA, 20 nt, Artificial Sequence
  spacer sequence CTCN PAM
gaaugggugggggagacagc

SEQ ID NO: 17980 - RNA, 20 nt, Artificial Sequence
  spacer sequence CTCN PAM
cccacccauucggaguugag

SEQ ID NO: 17981 - RNA, 20 nt, Artificial Sequence
  spacer sequence CTCN PAM
ccggggaacagagggauaaa

SEQ ID NO: 17982 - RNA, 20 nt, Artificial Sequence
  spacer sequence CTCN PAM
ggggaacagagggauaaagu

SEQ ID NO: 17983 - RNA, 20 nt, Artificial Sequence
  spacer sequence CTCN PAM
guuccccggagaguugacug

SEQ ID NO: 17984 - RNA, 20 nt, Artificial Sequence
  spacer sequence CTCN PAM
gcacuuuaucccucuguucc

SEQ ID NO: 17985 - RNA, 20 nt, Artificial Sequence
  spacer sequence CTCN PAM
acccgccugugcccuaggcu

SEQ ID NO: 17986 - RNA, 20 nt, Artificial Sequence
  spacer sequence CTCN PAM
gcagagggcucuggcugucc

SEQ ID NO: 17987 - RNA, 20 nt, Artificial Sequence
  spacer sequence CTCN PAM
gcagagccuagggcacaggc

SEQ ID NO: 17988 - RNA, 20 nt, Artificial Sequence
  spacer sequence CTCN PAM
ggcuguccuagggggacccu

SEQ ID NO: 17989 - RNA, 20 nt, Artificial Sequence
  spacer sequence CTCN PAM
acacacauucacccaccacc

SEQ ID NO: 17990 - RNA, 20 nt, Artificial Sequence
  spacer sequence CTCN PAM
gucccugcaaacaaaacugc

SEQ ID NO: 17991 - RNA, 20 nt, Artificial Sequence
  spacer sequence CTCN PAM
ucaccaaagaaacucacucc

SEQ ID NO: 17992 - RNA, 20 nt, Artificial Sequence
  spacer sequence CTCN PAM
ccaaagaaacucacuccgcc

SEQ ID NO: 17993 - RNA, 20 nt, Artificial Sequence
  spacer sequence CTCN PAM
cuccgccuaguuaacuggag

SEQ ID NO: 17994 - RNA, 20 nt, Artificial Sequence
  spacer sequence CTCN PAM
gccuaguuaacuggagcuca

SEQ ID NO: 17995 - RNA, 20 nt, Artificial Sequence
  spacer sequence CTCN PAM
aguuaacuaggcggagugag

SEQ ID NO: 17996 - RNA, 20 nt, Artificial Sequence
  spacer sequence CTCN PAM
cggcaacgacuuuucuguca

SEQ ID NO: 17997 - RNA, 20 nt, Artificial Sequence
  spacer sequence CTCN PAM
uaaacccaagcacagaaaac

SEQ ID NO: 17998 - RNA, 20 nt, Artificial Sequence
  spacer sequence CTCN PAM
ccccaccccaucccuugaag

SEQ ID NO: 17999 - RNA, 20 nt, Artificial Sequence
  spacer sequence CTCN PAM
ccccuccccccaccccaucc

SEQ ID NO: 18000 - RNA, 20 nt, Artificial Sequence
  spacer sequence CTCN PAM
ucuuuuaacaucagguauau

SEQ ID NO: 18001 - RNA, 20 nt, Artificial Sequence
  spacer sequence CTCN PAM
cuugaaguuguuuuuuuuuu

SEQ ID NO: 18002 - RNA, 20 nt, Artificial Sequence
  spacer sequence CTCN PAM
auuguguagucaggggccug

SEQ ID NO: 18003 - RNA, 20 nt, Artificial Sequence
  spacer sequence CTCN PAM
cgcugcagccucgggguagc

SEQ ID NO: 18004 - RNA, 20 nt, Artificial Sequence
  spacer sequence CTCN PAM
ggguagcgugccugccuuag

SEQ ID NO: 18005 - RNA, 20 nt, Artificial Sequence
  spacer sequence CTCN PAM
guuuacucugaacagcugca

SEQ ID NO: 18006 - RNA, 20 nt, Artificial Sequence
  spacer sequence CTCN PAM
gaacagcugcaggucagugc

SEQ ID NO: 18007 - RNA, 20 nt, Artificial Sequence
  spacer sequence CTCN PAM
ggcgacuguaaccacgcacu

SEQ ID NO: 18008 - RNA, 20 nt, Artificial Sequence
  spacer sequence CTCN PAM
uaaguaggaaaccuccggcg

SEQ ID NO: 18009 - RNA, 20 nt, Artificial Sequence
  spacer sequence CTCN PAM
ugaaaagcuagguaugucuu

SEQ ID NO: 18010 - RNA, 20 nt, Artificial Sequence
  spacer sequence CTCN PAM
ggccaugcuucugguuagca

SEQ ID NO: 18011 - RNA, 20 nt, Artificial Sequence
  spacer sequence CTCN PAM
ugccucaggccaugcuucug

SEQ ID NO: 18012 - RNA, 20 nt, Artificial Sequence
  spacer sequence CTCN PAM
gacgcccuagcuccuggccu

SEQ ID NO: 18013 - RNA, 20 nt, Artificial Sequence
  spacer sequence CTCN PAM
uggccugaggacuggagguc

SEQ ID NO: 18014 - RNA, 20 nt, Artificial Sequence
  spacer sequence CTCN PAM
ggccaggagcuagggcgucc

SEQ ID NO: 18015 - RNA, 20 nt, Artificial Sequence
  spacer sequence CTCN PAM
aguccucaggccaggagcua

SEQ ID NO: 18016 - RNA, 20 nt, Artificial Sequence
  spacer sequence CTCN PAM
uggugacacacugaccucca

SEQ ID NO: 18017 - RNA, 20 nt, Artificial Sequence
  spacer sequence CTCN PAM
cggggauggggugcugcccc

SEQ ID NO: 18018 - RNA, 20 nt, Artificial Sequence
  spacer sequence CTCN PAM
aguuccgaaugggggcagca

SEQ ID NO: 18019 - RNA, 20 nt, Artificial Sequence
  spacer sequence CTCN PAM
gaacccagcaggcuguuauu

SEQ ID NO: 18020 - RNA, 20 nt, Artificial Sequence
  spacer sequence CTCN PAM
accaaauuacgcucuuccaa

SEQ ID NO: 18021 - RNA, 20 nt, Artificial Sequence
  spacer sequence CTCN PAM
uccaagaguaccagcucaga

SEQ ID NO: 18022 - RNA, 20 nt, Artificial Sequence
  spacer sequence CTCN PAM
uggaagagcguaauuuggug

SEQ ID NO: 18023 - RNA, 20 nt, Artificial Sequence
  spacer sequence CTCN PAM
gaagucgcagauuuuccaaa

SEQ ID NO: 18024 - RNA, 20 nt, Artificial Sequence
  spacer sequence CTCN PAM
uuuggaaaaucugcgacuuc

SEQ ID NO: 18025 - RNA, 20 nt, Artificial Sequence
  spacer sequence CTCN PAM
cuuuuggaaaaucugcgacu

SEQ ID NO: 18026 - RNA, 20 nt, Artificial Sequence
  spacer sequence CTCN PAM
gccgaggguggugggaggcc

SEQ ID NO: 18027 - RNA, 20 nt, Artificial Sequence
  spacer sequence CTCN PAM
gcugagcaaaugugucucuc

SEQ ID NO: 18028 - RNA, 20 nt, Artificial Sequence
  spacer sequence CTCN PAM
caccacccucggcugagcaa

SEQ ID NO: 18029 - RNA, 20 nt, Artificial Sequence
  spacer sequence CTCN PAM
aggccucccaccacccucgg

SEQ ID NO: 18030 - RNA, 20 nt, Artificial Sequence
  spacer sequence CTCN PAM
ccucaaggccucccaccacc

SEQ ID NO: 18031 - RNA, 20 nt, Artificial Sequence
  spacer sequence CTCN PAM
cuucccuucccccacagacc

SEQ ID NO: 18032 - RNA, 20 nt, Artificial Sequence
  spacer sequence CTCN PAM
cccuucccuucccccacaga

SEQ ID NO: 18033 - RNA, 20 nt, Artificial Sequence
  spacer sequence CTCN PAM
cucucccuucccuuccccca

SEQ ID NO: 18034 - RNA, 20 nt, Artificial Sequence
  spacer sequence CTCN PAM
ggugugucguggucccuggg

SEQ ID NO: 18035 - RNA, 20 nt, Artificial Sequence
  spacer sequence CTCN PAM
uaggaaagccgccccaggga

SEQ ID NO: 18036 - RNA, 20 nt, Artificial Sequence
  spacer sequence CTCN PAM
ggccaccacccugcggauca

SEQ ID NO: 18037 - RNA, 20 nt, Artificial Sequence
  spacer sequence CTCN PAM
caaagccagaagcccuguca

SEQ ID NO: 18038 - RNA, 20 nt, Artificial Sequence
  spacer sequence CTCN PAM
cccaaagccagaagcccugu

SEQ ID NO: 18039 - RNA, 20 nt, Artificial Sequence
  spacer sequence CTCN PAM
caccugucauuccagcacuu

SEQ ID NO: 18040 - RNA, 20 nt, Artificial Sequence
  spacer sequence CTCN PAM
gcuucccaaagugcuggaau

SEQ ID NO: 18041 - RNA, 20 nt, Artificial Sequence
  spacer sequence CTCN PAM
agccucagcuucccaaagug

SEQ ID NO: 18042 - RNA, 20 nt, Artificial Sequence
  spacer sequence CTCN PAM
agggauccucuagccucagc

SEQ ID NO: 18043 - RNA, 20 nt, Artificial Sequence
  spacer sequence CTCN PAM
accuuccaggcucaagggau

SEQ ID NO: 18044 - RNA, 20 nt, Artificial Sequence
  spacer sequence CTCN PAM
caacagggagaccuugucuc

SEQ ID NO: 18045 - RNA, 20 nt, Artificial Sequence
  spacer sequence CTCN PAM
cuguugugagcuguggcaug

SEQ ID NO: 18046 - RNA, 20 nt, Artificial Sequence
  spacer sequence CTCN PAM
aaaaaaaaaagggaugacaa

SEQ ID NO: 18047 - RNA, 20 nt, Artificial Sequence
  spacer sequence CTCN PAM
ggcuguccccacggcuucau

SEQ ID NO: 18048 - RNA, 20 nt, Artificial Sequence
  spacer sequence CTCN PAM
aaccacaggacaugcuguga

SEQ ID NO: 18049 - RNA, 20 nt, Artificial Sequence
  spacer sequence CTCN PAM
aagacccuggaugggucacg

SEQ ID NO: 18050 - RNA, 20 nt, Artificial Sequence
  spacer sequence CTCN PAM
gccaaacccauuugccaauc

SEQ ID NO: 18051 - RNA, 20 nt, Artificial Sequence
  spacer sequence CTCN PAM
gcacgggggcuucuggucag

SEQ ID NO: 18052 - RNA, 20 nt, Artificial Sequence
  spacer sequence CTCN PAM
aacgugcauccugcuacgug

SEQ ID NO: 18053 - RNA, 20 nt, Artificial Sequence
  spacer sequence CTCN PAM
acguagcaggaugcacguuc

SEQ ID NO: 18054 - RNA, 20 nt, Artificial Sequence
  spacer sequence CTCN PAM
gucucgggaaauaagccugg

SEQ ID NO: 18055 - RNA, 20 nt, Artificial Sequence
  spacer sequence CTCN PAM
ggaaauaagccuggggcccu

SEQ ID NO: 18056 - RNA, 20 nt, Artificial Sequence
  spacer sequence CTCN PAM
cuuccuggcuaucucuacca

SEQ ID NO: 18057 - RNA, 20 nt, Artificial Sequence
  spacer sequence CTCN PAM
accaccccauggggcaggaa

SEQ ID NO: 18058 - RNA, 20 nt, Artificial Sequence
  spacer sequence CTCN PAM
gaaaugcaggcgggugucuu

SEQ ID NO: 18059 - RNA, 20 nt, Artificial Sequence
  spacer sequence CTCN PAM
caaccagcucaggaacagcg

SEQ ID NO: 18060 - RNA, 20 nt, Artificial Sequence
  spacer sequence CTCN PAM
ggaacagcgcagccgcucgc

SEQ ID NO: 18061 - RNA, 20 nt, Artificial Sequence
  spacer sequence CTCN PAM
caaaugcagugugcgaggua

SEQ ID NO: 18062 - RNA, 20 nt, Artificial Sequence
  spacer sequence CTCN PAM
cacacugcauuugcgagcgg

SEQ ID NO: 18063 - RNA, 20 nt, Artificial Sequence
  spacer sequence CTCN PAM
ugccaugcgggccccuucuc

SEQ ID NO: 18064 - RNA, 20 nt, Artificial Sequence
  spacer sequence CTCN PAM
caaggggacaccgcccaccc

SEQ ID NO: 18065 - RNA, 20 nt, Artificial Sequence
  spacer sequence CTCN PAM
gggccccagggguugggggu

SEQ ID NO: 18066 - RNA, 20 nt, Artificial Sequence
  spacer sequence CTCN PAM
aggugugcagggucugugcu

SEQ ID NO: 18067 - RNA, 20 nt, Artificial Sequence
  spacer sequence CTCN PAM
agcacagacccugcacaccu

SEQ ID NO: 18068 - RNA, 20 nt, Artificial Sequence
  spacer sequence CTCN PAM
aaccggccaccaugggcugu

SEQ ID NO: 18069 - RNA, 20 nt, Artificial Sequence
  spacer sequence CTCN PAM
ggcgcugcagggacccgggu

SEQ ID NO: 18070 - RNA, 20 nt, Artificial Sequence
  spacer sequence CTCN PAM
ucgcacucaguggacagcag

SEQ ID NO: 18071 - RNA, 20 nt, Artificial Sequence
  spacer sequence CTCN PAM
cacucaguggacagcagagc

SEQ ID NO: 18072 - RNA, 20 nt, Artificial Sequence
  spacer sequence CTCN PAM
guggacagcagagcgccccu

SEQ ID NO: 18073 - RNA, 20 nt, Artificial Sequence
  spacer sequence CTCN PAM
gcuguccacugagugcgagg

SEQ ID NO: 18074 - RNA, 20 nt, Artificial Sequence
  spacer sequence CTCN PAM
ggggcgcucugcuguccacu

SEQ ID NO: 18075 - RNA, 20 nt, Artificial Sequence
  spacer sequence CTCN PAM
guaucugcagaugcacaagg

SEQ ID NO: 18076 - RNA, 20 nt, Artificial Sequence
  spacer sequence CTCN PAM
ccugcuucugccccagccag

SEQ ID NO: 18077 - RNA, 20 nt, Artificial Sequence
  spacer sequence CTCN PAM
cuccccugcuucugccccag

SEQ ID NO: 18078 - RNA, 20 nt, Artificial Sequence
  spacer sequence CTCN PAM
gaggaaggcgccugcguccc

SEQ ID NO: 18079 - RNA, 20 nt, Artificial Sequence
  spacer sequence CTCN PAM
gagccccucccuccccugcu

SEQ ID NO: 18080 - RNA, 20 nt, Artificial Sequence
  spacer sequence CTCN PAM
guauuuugcaaauaaaacgu

SEQ ID NO: 18081 - RNA, 20 nt, Artificial Sequence
  spacer sequence CTCN PAM
cuguauuuugcaaauaaaac

SEQ ID NO: 18082 - RNA, 20 nt, Artificial Sequence
  spacer sequence CTCN PAM
auaagugcugggauuacagg

SEQ ID NO: 18083 - RNA, 20 nt, Artificial Sequence
  spacer sequence CTCN PAM
cgccuuggccuccauaagug

SEQ ID NO: 18084 - RNA, 20 nt, Artificial Sequence
  spacer sequence CTCN PAM
agggauccucccgccuuggc

SEQ ID NO: 18085 - RNA, 20 nt, Artificial Sequence
  spacer sequence CTCN PAM
ggaguuggagaccagccugg

SEQ ID NO: 18086 - RNA, 20 nt, Artificial Sequence
  spacer sequence CTCN PAM
ugagcucaagggauccuccc

SEQ ID NO: 18087 - RNA, 20 nt, Artificial Sequence
  spacer sequence CTCN PAM
aacuccugagcucaagggau

SEQ ID NO: 18088 - RNA, 20 nt, Artificial Sequence
  spacer sequence CTCN PAM
cuuuguuguccaggcugguc

SEQ ID NO: 18089 - RNA, 20 nt, Artificial Sequence
  spacer sequence CTCN PAM
acaaaaaaauacaaaaauua

SEQ ID NO: 18090 - RNA, 20 nt, Artificial Sequence
  spacer sequence CTCN PAM
aauagcugggaccacaggug

SEQ ID NO: 18091 - RNA, 20 nt, Artificial Sequence
  spacer sequence CTCN PAM
ccaauagcugggaccacagg

SEQ ID NO: 18092 - RNA, 20 nt, Artificial Sequence
  spacer sequence CTCN PAM
gccucuccaauagcugggac

SEQ ID NO: 18093 - RNA, 20 nt, Artificial Sequence
  spacer sequence CTCN PAM
caccucagccucuccaauag

SEQ ID NO: 18094 - RNA, 20 nt, Artificial Sequence
  spacer sequence CTCN PAM
agcaauccucccaccucagc

SEQ ID NO: 18095 - RNA, 20 nt, Artificial Sequence
  spacer sequence CTCN PAM
caggcucaagcaauccuccc

SEQ ID NO: 18096 - RNA, 20 nt, Artificial Sequence
  spacer sequence CTCN PAM
cugcagcuuccaccucccag

SEQ ID NO: 18097 - RNA, 20 nt, Artificial Sequence
  spacer sequence CTCN PAM
gcucacugcagcuuccaccu

SEQ ID NO: 18098 - RNA, 20 nt, Artificial Sequence
  spacer sequence CTCN PAM
agccugggcaacagagugag

SEQ ID NO: 18099 - RNA, 20 nt, Artificial Sequence
  spacer sequence CTCN PAM
guugcccaggcuggagugca

SEQ ID NO: 18100 - RNA, 20 nt, Artificial Sequence
  spacer sequence CTCN PAM
cucuguugcccaggcuggag

SEQ ID NO: 18101 - RNA, 20 nt, Artificial Sequence
  spacer sequence CTCN PAM
gucucaaaaaaaguugaggc

SEQ ID NO: 18102 - RNA, 20 nt, Artificial Sequence
  spacer sequence CTCN PAM
aaaaaaguugaggccgggca

SEQ ID NO: 18103 - RNA, 20 nt, Artificial Sequence
  spacer sequence CTCN PAM
acuuuuuuugagacagaguc

SEQ ID NO: 18104 - RNA, 20 nt, Artificial Sequence
  spacer sequence CTCN PAM
cauauguaaucccagcacuu

SEQ ID NO: 18105 - RNA, 20 nt, Artificial Sequence
  spacer sequence CTCN PAM
caaagugcugggauuacaua

SEQ ID NO: 18106 - RNA, 20 nt, Artificial Sequence
  spacer sequence CTCN PAM
acuaaaaauacaaaaauuag

SEQ ID NO: 18107 - RNA, 20 nt, Artificial Sequence
  spacer sequence CTCN PAM
ggaggcugaggcaggagaau

SEQ ID NO: 18108 - RNA, 20 nt, Artificial Sequence
  spacer sequence CTCN PAM
cgaguaacugggacuacagg

SEQ ID NO: 18109 - RNA, 20 nt, Artificial Sequence
  spacer sequence CTCN PAM
gccucccgaguaacugggac

SEQ ID NO: 18110 - RNA, 20 nt, Artificial Sequence
  spacer sequence CTCN PAM
ugccucagccucccgaguaa

SEQ ID NO: 18111 - RNA, 20 nt, Artificial Sequence
  spacer sequence CTCN PAM
uggguucaagugauucuccu

SEQ ID NO: 18112 - RNA, 20 nt, Artificial Sequence
  spacer sequence CTCN PAM
accuccuggguucaagugau

SEQ ID NO: 18113 - RNA, 20 nt, Artificial Sequence
  spacer sequence CTCN PAM
cugcaaccuccaccuccugg

SEQ ID NO: 18114 - RNA, 20 nt, Artificial Sequence
  spacer sequence CTCN PAM
gcucacugcaaccuccaccu

SEQ ID NO: 18115 - RNA, 20 nt, Artificial Sequence
  spacer sequence CTCN PAM
agccugggcaacagagggag

SEQ ID NO: 18116 - RNA, 20 nt, Artificial Sequence
  spacer sequence CTCN PAM
guugcccaggcuggagugca

SEQ ID NO: 18117 - RNA, 20 nt, Artificial Sequence
  spacer sequence CTCN PAM
cucuguugcccaggcuggag

SEQ ID NO: 18118 - RNA, 20 nt, Artificial Sequence
  spacer sequence CTCN PAM
aucucaaaaaaaaaaaaaaa

SEQ ID NO: 18119 - RNA, 20 nt, Artificial Sequence
  spacer sequence CTCN PAM
aaaaaaaaaaaaaaaaaaaa

SEQ ID NO: 18120 - RNA, 20 nt, Artificial Sequence
  spacer sequence CTCN PAM
cgccugcaaucucagcacuu

SEQ ID NO: 18121 - RNA, 20 nt, Artificial Sequence
  spacer sequence CTCN PAM
gcacuuugggaggcggaggc

SEQ ID NO: 18122 - RNA, 20 nt, Artificial Sequence
  spacer sequence CTCN PAM
caaagugcugagauugcagg

SEQ ID NO: 18123 - RNA, 20 nt, Artificial Sequence
  spacer sequence CTCN PAM
gccucccaaagugcugagau

SEQ ID NO: 18124 - RNA, 20 nt, Artificial Sequence
  spacer sequence CTCN PAM
ugauccgccugccuccgccu

SEQ ID NO: 18125 - RNA, 20 nt, Artificial Sequence
  spacer sequence CTCN PAM
ugaccucgugauccgccugc

SEQ ID NO: 18126 - RNA, 20 nt, Artificial Sequence
  spacer sequence CTCN PAM
accuccugaccucgugaucc

SEQ ID NO: 18127 - RNA, 20 nt, Artificial Sequence
  spacer sequence CTCN PAM
acuaaaaaaaauauacaaaa

SEQ ID NO: 18128 - RNA, 20 nt, Artificial Sequence
  spacer sequence CTCN PAM
agucccagguacucgggagg

SEQ ID NO: 18129 - RNA, 20 nt, Artificial Sequence
  spacer sequence CTCN PAM
ggaggcugaggcaggagaau

SEQ ID NO: 18130 - RNA, 20 nt, Artificial Sequence
  spacer sequence CTCN PAM
cgaguaccugggacuagagg

SEQ ID NO: 18131 - RNA, 20 nt, Artificial Sequence
  spacer sequence CTCN PAM
gccucccgaguaccugggac

SEQ ID NO: 18132 - RNA, 20 nt, Artificial Sequence
  spacer sequence CTCN PAM
ugccucagccucccgaguac

SEQ ID NO: 18133 - RNA, 20 nt, Artificial Sequence
  spacer sequence CTCN PAM
ccauucuccugccucagccu

SEQ ID NO: 18134 - RNA, 20 nt, Artificial Sequence
  spacer sequence CTCN PAM
cggguucucgccauucuccu

SEQ ID NO: 18135 - RNA, 20 nt, Artificial Sequence
  spacer sequence CTCN PAM
gccucccggguucucgccau

SEQ ID NO: 18136 - RNA, 20 nt, Artificial Sequence
  spacer sequence CTCN PAM
cugcaagcuccgccucccgg

SEQ ID NO: 18137 - RNA, 20 nt, Artificial Sequence
  spacer sequence CTCN PAM
agcuugggugacagagcgag

SEQ ID NO: 18138 - RNA, 20 nt, Artificial Sequence
  spacer sequence CTCN PAM
gucacccaagcuggagugua

SEQ ID NO: 18139 - RNA, 20 nt, Artificial Sequence
  spacer sequence CTCN PAM
cucugucacccaagcuggag

SEQ ID NO: 18140 - RNA, 20 nt, Artificial Sequence
  spacer sequence CTCN PAM
gucucaaaaaacaaaacaaa

SEQ ID NO: 18141 - RNA, 20 nt, Artificial Sequence
  spacer sequence CTCN PAM
aaaaacaaaacaaaacaaaa

SEQ ID NO: 18142 - RNA, 20 nt, Artificial Sequence
  spacer sequence CTCN PAM
aaacuuguuuuuguuuuguu

SEQ ID NO: 18143 - RNA, 20 nt, Artificial Sequence
  spacer sequence CTCN PAM
uaaggacgccuggagcuccc

SEQ ID NO: 18144 - RNA, 20 nt, Artificial Sequence
  spacer sequence CTCN PAM
aggcguccuuaagaggcuug

SEQ ID NO: 18145 - RNA, 20 nt, Artificial Sequence
  spacer sequence CTCN PAM
cagagcccccaggagcucaa

SEQ ID NO: 18146 - RNA, 20 nt, Artificial Sequence
  spacer sequence CTCN PAM
gggagcuccaggcguccuua

SEQ ID NO: 18147 - RNA, 20 nt, Artificial Sequence
  spacer sequence CTCN PAM
ugggggcucugggagcucca

SEQ ID NO: 18148 - RNA, 20 nt, Artificial Sequence
  spacer sequence CTCN PAM
aagaggcaggaaggguccuc

SEQ ID NO: 18149 - RNA, 20 nt, Artificial Sequence
  spacer sequence CTCN PAM
uugagcuccugggggcucug

SEQ ID NO: 18150 - RNA, 20 nt, Artificial Sequence
  spacer sequence CTCN PAM
cuauagccucuggagggauc

SEQ ID NO: 18151 - RNA, 20 nt, Artificial Sequence
  spacer sequence CTCN PAM
ggagggaucguggcccccau

SEQ ID NO: 18152 - RNA, 20 nt, Artificial Sequence
  spacer sequence CTCN PAM
agaggcuauagggaggaccc

SEQ ID NO: 18153 - RNA, 20 nt, Artificial Sequence
  spacer sequence CTCN PAM
ccccgcggugugacccucga

SEQ ID NO: 18154 - RNA, 20 nt, Artificial Sequence
  spacer sequence CTCN PAM
ccgcggugugacccucgaaa

SEQ ID NO: 18155 - RNA, 20 nt, Artificial Sequence
  spacer sequence CTCN PAM
aaagcuagacgugcccagga

SEQ ID NO: 18156 - RNA, 20 nt, Artificial Sequence
  spacer sequence CTCN PAM
ugggcacgucuagcuuucga

SEQ ID NO: 18157 - RNA, 20 nt, Artificial Sequence
  spacer sequence CTCN PAM
cgcucccucuggccgccggg

SEQ ID NO: 18158 - RNA, 20 nt, Artificial Sequence
  spacer sequence CTCN PAM
cucuggccgccgggccucag

SEQ ID NO: 18159 - RNA, 20 nt, Artificial Sequence
  spacer sequence CTCN PAM
ggccgccgggccucagccag

SEQ ID NO: 18160 - RNA, 20 nt, Artificial Sequence
  spacer sequence CTCN PAM
gccagcgcugcucccugacc

SEQ ID NO: 18161 - RNA, 20 nt, Artificial Sequence
  spacer sequence CTCN PAM
cugacccgccugugcccucg

SEQ ID NO: 18162 - RNA, 20 nt, Artificial Sequence
  spacer sequence CTCN PAM
ccagggccccucgccgccgc

SEQ ID NO: 18163 - RNA, 20 nt, Artificial Sequence
  spacer sequence CTCN PAM
ccgccgccuccugccgccuc

SEQ ID NO: 18164 - RNA, 20 nt, Artificial Sequence
  spacer sequence CTCN PAM
ugccgccucccgauauggcc

SEQ ID NO: 18165 - RNA, 20 nt, Artificial Sequence
  spacer sequence CTCN PAM
cgauauggccaaacacccgg

SEQ ID NO: 18166 - RNA, 20 nt, Artificial Sequence
  spacer sequence CTCN PAM
cgcccggguguuuggccaua

SEQ ID NO: 18167 - RNA, 20 nt, Artificial Sequence
  spacer sequence CTCN PAM
aaaugcagggacagaagacg

SEQ ID NO: 18168 - RNA, 20 nt, Artificial Sequence
  spacer sequence CTCN PAM
uacagguggggaaacugagg

SEQ ID NO: 18169 - RNA, 20 nt, Artificial Sequence
  spacer sequence CTCN PAM
guuuccccaccuguaagagg

SEQ ID NO: 18170 - RNA, 20 nt, Artificial Sequence
  spacer sequence CTCN PAM
gggcagucgcccagaccacc

SEQ ID NO: 18171 - RNA, 20 nt, Artificial Sequence
  spacer sequence CTCN PAM
cagccuucgcccgccccggc

SEQ ID NO: 18172 - RNA, 20 nt, Artificial Sequence
  spacer sequence CTCN PAM
caaggcggaaguaaacggcg

SEQ ID NO: 18173 - RNA, 20 nt, Artificial Sequence
  spacer sequence CTCN PAM
ucgcagccaucuuggcuccu

SEQ ID NO: 18174 - RNA, 20 nt, Artificial Sequence
  spacer sequence CTCN PAM
uggcagcggcugcccaggcc

SEQ ID NO: 18175 - RNA, 20 nt, Artificial Sequence
  spacer sequence CTCN PAM
gucgugggcugggcggccau

SEQ ID NO: 18176 - RNA, 20 nt, Artificial Sequence
  spacer sequence CTCN PAM
aacauggccgcccagcccac

SEQ ID NO: 18177 - RNA, 20 nt, Artificial Sequence
  spacer sequence CTCN PAM
cauauccggucacucuccac

SEQ ID NO: 18178 - RNA, 20 nt, Artificial Sequence
  spacer sequence CTCN PAM
uauccggucacucuccacug

SEQ ID NO: 18179 - RNA, 20 nt, Artificial Sequence
  spacer sequence CTCN PAM
ccacuggcgaugaucgauug

SEQ ID NO: 18180 - RNA, 20 nt, Artificial Sequence
  spacer sequence CTCN PAM
acuggcgaugaucgauugca

SEQ ID NO: 18181 - RNA, 20 nt, Artificial Sequence
  spacer sequence CTCN PAM
accagcgucgcguccgucaa

SEQ ID NO: 18182 - RNA, 20 nt, Artificial Sequence
  spacer sequence CTCN PAM
cgaccagcgucgcguccguc

SEQ ID NO: 18183 - RNA, 20 nt, Artificial Sequence
  spacer sequence CTCN PAM
cguugcucgacguuuucugc

SEQ ID NO: 18184 - RNA, 20 nt, Artificial Sequence
  spacer sequence CTCN PAM
acguuuucugcaacuccagg

SEQ ID NO: 18185 - RNA, 20 nt, Artificial Sequence
  spacer sequence CTCN PAM
aggaccguaaaauaucucga

SEQ ID NO: 18186 - RNA, 20 nt, Artificial Sequence
  spacer sequence CTCN PAM
aagacggcgaaagucgcaga

SEQ ID NO: 18187 - RNA, 20 nt, Artificial Sequence
  spacer sequence CTCN PAM
gugggcuucggagcguggcu

SEQ ID NO: 18188 - RNA, 20 nt, Artificial Sequence
  spacer sequence CTCN PAM
gaagcccaccgaggccuguc

SEQ ID NO: 18189 - RNA, 20 nt, Artificial Sequence
  spacer sequence CTCN PAM
gcaaggucgaggucgcgccu

SEQ ID NO: 18190 - RNA, 20 nt, Artificial Sequence
  spacer sequence CTCN PAM
accuugccgagccacgcucc

SEQ ID NO: 18191 - RNA, 20 nt, Artificial Sequence
  spacer sequence CTCN PAM
agagaugguuuugaggccuc

SEQ ID NO: 18192 - RNA, 20 nt, Artificial Sequence
  spacer sequence CTCN PAM
ggagaaaggcaucgaccugu

SEQ ID NO: 18193 - RNA, 20 nt, Artificial Sequence
  spacer sequence CTCN PAM
aaaccaucucuggagaaagg

SEQ ID NO: 18194 - RNA, 20 nt, Artificial Sequence
  spacer sequence CTCN PAM
guauuuaaagggggaaagcg

SEQ ID NO: 18195 - RNA, 20 nt, Artificial Sequence
  spacer sequence CTCN PAM
gguccuguuucugagcccac

SEQ ID NO: 18196 - RNA, 20 nt, Artificial Sequence
  spacer sequence CTCN PAM
gaaacaggaccggagccuuc

SEQ ID NO: 18197 - RNA, 20 nt, Artificial Sequence
  spacer sequence CTCN PAM
ucccaccgugggcucagaaa

SEQ ID NO: 18198 - RNA, 20 nt, Artificial Sequence
  spacer sequence CTCN PAM
uuuucucuucccaccguggg

SEQ ID NO: 18199 - RNA, 20 nt, Artificial Sequence
  spacer sequence CTCN PAM
ucuugcggacgcaucaucgg

SEQ ID NO: 18200 - RNA, 20 nt, Artificial Sequence
  spacer sequence CTCN PAM
auugcccucaucuugcggac

SEQ ID NO: 18201 - RNA, 20 nt, Artificial Sequence
  spacer sequence CTCN PAM
ccauugcccucaucuugcgg

SEQ ID NO: 18202 - RNA, 20 nt, Artificial Sequence
  spacer sequence CTCN PAM
cucuccauugcccucaucuu

SEQ ID NO: 18203 - RNA, 20 nt, Artificial Sequence
  spacer sequence CTCN PAM
cgucuguaguuaccugccca

SEQ ID NO: 18204 - RNA, 20 nt, Artificial Sequence
  spacer sequence CTCN PAM
cuguguuguugggcagguaa

SEQ ID NO: 18205 - RNA, 20 nt, Artificial Sequence
  spacer sequence CTCN PAM
cccuguguuguugggcaggu

SEQ ID NO: 18206 - RNA, 20 nt, Artificial Sequence
  spacer sequence CTCN PAM
gucuucggcuucguucuguc

SEQ ID NO: 18207 - RNA, 20 nt, Artificial Sequence
  spacer sequence CTCN PAM
ggaccccaauucaggcugcc

SEQ ID NO: 18208 - RNA, 20 nt, Artificial Sequence
  spacer sequence CTCN PAM
acaguuuccuaaaugggauc

SEQ ID NO: 18209 - RNA, 20 nt, Artificial Sequence
  spacer sequence CTCN PAM
caggcgugccagggaagaag

SEQ ID NO: 18210 - RNA, 20 nt, Artificial Sequence
  spacer sequence CTCN PAM
gaucucacaggcgugccagg

SEQ ID NO: 18211 - RNA, 20 nt, Artificial Sequence
  spacer sequence CTCN PAM
agaggccgaccaauauauug

SEQ ID NO: 18212 - RNA, 20 nt, Artificial Sequence
  spacer sequence CTCN PAM
ggagaaugccuacugaugcg

SEQ ID NO: 18213 - RNA, 20 nt, Artificial Sequence
  spacer sequence CTCN PAM
aauauauuggucggccucug

SEQ ID NO: 18214 - RNA, 20 nt, Artificial Sequence
  spacer sequence CTCN PAM
ccaauauauuggucggccuc

SEQ ID NO: 18215 - RNA, 20 nt, Artificial Sequence
  spacer sequence CTCN PAM
cuaaccgcaugggccaauuc

SEQ ID NO: 18216 - RNA, 20 nt, Artificial Sequence
  spacer sequence CTCN PAM
gccucccuaaccgcaugggc

SEQ ID NO: 18217 - RNA, 20 nt, Artificial Sequence
  spacer sequence CTCN PAM
cgggacuucucggccucccu

SEQ ID NO: 18218 - RNA, 20 nt, Artificial Sequence
  spacer sequence CTCN PAM
ggcuugcagauggcaucccu

SEQ ID NO: 18219 - RNA, 20 nt, Artificial Sequence
  spacer sequence CTCN PAM
guccaagucaggaaacggaa

SEQ ID NO: 18220 - RNA, 20 nt, Artificial Sequence
  spacer sequence CTCN PAM
ccugguucuuccguuuccug

SEQ ID NO: 18221 - RNA, 20 nt, Artificial Sequence
  spacer sequence CTCN PAM
ggccagggcugaaagcugag

SEQ ID NO: 18222 - RNA, 20 nt, Artificial Sequence
  spacer sequence CTCN PAM
gcuuucagcccuggccugag

SEQ ID NO: 18223 - RNA, 20 nt, Artificial Sequence
  spacer sequence CTCN PAM
uuggauucucagcuuucagc

SEQ ID NO: 18224 - RNA, 20 nt, Artificial Sequence
  spacer sequence CTCN PAM
aggacuuaacaccagcggcu

SEQ ID NO: 18225 - RNA, 20 nt, Artificial Sequence
  spacer sequence CTCN PAM
ugcccuuggacagggccccc

SEQ ID NO: 18226 - RNA, 20 nt, Artificial Sequence
  spacer sequence CTCN PAM
uccugcccuuggacagggcc

SEQ ID NO: 18227 - RNA, 20 nt, Artificial Sequence
  spacer sequence CTCN PAM
uccuccuccugcccuuggac

SEQ ID NO: 18228 - RNA, 20 nt, Artificial Sequence
  spacer sequence CTCN PAM
cuuccuccuccugcccuugg

SEQ ID NO: 18229 - RNA, 20 nt, Artificial Sequence
  spacer sequence CTCN PAM
cucuuccuccuccugcccuu

SEQ ID NO: 18230 - RNA, 20 nt, Artificial Sequence
  spacer sequence CTCN PAM
uguuccuggcgcugggacuc

SEQ ID NO: 18231 - RNA, 20 nt, Artificial Sequence
  spacer sequence CTCN PAM
uuuuuuuuuuuuuuuugaca

SEQ ID NO: 18232 - RNA, 20 nt, Artificial Sequence
  spacer sequence CTCN PAM
gucaaaaaaaaaaaaaaaaa

SEQ ID NO: 18233 - RNA, 20 nt, Artificial Sequence
  spacer sequence CTCN PAM
cucugucuccuaggcuagag

SEQ ID NO: 18234 - RNA, 20 nt, Artificial Sequence
  spacer sequence CTCN PAM
gucuccuaggcuagagacag

SEQ ID NO: 18235 - RNA, 20 nt, Artificial Sequence
  spacer sequence CTCN PAM
uaggcuagagacagaaugca

SEQ ID NO: 18236 - RNA, 20 nt, Artificial Sequence
  spacer sequence CTCN PAM
agccuaggagacagagcgag

SEQ ID NO: 18237 - RNA, 20 nt, Artificial Sequence
  spacer sequence CTCN PAM
gcucacugcagcguucaccu

SEQ ID NO: 18238 - RNA, 20 nt, Artificial Sequence
  spacer sequence CTCN PAM
cugcagcguucaccucccag

SEQ ID NO: 18239 - RNA, 20 nt, Artificial Sequence
  spacer sequence CTCN PAM
cagguucaagcgagucuccu

SEQ ID NO: 18240 - RNA, 20 nt, Artificial Sequence
  spacer sequence CTCN PAM
cuugaaccugggaggugaac

SEQ ID NO: 18241 - RNA, 20 nt, Artificial Sequence
  spacer sequence CTCN PAM
ugccucagucugcagaguag

SEQ ID NO: 18242 - RNA, 20 nt, Artificial Sequence
  spacer sequence CTCN PAM
gucugcagaguagcugggac

SEQ ID NO: 18243 - RNA, 20 nt, Artificial Sequence
  spacer sequence CTCN PAM
gcagacugaggcaggagacu

SEQ ID NO: 18244 - RNA, 20 nt, Artificial Sequence
  spacer sequence CTCN PAM
uaaaaaauacaaaacaaauu

SEQ ID NO: 18245 - RNA, 20 nt, Artificial Sequence
  spacer sequence CTCN PAM
ccuaaaaaauacaaaacaaa

SEQ ID NO: 18246 - RNA, 20 nt, Artificial Sequence
  spacer sequence CTCN PAM
ugaccucaagugauccgccu

SEQ ID NO: 18247 - RNA, 20 nt, Artificial Sequence
  spacer sequence CTCN PAM
agugauccgccugccucagc

SEQ ID NO: 18248 - RNA, 20 nt, Artificial Sequence
  spacer sequence CTCN PAM
gccucccaaagugcugggau

SEQ ID NO: 18249 - RNA, 20 nt, Artificial Sequence
  spacer sequence CTCN PAM
caaagugcugggauuacagg

SEQ ID NO: 18250 - RNA, 20 nt, Artificial Sequence
  spacer sequence CTCN PAM
augggggcggauaccaucaa

SEQ ID NO: 18251 - RNA, 20 nt, Artificial Sequence
  spacer sequence CTCN PAM
ucuggaaacccccucgcaga

SEQ ID NO: 18252 - RNA, 20 nt, Artificial Sequence
  spacer sequence CTCN PAM
ggaaacccccucgcagacac

SEQ ID NO: 18253 - RNA, 20 nt, Artificial Sequence
  spacer sequence CTCN PAM
cagacacacccagaagcagc

SEQ ID NO: 18254 - RNA, 20 nt, Artificial Sequence
  spacer sequence CTCN PAM
uaaggcgcugcuucugggug

SEQ ID NO: 18255 - RNA, 20 nt, Artificial Sequence
  spacer sequence CTCN PAM
agggaucccuucacccagcc

SEQ ID NO: 18256 - RNA, 20 nt, Artificial Sequence
  spacer sequence CTCN PAM
agcaccuacuuggcugggug

SEQ ID NO: 18257 - RNA, 20 nt, Artificial Sequence
  spacer sequence CTCN PAM
cuccucguccacuaggacag

SEQ ID NO: 18258 - RNA, 20 nt, Artificial Sequence
  spacer sequence CTCN PAM
ucguccacuaggacaguguc

SEQ ID NO: 18259 - RNA, 20 nt, Artificial Sequence
  spacer sequence CTCN PAM
uccacuaggacagugucuga

SEQ ID NO: 18260 - RNA, 20 nt, Artificial Sequence
  spacer sequence CTCN PAM
uucccucccugcauaagcug

SEQ ID NO: 18261 - RNA, 20 nt, Artificial Sequence
  spacer sequence CTCN PAM
cugcauaagcugauccagag

SEQ ID NO: 18262 - RNA, 20 nt, Artificial Sequence
  spacer sequence CTCN PAM
ggaucagcuuaugcagggag

SEQ ID NO: 18263 - RNA, 20 nt, Artificial Sequence
  spacer sequence CTCN PAM
gucuugugacaauucucugg

SEQ ID NO: 18264 - RNA, 20 nt, Artificial Sequence
  spacer sequence CTCN PAM
ugggcuccauucgugaugcu

SEQ ID NO: 18265 - RNA, 20 nt, Artificial Sequence
  spacer sequence CTCN PAM
auucgugaugcuagauucgg

SEQ ID NO: 18266 - RNA, 20 nt, Artificial Sequence
  spacer sequence CTCN PAM
acagagagcagggagugccc

SEQ ID NO: 18267 - RNA, 20 nt, Artificial Sequence
  spacer sequence CTCN PAM
guagagccaagcgguugccc

SEQ ID NO: 18268 - RNA, 20 nt, Artificial Sequence
  spacer sequence CTCN PAM
cuguagagccaagcgguugc

SEQ ID NO: 18269 - RNA, 20 nt, Artificial Sequence
  spacer sequence CTCN PAM
cugcucucuguagagccaag

SEQ ID NO: 18270 - RNA, 20 nt, Artificial Sequence
  spacer sequence CTCN PAM
guucagccccccggggcacu

SEQ ID NO: 18271 - RNA, 20 nt, Artificial Sequence
  spacer sequence CTCN PAM
ucuguucagccccccggggc

SEQ ID NO: 18272 - RNA, 20 nt, Artificial Sequence
  spacer sequence CTCN PAM
gcccuuccgucuagaaaacc

SEQ ID NO: 18273 - RNA, 20 nt, Artificial Sequence
  spacer sequence CTCN PAM
cuucgaagcugcuuuucuug

SEQ ID NO: 18274 - RNA, 20 nt, Artificial Sequence
  spacer sequence CTCN PAM
ucugcuuucacccuuacaag

SEQ ID NO: 18275 - RNA, 20 nt, Artificial Sequence
  spacer sequence CTCN PAM
uuauuguaccggcaaggauc

SEQ ID NO: 18276 - RNA, 20 nt, Artificial Sequence
  spacer sequence CTCN PAM
ccugguuucucagaaguuca

SEQ ID NO: 18277 - RNA, 20 nt, Artificial Sequence
  spacer sequence CTCN PAM
ugguuucucagaaguucaga

SEQ ID NO: 18278 - RNA, 20 nt, Artificial Sequence
  spacer sequence CTCN PAM
gaaguucagauaaacaacuu

SEQ ID NO: 18279 - RNA, 20 nt, Artificial Sequence
  spacer sequence CTCN PAM
acaacaaaaaaaaaaaaagu

SEQ ID NO: 18280 - RNA, 20 nt, Artificial Sequence
  spacer sequence CTCN PAM
cucugucgcccaggcuggag

SEQ ID NO: 18281 - RNA, 20 nt, Artificial Sequence
  spacer sequence CTCN PAM
gucgcccaggcuggagugca

SEQ ID NO: 18282 - RNA, 20 nt, Artificial Sequence
  spacer sequence CTCN PAM
agccugggcgacagagcgag

SEQ ID NO: 18283 - RNA, 20 nt, Artificial Sequence
  spacer sequence CTCN PAM
ggucacugcaaacuccgccu

SEQ ID NO: 18284 - RNA, 20 nt, Artificial Sequence
  spacer sequence CTCN PAM
gccucuccggguucaagcga

SEQ ID NO: 18285 - RNA, 20 nt, Artificial Sequence
  spacer sequence CTCN PAM
ccggguucaagcgauucucc

SEQ ID NO: 18286 - RNA, 20 nt, Artificial Sequence
  spacer sequence CTCN PAM
ggguucaagcgauucuccug

SEQ ID NO: 18287 - RNA, 20 nt, Artificial Sequence
  spacer sequence CTCN PAM
ugccugagccucccaagugu

SEQ ID NO: 18288 - RNA, 20 nt, Artificial Sequence
  spacer sequence CTCN PAM
ggcaggagaaucgcuugaac

SEQ ID NO: 18289 - RNA, 20 nt, Artificial Sequence
  spacer sequence CTCN PAM
caagugucugagauuacaag

SEQ ID NO: 18290 - RNA, 20 nt, Artificial Sequence
  spacer sequence CTCN PAM
gacacuugggaggcucaggc

SEQ ID NO: 18291 - RNA, 20 nt, Artificial Sequence
  spacer sequence CTCN PAM
acugaaaauacaaaaaucag

SEQ ID NO: 18292 - RNA, 20 nt, Artificial Sequence
  spacer sequence CTCN PAM
ucucuacugaaaauacaaaa

SEQ ID NO: 18293 - RNA, 20 nt, Artificial Sequence
  spacer sequence CTCN PAM
aacuccugaccucaagugau

SEQ ID NO: 18294 - RNA, 20 nt, Artificial Sequence
  spacer sequence CTCN PAM
ugaccucaagugauccuccc

SEQ ID NO: 18295 - RNA, 20 nt, Artificial Sequence
  spacer sequence CTCN PAM
agugauccucccgccucggc

SEQ ID NO: 18296 - RNA, 20 nt, Artificial Sequence
  spacer sequence CTCN PAM
cgccucggccucccaaaaug

SEQ ID NO: 18297 - RNA, 20 nt, Artificial Sequence
  spacer sequence CTCN PAM
gccucccaaaaugcugggau

SEQ ID NO: 18298 - RNA, 20 nt, Artificial Sequence
  spacer sequence CTCN PAM
caaaaugcugggauuacagg

SEQ ID NO: 18299 - RNA, 20 nt, Artificial Sequence
  spacer sequence CTCN PAM
cgccuguaaucccagcauuu

SEQ ID NO: 18300 - RNA, 20 nt, Artificial Sequence
  spacer sequence CTCN PAM
cuuccuucuguuaaaugaaa

SEQ ID NO: 18301 - RNA, 20 nt, Artificial Sequence
  spacer sequence CTCN PAM
ccucccuuccuucuguuaaa

SEQ ID NO: 18302 - RNA, 20 nt, Artificial Sequence
  spacer sequence CTCN PAM
ccccucccuuccuucuguua

SEQ ID NO: 18303 - RNA, 20 nt, Artificial Sequence
  spacer sequence CTCN PAM
cucuccccucccuuccuucu

SEQ ID NO: 18304 - RNA, 20 nt, Artificial Sequence
  spacer sequence CTCN PAM
accacagccucccucucccc

SEQ ID NO: 18305 - RNA, 20 nt, Artificial Sequence
  spacer sequence CTCN PAM
aaucccccagccucuaccac

SEQ ID NO: 18306 - RNA, 20 nt, Artificial Sequence
  spacer sequence CTCN PAM
ucaaaucccccagccucuac

SEQ ID NO: 18307 - RNA, 20 nt, Artificial Sequence
  spacer sequence CTCN PAM
ccucaaaucccccagccucu

SEQ ID NO: 18308 - RNA, 20 nt, Artificial Sequence
  spacer sequence CTCN PAM
gcagccucuccucaaauccc

SEQ ID NO: 18309 - RNA, 20 nt, Artificial Sequence
  spacer sequence CTCN PAM
cccacagcaaccucugcagc

SEQ ID NO: 18310 - RNA, 20 nt, Artificial Sequence
  spacer sequence CTCN PAM
gguucccugaggagggcugg

SEQ ID NO: 18311 - RNA, 20 nt, Artificial Sequence
  spacer sequence CTCN PAM
gggaaccagaggggacccgu

SEQ ID NO: 18312 - RNA, 20 nt, Artificial Sequence
  spacer sequence CTCN PAM
ucagggaaccagaggggacc

SEQ ID NO: 18313 - RNA, 20 nt, Artificial Sequence
  spacer sequence CTCN PAM
cagcccuccucagggaacca

SEQ ID NO: 18314 - RNA, 20 nt, Artificial Sequence
  spacer sequence CTCN PAM
cugcaucucccagcccuccu

SEQ ID NO: 18315 - RNA, 20 nt, Artificial Sequence
  spacer sequence CTCN PAM
aagcccagguaccauggggu

SEQ ID NO: 18316 - RNA, 20 nt, Artificial Sequence
  spacer sequence CTCN PAM
gcuaacccucaaagcccagg

SEQ ID NO: 18317 - RNA, 20 nt, Artificial Sequence
  spacer sequence CTCN PAM
gcaagauccaucugggacau

SEQ ID NO: 18318 - RNA, 20 nt, Artificial Sequence
  spacer sequence CTCN PAM
guagagacggugcagcgggg

SEQ ID NO: 18319 - RNA, 20 nt, Artificial Sequence
  spacer sequence CTCN PAM
acugaggucucugcaagauc

SEQ ID NO: 18320 - RNA, 20 nt, Artificial Sequence
  spacer sequence CTCN PAM
ccgcugcaccgucucuacug

SEQ ID NO: 18321 - RNA, 20 nt, Artificial Sequence
  spacer sequence CTCN PAM
augucccaagucacccagac

SEQ ID NO: 18322 - RNA, 20 nt, Artificial Sequence
  spacer sequence CTCN PAM
caaacaggccacaucaggau

SEQ ID NO: 18323 - RNA, 20 nt, Artificial Sequence
  spacer sequence CTCN PAM
gugugcgcccuuggcccgga

SEQ ID NO: 18324 - RNA, 20 nt, Artificial Sequence
  spacer sequence CTCN PAM
ggguucuggagcaggcucgg

SEQ ID NO: 18325 - RNA, 20 nt, Artificial Sequence
  spacer sequence CTCN PAM
agaacccagagguuccgggc

SEQ ID NO: 18326 - RNA, 20 nt, Artificial Sequence
  spacer sequence CTCN PAM
gaucuauggaggguuugccu

SEQ ID NO: 18327 - RNA, 20 nt, Artificial Sequence
  spacer sequence CTCN PAM
auagauccgagccugcucca

SEQ ID NO: 18328 - RNA, 20 nt, Artificial Sequence
  spacer sequence CTCN PAM
aaaggcaaacccuccauaga

SEQ ID NO: 18329 - RNA, 20 nt, Artificial Sequence
  spacer sequence CTCN PAM
gggcugccccgggcugcucu

SEQ ID NO: 18330 - RNA, 20 nt, Artificial Sequence
  spacer sequence CTCN PAM
gcccaaaaggaggcucccac

SEQ ID NO: 18331 - RNA, 20 nt, Artificial Sequence
  spacer sequence CTCN PAM
uuuugggcagagcagcccgg

SEQ ID NO: 18332 - RNA, 20 nt, Artificial Sequence
  spacer sequence CTCN PAM
cacacugagcagccaguggc

SEQ ID NO: 18333 - RNA, 20 nt, Artificial Sequence
  spacer sequence CTCN PAM
gugugggagccuccuuuugg

SEQ ID NO: 18334 - RNA, 20 nt, Artificial Sequence
  spacer sequence CTCN PAM
agccacuggcugcucagugu

SEQ ID NO: 18335 - RNA, 20 nt, Artificial Sequence
  spacer sequence CTCN PAM
ccacagggcagugcucuagc

SEQ ID NO: 18336 - RNA, 20 nt, Artificial Sequence
  spacer sequence CTCN PAM
ggacacuugauguggacggg

SEQ ID NO: 18337 - RNA, 20 nt, Artificial Sequence
  spacer sequence CTCN PAM
cccucagcagggaggaggug

SEQ ID NO: 18338 - RNA, 20 nt, Artificial Sequence
  spacer sequence CTCN PAM
cucagcagggaggaggugug

SEQ ID NO: 18339 - RNA, 20 nt, Artificial Sequence
  spacer sequence CTCN PAM
gcagggaggagguguggcau

SEQ ID NO: 18340 - RNA, 20 nt, Artificial Sequence
  spacer sequence CTCN PAM
cugcugagggagaggccagc

SEQ ID NO: 18341 - RNA, 20 nt, Artificial Sequence
  spacer sequence CTCN PAM
ucccugcugagggagaggcc

SEQ ID NO: 18342 - RNA, 20 nt, Artificial Sequence
  spacer sequence CTCN PAM
augccacaccuccucccugc

SEQ ID NO: 18343 - RNA, 20 nt, Artificial Sequence
  spacer sequence CTCN PAM
uggcuggcucugccacuuau

SEQ ID NO: 18344 - RNA, 20 nt, Artificial Sequence
  spacer sequence CTCN PAM
gccacuuauuagguggcugg

SEQ ID NO: 18345 - RNA, 20 nt, Artificial Sequence
  spacer sequence CTCN PAM
cccaugccagccaccuaaua

SEQ ID NO: 18346 - RNA, 20 nt, Artificial Sequence
  spacer sequence CTCN PAM
cugaggucugcucguuagag

SEQ ID NO: 18347 - RNA, 20 nt, Artificial Sequence
  spacer sequence CTCN PAM
gaggucugcucguuagagga

SEQ ID NO: 18348 - RNA, 20 nt, Artificial Sequence
  spacer sequence CTCN PAM
gagaggcugggccacucacc

SEQ ID NO: 18349 - RNA, 20 nt, Artificial Sequence
  spacer sequence CTCN PAM
uuagaggacggggaggacag

SEQ ID NO: 18350 - RNA, 20 nt, Artificial Sequence
  spacer sequence CTCN PAM
aacgagcagaccucagagag

SEQ ID NO: 18351 - RNA, 20 nt, Artificial Sequence
  spacer sequence CTCN PAM
ccguccucuaacgagcagac

SEQ ID NO: 18352 - RNA, 20 nt, Artificial Sequence
  spacer sequence CTCN PAM
caaaagcccugggcagcacu

SEQ ID NO: 18353 - RNA, 20 nt, Artificial Sequence
  spacer sequence CTCN PAM
auuauuuuucaugaugccca

SEQ ID NO: 18354 - RNA, 20 nt, Artificial Sequence
  spacer sequence CTCN PAM
cgccuguaaucccagcacuu

SEQ ID NO: 18355 - RNA, 20 nt, Artificial Sequence
  spacer sequence CTCN PAM
caaagugcugggauuacagg

SEQ ID NO: 18356 - RNA, 20 nt, Artificial Sequence
  spacer sequence CTCN PAM
gccucccaaagugcugggau

SEQ ID NO: 18357 - RNA, 20 nt, Artificial Sequence
  spacer sequence CTCN PAM
cuucucagccucccaaagug

SEQ ID NO: 18358 - RNA, 20 nt, Artificial Sequence
  spacer sequence CTCN PAM
agcaauccucccuucucagc

SEQ ID NO: 18359 - RNA, 20 nt, Artificial Sequence
  spacer sequence CTCN PAM
ggaguucaaggccugccugg

SEQ ID NO: 18360 - RNA, 20 nt, Artificial Sequence
  spacer sequence CTCN PAM
ugagcucaagcaauccuccc

SEQ ID NO: 18361 - RNA, 20 nt, Artificial Sequence
  spacer sequence CTCN PAM
caaaaaaaaaaaaaaaaaaa

SEQ ID NO: 18362 - RNA, 20 nt, Artificial Sequence
  spacer sequence CTCN PAM
aaaaaaaaaaaaaaaaaaau

SEQ ID NO: 18363 - RNA, 20 nt, Artificial Sequence
  spacer sequence CTCN PAM
caccugucguccgggcuacu

SEQ ID NO: 18364 - RNA, 20 nt, Artificial Sequence
  spacer sequence CTCN PAM
ggaggcugaggcaggaggau

SEQ ID NO: 18365 - RNA, 20 nt, Artificial Sequence
  spacer sequence CTCN PAM
ugaguagcccggacgacagg

SEQ ID NO: 18366 - RNA, 20 nt, Artificial Sequence
  spacer sequence CTCN PAM
gccuccugaguagcccggac

SEQ ID NO: 18367 - RNA, 20 nt, Artificial Sequence
  spacer sequence CTCN PAM
ugccucagccuccugaguag

SEQ ID NO: 18368 - RNA, 20 nt, Artificial Sequence
  spacer sequence CTCN PAM
ugagcccaggaguuugaggc

SEQ ID NO: 18369 - RNA, 20 nt, Artificial Sequence
  spacer sequence CTCN PAM
ggagauccuccugccucagc

SEQ ID NO: 18370 - RNA, 20 nt, Artificial Sequence
  spacer sequence CTCN PAM
ugggcucaggagauccuccu

SEQ ID NO: 18371 - RNA, 20 nt, Artificial Sequence
  spacer sequence CTCN PAM
aacuccugggcucaggagau

SEQ ID NO: 18372 - RNA, 20 nt, Artificial Sequence
  spacer sequence CTCN PAM
cugcagccucaaacuccugg

SEQ ID NO: 18373 - RNA, 20 nt, Artificial Sequence
  spacer sequence CTCN PAM
gugucccaggcuggaaucag

SEQ ID NO: 18374 - RNA, 20 nt, Artificial Sequence
  spacer sequence CTCN PAM
cucugugucccaggcuggaa

SEQ ID NO: 18375 - RNA, 20 nt, Artificial Sequence
  spacer sequence CTCN PAM
aaacaaaccaaaaaacauga

SEQ ID NO: 18376 - RNA, 20 nt, Artificial Sequence
  spacer sequence CTCN PAM
caccuguaaucccagcacuc

SEQ ID NO: 18377 - RNA, 20 nt, Artificial Sequence
  spacer sequence CTCN PAM
gggaggcugaggcgggugga

SEQ ID NO: 18378 - RNA, 20 nt, Artificial Sequence
  spacer sequence CTCN PAM
cagagugcugggauuacagg

SEQ ID NO: 18379 - RNA, 20 nt, Artificial Sequence
  spacer sequence CTCN PAM
gccucccagagugcugggau

SEQ ID NO: 18380 - RNA, 20 nt, Artificial Sequence
  spacer sequence CTCN PAM
agcaauccacccgccucagc

SEQ ID NO: 18381 - RNA, 20 nt, Artificial Sequence
  spacer sequence CTCN PAM
uggacucaagcaauccaccc

SEQ ID NO: 18382 - RNA, 20 nt, Artificial Sequence
  spacer sequence CTCN PAM
aacuccuggacucaagcaau

SEQ ID NO: 18383 - RNA, 20 nt, Artificial Sequence
  spacer sequence CTCN PAM
gucucuaccgaaaauacaaa

SEQ ID NO: 18384 - RNA, 20 nt, Artificial Sequence
  spacer sequence CTCN PAM
accgaaaauacaaaaauuag

SEQ ID NO: 18385 - RNA, 20 nt, Artificial Sequence
  spacer sequence CTCN PAM
uaacccagucucaaaaaaaa

SEQ ID NO: 18386 - RNA, 20 nt, Artificial Sequence
  spacer sequence CTCN PAM
aaaaaaaaaaaaaauuaaaa

SEQ ID NO: 18387 - RNA, 20 nt, Artificial Sequence
  spacer sequence CTCN PAM
aauuuuuuuuuaacuuuuua

SEQ ID NO: 18388 - RNA, 20 nt, Artificial Sequence
  spacer sequence CTCN PAM
caugaccgagggugggacgu

SEQ ID NO: 18389 - RNA, 20 nt, Artificial Sequence
  spacer sequence CTCN PAM
gucaugggaguacuuugcac

SEQ ID NO: 18390 - RNA, 20 nt, Artificial Sequence
  spacer sequence CTCN PAM
gaaugcuggggucugauacc

SEQ ID NO: 18391 - RNA, 20 nt, Artificial Sequence
  spacer sequence CTCN PAM
caugggacugggcagguauc

SEQ ID NO: 18392 - RNA, 20 nt, Artificial Sequence
  spacer sequence CTCN PAM
cgcaugggacugggcaggua

SEQ ID NO: 18393 - RNA, 20 nt, Artificial Sequence
  spacer sequence CTCN PAM
gccucucgcaugggacuggg

SEQ ID NO: 18394 - RNA, 20 nt, Artificial Sequence
  spacer sequence CTCN PAM
ccagcgccagccucagccuc

SEQ ID NO: 18395 - RNA, 20 nt, Artificial Sequence
  spacer sequence CTCN PAM
guggcuggugggggcucaag

SEQ ID NO: 18396 - RNA, 20 nt, Artificial Sequence
  spacer sequence CTCN PAM
agcucuguggugagaauucu

SEQ ID NO: 18397 - RNA, 20 nt, Artificial Sequence
  spacer sequence CTCN PAM
guggugagaauucucaccau

SEQ ID NO: 18398 - RNA, 20 nt, Artificial Sequence
  spacer sequence CTCN PAM
ccacagagcuugagccccca

SEQ ID NO: 18399 - RNA, 20 nt, Artificial Sequence
  spacer sequence CTCN PAM
ccauggucuucaguuacccc

SEQ ID NO: 18400 - RNA, 20 nt, Artificial Sequence
  spacer sequence CTCN PAM
agggguaacugaagaccaug

SEQ ID NO: 18401 - RNA, 20 nt, Artificial Sequence
  spacer sequence CTCN PAM
gcccacaccauugcaggcau

SEQ ID NO: 18402 - RNA, 20 nt, Artificial Sequence
  spacer sequence CTCN PAM
ccagacggggagguggagga

SEQ ID NO: 18403 - RNA, 20 nt, Artificial Sequence
  spacer sequence CTCN PAM
ccgucuggggagugggacuc

SEQ ID NO: 18404 - RNA, 20 nt, Artificial Sequence
  spacer sequence CTCN PAM
accuccccgucuggggagug

SEQ ID NO: 18405 - RNA, 20 nt, Artificial Sequence
  spacer sequence CTCN PAM
gacagccacuguacccacaa

SEQ ID NO: 18406 - RNA, 20 nt, Artificial Sequence
  spacer sequence CTCN PAM
uguggguacaguggcugucu

SEQ ID NO: 18407 - RNA, 20 nt, Artificial Sequence
  spacer sequence CTCN PAM
uuguccugcucuugugggua

SEQ ID NO: 18408 - RNA, 20 nt, Artificial Sequence
  spacer sequence CTCN PAM
auucuccuuguccugcucuu

SEQ ID NO: 18409 - RNA, 20 nt, Artificial Sequence
  spacer sequence CTCN PAM
cuccauucuccuuguccugc

SEQ ID NO: 18410 - RNA, 20 nt, Artificial Sequence
  spacer sequence CTCN PAM
ggagcaggcgggcaggcugc

SEQ ID NO: 18411 - RNA, 20 nt, Artificial Sequence
  spacer sequence CTCN PAM
ugaggugcgggggugccccc

SEQ ID NO: 18412 - RNA, 20 nt, Artificial Sequence
  spacer sequence CTCN PAM
gacuagcagccugcccgccu

SEQ ID NO: 18413 - RNA, 20 nt, Artificial Sequence
  spacer sequence CTCN PAM
ucucagacuagcagccugcc

SEQ ID NO: 18414 - RNA, 20 nt, Artificial Sequence
  spacer sequence CTCN PAM
cagguguggggggugaacau

SEQ ID NO: 18415 - RNA, 20 nt, Artificial Sequence
  spacer sequence CTCN PAM
gacuugagacgcucuuguga

SEQ ID NO: 18416 - RNA, 20 nt, Artificial Sequence
  spacer sequence CTCN PAM
agucugagauguucaccccc

SEQ ID NO: 18417 - RNA, 20 nt, Artificial Sequence
  spacer sequence CTCN PAM
ugugaagacccaguucaggg

SEQ ID NO: 18418 - RNA, 20 nt, Artificial Sequence
  spacer sequence CTCN PAM
agcccugaacugggucuuca

SEQ ID NO: 18419 - RNA, 20 nt, Artificial Sequence
  spacer sequence CTCN PAM
gaccaaccuuacgacgugcu

SEQ ID NO: 18420 - RNA, 20 nt, Artificial Sequence
  spacer sequence CTCN PAM
aaauccucugccugggaccc

SEQ ID NO: 18421 - RNA, 20 nt, Artificial Sequence
  spacer sequence CTCN PAM
gccugggacccccgaccccc

SEQ ID NO: 18422 - RNA, 20 nt, Artificial Sequence
  spacer sequence CTCN PAM
acgagggcaggugcaggaaa

SEQ ID NO: 18423 - RNA, 20 nt, Artificial Sequence
  spacer sequence CTCN PAM
uggagugggggucggggguc

SEQ ID NO: 18424 - RNA, 20 nt, Artificial Sequence
  spacer sequence CTCN PAM
gaugcuggaauauauuuggu

SEQ ID NO: 18425 - RNA, 20 nt, Artificial Sequence
  spacer sequence CTCN PAM
gugggcugaccgcuugugug

SEQ ID NO: 18426 - RNA, 20 nt, Artificial Sequence
  spacer sequence CTCN PAM
uucaagacccccuucacguu

SEQ ID NO: 18427 - RNA, 20 nt, Artificial Sequence
  spacer sequence CTCN PAM
uugggaacuguaaacacagc

SEQ ID NO: 18428 - RNA, 20 nt, Artificial Sequence
  spacer sequence CTCN PAM
uuuaucuccuugggaacugu

SEQ ID NO: 18429 - RNA, 20 nt, Artificial Sequence
  spacer sequence CTCN PAM
uuguucuuuuugcauguuuc

SEQ ID NO: 18430 - RNA, 20 nt, Artificial Sequence
  spacer sequence CTCN PAM
cgccuauagucccagcacuu

SEQ ID NO: 18431 - RNA, 20 nt, Artificial Sequence
  spacer sequence CTCN PAM
gcuuccccaagugcugggac

SEQ ID NO: 18432 - RNA, 20 nt, Artificial Sequence
  spacer sequence CTCN PAM
ggugaucugcccgccucagc

SEQ ID NO: 18433 - RNA, 20 nt, Artificial Sequence
  spacer sequence CTCN PAM
caaccucaggugaucugccc

SEQ ID NO: 18434 - RNA, 20 nt, Artificial Sequence
  spacer sequence CTCN PAM
aacucccaaccucaggugau

SEQ ID NO: 18435 - RNA, 20 nt, Artificial Sequence
  spacer sequence CTCN PAM
auguuggucaggcuggucuc

SEQ ID NO: 18436 - RNA, 20 nt, Artificial Sequence
  spacer sequence CTCN PAM
acuaaaaguacaaaaucagc

SEQ ID NO: 18437 - RNA, 20 nt, Artificial Sequence
  spacer sequence CTCN PAM
ggaggcugaggcaggagaau

SEQ ID NO: 18438 - RNA, 20 nt, Artificial Sequence
  spacer sequence CTCN PAM
cgaguagcugggauuacagg

SEQ ID NO: 18439 - RNA, 20 nt, Artificial Sequence
  spacer sequence CTCN PAM
gccucccgaguagcugggau

SEQ ID NO: 18440 - RNA, 20 nt, Artificial Sequence
  spacer sequence CTCN PAM
ugccucagccucccgaguag

SEQ ID NO: 18441 - RNA, 20 nt, Artificial Sequence
  spacer sequence CTCN PAM
uggauucaagcgauucuccu

SEQ ID NO: 18442 - RNA, 20 nt, Artificial Sequence
  spacer sequence CTCN PAM
gccuccuggauucaagcgau

SEQ ID NO: 18443 - RNA, 20 nt, Artificial Sequence
  spacer sequence CTCN PAM
cugcaaccuccgccuccugg

SEQ ID NO: 18444 - RNA, 20 nt, Artificial Sequence
  spacer sequence CTCN PAM
gcucacugcaaccuccgccu

SEQ ID NO: 18445 - RNA, 20 nt, Artificial Sequence
  spacer sequence CTCN PAM
ggccugggcgacagagcggg

SEQ ID NO: 18446 - RNA, 20 nt, Artificial Sequence
  spacer sequence CTCN PAM
gucgcccaggccggagugca

SEQ ID NO: 18447 - RNA, 20 nt, Artificial Sequence
  spacer sequence CTCN PAM
aucucaaaaaaaaaaaaaaa

SEQ ID NO: 18448 - RNA, 20 nt, Artificial Sequence
  spacer sequence CTCN PAM
aaaaaaaaaaaaaaaaacag

SEQ ID NO: 18449 - RNA, 20 nt, Artificial Sequence
  spacer sequence CTCN PAM
ccgaugaguugaaugacagu

SEQ ID NO: 18450 - RNA, 20 nt, Artificial Sequence
  spacer sequence CTCN PAM
ucggugagguuuuauuucua

SEQ ID NO: 18451 - RNA, 20 nt, Artificial Sequence
  spacer sequence CTCN PAM
acugucauucaacucaucgg

SEQ ID NO: 18452 - RNA, 20 nt, Artificial Sequence
  spacer sequence CTCN PAM
ggagugaaggagugagcccu

SEQ ID NO: 18453 - RNA, 20 nt, Artificial Sequence
  spacer sequence CTCN PAM
agagcggggacucaacuguc

SEQ ID NO: 18454 - RNA, 20 nt, Artificial Sequence
  spacer sequence CTCN PAM
uucacuccagagcggggacu

SEQ ID NO: 18455 - RNA, 20 nt, Artificial Sequence
  spacer sequence CTCN PAM
cuccuucacuccagagcggg

SEQ ID NO: 18456 - RNA, 20 nt, Artificial Sequence
  spacer sequence CTCN PAM
cugguucugucagggcucac

SEQ ID NO: 18457 - RNA, 20 nt, Artificial Sequence
  spacer sequence CTCN PAM
cugucggggguaaccucccu

SEQ ID NO: 18458 - RNA, 20 nt, Artificial Sequence
  spacer sequence CTCN PAM
cuugaucaggugcgggcucc

SEQ ID NO: 18459 - RNA, 20 nt, Artificial Sequence
  spacer sequence CTCN PAM
ucaagguugauuuguuugcu

SEQ ID NO: 18460 - RNA, 20 nt, Artificial Sequence
  spacer sequence CTCN PAM
agguugauuuguuugcuuuu

SEQ ID NO: 18461 - RNA, 20 nt, Artificial Sequence
  spacer sequence CTCN PAM
uccuacuaaaaaccagucua

SEQ ID NO: 18462 - RNA, 20 nt, Artificial Sequence
  spacer sequence CTCN PAM
uacggggcugagggcucagg

SEQ ID NO: 18463 - RNA, 20 nt, Artificial Sequence
  spacer sequence CTCN PAM
gccccguaugagauauauau

SEQ ID NO: 18464 - RNA, 20 nt, Artificial Sequence
  spacer sequence CTCN PAM
ggcacugccccuuggugcag

SEQ ID NO: 18465 - RNA, 20 nt, Artificial Sequence
  spacer sequence CTCN PAM
aggacugugugggagucccc

SEQ ID NO: 18466 - RNA, 20 nt, Artificial Sequence
  spacer sequence CTCN PAM
cacacaguccuugaggcccc

SEQ ID NO: 18467 - RNA, 20 nt, Artificial Sequence
  spacer sequence CTCN PAM
cagaccccggggacucccac

SEQ ID NO: 18468 - RNA, 20 nt, Artificial Sequence
  spacer sequence CTCN PAM
ugcgggccucacagaccccg

SEQ ID NO: 18469 - RNA, 20 nt, Artificial Sequence
  spacer sequence CTCN PAM
uugccuccugcgggccucac

SEQ ID NO: 18470 - RNA, 20 nt, Artificial Sequence
  spacer sequence CTCN PAM
ccuugccuccugcgggccuc

SEQ ID NO: 18471 - RNA, 20 nt, Artificial Sequence
  spacer sequence CTCN PAM
gccucuccuugccuccugcg

SEQ ID NO: 18472 - RNA, 20 nt, Artificial Sequence
  spacer sequence CTCN PAM
cugggggucucggccucucc

SEQ ID NO: 18473 - RNA, 20 nt, Artificial Sequence
  spacer sequence CTCN PAM
ugcgccgcugacccugcaga

SEQ ID NO: 18474 - RNA, 20 nt, Artificial Sequence
  spacer sequence CTCN PAM
gcuauugcugcgggaccggc

SEQ ID NO: 18475 - RNA, 20 nt, Artificial Sequence
  spacer sequence CTCN PAM
ccaucccuggguccaccccg

SEQ ID NO: 18476 - RNA, 20 nt, Artificial Sequence
  spacer sequence CTCN PAM
caugguggggagcggccggc

SEQ ID NO: 18477 - RNA, 20 nt, Artificial Sequence
  spacer sequence CTCN PAM
ccaccaugggagucggggug

SEQ ID NO: 18478 - RNA, 20 nt, Artificial Sequence
  spacer sequence CTCN PAM
aagccggccgcuccccacca

SEQ ID NO: 18479 - RNA, 20 nt, Artificial Sequence
  spacer sequence CTCN PAM
gucccacaggggcuccaagc

SEQ ID NO: 18480 - RNA, 20 nt, Artificial Sequence
  spacer sequence CTCN PAM
acuccgucccacaggggcuc

SEQ ID NO: 18481 - RNA, 20 nt, Artificial Sequence
  spacer sequence CTCN PAM
accuccacuccgucccacag

SEQ ID NO: 18482 - RNA, 20 nt, Artificial Sequence
  spacer sequence CTCN PAM
gggcacuugcuccaccucca

SEQ ID NO: 18483 - RNA, 20 nt, Artificial Sequence
  spacer sequence CTCN PAM
cggccaucaugugcgaaugu

SEQ ID NO: 18484 - RNA, 20 nt, Artificial Sequence
  spacer sequence CTCN PAM
gccaucaugugcgaauguuu

SEQ ID NO: 18485 - RNA, 20 nt, Artificial Sequence
  spacer sequence CTCN PAM
gugcugacgccucccucggc

SEQ ID NO: 18486 - RNA, 20 nt, Artificial Sequence
  spacer sequence CTCN PAM
cucggcaccguccugucugu

SEQ ID NO: 18487 - RNA, 20 nt, Artificial Sequence
  spacer sequence CTCN PAM
gcaccguccugucuguguug

SEQ ID NO: 18488 - RNA, 20 nt, Artificial Sequence
  spacer sequence CTCN PAM
cacgggguugggcgcuucug

SEQ ID NO: 18489 - RNA, 20 nt, Artificial Sequence
  spacer sequence CTCN PAM
cgggguugggcgcuucugcc

SEQ ID NO: 18490 - RNA, 20 nt, Artificial Sequence
  spacer sequence CTCN PAM
agaugccggccagcgucccc

SEQ ID NO: 18491 - RNA, 20 nt, Artificial Sequence
  spacer sequence CTCN PAM
gcugguguugccgcaggcau

SEQ ID NO: 18492 - RNA, 20 nt, Artificial Sequence
  spacer sequence CTCN PAM
accagccagaugccugcggc

SEQ ID NO: 18493 - RNA, 20 nt, Artificial Sequence
  spacer sequence CTCN PAM
ccgggcuccaccagccagau

SEQ ID NO: 18494 - RNA, 20 nt, Artificial Sequence
  spacer sequence CTCN PAM
gcggcggggcgguccugcgg

SEQ ID NO: 18495 - RNA, 20 nt, Artificial Sequence
  spacer sequence CTCN PAM
ugcccgcuggggucucccgc

SEQ ID NO: 18496 - RNA, 20 nt, Artificial Sequence
  spacer sequence CTCN PAM
cgccguccucgccgucacca

SEQ ID NO: 18497 - RNA, 20 nt, Artificial Sequence
  spacer sequence CTCN PAM
ccgucaccaccggguggagc

SEQ ID NO: 18498 - RNA, 20 nt, Artificial Sequence
  spacer sequence CTCN PAM
acccgguggugacggcgagg

SEQ ID NO: 18499 - RNA, 20 nt, Artificial Sequence
  spacer sequence CTCN PAM
cccaacgcuggcccagcccg

SEQ ID NO: 18500 - RNA, 20 nt, Artificial Sequence
  spacer sequence CTCN PAM
caggacccuucacaauccua

SEQ ID NO: 18501 - RNA, 20 nt, Artificial Sequence
  spacer sequence CTCN PAM
accagaaacagagcauuuaa

SEQ ID NO: 18502 - RNA, 20 nt, Artificial Sequence
  spacer sequence CTCN PAM
guuucugguagagugaaugu

SEQ ID NO: 18503 - RNA, 20 nt, Artificial Sequence
  spacer sequence CTCN PAM
ugucugcgucugcuugcaag

SEQ ID NO: 18504 - RNA, 20 nt, Artificial Sequence
  spacer sequence CTCN PAM
ggaacauuccgccccacacu

SEQ ID NO: 18505 - RNA, 20 nt, Artificial Sequence
  spacer sequence CTCN PAM
ugaaaguguggggcggaaug

SEQ ID NO: 18506 - RNA, 20 nt, Artificial Sequence
  spacer sequence CTCN PAM
ccugaaaguguggggcggaa

SEQ ID NO: 18507 - RNA, 20 nt, Artificial Sequence
  spacer sequence CTCN PAM
uucccacucuccugaaagug

SEQ ID NO: 18508 - RNA, 20 nt, Artificial Sequence
  spacer sequence CTCN PAM
ggccuguaaucccagcaccu

SEQ ID NO: 18509 - RNA, 20 nt, Artificial Sequence
  spacer sequence CTCN PAM
ccaggugcugggauuacagg

SEQ ID NO: 18510 - RNA, 20 nt, Artificial Sequence
  spacer sequence CTCN PAM
gccuccccaggugcugggau

SEQ ID NO: 18511 - RNA, 20 nt, Artificial Sequence
  spacer sequence CTCN PAM
gggcgggaguuugagaccac

SEQ ID NO: 18512 - RNA, 20 nt, Artificial Sequence
  spacer sequence CTCN PAM
cgcccugaggugaucagccc

SEQ ID NO: 18513 - RNA, 20 nt, Artificial Sequence
  spacer sequence CTCN PAM
aacucccgcccugaggugau

SEQ ID NO: 18514 - RNA, 20 nt, Artificial Sequence
  spacer sequence CTCN PAM
gauuacaggcguccgccacc

SEQ ID NO: 18515 - RNA, 20 nt, Artificial Sequence
  spacer sequence CTCN PAM
ggaggcugaggcaccagaau

SEQ ID NO: 18516 - RNA, 20 nt, Artificial Sequence
  spacer sequence CTCN PAM
ggaguagcucggauuacagg

SEQ ID NO: 18517 - RNA, 20 nt, Artificial Sequence
  spacer sequence CTCN PAM
gccuccggaguagcucggau

SEQ ID NO: 18518 - RNA, 20 nt, Artificial Sequence
  spacer sequence CTCN PAM
agugauucuggugccucagc

SEQ ID NO: 18519 - RNA, 20 nt, Artificial Sequence
  spacer sequence CTCN PAM
agggcucaagugauucuggu

SEQ ID NO: 18520 - RNA, 20 nt, Artificial Sequence
  spacer sequence CTCN PAM
accuccagggcucaagugau

SEQ ID NO: 18521 - RNA, 20 nt, Artificial Sequence
  spacer sequence CTCN PAM
augcaaccuccaccuccagg

SEQ ID NO: 18522 - RNA, 20 nt, Artificial Sequence
  spacer sequence CTCN PAM
gcuccaugcaaccuccaccu

SEQ ID NO: 18523 - RNA, 20 nt, Artificial Sequence
  spacer sequence CTCN PAM
agccugggcaacagagcgag

SEQ ID NO: 18524 - RNA, 20 nt, Artificial Sequence
  spacer sequence CTCN PAM
guugcccaggcuggagugcg

SEQ ID NO: 18525 - RNA, 20 nt, Artificial Sequence
  spacer sequence CTCN PAM
cucuguugcccaggcuggag

SEQ ID NO: 18526 - RNA, 20 nt, Artificial Sequence
  spacer sequence CTCN PAM
aaaaaaaaauaauaagaaug

SEQ ID NO: 18527 - RNA, 20 nt, Artificial Sequence
  spacer sequence CTCN PAM
gggacccuggaagcuuucug

SEQ ID NO: 18528 - RNA, 20 nt, Artificial Sequence
  spacer sequence CTCN PAM
aaggggacccagaaagcuuc

SEQ ID NO: 18529 - RNA, 20 nt, Artificial Sequence
  spacer sequence CTCN PAM
gaaugaaugaagcaaagcaa

SEQ ID NO: 18530 - RNA, 20 nt, Artificial Sequence
  spacer sequence CTCN PAM
aucucugaaugaaugaagca

SEQ ID NO: 18531 - RNA, 20 nt, Artificial Sequence
  spacer sequence CTCN PAM
guugcccaggcuggaguaca

SEQ ID NO: 18532 - RNA, 20 nt, Artificial Sequence
  spacer sequence CTCN PAM
agccugggcaacagagcaag

SEQ ID NO: 18533 - RNA, 20 nt, Artificial Sequence
  spacer sequence CTCN PAM
gcucacugcaaccuucgccu

SEQ ID NO: 18534 - RNA, 20 nt, Artificial Sequence
  spacer sequence CTCN PAM
cugcaaccuucgccucccgg

SEQ ID NO: 18535 - RNA, 20 nt, Artificial Sequence
  spacer sequence CTCN PAM
cggguucaagcgauucuccu

SEQ ID NO: 18536 - RNA, 20 nt, Artificial Sequence
  spacer sequence CTCN PAM
ugccucagccucccgaguag

SEQ ID NO: 18537 - RNA, 20 nt, Artificial Sequence
  spacer sequence CTCN PAM
gccucccgaguagcugggau

SEQ ID NO: 18538 - RNA, 20 nt, Artificial Sequence
  spacer sequence CTCN PAM
cgaguagcugggauuacagg

SEQ ID NO: 18539 - RNA, 20 nt, Artificial Sequence
  spacer sequence CTCN PAM
ggaggcugaggcaggagaau

SEQ ID NO: 18540 - RNA, 20 nt, Artificial Sequence
  spacer sequence CTCN PAM
acuacagauacaaaaaauua

SEQ ID NO: 18541 - RNA, 20 nt, Artificial Sequence
  spacer sequence CTCN PAM
agugauccaccugccuuggc

SEQ ID NO: 18542 - RNA, 20 nt, Artificial Sequence
  spacer sequence CTCN PAM
cagagugcugggauuacagg

SEQ ID NO: 18543 - RNA, 20 nt, Artificial Sequence
  spacer sequence CTCN PAM
gggaggccaaggcaggugga

SEQ ID NO: 18544 - RNA, 20 nt, Artificial Sequence
  spacer sequence CTCN PAM
cgccuguaaucccagcacuc

SEQ ID NO: 18545 - RNA, 20 nt, Artificial Sequence
  spacer sequence CTCN PAM
ucuucaacaaaaagauuuaa

SEQ ID NO: 18546 - RNA, 20 nt, Artificial Sequence
  spacer sequence CTCN PAM
gaaaacuguaauaacauaug

SEQ ID NO: 18547 - RNA, 20 nt, Artificial Sequence
  spacer sequence CTCN PAM
agcugguuucuacucugaaa

SEQ ID NO: 18548 - RNA, 20 nt, Artificial Sequence
  spacer sequence CTCN PAM
gggaggugagacuccucagu

SEQ ID NO: 18549 - RNA, 20 nt, Artificial Sequence
  spacer sequence CTCN PAM
cagagugacugugguuauaa

SEQ ID NO: 18550 - RNA, 20 nt, Artificial Sequence
  spacer sequence CTCN PAM
ccucccagagugacuguggu

SEQ ID NO: 18551 - RNA, 20 nt, Artificial Sequence
  spacer sequence CTCN PAM
ucaguccagagucacugagg

SEQ ID NO: 18552 - RNA, 20 nt, Artificial Sequence
  spacer sequence CTCN PAM
guccagagucacugaggucc

SEQ ID NO: 18553 - RNA, 20 nt, Artificial Sequence
  spacer sequence CTCN PAM
ggacugaggagucucaccuc

SEQ ID NO: 18554 - RNA, 20 nt, Artificial Sequence
  spacer sequence CTCN PAM
gugacucuggacugaggagu

SEQ ID NO: 18555 - RNA, 20 nt, Artificial Sequence
  spacer sequence CTCN PAM
cagaaaccccagaagcagcu

SEQ ID NO: 18556 - RNA, 20 nt, Artificial Sequence
  spacer sequence CTCN PAM
gcugcuucugggguuucugu

SEQ ID NO: 18557 - RNA, 20 nt, Artificial Sequence
  spacer sequence CTCN PAM
ucagcugcuucugggguuuc

SEQ ID NO: 18558 - RNA, 20 nt, Artificial Sequence
  spacer sequence CTCN PAM
gccccacuucuccucagcug

SEQ ID NO: 18559 - RNA, 20 nt, Artificial Sequence
  spacer sequence CTCN PAM
cgggcccccaucucggcccc

SEQ ID NO: 18560 - RNA, 20 nt, Artificial Sequence
  spacer sequence CTCN PAM
gaguguggcacgugggcugc

SEQ ID NO: 18561 - RNA, 20 nt, Artificial Sequence
  spacer sequence CTCN PAM
gaguuucugcacagccuggc

SEQ ID NO: 18562 - RNA, 20 nt, Artificial Sequence
  spacer sequence CTCN PAM
gccaggcccgucucuucucu

SEQ ID NO: 18563 - RNA, 20 nt, Artificial Sequence
  spacer sequence CTCN PAM
ucucuuuugagguuggugga

SEQ ID NO: 18564 - RNA, 20 nt, Artificial Sequence
  spacer sequence CTCN PAM
uuugagguugguggaaaugc

SEQ ID NO: 18565 - RNA, 20 nt, Artificial Sequence
  spacer sequence CTCN PAM
aaagagaagagacgggccug

SEQ ID NO: 18566 - RNA, 20 nt, Artificial Sequence
  spacer sequence CTCN PAM
aaaaaaacuuuuuaagguag

SEQ ID NO: 18567 - RNA, 20 nt, Artificial Sequence
  spacer sequence CTCN PAM
gucacccaggcuggagugca

SEQ ID NO: 18568 - RNA, 20 nt, Artificial Sequence
  spacer sequence CTCN PAM
agccugggugacagagcaag

SEQ ID NO: 18569 - RNA, 20 nt, Artificial Sequence
  spacer sequence CTCN PAM
gcucacugcaaccucugccu

SEQ ID NO: 18570 - RNA, 20 nt, Artificial Sequence
  spacer sequence CTCN PAM
cugcaaccucugccuccugg

SEQ ID NO: 18571 - RNA, 20 nt, Artificial Sequence
  spacer sequence CTCN PAM
gccuccuggguucaagcaau

SEQ ID NO: 18572 - RNA, 20 nt, Artificial Sequence
  spacer sequence CTCN PAM
uggguucaagcaauucuucu

SEQ ID NO: 18573 - RNA, 20 nt, Artificial Sequence
  spacer sequence CTCN PAM
gccucccgaguagcugggau

SEQ ID NO: 18574 - RNA, 20 nt, Artificial Sequence
  spacer sequence CTCN PAM
cgaguagcugggauuacagg

SEQ ID NO: 18575 - RNA, 20 nt, Artificial Sequence
  spacer sequence CTCN PAM
ggaggcugaggcagaagaau

SEQ ID NO: 18576 - RNA, 20 nt, Artificial Sequence
  spacer sequence CTCN PAM
ccuaauuuuuguauuuuuag

SEQ ID NO: 18577 - RNA, 20 nt, Artificial Sequence
  spacer sequence CTCN PAM
acuaaaaauacaaaaauuag

SEQ ID NO: 18578 - RNA, 20 nt, Artificial Sequence
  spacer sequence CTCN PAM
ugaccucaaguaauccaucu

SEQ ID NO: 18579 - RNA, 20 nt, Artificial Sequence
  spacer sequence CTCN PAM
aguaauccaucugccucagc

SEQ ID NO: 18580 - RNA, 20 nt, Artificial Sequence
  spacer sequence CTCN PAM
gccucuggaagugcugggau

SEQ ID NO: 18581 - RNA, 20 nt, Artificial Sequence
  spacer sequence CTCN PAM
ggaagugcugggauuacagg

SEQ ID NO: 18582 - RNA, 20 nt, Artificial Sequence
  spacer sequence CTCN PAM
caccuguaaucccagcacuu

SEQ ID NO: 18583 - RNA, 20 nt, Artificial Sequence
  spacer sequence CTCN PAM
aaaaaauacauuuuuuggcu

SEQ ID NO: 18584 - RNA, 20 nt, Artificial Sequence
  spacer sequence CTCN PAM
cuuagucacccaggccagag

SEQ ID NO: 18585 - RNA, 20 nt, Artificial Sequence
  spacer sequence CTCN PAM
ggccugggugacuaagggag

SEQ ID NO: 18586 - RNA, 20 nt, Artificial Sequence
  spacer sequence CTCN PAM
cugcagccuugaccucuccu

SEQ ID NO: 18587 - RNA, 20 nt, Artificial Sequence
  spacer sequence CTCN PAM
ccugggcucuagugauccuc

SEQ ID NO: 18588 - RNA, 20 nt, Artificial Sequence
  spacer sequence CTCN PAM
ugggcucuagugauccuccu

SEQ ID NO: 18589 - RNA, 20 nt, Artificial Sequence
  spacer sequence CTCN PAM
agugauccuccugccccagu

SEQ ID NO: 18590 - RNA, 20 nt, Artificial Sequence
  spacer sequence CTCN PAM
ugccccagucuccugagacc

SEQ ID NO: 18591 - RNA, 20 nt, Artificial Sequence
  spacer sequence CTCN PAM
ugagaccacagguggguacc

SEQ ID NO: 18592 - RNA, 20 nt, Artificial Sequence
  spacer sequence CTCN PAM
ggagacuggggcaggaggau

SEQ ID NO: 18593 - RNA, 20 nt, Artificial Sequence
  spacer sequence CTCN PAM
aucaaaaaaaaaaaaaaaaa

SEQ ID NO: 18594 - RNA, 20 nt, Artificial Sequence
  spacer sequence CTCN PAM
ucucuaucaaaaaaaaaaaa

SEQ ID NO: 18595 - RNA, 20 nt, Artificial Sequence
  spacer sequence CTCN PAM
guauguugccuagggugguc

SEQ ID NO: 18596 - RNA, 20 nt, Artificial Sequence
  spacer sequence CTCN PAM
agcgauccuccugccuuggc

SEQ ID NO: 18597 - RNA, 20 nt, Artificial Sequence
  spacer sequence CTCN PAM
ugccuuggccucgcaaagug

SEQ ID NO: 18598 - RNA, 20 nt, Artificial Sequence
  spacer sequence CTCN PAM
caaagugcugggaugacagg

SEQ ID NO: 18599 - RNA, 20 nt, Artificial Sequence
  spacer sequence CTCN PAM
guguuucagaaaacccacag

SEQ ID NO: 18600 - RNA, 20 nt, Artificial Sequence
  spacer sequence CTCN PAM
ucaguguuucagaaaaccca

SEQ ID NO: 18601 - RNA, 20 nt, Artificial Sequence
  spacer sequence CTCN PAM
gucuccucaguguuucagaa

SEQ ID NO: 18602 - RNA, 20 nt, Artificial Sequence
  spacer sequence CTCN PAM
gcucugucuccucaguguuu

SEQ ID NO: 18603 - RNA, 20 nt, Artificial Sequence
  spacer sequence CTCN PAM
ccgcagggucccguggaggu

SEQ ID NO: 18604 - RNA, 20 nt, Artificial Sequence
  spacer sequence CTCN PAM
acgggacccugcggggaggg

SEQ ID NO: 18605 - RNA, 20 nt, Artificial Sequence
  spacer sequence CTCN PAM
gguaaacugcgucgauccug

SEQ ID NO: 18606 - RNA, 20 nt, Artificial Sequence
  spacer sequence CTCN PAM
gccuucaccgaggggccuuu

SEQ ID NO: 18607 - RNA, 20 nt, Artificial Sequence
  spacer sequence CTCN PAM
gugaaggccgaggacuccgg

SEQ ID NO: 18608 - RNA, 20 nt, Artificial Sequence
  spacer sequence CTCN PAM
ggcagccagacgggaacugu

SEQ ID NO: 18609 - RNA, 20 nt, Artificial Sequence
  spacer sequence CTCN PAM
aaaccgcccagaccaccaaa

SEQ ID NO: 18610 - RNA, 20 nt, Artificial Sequence
  spacer sequence CTCN PAM
ucaaaaccgcccagaccacc

SEQ ID NO: 18611 - RNA, 20 nt, Artificial Sequence
  spacer sequence CTCN PAM
accggggcuuaccauacuuu

SEQ ID NO: 18612 - RNA, 20 nt, Artificial Sequence
  spacer sequence CTCN PAM
aggcuagaagggaccuguca

SEQ ID NO: 18613 - RNA, 20 nt, Artificial Sequence
  spacer sequence CTCN PAM
agaaaaguaugguaagcccc

SEQ ID NO: 18614 - RNA, 20 nt, Artificial Sequence
  spacer sequence CTCN PAM
ccuggcacugggaggaggug

SEQ ID NO: 18615 - RNA, 20 nt, Artificial Sequence
  spacer sequence CTCN PAM
cagugccaggggagggacac

SEQ ID NO: 18616 - RNA, 20 nt, Artificial Sequence
  spacer sequence CTCN PAM
ucccagugccaggggaggga

SEQ ID NO: 18617 - RNA, 20 nt, Artificial Sequence
  spacer sequence CTCN PAM
ccuccucccagugccagggg

SEQ ID NO: 18618 - RNA, 20 nt, Artificial Sequence
  spacer sequence CTCN PAM
gggguuccccucaccuccuc

SEQ ID NO: 18619 - RNA, 20 nt, Artificial Sequence
  spacer sequence CTCN PAM
ucucugggguuccccucacc

SEQ ID NO: 18620 - RNA, 20 nt, Artificial Sequence
  spacer sequence CTCN PAM
ccuggccccgugccuuguug

SEQ ID NO: 18621 - RNA, 20 nt, Artificial Sequence
  spacer sequence CTCN PAM
caagggcaccaggccucccc

SEQ ID NO: 18622 - RNA, 20 nt, Artificial Sequence
  spacer sequence CTCN PAM
cgggaccccugcaccuccca

SEQ ID NO: 18623 - RNA, 20 nt, Artificial Sequence
  spacer sequence CTCN PAM
cccgggaccccugcaccucc

SEQ ID NO: 18624 - RNA, 20 nt, Artificial Sequence
  spacer sequence CTCN PAM
cucccgggaccccugcaccu

SEQ ID NO: 18625 - RNA, 20 nt, Artificial Sequence
  spacer sequence CTCN PAM
gcucucucccgggaccccug

SEQ ID NO: 18626 - RNA, 20 nt, Artificial Sequence
  spacer sequence CTCN PAM
uggugcucagcucucucccg

SEQ ID NO: 18627 - RNA, 20 nt, Artificial Sequence
  spacer sequence CTCN PAM
acaccugcugugccccauuu

SEQ ID NO: 18628 - RNA, 20 nt, Artificial Sequence
  spacer sequence CTCN PAM
ccuggccuggggccuccuca

SEQ ID NO: 18629 - RNA, 20 nt, Artificial Sequence
  spacer sequence CTCN PAM
ucagcagggagcagaggcug

SEQ ID NO: 18630 - RNA, 20 nt, Artificial Sequence
  spacer sequence CTCN PAM
gcagggagcagaggcugugc

SEQ ID NO: 18631 - RNA, 20 nt, Artificial Sequence
  spacer sequence CTCN PAM
cugcugaggaggccccaggc

SEQ ID NO: 18632 - RNA, 20 nt, Artificial Sequence
  spacer sequence CTCN PAM
gcucccugcugaggaggccc

SEQ ID NO: 18633 - RNA, 20 nt, Artificial Sequence
  spacer sequence CTCN PAM
aaaaaaaaaaaaaaaaaaaa

SEQ ID NO: 18634 - RNA, 20 nt, Artificial Sequence
  spacer sequence CTCN PAM
gucucaaaaaaaaaaaaaaa

SEQ ID NO: 18635 - RNA, 20 nt, Artificial Sequence
  spacer sequence CTCN PAM
cucugucacccaggcuggag

SEQ ID NO: 18636 - RNA, 20 nt, Artificial Sequence
  spacer sequence CTCN PAM
gucacccaggcuggagugca

SEQ ID NO: 18637 - RNA, 20 nt, Artificial Sequence
  spacer sequence CTCN PAM
agccugggugacagagcgag

SEQ ID NO: 18638 - RNA, 20 nt, Artificial Sequence
  spacer sequence CTCN PAM
ucucacugcaagcuccgccu

SEQ ID NO: 18639 - RNA, 20 nt, Artificial Sequence
  spacer sequence CTCN PAM
cacugcaagcuccgccuccc

SEQ ID NO: 18640 - RNA, 20 nt, Artificial Sequence
  spacer sequence CTCN PAM
cugcaagcuccgccucccag

SEQ ID NO: 18641 - RNA, 20 nt, Artificial Sequence
  spacer sequence CTCN PAM
gccucccagguucacgccau

SEQ ID NO: 18642 - RNA, 20 nt, Artificial Sequence
  spacer sequence CTCN PAM
cagguucacgccauucuccu

SEQ ID NO: 18643 - RNA, 20 nt, Artificial Sequence
  spacer sequence CTCN PAM
ugccucagccucccgaguag

SEQ ID NO: 18644 - RNA, 20 nt, Artificial Sequence
  spacer sequence CTCN PAM
gccucccgaguagcugggac

SEQ ID NO: 18645 - RNA, 20 nt, Artificial Sequence
  spacer sequence CTCN PAM
cgaguagcugggacuacagg

SEQ ID NO: 18646 - RNA, 20 nt, Artificial Sequence
  spacer sequence CTCN PAM
ggaggcugaggcaggagaau

SEQ ID NO: 18647 - RNA, 20 nt, Artificial Sequence
  spacer sequence CTCN PAM
aauaaauauacaaaaaauua

SEQ ID NO: 18648 - RNA, 20 nt, Artificial Sequence
  spacer sequence CTCN PAM
ucucuaauaaauauacaaaa

SEQ ID NO: 18649 - RNA, 20 nt, Artificial Sequence
  spacer sequence CTCN PAM
gucuccugaccucgugaucc

SEQ ID NO: 18650 - RNA, 20 nt, Artificial Sequence
  spacer sequence CTCN PAM
ugaccucgugauccucccgc

SEQ ID NO: 18651 - RNA, 20 nt, Artificial Sequence
  spacer sequence CTCN PAM
ugauccucccgccucgggcu

SEQ ID NO: 18652 - RNA, 20 nt, Artificial Sequence
  spacer sequence CTCN PAM
cgccucgggcucccauagug

SEQ ID NO: 18653 - RNA, 20 nt, Artificial Sequence
  spacer sequence CTCN PAM
ggcucccauagugcugggau

SEQ ID NO: 18654 - RNA, 20 nt, Artificial Sequence
  spacer sequence CTCN PAM
cauagugcugggauuacagg

SEQ ID NO: 18655 - RNA, 20 nt, Artificial Sequence
  spacer sequence CTCN PAM
cgccuguaaucccagcacua

SEQ ID NO: 18656 - RNA, 20 nt, Artificial Sequence
  spacer sequence CTCN PAM
ggccgggcccuguggcucac

SEQ ID NO: 18657 - RNA, 20 nt, Artificial Sequence
  spacer sequence CTCN PAM
gcuuucguggggggcucugg

SEQ ID NO: 18658 - RNA, 20 nt, Artificial Sequence
  spacer sequence CTCN PAM
gggucucugguggcuggacu

SEQ ID NO: 18659 - RNA, 20 nt, Artificial Sequence
  spacer sequence CTCN PAM
gguggcuggacucggcggag

SEQ ID NO: 18660 - RNA, 20 nt, Artificial Sequence
  spacer sequence CTCN PAM
gcggaggguccagguguccu

SEQ ID NO: 18661 - RNA, 20 nt, Artificial Sequence
  spacer sequence CTCN PAM
gccgaguccagccaccagag

SEQ ID NO: 18662 - RNA, 20 nt, Artificial Sequence
  spacer sequence CTCN PAM
uggcuucucugcacaggccu

SEQ ID NO: 18663 - RNA, 20 nt, Artificial Sequence
  spacer sequence CTCN PAM
gcacaggccucagcccacau

SEQ ID NO: 18664 - RNA, 20 nt, Artificial Sequence
  spacer sequence CTCN PAM
gcccacaucaggcacccccu

SEQ ID NO: 18665 - RNA, 20 nt, Artificial Sequence
  spacer sequence CTCN PAM
gcugcggggcagggggugcc

SEQ ID NO: 18666 - RNA, 20 nt, Artificial Sequence
  spacer sequence CTCN PAM
ccccuccaggcagucucacg

SEQ ID NO: 18667 - RNA, 20 nt, Artificial Sequence
  spacer sequence CTCN PAM
aggcagucucacgggaaugc

SEQ ID NO: 18668 - RNA, 20 nt, Artificial Sequence
  spacer sequence CTCN PAM
cgggaaugcacguucaggcc

SEQ ID NO: 18669 - RNA, 20 nt, Artificial Sequence
  spacer sequence CTCN PAM
agaaaggccgcugcggguuc

SEQ ID NO: 18670 - RNA, 20 nt, Artificial Sequence
  spacer sequence CTCN PAM
uuggagccguccccagccuc

SEQ ID NO: 18671 - RNA, 20 nt, Artificial Sequence
  spacer sequence CTCN PAM
aaggagcccccagucaccaa

SEQ ID NO: 18672 - RNA, 20 nt, Artificial Sequence
  spacer sequence CTCN PAM
agcggcugcauugcagcuca

SEQ ID NO: 18673 - RNA, 20 nt, Artificial Sequence
  spacer sequence CTCN PAM
gggaccccgaagggaggacc

SEQ ID NO: 18674 - RNA, 20 nt, Artificial Sequence
  spacer sequence CTCN PAM
cuucggggucccugagcugc

SEQ ID NO: 18675 - RNA, 20 nt, Artificial Sequence
  spacer sequence CTCN PAM
gagucgccuggcaagacgga

SEQ ID NO: 18676 - RNA, 20 nt, Artificial Sequence
  spacer sequence CTCN PAM
gagucuucagcggcagaacg

SEQ ID NO: 18677 - RNA, 20 nt, Artificial Sequence
  spacer sequence CTCN PAM
gucuugccaggcgacuccga

SEQ ID NO: 18678 - RNA, 20 nt, Artificial Sequence
  spacer sequence CTCN PAM
cuccgucuugccaggcgacu

SEQ ID NO: 18679 - RNA, 20 nt, Artificial Sequence
  spacer sequence CTCN PAM
ccuucucgcuccgucuugcc

SEQ ID NO: 18680 - RNA, 20 nt, Artificial Sequence
  spacer sequence CTCN PAM
gucugcugccucgcaccgca

SEQ ID NO: 18681 - RNA, 20 nt, Artificial Sequence
  spacer sequence CTCN PAM
caccgcaccuuggaggacgc

SEQ ID NO: 18682 - RNA, 20 nt, Artificial Sequence
  spacer sequence CTCN PAM
aaggugcggugcgaggcagc

SEQ ID NO: 18683 - RNA, 20 nt, Artificial Sequence
  spacer sequence CTCN PAM
ggccaaggcugggaggggcg

SEQ ID NO: 18684 - RNA, 20 nt, Artificial Sequence
  spacer sequence CTCN PAM
cagccuuggccggagcgucc

SEQ ID NO: 18685 - RNA, 20 nt, Artificial Sequence
  spacer sequence CTCN PAM
ccccucccagccuuggccgg

SEQ ID NO: 18686 - RNA, 20 nt, Artificial Sequence
  spacer sequence CTCN PAM
ccaccgcgcgccugcagccg

SEQ ID NO: 18687 - RNA, 20 nt, Artificial Sequence
  spacer sequence CTCN PAM
cucgccaccgcgcgccugca

SEQ ID NO: 18688 - RNA, 20 nt, Artificial Sequence
  spacer sequence CTCN PAM
cccucccucgccaccgcgcg

SEQ ID NO: 18689 - RNA, 20 nt, Artificial Sequence
  spacer sequence CTCN PAM
cggucagauccucacccucc

SEQ ID NO: 18690 - RNA, 20 nt, Artificial Sequence
  spacer sequence CTCN PAM
ccucccggucagauccucac

SEQ ID NO: 18691 - RNA, 20 nt, Artificial Sequence
  spacer sequence CTCN PAM
ucgccucccggucagauccu

SEQ ID NO: 18692 - RNA, 20 nt, Artificial Sequence
  spacer sequence CTCN PAM
cuccucgccucccggucaga

SEQ ID NO: 18693 - RNA, 20 nt, Artificial Sequence
  spacer sequence CTCN PAM
ggcaagacgcaacgcuuugg

SEQ ID NO: 18694 - RNA, 20 nt, Artificial Sequence
  spacer sequence CTCN PAM
caccuaccugguccuggcga

SEQ ID NO: 18695 - RNA, 20 nt, Artificial Sequence
  spacer sequence CTCN PAM
ccuagaaaaagcacguuugg

SEQ ID NO: 18696 - RNA, 20 nt, Artificial Sequence
  spacer sequence CTCN PAM
gcucuccacugacacguuuu

SEQ ID NO: 18697 - RNA, 20 nt, Artificial Sequence
  spacer sequence CTCN PAM
ccacugacacguuuuuagcu

SEQ ID NO: 18698 - RNA, 20 nt, Artificial Sequence
  spacer sequence CTCN PAM
acugacacguuuuuagcuga

SEQ ID NO: 18699 - RNA, 20 nt, Artificial Sequence
  spacer sequence CTCN PAM
gcuaaaaacgugucagugga

SEQ ID NO: 18700 - RNA, 20 nt, Artificial Sequence
  spacer sequence CTCN PAM
uuaagaccgucuguuaaaag

SEQ ID NO: 18701 - RNA, 20 nt, Artificial Sequence
  spacer sequence CTCN PAM
gcuccccggcgaccagcaga

SEQ ID NO: 18702 - RNA, 20 nt, Artificial Sequence
  spacer sequence CTCN PAM
ccggcgaccagcagacgcgg

SEQ ID NO: 18703 - RNA, 20 nt, Artificial Sequence
  spacer sequence CTCN PAM
ugcccgggccccguggggcc

SEQ ID NO: 18704 - RNA, 20 nt, Artificial Sequence
  spacer sequence CTCN PAM
ccgccuuugcucagcgcgcc

SEQ ID NO: 18705 - RNA, 20 nt, Artificial Sequence
  spacer sequence CTCN PAM
gcgcgccucucauccccucu

SEQ ID NO: 18706 - RNA, 20 nt, Artificial Sequence
  spacer sequence CTCN PAM
cauccccucucuccugucga

SEQ ID NO: 18707 - RNA, 20 nt, Artificial Sequence
  spacer sequence CTCN PAM
uccccucucuccugucgacu

SEQ ID NO: 18708 - RNA, 20 nt, Artificial Sequence
  spacer sequence CTCN PAM
cuccugucgacucgcggcuu

SEQ ID NO: 18709 - RNA, 20 nt, Artificial Sequence
  spacer sequence CTCN PAM
ccugucgacucgcggcuucc

SEQ ID NO: 18710 - RNA, 20 nt, Artificial Sequence
  spacer sequence CTCN PAM
ugucgacucgcggcuuccug

SEQ ID NO: 18711 - RNA, 20 nt, Artificial Sequence
  spacer sequence CTCN PAM
cggcuuccugcagacccucg

SEQ ID NO: 18712 - RNA, 20 nt, Artificial Sequence
  spacer sequence CTCN PAM
gccugucugcggccccucgc

SEQ ID NO: 18713 - RNA, 20 nt, Artificial Sequence
  spacer sequence CTCN PAM
cccgcagccuccccagcagc

SEQ ID NO: 18714 - RNA, 20 nt, Artificial Sequence
  spacer sequence CTCN PAM
ccagcagccgagguuuccua

SEQ ID NO: 18715 - RNA, 20 nt, Artificial Sequence
  spacer sequence CTCN PAM
gcugcuggggaggcugcggg

SEQ ID NO: 18716 - RNA, 20 nt, Artificial Sequence
  spacer sequence CTCN PAM
ccaggaacugaacuucugug

SEQ ID NO: 18717 - RNA, 20 nt, Artificial Sequence
  spacer sequence CTCN PAM
ucuucagagaagccacuguu

SEQ ID NO: 18718 - RNA, 20 nt, Artificial Sequence
  spacer sequence CTCN PAM
gaagaugagccacagaaguu

SEQ ID NO: 18719 - RNA, 20 nt, Artificial Sequence
  spacer sequence CTCN PAM
acaguggcuucucugaagau

SEQ ID NO: 18720 - RNA, 20 nt, Artificial Sequence
  spacer sequence CTCN PAM
ucgggggugcuccagcugcg

SEQ ID NO: 18721 - RNA, 20 nt, Artificial Sequence
  spacer sequence CTCN PAM
ggggugcuccagcugcgggu

SEQ ID NO: 18722 - RNA, 20 nt, Artificial Sequence
  spacer sequence CTCN PAM
agcugcgggugagugacaug

SEQ ID NO: 18723 - RNA, 20 nt, Artificial Sequence
  spacer sequence CTCN PAM
cccgcagcuggagcaccccc

SEQ ID NO: 18724 - RNA, 20 nt, Artificial Sequence
  spacer sequence CTCN PAM
ugucacucacccgcagcugg

SEQ ID NO: 18725 - RNA, 20 nt, Artificial Sequence
  spacer sequence CTCN PAM
ccguuuuuuuuuuuuuuuuu

SEQ ID NO: 18726 - RNA, 20 nt, Artificial Sequence
  spacer sequence CTCN PAM
aaaaaaaaaaaaaaaaaaaa

SEQ ID NO: 18727 - RNA, 20 nt, Artificial Sequence
  spacer sequence CTCN PAM
agccugggauaaaaaagcga

SEQ ID NO: 18728 - RNA, 20 nt, Artificial Sequence
  spacer sequence CTCN PAM
gcucacugcaaccucugccu

SEQ ID NO: 18729 - RNA, 20 nt, Artificial Sequence
  spacer sequence CTCN PAM
cugcaaccucugccucccga

SEQ ID NO: 18730 - RNA, 20 nt, Artificial Sequence
  spacer sequence CTCN PAM
gccucccgaguucaagugau

SEQ ID NO: 18731 - RNA, 20 nt, Artificial Sequence
  spacer sequence CTCN PAM
cgaguucaagugauucuccu

SEQ ID NO: 18732 - RNA, 20 nt, Artificial Sequence
  spacer sequence CTCN PAM
ggaggcagagguugcaguga

SEQ ID NO: 18733 - RNA, 20 nt, Artificial Sequence
  spacer sequence CTCN PAM
ugccucagccuccugagugg

SEQ ID NO: 18734 - RNA, 20 nt, Artificial Sequence
  spacer sequence CTCN PAM
gccuccugaguggcugggac

SEQ ID NO: 18735 - RNA, 20 nt, Artificial Sequence
  spacer sequence CTCN PAM
ugaguggcugggacuacagg

SEQ ID NO: 18736 - RNA, 20 nt, Artificial Sequence
  spacer sequence CTCN PAM
ggaggcugaggcaggagaau

SEQ ID NO: 18737 - RNA, 20 nt, Artificial Sequence
  spacer sequence CTCN PAM
acuuaaaauacaaaauuagc

SEQ ID NO: 18738 - RNA, 20 nt, Artificial Sequence
  spacer sequence CTCN PAM
aacuccugagcucaugcccu

SEQ ID NO: 18739 - RNA, 20 nt, Artificial Sequence
  spacer sequence CTCN PAM
ugagcucaugcccuccuugg

SEQ ID NO: 18740 - RNA, 20 nt, Artificial Sequence
  spacer sequence CTCN PAM
ggaguuugagacuagccugg

SEQ ID NO: 18741 - RNA, 20 nt, Artificial Sequence
  spacer sequence CTCN PAM
ugcccuccuuggccucccaa

SEQ ID NO: 18742 - RNA, 20 nt, Artificial Sequence
  spacer sequence CTCN PAM
uuggccucccaaagugcuag

SEQ ID NO: 18743 - RNA, 20 nt, Artificial Sequence
  spacer sequence CTCN PAM
caaagugcuaggauuauagg

SEQ ID NO: 18744 - RNA, 20 nt, Artificial Sequence
  spacer sequence CTCN PAM
caccuauaauccuagcacuu

SEQ ID NO: 18745 - RNA, 20 nt, Artificial Sequence
  spacer sequence CTCN PAM
guccgggggcaguggcucac

SEQ ID NO: 18746 - RNA, 20 nt, Artificial Sequence
  spacer sequence CTCN PAM
cccaggcaccgugggggcgg

SEQ ID NO: 18747 - RNA, 20 nt, Artificial Sequence
  spacer sequence CTCN PAM
gugcaggacacaggccaaag

SEQ ID NO: 18748 - RNA, 20 nt, Artificial Sequence
  spacer sequence CTCN PAM
uucugcuuuggccugugucc

SEQ ID NO: 18749 - RNA, 20 nt, Artificial Sequence
  spacer sequence CTCN PAM
ugccuccuucugcuuuggcc

SEQ ID NO: 18750 - RNA, 20 nt, Artificial Sequence
  spacer sequence CTCN PAM
ugggugcccagucagcaagg

SEQ ID NO: 18751 - RNA, 20 nt, Artificial Sequence
  spacer sequence CTCN PAM
ccuagaguuggggggcucag

SEQ ID NO: 18752 - RNA, 20 nt, Artificial Sequence
  spacer sequence CTCN PAM
aggugagccagcauucagac

SEQ ID NO: 18753 - RNA, 20 nt, Artificial Sequence
  spacer sequence CTCN PAM
gggacaggacuaauucugga

SEQ ID NO: 18754 - RNA, 20 nt, Artificial Sequence
  spacer sequence CTCN PAM
ggugguguuaccuucugccu

SEQ ID NO: 18755 - RNA, 20 nt, Artificial Sequence
  spacer sequence CTCN PAM
cugugcucugguuucaucag

SEQ ID NO: 18756 - RNA, 20 nt, Artificial Sequence
  spacer sequence CTCN PAM
gugcucugguuucaucaguu

SEQ ID NO: 18757 - RNA, 20 nt, Artificial Sequence
  spacer sequence CTCN PAM
gguuucaucaguugugaauu

SEQ ID NO: 18758 - RNA, 20 nt, Artificial Sequence
  spacer sequence CTCN PAM
caccuguuagguaggaacca

SEQ ID NO: 18759 - RNA, 20 nt, Artificial Sequence
  spacer sequence CTCN PAM
auguauccauuuaucuaauc

SEQ ID NO: 18760 - RNA, 20 nt, Artificial Sequence
  spacer sequence CTCN PAM
ccauguauccauuuaucuaa

SEQ ID NO: 18761 - RNA, 20 nt, Artificial Sequence
  spacer sequence CTCN PAM
ccaucuuggcuguaccacgu

SEQ ID NO: 18762 - RNA, 20 nt, Artificial Sequence
  spacer sequence CTCN PAM
ggcuguguccugacagcaaa

SEQ ID NO: 18763 - RNA, 20 nt, Artificial Sequence
  spacer sequence CTCN PAM
auguugcagaaccaccugac

SEQ ID NO: 18764 - RNA, 20 nt, Artificial Sequence
  spacer sequence CTCN PAM
cuagagucauuuccauuaaa

SEQ ID NO: 18765 - RNA, 20 nt, Artificial Sequence
  spacer sequence CTCN PAM
agggaggugaaaaggaauau

SEQ ID NO: 18766 - RNA, 20 nt, Artificial Sequence
  spacer sequence CTCN PAM
acgccuauuuucugauuuaa

SEQ ID NO: 18767 - RNA, 20 nt, Artificial Sequence
  spacer sequence CTCN PAM
uuuuuaagugggacccacua

SEQ ID NO: 18768 - RNA, 20 nt, Artificial Sequence
  spacer sequence CTCN PAM
acuugcucuuuuuuaagugg

SEQ ID NO: 18769 - RNA, 20 nt, Artificial Sequence
  spacer sequence CTCN PAM
agcaacaaagcucaacuuag

SEQ ID NO: 18770 - RNA, 20 nt, Artificial Sequence
  spacer sequence CTCN PAM
acuuagaggauuccuguuaa

SEQ ID NO: 18771 - RNA, 20 nt, Artificial Sequence
  spacer sequence CTCN PAM
aaguugagcuuuguugcuug

SEQ ID NO: 18772 - RNA, 20 nt, Artificial Sequence
  spacer sequence CTCN PAM
ccguuggguccucccuggug

SEQ ID NO: 18773 - RNA, 20 nt, Artificial Sequence
  spacer sequence CTCN PAM
cugguggccccagugcaugu

SEQ ID NO: 18774 - RNA, 20 nt, Artificial Sequence
  spacer sequence CTCN PAM
ggguccugugcuuucuaagc

SEQ ID NO: 18775 - RNA, 20 nt, Artificial Sequence
  spacer sequence CTCN PAM
uucagggaguuaagaacacu

SEQ ID NO: 18776 - RNA, 20 nt, Artificial Sequence
  spacer sequence CTCN PAM
cugaaagagacuugggcuua

SEQ ID NO: 18777 - RNA, 20 nt, Artificial Sequence
  spacer sequence CTCN PAM
gagcacaagcucuguuucac

SEQ ID NO: 18778 - RNA, 20 nt, Artificial Sequence
  spacer sequence CTCN PAM
gagcaucugauaaauugucg

SEQ ID NO: 18779 - RNA, 20 nt, Artificial Sequence
  spacer sequence CTCN PAM
guuucacugaaagagugaac

SEQ ID NO: 18780 - RNA, 20 nt, Artificial Sequence
  spacer sequence CTCN PAM
uucagugaaacagagcuugu

SEQ ID NO: 18781 - RNA, 20 nt, Artificial Sequence
  spacer sequence CTCN PAM
uggguucacucuuucaguga

SEQ ID NO: 18782 - RNA, 20 nt, Artificial Sequence
  spacer sequence CTCN PAM
agcaucuccuggguucacuc

SEQ ID NO: 18783 - RNA, 20 nt, Artificial Sequence
  spacer sequence CTCN PAM
accccccacuccagcaucuc

SEQ ID NO: 18784 - RNA, 20 nt, Artificial Sequence
  spacer sequence CTCN PAM
accccuucuccaccccccac

SEQ ID NO: 18785 - RNA, 20 nt, Artificial Sequence
  spacer sequence CTCN PAM
ggaaacgaucagcggagugg

SEQ ID NO: 18786 - RNA, 20 nt, Artificial Sequence
  spacer sequence CTCN PAM
gcugaucguuuccugagggc

SEQ ID NO: 18787 - RNA, 20 nt, Artificial Sequence
  spacer sequence CTCN PAM
gagcauguccuuguggccug

SEQ ID NO: 18788 - RNA, 20 nt, Artificial Sequence
  spacer sequence CTCN PAM
gagggaaaccacuccgcuga

SEQ ID NO: 18789 - RNA, 20 nt, Artificial Sequence
  spacer sequence CTCN PAM
ggcugugcuaaauaaacgca

SEQ ID NO: 18790 - RNA, 20 nt, Artificial Sequence
  spacer sequence CTCN PAM
ccaggccaggccagcagccc

SEQ ID NO: 18791 - RNA, 20 nt, Artificial Sequence
  spacer sequence CTCN PAM
gggcucuguugguggcuucc

SEQ ID NO: 18792 - RNA, 20 nt, Artificial Sequence
  spacer sequence CTCN PAM
guugguggcuucccagagug

SEQ ID NO: 18793 - RNA, 20 nt, Artificial Sequence
  spacer sequence CTCN PAM
gggaagccaccaacagagcc

SEQ ID NO: 18794 - RNA, 20 nt, Artificial Sequence
  spacer sequence CTCN PAM
cucugggaagccaccaacag

SEQ ID NO: 18795 - RNA, 20 nt, Artificial Sequence
  spacer sequence CTCN PAM
uccccucacuccacaccgug

SEQ ID NO: 18796 - RNA, 20 nt, Artificial Sequence
  spacer sequence CTCN PAM
ccucacuccacaccguggag

SEQ ID NO: 18797 - RNA, 20 nt, Artificial Sequence
  spacer sequence CTCN PAM
cuccacaccguggagccuac

SEQ ID NO: 18798 - RNA, 20 nt, Artificial Sequence
  spacer sequence CTCN PAM
acaccguggagccuacauuc

SEQ ID NO: 18799 - RNA, 20 nt, Artificial Sequence
  spacer sequence CTCN PAM
acgguguggagugaggggag

SEQ ID NO: 18800 - RNA, 20 nt, Artificial Sequence
  spacer sequence CTCN PAM
ugguuccugccucauugggu

SEQ ID NO: 18801 - RNA, 20 nt, Artificial Sequence
  spacer sequence CTCN PAM
uuggguuuuggaaacauccu

SEQ ID NO: 18802 - RNA, 20 nt, Artificial Sequence
  spacer sequence CTCN PAM
cuugggagacugaggggcuc

SEQ ID NO: 18803 - RNA, 20 nt, Artificial Sequence
  spacer sequence CTCN PAM
caagugaggauguuuccaaa

SEQ ID NO: 18804 - RNA, 20 nt, Artificial Sequence
  spacer sequence CTCN PAM
gucucccaagugaggauguu

SEQ ID NO: 18805 - RNA, 20 nt, Artificial Sequence
  spacer sequence CTCN PAM
uagaagaucugcuggggccu

SEQ ID NO: 18806 - RNA, 20 nt, Artificial Sequence
  spacer sequence CTCN PAM
aagaucaggccccagcagau

SEQ ID NO: 18807 - RNA, 20 nt, Artificial Sequence
  spacer sequence CTCN PAM
gugcugcgaccccguccuau

SEQ ID NO: 18808 - RNA, 20 nt, Artificial Sequence
  spacer sequence CTCN PAM
accacaacacaccgggcccg

SEQ ID NO: 18809 - RNA, 20 nt, Artificial Sequence
  spacer sequence CTCN PAM
aaggggagcgagauucauga

SEQ ID NO: 18810 - RNA, 20 nt, Artificial Sequence
  spacer sequence CTCN PAM
ccuucgaggcccucaaccac

SEQ ID NO: 18811 - RNA, 20 nt, Artificial Sequence
  spacer sequence CTCN PAM
cuccccuucgaggcccucaa

SEQ ID NO: 18812 - RNA, 20 nt, Artificial Sequence
  spacer sequence CTCN PAM
ugaugccaauguggcguggu

SEQ ID NO: 18813 - RNA, 20 nt, Artificial Sequence
  spacer sequence CTCN PAM
caauacuccugaugccaaug

SEQ ID NO: 18814 - RNA, 20 nt, Artificial Sequence
  spacer sequence CTCN PAM
guugccugcagcucacaaua

SEQ ID NO: 18815 - RNA, 20 nt, Artificial Sequence
  spacer sequence CTCN PAM
guugaucucaguugccugca

SEQ ID NO: 18816 - RNA, 20 nt, Artificial Sequence
  spacer sequence CTCN PAM
gagcuucucuucugacuaaa

SEQ ID NO: 18817 - RNA, 20 nt, Artificial Sequence
  spacer sequence CTCN PAM
gagaagccguuuuucugccu

SEQ ID NO: 18818 - RNA, 20 nt, Artificial Sequence
  spacer sequence CTCN PAM
ucugacuaaaaccagcaacu

SEQ ID NO: 18819 - RNA, 20 nt, Artificial Sequence
  spacer sequence CTCN PAM
ugggaccugaggcugcuaca

SEQ ID NO: 18820 - RNA, 20 nt, Artificial Sequence
  spacer sequence CTCN PAM
ggucccaggaguugcugguu

SEQ ID NO: 18821 - RNA, 20 nt, Artificial Sequence
  spacer sequence CTCN PAM
gggaacggaaucaccgugaa

SEQ ID NO: 18822 - RNA, 20 nt, Artificial Sequence
  spacer sequence CTCN PAM
ccucugggaacggaaucacc

SEQ ID NO: 18823 - RNA, 20 nt, Artificial Sequence
  spacer sequence CTCN PAM
gcuuggggggaccaagacag

SEQ ID NO: 18824 - RNA, 20 nt, Artificial Sequence
  spacer sequence CTCN PAM
gucuaaaaaaggaaggaagg

SEQ ID NO: 18825 - RNA, 20 nt, Artificial Sequence
  spacer sequence CTCN PAM
cucuguugcccaggcuagag

SEQ ID NO: 18826 - RNA, 20 nt, Artificial Sequence
  spacer sequence CTCN PAM
guugcccaggcuagagugca

SEQ ID NO: 18827 - RNA, 20 nt, Artificial Sequence
  spacer sequence CTCN PAM
agccugggcaacagagcgag

SEQ ID NO: 18828 - RNA, 20 nt, Artificial Sequence
  spacer sequence CTCN PAM
gcacucuagccugggcaaca

SEQ ID NO: 18829 - RNA, 20 nt, Artificial Sequence
  spacer sequence CTCN PAM
gcucacugaaaccuccgccu

SEQ ID NO: 18830 - RNA, 20 nt, Artificial Sequence
  spacer sequence CTCN PAM
cugaaaccuccgccuccugg

SEQ ID NO: 18831 - RNA, 20 nt, Artificial Sequence
  spacer sequence CTCN PAM
gccuccugggucaagugauu

SEQ ID NO: 18832 - RNA, 20 nt, Artificial Sequence
  spacer sequence CTCN PAM
ugggucaagugauucuccug

SEQ ID NO: 18833 - RNA, 20 nt, Artificial Sequence
  spacer sequence CTCN PAM
ugccucagccccccgaguag

SEQ ID NO: 18834 - RNA, 20 nt, Artificial Sequence
  spacer sequence CTCN PAM
gccccccgaguagcugggau

SEQ ID NO: 18835 - RNA, 20 nt, Artificial Sequence
  spacer sequence CTCN PAM
gggggcugaggcaggagaau

SEQ ID NO: 18836 - RNA, 20 nt, Artificial Sequence
  spacer sequence CTCN PAM
aaaaaaaaaaaaauuagcca

SEQ ID NO: 18837 - RNA, 20 nt, Artificial Sequence
  spacer sequence CTCN PAM
aucucaaaaaaaaaaaaaau

SEQ ID NO: 18838 - RNA, 20 nt, Artificial Sequence
  spacer sequence CTCN PAM
cucugucaccgggcuggagu

SEQ ID NO: 18839 - RNA, 20 nt, Artificial Sequence
  spacer sequence CTCN PAM
gucaccgggcuggagugcag

SEQ ID NO: 18840 - RNA, 20 nt, Artificial Sequence
  spacer sequence CTCN PAM
agcccggugacagagugaga

SEQ ID NO: 18841 - RNA, 20 nt, Artificial Sequence
  spacer sequence CTCN PAM
gcucacugcaaccuccgccu

SEQ ID NO: 18842 - RNA, 20 nt, Artificial Sequence
  spacer sequence CTCN PAM
cugcaaccuccgccuccugg

SEQ ID NO: 18843 - RNA, 20 nt, Artificial Sequence
  spacer sequence CTCN PAM
gccuccuggguucaagcaau

SEQ ID NO: 18844 - RNA, 20 nt, Artificial Sequence
  spacer sequence CTCN PAM
uggguucaagcaauucuccu

SEQ ID NO: 18845 - RNA, 20 nt, Artificial Sequence
  spacer sequence CTCN PAM
ugccuuagccccccgaguag

SEQ ID NO: 18846 - RNA, 20 nt, Artificial Sequence
  spacer sequence CTCN PAM
gggggcuaaggcaggagaau

SEQ ID NO: 18847 - RNA, 20 nt, Artificial Sequence
  spacer sequence CTCN PAM
acuaaaaauacaaaaauuag

SEQ ID NO: 18848 - RNA, 20 nt, Artificial Sequence
  spacer sequence CTCN PAM
cuacuaaaaauacaaaaauu

SEQ ID NO: 18849 - RNA, 20 nt, Artificial Sequence
  spacer sequence CTCN PAM
ugaccucgugaucugccugc

SEQ ID NO: 18850 - RNA, 20 nt, Artificial Sequence
  spacer sequence CTCN PAM
ugaucugccugccuuggccu

SEQ ID NO: 18851 - RNA, 20 nt, Artificial Sequence
  spacer sequence CTCN PAM
caaagugcuggggugacagg

SEQ ID NO: 18852 - RNA, 20 nt, Artificial Sequence
  spacer sequence CTCN PAM
ugccugucaccccagcacuu

SEQ ID NO: 18853 - RNA, 20 nt, Artificial Sequence
  spacer sequence CTCN PAM
acuaaaaauacaaaaauuug

SEQ ID NO: 18854 - RNA, 20 nt, Artificial Sequence
  spacer sequence CTCN PAM
aacuccaaccuuaggugaac

SEQ ID NO: 18855 - RNA, 20 nt, Artificial Sequence
  spacer sequence CTCN PAM
aaccuuaggugaacugcccu

SEQ ID NO: 18856 - RNA, 20 nt, Artificial Sequence
  spacer sequence CTCN PAM
ucagccucucaaaguguugg

SEQ ID NO: 18857 - RNA, 20 nt, Artificial Sequence
  spacer sequence CTCN PAM
gccucucaaaguguugggau

SEQ ID NO: 18858 - RNA, 20 nt, Artificial Sequence
  spacer sequence CTCN PAM
caaaguguugggauuacagg

SEQ ID NO: 18859 - RNA, 20 nt, Artificial Sequence
  spacer sequence CTCN PAM
aaguguugggauuacaggcg

SEQ ID NO: 18860 - RNA, 20 nt, Artificial Sequence
  spacer sequence CTCN PAM
cgccuguaaucccaacacuu

SEQ ID NO: 18861 - RNA, 20 nt, Artificial Sequence
  spacer sequence CTCN PAM
gaagccuuuucugcugcccc

SEQ ID NO: 18862 - RNA, 20 nt, Artificial Sequence
  spacer sequence CTCN PAM
cuaggucagggaagggggca

SEQ ID NO: 18863 - RNA, 20 nt, Artificial Sequence
  spacer sequence CTCN PAM
uaaauucugcgacuggggcc

SEQ ID NO: 18864 - RNA, 20 nt, Artificial Sequence
  spacer sequence CTCN PAM
uucaccaccacaaccccacu

SEQ ID NO: 18865 - RNA, 20 nt, Artificial Sequence
  spacer sequence CTCN PAM
ccuuacgugugacacgcucg

SEQ ID NO: 18866 - RNA, 20 nt, Artificial Sequence
  spacer sequence CTCN PAM
ucgaacuugccagcaaaccc

SEQ ID NO: 18867 - RNA, 20 nt, Artificial Sequence
  spacer sequence CTCN PAM
cggguuugcuggcaaguucg

SEQ ID NO: 18868 - RNA, 20 nt, Artificial Sequence
  spacer sequence CTCN PAM
ccucccggguuugcuggcaa

SEQ ID NO: 18869 - RNA, 20 nt, Artificial Sequence
  spacer sequence CTCN PAM
ugaaaagccacugugucugc

SEQ ID NO: 18870 - RNA, 20 nt, Artificial Sequence
  spacer sequence CTCN PAM
gccaccugcacaaggugaua

SEQ ID NO: 18871 - RNA, 20 nt, Artificial Sequence
  spacer sequence CTCN PAM
cagccaccugcacaagguga

SEQ ID NO: 18872 - RNA, 20 nt, Artificial Sequence
  spacer sequence CTCN PAM
ucucucagccaccugcacaa

SEQ ID NO: 18873 - RNA, 20 nt, Artificial Sequence
  spacer sequence CTCN PAM
cagggccucuucucucagcc

SEQ ID NO: 18874 - RNA, 20 nt, Artificial Sequence
  spacer sequence CTCN PAM
ccugccucccagggccucuu

SEQ ID NO: 18875 - RNA, 20 nt, Artificial Sequence
  spacer sequence CTCN PAM
aaaaaaaaaaaagaaagaaa

SEQ ID NO: 18876 - RNA, 20 nt, Artificial Sequence
  spacer sequence CTCN PAM
gucucaaaaaaaaaaaaaga

SEQ ID NO: 18877 - RNA, 20 nt, Artificial Sequence
  spacer sequence CTCN PAM
agccugggcgacaagaacga

SEQ ID NO: 18878 - RNA, 20 nt, Artificial Sequence
  spacer sequence CTCN PAM
gcucacugcaaccucugccu

SEQ ID NO: 18879 - RNA, 20 nt, Artificial Sequence
  spacer sequence CTCN PAM
cugcaaccucugccucccgg

SEQ ID NO: 18880 - RNA, 20 nt, Artificial Sequence
  spacer sequence CTCN PAM
gccucccggguucaagcgau

SEQ ID NO: 18881 - RNA, 20 nt, Artificial Sequence
  spacer sequence CTCN PAM
cggguucaagcgauucuccu

SEQ ID NO: 18882 - RNA, 20 nt, Artificial Sequence
  spacer sequence CTCN PAM
ugccucagccucccgaguag

SEQ ID NO: 18883 - RNA, 20 nt, Artificial Sequence
  spacer sequence CTCN PAM
gccucccgaguagcugggau

SEQ ID NO: 18884 - RNA, 20 nt, Artificial Sequence
  spacer sequence CTCN PAM
cgaguagcugggauuacagg

SEQ ID NO: 18885 - RNA, 20 nt, Artificial Sequence
  spacer sequence CTCN PAM
ggaggcugaggcaggagaau

SEQ ID NO: 18886 - RNA, 20 nt, Artificial Sequence
  spacer sequence CTCN PAM
gguaaaaaaaaaaaaaaaaa

SEQ ID NO: 18887 - RNA, 20 nt, Artificial Sequence
  spacer sequence CTCN PAM
auguuggucaggcuggucuu

SEQ ID NO: 18888 - RNA, 20 nt, Artificial Sequence
  spacer sequence CTCN PAM
cgaucucaggugauccgccc

SEQ ID NO: 18889 - RNA, 20 nt, Artificial Sequence
  spacer sequence CTCN PAM
ggugauccgcccaccucggc

SEQ ID NO: 18890 - RNA, 20 nt, Artificial Sequence
  spacer sequence CTCN PAM
gccucccaaagugcugggau

SEQ ID NO: 18891 - RNA, 20 nt, Artificial Sequence
  spacer sequence CTCN PAM
caaagugcugggauuacagg

SEQ ID NO: 18892 - RNA, 20 nt, Artificial Sequence
  spacer sequence CTCN PAM
ucccuguaaucccagcacuu

SEQ ID NO: 18893 - RNA, 20 nt, Artificial Sequence
  spacer sequence CTCN PAM
uguagaaucuuuggugggga

SEQ ID NO: 18894 - RNA, 20 nt, Artificial Sequence
  spacer sequence CTCN PAM
ccaccaaagauucuacauga

SEQ ID NO: 18895 - RNA, 20 nt, Artificial Sequence
  spacer sequence CTCN PAM
ggugacagcugugggugcag

SEQ ID NO: 18896 - RNA, 20 nt, Artificial Sequence
  spacer sequence CTCN PAM
ugcucuggugacagcugugg

SEQ ID NO: 18897 - RNA, 20 nt, Artificial Sequence
  spacer sequence CTCN PAM
uggcuggucggcagguagca

SEQ ID NO: 18898 - RNA, 20 nt, Artificial Sequence
  spacer sequence CTCN PAM
ccagcuccuggcuggucggc

SEQ ID NO: 18899 - RNA, 20 nt, Artificial Sequence
  spacer sequence CTCN PAM
caaugaaaagguauuucaau

SEQ ID NO: 18900 - RNA, 20 nt, Artificial Sequence
  spacer sequence CTCN PAM
gggguugacuccgccuuucc

SEQ ID NO: 18901 - RNA, 20 nt, Artificial Sequence
  spacer sequence CTCN PAM
gccuuuccucccuucuugac

SEQ ID NO: 18902 - RNA, 20 nt, Artificial Sequence
  spacer sequence CTCN PAM
cuucuugacccuccuacccg

SEQ ID NO: 18903 - RNA, 20 nt, Artificial Sequence
  spacer sequence CTCN PAM
uacccgcccccuccagcccu

SEQ ID NO: 18904 - RNA, 20 nt, Artificial Sequence
  spacer sequence CTCN PAM
agcccugaggagcucagcuc

SEQ ID NO: 18905 - RNA, 20 nt, Artificial Sequence
  spacer sequence CTCN PAM
gggcuggagggggcggguag

SEQ ID NO: 18906 - RNA, 20 nt, Artificial Sequence
  spacer sequence CTCN PAM
ucagggcuggagggggcggg

SEQ ID NO: 18907 - RNA, 20 nt, Artificial Sequence
  spacer sequence CTCN PAM
gcuccccacacggcugcccg

SEQ ID NO: 18908 - RNA, 20 nt, Artificial Sequence
  spacer sequence CTCN PAM
ccacacggcugcccggaagu

SEQ ID NO: 18909 - RNA, 20 nt, Artificial Sequence
  spacer sequence CTCN PAM
cuugacagccgccucucauc

SEQ ID NO: 18910 - RNA, 20 nt, Artificial Sequence
  spacer sequence CTCN PAM
ugacagccgccucucaucgc

SEQ ID NO: 18911 - RNA, 20 nt, Artificial Sequence
  spacer sequence CTCN PAM
caucgcuaggccugacccuu

SEQ ID NO: 18912 - RNA, 20 nt, Artificial Sequence
  spacer sequence CTCN PAM
ucgcuaggccugacccuucu

SEQ ID NO: 18913 - RNA, 20 nt, Artificial Sequence
  spacer sequence CTCN PAM
gcuuccccagguguuccagg

SEQ ID NO: 18914 - RNA, 20 nt, Artificial Sequence
  spacer sequence CTCN PAM
uggaacaccuggggaagcug

SEQ ID NO: 18915 - RNA, 20 nt, Artificial Sequence
  spacer sequence CTCN PAM
ccaagcuccuggaacaccug

SEQ ID NO: 18916 - RNA, 20 nt, Artificial Sequence
  spacer sequence CTCN PAM
ugcagguccagcccucccca

SEQ ID NO: 18917 - RNA, 20 nt, Artificial Sequence
  spacer sequence CTCN PAM
gccuguucuuccaggcucuc

SEQ ID NO: 18918 - RNA, 20 nt, Artificial Sequence
  spacer sequence CTCN PAM
ccuugaaccuggcaccccag

SEQ ID NO: 18919 - RNA, 20 nt, Artificial Sequence
  spacer sequence CTCN PAM
uugaaccuggcaccccaggu

SEQ ID NO: 18920 - RNA, 20 nt, Artificial Sequence
  spacer sequence CTCN PAM
ucuagggagccucaaauaug

SEQ ID NO: 18921 - RNA, 20 nt, Artificial Sequence
  spacer sequence CTCN PAM
cuagaugagaauuuuggggg

SEQ ID NO: 18922 - RNA, 20 nt, Artificial Sequence
  spacer sequence CTCN PAM
aauauggccuuauuugcaaa

SEQ ID NO: 18923 - RNA, 20 nt, Artificial Sequence
  spacer sequence CTCN PAM
ugcaaugaccguauuugcaa

SEQ ID NO: 18924 - RNA, 20 nt, Artificial Sequence
  spacer sequence CTCN PAM
ucuuaauguaauuccuccug

SEQ ID NO: 18925 - RNA, 20 nt, Artificial Sequence
  spacer sequence CTCN PAM
agucugaccucaucuuaaug

SEQ ID NO: 18926 - RNA, 20 nt, Artificial Sequence
  spacer sequence CTCN PAM
ccaggacgcuggucacggga

SEQ ID NO: 18927 - RNA, 20 nt, Artificial Sequence
  spacer sequence CTCN PAM
caccaggacgcuggucacgg

SEQ ID NO: 18928 - RNA, 20 nt, Artificial Sequence
  spacer sequence CTCN PAM
ucucaccaggacgcugguca

SEQ ID NO: 18929 - RNA, 20 nt, Artificial Sequence
  spacer sequence CTCN PAM
uuccuccucucaccaggacg

SEQ ID NO: 18930 - RNA, 20 nt, Artificial Sequence
  spacer sequence CTCN PAM
guccacauggccaacccgug

SEQ ID NO: 18931 - RNA, 20 nt, Artificial Sequence
  spacer sequence CTCN PAM
gccuccguccacauggccaa

SEQ ID NO: 18932 - RNA, 20 nt, Artificial Sequence
  spacer sequence CTCN PAM
gaucuccgccuccguccaca

SEQ ID NO: 18933 - RNA, 20 nt, Artificial Sequence
  spacer sequence CTCN PAM
cgggcuuguagacacauggc

SEQ ID NO: 18934 - RNA, 20 nt, Artificial Sequence
  spacer sequence CTCN PAM
gugcucccgggcuuguagac

SEQ ID NO: 18935 - RNA, 20 nt, Artificial Sequence
  spacer sequence CTCN PAM
agaaacccucagugcucccg

SEQ ID NO: 18936 - RNA, 20 nt, Artificial Sequence
  spacer sequence CTCN PAM
agagccaugagggaaugaac

SEQ ID NO: 18937 - RNA, 20 nt, Artificial Sequence
  spacer sequence CTCN PAM
ggagacuccagaaacccuca

SEQ ID NO: 18938 - RNA, 20 nt, Artificial Sequence
  spacer sequence CTCN PAM
uggcucuggagacuccagaa

SEQ ID NO: 18939 - RNA, 20 nt, Artificial Sequence
  spacer sequence CTCN PAM
aaaccacaccaguucauucc

SEQ ID NO: 18940 - RNA, 20 nt, Artificial Sequence
  spacer sequence CTCN PAM
uuggcggccacaggauguga

SEQ ID NO: 18941 - RNA, 20 nt, Artificial Sequence
  spacer sequence CTCN PAM
ccuggagccucugggccucc

SEQ ID NO: 18942 - RNA, 20 nt, Artificial Sequence
  spacer sequence CTCN PAM
aggugaguucacauccugug

SEQ ID NO: 18943 - RNA, 20 nt, Artificial Sequence
  spacer sequence CTCN PAM
gggccucccccaggugcagg

SEQ ID NO: 18944 - RNA, 20 nt, Artificial Sequence
  spacer sequence CTCN PAM
cccaggugcaggugggacca

SEQ ID NO: 18945 - RNA, 20 nt, Artificial Sequence
  spacer sequence CTCN PAM
ugccguccugagggcugcag

SEQ ID NO: 18946 - RNA, 20 nt, Artificial Sequence
  spacer sequence CTCN PAM
ggacggcaggagccaggcug

SEQ ID NO: 18947 - RNA, 20 nt, Artificial Sequence
  spacer sequence CTCN PAM
uucucauccaguggcagguc

SEQ ID NO: 18948 - RNA, 20 nt, Artificial Sequence
  spacer sequence CTCN PAM
uccaguggcaggucccacag

SEQ ID NO: 18949 - RNA, 20 nt, Artificial Sequence
  spacer sequence CTCN PAM
ggcaagacccccuggaggac

SEQ ID NO: 18950 - RNA, 20 nt, Artificial Sequence
  spacer sequence CTCN PAM
agggggucuugccagagugc

SEQ ID NO: 18951 - RNA, 20 nt, Artificial Sequence
  spacer sequence CTCN PAM
ggcccucugcagaggagcag

SEQ ID NO: 18952 - RNA, 20 nt, Artificial Sequence
  spacer sequence CTCN PAM
gcagaggagcagugagcucg

SEQ ID NO: 18953 - RNA, 20 nt, Artificial Sequence
  spacer sequence CTCN PAM
gcagagggcccgagcguccu

SEQ ID NO: 18954 - RNA, 20 nt, Artificial Sequence
  spacer sequence CTCN PAM
ucugcagagggcccgagcgu

SEQ ID NO: 18955 - RNA, 20 nt, Artificial Sequence
  spacer sequence CTCN PAM
cugcuccucugcagagggcc

SEQ ID NO: 18956 - RNA, 20 nt, Artificial Sequence
  spacer sequence CTCN PAM
ggggguucagcugcgaugug

SEQ ID NO: 18957 - RNA, 20 nt, Artificial Sequence
  spacer sequence CTCN PAM
caucgcagcugaaccccccg

SEQ ID NO: 18958 - RNA, 20 nt, Artificial Sequence
  spacer sequence CTCN PAM
gugugggucuggaugccaaa

SEQ ID NO: 18959 - RNA, 20 nt, Artificial Sequence
  spacer sequence CTCN PAM
guucgugggucagacaugcu

SEQ ID NO: 18960 - RNA, 20 nt, Artificial Sequence
  spacer sequence CTCN PAM
cugaagccucgguucguggg

SEQ ID NO: 18961 - RNA, 20 nt, Artificial Sequence
  spacer sequence CTCN PAM
gcagcagccaagccugguaa

SEQ ID NO: 18962 - RNA, 20 nt, Artificial Sequence
  spacer sequence CTCN PAM
ggauguuucucaucagaaac

SEQ ID NO: 18963 - RNA, 20 nt, Artificial Sequence
  spacer sequence CTCN PAM
ucagaaacucggauuuuagc

SEQ ID NO: 18964 - RNA, 20 nt, Artificial Sequence
  spacer sequence CTCN PAM
gauuuuagcuugugagugug

SEQ ID NO: 18965 - RNA, 20 nt, Artificial Sequence
  spacer sequence CTCN PAM
caagcuaaaauccgaguuuc

SEQ ID NO: 18966 - RNA, 20 nt, Artificial Sequence
  spacer sequence CTCN PAM
cacucacaagcuaaaauccg

SEQ ID NO: 18967 - RNA, 20 nt, Artificial Sequence
  spacer sequence CTCN PAM
cuaaaauucagaaccaucac

SEQ ID NO: 18968 - RNA, 20 nt, Artificial Sequence
  spacer sequence CTCN PAM
aaaaaaaaaaacucccuaaa

SEQ ID NO: 18969 - RNA, 20 nt, Artificial Sequence
  spacer sequence CTCN PAM
aucucaaaaaaaaaaaacuc

SEQ ID NO: 18970 - RNA, 20 nt, Artificial Sequence
  spacer sequence CTCN PAM
caggcuguagugcagucacg

SEQ ID NO: 18971 - RNA, 20 nt, Artificial Sequence
  spacer sequence CTCN PAM
gcucacugcaaccuccgccu

SEQ ID NO: 18972 - RNA, 20 nt, Artificial Sequence
  spacer sequence CTCN PAM
cugcaaccuccgccucuuga

SEQ ID NO: 18973 - RNA, 20 nt, Artificial Sequence
  spacer sequence CTCN PAM
gccucuugaguucaagcauu

SEQ ID NO: 18974 - RNA, 20 nt, Artificial Sequence
  spacer sequence CTCN PAM
ugaguucaagcauuucuccu

SEQ ID NO: 18975 - RNA, 20 nt, Artificial Sequence
  spacer sequence CTCN PAM
agaggcggagguugcaguga

SEQ ID NO: 18976 - RNA, 20 nt, Artificial Sequence
  spacer sequence CTCN PAM
uaccucagccucccaaguag

SEQ ID NO: 18977 - RNA, 20 nt, Artificial Sequence
  spacer sequence CTCN PAM
gccucccaaguagcuggaau

SEQ ID NO: 18978 - RNA, 20 nt, Artificial Sequence
  spacer sequence CTCN PAM
caaguagcuggaauuacaug

SEQ ID NO: 18979 - RNA, 20 nt, Artificial Sequence
  spacer sequence CTCN PAM
guguuggucaggcuggucuc

SEQ ID NO: 18980 - RNA, 20 nt, Artificial Sequence
  spacer sequence CTCN PAM
aacuccugaccucgugaucu

SEQ ID NO: 18981 - RNA, 20 nt, Artificial Sequence
  spacer sequence CTCN PAM
ugaccucgugaucugcccgc

SEQ ID NO: 18982 - RNA, 20 nt, Artificial Sequence
  spacer sequence CTCN PAM
ugaucugcccgcuucggccu

SEQ ID NO: 18983 - RNA, 20 nt, Artificial Sequence
  spacer sequence CTCN PAM
cacagugcugggaucagagg

SEQ ID NO: 18984 - RNA, 20 nt, Artificial Sequence
  spacer sequence CTCN PAM
gaucccagcacugugggagg

SEQ ID NO: 18985 - RNA, 20 nt, Artificial Sequence
  spacer sequence CTCN PAM
cgccucugaucccagcacug

SEQ ID NO: 18986 - RNA, 20 nt, Artificial Sequence
  spacer sequence CTCN PAM
caaggccgggcgcagcggcu

SEQ ID NO: 18987 - RNA, 20 nt, Artificial Sequence
  spacer sequence CTCN PAM
uuuuaaaucgugcugcuuuu

SEQ ID NO: 18988 - RNA, 20 nt, Artificial Sequence
  spacer sequence CTCN PAM
aggcuguaggagguuuagaa

SEQ ID NO: 18989 - RNA, 20 nt, Artificial Sequence
  spacer sequence CTCN PAM
uacagccuugagaauccuuc

SEQ ID NO: 18990 - RNA, 20 nt, Artificial Sequence
  spacer sequence CTCN PAM
cacacaggccgcaccagcac

SEQ ID NO: 18991 - RNA, 20 nt, Artificial Sequence
  spacer sequence CTCN PAM
cucacacacaggccgcacca

SEQ ID NO: 18992 - RNA, 20 nt, Artificial Sequence
  spacer sequence CTCN PAM
cgcucacacacaggccgcac

SEQ ID NO: 18993 - RNA, 20 nt, Artificial Sequence
  spacer sequence CTCN PAM
gcagacacucucgcucacac

SEQ ID NO: 18994 - RNA, 20 nt, Artificial Sequence
  spacer sequence CTCN PAM
agccaccgugcggagaguga

SEQ ID NO: 18995 - RNA, 20 nt, Artificial Sequence
  spacer sequence CTCN PAM
agacuuccuucagccuucug

SEQ ID NO: 18996 - RNA, 20 nt, Artificial Sequence
  spacer sequence CTCN PAM
gcacgguggcucgagacuuc

SEQ ID NO: 18997 - RNA, 20 nt, Artificial Sequence
  spacer sequence CTCN PAM
ccgcacgguggcucgagacu

SEQ ID NO: 18998 - RNA, 20 nt, Artificial Sequence
  spacer sequence CTCN PAM
ccgugaaacccagcaucggg

SEQ ID NO: 18999 - RNA, 20 nt, Artificial Sequence
  spacer sequence CTCN PAM
gcauugccuggcuugggcag

SEQ ID NO: 19000 - RNA, 20 nt, Artificial Sequence
  spacer sequence CTCN PAM
ucucuugguaugagggcaaa

SEQ ID NO: 19001 - RNA, 20 nt, Artificial Sequence
  spacer sequence CTCN PAM
ugguaugagggcaaauuuug

SEQ ID NO: 19002 - RNA, 20 nt, Artificial Sequence
  spacer sequence CTCN PAM
uaccaagagaagaggguuac

SEQ ID NO: 19003 - RNA, 20 nt, Artificial Sequence
  spacer sequence CTCN PAM
cacugggauaguuuggaagc

SEQ ID NO: 19004 - RNA, 20 nt, Artificial Sequence
  spacer sequence CTCN PAM
uguauguuaugcuggcucau

SEQ ID NO: 19005 - RNA, 20 nt, Artificial Sequence
  spacer sequence CTCN PAM
uggucagccuggccucuggg

SEQ ID NO: 19006 - RNA, 20 nt, Artificial Sequence
  spacer sequence CTCN PAM
gggcuaucccuuagaucccu

SEQ ID NO: 19007 - RNA, 20 nt, Artificial Sequence
  spacer sequence CTCN PAM
agggaucuaagggauagccc

SEQ ID NO: 19008 - RNA, 20 nt, Artificial Sequence
  spacer sequence CTCN PAM
ugggaagauacagaccccaa

SEQ ID NO: 19009 - RNA, 20 nt, Artificial Sequence
  spacer sequence CTCN PAM
agaggauauuaaaacccuga

SEQ ID NO: 19010 - RNA, 20 nt, Artificial Sequence
  spacer sequence CTCN PAM
ggagguuccauuuuuaagga

SEQ ID NO: 19011 - RNA, 20 nt, Artificial Sequence
  spacer sequence CTCN PAM
ggguuuuaauauccucugga

SEQ ID NO: 19012 - RNA, 20 nt, Artificial Sequence
  spacer sequence CTCN PAM
cugaagcagacccgggacug

SEQ ID NO: 19013 - RNA, 20 nt, Artificial Sequence
  spacer sequence CTCN PAM
accgccugcaaacguccugu

SEQ ID NO: 19014 - RNA, 20 nt, Artificial Sequence
  spacer sequence CTCN PAM
aggggcugggccagggcuga

SEQ ID NO: 19015 - RNA, 20 nt, Artificial Sequence
  spacer sequence CTCN PAM
ugugagccucacagccgagu

SEQ ID NO: 19016 - RNA, 20 nt, Artificial Sequence
  spacer sequence CTCN PAM
caggaggcaaugggggccuu

SEQ ID NO: 19017 - RNA, 20 nt, Artificial Sequence
  spacer sequence CTCN PAM
cagccgagugccggggacau

SEQ ID NO: 19018 - RNA, 20 nt, Artificial Sequence
  spacer sequence CTCN PAM
gcugugaggcucacaggagg

SEQ ID NO: 19019 - RNA, 20 nt, Artificial Sequence
  spacer sequence CTCN PAM
uguccccggcacucggcugu

SEQ ID NO: 19020 - RNA, 20 nt, Artificial Sequence
  spacer sequence CTCN PAM
ggggcugggaggcacaucag

SEQ ID NO: 19021 - RNA, 20 nt, Artificial Sequence
  spacer sequence CTCN PAM
cagccccagagucccguggu

SEQ ID NO: 19022 - RNA, 20 nt, Artificial Sequence
  spacer sequence CTCN PAM
gaugugccucccagccccag

SEQ ID NO: 19023 - RNA, 20 nt, Artificial Sequence
  spacer sequence CTCN PAM
agaaagacgagaggaaauca

SEQ ID NO: 19024 - RNA, 20 nt, Artificial Sequence
  spacer sequence CTCN PAM
ucuuucuugagccccugugu

SEQ ID NO: 19025 - RNA, 20 nt, Artificial Sequence
  spacer sequence CTCN PAM
cgucuuucuugagccccugu

SEQ ID NO: 19026 - RNA, 20 nt, Artificial Sequence
  spacer sequence CTCN PAM
uugccuuucugugauuuccu

SEQ ID NO: 19027 - RNA, 20 nt, Artificial Sequence
  spacer sequence CTCN PAM
gccugucuguuaauugggcu

SEQ ID NO: 19028 - RNA, 20 nt, Artificial Sequence
  spacer sequence CTCN PAM
ccccgcugcuggccgucgug

SEQ ID NO: 19029 - RNA, 20 nt, Artificial Sequence
  spacer sequence CTCN PAM
ucacacuaggcccacgacgg

SEQ ID NO: 19030 - RNA, 20 nt, Artificial Sequence
  spacer sequence CTCN PAM
acccgcugcuggccgucgug

SEQ ID NO: 19031 - RNA, 20 nt, Artificial Sequence
  spacer sequence CTCN PAM
ucacaccgucacacuaggcc

SEQ ID NO: 19032 - RNA, 20 nt, Artificial Sequence
  spacer sequence CTCN PAM
ccccgcugcuggccgucgug

SEQ ID NO: 19033 - RNA, 20 nt, Artificial Sequence
  spacer sequence CTCN PAM
ucacacuagggggacucugg

SEQ ID NO: 19034 - RNA, 20 nt, Artificial Sequence
  spacer sequence CTCN PAM
gguccuccgccuugaccagc

SEQ ID NO: 19035 - RNA, 20 nt, Artificial Sequence
  spacer sequence CTCN PAM
gccuugaccagcccccaccu

SEQ ID NO: 19036 - RNA, 20 nt, Artificial Sequence
  spacer sequence CTCN PAM
ccaggcccggcagcguguag

SEQ ID NO: 19037 - RNA, 20 nt, Artificial Sequence
  spacer sequence CTCN PAM
cuacacgcugccgggccugg

SEQ ID NO: 19038 - RNA, 20 nt, Artificial Sequence
  spacer sequence CTCN PAM
ggggacccaggccucccuac

SEQ ID NO: 19039 - RNA, 20 nt, Artificial Sequence
  spacer sequence CTCN PAM
gggagaguggaugccacccc

SEQ ID NO: 19040 - RNA, 20 nt, Artificial Sequence
  spacer sequence CTCN PAM
cugaguuucauggcuucggc

SEQ ID NO: 19041 - RNA, 20 nt, Artificial Sequence
  spacer sequence CTCN PAM
cccugaguuucauggcuucg

SEQ ID NO: 19042 - RNA, 20 nt, Artificial Sequence
  spacer sequence CTCN PAM
ggugcgucccugccacagca

SEQ ID NO: 19043 - RNA, 20 nt, Artificial Sequence
  spacer sequence CTCN PAM
acaucccggcaaggcgucgg

SEQ ID NO: 19044 - RNA, 20 nt, Artificial Sequence
  spacer sequence CTCN PAM
cgacgccuugccgggaugug

SEQ ID NO: 19045 - RNA, 20 nt, Artificial Sequence
  spacer sequence CTCN PAM
cagcucccgacgccuugccg

SEQ ID NO: 19046 - RNA, 20 nt, Artificial Sequence
  spacer sequence CTCN PAM
gccagcaucguaaugacuug

SEQ ID NO: 19047 - RNA, 20 nt, Artificial Sequence
  spacer sequence CTCN PAM
gcaggcccacgcucagccag

SEQ ID NO: 19048 - RNA, 20 nt, Artificial Sequence
  spacer sequence CTCN PAM
cagcaggcccacgcucagcc

SEQ ID NO: 19049 - RNA, 20 nt, Artificial Sequence
  spacer sequence CTCN PAM
uccauggcaccgccguccca

SEQ ID NO: 19050 - RNA, 20 nt, Artificial Sequence
  spacer sequence CTCN PAM
uucacggcaccaacgucccg

SEQ ID NO: 19051 - RNA, 20 nt, Artificial Sequence
  spacer sequence CTCN PAM
ucccauccauggcaccacug

SEQ ID NO: 19052 - RNA, 20 nt, Artificial Sequence
  spacer sequence CTCN PAM
gaggauguuugcagccuccu

SEQ ID NO: 19053 - RNA, 20 nt, Artificial Sequence
  spacer sequence CTCN PAM
gagcaggggcagcccccccg

SEQ ID NO: 19054 - RNA, 20 nt, Artificial Sequence
  spacer sequence CTCN PAM
ucagccuccacucaccugau

SEQ ID NO: 19055 - RNA, 20 nt, Artificial Sequence
  spacer sequence CTCN PAM
gccuccacucaccugaugcc

SEQ ID NO: 19056 - RNA, 20 nt, Artificial Sequence
  spacer sequence CTCN PAM
acucaccugaugccagcagc

SEQ ID NO: 19057 - RNA, 20 nt, Artificial Sequence
  spacer sequence CTCN PAM
ccugaugccagcagcaucug

SEQ ID NO: 19058 - RNA, 20 nt, Artificial Sequence
  spacer sequence CTCN PAM
aaucacagaugcugcuggca

SEQ ID NO: 19059 - RNA, 20 nt, Artificial Sequence
  spacer sequence CTCN PAM
agggcaccccagggcaacgu

SEQ ID NO: 19060 - RNA, 20 nt, Artificial Sequence
  spacer sequence CTCN PAM
gcccuccagggcaccccagg

SEQ ID NO: 19061 - RNA, 20 nt, Artificial Sequence
  spacer sequence CTCN PAM
ggacagugagaagccacgau

SEQ ID NO: 19062 - RNA, 20 nt, Artificial Sequence
  spacer sequence CTCN PAM
cuguccagagaagaccccgg

SEQ ID NO: 19063 - RNA, 20 nt, Artificial Sequence
  spacer sequence CTCN PAM
uaccaaccggcgggugcuca

SEQ ID NO: 19064 - RNA, 20 nt, Artificial Sequence
  spacer sequence CTCN PAM
gccggccgccucugcccuuc

SEQ ID NO: 19065 - RNA, 20 nt, Artificial Sequence
  spacer sequence CTCN PAM
gcccuuccucccucccccac

SEQ ID NO: 19066 - RNA, 20 nt, Artificial Sequence
  spacer sequence CTCN PAM
cucccccacagaccccguuc

SEQ ID NO: 19067 - RNA, 20 nt, Artificial Sequence
  spacer sequence CTCN PAM
cccacagaccccguucugug

SEQ ID NO: 19068 - RNA, 20 nt, Artificial Sequence
  spacer sequence CTCN PAM
cggugaagaacaaaagucag

SEQ ID NO: 19069 - RNA, 20 nt, Artificial Sequence
  spacer sequence CTCN PAM
cacggugaagaacaaaaguc

SEQ ID NO: 19070 - RNA, 20 nt, Artificial Sequence
  spacer sequence CTCN PAM
gcuucccggaagcucucacg

SEQ ID NO: 19071 - RNA, 20 nt, Artificial Sequence
  spacer sequence CTCN PAM
ucugcuucccggaagcucuc

SEQ ID NO: 19072 - RNA, 20 nt, Artificial Sequence
  spacer sequence CTCN PAM
ccucugcuucccggaagcuc

SEQ ID NO: 19073 - RNA, 20 nt, Artificial Sequence
  spacer sequence CTCN PAM
uugucccucuccgagcggga

SEQ ID NO: 19074 - RNA, 20 nt, Artificial Sequence
  spacer sequence CTCN PAM
ccgagcgggagggugauggc

SEQ ID NO: 19075 - RNA, 20 nt, Artificial Sequence
  spacer sequence CTCN PAM
gagcgggagggugauggccg

SEQ ID NO: 19076 - RNA, 20 nt, Artificial Sequence
  spacer sequence CTCN PAM
gagagggacaaggaggaagg

SEQ ID NO: 19077 - RNA, 20 nt, Artificial Sequence
  spacer sequence CTCN PAM
cgcucggagagggacaagga

SEQ ID NO: 19078 - RNA, 20 nt, Artificial Sequence
  spacer sequence CTCN PAM
aagcaacacauuugccccga

SEQ ID NO: 19079 - RNA, 20 nt, Artificial Sequence
  spacer sequence CTCN PAM
caaagcaacacauuugcccc

SEQ ID NO: 19080 - RNA, 20 nt, Artificial Sequence
  spacer sequence CTCN PAM
gccucucaaagcaacacauu

SEQ ID NO: 19081 - RNA, 20 nt, Artificial Sequence
  spacer sequence CTCN PAM
cagccucucaaagcaacaca

SEQ ID NO: 19082 - RNA, 20 nt, Artificial Sequence
  spacer sequence CTCN PAM
ucucagccucucaaagcaac

SEQ ID NO: 19083 - RNA, 20 nt, Artificial Sequence
  spacer sequence CTCN PAM
cagcacgaagccacauggga

SEQ ID NO: 19084 - RNA, 20 nt, Artificial Sequence
  spacer sequence CTCN PAM
gggauccacggccguuugug

SEQ ID NO: 19085 - RNA, 20 nt, Artificial Sequence
  spacer sequence CTCN PAM
gggcccgcccagcccagggg

SEQ ID NO: 19086 - RNA, 20 nt, Artificial Sequence
  spacer sequence CTCN PAM
cccugggcugggcgggcccg

SEQ ID NO: 19087 - RNA, 20 nt, Artificial Sequence
  spacer sequence CTCN PAM
agcacgcggccucgguucag

SEQ ID NO: 19088 - RNA, 20 nt, Artificial Sequence
  spacer sequence CTCN PAM
guucagggacagguuccccg

SEQ ID NO: 19089 - RNA, 20 nt, Artificial Sequence
  spacer sequence CTCN PAM
ccgcacggggaaccuguccc

SEQ ID NO: 19090 - RNA, 20 nt, Artificial Sequence
  spacer sequence CTCN PAM
gcccaccgugccccucgccg

SEQ ID NO: 19091 - RNA, 20 nt, Artificial Sequence
  spacer sequence CTCN PAM
cggcccaccgugccccucgc

SEQ ID NO: 19092 - RNA, 20 nt, Artificial Sequence
  spacer sequence CTCN PAM
ucuggcucucggcccaccgu

SEQ ID NO: 19093 - RNA, 20 nt, Artificial Sequence
  spacer sequence CTCN PAM
acgcggccgugcccucuggc

SEQ ID NO: 19094 - RNA, 20 nt, Artificial Sequence
  spacer sequence CTCN PAM
ggcagccugggcuggaggga

SEQ ID NO: 19095 - RNA, 20 nt, Artificial Sequence
  spacer sequence CTCN PAM
agcccaggcugccagagggc

SEQ ID NO: 19096 - RNA, 20 nt, Artificial Sequence
  spacer sequence CTCN PAM
cuccagcccaggcugccaga

SEQ ID NO: 19097 - RNA, 20 nt, Artificial Sequence
  spacer sequence CTCN PAM
cuaaauuuucauuaagagcc

SEQ ID NO: 19098 - RNA, 20 nt, Artificial Sequence
  spacer sequence CTCN PAM
aaauuuucauuaagagccuu

SEQ ID NO: 19099 - RNA, 20 nt, Artificial Sequence
  spacer sequence CTCN PAM
uaaugaaaauuuagagagug

SEQ ID NO: 19100 - RNA, 20 nt, Artificial Sequence
  spacer sequence CTCN PAM
gggugaaggcucuuaaugaa

SEQ ID NO: 19101 - RNA, 20 nt, Artificial Sequence
  spacer sequence CTCN PAM
uguccaacaacaaaaucuaa

SEQ ID NO: 19102 - RNA, 20 nt, Artificial Sequence
  spacer sequence CTCN PAM
uuuacuucccagcccccacc

SEQ ID NO: 19103 - RNA, 20 nt, Artificial Sequence
  spacer sequence CTCN PAM
guucuuuccuaaaaccugua

SEQ ID NO: 19104 - RNA, 20 nt, Artificial Sequence
  spacer sequence CTCN PAM
cucgguucccaucaaaccgg

SEQ ID NO: 19105 - RNA, 20 nt, Artificial Sequence
  spacer sequence CTCN PAM
guucccaucaaaccgggauu

SEQ ID NO: 19106 - RNA, 20 nt, Artificial Sequence
  spacer sequence CTCN PAM
aaucccgguuugaugggaac

SEQ ID NO: 19107 - RNA, 20 nt, Artificial Sequence
  spacer sequence CTCN PAM
aaggaagcggcuguacguaa

SEQ ID NO: 19108 - RNA, 20 nt, Artificial Sequence
  spacer sequence CTCN PAM
gcuuuuauuuucugugugau

SEQ ID NO: 19109 - RNA, 20 nt, Artificial Sequence
  spacer sequence CTCN PAM
acaccgaaagccaucccgga

SEQ ID NO: 19110 - RNA, 20 nt, Artificial Sequence
  spacer sequence CTCN PAM
aacccacagcgcucgacacc

SEQ ID NO: 19111 - RNA, 20 nt, Artificial Sequence
  spacer sequence CTCN PAM
caaacccacagcgcucgaca

SEQ ID NO: 19112 - RNA, 20 nt, Artificial Sequence
  spacer sequence CTCN PAM
cucucaaacccacagcgcuc

SEQ ID NO: 19113 - RNA, 20 nt, Artificial Sequence
  spacer sequence CTCN PAM
cgcucucaaacccacagcgc

SEQ ID NO: 19114 - RNA, 20 nt, Artificial Sequence
  spacer sequence CTCN PAM
uuguccccuucaggaaagcg

SEQ ID NO: 19115 - RNA, 20 nt, Artificial Sequence
  spacer sequence CTCN PAM
aagcugguaagauauuuugc

SEQ ID NO: 19116 - RNA, 20 nt, Artificial Sequence
  spacer sequence CTCN PAM
uccgccucuccuucucccuc

SEQ ID NO: 19117 - RNA, 20 nt, Artificial Sequence
  spacer sequence CTCN PAM
ccuucucccucccaaguucu

SEQ ID NO: 19118 - RNA, 20 nt, Artificial Sequence
  spacer sequence CTCN PAM
uucucccucccaaguucucu

SEQ ID NO: 19119 - RNA, 20 nt, Artificial Sequence
  spacer sequence CTCN PAM
cucccaaguucucuuucucu

SEQ ID NO: 19120 - RNA, 20 nt, Artificial Sequence
  spacer sequence CTCN PAM
caaguucucuuucucuuuga

SEQ ID NO: 19121 - RNA, 20 nt, Artificial Sequence
  spacer sequence CTCN PAM
uucucuuugaugugcuaacg

SEQ ID NO: 19122 - RNA, 20 nt, Artificial Sequence
  spacer sequence CTCN PAM
uugaugugcuaacgugcucc

SEQ ID NO: 19123 - RNA, 20 nt, Artificial Sequence
  spacer sequence CTCN PAM
uucggccaccgaaauacaac

SEQ ID NO: 19124 - RNA, 20 nt, Artificial Sequence
  spacer sequence CTCN PAM
gcguuugccacaaaacugcu

SEQ ID NO: 19125 - RNA, 20 nt, Artificial Sequence
  spacer sequence CTCN PAM
cgggccgacaucuguuuuua

SEQ ID NO: 19126 - RNA, 20 nt, Artificial Sequence
  spacer sequence CTCN PAM
cgccuguaaucccagcacuu

SEQ ID NO: 19127 - RNA, 20 nt, Artificial Sequence
  spacer sequence CTCN PAM
caaagugcugggauuacagg

SEQ ID NO: 19128 - RNA, 20 nt, Artificial Sequence
  spacer sequence CTCN PAM
gccucccaaagugcugggau

SEQ ID NO: 19129 - RNA, 20 nt, Artificial Sequence
  spacer sequence CTCN PAM
ggugaucuaccugccucagc

SEQ ID NO: 19130 - RNA, 20 nt, Artificial Sequence
  spacer sequence CTCN PAM
ugaccucaggugaucuaccu

SEQ ID NO: 19131 - RNA, 20 nt, Artificial Sequence
  spacer sequence CTCN PAM
aacuccugaccucaggugau

SEQ ID NO: 19132 - RNA, 20 nt, Artificial Sequence
  spacer sequence CTCN PAM
aguaaacacacacacacaca

SEQ ID NO: 19133 - RNA, 20 nt, Artificial Sequence
  spacer sequence CTCN PAM
caagcagcugggacuacagg

SEQ ID NO: 19134 - RNA, 20 nt, Artificial Sequence
  spacer sequence CTCN PAM
gccucccaagcagcugggac

SEQ ID NO: 19135 - RNA, 20 nt, Artificial Sequence
  spacer sequence CTCN PAM
ugccucagccucccaagcag

SEQ ID NO: 19136 - RNA, 20 nt, Artificial Sequence
  spacer sequence CTCN PAM
gcuucccggguuaagcaauu

SEQ ID NO: 19137 - RNA, 20 nt, Artificial Sequence
  spacer sequence CTCN PAM
cuacaaccucugcuucccgg

SEQ ID NO: 19138 - RNA, 20 nt, Artificial Sequence
  spacer sequence CTCN PAM
agccugggcgacagagcgag

SEQ ID NO: 19139 - RNA, 20 nt, Artificial Sequence
  spacer sequence CTCN PAM
gucgcccaggcuggagugua

SEQ ID NO: 19140 - RNA, 20 nt, Artificial Sequence
  spacer sequence CTCN PAM
cucugucgcccaggcuggag

SEQ ID NO: 19141 - RNA, 20 nt, Artificial Sequence
  spacer sequence CTCN PAM
gucucacaaaaagaauaaga

SEQ ID NO: 19142 - RNA, 20 nt, Artificial Sequence
  spacer sequence CTCN PAM
caaaaagaauaagagggucg

SEQ ID NO: 19143 - RNA, 20 nt, Artificial Sequence
  spacer sequence CTCN PAM
uauucuuuuugugagacgga

SEQ ID NO: 19144 - RNA, 20 nt, Artificial Sequence
  spacer sequence CTCN PAM
cauuuccccgacccucuuau

SEQ ID NO: 19145 - RNA, 20 nt, Artificial Sequence
  spacer sequence CTCN PAM
aaaaaaaaaaaaaaaaaaca

SEQ ID NO: 19146 - RNA, 20 nt, Artificial Sequence
  spacer sequence CTCN PAM
gucucaaaaaaaaaaaaaaa

SEQ ID NO: 19147 - RNA, 20 nt, Artificial Sequence
  spacer sequence CTCN PAM
cucugucgcccaggcuggag

SEQ ID NO: 19148 - RNA, 20 nt, Artificial Sequence
  spacer sequence CTCN PAM
gucgcccaggcuggagugca

SEQ ID NO: 19149 - RNA, 20 nt, Artificial Sequence
  spacer sequence CTCN PAM
agccugggcgacagagcgag

SEQ ID NO: 19150 - RNA, 20 nt, Artificial Sequence
  spacer sequence CTCN PAM
gcucacugcaagcuccgccu

SEQ ID NO: 19151 - RNA, 20 nt, Artificial Sequence
  spacer sequence CTCN PAM
cugcaagcuccgccucccgg

SEQ ID NO: 19152 - RNA, 20 nt, Artificial Sequence
  spacer sequence CTCN PAM
gccucccggguucacgccau

SEQ ID NO: 19153 - RNA, 20 nt, Artificial Sequence
  spacer sequence CTCN PAM
cggguucacgccauucuccu

SEQ ID NO: 19154 - RNA, 20 nt, Artificial Sequence
  spacer sequence CTCN PAM
ugccucagccucccgaguag

SEQ ID NO: 19155 - RNA, 20 nt, Artificial Sequence
  spacer sequence CTCN PAM
gccucccgaguagcugggac

SEQ ID NO: 19156 - RNA, 20 nt, Artificial Sequence
  spacer sequence CTCN PAM
cgaguagcugggacuacagg

SEQ ID NO: 19157 - RNA, 20 nt, Artificial Sequence
  spacer sequence CTCN PAM
ggaggcugaggcaggagaau

SEQ ID NO: 19158 - RNA, 20 nt, Artificial Sequence
  spacer sequence CTCN PAM
acuaaaaauacaaaaaauua

SEQ ID NO: 19159 - RNA, 20 nt, Artificial Sequence
  spacer sequence CTCN PAM
aucuccugaccucgugaucc

SEQ ID NO: 19160 - RNA, 20 nt, Artificial Sequence
  spacer sequence CTCN PAM
ugaccucgugauccgcccgc

SEQ ID NO: 19161 - RNA, 20 nt, Artificial Sequence
  spacer sequence CTCN PAM
ugauccgcccgccucggccu

SEQ ID NO: 19162 - RNA, 20 nt, Artificial Sequence
  spacer sequence CTCN PAM
gccucccaaagugcugggau

SEQ ID NO: 19163 - RNA, 20 nt, Artificial Sequence
  spacer sequence CTCN PAM
caaagugcugggauuacagg

SEQ ID NO: 19164 - RNA, 20 nt, Artificial Sequence
  spacer sequence CTCN PAM
cgccuguaaucccagcacuu

SEQ ID NO: 19165 - RNA, 20 nt, Artificial Sequence
  spacer sequence CTCN PAM
cauuucaggccgggcgcggu

SEQ ID NO: 19166 - RNA, 20 nt, Artificial Sequence
  spacer sequence CTCN PAM
ccaggccgaggagggagguu

SEQ ID NO: 19167 - RNA, 20 nt, Artificial Sequence
  spacer sequence CTCN PAM
gccuggugagucuugaaacg

SEQ ID NO: 19168 - RNA, 20 nt, Artificial Sequence
  spacer sequence CTCN PAM
ucggccuggugagucuugaa

SEQ ID NO: 19169 - RNA, 20 nt, Artificial Sequence
  spacer sequence CTCN PAM
cuccucggccuggugagucu

SEQ ID NO: 19170 - RNA, 20 nt, Artificial Sequence
  spacer sequence CTCN PAM
gaggagcggcugugccuucg

SEQ ID NO: 19171 - RNA, 20 nt, Artificial Sequence
  spacer sequence CTCN PAM
gagaaccucccuccucggcc

SEQ ID NO: 19172 - RNA, 20 nt, Artificial Sequence
  spacer sequence CTCN PAM
ucagagaaccucccuccucg

SEQ ID NO: 19173 - RNA, 20 nt, Artificial Sequence
  spacer sequence CTCN PAM
ccgaaggcacagccgcuccu

SEQ ID NO: 19174 - RNA, 20 nt, Artificial Sequence
  spacer sequence CTCN PAM
gcuccccgaaggcacagccg

SEQ ID NO: 19175 - RNA, 20 nt, Artificial Sequence
  spacer sequence CTCN PAM
gugugucugugcguguccac

SEQ ID NO: 19176 - RNA, 20 nt, Artificial Sequence
  spacer sequence CTCN PAM
cacacgugcacagguacacg

SEQ ID NO: 19177 - RNA, 20 nt, Artificial Sequence
  spacer sequence CTCN PAM
caaaaccaccucacacacgu

SEQ ID NO: 19178 - RNA, 20 nt, Artificial Sequence
  spacer sequence CTCN PAM
accucugcucauaaacacug

SEQ ID NO: 19179 - RNA, 20 nt, Artificial Sequence
  spacer sequence CTCN PAM
gcucauaaacacugaggaug

SEQ ID NO: 19180 - RNA, 20 nt, Artificial Sequence
  spacer sequence CTCN PAM
uaaacacugaggauguggcu

SEQ ID NO: 19181 - RNA, 20 nt, Artificial Sequence
  spacer sequence CTCN PAM
guguuuaugagcagaggugg

SEQ ID NO: 19182 - RNA, 20 nt, Artificial Sequence
  spacer sequence CTCN PAM
caggccaggugugaagacuu

SEQ ID NO: 19183 - RNA, 20 nt, Artificial Sequence
  spacer sequence CTCN PAM
ggccaggugugaagacuucu

SEQ ID NO: 19184 - RNA, 20 nt, Artificial Sequence
  spacer sequence CTCN PAM
ccaccugccuuccgggugac

SEQ ID NO: 19185 - RNA, 20 nt, Artificial Sequence
  spacer sequence CTCN PAM
ggaagucacccggaaggcag

SEQ ID NO: 19186 - RNA, 20 nt, Artificial Sequence
  spacer sequence CTCN PAM
gaccuggugcucuccccacc

SEQ ID NO: 19187 - RNA, 20 nt, Artificial Sequence
  spacer sequence CTCN PAM
ccccaccugccugaccccgu

SEQ ID NO: 19188 - RNA, 20 nt, Artificial Sequence
  spacer sequence CTCN PAM
ccaccugccugaccccgucg

SEQ ID NO: 19189 - RNA, 20 nt, Artificial Sequence
  spacer sequence CTCN PAM
gaccuggcuucgcgucuguu

SEQ ID NO: 19190 - RNA, 20 nt, Artificial Sequence
  spacer sequence CTCN PAM
gcuccgcuccccgagucugu

SEQ ID NO: 19191 - RNA, 20 nt, Artificial Sequence
  spacer sequence CTCN PAM
gcuccccgagucugucucau

SEQ ID NO: 19192 - RNA, 20 nt, Artificial Sequence
  spacer sequence CTCN PAM
ccgagucugucucauggguu

SEQ ID NO: 19193 - RNA, 20 nt, Artificial Sequence
  spacer sequence CTCN PAM
gggagcggagcagaggugcu

SEQ ID NO: 19194 - RNA, 20 nt, Artificial Sequence
  spacer sequence CTCN PAM
uggguuucgccgccugauuc

SEQ ID NO: 19195 - RNA, 20 nt, Artificial Sequence
  spacer sequence CTCN PAM
cagugguugcagagcugguu

SEQ ID NO: 19196 - RNA, 20 nt, Artificial Sequence
  spacer sequence CTCN PAM
gcaaccacugggagaccaac

SEQ ID NO: 19197 - RNA, 20 nt, Artificial Sequence
  spacer sequence CTCN PAM
ggaggugccagucacugugc

SEQ ID NO: 19198 - RNA, 20 nt, Artificial Sequence
  spacer sequence CTCN PAM
cgagugcagcccaagggcag

SEQ ID NO: 19199 - RNA, 20 nt, Artificial Sequence
  spacer sequence CTCN PAM
ccggagucaccccagggauu

SEQ ID NO: 19200 - RNA, 20 nt, Artificial Sequence
  spacer sequence CTCN PAM
ggggagcguagugacaagca

SEQ ID NO: 19201 - RNA, 20 nt, Artificial Sequence
  spacer sequence CTCN PAM
cagaaucccuggggugacuc

SEQ ID NO: 19202 - RNA, 20 nt, Artificial Sequence
  spacer sequence CTCN PAM
guuuccuuguuugugcaaca

SEQ ID NO: 19203 - RNA, 20 nt, Artificial Sequence
  spacer sequence CTCN PAM
gcugccuggguugugaugaa

SEQ ID NO: 19204 - RNA, 20 nt, Artificial Sequence
  spacer sequence CTCN PAM
ggaaacgggccggccucugc

SEQ ID NO: 19205 - RNA, 20 nt, Artificial Sequence
  spacer sequence CTCN PAM
gcugccggguugugcuggag

SEQ ID NO: 19206 - RNA, 20 nt, Artificial Sequence
  spacer sequence CTCN PAM
agcacaacccggcagcagag

SEQ ID NO: 19207 - RNA, 20 nt, Artificial Sequence
  spacer sequence CTCN PAM
ggguagcuguggaagcugca

SEQ ID NO: 19208 - RNA, 20 nt, Artificial Sequence
  spacer sequence CTCN PAM
cugccaggcacaggaacaca

SEQ ID NO: 19209 - RNA, 20 nt, Artificial Sequence
  spacer sequence CTCN PAM
ccucaugccacacacgugac

SEQ ID NO: 19210 - RNA, 20 nt, Artificial Sequence
  spacer sequence CTCN PAM
ugccacacacgugacgacug

SEQ ID NO: 19211 - RNA, 20 nt, Artificial Sequence
  spacer sequence CTCN PAM
agucgucacguguguggcau

SEQ ID NO: 19212 - RNA, 20 nt, Artificial Sequence
  spacer sequence CTCN PAM
cuuugccccacuguguccug

SEQ ID NO: 19213 - RNA, 20 nt, Artificial Sequence
  spacer sequence CTCN PAM
uugccccacuguguccuggg

SEQ ID NO: 19214 - RNA, 20 nt, Artificial Sequence
  spacer sequence CTCN PAM
caggacacaguggggcaaag

SEQ ID NO: 19215 - RNA, 20 nt, Artificial Sequence
  spacer sequence CTCN PAM
aggaaccuugcagcagacag

SEQ ID NO: 19216 - RNA, 20 nt, Artificial Sequence
  spacer sequence CTCN PAM
ggccuggggcgcgggcagcc

SEQ ID NO: 19217 - RNA, 20 nt, Artificial Sequence
  spacer sequence CTCN PAM
cggccuccaggguauggcug

SEQ ID NO: 19218 - RNA, 20 nt, Artificial Sequence
  spacer sequence CTCN PAM
gccuccaggguauggcuggg

SEQ ID NO: 19219 - RNA, 20 nt, Artificial Sequence
  spacer sequence CTCN PAM
aggguauggcuggggccucc

SEQ ID NO: 19220 - RNA, 20 nt, Artificial Sequence
  spacer sequence CTCN PAM
gugccuggacccaggucaga

SEQ ID NO: 19221 - RNA, 20 nt, Artificial Sequence
  spacer sequence CTCN PAM
ucugaccuggguccaggcac

SEQ ID NO: 19222 - RNA, 20 nt, Artificial Sequence
  spacer sequence CTCN PAM
cgcaucccgaaauccugcca

SEQ ID NO: 19223 - RNA, 20 nt, Artificial Sequence
  spacer sequence CTCN PAM
ggcaggauuucgggaugcgu

SEQ ID NO: 19224 - RNA, 20 nt, Artificial Sequence
  spacer sequence CTCN PAM
gcacauuuaaugcaccuggc

SEQ ID NO: 19225 - RNA, 20 nt, Artificial Sequence
  spacer sequence CTCN PAM
guguuugaauccagcuuuac

SEQ ID NO: 19226 - RNA, 20 nt, Artificial Sequence
  spacer sequence CTCN PAM
ggccugaaacacaaacccug

SEQ ID NO: 19227 - RNA, 20 nt, Artificial Sequence
  spacer sequence CTCN PAM
aaccucaggccugaaacaca

SEQ ID NO: 19228 - RNA, 20 nt, Artificial Sequence
  spacer sequence CTCN PAM
ugccuccaaccucaggccug

SEQ ID NO: 19229 - RNA, 20 nt, Artificial Sequence
  spacer sequence CTCN PAM
cugccuccugccuccaaccu

SEQ ID NO: 19230 - RNA, 20 nt, Artificial Sequence
  spacer sequence CTCN PAM
gcccagcgucccucccugcc

SEQ ID NO: 19231 - RNA, 20 nt, Artificial Sequence
  spacer sequence CTCN PAM
ucuccuggaggcucugaccc

SEQ ID NO: 19232 - RNA, 20 nt, Artificial Sequence
  spacer sequence CTCN PAM
uggaggcucugaccccacug

SEQ ID NO: 19233 - RNA, 20 nt, Artificial Sequence
  spacer sequence CTCN PAM
aggagacgaggccucggccc

SEQ ID NO: 19234 - RNA, 20 nt, Artificial Sequence
  spacer sequence CTCN PAM
gaccccacuggugcagggug

SEQ ID NO: 19235 - RNA, 20 nt, Artificial Sequence
  spacer sequence CTCN PAM
ggaggggagguuugacgugg

SEQ ID NO: 19236 - RNA, 20 nt, Artificial Sequence
  spacer sequence CTCN PAM
cgaggugccccugcccacac

SEQ ID NO: 19237 - RNA, 20 nt, Artificial Sequence
  spacer sequence CTCN PAM
ccucccgaggugccccugcc

SEQ ID NO: 19238 - RNA, 20 nt, Artificial Sequence
  spacer sequence CTCN PAM
acgucaaaccuccccucccg

SEQ ID NO: 19239 - RNA, 20 nt, Artificial Sequence
  spacer sequence CTCN PAM
cgugcuccacgucaaaccuc

SEQ ID NO: 19240 - RNA, 20 nt, Artificial Sequence
  spacer sequence CTCN PAM
gucuucccacccaaagcggc

SEQ ID NO: 19241 - RNA, 20 nt, Artificial Sequence
  spacer sequence CTCN PAM
ggccucggucuucccaccca

SEQ ID NO: 19242 - RNA, 20 nt, Artificial Sequence
  spacer sequence CTCN PAM
ggacucucucuauccucggg

SEQ ID NO: 19243 - RNA, 20 nt, Artificial Sequence
  spacer sequence CTCN PAM
cucuauccucgggcucugug

SEQ ID NO: 19244 - RNA, 20 nt, Artificial Sequence
  spacer sequence CTCN PAM
cuauccucgggcucugugag

SEQ ID NO: 19245 - RNA, 20 nt, Artificial Sequence
  spacer sequence CTCN PAM
auccucgggcucugugagcu

SEQ ID NO: 19246 - RNA, 20 nt, Artificial Sequence
  spacer sequence CTCN PAM
ggcucugugagcuagagugg

SEQ ID NO: 19247 - RNA, 20 nt, Artificial Sequence
  spacer sequence CTCN PAM
gugagcuagaguggggaaug

SEQ ID NO: 19248 - RNA, 20 nt, Artificial Sequence
  spacer sequence CTCN PAM
cagagcccgaggauagagag

SEQ ID NO: 19249 - RNA, 20 nt, Artificial Sequence
  spacer sequence CTCN PAM
agcucacagagcccgaggau

SEQ ID NO: 19250 - RNA, 20 nt, Artificial Sequence
  spacer sequence CTCN PAM
ccccauuccccacucuagcu

SEQ ID NO: 19251 - RNA, 20 nt, Artificial Sequence
  spacer sequence CTCN PAM
cgguccacuccccccauucc

SEQ ID NO: 19252 - RNA, 20 nt, Artificial Sequence
  spacer sequence CTCN PAM
gggcggccgacaaugggaag

SEQ ID NO: 19253 - RNA, 20 nt, Artificial Sequence
  spacer sequence CTCN PAM
caggucaggggccuucccau

SEQ ID NO: 19254 - RNA, 20 nt, Artificial Sequence
  spacer sequence CTCN PAM
gggaagguccucugcucucu

SEQ ID NO: 19255 - RNA, 20 nt, Artificial Sequence
  spacer sequence CTCN PAM
gcucucugggugggguccgu

SEQ ID NO: 19256 - RNA, 20 nt, Artificial Sequence
  spacer sequence CTCN PAM
cugggugggguccgugggac

SEQ ID NO: 19257 - RNA, 20 nt, Artificial Sequence
  spacer sequence CTCN PAM
gggugggguccgugggacug

SEQ ID NO: 19258 - RNA, 20 nt, Artificial Sequence
  spacer sequence CTCN PAM
uaacacagucccacggaccc

SEQ ID NO: 19259 - RNA, 20 nt, Artificial Sequence
  spacer sequence CTCN PAM
guuccuacccagccacgggu

SEQ ID NO: 19260 - RNA, 20 nt, Artificial Sequence
  spacer sequence CTCN PAM
ugcaucagccgacagccccu

SEQ ID NO: 19261 - RNA, 20 nt, Artificial Sequence
  spacer sequence CTCN PAM
ugggaaggggcugucggcug

SEQ ID NO: 19262 - RNA, 20 nt, Artificial Sequence
  spacer sequence CTCN PAM
gaguccgccugcugcuccgg

SEQ ID NO: 19263 - RNA, 20 nt, Artificial Sequence
  spacer sequence CTCN PAM
gagcuccugggaaggggcug

SEQ ID NO: 19264 - RNA, 20 nt, Artificial Sequence
  spacer sequence CTCN PAM
ggggccgcuggggugaggac

SEQ ID NO: 19265 - RNA, 20 nt, Artificial Sequence
  spacer sequence CTCN PAM
ccccagcggccccggagcag

SEQ ID NO: 19266 - RNA, 20 nt, Artificial Sequence
  spacer sequence CTCN PAM
ucaccccguccucaccccag

SEQ ID NO: 19267 - RNA, 20 nt, Artificial Sequence
  spacer sequence CTCN PAM
cuccgacacugaccugagau

SEQ ID NO: 19268 - RNA, 20 nt, Artificial Sequence
  spacer sequence CTCN PAM
gacacugaccugagaugggg

SEQ ID NO: 19269 - RNA, 20 nt, Artificial Sequence
  spacer sequence CTCN PAM
ggucagugucggagugagaa

SEQ ID NO: 19270 - RNA, 20 nt, Artificial Sequence
  spacer sequence CTCN PAM
acagcccaccugcccacuuc

SEQ ID NO: 19271 - RNA, 20 nt, Artificial Sequence
  spacer sequence CTCN PAM
gaucagcagcaaugcaaaca

SEQ ID NO: 19272 - RNA, 20 nt, Artificial Sequence
  spacer sequence CTCN PAM
ugcugcugugugaggaggcc

SEQ ID NO: 19273 - RNA, 20 nt, Artificial Sequence
  spacer sequence CTCN PAM
cacagcagcaggaggcaccu

SEQ ID NO: 19274 - RNA, 20 nt, Artificial Sequence
  spacer sequence CTCN PAM
ucacacagcagcaggaggca

SEQ ID NO: 19275 - RNA, 20 nt, Artificial Sequence
  spacer sequence CTCN PAM
ccggagucucuacgaggugc

SEQ ID NO: 19276 - RNA, 20 nt, Artificial Sequence
  spacer sequence CTCN PAM
ggggaggcccggccuccuca

SEQ ID NO: 19277 - RNA, 20 nt, Artificial Sequence
  spacer sequence CTCN PAM
acgaggugcucucagagaga

SEQ ID NO: 19278 - RNA, 20 nt, Artificial Sequence
  spacer sequence CTCN PAM
uagagacuccggggaggccc

SEQ ID NO: 19279 - RNA, 20 nt, Artificial Sequence
  spacer sequence CTCN PAM
cagagagauucgaggggccc

SEQ ID NO: 19280 - RNA, 20 nt, Artificial Sequence
  spacer sequence CTCN PAM
gagagauucgaggggccccg

SEQ ID NO: 19281 - RNA, 20 nt, Artificial Sequence
  spacer sequence CTCN PAM
gagagcaccucguagagacu

SEQ ID NO: 19282 - RNA, 20 nt, Artificial Sequence
  spacer sequence CTCN PAM
cugagagcaccucguagaga

SEQ ID NO: 19283 - RNA, 20 nt, Artificial Sequence
  spacer sequence CTCN PAM
aaucucucugagagcaccuc

SEQ ID NO: 19284 - RNA, 20 nt, Artificial Sequence
  spacer sequence CTCN PAM
ggcuucuguguggggugaug

SEQ ID NO: 19285 - RNA, 20 nt, Artificial Sequence
  spacer sequence CTCN PAM
cacaucaccccacacagaag

SEQ ID NO: 19286 - RNA, 20 nt, Artificial Sequence
  spacer sequence CTCN PAM
cuccccccaucauuaggaaa

SEQ ID NO: 19287 - RNA, 20 nt, Artificial Sequence
  spacer sequence CTCN PAM
ccccaucauuaggaaagaaa

SEQ ID NO: 19288 - RNA, 20 nt, Artificial Sequence
  spacer sequence CTCN PAM
aaauaauaaauaaaauaaaa

SEQ ID NO: 19289 - RNA, 20 nt, Artificial Sequence
  spacer sequence CTCN PAM
gccucaaaauaauaaauaaa

SEQ ID NO: 19290 - RNA, 20 nt, Artificial Sequence
  spacer sequence CTCN PAM
cucugucgcccaggcuggag

SEQ ID NO: 19291 - RNA, 20 nt, Artificial Sequence
  spacer sequence CTCN PAM
gucgcccaggcuggagugcg

SEQ ID NO: 19292 - RNA, 20 nt, Artificial Sequence
  spacer sequence CTCN PAM
agccugggcgacagagggag

SEQ ID NO: 19293 - RNA, 20 nt, Artificial Sequence
  spacer sequence CTCN PAM
gcucacugcaaccuccaccu

SEQ ID NO: 19294 - RNA, 20 nt, Artificial Sequence
  spacer sequence CTCN PAM
cugcaaccuccaccuccugg

SEQ ID NO: 19295 - RNA, 20 nt, Artificial Sequence
  spacer sequence CTCN PAM
accuccuggguucacgcaau

SEQ ID NO: 19296 - RNA, 20 nt, Artificial Sequence
  spacer sequence CTCN PAM
uggguucacgcaauucuccu

SEQ ID NO: 19297 - RNA, 20 nt, Artificial Sequence
  spacer sequence CTCN PAM
ugccucagccucccgagugg

SEQ ID NO: 19298 - RNA, 20 nt, Artificial Sequence
  spacer sequence CTCN PAM
gccucccgaguggcugggau

SEQ ID NO: 19299 - RNA, 20 nt, Artificial Sequence
  spacer sequence CTCN PAM
cgaguggcugggauuacagg

SEQ ID NO: 19300 - RNA, 20 nt, Artificial Sequence
  spacer sequence CTCN PAM
ggaggcugaggcaggagaau

SEQ ID NO: 19301 - RNA, 20 nt, Artificial Sequence
  spacer sequence CTCN PAM
acuaaaaauacaaaaaaagu

SEQ ID NO: 19302 - RNA, 20 nt, Artificial Sequence
  spacer sequence CTCN PAM
aacuccugaccucaggugau

SEQ ID NO: 19303 - RNA, 20 nt, Artificial Sequence
  spacer sequence CTCN PAM
ugaccucaggugauccaucu

SEQ ID NO: 19304 - RNA, 20 nt, Artificial Sequence
  spacer sequence CTCN PAM
ggugauccaucuccuucggc

SEQ ID NO: 19305 - RNA, 20 nt, Artificial Sequence
  spacer sequence CTCN PAM
uucggccucccacagcacug

SEQ ID NO: 19306 - RNA, 20 nt, Artificial Sequence
  spacer sequence CTCN PAM
cacagcacugggaugacagg

SEQ ID NO: 19307 - RNA, 20 nt, Artificial Sequence
  spacer sequence CTCN PAM
caccugucaucccagugcug

SEQ ID NO: 19308 - RNA, 20 nt, Artificial Sequence
  spacer sequence CTCN PAM
ccucucucuaguccugaaug

SEQ ID NO: 19309 - RNA, 20 nt, Artificial Sequence
  spacer sequence CTCN PAM
cucuaguccugaauguccuc

SEQ ID NO: 19310 - RNA, 20 nt, Artificial Sequence
  spacer sequence CTCN PAM
cuaguccugaauguccucau

SEQ ID NO: 19311 - RNA, 20 nt, Artificial Sequence
  spacer sequence CTCN PAM
aguccugaauguccucauca

SEQ ID NO: 19312 - RNA, 20 nt, Artificial Sequence
  spacer sequence CTCN PAM
ucaccccaaaaggaaacccu

SEQ ID NO: 19313 - RNA, 20 nt, Artificial Sequence
  spacer sequence CTCN PAM
aucagcacuggcucaccacc

SEQ ID NO: 19314 - RNA, 20 nt, Artificial Sequence
  spacer sequence CTCN PAM
ccacccuuucccaagccuga

SEQ ID NO: 19315 - RNA, 20 nt, Artificial Sequence
  spacer sequence CTCN PAM
ggcuugggaaagggugguga

SEQ ID NO: 19316 - RNA, 20 nt, Artificial Sequence
  spacer sequence CTCN PAM
caggcuugggaaaggguggu

SEQ ID NO: 19317 - RNA, 20 nt, Artificial Sequence
  spacer sequence CTCN PAM
acgacucucuggcuuggccu

SEQ ID NO: 19318 - RNA, 20 nt, Artificial Sequence
  spacer sequence CTCN PAM
cuggcuuggccuguucugga

SEQ ID NO: 19319 - RNA, 20 nt, Artificial Sequence
  spacer sequence CTCN PAM
ggcuuggccuguucuggaug

SEQ ID NO: 19320 - RNA, 20 nt, Artificial Sequence
  spacer sequence CTCN PAM
gagccuccgucgcucgaggu

SEQ ID NO: 19321 - RNA, 20 nt, Artificial Sequence
  spacer sequence CTCN PAM
gagggacacagugucugauc

SEQ ID NO: 19322 - RNA, 20 nt, Artificial Sequence
  spacer sequence CTCN PAM
gucgcucgagguccugccuc

SEQ ID NO: 19323 - RNA, 20 nt, Artificial Sequence
  spacer sequence CTCN PAM
agguccugccucagguuuca

SEQ ID NO: 19324 - RNA, 20 nt, Artificial Sequence
  spacer sequence CTCN PAM
agcgacggaggcucagaggg

SEQ ID NO: 19325 - RNA, 20 nt, Artificial Sequence
  spacer sequence CTCN PAM
gguuucaucccgguguggug

SEQ ID NO: 19326 - RNA, 20 nt, Artificial Sequence
  spacer sequence CTCN PAM
uuccuucuuguggcugagug

SEQ ID NO: 19327 - RNA, 20 nt, Artificial Sequence
  spacer sequence CTCN PAM
gccacaagaaggaaggaggc

SEQ ID NO: 19328 - RNA, 20 nt, Artificial Sequence
  spacer sequence CTCN PAM
guguguggccagccugugug

SEQ ID NO: 19329 - RNA, 20 nt, Artificial Sequence
  spacer sequence CTCN PAM
ucugugaguggaugccaggc

SEQ ID NO: 19330 - RNA, 20 nt, Artificial Sequence
  spacer sequence CTCN PAM
cagaugagccacaaaccaca

SEQ ID NO: 19331 - RNA, 20 nt, Artificial Sequence
  spacer sequence CTCN PAM
ucugugaguggacgcugggc

SEQ ID NO: 19332 - RNA, 20 nt, Artificial Sequence
  spacer sequence CTCN PAM
cagacgagccacgaaccaca

SEQ ID NO: 19333 - RNA, 20 nt, Artificial Sequence
  spacer sequence CTCN PAM
cgcacugcgcccagcagccc

SEQ ID NO: 19334 - RNA, 20 nt, Artificial Sequence
  spacer sequence CTCN PAM
uguuggacagagguuuuugu

SEQ ID NO: 19335 - RNA, 20 nt, Artificial Sequence
  spacer sequence CTCN PAM
guccaacaagagccggugca

SEQ ID NO: 19336 - RNA, 20 nt, Artificial Sequence
  spacer sequence CTCN PAM
uggguacacguccaggcacc

SEQ ID NO: 19337 - RNA, 20 nt, Artificial Sequence
  spacer sequence CTCN PAM
cacaacaccacuccugggua

SEQ ID NO: 19338 - RNA, 20 nt, Artificial Sequence
  spacer sequence CTCN PAM
ggcgggauggcguuugguuc

SEQ ID NO: 19339 - RNA, 20 nt, Artificial Sequence
  spacer sequence CTCN PAM
uucugucaugaaaugcucag

SEQ ID NO: 19340 - RNA, 20 nt, Artificial Sequence
  spacer sequence CTCN PAM
gugcccacgcacgguccaua

SEQ ID NO: 19341 - RNA, 20 nt, Artificial Sequence
  spacer sequence CTCN PAM
gccgacaagaccggccuggg

SEQ ID NO: 19342 - RNA, 20 nt, Artificial Sequence
  spacer sequence CTCN PAM
ggccaccuccucuuuuccga

SEQ ID NO: 19343 - RNA, 20 nt, Artificial Sequence
  spacer sequence CTCN PAM
ucuuuuccgagguaggugag

SEQ ID NO: 19344 - RNA, 20 nt, Artificial Sequence
  spacer sequence CTCN PAM
uuuccgagguaggugagacu

SEQ ID NO: 19345 - RNA, 20 nt, Artificial Sequence
  spacer sequence CTCN PAM
gaaaagaggagguggccuga

SEQ ID NO: 19346 - RNA, 20 nt, Artificial Sequence
  spacer sequence CTCN PAM
ccuaccucggaaaagaggag

SEQ ID NO: 19347 - RNA, 20 nt, Artificial Sequence
  spacer sequence CTCN PAM
gggaagggaaggagcgaagg

SEQ ID NO: 19348 - RNA, 20 nt, Artificial Sequence
  spacer sequence CTCN PAM
uucccuucccagagucucac

SEQ ID NO: 19349 - RNA, 20 nt, Artificial Sequence
  spacer sequence CTCN PAM
uucgcuccuucccuucccag

SEQ ID NO: 19350 - RNA, 20 nt, Artificial Sequence
  spacer sequence CTCN PAM
aagccugccuccuucgcucc

SEQ ID NO: 19351 - RNA, 20 nt, Artificial Sequence
  spacer sequence CTCN PAM
cuguggucaaggcuccaagc

SEQ ID NO: 19352 - RNA, 20 nt, Artificial Sequence
  spacer sequence CTCN PAM
ucccuguggucaaggcucca

SEQ ID NO: 19353 - RNA, 20 nt, Artificial Sequence
  spacer sequence CTCN PAM
uggaugcgccggagcccagc

SEQ ID NO: 19354 - RNA, 20 nt, Artificial Sequence
  spacer sequence CTCN PAM
ggcgcauccaggagcagguu

SEQ ID NO: 19355 - RNA, 20 nt, Artificial Sequence
  spacer sequence CTCN PAM
uuccacaagccgggcugggc

SEQ ID NO: 19356 - RNA, 20 nt, Artificial Sequence
  spacer sequence CTCN PAM
ugcagccucguuccacaagc

SEQ ID NO: 19357 - RNA, 20 nt, Artificial Sequence
  spacer sequence CTCN PAM
ggcuccugcagccucguucc

SEQ ID NO: 19358 - RNA, 20 nt, Artificial Sequence
  spacer sequence CTCN PAM
guggcgcaggcccggcaguc

SEQ ID NO: 19359 - RNA, 20 nt, Artificial Sequence
  spacer sequence CTCN PAM
uccagccccuggcgcucagc

SEQ ID NO: 19360 - RNA, 20 nt, Artificial Sequence
  spacer sequence CTCN PAM
gcuuugccuuagcuguggcc

SEQ ID NO: 19361 - RNA, 20 nt, Artificial Sequence
  spacer sequence CTCN PAM
uaacuccagccucugccuug

SEQ ID NO: 19362 - RNA, 20 nt, Artificial Sequence
  spacer sequence CTCN PAM
agccucugccuuggucguca

SEQ ID NO: 19363 - RNA, 20 nt, Artificial Sequence
  spacer sequence CTCN PAM
gccuuggucgucauggccgu

SEQ ID NO: 19364 - RNA, 20 nt, Artificial Sequence
  spacer sequence CTCN PAM
augacgucggcaaggacccu

SEQ ID NO: 19365 - RNA, 20 nt, Artificial Sequence
  spacer sequence CTCN PAM
aauaucaaaaagcugccuug

SEQ ID NO: 19366 - RNA, 20 nt, Artificial Sequence
  spacer sequence CTCN PAM
gaccacucaaauaucaaaaa

SEQ ID NO: 19367 - RNA, 20 nt, Artificial Sequence
  spacer sequence CTCN PAM
ucguaggacugaagggcauu

SEQ ID NO: 19368 - RNA, 20 nt, Artificial Sequence
  spacer sequence CTCN PAM
uaggacugaagggcauuuuu

SEQ ID NO: 19369 - RNA, 20 nt, Artificial Sequence
  spacer sequence CTCN PAM
agggaaaaaugcccuucagu

SEQ ID NO: 19370 - RNA, 20 nt, Artificial Sequence
  spacer sequence CTCN PAM
ugcucaagggaaaaaugccc

SEQ ID NO: 19371 - RNA, 20 nt, Artificial Sequence
  spacer sequence CTCN PAM
acacacgcggacacugacgu

SEQ ID NO: 19372 - RNA, 20 nt, Artificial Sequence
  spacer sequence CTCN PAM
acgucaguguccgcgugugu

SEQ ID NO: 19373 - RNA, 20 nt, Artificial Sequence
  spacer sequence CTCN PAM
ggcaggggccggacccaagg

SEQ ID NO: 19374 - RNA, 20 nt, Artificial Sequence
  spacer sequence CTCN PAM
gggcuagaaggugcugcuga

SEQ ID NO: 19375 - RNA, 20 nt, Artificial Sequence
  spacer sequence CTCN PAM
ugagaggaagcuuuauuuuu

SEQ ID NO: 19376 - RNA, 20 nt, Artificial Sequence
  spacer sequence CTCN PAM
ggagcuuccugcuuaucuaa

SEQ ID NO: 19377 - RNA, 20 nt, Artificial Sequence
  spacer sequence CTCN PAM
caggagcuuccugcuuaucu

SEQ ID NO: 19378 - RNA, 20 nt, Artificial Sequence
  spacer sequence CTCN PAM
gugguuuuuggagauggccu

SEQ ID NO: 19379 - RNA, 20 nt, Artificial Sequence
  spacer sequence CTCN PAM
aaaaaccacagaggccggaa

SEQ ID NO: 19380 - RNA, 20 nt, Artificial Sequence
  spacer sequence CTCN PAM
agaagaaauauccgggagga

SEQ ID NO: 19381 - RNA, 20 nt, Artificial Sequence
  spacer sequence CTCN PAM
cggauauuucuucuggagcc

SEQ ID NO: 19382 - RNA, 20 nt, Artificial Sequence
  spacer sequence CTCN PAM
gggccuuccucccggauauu

SEQ ID NO: 19383 - RNA, 20 nt, Artificial Sequence
  spacer sequence CTCN PAM
uggccccgccgucccaggcu

SEQ ID NO: 19384 - RNA, 20 nt, Artificial Sequence
  spacer sequence CTCN PAM
uccuggccccgccgucccag

SEQ ID NO: 19385 - RNA, 20 nt, Artificial Sequence
  spacer sequence CTCN PAM
ggggccuccuccuggccccg

SEQ ID NO: 19386 - RNA, 20 nt, Artificial Sequence
  spacer sequence CTCN PAM
caggcucaggggccuccucc

SEQ ID NO: 19387 - RNA, 20 nt, Artificial Sequence
  spacer sequence CTCN PAM
ugggaucccugcagccccug

SEQ ID NO: 19388 - RNA, 20 nt, Artificial Sequence
  spacer sequence CTCN PAM
uccugggaucccugcagccc

SEQ ID NO: 19389 - RNA, 20 nt, Artificial Sequence
  spacer sequence CTCN PAM
cggccccgcauggcccugug

SEQ ID NO: 19390 - RNA, 20 nt, Artificial Sequence
  spacer sequence CTCN PAM
cagagccucacuccccaaaa

SEQ ID NO: 19391 - RNA, 20 nt, Artificial Sequence
  spacer sequence CTCN PAM
gugagcccugccccaggacc

SEQ ID NO: 19392 - RNA, 20 nt, Artificial Sequence
  spacer sequence CTCN PAM
cuccccaaaaccccagccug

SEQ ID NO: 19393 - RNA, 20 nt, Artificial Sequence
  spacer sequence CTCN PAM
ccaaaaccccagccuguguc

SEQ ID NO: 19394 - RNA, 20 nt, Artificial Sequence
  spacer sequence CTCN PAM
ccuuagagggguuuaguccc

SEQ ID NO: 19395 - RNA, 20 nt, Artificial Sequence
  spacer sequence CTCN PAM
uuagagggguuuagucccac

SEQ ID NO: 19396 - RNA, 20 nt, Artificial Sequence
  spacer sequence CTCN PAM
aaggagagggggcccuucgg

SEQ ID NO: 19397 - RNA, 20 nt, Artificial Sequence
  spacer sequence CTCN PAM
cuugaaaccagcccagcaac

SEQ ID NO: 19398 - RNA, 20 nt, Artificial Sequence
  spacer sequence CTCN PAM
gcccaccaucaucacggguc

SEQ ID NO: 19399 - RNA, 20 nt, Artificial Sequence
  spacer sequence CTCN PAM
gcagggcuuuccugacccgu

SEQ ID NO: 19400 - RNA, 20 nt, Artificial Sequence
  spacer sequence CTCN PAM
guccuucgacuucuggccca

SEQ ID NO: 19401 - RNA, 20 nt, Artificial Sequence
  spacer sequence CTCN PAM
cugggccagaagucgaagga

SEQ ID NO: 19402 - RNA, 20 nt, Artificial Sequence
  spacer sequence CTCN PAM
aggugccucgcugggccaga

SEQ ID NO: 19403 - RNA, 20 nt, Artificial Sequence
  spacer sequence CTCN PAM
gugacguucaacacagccac

SEQ ID NO: 19404 - RNA, 20 nt, Artificial Sequence
  spacer sequence CTCN PAM
gaccagcgggugccugggag

SEQ ID NO: 19405 - RNA, 20 nt, Artificial Sequence
  spacer sequence CTCN PAM
caggcacccgcuggucagag

SEQ ID NO: 19406 - RNA, 20 nt, Artificial Sequence
  spacer sequence CTCN PAM
uuggacaagagcugccucca

SEQ ID NO: 19407 - RNA, 20 nt, Artificial Sequence
  spacer sequence CTCN PAM
uguccaaggagaaccccccu

SEQ ID NO: 19408 - RNA, 20 nt, Artificial Sequence
  spacer sequence CTCN PAM
agccccuugguccagaaccc

SEQ ID NO: 19409 - RNA, 20 nt, Artificial Sequence
  spacer sequence CTCN PAM
gcccugugaguuuuuucccu

SEQ ID NO: 19410 - RNA, 20 nt, Artificial Sequence
  spacer sequence CTCN PAM
cagggcggagggugccgggg

SEQ ID NO: 19411 - RNA, 20 nt, Artificial Sequence
  spacer sequence CTCN PAM
gggagacguuuacuuuccug

SEQ ID NO: 19412 - RNA, 20 nt, Artificial Sequence
  spacer sequence CTCN PAM
cagagggaaaaaacucacag

SEQ ID NO: 19413 - RNA, 20 nt, Artificial Sequence
  spacer sequence CTCN PAM
cagaaaaggccagggcagcc

SEQ ID NO: 19414 - RNA, 20 nt, Artificial Sequence
  spacer sequence CTCN PAM
gccccuuuccugaggccaca

SEQ ID NO: 19415 - RNA, 20 nt, Artificial Sequence
  spacer sequence CTCN PAM
ggaaaggggcugaggggcug

SEQ ID NO: 19416 - RNA, 20 nt, Artificial Sequence
  spacer sequence CTCN PAM
gggcgguguggccucaggaa

SEQ ID NO: 19417 - RNA, 20 nt, Artificial Sequence
  spacer sequence CTCN PAM
cagggcgguguggccucagg

SEQ ID NO: 19418 - RNA, 20 nt, Artificial Sequence
  spacer sequence CTCN PAM
gcagaagcaaggaccagggc

SEQ ID NO: 19419 - RNA, 20 nt, Artificial Sequence
  spacer sequence CTCN PAM
ccucccggcuggggcccggg

SEQ ID NO: 19420 - RNA, 20 nt, Artificial Sequence
  spacer sequence CTCN PAM
ucccggcuggggcccgggau

SEQ ID NO: 19421 - RNA, 20 nt, Artificial Sequence
  spacer sequence CTCN PAM
cggcuggggcccgggauucu

SEQ ID NO: 19422 - RNA, 20 nt, Artificial Sequence
  spacer sequence CTCN PAM
gaaucccgggccccagccgg

SEQ ID NO: 19423 - RNA, 20 nt, Artificial Sequence
  spacer sequence CTCN PAM
aaggccagggcagggccggg

SEQ ID NO: 19424 - RNA, 20 nt, Artificial Sequence
  spacer sequence CTCN PAM
gccccggcccugcucagggc

SEQ ID NO: 19425 - RNA, 20 nt, Artificial Sequence
  spacer sequence CTCN PAM
gggcccuguggccucagcuc

SEQ ID NO: 19426 - RNA, 20 nt, Artificial Sequence
  spacer sequence CTCN PAM
gcuccuucccuggugagaca

SEQ ID NO: 19427 - RNA, 20 nt, Artificial Sequence
  spacer sequence CTCN PAM
uucccuggugagacacccac

SEQ ID NO: 19428 - RNA, 20 nt, Artificial Sequence
  spacer sequence CTCN PAM
ccagggaaggagcugaggcc

SEQ ID NO: 19429 - RNA, 20 nt, Artificial Sequence
  spacer sequence CTCN PAM
ccugcgucauaccacuggug

SEQ ID NO: 19430 - RNA, 20 nt, Artificial Sequence
  spacer sequence CTCN PAM
uccccugcgucauaccacug

SEQ ID NO: 19431 - RNA, 20 nt, Artificial Sequence
  spacer sequence CTCN PAM
ccgucuugcuccuccccugc

SEQ ID NO: 19432 - RNA, 20 nt, Artificial Sequence
  spacer sequence CTCN PAM
ccccaagccccuccccgucu

SEQ ID NO: 19433 - RNA, 20 nt, Artificial Sequence
  spacer sequence CTCN PAM
acccccccacgccccucccc

SEQ ID NO: 19434 - RNA, 20 nt, Artificial Sequence
  spacer sequence CTCN PAM
cacuccacccccccacgccc

SEQ ID NO: 19435 - RNA, 20 nt, Artificial Sequence
  spacer sequence CTCN PAM
ccccucacacuccacccccc

SEQ ID NO: 19436 - RNA, 20 nt, Artificial Sequence
  spacer sequence CTCN PAM
gccucccaaagugcugggau

SEQ ID NO: 19437 - RNA, 20 nt, Artificial Sequence
  spacer sequence CTCN PAM
caaagugcugggaugacagg

SEQ ID NO: 19438 - RNA, 20 nt, Artificial Sequence
  spacer sequence CTCN PAM
cgccugucaucccagcacuu

SEQ ID NO: 19439 - RNA, 20 nt, Artificial Sequence
  spacer sequence CTCN PAM
cuuuccuucucucuucuucu

SEQ ID NO: 19440 - RNA, 20 nt, Artificial Sequence
  spacer sequence CTCN PAM
uuccuucucucuucuucuuc

SEQ ID NO: 19441 - RNA, 20 nt, Artificial Sequence
  spacer sequence CTCN PAM
cuucuucuuccccacguugc

SEQ ID NO: 19442 - RNA, 20 nt, Artificial Sequence
  spacer sequence CTCN PAM
ucuucuuccccacguugccc

SEQ ID NO: 19443 - RNA, 20 nt, Artificial Sequence
  spacer sequence CTCN PAM
ggcaguaacuguggcgguca

SEQ ID NO: 19444 - RNA, 20 nt, Artificial Sequence
  spacer sequence CTCN PAM
caccaccaaccacccugugg

SEQ ID NO: 19445 - RNA, 20 nt, Artificial Sequence
  spacer sequence CTCN PAM
caguucacaucgcagacgcu

SEQ ID NO: 19446 - RNA, 20 nt, Artificial Sequence
  spacer sequence CTCN PAM
cgaccucccaguucacaucg

SEQ ID NO: 19447 - RNA, 20 nt, Artificial Sequence
  spacer sequence CTCN PAM
cggagaaggucacgcuccag

SEQ ID NO: 19448 - RNA, 20 nt, Artificial Sequence
  spacer sequence CTCN PAM
gcgaggcucccgaccuccca

SEQ ID NO: 19449 - RNA, 20 nt, Artificial Sequence
  spacer sequence CTCN PAM
agcagagaccagaggagaag

SEQ ID NO: 19450 - RNA, 20 nt, Artificial Sequence
  spacer sequence CTCN PAM
gcuggagcgugaccuucucc

SEQ ID NO: 19451 - RNA, 20 nt, Artificial Sequence
  spacer sequence CTCN PAM
ggucucugcuggagcgugac

SEQ ID NO: 19452 - RNA, 20 nt, Artificial Sequence
  spacer sequence CTCN PAM
ucuggucucugcuggagcgu

SEQ ID NO: 19453 - RNA, 20 nt, Artificial Sequence
  spacer sequence CTCN PAM
ggaggcgggcgaggcauucc

SEQ ID NO: 19454 - RNA, 20 nt, Artificial Sequence
  spacer sequence CTCN PAM
cgaguucggcuucuccucug

SEQ ID NO: 19455 - RNA, 20 nt, Artificial Sequence
  spacer sequence CTCN PAM
cccgccucccgaguucggcu

SEQ ID NO: 19456 - RNA, 20 nt, Artificial Sequence
  spacer sequence CTCN PAM
gugcgugcaguuccugucag

SEQ ID NO: 19457 - RNA, 20 nt, Artificial Sequence
  spacer sequence CTCN PAM
uacacaccaggcagguccug

SEQ ID NO: 19458 - RNA, 20 nt, Artificial Sequence
  spacer sequence CTCN PAM
ucgcuguuucuccuacacac

SEQ ID NO: 19459 - RNA, 20 nt, Artificial Sequence
  spacer sequence CTCN PAM
agcugcacgggccucgucgc

SEQ ID NO: 19460 - RNA, 20 nt, Artificial Sequence
  spacer sequence CTCN PAM
cgcugcuccagcugcacggg

SEQ ID NO: 19461 - RNA, 20 nt, Artificial Sequence
  spacer sequence CTCN PAM
uugcucacgcugcuccagcu

SEQ ID NO: 19462 - RNA, 20 nt, Artificial Sequence
  spacer sequence CTCN PAM
ucuccuugcucacgcugcuc

SEQ ID NO: 19463 - RNA, 20 nt, Artificial Sequence
  spacer sequence CTCN PAM
ucuucuccuugcucacgcug

SEQ ID NO: 19464 - RNA, 20 nt, Artificial Sequence
  spacer sequence CTCN PAM
cggcuccucuucuccuugcu

SEQ ID NO: 19465 - RNA, 20 nt, Artificial Sequence
  spacer sequence CTCN PAM
cacgucacccguguccccac

SEQ ID NO: 19466 - RNA, 20 nt, Artificial Sequence
  spacer sequence CTCN PAM
gauugggacgcgucccugcu

SEQ ID NO: 19467 - RNA, 20 nt, Artificial Sequence
  spacer sequence CTCN PAM
caagcgcccucuggugacau

SEQ ID NO: 19468 - RNA, 20 nt, Artificial Sequence
  spacer sequence CTCN PAM
ggugacaucugggagagcaa

SEQ ID NO: 19469 - RNA, 20 nt, Artificial Sequence
  spacer sequence CTCN PAM
cagaugucaccagagggcgc

SEQ ID NO: 19470 - RNA, 20 nt, Artificial Sequence
  spacer sequence CTCN PAM
cccagaugucaccagagggc

SEQ ID NO: 19471 - RNA, 20 nt, Artificial Sequence
  spacer sequence CTCN PAM
cggcaccgcccacguuuugc

SEQ ID NO: 19472 - RNA, 20 nt, Artificial Sequence
  spacer sequence CTCN PAM
cccggcaccgcccacguuuu

SEQ ID NO: 19473 - RNA, 20 nt, Artificial Sequence
  spacer sequence CTCN PAM
ucauccuucccagcauguga

SEQ ID NO: 19474 - RNA, 20 nt, Artificial Sequence
  spacer sequence CTCN PAM
ccuaucauccuuccugucau

SEQ ID NO: 19475 - RNA, 20 nt, Artificial Sequence
  spacer sequence CTCN PAM
aucauccuuaccaucauccu

SEQ ID NO: 19476 - RNA, 20 nt, Artificial Sequence
  spacer sequence CTCN PAM
aucauccuuccccaucaucc

SEQ ID NO: 19477 - RNA, 20 nt, Artificial Sequence
  spacer sequence CTCN PAM
aucaucguucuccaucaucc

SEQ ID NO: 19478 - RNA, 20 nt, Artificial Sequence
  spacer sequence CTCN PAM
aucaucguucuccaucaucg

SEQ ID NO: 19479 - RNA, 20 nt, Artificial Sequence
  spacer sequence CTCN PAM
aucauccuuaccaucauccu

SEQ ID NO: 19480 - RNA, 20 nt, Artificial Sequence
  spacer sequence CTCN PAM
aucauccuucuccaucaucc

SEQ ID NO: 19481 - RNA, 20 nt, Artificial Sequence
  spacer sequence CTCN PAM
aucauccuucuccaucaucc

SEQ ID NO: 19482 - RNA, 20 nt, Artificial Sequence
  spacer sequence CTCN PAM
aucaucguucuccaucaucc

SEQ ID NO: 19483 - RNA, 20 nt, Artificial Sequence
  spacer sequence CTCN PAM
aucaucguucuccaucaucg

SEQ ID NO: 19484 - RNA, 20 nt, Artificial Sequence
  spacer sequence CTCN PAM
gcugucuccuuggcacuuaa

SEQ ID NO: 19485 - RNA, 20 nt, Artificial Sequence
  spacer sequence CTCN PAM
uuggcacuuaaaacaacgcu

SEQ ID NO: 19486 - RNA, 20 nt, Artificial Sequence
  spacer sequence CTCN PAM
auaaagaugugcuggcaggg

SEQ ID NO: 19487 - RNA, 20 nt, Artificial Sequence
  spacer sequence CTCN PAM
gccuuccaaaguguugggac

SEQ ID NO: 19488 - RNA, 20 nt, Artificial Sequence
  spacer sequence CTCN PAM
cgccucggccuuccaaagug

SEQ ID NO: 19489 - RNA, 20 nt, Artificial Sequence
  spacer sequence CTCN PAM
agcaauccucccgccucggc

SEQ ID NO: 19490 - RNA, 20 nt, Artificial Sequence
  spacer sequence CTCN PAM
ggaggcggagguugcaguga

SEQ ID NO: 19491 - RNA, 20 nt, Artificial Sequence
  spacer sequence CTCN PAM
ugagcucaagcaauccuccc

SEQ ID NO: 19492 - RNA, 20 nt, Artificial Sequence
  spacer sequence CTCN PAM
gccuccugagcucaagcaau

SEQ ID NO: 19493 - RNA, 20 nt, Artificial Sequence
  spacer sequence CTCN PAM
cugcaaccuccgccuccuga

SEQ ID NO: 19494 - RNA, 20 nt, Artificial Sequence
  spacer sequence CTCN PAM
acucacugcaaccuccgccu

SEQ ID NO: 19495 - RNA, 20 nt, Artificial Sequence
  spacer sequence CTCN PAM
agccugggccacagagugag

SEQ ID NO: 19496 - RNA, 20 nt, Artificial Sequence
  spacer sequence CTCN PAM
guggcccaggcuggagcgca

SEQ ID NO: 19497 - RNA, 20 nt, Artificial Sequence
  spacer sequence CTCN PAM
cucuguggcccaggcuggag

SEQ ID NO: 19498 - RNA, 20 nt, Artificial Sequence
  spacer sequence CTCN PAM
ugcuuguuauuauuuugaca

SEQ ID NO: 19499 - RNA, 20 nt, Artificial Sequence
  spacer sequence CTCN PAM
gcugauccccccugccucau

SEQ ID NO: 19500 - RNA, 20 nt, Artificial Sequence
  spacer sequence CTCN PAM
ugaccucagcugaucccccc

SEQ ID NO: 19501 - RNA, 20 nt, Artificial Sequence
  spacer sequence CTCN PAM
aacuccugaccucagcugau

SEQ ID NO: 19502 - RNA, 20 nt, Artificial Sequence
  spacer sequence CTCN PAM
auuaagggaggagaccaucc

SEQ ID NO: 19503 - RNA, 20 nt, Artificial Sequence
  spacer sequence CTCN PAM
cuuaauagaguuucaccaug

SEQ ID NO: 19504 - RNA, 20 nt, Artificial Sequence
  spacer sequence CTCN PAM
ucccuuaauagaguuucacc

SEQ ID NO: 19505 - RNA, 20 nt, Artificial Sequence
  spacer sequence CTCN PAM
uauugucuuaugcccaauuu

SEQ ID NO: 19506 - RNA, 20 nt, Artificial Sequence
  spacer sequence CTCN PAM
aaagaaagaaguaaaaacua

SEQ ID NO: 19507 - RNA, 20 nt, Artificial Sequence
  spacer sequence CTCN PAM
uuaacuaccaggcccagggc

SEQ ID NO: 19508 - RNA, 20 nt, Artificial Sequence
  spacer sequence CTCN PAM
cacgcggacccccugagagu

SEQ ID NO: 19509 - RNA, 20 nt, Artificial Sequence
  spacer sequence CTCN PAM
cgcggacccccugagaguug

SEQ ID NO: 19510 - RNA, 20 nt, Artificial Sequence
  spacer sequence CTCN PAM
ggggguccgcgugagagggu

SEQ ID NO: 19511 - RNA, 20 nt, Artificial Sequence
  spacer sequence CTCN PAM
caggggguccgcgugagagg

SEQ ID NO: 19512 - RNA, 20 nt, Artificial Sequence
  spacer sequence CTCN PAM
caacucucaggggguccgcg

SEQ ID NO: 19513 - RNA, 20 nt, Artificial Sequence
  spacer sequence CTCN PAM
ucagggcucacaacucucag

SEQ ID NO: 19514 - RNA, 20 nt, Artificial Sequence
  spacer sequence CTCN PAM
cucggggagcucggcucuug

SEQ ID NO: 19515 - RNA, 20 nt, Artificial Sequence
  spacer sequence CTCN PAM
gggagcucggcucuugggac

SEQ ID NO: 19516 - RNA, 20 nt, Artificial Sequence
  spacer sequence CTCN PAM
ccgagugagcaauuccuguc

SEQ ID NO: 19517 - RNA, 20 nt, Artificial Sequence
  spacer sequence CTCN PAM
gcucuugggacaggagucuu

SEQ ID NO: 19518 - RNA, 20 nt, Artificial Sequence
  spacer sequence CTCN PAM
ugggacaggagucuugccga

SEQ ID NO: 19519 - RNA, 20 nt, Artificial Sequence
  spacer sequence CTCN PAM
ugucccaagagccgagcucc

SEQ ID NO: 19520 - RNA, 20 nt, Artificial Sequence
  spacer sequence CTCN PAM
aacugggugucugaggaguu

SEQ ID NO: 19521 - RNA, 20 nt, Artificial Sequence
  spacer sequence CTCN PAM
gacacccaguuagagaagga

SEQ ID NO: 19522 - RNA, 20 nt, Artificial Sequence
  spacer sequence CTCN PAM
ucagacacccaguuagagaa

SEQ ID NO: 19523 - RNA, 20 nt, Artificial Sequence
  spacer sequence CTCN PAM
uccugcuacacuaucucuac

SEQ ID NO: 19524 - RNA, 20 nt, Artificial Sequence
  spacer sequence CTCN PAM
acuaaaaauacaaaaaaaaa

SEQ ID NO: 19525 - RNA, 20 nt, Artificial Sequence
  spacer sequence CTCN PAM
ucgggaggcugaggcgggca

SEQ ID NO: 19526 - RNA, 20 nt, Artificial Sequence
  spacer sequence CTCN PAM
ggaggcugaggcgggcagau

SEQ ID NO: 19527 - RNA, 20 nt, Artificial Sequence
  spacer sequence CTCN PAM
cgaggagcugggauuacagg

SEQ ID NO: 19528 - RNA, 20 nt, Artificial Sequence
  spacer sequence CTCN PAM
gccucccgaggagcugggau

SEQ ID NO: 19529 - RNA, 20 nt, Artificial Sequence
  spacer sequence CTCN PAM
ugaucugcccgccucagccu

SEQ ID NO: 19530 - RNA, 20 nt, Artificial Sequence
  spacer sequence CTCN PAM
ugaccucgugaucugcccgc

SEQ ID NO: 19531 - RNA, 20 nt, Artificial Sequence
  spacer sequence CTCN PAM
aucuccugaccucgugaucu

SEQ ID NO: 19532 - RNA, 20 nt, Artificial Sequence
  spacer sequence CTCN PAM
acuaaaaauacaaacaauua

SEQ ID NO: 19533 - RNA, 20 nt, Artificial Sequence
  spacer sequence CTCN PAM
ggaggcugaggcaggagaau

SEQ ID NO: 19534 - RNA, 20 nt, Artificial Sequence
  spacer sequence CTCN PAM
cgaguagcugggacuacagg

SEQ ID NO: 19535 - RNA, 20 nt, Artificial Sequence
  spacer sequence CTCN PAM
gccucccgaguagcugggac

SEQ ID NO: 19536 - RNA, 20 nt, Artificial Sequence
  spacer sequence CTCN PAM
ugccucagccucccgaguag

SEQ ID NO: 19537 - RNA, 20 nt, Artificial Sequence
  spacer sequence CTCN PAM
cggguucacgccauucuccu

SEQ ID NO: 19538 - RNA, 20 nt, Artificial Sequence
  spacer sequence CTCN PAM
gccucccggguucacgccau

SEQ ID NO: 19539 - RNA, 20 nt, Artificial Sequence
  spacer sequence CTCN PAM
ccgcaagcuccgccucccgg

SEQ ID NO: 19540 - RNA, 20 nt, Artificial Sequence
  spacer sequence CTCN PAM
gcucaccgcaagcuccgccu

SEQ ID NO: 19541 - RNA, 20 nt, Artificial Sequence
  spacer sequence CTCN PAM
agccugggcgacagagcgag

SEQ ID NO: 19542 - RNA, 20 nt, Artificial Sequence
  spacer sequence CTCN PAM
gucgcccaggcuggagugca

SEQ ID NO: 19543 - RNA, 20 nt, Artificial Sequence
  spacer sequence CTCN PAM
cucugucgcccaggcuggag

SEQ ID NO: 19544 - RNA, 20 nt, Artificial Sequence
  spacer sequence CTCN PAM
gucucaaaaaaauaacaagu

SEQ ID NO: 19545 - RNA, 20 nt, Artificial Sequence
  spacer sequence CTCN PAM
aaaaaauaacaaguaaauca

SEQ ID NO: 19546 - RNA, 20 nt, Artificial Sequence
  spacer sequence CTCN PAM
uuaguuccacacugauuuac

SEQ ID NO: 19547 - RNA, 20 nt, Artificial Sequence
  spacer sequence CTCN PAM
ucccucgcgcugcugggacu

SEQ ID NO: 19548 - RNA, 20 nt, Artificial Sequence
  spacer sequence CTCN PAM
cgcugcugggacugacgucc

SEQ ID NO: 19549 - RNA, 20 nt, Artificial Sequence
  spacer sequence CTCN PAM
cggugacccugacccgcgaa

SEQ ID NO: 19550 - RNA, 20 nt, Artificial Sequence
  spacer sequence CTCN PAM
agaauccgcgucccggaacc

SEQ ID NO: 19551 - RNA, 20 nt, Artificial Sequence
  spacer sequence CTCN PAM
cugcgggggucggggccgca

SEQ ID NO: 19552 - RNA, 20 nt, Artificial Sequence
  spacer sequence CTCN PAM
gcccggggacaccaggcucc

SEQ ID NO: 19553 - RNA, 20 nt, Artificial Sequence
  spacer sequence CTCN PAM
uugggcgaacggccaggccu

SEQ ID NO: 19554 - RNA, 20 nt, Artificial Sequence
  spacer sequence CTCN PAM
cgggaccagcgcgcuggaag

SEQ ID NO: 19555 - RNA, 20 nt, Artificial Sequence
  spacer sequence CTCN PAM
cggcggggacgcccccucgg

SEQ ID NO: 19556 - RNA, 20 nt, Artificial Sequence
  spacer sequence CTCN PAM
gccgccccgugccgggcccc

SEQ ID NO: 19557 - RNA, 20 nt, Artificial Sequence
  spacer sequence CTCN PAM
cguucccacugcggggcgcc

SEQ ID NO: 19558 - RNA, 20 nt, Artificial Sequence
  spacer sequence CTCN PAM
ucgcguucccacugcggggc

SEQ ID NO: 19559 - RNA, 20 nt, Artificial Sequence
  spacer sequence CTCN PAM
ccccguggucggucuccucg

SEQ ID NO: 19560 - RNA, 20 nt, Artificial Sequence
  spacer sequence CTCN PAM
gaggaccgcgggcuagagcg

SEQ ID NO: 19561 - RNA, 20 nt, Artificial Sequence
  spacer sequence CTCN PAM
gaguucguggcgggcugaug

SEQ ID NO: 19562 - RNA, 20 nt, Artificial Sequence
  spacer sequence CTCN PAM
agcccgcgguccuccgaguu

SEQ ID NO: 19563 - RNA, 20 nt, Artificial Sequence
  spacer sequence CTCN PAM
gcggcauggcgggaguugug

SEQ ID NO: 19564 - RNA, 20 nt, Artificial Sequence
  spacer sequence CTCN PAM
cgccaugccgcggagcgcgg

SEQ ID NO: 19565 - RNA, 20 nt, Artificial Sequence
  spacer sequence CTCN PAM
cgcgcggcccccgcagcuga

SEQ ID NO: 19566 - RNA, 20 nt, Artificial Sequence
  spacer sequence CTCN PAM
cggcagcucccgcgcggccc

SEQ ID NO: 19567 - RNA, 20 nt, Artificial Sequence
  spacer sequence CTCN PAM
cuggcccugccacugcgcgc

SEQ ID NO: 19568 - RNA, 20 nt, Artificial Sequence
  spacer sequence CTCN PAM
uuuuccgcgggugcagcuca

SEQ ID NO: 19569 - RNA, 20 nt, Artificial Sequence
  spacer sequence CTCN PAM
cccuccuuuuccgcgggugc

SEQ ID NO: 19570 - RNA, 20 nt, Artificial Sequence
  spacer sequence CTCN PAM
acccgcagggcgcagcugac

SEQ ID NO: 19571 - RNA, 20 nt, Artificial Sequence
  spacer sequence CTCN PAM
aagcgccgccaucccugcug

SEQ ID NO: 19572 - RNA, 20 nt, Artificial Sequence
  spacer sequence CTCN PAM
gcacucaaagcgccgccauc

SEQ ID NO: 19573 - RNA, 20 nt, Artificial Sequence
  spacer sequence CTCN PAM
caggccgagccccgacuccc

SEQ ID NO: 19574 - RNA, 20 nt, Artificial Sequence
  spacer sequence CTCN PAM
gccugcgagggugggucaag

SEQ ID NO: 19575 - RNA, 20 nt, Artificial Sequence
  spacer sequence CTCN PAM
cgacccgccgucgcagcccg

SEQ ID NO: 19576 - RNA, 20 nt, Artificial Sequence
  spacer sequence CTCN PAM
gacccgcccucgcagcccgc

SEQ ID NO: 19577 - RNA, 20 nt, Artificial Sequence
  spacer sequence CTCN PAM
cagcccgcggccccgaccuc

SEQ ID NO: 19578 - RNA, 20 nt, Artificial Sequence
  spacer sequence CTCN PAM
gacccgcccucccagccaga

SEQ ID NO: 19579 - RNA, 20 nt, Artificial Sequence
  spacer sequence CTCN PAM
cagccagacccucuacgccc

SEQ ID NO: 19580 - RNA, 20 nt, Artificial Sequence
  spacer sequence CTCN PAM
acgcccgacccgcccucgca

SEQ ID NO: 19581 - RNA, 20 nt, Artificial Sequence
  spacer sequence CTCN PAM
cagcccauggcccaucggcc

SEQ ID NO: 19582 - RNA, 20 nt, Artificial Sequence
  spacer sequence CTCN PAM
gcguccacugccgggccgau

SEQ ID NO: 19583 - RNA, 20 nt, Artificial Sequence
  spacer sequence CTCN PAM
gccccguucccuccccggac

SEQ ID NO: 19584 - RNA, 20 nt, Artificial Sequence
  spacer sequence CTCN PAM
ccggaccccccggacccgcu

SEQ ID NO: 19585 - RNA, 20 nt, Artificial Sequence
  spacer sequence CTCN PAM
ccguccucccugcagagccg

SEQ ID NO: 19586 - RNA, 20 nt, Artificial Sequence
  spacer sequence CTCN PAM
guccucccugcagagccgag

SEQ ID NO: 19587 - RNA, 20 nt, Artificial Sequence
  spacer sequence CTCN PAM
cugcagagccgagggccuug

SEQ ID NO: 19588 - RNA, 20 nt, Artificial Sequence
  spacer sequence CTCN PAM
gcagggaggacggagagcgg

SEQ ID NO: 19589 - RNA, 20 nt, Artificial Sequence
  spacer sequence CTCN PAM
gcucugcagggaggacggag

SEQ ID NO: 19590 - RNA, 20 nt, Artificial Sequence
  spacer sequence CTCN PAM
ccgaccgugcucgauccagc

SEQ ID NO: 19591 - RNA, 20 nt, Artificial Sequence
  spacer sequence CTCN PAM
auccagcccgggugugcugc

SEQ ID NO: 19592 - RNA, 20 nt, Artificial Sequence
  spacer sequence CTCN PAM
cgggggccgucgggccugug

SEQ ID NO: 19593 - RNA, 20 nt, Artificial Sequence
  spacer sequence CTCN PAM
cccuucccagucgugacaac

SEQ ID NO: 19594 - RNA, 20 nt, Artificial Sequence
  spacer sequence CTCN PAM
ugggggcgggauugcggccg

SEQ ID NO: 19595 - RNA, 20 nt, Artificial Sequence
  spacer sequence CTCN PAM
cccggccgcaaucccgcccc

SEQ ID NO: 19596 - RNA, 20 nt, Artificial Sequence
  spacer sequence CTCN PAM
caacccguuaggaacugcag

SEQ ID NO: 19597 - RNA, 20 nt, Artificial Sequence
  spacer sequence CTCN PAM
gucccugcaguuccuaacgg

SEQ ID NO: 19598 - RNA, 20 nt, Artificial Sequence
  spacer sequence CTCN PAM
ccgucccugcaguuccuaac

SEQ ID NO: 19599 - RNA, 20 nt, Artificial Sequence
  spacer sequence CTCN PAM
ggauguccagcacucagcgc

SEQ ID NO: 19600 - RNA, 20 nt, Artificial Sequence
  spacer sequence CTCN PAM
gcgcggguuggguggcgaau

SEQ ID NO: 19601 - RNA, 20 nt, Artificial Sequence
  spacer sequence CTCN PAM
auucgccacccaacccgcgc

SEQ ID NO: 19602 - RNA, 20 nt, Artificial Sequence
  spacer sequence CTCN PAM
ccauucgccacccaacccgc

SEQ ID NO: 19603 - RNA, 20 nt, Artificial Sequence
  spacer sequence CTCN PAM
cucuccauucgccacccaac

SEQ ID NO: 19604 - RNA, 20 nt, Artificial Sequence
  spacer sequence CTCN PAM
gaggccgccggccugcaggc

SEQ ID NO: 19605 - RNA, 20 nt, Artificial Sequence
  spacer sequence CTCN PAM
gaggacgacucgcucuccau

SEQ ID NO: 19606 - RNA, 20 nt, Artificial Sequence
  spacer sequence CTCN PAM
ccugcaggccggcggccucu

SEQ ID NO: 19607 - RNA, 20 nt, Artificial Sequence
  spacer sequence CTCN PAM
cagccaggaggcugcggcuc

SEQ ID NO: 19608 - RNA, 20 nt, Artificial Sequence
  spacer sequence CTCN PAM
uggcugggaggguucucgcc

SEQ ID NO: 19609 - RNA, 20 nt, Artificial Sequence
  spacer sequence CTCN PAM
gccugaaccccgacccaggg

SEQ ID NO: 19610 - RNA, 20 nt, Artificial Sequence
  spacer sequence CTCN PAM
gcaccgggcaggggccaaau

SEQ ID NO: 19611 - RNA, 20 nt, Artificial Sequence
  spacer sequence CTCN PAM
cagcaccgggcaggggccaa

SEQ ID NO: 19612 - RNA, 20 nt, Artificial Sequence
  spacer sequence CTCN PAM
cucagcaccgggcaggggcc

SEQ ID NO: 19613 - RNA, 20 nt, Artificial Sequence
  spacer sequence CTCN PAM
ggccucucucagcaccgggc

SEQ ID NO: 19614 - RNA, 20 nt, Artificial Sequence
  spacer sequence CTCN PAM
gcuucuggggacgccgcucu

SEQ ID NO: 19615 - RNA, 20 nt, Artificial Sequence
  spacer sequence CTCN PAM
cgcuccgcuucuggggacgc

SEQ ID NO: 19616 - RNA, 20 nt, Artificial Sequence
  spacer sequence CTCN PAM
cgccuguaaucccagcacug

SEQ ID NO: 19617 - RNA, 20 nt, Artificial Sequence
  spacer sequence CTCN PAM
cacagugcugggauuacagg

SEQ ID NO: 19618 - RNA, 20 nt, Artificial Sequence
  spacer sequence CTCN PAM
gccucccacagugcugggau

SEQ ID NO: 19619 - RNA, 20 nt, Artificial Sequence
  spacer sequence CTCN PAM
ggugauccaccugccucggc

SEQ ID NO: 19620 - RNA, 20 nt, Artificial Sequence
  spacer sequence CTCN PAM
ugaccucaggugauccaccu

SEQ ID NO: 19621 - RNA, 20 nt, Artificial Sequence
  spacer sequence CTCN PAM
aacuccugaccucaggugau

SEQ ID NO: 19622 - RNA, 20 nt, Artificial Sequence
  spacer sequence CTCN PAM
ucucuacuaaaaauacaaaa

SEQ ID NO: 19623 - RNA, 20 nt, Artificial Sequence
  spacer sequence CTCN PAM
acuaaaaauacaaaaauuag

SEQ ID NO: 19624 - RNA, 20 nt, Artificial Sequence
  spacer sequence CTCN PAM
cggguucaagugauucuacu

SEQ ID NO: 19625 - RNA, 20 nt, Artificial Sequence
  spacer sequence CTCN PAM
accucacggguucaagugau

SEQ ID NO: 19626 - RNA, 20 nt, Artificial Sequence
  spacer sequence CTCN PAM
cugcaaccuccaccucacgg

SEQ ID NO: 19627 - RNA, 20 nt, Artificial Sequence
  spacer sequence CTCN PAM
gcucacugcaaccuccaccu

SEQ ID NO: 19628 - RNA, 20 nt, Artificial Sequence
  spacer sequence CTCN PAM
agccugggcgacaagaguga

SEQ ID NO: 19629 - RNA, 20 nt, Artificial Sequence
  spacer sequence CTCN PAM
ugucgcccaggcuggaguac

SEQ ID NO: 19630 - RNA, 20 nt, Artificial Sequence
  spacer sequence CTCN PAM
agcuaaaaaaaaaagaaaga

SEQ ID NO: 19631 - RNA, 20 nt, Artificial Sequence
  spacer sequence CTCN PAM
acauguauugcuuaugaauc

SEQ ID NO: 19632 - RNA, 20 nt, Artificial Sequence
  spacer sequence CTCN PAM
uuguucacgcugagcguuca

SEQ ID NO: 19633 - RNA, 20 nt, Artificial Sequence
  spacer sequence CTCN PAM
gcgugaacaaagaguguaca

SEQ ID NO: 19634 - RNA, 20 nt, Artificial Sequence
  spacer sequence CTCN PAM
gaacgcucagcgugaacaaa

SEQ ID NO: 19635 - RNA, 20 nt, Artificial Sequence
  spacer sequence CTCN PAM
caggaaauauucaaccugca

SEQ ID NO: 19636 - RNA, 20 nt, Artificial Sequence
  spacer sequence CTCN PAM
uuucuaacacgaauaucaac

SEQ ID NO: 19637 - RNA, 20 nt, Artificial Sequence
  spacer sequence CTCN PAM
caaagugcuggauuacaggu

SEQ ID NO: 19638 - RNA, 20 nt, Artificial Sequence
  spacer sequence CTCN PAM
agugaucugcccaccuuggg

SEQ ID NO: 19639 - RNA, 20 nt, Artificial Sequence
  spacer sequence CTCN PAM
ccaccucaagugaucugccc

SEQ ID NO: 19640 - RNA, 20 nt, Artificial Sequence
  spacer sequence CTCN PAM
auuaaaaauacaaaaauugg

SEQ ID NO: 19641 - RNA, 20 nt, Artificial Sequence
  spacer sequence CTCN PAM
cgccuguaaucccagcaccu

SEQ ID NO: 19642 - RNA, 20 nt, Artificial Sequence
  spacer sequence CTCN PAM
caaggugcugggauuacagg

SEQ ID NO: 19643 - RNA, 20 nt, Artificial Sequence
  spacer sequence CTCN PAM
ggugauccgcccgccuuggc

SEQ ID NO: 19644 - RNA, 20 nt, Artificial Sequence
  spacer sequence CTCN PAM
aacgccugaccucaggugau

SEQ ID NO: 19645 - RNA, 20 nt, Artificial Sequence
  spacer sequence CTCN PAM
acuaaaaaugcaaaaguuag

SEQ ID NO: 19646 - RNA, 20 nt, Artificial Sequence
  spacer sequence CTCN PAM
ggagucugagacagaauugc

SEQ ID NO: 19647 - RNA, 20 nt, Artificial Sequence
  spacer sequence CTCN PAM
ggaguagcugggacuacagg

SEQ ID NO: 19648 - RNA, 20 nt, Artificial Sequence
  spacer sequence CTCN PAM
gacuccggaguagcugggac

SEQ ID NO: 19649 - RNA, 20 nt, Artificial Sequence
  spacer sequence CTCN PAM
cagguuuaagcaauucuguc

SEQ ID NO: 19650 - RNA, 20 nt, Artificial Sequence
  spacer sequence CTCN PAM
gccucccagguuuaagcaau

SEQ ID NO: 19651 - RNA, 20 nt, Artificial Sequence
  spacer sequence CTCN PAM
cugcaaccucugccucccag

SEQ ID NO: 19652 - RNA, 20 nt, Artificial Sequence
  spacer sequence CTCN PAM
gcucacugcaaccucugccu

SEQ ID NO: 19653 - RNA, 20 nt, Artificial Sequence
  spacer sequence CTCN PAM
agccugggugacagagugag

SEQ ID NO: 19654 - RNA, 20 nt, Artificial Sequence
  spacer sequence CTCN PAM
gucacccaggcuggagugca

SEQ ID NO: 19655 - RNA, 20 nt, Artificial Sequence
  spacer sequence CTCN PAM
cucugucacccaggcuggag

SEQ ID NO: 19656 - RNA, 20 nt, Artificial Sequence
  spacer sequence CTCN PAM
aaaaaaaaaaaaaagucuac

SEQ ID NO: 19657 - RNA, 20 nt, Artificial Sequence
  spacer sequence CTCN PAM
gguaaguuuuguauuuguag

SEQ ID NO: 19658 - RNA, 20 nt, Artificial Sequence
  spacer sequence CTCN PAM
ggaggcucaggcgggagaau

SEQ ID NO: 19659 - RNA, 20 nt, Artificial Sequence
  spacer sequence CTCN PAM
ugaguagcugggauuauagg

SEQ ID NO: 19660 - RNA, 20 nt, Artificial Sequence
  spacer sequence CTCN PAM
ggcgggagaaucgcuugaac

SEQ ID NO: 19661 - RNA, 20 nt, Artificial Sequence
  spacer sequence CTCN PAM
cgccugagccuccugaguag

SEQ ID NO: 19662 - RNA, 20 nt, Artificial Sequence
  spacer sequence CTCN PAM
uggguucaagcgauucuccc

SEQ ID NO: 19663 - RNA, 20 nt, Artificial Sequence
  spacer sequence CTCN PAM
gccuccuggguucaagcgau

SEQ ID NO: 19664 - RNA, 20 nt, Artificial Sequence
  spacer sequence CTCN PAM
cugcaaccuccgccuccugg

SEQ ID NO: 19665 - RNA, 20 nt, Artificial Sequence
  spacer sequence CTCN PAM
cgccuguaaucccagcacuu

SEQ ID NO: 19666 - RNA, 20 nt, Artificial Sequence
  spacer sequence CTCN PAM
uuaaaccugaugcgggagcc

SEQ ID NO: 19667 - RNA, 20 nt, Artificial Sequence
  spacer sequence CTCN PAM
cgcaucagguuuaaggagga

SEQ ID NO: 19668 - RNA, 20 nt, Artificial Sequence
  spacer sequence CTCN PAM
acacguacacacgcacacac

SEQ ID NO: 19669 - RNA, 20 nt, Artificial Sequence
  spacer sequence CTCN PAM
ugcagccuccaucaaucuca

SEQ ID NO: 19670 - RNA, 20 nt, Artificial Sequence
  spacer sequence CTCN PAM
aucaaucucauuccuccccc

SEQ ID NO: 19671 - RNA, 20 nt, Artificial Sequence
  spacer sequence CTCN PAM
uuccucccccacucuccuug

SEQ ID NO: 19672 - RNA, 20 nt, Artificial Sequence
  spacer sequence CTCN PAM
cccacucuccuugcgacccu

SEQ ID NO: 19673 - RNA, 20 nt, Artificial Sequence
  spacer sequence CTCN PAM
ccuugcgacccucaggucug

SEQ ID NO: 19674 - RNA, 20 nt, Artificial Sequence
  spacer sequence CTCN PAM
uugcgacccucaggucuggg

SEQ ID NO: 19675 - RNA, 20 nt, Artificial Sequence
  spacer sequence CTCN PAM
ggucugggguccuuggacug

SEQ ID NO: 19676 - RNA, 20 nt, Artificial Sequence
  spacer sequence CTCN PAM
uuguuggacaaggcuugaac

SEQ ID NO: 19677 - RNA, 20 nt, Artificial Sequence
  spacer sequence CTCN PAM
cuccaaagaaaaagccauga

SEQ ID NO: 19678 - RNA, 20 nt, Artificial Sequence
  spacer sequence CTCN PAM
aaagaaaaagccaugaggac

SEQ ID NO: 19679 - RNA, 20 nt, Artificial Sequence
  spacer sequence CTCN PAM
uggcuuuuucuuuggaguga

SEQ ID NO: 19680 - RNA, 20 nt, Artificial Sequence
  spacer sequence CTCN PAM
cacccacuggucaguucugg

SEQ ID NO: 19681 - RNA, 20 nt, Artificial Sequence
  spacer sequence CTCN PAM
ugucucccacccacugguca

SEQ ID NO: 19682 - RNA, 20 nt, Artificial Sequence
  spacer sequence CTCN PAM
ccugucucccacccacuggu

SEQ ID NO: 19683 - RNA, 20 nt, Artificial Sequence
  spacer sequence CTCN PAM
gcuccuggacaacggcgccc

SEQ ID NO: 19684 - RNA, 20 nt, Artificial Sequence
  spacer sequence CTCN PAM
uggacaacggcgcccucaca

SEQ ID NO: 19685 - RNA, 20 nt, Artificial Sequence
  spacer sequence CTCN PAM
cagccccuuccccucagggc

SEQ ID NO: 19686 - RNA, 20 nt, Artificial Sequence
  spacer sequence CTCN PAM
gggcaacacagucaucugga

SEQ ID NO: 19687 - RNA, 20 nt, Artificial Sequence
  spacer sequence CTCN PAM
cucggcagcuguggacaggg

SEQ ID NO: 19688 - RNA, 20 nt, Artificial Sequence
  spacer sequence CTCN PAM
gcagcuguggacagggaggc

SEQ ID NO: 19689 - RNA, 20 nt, Artificial Sequence
  spacer sequence CTCN PAM
cuguccacagcugccgaggg

SEQ ID NO: 19690 - RNA, 20 nt, Artificial Sequence
  spacer sequence CTCN PAM
augggaaggggggcuuccug

SEQ ID NO: 19691 - RNA, 20 nt, Artificial Sequence
  spacer sequence CTCN PAM
augggaagggggcuuccuga

SEQ ID NO: 19692 - RNA, 20 nt, Artificial Sequence
  spacer sequence CTCN PAM
gucaggaagcccccuuccca

SEQ ID NO: 19693 - RNA, 20 nt, Artificial Sequence
  spacer sequence CTCN PAM
gcggccuccgucaggaagcc

SEQ ID NO: 19694 - RNA, 20 nt, Artificial Sequence
  spacer sequence CTCN PAM
accccgcccccaacaucaau

SEQ ID NO: 19695 - RNA, 20 nt, Artificial Sequence
  spacer sequence CTCN PAM
caaggacaaaaaggaggucc

SEQ ID NO: 19696 - RNA, 20 nt, Artificial Sequence
  spacer sequence CTCN PAM
uuuuuguccuugggagacuc

SEQ ID NO: 19697 - RNA, 20 nt, Artificial Sequence
  spacer sequence CTCN PAM
gacccaggggucucaggguc

SEQ ID NO: 19698 - RNA, 20 nt, Artificial Sequence
  spacer sequence CTCN PAM
ggguccuccccggcccucag

SEQ ID NO: 19699 - RNA, 20 nt, Artificial Sequence
  spacer sequence CTCN PAM
ccggcccucaggcugcuggc

SEQ ID NO: 19700 - RNA, 20 nt, Artificial Sequence
  spacer sequence CTCN PAM
ggcugcuggcccaccucggu

SEQ ID NO: 19701 - RNA, 20 nt, Artificial Sequence
  spacer sequence CTCN PAM
gucucuccaucccucugccu

SEQ ID NO: 19702 - RNA, 20 nt, Artificial Sequence
  spacer sequence CTCN PAM
ccaucccucugccucugccu

SEQ ID NO: 19703 - RNA, 20 nt, Artificial Sequence
  spacer sequence CTCN PAM
aucccucugccucugccucu

SEQ ID NO: 19704 - RNA, 20 nt, Artificial Sequence
  spacer sequence CTCN PAM
gccucugccucucugugucu

SEQ ID NO: 19705 - RNA, 20 nt, Artificial Sequence
  spacer sequence CTCN PAM
gccucucugugucucugucu

SEQ ID NO: 19706 - RNA, 20 nt, Artificial Sequence
  spacer sequence CTCN PAM
cugugucucugucucugucu

SEQ ID NO: 19707 - RNA, 20 nt, Artificial Sequence
  spacer sequence CTCN PAM
gugucucugucucugucucc

SEQ ID NO: 19708 - RNA, 20 nt, Artificial Sequence
  spacer sequence CTCN PAM
gucucugucucccugugucu

SEQ ID NO: 19709 - RNA, 20 nt, Artificial Sequence
  spacer sequence CTCN PAM
gucucccugugucucucugc

SEQ ID NO: 19710 - RNA, 20 nt, Artificial Sequence
  spacer sequence CTCN PAM
cugugucucucugccuucuc

SEQ ID NO: 19711 - RNA, 20 nt, Artificial Sequence
  spacer sequence CTCN PAM
cugccuucucucuuccucgc

SEQ ID NO: 19712 - RNA, 20 nt, Artificial Sequence
  spacer sequence CTCN PAM
gccuucucucuuccucgcuc

SEQ ID NO: 19713 - RNA, 20 nt, Artificial Sequence
  spacer sequence CTCN PAM
cuuccucgcucugucucugu

SEQ ID NO: 19714 - RNA, 20 nt, Artificial Sequence
  spacer sequence CTCN PAM
uccucgcucugucucugucu

SEQ ID NO: 19715 - RNA, 20 nt, Artificial Sequence
  spacer sequence CTCN PAM
cucugucucugucucucugu

SEQ ID NO: 19716 - RNA, 20 nt, Artificial Sequence
  spacer sequence CTCN PAM
gucucugucucucugugucu

SEQ ID NO: 19717 - RNA, 20 nt, Artificial Sequence
  spacer sequence CTCN PAM
gucucucugugucucuaucu

SEQ ID NO: 19718 - RNA, 20 nt, Artificial Sequence
  spacer sequence CTCN PAM
cugugucucuaucucccugu

SEQ ID NO: 19719 - RNA, 20 nt, Artificial Sequence
  spacer sequence CTCN PAM
gugucucuaucucccugugu

SEQ ID NO: 19720 - RNA, 20 nt, Artificial Sequence
  spacer sequence CTCN PAM
aucucccugugucucucugc

SEQ ID NO: 19721 - RNA, 20 nt, Artificial Sequence
  spacer sequence CTCN PAM
cugugucucucugccuuguc

SEQ ID NO: 19722 - RNA, 20 nt, Artificial Sequence
  spacer sequence CTCN PAM
cugccuugucucucuuccuu

SEQ ID NO: 19723 - RNA, 20 nt, Artificial Sequence
  spacer sequence CTCN PAM
gccuugucucucuuccuuga

SEQ ID NO: 19724 - RNA, 20 nt, Artificial Sequence
  spacer sequence CTCN PAM
cuuccuugaucugucucucc

SEQ ID NO: 19725 - RNA, 20 nt, Artificial Sequence
  spacer sequence CTCN PAM
uccuugaucugucucucccu

SEQ ID NO: 19726 - RNA, 20 nt, Artificial Sequence
  spacer sequence CTCN PAM
cccucucugugucucugucu

SEQ ID NO: 19727 - RNA, 20 nt, Artificial Sequence
  spacer sequence CTCN PAM
cucucugugucucugucucc

SEQ ID NO: 19728 - RNA, 20 nt, Artificial Sequence
  spacer sequence CTCN PAM
cugugucucugucucccuau

SEQ ID NO: 19729 - RNA, 20 nt, Artificial Sequence
  spacer sequence CTCN PAM
gugucucugucucccuaugu

SEQ ID NO: 19730 - RNA, 20 nt, Artificial Sequence
  spacer sequence CTCN PAM
gucucccuaugucucucuuc

SEQ ID NO: 19731 - RNA, 20 nt, Artificial Sequence
  spacer sequence CTCN PAM
cuaugucucucuuccucacu

SEQ ID NO: 19732 - RNA, 20 nt, Artificial Sequence
  spacer sequence CTCN PAM
cuuccucacucugucucugu

SEQ ID NO: 19733 - RNA, 20 nt, Artificial Sequence
  spacer sequence CTCN PAM
uccucacucugucucugucu

SEQ ID NO: 19734 - RNA, 20 nt, Artificial Sequence
  spacer sequence CTCN PAM
cucugucucugucucucugu

SEQ ID NO: 19735 - RNA, 20 nt, Artificial Sequence
  spacer sequence CTCN PAM
gucucugucucucugugucu

SEQ ID NO: 19736 - RNA, 20 nt, Artificial Sequence
  spacer sequence CTCN PAM
gucucucugugucucugucu

SEQ ID NO: 19737 - RNA, 20 nt, Artificial Sequence
  spacer sequence CTCN PAM
cugugucucugucucucucu

SEQ ID NO: 19738 - RNA, 20 nt, Artificial Sequence
  spacer sequence CTCN PAM
gugucucugucucucucucu

SEQ ID NO: 19739 - RNA, 20 nt, Artificial Sequence
  spacer sequence CTCN PAM
gucucucucucucugucucu

SEQ ID NO: 19740 - RNA, 20 nt, Artificial Sequence
  spacer sequence CTCN PAM
cucucucugucucugugucu

SEQ ID NO: 19741 - RNA, 20 nt, Artificial Sequence
  spacer sequence CTCN PAM
cucucugucucugugucucc

SEQ ID NO: 19742 - RNA, 20 nt, Artificial Sequence
  spacer sequence CTCN PAM
cucugucucugugucucccu

SEQ ID NO: 19743 - RNA, 20 nt, Artificial Sequence
  spacer sequence CTCN PAM
cugucucugugucucccuca

SEQ ID NO: 19744 - RNA, 20 nt, Artificial Sequence
  spacer sequence CTCN PAM
gucucugugucucccucacc

SEQ ID NO: 19745 - RNA, 20 nt, Artificial Sequence
  spacer sequence CTCN PAM
gugucucccucacccccgcc

SEQ ID NO: 19746 - RNA, 20 nt, Artificial Sequence
  spacer sequence CTCN PAM
cucacccccgccuuccccac

SEQ ID NO: 19747 - RNA, 20 nt, Artificial Sequence
  spacer sequence CTCN PAM
cccccgccuuccccaccucu

SEQ ID NO: 19748 - RNA, 20 nt, Artificial Sequence
  spacer sequence CTCN PAM
ggccguugaaaccugcgggu

SEQ ID NO: 19749 - RNA, 20 nt, Artificial Sequence
  spacer sequence CTCN PAM
gccucugggaacccucccuc

SEQ ID NO: 19750 - RNA, 20 nt, Artificial Sequence
  spacer sequence CTCN PAM
gggaacccucccuccuccuu

SEQ ID NO: 19751 - RNA, 20 nt, Artificial Sequence
  spacer sequence CTCN PAM
cuccuccuuccuguguccau

SEQ ID NO: 19752 - RNA, 20 nt, Artificial Sequence
  spacer sequence CTCN PAM
uccuuccuguguccauccca

SEQ ID NO: 19753 - RNA, 20 nt, Artificial Sequence
  spacer sequence CTCN PAM
uuccuguguccaucccaccu

SEQ ID NO: 19754 - RNA, 20 nt, Artificial Sequence
  spacer sequence CTCN PAM
gggggaccccagcuuuguug

SEQ ID NO: 19755 - RNA, 20 nt, Artificial Sequence
  spacer sequence CTCN PAM
ccgcccccacaagccugugg

SEQ ID NO: 19756 - RNA, 20 nt, Artificial Sequence
  spacer sequence CTCN PAM
cauccacaggcuuguggggg

SEQ ID NO: 19757 - RNA, 20 nt, Artificial Sequence
  spacer sequence CTCN PAM
gcacacggggacugugagca

SEQ ID NO: 19758 - RNA, 20 nt, Artificial Sequence
  spacer sequence CTCN PAM
caguccccgugugccgagcc

SEQ ID NO: 19759 - RNA, 20 nt, Artificial Sequence
  spacer sequence CTCN PAM
agggcccugucccccgcccg

SEQ ID NO: 19760 - RNA, 20 nt, Artificial Sequence
  spacer sequence CTCN PAM
ccagggcccugucccccgcc

SEQ ID NO: 19761 - RNA, 20 nt, Artificial Sequence
  spacer sequence CTCN PAM
gcccuccuggcgcccagugg

SEQ ID NO: 19762 - RNA, 20 nt, Artificial Sequence
  spacer sequence CTCN PAM
uggcgcccaguggucccucc

SEQ ID NO: 19763 - RNA, 20 nt, Artificial Sequence
  spacer sequence CTCN PAM
ccaccugcaggaaguagggu

SEQ ID NO: 19764 - RNA, 20 nt, Artificial Sequence
  spacer sequence CTCN PAM
ggccuggggagggccccucc

SEQ ID NO: 19765 - RNA, 20 nt, Artificial Sequence
  spacer sequence CTCN PAM
ccaggccggaggugcaggcc

SEQ ID NO: 19766 - RNA, 20 nt, Artificial Sequence
  spacer sequence CTCN PAM
ucggagucugcuuuccggug

SEQ ID NO: 19767 - RNA, 20 nt, Artificial Sequence
  spacer sequence CTCN PAM
gagucugcuuuccggugagg

SEQ ID NO: 19768 - RNA, 20 nt, Artificial Sequence
  spacer sequence CTCN PAM
gaggaggggcccuccccagg

SEQ ID NO: 19769 - RNA, 20 nt, Artificial Sequence
  spacer sequence CTCN PAM
ccggaaagcagacuccgagg

SEQ ID NO: 19770 - RNA, 20 nt, Artificial Sequence
  spacer sequence CTCN PAM
ugcccaggcuggugccggga

SEQ ID NO: 19771 - RNA, 20 nt, Artificial Sequence
  spacer sequence CTCN PAM
cugggucccaucccccuccu

SEQ ID NO: 19772 - RNA, 20 nt, Artificial Sequence
  spacer sequence CTCN PAM
cagcccugucucccuggguc

SEQ ID NO: 19773 - RNA, 20 nt, Artificial Sequence
  spacer sequence CTCN PAM
cacaccugggcccucaccuc

SEQ ID NO: 19774 - RNA, 20 nt, Artificial Sequence
  spacer sequence CTCN PAM
ccucugaggggacuguuucc

SEQ ID NO: 19775 - RNA, 20 nt, Artificial Sequence
  spacer sequence CTCN PAM
gaggggacuguuuccccacc

SEQ ID NO: 19776 - RNA, 20 nt, Artificial Sequence
  spacer sequence CTCN PAM
gaggugagggcccaggugug

SEQ ID NO: 19777 - RNA, 20 nt, Artificial Sequence
  spacer sequence CTCN PAM
guuucccuccucuaggccuc

SEQ ID NO: 19778 - RNA, 20 nt, Artificial Sequence
  spacer sequence CTCN PAM
ucuaggccucaguuucucuc

SEQ ID NO: 19779 - RNA, 20 nt, Artificial Sequence
  spacer sequence CTCN PAM
aggccucaguuucucuccuu

SEQ ID NO: 19780 - RNA, 20 nt, Artificial Sequence
  spacer sequence CTCN PAM
guuucucuccuuugcaccca

SEQ ID NO: 19781 - RNA, 20 nt, Artificial Sequence
  spacer sequence CTCN PAM
ccuuugcacccagccccucc

SEQ ID NO: 19782 - RNA, 20 nt, Artificial Sequence
  spacer sequence CTCN PAM
uuugcacccagccccuccuc

SEQ ID NO: 19783 - RNA, 20 nt, Artificial Sequence
  spacer sequence CTCN PAM
ucuaggccucaguuucccuc

SEQ ID NO: 19784 - RNA, 20 nt, Artificial Sequence
  spacer sequence CTCN PAM
aggccucaguuucccuccuc

SEQ ID NO: 19785 - RNA, 20 nt, Artificial Sequence
  spacer sequence CTCN PAM
guuucccuccucagcaccca

SEQ ID NO: 19786 - RNA, 20 nt, Artificial Sequence
  spacer sequence CTCN PAM
ucagcacccagccccucccc

SEQ ID NO: 19787 - RNA, 20 nt, Artificial Sequence
  spacer sequence CTCN PAM
gcacccagccccucccccga

SEQ ID NO: 19788 - RNA, 20 nt, Artificial Sequence
  spacer sequence CTCN PAM
cccgagccucauuuugccuc

SEQ ID NO: 19789 - RNA, 20 nt, Artificial Sequence
  spacer sequence CTCN PAM
ggggaggggcugggugcuga

SEQ ID NO: 19790 - RNA, 20 nt, Artificial Sequence
  spacer sequence CTCN PAM
uuuugccuccucugcaccca

SEQ ID NO: 19791 - RNA, 20 nt, Artificial Sequence
  spacer sequence CTCN PAM
ucugcacccagccccucccc

SEQ ID NO: 19792 - RNA, 20 nt, Artificial Sequence
  spacer sequence CTCN PAM
gcacccagccccuccccuag

SEQ ID NO: 19793 - RNA, 20 nt, Artificial Sequence
  spacer sequence CTCN PAM
ccuaggccucaguuucccuc

SEQ ID NO: 19794 - RNA, 20 nt, Artificial Sequence
  spacer sequence CTCN PAM
guuucccuccuuugcaccca

SEQ ID NO: 19795 - RNA, 20 nt, Artificial Sequence
  spacer sequence CTCN PAM
uuugcacccaggcccugccc

SEQ ID NO: 19796 - RNA, 20 nt, Artificial Sequence
  spacer sequence CTCN PAM
guuucccuccucugguccca

SEQ ID NO: 19797 - RNA, 20 nt, Artificial Sequence
  spacer sequence CTCN PAM
ucuggucccagccccacccc

SEQ ID NO: 19798 - RNA, 20 nt, Artificial Sequence
  spacer sequence CTCN PAM
ggucccagccccaccccugg

SEQ ID NO: 19799 - RNA, 20 nt, Artificial Sequence
  spacer sequence CTCN PAM
guuucccuccucugauccca

SEQ ID NO: 19800 - RNA, 20 nt, Artificial Sequence
  spacer sequence CTCN PAM
ucugaucccagccccuccuc

SEQ ID NO: 19801 - RNA, 20 nt, Artificial Sequence
  spacer sequence CTCN PAM
gaucccagccccuccucugg

SEQ ID NO: 19802 - RNA, 20 nt, Artificial Sequence
  spacer sequence CTCN PAM
ucugggccucaguuucccuc

SEQ ID NO: 19803 - RNA, 20 nt, Artificial Sequence
  spacer sequence CTCN PAM
gggccucaguuucccuccuc

SEQ ID NO: 19804 - RNA, 20 nt, Artificial Sequence
  spacer sequence CTCN PAM
guuucccuccucugguccca

SEQ ID NO: 19805 - RNA, 20 nt, Artificial Sequence
  spacer sequence CTCN PAM
ucuggucccagccccgcccc

SEQ ID NO: 19806 - RNA, 20 nt, Artificial Sequence
  spacer sequence CTCN PAM
ggucccagccccgccccugg

SEQ ID NO: 19807 - RNA, 20 nt, Artificial Sequence
  spacer sequence CTCN PAM
guuucccuccucugauccca

SEQ ID NO: 19808 - RNA, 20 nt, Artificial Sequence
  spacer sequence CTCN PAM
ucugaucccagccccuccuc

SEQ ID NO: 19809 - RNA, 20 nt, Artificial Sequence
  spacer sequence CTCN PAM
gaucccagccccuccucugg

SEQ ID NO: 19810 - RNA, 20 nt, Artificial Sequence
  spacer sequence CTCN PAM
ucugggccucaguuuuccuc

SEQ ID NO: 19811 - RNA, 20 nt, Artificial Sequence
  spacer sequence CTCN PAM
gggccucaguuuuccuccuc

SEQ ID NO: 19812 - RNA, 20 nt, Artificial Sequence
  spacer sequence CTCN PAM
guuuuccuccucugguccca

SEQ ID NO: 19813 - RNA, 20 nt, Artificial Sequence
  spacer sequence CTCN PAM
ucuggucccagccccgcccc

SEQ ID NO: 19814 - RNA, 20 nt, Artificial Sequence
  spacer sequence CTCN PAM
ggucccagccccgccccugg

SEQ ID NO: 19815 - RNA, 20 nt, Artificial Sequence
  spacer sequence CTCN PAM
guuucccuccucugguccca

SEQ ID NO: 19816 - RNA, 20 nt, Artificial Sequence
  spacer sequence CTCN PAM
ucuggucccagcccugcccc

SEQ ID NO: 19817 - RNA, 20 nt, Artificial Sequence
  spacer sequence CTCN PAM
ggucccagcccugccccugg

SEQ ID NO: 19818 - RNA, 20 nt, Artificial Sequence
  spacer sequence CTCN PAM
guuucccuccucugacaggu

SEQ ID NO: 19819 - RNA, 20 nt, Artificial Sequence
  spacer sequence CTCN PAM
ucugacagguaagccgauug

SEQ ID NO: 19820 - RNA, 20 nt, Artificial Sequence
  spacer sequence CTCN PAM
gacagguaagccgauuggca

SEQ ID NO: 19821 - RNA, 20 nt, Artificial Sequence
  spacer sequence CTCN PAM
guuucccuggccauggaaua

SEQ ID NO: 19822 - RNA, 20 nt, Artificial Sequence
  spacer sequence CTCN PAM
gggucugucugugccucagu

SEQ ID NO: 19823 - RNA, 20 nt, Artificial Sequence
  spacer sequence CTCN PAM
aucauuuuauucccgcgugc

SEQ ID NO: 19824 - RNA, 20 nt, Artificial Sequence
  spacer sequence CTCN PAM
acccaggggccgguccugug

SEQ ID NO: 19825 - RNA, 20 nt, Artificial Sequence
  spacer sequence CTCN PAM
ccuccacccaggggccgguc

SEQ ID NO: 19826 - RNA, 20 nt, Artificial Sequence
  spacer sequence CTCN PAM
uugagcuaggagcagagcac

SEQ ID NO: 19827 - RNA, 20 nt, Artificial Sequence
  spacer sequence CTCN PAM
augagggccugugguggcag

SEQ ID NO: 19828 - RNA, 20 nt, Artificial Sequence
  spacer sequence CTCN PAM
uagcucaaugagggccugug

SEQ ID NO: 19829 - RNA, 20 nt, Artificial Sequence
  spacer sequence CTCN PAM
gcuccuagcucaaugagggc

SEQ ID NO: 19830 - RNA, 20 nt, Artificial Sequence
  spacer sequence CTCN PAM
gcugugguucccagggugcu

SEQ ID NO: 19831 - RNA, 20 nt, Artificial Sequence
  spacer sequence CTCN PAM
uccgcugugguucccagggu

SEQ ID NO: 19832 - RNA, 20 nt, Artificial Sequence
  spacer sequence CTCN PAM
ccccccacccuccuccgcug

SEQ ID NO: 19833 - RNA, 20 nt, Artificial Sequence
  spacer sequence CTCN PAM
cccccucgccccccacccuc

SEQ ID NO: 19834 - RNA, 20 nt, Artificial Sequence
  spacer sequence CTCN PAM
ccuuacccagguucugccca

SEQ ID NO: 19835 - RNA, 20 nt, Artificial Sequence
  spacer sequence CTCN PAM
ucaccuuacccagguucugc

SEQ ID NO: 19836 - RNA, 20 nt, Artificial Sequence
  spacer sequence CTCN PAM
gcccgggcugcuccucaccu

SEQ ID NO: 19837 - RNA, 20 nt, Artificial Sequence
  spacer sequence CTCN PAM
gggacucugcccgggcugcu

SEQ ID NO: 19838 - RNA, 20 nt, Artificial Sequence
  spacer sequence CTCN PAM
cagggccucugggacucugc

SEQ ID NO: 19839 - RNA, 20 nt, Artificial Sequence
  spacer sequence CTCN PAM
gcugguggcuuguuuacccc

SEQ ID NO: 19840 - RNA, 20 nt, Artificial Sequence
  spacer sequence CTCN PAM
aagccccgcacacugguucu

SEQ ID NO: 19841 - RNA, 20 nt, Artificial Sequence
  spacer sequence CTCN PAM
ucuuccaaacgcacuggaau

SEQ ID NO: 19842 - RNA, 20 nt, Artificial Sequence
  spacer sequence CTCN PAM
cugauggcagcugugagugg

SEQ ID NO: 19843 - RNA, 20 nt, Artificial Sequence
  spacer sequence CTCN PAM
cagcugccaucagcgagucc

SEQ ID NO: 19844 - RNA, 20 nt, Artificial Sequence
  spacer sequence CTCN PAM
cacucacagcugccaucagc

SEQ ID NO: 19845 - RNA, 20 nt, Artificial Sequence
  spacer sequence CTCN PAM
uguggaccgagauccagguc

SEQ ID NO: 19846 - RNA, 20 nt, Artificial Sequence
  spacer sequence CTCN PAM
guccacaagagggaucugga

SEQ ID NO: 19847 - RNA, 20 nt, Artificial Sequence
  spacer sequence CTCN PAM
guguagaccaaggaacagag

SEQ ID NO: 19848 - RNA, 20 nt, Artificial Sequence
  spacer sequence CTCN PAM
guuccuuggucuacacugag

SEQ ID NO: 19849 - RNA, 20 nt, Artificial Sequence
  spacer sequence CTCN PAM
ggcucccaggcuccagccag

SEQ ID NO: 19850 - RNA, 20 nt, Artificial Sequence
  spacer sequence CTCN PAM
caggcuccagccaggccugc

SEQ ID NO: 19851 - RNA, 20 nt, Artificial Sequence
  spacer sequence CTCN PAM
agccaggccugcuagguggg

SEQ ID NO: 19852 - RNA, 20 nt, Artificial Sequence
  spacer sequence CTCN PAM
gcccgugugauggaaggaag

SEQ ID NO: 19853 - RNA, 20 nt, Artificial Sequence
  spacer sequence CTCN PAM
gagauggggugacuuguccc

SEQ ID NO: 19854 - RNA, 20 nt, Artificial Sequence
  spacer sequence CTCN PAM
gagccuggcuuccuuccauc

SEQ ID NO: 19855 - RNA, 20 nt, Artificial Sequence
  spacer sequence CTCN PAM
aggacgugggacaagucacc

SEQ ID NO: 19856 - RNA, 20 nt, Artificial Sequence
  spacer sequence CTCN PAM
cagcuccaccacggccagga

SEQ ID NO: 19857 - RNA, 20 nt, Artificial Sequence
  spacer sequence CTCN PAM
accacggccaggagacuuca

SEQ ID NO: 19858 - RNA, 20 nt, Artificial Sequence
  spacer sequence CTCN PAM
uggccgugguggagcuguga

SEQ ID NO: 19859 - RNA, 20 nt, Artificial Sequence
  spacer sequence CTCN PAM
auccccagcgaccuucaccu

SEQ ID NO: 19860 - RNA, 20 nt, Artificial Sequence
  spacer sequence CTCN PAM
ggaacgggggagggcugcuc

SEQ ID NO: 19861 - RNA, 20 nt, Artificial Sequence
  spacer sequence CTCN PAM
cccguuccggagcugcaggc

SEQ ID NO: 19862 - RNA, 20 nt, Artificial Sequence
  spacer sequence CTCN PAM
ccaccgccccugugcggccg

SEQ ID NO: 19863 - RNA, 20 nt, Artificial Sequence
  spacer sequence CTCN PAM
accgccccugugcggccgcc

SEQ ID NO: 19864 - RNA, 20 nt, Artificial Sequence
  spacer sequence CTCN PAM
cgccugugaucucagcacuu

SEQ ID NO: 19865 - RNA, 20 nt, Artificial Sequence
  spacer sequence CTCN PAM
gcacuuugggaggccgaggu

SEQ ID NO: 19866 - RNA, 20 nt, Artificial Sequence
  spacer sequence CTCN PAM
caaagugcugagaucacagg

SEQ ID NO: 19867 - RNA, 20 nt, Artificial Sequence
  spacer sequence CTCN PAM
gccucccaaagugcugagau

SEQ ID NO: 19868 - RNA, 20 nt, Artificial Sequence
  spacer sequence CTCN PAM
ggugauccgcccaccucggc

SEQ ID NO: 19869 - RNA, 20 nt, Artificial Sequence
  spacer sequence CTCN PAM
cgaccucaggugauccgccc

SEQ ID NO: 19870 - RNA, 20 nt, Artificial Sequence
  spacer sequence CTCN PAM
aacucccgaccucaggugau

SEQ ID NO: 19871 - RNA, 20 nt, Artificial Sequence
  spacer sequence CTCN PAM
auguugggcaggcuggccuc

SEQ ID NO: 19872 - RNA, 20 nt, Artificial Sequence
  spacer sequence CTCN PAM
acuaaagauacaaaauuagc

SEQ ID NO: 19873 - RNA, 20 nt, Artificial Sequence
  spacer sequence CTCN PAM
aguagcugggauuacaggca

SEQ ID NO: 19874 - RNA, 20 nt, Artificial Sequence
  spacer sequence CTCN PAM
gccacuccaguagcugggau

SEQ ID NO: 19875 - RNA, 20 nt, Artificial Sequence
  spacer sequence CTCN PAM
ugccucagccacuccaguag

SEQ ID NO: 19876 - RNA, 20 nt, Artificial Sequence
  spacer sequence CTCN PAM
agcgauucuccugccucagc

SEQ ID NO: 19877 - RNA, 20 nt, Artificial Sequence
  spacer sequence CTCN PAM
cgggcucaagcgauucuccu

SEQ ID NO: 19878 - RNA, 20 nt, Artificial Sequence
  spacer sequence CTCN PAM
gucucccgggcucaagcgau

SEQ ID NO: 19879 - RNA, 20 nt, Artificial Sequence
  spacer sequence CTCN PAM
ccgcaaccucugucucccgg

SEQ ID NO: 19880 - RNA, 20 nt, Artificial Sequence
  spacer sequence CTCN PAM
gcucaccgcaaccucugucu

SEQ ID NO: 19881 - RNA, 20 nt, Artificial Sequence
  spacer sequence CTCN PAM
agccugggcaacaagagcga

SEQ ID NO: 19882 - RNA, 20 nt, Artificial Sequence
  spacer sequence CTCN PAM
uguugcccaggcuggagugc

SEQ ID NO: 19883 - RNA, 20 nt, Artificial Sequence
  spacer sequence CTCN PAM
gaaaaaaaagaaaagaaagu

SEQ ID NO: 19884 - RNA, 20 nt, Artificial Sequence
  spacer sequence CTCN PAM
gucccacuuccaugcacuug

SEQ ID NO: 19885 - RNA, 20 nt, Artificial Sequence
  spacer sequence CTCN PAM
acccuccggccuccgucugc

SEQ ID NO: 19886 - RNA, 20 nt, Artificial Sequence
  spacer sequence CTCN PAM
ggccuccgucugcgaucuuc

SEQ ID NO: 19887 - RNA, 20 nt, Artificial Sequence
  spacer sequence CTCN PAM
gucugcgaucuucccgugcc

SEQ ID NO: 19888 - RNA, 20 nt, Artificial Sequence
  spacer sequence CTCN PAM
uauucaggcacgggaagauc

SEQ ID NO: 19889 - RNA, 20 nt, Artificial Sequence
  spacer sequence CTCN PAM
ggacgggcaggcaggaaggu

SEQ ID NO: 19890 - RNA, 20 nt, Artificial Sequence
  spacer sequence CTCN PAM
cugccgccuccagggucggg

SEQ ID NO: 19891 - RNA, 20 nt, Artificial Sequence
  spacer sequence CTCN PAM
gccgccuccagggucggggg

SEQ ID NO: 19892 - RNA, 20 nt, Artificial Sequence
  spacer sequence CTCN PAM
agggucgggggucaggccag

SEQ ID NO: 19893 - RNA, 20 nt, Artificial Sequence
  spacer sequence CTCN PAM
ccgggggcuucccaaggggc

SEQ ID NO: 19894 - RNA, 20 nt, Artificial Sequence
  spacer sequence CTCN PAM
agcugcuccccgggggcuuc

SEQ ID NO: 19895 - RNA, 20 nt, Artificial Sequence
  spacer sequence CTCN PAM
uucccgccgcccggcgaccc

SEQ ID NO: 19896 - RNA, 20 nt, Artificial Sequence
  spacer sequence CTCN PAM
auuuaagcggcuuccccgcg

SEQ ID NO: 19897 - RNA, 20 nt, Artificial Sequence
  spacer sequence CTCN PAM
ggacagaggggacugagcau

SEQ ID NO: 19898 - RNA, 20 nt, Artificial Sequence
  spacer sequence CTCN PAM
gucccgaggccgcggggaag

SEQ ID NO: 19899 - RNA, 20 nt, Artificial Sequence
  spacer sequence CTCN PAM
guccccucugucccgaggcc

SEQ ID NO: 19900 - RNA, 20 nt, Artificial Sequence
  spacer sequence CTCN PAM
ugcuggcggggcuucugggg

SEQ ID NO: 19901 - RNA, 20 nt, Artificial Sequence
  spacer sequence CTCN PAM
uccucggugagaaggggagg

SEQ ID NO: 19902 - RNA, 20 nt, Artificial Sequence
  spacer sequence CTCN PAM
ucggugagaaggggaggggg

SEQ ID NO: 19903 - RNA, 20 nt, Artificial Sequence
  spacer sequence CTCN PAM
gugagaaggggagggggcgc

SEQ ID NO: 19904 - RNA, 20 nt, Artificial Sequence
  spacer sequence CTCN PAM
ccgaggaggagccccagaag

SEQ ID NO: 19905 - RNA, 20 nt, Artificial Sequence
  spacer sequence CTCN PAM
ccuucucaccgaggaggagc

SEQ ID NO: 19906 - RNA, 20 nt, Artificial Sequence
  spacer sequence CTCN PAM
cgcgcccccuccccuucuca

SEQ ID NO: 19907 - RNA, 20 nt, Artificial Sequence
  spacer sequence CTCN PAM
cccgcgcccccuccccuucu

SEQ ID NO: 19908 - RNA, 20 nt, Artificial Sequence
  spacer sequence CTCN PAM
cucccgcgcccccuccccuu

SEQ ID NO: 19909 - RNA, 20 nt, Artificial Sequence
  spacer sequence CTCN PAM
ucucucccgcgcccccuccc

SEQ ID NO: 19910 - RNA, 20 nt, Artificial Sequence
  spacer sequence CTCN PAM
cuccucucucccgcgccccc

SEQ ID NO: 19911 - RNA, 20 nt, Artificial Sequence
  spacer sequence CTCN PAM
uaacucacuccucucucccg

SEQ ID NO: 19912 - RNA, 20 nt, Artificial Sequence
  spacer sequence CTCN PAM
ggagagaggagggggcucag

SEQ ID NO: 19913 - RNA, 20 nt, Artificial Sequence
  spacer sequence CTCN PAM
ugagcccccuccuaacucac

SEQ ID NO: 19914 - RNA, 20 nt, Artificial Sequence
  spacer sequence CTCN PAM
ccugagcccccuccuaacuc

SEQ ID NO: 19915 - RNA, 20 nt, Artificial Sequence
  spacer sequence CTCN PAM
cuccugagcccccuccuaac

SEQ ID NO: 19916 - RNA, 20 nt, Artificial Sequence
  spacer sequence CTCN PAM
ucucuccugagcccccuccu

SEQ ID NO: 19917 - RNA, 20 nt, Artificial Sequence
  spacer sequence CTCN PAM
ggagaggggagggggcucag

SEQ ID NO: 19918 - RNA, 20 nt, Artificial Sequence
  spacer sequence CTCN PAM
ugagcccccuccucucuccu

SEQ ID NO: 19919 - RNA, 20 nt, Artificial Sequence
  spacer sequence CTCN PAM
ccugagcccccuccucucuc

SEQ ID NO: 19920 - RNA, 20 nt, Artificial Sequence
  spacer sequence CTCN PAM
ccucuccugagcccccuccu

SEQ ID NO: 19921 - RNA, 20 nt, Artificial Sequence
  spacer sequence CTCN PAM
ggagagaggagagggcccgg

SEQ ID NO: 19922 - RNA, 20 nt, Artificial Sequence
  spacer sequence CTCN PAM
ugagcccccuccccucuccu

SEQ ID NO: 19923 - RNA, 20 nt, Artificial Sequence
  spacer sequence CTCN PAM
ccugagcccccuccccucuc

SEQ ID NO: 19924 - RNA, 20 nt, Artificial Sequence
  spacer sequence CTCN PAM
cuccugagcccccuccccuc

SEQ ID NO: 19925 - RNA, 20 nt, Artificial Sequence
  spacer sequence CTCN PAM
ucucuccugagcccccuccc

SEQ ID NO: 19926 - RNA, 20 nt, Artificial Sequence
  spacer sequence CTCN PAM
ccucucuccugagcccccuc

SEQ ID NO: 19927 - RNA, 20 nt, Artificial Sequence
  spacer sequence CTCN PAM
cgggcccucuccucucuccu

SEQ ID NO: 19928 - RNA, 20 nt, Artificial Sequence
  spacer sequence CTCN PAM
cccgggcccucuccucucuc

SEQ ID NO: 19929 - RNA, 20 nt, Artificial Sequence
  spacer sequence CTCN PAM
cucccgggcccucuccucuc

SEQ ID NO: 19930 - RNA, 20 nt, Artificial Sequence
  spacer sequence CTCN PAM
ucucucccgggcccucuccu

SEQ ID NO: 19931 - RNA, 20 nt, Artificial Sequence
  spacer sequence CTCN PAM
ugggcccccuccucucuccc

SEQ ID NO: 19932 - RNA, 20 nt, Artificial Sequence
  spacer sequence CTCN PAM
ccugggcccccuccucucuc

SEQ ID NO: 19933 - RNA, 20 nt, Artificial Sequence
  spacer sequence CTCN PAM
ccucuccugggcccccuccu

SEQ ID NO: 19934 - RNA, 20 nt, Artificial Sequence
  spacer sequence CTCN PAM
guagagugggggggcucagg

SEQ ID NO: 19935 - RNA, 20 nt, Artificial Sequence
  spacer sequence CTCN PAM
acugagcccccuccccucuc

SEQ ID NO: 19936 - RNA, 20 nt, Artificial Sequence
  spacer sequence CTCN PAM
ggagagaggagggacgcagg

SEQ ID NO: 19937 - RNA, 20 nt, Artificial Sequence
  spacer sequence CTCN PAM
ugagcccccccacucuacug

SEQ ID NO: 19938 - RNA, 20 nt, Artificial Sequence
  spacer sequence CTCN PAM
ccugagcccccccacucuac

SEQ ID NO: 19939 - RNA, 20 nt, Artificial Sequence
  spacer sequence CTCN PAM
cuccugagcccccccacucu

SEQ ID NO: 19940 - RNA, 20 nt, Artificial Sequence
  spacer sequence CTCN PAM
ucucuccugagcccccccac

SEQ ID NO: 19941 - RNA, 20 nt, Artificial Sequence
  spacer sequence CTCN PAM
ugcgucccuccucucuccug

SEQ ID NO: 19942 - RNA, 20 nt, Artificial Sequence
  spacer sequence CTCN PAM
ccugcgucccuccucucucc

SEQ ID NO: 19943 - RNA, 20 nt, Artificial Sequence
  spacer sequence CTCN PAM
cuccugcgucccuccucucu

SEQ ID NO: 19944 - RNA, 20 nt, Artificial Sequence
  spacer sequence CTCN PAM
ucucuccugcgucccuccuc

SEQ ID NO: 19945 - RNA, 20 nt, Artificial Sequence
  spacer sequence CTCN PAM
ugcgccccuccucucuccug

SEQ ID NO: 19946 - RNA, 20 nt, Artificial Sequence
  spacer sequence CTCN PAM
ccugcgccccuccucucucc

SEQ ID NO: 19947 - RNA, 20 nt, Artificial Sequence
  spacer sequence CTCN PAM
cuccugcgccccuccucucu

SEQ ID NO: 19948 - RNA, 20 nt, Artificial Sequence
  spacer sequence CTCN PAM
ucucuccugcgccccuccuc

SEQ ID NO: 19949 - RNA, 20 nt, Artificial Sequence
  spacer sequence CTCN PAM
ggagaguggagggggcucag

SEQ ID NO: 19950 - RNA, 20 nt, Artificial Sequence
  spacer sequence CTCN PAM
ugagcccccuccucucuccu

SEQ ID NO: 19951 - RNA, 20 nt, Artificial Sequence
  spacer sequence CTCN PAM
ccugagcccccuccucucuc

SEQ ID NO: 19952 - RNA, 20 nt, Artificial Sequence
  spacer sequence CTCN PAM
acucuccugagcccccuccu

SEQ ID NO: 19953 - RNA, 20 nt, Artificial Sequence
  spacer sequence CTCN PAM
ggagagaggaggggcgcagg

SEQ ID NO: 19954 - RNA, 20 nt, Artificial Sequence
  spacer sequence CTCN PAM
ugagcccccuccacucuccu

SEQ ID NO: 19955 - RNA, 20 nt, Artificial Sequence
  spacer sequence CTCN PAM
ccugagcccccuccacucuc

SEQ ID NO: 19956 - RNA, 20 nt, Artificial Sequence
  spacer sequence CTCN PAM
cuccugagcccccuccacuc

SEQ ID NO: 19957 - RNA, 20 nt, Artificial Sequence
  spacer sequence CTCN PAM
ucucuccugagcccccucca

SEQ ID NO: 19958 - RNA, 20 nt, Artificial Sequence
  spacer sequence CTCN PAM
ugcgccccuccucucuccug

SEQ ID NO: 19959 - RNA, 20 nt, Artificial Sequence
  spacer sequence CTCN PAM
ccugcgccccuccucucucc

SEQ ID NO: 19960 - RNA, 20 nt, Artificial Sequence
  spacer sequence CTCN PAM
cuccugcgccccuccucucu

SEQ ID NO: 19961 - RNA, 20 nt, Artificial Sequence
  spacer sequence CTCN PAM
ucucuccugcgccccuccuc

SEQ ID NO: 19962 - RNA, 20 nt, Artificial Sequence
  spacer sequence CTCN PAM
cgcgcccccuccucucuccu

SEQ ID NO: 19963 - RNA, 20 nt, Artificial Sequence
  spacer sequence CTCN PAM
cccgcgcccccuccucucuc

SEQ ID NO: 19964 - RNA, 20 nt, Artificial Sequence
  spacer sequence CTCN PAM
cucccgcgcccccuccucuc

SEQ ID NO: 19965 - RNA, 20 nt, Artificial Sequence
  spacer sequence CTCN PAM
ucucucccgcgcccccuccu

SEQ ID NO: 19966 - RNA, 20 nt, Artificial Sequence
  spacer sequence CTCN PAM
gcgcccccuccucucucccg

SEQ ID NO: 19967 - RNA, 20 nt, Artificial Sequence
  spacer sequence CTCN PAM
ccuccgcgcccccuccucuc

SEQ ID NO: 19968 - RNA, 20 nt, Artificial Sequence
  spacer sequence CTCN PAM
ugcgcccccuccccuccgcg

SEQ ID NO: 19969 - RNA, 20 nt, Artificial Sequence
  spacer sequence CTCN PAM
ccugcgcccccuccccuccg

SEQ ID NO: 19970 - RNA, 20 nt, Artificial Sequence
  spacer sequence CTCN PAM
cuccugcgcccccuccccuc

SEQ ID NO: 19971 - RNA, 20 nt, Artificial Sequence
  spacer sequence CTCN PAM
ucucuccugcgcccccuccc

SEQ ID NO: 19972 - RNA, 20 nt, Artificial Sequence
  spacer sequence CTCN PAM
ugcgcccccuccucucuccu

SEQ ID NO: 19973 - RNA, 20 nt, Artificial Sequence
  spacer sequence CTCN PAM
ccugcgcccccuccucucuc

SEQ ID NO: 19974 - RNA, 20 nt, Artificial Sequence
  spacer sequence CTCN PAM
acucuccugcgcccccuccu

SEQ ID NO: 19975 - RNA, 20 nt, Artificial Sequence
  spacer sequence CTCN PAM
cgcgcccccuccacucuccu

SEQ ID NO: 19976 - RNA, 20 nt, Artificial Sequence
  spacer sequence CTCN PAM
cccgcgcccccuccacucuc

SEQ ID NO: 19977 - RNA, 20 nt, Artificial Sequence
  spacer sequence CTCN PAM
cucccgcgcccccuccacuc

SEQ ID NO: 19978 - RNA, 20 nt, Artificial Sequence
  spacer sequence CTCN PAM
ucucucccgcgcccccucca

SEQ ID NO: 19979 - RNA, 20 nt, Artificial Sequence
  spacer sequence CTCN PAM
cgcgcccccuccucucuccc

SEQ ID NO: 19980 - RNA, 20 nt, Artificial Sequence
  spacer sequence CTCN PAM
cccgcgcccccuccucucuc

SEQ ID NO: 19981 - RNA, 20 nt, Artificial Sequence
  spacer sequence CTCN PAM
ccucucccgcgcccccuccu

SEQ ID NO: 19982 - RNA, 20 nt, Artificial Sequence
  spacer sequence CTCN PAM
ggggagaggaaggggcgcgg

SEQ ID NO: 19983 - RNA, 20 nt, Artificial Sequence
  spacer sequence CTCN PAM
cccgagcccccuccccucuc

SEQ ID NO: 19984 - RNA, 20 nt, Artificial Sequence
  spacer sequence CTCN PAM
cccccgagcccccuccccuc

SEQ ID NO: 19985 - RNA, 20 nt, Artificial Sequence
  spacer sequence CTCN PAM
ccgcgccccuuccucucccc

SEQ ID NO: 19986 - RNA, 20 nt, Artificial Sequence
  spacer sequence CTCN PAM
ccgcucaccgcgccccuucc

SEQ ID NO: 19987 - RNA, 20 nt, Artificial Sequence
  spacer sequence CTCN PAM
cgcguccccuccccgcucac

SEQ ID NO: 19988 - RNA, 20 nt, Artificial Sequence
  spacer sequence CTCN PAM
cccgcguccccuccccgcuc

SEQ ID NO: 19989 - RNA, 20 nt, Artificial Sequence
  spacer sequence CTCN PAM
cucccgcguccccuccccgc

SEQ ID NO: 19990 - RNA, 20 nt, Artificial Sequence
  spacer sequence CTCN PAM
ucucucccgcguccccuccc

SEQ ID NO: 19991 - RNA, 20 nt, Artificial Sequence
  spacer sequence CTCN PAM
cuccucucucccgcgucccc

SEQ ID NO: 19992 - RNA, 20 nt, Artificial Sequence
  spacer sequence CTCN PAM
uaacucccuccucucucccg

SEQ ID NO: 19993 - RNA, 20 nt, Artificial Sequence
  spacer sequence CTCN PAM
ggagaggggagggggcucag

SEQ ID NO: 19994 - RNA, 20 nt, Artificial Sequence
  spacer sequence CTCN PAM
ugagcccccuccuaacuccc

SEQ ID NO: 19995 - RNA, 20 nt, Artificial Sequence
  spacer sequence CTCN PAM
ccugagcccccuccuaacuc

SEQ ID NO: 19996 - RNA, 20 nt, Artificial Sequence
  spacer sequence CTCN PAM
ccucuccugagcccccuccu

SEQ ID NO: 19997 - RNA, 20 nt, Artificial Sequence
  spacer sequence CTCN PAM
guagagugggggggcucagg

SEQ ID NO: 19998 - RNA, 20 nt, Artificial Sequence
  spacer sequence CTCN PAM
acugagcccccuccccucuc

SEQ ID NO: 19999 - RNA, 20 nt, Artificial Sequence
  spacer sequence CTCN PAM
ggagagaggagggacgcagg

SEQ ID NO: 20000 - RNA, 20 nt, Artificial Sequence
  spacer sequence CTCN PAM
ugagcccccccacucuacug

SEQ ID NO: 20001 - RNA, 20 nt, Artificial Sequence
  spacer sequence CTCN PAM
ccugagcccccccacucuac

SEQ ID NO: 20002 - RNA, 20 nt, Artificial Sequence
  spacer sequence CTCN PAM
cuccugagcccccccacucu

SEQ ID NO: 20003 - RNA, 20 nt, Artificial Sequence
  spacer sequence CTCN PAM
ucucuccugagcccccccac

SEQ ID NO: 20004 - RNA, 20 nt, Artificial Sequence
  spacer sequence CTCN PAM
ugcgucccuccucucuccug

SEQ ID NO: 20005 - RNA, 20 nt, Artificial Sequence
  spacer sequence CTCN PAM
ccugcgucccuccucucucc

SEQ ID NO: 20006 - RNA, 20 nt, Artificial Sequence
  spacer sequence CTCN PAM
cuccugcgucccuccucucu

SEQ ID NO: 20007 - RNA, 20 nt, Artificial Sequence
  spacer sequence CTCN PAM
ucucuccugcgucccuccuc

SEQ ID NO: 20008 - RNA, 20 nt, Artificial Sequence
  spacer sequence CTCN PAM
ccugcgccccuccucucucc

SEQ ID NO: 20009 - RNA, 20 nt, Artificial Sequence
  spacer sequence CTCN PAM
ccccugcgccccuccucucu

SEQ ID NO: 20010 - RNA, 20 nt, Artificial Sequence
  spacer sequence CTCN PAM
ucuccccugcgccccuccuc

SEQ ID NO: 20011 - RNA, 20 nt, Artificial Sequence
  spacer sequence CTCN PAM
ugcgcccccuccucuccccu

SEQ ID NO: 20012 - RNA, 20 nt, Artificial Sequence
  spacer sequence CTCN PAM
ccugcgcccccuccucuccc

SEQ ID NO: 20013 - RNA, 20 nt, Artificial Sequence
  spacer sequence CTCN PAM
acucuccugcgcccccuccu

SEQ ID NO: 20014 - RNA, 20 nt, Artificial Sequence
  spacer sequence CTCN PAM
ggagagagaaggggcucagg

SEQ ID NO: 20015 - RNA, 20 nt, Artificial Sequence
  spacer sequence CTCN PAM
ugagcccccuccacucuccu

SEQ ID NO: 20016 - RNA, 20 nt, Artificial Sequence
  spacer sequence CTCN PAM
ccugagcccccuccacucuc

SEQ ID NO: 20017 - RNA, 20 nt, Artificial Sequence
  spacer sequence CTCN PAM
cuccugagcccccuccacuc

SEQ ID NO: 20018 - RNA, 20 nt, Artificial Sequence
  spacer sequence CTCN PAM
ggagagagaaggggcgcagg

SEQ ID NO: 20019 - RNA, 20 nt, Artificial Sequence
  spacer sequence CTCN PAM
ugagccccuucucucuccug

SEQ ID NO: 20020 - RNA, 20 nt, Artificial Sequence
  spacer sequence CTCN PAM
ccugagccccuucucucucc

SEQ ID NO: 20021 - RNA, 20 nt, Artificial Sequence
  spacer sequence CTCN PAM
cuccugagccccuucucucu

SEQ ID NO: 20022 - RNA, 20 nt, Artificial Sequence
  spacer sequence CTCN PAM
ugcgccccuucucucuccug

SEQ ID NO: 20023 - RNA, 20 nt, Artificial Sequence
  spacer sequence CTCN PAM
ccugcgccccuucucucucc

SEQ ID NO: 20024 - RNA, 20 nt, Artificial Sequence
  spacer sequence CTCN PAM
cuccugcgccccuucucucu

SEQ ID NO: 20025 - RNA, 20 nt, Artificial Sequence
  spacer sequence CTCN PAM
ucucuccugcgccccuucuc

SEQ ID NO: 20026 - RNA, 20 nt, Artificial Sequence
  spacer sequence CTCN PAM
gcgccccuccucucuccugc

SEQ ID NO: 20027 - RNA, 20 nt, Artificial Sequence
  spacer sequence CTCN PAM
ccuccgcgccccuccucucu

SEQ ID NO: 20028 - RNA, 20 nt, Artificial Sequence
  spacer sequence CTCN PAM
ugcgcccccuccccuccgcg

SEQ ID NO: 20029 - RNA, 20 nt, Artificial Sequence
  spacer sequence CTCN PAM
ccugcgcccccuccccuccg

SEQ ID NO: 20030 - RNA, 20 nt, Artificial Sequence
  spacer sequence CTCN PAM
cuccugcgcccccuccccuc

SEQ ID NO: 20031 - RNA, 20 nt, Artificial Sequence
  spacer sequence CTCN PAM
ucacuuuacugcgcccccug

SEQ ID NO: 20032 - RNA, 20 nt, Artificial Sequence
  spacer sequence CTCN PAM
ggagagaggagggggcgcgg

SEQ ID NO: 20033 - RNA, 20 nt, Artificial Sequence
  spacer sequence CTCN PAM
ugaguccucuucacuuuacu

SEQ ID NO: 20034 - RNA, 20 nt, Artificial Sequence
  spacer sequence CTCN PAM
ccugaguccucuucacuuua

SEQ ID NO: 20035 - RNA, 20 nt, Artificial Sequence
  spacer sequence CTCN PAM
cuccugaguccucuucacuu

SEQ ID NO: 20036 - RNA, 20 nt, Artificial Sequence
  spacer sequence CTCN PAM
ucucuccugaguccucuuca

SEQ ID NO: 20037 - RNA, 20 nt, Artificial Sequence
  spacer sequence CTCN PAM
cgcgcccccuccucucuccu

SEQ ID NO: 20038 - RNA, 20 nt, Artificial Sequence
  spacer sequence CTCN PAM
cccgcgcccccuccucucuc

SEQ ID NO: 20039 - RNA, 20 nt, Artificial Sequence
  spacer sequence CTCN PAM
ccucucccgcgcccccuccu

SEQ ID NO: 20040 - RNA, 20 nt, Artificial Sequence
  spacer sequence CTCN PAM
uccaaacccccuccccucuc

SEQ ID NO: 20041 - RNA, 20 nt, Artificial Sequence
  spacer sequence CTCN PAM
ggagaggggagggggcucgg

SEQ ID NO: 20042 - RNA, 20 nt, Artificial Sequence
  spacer sequence CTCN PAM
cgagccccccuucucuucca

SEQ ID NO: 20043 - RNA, 20 nt, Artificial Sequence
  spacer sequence CTCN PAM
cccgagccccccuucucuuc

SEQ ID NO: 20044 - RNA, 20 nt, Artificial Sequence
  spacer sequence CTCN PAM
ccucucccgagccccccuuc

SEQ ID NO: 20045 - RNA, 20 nt, Artificial Sequence
  spacer sequence CTCN PAM
ggagaggggaggggguucgg

SEQ ID NO: 20046 - RNA, 20 nt, Artificial Sequence
  spacer sequence CTCN PAM
cgagcccccuccccucuccc

SEQ ID NO: 20047 - RNA, 20 nt, Artificial Sequence
  spacer sequence CTCN PAM
cccgagcccccuccccucuc

SEQ ID NO: 20048 - RNA, 20 nt, Artificial Sequence
  spacer sequence CTCN PAM
ccucucccgagcccccuccc

SEQ ID NO: 20049 - RNA, 20 nt, Artificial Sequence
  spacer sequence CTCN PAM
uccgaacccccuccccucuc

SEQ ID NO: 20050 - RNA, 20 nt, Artificial Sequence
  spacer sequence CTCN PAM
cgggccccccuucucuuccg

SEQ ID NO: 20051 - RNA, 20 nt, Artificial Sequence
  spacer sequence CTCN PAM
cccgggccccccuucucuuc

SEQ ID NO: 20052 - RNA, 20 nt, Artificial Sequence
  spacer sequence CTCN PAM
ccucucccgggccccccuuc

SEQ ID NO: 20053 - RNA, 20 nt, Artificial Sequence
  spacer sequence CTCN PAM
cccgggcccccuccccucuc

SEQ ID NO: 20054 - RNA, 20 nt, Artificial Sequence
  spacer sequence CTCN PAM
cccccgggcccccuccccuc

SEQ ID NO: 20055 - RNA, 20 nt, Artificial Sequence
  spacer sequence CTCN PAM
ccgcgccccuuccucucccc

SEQ ID NO: 20056 - RNA, 20 nt, Artificial Sequence
  spacer sequence CTCN PAM
ccgcucaccgcgccccuucc

SEQ ID NO: 20057 - RNA, 20 nt, Artificial Sequence
  spacer sequence CTCN PAM
cgcguccccuccccgcucac

SEQ ID NO: 20058 - RNA, 20 nt, Artificial Sequence
  spacer sequence CTCN PAM
cccgcguccccuccccgcuc

SEQ ID NO: 20059 - RNA, 20 nt, Artificial Sequence
  spacer sequence CTCN PAM
cucccgcguccccuccccgc

SEQ ID NO: 20060 - RNA, 20 nt, Artificial Sequence
  spacer sequence CTCN PAM
ucucucccgcguccccuccc

SEQ ID NO: 20061 - RNA, 20 nt, Artificial Sequence
  spacer sequence CTCN PAM
cuccucucucccgcgucccc

SEQ ID NO: 20062 - RNA, 20 nt, Artificial Sequence
  spacer sequence CTCN PAM
uaacucccuccucucucccg

SEQ ID NO: 20063 - RNA, 20 nt, Artificial Sequence
  spacer sequence CTCN PAM
ugcgcccccucuuaacuccc

SEQ ID NO: 20064 - RNA, 20 nt, Artificial Sequence
  spacer sequence CTCN PAM
ccugcgcccccucuuaacuc

SEQ ID NO: 20065 - RNA, 20 nt, Artificial Sequence
  spacer sequence CTCN PAM
cuccugcgcccccucuuaac

SEQ ID NO: 20066 - RNA, 20 nt, Artificial Sequence
  spacer sequence CTCN PAM
ucucuccugcgcccccucuu

SEQ ID NO: 20067 - RNA, 20 nt, Artificial Sequence
  spacer sequence CTCN PAM
gagggggcgcgggagagacg

SEQ ID NO: 20068 - RNA, 20 nt, Artificial Sequence
  spacer sequence CTCN PAM
gagccccuccucucuccugc

SEQ ID NO: 20069 - RNA, 20 nt, Artificial Sequence
  spacer sequence CTCN PAM
cgcgcccccuccgagccccu

SEQ ID NO: 20070 - RNA, 20 nt, Artificial Sequence
  spacer sequence CTCN PAM
cccgcgcccccuccgagccc

SEQ ID NO: 20071 - RNA, 20 nt, Artificial Sequence
  spacer sequence CTCN PAM
ucucucccgcgcccccuccg

SEQ ID NO: 20072 - RNA, 20 nt, Artificial Sequence
  spacer sequence CTCN PAM
gaguuaaggggcuccgagau

SEQ ID NO: 20073 - RNA, 20 nt, Artificial Sequence
  spacer sequence CTCN PAM
gagcaccccucgucucuccc

SEQ ID NO: 20074 - RNA, 20 nt, Artificial Sequence
  spacer sequence CTCN PAM
gagauagggggugauuggug

SEQ ID NO: 20075 - RNA, 20 nt, Artificial Sequence
  spacer sequence CTCN PAM
gagccccuuaacucugagca

SEQ ID NO: 20076 - RNA, 20 nt, Artificial Sequence
  spacer sequence CTCN PAM
ggcaggaucaccaaucaccc

SEQ ID NO: 20077 - RNA, 20 nt, Artificial Sequence
  spacer sequence CTCN PAM
ucuggcaggaucaccaauca

SEQ ID NO: 20078 - RNA, 20 nt, Artificial Sequence
  spacer sequence CTCN PAM
gaggaggcaggggcugagag

SEQ ID NO: 20079 - RNA, 20 nt, Artificial Sequence
  spacer sequence CTCN PAM
gagcccccuccucuggcagg

SEQ ID NO: 20080 - RNA, 20 nt, Artificial Sequence
  spacer sequence CTCN PAM
uccgagcccccuccucuggc

SEQ ID NO: 20081 - RNA, 20 nt, Artificial Sequence
  spacer sequence CTCN PAM
gccccugccuccuccgagcc

SEQ ID NO: 20082 - RNA, 20 nt, Artificial Sequence
  spacer sequence CTCN PAM
cagccccugccuccuccgag

SEQ ID NO: 20083 - RNA, 20 nt, Artificial Sequence
  spacer sequence CTCN PAM
gcgcggcccccugacccgca

SEQ ID NO: 20084 - RNA, 20 nt, Artificial Sequence
  spacer sequence CTCN PAM
aggcagcugggguucggggg

SEQ ID NO: 20085 - RNA, 20 nt, Artificial Sequence
  spacer sequence CTCN PAM
gccccagucccccgaacccc

SEQ ID NO: 20086 - RNA, 20 nt, Artificial Sequence
  spacer sequence CTCN PAM
gucccugaaccccgccccga

SEQ ID NO: 20087 - RNA, 20 nt, Artificial Sequence
  spacer sequence CTCN PAM
caggcucggucccugaaccc

SEQ ID NO: 20088 - RNA, 20 nt, Artificial Sequence
  spacer sequence CTCN PAM
gcugcacccccggaccccug

SEQ ID NO: 20089 - RNA, 20 nt, Artificial Sequence
  spacer sequence CTCN PAM
gcccgguucccggacccucc

SEQ ID NO: 20090 - RNA, 20 nt, Artificial Sequence
  spacer sequence CTCN PAM
acccccggaccccgccccgc

SEQ ID NO: 20091 - RNA, 20 nt, Artificial Sequence
  spacer sequence CTCN PAM
gcggggcugagcgagagccg

SEQ ID NO: 20092 - RNA, 20 nt, Artificial Sequence
  spacer sequence CTCN PAM
gccccgcggagucccggacc

SEQ ID NO: 20093 - RNA, 20 nt, Artificial Sequence
  spacer sequence CTCN PAM
cucagccccgcggagucccg

SEQ ID NO: 20094 - RNA, 20 nt, Artificial Sequence
  spacer sequence CTCN PAM
cgcucagccccgcggagucc

SEQ ID NO: 20095 - RNA, 20 nt, Artificial Sequence
  spacer sequence CTCN PAM
aggugaagccccugcaggug

SEQ ID NO: 20096 - RNA, 20 nt, Artificial Sequence
  spacer sequence CTCN PAM
accugcaggggcuucaccug

SEQ ID NO: 20097 - RNA, 20 nt, Artificial Sequence
  spacer sequence CTCN PAM
gggggcuccaccugcagggg

SEQ ID NO: 20098 - RNA, 20 nt, Artificial Sequence
  spacer sequence CTCN PAM
cgccagcucaccugccgccu

SEQ ID NO: 20099 - RNA, 20 nt, Artificial Sequence
  spacer sequence CTCN PAM
ccugccgccuggccugcgcg

SEQ ID NO: 20100 - RNA, 20 nt, Artificial Sequence
  spacer sequence CTCN PAM
gugcaguggcggggccugga

SEQ ID NO: 20101 - RNA, 20 nt, Artificial Sequence
  spacer sequence CTCN PAM
ccgugcgcaacgccucgcug

SEQ ID NO: 20102 - RNA, 20 nt, Artificial Sequence
  spacer sequence CTCN PAM
cugucggcggccgggacccg

SEQ ID NO: 20103 - RNA, 20 nt, Artificial Sequence
  spacer sequence CTCN PAM
ugcgggggccgcaccuucca

SEQ ID NO: 20104 - RNA, 20 nt, Artificial Sequence
  spacer sequence CTCN PAM
uuguguacggugaggcgucc

SEQ ID NO: 20105 - RNA, 20 nt, Artificial Sequence
  spacer sequence CTCN PAM
ccguacacaaggagcugcac

SEQ ID NO: 20106 - RNA, 20 nt, Artificial Sequence
  spacer sequence CTCN PAM
cugacccuuggacucccggc

SEQ ID NO: 20107 - RNA, 20 nt, Artificial Sequence
  spacer sequence CTCN PAM
gacccuuggacucccggcuc

SEQ ID NO: 20108 - RNA, 20 nt, Artificial Sequence
  spacer sequence CTCN PAM
cggcuccuucccuaugccac

SEQ ID NO: 20109 - RNA, 20 nt, Artificial Sequence
  spacer sequence CTCN PAM
uucccuaugccaccucuucc

SEQ ID NO: 20110 - RNA, 20 nt, Artificial Sequence
  spacer sequence CTCN PAM
uccuggaagccucccagauu

SEQ ID NO: 20111 - RNA, 20 nt, Artificial Sequence
  spacer sequence CTCN PAM
cagauugcaggcaggguccc

SEQ ID NO: 20112 - RNA, 20 nt, Artificial Sequence
  spacer sequence CTCN PAM
augcacagcuccccgaagcc

SEQ ID NO: 20113 - RNA, 20 nt, Artificial Sequence
  spacer sequence CTCN PAM
acuaaaaauacaaaaauuag

SEQ ID NO: 20114 - RNA, 20 nt, Artificial Sequence
  spacer sequence CTCN PAM
aucucuugaccuugugaucc

SEQ ID NO: 20115 - RNA, 20 nt, Artificial Sequence
  spacer sequence CTCN PAM
ugaccuugugauccucccac

SEQ ID NO: 20116 - RNA, 20 nt, Artificial Sequence
  spacer sequence CTCN PAM
caccucggccucccaaagug

SEQ ID NO: 20117 - RNA, 20 nt, Artificial Sequence
  spacer sequence CTCN PAM
gccucccaaagugcugggau

SEQ ID NO: 20118 - RNA, 20 nt, Artificial Sequence
  spacer sequence CTCN PAM
caaagugcugggauuacagg

SEQ ID NO: 20119 - RNA, 20 nt, Artificial Sequence
  spacer sequence CTCN PAM
cgccuguaaucccagcacuu

SEQ ID NO: 20120 - RNA, 20 nt, Artificial Sequence
  spacer sequence CTCN PAM
caucuugagaaaaacauguc

SEQ ID NO: 20121 - RNA, 20 nt, Artificial Sequence
  spacer sequence CTCN PAM
agaugugagaaauguuggcc

SEQ ID NO: 20122 - RNA, 20 nt, Artificial Sequence
  spacer sequence CTCN PAM
cuagcacggcugcaggguca

SEQ ID NO: 20123 - RNA, 20 nt, Artificial Sequence
  spacer sequence CTCN PAM
cugggccuguaauaaacuga

SEQ ID NO: 20124 - RNA, 20 nt, Artificial Sequence
  spacer sequence CTCN PAM
guuuauuacaggcccagcga

SEQ ID NO: 20125 - RNA, 20 nt, Artificial Sequence
  spacer sequence CTCN PAM
acauuccucaguuuauuaca

SEQ ID NO: 20126 - RNA, 20 nt, Artificial Sequence
  spacer sequence CTCN PAM
aacuccacauuccucaguuu

SEQ ID NO: 20127 - RNA, 20 nt, Artificial Sequence
  spacer sequence CTCN PAM
ccaacuccacauuccucagu

SEQ ID NO: 20128 - RNA, 20 nt, Artificial Sequence
  spacer sequence CTCN PAM
guagucaguggaccuuaucu

SEQ ID NO: 20129 - RNA, 20 nt, Artificial Sequence
  spacer sequence CTCN PAM
cuguagucaguggaccuuau

SEQ ID NO: 20130 - RNA, 20 nt, Artificial Sequence
  spacer sequence CTCN PAM
uuuaacuugaguguaagggu

SEQ ID NO: 20131 - RNA, 20 nt, Artificial Sequence
  spacer sequence CTCN PAM
aguuaaaagagaauguuaac

SEQ ID NO: 20132 - RNA, 20 nt, Artificial Sequence
  spacer sequence CTCN PAM
uaaaguugcugcaaagugug

SEQ ID NO: 20133 - RNA, 20 nt, Artificial Sequence
  spacer sequence CTCN PAM
aaccuaauaguaguagucau

SEQ ID NO: 20134 - RNA, 20 nt, Artificial Sequence
  spacer sequence CTCN PAM
guaaaugucuugaaucaacg

SEQ ID NO: 20135 - RNA, 20 nt, Artificial Sequence
  spacer sequence CTCN PAM
agggccggaaguucgucuug

SEQ ID NO: 20136 - RNA, 20 nt, Artificial Sequence
  spacer sequence CTCN PAM
cacuggugggagacaugaag

SEQ ID NO: 20137 - RNA, 20 nt, Artificial Sequence
  spacer sequence CTCN PAM
caccagugugagcaccugcc

SEQ ID NO: 20138 - RNA, 20 nt, Artificial Sequence
  spacer sequence CTCN PAM
cagggaugugggacagcgag

SEQ ID NO: 20139 - RNA, 20 nt, Artificial Sequence
  spacer sequence CTCN PAM
cugucccacaucccugugag

SEQ ID NO: 20140 - RNA, 20 nt, Artificial Sequence
  spacer sequence CTCN PAM
cucgcugucccacaucccug

SEQ ID NO: 20141 - RNA, 20 nt, Artificial Sequence
  spacer sequence CTCN PAM
uguuuucuuccuagugguca

SEQ ID NO: 20142 - RNA, 20 nt, Artificial Sequence
  spacer sequence CTCN PAM
uuuccuccuguuuucuuccu

SEQ ID NO: 20143 - RNA, 20 nt, Artificial Sequence
  spacer sequence CTCN PAM
ccugaccccuaacuccuuuc

SEQ ID NO: 20144 - RNA, 20 nt, Artificial Sequence
  spacer sequence CTCN PAM
aaugucgccuccccugaccc

SEQ ID NO: 20145 - RNA, 20 nt, Artificial Sequence
  spacer sequence CTCN PAM
ucaaaugucgccuccccuga

SEQ ID NO: 20146 - RNA, 20 nt, Artificial Sequence
  spacer sequence CTCN PAM
ccucaaaugucgccuccccu

SEQ ID NO: 20147 - RNA, 20 nt, Artificial Sequence
  spacer sequence CTCN PAM
aggucucuccucaaaugucg

SEQ ID NO: 20148 - RNA, 20 nt, Artificial Sequence
  spacer sequence CTCN PAM
uccaggucucuccucaaaug

SEQ ID NO: 20149 - RNA, 20 nt, Artificial Sequence
  spacer sequence CTCN PAM
cuggucuccuccaggucucu

SEQ ID NO: 20150 - RNA, 20 nt, Artificial Sequence
  spacer sequence CTCN PAM
ucccuggucuccuccagguc

SEQ ID NO: 20151 - RNA, 20 nt, Artificial Sequence
  spacer sequence CTCN PAM
ccuccucccuggucuccucc

SEQ ID NO: 20152 - RNA, 20 nt, Artificial Sequence
  spacer sequence CTCN PAM
cucaccuccucccuggucuc

SEQ ID NO: 20153 - RNA, 20 nt, Artificial Sequence
  spacer sequence CTCN PAM
gcaagggccgugacacugcc

SEQ ID NO: 20154 - RNA, 20 nt, Artificial Sequence
  spacer sequence CTCN PAM
gggccucugcaagggccgug

SEQ ID NO: 20155 - RNA, 20 nt, Artificial Sequence
  spacer sequence CTCN PAM
aacuggaccggccucagggc

SEQ ID NO: 20156 - RNA, 20 nt, Artificial Sequence
  spacer sequence CTCN PAM
cauccagcccuggcuuccca

SEQ ID NO: 20157 - RNA, 20 nt, Artificial Sequence
  spacer sequence CTCN PAM
ccgcagcucccauccagccc

SEQ ID NO: 20158 - RNA, 20 nt, Artificial Sequence
  spacer sequence CTCN PAM
uccccgcagcucccauccag

SEQ ID NO: 20159 - RNA, 20 nt, Artificial Sequence
  spacer sequence CTCN PAM
ccuccccgcagcucccaucc

SEQ ID NO: 20160 - RNA, 20 nt, Artificial Sequence
  spacer sequence CTCN PAM
ggccucuccuccccgcagcu

SEQ ID NO: 20161 - RNA, 20 nt, Artificial Sequence
  spacer sequence CTCN PAM
acccagcucaggccucuccu

SEQ ID NO: 20162 - RNA, 20 nt, Artificial Sequence
  spacer sequence CTCN PAM
cagccuccacccagcucagg

SEQ ID NO: 20163 - RNA, 20 nt, Artificial Sequence
  spacer sequence CTCN PAM
ccccucccagccuccaccca

SEQ ID NO: 20164 - RNA, 20 nt, Artificial Sequence
  spacer sequence CTCN PAM
cagcccccacccagccuggc

SEQ ID NO: 20165 - RNA, 20 nt, Artificial Sequence
  spacer sequence CTCN PAM
ccccucccagcccccaccca

SEQ ID NO: 20166 - RNA, 20 nt, Artificial Sequence
  spacer sequence CTCN PAM
cagcccccacccagccuggc

SEQ ID NO: 20167 - RNA, 20 nt, Artificial Sequence
  spacer sequence CTCN PAM
auccucccagcccccaccca

SEQ ID NO: 20168 - RNA, 20 nt, Artificial Sequence
  spacer sequence CTCN PAM
ccccuuccagcccccaccca

SEQ ID NO: 20169 - RNA, 20 nt, Artificial Sequence
  spacer sequence CTCN PAM
cagcaccccccagccugggc

SEQ ID NO: 20170 - RNA, 20 nt, Artificial Sequence
  spacer sequence CTCN PAM
guccucccagcaccccccag

SEQ ID NO: 20171 - RNA, 20 nt, Artificial Sequence
  spacer sequence CTCN PAM
cagcccccacccagccuggc

SEQ ID NO: 20172 - RNA, 20 nt, Artificial Sequence
  spacer sequence CTCN PAM
ccccucccagcccccaccca

SEQ ID NO: 20173 - RNA, 20 nt, Artificial Sequence
  spacer sequence CTCN PAM
cagcccccacccauccuggc

SEQ ID NO: 20174 - RNA, 20 nt, Artificial Sequence
  spacer sequence CTCN PAM
ucccagcccccacccauccu

SEQ ID NO: 20175 - RNA, 20 nt, Artificial Sequence
  spacer sequence CTCN PAM
cuccucccagcccccaccca

SEQ ID NO: 20176 - RNA, 20 nt, Artificial Sequence
  spacer sequence CTCN PAM
ccccuucuagcccccaccca

SEQ ID NO: 20177 - RNA, 20 nt, Artificial Sequence
  spacer sequence CTCN PAM
cagcaccccccagccugggu

SEQ ID NO: 20178 - RNA, 20 nt, Artificial Sequence
  spacer sequence CTCN PAM
guccucccagcaccccccag

SEQ ID NO: 20179 - RNA, 20 nt, Artificial Sequence
  spacer sequence CTCN PAM
cagcccccacccagccuggc

SEQ ID NO: 20180 - RNA, 20 nt, Artificial Sequence
  spacer sequence CTCN PAM
ccccucccagcccccaccca

SEQ ID NO: 20181 - RNA, 20 nt, Artificial Sequence
  spacer sequence CTCN PAM
cagcaccccccagccuggcc

SEQ ID NO: 20182 - RNA, 20 nt, Artificial Sequence
  spacer sequence CTCN PAM
ucccagcaccccccagccug

SEQ ID NO: 20183 - RNA, 20 nt, Artificial Sequence
  spacer sequence CTCN PAM
uccucccagcaccccccagc

SEQ ID NO: 20184 - RNA, 20 nt, Artificial Sequence
  spacer sequence CTCN PAM
gccuccuccucccagcaccc

SEQ ID NO: 20185 - RNA, 20 nt, Artificial Sequence
  spacer sequence CTCN PAM
cccgucccagccccuaccca

SEQ ID NO: 20186 - RNA, 20 nt, Artificial Sequence
  spacer sequence CTCN PAM
acccagccuggccucccccg

SEQ ID NO: 20187 - RNA, 20 nt, Artificial Sequence
  spacer sequence CTCN PAM
uccccgccuccacccagccu

SEQ ID NO: 20188 - RNA, 20 nt, Artificial Sequence
  spacer sequence CTCN PAM
cucauccccgccuccaccca

SEQ ID NO: 20189 - RNA, 20 nt, Artificial Sequence
  spacer sequence CTCN PAM
caaccugggucucccucauc

SEQ ID NO: 20190 - RNA, 20 nt, Artificial Sequence
  spacer sequence CTCN PAM
ucccaaccugggucucccuc

SEQ ID NO: 20191 - RNA, 20 nt, Artificial Sequence
  spacer sequence CTCN PAM
uccucccaaccugggucucc

SEQ ID NO: 20192 - RNA, 20 nt, Artificial Sequence
  spacer sequence CTCN PAM
gccuccuccucccaaccugg

SEQ ID NO: 20193 - RNA, 20 nt, Artificial Sequence
  spacer sequence CTCN PAM
ccaccagcacccccagccuc

SEQ ID NO: 20194 - RNA, 20 nt, Artificial Sequence
  spacer sequence CTCN PAM
ccuccccaccagcaccccca

SEQ ID NO: 20195 - RNA, 20 nt, Artificial Sequence
  spacer sequence CTCN PAM
cagcaccgcccagcccgggc

SEQ ID NO: 20196 - RNA, 20 nt, Artificial Sequence
  spacer sequence CTCN PAM
ucccagcaccgcccagcccg

SEQ ID NO: 20197 - RNA, 20 nt, Artificial Sequence
  spacer sequence CTCN PAM
cuccucccagcaccgcccag

SEQ ID NO: 20198 - RNA, 20 nt, Artificial Sequence
  spacer sequence CTCN PAM
cagcccccacccagccuggc

SEQ ID NO: 20199 - RNA, 20 nt, Artificial Sequence
  spacer sequence CTCN PAM
ucccagcccccacccagccu

SEQ ID NO: 20200 - RNA, 20 nt, Artificial Sequence
  spacer sequence CTCN PAM
uccucccagcccccacccag

SEQ ID NO: 20201 - RNA, 20 nt, Artificial Sequence
  spacer sequence CTCN PAM
acccagccugggccuccucc

SEQ ID NO: 20202 - RNA, 20 nt, Artificial Sequence
  spacer sequence CTCN PAM
cagccucuacccagccuggg

SEQ ID NO: 20203 - RNA, 20 nt, Artificial Sequence
  spacer sequence CTCN PAM
ucccagccucuacccagccu

SEQ ID NO: 20204 - RNA, 20 nt, Artificial Sequence
  spacer sequence CTCN PAM
cuccucccagccucuaccca

SEQ ID NO: 20205 - RNA, 20 nt, Artificial Sequence
  spacer sequence CTCN PAM
caaccuggaucucccuccuc

SEQ ID NO: 20206 - RNA, 20 nt, Artificial Sequence
  spacer sequence CTCN PAM
ucccaaccuggaucucccuc

SEQ ID NO: 20207 - RNA, 20 nt, Artificial Sequence
  spacer sequence CTCN PAM
acccagccugggccuccucc

SEQ ID NO: 20208 - RNA, 20 nt, Artificial Sequence
  spacer sequence CTCN PAM
cagccucuacccagccuggg

SEQ ID NO: 20209 - RNA, 20 nt, Artificial Sequence
  spacer sequence CTCN PAM
ucccagccucuacccagccu

SEQ ID NO: 20210 - RNA, 20 nt, Artificial Sequence
  spacer sequence CTCN PAM
cuccucccagccucuaccca

SEQ ID NO: 20211 - RNA, 20 nt, Artificial Sequence
  spacer sequence CTCN PAM
caaccuggaucucccuccuc

SEQ ID NO: 20212 - RNA, 20 nt, Artificial Sequence
  spacer sequence CTCN PAM
ucccaaccuggaucucccuc

SEQ ID NO: 20213 - RNA, 20 nt, Artificial Sequence
  spacer sequence CTCN PAM
gccuccucccaaccuggauc

SEQ ID NO: 20214 - RNA, 20 nt, Artificial Sequence
  spacer sequence CTCN PAM
ccaccagcacccccagccuc

SEQ ID NO: 20215 - RNA, 20 nt, Artificial Sequence
  spacer sequence CTCN PAM
ccuccccaccagcaccccca

SEQ ID NO: 20216 - RNA, 20 nt, Artificial Sequence
  spacer sequence CTCN PAM
gccugggccuccccucccca

SEQ ID NO: 20217 - RNA, 20 nt, Artificial Sequence
  spacer sequence CTCN PAM
cagcacccccucagccuggg

SEQ ID NO: 20218 - RNA, 20 nt, Artificial Sequence
  spacer sequence CTCN PAM
ucccagcacccccucagccu

SEQ ID NO: 20219 - RNA, 20 nt, Artificial Sequence
  spacer sequence CTCN PAM
cagcacccacccagccaggc

SEQ ID NO: 20220 - RNA, 20 nt, Artificial Sequence
  spacer sequence CTCN PAM
ucccagcacccacccagcca

SEQ ID NO: 20221 - RNA, 20 nt, Artificial Sequence
  spacer sequence CTCN PAM
cuccucccagcacccaccca

SEQ ID NO: 20222 - RNA, 20 nt, Artificial Sequence
  spacer sequence CTCN PAM
cagcaccccccagcccgggg

SEQ ID NO: 20223 - RNA, 20 nt, Artificial Sequence
  spacer sequence CTCN PAM
uuccucccagcaccccccag

SEQ ID NO: 20224 - RNA, 20 nt, Artificial Sequence
  spacer sequence CTCN PAM
cacccagccuggccuccuuc

SEQ ID NO: 20225 - RNA, 20 nt, Artificial Sequence
  spacer sequence CTCN PAM
cagcucccacccagccuggc

SEQ ID NO: 20226 - RNA, 20 nt, Artificial Sequence
  spacer sequence CTCN PAM
ucccagcucccacccagccu

SEQ ID NO: 20227 - RNA, 20 nt, Artificial Sequence
  spacer sequence CTCN PAM
cuccucccagcucccaccca

SEQ ID NO: 20228 - RNA, 20 nt, Artificial Sequence
  spacer sequence CTCN PAM
cagccugggccucccuccuc

SEQ ID NO: 20229 - RNA, 20 nt, Artificial Sequence
  spacer sequence CTCN PAM
ccaccccaccagcacuccca

SEQ ID NO: 20230 - RNA, 20 nt, Artificial Sequence
  spacer sequence CTCN PAM
ccuccccaccccaccagcac

SEQ ID NO: 20231 - RNA, 20 nt, Artificial Sequence
  spacer sequence CTCN PAM
accugggccuccccucccca

SEQ ID NO: 20232 - RNA, 20 nt, Artificial Sequence
  spacer sequence CTCN PAM
ucccagccccuacucaaccu

SEQ ID NO: 20233 - RNA, 20 nt, Artificial Sequence
  spacer sequence CTCN PAM
cucuucccagccccuacuca

SEQ ID NO: 20234 - RNA, 20 nt, Artificial Sequence
  spacer sequence CTCN PAM
cagccccuacccagccgggg

SEQ ID NO: 20235 - RNA, 20 nt, Artificial Sequence
  spacer sequence CTCN PAM
ucccagccccuacccagccg

SEQ ID NO: 20236 - RNA, 20 nt, Artificial Sequence
  spacer sequence CTCN PAM
cuccucccagccccuaccca

SEQ ID NO: 20237 - RNA, 20 nt, Artificial Sequence
  spacer sequence CTCN PAM
cacccagccuggccucccuc

SEQ ID NO: 20238 - RNA, 20 nt, Artificial Sequence
  spacer sequence CTCN PAM
cagcucccacccagccuggc

SEQ ID NO: 20239 - RNA, 20 nt, Artificial Sequence
  spacer sequence CTCN PAM
ucccagcucccacccagccu

SEQ ID NO: 20240 - RNA, 20 nt, Artificial Sequence
  spacer sequence CTCN PAM
ccuccucccagcucccaccc

SEQ ID NO: 20241 - RNA, 20 nt, Artificial Sequence
  spacer sequence CTCN PAM
cagccccuacccagccugga

SEQ ID NO: 20242 - RNA, 20 nt, Artificial Sequence
  spacer sequence CTCN PAM
ucccagccccuacccagccu

SEQ ID NO: 20243 - RNA, 20 nt, Artificial Sequence
  spacer sequence CTCN PAM
cuccucccagccccuaccca

SEQ ID NO: 20244 - RNA, 20 nt, Artificial Sequence
  spacer sequence CTCN PAM
cagccugggccucccuccuc

SEQ ID NO: 20245 - RNA, 20 nt, Artificial Sequence
  spacer sequence CTCN PAM
ccaccccaccagcacuccca

SEQ ID NO: 20246 - RNA, 20 nt, Artificial Sequence
  spacer sequence CTCN PAM
ccuccccaccccaccagcac

SEQ ID NO: 20247 - RNA, 20 nt, Artificial Sequence
  spacer sequence CTCN PAM
accugggccuccccucccca

SEQ ID NO: 20248 - RNA, 20 nt, Artificial Sequence
  spacer sequence CTCN PAM
ucccagccccuacucaaccu

SEQ ID NO: 20249 - RNA, 20 nt, Artificial Sequence
  spacer sequence CTCN PAM
cucuucccagccccuacuca

SEQ ID NO: 20250 - RNA, 20 nt, Artificial Sequence
  spacer sequence CTCN PAM
cagccccuacccagcccggg

SEQ ID NO: 20251 - RNA, 20 nt, Artificial Sequence
  spacer sequence CTCN PAM
ucccagccccuacccagccc

SEQ ID NO: 20252 - RNA, 20 nt, Artificial Sequence
  spacer sequence CTCN PAM
cuccucccagccccuaccca

SEQ ID NO: 20253 - RNA, 20 nt, Artificial Sequence
  spacer sequence CTCN PAM
ccccaguaucccaagcccag

SEQ ID NO: 20254 - RNA, 20 nt, Artificial Sequence
  spacer sequence CTCN PAM
uccccccaguaucccaagcc

SEQ ID NO: 20255 - RNA, 20 nt, Artificial Sequence
  spacer sequence CTCN PAM
ccuccccccaguaucccaag

SEQ ID NO: 20256 - RNA, 20 nt, Artificial Sequence
  spacer sequence CTCN PAM
cagcccuggccucuccuccc

SEQ ID NO: 20257 - RNA, 20 nt, Artificial Sequence
  spacer sequence CTCN PAM
gcccccucccagcccuggcc

SEQ ID NO: 20258 - RNA, 20 nt, Artificial Sequence
  spacer sequence CTCN PAM
cagcccccucccagcccugg

SEQ ID NO: 20259 - RNA, 20 nt, Artificial Sequence
  spacer sequence CTCN PAM
ucucagcccccucccagccc

SEQ ID NO: 20260 - RNA, 20 nt, Artificial Sequence
  spacer sequence CTCN PAM
uccucucagcccccucccag

SEQ ID NO: 20261 - RNA, 20 nt, Artificial Sequence
  spacer sequence CTCN PAM
agcccaggccuccuccucuc

SEQ ID NO: 20262 - RNA, 20 nt, Artificial Sequence
  spacer sequence CTCN PAM
cccagcaucuccagcccagg

SEQ ID NO: 20263 - RNA, 20 nt, Artificial Sequence
  spacer sequence CTCN PAM
ucccccagcaucuccagccc

SEQ ID NO: 20264 - RNA, 20 nt, Artificial Sequence
  spacer sequence CTCN PAM
ccucccccagcaucuccagc

SEQ ID NO: 20265 - RNA, 20 nt, Artificial Sequence
  spacer sequence CTCN PAM
cccaagcauccccagccugg

SEQ ID NO: 20266 - RNA, 20 nt, Artificial Sequence
  spacer sequence CTCN PAM
cucccccaagcauccccagc

SEQ ID NO: 20267 - RNA, 20 nt, Artificial Sequence
  spacer sequence CTCN PAM
cagcccaggccucccucccc

SEQ ID NO: 20268 - RNA, 20 nt, Artificial Sequence
  spacer sequence CTCN PAM
caguccccucccagcccagg

SEQ ID NO: 20269 - RNA, 20 nt, Artificial Sequence
  spacer sequence CTCN PAM
ucccaguccccucccagccc

SEQ ID NO: 20270 - RNA, 20 nt, Artificial Sequence
  spacer sequence CTCN PAM
cuccucccaguccccuccca

SEQ ID NO: 20271 - RNA, 20 nt, Artificial Sequence
  spacer sequence CTCN PAM
ccccagcauccccagcccag

SEQ ID NO: 20272 - RNA, 20 nt, Artificial Sequence
  spacer sequence CTCN PAM
uccccccagcauccccagcc

SEQ ID NO: 20273 - RNA, 20 nt, Artificial Sequence
  spacer sequence CTCN PAM
ccuccccccagcauccccag

SEQ ID NO: 20274 - RNA, 20 nt, Artificial Sequence
  spacer sequence CTCN PAM
cccaagcauccccagcccgg

SEQ ID NO: 20275 - RNA, 20 nt, Artificial Sequence
  spacer sequence CTCN PAM
ucccccaagcauccccagcc

SEQ ID NO: 20276 - RNA, 20 nt, Artificial Sequence
  spacer sequence CTCN PAM
ccucccccaagcauccccag

SEQ ID NO: 20277 - RNA, 20 nt, Artificial Sequence
  spacer sequence CTCN PAM
ccgcagcauccccagcccgg

SEQ ID NO: 20278 - RNA, 20 nt, Artificial Sequence
  spacer sequence CTCN PAM
uccccgcagcauccccagcc

SEQ ID NO: 20279 - RNA, 20 nt, Artificial Sequence
  spacer sequence CTCN PAM
ccuccccgcagcauccccag

SEQ ID NO: 20280 - RNA, 20 nt, Artificial Sequence
  spacer sequence CTCN PAM
cagcuagggccucuccuccc

SEQ ID NO: 20281 - RNA, 20 nt, Artificial Sequence
  spacer sequence CTCN PAM
cuucucccagcuagggccuc

SEQ ID NO: 20282 - RNA, 20 nt, Artificial Sequence
  spacer sequence CTCN PAM
agagaggagcuucagggaua

SEQ ID NO: 20283 - RNA, 20 nt, Artificial Sequence
  spacer sequence CTCN PAM
ugagcccccgccucccuucu

SEQ ID NO: 20284 - RNA, 20 nt, Artificial Sequence
  spacer sequence CTCN PAM
cuugagcccccgccucccuu

SEQ ID NO: 20285 - RNA, 20 nt, Artificial Sequence
  spacer sequence CTCN PAM
ucucuugagcccccgccucc

SEQ ID NO: 20286 - RNA, 20 nt, Artificial Sequence
  spacer sequence CTCN PAM
aucccugaagcuccucucuu

SEQ ID NO: 20287 - RNA, 20 nt, Artificial Sequence
  spacer sequence CTCN PAM
cccucuaucccugaagcucc

SEQ ID NO: 20288 - RNA, 20 nt, Artificial Sequence
  spacer sequence CTCN PAM
ucacccucuaucccugaagc

SEQ ID NO: 20289 - RNA, 20 nt, Artificial Sequence
  spacer sequence CTCN PAM
uccucacccucuaucccuga

SEQ ID NO: 20290 - RNA, 20 nt, Artificial Sequence
  spacer sequence CTCN PAM
ccuccuccucacccucuauc

SEQ ID NO: 20291 - RNA, 20 nt, Artificial Sequence
  spacer sequence CTCN PAM
uaccccccauccccggccuc

SEQ ID NO: 20292 - RNA, 20 nt, Artificial Sequence
  spacer sequence CTCN PAM
uccuaccccccauccccggc

SEQ ID NO: 20293 - RNA, 20 nt, Artificial Sequence
  spacer sequence CTCN PAM
ccuccuaccccccauccccg

SEQ ID NO: 20294 - RNA, 20 nt, Artificial Sequence
  spacer sequence CTCN PAM
ccucuccuccuaccccccau

SEQ ID NO: 20295 - RNA, 20 nt, Artificial Sequence
  spacer sequence CTCN PAM
ccgaccccccagccagcccu

SEQ ID NO: 20296 - RNA, 20 nt, Artificial Sequence
  spacer sequence CTCN PAM
ccaggccuaugcccuagccu

SEQ ID NO: 20297 - RNA, 20 nt, Artificial Sequence
  spacer sequence CTCN PAM
ucgccaggccuaugcccuag

SEQ ID NO: 20298 - RNA, 20 nt, Artificial Sequence
  spacer sequence CTCN PAM
ccuccucgccaggccuaugc

SEQ ID NO: 20299 - RNA, 20 nt, Artificial Sequence
  spacer sequence CTCN PAM
gccggcccccaacguccccg

SEQ ID NO: 20300 - RNA, 20 nt, Artificial Sequence
  spacer sequence CTCN PAM
gcagggccgccuucaacaac

SEQ ID NO: 20301 - RNA, 20 nt, Artificial Sequence
  spacer sequence CTCN PAM
cguuguuguugaaggcggcc

SEQ ID NO: 20302 - RNA, 20 nt, Artificial Sequence
  spacer sequence CTCN PAM
uaggccacgcucacguuguu

SEQ ID NO: 20303 - RNA, 20 nt, Artificial Sequence
  spacer sequence CTCN PAM
ggcacucguaggccacgcuc

SEQ ID NO: 20304 - RNA, 20 nt, Artificial Sequence
  spacer sequence CTCN PAM
uccugcgcccgccggcgcuc

SEQ ID NO: 20305 - RNA, 20 nt, Artificial Sequence
  spacer sequence CTCN PAM
cuguaggugcgcccguccag

SEQ ID NO: 20306 - RNA, 20 nt, Artificial Sequence
  spacer sequence CTCN PAM
ggcgcaucugccgggacggc

SEQ ID NO: 20307 - RNA, 20 nt, Artificial Sequence
  spacer sequence CTCN PAM
ggggcuuggccgucccggca

SEQ ID NO: 20308 - RNA, 20 nt, Artificial Sequence
  spacer sequence CTCN PAM
ucgggggcuuggccgucccg

SEQ ID NO: 20309 - RNA, 20 nt, Artificial Sequence
  spacer sequence CTCN PAM
uggucacggcacugcaccuu

SEQ ID NO: 20310 - RNA, 20 nt, Artificial Sequence
  spacer sequence CTCN PAM
gcggcaccgccucgugguca

SEQ ID NO: 20311 - RNA, 20 nt, Artificial Sequence
  spacer sequence CTCN PAM
ccugcuucgugcugcuggag

SEQ ID NO: 20312 - RNA, 20 nt, Artificial Sequence
  spacer sequence CTCN PAM
agcagcacgaagcaggugag

SEQ ID NO: 20313 - RNA, 20 nt, Artificial Sequence
  spacer sequence CTCN PAM
uccagcugcuggaggacucg

SEQ ID NO: 20314 - RNA, 20 nt, Artificial Sequence
  spacer sequence CTCN PAM
agcagcuggaagagcgcgcc

SEQ ID NO: 20315 - RNA, 20 nt, Artificial Sequence
  spacer sequence CTCN PAM
gccgccgccguggccgaccg

SEQ ID NO: 20316 - RNA, 20 nt, Artificial Sequence
  spacer sequence CTCN PAM
aggguguccagcacggccug

SEQ ID NO: 20317 - RNA, 20 nt, Artificial Sequence
  spacer sequence CTCN PAM
aggaagcgcgcgggcgcggc

SEQ ID NO: 20318 - RNA, 20 nt, Artificial Sequence
  spacer sequence CTCN PAM
cgcuuggggcccgacagccu

SEQ ID NO: 20319 - RNA, 20 nt, Artificial Sequence
  spacer sequence CTCN PAM
cgggucaugggcgcgcuggg

SEQ ID NO: 20320 - RNA, 20 nt, Artificial Sequence
  spacer sequence CTCN PAM
ucgcgggucaugggcgcgcu

SEQ ID NO: 20321 - RNA, 20 nt, Artificial Sequence
  spacer sequence CTCN PAM
agaaacuccucgcgggucau

SEQ ID NO: 20322 - RNA, 20 nt, Artificial Sequence
  spacer sequence CTCN PAM
ccagaaacuccucgcggguc

SEQ ID NO: 20323 - RNA, 20 nt, Artificial Sequence
  spacer sequence CTCN PAM
ucaucgcgaaggucaagccg

SEQ ID NO: 20324 - RNA, 20 nt, Artificial Sequence
  spacer sequence CTCN PAM
gcccaccggcuugaccuucg

SEQ ID NO: 20325 - RNA, 20 nt, Artificial Sequence
  spacer sequence CTCN PAM
aaaauaaauaaauuuaggcc

SEQ ID NO: 20326 - RNA, 20 nt, Artificial Sequence
  spacer sequence CTCN PAM
gucacccaggcugaagagca

SEQ ID NO: 20327 - RNA, 20 nt, Artificial Sequence
  spacer sequence CTCN PAM
ucagccugggugacagagca

SEQ ID NO: 20328 - RNA, 20 nt, Artificial Sequence
  spacer sequence CTCN PAM
cugcagccccaaccugggcu

SEQ ID NO: 20329 - RNA, 20 nt, Artificial Sequence
  spacer sequence CTCN PAM
agcgauccuccugccccagu

SEQ ID NO: 20330 - RNA, 20 nt, Artificial Sequence
  spacer sequence CTCN PAM
ugccccagucucucaaagug

SEQ ID NO: 20331 - RNA, 20 nt, Artificial Sequence
  spacer sequence CTCN PAM
caaagugcugggauuacagg

SEQ ID NO: 20332 - RNA, 20 nt, Artificial Sequence
  spacer sequence CTCN PAM
aagugcugggauuacaggug

SEQ ID NO: 20333 - RNA, 20 nt, Artificial Sequence
  spacer sequence CTCN PAM
caccuguaaucccagcacuu

SEQ ID NO: 20334 - RNA, 20 nt, Artificial Sequence
  spacer sequence CTCN PAM
uuuuuguggcugugucacau

SEQ ID NO: 20335 - RNA, 20 nt, Artificial Sequence
  spacer sequence CTCN PAM
cuccuuuuuguggcuguguc

SEQ ID NO: 20336 - RNA, 20 nt, Artificial Sequence
  spacer sequence CTCN PAM
gacacaggccacagccugga

SEQ ID NO: 20337 - RNA, 20 nt, Artificial Sequence
  spacer sequence CTCN PAM
aggugcauccaggcuguggc

SEQ ID NO: 20338 - RNA, 20 nt, Artificial Sequence
  spacer sequence CTCN PAM
cagcaugacguccucaaggu

SEQ ID NO: 20339 - RNA, 20 nt, Artificial Sequence
  spacer sequence CTCN PAM
cccagcaugacguccucaag

SEQ ID NO: 20340 - RNA, 20 nt, Artificial Sequence
  spacer sequence CTCN PAM
ugggaggucccuagagacca

SEQ ID NO: 20341 - RNA, 20 nt, Artificial Sequence
  spacer sequence CTCN PAM
caggaguggaaucacacagg

SEQ ID NO: 20342 - RNA, 20 nt, Artificial Sequence
  spacer sequence CTCN PAM
agggaccucccaggagugga

SEQ ID NO: 20343 - RNA, 20 nt, Artificial Sequence
  spacer sequence CTCN PAM
gaauuggucucuagggaccu

SEQ ID NO: 20344 - RNA, 20 nt, Artificial Sequence
  spacer sequence CTCN PAM
ugccuguaaucccagcacug

SEQ ID NO: 20345 - RNA, 20 nt, Artificial Sequence
  spacer sequence CTCN PAM
cagugcugggauuacaggca

SEQ ID NO: 20346 - RNA, 20 nt, Artificial Sequence
  spacer sequence CTCN PAM
gccucccagugcugggauua

SEQ ID NO: 20347 - RNA, 20 nt, Artificial Sequence
  spacer sequence CTCN PAM
ggugauccacccaccucggc

SEQ ID NO: 20348 - RNA, 20 nt, Artificial Sequence
  spacer sequence CTCN PAM
cgaccucaggugauccaccc

SEQ ID NO: 20349 - RNA, 20 nt, Artificial Sequence
  spacer sequence CTCN PAM
aacucccgaccucaggugau

SEQ ID NO: 20350 - RNA, 20 nt, Artificial Sequence
  spacer sequence CTCN PAM
ucucuacuaagaauacgaaa

SEQ ID NO: 20351 - RNA, 20 nt, Artificial Sequence
  spacer sequence CTCN PAM
acuaagaauacgaaaauuag

SEQ ID NO: 20352 - RNA, 20 nt, Artificial Sequence
  spacer sequence CTCN PAM
ggaggcugaggccggaguau

SEQ ID NO: 20353 - RNA, 20 nt, Artificial Sequence
  spacer sequence CTCN PAM
cgaguagugggacuacaggu

SEQ ID NO: 20354 - RNA, 20 nt, Artificial Sequence
  spacer sequence CTCN PAM
gccucccgaguagugggacu

SEQ ID NO: 20355 - RNA, 20 nt, Artificial Sequence
  spacer sequence CTCN PAM
ggccucagccucccgaguag

SEQ ID NO: 20356 - RNA, 20 nt, Artificial Sequence
  spacer sequence CTCN PAM
cggguucacgccauacuccg

SEQ ID NO: 20357 - RNA, 20 nt, Artificial Sequence
  spacer sequence CTCN PAM
gccucccggguucacgccau

SEQ ID NO: 20358 - RNA, 20 nt, Artificial Sequence
  spacer sequence CTCN PAM
cugcaagcuccgccucccgg

SEQ ID NO: 20359 - RNA, 20 nt, Artificial Sequence
  spacer sequence CTCN PAM
gcucacugcaagcuccgccu

SEQ ID NO: 20360 - RNA, 20 nt, Artificial Sequence
  spacer sequence CTCN PAM
agccugggcgacagagcgag

SEQ ID NO: 20361 - RNA, 20 nt, Artificial Sequence
  spacer sequence CTCN PAM
gucgcccaggcuggagugcg

SEQ ID NO: 20362 - RNA, 20 nt, Artificial Sequence
  spacer sequence CTCN PAM
cucugucgcccaggcuggag

SEQ ID NO: 20363 - RNA, 20 nt, Artificial Sequence
  spacer sequence CTCN PAM
aucucugaaaaaaaaaaaaa

SEQ ID NO: 20364 - RNA, 20 nt, Artificial Sequence
  spacer sequence CTCN PAM
gaaaaaaaaaaaaaaaaaaa

SEQ ID NO: 20365 - RNA, 20 nt, Artificial Sequence
  spacer sequence CTCN PAM
aguccucuuugagaaacacu

SEQ ID NO: 20366 - RNA, 20 nt, Artificial Sequence
  spacer sequence CTCN PAM
agaugaagccacacuaccau

SEQ ID NO: 20367 - RNA, 20 nt, Artificial Sequence
  spacer sequence CTCN PAM
uugagaaacacuuucuaaaa

SEQ ID NO: 20368 - RNA, 20 nt, Artificial Sequence
  spacer sequence CTCN PAM
aagaggacucgagaugaagc

SEQ ID NO: 20369 - RNA, 20 nt, Artificial Sequence
  spacer sequence CTCN PAM
aggauggaggguggagggug

SEQ ID NO: 20370 - RNA, 20 nt, Artificial Sequence
  spacer sequence CTCN PAM
auccuugagcauuuuagaaa

SEQ ID NO: 20371 - RNA, 20 nt, Artificial Sequence
  spacer sequence CTCN PAM
acccuccauccuugagcauu

SEQ ID NO: 20372 - RNA, 20 nt, Artificial Sequence
  spacer sequence CTCN PAM
ccucccccacaggaagcgcg

SEQ ID NO: 20373 - RNA, 20 nt, Artificial Sequence
  spacer sequence CTCN PAM
cccacaggaagcgcgugugg

SEQ ID NO: 20374 - RNA, 20 nt, Artificial Sequence
  spacer sequence CTCN PAM
ccacacgcgcuuccuguggg

SEQ ID NO: 20375 - RNA, 20 nt, Artificial Sequence
  spacer sequence CTCN PAM
gggccggggccagcacccac

SEQ ID NO: 20376 - RNA, 20 nt, Artificial Sequence
  spacer sequence CTCN PAM
acagcggcauggaggccugc

SEQ ID NO: 20377 - RNA, 20 nt, Artificial Sequence
  spacer sequence CTCN PAM
augccgcuguggagacccag

SEQ ID NO: 20378 - RNA, 20 nt, Artificial Sequence
  spacer sequence CTCN PAM
ccuacugacagggcccccag

SEQ ID NO: 20379 - RNA, 20 nt, Artificial Sequence
  spacer sequence CTCN PAM
cacucaccuacugacagggc

SEQ ID NO: 20380 - RNA, 20 nt, Artificial Sequence
  spacer sequence CTCN PAM
guguccccccugcaucccgg

SEQ ID NO: 20381 - RNA, 20 nt, Artificial Sequence
  spacer sequence CTCN PAM
cggugggucccuggauggga

SEQ ID NO: 20382 - RNA, 20 nt, Artificial Sequence
  spacer sequence CTCN PAM
gugggucccuggaugggagg

SEQ ID NO: 20383 - RNA, 20 nt, Artificial Sequence
  spacer sequence CTCN PAM
cauccagggacccaccgaga

SEQ ID NO: 20384 - RNA, 20 nt, Artificial Sequence
  spacer sequence CTCN PAM
uacacccaggaugucggcgc

SEQ ID NO: 20385 - RNA, 20 nt, Artificial Sequence
  spacer sequence CTCN PAM
gcucuuacacccaggauguc

SEQ ID NO: 20386 - RNA, 20 nt, Artificial Sequence
  spacer sequence CTCN PAM
aaacaaggaugaaucuccgc

SEQ ID NO: 20387 - RNA, 20 nt, Artificial Sequence
  spacer sequence CTCN PAM
gucccccuccaaacaaggau

SEQ ID NO: 20388 - RNA, 20 nt, Artificial Sequence
  spacer sequence CTCN PAM
ggaugccccaggccucaguc

SEQ ID NO: 20389 - RNA, 20 nt, Artificial Sequence
  spacer sequence CTCN PAM
ucacgcuucaccccgagugg

SEQ ID NO: 20390 - RNA, 20 nt, Artificial Sequence
  spacer sequence CTCN PAM
cgcuucaccccgaguggaca

SEQ ID NO: 20391 - RNA, 20 nt, Artificial Sequence
  spacer sequence CTCN PAM
gggugaagcgugaggagcuc

SEQ ID NO: 20392 - RNA, 20 nt, Artificial Sequence
  spacer sequence CTCN PAM
cacggucccgggauguccac

SEQ ID NO: 20393 - RNA, 20 nt, Artificial Sequence
  spacer sequence CTCN PAM
cccacggucccgggaugucc

SEQ ID NO: 20394 - RNA, 20 nt, Artificial Sequence
  spacer sequence CTCN PAM
ccucgcccauccucccggca

SEQ ID NO: 20395 - RNA, 20 nt, Artificial Sequence
  spacer sequence CTCN PAM
cccauccucccggcagcagc

SEQ ID NO: 20396 - RNA, 20 nt, Artificial Sequence
  spacer sequence CTCN PAM
cggcagcagccagaaggcag

SEQ ID NO: 20397 - RNA, 20 nt, Artificial Sequence
  spacer sequence CTCN PAM
cacccgaggugcagaguagg

SEQ ID NO: 20398 - RNA, 20 nt, Artificial Sequence
  spacer sequence CTCN PAM
ggugugagcgugaccccugc

SEQ ID NO: 20399 - RNA, 20 nt, Artificial Sequence
  spacer sequence CTCN PAM
gcaccucgggugugagcgug

SEQ ID NO: 20400 - RNA, 20 nt, Artificial Sequence
  spacer sequence CTCN PAM
uacucugcaccucgggugug

SEQ ID NO: 20401 - RNA, 20 nt, Artificial Sequence
  spacer sequence CTCN PAM
gucuccuacucugcaccucg

SEQ ID NO: 20402 - RNA, 20 nt, Artificial Sequence
  spacer sequence CTCN PAM
uucgccaagucucagucucc

SEQ ID NO: 20403 - RNA, 20 nt, Artificial Sequence
  spacer sequence CTCN PAM
cagcugggcaguccuagguc

SEQ ID NO: 20404 - RNA, 20 nt, Artificial Sequence
  spacer sequence CTCN PAM
gcccucccagcugggcaguc

SEQ ID NO: 20405 - RNA, 20 nt, Artificial Sequence
  spacer sequence CTCN PAM
auccccgcuggcugccugcc

SEQ ID NO: 20406 - RNA, 20 nt, Artificial Sequence
  spacer sequence CTCN PAM
cugcugggcaccuaguccca

SEQ ID NO: 20407 - RNA, 20 nt, Artificial Sequence
  spacer sequence CTCN PAM
cucacugcugggcaccuagu

SEQ ID NO: 20408 - RNA, 20 nt, Artificial Sequence
  spacer sequence CTCN PAM
cuucucccucacugcugggc

SEQ ID NO: 20409 - RNA, 20 nt, Artificial Sequence
  spacer sequence CTCN PAM
ccugcauuccagcuggacug

SEQ ID NO: 20410 - RNA, 20 nt, Artificial Sequence
  spacer sequence CTCN PAM
guccagcuggaaugcagggg

SEQ ID NO: 20411 - RNA, 20 nt, Artificial Sequence
  spacer sequence CTCN PAM
ugaugaguuggggacccaag

SEQ ID NO: 20412 - RNA, 20 nt, Artificial Sequence
  spacer sequence CTCN PAM
ucaagagccccugucacuca

SEQ ID NO: 20413 - RNA, 20 nt, Artificial Sequence
  spacer sequence CTCN PAM
guccaucuucuugggucccc

SEQ ID NO: 20414 - RNA, 20 nt, Artificial Sequence
  spacer sequence CTCN PAM
cauuuuuauuuccuuccacc

SEQ ID NO: 20415 - RNA, 20 nt, Artificial Sequence
  spacer sequence CTCN PAM
cucccucccucccucccucc

SEQ ID NO: 20416 - RNA, 20 nt, Artificial Sequence
  spacer sequence CTCN PAM
cucccucccucccucccuca

SEQ ID NO: 20417 - RNA, 20 nt, Artificial Sequence
  spacer sequence CTCN PAM
cucccucccucccucaucuc

SEQ ID NO: 20418 - RNA, 20 nt, Artificial Sequence
  spacer sequence CTCN PAM
cucccucccucaucuccccu

SEQ ID NO: 20419 - RNA, 20 nt, Artificial Sequence
  spacer sequence CTCN PAM
cucccucaucuccccuuccu

SEQ ID NO: 20420 - RNA, 20 nt, Artificial Sequence
  spacer sequence CTCN PAM
cucaucuccccuuccuuccc

SEQ ID NO: 20421 - RNA, 20 nt, Artificial Sequence
  spacer sequence CTCN PAM
ucuccccuuccuucccucua

SEQ ID NO: 20422 - RNA, 20 nt, Artificial Sequence
  spacer sequence CTCN PAM
ccuuccuucccucuacccgu

SEQ ID NO: 20423 - RNA, 20 nt, Artificial Sequence
  spacer sequence CTCN PAM
acccguccguccacccauca

SEQ ID NO: 20424 - RNA, 20 nt, Artificial Sequence
  spacer sequence CTCN PAM
uuccauucuuccacccaccc

SEQ ID NO: 20425 - RNA, 20 nt, Artificial Sequence
  spacer sequence CTCN PAM
acccauggguccaucaucca

SEQ ID NO: 20426 - RNA, 20 nt, Artificial Sequence
  spacer sequence CTCN PAM
cucccuccuuucguuccccc

SEQ ID NO: 20427 - RNA, 20 nt, Artificial Sequence
  spacer sequence CTCN PAM
cuccuuucguucccccuucc

SEQ ID NO: 20428 - RNA, 20 nt, Artificial Sequence
  spacer sequence CTCN PAM
uuucguucccccuuccuucc

SEQ ID NO: 20429 - RNA, 20 nt, Artificial Sequence
  spacer sequence CTCN PAM
gccaguccauccacccauca

SEQ ID NO: 20430 - RNA, 20 nt, Artificial Sequence
  spacer sequence CTCN PAM
uuccucccauucuuccaccc

SEQ ID NO: 20431 - RNA, 20 nt, Artificial Sequence
  spacer sequence CTCN PAM
cauucuuccacccacccguc

SEQ ID NO: 20432 - RNA, 20 nt, Artificial Sequence
  spacer sequence CTCN PAM
uuucaaccucccuccuuccc

SEQ ID NO: 20433 - RNA, 20 nt, Artificial Sequence
  spacer sequence CTCN PAM
cuccuucccuccacccguca

SEQ ID NO: 20434 - RNA, 20 nt, Artificial Sequence
  spacer sequence CTCN PAM
uucccuccacccgucauccu

SEQ ID NO: 20435 - RNA, 20 nt, Artificial Sequence
  spacer sequence CTCN PAM
acccgucauccuucccuccc

SEQ ID NO: 20436 - RNA, 20 nt, Artificial Sequence
  spacer sequence CTCN PAM
cuccuuccauguauccaccc

SEQ ID NO: 20437 - RNA, 20 nt, Artificial Sequence
  spacer sequence CTCN PAM
uuccauguauccacccaucc

SEQ ID NO: 20438 - RNA, 20 nt, Artificial Sequence
  spacer sequence CTCN PAM
cucuuccuuuccccccuccu

SEQ ID NO: 20439 - RNA, 20 nt, Artificial Sequence
  spacer sequence CTCN PAM
cuuccuuuccccccuccuuc

SEQ ID NO: 20440 - RNA, 20 nt, Artificial Sequence
  spacer sequence CTCN PAM
uccuuuccccccuccuuccc

SEQ ID NO: 20441 - RNA, 20 nt, Artificial Sequence
  spacer sequence CTCN PAM
uucccuccucccucccaucc

SEQ ID NO: 20442 - RNA, 20 nt, Artificial Sequence
  spacer sequence CTCN PAM
ucccucccauccauccauca

SEQ ID NO: 20443 - RNA, 20 nt, Artificial Sequence
  spacer sequence CTCN PAM
cucccauccauccaucaucc

SEQ ID NO: 20444 - RNA, 20 nt, Artificial Sequence
  spacer sequence CTCN PAM
cauccauccaucauccauuc

SEQ ID NO: 20445 - RNA, 20 nt, Artificial Sequence
  spacer sequence CTCN PAM
uuccaucccuccuuccuuuc

SEQ ID NO: 20446 - RNA, 20 nt, Artificial Sequence
  spacer sequence CTCN PAM
uuccuuucucccgugcuucu

SEQ ID NO: 20447 - RNA, 20 nt, Artificial Sequence
  spacer sequence CTCN PAM
cgugcuucuguguauccauc

SEQ ID NO: 20448 - RNA, 20 nt, Artificial Sequence
  spacer sequence CTCN PAM
ugcuguucuaggccugcccu

SEQ ID NO: 20449 - RNA, 20 nt, Artificial Sequence
  spacer sequence CTCN PAM
ugucugacuggaagagacag

SEQ ID NO: 20450 - RNA, 20 nt, Artificial Sequence
  spacer sequence CTCN PAM
uccagucagacaggagggca

SEQ ID NO: 20451 - RNA, 20 nt, Artificial Sequence
  spacer sequence CTCN PAM
ugccuggccugucucuucca

SEQ ID NO: 20452 - RNA, 20 nt, Artificial Sequence
  spacer sequence CTCN PAM
gcacagucucaugccuggcc

SEQ ID NO: 20453 - RNA, 20 nt, Artificial Sequence
  spacer sequence CTCN PAM
gcucugcacagucucaugcc

SEQ ID NO: 20454 - RNA, 20 nt, Artificial Sequence
  spacer sequence CTCN PAM
guguuuccuccgcucugcac

SEQ ID NO: 20455 - RNA, 20 nt, Artificial Sequence
  spacer sequence CTCN PAM
ugcccuccguguuuccuccg

SEQ ID NO: 20456 - RNA, 20 nt, Artificial Sequence
  spacer sequence CTCN PAM
ugcaacggccccccacccgc

SEQ ID NO: 20457 - RNA, 20 nt, Artificial Sequence
  spacer sequence CTCN PAM
ucuccugcaacggcccccca

SEQ ID NO: 20458 - RNA, 20 nt, Artificial Sequence
  spacer sequence CTCN PAM
cuugguuuaugcucgucucc

SEQ ID NO: 20459 - RNA, 20 nt, Artificial Sequence
  spacer sequence CTCN PAM
cuuagcugccugcguaccuu

SEQ ID NO: 20460 - RNA, 20 nt, Artificial Sequence
  spacer sequence CTCN PAM
cacgccugauccgcuacauc

SEQ ID NO: 20461 - RNA, 20 nt, Artificial Sequence
  spacer sequence CTCN PAM
cgccugauccgcuacaucca

SEQ ID NO: 20462 - RNA, 20 nt, Artificial Sequence
  spacer sequence CTCN PAM
cacugauggauguagcggau

SEQ ID NO: 20463 - RNA, 20 nt, Artificial Sequence
  spacer sequence CTCN PAM
ucccacugauggauguagcg

SEQ ID NO: 20464 - RNA, 20 nt, Artificial Sequence
  spacer sequence CTCN PAM
ccuccucccacugauggaug

SEQ ID NO: 20465 - RNA, 20 nt, Artificial Sequence
  spacer sequence CTCN PAM
uagccccaccccugcugccu

SEQ ID NO: 20466 - RNA, 20 nt, Artificial Sequence
  spacer sequence CTCN PAM
cauagccccaccccugcugc

SEQ ID NO: 20467 - RNA, 20 nt, Artificial Sequence
  spacer sequence CTCN PAM
cauagccccaccccuggggc

SEQ ID NO: 20468 - RNA, 20 nt, Artificial Sequence
  spacer sequence CTCN PAM
uagccccaucccuggggccu

SEQ ID NO: 20469 - RNA, 20 nt, Artificial Sequence
  spacer sequence CTCN PAM
cauagccccaucccuggggc

SEQ ID NO: 20470 - RNA, 20 nt, Artificial Sequence
  spacer sequence CTCN PAM
gaucucucauagccccaucc

SEQ ID NO: 20471 - RNA, 20 nt, Artificial Sequence
  spacer sequence CTCN PAM
uagccccaucccuggggccu

SEQ ID NO: 20472 - RNA, 20 nt, Artificial Sequence
  spacer sequence CTCN PAM
cauagccccaucccuggggc

SEQ ID NO: 20473 - RNA, 20 nt, Artificial Sequence
  spacer sequence CTCN PAM
cauagccccaccccuggggc

SEQ ID NO: 20474 - RNA, 20 nt, Artificial Sequence
  spacer sequence CTCN PAM
uagccccaucccuggggccu

SEQ ID NO: 20475 - RNA, 20 nt, Artificial Sequence
  spacer sequence CTCN PAM
cauagccccaucccuggggc

SEQ ID NO: 20476 - RNA, 20 nt, Artificial Sequence
  spacer sequence CTCN PAM
uagccccaccccuggggccu

SEQ ID NO: 20477 - RNA, 20 nt, Artificial Sequence
  spacer sequence CTCN PAM
accccugcacccucauagcc

SEQ ID NO: 20478 - RNA, 20 nt, Artificial Sequence
  spacer sequence CTCN PAM
accacugcaccauuguagcu

SEQ ID NO: 20479 - RNA, 20 nt, Artificial Sequence
  spacer sequence CTCN PAM
gcaaccugauagccccaccc

SEQ ID NO: 20480 - RNA, 20 nt, Artificial Sequence
  spacer sequence CTCN PAM
acccugcucagcaaccugau

SEQ ID NO: 20481 - RNA, 20 nt, Artificial Sequence
  spacer sequence CTCN PAM
accccagcagcaucauagcc

SEQ ID NO: 20482 - RNA, 20 nt, Artificial Sequence
  spacer sequence CTCN PAM
uugaccccacccagauauca

SEQ ID NO: 20483 - RNA, 20 nt, Artificial Sequence
  spacer sequence CTCN PAM
cagcccugccccugcuccuu

SEQ ID NO: 20484 - RNA, 20 nt, Artificial Sequence
  spacer sequence CTCN PAM
uagccccgccccugaugccu

SEQ ID NO: 20485 - RNA, 20 nt, Artificial Sequence
  spacer sequence CTCN PAM
gcacaacccucauagccccg

SEQ ID NO: 20486 - RNA, 20 nt, Artificial Sequence
  spacer sequence CTCN PAM
gaugucugaccccgcucagc

SEQ ID NO: 20487 - RNA, 20 nt, Artificial Sequence
  spacer sequence CTCN PAM
acucggaugucugaccccgc

SEQ ID NO: 20488 - RNA, 20 nt, Artificial Sequence
  spacer sequence CTCN PAM
uaucuccacucggaugucug

SEQ ID NO: 20489 - RNA, 20 nt, Artificial Sequence
  spacer sequence CTCN PAM
uagucccgcccuugcugccu

SEQ ID NO: 20490 - RNA, 20 nt, Artificial Sequence
  spacer sequence CTCN PAM
uauccccaccccugaugucu

SEQ ID NO: 20491 - RNA, 20 nt, Artificial Sequence
  spacer sequence CTCN PAM
ccaccccugaugucugacac

SEQ ID NO: 20492 - RNA, 20 nt, Artificial Sequence
  spacer sequence CTCN PAM
acagccuucacugcaggacc

SEQ ID NO: 20493 - RNA, 20 nt, Artificial Sequence
  spacer sequence CTCN PAM
aaacccacagcccccacccc

SEQ ID NO: 20494 - RNA, 20 nt, Artificial Sequence
  spacer sequence CTCN PAM
cccaaauccaaggccccgca

SEQ ID NO: 20495 - RNA, 20 nt, Artificial Sequence
  spacer sequence CTCN PAM
uggcccccucccccaaaucc

SEQ ID NO: 20496 - RNA, 20 nt, Artificial Sequence
  spacer sequence CTCN PAM
cgcagugggggcgcacgggg

SEQ ID NO: 20497 - RNA, 20 nt, Artificial Sequence
  spacer sequence CTCN PAM
gaaggugggggccggggguc

SEQ ID NO: 20498 - RNA, 20 nt, Artificial Sequence
  spacer sequence CTCN PAM
cggcgccuuccugcagaucu

SEQ ID NO: 20499 - RNA, 20 nt, Artificial Sequence
  spacer sequence CTCN PAM
ucaccgcgcuggccagguca

SEQ ID NO: 20500 - RNA, 20 nt, Artificial Sequence
  spacer sequence CTCN PAM
ucagcaugaugcugcugcuc

SEQ ID NO: 20501 - RNA, 20 nt, Artificial Sequence
  spacer sequence CTCN PAM
gccacugggacggcugccug

SEQ ID NO: 20502 - RNA, 20 nt, Artificial Sequence
  spacer sequence CTCN PAM
ccaccaugccauugauggac

SEQ ID NO: 20503 - RNA, 20 nt, Artificial Sequence
  spacer sequence CTCN PAM
gucagggcccgcggcgcuca

SEQ ID NO: 20504 - RNA, 20 nt, Artificial Sequence
  spacer sequence CTCN PAM
cccuccgucagggcccgcgg

SEQ ID NO: 20505 - RNA, 20 nt, Artificial Sequence
  spacer sequence CTCN PAM
cauacagaggggggacccag

SEQ ID NO: 20506 - RNA, 20 nt, Artificial Sequence
  spacer sequence CTCN PAM
guaugggagccugcgucucc

SEQ ID NO: 20507 - RNA, 20 nt, Artificial Sequence
  spacer sequence CTCN PAM
guaagcgggauaagggggcc

SEQ ID NO: 20508 - RNA, 20 nt, Artificial Sequence
  spacer sequence CTCN PAM
gaaaggcuuggguucaaccc

SEQ ID NO: 20509 - RNA, 20 nt, Artificial Sequence
  spacer sequence CTCN PAM
auaagggggcgccugggucc

SEQ ID NO: 20510 - RNA, 20 nt, Artificial Sequence
  spacer sequence CTCN PAM
ccuccauaagggggcgccug

SEQ ID NO: 20511 - RNA, 20 nt, Artificial Sequence
  spacer sequence CTCN PAM
ggcccuuacagaggugggga

SEQ ID NO: 20512 - RNA, 20 nt, Artificial Sequence
  spacer sequence CTCN PAM
guaagggcccgaguccuccc

SEQ ID NO: 20513 - RNA, 20 nt, Artificial Sequence
  spacer sequence CTCN PAM
auaagggggcgccugggucc

SEQ ID NO: 20514 - RNA, 20 nt, Artificial Sequence
  spacer sequence CTCN PAM
ccuccauaagggggcgccug

SEQ ID NO: 20515 - RNA, 20 nt, Artificial Sequence
  spacer sequence CTCN PAM
ggcccuuucagaggcgggga

SEQ ID NO: 20516 - RNA, 20 nt, Artificial Sequence
  spacer sequence CTCN PAM
gaaagggcccgaguccuccc

SEQ ID NO: 20517 - RNA, 20 nt, Artificial Sequence
  spacer sequence CTCN PAM
auaagggggcgccugggucc

SEQ ID NO: 20518 - RNA, 20 nt, Artificial Sequence
  spacer sequence CTCN PAM
ccuccauaagggggcgccug

SEQ ID NO: 20519 - RNA, 20 nt, Artificial Sequence
  spacer sequence CTCN PAM
ggcccuuacagaggugggga

SEQ ID NO: 20520 - RNA, 20 nt, Artificial Sequence
  spacer sequence CTCN PAM
guaagggcccgaguccuccc

SEQ ID NO: 20521 - RNA, 20 nt, Artificial Sequence
  spacer sequence CTCN PAM
auaagggggcgccugggucc

SEQ ID NO: 20522 - RNA, 20 nt, Artificial Sequence
  spacer sequence CTCN PAM
ccuccauaagggggcgccug

SEQ ID NO: 20523 - RNA, 20 nt, Artificial Sequence
  spacer sequence CTCN PAM
ggcccuuucagaggugggga

SEQ ID NO: 20524 - RNA, 20 nt, Artificial Sequence
  spacer sequence CTCN PAM
gaaagggcccgaguccuccc

SEQ ID NO: 20525 - RNA, 20 nt, Artificial Sequence
  spacer sequence CTCN PAM
auaagggggcgccugggucc

SEQ ID NO: 20526 - RNA, 20 nt, Artificial Sequence
  spacer sequence CTCN PAM
ccuccauaagggggcgccug

SEQ ID NO: 20527 - RNA, 20 nt, Artificial Sequence
  spacer sequence CTCN PAM
ggcccuuucagaggugggga

SEQ ID NO: 20528 - RNA, 20 nt, Artificial Sequence
  spacer sequence CTCN PAM
gaaagggcccgaguccuccc

SEQ ID NO: 20529 - RNA, 20 nt, Artificial Sequence
  spacer sequence CTCN PAM
auaagggggcgccugggucc

SEQ ID NO: 20530 - RNA, 20 nt, Artificial Sequence
  spacer sequence CTCN PAM
ccuccauaagggggcgccug

SEQ ID NO: 20531 - RNA, 20 nt, Artificial Sequence
  spacer sequence CTCN PAM
ggcccuuacagaggugggga

SEQ ID NO: 20532 - RNA, 20 nt, Artificial Sequence
  spacer sequence CTCN PAM
guaagggcccgaguccuccc

SEQ ID NO: 20533 - RNA, 20 nt, Artificial Sequence
  spacer sequence CTCN PAM
auaagggggcgccugggucc

SEQ ID NO: 20534 - RNA, 20 nt, Artificial Sequence
  spacer sequence CTCN PAM
ccuccauaagggggcgccug

SEQ ID NO: 20535 - RNA, 20 nt, Artificial Sequence
  spacer sequence CTCN PAM
ggcccuuacagaggugggga

SEQ ID NO: 20536 - RNA, 20 nt, Artificial Sequence
  spacer sequence CTCN PAM
guaagggcccgaguccuccc

SEQ ID NO: 20537 - RNA, 20 nt, Artificial Sequence
  spacer sequence CTCN PAM
auaagggggcgccugggucc

SEQ ID NO: 20538 - RNA, 20 nt, Artificial Sequence
  spacer sequence CTCN PAM
ccuccauaagggggcgccug

SEQ ID NO: 20539 - RNA, 20 nt, Artificial Sequence
  spacer sequence CTCN PAM
ggcccuuacagaggugggga

SEQ ID NO: 20540 - RNA, 20 nt, Artificial Sequence
  spacer sequence CTCN PAM
guaagggcccgaguccuccc

SEQ ID NO: 20541 - RNA, 20 nt, Artificial Sequence
  spacer sequence CTCN PAM
auaagggggcgccugggucc

SEQ ID NO: 20542 - RNA, 20 nt, Artificial Sequence
  spacer sequence CTCN PAM
ggcccuuacagaggcgggga

SEQ ID NO: 20543 - RNA, 20 nt, Artificial Sequence
  spacer sequence CTCN PAM
guaagggcccgaguccuucc

SEQ ID NO: 20544 - RNA, 20 nt, Artificial Sequence
  spacer sequence CTCN PAM
guaaggcggccugggucccc

SEQ ID NO: 20545 - RNA, 20 nt, Artificial Sequence
  spacer sequence CTCN PAM
cucuguaaggcggccugggu

SEQ ID NO: 20546 - RNA, 20 nt, Artificial Sequence
  spacer sequence CTCN PAM
cccucuguaaggcggccugg

SEQ ID NO: 20547 - RNA, 20 nt, Artificial Sequence
  spacer sequence CTCN PAM
cguguaagggggucuugucc

SEQ ID NO: 20548 - RNA, 20 nt, Artificial Sequence
  spacer sequence CTCN PAM
ggccucuuuacagaggggga

SEQ ID NO: 20549 - RNA, 20 nt, Artificial Sequence
  spacer sequence CTCN PAM
uuacagagggggacccagga

SEQ ID NO: 20550 - RNA, 20 nt, Artificial Sequence
  spacer sequence CTCN PAM
guaaagaggccugaguccuc

SEQ ID NO: 20551 - RNA, 20 nt, Artificial Sequence
  spacer sequence CTCN PAM
acggaugaucccaggccuga

SEQ ID NO: 20552 - RNA, 20 nt, Artificial Sequence
  spacer sequence CTCN PAM
ccacggaugaucccaggccu

SEQ ID NO: 20553 - RNA, 20 nt, Artificial Sequence
  spacer sequence CTCN PAM
gcuucucuccacggaugauc

SEQ ID NO: 20554 - RNA, 20 nt, Artificial Sequence
  spacer sequence CTCN PAM
ucauaaccacacucagcuuc

SEQ ID NO: 20555 - RNA, 20 nt, Artificial Sequence
  spacer sequence CTCN PAM
aaaaaaaauaaguaaauaaa

SEQ ID NO: 20556 - RNA, 20 nt, Artificial Sequence
  spacer sequence CTCN PAM
gucucaaaaaaaaauaagua

SEQ ID NO: 20557 - RNA, 20 nt, Artificial Sequence
  spacer sequence CTCN PAM
gucgcccaggcuggagugca

SEQ ID NO: 20558 - RNA, 20 nt, Artificial Sequence
  spacer sequence CTCN PAM
gaccccgggacaaggacuac

SEQ ID NO: 20559 - RNA, 20 nt, Artificial Sequence
  spacer sequence CTCN PAM
ccucagaccccgggacaagg

SEQ ID NO: 20560 - RNA, 20 nt, Artificial Sequence
  spacer sequence CTCN PAM
gaccccggggccgggcccgc

SEQ ID NO: 20561 - RNA, 20 nt, Artificial Sequence
  spacer sequence CTCN PAM
ccucagaccccggggccggg

SEQ ID NO: 20562 - RNA, 20 nt, Artificial Sequence
  spacer sequence CTCN PAM
ccccucagaccccggggccg

SEQ ID NO: 20563 - RNA, 20 nt, Artificial Sequence
  spacer sequence CTCN PAM
gcccuucacucagcuucaag

SEQ ID NO: 20564 - RNA, 20 nt, Artificial Sequence
  spacer sequence CTCN PAM
gcuucaaguggcgcgcucag

SEQ ID NO: 20565 - RNA, 20 nt, Artificial Sequence
  spacer sequence CTCN PAM
gggcagagaccgcgugaugg

SEQ ID NO: 20566 - RNA, 20 nt, Artificial Sequence
  spacer sequence CTCN PAM
gcccugagcgcgccacuuga

SEQ ID NO: 20567 - RNA, 20 nt, Artificial Sequence
  spacer sequence CTCN PAM
ccaucacgcggucucugccc

SEQ ID NO: 20568 - RNA, 20 nt, Artificial Sequence
  spacer sequence CTCN PAM
uaaucacagccacagacccc

SEQ ID NO: 20569 - RNA, 20 nt, Artificial Sequence
  spacer sequence CTCN PAM
uccuaaucacagccacagac

SEQ ID NO: 20570 - RNA, 20 nt, Artificial Sequence
  spacer sequence CTCN PAM
ccaccggccguuucuccucc

SEQ ID NO: 20571 - RNA, 20 nt, Artificial Sequence
  spacer sequence CTCN PAM
caccaccggccguuucuccu

SEQ ID NO: 20572 - RNA, 20 nt, Artificial Sequence
  spacer sequence CTCN PAM
gacccugugacagggaggga

SEQ ID NO: 20573 - RNA, 20 nt, Artificial Sequence
  spacer sequence CTCN PAM
cugucacagggucagagaac

SEQ ID NO: 20574 - RNA, 20 nt, Artificial Sequence
  spacer sequence CTCN PAM
cucccugucacagggucaga

SEQ ID NO: 20575 - RNA, 20 nt, Artificial Sequence
  spacer sequence CTCN PAM
ggaccucccucccugucaca

SEQ ID NO: 20576 - RNA, 20 nt, Artificial Sequence
  spacer sequence CTCN PAM
aggcucuggaccucccuccc

SEQ ID NO: 20577 - RNA, 20 nt, Artificial Sequence
  spacer sequence CTCN PAM
ccagcccccgccccacgucc

SEQ ID NO: 20578 - RNA, 20 nt, Artificial Sequence
  spacer sequence CTCN PAM
ccccuuccugcccagccugc

SEQ ID NO: 20579 - RNA, 20 nt, Artificial Sequence
  spacer sequence CTCN PAM
uggcaaugccccuucagccc

SEQ ID NO: 20580 - RNA, 20 nt, Artificial Sequence
  spacer sequence CTCN PAM
aggccggcucaggauggggc

SEQ ID NO: 20581 - RNA, 20 nt, Artificial Sequence
  spacer sequence CTCN PAM
ggauggggcuggguuaggga

SEQ ID NO: 20582 - RNA, 20 nt, Artificial Sequence
  spacer sequence CTCN PAM
gaccccgccaggcccuuccc

SEQ ID NO: 20583 - RNA, 20 nt, Artificial Sequence
  spacer sequence CTCN PAM
cagaccccgccaggcccuuc

SEQ ID NO: 20584 - RNA, 20 nt, Artificial Sequence
  spacer sequence CTCN PAM
cugaagccuggcccugacug

SEQ ID NO: 20585 - RNA, 20 nt, Artificial Sequence
  spacer sequence CTCN PAM
cccugaagccuggcccugac

SEQ ID NO: 20586 - RNA, 20 nt, Artificial Sequence
  spacer sequence CTCN PAM
gaugcggccucuggccugca

SEQ ID NO: 20587 - RNA, 20 nt, Artificial Sequence
  spacer sequence CTCN PAM
ggccugcagcguccauuggg

SEQ ID NO: 20588 - RNA, 20 nt, Artificial Sequence
  spacer sequence CTCN PAM
acugccaagccuaggauuaa

SEQ ID NO: 20589 - RNA, 20 nt, Artificial Sequence
  spacer sequence CTCN PAM
cccguguccccuccacugcc

SEQ ID NO: 20590 - RNA, 20 nt, Artificial Sequence
  spacer sequence CTCN PAM
cagcucccccguguccccuc

SEQ ID NO: 20591 - RNA, 20 nt, Artificial Sequence
  spacer sequence CTCN PAM
accccucccagcucccccgu

SEQ ID NO: 20592 - RNA, 20 nt, Artificial Sequence
  spacer sequence CTCN PAM
cuccaccccucccagcuccc

SEQ ID NO: 20593 - RNA, 20 nt, Artificial Sequence
  spacer sequence CTCN PAM
aggggcugccaauggggcca

SEQ ID NO: 20594 - RNA, 20 nt, Artificial Sequence
  spacer sequence CTCN PAM
ugcaccacucugugccucag

SEQ ID NO: 20595 - RNA, 20 nt, Artificial Sequence
  spacer sequence CTCN PAM
gugccucaguuuccccaugu

SEQ ID NO: 20596 - RNA, 20 nt, Artificial Sequence
  spacer sequence CTCN PAM
guuuccccauguuaggcggc

SEQ ID NO: 20597 - RNA, 20 nt, Artificial Sequence
  spacer sequence CTCN PAM
cagccaggaccagccagccg

SEQ ID NO: 20598 - RNA, 20 nt, Artificial Sequence
  spacer sequence CTCN PAM
cccgcgccccgagcaguggc

SEQ ID NO: 20599 - RNA, 20 nt, Artificial Sequence
  spacer sequence CTCN PAM
cgcgccccgagcaguggcug

SEQ ID NO: 20600 - RNA, 20 nt, Artificial Sequence
  spacer sequence CTCN PAM
gggcgcgggagaggggggca

SEQ ID NO: 20601 - RNA, 20 nt, Artificial Sequence
  spacer sequence CTCN PAM
cacccaaacauaagcuggug

SEQ ID NO: 20602 - RNA, 20 nt, Artificial Sequence
  spacer sequence CTCN PAM
gcggaacccgugacggcggg

SEQ ID NO: 20603 - RNA, 20 nt, Artificial Sequence
  spacer sequence CTCN PAM
gggcagcugcggccgggcgg

SEQ ID NO: 20604 - RNA, 20 nt, Artificial Sequence
  spacer sequence CTCN PAM
cuuccgccccagccccgccc

SEQ ID NO: 20605 - RNA, 20 nt, Artificial Sequence
  spacer sequence CTCN PAM
agccucacuuccgccccagc

SEQ ID NO: 20606 - RNA, 20 nt, Artificial Sequence
  spacer sequence CTCN PAM
cuucccugcucaggaggggc

SEQ ID NO: 20607 - RNA, 20 nt, Artificial Sequence
  spacer sequence CTCN PAM
ggaggggcugacccgauggu

SEQ ID NO: 20608 - RNA, 20 nt, Artificial Sequence
  spacer sequence CTCN PAM
ugagcagggaagggagcgug

SEQ ID NO: 20609 - RNA, 20 nt, Artificial Sequence
  spacer sequence CTCN PAM
ggcccuucccugaugaucuu

SEQ ID NO: 20610 - RNA, 20 nt, Artificial Sequence
  spacer sequence CTCN PAM
ccucguagagucaggugccc

SEQ ID NO: 20611 - RNA, 20 nt, Artificial Sequence
  spacer sequence CTCN PAM
ucguagagucaggugcccac

SEQ ID NO: 20612 - RNA, 20 nt, Artificial Sequence
  spacer sequence CTCN PAM
uagagucaggugcccaccca

SEQ ID NO: 20613 - RNA, 20 nt, Artificial Sequence
  spacer sequence CTCN PAM
acgaggagaggccccaggua

SEQ ID NO: 20614 - RNA, 20 nt, Artificial Sequence
  spacer sequence CTCN PAM
gggauaggguugcuagauaa

SEQ ID NO: 20615 - RNA, 20 nt, Artificial Sequence
  spacer sequence CTCN PAM
ugccuguaaucccggcacuc

SEQ ID NO: 20616 - RNA, 20 nt, Artificial Sequence
  spacer sequence CTCN PAM
gggaggccgagacaggccga

SEQ ID NO: 20617 - RNA, 20 nt, Artificial Sequence
  spacer sequence CTCN PAM
cagagugccgggauuacagg

SEQ ID NO: 20618 - RNA, 20 nt, Artificial Sequence
  spacer sequence CTCN PAM
gccucccagagugccgggau

SEQ ID NO: 20619 - RNA, 20 nt, Artificial Sequence
  spacer sequence CTCN PAM
ggcgaucggccugucucggc

SEQ ID NO: 20620 - RNA, 20 nt, Artificial Sequence
  spacer sequence CTCN PAM
ugaccucaggcgaucggccu

SEQ ID NO: 20621 - RNA, 20 nt, Artificial Sequence
  spacer sequence CTCN PAM
ggcuggucuuaaacuccuga

SEQ ID NO: 20622 - RNA, 20 nt, Artificial Sequence
  spacer sequence CTCN PAM
ccguguugcucaggcugguc

SEQ ID NO: 20623 - RNA, 20 nt, Artificial Sequence
  spacer sequence CTCN PAM
ucgcuacaaaaaauuaaaaa

SEQ ID NO: 20624 - RNA, 20 nt, Artificial Sequence
  spacer sequence CTCN PAM
ggaggccgaggugggaggau

SEQ ID NO: 20625 - RNA, 20 nt, Artificial Sequence
  spacer sequence CTCN PAM
ugaguaguggggauuacagg

SEQ ID NO: 20626 - RNA, 20 nt, Artificial Sequence
  spacer sequence CTCN PAM
gccuccugaguaguggggau

SEQ ID NO: 20627 - RNA, 20 nt, Artificial Sequence
  spacer sequence CTCN PAM
caccucggccuccugaguag

SEQ ID NO: 20628 - RNA, 20 nt, Artificial Sequence
  spacer sequence CTCN PAM
agggauccucccaccucggc

SEQ ID NO: 20629 - RNA, 20 nt, Artificial Sequence
  spacer sequence CTCN PAM
ugggcucaagggauccuccc

SEQ ID NO: 20630 - RNA, 20 nt, Artificial Sequence
  spacer sequence CTCN PAM
ccauauugcacaggcugguc

SEQ ID NO: 20631 - RNA, 20 nt, Artificial Sequence
  spacer sequence CTCN PAM
ucuccacaaaaaauaaaaga

SEQ ID NO: 20632 - RNA, 20 nt, Artificial Sequence
  spacer sequence CTCN PAM
acaaaaaauaaaagaaucag

SEQ ID NO: 20633 - RNA, 20 nt, Artificial Sequence
  spacer sequence CTCN PAM
ggaggcugaggugggaggau

SEQ ID NO: 20634 - RNA, 20 nt, Artificial Sequence
  spacer sequence CTCN PAM
ugaguagcagggacugcagg

SEQ ID NO: 20635 - RNA, 20 nt, Artificial Sequence
  spacer sequence CTCN PAM
gccuccugaguagcagggac

SEQ ID NO: 20636 - RNA, 20 nt, Artificial Sequence
  spacer sequence CTCN PAM
caccucagccuccugaguag

SEQ ID NO: 20637 - RNA, 20 nt, Artificial Sequence
  spacer sequence CTCN PAM
agcaauccucccaccucagc

SEQ ID NO: 20638 - RNA, 20 nt, Artificial Sequence
  spacer sequence CTCN PAM
gccuaugggcucaagcaauc

SEQ ID NO: 20639 - RNA, 20 nt, Artificial Sequence
  spacer sequence CTCN PAM
cugcagccuccgccuauggg

SEQ ID NO: 20640 - RNA, 20 nt, Artificial Sequence
  spacer sequence CTCN PAM
agcgugggccacagagcgag

SEQ ID NO: 20641 - RNA, 20 nt, Artificial Sequence
  spacer sequence CTCN PAM
guggcccacgcuggagugca

SEQ ID NO: 20642 - RNA, 20 nt, Artificial Sequence
  spacer sequence CTCN PAM
cucuguggcccacgcuggag

SEQ ID NO: 20643 - RNA, 20 nt, Artificial Sequence
  spacer sequence CTCN PAM
gaaaaaaaaaauggaauuua

SEQ ID NO: 20644 - RNA, 20 nt, Artificial Sequence
  spacer sequence CTCN PAM
uguugaaucuggccgccccu

SEQ ID NO: 20645 - RNA, 20 nt, Artificial Sequence
  spacer sequence CTCN PAM
gccacacacaggggcggcca

SEQ ID NO: 20646 - RNA, 20 nt, Artificial Sequence
  spacer sequence CTCN PAM
ccgcugugggcgggggcuuu

SEQ ID NO: 20647 - RNA, 20 nt, Artificial Sequence
  spacer sequence CTCN PAM
ccgccacaggccggggggcu

SEQ ID NO: 20648 - RNA, 20 nt, Artificial Sequence
  spacer sequence CTCN PAM
ccuccccacaguacaagcag

SEQ ID NO: 20649 - RNA, 20 nt, Artificial Sequence
  spacer sequence CTCN PAM
ccacaguacaagcaggugcc

SEQ ID NO: 20650 - RNA, 20 nt, Artificial Sequence
  spacer sequence CTCN PAM
ccuccuccccacaguacaag

SEQ ID NO: 20651 - RNA, 20 nt, Artificial Sequence
  spacer sequence CTCN PAM
uccccacaguacaagcaggu

SEQ ID NO: 20652 - RNA, 20 nt, Artificial Sequence
  spacer sequence CTCN PAM
ccacaguacaagcaggugga

SEQ ID NO: 20653 - RNA, 20 nt, Artificial Sequence
  spacer sequence CTCN PAM
accugcuuguacugugggga

SEQ ID NO: 20654 - RNA, 20 nt, Artificial Sequence
  spacer sequence CTCN PAM
uaguagucguggaucuucug

SEQ ID NO: 20655 - RNA, 20 nt, Artificial Sequence
  spacer sequence CTCN PAM
ucaaacaucuugcccuggua

SEQ ID NO: 20656 - RNA, 20 nt, Artificial Sequence
  spacer sequence CTCN PAM
cccaggaugcuguccucguc

SEQ ID NO: 20657 - RNA, 20 nt, Artificial Sequence
  spacer sequence CTCN PAM
acgggccccugcgggaggug

SEQ ID NO: 20658 - RNA, 20 nt, Artificial Sequence
  spacer sequence CTCN PAM
cgcaggggcccguugagcuc

SEQ ID NO: 20659 - RNA, 20 nt, Artificial Sequence
  spacer sequence CTCN PAM
ccucccgcaggggcccguug

SEQ ID NO: 20660 - RNA, 20 nt, Artificial Sequence
  spacer sequence CTCN PAM
cgcccgcccggcgcccgccu

SEQ ID NO: 20661 - RNA, 20 nt, Artificial Sequence
  spacer sequence CTCN PAM
gguacagggccggccucccu

SEQ ID NO: 20662 - RNA, 20 nt, Artificial Sequence
  spacer sequence CTCN PAM
cucuccuggagcccaggagc

SEQ ID NO: 20663 - RNA, 20 nt, Artificial Sequence
  spacer sequence CTCN PAM
ccuggagcccaggagccggu

SEQ ID NO: 20664 - RNA, 20 nt, Artificial Sequence
  spacer sequence CTCN PAM
uggagcccaggagccggucc

SEQ ID NO: 20665 - RNA, 20 nt, Artificial Sequence
  spacer sequence CTCN PAM
aggagagggaggccggcccu

SEQ ID NO: 20666 - RNA, 20 nt, Artificial Sequence
  spacer sequence CTCN PAM
ugggcuccaggagagggagg

SEQ ID NO: 20667 - RNA, 20 nt, Artificial Sequence
  spacer sequence CTCN PAM
gggaccggcuccugggcucc

SEQ ID NO: 20668 - RNA, 20 nt, Artificial Sequence
  spacer sequence CTCN PAM
cucagggaccggcuccuggg

SEQ ID NO: 20669 - RNA, 20 nt, Artificial Sequence
  spacer sequence CTCN PAM
ccucccucagggaccggcuc

SEQ ID NO: 20670 - RNA, 20 nt, Artificial Sequence
  spacer sequence CTCN PAM
ugcugcagccuaggcaccuc

SEQ ID NO: 20671 - RNA, 20 nt, Artificial Sequence
  spacer sequence CTCN PAM
agcuagaccugcguacacac

SEQ ID NO: 20672 - RNA, 20 nt, Artificial Sequence
  spacer sequence CTCN PAM
agucccuccugcugcagccu

SEQ ID NO: 20673 - RNA, 20 nt, Artificial Sequence
  spacer sequence CTCN PAM
ccuccccgccccgugagccu

SEQ ID NO: 20674 - RNA, 20 nt, Artificial Sequence
  spacer sequence CTCN PAM
ccgccccgugagccucugca

SEQ ID NO: 20675 - RNA, 20 nt, Artificial Sequence
  spacer sequence CTCN PAM
cggggcggggaggggagggu

SEQ ID NO: 20676 - RNA, 20 nt, Artificial Sequence
  spacer sequence CTCN PAM
gcacccccaggacccccgcc

SEQ ID NO: 20677 - RNA, 20 nt, Artificial Sequence
  spacer sequence CTCN PAM
ccacccccugcccugcuucu

SEQ ID NO: 20678 - RNA, 20 nt, Artificial Sequence
  spacer sequence CTCN PAM
cuccccacccccugcccugc

SEQ ID NO: 20679 - RNA, 20 nt, Artificial Sequence
  spacer sequence CTCN PAM
ucccuccccacccccugccc

SEQ ID NO: 20680 - RNA, 20 nt, Artificial Sequence
  spacer sequence CTCN PAM
gcggcuccucccuccccacc

SEQ ID NO: 20681 - RNA, 20 nt, Artificial Sequence
  spacer sequence CTCN PAM
gcggggccucugcggcuccu

SEQ ID NO: 20682 - RNA, 20 nt, Artificial Sequence
  spacer sequence CTCN PAM
gugcccccaggaccuggugc

SEQ ID NO: 20683 - RNA, 20 nt, Artificial Sequence
  spacer sequence CTCN PAM
aaucagccucagugccccca

SEQ ID NO: 20684 - RNA, 20 nt, Artificial Sequence
  spacer sequence CTCN PAM
cagcucuguuccgguagccu

SEQ ID NO: 20685 - RNA, 20 nt, Artificial Sequence
  spacer sequence CTCN PAM
guuccgguagccugagugac

SEQ ID NO: 20686 - RNA, 20 nt, Artificial Sequence
  spacer sequence CTCN PAM
ggcuaccggaacagagcugg

SEQ ID NO: 20687 - RNA, 20 nt, Artificial Sequence
  spacer sequence CTCN PAM
gccuguggguauuuguuccc

SEQ ID NO: 20688 - RNA, 20 nt, Artificial Sequence
  spacer sequence CTCN PAM
gcuguucaagccacucagcc

SEQ ID NO: 20689 - RNA, 20 nt, Artificial Sequence
  spacer sequence CTCN PAM
caccguccuggaggccggaa

SEQ ID NO: 20690 - RNA, 20 nt, Artificial Sequence
  spacer sequence CTCN PAM
aggacggugggaggccgaau

SEQ ID NO: 20691 - RNA, 20 nt, Artificial Sequence
  spacer sequence CTCN PAM
ggggggguagcacggcccgg

SEQ ID NO: 20692 - RNA, 20 nt, Artificial Sequence
  spacer sequence CTCN PAM
ccaggggcuccgggggggua

SEQ ID NO: 20693 - RNA, 20 nt, Artificial Sequence
  spacer sequence CTCN PAM
uccggcgucuggggcuccag

SEQ ID NO: 20694 - RNA, 20 nt, Artificial Sequence
  spacer sequence CTCN PAM
aggcgcccuuggcuugcaga

SEQ ID NO: 20695 - RNA, 20 nt, Artificial Sequence
  spacer sequence CTCN PAM
cugaucucugccuccaucug

SEQ ID NO: 20696 - RNA, 20 nt, Artificial Sequence
  spacer sequence CTCN PAM
gccuccaucugcucacagcc

SEQ ID NO: 20697 - RNA, 20 nt, Artificial Sequence
  spacer sequence CTCN PAM
aucugcucacagccuucucc

SEQ ID NO: 20698 - RNA, 20 nt, Artificial Sequence
  spacer sequence CTCN PAM
cagccuucuccccugugugu

SEQ ID NO: 20699 - RNA, 20 nt, Artificial Sequence
  spacer sequence CTCN PAM
ccugugugucucugucucuu

SEQ ID NO: 20700 - RNA, 20 nt, Artificial Sequence
  spacer sequence CTCN PAM
gucucuucuuguaaauucau

SEQ ID NO: 20701 - RNA, 20 nt, Artificial Sequence
  spacer sequence CTCN PAM
ucuuguaaauucauccgucg

SEQ ID NO: 20702 - RNA, 20 nt, Artificial Sequence
  spacer sequence CTCN PAM
uggccucgccuuaacugggc

SEQ ID NO: 20703 - RNA, 20 nt, Artificial Sequence
  spacer sequence CTCN PAM
ccuuaacugggccaugucug

SEQ ID NO: 20704 - RNA, 20 nt, Artificial Sequence
  spacer sequence CTCN PAM
gcagacauggcccaguuaag

SEQ ID NO: 20705 - RNA, 20 nt, Artificial Sequence
  spacer sequence CTCN PAM
cagaaagacaggcugacauc

SEQ ID NO: 20706 - RNA, 20 nt, Artificial Sequence
  spacer sequence CTCN PAM
auaacuguuugauguguguu

SEQ ID NO: 20707 - RNA, 20 nt, Artificial Sequence
  spacer sequence CTCN PAM
ggaagcggggccuagggaug

SEQ ID NO: 20708 - RNA, 20 nt, Artificial Sequence
  spacer sequence CTCN PAM
gcugccugcgugaucacggc

SEQ ID NO: 20709 - RNA, 20 nt, Artificial Sequence
  spacer sequence CTCN PAM
cugcugccugcgugaucacg

SEQ ID NO: 20710 - RNA, 20 nt, Artificial Sequence
  spacer sequence CTCN PAM
gggaagcggggagggacgag

SEQ ID NO: 20711 - RNA, 20 nt, Artificial Sequence
  spacer sequence CTCN PAM
ccgcuucccagagcugcucu

SEQ ID NO: 20712 - RNA, 20 nt, Artificial Sequence
  spacer sequence CTCN PAM
ucccuccccgcuucccagag

SEQ ID NO: 20713 - RNA, 20 nt, Artificial Sequence
  spacer sequence CTCN PAM
ccguccucgucccuccccgc

SEQ ID NO: 20714 - RNA, 20 nt, Artificial Sequence
  spacer sequence CTCN PAM
cacacggccuugcugauguc

SEQ ID NO: 20715 - RNA, 20 nt, Artificial Sequence
  spacer sequence CTCN PAM
ggcagaggccccgaggaggg

SEQ ID NO: 20716 - RNA, 20 nt, Artificial Sequence
  spacer sequence CTCN PAM
gcccgagccaggugcuacac

SEQ ID NO: 20717 - RNA, 20 nt, Artificial Sequence
  spacer sequence CTCN PAM
gggccucugcccgagccagg

SEQ ID NO: 20718 - RNA, 20 nt, Artificial Sequence
  spacer sequence CTCN PAM
ucggggccucugcccgagcc

SEQ ID NO: 20719 - RNA, 20 nt, Artificial Sequence
  spacer sequence CTCN PAM
agccccuccucggggccucu

SEQ ID NO: 20720 - RNA, 20 nt, Artificial Sequence
  spacer sequence CTCN PAM
uccagccccuccucggggcc

SEQ ID NO: 20721 - RNA, 20 nt, Artificial Sequence
  spacer sequence CTCN PAM
cccagcuccuccagccccuc

SEQ ID NO: 20722 - RNA, 20 nt, Artificial Sequence
  spacer sequence CTCN PAM
ucgcccagcuccuccagccc

SEQ ID NO: 20723 - RNA, 20 nt, Artificial Sequence
  spacer sequence CTCN PAM
ggccccgggaaugccucugg

SEQ ID NO: 20724 - RNA, 20 nt, Artificial Sequence
  spacer sequence CTCN PAM
gggggggcguguacacccgu

SEQ ID NO: 20725 - RNA, 20 nt, Artificial Sequence
  spacer sequence CTCN PAM
caggaggcacacacugcggu

SEQ ID NO: 20726 - RNA, 20 nt, Artificial Sequence
  spacer sequence CTCN PAM
ugggagcaacggguguacac

SEQ ID NO: 20727 - RNA, 20 nt, Artificial Sequence
  spacer sequence CTCN PAM
acaaaugaaugaauggaaac

SEQ ID NO: 20728 - RNA, 20 nt, Artificial Sequence
  spacer sequence CTCN PAM
gaccacaaaaugcauaaaau

SEQ ID NO: 20729 - RNA, 20 nt, Artificial Sequence
  spacer sequence CTCN PAM
guuaauacuaaaagccaccg

SEQ ID NO: 20730 - RNA, 20 nt, Artificial Sequence
  spacer sequence CTCN PAM
cuccagaacauucucauggg

SEQ ID NO: 20731 - RNA, 20 nt, Artificial Sequence
  spacer sequence CTCN PAM
agaacauucucaugggccca

SEQ ID NO: 20732 - RNA, 20 nt, Artificial Sequence
  spacer sequence CTCN PAM
ugggcccaaaaggagaccug

SEQ ID NO: 20733 - RNA, 20 nt, Artificial Sequence
  spacer sequence CTCN PAM
uuuugggcccaugagaaugu

SEQ ID NO: 20734 - RNA, 20 nt, Artificial Sequence
  spacer sequence CTCN PAM
cuccccguccccagccccug

SEQ ID NO: 20735 - RNA, 20 nt, Artificial Sequence
  spacer sequence CTCN PAM
ccguccccagccccuggcaa

SEQ ID NO: 20736 - RNA, 20 nt, Artificial Sequence
  spacer sequence CTCN PAM
uaaacaccuaaauaaugacu

SEQ ID NO: 20737 - RNA, 20 nt, Artificial Sequence
  spacer sequence CTCN PAM
cgccuguaaucccagcacuu

SEQ ID NO: 20738 - RNA, 20 nt, Artificial Sequence
  spacer sequence CTCN PAM
gaaagugcugggauuacagg

SEQ ID NO: 20739 - RNA, 20 nt, Artificial Sequence
  spacer sequence CTCN PAM
gccucugaaagugcugggau

SEQ ID NO: 20740 - RNA, 20 nt, Artificial Sequence
  spacer sequence CTCN PAM
ggugaucugcccgucucggc

SEQ ID NO: 20741 - RNA, 20 nt, Artificial Sequence
  spacer sequence CTCN PAM
ugaccucaggugaucugccc

SEQ ID NO: 20742 - RNA, 20 nt, Artificial Sequence
  spacer sequence CTCN PAM
aacuccugaccucaggugau

SEQ ID NO: 20743 - RNA, 20 nt, Artificial Sequence
  spacer sequence CTCN PAM
acuaaaaauacaaaauuagc

SEQ ID NO: 20744 - RNA, 20 nt, Artificial Sequence
  spacer sequence CTCN PAM
ggaggcugagacaggagaau

SEQ ID NO: 20745 - RNA, 20 nt, Artificial Sequence
  spacer sequence CTCN PAM
agaguagcugggauuacagg

SEQ ID NO: 20746 - RNA, 20 nt, Artificial Sequence
  spacer sequence CTCN PAM
gccuccagaguagcugggau

SEQ ID NO: 20747 - RNA, 20 nt, Artificial Sequence
  spacer sequence CTCN PAM
ugucucagccuccagaguag

SEQ ID NO: 20748 - RNA, 20 nt, Artificial Sequence
  spacer sequence CTCN PAM
uggguucaagcgauucuccu

SEQ ID NO: 20749 - RNA, 20 nt, Artificial Sequence
  spacer sequence CTCN PAM
cugcaaccgccgccuccugg

SEQ ID NO: 20750 - RNA, 20 nt, Artificial Sequence
  spacer sequence CTCN PAM
gcucacugcaaccgccgccu

SEQ ID NO: 20751 - RNA, 20 nt, Artificial Sequence
  spacer sequence CTCN PAM
agccuggacaacagagcgag

SEQ ID NO: 20752 - RNA, 20 nt, Artificial Sequence
  spacer sequence CTCN PAM
guuguccaggcuggagugca

SEQ ID NO: 20753 - RNA, 20 nt, Artificial Sequence
  spacer sequence CTCN PAM
cucuguuguccaggcuggag

SEQ ID NO: 20754 - RNA, 20 nt, Artificial Sequence
  spacer sequence CTCN PAM
gucucaaaaaaaaaaaaagu

SEQ ID NO: 20755 - RNA, 20 nt, Artificial Sequence
  spacer sequence CTCN PAM
aaaaaaaaaaaaguaccaaa

SEQ ID NO: 20756 - RNA, 20 nt, Artificial Sequence
  spacer sequence CTCN PAM
auagcuggucccuaaaggga

SEQ ID NO: 20757 - RNA, 20 nt, Artificial Sequence
  spacer sequence CTCN PAM
agacccuugguuuucauguu

SEQ ID NO: 20758 - RNA, 20 nt, Artificial Sequence
  spacer sequence CTCN PAM
cacacacacacacacacaca

SEQ ID NO: 20759 - RNA, 20 nt, Artificial Sequence
  spacer sequence CTCN PAM
cacacacacacacacacaca

SEQ ID NO: 20760 - RNA, 20 nt, Artificial Sequence
  spacer sequence CTCN PAM
cucacacacacacacacaca

SEQ ID NO: 20761 - RNA, 20 nt, Artificial Sequence
  spacer sequence CTCN PAM
cucucacacacacacacaca

SEQ ID NO: 20762 - RNA, 20 nt, Artificial Sequence
  spacer sequence CTCN PAM
aucucucucucacacacaca

SEQ ID NO: 20763 - RNA, 20 nt, Artificial Sequence
  spacer sequence CTCN PAM
cucugucacccgggcuccag

SEQ ID NO: 20764 - RNA, 20 nt, Artificial Sequence
  spacer sequence CTCN PAM
gucacccgggcuccagugca

SEQ ID NO: 20765 - RNA, 20 nt, Artificial Sequence
  spacer sequence CTCN PAM
agugcaguugugugaucuug

SEQ ID NO: 20766 - RNA, 20 nt, Artificial Sequence
  spacer sequence CTCN PAM
uccucccggguucaagagac

SEQ ID NO: 20767 - RNA, 20 nt, Artificial Sequence
  spacer sequence CTCN PAM
ucccggguucaagagacucg

SEQ ID NO: 20768 - RNA, 20 nt, Artificial Sequence
  spacer sequence CTCN PAM
cggguucaagagacucgugc

SEQ ID NO: 20769 - RNA, 20 nt, Artificial Sequence
  spacer sequence CTCN PAM
ugaacccgggaggaggaggu

SEQ ID NO: 20770 - RNA, 20 nt, Artificial Sequence
  spacer sequence CTCN PAM
ugccucagccucccgaguag

SEQ ID NO: 20771 - RNA, 20 nt, Artificial Sequence
  spacer sequence CTCN PAM
gccucccgaguagcugggau

SEQ ID NO: 20772 - RNA, 20 nt, Artificial Sequence
  spacer sequence CTCN PAM
cgaguagcugggauuacagg

SEQ ID NO: 20773 - RNA, 20 nt, Artificial Sequence
  spacer sequence CTCN PAM
ggaggcugaggcacgagucu

SEQ ID NO: 20774 - RNA, 20 nt, Artificial Sequence
  spacer sequence CTCN PAM
acuaaaaauacaaaaauuag

SEQ ID NO: 20775 - RNA, 20 nt, Artificial Sequence
  spacer sequence CTCN PAM
ugaccucuugauccgcccgc

SEQ ID NO: 20776 - RNA, 20 nt, Artificial Sequence
  spacer sequence CTCN PAM
ugauccgcccgccucggccu

SEQ ID NO: 20777 - RNA, 20 nt, Artificial Sequence
  spacer sequence CTCN PAM
gccucccaaagugcugggau

SEQ ID NO: 20778 - RNA, 20 nt, Artificial Sequence
  spacer sequence CTCN PAM
caaagugcugggauuacagg

SEQ ID NO: 20779 - RNA, 20 nt, Artificial Sequence
  spacer sequence CTCN PAM
cgccuguaaucccagcacuu

SEQ ID NO: 20780 - RNA, 20 nt, Artificial Sequence
  spacer sequence CTCN PAM
gacccuugaccucuugaucc

SEQ ID NO: 20781 - RNA, 20 nt, Artificial Sequence
  spacer sequence CTCN PAM
ugauccgcccaccuuggcca

SEQ ID NO: 20782 - RNA, 20 nt, Artificial Sequence
  spacer sequence CTCN PAM
cagcacuuuuggguggccaa

SEQ ID NO: 20783 - RNA, 20 nt, Artificial Sequence
  spacer sequence CTCN PAM
cgccuguacucccagcacuu

SEQ ID NO: 20784 - RNA, 20 nt, Artificial Sequence
  spacer sequence CTCN PAM
aacccccgaccucuugaucc

SEQ ID NO: 20785 - RNA, 20 nt, Artificial Sequence
  spacer sequence CTCN PAM
ugauccgcccaccucggcca

SEQ ID NO: 20786 - RNA, 20 nt, Artificial Sequence
  spacer sequence CTCN PAM
gccacccaaaagugcuggga

SEQ ID NO: 20787 - RNA, 20 nt, Artificial Sequence
  spacer sequence CTCN PAM
cgccuguaaucccagcacuu

SEQ ID NO: 20788 - RNA, 20 nt, Artificial Sequence
  spacer sequence CTCN PAM
cgccucucccuucccggcug

SEQ ID NO: 20789 - RNA, 20 nt, Artificial Sequence
  spacer sequence CTCN PAM
cccuucccggcugccuaaug

SEQ ID NO: 20790 - RNA, 20 nt, Artificial Sequence
  spacer sequence CTCN PAM
cuucccggcugccuaaugga

SEQ ID NO: 20791 - RNA, 20 nt, Artificial Sequence
  spacer sequence CTCN PAM
caccucccucccacaccacc

SEQ ID NO: 20792 - RNA, 20 nt, Artificial Sequence
  spacer sequence CTCN PAM
cucccacaccaccagccagg

SEQ ID NO: 20793 - RNA, 20 nt, Artificial Sequence
  spacer sequence CTCN PAM
cacaccaccagccaggccag

SEQ ID NO: 20794 - RNA, 20 nt, Artificial Sequence
  spacer sequence CTCN PAM
uccuggccuggcugguggug

SEQ ID NO: 20795 - RNA, 20 nt, Artificial Sequence
  spacer sequence CTCN PAM
agcgguggcaggcccucguc

SEQ ID NO: 20796 - RNA, 20 nt, Artificial Sequence
  spacer sequence CTCN PAM
caaguuucgcagucauccag

SEQ ID NO: 20797 - RNA, 20 nt, Artificial Sequence
  spacer sequence CTCN PAM
auuaggcgccuaccccccag

SEQ ID NO: 20798 - RNA, 20 nt, Artificial Sequence
  spacer sequence CTCN PAM
gggggguaggcgccuaaugg

SEQ ID NO: 20799 - RNA, 20 nt, Artificial Sequence
  spacer sequence CTCN PAM
gcuguccuggcuuggcucug

SEQ ID NO: 20800 - RNA, 20 nt, Artificial Sequence
  spacer sequence CTCN PAM
gcacauguggccuuggcggc

SEQ ID NO: 20801 - RNA, 20 nt, Artificial Sequence
  spacer sequence CTCN PAM
ccagacauaaucuugggccu

SEQ ID NO: 20802 - RNA, 20 nt, Artificial Sequence
  spacer sequence CTCN PAM
agacauaaucuugggccuca

SEQ ID NO: 20803 - RNA, 20 nt, Artificial Sequence
  spacer sequence CTCN PAM
ccuaugucccuggaaagugg

SEQ ID NO: 20804 - RNA, 20 nt, Artificial Sequence
  spacer sequence CTCN PAM
cacuuuccagggacauaggu

SEQ ID NO: 20805 - RNA, 20 nt, Artificial Sequence
  spacer sequence CTCN PAM
ccagaaccccaccaggugcu

SEQ ID NO: 20806 - RNA, 20 nt, Artificial Sequence
  spacer sequence CTCN PAM
uaauucccccuccccagaac

SEQ ID NO: 20807 - RNA, 20 nt, Artificial Sequence
  spacer sequence CTCN PAM
cguaauucccccuccccaga

SEQ ID NO: 20808 - RNA, 20 nt, Artificial Sequence
  spacer sequence CTCN PAM
aggaaggagccugcucagca

SEQ ID NO: 20809 - RNA, 20 nt, Artificial Sequence
  spacer sequence CTCN PAM
uuccuggagcucucguaauu

SEQ ID NO: 20810 - RNA, 20 nt, Artificial Sequence
  spacer sequence CTCN PAM
gcaaggacagggcccaugag

SEQ ID NO: 20811 - RNA, 20 nt, Artificial Sequence
  spacer sequence CTCN PAM
ugggcccuguccuugcugag

SEQ ID NO: 20812 - RNA, 20 nt, Artificial Sequence
  spacer sequence CTCN PAM
ugcaccgcucaugggcccug

SEQ ID NO: 20813 - RNA, 20 nt, Artificial Sequence
  spacer sequence CTCN PAM
ggucccaggacacgcccaga

SEQ ID NO: 20814 - RNA, 20 nt, Artificial Sequence
  spacer sequence CTCN PAM
cgggucccaggacacgccca

SEQ ID NO: 20815 - RNA, 20 nt, Artificial Sequence
  spacer sequence CTCN PAM
accucucgggucccaggaca

SEQ ID NO: 20816 - RNA, 20 nt, Artificial Sequence
  spacer sequence CTCN PAM
gccugucucagaaucugagc

SEQ ID NO: 20817 - RNA, 20 nt, Artificial Sequence
  spacer sequence CTCN PAM
gaaucugagccuuugccuuu

SEQ ID NO: 20818 - RNA, 20 nt, Artificial Sequence
  spacer sequence CTCN PAM
gauucugagacaggcugagg

SEQ ID NO: 20819 - RNA, 20 nt, Artificial Sequence
  spacer sequence CTCN PAM
cggcagcagggagcggacuc

SEQ ID NO: 20820 - RNA, 20 nt, Artificial Sequence
  spacer sequence CTCN PAM
cugcugccgggagaaaaggc

SEQ ID NO: 20821 - RNA, 20 nt, Artificial Sequence
  spacer sequence CTCN PAM
ccucucccgggccgccgugg

SEQ ID NO: 20822 - RNA, 20 nt, Artificial Sequence
  spacer sequence CTCN PAM
ucucccgggccgccgugggg

SEQ ID NO: 20823 - RNA, 20 nt, Artificial Sequence
  spacer sequence CTCN PAM
cccgggccgccguggggguc

SEQ ID NO: 20824 - RNA, 20 nt, Artificial Sequence
  spacer sequence CTCN PAM
cgggccgccgugggggucgc

SEQ ID NO: 20825 - RNA, 20 nt, Artificial Sequence
  spacer sequence CTCN PAM
cccuccagcagcuccacgug

SEQ ID NO: 20826 - RNA, 20 nt, Artificial Sequence
  spacer sequence CTCN PAM
agcagcuccacguggcccca

SEQ ID NO: 20827 - RNA, 20 nt, Artificial Sequence
  spacer sequence CTCN PAM
acguggccccaguccuuccu

SEQ ID NO: 20828 - RNA, 20 nt, Artificial Sequence
  spacer sequence CTCN PAM
ugggggcuggcggacgagcu

SEQ ID NO: 20829 - RNA, 20 nt, Artificial Sequence
  spacer sequence CTCN PAM
uccgccagcccccaggagca

SEQ ID NO: 20830 - RNA, 20 nt, Artificial Sequence
  spacer sequence CTCN PAM
uccuggggccgcagacgcca

SEQ ID NO: 20831 - RNA, 20 nt, Artificial Sequence
  spacer sequence CTCN PAM
uggggccgcagacgccaccg

SEQ ID NO: 20832 - RNA, 20 nt, Artificial Sequence
  spacer sequence CTCN PAM
ucuuucccgcagggaccgcc

SEQ ID NO: 20833 - RNA, 20 nt, Artificial Sequence
  spacer sequence CTCN PAM
cgucuuucccgcagggaccg

SEQ ID NO: 20834 - RNA, 20 nt, Artificial Sequence
  spacer sequence CTCN PAM
gccgcucucgucuuucccgc

SEQ ID NO: 20835 - RNA, 20 nt, Artificial Sequence
  spacer sequence CTCN PAM
auaaaggcagaagccgaagg

SEQ ID NO: 20836 - RNA, 20 nt, Artificial Sequence
  spacer sequence CTCN PAM
uuugcccuucgacccuucgg

SEQ ID NO: 20837 - RNA, 20 nt, Artificial Sequence
  spacer sequence CTCN PAM
cggagcacgggcuuaaguug

SEQ ID NO: 20838 - RNA, 20 nt, Artificial Sequence
  spacer sequence CTCN PAM
gagcacgggcuuaaguugga

SEQ ID NO: 20839 - RNA, 20 nt, Artificial Sequence
  spacer sequence CTCN PAM
gagaguuuccgcugcguuua

SEQ ID NO: 20840 - RNA, 20 nt, Artificial Sequence
  spacer sequence CTCN PAM
gcgguuccgcgcccguguuc

SEQ ID NO: 20841 - RNA, 20 nt, Artificial Sequence
  spacer sequence CTCN PAM
cggcgguuccgcgcccgugu

SEQ ID NO: 20842 - RNA, 20 nt, Artificial Sequence
  spacer sequence CTCN PAM
cucggcgguuccgcgcccgu

SEQ ID NO: 20843 - RNA, 20 nt, Artificial Sequence
  spacer sequence CTCN PAM
cacucgaggugcagcagguc

SEQ ID NO: 20844 - RNA, 20 nt, Artificial Sequence
  spacer sequence CTCN PAM
aggugcagcaggucaaaggu

SEQ ID NO: 20845 - RNA, 20 nt, Artificial Sequence
  spacer sequence CTCN PAM
agugcgaggaacccucucuc

SEQ ID NO: 20846 - RNA, 20 nt, Artificial Sequence
  spacer sequence CTCN PAM
uaaccuuugaccugcugcac

SEQ ID NO: 20847 - RNA, 20 nt, Artificial Sequence
  spacer sequence CTCN PAM
ugaccccaggugugguguuu

SEQ ID NO: 20848 - RNA, 20 nt, Artificial Sequence
  spacer sequence CTCN PAM
ugguuucuuaugcagccucc

SEQ ID NO: 20849 - RNA, 20 nt, Artificial Sequence
  spacer sequence CTCN PAM
gugcagucugaccuuugacu

SEQ ID NO: 20850 - RNA, 20 nt, Artificial Sequence
  spacer sequence CTCN PAM
uccgugcagucugaccuuug

SEQ ID NO: 20851 - RNA, 20 nt, Artificial Sequence
  spacer sequence CTCN PAM
gucgaaaagcgggcaagggc

SEQ ID NO: 20852 - RNA, 20 nt, Artificial Sequence
  spacer sequence CTCN PAM
cccuugcccgcuuuucgacu

SEQ ID NO: 20853 - RNA, 20 nt, Artificial Sequence
  spacer sequence CTCN PAM
uugcaccugggcgugcgcag

SEQ ID NO: 20854 - RNA, 20 nt, Artificial Sequence
  spacer sequence CTCN PAM
ccgcgcggccggggccuuug

SEQ ID NO: 20855 - RNA, 20 nt, Artificial Sequence
  spacer sequence CTCN PAM
uccccgcgcggccggggccu

SEQ ID NO: 20856 - RNA, 20 nt, Artificial Sequence
  spacer sequence CTCN PAM
cuuuguguuaccuucuuugc

SEQ ID NO: 20857 - RNA, 20 nt, Artificial Sequence
  spacer sequence CTCN PAM
ccggcaaagaagguaacaca

SEQ ID NO: 20858 - RNA, 20 nt, Artificial Sequence
  spacer sequence CTCN PAM
uuugagccccgccgcuccgc

SEQ ID NO: 20859 - RNA, 20 nt, Artificial Sequence
  spacer sequence CTCN PAM
aacgagcccuacggccuugc

SEQ ID NO: 20860 - RNA, 20 nt, Artificial Sequence
  spacer sequence CTCN PAM
gcggccccagcaaagugccg

SEQ ID NO: 20861 - RNA, 20 nt, Artificial Sequence
  spacer sequence CTCN PAM
aggccaccccaccggcccgc

SEQ ID NO: 20862 - RNA, 20 nt, Artificial Sequence
  spacer sequence CTCN PAM
cggcaggcggcgcgggcgca

SEQ ID NO: 20863 - RNA, 20 nt, Artificial Sequence
  spacer sequence CTCN PAM
gucgaccaugaaaccacaac

SEQ ID NO: 20864 - RNA, 20 nt, Artificial Sequence
  spacer sequence CTCN PAM
caggaugcagcggaggcgcg

SEQ ID NO: 20865 - RNA, 20 nt, Artificial Sequence
  spacer sequence CTCN PAM
gcugcauccugggagucuac

SEQ ID NO: 20866 - RNA, 20 nt, Artificial Sequence
  spacer sequence CTCN PAM
gauugguuccuccugcuguu

SEQ ID NO: 20867 - RNA, 20 nt, Artificial Sequence
  spacer sequence CTCN PAM
ugcuguuuuuaaagggaggg

SEQ ID NO: 20868 - RNA, 20 nt, Artificial Sequence
  spacer sequence CTCN PAM
cuuuaaaaacagcaggagga

SEQ ID NO: 20869 - RNA, 20 nt, Artificial Sequence
  spacer sequence CTCN PAM
gucccgcccccucccuuuaa

SEQ ID NO: 20870 - RNA, 20 nt, Artificial Sequence
  spacer sequence CTCN PAM
caguugccacggcaacagcu

SEQ ID NO: 20871 - RNA, 20 nt, Artificial Sequence
  spacer sequence CTCN PAM
caggcuguuuucccgaggac

SEQ ID NO: 20872 - RNA, 20 nt, Artificial Sequence
  spacer sequence CTCN PAM
ggcuguuuucccgaggaccu

SEQ ID NO: 20873 - RNA, 20 nt, Artificial Sequence
  spacer sequence CTCN PAM
ggaaaacagccugagagugc

SEQ ID NO: 20874 - RNA, 20 nt, Artificial Sequence
  spacer sequence CTCN PAM
aauccggacuuuuuuucugu

SEQ ID NO: 20875 - RNA, 20 nt, Artificial Sequence
  spacer sequence CTCN PAM
agccugggccacaacgcguc

SEQ ID NO: 20876 - RNA, 20 nt, Artificial Sequence
  spacer sequence CTCN PAM
gugcagcuucgaacugcugg

SEQ ID NO: 20877 - RNA, 20 nt, Artificial Sequence
  spacer sequence CTCN PAM
uuaccccagcaguucgaagc

SEQ ID NO: 20878 - RNA, 20 nt, Artificial Sequence
  spacer sequence CTCN PAM
ccccucggcuucccaaagcg

SEQ ID NO: 20879 - RNA, 20 nt, Artificial Sequence
  spacer sequence CTCN PAM
gcuucccaaagcgcugggau

SEQ ID NO: 20880 - RNA, 20 nt, Artificial Sequence
  spacer sequence CTCN PAM
ucuaauaacgaggacagcau

SEQ ID NO: 20881 - RNA, 20 nt, Artificial Sequence
  spacer sequence CTCN PAM
uuauuagaugaguaugccuu

SEQ ID NO: 20882 - RNA, 20 nt, Artificial Sequence
  spacer sequence CTCN PAM
aaauugcagaugcuguccuc

SEQ ID NO: 20883 - RNA, 20 nt, Artificial Sequence
  spacer sequence CTCN PAM
aacgacaacuuuuggguaag

SEQ ID NO: 20884 - RNA, 20 nt, Artificial Sequence
  spacer sequence CTCN PAM
uacccaaaaguugucguugg

SEQ ID NO: 20885 - RNA, 20 nt, Artificial Sequence
  spacer sequence CTCN PAM
augauagacggcauccuaau

SEQ ID NO: 20886 - RNA, 20 nt, Artificial Sequence
  spacer sequence CTCN PAM
gcuuccuccaugauagacgg

SEQ ID NO: 20887 - RNA, 20 nt, Artificial Sequence
  spacer sequence CTCN PAM
gagagggccaccaaguugcu

SEQ ID NO: 20888 - RNA, 20 nt, Artificial Sequence
  spacer sequence CTCN PAM
gagccucagcuuccuccaug

SEQ ID NO: 20889 - RNA, 20 nt, Artificial Sequence
  spacer sequence CTCN PAM
cugagccucagcuuccucca

SEQ ID NO: 20890 - RNA, 20 nt, Artificial Sequence
  spacer sequence CTCN PAM
gggaggcugcaaggagagaa

SEQ ID NO: 20891 - RNA, 20 nt, Artificial Sequence
  spacer sequence CTCN PAM
cugaggucgcacgugcugug

SEQ ID NO: 20892 - RNA, 20 nt, Artificial Sequence
  spacer sequence CTCN PAM
uugcagccucccugaggucg

SEQ ID NO: 20893 - RNA, 20 nt, Artificial Sequence
  spacer sequence CTCN PAM
ccuugcagccucccugaggu

SEQ ID NO: 20894 - RNA, 20 nt, Artificial Sequence
  spacer sequence CTCN PAM
cggacuggggcuuucucucc

SEQ ID NO: 20895 - RNA, 20 nt, Artificial Sequence
  spacer sequence CTCN PAM
cagccuccagcuucaguuua

SEQ ID NO: 20896 - RNA, 20 nt, Artificial Sequence
  spacer sequence CTCN PAM
agcuucaguuuacccuccaa

SEQ ID NO: 20897 - RNA, 20 nt, Artificial Sequence
  spacer sequence CTCN PAM
aauccccaagcccucagggg

SEQ ID NO: 20898 - RNA, 20 nt, Artificial Sequence
  spacer sequence CTCN PAM
ggggcaggagccgaauggag

SEQ ID NO: 20899 - RNA, 20 nt, Artificial Sequence
  spacer sequence CTCN PAM
ugccccugagggcuugggga

SEQ ID NO: 20900 - RNA, 20 nt, Artificial Sequence
  spacer sequence CTCN PAM
auucggcuccugccccugag

SEQ ID NO: 20901 - RNA, 20 nt, Artificial Sequence
  spacer sequence CTCN PAM
ccccacuuagcaggugaauc

SEQ ID NO: 20902 - RNA, 20 nt, Artificial Sequence
  spacer sequence CTCN PAM
gagccuagagccugcccugg

SEQ ID NO: 20903 - RNA, 20 nt, Artificial Sequence
  spacer sequence CTCN PAM
gagguuuauuucauucccuu

SEQ ID NO: 20904 - RNA, 20 nt, Artificial Sequence
  spacer sequence CTCN PAM
aggcuccgagguuuauuuca

SEQ ID NO: 20905 - RNA, 20 nt, Artificial Sequence
  spacer sequence CTCN PAM
gcgugauccugccuaggagg

SEQ ID NO: 20906 - RNA, 20 nt, Artificial Sequence
  spacer sequence CTCN PAM
uaggcaggaucacgcggaga

SEQ ID NO: 20907 - RNA, 20 nt, Artificial Sequence
  spacer sequence CTCN PAM
uccuaggcaggaucacgcgg

SEQ ID NO: 20908 - RNA, 20 nt, Artificial Sequence
  spacer sequence CTCN PAM
cgcccugcuccuccuaggca

SEQ ID NO: 20909 - RNA, 20 nt, Artificial Sequence
  spacer sequence CTCN PAM
ggccugcugccccggcugaa

SEQ ID NO: 20910 - RNA, 20 nt, Artificial Sequence
  spacer sequence CTCN PAM
cgccucuggccugcugcccc

SEQ ID NO: 20911 - RNA, 20 nt, Artificial Sequence
  spacer sequence CTCN PAM
cccuucccaagccuacugcc

SEQ ID NO: 20912 - RNA, 20 nt, Artificial Sequence
  spacer sequence CTCN PAM
ccuuugcaacugggauauua

SEQ ID NO: 20913 - RNA, 20 nt, Artificial Sequence
  spacer sequence CTCN PAM
ggccugucaucccagcacuu

SEQ ID NO: 20914 - RNA, 20 nt, Artificial Sequence
  spacer sequence CTCN PAM
caaagugcugggaugacagg

SEQ ID NO: 20915 - RNA, 20 nt, Artificial Sequence
  spacer sequence CTCN PAM
gccucccaaagugcugggau

SEQ ID NO: 20916 - RNA, 20 nt, Artificial Sequence
  spacer sequence CTCN PAM
gaccuuaggugauccgcccg

SEQ ID NO: 20917 - RNA, 20 nt, Artificial Sequence
  spacer sequence CTCN PAM
aacucugaccuuaggugauc

SEQ ID NO: 20918 - RNA, 20 nt, Artificial Sequence
  spacer sequence CTCN PAM
aguaaaaauacaaaaauuau

SEQ ID NO: 20919 - RNA, 20 nt, Artificial Sequence
  spacer sequence CTCN PAM
ggaggcugaggcaggagaau

SEQ ID NO: 20920 - RNA, 20 nt, Artificial Sequence
  spacer sequence CTCN PAM
cgaguagcugggauuacagg

SEQ ID NO: 20921 - RNA, 20 nt, Artificial Sequence
  spacer sequence CTCN PAM
gccucccgaguagcugggau

SEQ ID NO: 20922 - RNA, 20 nt, Artificial Sequence
  spacer sequence CTCN PAM
ugccucagccucccgaguag

SEQ ID NO: 20923 - RNA, 20 nt, Artificial Sequence
  spacer sequence CTCN PAM
cggguucaagcgauucuccu

SEQ ID NO: 20924 - RNA, 20 nt, Artificial Sequence
  spacer sequence CTCN PAM
gccucccggguucaagcgau

SEQ ID NO: 20925 - RNA, 20 nt, Artificial Sequence
  spacer sequence CTCN PAM
cugcaaccuccgccucccgg

SEQ ID NO: 20926 - RNA, 20 nt, Artificial Sequence
  spacer sequence CTCN PAM
ccacugcacuccagccuggg

SEQ ID NO: 20927 - RNA, 20 nt, Artificial Sequence
  spacer sequence CTCN PAM
agccugggugacagagcgag

SEQ ID NO: 20928 - RNA, 20 nt, Artificial Sequence
  spacer sequence CTCN PAM
gucacccaggcuggagugca

SEQ ID NO: 20929 - RNA, 20 nt, Artificial Sequence
  spacer sequence CTCN PAM
cucugucacccaggcuggag

SEQ ID NO: 20930 - RNA, 20 nt, Artificial Sequence
  spacer sequence CTCN PAM
aaaaaaaaaaagugcaaagg

SEQ ID NO: 20931 - RNA, 20 nt, Artificial Sequence
  spacer sequence CTCN PAM
cuuugcacuuuuuuuuuuuu

SEQ ID NO: 20932 - RNA, 20 nt, Artificial Sequence
  spacer sequence CTCN PAM
ggccuguaaucccagcacuu

SEQ ID NO: 20933 - RNA, 20 nt, Artificial Sequence
  spacer sequence CTCN PAM
caaagugcugggauuacagg

SEQ ID NO: 20934 - RNA, 20 nt, Artificial Sequence
  spacer sequence CTCN PAM
cgccgcagccucccaaagug

SEQ ID NO: 20935 - RNA, 20 nt, Artificial Sequence
  spacer sequence CTCN PAM
agcgauccucccgccgcagc

SEQ ID NO: 20936 - RNA, 20 nt, Artificial Sequence
  spacer sequence CTCN PAM
ugggcucaagcgauccuccc

SEQ ID NO: 20937 - RNA, 20 nt, Artificial Sequence
  spacer sequence CTCN PAM
guugcccaaggcuugucugg

SEQ ID NO: 20938 - RNA, 20 nt, Artificial Sequence
  spacer sequence CTCN PAM
guaucucgguugcccaaggc

SEQ ID NO: 20939 - RNA, 20 nt, Artificial Sequence
  spacer sequence CTCN PAM
accaaaggaaaaaaagaaau

SEQ ID NO: 20940 - RNA, 20 nt, Artificial Sequence
  spacer sequence CTCN PAM
ggguccguguacuuggggac

SEQ ID NO: 20941 - RNA, 20 nt, Artificial Sequence
  spacer sequence CTCN PAM
gcuguggucuacuggaccgu

SEQ ID NO: 20942 - RNA, 20 nt, Artificial Sequence
  spacer sequence CTCN PAM
cgggaccgauucuauccaga

SEQ ID NO: 20943 - RNA, 20 nt, Artificial Sequence
  spacer sequence CTCN PAM
ggaccgauucuauccagagc

SEQ ID NO: 20944 - RNA, 20 nt, Artificial Sequence
  spacer sequence CTCN PAM
ggauagaaucggucccgaga

SEQ ID NO: 20945 - RNA, 20 nt, Artificial Sequence
  spacer sequence CTCN PAM
agcgucucagaaaaccgagc

SEQ ID NO: 20946 - RNA, 20 nt, Artificial Sequence
  spacer sequence CTCN PAM
gaaaaccgagcuccuggcag

SEQ ID NO: 20947 - RNA, 20 nt, Artificial Sequence
  spacer sequence CTCN PAM
guuuucugagacgcuggagg

SEQ ID NO: 20948 - RNA, 20 nt, Artificial Sequence
  spacer sequence CTCN PAM
ggaggcuaagguggaaggau

SEQ ID NO: 20949 - RNA, 20 nt, Artificial Sequence
  spacer sequence CTCN PAM
ugaguagcugggauuacagg

SEQ ID NO: 20950 - RNA, 20 nt, Artificial Sequence
  spacer sequence CTCN PAM
uggguucaagccauccuucc

SEQ ID NO: 20951 - RNA, 20 nt, Artificial Sequence
  spacer sequence CTCN PAM
accuccuggguucaagccau

SEQ ID NO: 20952 - RNA, 20 nt, Artificial Sequence
  spacer sequence CTCN PAM
cugcaaccuccaccuccugg

SEQ ID NO: 20953 - RNA, 20 nt, Artificial Sequence
  spacer sequence CTCN PAM
gcucacugcaaccuccaccu

SEQ ID NO: 20954 - RNA, 20 nt, Artificial Sequence
  spacer sequence CTCN PAM
ggaggcugaggugggaggau

SEQ ID NO: 20955 - RNA, 20 nt, Artificial Sequence
  spacer sequence CTCN PAM
ugaguaucugggacuacagg

SEQ ID NO: 20956 - RNA, 20 nt, Artificial Sequence
  spacer sequence CTCN PAM
gccuccugaguaucugggac

SEQ ID NO: 20957 - RNA, 20 nt, Artificial Sequence
  spacer sequence CTCN PAM
caccucagccuccugaguau

SEQ ID NO: 20958 - RNA, 20 nt, Artificial Sequence
  spacer sequence CTCN PAM
cccaucagguaauccuccca

SEQ ID NO: 20959 - RNA, 20 nt, Artificial Sequence
  spacer sequence CTCN PAM
accucccccaucagguaauc

SEQ ID NO: 20960 - RNA, 20 nt, Artificial Sequence
  spacer sequence CTCN PAM
cugcagccucgaccuccccc

SEQ ID NO: 20961 - RNA, 20 nt, Artificial Sequence
  spacer sequence CTCN PAM
cagaggaacacacaaggcgu

SEQ ID NO: 20962 - RNA, 20 nt, Artificial Sequence
  spacer sequence CTCN PAM
gggagaacuuccccagcuuc

SEQ ID NO: 20963 - RNA, 20 nt, Artificial Sequence
  spacer sequence CTCN PAM
gccucccaaagugcugggau

SEQ ID NO: 20964 - RNA, 20 nt, Artificial Sequence
  spacer sequence CTCN PAM
ugauccgccugccucggccu

SEQ ID NO: 20965 - RNA, 20 nt, Artificial Sequence
  spacer sequence CTCN PAM
ugaccucuugauccgccugc

SEQ ID NO: 20966 - RNA, 20 nt, Artificial Sequence
  spacer sequence CTCN PAM
aucuccugaccucuugaucc

SEQ ID NO: 20967 - RNA, 20 nt, Artificial Sequence
  spacer sequence CTCN PAM
acuaaaaauacaaaaaauaa

SEQ ID NO: 20968 - RNA, 20 nt, Artificial Sequence
  spacer sequence CTCN PAM
ugucucagccucccgaguag

SEQ ID NO: 20969 - RNA, 20 nt, Artificial Sequence
  spacer sequence CTCN PAM
cagguucacgccauucuccu

SEQ ID NO: 20970 - RNA, 20 nt, Artificial Sequence
  spacer sequence CTCN PAM
cugcaauuuccaccucccag

SEQ ID NO: 20971 - RNA, 20 nt, Artificial Sequence
  spacer sequence CTCN PAM
gcucacugcaauuuccaccu

SEQ ID NO: 20972 - RNA, 20 nt, Artificial Sequence
  spacer sequence CTCN PAM
agccugggcgacagagugag

SEQ ID NO: 20973 - RNA, 20 nt, Artificial Sequence
  spacer sequence CTCN PAM
gucgcccaggcuggagugca

SEQ ID NO: 20974 - RNA, 20 nt, Artificial Sequence
  spacer sequence CTCN PAM
uggauucaagugauccuccu

SEQ ID NO: 20975 - RNA, 20 nt, Artificial Sequence
  spacer sequence CTCN PAM
ugcuucagucuccugaagug

SEQ ID NO: 20976 - RNA, 20 nt, Artificial Sequence
  spacer sequence CTCN PAM
ugaaguguugggauuacaug

SEQ ID NO: 20977 - RNA, 20 nt, Artificial Sequence
  spacer sequence CTCN PAM
ggcccacugccuguuuuugu

SEQ ID NO: 20978 - RNA, 20 nt, Artificial Sequence
  spacer sequence CTCN PAM
gugcccauaaaacuuuauuu

SEQ ID NO: 20979 - RNA, 20 nt, Artificial Sequence
  spacer sequence CTCN PAM
acagcucauccggggcuacu

SEQ ID NO: 20980 - RNA, 20 nt, Artificial Sequence
  spacer sequence CTCN PAM
uccggggcuacuuuccuuua

SEQ ID NO: 20981 - RNA, 20 nt, Artificial Sequence
  spacer sequence CTCN PAM
ggcaucgccccgcgcaaagc

SEQ ID NO: 20982 - RNA, 20 nt, Artificial Sequence
  spacer sequence CTCN PAM
ccuccccucccccgcgcgcc

SEQ ID NO: 20983 - RNA, 20 nt, Artificial Sequence
  spacer sequence CTCN PAM
ccucccccgcgcgccacccg

SEQ ID NO: 20984 - RNA, 20 nt, Artificial Sequence
  spacer sequence CTCN PAM
cccgcgcgccacccgcgccc

SEQ ID NO: 20985 - RNA, 20 nt, Artificial Sequence
  spacer sequence CTCN PAM
gcggggagauggagugagua

SEQ ID NO: 20986 - RNA, 20 nt, Artificial Sequence
  spacer sequence CTCN PAM
ccgccgagguccgggugggu

SEQ ID NO: 20987 - RNA, 20 nt, Artificial Sequence
  spacer sequence CTCN PAM
aucuccccgccgagguccgg

SEQ ID NO: 20988 - RNA, 20 nt, Artificial Sequence
  spacer sequence CTCN PAM
cuccaucuccccgccgaggu

SEQ ID NO: 20989 - RNA, 20 nt, Artificial Sequence
  spacer sequence CTCN PAM
ggccgcggggcugggggccc

SEQ ID NO: 20990 - RNA, 20 nt, Artificial Sequence
  spacer sequence CTCN PAM
gggcccccagccccgcggcc

SEQ ID NO: 20991 - RNA, 20 nt, Artificial Sequence
  spacer sequence CTCN PAM
gggagccggggaggggggag

SEQ ID NO: 20992 - RNA, 20 nt, Artificial Sequence
  spacer sequence CTCN PAM
agggcgagccucggcucucg

SEQ ID NO: 20993 - RNA, 20 nt, Artificial Sequence
  spacer sequence CTCN PAM
cccuggagacgcgggcgggg

SEQ ID NO: 20994 - RNA, 20 nt, Artificial Sequence
  spacer sequence CTCN PAM
gcucucggccaccugugggu

SEQ ID NO: 20995 - RNA, 20 nt, Artificial Sequence
  spacer sequence CTCN PAM
cggccaccuguggguggccc

SEQ ID NO: 20996 - RNA, 20 nt, Artificial Sequence
  spacer sequence CTCN PAM
gccaccuguggguggccccg

SEQ ID NO: 20997 - RNA, 20 nt, Artificial Sequence
  spacer sequence CTCN PAM
ccggggccacccacaggugg

SEQ ID NO: 20998 - RNA, 20 nt, Artificial Sequence
  spacer sequence CTCN PAM
aucuccccggggccacccac

SEQ ID NO: 20999 - RNA, 20 nt, Artificial Sequence
  spacer sequence CTCN PAM
ccagauugcaccgguccggc

SEQ ID NO: 21000 - RNA, 20 nt, Artificial Sequence
  spacer sequence CTCN PAM
ggugccccucugccccucac

SEQ ID NO: 21001 - RNA, 20 nt, Artificial Sequence
  spacer sequence CTCN PAM
gccccucacucccacaggug

SEQ ID NO: 21002 - RNA, 20 nt, Artificial Sequence
  spacer sequence CTCN PAM
cucccacaggugggcacugc

SEQ ID NO: 21003 - RNA, 20 nt, Artificial Sequence
  spacer sequence CTCN PAM
cacaggugggcacugcacgg

SEQ ID NO: 21004 - RNA, 20 nt, Artificial Sequence
  spacer sequence CTCN PAM
ugaccccugcccgugcagug

SEQ ID NO: 21005 - RNA, 20 nt, Artificial Sequence
  spacer sequence CTCN PAM
uccuggggucacccaccugc

SEQ ID NO: 21006 - RNA, 20 nt, Artificial Sequence
  spacer sequence CTCN PAM
uggggucacccaccugccca

SEQ ID NO: 21007 - RNA, 20 nt, Artificial Sequence
  spacer sequence CTCN PAM
cucccucccugggaaagcga

SEQ ID NO: 21008 - RNA, 20 nt, Artificial Sequence
  spacer sequence CTCN PAM
cucccugggaaagcgagaca

SEQ ID NO: 21009 - RNA, 20 nt, Artificial Sequence
  spacer sequence CTCN PAM
cugggaaagcgagacaccca

SEQ ID NO: 21010 - RNA, 20 nt, Artificial Sequence
  spacer sequence CTCN PAM
cuuucccagggagggaggga

SEQ ID NO: 21011 - RNA, 20 nt, Artificial Sequence
  spacer sequence CTCN PAM
gcuuuugaaaacccagacaa

SEQ ID NO: 21012 - RNA, 20 nt, Artificial Sequence
  spacer sequence CTCN PAM
ccccgucaccccgccccggg

SEQ ID NO: 21013 - RNA, 20 nt, Artificial Sequence
  spacer sequence CTCN PAM
ccgucaccccgccccgggag

SEQ ID NO: 21014 - RNA, 20 nt, Artificial Sequence
  spacer sequence CTCN PAM
cggggcggggugacggggag

SEQ ID NO: 21015 - RNA, 20 nt, Artificial Sequence
  spacer sequence CTCN PAM
gccaggggcucaggggagcc

SEQ ID NO: 21016 - RNA, 20 nt, Artificial Sequence
  spacer sequence CTCN PAM
ggggagccagggcccagacu

SEQ ID NO: 21017 - RNA, 20 nt, Artificial Sequence
  spacer sequence CTCN PAM
ccugagccccuggcugagcu

SEQ ID NO: 21018 - RNA, 20 nt, Artificial Sequence
  spacer sequence CTCN PAM
acacccccaccccccagccu

SEQ ID NO: 21019 - RNA, 20 nt, Artificial Sequence
  spacer sequence CTCN PAM
ccaggccccggaggagccuc

SEQ ID NO: 21020 - RNA, 20 nt, Artificial Sequence
  spacer sequence CTCN PAM
ggggccuggcgagcagggca

SEQ ID NO: 21021 - RNA, 20 nt, Artificial Sequence
  spacer sequence CTCN PAM
uccggggccuggcgagcagg

SEQ ID NO: 21022 - RNA, 20 nt, Artificial Sequence
  spacer sequence CTCN PAM
gggccucugacagccaggcc

SEQ ID NO: 21023 - RNA, 20 nt, Artificial Sequence
  spacer sequence CTCN PAM
gacagccaggccugggcagg

SEQ ID NO: 21024 - RNA, 20 nt, Artificial Sequence
  spacer sequence CTCN PAM
ccacagccacacccugccca

SEQ ID NO: 21025 - RNA, 20 nt, Artificial Sequence
  spacer sequence CTCN PAM
uaggcagcccccuccccaca

SEQ ID NO: 21026 - RNA, 20 nt, Artificial Sequence
  spacer sequence CTCN PAM
gucguccuccuaggcagccc

SEQ ID NO: 21027 - RNA, 20 nt, Artificial Sequence
  spacer sequence CTCN PAM
cucccagaggagggguguca

SEQ ID NO: 21028 - RNA, 20 nt, Artificial Sequence
  spacer sequence CTCN PAM
cagaggaggggugucagcga

SEQ ID NO: 21029 - RNA, 20 nt, Artificial Sequence
  spacer sequence CTCN PAM
gggagggagaucuccgucgu

SEQ ID NO: 21030 - RNA, 20 nt, Artificial Sequence
  spacer sequence CTCN PAM
ucugggagggagaucuccgu

SEQ ID NO: 21031 - RNA, 20 nt, Artificial Sequence
  spacer sequence CTCN PAM
guugggugcuaacugggucc

SEQ ID NO: 21032 - RNA, 20 nt, Artificial Sequence
  spacer sequence CTCN PAM
uucacacuugcuaauccccc

SEQ ID NO: 21033 - RNA, 20 nt, Artificial Sequence
  spacer sequence CTCN PAM
cuugauccuuacagaagccc

SEQ ID NO: 21034 - RNA, 20 nt, Artificial Sequence
  spacer sequence CTCN PAM
cagggcuucuguaaggauca

SEQ ID NO: 21035 - RNA, 20 nt, Artificial Sequence
  spacer sequence CTCN PAM
cgcagggcuucuguaaggau

SEQ ID NO: 21036 - RNA, 20 nt, Artificial Sequence
  spacer sequence CTCN PAM
cucgcagggcuucuguaagg

SEQ ID NO: 21037 - RNA, 20 nt, Artificial Sequence
  spacer sequence CTCN PAM
guuucccucucucgcagggc

SEQ ID NO: 21038 - RNA, 20 nt, Artificial Sequence
  spacer sequence CTCN PAM
gaaaagguucaugauggacu

SEQ ID NO: 21039 - RNA, 20 nt, Artificial Sequence
  spacer sequence CTCN PAM
ggaggcugaggcaggagaau

SEQ ID NO: 21040 - RNA, 20 nt, Artificial Sequence
  spacer sequence CTCN PAM
cgaguagcugggauuacagg

SEQ ID NO: 21041 - RNA, 20 nt, Artificial Sequence
  spacer sequence CTCN PAM
gccucccgaguagcugggau

SEQ ID NO: 21042 - RNA, 20 nt, Artificial Sequence
  spacer sequence CTCN PAM
ugccucagccucccgaguag

SEQ ID NO: 21043 - RNA, 20 nt, Artificial Sequence
  spacer sequence CTCN PAM
uggguucaagcgauucuccu

SEQ ID NO: 21044 - RNA, 20 nt, Artificial Sequence
  spacer sequence CTCN PAM
uccuggguucaagcgauucu

SEQ ID NO: 21045 - RNA, 20 nt, Artificial Sequence
  spacer sequence CTCN PAM
cugcaaccuccuccuggguu

SEQ ID NO: 21046 - RNA, 20 nt, Artificial Sequence
  spacer sequence CTCN PAM
cacugagcgugauguccuca

SEQ ID NO: 21047 - RNA, 20 nt, Artificial Sequence
  spacer sequence CTCN PAM
cugagcgugauguccucaag

SEQ ID NO: 21048 - RNA, 20 nt, Artificial Sequence
  spacer sequence CTCN PAM
gugagagacgccagacacag

SEQ ID NO: 21049 - RNA, 20 nt, Artificial Sequence
  spacer sequence CTCN PAM
aggugcauccgcgccguggc

SEQ ID NO: 21050 - RNA, 20 nt, Artificial Sequence
  spacer sequence CTCN PAM
cugccccgucuuccccugag

SEQ ID NO: 21051 - RNA, 20 nt, Artificial Sequence
  spacer sequence CTCN PAM
ggggaagacggggcagugag

SEQ ID NO: 21052 - RNA, 20 nt, Artificial Sequence
  spacer sequence CTCN PAM
uuccuuucaauuagcagcag

SEQ ID NO: 21053 - RNA, 20 nt, Artificial Sequence
  spacer sequence CTCN PAM
gcgccugcccgggcagggac

SEQ ID NO: 21054 - RNA, 20 nt, Artificial Sequence
  spacer sequence CTCN PAM
uucuggcuggagcugcccgg

SEQ ID NO: 21055 - RNA, 20 nt, Artificial Sequence
  spacer sequence CTCN PAM
cgccucggacagggcccgcc

SEQ ID NO: 21056 - RNA, 20 nt, Artificial Sequence
  spacer sequence CTCN PAM
gacagggcccgcccugcucg

SEQ ID NO: 21057 - RNA, 20 nt, Artificial Sequence
  spacer sequence CTCN PAM
cugggugaccuuggccguug

SEQ ID NO: 21058 - RNA, 20 nt, Artificial Sequence
  spacer sequence CTCN PAM
cugggcccuuccaacaccaa

SEQ ID NO: 21059 - RNA, 20 nt, Artificial Sequence
  spacer sequence CTCN PAM
gggcccuuccaacaccaacg

SEQ ID NO: 21060 - RNA, 20 nt, Artificial Sequence
  spacer sequence CTCN PAM
cguccccgcgaugcuuuuua

SEQ ID NO: 21061 - RNA, 20 nt, Artificial Sequence
  spacer sequence CTCN PAM
aggggcucugcgcggcugcc

SEQ ID NO: 21062 - RNA, 20 nt, Artificial Sequence
  spacer sequence CTCN PAM
gcgcggcugccgggagccag

SEQ ID NO: 21063 - RNA, 20 nt, Artificial Sequence
  spacer sequence CTCN PAM
gccccccccaauccccccaa

SEQ ID NO: 21064 - RNA, 20 nt, Artificial Sequence
  spacer sequence CTCN PAM
cgcccccggccugugcuugg

SEQ ID NO: 21065 - RNA, 20 nt, Artificial Sequence
  spacer sequence CTCN PAM
gcguugccauggggacggcg

SEQ ID NO: 21066 - RNA, 20 nt, Artificial Sequence
  spacer sequence CTCN PAM
cgcgggccccuccauccauc

SEQ ID NO: 21067 - RNA, 20 nt, Artificial Sequence
  spacer sequence CTCN PAM
auccaucaccggggcggcgg

SEQ ID NO: 21068 - RNA, 20 nt, Artificial Sequence
  spacer sequence CTCN PAM
ccagacccgggcgccgccgc

SEQ ID NO: 21069 - RNA, 20 nt, Artificial Sequence
  spacer sequence CTCN PAM
ccccuccccagacccgggcg

SEQ ID NO: 21070 - RNA, 20 nt, Artificial Sequence
  spacer sequence CTCN PAM
ccuuuccccaggacacgcag

SEQ ID NO: 21071 - RNA, 20 nt, Artificial Sequence
  spacer sequence CTCN PAM
ccgggccuggacgcccccuc

SEQ ID NO: 21072 - RNA, 20 nt, Artificial Sequence
  spacer sequence CTCN PAM
ccccuccccgggccuggacg

SEQ ID NO: 21073 - RNA, 20 nt, Artificial Sequence
  spacer sequence CTCN PAM
ccagacccggcgccccccuc

SEQ ID NO: 21074 - RNA, 20 nt, Artificial Sequence
  spacer sequence CTCN PAM
ccccuccccagacccggcgc

SEQ ID NO: 21075 - RNA, 20 nt, Artificial Sequence
  spacer sequence CTCN PAM
caggggcccgggaacaccag

SEQ ID NO: 21076 - RNA, 20 nt, Artificial Sequence
  spacer sequence CTCN PAM
cuuccuggcaggugacaccu

SEQ ID NO: 21077 - RNA, 20 nt, Artificial Sequence
  spacer sequence CTCN PAM
ucccuuccuggcaggugaca

SEQ ID NO: 21078 - RNA, 20 nt, Artificial Sequence
  spacer sequence CTCN PAM
ggggcaugggagcuggacaa

SEQ ID NO: 21079 - RNA, 20 nt, Artificial Sequence
  spacer sequence CTCN PAM
caugccccagaggugacccc

SEQ ID NO: 21080 - RNA, 20 nt, Artificial Sequence
  spacer sequence CTCN PAM
gcagggccaggaaaccaaac

SEQ ID NO: 21081 - RNA, 20 nt, Artificial Sequence
  spacer sequence CTCN PAM
gguuugguuuccuggcccug

SEQ ID NO: 21082 - RNA, 20 nt, Artificial Sequence
  spacer sequence CTCN PAM
caccccucaccccugguucc

SEQ ID NO: 21083 - RNA, 20 nt, Artificial Sequence
  spacer sequence CTCN PAM
ccccugguucccgccaggcc

SEQ ID NO: 21084 - RNA, 20 nt, Artificial Sequence
  spacer sequence CTCN PAM
cccuguugaugccgcccaga

SEQ ID NO: 21085 - RNA, 20 nt, Artificial Sequence
  spacer sequence CTCN PAM
cucuuauccaaucauugugg

SEQ ID NO: 21086 - RNA, 20 nt, Artificial Sequence
  spacer sequence CTCN PAM
caaggacgcacagcaaagga

SEQ ID NO: 21087 - RNA, 20 nt, Artificial Sequence
  spacer sequence CTCN PAM
ucucccugucugggcuuuug

SEQ ID NO: 21088 - RNA, 20 nt, Artificial Sequence
  spacer sequence CTCN PAM
cugucugggcuuuugcaagc

SEQ ID NO: 21089 - RNA, 20 nt, Artificial Sequence
  spacer sequence CTCN PAM
gcagccccaggaggggcaaa

SEQ ID NO: 21090 - RNA, 20 nt, Artificial Sequence
  spacer sequence CTCN PAM
ugcccaccaagaccuacucu

SEQ ID NO: 21091 - RNA, 20 nt, Artificial Sequence
  spacer sequence CTCN PAM
gcacccuccugcccaccaag

SEQ ID NO: 21092 - RNA, 20 nt, Artificial Sequence
  spacer sequence CTCN PAM
cugcacccuccugcccacca

SEQ ID NO: 21093 - RNA, 20 nt, Artificial Sequence
  spacer sequence CTCN PAM
uggcccagaccauaagacag

SEQ ID NO: 21094 - RNA, 20 nt, Artificial Sequence
  spacer sequence CTCN PAM
gguucacugagcccugcugu

SEQ ID NO: 21095 - RNA, 20 nt, Artificial Sequence
  spacer sequence CTCN PAM
cucccgcaggguccuggcgg

SEQ ID NO: 21096 - RNA, 20 nt, Artificial Sequence
  spacer sequence CTCN PAM
cgcaggguccuggcggcaga

SEQ ID NO: 21097 - RNA, 20 nt, Artificial Sequence
  spacer sequence CTCN PAM
gccgccaggacccugcggga

SEQ ID NO: 21098 - RNA, 20 nt, Artificial Sequence
  spacer sequence CTCN PAM
ugcugggacguggucucugc

SEQ ID NO: 21099 - RNA, 20 nt, Artificial Sequence
  spacer sequence CTCN PAM
cugcgauggccugcagccgc

SEQ ID NO: 21100 - RNA, 20 nt, Artificial Sequence
  spacer sequence CTCN PAM
ccacaggagaagcggaagcg

SEQ ID NO: 21101 - RNA, 20 nt, Artificial Sequence
  spacer sequence CTCN PAM
uguggggagggccggguggg

SEQ ID NO: 21102 - RNA, 20 nt, Artificial Sequence
  spacer sequence CTCN PAM
gccugccgcuuccgcuucuc

SEQ ID NO: 21103 - RNA, 20 nt, Artificial Sequence
  spacer sequence CTCN PAM
aucuccgccugccgcuuccg

SEQ ID NO: 21104 - RNA, 20 nt, Artificial Sequence
  spacer sequence CTCN PAM
agcugccggcgcuuguucuc

SEQ ID NO: 21105 - RNA, 20 nt, Artificial Sequence
  spacer sequence CTCN PAM
uccuccagcugccggcgcuu

SEQ ID NO: 21106 - RNA, 20 nt, Artificial Sequence
  spacer sequence CTCN PAM
gcucguccuccagcugccgg

SEQ ID NO: 21107 - RNA, 20 nt, Artificial Sequence
  spacer sequence CTCN PAM
uaccuucaggugcugcagcu

SEQ ID NO: 21108 - RNA, 20 nt, Artificial Sequence
  spacer sequence CTCN PAM
cugacccugggucccugccc

SEQ ID NO: 21109 - RNA, 20 nt, Artificial Sequence
  spacer sequence CTCN PAM
gaccuggaucccugcugcuc

SEQ ID NO: 21110 - RNA, 20 nt, Artificial Sequence
  spacer sequence CTCN PAM
guccaaggcacugcgggagc

SEQ ID NO: 21111 - RNA, 20 nt, Artificial Sequence
  spacer sequence CTCN PAM
cgcagugccuuggacugagc

SEQ ID NO: 21112 - RNA, 20 nt, Artificial Sequence
  spacer sequence CTCN PAM
agcagccagcgcucccgcag

SEQ ID NO: 21113 - RNA, 20 nt, Artificial Sequence
  spacer sequence CTCN PAM
gccucagagggggaugagga

SEQ ID NO: 21114 - RNA, 20 nt, Artificial Sequence
  spacer sequence CTCN PAM
gagggggaugaggaccugag

SEQ ID NO: 21115 - RNA, 20 nt, Artificial Sequence
  spacer sequence CTCN PAM
gaggccgaggacggcguccc

SEQ ID NO: 21116 - RNA, 20 nt, Artificial Sequence
  spacer sequence CTCN PAM
ucccccucugaggccgagga

SEQ ID NO: 21117 - RNA, 20 nt, Artificial Sequence
  spacer sequence CTCN PAM
gguccucaucccccucugag

SEQ ID NO: 21118 - RNA, 20 nt, Artificial Sequence
  spacer sequence CTCN PAM
ucagguccucaucccccucu

SEQ ID NO: 21119 - RNA, 20 nt, Artificial Sequence
  spacer sequence CTCN PAM
ucguccugcaucugccuccu

SEQ ID NO: 21120 - RNA, 20 nt, Artificial Sequence
  spacer sequence CTCN PAM
agcagccgugucuucugcuc

SEQ ID NO: 21121 - RNA, 20 nt, Artificial Sequence
  spacer sequence CTCN PAM
guguccaggugggggcugca

SEQ ID NO: 21122 - RNA, 20 nt, Artificial Sequence
  spacer sequence CTCN PAM
aggccuuuggucccagcccc

SEQ ID NO: 21123 - RNA, 20 nt, Artificial Sequence
  spacer sequence CTCN PAM
cgcccgccggaaacuccagg

SEQ ID NO: 21124 - RNA, 20 nt, Artificial Sequence
  spacer sequence CTCN PAM
gcccaggcaccuccugcagg

SEQ ID NO: 21125 - RNA, 20 nt, Artificial Sequence
  spacer sequence CTCN PAM
ugcaggaagcccuccaggcu

SEQ ID NO: 21126 - RNA, 20 nt, Artificial Sequence
  spacer sequence CTCN PAM
aggcugacugugggcuccca

SEQ ID NO: 21127 - RNA, 20 nt, Artificial Sequence
  spacer sequence CTCN PAM
cagacaccuccugcaggaag

SEQ ID NO: 21128 - RNA, 20 nt, Artificial Sequence
  spacer sequence CTCN PAM
ugcaggaagcccuccaggcg

SEQ ID NO: 21129 - RNA, 20 nt, Artificial Sequence
  spacer sequence CTCN PAM
ucuaauacuuggaaagugac

SEQ ID NO: 21130 - RNA, 20 nt, Artificial Sequence
  spacer sequence CTCN PAM
ccagggaaacuggaaaaacc

SEQ ID NO: 21131 - RNA, 20 nt, Artificial Sequence
  spacer sequence CTCN PAM
aauuugcacauuuuaacagg

SEQ ID NO: 21132 - RNA, 20 nt, Artificial Sequence
  spacer sequence CTCN PAM
uuucccgcucaaauuugcac

SEQ ID NO: 21133 - RNA, 20 nt, Artificial Sequence
  spacer sequence CTCN PAM
ccuuucccgcucaaauuugc

SEQ ID NO: 21134 - RNA, 20 nt, Artificial Sequence
  spacer sequence CTCN PAM
ugcauccccgguggggcucu

SEQ ID NO: 21135 - RNA, 20 nt, Artificial Sequence
  spacer sequence CTCN PAM
caggcacacccucuccccag

SEQ ID NO: 21136 - RNA, 20 nt, Artificial Sequence
  spacer sequence CTCN PAM
ccccagguuggagaaggaaa

SEQ ID NO: 21137 - RNA, 20 nt, Artificial Sequence
  spacer sequence CTCN PAM
ccagguuggagaaggaaauu

SEQ ID NO: 21138 - RNA, 20 nt, Artificial Sequence
  spacer sequence CTCN PAM
aaccuggggagagggugugc

SEQ ID NO: 21139 - RNA, 20 nt, Artificial Sequence
  spacer sequence CTCN PAM
auuuccuucuccaaccuggg

SEQ ID NO: 21140 - RNA, 20 nt, Artificial Sequence
  spacer sequence CTCN PAM
agcaccucaauuuccuucuc

SEQ ID NO: 21141 - RNA, 20 nt, Artificial Sequence
  spacer sequence CTCN PAM
acgcuccagcaccucaauuu

SEQ ID NO: 21142 - RNA, 20 nt, Artificial Sequence
  spacer sequence CTCN PAM
gccccagccacugccaagga

SEQ ID NO: 21143 - RNA, 20 nt, Artificial Sequence
  spacer sequence CTCN PAM
uuggcaguggcuggggcgga

SEQ ID NO: 21144 - RNA, 20 nt, Artificial Sequence
  spacer sequence CTCN PAM
gggccgccgcguucuccuug

SEQ ID NO: 21145 - RNA, 20 nt, Artificial Sequence
  spacer sequence CTCN PAM
gggcuggggcccggacuggg

SEQ ID NO: 21146 - RNA, 20 nt, Artificial Sequence
  spacer sequence CTCN PAM
uuggcuggacucggggcugg

SEQ ID NO: 21147 - RNA, 20 nt, Artificial Sequence
  spacer sequence CTCN PAM
uccuuggcuggacucggggc

SEQ ID NO: 21148 - RNA, 20 nt, Artificial Sequence
  spacer sequence CTCN PAM
gucuugcgcuccuccuuggc

SEQ ID NO: 21149 - RNA, 20 nt, Artificial Sequence
  spacer sequence CTCN PAM
ccccagucacccccuuaccu

SEQ ID NO: 21150 - RNA, 20 nt, Artificial Sequence
  spacer sequence CTCN PAM
ugccucagccucccaaguag

SEQ ID NO: 21151 - RNA, 20 nt, Artificial Sequence
  spacer sequence CTCN PAM
gccucccaaguagcugggac

SEQ ID NO: 21152 - RNA, 20 nt, Artificial Sequence
  spacer sequence CTCN PAM
caaguagcugggacuacagg

SEQ ID NO: 21153 - RNA, 20 nt, Artificial Sequence
  spacer sequence CTCN PAM
aaucccagcacuuugggagg

SEQ ID NO: 21154 - RNA, 20 nt, Artificial Sequence
  spacer sequence CTCN PAM
ugccucuaaucccagcacuu

SEQ ID NO: 21155 - RNA, 20 nt, Artificial Sequence
  spacer sequence CTCN PAM
uauucaaccuucaaaaccca

SEQ ID NO: 21156 - RNA, 20 nt, Artificial Sequence
  spacer sequence CTCN PAM
aggugcuuuucccugaaggu

SEQ ID NO: 21157 - RNA, 20 nt, Artificial Sequence
  spacer sequence CTCN PAM
gggcuguggugucugaugcu

SEQ ID NO: 21158 - RNA, 20 nt, Artificial Sequence
  spacer sequence CTCN PAM
ugucucagggcugugguguc

SEQ ID NO: 21159 - RNA, 20 nt, Artificial Sequence
  spacer sequence CTCN PAM
cugaacugugcccuggcauc

SEQ ID NO: 21160 - RNA, 20 nt, Artificial Sequence
  spacer sequence CTCN PAM
cccugaacugugcccuggca

SEQ ID NO: 21161 - RNA, 20 nt, Artificial Sequence
  spacer sequence CTCN PAM
gggucuagugucgccugucu

SEQ ID NO: 21162 - RNA, 20 nt, Artificial Sequence
  spacer sequence CTCN PAM
cacaguggcucccaggaggc

SEQ ID NO: 21163 - RNA, 20 nt, Artificial Sequence
  spacer sequence CTCN PAM
caggaggccaagggaggagg

SEQ ID NO: 21164 - RNA, 20 nt, Artificial Sequence
  spacer sequence CTCN PAM
ugggagccacugugcgaggc

SEQ ID NO: 21165 - RNA, 20 nt, Artificial Sequence
  spacer sequence CTCN PAM
cuuggccuccugggagccac

SEQ ID NO: 21166 - RNA, 20 nt, Artificial Sequence
  spacer sequence CTCN PAM
ucccuuggccuccugggagc

SEQ ID NO: 21167 - RNA, 20 nt, Artificial Sequence
  spacer sequence CTCN PAM
agcgauccuccucccuuggc

SEQ ID NO: 21168 - RNA, 20 nt, Artificial Sequence
  spacer sequence CTCN PAM
caagcgauccuccucccuug

SEQ ID NO: 21169 - RNA, 20 nt, Artificial Sequence
  spacer sequence CTCN PAM
ugcucucaagcgauccuccu

SEQ ID NO: 21170 - RNA, 20 nt, Artificial Sequence
  spacer sequence CTCN PAM
uccacuccugcucucaagcg

SEQ ID NO: 21171 - RNA, 20 nt, Artificial Sequence
  spacer sequence CTCN PAM
agucucguccacuccugcuc

SEQ ID NO: 21172 - RNA, 20 nt, Artificial Sequence
  spacer sequence CTCN PAM
gugcccccuccagucucguc

SEQ ID NO: 21173 - RNA, 20 nt, Artificial Sequence
  spacer sequence CTCN PAM
uccgugcccccuccagucuc

SEQ ID NO: 21174 - RNA, 20 nt, Artificial Sequence
  spacer sequence CTCN PAM
cgcaggccacccugaaucca

SEQ ID NO: 21175 - RNA, 20 nt, Artificial Sequence
  spacer sequence CTCN PAM
ccacauacccccgcaucagc

SEQ ID NO: 21176 - RNA, 20 nt, Artificial Sequence
  spacer sequence CTCN PAM
cuccccacauacccccgcau

SEQ ID NO: 21177 - RNA, 20 nt, Artificial Sequence
  spacer sequence CTCN PAM
uuucuucccucccuccccac

SEQ ID NO: 21178 - RNA, 20 nt, Artificial Sequence
  spacer sequence CTCN PAM
aucucauuucuucccucccu

SEQ ID NO: 21179 - RNA, 20 nt, Artificial Sequence
  spacer sequence CTCN PAM
gccuguaaucccggcacuuu

SEQ ID NO: 21180 - RNA, 20 nt, Artificial Sequence
  spacer sequence CTCN PAM
caaagugccgggauuacagg

SEQ ID NO: 21181 - RNA, 20 nt, Artificial Sequence
  spacer sequence CTCN PAM
gccucccaaagugccgggau

SEQ ID NO: 21182 - RNA, 20 nt, Artificial Sequence
  spacer sequence CTCN PAM
ggugauccacccaccucggc

SEQ ID NO: 21183 - RNA, 20 nt, Artificial Sequence
  spacer sequence CTCN PAM
ccuuccucuucccggggaug

SEQ ID NO: 21184 - RNA, 20 nt, Artificial Sequence
  spacer sequence CTCN PAM
ucccggggaugcugacgccc

SEQ ID NO: 21185 - RNA, 20 nt, Artificial Sequence
  spacer sequence CTCN PAM
cuucuuucuugcagacgccg

SEQ ID NO: 21186 - RNA, 20 nt, Artificial Sequence
  spacer sequence CTCN PAM
ucuuucuugcagacgccggu

SEQ ID NO: 21187 - RNA, 20 nt, Artificial Sequence
  spacer sequence CTCN PAM
ggaaggaacucguggggccu

SEQ ID NO: 21188 - RNA, 20 nt, Artificial Sequence
  spacer sequence CTCN PAM
uggggccucggcgcacucug

SEQ ID NO: 21189 - RNA, 20 nt, Artificial Sequence
  spacer sequence CTCN PAM
gcgcacucugguggccagag

SEQ ID NO: 21190 - RNA, 20 nt, Artificial Sequence
  spacer sequence CTCN PAM
gguggccagagaggggaugg

SEQ ID NO: 21191 - RNA, 20 nt, Artificial Sequence
  spacer sequence CTCN PAM
ggccaccagagugcgccgag

SEQ ID NO: 21192 - RNA, 20 nt, Artificial Sequence
  spacer sequence CTCN PAM
cuggccaccagagugcgccg

SEQ ID NO: 21193 - RNA, 20 nt, Artificial Sequence
  spacer sequence CTCN PAM
ccgcccugccauccccucuc

SEQ ID NO: 21194 - RNA, 20 nt, Artificial Sequence
  spacer sequence CTCN PAM
gugccucacgccugugaucc

SEQ ID NO: 21195 - RNA, 20 nt, Artificial Sequence
  spacer sequence CTCN PAM
uuaugaauaauuaacacaca

SEQ ID NO: 21196 - RNA, 20 nt, Artificial Sequence
  spacer sequence CTCN PAM
ccuuaugaauaauuaacaca

SEQ ID NO: 21197 - RNA, 20 nt, Artificial Sequence
  spacer sequence CTCN PAM
cagggauuuugugaaaauca

SEQ ID NO: 21198 - RNA, 20 nt, Artificial Sequence
  spacer sequence CTCN PAM
gggauuuugugaaaaucacu

SEQ ID NO: 21199 - RNA, 20 nt, Artificial Sequence
  spacer sequence CTCN PAM
gcccagugauuuucacaaaa

SEQ ID NO: 21200 - RNA, 20 nt, Artificial Sequence
  spacer sequence CTCN PAM
uccucagcccagugauuuuc

SEQ ID NO: 21201 - RNA, 20 nt, Artificial Sequence
  spacer sequence CTCN PAM
ucucucucuccgcuuccacc

SEQ ID NO: 21202 - RNA, 20 nt, Artificial Sequence
  spacer sequence CTCN PAM
cucuccgcuuccaccucccg

SEQ ID NO: 21203 - RNA, 20 nt, Artificial Sequence
  spacer sequence CTCN PAM
cuccgcuuccaccucccgug

SEQ ID NO: 21204 - RNA, 20 nt, Artificial Sequence
  spacer sequence CTCN PAM
ccgcuuccaccucccgugca

SEQ ID NO: 21205 - RNA, 20 nt, Artificial Sequence
  spacer sequence CTCN PAM
gcuuccaccucccgugcaga

SEQ ID NO: 21206 - RNA, 20 nt, Artificial Sequence
  spacer sequence CTCN PAM
cgugcagacaagcgagucuc

SEQ ID NO: 21207 - RNA, 20 nt, Artificial Sequence
  spacer sequence CTCN PAM
cuugucugcacgggaggugg

SEQ ID NO: 21208 - RNA, 20 nt, Artificial Sequence
  spacer sequence CTCN PAM
aacacgccccugaggacggu

SEQ ID NO: 21209 - RNA, 20 nt, Artificial Sequence
  spacer sequence CTCN PAM
ggggcguguuggagacucgc

SEQ ID NO: 21210 - RNA, 20 nt, Artificial Sequence
  spacer sequence CTCN PAM
cccaugaugaaggcaggugg

SEQ ID NO: 21211 - RNA, 20 nt, Artificial Sequence
  spacer sequence CTCN PAM
gggccccagauccagccgcu

SEQ ID NO: 21212 - RNA, 20 nt, Artificial Sequence
  spacer sequence CTCN PAM
gcuuuguugcccugguccca

SEQ ID NO: 21213 - RNA, 20 nt, Artificial Sequence
  spacer sequence CTCN PAM
gggaagcgugggccggcgug

SEQ ID NO: 21214 - RNA, 20 nt, Artificial Sequence
  spacer sequence CTCN PAM
aaccgacgcgaccucacggc

SEQ ID NO: 21215 - RNA, 20 nt, Artificial Sequence
  spacer sequence CTCN PAM
cggcuuucauuccacccuaa

SEQ ID NO: 21216 - RNA, 20 nt, Artificial Sequence
  spacer sequence CTCN PAM
cggggcagccaguccuacug

SEQ ID NO: 21217 - RNA, 20 nt, Artificial Sequence
  spacer sequence CTCN PAM
agggacggggcacccacuuu

SEQ ID NO: 21218 - RNA, 20 nt, Artificial Sequence
  spacer sequence CTCN PAM
gaagcgcagcggugcugggg

SEQ ID NO: 21219 - RNA, 20 nt, Artificial Sequence
  spacer sequence CTCN PAM
gcgucaacccccaccuuccc

SEQ ID NO: 21220 - RNA, 20 nt, Artificial Sequence
  spacer sequence CTCN PAM
uuccuuccagcccugucccg

SEQ ID NO: 21221 - RNA, 20 nt, Artificial Sequence
  spacer sequence CTCN PAM
ccuuccuuccagcccugucc

SEQ ID NO: 21222 - RNA, 20 nt, Artificial Sequence
  spacer sequence CTCN PAM
ggguggcucuccuuccuucc

SEQ ID NO: 21223 - RNA, 20 nt, Artificial Sequence
  spacer sequence CTCN PAM
agcacgguccaggguggggg

SEQ ID NO: 21224 - RNA, 20 nt, Artificial Sequence
  spacer sequence CTCN PAM
gucugcugcauccuggggca

SEQ ID NO: 21225 - RNA, 20 nt, Artificial Sequence
  spacer sequence CTCN PAM
gacaaaugccucugucugcu

SEQ ID NO: 21226 - RNA, 20 nt, Artificial Sequence
  spacer sequence CTCN PAM
gugccagugagaccagcccu

SEQ ID NO: 21227 - RNA, 20 nt, Artificial Sequence
  spacer sequence CTCN PAM
cuggcacagaggcccacagg

SEQ ID NO: 21228 - RNA, 20 nt, Artificial Sequence
  spacer sequence CTCN PAM
gugucugccagggcuggucu

SEQ ID NO: 21229 - RNA, 20 nt, Artificial Sequence
  spacer sequence CTCN PAM
acagugugggcagcucugga

SEQ ID NO: 21230 - RNA, 20 nt, Artificial Sequence
  spacer sequence CTCN PAM
ggacuagcugucuggggugg

SEQ ID NO: 21231 - RNA, 20 nt, Artificial Sequence
  spacer sequence CTCN PAM
accccagacagcuaguccag

SEQ ID NO: 21232 - RNA, 20 nt, Artificial Sequence
  spacer sequence CTCN PAM
gcccuccaccccagacagcu

SEQ ID NO: 21233 - RNA, 20 nt, Artificial Sequence
  spacer sequence CTCN PAM
gcacagccucagcccuccac

SEQ ID NO: 21234 - RNA, 20 nt, Artificial Sequence
  spacer sequence CTCN PAM
auagcucugcacagccucag

SEQ ID NO: 21235 - RNA, 20 nt, Artificial Sequence
  spacer sequence CTCN PAM
cccaaugccuggcaugcagc

SEQ ID NO: 21236 - RNA, 20 nt, Artificial Sequence
  spacer sequence CTCN PAM
cccccaaugccuggcaugca

SEQ ID NO: 21237 - RNA, 20 nt, Artificial Sequence
  spacer sequence CTCN PAM
uuagaauacccucuccccca

SEQ ID NO: 21238 - RNA, 20 nt, Artificial Sequence
  spacer sequence CTCN PAM
acuacgguagaaaagugagg

SEQ ID NO: 21239 - RNA, 20 nt, Artificial Sequence
  spacer sequence CTCN PAM
cuuuucuaccguaguagagg

SEQ ID NO: 21240 - RNA, 20 nt, Artificial Sequence
  spacer sequence CTCN PAM
acguccuuggccucacuuuu

SEQ ID NO: 21241 - RNA, 20 nt, Artificial Sequence
  spacer sequence CTCN PAM
agcucaacguccuuggccuc

SEQ ID NO: 21242 - RNA, 20 nt, Artificial Sequence
  spacer sequence CTCN PAM
uuccuccagcucaacguccu

SEQ ID NO: 21243 - RNA, 20 nt, Artificial Sequence
  spacer sequence CTCN PAM
gguucaaauucuccuuccuc

SEQ ID NO: 21244 - RNA, 20 nt, Artificial Sequence
  spacer sequence CTCN PAM
ggggaggggagcguucaacg

SEQ ID NO: 21245 - RNA, 20 nt, Artificial Sequence
  spacer sequence CTCN PAM
ccugagcccucugguucaaa

SEQ ID NO: 21246 - RNA, 20 nt, Artificial Sequence
  spacer sequence CTCN PAM
ccuccccugagcccucuggu

SEQ ID NO: 21247 - RNA, 20 nt, Artificial Sequence
  spacer sequence CTCN PAM
uacguugaacgcuccccucc

SEQ ID NO: 21248 - RNA, 20 nt, Artificial Sequence
  spacer sequence CTCN PAM
gacgucaccucuuacguuga

SEQ ID NO: 21249 - RNA, 20 nt, Artificial Sequence
  spacer sequence CTCN PAM
gggucuuugcucagacguca

SEQ ID NO: 21250 - RNA, 20 nt, Artificial Sequence
  spacer sequence CTCN PAM
gcaccucugggucuuugcuc

SEQ ID NO: 21251 - RNA, 20 nt, Artificial Sequence
  spacer sequence CTCN PAM
cucagcaccucugggucuuu

SEQ ID NO: 21252 - RNA, 20 nt, Artificial Sequence
  spacer sequence CTCN PAM
agauagcugcgugccuugcu

SEQ ID NO: 21253 - RNA, 20 nt, Artificial Sequence
  spacer sequence CTCN PAM
gccuggaacaccuuucccca

SEQ ID NO: 21254 - RNA, 20 nt, Artificial Sequence
  spacer sequence CTCN PAM
aacaccccaggcgcaguccu

SEQ ID NO: 21255 - RNA, 20 nt, Artificial Sequence
  spacer sequence CTCN PAM
uggccguuccuccaacaccc

SEQ ID NO: 21256 - RNA, 20 nt, Artificial Sequence
  spacer sequence CTCN PAM
agccacacggaucuccuggc

SEQ ID NO: 21257 - RNA, 20 nt, Artificial Sequence
  spacer sequence CTCN PAM
cgcugcuccagccacacgga

SEQ ID NO: 21258 - RNA, 20 nt, Artificial Sequence
  spacer sequence CTCN PAM
ucacgcugcuccagccacac

SEQ ID NO: 21259 - RNA, 20 nt, Artificial Sequence
  spacer sequence CTCN PAM
cccuccucacgcugcuccag

SEQ ID NO: 21260 - RNA, 20 nt, Artificial Sequence
  spacer sequence CTCN PAM
cccccuccucacgcugcucc

SEQ ID NO: 21261 - RNA, 20 nt, Artificial Sequence
  spacer sequence CTCN PAM
gcccucucccccuccucacg

SEQ ID NO: 21262 - RNA, 20 nt, Artificial Sequence
  spacer sequence CTCN PAM
uccgcccucucccccuccuc

SEQ ID NO: 21263 - RNA, 20 nt, Artificial Sequence
  spacer sequence CTCN PAM
ccuccgcccucucccccucc

SEQ ID NO: 21264 - RNA, 20 nt, Artificial Sequence
  spacer sequence CTCN PAM
aucaucucuccuccgcccuc

SEQ ID NO: 21265 - RNA, 20 nt, Artificial Sequence
  spacer sequence CTCN PAM
ccaucaucucuccuccgccc

SEQ ID NO: 21266 - RNA, 20 nt, Artificial Sequence
  spacer sequence CTCN PAM
acaaucucuccaucaucucu

SEQ ID NO: 21267 - RNA, 20 nt, Artificial Sequence
  spacer sequence CTCN PAM
cgccccugccacagggcccu

SEQ ID NO: 21268 - RNA, 20 nt, Artificial Sequence
  spacer sequence CTCN PAM
cgggaaaagcccacgucccc

SEQ ID NO: 21269 - RNA, 20 nt, Artificial Sequence
  spacer sequence CTCN PAM
cucccgggaaaagcccacgu

SEQ ID NO: 21270 - RNA, 20 nt, Artificial Sequence
  spacer sequence CTCN PAM
gugcucacccacgcccucug

SEQ ID NO: 21271 - RNA, 20 nt, Artificial Sequence
  spacer sequence CTCN PAM
cccacgcccucuggugacug

SEQ ID NO: 21272 - RNA, 20 nt, Artificial Sequence
  spacer sequence CTCN PAM
ggugacugcagggagaacag

SEQ ID NO: 21273 - RNA, 20 nt, Artificial Sequence
  spacer sequence CTCN PAM
cugcagucaccagagggcgu

SEQ ID NO: 21274 - RNA, 20 nt, Artificial Sequence
  spacer sequence CTCN PAM
accuggcaccguccacgguc

SEQ ID NO: 21275 - RNA, 20 nt, Artificial Sequence
  spacer sequence CTCN PAM
cccagcagcccuguccccuc

SEQ ID NO: 21276 - RNA, 20 nt, Artificial Sequence
  spacer sequence CTCN PAM
ucccccagcagcccuguccc

SEQ ID NO: 21277 - RNA, 20 nt, Artificial Sequence
  spacer sequence CTCN PAM
acggcccaucccagccuccu

SEQ ID NO: 21278 - RNA, 20 nt, Artificial Sequence
  spacer sequence CTCN PAM
ccccuccacggcccauccca

SEQ ID NO: 21279 - RNA, 20 nt, Artificial Sequence
  spacer sequence CTCN PAM
accuucagaacauaaggaac

SEQ ID NO: 21280 - RNA, 20 nt, Artificial Sequence
  spacer sequence CTCN PAM
aacccugggggcuccaccuu

SEQ ID NO: 21281 - RNA, 20 nt, Artificial Sequence
  spacer sequence CTCN PAM
ucaaacccugggggcuccac

SEQ ID NO: 21282 - RNA, 20 nt, Artificial Sequence
  spacer sequence CTCN PAM
uuucuccucaaacccugggg

SEQ ID NO: 21283 - RNA, 20 nt, Artificial Sequence
  spacer sequence CTCN PAM
cugacaccucguuucuccuc

SEQ ID NO: 21284 - RNA, 20 nt, Artificial Sequence
  spacer sequence CTCN PAM
cgccuguaaucccagcaccu

SEQ ID NO: 21285 - RNA, 20 nt, Artificial Sequence
  spacer sequence CTCN PAM
aaaggugcugggauuacagg

SEQ ID NO: 21286 - RNA, 20 nt, Artificial Sequence
  spacer sequence CTCN PAM
aaugaucugcccgccuuggc

SEQ ID NO: 21287 - RNA, 20 nt, Artificial Sequence
  spacer sequence CTCN PAM
ugaccucaaaugaucugccc

SEQ ID NO: 21288 - RNA, 20 nt, Artificial Sequence
  spacer sequence CTCN PAM
ggcuggucuugaacuccuga

SEQ ID NO: 21289 - RNA, 20 nt, Artificial Sequence
  spacer sequence CTCN PAM
acuaaaaaauagaaaaauua

SEQ ID NO: 21290 - RNA, 20 nt, Artificial Sequence
  spacer sequence CTCN PAM
ccccuguaaucccagcacuu

SEQ ID NO: 21291 - RNA, 20 nt, Artificial Sequence
  spacer sequence CTCN PAM
caaagugcugggauuacagg

SEQ ID NO: 21292 - RNA, 20 nt, Artificial Sequence
  spacer sequence CTCN PAM
gccucccaaagugcugggau

SEQ ID NO: 21293 - RNA, 20 nt, Artificial Sequence
  spacer sequence CTCN PAM
ugaucugccccccucggccu

SEQ ID NO: 21294 - RNA, 20 nt, Artificial Sequence
  spacer sequence CTCN PAM
ugaccucaugaucugccccc

SEQ ID NO: 21295 - RNA, 20 nt, Artificial Sequence
  spacer sequence CTCN PAM
aucuccugaccucaugaucu

SEQ ID NO: 21296 - RNA, 20 nt, Artificial Sequence
  spacer sequence CTCN PAM
aguaaaaauacaaaaaauua

SEQ ID NO: 21297 - RNA, 20 nt, Artificial Sequence
  spacer sequence CTCN PAM
ggagccuuaggcaggagaau

SEQ ID NO: 21298 - RNA, 20 nt, Artificial Sequence
  spacer sequence CTCN PAM
cgagcagcugggauuacagg

SEQ ID NO: 21299 - RNA, 20 nt, Artificial Sequence
  spacer sequence CTCN PAM
ugccuaaggcucccgagcag

SEQ ID NO: 21300 - RNA, 20 nt, Artificial Sequence
  spacer sequence CTCN PAM
cagguucaaccgauucuccu

SEQ ID NO: 21301 - RNA, 20 nt, Artificial Sequence
  spacer sequence CTCN PAM
gccucccagguucaaccgau

SEQ ID NO: 21302 - RNA, 20 nt, Artificial Sequence
  spacer sequence CTCN PAM
gaucacugcaaucucugccu

SEQ ID NO: 21303 - RNA, 20 nt, Artificial Sequence
  spacer sequence CTCN PAM
agccugggcaacaagagcaa

SEQ ID NO: 21304 - RNA, 20 nt, Artificial Sequence
  spacer sequence CTCN PAM
uguugcccaggcuggagugc

SEQ ID NO: 21305 - RNA, 20 nt, Artificial Sequence
  spacer sequence CTCN PAM
aaaaaaaaaagagggaggac

SEQ ID NO: 21306 - RNA, 20 nt, Artificial Sequence
  spacer sequence CTCN PAM
uuuuuuuuuugagacaaagu

SEQ ID NO: 21307 - RNA, 20 nt, Artificial Sequence
  spacer sequence CTCN PAM
cucuuuuuuuuuuugagaca

SEQ ID NO: 21308 - RNA, 20 nt, Artificial Sequence
  spacer sequence CTCN PAM
guccucccucuuuuuuuuuu

SEQ ID NO: 21309 - RNA, 20 nt, Artificial Sequence
  spacer sequence CTCN PAM
ucccacccguugggggcagc

SEQ ID NO: 21310 - RNA, 20 nt, Artificial Sequence
  spacer sequence CTCN PAM
caaucugcccccuacaccug

SEQ ID NO: 21311 - RNA, 20 nt, Artificial Sequence
  spacer sequence CTCN PAM
cacguccauaacacuacucc

SEQ ID NO: 21312 - RNA, 20 nt, Artificial Sequence
  spacer sequence CTCN PAM
cacacguccauaacacuacu

SEQ ID NO: 21313 - RNA, 20 nt, Artificial Sequence
  spacer sequence CTCN PAM
gccccuauccacaggggccc

SEQ ID NO: 21314 - RNA, 20 nt, Artificial Sequence
  spacer sequence CTCN PAM
cgcacacccauccccaccug

SEQ ID NO: 21315 - RNA, 20 nt, Artificial Sequence
  spacer sequence CTCN PAM
aaucucccgcacacccaucc

SEQ ID NO: 21316 - RNA, 20 nt, Artificial Sequence
  spacer sequence CTCN PAM
gcucuaaucucccgcacacc

SEQ ID NO: 21317 - RNA, 20 nt, Artificial Sequence
  spacer sequence CTCN PAM
cccaggcacucggcucuaau

SEQ ID NO: 21318 - RNA, 20 nt, Artificial Sequence
  spacer sequence CTCN PAM
gcgccggggaccucgcccag

SEQ ID NO: 21319 - RNA, 20 nt, Artificial Sequence
  spacer sequence CTCN PAM
gcucugcgccggggaccucg

SEQ ID NO: 21320 - RNA, 20 nt, Artificial Sequence
  spacer sequence CTCN PAM
acgcuuaggcccggcugcgg

SEQ ID NO: 21321 - RNA, 20 nt, Artificial Sequence
  spacer sequence CTCN PAM
cacccaaccucgacgcuuag

SEQ ID NO: 21322 - RNA, 20 nt, Artificial Sequence
  spacer sequence CTCN PAM
ucccacccaaccucgacgcu

SEQ ID NO: 21323 - RNA, 20 nt, Artificial Sequence
  spacer sequence CTCN PAM
uuucccuccucccacccaac

SEQ ID NO: 21324 - RNA, 20 nt, Artificial Sequence
  spacer sequence CTCN PAM
gcccccauagccaccucguu

SEQ ID NO: 21325 - RNA, 20 nt, Artificial Sequence
  spacer sequence CTCN PAM
gaaguggugaggacaugcag

SEQ ID NO: 21326 - RNA, 20 nt, Artificial Sequence
  spacer sequence CTCN PAM
ccacuucugaggggccaucg

SEQ ID NO: 21327 - RNA, 20 nt, Artificial Sequence
  spacer sequence CTCN PAM
gggccuuugcacaggcuguu

SEQ ID NO: 21328 - RNA, 20 nt, Artificial Sequence
  spacer sequence CTCN PAM
cgcugcggggcggggucuca

SEQ ID NO: 21329 - RNA, 20 nt, Artificial Sequence
  spacer sequence CTCN PAM
gggaggugccuggugauccc

SEQ ID NO: 21330 - RNA, 20 nt, Artificial Sequence
  spacer sequence CTCN PAM
cugagaccccgccccgcagc

SEQ ID NO: 21331 - RNA, 20 nt, Artificial Sequence
  spacer sequence CTCN PAM
ucaucuucaagcaggccugg

SEQ ID NO: 21332 - RNA, 20 nt, Artificial Sequence
  spacer sequence CTCN PAM
gugugguuucugcaggaaug

SEQ ID NO: 21333 - RNA, 20 nt, Artificial Sequence
  spacer sequence CTCN PAM
guaaaaaucauuccugcaga

SEQ ID NO: 21334 - RNA, 20 nt, Artificial Sequence
  spacer sequence CTCN PAM
ccccacucuguaaaaaucau

SEQ ID NO: 21335 - RNA, 20 nt, Artificial Sequence
  spacer sequence CTCN PAM
acagccagcaccucgcccca

SEQ ID NO: 21336 - RNA, 20 nt, Artificial Sequence
  spacer sequence CTCN PAM
ucagggcccuaacuccacag

SEQ ID NO: 21337 - RNA, 20 nt, Artificial Sequence
  spacer sequence CTCN PAM
ggaggguuccuucauucuga

SEQ ID NO: 21338 - RNA, 20 nt, Artificial Sequence
  spacer sequence CTCN PAM
ugagauagucgaacuugcua

SEQ ID NO: 21339 - RNA, 20 nt, Artificial Sequence
  spacer sequence CTCN PAM
gaaugaaggaacccuccuga

SEQ ID NO: 21340 - RNA, 20 nt, Artificial Sequence
  spacer sequence CTCN PAM
uuccagccaacgguuggaca

SEQ ID NO: 21341 - RNA, 20 nt, Artificial Sequence
  spacer sequence CTCN PAM
caggacuugacgccuccuuc

SEQ ID NO: 21342 - RNA, 20 nt, Artificial Sequence
  spacer sequence CTCN PAM
gucugcagacccacagcccc

SEQ ID NO: 21343 - RNA, 20 nt, Artificial Sequence
  spacer sequence CTCN PAM
gccgugaccccgggcaaggc

SEQ ID NO: 21344 - RNA, 20 nt, Artificial Sequence
  spacer sequence CTCN PAM
cugggauucaccugcuccuc

SEQ ID NO: 21345 - RNA, 20 nt, Artificial Sequence
  spacer sequence CTCN PAM
gggauucaccugcuccucug

SEQ ID NO: 21346 - RNA, 20 nt, Artificial Sequence
  spacer sequence CTCN PAM
ucugagaaaccaggaauggu

SEQ ID NO: 21347 - RNA, 20 nt, Artificial Sequence
  spacer sequence CTCN PAM
gagaaaccaggaaugguggg

SEQ ID NO: 21348 - RNA, 20 nt, Artificial Sequence
  spacer sequence CTCN PAM
gaggagcaggugaaucccag

SEQ ID NO: 21349 - RNA, 20 nt, Artificial Sequence
  spacer sequence CTCN PAM
agggcucacguuuauaaucc

SEQ ID NO: 21350 - RNA, 20 nt, Artificial Sequence
  spacer sequence CTCN PAM
agccccaccauuccugguuu

SEQ ID NO: 21351 - RNA, 20 nt, Artificial Sequence
  spacer sequence CTCN PAM
cguuuauaaucccagggcuu

SEQ ID NO: 21352 - RNA, 20 nt, Artificial Sequence
  spacer sequence CTCN PAM
caaagcccugggauuauaaa

SEQ ID NO: 21353 - RNA, 20 nt, Artificial Sequence
  spacer sequence CTCN PAM
gccucccaaagcccugggau

SEQ ID NO: 21354 - RNA, 20 nt, Artificial Sequence
  spacer sequence CTCN PAM
caccucagccucccaaagcc

SEQ ID NO: 21355 - RNA, 20 nt, Artificial Sequence
  spacer sequence CTCN PAM
agcaauccucccaccucagc

SEQ ID NO: 21356 - RNA, 20 nt, Artificial Sequence
  spacer sequence CTCN PAM
ugggcucaagcaauccuccc

SEQ ID NO: 21357 - RNA, 20 nt, Artificial Sequence
  spacer sequence CTCN PAM
aacuccugggcucaagcaau

SEQ ID NO: 21358 - RNA, 20 nt, Artificial Sequence
  spacer sequence CTCN PAM
cuauguugcccaggcugguc

SEQ ID NO: 21359 - RNA, 20 nt, Artificial Sequence
  spacer sequence CTCN PAM
caaguagcugggaccacagg

SEQ ID NO: 21360 - RNA, 20 nt, Artificial Sequence
  spacer sequence CTCN PAM
gccucccaaguagcugggac

SEQ ID NO: 21361 - RNA, 20 nt, Artificial Sequence
  spacer sequence CTCN PAM
caccucagccucccaaguag

SEQ ID NO: 21362 - RNA, 20 nt, Artificial Sequence
  spacer sequence CTCN PAM
ccccauucucccaccucagc

SEQ ID NO: 21363 - RNA, 20 nt, Artificial Sequence
  spacer sequence CTCN PAM
cugcagucaugaccuuccug

SEQ ID NO: 21364 - RNA, 20 nt, Artificial Sequence
  spacer sequence CTCN PAM
acuccagccuggccaacaga

SEQ ID NO: 21365 - RNA, 20 nt, Artificial Sequence
  spacer sequence CTCN PAM
agccuggccaacagagggag

SEQ ID NO: 21366 - RNA, 20 nt, Artificial Sequence
  spacer sequence CTCN PAM
guuggccaggcuggagugga

SEQ ID NO: 21367 - RNA, 20 nt, Artificial Sequence
  spacer sequence CTCN PAM
cucuguuggccaggcuggag

SEQ ID NO: 21368 - RNA, 20 nt, Artificial Sequence
  spacer sequence CTCN PAM
cgccuguaaucccagcacuu

SEQ ID NO: 21369 - RNA, 20 nt, Artificial Sequence
  spacer sequence CTCN PAM
caaagugcugggauuacagg

SEQ ID NO: 21370 - RNA, 20 nt, Artificial Sequence
  spacer sequence CTCN PAM
ggugauccaccugccuuggc

SEQ ID NO: 21371 - RNA, 20 nt, Artificial Sequence
  spacer sequence CTCN PAM
ugaccucaggugauccaccu

SEQ ID NO: 21372 - RNA, 20 nt, Artificial Sequence
  spacer sequence CTCN PAM
aacuccugaccucaggugau

SEQ ID NO: 21373 - RNA, 20 nt, Artificial Sequence
  spacer sequence CTCN PAM
auguuggucaggcuggucuc

SEQ ID NO: 21374 - RNA, 20 nt, Artificial Sequence
  spacer sequence CTCN PAM
acuaaaaauacaaaaauuag

SEQ ID NO: 21375 - RNA, 20 nt, Artificial Sequence
  spacer sequence CTCN PAM
gccuuccacguagcugggac

SEQ ID NO: 21376 - RNA, 20 nt, Artificial Sequence
  spacer sequence CTCN PAM
ugccucagccuuccacguag

SEQ ID NO: 21377 - RNA, 20 nt, Artificial Sequence
  spacer sequence CTCN PAM
cgguucuagcgauucuccug

SEQ ID NO: 21378 - RNA, 20 nt, Artificial Sequence
  spacer sequence CTCN PAM
ccucccgguucuagcgauuc

SEQ ID NO: 21379 - RNA, 20 nt, Artificial Sequence
  spacer sequence CTCN PAM
agccggggcgacagagcaag

SEQ ID NO: 21380 - RNA, 20 nt, Artificial Sequence
  spacer sequence CTCN PAM
gucgccccggcuggagcaca

SEQ ID NO: 21381 - RNA, 20 nt, Artificial Sequence
  spacer sequence CTCN PAM
aucucaaaaaaauuaaaaag

SEQ ID NO: 21382 - RNA, 20 nt, Artificial Sequence
  spacer sequence CTCN PAM
aaaaaauuaaaaagauccgg

SEQ ID NO: 21383 - RNA, 20 nt, Artificial Sequence
  spacer sequence CTCN PAM
gguuccagcccagcccaucu

SEQ ID NO: 21384 - RNA, 20 nt, Artificial Sequence
  spacer sequence CTCN PAM
guuucgccaccaaacuauug

SEQ ID NO: 21385 - RNA, 20 nt, Artificial Sequence
  spacer sequence CTCN PAM
gcacuguguccucuguuucg

SEQ ID NO: 21386 - RNA, 20 nt, Artificial Sequence
  spacer sequence CTCN PAM
ucccuguacucugcacugug

SEQ ID NO: 21387 - RNA, 20 nt, Artificial Sequence
  spacer sequence CTCN PAM
aaugccaaggagagguguuc

SEQ ID NO: 21388 - RNA, 20 nt, Artificial Sequence
  spacer sequence CTCN PAM
uuggcauuugaggcccaucc

SEQ ID NO: 21389 - RNA, 20 nt, Artificial Sequence
  spacer sequence CTCN PAM
ccuuggcauuugaggcccau

SEQ ID NO: 21390 - RNA, 20 nt, Artificial Sequence
  spacer sequence CTCN PAM
aggcacuggggagcuaugga

SEQ ID NO: 21391 - RNA, 20 nt, Artificial Sequence
  spacer sequence CTCN PAM
ccagugccuggagacgacca

SEQ ID NO: 21392 - RNA, 20 nt, Artificial Sequence
  spacer sequence CTCN PAM
auagcuccccagugccugga

SEQ ID NO: 21393 - RNA, 20 nt, Artificial Sequence
  spacer sequence CTCN PAM
acaucccuccauagcucccc

SEQ ID NO: 21394 - RNA, 20 nt, Artificial Sequence
  spacer sequence CTCN PAM
ccaacucuacaucccuccau

SEQ ID NO: 21395 - RNA, 20 nt, Artificial Sequence
  spacer sequence CTCN PAM
acgcggcccuccccaacucu

SEQ ID NO: 21396 - RNA, 20 nt, Artificial Sequence
  spacer sequence CTCN PAM
gccugccccaucgcugcuug

SEQ ID NO: 21397 - RNA, 20 nt, Artificial Sequence
  spacer sequence CTCN PAM
gcgcugcuggcuccccccuc

SEQ ID NO: 21398 - RNA, 20 nt, Artificial Sequence
  spacer sequence CTCN PAM
ccccucccuggcuuggccgc

SEQ ID NO: 21399 - RNA, 20 nt, Artificial Sequence
  spacer sequence CTCN PAM
cuggcuuggccgcagcccgg

SEQ ID NO: 21400 - RNA, 20 nt, Artificial Sequence
  spacer sequence CTCN PAM
cgugccagccauguacucgg

SEQ ID NO: 21401 - RNA, 20 nt, Artificial Sequence
  spacer sequence CTCN PAM
ugccagccauguacucgguu

SEQ ID NO: 21402 - RNA, 20 nt, Artificial Sequence
  spacer sequence CTCN PAM
guugagaucacuguggagaa

SEQ ID NO: 21403 - RNA, 20 nt, Artificial Sequence
  spacer sequence CTCN PAM
accgaguacauggcuggcac

SEQ ID NO: 21404 - RNA, 20 nt, Artificial Sequence
  spacer sequence CTCN PAM
acagugaucucaaccgagua

SEQ ID NO: 21405 - RNA, 20 nt, Artificial Sequence
  spacer sequence CTCN PAM
ccugucaccuuguccuucuc

SEQ ID NO: 21406 - RNA, 20 nt, Artificial Sequence
  spacer sequence CTCN PAM
cucggcagccgcucccucug

SEQ ID NO: 21407 - RNA, 20 nt, Artificial Sequence
  spacer sequence CTCN PAM
gcagccgcucccucugggca

SEQ ID NO: 21408 - RNA, 20 nt, Artificial Sequence
  spacer sequence CTCN PAM
cucugggcaucaaagucuac

SEQ ID NO: 21409 - RNA, 20 nt, Artificial Sequence
  spacer sequence CTCN PAM
gggcaucaaagucuacgagg

SEQ ID NO: 21410 - RNA, 20 nt, Artificial Sequence
  spacer sequence CTCN PAM
uagacuuugaugcccagagg

SEQ ID NO: 21411 - RNA, 20 nt, Artificial Sequence
  spacer sequence CTCN PAM
uccucguagacuuugaugcc

SEQ ID NO: 21412 - RNA, 20 nt, Artificial Sequence
  spacer sequence CTCN PAM
uaccuuuggucucguccucg

SEQ ID NO: 21413 - RNA, 20 nt, Artificial Sequence
  spacer sequence CTCN PAM
cuccaccugggccagagccc

SEQ ID NO: 21414 - RNA, 20 nt, Artificial Sequence
  spacer sequence CTCN PAM
accugggccagagccccgaa

SEQ ID NO: 21415 - RNA, 20 nt, Artificial Sequence
  spacer sequence CTCN PAM
ggcccagguggagggagggc

SEQ ID NO: 21416 - RNA, 20 nt, Artificial Sequence
  spacer sequence CTCN PAM
cagcgugugggucuggcguc

SEQ ID NO: 21417 - RNA, 20 nt, Artificial Sequence
  spacer sequence CTCN PAM
cccccuguggcccacagcug

SEQ ID NO: 21418 - RNA, 20 nt, Artificial Sequence
  spacer sequence CTCN PAM
gaggucguucagcccugggc

SEQ ID NO: 21419 - RNA, 20 nt, Artificial Sequence
  spacer sequence CTCN PAM
gagcccagcugugggccaca

SEQ ID NO: 21420 - RNA, 20 nt, Artificial Sequence
  spacer sequence CTCN PAM
cugcccaaucauucauccac

SEQ ID NO: 21421 - RNA, 20 nt, Artificial Sequence
  spacer sequence CTCN PAM
agaaagcugccugaaagcug

SEQ ID NO: 21422 - RNA, 20 nt, Artificial Sequence
  spacer sequence CTCN PAM
gcuuucaggcagcuuucugg

SEQ ID NO: 21423 - RNA, 20 nt, Artificial Sequence
  spacer sequence CTCN PAM
ggagggaaauccggagguag

SEQ ID NO: 21424 - RNA, 20 nt, Artificial Sequence
  spacer sequence CTCN PAM
agagcccagcuggguaccug

SEQ ID NO: 21425 - RNA, 20 nt, Artificial Sequence
  spacer sequence CTCN PAM
ggauuucccuccagagccca

SEQ ID NO: 21426 - RNA, 20 nt, Artificial Sequence
  spacer sequence CTCN PAM
agauggaagggcccgguuug

SEQ ID NO: 21427 - RNA, 20 nt, Artificial Sequence
  spacer sequence CTCN PAM
uaaauaauucguuuaaauaa

SEQ ID NO: 21428 - RNA, 20 nt, Artificial Sequence
  spacer sequence CTCN PAM
cgccuuuagucccagcacuu

SEQ ID NO: 21429 - RNA, 20 nt, Artificial Sequence
  spacer sequence CTCN PAM
caaagugcugggacuaaagg

SEQ ID NO: 21430 - RNA, 20 nt, Artificial Sequence
  spacer sequence CTCN PAM
gccucccaaagugcugggac

SEQ ID NO: 21431 - RNA, 20 nt, Artificial Sequence
  spacer sequence CTCN PAM
cucggccucccaaagugcug

SEQ ID NO: 21432 - RNA, 20 nt, Artificial Sequence
  spacer sequence CTCN PAM
ucccucggccucccaaagug

SEQ ID NO: 21433 - RNA, 20 nt, Artificial Sequence
  spacer sequence CTCN PAM
agcgauccuccucccucggc

SEQ ID NO: 21434 - RNA, 20 nt, Artificial Sequence
  spacer sequence CTCN PAM
aacuucugggcucaagcgau

SEQ ID NO: 21435 - RNA, 20 nt, Artificial Sequence
  spacer sequence CTCN PAM
gucucuaccaaaaaaaaaaa

SEQ ID NO: 21436 - RNA, 20 nt, Artificial Sequence
  spacer sequence CTCN PAM
accaaaaaaaaaaaaaaaaa

SEQ ID NO: 21437 - RNA, 20 nt, Artificial Sequence
  spacer sequence CTCN PAM
caaguagcugggaccacagg

SEQ ID NO: 21438 - RNA, 20 nt, Artificial Sequence
  spacer sequence CTCN PAM
gccucccaaguagcugggac

SEQ ID NO: 21439 - RNA, 20 nt, Artificial Sequence
  spacer sequence CTCN PAM
caucucagccucccaaguag

SEQ ID NO: 21440 - RNA, 20 nt, Artificial Sequence
  spacer sequence CTCN PAM
ugggcccaagugauccuccc

SEQ ID NO: 21441 - RNA, 20 nt, Artificial Sequence
  spacer sequence CTCN PAM
accuccugggcccaagugau

SEQ ID NO: 21442 - RNA, 20 nt, Artificial Sequence
  spacer sequence CTCN PAM
cuacagccucaaccuccugg

SEQ ID NO: 21443 - RNA, 20 nt, Artificial Sequence
  spacer sequence CTCN PAM
aaccugggcaacagagugag

SEQ ID NO: 21444 - RNA, 20 nt, Artificial Sequence
  spacer sequence CTCN PAM
guugcccagguuggagugca

SEQ ID NO: 21445 - RNA, 20 nt, Artificial Sequence
  spacer sequence CTCN PAM
cucuguugcccagguuggag

SEQ ID NO: 21446 - RNA, 20 nt, Artificial Sequence
  spacer sequence CTCN PAM
uaagaauaaaaaauaauaau

SEQ ID NO: 21447 - RNA, 20 nt, Artificial Sequence
  spacer sequence CTCN PAM
cagcccccuggaugugcauu

SEQ ID NO: 21448 - RNA, 20 nt, Artificial Sequence
  spacer sequence CTCN PAM
cagggugaggauggggccgg

SEQ ID NO: 21449 - RNA, 20 nt, Artificial Sequence
  spacer sequence CTCN PAM
cccugugagacuucucacag

SEQ ID NO: 21450 - RNA, 20 nt, Artificial Sequence
  spacer sequence CTCN PAM
cccggccccauccucacccu

SEQ ID NO: 21451 - RNA, 20 nt, Artificial Sequence
  spacer sequence CTCN PAM
gggaagccucccccggcccc

SEQ ID NO: 21452 - RNA, 20 nt, Artificial Sequence
  spacer sequence CTCN PAM
ucugggaagccucccccggc

SEQ ID NO: 21453 - RNA, 20 nt, Artificial Sequence
  spacer sequence CTCN PAM
ucagagacacgcagugcaug

SEQ ID NO: 21454 - RNA, 20 nt, Artificial Sequence
  spacer sequence CTCN PAM
gaugagccccugcuugccuc

SEQ ID NO: 21455 - RNA, 20 nt, Artificial Sequence
  spacer sequence CTCN PAM
gccaggugugguucccaugc

SEQ ID NO: 21456 - RNA, 20 nt, Artificial Sequence
  spacer sequence CTCN PAM
gggccuuugcaggggcugcg

SEQ ID NO: 21457 - RNA, 20 nt, Artificial Sequence
  spacer sequence CTCN PAM
auccuaccucagggccuuug

SEQ ID NO: 21458 - RNA, 20 nt, Artificial Sequence
  spacer sequence CTCN PAM
agcccagcugacuccauccu

SEQ ID NO: 21459 - RNA, 20 nt, Artificial Sequence
  spacer sequence CTCN PAM
gcccuccagcccagcugacu

SEQ ID NO: 21460 - RNA, 20 nt, Artificial Sequence
  spacer sequence CTCN PAM
ccucagcccuccagcccagc

SEQ ID NO: 21461 - RNA, 20 nt, Artificial Sequence
  spacer sequence CTCN PAM
ugcagcccaacuccccucag

SEQ ID NO: 21462 - RNA, 20 nt, Artificial Sequence
  spacer sequence CTCN PAM
cuccugcagcccaacucccc

SEQ ID NO: 21463 - RNA, 20 nt, Artificial Sequence
  spacer sequence CTCN PAM
ccucacuccugcagcccaac

SEQ ID NO: 21464 - RNA, 20 nt, Artificial Sequence
  spacer sequence CTCN PAM
ccccugcagcccgucucccc

SEQ ID NO: 21465 - RNA, 20 nt, Artificial Sequence
  spacer sequence CTCN PAM
ccucaccccugcagcccguc

SEQ ID NO: 21466 - RNA, 20 nt, Artificial Sequence
  spacer sequence CTCN PAM
ccccugcagcccgucucccc

SEQ ID NO: 21467 - RNA, 20 nt, Artificial Sequence
  spacer sequence CTCN PAM
ccucaccccugcagcccguc

SEQ ID NO: 21468 - RNA, 20 nt, Artificial Sequence
  spacer sequence CTCN PAM
ccccugcagcccgucucccc

SEQ ID NO: 21469 - RNA, 20 nt, Artificial Sequence
  spacer sequence CTCN PAM
ccucaccccugcagcccguc

SEQ ID NO: 21470 - RNA, 20 nt, Artificial Sequence
  spacer sequence CTCN PAM
ccccugcagcccgucucccc

SEQ ID NO: 21471 - RNA, 20 nt, Artificial Sequence
  spacer sequence CTCN PAM
ccucaccccugcagcccguc

SEQ ID NO: 21472 - RNA, 20 nt, Artificial Sequence
  spacer sequence CTCN PAM
ccccugcagcccagcucccc

SEQ ID NO: 21473 - RNA, 20 nt, Artificial Sequence
  spacer sequence CTCN PAM
ccucaccccugcagcccagc

SEQ ID NO: 21474 - RNA, 20 nt, Artificial Sequence
  spacer sequence CTCN PAM
ccccgucuccccucaccccu

SEQ ID NO: 21475 - RNA, 20 nt, Artificial Sequence
  spacer sequence CTCN PAM
ccucaccccgucuccccuca

SEQ ID NO: 21476 - RNA, 20 nt, Artificial Sequence
  spacer sequence CTCN PAM
ccccugcagcccgucucccc

SEQ ID NO: 21477 - RNA, 20 nt, Artificial Sequence
  spacer sequence CTCN PAM
ccucaccccugcagcccguc

SEQ ID NO: 21478 - RNA, 20 nt, Artificial Sequence
  spacer sequence CTCN PAM
ccccugcagcccgucucccc

SEQ ID NO: 21479 - RNA, 20 nt, Artificial Sequence
  spacer sequence CTCN PAM
cugaccaaccugguuccccc

SEQ ID NO: 21480 - RNA, 20 nt, Artificial Sequence
  spacer sequence CTCN PAM
acucccugaccaaccugguu

SEQ ID NO: 21481 - RNA, 20 nt, Artificial Sequence
  spacer sequence CTCN PAM
ucaacucccugaccaaccug

SEQ ID NO: 21482 - RNA, 20 nt, Artificial Sequence
  spacer sequence CTCN PAM
cgcagggaggagaagggugc

SEQ ID NO: 21483 - RNA, 20 nt, Artificial Sequence
  spacer sequence CTCN PAM
cugcgugagcccagcuccuc

SEQ ID NO: 21484 - RNA, 20 nt, Artificial Sequence
  spacer sequence CTCN PAM
ucccugcgugagcccagcuc

SEQ ID NO: 21485 - RNA, 20 nt, Artificial Sequence
  spacer sequence CTCN PAM
aggcaaagcacccuucuccu

SEQ ID NO: 21486 - RNA, 20 nt, Artificial Sequence
  spacer sequence CTCN PAM
ggacacggccccgccugucc

SEQ ID NO: 21487 - RNA, 20 nt, Artificial Sequence
  spacer sequence CTCN PAM
gcaccgucaggacccaacgc

SEQ ID NO: 21488 - RNA, 20 nt, Artificial Sequence
  spacer sequence CTCN PAM
uccuagaggucaagaggcaa

SEQ ID NO: 21489 - RNA, 20 nt, Artificial Sequence
  spacer sequence CTCN PAM
uagaggucaagaggcaaaca

SEQ ID NO: 21490 - RNA, 20 nt, Artificial Sequence
  spacer sequence CTCN PAM
aggaggagcccuuaaaacca

SEQ ID NO: 21491 - RNA, 20 nt, Artificial Sequence
  spacer sequence CTCN PAM
ugaccucuaggaggagcccu

SEQ ID NO: 21492 - RNA, 20 nt, Artificial Sequence
  spacer sequence CTCN PAM
cacagccuguuugccucuug

SEQ ID NO: 21493 - RNA, 20 nt, Artificial Sequence
  spacer sequence CTCN PAM
uggggucccuggcaucuccc

SEQ ID NO: 21494 - RNA, 20 nt, Artificial Sequence
  spacer sequence CTCN PAM
uccuggggucccuggcaucu

SEQ ID NO: 21495 - RNA, 20 nt, Artificial Sequence
  spacer sequence CTCN PAM
uccuccuggggucccuggca

SEQ ID NO: 21496 - RNA, 20 nt, Artificial Sequence
  spacer sequence CTCN PAM
acacugaagccccacucucu

SEQ ID NO: 21497 - RNA, 20 nt, Artificial Sequence
  spacer sequence CTCN PAM
cucucuuucuuuuucuuuuu

SEQ ID NO: 21498 - RNA, 20 nt, Artificial Sequence
  spacer sequence CTCN PAM
cucuuucuuuuucuuuuuau

SEQ ID NO: 21499 - RNA, 20 nt, Artificial Sequence
  spacer sequence CTCN PAM
cuuucuuuuucuuuuuauuu

SEQ ID NO: 21500 - RNA, 20 nt, Artificial Sequence
  spacer sequence CTCN PAM
uucuuuuucuuuuuauuuau

SEQ ID NO: 21501 - RNA, 20 nt, Artificial Sequence
  spacer sequence CTCN PAM
uucuucagaaaguaaauaaa

SEQ ID NO: 21502 - RNA, 20 nt, Artificial Sequence
  spacer sequence CTCN PAM
gucgcccggcccgcagugca

SEQ ID NO: 21503 - RNA, 20 nt, Artificial Sequence
  spacer sequence CTCN PAM
cugcagccuccagcuccugg

SEQ ID NO: 21504 - RNA, 20 nt, Artificial Sequence
  spacer sequence CTCN PAM
agcuccugggcucaggcgau

SEQ ID NO: 21505 - RNA, 20 nt, Artificial Sequence
  spacer sequence CTCN PAM
ugggcucaggcgauccuccu

SEQ ID NO: 21506 - RNA, 20 nt, Artificial Sequence
  spacer sequence CTCN PAM
ggcgauccuccugccucggc

SEQ ID NO: 21507 - RNA, 20 nt, Artificial Sequence
  spacer sequence CTCN PAM
ugccucggccucccgaaaug

SEQ ID NO: 21508 - RNA, 20 nt, Artificial Sequence
  spacer sequence CTCN PAM
gccucccgaaaugcugagac

SEQ ID NO: 21509 - RNA, 20 nt, Artificial Sequence
  spacer sequence CTCN PAM
cgaaaugcugagaccacagg

SEQ ID NO: 21510 - RNA, 20 nt, Artificial Sequence
  spacer sequence CTCN PAM
gcauuucgggaggccgaggc

SEQ ID NO: 21511 - RNA, 20 nt, Artificial Sequence
  spacer sequence CTCN PAM
ugccuguggucucagcauuu

SEQ ID NO: 21512 - RNA, 20 nt, Artificial Sequence
  spacer sequence CTCN PAM
uuuucuuuuaugagauauaa

SEQ ID NO: 21513 - RNA, 20 nt, Artificial Sequence
  spacer sequence CTCN PAM
uaaaagaaaaagaggccggg

SEQ ID NO: 21514 - RNA, 20 nt, Artificial Sequence
  spacer sequence CTCN PAM
cauuaaggcggaauuuuaug

SEQ ID NO: 21515 - RNA, 20 nt, Artificial Sequence
  spacer sequence CTCN PAM
ucugggcccgggacauugag

SEQ ID NO: 21516 - RNA, 20 nt, Artificial Sequence
  spacer sequence CTCN PAM
augucccgggcccagaugag

SEQ ID NO: 21517 - RNA, 20 nt, Artificial Sequence
  spacer sequence CTCN PAM
uugcagccucaaugucccgg

SEQ ID NO: 21518 - RNA, 20 nt, Artificial Sequence
  spacer sequence CTCN PAM
agccugggccacagaccaag

SEQ ID NO: 21519 - RNA, 20 nt, Artificial Sequence
  spacer sequence CTCN PAM
aaaacaagaaagaggagaga

SEQ ID NO: 21520 - RNA, 20 nt, Artificial Sequence
  spacer sequence CTCN PAM
uucuuguuuuugagacaggg

SEQ ID NO: 21521 - RNA, 20 nt, Artificial Sequence
  spacer sequence CTCN PAM
ucuuucuuguuuuugagaca

SEQ ID NO: 21522 - RNA, 20 nt, Artificial Sequence
  spacer sequence CTCN PAM
ccucuuucuuguuuuugaga

SEQ ID NO: 21523 - RNA, 20 nt, Artificial Sequence
  spacer sequence CTCN PAM
ccagucagcgucacucccua

SEQ ID NO: 21524 - RNA, 20 nt, Artificial Sequence
  spacer sequence CTCN PAM
cuauccccuccccagcucug

SEQ ID NO: 21525 - RNA, 20 nt, Artificial Sequence
  spacer sequence CTCN PAM
ccagcucuggcacccacgca

SEQ ID NO: 21526 - RNA, 20 nt, Artificial Sequence
  spacer sequence CTCN PAM
ggcacccacgcauccccucc

SEQ ID NO: 21527 - RNA, 20 nt, Artificial Sequence
  spacer sequence CTCN PAM
ugucucucuggauuggccug

SEQ ID NO: 21528 - RNA, 20 nt, Artificial Sequence
  spacer sequence CTCN PAM
cuggauuggccuguccugga

SEQ ID NO: 21529 - RNA, 20 nt, Artificial Sequence
  spacer sequence CTCN PAM
ggauuggccuguccuggaca

SEQ ID NO: 21530 - RNA, 20 nt, Artificial Sequence
  spacer sequence CTCN PAM
uuucuaugaaauguccagga

SEQ ID NO: 21531 - RNA, 20 nt, Artificial Sequence
  spacer sequence CTCN PAM
caccuguaaucccggcacuu

SEQ ID NO: 21532 - RNA, 20 nt, Artificial Sequence
  spacer sequence CTCN PAM
caaagugccgggauuacagg

SEQ ID NO: 21533 - RNA, 20 nt, Artificial Sequence
  spacer sequence CTCN PAM
gccucccaaagugccgggau

SEQ ID NO: 21534 - RNA, 20 nt, Artificial Sequence
  spacer sequence CTCN PAM
ggugauccacccgccucggc

SEQ ID NO: 21535 - RNA, 20 nt, Artificial Sequence
  spacer sequence CTCN PAM
ugaccucaggugauccaccc

SEQ ID NO: 21536 - RNA, 20 nt, Artificial Sequence
  spacer sequence CTCN PAM
aacuccugaccucaggugau

SEQ ID NO: 21537 - RNA, 20 nt, Artificial Sequence
  spacer sequence CTCN PAM
auguuggccaggcuggucuc

SEQ ID NO: 21538 - RNA, 20 nt, Artificial Sequence
  spacer sequence CTCN PAM
gcuaaaaauacaaaaauuag

SEQ ID NO: 21539 - RNA, 20 nt, Artificial Sequence
  spacer sequence CTCN PAM
aaaguaucugggauuacagg

SEQ ID NO: 21540 - RNA, 20 nt, Artificial Sequence
  spacer sequence CTCN PAM
ugcuucagccuccaaaguau

SEQ ID NO: 21541 - RNA, 20 nt, Artificial Sequence
  spacer sequence CTCN PAM
uggguucaagugauucuccu

SEQ ID NO: 21542 - RNA, 20 nt, Artificial Sequence
  spacer sequence CTCN PAM
gccuccuggguucaagugau

SEQ ID NO: 21543 - RNA, 20 nt, Artificial Sequence
  spacer sequence CTCN PAM
cugcaaccuccgccuccugg

SEQ ID NO: 21544 - RNA, 20 nt, Artificial Sequence
  spacer sequence CTCN PAM
gcucacugcaaccuccgccu

SEQ ID NO: 21545 - RNA, 20 nt, Artificial Sequence
  spacer sequence CTCN PAM
ccagccugugcgacaagagu

SEQ ID NO: 21546 - RNA, 20 nt, Artificial Sequence
  spacer sequence CTCN PAM
agccugugcgacaagaguga

SEQ ID NO: 21547 - RNA, 20 nt, Artificial Sequence
  spacer sequence CTCN PAM
ugucgcacaggcuggagagc

SEQ ID NO: 21548 - RNA, 20 nt, Artificial Sequence
  spacer sequence CTCN PAM
gucucaaaaaaaaaaaaaag

SEQ ID NO: 21549 - RNA, 20 nt, Artificial Sequence
  spacer sequence CTCN PAM
aaaaaaaaaaaaagaaagaa

SEQ ID NO: 21550 - RNA, 20 nt, Artificial Sequence
  spacer sequence CTCN PAM
uuucuuucuuuuuuuuuuuu

SEQ ID NO: 21551 - RNA, 20 nt, Artificial Sequence
  spacer sequence CTCN PAM
cacugggcgugacgucccca

SEQ ID NO: 21552 - RNA, 20 nt, Artificial Sequence
  spacer sequence CTCN PAM
cugggcgugacguccccaag

SEQ ID NO: 21553 - RNA, 20 nt, Artificial Sequence
  spacer sequence CTCN PAM
gacccaggccacagugccga

SEQ ID NO: 21554 - RNA, 20 nt, Artificial Sequence
  spacer sequence CTCN PAM
uuuucauggcugaauacuau

SEQ ID NO: 21555 - RNA, 20 nt, Artificial Sequence
  spacer sequence CTCN PAM
cugcagccaaaggguagaaa

SEQ ID NO: 21556 - RNA, 20 nt, Artificial Sequence
  spacer sequence CTCN PAM
aaagcaggggcgugaacaaa

SEQ ID NO: 21557 - RNA, 20 nt, Artificial Sequence
  spacer sequence CTCN PAM
uacguguacacccaaaggcc

SEQ ID NO: 21558 - RNA, 20 nt, Artificial Sequence
  spacer sequence CTCN PAM
ggacccagcaguucacuccu

SEQ ID NO: 21559 - RNA, 20 nt, Artificial Sequence
  spacer sequence CTCN PAM
acacagucgccucaggaccc

SEQ ID NO: 21560 - RNA, 20 nt, Artificial Sequence
  spacer sequence CTCN PAM
gugaggaccugcuguuuucc

SEQ ID NO: 21561 - RNA, 20 nt, Artificial Sequence
  spacer sequence CTCN PAM
cggagcuccacacagucgcc

SEQ ID NO: 21562 - RNA, 20 nt, Artificial Sequence
  spacer sequence CTCN PAM
guggaaaacagcagguccuc

SEQ ID NO: 21563 - RNA, 20 nt, Artificial Sequence
  spacer sequence CTCN PAM
uccacgaccugugggaacgg

SEQ ID NO: 21564 - RNA, 20 nt, Artificial Sequence
  spacer sequence CTCN PAM
acguccucaccagcgcucgu

SEQ ID NO: 21565 - RNA, 20 nt, Artificial Sequence
  spacer sequence CTCN PAM
ccagcgcucguagcccauuc

SEQ ID NO: 21566 - RNA, 20 nt, Artificial Sequence
  spacer sequence CTCN PAM
uagcccauucucguggcugu

SEQ ID NO: 21567 - RNA, 20 nt, Artificial Sequence
  spacer sequence CTCN PAM
uggcuguccugguggcguga

SEQ ID NO: 21568 - RNA, 20 nt, Artificial Sequence
  spacer sequence CTCN PAM
cugugguuuggauucccaaa

SEQ ID NO: 21569 - RNA, 20 nt, Artificial Sequence
  spacer sequence CTCN PAM
gaggcagcuuggccucugcg

SEQ ID NO: 21570 - RNA, 20 nt, Artificial Sequence
  spacer sequence CTCN PAM
gagaacagaaggcuuuggga

SEQ ID NO: 21571 - RNA, 20 nt, Artificial Sequence
  spacer sequence CTCN PAM
gcggugccccagaugcuguc

SEQ ID NO: 21572 - RNA, 20 nt, Artificial Sequence
  spacer sequence CTCN PAM
gacagcaucuggggcaccgc

SEQ ID NO: 21573 - RNA, 20 nt, Artificial Sequence
  spacer sequence CTCN PAM
ggaguggcuuuggggugugg

SEQ ID NO: 21574 - RNA, 20 nt, Artificial Sequence
  spacer sequence CTCN PAM
agagcugggcugcggggacc

SEQ ID NO: 21575 - RNA, 20 nt, Artificial Sequence
  spacer sequence CTCN PAM
gcucuagcucuccccagcug

SEQ ID NO: 21576 - RNA, 20 nt, Artificial Sequence
  spacer sequence CTCN PAM
agcucuccccagcugugugg

SEQ ID NO: 21577 - RNA, 20 nt, Artificial Sequence
  spacer sequence CTCN PAM
ccccagcuguguggcccugg

SEQ ID NO: 21578 - RNA, 20 nt, Artificial Sequence
  spacer sequence CTCN PAM
ccagcuguguggcccuggga

SEQ ID NO: 21579 - RNA, 20 nt, Artificial Sequence
  spacer sequence CTCN PAM
ucuuccggaugagguccuca

SEQ ID NO: 21580 - RNA, 20 nt, Artificial Sequence
  spacer sequence CTCN PAM
uccggaagacgaggcauggg

SEQ ID NO: 21581 - RNA, 20 nt, Artificial Sequence
  spacer sequence CTCN PAM
cccccaucacuccacccucc

SEQ ID NO: 21582 - RNA, 20 nt, Artificial Sequence
  spacer sequence CTCN PAM
acccuccucagccucaccug

SEQ ID NO: 21583 - RNA, 20 nt, Artificial Sequence
  spacer sequence CTCN PAM
ucagccucaccuggucccug

SEQ ID NO: 21584 - RNA, 20 nt, Artificial Sequence
  spacer sequence CTCN PAM
gccucaccuggucccugggg

SEQ ID NO: 21585 - RNA, 20 nt, Artificial Sequence
  spacer sequence CTCN PAM
ccuggucccuggggauucca

SEQ ID NO: 21586 - RNA, 20 nt, Artificial Sequence
  spacer sequence CTCN PAM
gcugccauggaaacggauca

SEQ ID NO: 21587 - RNA, 20 nt, Artificial Sequence
  spacer sequence CTCN PAM
aauuccugucuuggggcagc

SEQ ID NO: 21588 - RNA, 20 nt, Artificial Sequence
  spacer sequence CTCN PAM
gugugucccacuggccgcug

SEQ ID NO: 21589 - RNA, 20 nt, Artificial Sequence
  spacer sequence CTCN PAM
gggccuccagcccaaaguca

SEQ ID NO: 21590 - RNA, 20 nt, Artificial Sequence
  spacer sequence CTCN PAM
agcccaaagucauugagaug

SEQ ID NO: 21591 - RNA, 20 nt, Artificial Sequence
  spacer sequence CTCN PAM
augacuuugggcuggaggcc

SEQ ID NO: 21592 - RNA, 20 nt, Artificial Sequence
  spacer sequence CTCN PAM
ccucccugggggcuuagaaa

SEQ ID NO: 21593 - RNA, 20 nt, Artificial Sequence
  spacer sequence CTCN PAM
cugggggcuuagaaacugaa

SEQ ID NO: 21594 - RNA, 20 nt, Artificial Sequence
  spacer sequence CTCN PAM
acuuucaguuucuaagcccc

SEQ ID NO: 21595 - RNA, 20 nt, Artificial Sequence
  spacer sequence CTCN PAM
uguuccuggcuacagaccag

SEQ ID NO: 21596 - RNA, 20 nt, Artificial Sequence
  spacer sequence CTCN PAM
gccaagggucagggcuccug

SEQ ID NO: 21597 - RNA, 20 nt, Artificial Sequence
  spacer sequence CTCN PAM
cggccaagggucagggcucc

SEQ ID NO: 21598 - RNA, 20 nt, Artificial Sequence
  spacer sequence CTCN PAM
ucucggccaagggucagggc

SEQ ID NO: 21599 - RNA, 20 nt, Artificial Sequence
  spacer sequence CTCN PAM
ccuccucucggccaaggguc

SEQ ID NO: 21600 - RNA, 20 nt, Artificial Sequence
  spacer sequence CTCN PAM
caacucccagcguggcccag

SEQ ID NO: 21601 - RNA, 20 nt, Artificial Sequence
  spacer sequence CTCN PAM
cagcguggcccaggcagccg

SEQ ID NO: 21602 - RNA, 20 nt, Artificial Sequence
  spacer sequence CTCN PAM
cagcccugcaaauuccuucu

SEQ ID NO: 21603 - RNA, 20 nt, Artificial Sequence
  spacer sequence CTCN PAM
cugcuaugaucuaacaccag

SEQ ID NO: 21604 - RNA, 20 nt, Artificial Sequence
  spacer sequence CTCN PAM
aaggaccggauuucagcacc

SEQ ID NO: 21605 - RNA, 20 nt, Artificial Sequence
  spacer sequence CTCN PAM
ccaaggaccggauuucagca

SEQ ID NO: 21606 - RNA, 20 nt, Artificial Sequence
  spacer sequence CTCN PAM
agaaaugucaagucagagac

SEQ ID NO: 21607 - RNA, 20 nt, Artificial Sequence
  spacer sequence CTCN PAM
gacuugacauuucuugaggu

SEQ ID NO: 21608 - RNA, 20 nt, Artificial Sequence
  spacer sequence CTCN PAM
agucuuuccaaauuuccuua

SEQ ID NO: 21609 - RNA, 20 nt, Artificial Sequence
  spacer sequence CTCN PAM
acuggguagcauuuuauaca

SEQ ID NO: 21610 - RNA, 20 nt, Artificial Sequence
  spacer sequence CTCN PAM
uuggcagccugggccacggu

SEQ ID NO: 21611 - RNA, 20 nt, Artificial Sequence
  spacer sequence CTCN PAM
guuaacaguccuaaaaccuc

SEQ ID NO: 21612 - RNA, 20 nt, Artificial Sequence
  spacer sequence CTCN PAM
guguuccucuccucccugaa

SEQ ID NO: 21613 - RNA, 20 nt, Artificial Sequence
  spacer sequence CTCN PAM
ccucccugaaauuuaaaaac

SEQ ID NO: 21614 - RNA, 20 nt, Artificial Sequence
  spacer sequence CTCN PAM
ucccugaaauuuaaaaacac

SEQ ID NO: 21615 - RNA, 20 nt, Artificial Sequence
  spacer sequence CTCN PAM
cugaaauuuaaaaacacccu

SEQ ID NO: 21616 - RNA, 20 nt, Artificial Sequence
  spacer sequence CTCN PAM
aaauaaauuguggcuuccug

SEQ ID NO: 21617 - RNA, 20 nt, Artificial Sequence
  spacer sequence CTCN PAM
cgccuguaaucccagcacuu

SEQ ID NO: 21618 - RNA, 20 nt, Artificial Sequence
  spacer sequence CTCN PAM
caaagugcugggauuacagg

SEQ ID NO: 21619 - RNA, 20 nt, Artificial Sequence
  spacer sequence CTCN PAM
gccucccaaagugcugggau

SEQ ID NO: 21620 - RNA, 20 nt, Artificial Sequence
  spacer sequence CTCN PAM
ugccucagccucccaaagug

SEQ ID NO: 21621 - RNA, 20 nt, Artificial Sequence
  spacer sequence CTCN PAM
ugauccuccugccucagccu

SEQ ID NO: 21622 - RNA, 20 nt, Artificial Sequence
  spacer sequence CTCN PAM
ugaccucgugauccuccugc

SEQ ID NO: 21623 - RNA, 20 nt, Artificial Sequence
  spacer sequence CTCN PAM
aucuccugaccucgugaucc

SEQ ID NO: 21624 - RNA, 20 nt, Artificial Sequence
  spacer sequence CTCN PAM
ggaggcugaggcaggagaau

SEQ ID NO: 21625 - RNA, 20 nt, Artificial Sequence
  spacer sequence CTCN PAM
ugaguagcugggacuacagg

SEQ ID NO: 21626 - RNA, 20 nt, Artificial Sequence
  spacer sequence CTCN PAM
gccuccugaguagcugggac

SEQ ID NO: 21627 - RNA, 20 nt, Artificial Sequence
  spacer sequence CTCN PAM
ugccucagccuccugaguag

SEQ ID NO: 21628 - RNA, 20 nt, Artificial Sequence
  spacer sequence CTCN PAM
cggguucaagcgauucuccu

SEQ ID NO: 21629 - RNA, 20 nt, Artificial Sequence
  spacer sequence CTCN PAM
accucccggguucaagcgau

SEQ ID NO: 21630 - RNA, 20 nt, Artificial Sequence
  spacer sequence CTCN PAM
aggcaggagggacagagaga

SEQ ID NO: 21631 - RNA, 20 nt, Artificial Sequence
  spacer sequence CTCN PAM
cugucucuccuuguacagug

SEQ ID NO: 21632 - RNA, 20 nt, Artificial Sequence
  spacer sequence CTCN PAM
gucucuccuuguacaguggu

SEQ ID NO: 21633 - RNA, 20 nt, Artificial Sequence
  spacer sequence CTCN PAM
ccuuguacagugguccaugc

SEQ ID NO: 21634 - RNA, 20 nt, Artificial Sequence
  spacer sequence CTCN PAM
uuguacagugguccaugcug

SEQ ID NO: 21635 - RNA, 20 nt, Artificial Sequence
  spacer sequence CTCN PAM
gcggugccguccacagcaug

SEQ ID NO: 21636 - RNA, 20 nt, Artificial Sequence
  spacer sequence CTCN PAM
ggggguggaucccguucucg

SEQ ID NO: 21637 - RNA, 20 nt, Artificial Sequence
  spacer sequence CTCN PAM
uccgagguggacgaacucau

SEQ ID NO: 21638 - RNA, 20 nt, Artificial Sequence
  spacer sequence CTCN PAM
gagguggacgaacucaucca

SEQ ID NO: 21639 - RNA, 20 nt, Artificial Sequence
  spacer sequence CTCN PAM
gaggagcucaggggguggau

SEQ ID NO: 21640 - RNA, 20 nt, Artificial Sequence
  spacer sequence CTCN PAM
uccacaaagcggacgagguc

SEQ ID NO: 21641 - RNA, 20 nt, Artificial Sequence
  spacer sequence CTCN PAM
uccgcuuuguggaugaguuc

SEQ ID NO: 21642 - RNA, 20 nt, Artificial Sequence
  spacer sequence CTCN PAM
gcgugaccucguccgcuuug

SEQ ID NO: 21643 - RNA, 20 nt, Artificial Sequence
  spacer sequence CTCN PAM
cucagcgugaccucguccgc

SEQ ID NO: 21644 - RNA, 20 nt, Artificial Sequence
  spacer sequence CTCN PAM
gccgccccggccguggaccc

SEQ ID NO: 21645 - RNA, 20 nt, Artificial Sequence
  spacer sequence CTCN PAM
acagccccccgggucucugc

SEQ ID NO: 21646 - RNA, 20 nt, Artificial Sequence
  spacer sequence CTCN PAM
cggcgggagaucaccggugu

SEQ ID NO: 21647 - RNA, 20 nt, Artificial Sequence
  spacer sequence CTCN PAM
cgccgggagggcgugguccg

SEQ ID NO: 21648 - RNA, 20 nt, Artificial Sequence
  spacer sequence CTCN PAM
ccuggcugugccugcacacc

SEQ ID NO: 21649 - RNA, 20 nt, Artificial Sequence
  spacer sequence CTCN PAM
uggccgggcuggauccccgg

SEQ ID NO: 21650 - RNA, 20 nt, Artificial Sequence
  spacer sequence CTCN PAM
acguucugguaacccaugaa

SEQ ID NO: 21651 - RNA, 20 nt, Artificial Sequence
  spacer sequence CTCN PAM
uccuccacguucugguaacc

SEQ ID NO: 21652 - RNA, 20 nt, Artificial Sequence
  spacer sequence CTCN PAM
gccucauccuccacguucug

SEQ ID NO: 21653 - RNA, 20 nt, Artificial Sequence
  spacer sequence CTCN PAM
gccgugaugguaucuugaag

SEQ ID NO: 21654 - RNA, 20 nt, Artificial Sequence
  spacer sequence CTCN PAM
gccgcgucuucgaugaccac

SEQ ID NO: 21655 - RNA, 20 nt, Artificial Sequence
  spacer sequence CTCN PAM
uugggcucagccgcgucuuc

SEQ ID NO: 21656 - RNA, 20 nt, Artificial Sequence
  spacer sequence CTCN PAM
gcagcacugccguugggugg

SEQ ID NO: 21657 - RNA, 20 nt, Artificial Sequence
  spacer sequence CTCN PAM
cacggaggccgccuccaggg

SEQ ID NO: 21658 - RNA, 20 nt, Artificial Sequence
  spacer sequence CTCN PAM
gugggaggcucggcagcacu

SEQ ID NO: 21659 - RNA, 20 nt, Artificial Sequence
  spacer sequence CTCN PAM
agggaagagaaucaggcggg

SEQ ID NO: 21660 - RNA, 20 nt, Artificial Sequence
  spacer sequence CTCN PAM
ucccuggaggcggccuccgu

SEQ ID NO: 21661 - RNA, 20 nt, Artificial Sequence
  spacer sequence CTCN PAM
ggccccgccugauucucuuc

SEQ ID NO: 21662 - RNA, 20 nt, Artificial Sequence
  spacer sequence CTCN PAM
acaugaagaagcaccguugu

SEQ ID NO: 21663 - RNA, 20 nt, Artificial Sequence
  spacer sequence CTCN PAM
aucaugugagccggcccccg

SEQ ID NO: 21664 - RNA, 20 nt, Artificial Sequence
  spacer sequence CTCN PAM
caugauggagcagcauuuac

SEQ ID NO: 21665 - RNA, 20 nt, Artificial Sequence
  spacer sequence CTCN PAM
ggggccggcucacaugaugg

SEQ ID NO: 21666 - RNA, 20 nt, Artificial Sequence
  spacer sequence CTCN PAM
cggcgccugcccacccucca

SEQ ID NO: 21667 - RNA, 20 nt, Artificial Sequence
  spacer sequence CTCN PAM
acccacagccucacgggucc

SEQ ID NO: 21668 - RNA, 20 nt, Artificial Sequence
  spacer sequence CTCN PAM
cggguccaggacuuggcgug

SEQ ID NO: 21669 - RNA, 20 nt, Artificial Sequence
  spacer sequence CTCN PAM
gaaggaacauguaacaacac

SEQ ID NO: 21670 - RNA, 20 nt, Artificial Sequence
  spacer sequence CTCN PAM
uuccagcgaaagaaaacucg

SEQ ID NO: 21671 - RNA, 20 nt, Artificial Sequence
  spacer sequence CTCN PAM
ggaaaagcgggucuguccug

SEQ ID NO: 21672 - RNA, 20 nt, Artificial Sequence
  spacer sequence CTCN PAM
cgcccaccgggguccuggcg

SEQ ID NO: 21673 - RNA, 20 nt, Artificial Sequence
  spacer sequence CTCN PAM
acgcggcccaggccagccug

SEQ ID NO: 21674 - RNA, 20 nt, Artificial Sequence
  spacer sequence CTCN PAM
gggccuccuaccugugccuu

SEQ ID NO: 21675 - RNA, 20 nt, Artificial Sequence
  spacer sequence CTCN PAM
uaccugugccuuucucugag

SEQ ID NO: 21676 - RNA, 20 nt, Artificial Sequence
  spacer sequence CTCN PAM
gaggggacaccccgccagag

SEQ ID NO: 21677 - RNA, 20 nt, Artificial Sequence
  spacer sequence CTCN PAM
gagaaaggcacagguaggag

SEQ ID NO: 21678 - RNA, 20 nt, Artificial Sequence
  spacer sequence CTCN PAM
ggcgggguguccccucagag

SEQ ID NO: 21679 - RNA, 20 nt, Artificial Sequence
  spacer sequence CTCN PAM
cuggcgggguguccccucag

SEQ ID NO: 21680 - RNA, 20 nt, Artificial Sequence
  spacer sequence CTCN PAM
cggggcccucucuggcgggg

SEQ ID NO: 21681 - RNA, 20 nt, Artificial Sequence
  spacer sequence CTCN PAM
guacccacccccggcucccg

SEQ ID NO: 21682 - RNA, 20 nt, Artificial Sequence
  spacer sequence CTCN PAM
ggcccuggaagugaggcucu

SEQ ID NO: 21683 - RNA, 20 nt, Artificial Sequence
  spacer sequence CTCN PAM
cuuccagggccugagcaggc

SEQ ID NO: 21684 - RNA, 20 nt, Artificial Sequence
  spacer sequence CTCN PAM
augggguucccuggccaagg

SEQ ID NO: 21685 - RNA, 20 nt, Artificial Sequence
  spacer sequence CTCN PAM
ggcaguuggggugaggccgu

SEQ ID NO: 21686 - RNA, 20 nt, Artificial Sequence
  spacer sequence CTCN PAM
ccccaacugccugagauugg

SEQ ID NO: 21687 - RNA, 20 nt, Artificial Sequence
  spacer sequence CTCN PAM
uugggggcuaaaggucuugg

SEQ ID NO: 21688 - RNA, 20 nt, Artificial Sequence
  spacer sequence CTCN PAM
acccaagaccuuuagccccc

SEQ ID NO: 21689 - RNA, 20 nt, Artificial Sequence
  spacer sequence CTCN PAM
gcugugccccuaugcccugu

SEQ ID NO: 21690 - RNA, 20 nt, Artificial Sequence
  spacer sequence CTCN PAM
auuguccacugguugggccc

SEQ ID NO: 21691 - RNA, 20 nt, Artificial Sequence
  spacer sequence CTCN PAM
cccagacuccauuguccacu

SEQ ID NO: 21692 - RNA, 20 nt, Artificial Sequence
  spacer sequence CTCN PAM
cgggugggggcauguccccg

SEQ ID NO: 21693 - RNA, 20 nt, Artificial Sequence
  spacer sequence CTCN PAM
gucccugcccugugcagggg

SEQ ID NO: 21694 - RNA, 20 nt, Artificial Sequence
  spacer sequence CTCN PAM
cucggucccugcccugugca

SEQ ID NO: 21695 - RNA, 20 nt, Artificial Sequence
  spacer sequence CTCN PAM
uugucccgagcucccgcccc

SEQ ID NO: 21696 - RNA, 20 nt, Artificial Sequence
  spacer sequence CTCN PAM
ggacaaggaguggcucacuc

SEQ ID NO: 21697 - RNA, 20 nt, Artificial Sequence
  spacer sequence CTCN PAM
cgcccccacugggcccuccu

SEQ ID NO: 21698 - RNA, 20 nt, Artificial Sequence
  spacer sequence CTCN PAM
uuccuccuggugcuaauuug

SEQ ID NO: 21699 - RNA, 20 nt, Artificial Sequence
  spacer sequence CTCN PAM
uggugcuaauuuggggaccc

SEQ ID NO: 21700 - RNA, 20 nt, Artificial Sequence
  spacer sequence CTCN PAM
ucuccauccugcuuggacca

SEQ ID NO: 21701 - RNA, 20 nt, Artificial Sequence
  spacer sequence CTCN PAM
auccugcuuggaccaggguc

SEQ ID NO: 21702 - RNA, 20 nt, Artificial Sequence
  spacer sequence CTCN PAM
ggguaugguugggaagaccc

SEQ ID NO: 21703 - RNA, 20 nt, Artificial Sequence
  spacer sequence CTCN PAM
acugggcuuggagcacgucc

SEQ ID NO: 21704 - RNA, 20 nt, Artificial Sequence
  spacer sequence CTCN PAM
aagcccaguagagcuggcag

SEQ ID NO: 21705 - RNA, 20 nt, Artificial Sequence
  spacer sequence CTCN PAM
acugcccggacgugcuccaa

SEQ ID NO: 21706 - RNA, 20 nt, Artificial Sequence
  spacer sequence CTCN PAM
cuccacugcccggacgugcu

SEQ ID NO: 21707 - RNA, 20 nt, Artificial Sequence
  spacer sequence CTCN PAM
uggguuggagcaggagaccc

SEQ ID NO: 21708 - RNA, 20 nt, Artificial Sequence
  spacer sequence CTCN PAM
aacccaagaggcuuccuguc

SEQ ID NO: 21709 - RNA, 20 nt, Artificial Sequence
  spacer sequence CTCN PAM
ugcuccaacccaagaggcuu

SEQ ID NO: 21710 - RNA, 20 nt, Artificial Sequence
  spacer sequence CTCN PAM
uuugccacccagaccaaugu

SEQ ID NO: 21711 - RNA, 20 nt, Artificial Sequence
  spacer sequence CTCN PAM
cauuggucuggguggcaaau

SEQ ID NO: 21712 - RNA, 20 nt, Artificial Sequence
  spacer sequence CTCN PAM
cauuggaaguggcaaggggc

SEQ ID NO: 21713 - RNA, 20 nt, Artificial Sequence
  spacer sequence CTCN PAM
uuggaaguggcaaggggcuu

SEQ ID NO: 21714 - RNA, 20 nt, Artificial Sequence
  spacer sequence CTCN PAM
ugggggcagcuacacucguc

SEQ ID NO: 21715 - RNA, 20 nt, Artificial Sequence
  spacer sequence CTCN PAM
uccccagaggcacauucgug

SEQ ID NO: 21716 - RNA, 20 nt, Artificial Sequence
  spacer sequence CTCN PAM
ggggacgaguguagcugccc

SEQ ID NO: 21717 - RNA, 20 nt, Artificial Sequence
  spacer sequence CTCN PAM
cagacaccgucucacacguu

SEQ ID NO: 21718 - RNA, 20 nt, Artificial Sequence
  spacer sequence CTCN PAM
cacguuggcuuuggacaacc

SEQ ID NO: 21719 - RNA, 20 nt, Artificial Sequence
  spacer sequence CTCN PAM
agccuggugcccagugcuca

SEQ ID NO: 21720 - RNA, 20 nt, Artificial Sequence
  spacer sequence CTCN PAM
ggccaccuccugguccaguc

SEQ ID NO: 21721 - RNA, 20 nt, Artificial Sequence
  spacer sequence CTCN PAM
ugguccagucaccaccugca

SEQ ID NO: 21722 - RNA, 20 nt, Artificial Sequence
  spacer sequence CTCN PAM
gcagggcagguacaggggcc

SEQ ID NO: 21723 - RNA, 20 nt, Artificial Sequence
  spacer sequence CTCN PAM
gaugggagccugggucccug

SEQ ID NO: 21724 - RNA, 20 nt, Artificial Sequence
  spacer sequence CTCN PAM
cauccgagguggccccugua

SEQ ID NO: 21725 - RNA, 20 nt, Artificial Sequence
  spacer sequence CTCN PAM
gcucugccccuggguggcug

SEQ ID NO: 21726 - RNA, 20 nt, Artificial Sequence
  spacer sequence CTCN PAM
gccccuggguggcugggagg

SEQ ID NO: 21727 - RNA, 20 nt, Artificial Sequence
  spacer sequence CTCN PAM
cagccacccaggggcagagc

SEQ ID NO: 21728 - RNA, 20 nt, Artificial Sequence
  spacer sequence CTCN PAM
ucccagccacccaggggcag

SEQ ID NO: 21729 - RNA, 20 nt, Artificial Sequence
  spacer sequence CTCN PAM
ccucccagccacccaggggc

SEQ ID NO: 21730 - RNA, 20 nt, Artificial Sequence
  spacer sequence CTCN PAM
cgggggugaccugggcguca

SEQ ID NO: 21731 - RNA, 20 nt, Artificial Sequence
  spacer sequence CTCN PAM
ggggugaccugggcgucagc

SEQ ID NO: 21732 - RNA, 20 nt, Artificial Sequence
  spacer sequence CTCN PAM
uccucccuggagucugccug

SEQ ID NO: 21733 - RNA, 20 nt, Artificial Sequence
  spacer sequence CTCN PAM
ucccuggagucugccugagu

SEQ ID NO: 21734 - RNA, 20 nt, Artificial Sequence
  spacer sequence CTCN PAM
cuggagucugccugaguccc

SEQ ID NO: 21735 - RNA, 20 nt, Artificial Sequence
  spacer sequence CTCN PAM
agggaggaggaggggguucc

SEQ ID NO: 21736 - RNA, 20 nt, Artificial Sequence
  spacer sequence CTCN PAM
ggcagacuccagggaggagg

SEQ ID NO: 21737 - RNA, 20 nt, Artificial Sequence
  spacer sequence CTCN PAM
agccgcgagccuucgcugaa

SEQ ID NO: 21738 - RNA, 20 nt, Artificial Sequence
  spacer sequence CTCN PAM
agggacucaggcagacucca

SEQ ID NO: 21739 - RNA, 20 nt, Artificial Sequence
  spacer sequence CTCN PAM
cggcucgagggacucaggca

SEQ ID NO: 21740 - RNA, 20 nt, Artificial Sequence
  spacer sequence CTCN PAM
gcuucuggugugugacgagg

SEQ ID NO: 21741 - RNA, 20 nt, Artificial Sequence
  spacer sequence CTCN PAM
ucacacaccagaagcagagg

SEQ ID NO: 21742 - RNA, 20 nt, Artificial Sequence
  spacer sequence CTCN PAM
gggaaaaucaagaacaucgg

SEQ ID NO: 21743 - RNA, 20 nt, Artificial Sequence
  spacer sequence CTCN PAM
aggaacuggggcuguucacg

SEQ ID NO: 21744 - RNA, 20 nt, Artificial Sequence
  spacer sequence CTCN PAM
ccagguugaaaggcaagaac

SEQ ID NO: 21745 - RNA, 20 nt, Artificial Sequence
  spacer sequence CTCN PAM
aaggccggcaggccccaccc

SEQ ID NO: 21746 - RNA, 20 nt, Artificial Sequence
  spacer sequence CTCN PAM
cuuuaauggcucaaaggccg

SEQ ID NO: 21747 - RNA, 20 nt, Artificial Sequence
  spacer sequence CTCN PAM
gccucccuuuaauggcucaa

SEQ ID NO: 21748 - RNA, 20 nt, Artificial Sequence
  spacer sequence CTCN PAM
cccugagcgccuuggggugg

SEQ ID NO: 21749 - RNA, 20 nt, Artificial Sequence
  spacer sequence CTCN PAM
gggugagcgggugcaggcag

SEQ ID NO: 21750 - RNA, 20 nt, Artificial Sequence
  spacer sequence CTCN PAM
caccaccccaaggcgcucag

SEQ ID NO: 21751 - RNA, 20 nt, Artificial Sequence
  spacer sequence CTCN PAM
gguucugcggccgccccguc

SEQ ID NO: 21752 - RNA, 20 nt, Artificial Sequence
  spacer sequence CTCN PAM
cuuugcugggcucacagccc

SEQ ID NO: 21753 - RNA, 20 nt, Artificial Sequence
  spacer sequence CTCN PAM
cagccccugggugaugacag

SEQ ID NO: 21754 - RNA, 20 nt, Artificial Sequence
  spacer sequence CTCN PAM
gucaucacccaggggcugug

SEQ ID NO: 21755 - RNA, 20 nt, Artificial Sequence
  spacer sequence CTCN PAM
guagagaagccggccccugg

SEQ ID NO: 21756 - RNA, 20 nt, Artificial Sequence
  spacer sequence CTCN PAM
acagagcuugugggugucca

SEQ ID NO: 21757 - RNA, 20 nt, Artificial Sequence
  spacer sequence CTCN PAM
uguguauuucccaggggccg

SEQ ID NO: 21758 - RNA, 20 nt, Artificial Sequence
  spacer sequence CTCN PAM
ccaggccuccuguguauuuc

SEQ ID NO: 21759 - RNA, 20 nt, Artificial Sequence
  spacer sequence CTCN PAM
uccccaggccuccuguguau

SEQ ID NO: 21760 - RNA, 20 nt, Artificial Sequence
  spacer sequence CTCN PAM
acagacaccuccuccccagg

SEQ ID NO: 21761 - RNA, 20 nt, Artificial Sequence
  spacer sequence CTCN PAM
cgggaaggugcugccccgcc

SEQ ID NO: 21762 - RNA, 20 nt, Artificial Sequence
  spacer sequence CTCN PAM
cucacgcuguagucuuggag

SEQ ID NO: 21763 - RNA, 20 nt, Artificial Sequence
  spacer sequence CTCN PAM
cacgcuguagucuuggagaa

SEQ ID NO: 21764 - RNA, 20 nt, Artificial Sequence
  spacer sequence CTCN PAM
cgcuguagucuuggagaagu

SEQ ID NO: 21765 - RNA, 20 nt, Artificial Sequence
  spacer sequence CTCN PAM
aagacuacagcgugagagag

SEQ ID NO: 21766 - RNA, 20 nt, Artificial Sequence
  spacer sequence CTCN PAM
ucugggccucaguuuuccca

SEQ ID NO: 21767 - RNA, 20 nt, Artificial Sequence
  spacer sequence CTCN PAM
gggccucaguuuucccaucu

SEQ ID NO: 21768 - RNA, 20 nt, Artificial Sequence
  spacer sequence CTCN PAM
guuuucccaucuguaaaaua

SEQ ID NO: 21769 - RNA, 20 nt, Artificial Sequence
  spacer sequence CTCN PAM
caaaguacuaggauugcagg

SEQ ID NO: 21770 - RNA, 20 nt, Artificial Sequence
  spacer sequence CTCN PAM
gccucccaaaguacuaggau

SEQ ID NO: 21771 - RNA, 20 nt, Artificial Sequence
  spacer sequence CTCN PAM
ugaccuugugauccgcccac

SEQ ID NO: 21772 - RNA, 20 nt, Artificial Sequence
  spacer sequence CTCN PAM
acuaaaaauacaaaaacuua

SEQ ID NO: 21773 - RNA, 20 nt, Artificial Sequence
  spacer sequence CTCN PAM
cgccuguaauccuagcuauu

SEQ ID NO: 21774 - RNA, 20 nt, Artificial Sequence
  spacer sequence CTCN PAM
ugaauagcuaggauuacagg

SEQ ID NO: 21775 - RNA, 20 nt, Artificial Sequence
  spacer sequence CTCN PAM
gccuccugaauagcuaggau

SEQ ID NO: 21776 - RNA, 20 nt, Artificial Sequence
  spacer sequence CTCN PAM
ugccucagccuccugaauag

SEQ ID NO: 21777 - RNA, 20 nt, Artificial Sequence
  spacer sequence CTCN PAM
cagguucaagcgauucuccu

SEQ ID NO: 21778 - RNA, 20 nt, Artificial Sequence
  spacer sequence CTCN PAM
gccucccagguucaagcgau

SEQ ID NO: 21779 - RNA, 20 nt, Artificial Sequence
  spacer sequence CTCN PAM
cugcagccuccgccucccag

SEQ ID NO: 21780 - RNA, 20 nt, Artificial Sequence
  spacer sequence CTCN PAM
gcucacugcagccuccgccu

SEQ ID NO: 21781 - RNA, 20 nt, Artificial Sequence
  spacer sequence CTCN PAM
aaccugggcgacagagcgag

SEQ ID NO: 21782 - RNA, 20 nt, Artificial Sequence
  spacer sequence CTCN PAM
gucgcccagguuggagugca

SEQ ID NO: 21783 - RNA, 20 nt, Artificial Sequence
  spacer sequence CTCN PAM
cucugucgcccagguuggag

SEQ ID NO: 21784 - RNA, 20 nt, Artificial Sequence
  spacer sequence CTCN PAM
gucucaaauaaaauaaaaua

SEQ ID NO: 21785 - RNA, 20 nt, Artificial Sequence
  spacer sequence CTCN PAM
aauaaaauaaaauaggccuu

SEQ ID NO: 21786 - RNA, 20 nt, Artificial Sequence
  spacer sequence CTCN PAM
gaaggccuauuuuauuuuau

SEQ ID NO: 21787 - RNA, 20 nt, Artificial Sequence
  spacer sequence CTCN PAM
gggcuccgaaggccuauuuu

SEQ ID NO: 21788 - RNA, 20 nt, Artificial Sequence
  spacer sequence CTCN PAM
cacucagggcuccgaaggcc

SEQ ID NO: 21789 - RNA, 20 nt, Artificial Sequence
  spacer sequence CTCN PAM
gccugggcgugggacgucuc

SEQ ID NO: 21790 - RNA, 20 nt, Artificial Sequence
  spacer sequence CTCN PAM
acagugcccccagcucaugg

SEQ ID NO: 21791 - RNA, 20 nt, Artificial Sequence
  spacer sequence CTCN PAM
ugggcgauccagccuccacc

SEQ ID NO: 21792 - RNA, 20 nt, Artificial Sequence
  spacer sequence CTCN PAM
acccugcuggggccucaguu

SEQ ID NO: 21793 - RNA, 20 nt, Artificial Sequence
  spacer sequence CTCN PAM
guuuuccccgaugagguggu

SEQ ID NO: 21794 - RNA, 20 nt, Artificial Sequence
  spacer sequence CTCN PAM
ucggggaaaacugaggcccc

SEQ ID NO: 21795 - RNA, 20 nt, Artificial Sequence
  spacer sequence CTCN PAM
ccaccucaucggggaaaacu

SEQ ID NO: 21796 - RNA, 20 nt, Artificial Sequence
  spacer sequence CTCN PAM
accacacucaccaccucauc

SEQ ID NO: 21797 - RNA, 20 nt, Artificial Sequence
  spacer sequence CTCN PAM
ccaccacacucaccaccuca

SEQ ID NO: 21798 - RNA, 20 nt, Artificial Sequence
  spacer sequence CTCN PAM
gcagugcucuccaccacacu

SEQ ID NO: 21799 - RNA, 20 nt, Artificial Sequence
  spacer sequence CTCN PAM
gguuccaauuccagccuaaa

SEQ ID NO: 21800 - RNA, 20 nt, Artificial Sequence
  spacer sequence CTCN PAM
ggaauggcggggguuuaggc

SEQ ID NO: 21801 - RNA, 20 nt, Artificial Sequence
  spacer sequence CTCN PAM
guuucccuaucuacaagcca

SEQ ID NO: 21802 - RNA, 20 nt, Artificial Sequence
  spacer sequence CTCN PAM
cuggcuuguagauagggaaa

SEQ ID NO: 21803 - RNA, 20 nt, Artificial Sequence
  spacer sequence CTCN PAM
cgccacccccuucacguccu

SEQ ID NO: 21804 - RNA, 20 nt, Artificial Sequence
  spacer sequence CTCN PAM
caccgccgccucccgccacc

SEQ ID NO: 21805 - RNA, 20 nt, Artificial Sequence
  spacer sequence CTCN PAM
cggcgccucccaccgccgcc

SEQ ID NO: 21806 - RNA, 20 nt, Artificial Sequence
  spacer sequence CTCN PAM
gggugcgcggccucacggcg

SEQ ID NO: 21807 - RNA, 20 nt, Artificial Sequence
  spacer sequence CTCN PAM
cgccuguaaucccagcacuu

SEQ ID NO: 21808 - RNA, 20 nt, Artificial Sequence
  spacer sequence CTCN PAM
caaagugcugggauuacagg

SEQ ID NO: 21809 - RNA, 20 nt, Artificial Sequence
  spacer sequence CTCN PAM
gccucccaaagugcugggau

SEQ ID NO: 21810 - RNA, 20 nt, Artificial Sequence
  spacer sequence CTCN PAM
ggugaugcccccgccucagc

SEQ ID NO: 21811 - RNA, 20 nt, Artificial Sequence
  spacer sequence CTCN PAM
ugaccucaggugaugccccc

SEQ ID NO: 21812 - RNA, 20 nt, Artificial Sequence
  spacer sequence CTCN PAM
aacuccugaccucaggugau

SEQ ID NO: 21813 - RNA, 20 nt, Artificial Sequence
  spacer sequence CTCN PAM
acuaaaaauacaaaaauagc

SEQ ID NO: 21814 - RNA, 20 nt, Artificial Sequence
  spacer sequence CTCN PAM
ugccaguaaucccagcuacu

SEQ ID NO: 21815 - RNA, 20 nt, Artificial Sequence
  spacer sequence CTCN PAM
gcuucccuaguagcugggau

SEQ ID NO: 21816 - RNA, 20 nt, Artificial Sequence
  spacer sequence CTCN PAM
ugccucagcuucccuaguag

SEQ ID NO: 21817 - RNA, 20 nt, Artificial Sequence
  spacer sequence CTCN PAM
ccuguucaagcaauucuccu

SEQ ID NO: 21818 - RNA, 20 nt, Artificial Sequence
  spacer sequence CTCN PAM
cggcaaccuccccuguucaa

SEQ ID NO: 21819 - RNA, 20 nt, Artificial Sequence
  spacer sequence CTCN PAM
gcucacggcaaccuccccug

SEQ ID NO: 21820 - RNA, 20 nt, Artificial Sequence
  spacer sequence CTCN PAM
agccugggugacaagagcga

SEQ ID NO: 21821 - RNA, 20 nt, Artificial Sequence
  spacer sequence CTCN PAM
ugucacccaggcuggagugc

SEQ ID NO: 21822 - RNA, 20 nt, Artificial Sequence
  spacer sequence CTCN PAM
cucuugucacccaggcugga

SEQ ID NO: 21823 - RNA, 20 nt, Artificial Sequence
  spacer sequence CTCN PAM
gucucaaaaaaaaaacacaa

SEQ ID NO: 21824 - RNA, 20 nt, Artificial Sequence
  spacer sequence CTCN PAM
aaaaaaaaacacaaaaaaag

SEQ ID NO: 21825 - RNA, 20 nt, Artificial Sequence
  spacer sequence CTCN PAM
ugagcagcccugcuggauuc

SEQ ID NO: 21826 - RNA, 20 nt, Artificial Sequence
  spacer sequence CTCN PAM
ggaggggggugcuuuuuuug

SEQ ID NO: 21827 - RNA, 20 nt, Artificial Sequence
  spacer sequence CTCN PAM
aagaagagacugagguucag

SEQ ID NO: 21828 - RNA, 20 nt, Artificial Sequence
  spacer sequence CTCN PAM
ucuucgaguaaaaaggcccc

SEQ ID NO: 21829 - RNA, 20 nt, Artificial Sequence
  spacer sequence CTCN PAM
gucucuucuucgaguaaaaa

SEQ ID NO: 21830 - RNA, 20 nt, Artificial Sequence
  spacer sequence CTCN PAM
gaaccucagucucuucuucg

SEQ ID NO: 21831 - RNA, 20 nt, Artificial Sequence
  spacer sequence CTCN PAM
acaagcagccccucuggcgu

SEQ ID NO: 21832 - RNA, 20 nt, Artificial Sequence
  spacer sequence CTCN PAM
ggcguaggucaggacagagc

SEQ ID NO: 21833 - RNA, 20 nt, Artificial Sequence
  spacer sequence CTCN PAM
guccugaccuacgccagagg

SEQ ID NO: 21834 - RNA, 20 nt, Artificial Sequence
  spacer sequence CTCN PAM
gcuguguucccugcccucau

SEQ ID NO: 21835 - RNA, 20 nt, Artificial Sequence
  spacer sequence CTCN PAM
uagacggcgcuaggcccagu

SEQ ID NO: 21836 - RNA, 20 nt, Artificial Sequence
  spacer sequence CTCN PAM
ccacagucccagcaaggccu

SEQ ID NO: 21837 - RNA, 20 nt, Artificial Sequence
  spacer sequence CTCN PAM
gcaccuugacuaagaaucca

SEQ ID NO: 21838 - RNA, 20 nt, Artificial Sequence
  spacer sequence CTCN PAM
uggauucuuagucaaggugc

SEQ ID NO: 21839 - RNA, 20 nt, Artificial Sequence
  spacer sequence CTCN PAM
ggcgcccaugguccuccugg

SEQ ID NO: 21840 - RNA, 20 nt, Artificial Sequence
  spacer sequence CTCN PAM
gcguccccaucucucggggu

SEQ ID NO: 21841 - RNA, 20 nt, Artificial Sequence
  spacer sequence CTCN PAM
cgggguggccugggucuuuu

SEQ ID NO: 21842 - RNA, 20 nt, Artificial Sequence
  spacer sequence CTCN PAM
ggguggccugggucuuuuga

SEQ ID NO: 21843 - RNA, 20 nt, Artificial Sequence
  spacer sequence CTCN PAM
ugcgguucuuuuuuuuuuuu

SEQ ID NO: 21844 - RNA, 20 nt, Artificial Sequence
  spacer sequence CTCN PAM
aaaaaaaaaaaaaaaaaaaa

SEQ ID NO: 21845 - RNA, 20 nt, Artificial Sequence
  spacer sequence CTCN PAM
aacucaaaaaaaaaaaaaaa

SEQ ID NO: 21846 - RNA, 20 nt, Artificial Sequence
  spacer sequence CTCN PAM
ugucgcccaggcuggagugc

SEQ ID NO: 21847 - RNA, 20 nt, Artificial Sequence
  spacer sequence CTCN PAM
agccugggcgacaagagcaa

SEQ ID NO: 21848 - RNA, 20 nt, Artificial Sequence
  spacer sequence CTCN PAM
gcucacugcaaccuccaacu

SEQ ID NO: 21849 - RNA, 20 nt, Artificial Sequence
  spacer sequence CTCN PAM
cugcaaccuccaacuccugg

SEQ ID NO: 21850 - RNA, 20 nt, Artificial Sequence
  spacer sequence CTCN PAM
aacuccuggguucaagugau

SEQ ID NO: 21851 - RNA, 20 nt, Artificial Sequence
  spacer sequence CTCN PAM
uggguucaagugauucuucu

SEQ ID NO: 21852 - RNA, 20 nt, Artificial Sequence
  spacer sequence CTCN PAM
gccucccaaguagcugggau

SEQ ID NO: 21853 - RNA, 20 nt, Artificial Sequence
  spacer sequence CTCN PAM
caaguagcugggauuauaau

SEQ ID NO: 21854 - RNA, 20 nt, Artificial Sequence
  spacer sequence CTCN PAM
acuaaaaauacaaaauuuag

SEQ ID NO: 21855 - RNA, 20 nt, Artificial Sequence
  spacer sequence CTCN PAM
aacuccuggccucaagugau

SEQ ID NO: 21856 - RNA, 20 nt, Artificial Sequence
  spacer sequence CTCN PAM
uggccucaagugauccgccc

SEQ ID NO: 21857 - RNA, 20 nt, Artificial Sequence
  spacer sequence CTCN PAM
agugauccgcccgccucggc

SEQ ID NO: 21858 - RNA, 20 nt, Artificial Sequence
  spacer sequence CTCN PAM
gccucccaaagugcugggau

SEQ ID NO: 21859 - RNA, 20 nt, Artificial Sequence
  spacer sequence CTCN PAM
caaagugcugggauuacagg

SEQ ID NO: 21860 - RNA, 20 nt, Artificial Sequence
  spacer sequence CTCN PAM
caccuguaaucccagcacuu

SEQ ID NO: 21861 - RNA, 20 nt, Artificial Sequence
  spacer sequence CTCN PAM
uauggguuuuuauguggaug

SEQ ID NO: 21862 - RNA, 20 nt, Artificial Sequence
  spacer sequence CTCN PAM
cagcagcccugagggagccc

SEQ ID NO: 21863 - RNA, 20 nt, Artificial Sequence
  spacer sequence CTCN PAM
gggcugcugggaggaauucc

SEQ ID NO: 21864 - RNA, 20 nt, Artificial Sequence
  spacer sequence CTCN PAM
cucagggcugcugggaggaa

SEQ ID NO: 21865 - RNA, 20 nt, Artificial Sequence
  spacer sequence CTCN PAM
gggacgugggggaacaucac

SEQ ID NO: 21866 - RNA, 20 nt, Artificial Sequence
  spacer sequence CTCN PAM
uccgggacgugggggaacau

SEQ ID NO: 21867 - RNA, 20 nt, Artificial Sequence
  spacer sequence CTCN PAM
uagcccuguuuucuccuccg

SEQ ID NO: 21868 - RNA, 20 nt, Artificial Sequence
  spacer sequence CTCN PAM
cuuagcccuguuuucuccuc

SEQ ID NO: 21869 - RNA, 20 nt, Artificial Sequence
  spacer sequence CTCN PAM
gggggguuugguguggccug

SEQ ID NO: 21870 - RNA, 20 nt, Artificial Sequence
  spacer sequence CTCN PAM
ccuagauggcccccuucuug

SEQ ID NO: 21871 - RNA, 20 nt, Artificial Sequence
  spacer sequence CTCN PAM
gccccuccggccccccagga

SEQ ID NO: 21872 - RNA, 20 nt, Artificial Sequence
  spacer sequence CTCN PAM
ggccccccaggagacacagg

SEQ ID NO: 21873 - RNA, 20 nt, Artificial Sequence
  spacer sequence CTCN PAM
uggggggccggaggggcuga

SEQ ID NO: 21874 - RNA, 20 nt, Artificial Sequence
  spacer sequence CTCN PAM
gcgugcacaguggccugugu

SEQ ID NO: 21875 - RNA, 20 nt, Artificial Sequence
  spacer sequence CTCN PAM
cugagcggugcugagaggcg

SEQ ID NO: 21876 - RNA, 20 nt, Artificial Sequence
  spacer sequence CTCN PAM
gagcggugcugagaggcggu

SEQ ID NO: 21877 - RNA, 20 nt, Artificial Sequence
  spacer sequence CTCN PAM
gagagggucagcaggugucc

SEQ ID NO: 21878 - RNA, 20 nt, Artificial Sequence
  spacer sequence CTCN PAM
gcaccgcucagagaggguca

SEQ ID NO: 21879 - RNA, 20 nt, Artificial Sequence
  spacer sequence CTCN PAM
cagcaccgcucagagagggu

SEQ ID NO: 21880 - RNA, 20 nt, Artificial Sequence
  spacer sequence CTCN PAM
caccgccucucagcaccgcu

SEQ ID NO: 21881 - RNA, 20 nt, Artificial Sequence
  spacer sequence CTCN PAM
cuuggcugccuggcccuccc

SEQ ID NO: 21882 - RNA, 20 nt, Artificial Sequence
  spacer sequence CTCN PAM
gccgaaaccucccuuggcug

SEQ ID NO: 21883 - RNA, 20 nt, Artificial Sequence
  spacer sequence CTCN PAM
ucggggccaccuggaggccc

SEQ ID NO: 21884 - RNA, 20 nt, Artificial Sequence
  spacer sequence CTCN PAM
gggccaccuggaggcccugg

SEQ ID NO: 21885 - RNA, 20 nt, Artificial Sequence
  spacer sequence CTCN PAM
agguggccccgaggagccag

SEQ ID NO: 21886 - RNA, 20 nt, Artificial Sequence
  spacer sequence CTCN PAM
acccccagggccuccaggug

SEQ ID NO: 21887 - RNA, 20 nt, Artificial Sequence
  spacer sequence CTCN PAM
uucucccuccuccuccucug

SEQ ID NO: 21888 - RNA, 20 nt, Artificial Sequence
  spacer sequence CTCN PAM
cuccuccuccucuggacuuu

SEQ ID NO: 21889 - RNA, 20 nt, Artificial Sequence
  spacer sequence CTCN PAM
uccuccucuggacuuuguuu

SEQ ID NO: 21890 - RNA, 20 nt, Artificial Sequence
  spacer sequence CTCN PAM
uccucuggacuuuguuuccu

SEQ ID NO: 21891 - RNA, 20 nt, Artificial Sequence
  spacer sequence CTCN PAM
ucuggacuuuguuuccugau

SEQ ID NO: 21892 - RNA, 20 nt, Artificial Sequence
  spacer sequence CTCN PAM
ggacuuuguuuccugauccc

SEQ ID NO: 21893 - RNA, 20 nt, Artificial Sequence
  spacer sequence CTCN PAM
ccccagccccaccugggauc

SEQ ID NO: 21894 - RNA, 20 nt, Artificial Sequence
  spacer sequence CTCN PAM
ccuggguggggccucuguuc

SEQ ID NO: 21895 - RNA, 20 nt, Artificial Sequence
  spacer sequence CTCN PAM
guucccuggcaaccuggcgg

SEQ ID NO: 21896 - RNA, 20 nt, Artificial Sequence
  spacer sequence CTCN PAM
gcccugcccgccagguugcc

SEQ ID NO: 21897 - RNA, 20 nt, Artificial Sequence
  spacer sequence CTCN PAM
cagcuccgcccugcccgcca

SEQ ID NO: 21898 - RNA, 20 nt, Artificial Sequence
  spacer sequence CTCN PAM
gugcccaucgaggagucaga

SEQ ID NO: 21899 - RNA, 20 nt, Artificial Sequence
  spacer sequence CTCN PAM
augggcacagaggccuccca

SEQ ID NO: 21900 - RNA, 20 nt, Artificial Sequence
  spacer sequence CTCN PAM
ucgaugggcacagaggccuc

SEQ ID NO: 21901 - RNA, 20 nt, Artificial Sequence
  spacer sequence CTCN PAM
gacuccucgaugggcacaga

SEQ ID NO: 21902 - RNA, 20 nt, Artificial Sequence
  spacer sequence CTCN PAM
acucugacuccucgaugggc

SEQ ID NO: 21903 - RNA, 20 nt, Artificial Sequence
  spacer sequence CTCN PAM
acagucugcagccuccacuc

SEQ ID NO: 21904 - RNA, 20 nt, Artificial Sequence
  spacer sequence CTCN PAM
cggcuccacagucugcagcc

SEQ ID NO: 21905 - RNA, 20 nt, Artificial Sequence
  spacer sequence CTCN PAM
ccugccggcucccggcucca

SEQ ID NO: 21906 - RNA, 20 nt, Artificial Sequence
  spacer sequence CTCN PAM
cacgccaaauguggauccaa

SEQ ID NO: 21907 - RNA, 20 nt, Artificial Sequence
  spacer sequence CTCN PAM
cuggaucccaagugccgcca

SEQ ID NO: 21908 - RNA, 20 nt, Artificial Sequence
  spacer sequence CTCN PAM
gagccucccugaggcaccuu

SEQ ID NO: 21909 - RNA, 20 nt, Artificial Sequence
  spacer sequence CTCN PAM
gagggugacgggguggggca

SEQ ID NO: 21910 - RNA, 20 nt, Artificial Sequence
  spacer sequence CTCN PAM
cugaggcaccuuucccucug

SEQ ID NO: 21911 - RNA, 20 nt, Artificial Sequence
  spacer sequence CTCN PAM
gggaggcuccgagggugacg

SEQ ID NO: 21912 - RNA, 20 nt, Artificial Sequence
  spacer sequence CTCN PAM
gcccccgcuagguacucugg

SEQ ID NO: 21913 - RNA, 20 nt, Artificial Sequence
  spacer sequence CTCN PAM
ggggccucaagggcacccac

SEQ ID NO: 21914 - RNA, 20 nt, Artificial Sequence
  spacer sequence CTCN PAM
agggcacccacugggagagc

SEQ ID NO: 21915 - RNA, 20 nt, Artificial Sequence
  spacer sequence CTCN PAM
cagugggugcccuugaggcc

SEQ ID NO: 21916 - RNA, 20 nt, Artificial Sequence
  spacer sequence CTCN PAM
cccagugggugcccuugagg

SEQ ID NO: 21917 - RNA, 20 nt, Artificial Sequence
  spacer sequence CTCN PAM
gcucucccagugggugcccu

SEQ ID NO: 21918 - RNA, 20 nt, Artificial Sequence
  spacer sequence CTCN PAM
cugcucucccagugggugcc

SEQ ID NO: 21919 - RNA, 20 nt, Artificial Sequence
  spacer sequence CTCN PAM
gcuggggcuuuugaacccca

SEQ ID NO: 21920 - RNA, 20 nt, Artificial Sequence
  spacer sequence CTCN PAM
gggauuugggguucaaaagc

SEQ ID NO: 21921 - RNA, 20 nt, Artificial Sequence
  spacer sequence CTCN PAM
aagggaggggccggguuggc

SEQ ID NO: 21922 - RNA, 20 nt, Artificial Sequence
  spacer sequence CTCN PAM
cuuggagggcucugggauuu

SEQ ID NO: 21923 - RNA, 20 nt, Artificial Sequence
  spacer sequence CTCN PAM
gaccaugggggugccaaccc

SEQ ID NO: 21924 - RNA, 20 nt, Artificial Sequence
  spacer sequence CTCN PAM
ggccucugaccaugggggug

SEQ ID NO: 21925 - RNA, 20 nt, Artificial Sequence
  spacer sequence CTCN PAM
augguucugggaauuccaga

SEQ ID NO: 21926 - RNA, 20 nt, Artificial Sequence
  spacer sequence CTCN PAM
ggaauucccagaaccaugga

SEQ ID NO: 21927 - RNA, 20 nt, Artificial Sequence
  spacer sequence CTCN PAM
agaagccucuggaauuccca

SEQ ID NO: 21928 - RNA, 20 nt, Artificial Sequence
  spacer sequence CTCN PAM
ccagaagccucuggaauucc

SEQ ID NO: 21929 - RNA, 20 nt, Artificial Sequence
  spacer sequence CTCN PAM
cagucaggggccugguggga

SEQ ID NO: 21930 - RNA, 20 nt, Artificial Sequence
  spacer sequence CTCN PAM
gggcaguaaacacccccgug

SEQ ID NO: 21931 - RNA, 20 nt, Artificial Sequence
  spacer sequence CTCN PAM
guguccccaaaccagccccc

SEQ ID NO: 21932 - RNA, 20 nt, Artificial Sequence
  spacer sequence CTCN PAM
uccguguccccaaaccagcc

SEQ ID NO: 21933 - RNA, 20 nt, Artificial Sequence
  spacer sequence CTCN PAM
gccaccccuccuccgugucc

SEQ ID NO: 21934 - RNA, 20 nt, Artificial Sequence
  spacer sequence CTCN PAM
uuccgccuguacucagccac

SEQ ID NO: 21935 - RNA, 20 nt, Artificial Sequence
  spacer sequence CTCN PAM
ggccggggcuggggacuugg

SEQ ID NO: 21936 - RNA, 20 nt, Artificial Sequence
  spacer sequence CTCN PAM
ggugggggugaggugguagc

SEQ ID NO: 21937 - RNA, 20 nt, Artificial Sequence
  spacer sequence CTCN PAM
cccccacccgaggacccagg

SEQ ID NO: 21938 - RNA, 20 nt, Artificial Sequence
  spacer sequence CTCN PAM
gcccagcgucugccggugga

SEQ ID NO: 21939 - RNA, 20 nt, Artificial Sequence
  spacer sequence CTCN PAM
accggcagacgcugggccga

SEQ ID NO: 21940 - RNA, 20 nt, Artificial Sequence
  spacer sequence CTCN PAM
gcccaggagcccaaggagcu

SEQ ID NO: 21941 - RNA, 20 nt, Artificial Sequence
  spacer sequence CTCN PAM
ugggcggagcuccaccggca

SEQ ID NO: 21942 - RNA, 20 nt, Artificial Sequence
  spacer sequence CTCN PAM
uugggcuccugggcggagcu

SEQ ID NO: 21943 - RNA, 20 nt, Artificial Sequence
  spacer sequence CTCN PAM
gcuccuugggcuccugggcg

SEQ ID NO: 21944 - RNA, 20 nt, Artificial Sequence
  spacer sequence CTCN PAM
agggugacugcaacccugag

SEQ ID NO: 21945 - RNA, 20 nt, Artificial Sequence
  spacer sequence CTCN PAM
ggguugcagucacccuugag

SEQ ID NO: 21946 - RNA, 20 nt, Artificial Sequence
  spacer sequence CTCN PAM
cuucugcauggccuccuugu

SEQ ID NO: 21947 - RNA, 20 nt, Artificial Sequence
  spacer sequence CTCN PAM
uugucugagucucggcccca

SEQ ID NO: 21948 - RNA, 20 nt, Artificial Sequence
  spacer sequence CTCN PAM
gacaaggaggccaugcagaa

SEQ ID NO: 21949 - RNA, 20 nt, Artificial Sequence
  spacer sequence CTCN PAM
gccccacaagggaaccuuug

SEQ ID NO: 21950 - RNA, 20 nt, Artificial Sequence
  spacer sequence CTCN PAM
cauagagccaacuggcugau

SEQ ID NO: 21951 - RNA, 20 nt, Artificial Sequence
  spacer sequence CTCN PAM
augugaggggcaaagguucc

SEQ ID NO: 21952 - RNA, 20 nt, Artificial Sequence
  spacer sequence CTCN PAM
ucagccaguuggcucuaugu

SEQ ID NO: 21953 - RNA, 20 nt, Artificial Sequence
  spacer sequence CTCN PAM
uuccucaucagccaguuggc

SEQ ID NO: 21954 - RNA, 20 nt, Artificial Sequence
  spacer sequence CTCN PAM
guugauaccagaaugaaacu

SEQ ID NO: 21955 - RNA, 20 nt, Artificial Sequence
  spacer sequence CTCN PAM
cccugaacucuguugauacc

SEQ ID NO: 21956 - RNA, 20 nt, Artificial Sequence
  spacer sequence CTCN PAM
cagccucacccugaacucug

SEQ ID NO: 21957 - RNA, 20 nt, Artificial Sequence
  spacer sequence CTCN PAM
ucccagccucacccugaacu

SEQ ID NO: 21958 - RNA, 20 nt, Artificial Sequence
  spacer sequence CTCN PAM
uacaggaagcccccuggguu

SEQ ID NO: 21959 - RNA, 20 nt, Artificial Sequence
  spacer sequence CTCN PAM
aaaucacccccuccuacagg

SEQ ID NO: 21960 - RNA, 20 nt, Artificial Sequence
  spacer sequence CTCN PAM
gucaucgcugugugaccuca

SEQ ID NO: 21961 - RNA, 20 nt, Artificial Sequence
  spacer sequence CTCN PAM
gaugagcagguucuccucuc

SEQ ID NO: 21962 - RNA, 20 nt, Artificial Sequence
  spacer sequence CTCN PAM
ucugaggucacacagcgaug

SEQ ID NO: 21963 - RNA, 20 nt, Artificial Sequence
  spacer sequence CTCN PAM
ucucugggucccagcucccu

SEQ ID NO: 21964 - RNA, 20 nt, Artificial Sequence
  spacer sequence CTCN PAM
cugggucccagcucccucuc

SEQ ID NO: 21965 - RNA, 20 nt, Artificial Sequence
  spacer sequence CTCN PAM
gggucccagcucccucucuc

SEQ ID NO: 21966 - RNA, 20 nt, Artificial Sequence
  spacer sequence CTCN PAM
cucucucgaaaaccggaguc

SEQ ID NO: 21967 - RNA, 20 nt, Artificial Sequence
  spacer sequence CTCN PAM
cucgaaaaccggagucgaaa

SEQ ID NO: 21968 - RNA, 20 nt, Artificial Sequence
  spacer sequence CTCN PAM
cgaaaaccggagucgaaaac

SEQ ID NO: 21969 - RNA, 20 nt, Artificial Sequence
  spacer sequence CTCN PAM
aaaaccggagucgaaaacgg

SEQ ID NO: 21970 - RNA, 20 nt, Artificial Sequence
  spacer sequence CTCN PAM
gguuuucgagagagggagcu

SEQ ID NO: 21971 - RNA, 20 nt, Artificial Sequence
  spacer sequence CTCN PAM
uccugcaacaccuuggaacc

SEQ ID NO: 21972 - RNA, 20 nt, Artificial Sequence
  spacer sequence CTCN PAM
ggacgccgagguccuuagcc

SEQ ID NO: 21973 - RNA, 20 nt, Artificial Sequence
  spacer sequence CTCN PAM
gcguccugagacucuuccug

SEQ ID NO: 21974 - RNA, 20 nt, Artificial Sequence
  spacer sequence CTCN PAM
ucccccgagggcagcgccgc

SEQ ID NO: 21975 - RNA, 20 nt, Artificial Sequence
  spacer sequence CTCN PAM
ggggaagagccccaggacgg

SEQ ID NO: 21976 - RNA, 20 nt, Artificial Sequence
  spacer sequence CTCN PAM
uggccggcauucuugggcag

SEQ ID NO: 21977 - RNA, 20 nt, Artificial Sequence
  spacer sequence CTCN PAM
cauggccggcauucuugggc

SEQ ID NO: 21978 - RNA, 20 nt, Artificial Sequence
  spacer sequence CTCN PAM
acuaaaaauacaaaacuuag

SEQ ID NO: 21979 - RNA, 20 nt, Artificial Sequence
  spacer sequence CTCN PAM
caaguagcugggacuacagg

SEQ ID NO: 21980 - RNA, 20 nt, Artificial Sequence
  spacer sequence CTCN PAM
gccucccaaguagcugggac

SEQ ID NO: 21981 - RNA, 20 nt, Artificial Sequence
  spacer sequence CTCN PAM
ugccucagccucccaaguag

SEQ ID NO: 21982 - RNA, 20 nt, Artificial Sequence
  spacer sequence CTCN PAM
cggauucacaccauucuccu

SEQ ID NO: 21983 - RNA, 20 nt, Artificial Sequence
  spacer sequence CTCN PAM
gccucccggauucacaccau

SEQ ID NO: 21984 - RNA, 20 nt, Artificial Sequence
  spacer sequence CTCN PAM
auucacugcaaccucugccu

SEQ ID NO: 21985 - RNA, 20 nt, Artificial Sequence
  spacer sequence CTCN PAM
agccugggcgacagagggag

SEQ ID NO: 21986 - RNA, 20 nt, Artificial Sequence
  spacer sequence CTCN PAM
gucgcccaggcuggagugca

SEQ ID NO: 21987 - RNA, 20 nt, Artificial Sequence
  spacer sequence CTCN PAM
cucugucgcccaggcuggag

SEQ ID NO: 21988 - RNA, 20 nt, Artificial Sequence
  spacer sequence CTCN PAM
aucucaaaaaaaaaagcggg

SEQ ID NO: 21989 - RNA, 20 nt, Artificial Sequence
  spacer sequence CTCN PAM
aaaaaaaaagcggggggcgg

SEQ ID NO: 21990 - RNA, 20 nt, Artificial Sequence
  spacer sequence CTCN PAM
gugcccacccccgccccccg

SEQ ID NO: 21991 - RNA, 20 nt, Artificial Sequence
  spacer sequence CTCN PAM
ccugcugccugugccucagu

SEQ ID NO: 21992 - RNA, 20 nt, Artificial Sequence
  spacer sequence CTCN PAM
uggguucaaggccacugggc

SEQ ID NO: 21993 - RNA, 20 nt, Artificial Sequence
  spacer sequence CTCN PAM
ccagugauucacugaagcca

SEQ ID NO: 21994 - RNA, 20 nt, Artificial Sequence
  spacer sequence CTCN PAM
uuccuccccagugauucacu

SEQ ID NO: 21995 - RNA, 20 nt, Artificial Sequence
  spacer sequence CTCN PAM
gcucauuccuccccagugau

SEQ ID NO: 21996 - RNA, 20 nt, Artificial Sequence
  spacer sequence CTCN PAM
ucugcucauuccuccccagu

SEQ ID NO: 21997 - RNA, 20 nt, Artificial Sequence
  spacer sequence CTCN PAM
caguggggucgggguugggu

SEQ ID NO: 21998 - RNA, 20 nt, Artificial Sequence
  spacer sequence CTCN PAM
aggcugggcggacagcuccc

SEQ ID NO: 21999 - RNA, 20 nt, Artificial Sequence
  spacer sequence CTCN PAM
agcaggugccgggucuccca

SEQ ID NO: 22000 - RNA, 20 nt, Artificial Sequence
  spacer sequence CTCN PAM
cuuucucccggaguugacgu

SEQ ID NO: 22001 - RNA, 20 nt, Artificial Sequence
  spacer sequence CTCN PAM
cggaguugacgucugaugug

SEQ ID NO: 22002 - RNA, 20 nt, Artificial Sequence
  spacer sequence CTCN PAM
gggagaaagggagcuguccg

SEQ ID NO: 22003 - RNA, 20 nt, Artificial Sequence
  spacer sequence CTCN PAM
cugggcaaacauuccuacac

SEQ ID NO: 22004 - RNA, 20 nt, Artificial Sequence
  spacer sequence CTCN PAM
ccggggagcuccagggugca

SEQ ID NO: 22005 - RNA, 20 nt, Artificial Sequence
  spacer sequence CTCN PAM
ccggggagggcggguguagg

SEQ ID NO: 22006 - RNA, 20 nt, Artificial Sequence
  spacer sequence CTCN PAM
agggugcagggcguggaccu

SEQ ID NO: 22007 - RNA, 20 nt, Artificial Sequence
  spacer sequence CTCN PAM
accgugccuucuggcccuga

SEQ ID NO: 22008 - RNA, 20 nt, Artificial Sequence
  spacer sequence CTCN PAM
uugcggaaugcagaccggcu

SEQ ID NO: 22009 - RNA, 20 nt, Artificial Sequence
  spacer sequence CTCN PAM
gacgugggggucgggcucau

SEQ ID NO: 22010 - RNA, 20 nt, Artificial Sequence
  spacer sequence CTCN PAM
ucccagcugcucagacgugg

SEQ ID NO: 22011 - RNA, 20 nt, Artificial Sequence
  spacer sequence CTCN PAM
gggcugcaggaagggugcug

SEQ ID NO: 22012 - RNA, 20 nt, Artificial Sequence
  spacer sequence CTCN PAM
ccugcuguggccacagguca

SEQ ID NO: 22013 - RNA, 20 nt, Artificial Sequence
  spacer sequence CTCN PAM
cgccugcuguggccacaggu

SEQ ID NO: 22014 - RNA, 20 nt, Artificial Sequence
  spacer sequence CTCN PAM
cucucgccugcuguggccac

SEQ ID NO: 22015 - RNA, 20 nt, Artificial Sequence
  spacer sequence CTCN PAM
cacccgaaaccgucagccca

SEQ ID NO: 22016 - RNA, 20 nt, Artificial Sequence
  spacer sequence CTCN PAM
cggaaggccuugccuucucc

SEQ ID NO: 22017 - RNA, 20 nt, Artificial Sequence
  spacer sequence CTCN PAM
guggacgccgccugcccagc

SEQ ID NO: 22018 - RNA, 20 nt, Artificial Sequence
  spacer sequence CTCN PAM
uccguggacgccgccugccc

SEQ ID NO: 22019 - RNA, 20 nt, Artificial Sequence
  spacer sequence CTCN PAM
uccuccguggacgccgccug

SEQ ID NO: 22020 - RNA, 20 nt, Artificial Sequence
  spacer sequence CTCN PAM
ggucaggggagccaucugug

SEQ ID NO: 22021 - RNA, 20 nt, Artificial Sequence
  spacer sequence CTCN PAM
ccugacccgaggccuccucc

SEQ ID NO: 22022 - RNA, 20 nt, Artificial Sequence
  spacer sequence CTCN PAM
caaagcgugacgcacagaug

SEQ ID NO: 22023 - RNA, 20 nt, Artificial Sequence
  spacer sequence CTCN PAM
gcuguuugugugggauuuau

SEQ ID NO: 22024 - RNA, 20 nt, Artificial Sequence
  spacer sequence CTCN PAM
ccacggucucuccacuuuau

SEQ ID NO: 22025 - RNA, 20 nt, Artificial Sequence
  spacer sequence CTCN PAM
ccacuuuaugcuguuugaug

SEQ ID NO: 22026 - RNA, 20 nt, Artificial Sequence
  spacer sequence CTCN PAM
acuuuaugcuguuugaugcc

SEQ ID NO: 22027 - RNA, 20 nt, Artificial Sequence
  spacer sequence CTCN PAM
gaacuggaaaguggcaucaa

SEQ ID NO: 22028 - RNA, 20 nt, Artificial Sequence
  spacer sequence CTCN PAM
cugaacuggaaaguggcauc

SEQ ID NO: 22029 - RNA, 20 nt, Artificial Sequence
  spacer sequence CTCN PAM
aaaaaaaaaaaaaagaaaaa

SEQ ID NO: 22030 - RNA, 20 nt, Artificial Sequence
  spacer sequence CTCN PAM
gccucaaaaaaaaaaaaaaa

SEQ ID NO: 22031 - RNA, 20 nt, Artificial Sequence
  spacer sequence CTCN PAM
gucaccaggcuggagugcaa

SEQ ID NO: 22032 - RNA, 20 nt, Artificial Sequence
  spacer sequence CTCN PAM
agccuggugacagagcuaga

SEQ ID NO: 22033 - RNA, 20 nt, Artificial Sequence
  spacer sequence CTCN PAM
gcucccugcaagcuccaccu

SEQ ID NO: 22034 - RNA, 20 nt, Artificial Sequence
  spacer sequence CTCN PAM
cugcaagcuccaccucccgg

SEQ ID NO: 22035 - RNA, 20 nt, Artificial Sequence
  spacer sequence CTCN PAM
accucccggguucacagcau

SEQ ID NO: 22036 - RNA, 20 nt, Artificial Sequence
  spacer sequence CTCN PAM
cggguucacagcauucuccu

SEQ ID NO: 22037 - RNA, 20 nt, Artificial Sequence
  spacer sequence CTCN PAM
ugccucagccuccugaguag

SEQ ID NO: 22038 - RNA, 20 nt, Artificial Sequence
  spacer sequence CTCN PAM
gccuccugaguagcugggac

SEQ ID NO: 22039 - RNA, 20 nt, Artificial Sequence
  spacer sequence CTCN PAM
ugaguagcugggacuacagg

SEQ ID NO: 22040 - RNA, 20 nt, Artificial Sequence
  spacer sequence CTCN PAM
ggaggcugaggcaggagaau

SEQ ID NO: 22041 - RNA, 20 nt, Artificial Sequence
  spacer sequence CTCN PAM
acuaaaaauacaaaaaaaau

SEQ ID NO: 22042 - RNA, 20 nt, Artificial Sequence
  spacer sequence CTCN PAM
aucuccugaccucgugaucc

SEQ ID NO: 22043 - RNA, 20 nt, Artificial Sequence
  spacer sequence CTCN PAM
ugaccucgugauccgccaaa

SEQ ID NO: 22044 - RNA, 20 nt, Artificial Sequence
  spacer sequence CTCN PAM
ugauccgccaaagugcuggg

SEQ ID NO: 22045 - RNA, 20 nt, Artificial Sequence
  spacer sequence CTCN PAM
caccuguaaucccagcacuu

SEQ ID NO: 22046 - RNA, 20 nt, Artificial Sequence
  spacer sequence CTCN PAM
cgggccaccaaggcuauuau

SEQ ID NO: 22047 - RNA, 20 nt, Artificial Sequence
  spacer sequence CTCN PAM
aaagaaaaacaaacccccac

SEQ ID NO: 22048 - RNA, 20 nt, Artificial Sequence
  spacer sequence CTCN PAM
gucacccaggcuggagugca

SEQ ID NO: 22049 - RNA, 20 nt, Artificial Sequence
  spacer sequence CTCN PAM
agccugggugacagagaaag

SEQ ID NO: 22050 - RNA, 20 nt, Artificial Sequence
  spacer sequence CTCN PAM
gcucaccgcaaccuccaccu

SEQ ID NO: 22051 - RNA, 20 nt, Artificial Sequence
  spacer sequence CTCN PAM
ccgcaaccuccaccucacag

SEQ ID NO: 22052 - RNA, 20 nt, Artificial Sequence
  spacer sequence CTCN PAM
accucacagguucaagugau

SEQ ID NO: 22053 - RNA, 20 nt, Artificial Sequence
  spacer sequence CTCN PAM
cagguucaagugauucuccc

SEQ ID NO: 22054 - RNA, 20 nt, Artificial Sequence
  spacer sequence CTCN PAM
caccucagccucccaaguag

SEQ ID NO: 22055 - RNA, 20 nt, Artificial Sequence
  spacer sequence CTCN PAM
gccucccaaguagcugggau

SEQ ID NO: 22056 - RNA, 20 nt, Artificial Sequence
  spacer sequence CTCN PAM
caaguagcugggauuacagg

SEQ ID NO: 22057 - RNA, 20 nt, Artificial Sequence
  spacer sequence CTCN PAM
ggccuguaaucccagcuacu

SEQ ID NO: 22058 - RNA, 20 nt, Artificial Sequence
  spacer sequence CTCN PAM
uaaaaaaagcacugucggcu

SEQ ID NO: 22059 - RNA, 20 nt, Artificial Sequence
  spacer sequence CTCN PAM
ugacuccuaaaaaaagcacu

SEQ ID NO: 22060 - RNA, 20 nt, Artificial Sequence
  spacer sequence CTCN PAM
agcuuuugagaucccugugu

SEQ ID NO: 22061 - RNA, 20 nt, Artificial Sequence
  spacer sequence CTCN PAM
aaagcuugagcuccugacuc

SEQ ID NO: 22062 - RNA, 20 nt, Artificial Sequence
  spacer sequence CTCN PAM
ccugaagacacagggaucuc

SEQ ID NO: 22063 - RNA, 20 nt, Artificial Sequence
  spacer sequence CTCN PAM
acuaugaaagaugaugucug

SEQ ID NO: 22064 - RNA, 20 nt, Artificial Sequence
  spacer sequence CTCN PAM
cgccuguaaucccugcacuu

SEQ ID NO: 22065 - RNA, 20 nt, Artificial Sequence
  spacer sequence CTCN PAM
caaagugcagggauuacagg

SEQ ID NO: 22066 - RNA, 20 nt, Artificial Sequence
  spacer sequence CTCN PAM
gccucccaaagugcagggau

SEQ ID NO: 22067 - RNA, 20 nt, Artificial Sequence
  spacer sequence CTCN PAM
ugacuucaggugauccgccu

SEQ ID NO: 22068 - RNA, 20 nt, Artificial Sequence
  spacer sequence CTCN PAM
acuaacaauacaaaaauuag

SEQ ID NO: 22069 - RNA, 20 nt, Artificial Sequence
  spacer sequence CTCN PAM
cgccuguaaucccaacacuu

SEQ ID NO: 22070 - RNA, 20 nt, Artificial Sequence
  spacer sequence CTCN PAM
caaaguguugggauuacagg

SEQ ID NO: 22071 - RNA, 20 nt, Artificial Sequence
  spacer sequence CTCN PAM
gccucccaaaguguugggau

SEQ ID NO: 22072 - RNA, 20 nt, Artificial Sequence
  spacer sequence CTCN PAM
cgccucggccucccaaagug

SEQ ID NO: 22073 - RNA, 20 nt, Artificial Sequence
  spacer sequence CTCN PAM
ugauccucccgccucggccu

SEQ ID NO: 22074 - RNA, 20 nt, Artificial Sequence
  spacer sequence CTCN PAM
ugaccucgugauccucccgc

SEQ ID NO: 22075 - RNA, 20 nt, Artificial Sequence
  spacer sequence CTCN PAM
acuaaaaauacaaaaaauua

SEQ ID NO: 22076 - RNA, 20 nt, Artificial Sequence
  spacer sequence CTCN PAM
agggaggcugaggcaggaga

SEQ ID NO: 22077 - RNA, 20 nt, Artificial Sequence
  spacer sequence CTCN PAM
cuagagcugggacuacgggc

SEQ ID NO: 22078 - RNA, 20 nt, Artificial Sequence
  spacer sequence CTCN PAM
gccucccuagagcugggacu

SEQ ID NO: 22079 - RNA, 20 nt, Artificial Sequence
  spacer sequence CTCN PAM
ugccucagccucccuagagc

SEQ ID NO: 22080 - RNA, 20 nt, Artificial Sequence
  spacer sequence CTCN PAM
cagguucacgccauucuccu

SEQ ID NO: 22081 - RNA, 20 nt, Artificial Sequence
  spacer sequence CTCN PAM
gccucccagguucacgccau

SEQ ID NO: 22082 - RNA, 20 nt, Artificial Sequence
  spacer sequence CTCN PAM
cugcaagcucugccucccag

SEQ ID NO: 22083 - RNA, 20 nt, Artificial Sequence
  spacer sequence CTCN PAM
gcucccugcaagcucugccu

SEQ ID NO: 22084 - RNA, 20 nt, Artificial Sequence
  spacer sequence CTCN PAM
agccugggcgacagagugag

SEQ ID NO: 22085 - RNA, 20 nt, Artificial Sequence
  spacer sequence CTCN PAM
gucgcccaggcuggagugca

SEQ ID NO: 22086 - RNA, 20 nt, Artificial Sequence
  spacer sequence CTCN PAM
cucugucgcccaggcuggag

SEQ ID NO: 22087 - RNA, 20 nt, Artificial Sequence
  spacer sequence CTCN PAM
gccucaaaaaaaagaaaaaa

SEQ ID NO: 22088 - RNA, 20 nt, Artificial Sequence
  spacer sequence CTCN PAM
aaaaaaagaaaaaauuagcc

SEQ ID NO: 22089 - RNA, 20 nt, Artificial Sequence
  spacer sequence CTCN PAM
ggaggcugaggcaggagaau

SEQ ID NO: 22090 - RNA, 20 nt, Artificial Sequence
  spacer sequence CTCN PAM
ugaguagcugggacuacggg

SEQ ID NO: 22091 - RNA, 20 nt, Artificial Sequence
  spacer sequence CTCN PAM
gccuccugaguagcugggac

SEQ ID NO: 22092 - RNA, 20 nt, Artificial Sequence
  spacer sequence CTCN PAM
ugccucagccuccugaguag

SEQ ID NO: 22093 - RNA, 20 nt, Artificial Sequence
  spacer sequence CTCN PAM
cggguucaagcaauucuccu

SEQ ID NO: 22094 - RNA, 20 nt, Artificial Sequence
  spacer sequence CTCN PAM
accucccggguucaagcaau

SEQ ID NO: 22095 - RNA, 20 nt, Artificial Sequence
  spacer sequence CTCN PAM
cugcaaucuccaccucccgg

SEQ ID NO: 22096 - RNA, 20 nt, Artificial Sequence
  spacer sequence CTCN PAM
gcucacugcaaucuccaccu

SEQ ID NO: 22097 - RNA, 20 nt, Artificial Sequence
  spacer sequence CTCN PAM
cugcgaugcacaggcuggac

SEQ ID NO: 22098 - RNA, 20 nt, Artificial Sequence
  spacer sequence CTCN PAM
gucucaaaacaaaagacaau

SEQ ID NO: 22099 - RNA, 20 nt, Artificial Sequence
  spacer sequence CTCN PAM
aaacaaaagacaauaccuaa

SEQ ID NO: 22100 - RNA, 20 nt, Artificial Sequence
  spacer sequence CTCN PAM
uucaugucaggccuuguacc

SEQ ID NO: 22101 - RNA, 20 nt, Artificial Sequence
  spacer sequence CTCN PAM
gggggaggggcaaucugggu

SEQ ID NO: 22102 - RNA, 20 nt, Artificial Sequence
  spacer sequence CTCN PAM
cccagagccaucaucugaac

SEQ ID NO: 22103 - RNA, 20 nt, Artificial Sequence
  spacer sequence CTCN PAM
aggaaguaacccagauugcc

SEQ ID NO: 22104 - RNA, 20 nt, Artificial Sequence
  spacer sequence CTCN PAM
uccaggaaguaacccagauu

SEQ ID NO: 22105 - RNA, 20 nt, Artificial Sequence
  spacer sequence CTCN PAM
gcugaagcccauggacaccu

SEQ ID NO: 22106 - RNA, 20 nt, Artificial Sequence
  spacer sequence CTCN PAM
acggcuuccucugcugaagc

SEQ ID NO: 22107 - RNA, 20 nt, Artificial Sequence
  spacer sequence CTCN PAM
agacagagagagcugcaggu

SEQ ID NO: 22108 - RNA, 20 nt, Artificial Sequence
  spacer sequence CTCN PAM
aggcugccuguuucugcuuc

SEQ ID NO: 22109 - RNA, 20 nt, Artificial Sequence
  spacer sequence CTCN PAM
gucucgaggcugccuguuuc

SEQ ID NO: 22110 - RNA, 20 nt, Artificial Sequence
  spacer sequence CTCN PAM
cugucucgaggcugccuguu

SEQ ID NO: 22111 - RNA, 20 nt, Artificial Sequence
  spacer sequence CTCN PAM
cucugucucgaggcugccug

SEQ ID NO: 22112 - RNA, 20 nt, Artificial Sequence
  spacer sequence CTCN PAM
accugcagcucucucugucu

SEQ ID NO: 22113 - RNA, 20 nt, Artificial Sequence
  spacer sequence CTCN PAM
ucuaccugcagcucucucug

SEQ ID NO: 22114 - RNA, 20 nt, Artificial Sequence
  spacer sequence CTCN PAM
uccucuaccugcagcucucu

SEQ ID NO: 22115 - RNA, 20 nt, Artificial Sequence
  spacer sequence CTCN PAM
cccuccuccucuaccugcag

SEQ ID NO: 22116 - RNA, 20 nt, Artificial Sequence
  spacer sequence CTCN PAM
accccaaaccucgcccuccu

SEQ ID NO: 22117 - RNA, 20 nt, Artificial Sequence
  spacer sequence CTCN PAM
uccuccaccccaaaccucgc

SEQ ID NO: 22118 - RNA, 20 nt, Artificial Sequence
  spacer sequence CTCN PAM
uccaccccaaaccaggcccu

SEQ ID NO: 22119 - RNA, 20 nt, Artificial Sequence
  spacer sequence CTCN PAM
ucuuccaccccaaaccaggc

SEQ ID NO: 22120 - RNA, 20 nt, Artificial Sequence
  spacer sequence CTCN PAM
aacccaaaccagacccuccu

SEQ ID NO: 22121 - RNA, 20 nt, Artificial Sequence
  spacer sequence CTCN PAM
uccuccaacccaaaccagac

SEQ ID NO: 22122 - RNA, 20 nt, Artificial Sequence
  spacer sequence CTCN PAM
uccacccaaaccaggcccuc

SEQ ID NO: 22123 - RNA, 20 nt, Artificial Sequence
  spacer sequence CTCN PAM
ucuuccacccaaaccaggcc

SEQ ID NO: 22124 - RNA, 20 nt, Artificial Sequence
  spacer sequence CTCN PAM
uccacccaaaccagacccuc

SEQ ID NO: 22125 - RNA, 20 nt, Artificial Sequence
  spacer sequence CTCN PAM
ucuuccacccaaaccagacc

SEQ ID NO: 22126 - RNA, 20 nt, Artificial Sequence
  spacer sequence CTCN PAM
uccaccccaaaccagacccu

SEQ ID NO: 22127 - RNA, 20 nt, Artificial Sequence
  spacer sequence CTCN PAM
ucuuccaccccaaaccagac

SEQ ID NO: 22128 - RNA, 20 nt, Artificial Sequence
  spacer sequence CTCN PAM
accccaagccaggcccuccu

SEQ ID NO: 22129 - RNA, 20 nt, Artificial Sequence
  spacer sequence CTCN PAM
uccuccaccccaagccaggc

SEQ ID NO: 22130 - RNA, 20 nt, Artificial Sequence
  spacer sequence CTCN PAM
uccaccccaaaccaggcccu

SEQ ID NO: 22131 - RNA, 20 nt, Artificial Sequence
  spacer sequence CTCN PAM
ucuuccaccccaaaccaggc

SEQ ID NO: 22132 - RNA, 20 nt, Artificial Sequence
  spacer sequence CTCN PAM
uccaccccaaaccaggcccu

SEQ ID NO: 22133 - RNA, 20 nt, Artificial Sequence
  spacer sequence CTCN PAM
ucuuccaccccaaaccaggc

SEQ ID NO: 22134 - RNA, 20 nt, Artificial Sequence
  spacer sequence CTCN PAM
ucuaccccaaaccagacccu

SEQ ID NO: 22135 - RNA, 20 nt, Artificial Sequence
  spacer sequence CTCN PAM
ucuucuaccccaaaccagac

SEQ ID NO: 22136 - RNA, 20 nt, Artificial Sequence
  spacer sequence CTCN PAM
accccaagccaggcccuccu

SEQ ID NO: 22137 - RNA, 20 nt, Artificial Sequence
  spacer sequence CTCN PAM
uggccuuagcacgaaacccc

SEQ ID NO: 22138 - RNA, 20 nt, Artificial Sequence
  spacer sequence CTCN PAM
cacccugcuccuggccuuag

SEQ ID NO: 22139 - RNA, 20 nt, Artificial Sequence
  spacer sequence CTCN PAM
uggcaucugcagggcacagu

SEQ ID NO: 22140 - RNA, 20 nt, Artificial Sequence
  spacer sequence CTCN PAM
caucgcuucuguggcuccug

SEQ ID NO: 22141 - RNA, 20 nt, Artificial Sequence
  spacer sequence CTCN PAM
gggaaggcuccuggaacuga

SEQ ID NO: 22142 - RNA, 20 nt, Artificial Sequence
  spacer sequence CTCN PAM
uggaacugagcccagcagca

SEQ ID NO: 22143 - RNA, 20 nt, Artificial Sequence
  spacer sequence CTCN PAM
guuccaggagccuucccgga

SEQ ID NO: 22144 - RNA, 20 nt, Artificial Sequence
  spacer sequence CTCN PAM
caaggguccagguugcugcu

SEQ ID NO: 22145 - RNA, 20 nt, Artificial Sequence
  spacer sequence CTCN PAM
cccaaggguccagguugcug

SEQ ID NO: 22146 - RNA, 20 nt, Artificial Sequence
  spacer sequence CTCN PAM
cccucucccaaggguccagg

SEQ ID NO: 22147 - RNA, 20 nt, Artificial Sequence
  spacer sequence CTCN PAM
cgcccucucccaagggucca

SEQ ID NO: 22148 - RNA, 20 nt, Artificial Sequence
  spacer sequence CTCN PAM
cuccacggccccaccugggc

SEQ ID NO: 22149 - RNA, 20 nt, Artificial Sequence
  spacer sequence CTCN PAM
acggccccaccugggcccag

SEQ ID NO: 22150 - RNA, 20 nt, Artificial Sequence
  spacer sequence CTCN PAM
gaugggacgagguguccagc

SEQ ID NO: 22151 - RNA, 20 nt, Artificial Sequence
  spacer sequence CTCN PAM
ucccaucugagacaacaucc

SEQ ID NO: 22152 - RNA, 20 nt, Artificial Sequence
  spacer sequence CTCN PAM
acccugcccugcccagcugg

SEQ ID NO: 22153 - RNA, 20 nt, Artificial Sequence
  spacer sequence CTCN PAM
cacauccugguucuccaccc

SEQ ID NO: 22154 - RNA, 20 nt, Artificial Sequence
  spacer sequence CTCN PAM
aguuucccggcucccacauc

SEQ ID NO: 22155 - RNA, 20 nt, Artificial Sequence
  spacer sequence CTCN PAM
cugggccucaguuucuccau

SEQ ID NO: 22156 - RNA, 20 nt, Artificial Sequence
  spacer sequence CTCN PAM
gggccucaguuucuccauuu

SEQ ID NO: 22157 - RNA, 20 nt, Artificial Sequence
  spacer sequence CTCN PAM
guuucuccauuugacauccc

SEQ ID NO: 22158 - RNA, 20 nt, Artificial Sequence
  spacer sequence CTCN PAM
auuugacaucccuuagcaag

SEQ ID NO: 22159 - RNA, 20 nt, Artificial Sequence
  spacer sequence CTCN PAM
uggugugggauuuuuccauc

SEQ ID NO: 22160 - RNA, 20 nt, Artificial Sequence
  spacer sequence CTCN PAM
gagugagcucaggguggaaa

SEQ ID NO: 22161 - RNA, 20 nt, Artificial Sequence
  spacer sequence CTCN PAM
gagacuccuggugugggauu

SEQ ID NO: 22162 - RNA, 20 nt, Artificial Sequence
  spacer sequence CTCN PAM
cucugagacuccuggugugg

SEQ ID NO: 22163 - RNA, 20 nt, Artificial Sequence
  spacer sequence CTCN PAM
ggguggaaaggcucagugca

SEQ ID NO: 22164 - RNA, 20 nt, Artificial Sequence
  spacer sequence CTCN PAM
gugcacaggagacacagaua

SEQ ID NO: 22165 - RNA, 20 nt, Artificial Sequence
  spacer sequence CTCN PAM
ugugcacugagccuuuccac

SEQ ID NO: 22166 - RNA, 20 nt, Artificial Sequence
  spacer sequence CTCN PAM
gaagccuuccuuggccgcac

SEQ ID NO: 22167 - RNA, 20 nt, Artificial Sequence
  spacer sequence CTCN PAM
gccuugaucucugaagccuu

SEQ ID NO: 22168 - RNA, 20 nt, Artificial Sequence
  spacer sequence CTCN PAM
cgccuguaauuccagcacuu

SEQ ID NO: 22169 - RNA, 20 nt, Artificial Sequence
  spacer sequence CTCN PAM
caaagugcuggaauuacagg

SEQ ID NO: 22170 - RNA, 20 nt, Artificial Sequence
  spacer sequence CTCN PAM
gccucccaaagugcuggaau

SEQ ID NO: 22171 - RNA, 20 nt, Artificial Sequence
  spacer sequence CTCN PAM
ggugaucugcccgccucggc

SEQ ID NO: 22172 - RNA, 20 nt, Artificial Sequence
  spacer sequence CTCN PAM
ggaguucgagaccaaccugg

SEQ ID NO: 22173 - RNA, 20 nt, Artificial Sequence
  spacer sequence CTCN PAM
ugagcucaggugaucugccc

SEQ ID NO: 22174 - RNA, 20 nt, Artificial Sequence
  spacer sequence CTCN PAM
aacuccugagcucaggugau

SEQ ID NO: 22175 - RNA, 20 nt, Artificial Sequence
  spacer sequence CTCN PAM
ccauguuggccagguugguc

SEQ ID NO: 22176 - RNA, 20 nt, Artificial Sequence
  spacer sequence CTCN PAM
ucucuacuaaaaauacaaaa

SEQ ID NO: 22177 - RNA, 20 nt, Artificial Sequence
  spacer sequence CTCN PAM
acuaaaaauacaaaaaauua

SEQ ID NO: 22178 - RNA, 20 nt, Artificial Sequence
  spacer sequence CTCN PAM
caaguccggcuaauuuuuug

SEQ ID NO: 22179 - RNA, 20 nt, Artificial Sequence
  spacer sequence CTCN PAM
ggaggcugaggcacgagaau

SEQ ID NO: 22180 - RNA, 20 nt, Artificial Sequence
  spacer sequence CTCN PAM
ugaguagcugggauuacagg

SEQ ID NO: 22181 - RNA, 20 nt, Artificial Sequence
  spacer sequence CTCN PAM
gccuccugaguagcugggau

SEQ ID NO: 22182 - RNA, 20 nt, Artificial Sequence
  spacer sequence CTCN PAM
ugccucagccuccugaguag

SEQ ID NO: 22183 - RNA, 20 nt, Artificial Sequence
  spacer sequence CTCN PAM
gcuuccagguucaagcaauu

SEQ ID NO: 22184 - RNA, 20 nt, Artificial Sequence
  spacer sequence CTCN PAM
cugcaaccucugcuuccagg

SEQ ID NO: 22185 - RNA, 20 nt, Artificial Sequence
  spacer sequence CTCN PAM
aggcugggcaacagagcgag

SEQ ID NO: 22186 - RNA, 20 nt, Artificial Sequence
  spacer sequence CTCN PAM
guugcccagccuggagugca

SEQ ID NO: 22187 - RNA, 20 nt, Artificial Sequence
  spacer sequence CTCN PAM
cucuguugcccagccuggag

SEQ ID NO: 22188 - RNA, 20 nt, Artificial Sequence
  spacer sequence CTCN PAM
aucucaaaaaaaaaaaaauc

SEQ ID NO: 22189 - RNA, 20 nt, Artificial Sequence
  spacer sequence CTCN PAM
aaaaaaaaaaaaucaaggcu

SEQ ID NO: 22190 - RNA, 20 nt, Artificial Sequence
  spacer sequence CTCN PAM
gccuugauuuuuuuuuuuuu

SEQ ID NO: 22191 - RNA, 20 nt, Artificial Sequence
  spacer sequence CTCN PAM
acagggcagguguguguguc

SEQ ID NO: 22192 - RNA, 20 nt, Artificial Sequence
  spacer sequence CTCN PAM
cagacacacacaccugcccu

SEQ ID NO: 22193 - RNA, 20 nt, Artificial Sequence
  spacer sequence CTCN PAM
cauuauauguuucuaacauu

SEQ ID NO: 22194 - RNA, 20 nt, Artificial Sequence
  spacer sequence CTCN PAM
gaaugucccgguuacuaccc

SEQ ID NO: 22195 - RNA, 20 nt, Artificial Sequence
  spacer sequence CTCN PAM
cugauuccaaccauaccuga

SEQ ID NO: 22196 - RNA, 20 nt, Artificial Sequence
  spacer sequence CTCN PAM
uuccaucagccuaacaagac

SEQ ID NO: 22197 - RNA, 20 nt, Artificial Sequence
  spacer sequence CTCN PAM
ucccgcuggucuuguuaggc

SEQ ID NO: 22198 - RNA, 20 nt, Artificial Sequence
  spacer sequence CTCN PAM
ugucauuggcuagacugggu

SEQ ID NO: 22199 - RNA, 20 nt, Artificial Sequence
  spacer sequence CTCN PAM
ucucugaaccaauuacagag

SEQ ID NO: 22200 - RNA, 20 nt, Artificial Sequence
  spacer sequence CTCN PAM
gaaccaauuacagaggccag

SEQ ID NO: 22201 - RNA, 20 nt, Artificial Sequence
  spacer sequence CTCN PAM
guaauugguucagagaugag

SEQ ID NO: 22202 - RNA, 20 nt, Artificial Sequence
  spacer sequence CTCN PAM
ggccucuguaauugguucag

SEQ ID NO: 22203 - RNA, 20 nt, Artificial Sequence
  spacer sequence CTCN PAM
cacuggcuggacuaggucac

SEQ ID NO: 22204 - RNA, 20 nt, Artificial Sequence
  spacer sequence CTCN PAM
cuggcuggacuaggucacuu

SEQ ID NO: 22205 - RNA, 20 nt, Artificial Sequence
  spacer sequence CTCN PAM
gugauugguucaaagauggg

SEQ ID NO: 22206 - RNA, 20 nt, Artificial Sequence
  spacer sequence CTCN PAM
gauugaucaggaugagucac

SEQ ID NO: 22207 - RNA, 20 nt, Artificial Sequence
  spacer sequence CTCN PAM
uccugaucaaucagagcauc

SEQ ID NO: 22208 - RNA, 20 nt, Artificial Sequence
  spacer sequence CTCN PAM
gugauugguucagggauggg

SEQ ID NO: 22209 - RNA, 20 nt, Artificial Sequence
  spacer sequence CTCN PAM
ggccucugugauugguucag

SEQ ID NO: 22210 - RNA, 20 nt, Artificial Sequence
  spacer sequence CTCN PAM
gacuggccaggcugggccau

SEQ ID NO: 22211 - RNA, 20 nt, Artificial Sequence
  spacer sequence CTCN PAM
uccuugaaccaaucacagag

SEQ ID NO: 22212 - RNA, 20 nt, Artificial Sequence
  spacer sequence CTCN PAM
gugauugguucaaggaugag

SEQ ID NO: 22213 - RNA, 20 nt, Artificial Sequence
  spacer sequence CTCN PAM
gauuggccaggcugaguuac

SEQ ID NO: 22214 - RNA, 20 nt, Artificial Sequence
  spacer sequence CTCN PAM
gccuggccaaucagagcauc

SEQ ID NO: 22215 - RNA, 20 nt, Artificial Sequence
  spacer sequence CTCN PAM
gugauuggcuaagggauagg

SEQ ID NO: 22216 - RNA, 20 nt, Artificial Sequence
  spacer sequence CTCN PAM
agucccccaaagggcaaagg

SEQ ID NO: 22217 - RNA, 20 nt, Artificial Sequence
  spacer sequence CTCN PAM
cccuaggugcucugacuuga

SEQ ID NO: 22218 - RNA, 20 nt, Artificial Sequence
  spacer sequence CTCN PAM
cuaggugcucugacuugaug

SEQ ID NO: 22219 - RNA, 20 nt, Artificial Sequence
  spacer sequence CTCN PAM
gacuugauggcccucauuuc

SEQ ID NO: 22220 - RNA, 20 nt, Artificial Sequence
  spacer sequence CTCN PAM
uuuccuucuccucccucagu

SEQ ID NO: 22221 - RNA, 20 nt, Artificial Sequence
  spacer sequence CTCN PAM
ucccucaguaagcccagagg

SEQ ID NO: 22222 - RNA, 20 nt, Artificial Sequence
  spacer sequence CTCN PAM
cucaguaagcccagaggucu

SEQ ID NO: 22223 - RNA, 20 nt, Artificial Sequence
  spacer sequence CTCN PAM
guaagcccagaggucuccac

SEQ ID NO: 22224 - RNA, 20 nt, Artificial Sequence
  spacer sequence CTCN PAM
gggcuuacugagggaggaga

SEQ ID NO: 22225 - RNA, 20 nt, Artificial Sequence
  spacer sequence CTCN PAM
accccacgggaggaaggcug

SEQ ID NO: 22226 - RNA, 20 nt, Artificial Sequence
  spacer sequence CTCN PAM
cgugggguggagaccucugg

SEQ ID NO: 22227 - RNA, 20 nt, Artificial Sequence
  spacer sequence CTCN PAM
gccuuccucccguggggugg

SEQ ID NO: 22228 - RNA, 20 nt, Artificial Sequence
  spacer sequence CTCN PAM
uccggggucuuggccucagc

SEQ ID NO: 22229 - RNA, 20 nt, Artificial Sequence
  spacer sequence CTCN PAM
ggcacaccguggcaccggcc

SEQ ID NO: 22230 - RNA, 20 nt, Artificial Sequence
  spacer sequence CTCN PAM
auccagcaccaggccggugc

SEQ ID NO: 22231 - RNA, 20 nt, Artificial Sequence
  spacer sequence CTCN PAM
gggcccaugcacaccagaug

SEQ ID NO: 22232 - RNA, 20 nt, Artificial Sequence
  spacer sequence CTCN PAM
uccuggccccagccgcuggc

SEQ ID NO: 22233 - RNA, 20 nt, Artificial Sequence
  spacer sequence CTCN PAM
gcacgcccugcugggcccug

SEQ ID NO: 22234 - RNA, 20 nt, Artificial Sequence
  spacer sequence CTCN PAM
acucggagaacagggaggau

SEQ ID NO: 22235 - RNA, 20 nt, Artificial Sequence
  spacer sequence CTCN PAM
gagaacagggaggaugaggg

SEQ ID NO: 22236 - RNA, 20 nt, Artificial Sequence
  spacer sequence CTCN PAM
gaguggagcccccgugggga

SEQ ID NO: 22237 - RNA, 20 nt, Artificial Sequence
  spacer sequence CTCN PAM
cuguucuccgaguggagccc

SEQ ID NO: 22238 - RNA, 20 nt, Artificial Sequence
  spacer sequence CTCN PAM
uccucccuguucuccgagug

SEQ ID NO: 22239 - RNA, 20 nt, Artificial Sequence
  spacer sequence CTCN PAM
gcccagaggacggggaggac

SEQ ID NO: 22240 - RNA, 20 nt, Artificial Sequence
  spacer sequence CTCN PAM
gggcggagugcccauguugg

SEQ ID NO: 22241 - RNA, 20 nt, Artificial Sequence
  spacer sequence CTCN PAM
ccguccucugggcggagugc

SEQ ID NO: 22242 - RNA, 20 nt, Artificial Sequence
  spacer sequence CTCN PAM
uuguccuccccguccucugg

SEQ ID NO: 22243 - RNA, 20 nt, Artificial Sequence
  spacer sequence CTCN PAM
uggggucagcguccccagca

SEQ ID NO: 22244 - RNA, 20 nt, Artificial Sequence
  spacer sequence CTCN PAM
aggucacacagccuccuggg

SEQ ID NO: 22245 - RNA, 20 nt, Artificial Sequence
  spacer sequence CTCN PAM
cgcuccaggucacacagccu

SEQ ID NO: 22246 - RNA, 20 nt, Artificial Sequence
  spacer sequence CTCN PAM
uccugacugccuggcccugg

SEQ ID NO: 22247 - RNA, 20 nt, Artificial Sequence
  spacer sequence CTCN PAM
agggcacuccugaccacgga

SEQ ID NO: 22248 - RNA, 20 nt, Artificial Sequence
  spacer sequence CTCN PAM
ugaccacggagaccccagga

SEQ ID NO: 22249 - RNA, 20 nt, Artificial Sequence
  spacer sequence CTCN PAM
guggucaggagugcccugga

SEQ ID NO: 22250 - RNA, 20 nt, Artificial Sequence
  spacer sequence CTCN PAM
guccacgccccuggaggaga

SEQ ID NO: 22251 - RNA, 20 nt, Artificial Sequence
  spacer sequence CTCN PAM
aggggcguggaccgaggugg

SEQ ID NO: 22252 - RNA, 20 nt, Artificial Sequence
  spacer sequence CTCN PAM
uccaggggcguggaccgagg

SEQ ID NO: 22253 - RNA, 20 nt, Artificial Sequence
  spacer sequence CTCN PAM
cugucaaccacguucuccuc

SEQ ID NO: 22254 - RNA, 20 nt, Artificial Sequence
  spacer sequence CTCN PAM
cugccaggaagucaaucugc

SEQ ID NO: 22255 - RNA, 20 nt, Artificial Sequence
  spacer sequence CTCN PAM
ggaacugcugucucgcugcc

SEQ ID NO: 22256 - RNA, 20 nt, Artificial Sequence
  spacer sequence CTCN PAM
agacucaggaacugcugucu

SEQ ID NO: 22257 - RNA, 20 nt, Artificial Sequence
  spacer sequence CTCN PAM
uagcuccccggccaggggga

SEQ ID NO: 22258 - RNA, 20 nt, Artificial Sequence
  spacer sequence CTCN PAM
ccggccagggggaccccugc

SEQ ID NO: 22259 - RNA, 20 nt, Artificial Sequence
  spacer sequence CTCN PAM
guggaguccccggggacccc

SEQ ID NO: 22260 - RNA, 20 nt, Artificial Sequence
  spacer sequence CTCN PAM
acugaggccaaggagccagg

SEQ ID NO: 22261 - RNA, 20 nt, Artificial Sequence
  spacer sequence CTCN PAM
uuggggguccccggggacuc

SEQ ID NO: 22262 - RNA, 20 nt, Artificial Sequence
  spacer sequence CTCN PAM
augggcgucuccuugggggu

SEQ ID NO: 22263 - RNA, 20 nt, Artificial Sequence
  spacer sequence CTCN PAM
cgcucgaugggcgucuccuu

SEQ ID NO: 22264 - RNA, 20 nt, Artificial Sequence
  spacer sequence CTCN PAM
ggagcgugaggcagaccugc

SEQ ID NO: 22265 - RNA, 20 nt, Artificial Sequence
  spacer sequence CTCN PAM
ugagccagacggaucucccg

SEQ ID NO: 22266 - RNA, 20 nt, Artificial Sequence
  spacer sequence CTCN PAM
cgcuccugagccagacggau

SEQ ID NO: 22267 - RNA, 20 nt, Artificial Sequence
  spacer sequence CTCN PAM
caggucugccucacgcuccu

SEQ ID NO: 22268 - RNA, 20 nt, Artificial Sequence
  spacer sequence CTCN PAM
cgcaggucugccucacgcuc

SEQ ID NO: 22269 - RNA, 20 nt, Artificial Sequence
  spacer sequence CTCN PAM
gcucucgcaggucugccuca

SEQ ID NO: 22270 - RNA, 20 nt, Artificial Sequence
  spacer sequence CTCN PAM
ugguggucgguugccugccg

SEQ ID NO: 22271 - RNA, 20 nt, Artificial Sequence
  spacer sequence CTCN PAM
gcuuggucagcagcggccug

SEQ ID NO: 22272 - RNA, 20 nt, Artificial Sequence
  spacer sequence CTCN PAM
cgccguggggcugugaucag

SEQ ID NO: 22273 - RNA, 20 nt, Artificial Sequence
  spacer sequence CTCN PAM
cccgccguggggcugugauc

SEQ ID NO: 22274 - RNA, 20 nt, Artificial Sequence
  spacer sequence CTCN PAM
cucccgccguggggcuguga

SEQ ID NO: 22275 - RNA, 20 nt, Artificial Sequence
  spacer sequence CTCN PAM
acgugcagcgggacauagua

SEQ ID NO: 22276 - RNA, 20 nt, Artificial Sequence
  spacer sequence CTCN PAM
uguacuaugucccgcugcac

SEQ ID NO: 22277 - RNA, 20 nt, Artificial Sequence
  spacer sequence CTCN PAM
cgcugugucuccuguacuau

SEQ ID NO: 22278 - RNA, 20 nt, Artificial Sequence
  spacer sequence CTCN PAM
cgccgguggucuuccucacg

SEQ ID NO: 22279 - RNA, 20 nt, Artificial Sequence
  spacer sequence CTCN PAM
gaggguccccagcccggacu

SEQ ID NO: 22280 - RNA, 20 nt, Artificial Sequence
  spacer sequence CTCN PAM
gagacccagucgggugugga

SEQ ID NO: 22281 - RNA, 20 nt, Artificial Sequence
  spacer sequence CTCN PAM
ggagagcccucagcucagau

SEQ ID NO: 22282 - RNA, 20 nt, Artificial Sequence
  spacer sequence CTCN PAM
ggaguccgggcuggggaccc

SEQ ID NO: 22283 - RNA, 20 nt, Artificial Sequence
  spacer sequence CTCN PAM
ccggaguccgggcuggggac

SEQ ID NO: 22284 - RNA, 20 nt, Artificial Sequence
  spacer sequence CTCN PAM
gcucagauuccauccucagc

SEQ ID NO: 22285 - RNA, 20 nt, Artificial Sequence
  spacer sequence CTCN PAM
gauuccauccucagcccggc

SEQ ID NO: 22286 - RNA, 20 nt, Artificial Sequence
  spacer sequence CTCN PAM
gcccggccccagaugcccgu

SEQ ID NO: 22287 - RNA, 20 nt, Artificial Sequence
  spacer sequence CTCN PAM
gggacaucguggccuuuggu

SEQ ID NO: 22288 - RNA, 20 nt, Artificial Sequence
  spacer sequence CTCN PAM
cagaauccucuggaaaaccc

SEQ ID NO: 22289 - RNA, 20 nt, Artificial Sequence
  spacer sequence CTCN PAM
gaauccucuggaaaaccccu

SEQ ID NO: 22290 - RNA, 20 nt, Artificial Sequence
  spacer sequence CTCN PAM
ggaaaaccccugagcacaaa

SEQ ID NO: 22291 - RNA, 20 nt, Artificial Sequence
  spacer sequence CTCN PAM
gggguuuuccagaggauucu

SEQ ID NO: 22292 - RNA, 20 nt, Artificial Sequence
  spacer sequence CTCN PAM
ugcuuugugcucagggguuu

SEQ ID NO: 22293 - RNA, 20 nt, Artificial Sequence
  spacer sequence CTCN PAM
caccgcacgacaccccuguu

SEQ ID NO: 22294 - RNA, 20 nt, Artificial Sequence
  spacer sequence CTCN PAM
gcgguucagggccccagacg

SEQ ID NO: 22295 - RNA, 20 nt, Artificial Sequence
  spacer sequence CTCN PAM
ucuggggcccugaaccgcag

SEQ ID NO: 22296 - RNA, 20 nt, Artificial Sequence
  spacer sequence CTCN PAM
cagccccagacaugggggac

SEQ ID NO: 22297 - RNA, 20 nt, Artificial Sequence
  spacer sequence CTCN PAM
gugcaggggccccagccacc

SEQ ID NO: 22298 - RNA, 20 nt, Artificial Sequence
  spacer sequence CTCN PAM
cuuuccagcagaucagauga

SEQ ID NO: 22299 - RNA, 20 nt, Artificial Sequence
  spacer sequence CTCN PAM
cccuuuccagcagaucagau

SEQ ID NO: 22300 - RNA, 20 nt, Artificial Sequence
  spacer sequence CTCN PAM
cucucccuuuccagcagauc

SEQ ID NO: 22301 - RNA, 20 nt, Artificial Sequence
  spacer sequence CTCN PAM
cccucucccuuuccagcaga

SEQ ID NO: 22302 - RNA, 20 nt, Artificial Sequence
  spacer sequence CTCN PAM
cggcgcaggacacucucccu

SEQ ID NO: 22303 - RNA, 20 nt, Artificial Sequence
  spacer sequence CTCN PAM
ugcucccggcgcaggacacu

SEQ ID NO: 22304 - RNA, 20 nt, Artificial Sequence
  spacer sequence CTCN PAM
gccaccucuugcucccggcg

SEQ ID NO: 22305 - RNA, 20 nt, Artificial Sequence
  spacer sequence CTCN PAM
ucugccaccucuugcucccg

SEQ ID NO: 22306 - RNA, 20 nt, Artificial Sequence
  spacer sequence CTCN PAM
gcuccucugccaccucuugc

SEQ ID NO: 22307 - RNA, 20 nt, Artificial Sequence
  spacer sequence CTCN PAM
cuucccagaggucuucuccc

SEQ ID NO: 22308 - RNA, 20 nt, Artificial Sequence
  spacer sequence CTCN PAM
ucccagaggucuucucccca

SEQ ID NO: 22309 - RNA, 20 nt, Artificial Sequence
  spacer sequence CTCN PAM
gggaagagagcauuucuccg

SEQ ID NO: 22310 - RNA, 20 nt, Artificial Sequence
  spacer sequence CTCN PAM
ccaacgccagaugagaacuc

SEQ ID NO: 22311 - RNA, 20 nt, Artificial Sequence
  spacer sequence CTCN PAM
ucuggcguuggggagaagac

SEQ ID NO: 22312 - RNA, 20 nt, Artificial Sequence
  spacer sequence CTCN PAM
gaccagaacuccaggagcuc

SEQ ID NO: 22313 - RNA, 20 nt, Artificial Sequence
  spacer sequence CTCN PAM
aggagcuccucccaggcauc

SEQ ID NO: 22314 - RNA, 20 nt, Artificial Sequence
  spacer sequence CTCN PAM
uggaguucuggucagaguuc

SEQ ID NO: 22315 - RNA, 20 nt, Artificial Sequence
  spacer sequence CTCN PAM
ucccaggcauccggugagaa

SEQ ID NO: 22316 - RNA, 20 nt, Artificial Sequence
  spacer sequence CTCN PAM
caggcauccggugagaaggg

SEQ ID NO: 22317 - RNA, 20 nt, Artificial Sequence
  spacer sequence CTCN PAM
ccggaugccugggaggagcu

SEQ ID NO: 22318 - RNA, 20 nt, Artificial Sequence
  spacer sequence CTCN PAM
agggaguggcugcuuggcuc

SEQ ID NO: 22319 - RNA, 20 nt, Artificial Sequence
  spacer sequence CTCN PAM
cuggagccccuucucaccgg

SEQ ID NO: 22320 - RNA, 20 nt, Artificial Sequence
  spacer sequence CTCN PAM
gggucucagagguuggagca

SEQ ID NO: 22321 - RNA, 20 nt, Artificial Sequence
  spacer sequence CTCN PAM
cugcuccccuacaggcauca

SEQ ID NO: 22322 - RNA, 20 nt, Artificial Sequence
  spacer sequence CTCN PAM
ccuacaggcaucacgggcag

SEQ ID NO: 22323 - RNA, 20 nt, Artificial Sequence
  spacer sequence CTCN PAM
gugucugagucucccuucuu

SEQ ID NO: 22324 - RNA, 20 nt, Artificial Sequence
  spacer sequence CTCN PAM
gacaccgaguaacugcccgu

SEQ ID NO: 22325 - RNA, 20 nt, Artificial Sequence
  spacer sequence CTCN PAM
cuucuucagccccauccacc

SEQ ID NO: 22326 - RNA, 20 nt, Artificial Sequence
  spacer sequence CTCN PAM
aacguggcguggacagugga

SEQ ID NO: 22327 - RNA, 20 nt, Artificial Sequence
  spacer sequence CTCN PAM
ucccgggcagagaaagaagg

SEQ ID NO: 22328 - RNA, 20 nt, Artificial Sequence
  spacer sequence CTCN PAM
cgggcagagaaagaaggagc

SEQ ID NO: 22329 - RNA, 20 nt, Artificial Sequence
  spacer sequence CTCN PAM
gcccgggaggagcacugucc

SEQ ID NO: 22330 - RNA, 20 nt, Artificial Sequence
  spacer sequence CTCN PAM
uucuuucucugcccgggagg

SEQ ID NO: 22331 - RNA, 20 nt, Artificial Sequence
  spacer sequence CTCN PAM
cccauugcuccuucuuucuc

SEQ ID NO: 22332 - RNA, 20 nt, Artificial Sequence
  spacer sequence CTCN PAM
gcagaggccaggcugagguc

SEQ ID NO: 22333 - RNA, 20 nt, Artificial Sequence
  spacer sequence CTCN PAM
gcagagacggguuccagacu

SEQ ID NO: 22334 - RNA, 20 nt, Artificial Sequence
  spacer sequence CTCN PAM
gccuggccucugcagagacg

SEQ ID NO: 22335 - RNA, 20 nt, Artificial Sequence
  spacer sequence CTCN PAM
gcaccgggcagggcagaaag

SEQ ID NO: 22336 - RNA, 20 nt, Artificial Sequence
  spacer sequence CTCN PAM
gacgguaucaacucagaggu

SEQ ID NO: 22337 - RNA, 20 nt, Artificial Sequence
  spacer sequence CTCN PAM
gaggugaguaugcuccuggg

SEQ ID NO: 22338 - RNA, 20 nt, Artificial Sequence
  spacer sequence CTCN PAM
gaguugauaccguccgaggg

SEQ ID NO: 22339 - RNA, 20 nt, Artificial Sequence
  spacer sequence CTCN PAM
ccucugaguugauaccgucc

SEQ ID NO: 22340 - RNA, 20 nt, Artificial Sequence
  spacer sequence CTCN PAM
ugggcacgaagacucaaguc

SEQ ID NO: 22341 - RNA, 20 nt, Artificial Sequence
  spacer sequence CTCN PAM
agucuuucccccccacaucu

SEQ ID NO: 22342 - RNA, 20 nt, Artificial Sequence
  spacer sequence CTCN PAM
auugguagugucugcucagg

SEQ ID NO: 22343 - RNA, 20 nt, Artificial Sequence
  spacer sequence CTCN PAM
ggguggauuuugcugugauc

SEQ ID NO: 22344 - RNA, 20 nt, Artificial Sequence
  spacer sequence CTCN PAM
gccucccggguucacgccau

SEQ ID NO: 22345 - RNA, 20 nt, Artificial Sequence
  spacer sequence CTCN PAM
cggguucacgccauucuccu

SEQ ID NO: 22346 - RNA, 20 nt, Artificial Sequence
  spacer sequence CTCN PAM
ugccucagccucccgaguag

SEQ ID NO: 22347 - RNA, 20 nt, Artificial Sequence
  spacer sequence CTCN PAM
gccucccgaguagcugggac

SEQ ID NO: 22348 - RNA, 20 nt, Artificial Sequence
  spacer sequence CTCN PAM
cgaguagcugggacuacagg

SEQ ID NO: 22349 - RNA, 20 nt, Artificial Sequence
  spacer sequence CTCN PAM
ggaggcugaggcaggagaau

SEQ ID NO: 22350 - RNA, 20 nt, Artificial Sequence
  spacer sequence CTCN PAM
uaguaauaugaucaaagaau

SEQ ID NO: 22351 - RNA, 20 nt, Artificial Sequence
  spacer sequence CTCN PAM
acuccuaguaauaugaucaa

SEQ ID NO: 22352 - RNA, 20 nt, Artificial Sequence
  spacer sequence CTCN PAM
guuucagacccucuacuccu

SEQ ID NO: 22353 - RNA, 20 nt, Artificial Sequence
  spacer sequence CTCN PAM
ucuguuucagacccucuacu

SEQ ID NO: 22354 - RNA, 20 nt, Artificial Sequence
  spacer sequence CTCN PAM
cuaaugaauuggcaguugga

SEQ ID NO: 22355 - RNA, 20 nt, Artificial Sequence
  spacer sequence CTCN PAM
aaugaauuggcaguuggagg

SEQ ID NO: 22356 - RNA, 20 nt, Artificial Sequence
  spacer sequence CTCN PAM
uuuuugcagguccuggaagc

SEQ ID NO: 22357 - RNA, 20 nt, Artificial Sequence
  spacer sequence CTCN PAM
gccauggcguucuugugacg

SEQ ID NO: 22358 - RNA, 20 nt, Artificial Sequence
  spacer sequence CTCN PAM
cuggcguagaugcgggauuc

SEQ ID NO: 22359 - RNA, 20 nt, Artificial Sequence
  spacer sequence CTCN PAM
ucacuggcguagaugcggga

SEQ ID NO: 22360 - RNA, 20 nt, Artificial Sequence
  spacer sequence CTCN PAM
gucauccuccucacuggcgu

SEQ ID NO: 22361 - RNA, 20 nt, Artificial Sequence
  spacer sequence CTCN PAM
ggauggggcgcccacccccu

SEQ ID NO: 22362 - RNA, 20 nt, Artificial Sequence
  spacer sequence CTCN PAM
uucuuucuuagacccagggc

SEQ ID NO: 22363 - RNA, 20 nt, Artificial Sequence
  spacer sequence CTCN PAM
acaagcaucagcuaagcacc

SEQ ID NO: 22364 - RNA, 20 nt, Artificial Sequence
  spacer sequence CTCN PAM
gcucugcccagauguagccc

SEQ ID NO: 22365 - RNA, 20 nt, Artificial Sequence
  spacer sequence CTCN PAM
gucucugcucugcccagaug

SEQ ID NO: 22366 - RNA, 20 nt, Artificial Sequence
  spacer sequence CTCN PAM
cucagucucugcucugccca

SEQ ID NO: 22367 - RNA, 20 nt, Artificial Sequence
  spacer sequence CTCN PAM
ucccucagucucugcucugc

SEQ ID NO: 22368 - RNA, 20 nt, Artificial Sequence
  spacer sequence CTCN PAM
cuccucccucagucucugcu

SEQ ID NO: 22369 - RNA, 20 nt, Artificial Sequence
  spacer sequence CTCN PAM
cccuccucccucagucucug

SEQ ID NO: 22370 - RNA, 20 nt, Artificial Sequence
  spacer sequence CTCN PAM
cugaagacaggggcucuccc

SEQ ID NO: 22371 - RNA, 20 nt, Artificial Sequence
  spacer sequence CTCN PAM
aucagacuggggucucccug

SEQ ID NO: 22372 - RNA, 20 nt, Artificial Sequence
  spacer sequence CTCN PAM
uccaucagacuggggucucc

SEQ ID NO: 22373 - RNA, 20 nt, Artificial Sequence
  spacer sequence CTCN PAM
uccuaaauuuguuuuuuugu

SEQ ID NO: 22374 - RNA, 20 nt, Artificial Sequence
  spacer sequence CTCN PAM
aaaaaaaaacaaaauacaaa

SEQ ID NO: 22375 - RNA, 20 nt, Artificial Sequence
  spacer sequence CTCN PAM
cucugucgcccaggcuggag

SEQ ID NO: 22376 - RNA, 20 nt, Artificial Sequence
  spacer sequence CTCN PAM
gucgcccaggcuggagugca

SEQ ID NO: 22377 - RNA, 20 nt, Artificial Sequence
  spacer sequence CTCN PAM
agccugggcgacagagcgag

SEQ ID NO: 22378 - RNA, 20 nt, Artificial Sequence
  spacer sequence CTCN PAM
caccuguaaucccaacacuu

SEQ ID NO: 22379 - RNA, 20 nt, Artificial Sequence
  spacer sequence CTCN PAM
caaaguguugggauuacagg

SEQ ID NO: 22380 - RNA, 20 nt, Artificial Sequence
  spacer sequence CTCN PAM
ggugauccgcccgcuucagc

SEQ ID NO: 22381 - RNA, 20 nt, Artificial Sequence
  spacer sequence CTCN PAM
ugaccucaggugauccgccc

SEQ ID NO: 22382 - RNA, 20 nt, Artificial Sequence
  spacer sequence CTCN PAM
acuaaaaauacaaaaaauag

SEQ ID NO: 22383 - RNA, 20 nt, Artificial Sequence
  spacer sequence CTCN PAM
cggguagcugggauuacagg

SEQ ID NO: 22384 - RNA, 20 nt, Artificial Sequence
  spacer sequence CTCN PAM
gccucccggguagcugggau

SEQ ID NO: 22385 - RNA, 20 nt, Artificial Sequence
  spacer sequence CTCN PAM
ugccucggccucccggguag

SEQ ID NO: 22386 - RNA, 20 nt, Artificial Sequence
  spacer sequence CTCN PAM
uggguucaaaggauucuccu

SEQ ID NO: 22387 - RNA, 20 nt, Artificial Sequence
  spacer sequence CTCN PAM
accuccuggguucaaaggau

SEQ ID NO: 22388 - RNA, 20 nt, Artificial Sequence
  spacer sequence CTCN PAM
aacaaacaaaaggacagaau

SEQ ID NO: 22389 - RNA, 20 nt, Artificial Sequence
  spacer sequence CTCN PAM
auuugcccaggcuggagugc

SEQ ID NO: 22390 - RNA, 20 nt, Artificial Sequence
  spacer sequence CTCN PAM
agccugggcaaauggagcga

SEQ ID NO: 22391 - RNA, 20 nt, Artificial Sequence
  spacer sequence CTCN PAM
gcucaccgaaaccucugccu

SEQ ID NO: 22392 - RNA, 20 nt, Artificial Sequence
  spacer sequence CTCN PAM
ccgaaaccucugccuccuga

SEQ ID NO: 22393 - RNA, 20 nt, Artificial Sequence
  spacer sequence CTCN PAM
gccuccugaauuccagugau

SEQ ID NO: 22394 - RNA, 20 nt, Artificial Sequence
  spacer sequence CTCN PAM
ugaauuccagugauucuccu

SEQ ID NO: 22395 - RNA, 20 nt, Artificial Sequence
  spacer sequence CTCN PAM
ugccucagccucucgaguag

SEQ ID NO: 22396 - RNA, 20 nt, Artificial Sequence
  spacer sequence CTCN PAM
gccucucgaguagcugggau

SEQ ID NO: 22397 - RNA, 20 nt, Artificial Sequence
  spacer sequence CTCN PAM
cgaguagcugggauuacagg

SEQ ID NO: 22398 - RNA, 20 nt, Artificial Sequence
  spacer sequence CTCN PAM
aguagcugggauuacaggcc

SEQ ID NO: 22399 - RNA, 20 nt, Artificial Sequence
  spacer sequence CTCN PAM
agaggcugaggcaggagaau

SEQ ID NO: 22400 - RNA, 20 nt, Artificial Sequence
  spacer sequence CTCN PAM
acuaaaaguacaaaauuagc

SEQ ID NO: 22401 - RNA, 20 nt, Artificial Sequence
  spacer sequence CTCN PAM
auauuggccaggcuggucuc

SEQ ID NO: 22402 - RNA, 20 nt, Artificial Sequence
  spacer sequence CTCN PAM
aacuccugacuccaggugau

SEQ ID NO: 22403 - RNA, 20 nt, Artificial Sequence
  spacer sequence CTCN PAM
ugacuccaggugauccacuu

SEQ ID NO: 22404 - RNA, 20 nt, Artificial Sequence
  spacer sequence CTCN PAM
aggugauccacuugccucag

SEQ ID NO: 22405 - RNA, 20 nt, Artificial Sequence
  spacer sequence CTCN PAM
gccucccaaagugcugggau

SEQ ID NO: 22406 - RNA, 20 nt, Artificial Sequence
  spacer sequence CTCN PAM
caaagugcugggauuacagg

SEQ ID NO: 22407 - RNA, 20 nt, Artificial Sequence
  spacer sequence CTCN PAM
cgccuguaaucccagcacuu

SEQ ID NO: 22408 - RNA, 20 nt, Artificial Sequence
  spacer sequence CTCN PAM
cccggccuauucuguccugu

SEQ ID NO: 22409 - RNA, 20 nt, Artificial Sequence
  spacer sequence CTCN PAM
caccuguaaucccaccauuu

SEQ ID NO: 22410 - RNA, 20 nt, Artificial Sequence
  spacer sequence CTCN PAM
caaaauggugggauuacagg

SEQ ID NO: 22411 - RNA, 20 nt, Artificial Sequence
  spacer sequence CTCN PAM
gccucccaaaauggugggau

SEQ ID NO: 22412 - RNA, 20 nt, Artificial Sequence
  spacer sequence CTCN PAM
ugaccuugugauccgcccgc

SEQ ID NO: 22413 - RNA, 20 nt, Artificial Sequence
  spacer sequence CTCN PAM
aucuccugaccuugugaucc

SEQ ID NO: 22414 - RNA, 20 nt, Artificial Sequence
  spacer sequence CTCN PAM
acuaaaaauacaaaaauuag

SEQ ID NO: 22415 - RNA, 20 nt, Artificial Sequence
  spacer sequence CTCN PAM
ggaggcugaggcaggagaau

SEQ ID NO: 22416 - RNA, 20 nt, Artificial Sequence
  spacer sequence CTCN PAM
cgaguaauugggauuacagg

SEQ ID NO: 22417 - RNA, 20 nt, Artificial Sequence
  spacer sequence CTCN PAM
gccucccgaguaauugggau

SEQ ID NO: 22418 - RNA, 20 nt, Artificial Sequence
  spacer sequence CTCN PAM
ugccucagccucccgaguaa

SEQ ID NO: 22419 - RNA, 20 nt, Artificial Sequence
  spacer sequence CTCN PAM
gguucaagcgauucuccugc

SEQ ID NO: 22420 - RNA, 20 nt, Artificial Sequence
  spacer sequence CTCN PAM
cggguucaagcgauucuccu

SEQ ID NO: 22421 - RNA, 20 nt, Artificial Sequence
  spacer sequence CTCN PAM
gccucucggguucaagcgau

SEQ ID NO: 22422 - RNA, 20 nt, Artificial Sequence
  spacer sequence CTCN PAM
cugcaaccuccgccucucgg

SEQ ID NO: 22423 - RNA, 20 nt, Artificial Sequence
  spacer sequence CTCN PAM
agccugggcgacagagcaag

SEQ ID NO: 22424 - RNA, 20 nt, Artificial Sequence
  spacer sequence CTCN PAM
gucgcccaggcuggagugcc

SEQ ID NO: 22425 - RNA, 20 nt, Artificial Sequence
  spacer sequence CTCN PAM
aaaaaaaagauuuaguuuaa

SEQ ID NO: 22426 - RNA, 20 nt, Artificial Sequence
  spacer sequence CTCN PAM
uuacaggaauuaaacuaaau

SEQ ID NO: 22427 - RNA, 20 nt, Artificial Sequence
  spacer sequence CTCN PAM
gcaggcagaauucugucuga

SEQ ID NO: 22428 - RNA, 20 nt, Artificial Sequence
  spacer sequence CTCN PAM
gugagagguuuagacgaauu

SEQ ID NO: 22429 - RNA, 20 nt, Artificial Sequence
  spacer sequence CTCN PAM
cagaguaacuucuggaaugu

SEQ ID NO: 22430 - RNA, 20 nt, Artificial Sequence
  spacer sequence CTCN PAM
cacagaguaacuucuggaau

SEQ ID NO: 22431 - RNA, 20 nt, Artificial Sequence
  spacer sequence CTCN PAM
cgccccuggaaauuucacua

SEQ ID NO: 22432 - RNA, 20 nt, Artificial Sequence
  spacer sequence CTCN PAM
cccgccccuggaaauuucac

SEQ ID NO: 22433 - RNA, 20 nt, Artificial Sequence
  spacer sequence CTCN PAM
gugauugcugugauguccgc

SEQ ID NO: 22434 - RNA, 20 nt, Artificial Sequence
  spacer sequence CTCN PAM
cugcuagcaggagggaguuc

SEQ ID NO: 22435 - RNA, 20 nt, Artificial Sequence
  spacer sequence CTCN PAM
ugcuagcagcgagcgccagc

SEQ ID NO: 22436 - RNA, 20 nt, Artificial Sequence
  spacer sequence CTCN PAM
cuccugcuagcagcgagcgc

SEQ ID NO: 22437 - RNA, 20 nt, Artificial Sequence
  spacer sequence CTCN PAM
uggcucaguguaucaugaua

SEQ ID NO: 22438 - RNA, 20 nt, Artificial Sequence
  spacer sequence CTCN PAM
guguaucaugauaugccagg

SEQ ID NO: 22439 - RNA, 20 nt, Artificial Sequence
  spacer sequence CTCN PAM
uuucccuggcauaucaugau

SEQ ID NO: 22440 - RNA, 20 nt, Artificial Sequence
  spacer sequence CTCN PAM
uccuuucccuggcauaucau

SEQ ID NO: 22441 - RNA, 20 nt, Artificial Sequence
  spacer sequence CTCN PAM
uuuuuguuuguuugguuuuu

SEQ ID NO: 22442 - RNA, 20 nt, Artificial Sequence
  spacer sequence CTCN PAM
aaaaaccaaacaaacaaaaa

SEQ ID NO: 22443 - RNA, 20 nt, Artificial Sequence
  spacer sequence CTCN PAM
gucucaaaaaaccaaacaaa

SEQ ID NO: 22444 - RNA, 20 nt, Artificial Sequence
  spacer sequence CTCN PAM
cgcuguugcccaggcuggag

SEQ ID NO: 22445 - RNA, 20 nt, Artificial Sequence
  spacer sequence CTCN PAM
agccugggcaacagcgugag

SEQ ID NO: 22446 - RNA, 20 nt, Artificial Sequence
  spacer sequence CTCN PAM
gcucaccacaaccucugccu

SEQ ID NO: 22447 - RNA, 20 nt, Artificial Sequence
  spacer sequence CTCN PAM
ccacaaccucugccuccugg

SEQ ID NO: 22448 - RNA, 20 nt, Artificial Sequence
  spacer sequence CTCN PAM
gccuccuggguucaagcgau

SEQ ID NO: 22449 - RNA, 20 nt, Artificial Sequence
  spacer sequence CTCN PAM
uggguucaagcgauucuccu

SEQ ID NO: 22450 - RNA, 20 nt, Artificial Sequence
  spacer sequence CTCN PAM
ugccucaacccccggaguaa

SEQ ID NO: 22451 - RNA, 20 nt, Artificial Sequence
  spacer sequence CTCN PAM
acccccggaguaacugggau

SEQ ID NO: 22452 - RNA, 20 nt, Artificial Sequence
  spacer sequence CTCN PAM
ggggguugaggcaggagaau

SEQ ID NO: 22453 - RNA, 20 nt, Artificial Sequence
  spacer sequence CTCN PAM
acuaaaaauacaaaaauuag

SEQ ID NO: 22454 - RNA, 20 nt, Artificial Sequence
  spacer sequence CTCN PAM
auguugggcaggauggucug

SEQ ID NO: 22455 - RNA, 20 nt, Artificial Sequence
  spacer sequence CTCN PAM
agaccucagaugauccaccc

SEQ ID NO: 22456 - RNA, 20 nt, Artificial Sequence
  spacer sequence CTCN PAM
gaugauccacccgccucagc

SEQ ID NO: 22457 - RNA, 20 nt, Artificial Sequence
  spacer sequence CTCN PAM
gccucccaaagugcuggggu

SEQ ID NO: 22458 - RNA, 20 nt, Artificial Sequence
  spacer sequence CTCN PAM
caaagugcugggguuacagg

SEQ ID NO: 22459 - RNA, 20 nt, Artificial Sequence
  spacer sequence CTCN PAM
cgccuguaaccccagcacuu

SEQ ID NO: 22460 - RNA, 20 nt, Artificial Sequence
  spacer sequence CTCN PAM
acuccauuuuaauuaacccu

SEQ ID NO: 22461 - RNA, 20 nt, Artificial Sequence
  spacer sequence CTCN PAM
auuuuaauuaacccugcagg

SEQ ID NO: 22462 - RNA, 20 nt, Artificial Sequence
  spacer sequence CTCN PAM
ugccuguaauccuggcauuu

SEQ ID NO: 22463 - RNA, 20 nt, Artificial Sequence
  spacer sequence CTCN PAM
gcuucccaaaaugccaggau

SEQ ID NO: 22464 - RNA, 20 nt, Artificial Sequence
  spacer sequence CTCN PAM
ugccucagcuucccaaaaug

SEQ ID NO: 22465 - RNA, 20 nt, Artificial Sequence
  spacer sequence CTCN PAM
ggugauccaccuccugccuc

SEQ ID NO: 22466 - RNA, 20 nt, Artificial Sequence
  spacer sequence CTCN PAM
ugaccucaggugauccaccu

SEQ ID NO: 22467 - RNA, 20 nt, Artificial Sequence
  spacer sequence CTCN PAM
aacuccugaccucaggugau

SEQ ID NO: 22468 - RNA, 20 nt, Artificial Sequence
  spacer sequence CTCN PAM
aggaaauacaaaaaauuagc

SEQ ID NO: 22469 - RNA, 20 nt, Artificial Sequence
  spacer sequence CTCN PAM
ggaggcugaggcaggagaau

SEQ ID NO: 22470 - RNA, 20 nt, Artificial Sequence
  spacer sequence CTCN PAM
gcugguuccaggugccacac

SEQ ID NO: 22471 - RNA, 20 nt, Artificial Sequence
  spacer sequence CTCN PAM
gguuccuucgguguugggag

SEQ ID NO: 22472 - RNA, 20 nt, Artificial Sequence
  spacer sequence CTCN PAM
caacaccgaaggaaccugag

SEQ ID NO: 22473 - RNA, 20 nt, Artificial Sequence
  spacer sequence CTCN PAM
ggcuccaagcccaggacaga

SEQ ID NO: 22474 - RNA, 20 nt, Artificial Sequence
  spacer sequence CTCN PAM
cccagccucaguguccuuau

SEQ ID NO: 22475 - RNA, 20 nt, Artificial Sequence
  spacer sequence CTCN PAM
cagccucaguguccuuaucu

SEQ ID NO: 22476 - RNA, 20 nt, Artificial Sequence
  spacer sequence CTCN PAM
guguccuuaucuguaaguga

SEQ ID NO: 22477 - RNA, 20 nt, Artificial Sequence
  spacer sequence CTCN PAM
ugacgucccccagggcaggg

SEQ ID NO: 22478 - RNA, 20 nt, Artificial Sequence
  spacer sequence CTCN PAM
cugauuuucaccaggugccc

SEQ ID NO: 22479 - RNA, 20 nt, Artificial Sequence
  spacer sequence CTCN PAM
acauucauucuuauuccuca

SEQ ID NO: 22480 - RNA, 20 nt, Artificial Sequence
  spacer sequence CTCN PAM
cgccuguaaucccagcacuc

SEQ ID NO: 22481 - RNA, 20 nt, Artificial Sequence
  spacer sequence CTCN PAM
gggaggccgaggcgggcgga

SEQ ID NO: 22482 - RNA, 20 nt, Artificial Sequence
  spacer sequence CTCN PAM
cagagugcugggauuacagg

SEQ ID NO: 22483 - RNA, 20 nt, Artificial Sequence
  spacer sequence CTCN PAM
gccucccagagugcugggau

SEQ ID NO: 22484 - RNA, 20 nt, Artificial Sequence
  spacer sequence CTCN PAM
ugauccgcccgccucggccu

SEQ ID NO: 22485 - RNA, 20 nt, Artificial Sequence
  spacer sequence CTCN PAM
ugaccucgugauccgcccgc

SEQ ID NO: 22486 - RNA, 20 nt, Artificial Sequence
  spacer sequence CTCN PAM
gucucuacuaaaaauacaaa

SEQ ID NO: 22487 - RNA, 20 nt, Artificial Sequence
  spacer sequence CTCN PAM
acuaaaaauacaaacaauua

SEQ ID NO: 22488 - RNA, 20 nt, Artificial Sequence
  spacer sequence CTCN PAM
ggaggcugacgcaggagagu

SEQ ID NO: 22489 - RNA, 20 nt, Artificial Sequence
  spacer sequence CTCN PAM
cgaguagcugggauuacagg

SEQ ID NO: 22490 - RNA, 20 nt, Artificial Sequence
  spacer sequence CTCN PAM
ugcgucagccucccgaguag

SEQ ID NO: 22491 - RNA, 20 nt, Artificial Sequence
  spacer sequence CTCN PAM
ccugcgucagccucccgagu

SEQ ID NO: 22492 - RNA, 20 nt, Artificial Sequence
  spacer sequence CTCN PAM
uggguucaccccacucuccu

SEQ ID NO: 22493 - RNA, 20 nt, Artificial Sequence
  spacer sequence CTCN PAM
accuccuggguucaccccac

SEQ ID NO: 22494 - RNA, 20 nt, Artificial Sequence
  spacer sequence CTCN PAM
cugcaagcuccaccuccugg

SEQ ID NO: 22495 - RNA, 20 nt, Artificial Sequence
  spacer sequence CTCN PAM
gcucacugcaagcuccaccu

SEQ ID NO: 22496 - RNA, 20 nt, Artificial Sequence
  spacer sequence CTCN PAM
agccugggcgacagagcgag

SEQ ID NO: 22497 - RNA, 20 nt, Artificial Sequence
  spacer sequence CTCN PAM
gucgcccaggcuggagugca

SEQ ID NO: 22498 - RNA, 20 nt, Artificial Sequence
  spacer sequence CTCN PAM
cucugucgcccaggcuggag

SEQ ID NO: 22499 - RNA, 20 nt, Artificial Sequence
  spacer sequence CTCN PAM
gucucaaaaaaaaaaaaaaa

SEQ ID NO: 22500 - RNA, 20 nt, Artificial Sequence
  spacer sequence CTCN PAM
aaaaaaaaaaaaaaaaaaaa

SEQ ID NO: 22501 - RNA, 20 nt, Artificial Sequence
  spacer sequence CTCN PAM
caccagaaagucacauggaa

SEQ ID NO: 22502 - RNA, 20 nt, Artificial Sequence
  spacer sequence CTCN PAM
ggcucacaccagaaagucac

SEQ ID NO: 22503 - RNA, 20 nt, Artificial Sequence
  spacer sequence CTCN PAM
ccggcucacaccagaaaguc

SEQ ID NO: 22504 - RNA, 20 nt, Artificial Sequence
  spacer sequence CTCN PAM
ucuccggcucacaccagaaa

SEQ ID NO: 22505 - RNA, 20 nt, Artificial Sequence
  spacer sequence CTCN PAM
gguggcagcgugcaucggcu

SEQ ID NO: 22506 - RNA, 20 nt, Artificial Sequence
  spacer sequence CTCN PAM
ccccgccagggagaaaacgc

SEQ ID NO: 22507 - RNA, 20 nt, Artificial Sequence
  spacer sequence CTCN PAM
cuggcggggcgagggccgcg

SEQ ID NO: 22508 - RNA, 20 nt, Artificial Sequence
  spacer sequence CTCN PAM
caccuucucauucccguaac

SEQ ID NO: 22509 - RNA, 20 nt, Artificial Sequence
  spacer sequence CTCN PAM
ccuucucauucccguaaccg

SEQ ID NO: 22510 - RNA, 20 nt, Artificial Sequence
  spacer sequence CTCN PAM
uucccguaaccggauggugu

SEQ ID NO: 22511 - RNA, 20 nt, Artificial Sequence
  spacer sequence CTCN PAM
uugaaagccuggacagggcc

SEQ ID NO: 22512 - RNA, 20 nt, Artificial Sequence
  spacer sequence CTCN PAM
cgccuguaaucccagcacuu

SEQ ID NO: 22513 - RNA, 20 nt, Artificial Sequence
  spacer sequence CTCN PAM
cgaagugcugggauuacagg

SEQ ID NO: 22514 - RNA, 20 nt, Artificial Sequence
  spacer sequence CTCN PAM
agugauccacccgucuuggc

SEQ ID NO: 22515 - RNA, 20 nt, Artificial Sequence
  spacer sequence CTCN PAM
ugaccucaagugauccaccc

SEQ ID NO: 22516 - RNA, 20 nt, Artificial Sequence
  spacer sequence CTCN PAM
acuuaaaaaaaaaaaaaaaa

SEQ ID NO: 22517 - RNA, 20 nt, Artificial Sequence
  spacer sequence CTCN PAM
ggaagcugaggcaggagaau

SEQ ID NO: 22518 - RNA, 20 nt, Artificial Sequence
  spacer sequence CTCN PAM
gcuuccugaguagcugggau

SEQ ID NO: 22519 - RNA, 20 nt, Artificial Sequence
  spacer sequence CTCN PAM
ugccucagcuuccugaguag

SEQ ID NO: 22520 - RNA, 20 nt, Artificial Sequence
  spacer sequence CTCN PAM
cagguucaagcaauucuccu

SEQ ID NO: 22521 - RNA, 20 nt, Artificial Sequence
  spacer sequence CTCN PAM
accucccagguucaagcaau

SEQ ID NO: 22522 - RNA, 20 nt, Artificial Sequence
  spacer sequence CTCN PAM
cugcaaccuccaccucccag

SEQ ID NO: 22523 - RNA, 20 nt, Artificial Sequence
  spacer sequence CTCN PAM
gcucacugcaaccuccaccu

SEQ ID NO: 22524 - RNA, 20 nt, Artificial Sequence
  spacer sequence CTCN PAM
aucucagcucacugcaaccu

SEQ ID NO: 22525 - RNA, 20 nt, Artificial Sequence
  spacer sequence CTCN PAM
agccugggugacagaggaag

SEQ ID NO: 22526 - RNA, 20 nt, Artificial Sequence
  spacer sequence CTCN PAM
gucacccaggcuggagugca

SEQ ID NO: 22527 - RNA, 20 nt, Artificial Sequence
  spacer sequence CTCN PAM
aucuaaaaaaaaaaauuauu

SEQ ID NO: 22528 - RNA, 20 nt, Artificial Sequence
  spacer sequence CTCN PAM
acaaauaauuuuuuuuuuua

SEQ ID NO: 22529 - RNA, 20 nt, Artificial Sequence
  spacer sequence CTCN PAM
gucaucucuacaaauaauuu

SEQ ID NO: 22530 - RNA, 20 nt, Artificial Sequence
  spacer sequence CTCN PAM
cucugucaucucuacaaaua

SEQ ID NO: 22531 - RNA, 20 nt, Artificial Sequence
  spacer sequence CTCN PAM
aucuaaaaaaaaauuauuug

SEQ ID NO: 22532 - RNA, 20 nt, Artificial Sequence
  spacer sequence CTCN PAM
acaaauaauuuuuuuuuaga

SEQ ID NO: 22533 - RNA, 20 nt, Artificial Sequence
  spacer sequence CTCN PAM
ccauguuucccaagcugguc

SEQ ID NO: 22534 - RNA, 20 nt, Artificial Sequence
  spacer sequence CTCN PAM
ucaagugauccuccugccuc

SEQ ID NO: 22535 - RNA, 20 nt, Artificial Sequence
  spacer sequence CTCN PAM
agugauccuccugccucauc

SEQ ID NO: 22536 - RNA, 20 nt, Artificial Sequence
  spacer sequence CTCN PAM
ugccucauccccacaaagug

SEQ ID NO: 22537 - RNA, 20 nt, Artificial Sequence
  spacer sequence CTCN PAM
uccccacaaagugcugggau

SEQ ID NO: 22538 - RNA, 20 nt, Artificial Sequence
  spacer sequence CTCN PAM
caccaguaaucccagcacuu

SEQ ID NO: 22539 - RNA, 20 nt, Artificial Sequence
  spacer sequence CTCN PAM
auggcucacaccaguaaucc

SEQ ID NO: 22540 - RNA, 20 nt, Artificial Sequence
  spacer sequence CTCN PAM
aaauaguuggucagggcugg

SEQ ID NO: 22541 - RNA, 20 nt, Artificial Sequence
  spacer sequence CTCN PAM
guuuucaaccucuaaauagu

SEQ ID NO: 22542 - RNA, 20 nt, Artificial Sequence
  spacer sequence CTCN PAM
caccuguaaucccagcacuu

SEQ ID NO: 22543 - RNA, 20 nt, Artificial Sequence
  spacer sequence CTCN PAM
caaagugcugggauuacagg

SEQ ID NO: 22544 - RNA, 20 nt, Artificial Sequence
  spacer sequence CTCN PAM
gccucccaaagugcugggau

SEQ ID NO: 22545 - RNA, 20 nt, Artificial Sequence
  spacer sequence CTCN PAM
gaucacgaggucaggagauu

SEQ ID NO: 22546 - RNA, 20 nt, Artificial Sequence
  spacer sequence CTCN PAM
ugauccgagggccucggccu

SEQ ID NO: 22547 - RNA, 20 nt, Artificial Sequence
  spacer sequence CTCN PAM
ugaccucgugauccgagggc

SEQ ID NO: 22548 - RNA, 20 nt, Artificial Sequence
  spacer sequence CTCN PAM
aucuccugaccucgugaucc

SEQ ID NO: 22549 - RNA, 20 nt, Artificial Sequence
  spacer sequence CTCN PAM
acuaaaaauacaaaaaaauu

SEQ ID NO: 22550 - RNA, 20 nt, Artificial Sequence
  spacer sequence CTCN PAM
ggaggcugaggcaggagaau

SEQ ID NO: 22551 - RNA, 20 nt, Artificial Sequence
  spacer sequence CTCN PAM
ugaguagcugggacuacagg

SEQ ID NO: 22552 - RNA, 20 nt, Artificial Sequence
  spacer sequence CTCN PAM
gccuccugaguagcugggac

SEQ ID NO: 22553 - RNA, 20 nt, Artificial Sequence
  spacer sequence CTCN PAM
ugccucagccuccugaguag

SEQ ID NO: 22554 - RNA, 20 nt, Artificial Sequence
  spacer sequence CTCN PAM
cagguucaagugauucuccu

SEQ ID NO: 22555 - RNA, 20 nt, Artificial Sequence
  spacer sequence CTCN PAM
ucccagguucaagugauucu

SEQ ID NO: 22556 - RNA, 20 nt, Artificial Sequence
  spacer sequence CTCN PAM
gccuccucccagguucaagu

SEQ ID NO: 22557 - RNA, 20 nt, Artificial Sequence
  spacer sequence CTCN PAM
cugcaagcuccgccuccucc

SEQ ID NO: 22558 - RNA, 20 nt, Artificial Sequence
  spacer sequence CTCN PAM
gcucacugcaagcuccgccu

SEQ ID NO: 22559 - RNA, 20 nt, Artificial Sequence
  spacer sequence CTCN PAM
aucucggcucacugcaagcu

SEQ ID NO: 22560 - RNA, 20 nt, Artificial Sequence
  spacer sequence CTCN PAM
agccugggcgacagagugag

SEQ ID NO: 22561 - RNA, 20 nt, Artificial Sequence
  spacer sequence CTCN PAM
gucgcccaggcuggagugca

SEQ ID NO: 22562 - RNA, 20 nt, Artificial Sequence
  spacer sequence CTCN PAM
cucugucgcccaggcuggag

SEQ ID NO: 22563 - RNA, 20 nt, Artificial Sequence
  spacer sequence CTCN PAM
gucucaaaaauaaaaauaaa

SEQ ID NO: 22564 - RNA, 20 nt, Artificial Sequence
  spacer sequence CTCN PAM
aaaauaaaaauaaaaauaaa

SEQ ID NO: 22565 - RNA, 20 nt, Artificial Sequence
  spacer sequence CTCN PAM
gccacuuccggcuaauuuua

SEQ ID NO: 22566 - RNA, 20 nt, Artificial Sequence
  spacer sequence CTCN PAM
uccacagcagccagagggcg

SEQ ID NO: 22567 - RNA, 20 nt, Artificial Sequence
  spacer sequence CTCN PAM
ggcugcuguggaagagccac

SEQ ID NO: 22568 - RNA, 20 nt, Artificial Sequence
  spacer sequence CTCN PAM
caggcgcccucuggcugcug

SEQ ID NO: 22569 - RNA, 20 nt, Artificial Sequence
  spacer sequence CTCN PAM
gcccacagcccuccauggcu

SEQ ID NO: 22570 - RNA, 20 nt, Artificial Sequence
  spacer sequence CTCN PAM
auggcucccauuucccucug

SEQ ID NO: 22571 - RNA, 20 nt, Artificial Sequence
  spacer sequence CTCN PAM
cauuucccucuggguagaag

SEQ ID NO: 22572 - RNA, 20 nt, Artificial Sequence
  spacer sequence CTCN PAM
ggguagaagcccaaguccuc

SEQ ID NO: 22573 - RNA, 20 nt, Artificial Sequence
  spacer sequence CTCN PAM
gugcagcccacaaggcucug

SEQ ID NO: 22574 - RNA, 20 nt, Artificial Sequence
  spacer sequence CTCN PAM
gcccaguccccucucuccuc

SEQ ID NO: 22575 - RNA, 20 nt, Artificial Sequence
  spacer sequence CTCN PAM
cuccucucccuccucugucu

SEQ ID NO: 22576 - RNA, 20 nt, Artificial Sequence
  spacer sequence CTCN PAM
ccucucccuccucugucuac

SEQ ID NO: 22577 - RNA, 20 nt, Artificial Sequence
  spacer sequence CTCN PAM
ucucccuccucugucuacuc

SEQ ID NO: 22578 - RNA, 20 nt, Artificial Sequence
  spacer sequence CTCN PAM
cccuccucugucuacucucc

SEQ ID NO: 22579 - RNA, 20 nt, Artificial Sequence
  spacer sequence CTCN PAM
cuccucugucuacucucccu

SEQ ID NO: 22580 - RNA, 20 nt, Artificial Sequence
  spacer sequence CTCN PAM
ucugucuacucucccuccuc

SEQ ID NO: 22581 - RNA, 20 nt, Artificial Sequence
  spacer sequence CTCN PAM
gucuacucucccuccucccu

SEQ ID NO: 22582 - RNA, 20 nt, Artificial Sequence
  spacer sequence CTCN PAM
cccuccucccugucuccccc

SEQ ID NO: 22583 - RNA, 20 nt, Artificial Sequence
  spacer sequence CTCN PAM
cuccucccugucucccccuc

SEQ ID NO: 22584 - RNA, 20 nt, Artificial Sequence
  spacer sequence CTCN PAM
ucccugucucccccuccucc

SEQ ID NO: 22585 - RNA, 20 nt, Artificial Sequence
  spacer sequence CTCN PAM
cugucucccccuccuccucu

SEQ ID NO: 22586 - RNA, 20 nt, Artificial Sequence
  spacer sequence CTCN PAM
cccuccuccucugcccaguc

SEQ ID NO: 22587 - RNA, 20 nt, Artificial Sequence
  spacer sequence CTCN PAM
uccucugcccaguccccucu

SEQ ID NO: 22588 - RNA, 20 nt, Artificial Sequence
  spacer sequence CTCN PAM
ucugcccaguccccucucuc

SEQ ID NO: 22589 - RNA, 20 nt, Artificial Sequence
  spacer sequence CTCN PAM
gcccaguccccucucuccuc

SEQ ID NO: 22590 - RNA, 20 nt, Artificial Sequence
  spacer sequence CTCN PAM
cuccucucccuccucccucu

SEQ ID NO: 22591 - RNA, 20 nt, Artificial Sequence
  spacer sequence CTCN PAM
ccucucccuccucccucucu

SEQ ID NO: 22592 - RNA, 20 nt, Artificial Sequence
  spacer sequence CTCN PAM
ucucccuccucccucucucc

SEQ ID NO: 22593 - RNA, 20 nt, Artificial Sequence
  spacer sequence CTCN PAM
cccuccucccucucuccucu

SEQ ID NO: 22594 - RNA, 20 nt, Artificial Sequence
  spacer sequence CTCN PAM
cuccucccucucuccucucc

SEQ ID NO: 22595 - RNA, 20 nt, Artificial Sequence
  spacer sequence CTCN PAM
ucccucucuccucucccucc

SEQ ID NO: 22596 - RNA, 20 nt, Artificial Sequence
  spacer sequence CTCN PAM
cucucuccucucccuccucc

SEQ ID NO: 22597 - RNA, 20 nt, Artificial Sequence
  spacer sequence CTCN PAM
cuccucucccuccucccucc

SEQ ID NO: 22598 - RNA, 20 nt, Artificial Sequence
  spacer sequence CTCN PAM
ccucucccuccucccucccu

SEQ ID NO: 22599 - RNA, 20 nt, Artificial Sequence
  spacer sequence CTCN PAM
ucucccuccucccucccuau

SEQ ID NO: 22600 - RNA, 20 nt, Artificial Sequence
  spacer sequence CTCN PAM
cccuccucccucccuaucuc

SEQ ID NO: 22601 - RNA, 20 nt, Artificial Sequence
  spacer sequence CTCN PAM
cuccucccucccuaucuccc

SEQ ID NO: 22602 - RNA, 20 nt, Artificial Sequence
  spacer sequence CTCN PAM
ucccucccuaucucccccuc

SEQ ID NO: 22603 - RNA, 20 nt, Artificial Sequence
  spacer sequence CTCN PAM
cucccuaucucccccuccuc

SEQ ID NO: 22604 - RNA, 20 nt, Artificial Sequence
  spacer sequence CTCN PAM
cuaucucccccuccuccucu

SEQ ID NO: 22605 - RNA, 20 nt, Artificial Sequence
  spacer sequence CTCN PAM
cccuccuccucuacccaguc

SEQ ID NO: 22606 - RNA, 20 nt, Artificial Sequence
  spacer sequence CTCN PAM
uccucuacccaguccccucu

SEQ ID NO: 22607 - RNA, 20 nt, Artificial Sequence
  spacer sequence CTCN PAM
ucuacccaguccccucucuc

SEQ ID NO: 22608 - RNA, 20 nt, Artificial Sequence
  spacer sequence CTCN PAM
acccaguccccucucuccuc

SEQ ID NO: 22609 - RNA, 20 nt, Artificial Sequence
  spacer sequence CTCN PAM
cuccucucccuccucccuau

SEQ ID NO: 22610 - RNA, 20 nt, Artificial Sequence
  spacer sequence CTCN PAM
ccucucccuccucccuaucu

SEQ ID NO: 22611 - RNA, 20 nt, Artificial Sequence
  spacer sequence CTCN PAM
ucucccuccucccuaucucc

SEQ ID NO: 22612 - RNA, 20 nt, Artificial Sequence
  spacer sequence CTCN PAM
cccuccucccuaucuccccc

SEQ ID NO: 22613 - RNA, 20 nt, Artificial Sequence
  spacer sequence CTCN PAM
cuccucccuaucucccccuc

SEQ ID NO: 22614 - RNA, 20 nt, Artificial Sequence
  spacer sequence CTCN PAM
ucccuaucucccccuccucc

SEQ ID NO: 22615 - RNA, 20 nt, Artificial Sequence
  spacer sequence CTCN PAM
cuaucucccccuccuccucu

SEQ ID NO: 22616 - RNA, 20 nt, Artificial Sequence
  spacer sequence CTCN PAM
cccuccuccucuacccaguc

SEQ ID NO: 22617 - RNA, 20 nt, Artificial Sequence
  spacer sequence CTCN PAM
uccucuacccaguccccucu

SEQ ID NO: 22618 - RNA, 20 nt, Artificial Sequence
  spacer sequence CTCN PAM
ucuacccaguccccucucuc

SEQ ID NO: 22619 - RNA, 20 nt, Artificial Sequence
  spacer sequence CTCN PAM
acccaguccccucucuccuc

SEQ ID NO: 22620 - RNA, 20 nt, Artificial Sequence
  spacer sequence CTCN PAM
cuccucucccuccucccuuu

SEQ ID NO: 22621 - RNA, 20 nt, Artificial Sequence
  spacer sequence CTCN PAM
ccucucccuccucccuuucu

SEQ ID NO: 22622 - RNA, 20 nt, Artificial Sequence
  spacer sequence CTCN PAM
ucucccuccucccuuucucc

SEQ ID NO: 22623 - RNA, 20 nt, Artificial Sequence
  spacer sequence CTCN PAM
cccuccucccuuucuccccc

SEQ ID NO: 22624 - RNA, 20 nt, Artificial Sequence
  spacer sequence CTCN PAM
cuccucccuuucucccccuc

SEQ ID NO: 22625 - RNA, 20 nt, Artificial Sequence
  spacer sequence CTCN PAM
ucccuuucucccccuccucc

SEQ ID NO: 22626 - RNA, 20 nt, Artificial Sequence
  spacer sequence CTCN PAM
cuuucucccccuccuccucu

SEQ ID NO: 22627 - RNA, 20 nt, Artificial Sequence
  spacer sequence CTCN PAM
cccuccuccucuacccaguc

SEQ ID NO: 22628 - RNA, 20 nt, Artificial Sequence
  spacer sequence CTCN PAM
uccucuacccaguccccucu

SEQ ID NO: 22629 - RNA, 20 nt, Artificial Sequence
  spacer sequence CTCN PAM
ucuacccaguccccucucuc

SEQ ID NO: 22630 - RNA, 20 nt, Artificial Sequence
  spacer sequence CTCN PAM
acccaguccccucucuccuc

SEQ ID NO: 22631 - RNA, 20 nt, Artificial Sequence
  spacer sequence CTCN PAM
cuccucucccuccucccugu

SEQ ID NO: 22632 - RNA, 20 nt, Artificial Sequence
  spacer sequence CTCN PAM
ccucucccuccucccugucu

SEQ ID NO: 22633 - RNA, 20 nt, Artificial Sequence
  spacer sequence CTCN PAM
ucucccuccucccugucucc

SEQ ID NO: 22634 - RNA, 20 nt, Artificial Sequence
  spacer sequence CTCN PAM
cccuccucccugucuccccc

SEQ ID NO: 22635 - RNA, 20 nt, Artificial Sequence
  spacer sequence CTCN PAM
cuccucccugucucccccuc

SEQ ID NO: 22636 - RNA, 20 nt, Artificial Sequence
  spacer sequence CTCN PAM
ucccugucucccccuccucc

SEQ ID NO: 22637 - RNA, 20 nt, Artificial Sequence
  spacer sequence CTCN PAM
cugucucccccuccuccucu

SEQ ID NO: 22638 - RNA, 20 nt, Artificial Sequence
  spacer sequence CTCN PAM
cccuccuccucugcccaguc

SEQ ID NO: 22639 - RNA, 20 nt, Artificial Sequence
  spacer sequence CTCN PAM
uccucugcccaguccccucu

SEQ ID NO: 22640 - RNA, 20 nt, Artificial Sequence
  spacer sequence CTCN PAM
ucugcccaguccccucuccu

SEQ ID NO: 22641 - RNA, 20 nt, Artificial Sequence
  spacer sequence CTCN PAM
gcccaguccccucuccucuc

SEQ ID NO: 22642 - RNA, 20 nt, Artificial Sequence
  spacer sequence CTCN PAM
ccucuccuuccucccugucu

SEQ ID NO: 22643 - RNA, 20 nt, Artificial Sequence
  spacer sequence CTCN PAM
ucuccuuccucccugucucc

SEQ ID NO: 22644 - RNA, 20 nt, Artificial Sequence
  spacer sequence CTCN PAM
ccuuccucccugucuccccc

SEQ ID NO: 22645 - RNA, 20 nt, Artificial Sequence
  spacer sequence CTCN PAM
uuccucccugucucccccuc

SEQ ID NO: 22646 - RNA, 20 nt, Artificial Sequence
  spacer sequence CTCN PAM
cugucucccccucccuccuc

SEQ ID NO: 22647 - RNA, 20 nt, Artificial Sequence
  spacer sequence CTCN PAM
cccucccuccucccugucuc

SEQ ID NO: 22648 - RNA, 20 nt, Artificial Sequence
  spacer sequence CTCN PAM
cuccucccugucucccccuc

SEQ ID NO: 22649 - RNA, 20 nt, Artificial Sequence
  spacer sequence CTCN PAM
ucccugucucccccuccucc

SEQ ID NO: 22650 - RNA, 20 nt, Artificial Sequence
  spacer sequence CTCN PAM
cugucucccccuccuccucu

SEQ ID NO: 22651 - RNA, 20 nt, Artificial Sequence
  spacer sequence CTCN PAM
cccuccuccucugcccaguc

SEQ ID NO: 22652 - RNA, 20 nt, Artificial Sequence
  spacer sequence CTCN PAM
ccucaucacacagcuguugc

SEQ ID NO: 22653 - RNA, 20 nt, Artificial Sequence
  spacer sequence CTCN PAM
ucacacagcuguugcucagu

SEQ ID NO: 22654 - RNA, 20 nt, Artificial Sequence
  spacer sequence CTCN PAM
guaaauauggcagaauaaau

SEQ ID NO: 22655 - RNA, 20 nt, Artificial Sequence
  spacer sequence CTCN PAM
guggcucaugccugugaucc

SEQ ID NO: 22656 - RNA, 20 nt, Artificial Sequence
  spacer sequence CTCN PAM
ugccugugauccuagcacuu

SEQ ID NO: 22657 - RNA, 20 nt, Artificial Sequence
  spacer sequence CTCN PAM
agaagugcuaggaucacagg

SEQ ID NO: 22658 - RNA, 20 nt, Artificial Sequence
  spacer sequence CTCN PAM
gccuccagaagugcuaggau

SEQ ID NO: 22659 - RNA, 20 nt, Artificial Sequence
  spacer sequence CTCN PAM
ugccucagccuccagaagug

SEQ ID NO: 22660 - RNA, 20 nt, Artificial Sequence
  spacer sequence CTCN PAM
cuugagcucaggaguuggag

SEQ ID NO: 22661 - RNA, 20 nt, Artificial Sequence
  spacer sequence CTCN PAM
agugagccuccugccucagc

SEQ ID NO: 22662 - RNA, 20 nt, Artificial Sequence
  spacer sequence CTCN PAM
ggaguuggagacuagccugg

SEQ ID NO: 22663 - RNA, 20 nt, Artificial Sequence
  spacer sequence CTCN PAM
ugagcucaagugagccuccu

SEQ ID NO: 22664 - RNA, 20 nt, Artificial Sequence
  spacer sequence CTCN PAM
aacuccugagcucaagugag

SEQ ID NO: 22665 - RNA, 20 nt, Artificial Sequence
  spacer sequence CTCN PAM
acguuggccaggcuagucuc

SEQ ID NO: 22666 - RNA, 20 nt, Artificial Sequence
  spacer sequence CTCN PAM
cuacguuggccaggcuaguc

SEQ ID NO: 22667 - RNA, 20 nt, Artificial Sequence
  spacer sequence CTCN PAM
aucucuacuuagggugacca

SEQ ID NO: 22668 - RNA, 20 nt, Artificial Sequence
  spacer sequence CTCN PAM
acuuagggugaccaggggag

SEQ ID NO: 22669 - RNA, 20 nt, Artificial Sequence
  spacer sequence CTCN PAM
ccuggucacccuaaguagag

SEQ ID NO: 22670 - RNA, 20 nt, Artificial Sequence
  spacer sequence CTCN PAM
ccccuggucacccuaaguag

SEQ ID NO: 22671 - RNA, 20 nt, Artificial Sequence
  spacer sequence CTCN PAM
uuuuuuuuuuuuuuuugaaa

SEQ ID NO: 22672 - RNA, 20 nt, Artificial Sequence
  spacer sequence CTCN PAM
auuucaaaaaaaaaaaaaaa

SEQ ID NO: 22673 - RNA, 20 nt, Artificial Sequence
  spacer sequence CTCN PAM
gucgcacaggcuagagugca

SEQ ID NO: 22674 - RNA, 20 nt, Artificial Sequence
  spacer sequence CTCN PAM
agccugugcgacagagcaag

SEQ ID NO: 22675 - RNA, 20 nt, Artificial Sequence
  spacer sequence CTCN PAM
ccacugcacucuagccugug

SEQ ID NO: 22676 - RNA, 20 nt, Artificial Sequence
  spacer sequence CTCN PAM
gcucacugcaaccuccaccu

SEQ ID NO: 22677 - RNA, 20 nt, Artificial Sequence
  spacer sequence CTCN PAM
cugcaaccuccaccuccugg

SEQ ID NO: 22678 - RNA, 20 nt, Artificial Sequence
  spacer sequence CTCN PAM
accuccuggguucaagcaau

SEQ ID NO: 22679 - RNA, 20 nt, Artificial Sequence
  spacer sequence CTCN PAM
uggguucaagcaauucuccu

SEQ ID NO: 22680 - RNA, 20 nt, Artificial Sequence
  spacer sequence CTCN PAM
ugcuucagccuccugaguag

SEQ ID NO: 22681 - RNA, 20 nt, Artificial Sequence
  spacer sequence CTCN PAM
acuaaaaauacaaaauuagc

SEQ ID NO: 22682 - RNA, 20 nt, Artificial Sequence
  spacer sequence CTCN PAM
gucucuacuaaaaauacaaa

SEQ ID NO: 22683 - RNA, 20 nt, Artificial Sequence
  spacer sequence CTCN PAM
aacuccugacugcaggugau

SEQ ID NO: 22684 - RNA, 20 nt, Artificial Sequence
  spacer sequence CTCN PAM
ugcuugccugcacagccgga

SEQ ID NO: 22685 - RNA, 20 nt, Artificial Sequence
  spacer sequence CTCN PAM
uuuggcuugggguugguguc

SEQ ID NO: 22686 - RNA, 20 nt, Artificial Sequence
  spacer sequence CTCN PAM
gguggccucauuuggcuugg

SEQ ID NO: 22687 - RNA, 20 nt, Artificial Sequence
  spacer sequence CTCN PAM
acaccugccccgugcgggac

SEQ ID NO: 22688 - RNA, 20 nt, Artificial Sequence
  spacer sequence CTCN PAM
aucccgccagcauuugcucc

SEQ ID NO: 22689 - RNA, 20 nt, Artificial Sequence
  spacer sequence CTCN PAM
aucccucuaucccgccagca

SEQ ID NO: 22690 - RNA, 20 nt, Artificial Sequence
  spacer sequence CTCN PAM
caggcagcccccuucuccau

SEQ ID NO: 22691 - RNA, 20 nt, Artificial Sequence
  spacer sequence CTCN PAM
cucccaggcagcccccuucu

SEQ ID NO: 22692 - RNA, 20 nt, Artificial Sequence
  spacer sequence CTCN PAM
gccuccugcccuauccgaga

SEQ ID NO: 22693 - RNA, 20 nt, Artificial Sequence
  spacer sequence CTCN PAM
ugcccuauccgagaacagag

SEQ ID NO: 22694 - RNA, 20 nt, Artificial Sequence
  spacer sequence CTCN PAM
gauagggcaggaggcugagg

SEQ ID NO: 22695 - RNA, 20 nt, Artificial Sequence
  spacer sequence CTCN PAM
guucucggauagggcaggag

SEQ ID NO: 22696 - RNA, 20 nt, Artificial Sequence
  spacer sequence CTCN PAM
gguuuccugcccggcagccc

SEQ ID NO: 22697 - RNA, 20 nt, Artificial Sequence
  spacer sequence CTCN PAM
cgggcugccgggcaggaaac

SEQ ID NO: 22698 - RNA, 20 nt, Artificial Sequence
  spacer sequence CTCN PAM
ucacgggcugccgggcagga

SEQ ID NO: 22699 - RNA, 20 nt, Artificial Sequence
  spacer sequence CTCN PAM
cugcuccucacgggcugccg

SEQ ID NO: 22700 - RNA, 20 nt, Artificial Sequence
  spacer sequence CTCN PAM
ucaggacuguccggccccca

SEQ ID NO: 22701 - RNA, 20 nt, Artificial Sequence
  spacer sequence CTCN PAM
agcucuucaggacuguccgg

SEQ ID NO: 22702 - RNA, 20 nt, Artificial Sequence
  spacer sequence CTCN PAM
uggcuccuaaagcauagcgc

SEQ ID NO: 22703 - RNA, 20 nt, Artificial Sequence
  spacer sequence CTCN PAM
uaaagcauagcgccggcucu

SEQ ID NO: 22704 - RNA, 20 nt, Artificial Sequence
  spacer sequence CTCN PAM
ggggaucugccagggagaga

SEQ ID NO: 22705 - RNA, 20 nt, Artificial Sequence
  spacer sequence CTCN PAM
cuggcagauccccagagccg

SEQ ID NO: 22706 - RNA, 20 nt, Artificial Sequence
  spacer sequence CTCN PAM
cccuggcagauccccagagc

SEQ ID NO: 22707 - RNA, 20 nt, Artificial Sequence
  spacer sequence CTCN PAM
agggccccuggaugcagguu

SEQ ID NO: 22708 - RNA, 20 nt, Artificial Sequence
  spacer sequence CTCN PAM
aaccugcauccaggggcccu

SEQ ID NO: 22709 - RNA, 20 nt, Artificial Sequence
  spacer sequence CTCN PAM
ggcuguccccugauggccuc

SEQ ID NO: 22710 - RNA, 20 nt, Artificial Sequence
  spacer sequence CTCN PAM
gugcuaugggugaguuucuc

SEQ ID NO: 22711 - RNA, 20 nt, Artificial Sequence
  spacer sequence CTCN PAM
cccauagcaccgaggccauc

SEQ ID NO: 22712 - RNA, 20 nt, Artificial Sequence
  spacer sequence CTCN PAM
accucucugugcucagccuc

SEQ ID NO: 22713 - RNA, 20 nt, Artificial Sequence
  spacer sequence CTCN PAM
cugugcucagccucucaccg

SEQ ID NO: 22714 - RNA, 20 nt, Artificial Sequence
  spacer sequence CTCN PAM
gugcucagccucucaccgga

SEQ ID NO: 22715 - RNA, 20 nt, Artificial Sequence
  spacer sequence CTCN PAM
gccucucaccggagaggggg

SEQ ID NO: 22716 - RNA, 20 nt, Artificial Sequence
  spacer sequence CTCN PAM
caccggagagggggugggug

SEQ ID NO: 22717 - RNA, 20 nt, Artificial Sequence
  spacer sequence CTCN PAM
ccggagagggggugggugau

SEQ ID NO: 22718 - RNA, 20 nt, Artificial Sequence
  spacer sequence CTCN PAM
ggugagaggcugagcacaga

SEQ ID NO: 22719 - RNA, 20 nt, Artificial Sequence
  spacer sequence CTCN PAM
ccggugagaggcugagcaca

SEQ ID NO: 22720 - RNA, 20 nt, Artificial Sequence
  spacer sequence CTCN PAM
ggccaggaucacccaccccc

SEQ ID NO: 22721 - RNA, 20 nt, Artificial Sequence
  spacer sequence CTCN PAM
ucuguggcugguauuuccca

SEQ ID NO: 22722 - RNA, 20 nt, Artificial Sequence
  spacer sequence CTCN PAM
guggcugguauuucccaaca

SEQ ID NO: 22723 - RNA, 20 nt, Artificial Sequence
  spacer sequence CTCN PAM
auaaauucacagguggcuca

SEQ ID NO: 22724 - RNA, 20 nt, Artificial Sequence
  spacer sequence CTCN PAM
ggccuguaaucccagcacuu

SEQ ID NO: 22725 - RNA, 20 nt, Artificial Sequence
  spacer sequence CTCN PAM
caaagugcugggauuacagg

SEQ ID NO: 22726 - RNA, 20 nt, Artificial Sequence
  spacer sequence CTCN PAM
acuaaaaauacaaaaauuag

SEQ ID NO: 22727 - RNA, 20 nt, Artificial Sequence
  spacer sequence CTCN PAM
ggaggcugaggcaggagaau

SEQ ID NO: 22728 - RNA, 20 nt, Artificial Sequence
  spacer sequence CTCN PAM
cgaguagcugggacuacagg

SEQ ID NO: 22729 - RNA, 20 nt, Artificial Sequence
  spacer sequence CTCN PAM
gccucccgaguagcugggac

SEQ ID NO: 22730 - RNA, 20 nt, Artificial Sequence
  spacer sequence CTCN PAM
ugccucagccucccgaguag

SEQ ID NO: 22731 - RNA, 20 nt, Artificial Sequence
  spacer sequence CTCN PAM
cggguucaagcgauucuccu

SEQ ID NO: 22732 - RNA, 20 nt, Artificial Sequence
  spacer sequence CTCN PAM
gccucccggguucaagcgau

SEQ ID NO: 22733 - RNA, 20 nt, Artificial Sequence
  spacer sequence CTCN PAM
cugcaaccuccgccucccgg

SEQ ID NO: 22734 - RNA, 20 nt, Artificial Sequence
  spacer sequence CTCN PAM
agccucagcaauaagagcaa

SEQ ID NO: 22735 - RNA, 20 nt, Artificial Sequence
  spacer sequence CTCN PAM
gcaauaagagcaaaacucca

SEQ ID NO: 22736 - RNA, 20 nt, Artificial Sequence
  spacer sequence CTCN PAM
uauugcugaggcuggaguga

SEQ ID NO: 22737 - RNA, 20 nt, Artificial Sequence
  spacer sequence CTCN PAM
aucucaaaacaaaauaaaaa

SEQ ID NO: 22738 - RNA, 20 nt, Artificial Sequence
  spacer sequence CTCN PAM
aaacaaaauaaaaaauaagg

SEQ ID NO: 22739 - RNA, 20 nt, Artificial Sequence
  spacer sequence CTCN PAM
ugccuguaaucccaacacuu

SEQ ID NO: 22740 - RNA, 20 nt, Artificial Sequence
  spacer sequence CTCN PAM
caaaguguugggauuacagg

SEQ ID NO: 22741 - RNA, 20 nt, Artificial Sequence
  spacer sequence CTCN PAM
ugaccuugugauccgccugc

SEQ ID NO: 22742 - RNA, 20 nt, Artificial Sequence
  spacer sequence CTCN PAM
aucuccugaccuugugaucc

SEQ ID NO: 22743 - RNA, 20 nt, Artificial Sequence
  spacer sequence CTCN PAM
ucucuacuaaaauacaaaaa

SEQ ID NO: 22744 - RNA, 20 nt, Artificial Sequence
  spacer sequence CTCN PAM
acuaaaauacaaaaaauuag

SEQ ID NO: 22745 - RNA, 20 nt, Artificial Sequence
  spacer sequence CTCN PAM
ggaggcugaggcaggggaau

SEQ ID NO: 22746 - RNA, 20 nt, Artificial Sequence
  spacer sequence CTCN PAM
ugaguagcugggauuacagg

SEQ ID NO: 22747 - RNA, 20 nt, Artificial Sequence
  spacer sequence CTCN PAM
gccuccugaguagcugggau

SEQ ID NO: 22748 - RNA, 20 nt, Artificial Sequence
  spacer sequence CTCN PAM
cagguucaagcgauuccccu

SEQ ID NO: 22749 - RNA, 20 nt, Artificial Sequence
  spacer sequence CTCN PAM
gccucccagguucaagcgau

SEQ ID NO: 22750 - RNA, 20 nt, Artificial Sequence
  spacer sequence CTCN PAM
aaaaaaaaaaaaaagaaaag

SEQ ID NO: 22751 - RNA, 20 nt, Artificial Sequence
  spacer sequence CTCN PAM
caaaaaaaaaaaaaaagaaa

SEQ ID NO: 22752 - RNA, 20 nt, Artificial Sequence
  spacer sequence CTCN PAM
cucugucacccaggcuggag

SEQ ID NO: 22753 - RNA, 20 nt, Artificial Sequence
  spacer sequence CTCN PAM
gucacccaggcuggagugca

SEQ ID NO: 22754 - RNA, 20 nt, Artificial Sequence
  spacer sequence CTCN PAM
agccugggugacagagcgag

SEQ ID NO: 22755 - RNA, 20 nt, Artificial Sequence
  spacer sequence CTCN PAM
gcugcacuccagccugggug

SEQ ID NO: 22756 - RNA, 20 nt, Artificial Sequence
  spacer sequence CTCN PAM
gcucacuacaagcuccgccu

SEQ ID NO: 22757 - RNA, 20 nt, Artificial Sequence
  spacer sequence CTCN PAM
cuacaagcuccgccucccag

SEQ ID NO: 22758 - RNA, 20 nt, Artificial Sequence
  spacer sequence CTCN PAM
gccucccagguucaugccau

SEQ ID NO: 22759 - RNA, 20 nt, Artificial Sequence
  spacer sequence CTCN PAM
agcaccaucugucuggcuua

SEQ ID NO: 22760 - RNA, 20 nt, Artificial Sequence
  spacer sequence CTCN PAM
ccaucuccagcaccaucugu

SEQ ID NO: 22761 - RNA, 20 nt, Artificial Sequence
  spacer sequence CTCN PAM
gggugcugccuggacaggug

SEQ ID NO: 22762 - RNA, 20 nt, Artificial Sequence
  spacer sequence CTCN PAM
cugcaaccucugucucucgg

SEQ ID NO: 22763 - RNA, 20 nt, Artificial Sequence
  spacer sequence CTCN PAM
gucucucggguucaagcaau

SEQ ID NO: 22764 - RNA, 20 nt, Artificial Sequence
  spacer sequence CTCN PAM
cggguucaagcaauucuccu

SEQ ID NO: 22765 - RNA, 20 nt, Artificial Sequence
  spacer sequence CTCN PAM
gguucaagcaauucuccugc

SEQ ID NO: 22766 - RNA, 20 nt, Artificial Sequence
  spacer sequence CTCN PAM
ugccucagccucccaaguag

SEQ ID NO: 22767 - RNA, 20 nt, Artificial Sequence
  spacer sequence CTCN PAM
gccucccaaguagcugggac

SEQ ID NO: 22768 - RNA, 20 nt, Artificial Sequence
  spacer sequence CTCN PAM
caaguagcugggacuacagg

SEQ ID NO: 22769 - RNA, 20 nt, Artificial Sequence
  spacer sequence CTCN PAM
ucccuucuccuuuuagcccc

SEQ ID NO: 22770 - RNA, 20 nt, Artificial Sequence
  spacer sequence CTCN PAM
cuucuccuuuuagccccaga

SEQ ID NO: 22771 - RNA, 20 nt, Artificial Sequence
  spacer sequence CTCN PAM
uuuuagccccagauaacauu

SEQ ID NO: 22772 - RNA, 20 nt, Artificial Sequence
  spacer sequence CTCN PAM
auguuuaucugcucgccugc

SEQ ID NO: 22773 - RNA, 20 nt, Artificial Sequence
  spacer sequence CTCN PAM
ccugccgaaggacguuuugg

SEQ ID NO: 22774 - RNA, 20 nt, Artificial Sequence
  spacer sequence CTCN PAM
gcuauucauaacagcccagc

SEQ ID NO: 22775 - RNA, 20 nt, Artificial Sequence
  spacer sequence CTCN PAM
cgccuguaaucccagcaguu

SEQ ID NO: 22776 - RNA, 20 nt, Artificial Sequence
  spacer sequence CTCN PAM
ugaacugcugggauuacagg

SEQ ID NO: 22777 - RNA, 20 nt, Artificial Sequence
  spacer sequence CTCN PAM
caccuuggccuccugaacug

SEQ ID NO: 22778 - RNA, 20 nt, Artificial Sequence
  spacer sequence CTCN PAM
acuaaaaauacaaaaauuag

SEQ ID NO: 22779 - RNA, 20 nt, Artificial Sequence
  spacer sequence CTCN PAM
aacuccugaccucaagugau

SEQ ID NO: 22780 - RNA, 20 nt, Artificial Sequence
  spacer sequence CTCN PAM
ugaccucaagugaucugccu

SEQ ID NO: 22781 - RNA, 20 nt, Artificial Sequence
  spacer sequence CTCN PAM
agugaucugccugccucagc

SEQ ID NO: 22782 - RNA, 20 nt, Artificial Sequence
  spacer sequence CTCN PAM
gccucucaaagugccgggau

SEQ ID NO: 22783 - RNA, 20 nt, Artificial Sequence
  spacer sequence CTCN PAM
caaagugccgggauuacagg

SEQ ID NO: 22784 - RNA, 20 nt, Artificial Sequence
  spacer sequence CTCN PAM
aagugccgggauuacaggcg

SEQ ID NO: 22785 - RNA, 20 nt, Artificial Sequence
  spacer sequence CTCN PAM
cgccuguaaucccggcacuu

SEQ ID NO: 22786 - RNA, 20 nt, Artificial Sequence
  spacer sequence CTCN PAM
auuuuauuauuuaaaaaaaa

SEQ ID NO: 22787 - RNA, 20 nt, Artificial Sequence
  spacer sequence CTCN PAM
cagccucuauuuuauuauuu

SEQ ID NO: 22788 - RNA, 20 nt, Artificial Sequence
  spacer sequence CTCN PAM
cgccuguaaucccagcacuu

SEQ ID NO: 22789 - RNA, 20 nt, Artificial Sequence
  spacer sequence CTCN PAM
ggugaucccaaagugcuggg

SEQ ID NO: 22790 - RNA, 20 nt, Artificial Sequence
  spacer sequence CTCN PAM
ugaccucaggugaucccaaa

SEQ ID NO: 22791 - RNA, 20 nt, Artificial Sequence
  spacer sequence CTCN PAM
aacucuugaccucaggugau

SEQ ID NO: 22792 - RNA, 20 nt, Artificial Sequence
  spacer sequence CTCN PAM
gcuaaaaacacaaaaauuag

SEQ ID NO: 22793 - RNA, 20 nt, Artificial Sequence
  spacer sequence CTCN PAM
gcuacuugggaggcugaggc

SEQ ID NO: 22794 - RNA, 20 nt, Artificial Sequence
  spacer sequence CTCN PAM
caaguagcugagauuacagg

SEQ ID NO: 22795 - RNA, 20 nt, Artificial Sequence
  spacer sequence CTCN PAM
gccucccaaguagcugagau

SEQ ID NO: 22796 - RNA, 20 nt, Artificial Sequence
  spacer sequence CTCN PAM
ugccucagccucccaaguag

SEQ ID NO: 22797 - RNA, 20 nt, Artificial Sequence
  spacer sequence CTCN PAM
uggguucaagcgcuucuccu

SEQ ID NO: 22798 - RNA, 20 nt, Artificial Sequence
  spacer sequence CTCN PAM
ggcuccuggguucaagcgcu

SEQ ID NO: 22799 - RNA, 20 nt, Artificial Sequence
  spacer sequence CTCN PAM
cugcaaccuccggcuccugg

SEQ ID NO: 22800 - RNA, 20 nt, Artificial Sequence
  spacer sequence CTCN PAM
acucacugcaaccuccggcu

SEQ ID NO: 22801 - RNA, 20 nt, Artificial Sequence
  spacer sequence CTCN PAM
agccugggcaacagagcgag

SEQ ID NO: 22802 - RNA, 20 nt, Artificial Sequence
  spacer sequence CTCN PAM
guugcccaggcuggagcaca

SEQ ID NO: 22803 - RNA, 20 nt, Artificial Sequence
  spacer sequence CTCN PAM
cucuguugcccaggcuggag

SEQ ID NO: 22804 - RNA, 20 nt, Artificial Sequence
  spacer sequence CTCN PAM
cgcucuguugcccaggcugg

SEQ ID NO: 22805 - RNA, 20 nt, Artificial Sequence
  spacer sequence CTCN PAM
uggagcuucucuucucaggg

SEQ ID NO: 22806 - RNA, 20 nt, Artificial Sequence
  spacer sequence CTCN PAM
aggaggucagugacggucua

SEQ ID NO: 22807 - RNA, 20 nt, Artificial Sequence
  spacer sequence CTCN PAM
ucucagggaaaggaacuucc

SEQ ID NO: 22808 - RNA, 20 nt, Artificial Sequence
  spacer sequence CTCN PAM
gggaaaggaacuuccagacu

SEQ ID NO: 22809 - RNA, 20 nt, Artificial Sequence
  spacer sequence CTCN PAM
gaaaacuggggcaggaaaca

SEQ ID NO: 22810 - RNA, 20 nt, Artificial Sequence
  spacer sequence CTCN PAM
ggcagcuuccaggaggauug

SEQ ID NO: 22811 - RNA, 20 nt, Artificial Sequence
  spacer sequence CTCN PAM
uggaagcugccugagauccg

SEQ ID NO: 22812 - RNA, 20 nt, Artificial Sequence
  spacer sequence CTCN PAM
cugaaauugcccaauucccu

SEQ ID NO: 22813 - RNA, 20 nt, Artificial Sequence
  spacer sequence CTCN PAM
ugggcacaugguuuucagau

SEQ ID NO: 22814 - RNA, 20 nt, Artificial Sequence
  spacer sequence CTCN PAM
gccccggugcagggugugug

SEQ ID NO: 22815 - RNA, 20 nt, Artificial Sequence
  spacer sequence CTCN PAM
cccuggcguuugaauccugg

SEQ ID NO: 22816 - RNA, 20 nt, Artificial Sequence
  spacer sequence CTCN PAM
uguggacuaaacccggggcc

SEQ ID NO: 22817 - RNA, 20 nt, Artificial Sequence
  spacer sequence CTCN PAM
uccuguggacuaaacccggg

SEQ ID NO: 22818 - RNA, 20 nt, Artificial Sequence
  spacer sequence CTCN PAM
cagcagccaguguggcuucu

SEQ ID NO: 22819 - RNA, 20 nt, Artificial Sequence
  spacer sequence CTCN PAM
gaggaauccaccccagauaa

SEQ ID NO: 22820 - RNA, 20 nt, Artificial Sequence
  spacer sequence CTCN PAM
gagccgcacggugggguuag

SEQ ID NO: 22821 - RNA, 20 nt, Artificial Sequence
  spacer sequence CTCN PAM
caauaaacauguucacagca

SEQ ID NO: 22822 - RNA, 20 nt, Artificial Sequence
  spacer sequence CTCN PAM
auaaacauguucacagcagc

SEQ ID NO: 22823 - RNA, 20 nt, Artificial Sequence
  spacer sequence CTCN PAM
ugcugcugugaacauguuua

SEQ ID NO: 22824 - RNA, 20 nt, Artificial Sequence
  spacer sequence CTCN PAM
cguggcucaugcugcuguga

SEQ ID NO: 22825 - RNA, 20 nt, Artificial Sequence
  spacer sequence CTCN PAM
ugccacuguuuccguccacc

SEQ ID NO: 22826 - RNA, 20 nt, Artificial Sequence
  spacer sequence CTCN PAM
uguggcucgugccacuguuu

SEQ ID NO: 22827 - RNA, 20 nt, Artificial Sequence
  spacer sequence CTCN PAM
ugccacuguuuccuuccacg

SEQ ID NO: 22828 - RNA, 20 nt, Artificial Sequence
  spacer sequence CTCN PAM
uaacucgugccacuguuucc

SEQ ID NO: 22829 - RNA, 20 nt, Artificial Sequence
  spacer sequence CTCN PAM
cguaacucgugccacuguuu

SEQ ID NO: 22830 - RNA, 20 nt, Artificial Sequence
  spacer sequence CTCN PAM
cgugaaucaugcugcuguuu

SEQ ID NO: 22831 - RNA, 20 nt, Artificial Sequence
  spacer sequence CTCN PAM
guccaugccuggcucccgug

SEQ ID NO: 22832 - RNA, 20 nt, Artificial Sequence
  spacer sequence CTCN PAM
uguggacuccguccaugccu

SEQ ID NO: 22833 - RNA, 20 nt, Artificial Sequence
  spacer sequence CTCN PAM
cgugaaucgugccacuguuu

SEQ ID NO: 22834 - RNA, 20 nt, Artificial Sequence
  spacer sequence CTCN PAM
guuuccauccacgccuggcu

SEQ ID NO: 22835 - RNA, 20 nt, Artificial Sequence
  spacer sequence CTCN PAM
ccguuuccauccacgccugg

SEQ ID NO: 22836 - RNA, 20 nt, Artificial Sequence
  spacer sequence CTCN PAM
ucuccguuuccauccacgcc

SEQ ID NO: 22837 - RNA, 20 nt, Artificial Sequence
  spacer sequence CTCN PAM
gcuccucuccguuuccaucc

SEQ ID NO: 22838 - RNA, 20 nt, Artificial Sequence
  spacer sequence CTCN PAM
cugcuccucuccguuuccau

SEQ ID NO: 22839 - RNA, 20 nt, Artificial Sequence
  spacer sequence CTCN PAM
gacgccagccacagcgcaga

SEQ ID NO: 22840 - RNA, 20 nt, Artificial Sequence
  spacer sequence CTCN PAM
gggugcaucugcgcuguggc

SEQ ID NO: 22841 - RNA, 20 nt, Artificial Sequence
  spacer sequence CTCN PAM
gacggaugcccgacacgaaa

SEQ ID NO: 22842 - RNA, 20 nt, Artificial Sequence
  spacer sequence CTCN PAM
cgccugugaucccagcacuu

SEQ ID NO: 22843 - RNA, 20 nt, Artificial Sequence
  spacer sequence CTCN PAM
caaagugcugggaucacagg

SEQ ID NO: 22844 - RNA, 20 nt, Artificial Sequence
  spacer sequence CTCN PAM
aaaaaaaaaauuccagcgug

SEQ ID NO: 22845 - RNA, 20 nt, Artificial Sequence
  spacer sequence CTCN PAM
cuguguugcccaggcuggag

SEQ ID NO: 22846 - RNA, 20 nt, Artificial Sequence
  spacer sequence CTCN PAM
guguugcccaggcuggagug

SEQ ID NO: 22847 - RNA, 20 nt, Artificial Sequence
  spacer sequence CTCN PAM
agccugggcaacacagagag

SEQ ID NO: 22848 - RNA, 20 nt, Artificial Sequence
  spacer sequence CTCN PAM
caugaggaggucaaagucac

SEQ ID NO: 22849 - RNA, 20 nt, Artificial Sequence
  spacer sequence CTCN PAM
ugggaggaaaaagcaggaug

SEQ ID NO: 22850 - RNA, 20 nt, Artificial Sequence
  spacer sequence CTCN PAM
ucaugggaggaaaaagcagg

SEQ ID NO: 22851 - RNA, 20 nt, Artificial Sequence
  spacer sequence CTCN PAM
ugccuguaaucucaguacuu

SEQ ID NO: 22852 - RNA, 20 nt, Artificial Sequence
  spacer sequence CTCN PAM
guacuuugggaggccaaggu

SEQ ID NO: 22853 - RNA, 20 nt, Artificial Sequence
  spacer sequence CTCN PAM
caaaguacugagauuacagg

SEQ ID NO: 22854 - RNA, 20 nt, Artificial Sequence
  spacer sequence CTCN PAM
ggaggcugaggcaggagaau

SEQ ID NO: 22855 - RNA, 20 nt, Artificial Sequence
  spacer sequence CTCN PAM
ugaguagcugggaccacagg

SEQ ID NO: 22856 - RNA, 20 nt, Artificial Sequence
  spacer sequence CTCN PAM
gccuccugaguagcugggac

SEQ ID NO: 22857 - RNA, 20 nt, Artificial Sequence
  spacer sequence CTCN PAM
ugccucagccuccugaguag

SEQ ID NO: 22858 - RNA, 20 nt, Artificial Sequence
  spacer sequence CTCN PAM
gguucaggccauucuccugc

SEQ ID NO: 22859 - RNA, 20 nt, Artificial Sequence
  spacer sequence CTCN PAM
cggguucaggccauucuccu

SEQ ID NO: 22860 - RNA, 20 nt, Artificial Sequence
  spacer sequence CTCN PAM
gccucucggguucaggccau

SEQ ID NO: 22861 - RNA, 20 nt, Artificial Sequence
  spacer sequence CTCN PAM
cugcaaacuccgccucucgg

SEQ ID NO: 22862 - RNA, 20 nt, Artificial Sequence
  spacer sequence CTCN PAM
gcucacugcaaacuccgccu

SEQ ID NO: 22863 - RNA, 20 nt, Artificial Sequence
  spacer sequence CTCN PAM
agccugggcgaaagagugaa

SEQ ID NO: 22864 - RNA, 20 nt, Artificial Sequence
  spacer sequence CTCN PAM
uucgcccaggcuggagugca

SEQ ID NO: 22865 - RNA, 20 nt, Artificial Sequence
  spacer sequence CTCN PAM
gucucaaaaaauaaaaagaa

SEQ ID NO: 22866 - RNA, 20 nt, Artificial Sequence
  spacer sequence CTCN PAM
aaaaauaaaaagaaaagaaa

SEQ ID NO: 22867 - RNA, 20 nt, Artificial Sequence
  spacer sequence CTCN PAM
ggaggcugaggcaagagaau

SEQ ID NO: 22868 - RNA, 20 nt, Artificial Sequence
  spacer sequence CTCN PAM
cgagcagcugggacuacagg

SEQ ID NO: 22869 - RNA, 20 nt, Artificial Sequence
  spacer sequence CTCN PAM
gccucccgagcagcugggac

SEQ ID NO: 22870 - RNA, 20 nt, Artificial Sequence
  spacer sequence CTCN PAM
ugccucagccucccgagcag

SEQ ID NO: 22871 - RNA, 20 nt, Artificial Sequence
  spacer sequence CTCN PAM
cggguucaagcgauucucuu

SEQ ID NO: 22872 - RNA, 20 nt, Artificial Sequence
  spacer sequence CTCN PAM
ccucccggguucaagcgauu

SEQ ID NO: 22873 - RNA, 20 nt, Artificial Sequence
  spacer sequence CTCN PAM
cugcaacccucgccucccgg

SEQ ID NO: 22874 - RNA, 20 nt, Artificial Sequence
  spacer sequence CTCN PAM
gcucacugcaacccucgccu

SEQ ID NO: 22875 - RNA, 20 nt, Artificial Sequence
  spacer sequence CTCN PAM
gucucagaaaaacaaagucg

SEQ ID NO: 22876 - RNA, 20 nt, Artificial Sequence
  spacer sequence CTCN PAM
gaaaaacaaagucgcacagg

SEQ ID NO: 22877 - RNA, 20 nt, Artificial Sequence
  spacer sequence CTCN PAM
ugugcgacuuuguuuuucug

SEQ ID NO: 22878 - RNA, 20 nt, Artificial Sequence
  spacer sequence CTCN PAM
ccugugcgacuuuguuuuuc

SEQ ID NO: 22879 - RNA, 20 nt, Artificial Sequence
  spacer sequence CTCN PAM
acagacaaccccaucaaggc

SEQ ID NO: 22880 - RNA, 20 nt, Artificial Sequence
  spacer sequence CTCN PAM
cugccccagccuugaugggg

SEQ ID NO: 22881 - RNA, 20 nt, Artificial Sequence
  spacer sequence CTCN PAM
gaaggccacaggcccccagg

SEQ ID NO: 22882 - RNA, 20 nt, Artificial Sequence
  spacer sequence CTCN PAM
cccucccugcugucccucug

SEQ ID NO: 22883 - RNA, 20 nt, Artificial Sequence
  spacer sequence CTCN PAM
cucccugcugucccucugug

SEQ ID NO: 22884 - RNA, 20 nt, Artificial Sequence
  spacer sequence CTCN PAM
cugcugucccucugugagcc

SEQ ID NO: 22885 - RNA, 20 nt, Artificial Sequence
  spacer sequence CTCN PAM
gugagccacacccugcggcu

SEQ ID NO: 22886 - RNA, 20 nt, Artificial Sequence
  spacer sequence CTCN PAM
cagagggacagcagggaggg

SEQ ID NO: 22887 - RNA, 20 nt, Artificial Sequence
  spacer sequence CTCN PAM
guccccagccccugcagccc

SEQ ID NO: 22888 - RNA, 20 nt, Artificial Sequence
  spacer sequence CTCN PAM
ucccccucuguccccagccc

SEQ ID NO: 22889 - RNA, 20 nt, Artificial Sequence
  spacer sequence CTCN PAM
caggccgccuggcuggaaac

SEQ ID NO: 22890 - RNA, 20 nt, Artificial Sequence
  spacer sequence CTCN PAM
guuuugucuuagaagcaguu

SEQ ID NO: 22891 - RNA, 20 nt, Artificial Sequence
  spacer sequence CTCN PAM
aggccguccaggguucaggc

SEQ ID NO: 22892 - RNA, 20 nt, Artificial Sequence
  spacer sequence CTCN PAM
gccugaacccuggacggccu

SEQ ID NO: 22893 - RNA, 20 nt, Artificial Sequence
  spacer sequence CTCN PAM
uucgaccuccgucaacccug

SEQ ID NO: 22894 - RNA, 20 nt, Artificial Sequence
  spacer sequence CTCN PAM
gucaacccuggagaugaagc

SEQ ID NO: 22895 - RNA, 20 nt, Artificial Sequence
  spacer sequence CTCN PAM
aggguugacggaggucgaag

SEQ ID NO: 22896 - RNA, 20 nt, Artificial Sequence
  spacer sequence CTCN PAM
agccagggccccuucccugc

SEQ ID NO: 22897 - RNA, 20 nt, Artificial Sequence
  spacer sequence CTCN PAM
ggauggauguccaagccucc

SEQ ID NO: 22898 - RNA, 20 nt, Artificial Sequence
  spacer sequence CTCN PAM
gccccuccggauggaugucc

SEQ ID NO: 22899 - RNA, 20 nt, Artificial Sequence
  spacer sequence CTCN PAM
aggcggugugugaguccccg

SEQ ID NO: 22900 - RNA, 20 nt, Artificial Sequence
  spacer sequence CTCN PAM
aggccacuccgccccuccgg

SEQ ID NO: 22901 - RNA, 20 nt, Artificial Sequence
  spacer sequence CTCN PAM
cacaccgccucgaggccacu

SEQ ID NO: 22902 - RNA, 20 nt, Artificial Sequence
  spacer sequence CTCN PAM
ugccaccggccacccagcgu

SEQ ID NO: 22903 - RNA, 20 nt, Artificial Sequence
  spacer sequence CTCN PAM
cucgugccaccggccaccca

SEQ ID NO: 22904 - RNA, 20 nt, Artificial Sequence
  spacer sequence CTCN PAM
gggucccgcagccccccgug

SEQ ID NO: 22905 - RNA, 20 nt, Artificial Sequence
  spacer sequence CTCN PAM
ggcacccacaccacgggggg

SEQ ID NO: 22906 - RNA, 20 nt, Artificial Sequence
  spacer sequence CTCN PAM
aggaggacaagggagggaac

SEQ ID NO: 22907 - RNA, 20 nt, Artificial Sequence
  spacer sequence CTCN PAM
aggaccccccaacucaggca

SEQ ID NO: 22908 - RNA, 20 nt, Artificial Sequence
  spacer sequence CTCN PAM
ucgaggaccccccaacucag

SEQ ID NO: 22909 - RNA, 20 nt, Artificial Sequence
  spacer sequence CTCN PAM
cuuguccuccucgaggaccc

SEQ ID NO: 22910 - RNA, 20 nt, Artificial Sequence
  spacer sequence CTCN PAM
gugauaugcuaagucccucc

SEQ ID NO: 22911 - RNA, 20 nt, Artificial Sequence
  spacer sequence CTCN PAM
ugcucaccacuaaacccaag

SEQ ID NO: 22912 - RNA, 20 nt, Artificial Sequence
  spacer sequence CTCN PAM
ccacuaaacccaagaggaaa

SEQ ID NO: 22913 - RNA, 20 nt, Artificial Sequence
  spacer sequence CTCN PAM
uggguuuaguggugagcagg

SEQ ID NO: 22914 - RNA, 20 nt, Artificial Sequence
  spacer sequence CTCN PAM
gccaggaauuccuuuuccuc

SEQ ID NO: 22915 - RNA, 20 nt, Artificial Sequence
  spacer sequence CTCN PAM
uucccacauuguuuguuugu

SEQ ID NO: 22916 - RNA, 20 nt, Artificial Sequence
  spacer sequence CTCN PAM
ccuucccacauuguuuguuu

SEQ ID NO: 22917 - RNA, 20 nt, Artificial Sequence
  spacer sequence CTCN PAM
cccacauuccugggauuccu

SEQ ID NO: 22918 - RNA, 20 nt, Artificial Sequence
  spacer sequence CTCN PAM
ucccgccggggccacccugg

SEQ ID NO: 22919 - RNA, 20 nt, Artificial Sequence
  spacer sequence CTCN PAM
cgccggggccacccuggacc

SEQ ID NO: 22920 - RNA, 20 nt, Artificial Sequence
  spacer sequence CTCN PAM
ccggguccaggguggccccg

SEQ ID NO: 22921 - RNA, 20 nt, Artificial Sequence
  spacer sequence CTCN PAM
uggacguggguccuuggggg

SEQ ID NO: 22922 - RNA, 20 nt, Artificial Sequence
  spacer sequence CTCN PAM
cugugcaaaccagacaaccc

SEQ ID NO: 22923 - RNA, 20 nt, Artificial Sequence
  spacer sequence CTCN PAM
gugcaaaccagacaacccug

SEQ ID NO: 22924 - RNA, 20 nt, Artificial Sequence
  spacer sequence CTCN PAM
cgucucuauuucuuucucug

SEQ ID NO: 22925 - RNA, 20 nt, Artificial Sequence
  spacer sequence CTCN PAM
auuucuuucucuguuuuauu

SEQ ID NO: 22926 - RNA, 20 nt, Artificial Sequence
  spacer sequence CTCN PAM
guuuuauuaucucauucuug

SEQ ID NO: 22927 - RNA, 20 nt, Artificial Sequence
  spacer sequence CTCN PAM
uucuuggcugugagguaaac

SEQ ID NO: 22928 - RNA, 20 nt, Artificial Sequence
  spacer sequence CTCN PAM
cagccaagaaugagauaaua

SEQ ID NO: 22929 - RNA, 20 nt, Artificial Sequence
  spacer sequence CTCN PAM
uguuuaccucacagccaaga

SEQ ID NO: 22930 - RNA, 20 nt, Artificial Sequence
  spacer sequence CTCN PAM
uuuucuccuguuuaccucac

SEQ ID NO: 22931 - RNA, 20 nt, Artificial Sequence
  spacer sequence CTCN PAM
agaaccaccuucucauuuuc

SEQ ID NO: 22932 - RNA, 20 nt, Artificial Sequence
  spacer sequence CTCN PAM
ccggccgcagcccucaccaa

SEQ ID NO: 22933 - RNA, 20 nt, Artificial Sequence
  spacer sequence CTCN PAM
ccaaaggggauuugggggcc

SEQ ID NO: 22934 - RNA, 20 nt, Artificial Sequence
  spacer sequence CTCN PAM
ggacagggguccugaagguu

SEQ ID NO: 22935 - RNA, 20 nt, Artificial Sequence
  spacer sequence CTCN PAM
ggggguacaggaaccccugc

SEQ ID NO: 22936 - RNA, 20 nt, Artificial Sequence
  spacer sequence CTCN PAM
ugcagggguuccuguacccc

SEQ ID NO: 22937 - RNA, 20 nt, Artificial Sequence
  spacer sequence CTCN PAM
ugccuuugaaaccuccugca

SEQ ID NO: 22938 - RNA, 20 nt, Artificial Sequence
  spacer sequence CTCN PAM
gcgaaacucuugccuuugaa

SEQ ID NO: 22939 - RNA, 20 nt, Artificial Sequence
  spacer sequence CTCN PAM
cugcgaaacucuugccuuug

SEQ ID NO: 22940 - RNA, 20 nt, Artificial Sequence
  spacer sequence CTCN PAM
gccgggccgcgccugggcug

SEQ ID NO: 22941 - RNA, 20 nt, Artificial Sequence
  spacer sequence CTCN PAM
uccggaauucucuacaauau

SEQ ID NO: 22942 - RNA, 20 nt, Artificial Sequence
  spacer sequence CTCN PAM
acaauaucuggaagugacca

SEQ ID NO: 22943 - RNA, 20 nt, Artificial Sequence
  spacer sequence CTCN PAM
ggguucuggaauuuucuugg

SEQ ID NO: 22944 - RNA, 20 nt, Artificial Sequence
  spacer sequence CTCN PAM
acggcgcagccuccggguuc

SEQ ID NO: 22945 - RNA, 20 nt, Artificial Sequence
  spacer sequence CTCN PAM
aggaagaugcccgggaauuu

SEQ ID NO: 22946 - RNA, 20 nt, Artificial Sequence
  spacer sequence CTCN PAM
acccagaagcucgggguggc

SEQ ID NO: 22947 - RNA, 20 nt, Artificial Sequence
  spacer sequence CTCN PAM
ggguggcagggaaaggauca

SEQ ID NO: 22948 - RNA, 20 nt, Artificial Sequence
  spacer sequence CTCN PAM
guugcccaggcuggagcgca

SEQ ID NO: 22949 - RNA, 20 nt, Artificial Sequence
  spacer sequence CTCN PAM
agccugggcaacagagcgaa

SEQ ID NO: 22950 - RNA, 20 nt, Artificial Sequence
  spacer sequence CTCN PAM
uuugugccauuggggucagg

SEQ ID NO: 22951 - RNA, 20 nt, Artificial Sequence
  spacer sequence CTCN PAM
ugccucaaucuccuaaguag

SEQ ID NO: 22952 - RNA, 20 nt, Artificial Sequence
  spacer sequence CTCN PAM
aucuccuaaguagcugggac

SEQ ID NO: 22953 - RNA, 20 nt, Artificial Sequence
  spacer sequence CTCN PAM
uaaguagcugggacuacagg

SEQ ID NO: 22954 - RNA, 20 nt, Artificial Sequence
  spacer sequence CTCN PAM
aaaaaaaaaaaaaaaaaaau

SEQ ID NO: 22955 - RNA, 20 nt, Artificial Sequence
  spacer sequence CTCN PAM
gucucaaaaaaaaaaaaaaa

SEQ ID NO: 22956 - RNA, 20 nt, Artificial Sequence
  spacer sequence CTCN PAM
ugucgcccaggcuggagugc

SEQ ID NO: 22957 - RNA, 20 nt, Artificial Sequence
  spacer sequence CTCN PAM
agccugggcgacaagaggga

SEQ ID NO: 22958 - RNA, 20 nt, Artificial Sequence
  spacer sequence CTCN PAM
ccacaaccuccgccucccag

SEQ ID NO: 22959 - RNA, 20 nt, Artificial Sequence
  spacer sequence CTCN PAM
gccucccagguggaagcgau

SEQ ID NO: 22960 - RNA, 20 nt, Artificial Sequence
  spacer sequence CTCN PAM
cagguggaagcgauucuccu

SEQ ID NO: 22961 - RNA, 20 nt, Artificial Sequence
  spacer sequence CTCN PAM
ugccucagccucccaaguag

SEQ ID NO: 22962 - RNA, 20 nt, Artificial Sequence
  spacer sequence CTCN PAM
gccucccaaguagcugggau

SEQ ID NO: 22963 - RNA, 20 nt, Artificial Sequence
  spacer sequence CTCN PAM
caaguagcugggauuacagg

SEQ ID NO: 22964 - RNA, 20 nt, Artificial Sequence
  spacer sequence CTCN PAM
ugccuguaaucccagcuacu

SEQ ID NO: 22965 - RNA, 20 nt, Artificial Sequence
  spacer sequence CTCN PAM
acuaaaaaugcaaaaauuag

SEQ ID NO: 22966 - RNA, 20 nt, Artificial Sequence
  spacer sequence CTCN PAM
aacuccugaccuugugaucc

SEQ ID NO: 22967 - RNA, 20 nt, Artificial Sequence
  spacer sequence CTCN PAM
ugaccuugugauccacccac

SEQ ID NO: 22968 - RNA, 20 nt, Artificial Sequence
  spacer sequence CTCN PAM
gccucccaaagugcugggau

SEQ ID NO: 22969 - RNA, 20 nt, Artificial Sequence
  spacer sequence CTCN PAM
caaagugcugggauuacagg

SEQ ID NO: 22970 - RNA, 20 nt, Artificial Sequence
  spacer sequence CTCN PAM
cgccuguaaucccagcacuu

SEQ ID NO: 22971 - RNA, 20 nt, Artificial Sequence
  spacer sequence CTCN PAM
acaaaaauaaauaaauaaac

SEQ ID NO: 22972 - RNA, 20 nt, Artificial Sequence
  spacer sequence CTCN PAM
cugugucacccaggcuggag

SEQ ID NO: 22973 - RNA, 20 nt, Artificial Sequence
  spacer sequence CTCN PAM
agccugggugacacagcgag

SEQ ID NO: 22974 - RNA, 20 nt, Artificial Sequence
  spacer sequence CTCN PAM
accuccugggcucaagugau

SEQ ID NO: 22975 - RNA, 20 nt, Artificial Sequence
  spacer sequence CTCN PAM
ugggcucaagugauccuccu

SEQ ID NO: 22976 - RNA, 20 nt, Artificial Sequence
  spacer sequence CTCN PAM
agugauccuccugccucagc

SEQ ID NO: 22977 - RNA, 20 nt, Artificial Sequence
  spacer sequence CTCN PAM
ugccucagccuccugaguag

SEQ ID NO: 22978 - RNA, 20 nt, Artificial Sequence
  spacer sequence CTCN PAM
gccuccugaguagcugggac

SEQ ID NO: 22979 - RNA, 20 nt, Artificial Sequence
  spacer sequence CTCN PAM
ugaguagcugggaccacagg

SEQ ID NO: 22980 - RNA, 20 nt, Artificial Sequence
  spacer sequence CTCN PAM
ggaggcugaggcaggaggau

SEQ ID NO: 22981 - RNA, 20 nt, Artificial Sequence
  spacer sequence CTCN PAM
cucuuguaaucccagcaauu

SEQ ID NO: 22982 - RNA, 20 nt, Artificial Sequence
  spacer sequence CTCN PAM
uguaaucccagcaauuuggg

SEQ ID NO: 22983 - RNA, 20 nt, Artificial Sequence
  spacer sequence CTCN PAM
gcuucccaaauugcugggau

SEQ ID NO: 22984 - RNA, 20 nt, Artificial Sequence
  spacer sequence CTCN PAM
agugaucuguccgccucagc

SEQ ID NO: 22985 - RNA, 20 nt, Artificial Sequence
  spacer sequence CTCN PAM
ugaccucuagugaucugucc

SEQ ID NO: 22986 - RNA, 20 nt, Artificial Sequence
  spacer sequence CTCN PAM
aacuccugaccucuagugau

SEQ ID NO: 22987 - RNA, 20 nt, Artificial Sequence
  spacer sequence CTCN PAM
acuaaaaauacaaaaauuag

SEQ ID NO: 22988 - RNA, 20 nt, Artificial Sequence
  spacer sequence CTCN PAM
ggaggcugaggcaggacaau

SEQ ID NO: 22989 - RNA, 20 nt, Artificial Sequence
  spacer sequence CTCN PAM
ggaguagcugggauuacaug

SEQ ID NO: 22990 - RNA, 20 nt, Artificial Sequence
  spacer sequence CTCN PAM
gccuccggaguagcugggau

SEQ ID NO: 22991 - RNA, 20 nt, Artificial Sequence
  spacer sequence CTCN PAM
gcuucccggguucaagugau

SEQ ID NO: 22992 - RNA, 20 nt, Artificial Sequence
  spacer sequence CTCN PAM
cugcaaccucugcuucccgg

SEQ ID NO: 22993 - RNA, 20 nt, Artificial Sequence
  spacer sequence CTCN PAM
ccucacugcaaccucugcuu

SEQ ID NO: 22994 - RNA, 20 nt, Artificial Sequence
  spacer sequence CTCN PAM
gucgcccaggggcacgaucu

SEQ ID NO: 22995 - RNA, 20 nt, Artificial Sequence
  spacer sequence CTCN PAM
cucugucgcccaggggcacg

SEQ ID NO: 22996 - RNA, 20 nt, Artificial Sequence
  spacer sequence CTCN PAM
aaaaaaaaaaaaaaaaauuu

SEQ ID NO: 22997 - RNA, 20 nt, Artificial Sequence
  spacer sequence CTCN PAM
ccacguugcccaggcugguc

SEQ ID NO: 22998 - RNA, 20 nt, Artificial Sequence
  spacer sequence CTCN PAM
ugagcucaagugauucucuc

SEQ ID NO: 22999 - RNA, 20 nt, Artificial Sequence
  spacer sequence CTCN PAM
ggaguucaagaccagccugg

SEQ ID NO: 23000 - RNA, 20 nt, Artificial Sequence
  spacer sequence CTCN PAM
agugauucucucaccucgac

SEQ ID NO: 23001 - RNA, 20 nt, Artificial Sequence
  spacer sequence CTCN PAM
caccucgacaucccagguug

SEQ ID NO: 23002 - RNA, 20 nt, Artificial Sequence
  spacer sequence CTCN PAM
ccucgacaucccagguuggu

SEQ ID NO: 23003 - RNA, 20 nt, Artificial Sequence
  spacer sequence CTCN PAM
acaucccagguugguggauu

SEQ ID NO: 23004 - RNA, 20 nt, Artificial Sequence
  spacer sequence CTCN PAM
cgccuguaauccaccaaccu

SEQ ID NO: 23005 - RNA, 20 nt, Artificial Sequence
  spacer sequence CTCN PAM
gcuguugugauaggaaggcu

SEQ ID NO: 23006 - RNA, 20 nt, Artificial Sequence
  spacer sequence CTCN PAM
agccuuccuaucacaacagc

SEQ ID NO: 23007 - RNA, 20 nt, Artificial Sequence
  spacer sequence CTCN PAM
ugucccugccaucgucccca

SEQ ID NO: 23008 - RNA, 20 nt, Artificial Sequence
  spacer sequence CTCN PAM
cuccugucccugccaucguc

SEQ ID NO: 23009 - RNA, 20 nt, Artificial Sequence
  spacer sequence CTCN PAM
uucugcugguccagcaguuc

SEQ ID NO: 23010 - RNA, 20 nt, Artificial Sequence
  spacer sequence CTCN PAM
guggccgggcagugcugccc

SEQ ID NO: 23011 - RNA, 20 nt, Artificial Sequence
  spacer sequence CTCN PAM
gcuaccagcuccugcaucug

SEQ ID NO: 23012 - RNA, 20 nt, Artificial Sequence
  spacer sequence CTCN PAM
ugcaucuggaagaugaccag

SEQ ID NO: 23013 - RNA, 20 nt, Artificial Sequence
  spacer sequence CTCN PAM
uggucaucuuccagaugcag

SEQ ID NO: 23014 - RNA, 20 nt, Artificial Sequence
  spacer sequence CTCN PAM
uccuggucaucuuccagaug

SEQ ID NO: 23015 - RNA, 20 nt, Artificial Sequence
  spacer sequence CTCN PAM
caaaugcugguauuacaagc

SEQ ID NO: 23016 - RNA, 20 nt, Artificial Sequence
  spacer sequence CTCN PAM
gccucccaaaugcugguauu

SEQ ID NO: 23017 - RNA, 20 nt, Artificial Sequence
  spacer sequence CTCN PAM
ggugauccgccugccucagc

SEQ ID NO: 23018 - RNA, 20 nt, Artificial Sequence
  spacer sequence CTCN PAM
cgaccucaggugauccgccu

SEQ ID NO: 23019 - RNA, 20 nt, Artificial Sequence
  spacer sequence CTCN PAM
aacucccgaccucaggugau

SEQ ID NO: 23020 - RNA, 20 nt, Artificial Sequence
  spacer sequence CTCN PAM
acguuggucaggcuggucuc

SEQ ID NO: 23021 - RNA, 20 nt, Artificial Sequence
  spacer sequence CTCN PAM
acuaaaaauacaaaauuagc

SEQ ID NO: 23022 - RNA, 20 nt, Artificial Sequence
  spacer sequence CTCN PAM
ggaggcugaggcaggagaau

SEQ ID NO: 23023 - RNA, 20 nt, Artificial Sequence
  spacer sequence CTCN PAM
cgaguagcugcgccaccacg

SEQ ID NO: 23024 - RNA, 20 nt, Artificial Sequence
  spacer sequence CTCN PAM
gccucccgaguagcugcgcc

SEQ ID NO: 23025 - RNA, 20 nt, Artificial Sequence
  spacer sequence CTCN PAM
ugccucagccucccgaguag

SEQ ID NO: 23026 - RNA, 20 nt, Artificial Sequence
  spacer sequence CTCN PAM
cggguucaagcgauucuccu

SEQ ID NO: 23027 - RNA, 20 nt, Artificial Sequence
  spacer sequence CTCN PAM
gccucccggguucaagcgau

SEQ ID NO: 23028 - RNA, 20 nt, Artificial Sequence
  spacer sequence CTCN PAM
ccgcaaccuccgccucccgg

SEQ ID NO: 23029 - RNA, 20 nt, Artificial Sequence
  spacer sequence CTCN PAM
agacuuuuguauccauuuau

SEQ ID NO: 23030 - RNA, 20 nt, Artificial Sequence
  spacer sequence CTCN PAM
aacuccugaccucaagugau

SEQ ID NO: 23031 - RNA, 20 nt, Artificial Sequence
  spacer sequence CTCN PAM
ugaccucaagugauccuccc

SEQ ID NO: 23032 - RNA, 20 nt, Artificial Sequence
  spacer sequence CTCN PAM
agugauccucccgccucugc

SEQ ID NO: 23033 - RNA, 20 nt, Artificial Sequence
  spacer sequence CTCN PAM
cgccucugcuauuuauuuau

SEQ ID NO: 23034 - RNA, 20 nt, Artificial Sequence
  spacer sequence CTCN PAM
gcuauuuauuuauucugggu

SEQ ID NO: 23035 - RNA, 20 nt, Artificial Sequence
  spacer sequence CTCN PAM
aaauaaauaggaaaagaaag

SEQ ID NO: 23036 - RNA, 20 nt, Artificial Sequence
  spacer sequence CTCN PAM
cggacucaagccaucugccc

SEQ ID NO: 23037 - RNA, 20 nt, Artificial Sequence
  spacer sequence CTCN PAM
agccaucugcccaugccggc

SEQ ID NO: 23038 - RNA, 20 nt, Artificial Sequence
  spacer sequence CTCN PAM
cagugugcugggauuacagg

SEQ ID NO: 23039 - RNA, 20 nt, Artificial Sequence
  spacer sequence CTCN PAM
uguaaucccagcacacuggg

SEQ ID NO: 23040 - RNA, 20 nt, Artificial Sequence
  spacer sequence CTCN PAM
auuaaaaauuuaaaaaugaa

SEQ ID NO: 23041 - RNA, 20 nt, Artificial Sequence
  spacer sequence CTCN PAM
cuaugucacccaggcugguc

SEQ ID NO: 23042 - RNA, 20 nt, Artificial Sequence
  spacer sequence CTCN PAM
ugggcucaaaccauccgccc

SEQ ID NO: 23043 - RNA, 20 nt, Artificial Sequence
  spacer sequence CTCN PAM
aaccauccgcccaccucggc

SEQ ID NO: 23044 - RNA, 20 nt, Artificial Sequence
  spacer sequence CTCN PAM
gccucccaaagugcugggau

SEQ ID NO: 23045 - RNA, 20 nt, Artificial Sequence
  spacer sequence CTCN PAM
caaagugcugggaucacagg

SEQ ID NO: 23046 - RNA, 20 nt, Artificial Sequence
  spacer sequence CTCN PAM
caccugugaucccagcacuu

SEQ ID NO: 23047 - RNA, 20 nt, Artificial Sequence
  spacer sequence CTCN PAM
uugcacaagcaccugagccg

SEQ ID NO: 23048 - RNA, 20 nt, Artificial Sequence
  spacer sequence CTCN PAM
ggugcuugugcaaggagggc

SEQ ID NO: 23049 - RNA, 20 nt, Artificial Sequence
  spacer sequence CTCN PAM
gguuuugaugggccuguggg

SEQ ID NO: 23050 - RNA, 20 nt, Artificial Sequence
  spacer sequence CTCN PAM
acuccagccccagggcccag

SEQ ID NO: 23051 - RNA, 20 nt, Artificial Sequence
  spacer sequence CTCN PAM
agccccagggcccagcccca

SEQ ID NO: 23052 - RNA, 20 nt, Artificial Sequence
  spacer sequence CTCN PAM
gguggccuggggcugggccc

SEQ ID NO: 23053 - RNA, 20 nt, Artificial Sequence
  spacer sequence CTCN PAM
ggucacccacagccggcucg

SEQ ID NO: 23054 - RNA, 20 nt, Artificial Sequence
  spacer sequence CTCN PAM
ggcaucaauaguuuauagca

SEQ ID NO: 23055 - RNA, 20 nt, Artificial Sequence
  spacer sequence CTCN PAM
aggagcuccgggcuuggcua

SEQ ID NO: 23056 - RNA, 20 nt, Artificial Sequence
  spacer sequence CTCN PAM
uggaggugacugcucaggca

SEQ ID NO: 23057 - RNA, 20 nt, Artificial Sequence
  spacer sequence CTCN PAM
gggcuuggcuacgguguccu

SEQ ID NO: 23058 - RNA, 20 nt, Artificial Sequence
  spacer sequence CTCN PAM
aggccgcagcugccccgggc

SEQ ID NO: 23059 - RNA, 20 nt, Artificial Sequence
  spacer sequence CTCN PAM
gccuccauccugggcccgcc

SEQ ID NO: 23060 - RNA, 20 nt, Artificial Sequence
  spacer sequence CTCN PAM
auccugggcccgccuggggc

SEQ ID NO: 23061 - RNA, 20 nt, Artificial Sequence
  spacer sequence CTCN PAM
uuuccuucuaggccugguuc

SEQ ID NO: 23062 - RNA, 20 nt, Artificial Sequence
  spacer sequence CTCN PAM
aaaauuagcuuccuaucggg

SEQ ID NO: 23063 - RNA, 20 nt, Artificial Sequence
  spacer sequence CTCN PAM
caauggaggccugaccucug

SEQ ID NO: 23064 - RNA, 20 nt, Artificial Sequence
  spacer sequence CTCN PAM
auugugaggggaugugggau

SEQ ID NO: 23065 - RNA, 20 nt, Artificial Sequence
  spacer sequence CTCN PAM
ggggagacacaaugucaggg

SEQ ID NO: 23066 - RNA, 20 nt, Artificial Sequence
  spacer sequence CTCN PAM
ccagaggucaggccuccauu

SEQ ID NO: 23067 - RNA, 20 nt, Artificial Sequence
  spacer sequence CTCN PAM
cagugacccugacauugugu

SEQ ID NO: 23068 - RNA, 20 nt, Artificial Sequence
  spacer sequence CTCN PAM
guaucaaauaaauaaaaaua

SEQ ID NO: 23069 - RNA, 20 nt, Artificial Sequence
  spacer sequence CTCN PAM
cuguguuguccaggcuggac

SEQ ID NO: 23070 - RNA, 20 nt, Artificial Sequence
  spacer sequence CTCN PAM
cugcaaccucugccucucgg

SEQ ID NO: 23071 - RNA, 20 nt, Artificial Sequence
  spacer sequence CTCN PAM
gccucucgggcucaagcgau

SEQ ID NO: 23072 - RNA, 20 nt, Artificial Sequence
  spacer sequence CTCN PAM
cgggcucaagcgauucuccu

SEQ ID NO: 23073 - RNA, 20 nt, Artificial Sequence
  spacer sequence CTCN PAM
ggcucaagcgauucuccugc

SEQ ID NO: 23074 - RNA, 20 nt, Artificial Sequence
  spacer sequence CTCN PAM
uuuuuuuugagagagagaga

SEQ ID NO: 23075 - RNA, 20 nt, Artificial Sequence
  spacer sequence CTCN PAM
aaaaaaaugaguaaaucgag

SEQ ID NO: 23076 - RNA, 20 nt, Artificial Sequence
  spacer sequence CTCN PAM
caaaaaaaaugaguaaaucg

SEQ ID NO: 23077 - RNA, 20 nt, Artificial Sequence
  spacer sequence CTCN PAM
cucaaaaaaaaugaguaaau

SEQ ID NO: 23078 - RNA, 20 nt, Artificial Sequence
  spacer sequence CTCN PAM
cucucaaaaaaaaugaguaa

SEQ ID NO: 23079 - RNA, 20 nt, Artificial Sequence
  spacer sequence CTCN PAM
cucucucaaaaaaaaugagu

SEQ ID NO: 23080 - RNA, 20 nt, Artificial Sequence
  spacer sequence CTCN PAM
cucucucucaaaaaaaauga

SEQ ID NO: 23081 - RNA, 20 nt, Artificial Sequence
  spacer sequence CTCN PAM
cucucucucucaaaaaaaau

SEQ ID NO: 23082 - RNA, 20 nt, Artificial Sequence
  spacer sequence CTCN PAM
cucugucacccaggcuggag

SEQ ID NO: 23083 - RNA, 20 nt, Artificial Sequence
  spacer sequence CTCN PAM
gucacccaggcuggagugca

SEQ ID NO: 23084 - RNA, 20 nt, Artificial Sequence
  spacer sequence CTCN PAM
agccugggugacagagugag

SEQ ID NO: 23085 - RNA, 20 nt, Artificial Sequence
  spacer sequence CTCN PAM
gcucacugcaaccuccgccu

SEQ ID NO: 23086 - RNA, 20 nt, Artificial Sequence
  spacer sequence CTCN PAM
cugcaaccuccgccucuugg

SEQ ID NO: 23087 - RNA, 20 nt, Artificial Sequence
  spacer sequence CTCN PAM
gccucuuggguucaaauaau

SEQ ID NO: 23088 - RNA, 20 nt, Artificial Sequence
  spacer sequence CTCN PAM
uggguucaaauaauaauucu

SEQ ID NO: 23089 - RNA, 20 nt, Artificial Sequence
  spacer sequence CTCN PAM
ugccucagccucccgaguag

SEQ ID NO: 23090 - RNA, 20 nt, Artificial Sequence
  spacer sequence CTCN PAM
gccucccgaguagcugggau

SEQ ID NO: 23091 - RNA, 20 nt, Artificial Sequence
  spacer sequence CTCN PAM
cgaguagcugggauuacaug

SEQ ID NO: 23092 - RNA, 20 nt, Artificial Sequence
  spacer sequence CTCN PAM
ggaggcugaggcaggagaau

SEQ ID NO: 23093 - RNA, 20 nt, Artificial Sequence
  spacer sequence CTCN PAM
accaaagauauaaaaauuag

SEQ ID NO: 23094 - RNA, 20 nt, Artificial Sequence
  spacer sequence CTCN PAM
aacuccugaccucagggcau

SEQ ID NO: 23095 - RNA, 20 nt, Artificial Sequence
  spacer sequence CTCN PAM
ugaccucagggcauccaccc

SEQ ID NO: 23096 - RNA, 20 nt, Artificial Sequence
  spacer sequence CTCN PAM
gggcauccacccgccucagu

SEQ ID NO: 23097 - RNA, 20 nt, Artificial Sequence
  spacer sequence CTCN PAM
gucacccaacgugcugggau

SEQ ID NO: 23098 - RNA, 20 nt, Artificial Sequence
  spacer sequence CTCN PAM
cgccugugaucccagcacgu

SEQ ID NO: 23099 - RNA, 20 nt, Artificial Sequence
  spacer sequence CTCN PAM
uuguaaaacaauaauaaagu

SEQ ID NO: 23100 - RNA, 20 nt, Artificial Sequence
  spacer sequence CTCN PAM
gcguuuuauccauggcaggu

SEQ ID NO: 23101 - RNA, 20 nt, Artificial Sequence
  spacer sequence CTCN PAM
agaacucggcguuuuaucca

SEQ ID NO: 23102 - RNA, 20 nt, Artificial Sequence
  spacer sequence CTCN PAM
aguguccucuagaacucggc

SEQ ID NO: 23103 - RNA, 20 nt, Artificial Sequence
  spacer sequence CTCN PAM
gucuccaguguccucuagaa

SEQ ID NO: 23104 - RNA, 20 nt, Artificial Sequence
  spacer sequence CTCN PAM
acucccgggggagcgugcag

SEQ ID NO: 23105 - RNA, 20 nt, Artificial Sequence
  spacer sequence CTCN PAM
cgggggagcgugcagcgggg

SEQ ID NO: 23106 - RNA, 20 nt, Artificial Sequence
  spacer sequence CTCN PAM
cccgggaguggagaccccag

SEQ ID NO: 23107 - RNA, 20 nt, Artificial Sequence
  spacer sequence CTCN PAM
gugcccccgccccaccccca

SEQ ID NO: 23108 - RNA, 20 nt, Artificial Sequence
  spacer sequence CTCN PAM
gcaggccgcugacccugugg

SEQ ID NO: 23109 - RNA, 20 nt, Artificial Sequence
  spacer sequence CTCN PAM
ccagcccgaccacaggguca

SEQ ID NO: 23110 - RNA, 20 nt, Artificial Sequence
  spacer sequence CTCN PAM
cguucccucucccuauggag

SEQ ID NO: 23111 - RNA, 20 nt, Artificial Sequence
  spacer sequence CTCN PAM
cccuauggagacaucuuccu

SEQ ID NO: 23112 - RNA, 20 nt, Artificial Sequence
  spacer sequence CTCN PAM
cuauggagacaucuuccuuu

SEQ ID NO: 23113 - RNA, 20 nt, Artificial Sequence
  spacer sequence CTCN PAM
auagggagagggaacgugag

SEQ ID NO: 23114 - RNA, 20 nt, Artificial Sequence
  spacer sequence CTCN PAM
acggccuugcaaaauuuauu

SEQ ID NO: 23115 - RNA, 20 nt, Artificial Sequence
  spacer sequence CTCN PAM
ggcccacgucugucucccau

SEQ ID NO: 23116 - RNA, 20 nt, Artificial Sequence
  spacer sequence CTCN PAM
cauccccaucaccacacgag

SEQ ID NO: 23117 - RNA, 20 nt, Artificial Sequence
  spacer sequence CTCN PAM
uguggugauggggaugggag

SEQ ID NO: 23118 - RNA, 20 nt, Artificial Sequence
  spacer sequence CTCN PAM
cgucucuggaggccggaagu

SEQ ID NO: 23119 - RNA, 20 nt, Artificial Sequence
  spacer sequence CTCN PAM
ucucuggaggccggaagucu

SEQ ID NO: 23120 - RNA, 20 nt, Artificial Sequence
  spacer sequence CTCN PAM
ggaggccggaagucugaagu

SEQ ID NO: 23121 - RNA, 20 nt, Artificial Sequence
  spacer sequence CTCN PAM
agagacgagaguguauuugu

SEQ ID NO: 23122 - RNA, 20 nt, Artificial Sequence
  spacer sequence CTCN PAM
ccuggcaccuugcacaccuu

SEQ ID NO: 23123 - RNA, 20 nt, Artificial Sequence
  spacer sequence CTCN PAM
cggccucuuccagcuccugg

SEQ ID NO: 23124 - RNA, 20 nt, Artificial Sequence
  spacer sequence CTCN PAM
uccagcuccuggugccgaca

SEQ ID NO: 23125 - RNA, 20 nt, Artificial Sequence
  spacer sequence CTCN PAM
uggugccgacagccaccucu

SEQ ID NO: 23126 - RNA, 20 nt, Artificial Sequence
  spacer sequence CTCN PAM
gacccuccuggacuugcggc

SEQ ID NO: 23127 - RNA, 20 nt, Artificial Sequence
  spacer sequence CTCN PAM
uggacuugcggccgcuuccc

SEQ ID NO: 23128 - RNA, 20 nt, Artificial Sequence
  spacer sequence CTCN PAM
caauucugccucugcugccc

SEQ ID NO: 23129 - RNA, 20 nt, Artificial Sequence
  spacer sequence CTCN PAM
gcugccccacggcggucucc

SEQ ID NO: 23130 - RNA, 20 nt, Artificial Sequence
  spacer sequence CTCN PAM
ucugcaucuguguccaaauu

SEQ ID NO: 23131 - RNA, 20 nt, Artificial Sequence
  spacer sequence CTCN PAM
gcaucuguguccaaauuucc

SEQ ID NO: 23132 - RNA, 20 nt, Artificial Sequence
  spacer sequence CTCN PAM
cgaagucgccugucacugcg

SEQ ID NO: 23133 - RNA, 20 nt, Artificial Sequence
  spacer sequence CTCN PAM
uccuaacuaauuacaucugc

SEQ ID NO: 23134 - RNA, 20 nt, Artificial Sequence
  spacer sequence CTCN PAM
aagaucugucuuugcgugaa

SEQ ID NO: 23135 - RNA, 20 nt, Artificial Sequence
  spacer sequence CTCN PAM
auucaccccaccccggggag

SEQ ID NO: 23136 - RNA, 20 nt, Artificial Sequence
  spacer sequence CTCN PAM
ccgggguggggugaauugag

SEQ ID NO: 23137 - RNA, 20 nt, Artificial Sequence
  spacer sequence CTCN PAM
gaucaaauucugccuccuca

SEQ ID NO: 23138 - RNA, 20 nt, Artificial Sequence
  spacer sequence CTCN PAM
ucagcgaggccuuccugacc

SEQ ID NO: 23139 - RNA, 20 nt, Artificial Sequence
  spacer sequence CTCN PAM
gcgaggccuuccugacccuc

SEQ ID NO: 23140 - RNA, 20 nt, Artificial Sequence
  spacer sequence CTCN PAM
cugaggaggcagaauuugau

SEQ ID NO: 23141 - RNA, 20 nt, Artificial Sequence
  spacer sequence CTCN PAM
cgggcccuuccugccuuucu

SEQ ID NO: 23142 - RNA, 20 nt, Artificial Sequence
  spacer sequence CTCN PAM
cuggcugcggcuguuuccug

SEQ ID NO: 23143 - RNA, 20 nt, Artificial Sequence
  spacer sequence CTCN PAM
ggcugcggcuguuuccugcg

SEQ ID NO: 23144 - RNA, 20 nt, Artificial Sequence
  spacer sequence CTCN PAM
cggcggcgcccuguccugua

SEQ ID NO: 23145 - RNA, 20 nt, Artificial Sequence
  spacer sequence CTCN PAM
uugcccgcaggaccucccag

SEQ ID NO: 23146 - RNA, 20 nt, Artificial Sequence
  spacer sequence CTCN PAM
cagcaggagcagggacccag

SEQ ID NO: 23147 - RNA, 20 nt, Artificial Sequence
  spacer sequence CTCN PAM
ugcugggagguccugcgggc

SEQ ID NO: 23148 - RNA, 20 nt, Artificial Sequence
  spacer sequence CTCN PAM
guccgaaccacaagcugcug

SEQ ID NO: 23149 - RNA, 20 nt, Artificial Sequence
  spacer sequence CTCN PAM
aaagcaacagaaaaagcaaa

SEQ ID NO: 23150 - RNA, 20 nt, Artificial Sequence
  spacer sequence CTCN PAM
agccuggaugacagggcaaa

SEQ ID NO: 23151 - RNA, 20 nt, Artificial Sequence
  spacer sequence CTCN PAM
guucacugcagccuccaucu

SEQ ID NO: 23152 - RNA, 20 nt, Artificial Sequence
  spacer sequence CTCN PAM
aucuccugggcucuggugag

SEQ ID NO: 23153 - RNA, 20 nt, Artificial Sequence
  spacer sequence CTCN PAM
ugggcucuggugagacuacg

SEQ ID NO: 23154 - RNA, 20 nt, Artificial Sequence
  spacer sequence CTCN PAM
ggugagacuacggccuuagc

SEQ ID NO: 23155 - RNA, 20 nt, Artificial Sequence
  spacer sequence CTCN PAM
ccagagcccaggagauggag

SEQ ID NO: 23156 - RNA, 20 nt, Artificial Sequence
  spacer sequence CTCN PAM
ugaauagcugagaccacagg

SEQ ID NO: 23157 - RNA, 20 nt, Artificial Sequence
  spacer sequence CTCN PAM
gcuauucaggaggcuaaggc

SEQ ID NO: 23158 - RNA, 20 nt, Artificial Sequence
  spacer sequence CTCN PAM
agcaauccucgugccucgcc

SEQ ID NO: 23159 - RNA, 20 nt, Artificial Sequence
  spacer sequence CTCN PAM
ugccucgcccucccgaagug

SEQ ID NO: 23160 - RNA, 20 nt, Artificial Sequence
  spacer sequence CTCN PAM
cccucccgaagugaugggau

SEQ ID NO: 23161 - RNA, 20 nt, Artificial Sequence
  spacer sequence CTCN PAM
cgaagugaugggauuauagg

SEQ ID NO: 23162 - RNA, 20 nt, Artificial Sequence
  spacer sequence CTCN PAM
auccuuuccuuuuuuuuuuu

SEQ ID NO: 23163 - RNA, 20 nt, Artificial Sequence
  spacer sequence CTCN PAM
aaaaaaaaaaaaaaggaaag

SEQ ID NO: 23164 - RNA, 20 nt, Artificial Sequence
  spacer sequence CTCN PAM
gucucaaaaaaaaaaaaaaa

SEQ ID NO: 23165 - RNA, 20 nt, Artificial Sequence
  spacer sequence CTCN PAM
gucaccaggcuggagugcaa

SEQ ID NO: 23166 - RNA, 20 nt, Artificial Sequence
  spacer sequence CTCN PAM
agccuggugacagaguaaga

SEQ ID NO: 23167 - RNA, 20 nt, Artificial Sequence
  spacer sequence CTCN PAM
gcucacugcaaccuccgccu

SEQ ID NO: 23168 - RNA, 20 nt, Artificial Sequence
  spacer sequence CTCN PAM
cugcaaccuccgccucccag

SEQ ID NO: 23169 - RNA, 20 nt, Artificial Sequence
  spacer sequence CTCN PAM
gccucccagguucaagcgau

SEQ ID NO: 23170 - RNA, 20 nt, Artificial Sequence
  spacer sequence CTCN PAM
cagguucaagcgauucuccu

SEQ ID NO: 23171 - RNA, 20 nt, Artificial Sequence
  spacer sequence CTCN PAM
ugccucagccucccgaguag

SEQ ID NO: 23172 - RNA, 20 nt, Artificial Sequence
  spacer sequence CTCN PAM
gccucccgaguagcugggau

SEQ ID NO: 23173 - RNA, 20 nt, Artificial Sequence
  spacer sequence CTCN PAM
cgaguagcugggauuacagg

SEQ ID NO: 23174 - RNA, 20 nt, Artificial Sequence
  spacer sequence CTCN PAM
ggaggcugaggcaggagaau

SEQ ID NO: 23175 - RNA, 20 nt, Artificial Sequence
  spacer sequence CTCN PAM
gccucccaaacugcugggau

SEQ ID NO: 23176 - RNA, 20 nt, Artificial Sequence
  spacer sequence CTCN PAM
caaacugcugggauuacagg

SEQ ID NO: 23177 - RNA, 20 nt, Artificial Sequence
  spacer sequence CTCN PAM
ugccuguaaucccagcaguu

SEQ ID NO: 23178 - RNA, 20 nt, Artificial Sequence
  spacer sequence CTCN PAM
gccgggugugguggcucaug

SEQ ID NO: 23179 - RNA, 20 nt, Artificial Sequence
  spacer sequence CTCN PAM
ggcucccgaagugcuaggau

SEQ ID NO: 23180 - RNA, 20 nt, Artificial Sequence
  spacer sequence CTCN PAM
cgaagugcuaggauuacagg

SEQ ID NO: 23181 - RNA, 20 nt, Artificial Sequence
  spacer sequence CTCN PAM
cgccuguaauccuagcacuu

SEQ ID NO: 23182 - RNA, 20 nt, Artificial Sequence
  spacer sequence CTCN PAM
aaaaauuaaauaaagccagg

SEQ ID NO: 23183 - RNA, 20 nt, Artificial Sequence
  spacer sequence CTCN PAM
cucuguggcccaggauggag

SEQ ID NO: 23184 - RNA, 20 nt, Artificial Sequence
  spacer sequence CTCN PAM
guggcccaggauggagugca

SEQ ID NO: 23185 - RNA, 20 nt, Artificial Sequence
  spacer sequence CTCN PAM
auccugggccacagagugag

SEQ ID NO: 23186 - RNA, 20 nt, Artificial Sequence
  spacer sequence CTCN PAM
acuaaaaauacaaaaauuag

SEQ ID NO: 23187 - RNA, 20 nt, Artificial Sequence
  spacer sequence CTCN PAM
gcuccuugggacucugaggc

SEQ ID NO: 23188 - RNA, 20 nt, Artificial Sequence
  spacer sequence CTCN PAM
uugggacucugaggcaggag

SEQ ID NO: 23189 - RNA, 20 nt, Artificial Sequence
  spacer sequence CTCN PAM
gaggcaggagaauugauuga

SEQ ID NO: 23190 - RNA, 20 nt, Artificial Sequence
  spacer sequence CTCN PAM
gagucccaaggagcugagau

SEQ ID NO: 23191 - RNA, 20 nt, Artificial Sequence
  spacer sequence CTCN PAM
ugccucagagucccaaggag

SEQ ID NO: 23192 - RNA, 20 nt, Artificial Sequence
  spacer sequence CTCN PAM
ugguucaaucaauucuccug

SEQ ID NO: 23193 - RNA, 20 nt, Artificial Sequence
  spacer sequence CTCN PAM
gccuccugguucaaucaauu

SEQ ID NO: 23194 - RNA, 20 nt, Artificial Sequence
  spacer sequence CTCN PAM
guucacugcaaccucugccu

SEQ ID NO: 23195 - RNA, 20 nt, Artificial Sequence
  spacer sequence CTCN PAM
agccugggcagcaagagcca

SEQ ID NO: 23196 - RNA, 20 nt, Artificial Sequence
  spacer sequence CTCN PAM
ugcugcccaggcuggagugc

SEQ ID NO: 23197 - RNA, 20 nt, Artificial Sequence
  spacer sequence CTCN PAM
gucucgaaaaaauaaaauaa

SEQ ID NO: 23198 - RNA, 20 nt, Artificial Sequence
  spacer sequence CTCN PAM
aaaaaauaaaauaaauggga

SEQ ID NO: 23199 - RNA, 20 nt, Artificial Sequence
  spacer sequence CTCN PAM
cacggagcgugacguccuua

SEQ ID NO: 23200 - RNA, 20 nt, Artificial Sequence
  spacer sequence CTCN PAM
cggagcgugacguccuuaag

SEQ ID NO: 23201 - RNA, 20 nt, Artificial Sequence
  spacer sequence CTCN PAM
gugagagacgccagacacag

SEQ ID NO: 23202 - RNA, 20 nt, Artificial Sequence
  spacer sequence CTCN PAM
gacccaggccacagcgcgga

SEQ ID NO: 23203 - RNA, 20 nt, Artificial Sequence
  spacer sequence CTCN PAM
gcgugaaaaggauccaggcu

SEQ ID NO: 23204 - RNA, 20 nt, Artificial Sequence
  spacer sequence CTCN PAM
gugaauaacacuacgaugaa

SEQ ID NO: 23205 - RNA, 20 nt, Artificial Sequence
  spacer sequence CTCN PAM
caggggcaugaauaggagga

SEQ ID NO: 23206 - RNA, 20 nt, Artificial Sequence
  spacer sequence CTCN PAM
ggggcaugaauaggaggaga

SEQ ID NO: 23207 - RNA, 20 nt, Artificial Sequence
  spacer sequence CTCN PAM
uauucaugccccugagagaa

SEQ ID NO: 23208 - RNA, 20 nt, Artificial Sequence
  spacer sequence CTCN PAM
uccuauucaugccccugaga

SEQ ID NO: 23209 - RNA, 20 nt, Artificial Sequence
  spacer sequence CTCN PAM
ggaaccccgcaauucuccuc

SEQ ID NO: 23210 - RNA, 20 nt, Artificial Sequence
  spacer sequence CTCN PAM
uuuuuuuuuuugagacagag

SEQ ID NO: 23211 - RNA, 20 nt, Artificial Sequence
  spacer sequence CTCN PAM
aaaaaaaaaaagaggggugg

SEQ ID NO: 23212 - RNA, 20 nt, Artificial Sequence
  spacer sequence CTCN PAM
gucucaaaaaaaaaaaagag

SEQ ID NO: 23213 - RNA, 20 nt, Artificial Sequence
  spacer sequence CTCN PAM
gucacccaugcuagagugca

SEQ ID NO: 23214 - RNA, 20 nt, Artificial Sequence
  spacer sequence CTCN PAM
agcaugggugacggagcaag

SEQ ID NO: 23215 - RNA, 20 nt, Artificial Sequence
  spacer sequence CTCN PAM
gcucacugcaaccuccgccu

SEQ ID NO: 23216 - RNA, 20 nt, Artificial Sequence
  spacer sequence CTCN PAM
cugcaaccuccgccuccuga

SEQ ID NO: 23217 - RNA, 20 nt, Artificial Sequence
  spacer sequence CTCN PAM
gccuccugaguucaagcaau

SEQ ID NO: 23218 - RNA, 20 nt, Artificial Sequence
  spacer sequence CTCN PAM
ugaguucaagcaauucuccu

SEQ ID NO: 23219 - RNA, 20 nt, Artificial Sequence
  spacer sequence CTCN PAM
ggaggcggagguugcaguga

SEQ ID NO: 23220 - RNA, 20 nt, Artificial Sequence
  spacer sequence CTCN PAM
ugccucagucucccgaggag

SEQ ID NO: 23221 - RNA, 20 nt, Artificial Sequence
  spacer sequence CTCN PAM
gucucccgaggagcugaggu

SEQ ID NO: 23222 - RNA, 20 nt, Artificial Sequence
  spacer sequence CTCN PAM
cgaggagcugagguuacagg

SEQ ID NO: 23223 - RNA, 20 nt, Artificial Sequence
  spacer sequence CTCN PAM
ggagacugaggcaggagaau

SEQ ID NO: 23224 - RNA, 20 nt, Artificial Sequence
  spacer sequence CTCN PAM
ucgggagacugaggcaggag

SEQ ID NO: 23225 - RNA, 20 nt, Artificial Sequence
  spacer sequence CTCN PAM
gcuccucgggagacugaggc

SEQ ID NO: 23226 - RNA, 20 nt, Artificial Sequence
  spacer sequence CTCN PAM
cacuaaaaaaacaaaaauua

SEQ ID NO: 23227 - RNA, 20 nt, Artificial Sequence
  spacer sequence CTCN PAM
ugaucucagggauccacgca

SEQ ID NO: 23228 - RNA, 20 nt, Artificial Sequence
  spacer sequence CTCN PAM
gggauccacgcaccucagca

SEQ ID NO: 23229 - RNA, 20 nt, Artificial Sequence
  spacer sequence CTCN PAM
gcacccucuuuggaaguucc

SEQ ID NO: 23230 - RNA, 20 nt, Artificial Sequence
  spacer sequence CTCN PAM
uuggaaguuccuagcaaguu

SEQ ID NO: 23231 - RNA, 20 nt, Artificial Sequence
  spacer sequence CTCN PAM
gccugaguucagacccacag

SEQ ID NO: 23232 - RNA, 20 nt, Artificial Sequence
  spacer sequence CTCN PAM
ggcagagaacuugcuaggaa

SEQ ID NO: 23233 - RNA, 20 nt, Artificial Sequence
  spacer sequence CTCN PAM
uaggggacgggggaggguca

SEQ ID NO: 23234 - RNA, 20 nt, Artificial Sequence
  spacer sequence CTCN PAM
cccguccccuaagaggcccu

SEQ ID NO: 23235 - RNA, 20 nt, Artificial Sequence
  spacer sequence CTCN PAM
agcugaacucccccgggggg

SEQ ID NO: 23236 - RNA, 20 nt, Artificial Sequence
  spacer sequence CTCN PAM
cccggggggaggggggaggg

SEQ ID NO: 23237 - RNA, 20 nt, Artificial Sequence
  spacer sequence CTCN PAM
ccccgggggaguucagcuag

SEQ ID NO: 23238 - RNA, 20 nt, Artificial Sequence
  spacer sequence CTCN PAM
ccccuccccccgggggaguu

SEQ ID NO: 23239 - RNA, 20 nt, Artificial Sequence
  spacer sequence CTCN PAM
ccccuccccccuccccccgg

SEQ ID NO: 23240 - RNA, 20 nt, Artificial Sequence
  spacer sequence CTCN PAM
ggacccagcucuagggggga

SEQ ID NO: 23241 - RNA, 20 nt, Artificial Sequence
  spacer sequence CTCN PAM
aggggggauugaggaggauc

SEQ ID NO: 23242 - RNA, 20 nt, Artificial Sequence
  spacer sequence CTCN PAM
auccccccuagagcuggguc

SEQ ID NO: 23243 - RNA, 20 nt, Artificial Sequence
  spacer sequence CTCN PAM
ucaauccccccuagagcugg

SEQ ID NO: 23244 - RNA, 20 nt, Artificial Sequence
  spacer sequence CTCN PAM
agcugaacuccccugggggu

SEQ ID NO: 23245 - RNA, 20 nt, Artificial Sequence
  spacer sequence CTCN PAM
ccuggggguagggaggaggg

SEQ ID NO: 23246 - RNA, 20 nt, Artificial Sequence
  spacer sequence CTCN PAM
cuacccccaggggaguucag

SEQ ID NO: 23247 - RNA, 20 nt, Artificial Sequence
  spacer sequence CTCN PAM
ucccuacccccaggggaguu

SEQ ID NO: 23248 - RNA, 20 nt, Artificial Sequence
  spacer sequence CTCN PAM
agcugaacuccccugggugg

SEQ ID NO: 23249 - RNA, 20 nt, Artificial Sequence
  spacer sequence CTCN PAM
ccugggugggguggggaaag

SEQ ID NO: 23250 - RNA, 20 nt, Artificial Sequence
  spacer sequence CTCN PAM
uuccccaccccacccagggg

SEQ ID NO: 23251 - RNA, 20 nt, Artificial Sequence
  spacer sequence CTCN PAM
ccagccugacccucuuuccc

SEQ ID NO: 23252 - RNA, 20 nt, Artificial Sequence
  spacer sequence CTCN PAM
ccuccccagccugacccucu

SEQ ID NO: 23253 - RNA, 20 nt, Artificial Sequence
  spacer sequence CTCN PAM
cccaggccuggcaccccgcc

SEQ ID NO: 23254 - RNA, 20 nt, Artificial Sequence
  spacer sequence CTCN PAM
cccccaggccuggcaccccg

SEQ ID NO: 23255 - RNA, 20 nt, Artificial Sequence
  spacer sequence CTCN PAM
ggccaacaggaaaaggccac

SEQ ID NO: 23256 - RNA, 20 nt, Artificial Sequence
  spacer sequence CTCN PAM
ccacccccacccugggcccu

SEQ ID NO: 23257 - RNA, 20 nt, Artificial Sequence
  spacer sequence CTCN PAM
ccccacccccacccugggcc

SEQ ID NO: 23258 - RNA, 20 nt, Artificial Sequence
  spacer sequence CTCN PAM
cugaggucugggcauaggga

SEQ ID NO: 23259 - RNA, 20 nt, Artificial Sequence
  spacer sequence CTCN PAM
gggagaccagccucucccca

SEQ ID NO: 23260 - RNA, 20 nt, Artificial Sequence
  spacer sequence CTCN PAM
cuaugcccagaccucaggga

SEQ ID NO: 23261 - RNA, 20 nt, Artificial Sequence
  spacer sequence CTCN PAM
ucccaggacaccucccuaug

SEQ ID NO: 23262 - RNA, 20 nt, Artificial Sequence
  spacer sequence CTCN PAM
ugagaagugacuuugauaau

SEQ ID NO: 23263 - RNA, 20 nt, Artificial Sequence
  spacer sequence CTCN PAM
agagucuucucaucccagga

SEQ ID NO: 23264 - RNA, 20 nt, Artificial Sequence
  spacer sequence CTCN PAM
guucaucccccaccccaaga

SEQ ID NO: 23265 - RNA, 20 nt, Artificial Sequence
  spacer sequence CTCN PAM
agucucuguucaucccccac

SEQ ID NO: 23266 - RNA, 20 nt, Artificial Sequence
  spacer sequence CTCN PAM
ccagucucuguucauccccc

SEQ ID NO: 23267 - RNA, 20 nt, Artificial Sequence
  spacer sequence CTCN PAM
cccacccucuccagucucug

SEQ ID NO: 23268 - RNA, 20 nt, Artificial Sequence
  spacer sequence CTCN PAM
uuucucccccacccucucca

SEQ ID NO: 23269 - RNA, 20 nt, Artificial Sequence
  spacer sequence CTCN PAM
acuccuuucucccccacccu

SEQ ID NO: 23270 - RNA, 20 nt, Artificial Sequence
  spacer sequence CTCN PAM
caggccggguguggcagcuc

SEQ ID NO: 23271 - RNA, 20 nt, Artificial Sequence
  spacer sequence CTCN PAM
ggccggguguggcagcucac

SEQ ID NO: 23272 - RNA, 20 nt, Artificial Sequence
  spacer sequence CTCN PAM
caccugucaucccagcacac

SEQ ID NO: 23273 - RNA, 20 nt, Artificial Sequence
  spacer sequence CTCN PAM
gcugcccagugugcugggau

SEQ ID NO: 23274 - RNA, 20 nt, Artificial Sequence
  spacer sequence CTCN PAM
ugccucagcugcccagugug

SEQ ID NO: 23275 - RNA, 20 nt, Artificial Sequence
  spacer sequence CTCN PAM
agggguccuccugccucagc

SEQ ID NO: 23276 - RNA, 20 nt, Artificial Sequence
  spacer sequence CTCN PAM
ugggcucaagggguccuccu

SEQ ID NO: 23277 - RNA, 20 nt, Artificial Sequence
  spacer sequence CTCN PAM
aacuccugggcucaaggggu

SEQ ID NO: 23278 - RNA, 20 nt, Artificial Sequence
  spacer sequence CTCN PAM
ccguguuacccaggcugguc

SEQ ID NO: 23279 - RNA, 20 nt, Artificial Sequence
  spacer sequence CTCN PAM
uuuuaaaaaauguuuuguag

SEQ ID NO: 23280 - RNA, 20 nt, Artificial Sequence
  spacer sequence CTCN PAM
guagcuggggcuauaagcaa

SEQ ID NO: 23281 - RNA, 20 nt, Artificial Sequence
  spacer sequence CTCN PAM
cgguagcuggggcuauaagc

SEQ ID NO: 23282 - RNA, 20 nt, Artificial Sequence
  spacer sequence CTCN PAM
gccucucgguagcuggggcu

SEQ ID NO: 23283 - RNA, 20 nt, Artificial Sequence
  spacer sequence CTCN PAM
cgccucagccucucgguagc

SEQ ID NO: 23284 - RNA, 20 nt, Artificial Sequence
  spacer sequence CTCN PAM
ggugauccucccgccucagc

SEQ ID NO: 23285 - RNA, 20 nt, Artificial Sequence
  spacer sequence CTCN PAM
ccagcucaggugauccuccc

SEQ ID NO: 23286 - RNA, 20 nt, Artificial Sequence
  spacer sequence CTCN PAM
ccacagccccaaccucccca

SEQ ID NO: 23287 - RNA, 20 nt, Artificial Sequence
  spacer sequence CTCN PAM
gcuccccacagccccaaccu

SEQ ID NO: 23288 - RNA, 20 nt, Artificial Sequence
  spacer sequence CTCN PAM
gcacuccagccugggcaaca

SEQ ID NO: 23289 - RNA, 20 nt, Artificial Sequence
  spacer sequence CTCN PAM
agccugggcaacagagugag

SEQ ID NO: 23290 - RNA, 20 nt, Artificial Sequence
  spacer sequence CTCN PAM
guugcccaggcuggagugca

SEQ ID NO: 23291 - RNA, 20 nt, Artificial Sequence
  spacer sequence CTCN PAM
cucuguugcccaggcuggag

SEQ ID NO: 23292 - RNA, 20 nt, Artificial Sequence
  spacer sequence CTCN PAM
aaaaaauaaauaaacaaaaa

SEQ ID NO: 23293 - RNA, 20 nt, Artificial Sequence
  spacer sequence CTCN PAM
acuuccuauaccaacccacu

SEQ ID NO: 23294 - RNA, 20 nt, Artificial Sequence
  spacer sequence CTCN PAM
aagcugggacaguggguugg

SEQ ID NO: 23295 - RNA, 20 nt, Artificial Sequence
  spacer sequence CTCN PAM
agccgcaguugauucccaga

SEQ ID NO: 23296 - RNA, 20 nt, Artificial Sequence
  spacer sequence CTCN PAM
aggcuggucccgccccucca

SEQ ID NO: 23297 - RNA, 20 nt, Artificial Sequence
  spacer sequence CTCN PAM
gggaaucaacugcggcucga

SEQ ID NO: 23298 - RNA, 20 nt, Artificial Sequence
  spacer sequence CTCN PAM
gugcucugggaaucaacugc

SEQ ID NO: 23299 - RNA, 20 nt, Artificial Sequence
  spacer sequence CTCN PAM
cuauaccccaugcagaacca

SEQ ID NO: 23300 - RNA, 20 nt, Artificial Sequence
  spacer sequence CTCN PAM
cggacaggaaugcauugcua

SEQ ID NO: 23301 - RNA, 20 nt, Artificial Sequence
  spacer sequence CTCN PAM
ccgaacccccacuccaagcu

SEQ ID NO: 23302 - RNA, 20 nt, Artificial Sequence
  spacer sequence CTCN PAM
aagcuccguucaacagaaau

SEQ ID NO: 23303 - RNA, 20 nt, Artificial Sequence
  spacer sequence CTCN PAM
guucaacagaaauccaggaa

SEQ ID NO: 23304 - RNA, 20 nt, Artificial Sequence
  spacer sequence CTCN PAM
ggcccauuuccuggauuucu

SEQ ID NO: 23305 - RNA, 20 nt, Artificial Sequence
  spacer sequence CTCN PAM
ccggcccauuuccuggauuu

SEQ ID NO: 23306 - RNA, 20 nt, Artificial Sequence
  spacer sequence CTCN PAM
cagccucuccggcccauuuc

SEQ ID NO: 23307 - RNA, 20 nt, Artificial Sequence
  spacer sequence CTCN PAM
uggguggucucccagccucu

SEQ ID NO: 23308 - RNA, 20 nt, Artificial Sequence
  spacer sequence CTCN PAM
ggcuggucuccugggugguc

SEQ ID NO: 23309 - RNA, 20 nt, Artificial Sequence
  spacer sequence CTCN PAM
gggauccagggcgcggccuc

SEQ ID NO: 23310 - RNA, 20 nt, Artificial Sequence
  spacer sequence CTCN PAM
cuuuuguaauuaagauaaua

SEQ ID NO: 23311 - RNA, 20 nt, Artificial Sequence
  spacer sequence CTCN PAM
caaagugcugggaugacagg

SEQ ID NO: 23312 - RNA, 20 nt, Artificial Sequence
  spacer sequence CTCN PAM
ggugaucugcccgccuuggu

SEQ ID NO: 23313 - RNA, 20 nt, Artificial Sequence
  spacer sequence CTCN PAM
ugaccucaggugaucugccc

SEQ ID NO: 23314 - RNA, 20 nt, Artificial Sequence
  spacer sequence CTCN PAM
aacuccugaccucaggugau

SEQ ID NO: 23315 - RNA, 20 nt, Artificial Sequence
  spacer sequence CTCN PAM
acuaaaaauacaaaaauuag

SEQ ID NO: 23316 - RNA, 20 nt, Artificial Sequence
  spacer sequence CTCN PAM
cagguggauuacaggguggc

SEQ ID NO: 23317 - RNA, 20 nt, Artificial Sequence
  spacer sequence CTCN PAM
caaagugcugggauuacagg

SEQ ID NO: 23318 - RNA, 20 nt, Artificial Sequence
  spacer sequence CTCN PAM
uuggccucccaaagugcugg

SEQ ID NO: 23319 - RNA, 20 nt, Artificial Sequence
  spacer sequence CTCN PAM
ugaccuugugaucugcccuc

SEQ ID NO: 23320 - RNA, 20 nt, Artificial Sequence
  spacer sequence CTCN PAM
aucucuugaccuugugaucu

SEQ ID NO: 23321 - RNA, 20 nt, Artificial Sequence
  spacer sequence CTCN PAM
auuaaaaguauaaaaauuag

SEQ ID NO: 23322 - RNA, 20 nt, Artificial Sequence
  spacer sequence CTCN PAM
ggaggcugaggcaggagacu

SEQ ID NO: 23323 - RNA, 20 nt, Artificial Sequence
  spacer sequence CTCN PAM
cgaguagcugggacuacagg

SEQ ID NO: 23324 - RNA, 20 nt, Artificial Sequence
  spacer sequence CTCN PAM
gccucccgaguagcugggac

SEQ ID NO: 23325 - RNA, 20 nt, Artificial Sequence
  spacer sequence CTCN PAM
ugccucagccucccgaguag

SEQ ID NO: 23326 - RNA, 20 nt, Artificial Sequence
  spacer sequence CTCN PAM
cuugaacccaggaggcggag

SEQ ID NO: 23327 - RNA, 20 nt, Artificial Sequence
  spacer sequence CTCN PAM
uggguucaagcgagucuccu

SEQ ID NO: 23328 - RNA, 20 nt, Artificial Sequence
  spacer sequence CTCN PAM
gccuccuggguucaagcgag

SEQ ID NO: 23329 - RNA, 20 nt, Artificial Sequence
  spacer sequence CTCN PAM
uguugacgaagaaguaaacu

SEQ ID NO: 23330 - RNA, 20 nt, Artificial Sequence
  spacer sequence CTCN PAM
guuuacuucuucgucaacau

SEQ ID NO: 23331 - RNA, 20 nt, Artificial Sequence
  spacer sequence CTCN PAM
cccaucagaacugaaaggug

SEQ ID NO: 23332 - RNA, 20 nt, Artificial Sequence
  spacer sequence CTCN PAM
ugccaggcucagaguaucau

SEQ ID NO: 23333 - RNA, 20 nt, Artificial Sequence
  spacer sequence CTCN PAM
gaguaucauuuucaaaaugg

SEQ ID NO: 23334 - RNA, 20 nt, Artificial Sequence
  spacer sequence CTCN PAM
gagccuggcaggagaaacgg

SEQ ID NO: 23335 - RNA, 20 nt, Artificial Sequence
  spacer sequence CTCN PAM
cacaaaggcaaggugagccu

SEQ ID NO: 23336 - RNA, 20 nt, Artificial Sequence
  spacer sequence CTCN PAM
ccuugccuuugugcgagaau

SEQ ID NO: 23337 - RNA, 20 nt, Artificial Sequence
  spacer sequence CTCN PAM
cucacccugaaucauucaug

SEQ ID NO: 23338 - RNA, 20 nt, Artificial Sequence
  spacer sequence CTCN PAM
cccugaaucauucaugaagg

SEQ ID NO: 23339 - RNA, 20 nt, Artificial Sequence
  spacer sequence CTCN PAM
uucaugaaugauucagggug

SEQ ID NO: 23340 - RNA, 20 nt, Artificial Sequence
  spacer sequence CTCN PAM
caucccagcccgcaggccag

SEQ ID NO: 23341 - RNA, 20 nt, Artificial Sequence
  spacer sequence CTCN PAM
ugucucccaucccagcccgc

SEQ ID NO: 23342 - RNA, 20 nt, Artificial Sequence
  spacer sequence CTCN PAM
ccugucucccaucccagccc

SEQ ID NO: 23343 - RNA, 20 nt, Artificial Sequence
  spacer sequence CTCN PAM
ucuccugucucccaucccag

SEQ ID NO: 23344 - RNA, 20 nt, Artificial Sequence
  spacer sequence CTCN PAM
gucuuuucuccucuccuguc

SEQ ID NO: 23345 - RNA, 20 nt, Artificial Sequence
  spacer sequence CTCN PAM
cuaaauaaaucaggugccca

SEQ ID NO: 23346 - RNA, 20 nt, Artificial Sequence
  spacer sequence CTCN PAM
cgugggcaccugauuuauuu

SEQ ID NO: 23347 - RNA, 20 nt, Artificial Sequence
  spacer sequence CTCN PAM
gccaugguuacugucaggcc

SEQ ID NO: 23348 - RNA, 20 nt, Artificial Sequence
  spacer sequence CTCN PAM
cgccucagucucccgaguag

SEQ ID NO: 23349 - RNA, 20 nt, Artificial Sequence
  spacer sequence CTCN PAM
gucucccgaguagcugggau

SEQ ID NO: 23350 - RNA, 20 nt, Artificial Sequence
  spacer sequence CTCN PAM
cgaguagcugggauuacagg

SEQ ID NO: 23351 - RNA, 20 nt, Artificial Sequence
  spacer sequence CTCN PAM
ggagacugaggcgggagaau

SEQ ID NO: 23352 - RNA, 20 nt, Artificial Sequence
  spacer sequence CTCN PAM
uguaaucccagcuacucggg

SEQ ID NO: 23353 - RNA, 20 nt, Artificial Sequence
  spacer sequence CTCN PAM
aaguauaaacccaaggccau

SEQ ID NO: 23354 - RNA, 20 nt, Artificial Sequence
  spacer sequence CTCN PAM
ugucuugcucaaaguauaaa

SEQ ID NO: 23355 - RNA, 20 nt, Artificial Sequence
  spacer sequence CTCN PAM
acugcugccagcugccacuc

SEQ ID NO: 23356 - RNA, 20 nt, Artificial Sequence
  spacer sequence CTCN PAM
gacccccggccgccccugcc

SEQ ID NO: 23357 - RNA, 20 nt, Artificial Sequence
  spacer sequence CTCN PAM
gcgaacagacagaagcggcu

SEQ ID NO: 23358 - RNA, 20 nt, Artificial Sequence
  spacer sequence CTCN PAM
caccaccagaaccagccgcu

SEQ ID NO: 23359 - RNA, 20 nt, Artificial Sequence
  spacer sequence CTCN PAM
aggggagcaaauccacagua

SEQ ID NO: 23360 - RNA, 20 nt, Artificial Sequence
  spacer sequence CTCN PAM
ccuggagacccccauccuca

SEQ ID NO: 23361 - RNA, 20 nt, Artificial Sequence
  spacer sequence CTCN PAM
cagauccaccggacauuccu

SEQ ID NO: 23362 - RNA, 20 nt, Artificial Sequence
  spacer sequence CTCN PAM
ucaggaauguccgguggauc

SEQ ID NO: 23363 - RNA, 20 nt, Artificial Sequence
  spacer sequence CTCN PAM
uggugagucuccguugaccg

SEQ ID NO: 23364 - RNA, 20 nt, Artificial Sequence
  spacer sequence CTCN PAM
ccaagagccaucugcagcca

SEQ ID NO: 23365 - RNA, 20 nt, Artificial Sequence
  spacer sequence CTCN PAM
guugaccgggugguucgggc

SEQ ID NO: 23366 - RNA, 20 nt, Artificial Sequence
  spacer sequence CTCN PAM
auggagcucggcggccaccc

SEQ ID NO: 23367 - RNA, 20 nt, Artificial Sequence
  spacer sequence CTCN PAM
auggaggcaucgcacggcaa

SEQ ID NO: 23368 - RNA, 20 nt, Artificial Sequence
  spacer sequence CTCN PAM
gcggccaccccuaauccggg

SEQ ID NO: 23369 - RNA, 20 nt, Artificial Sequence
  spacer sequence CTCN PAM
ggcaccagacgcccggcggg

SEQ ID NO: 23370 - RNA, 20 nt, Artificial Sequence
  spacer sequence CTCN PAM
aaggcuccugggcccacgcc

SEQ ID NO: 23371 - RNA, 20 nt, Artificial Sequence
  spacer sequence CTCN PAM
ugggcccacgccaggccccg

SEQ ID NO: 23372 - RNA, 20 nt, Artificial Sequence
  spacer sequence CTCN PAM
ggcguguuuuauuccagcag

SEQ ID NO: 23373 - RNA, 20 nt, Artificial Sequence
  spacer sequence CTCN PAM
ccuggauuuggggaaacgag

SEQ ID NO: 23374 - RNA, 20 nt, Artificial Sequence
  spacer sequence CTCN PAM
uuuccccaaauccaggcgag

SEQ ID NO: 23375 - RNA, 20 nt, Artificial Sequence
  spacer sequence CTCN PAM
cuccguagguugguguuaau

SEQ ID NO: 23376 - RNA, 20 nt, Artificial Sequence
  spacer sequence CTCN PAM
guagguugguguuaaugaaa

SEQ ID NO: 23377 - RNA, 20 nt, Artificial Sequence
  spacer sequence CTCN PAM
cuaaauagaauuagcgggau

SEQ ID NO: 23378 - RNA, 20 nt, Artificial Sequence
  spacer sequence CTCN PAM
gggccgggaacugcuccggu

SEQ ID NO: 23379 - RNA, 20 nt, Artificial Sequence
  spacer sequence CTCN PAM
gguuuccaaccgcagccucc

SEQ ID NO: 23380 - RNA, 20 nt, Artificial Sequence
  spacer sequence CTCN PAM
cgugagggucccagugugga

SEQ ID NO: 23381 - RNA, 20 nt, Artificial Sequence
  spacer sequence CTCN PAM
cgggaggcugcgguuggaaa

SEQ ID NO: 23382 - RNA, 20 nt, Artificial Sequence
  spacer sequence CTCN PAM
acacugggacccucacggga

SEQ ID NO: 23383 - RNA, 20 nt, Artificial Sequence
  spacer sequence CTCN PAM
cucugggauggcucccaacc

SEQ ID NO: 23384 - RNA, 20 nt, Artificial Sequence
  spacer sequence CTCN PAM
gggauggcucccaacccgcu

SEQ ID NO: 23385 - RNA, 20 nt, Artificial Sequence
  spacer sequence CTCN PAM
caacccgcugaccuggccuc

SEQ ID NO: 23386 - RNA, 20 nt, Artificial Sequence
  spacer sequence CTCN PAM
ccgucaggcacccucacagc

SEQ ID NO: 23387 - RNA, 20 nt, Artificial Sequence
  spacer sequence CTCN PAM
cagcucugucagacucuuca

SEQ ID NO: 23388 - RNA, 20 nt, Artificial Sequence
  spacer sequence CTCN PAM
gucagacucuucaugugauc

SEQ ID NO: 23389 - RNA, 20 nt, Artificial Sequence
  spacer sequence CTCN PAM
ucaugugaucagcgcuccug

SEQ ID NO: 23390 - RNA, 20 nt, Artificial Sequence
  spacer sequence CTCN PAM
ugggaacauuaguuuagggu

SEQ ID NO: 23391 - RNA, 20 nt, Artificial Sequence
  spacer sequence CTCN PAM
cgggccaccaucccagcagc

SEQ ID NO: 23392 - RNA, 20 nt, Artificial Sequence
  spacer sequence CTCN PAM
uggugacccugcugggccug

SEQ ID NO: 23393 - RNA, 20 nt, Artificial Sequence
  spacer sequence CTCN PAM
guuuccccagccguaggcug

SEQ ID NO: 23394 - RNA, 20 nt, Artificial Sequence
  spacer sequence CTCN PAM
aacuguacgagcuccaggcc

SEQ ID NO: 23395 - RNA, 20 nt, Artificial Sequence
  spacer sequence CTCN PAM
uacaguucgaggcugccagc

SEQ ID NO: 23396 - RNA, 20 nt, Artificial Sequence
  spacer sequence CTCN PAM
aggccacaguuuccccagcu

SEQ ID NO: 23397 - RNA, 20 nt, Artificial Sequence
  spacer sequence CTCN PAM
ggccucaguuuccccagcug

SEQ ID NO: 23398 - RNA, 20 nt, Artificial Sequence
  spacer sequence CTCN PAM
guuuccccagcuguaggcgg

SEQ ID NO: 23399 - RNA, 20 nt, Artificial Sequence
  spacer sequence CTCN PAM
guuuccccaccuguaggcgg

SEQ ID NO: 23400 - RNA, 20 nt, Artificial Sequence
  spacer sequence CTCN PAM
auacaauccaaggccgcccg

SEQ ID NO: 23401 - RNA, 20 nt, Artificial Sequence
  spacer sequence CTCN PAM
guuucuccagcuguaggcgg

SEQ ID NO: 23402 - RNA, 20 nt, Artificial Sequence
  spacer sequence CTCN PAM
agcuguaggcggauggccgu

SEQ ID NO: 23403 - RNA, 20 nt, Artificial Sequence
  spacer sequence CTCN PAM
guuucccccgcuguaggcag

SEQ ID NO: 23404 - RNA, 20 nt, Artificial Sequence
  spacer sequence CTCN PAM
guuuccccagcuguaggcgg

SEQ ID NO: 23405 - RNA, 20 nt, Artificial Sequence
  spacer sequence CTCN PAM
gcuuccccagcuuuaggcgg

SEQ ID NO: 23406 - RNA, 20 nt, Artificial Sequence
  spacer sequence CTCN PAM
guuuccccagcuguaagcgg

SEQ ID NO: 23407 - RNA, 20 nt, Artificial Sequence
  spacer sequence CTCN PAM
guuuccccagcuguagguga

SEQ ID NO: 23408 - RNA, 20 nt, Artificial Sequence
  spacer sequence CTCN PAM
ccuacagcuggggaaacuga

SEQ ID NO: 23409 - RNA, 20 nt, Artificial Sequence
  spacer sequence CTCN PAM
caccuacagcuggggaaacu

SEQ ID NO: 23410 - RNA, 20 nt, Artificial Sequence
  spacer sequence CTCN PAM
guuuccccagcuguaggcgg

SEQ ID NO: 23411 - RNA, 20 nt, Artificial Sequence
  spacer sequence CTCN PAM
guuuccccaccuguaggcgg

SEQ ID NO: 23412 - RNA, 20 nt, Artificial Sequence
  spacer sequence CTCN PAM
guuuccccagcuguagguga

SEQ ID NO: 23413 - RNA, 20 nt, Artificial Sequence
  spacer sequence CTCN PAM
ccuacagcuggggaaacuga

SEQ ID NO: 23414 - RNA, 20 nt, Artificial Sequence
  spacer sequence CTCN PAM
caccuacagcuggggaaacu

SEQ ID NO: 23415 - RNA, 20 nt, Artificial Sequence
  spacer sequence CTCN PAM
guuuccccagcuguaggcgg

SEQ ID NO: 23416 - RNA, 20 nt, Artificial Sequence
  spacer sequence CTCN PAM
guuuccccagcuguaggcgg

SEQ ID NO: 23417 - RNA, 20 nt, Artificial Sequence
  spacer sequence CTCN PAM
guuuucccagcuguaggcag

SEQ ID NO: 23418 - RNA, 20 nt, Artificial Sequence
  spacer sequence CTCN PAM
guuucccuaucuccgcaguc

SEQ ID NO: 23419 - RNA, 20 nt, Artificial Sequence
  spacer sequence CTCN PAM
gcagucgggauucgcuguuc

SEQ ID NO: 23420 - RNA, 20 nt, Artificial Sequence
  spacer sequence CTCN PAM
ccgcgcgaucacccagaugu

SEQ ID NO: 23421 - RNA, 20 nt, Artificial Sequence
  spacer sequence CTCN PAM
caucugggugaucgcgcggg

SEQ ID NO: 23422 - RNA, 20 nt, Artificial Sequence
  spacer sequence CTCN PAM
guuugaaucggacuuuuugg

SEQ ID NO: 23423 - RNA, 20 nt, Artificial Sequence
  spacer sequence CTCN PAM
auguugguugugggcacaug

SEQ ID NO: 23424 - RNA, 20 nt, Artificial Sequence
  spacer sequence CTCN PAM
gggcuccauguugguugugg

SEQ ID NO: 23425 - RNA, 20 nt, Artificial Sequence
  spacer sequence CTCN PAM
aagauggcgaugcgacuccc

SEQ ID NO: 23426 - RNA, 20 nt, Artificial Sequence
  spacer sequence CTCN PAM
cuuugcccucacggcccagg

SEQ ID NO: 23427 - RNA, 20 nt, Artificial Sequence
  spacer sequence CTCN PAM
cggcccaggcgggcgggucc

SEQ ID NO: 23428 - RNA, 20 nt, Artificial Sequence
  spacer sequence CTCN PAM
ccacguacccacucucaaga

SEQ ID NO: 23429 - RNA, 20 nt, Artificial Sequence
  spacer sequence CTCN PAM
caagauggcgucucccgcaa

SEQ ID NO: 23430 - RNA, 20 nt, Artificial Sequence
  spacer sequence CTCN PAM
agauggcgucucccgcaaag

SEQ ID NO: 23431 - RNA, 20 nt, Artificial Sequence
  spacer sequence CTCN PAM
cgcaaagccacgcgccagcu

SEQ ID NO: 23432 - RNA, 20 nt, Artificial Sequence
  spacer sequence CTCN PAM
gacgccgucacgugauccca

SEQ ID NO: 23433 - RNA, 20 nt, Artificial Sequence
  spacer sequence CTCN PAM
cccucccccgacuacacaag

SEQ ID NO: 23434 - RNA, 20 nt, Artificial Sequence
  spacer sequence CTCN PAM
cccgacuacacaagccguuu

SEQ ID NO: 23435 - RNA, 20 nt, Artificial Sequence
  spacer sequence CTCN PAM
aggccgaaggcggaaacggc

SEQ ID NO: 23436 - RNA, 20 nt, Artificial Sequence
  spacer sequence CTCN PAM
cccaauaggcgccugcgauu

SEQ ID NO: 23437 - RNA, 20 nt, Artificial Sequence
  spacer sequence CTCN PAM
gggucccgcccccgggcggc

SEQ ID NO: 23438 - RNA, 20 nt, Artificial Sequence
  spacer sequence CTCN PAM
cacuggccagaaggccgccc

SEQ ID NO: 23439 - RNA, 20 nt, Artificial Sequence
  spacer sequence CTCN PAM
ccccgcccccuggcugcagc

SEQ ID NO: 23440 - RNA, 20 nt, Artificial Sequence
  spacer sequence CTCN PAM
ccgcccccuggcugcagcgg

SEQ ID NO: 23441 - RNA, 20 nt, Artificial Sequence
  spacer sequence CTCN PAM
cgcugcagccagggggcggg

SEQ ID NO: 23442 - RNA, 20 nt, Artificial Sequence
  spacer sequence CTCN PAM
gccauuuugugagucuauaa

SEQ ID NO: 23443 - RNA, 20 nt, Artificial Sequence
  spacer sequence CTCN PAM
caaaauggcggagacgcccg

SEQ ID NO: 23444 - RNA, 20 nt, Artificial Sequence
  spacer sequence CTCN PAM
gagccguugggucgguuccu

SEQ ID NO: 23445 - RNA, 20 nt, Artificial Sequence
  spacer sequence CTCN PAM
gaguuauagacucacaaaau

SEQ ID NO: 23446 - RNA, 20 nt, Artificial Sequence
  spacer sequence CTCN PAM
acuccgucccccgcgggucu

SEQ ID NO: 23447 - RNA, 20 nt, Artificial Sequence
  spacer sequence CTCN PAM
gucccccgcgggucugcucu

SEQ ID NO: 23448 - RNA, 20 nt, Artificial Sequence
  spacer sequence CTCN PAM
gugugccauggacgggugag

SEQ ID NO: 23449 - RNA, 20 nt, Artificial Sequence
  spacer sequence CTCN PAM
cccguccauggcacacagag

SEQ ID NO: 23450 - RNA, 20 nt, Artificial Sequence
  spacer sequence CTCN PAM
ccgcgccgcagcccugcccc

SEQ ID NO: 23451 - RNA, 20 nt, Artificial Sequence
  spacer sequence CTCN PAM
ccggggccgaucucgccccc

SEQ ID NO: 23452 - RNA, 20 nt, Artificial Sequence
  spacer sequence CTCN PAM
cccccucucgggcgggaggg

SEQ ID NO: 23453 - RNA, 20 nt, Artificial Sequence
  spacer sequence CTCN PAM
cgggcgggagggggcggcgg

SEQ ID NO: 23454 - RNA, 20 nt, Artificial Sequence
  spacer sequence CTCN PAM
ggcgggagggggcggcgggc

SEQ ID NO: 23455 - RNA, 20 nt, Artificial Sequence
  spacer sequence CTCN PAM
cgcccgagagggggcgagau

SEQ ID NO: 23456 - RNA, 20 nt, Artificial Sequence
  spacer sequence CTCN PAM
ccccuuccucuccgcguggc

SEQ ID NO: 23457 - RNA, 20 nt, Artificial Sequence
  spacer sequence CTCN PAM
ccuuccucuccgcguggcgg

SEQ ID NO: 23458 - RNA, 20 nt, Artificial Sequence
  spacer sequence CTCN PAM
ccgcguggcgggcgcgggug

SEQ ID NO: 23459 - RNA, 20 nt, Artificial Sequence
  spacer sequence CTCN PAM
gcguggcgggcgcgggugcg

SEQ ID NO: 23460 - RNA, 20 nt, Artificial Sequence
  spacer sequence CTCN PAM
cgcgccccucccccuccgcg

SEQ ID NO: 23461 - RNA, 20 nt, Artificial Sequence
  spacer sequence CTCN PAM
cccuccgcgcgcguccccgc

SEQ ID NO: 23462 - RNA, 20 nt, Artificial Sequence
  spacer sequence CTCN PAM
gcgcgcguccccgcacuucg

SEQ ID NO: 23463 - RNA, 20 nt, Artificial Sequence
  spacer sequence CTCN PAM
gcggcgcgcggcccuucccg

SEQ ID NO: 23464 - RNA, 20 nt, Artificial Sequence
  spacer sequence CTCN PAM
cgcgcccggauggcccuucc

SEQ ID NO: 23465 - RNA, 20 nt, Artificial Sequence
  spacer sequence CTCN PAM
cguccgcuccccucgugcgc

SEQ ID NO: 23466 - RNA, 20 nt, Artificial Sequence
  spacer sequence CTCN PAM
ccucgugcgccugcguagcc

SEQ ID NO: 23467 - RNA, 20 nt, Artificial Sequence
  spacer sequence CTCN PAM
ugcgccugcguagcccgucg

SEQ ID NO: 23468 - RNA, 20 nt, Artificial Sequence
  spacer sequence CTCN PAM
gcccccggcgcagccccgga

SEQ ID NO: 23469 - RNA, 20 nt, Artificial Sequence
  spacer sequence CTCN PAM
cggcggccgccccagccccg

SEQ ID NO: 23470 - RNA, 20 nt, Artificial Sequence
  spacer sequence CTCN PAM
ccgcgggcccgagucucugc

SEQ ID NO: 23471 - RNA, 20 nt, Artificial Sequence
  spacer sequence CTCN PAM
ggcccgcggcgaggccccgg

SEQ ID NO: 23472 - RNA, 20 nt, Artificial Sequence
  spacer sequence CTCN PAM
gcgcuccccgcccuaccccu

SEQ ID NO: 23473 - RNA, 20 nt, Artificial Sequence
  spacer sequence CTCN PAM
ccgcccuaccccugcccccc

SEQ ID NO: 23474 - RNA, 20 nt, Artificial Sequence
  spacer sequence CTCN PAM
ggagagaagcggccgccccg

SEQ ID NO: 23475 - RNA, 20 nt, Artificial Sequence
  spacer sequence CTCN PAM
cgagaucaccgaaaccccuu

SEQ ID NO: 23476 - RNA, 20 nt, Artificial Sequence
  spacer sequence CTCN PAM
cccgagaucaccgaaacccc

SEQ ID NO: 23477 - RNA, 20 nt, Artificial Sequence
  spacer sequence CTCN PAM
gggcggccgcuucucucccg

SEQ ID NO: 23478 - RNA, 20 nt, Artificial Sequence
  spacer sequence CTCN PAM
gccccggggccggaggggcc

SEQ ID NO: 23479 - RNA, 20 nt, Artificial Sequence
  spacer sequence CTCN PAM
ggccccggggcggaggacag

SEQ ID NO: 23480 - RNA, 20 nt, Artificial Sequence
  spacer sequence CTCN PAM
ccagggacccccgcgggcgc

SEQ ID NO: 23481 - RNA, 20 nt, Artificial Sequence
  spacer sequence CTCN PAM
agggacccccgcgggcgccg

SEQ ID NO: 23482 - RNA, 20 nt, Artificial Sequence
  spacer sequence CTCN PAM
ccaugacggcgcccgcgggg

SEQ ID NO: 23483 - RNA, 20 nt, Artificial Sequence
  spacer sequence CTCN PAM
cgggccggggcagccuuucc

SEQ ID NO: 23484 - RNA, 20 nt, Artificial Sequence
  spacer sequence CTCN PAM
ggccggggcagccuuuccgg

SEQ ID NO: 23485 - RNA, 20 nt, Artificial Sequence
  spacer sequence CTCN PAM
caagggaagcccgcccagca

SEQ ID NO: 23486 - RNA, 20 nt, Artificial Sequence
  spacer sequence CTCN PAM
cccaagggaagcccgcccag

SEQ ID NO: 23487 - RNA, 20 nt, Artificial Sequence
  spacer sequence CTCN PAM
caccucucccaagggaagcc

SEQ ID NO: 23488 - RNA, 20 nt, Artificial Sequence
  spacer sequence CTCN PAM
agaaaggccgugucccgccg

SEQ ID NO: 23489 - RNA, 20 nt, Artificial Sequence
  spacer sequence CTCN PAM
gcgggacacggccuuucugg

SEQ ID NO: 23490 - RNA, 20 nt, Artificial Sequence
  spacer sequence CTCN PAM
cgcaggaagcgcucggcggg

SEQ ID NO: 23491 - RNA, 20 nt, Artificial Sequence
  spacer sequence CTCN PAM
cugggaauaggaagcgggag

SEQ ID NO: 23492 - RNA, 20 nt, Artificial Sequence
  spacer sequence CTCN PAM
cgcuuccuauucccagggag

SEQ ID NO: 23493 - RNA, 20 nt, Artificial Sequence
  spacer sequence CTCN PAM
cccgcuuccuauucccaggg

SEQ ID NO: 23494 - RNA, 20 nt, Artificial Sequence
  spacer sequence CTCN PAM
agccucucccgcuuccuauu

SEQ ID NO: 23495 - RNA, 20 nt, Artificial Sequence
  spacer sequence CTCN PAM
ggaaaacggaaagaaugcga

SEQ ID NO: 23496 - RNA, 20 nt, Artificial Sequence
  spacer sequence CTCN PAM
ucugacaccacagacugcac

SEQ ID NO: 23497 - RNA, 20 nt, Artificial Sequence
  spacer sequence CTCN PAM
agggcugcgccucuucugac

SEQ ID NO: 23498 - RNA, 20 nt, Artificial Sequence
  spacer sequence CTCN PAM
ccgucugcaggacccaccug

SEQ ID NO: 23499 - RNA, 20 nt, Artificial Sequence
  spacer sequence CTCN PAM
ucucgccgucugcaggaccc

SEQ ID NO: 23500 - RNA, 20 nt, Artificial Sequence
  spacer sequence CTCN PAM
ccgcucucggacccagcacc

SEQ ID NO: 23501 - RNA, 20 nt, Artificial Sequence
  spacer sequence CTCN PAM
cggacccagcaccgcgggcu

SEQ ID NO: 23502 - RNA, 20 nt, Artificial Sequence
  spacer sequence CTCN PAM
gacccagcaccgcgggcucg

SEQ ID NO: 23503 - RNA, 20 nt, Artificial Sequence
  spacer sequence CTCN PAM
ggggccgcgcacucgccucc

SEQ ID NO: 23504 - RNA, 20 nt, Artificial Sequence
  spacer sequence CTCN PAM
ccucccggagugaggcagga

SEQ ID NO: 23505 - RNA, 20 nt, Artificial Sequence
  spacer sequence CTCN PAM
cggagugaggcaggaggccc

SEQ ID NO: 23506 - RNA, 20 nt, Artificial Sequence
  spacer sequence CTCN PAM
gggaggcgagugcgcggccc

SEQ ID NO: 23507 - RNA, 20 nt, Artificial Sequence
  spacer sequence CTCN PAM
cuccgggaggcgagugcgcg

SEQ ID NO: 23508 - RNA, 20 nt, Artificial Sequence
  spacer sequence CTCN PAM
ugccucacuccgggaggcga

SEQ ID NO: 23509 - RNA, 20 nt, Artificial Sequence
  spacer sequence CTCN PAM
gggccuccugccucacuccg

SEQ ID NO: 23510 - RNA, 20 nt, Artificial Sequence
  spacer sequence CTCN PAM
gagucacuuagggccucgcc

SEQ ID NO: 23511 - RNA, 20 nt, Artificial Sequence
  spacer sequence CTCN PAM
gagcguccgucggaagggca

SEQ ID NO: 23512 - RNA, 20 nt, Artificial Sequence
  spacer sequence CTCN PAM
ccgggaguugcaguggccgg

SEQ ID NO: 23513 - RNA, 20 nt, Artificial Sequence
  spacer sequence CTCN PAM
cggcgaggcccuaagugacu

SEQ ID NO: 23514 - RNA, 20 nt, Artificial Sequence
  spacer sequence CTCN PAM
cggccacugcaacucccggc

SEQ ID NO: 23515 - RNA, 20 nt, Artificial Sequence
  spacer sequence CTCN PAM
ccacggcuucucccggccac

SEQ ID NO: 23516 - RNA, 20 nt, Artificial Sequence
  spacer sequence CTCN PAM
cuguugggucaggaccuggc

SEQ ID NO: 23517 - RNA, 20 nt, Artificial Sequence
  spacer sequence CTCN PAM
cuucagccccggccaggucc

SEQ ID NO: 23518 - RNA, 20 nt, Artificial Sequence
  spacer sequence CTCN PAM
gacaguccggcuuucuaucc

SEQ ID NO: 23519 - RNA, 20 nt, Artificial Sequence
  spacer sequence CTCN PAM
ggacaccccggggggaaggu

SEQ ID NO: 23520 - RNA, 20 nt, Artificial Sequence
  spacer sequence CTCN PAM
ucgggacaccccggggggaa

SEQ ID NO: 23521 - RNA, 20 nt, Artificial Sequence
  spacer sequence CTCN PAM
cuccucgggacaccccgggg

SEQ ID NO: 23522 - RNA, 20 nt, Artificial Sequence
  spacer sequence CTCN PAM
cccuccucgggacaccccgg

SEQ ID NO: 23523 - RNA, 20 nt, Artificial Sequence
  spacer sequence CTCN PAM
gguugaucaguaacugaggc

SEQ ID NO: 23524 - RNA, 20 nt, Artificial Sequence
  spacer sequence CTCN PAM
guuacugaucaacccgagcc

SEQ ID NO: 23525 - RNA, 20 nt, Artificial Sequence
  spacer sequence CTCN PAM
ugcucuccucgguggaucgg

SEQ ID NO: 23526 - RNA, 20 nt, Artificial Sequence
  spacer sequence CTCN PAM
ccucgguggaucgggcucca

SEQ ID NO: 23527 - RNA, 20 nt, Artificial Sequence
  spacer sequence CTCN PAM
ucgguggaucgggcuccacu

SEQ ID NO: 23528 - RNA, 20 nt, Artificial Sequence
  spacer sequence CTCN PAM
guggaucgggcuccacucug

SEQ ID NO: 23529 - RNA, 20 nt, Artificial Sequence
  spacer sequence CTCN PAM
acucugcugagaggcacccu

SEQ ID NO: 23530 - RNA, 20 nt, Artificial Sequence
  spacer sequence CTCN PAM
gcugagaggcacccucuugg

SEQ ID NO: 23531 - RNA, 20 nt, Artificial Sequence
  spacer sequence CTCN PAM
gcagaguggagcccgaucca

SEQ ID NO: 23532 - RNA, 20 nt, Artificial Sequence
  spacer sequence CTCN PAM
cagcagaguggagcccgauc

SEQ ID NO: 23533 - RNA, 20 nt, Artificial Sequence
  spacer sequence CTCN PAM
ugggggcccaccccuacccg

SEQ ID NO: 23534 - RNA, 20 nt, Artificial Sequence
  spacer sequence CTCN PAM
ggcccaggccugugaguuug

SEQ ID NO: 23535 - RNA, 20 nt, Artificial Sequence
  spacer sequence CTCN PAM
caggccugggccagagcuuc

SEQ ID NO: 23536 - RNA, 20 nt, Artificial Sequence
  spacer sequence CTCN PAM
ccgaggcguuuccaacuuac

SEQ ID NO: 23537 - RNA, 20 nt, Artificial Sequence
  spacer sequence CTCN PAM
gaggcguuuccaacuuacug

SEQ ID NO: 23538 - RNA, 20 nt, Artificial Sequence
  spacer sequence CTCN PAM
gagaggcugaaacuggcaaa

SEQ ID NO: 23539 - RNA, 20 nt, Artificial Sequence
  spacer sequence CTCN PAM
cagcggcaucuagcauuccu

SEQ ID NO: 23540 - RNA, 20 nt, Artificial Sequence
  spacer sequence CTCN PAM
gcggcaucuagcauuccucg

SEQ ID NO: 23541 - RNA, 20 nt, Artificial Sequence
  spacer sequence CTCN PAM
gggcuuccgauggggguguc

SEQ ID NO: 23542 - RNA, 20 nt, Artificial Sequence
  spacer sequence CTCN PAM
ggaccaggccccacacguuc

SEQ ID NO: 23543 - RNA, 20 nt, Artificial Sequence
  spacer sequence CTCN PAM
cagcaggaccccaggcccca

SEQ ID NO: 23544 - RNA, 20 nt, Artificial Sequence
  spacer sequence CTCN PAM
cucccagcaggaccccaggc

SEQ ID NO: 23545 - RNA, 20 nt, Artificial Sequence
  spacer sequence CTCN PAM
cuucccugcccuucugagcu

SEQ ID NO: 23546 - RNA, 20 nt, Artificial Sequence
  spacer sequence CTCN PAM
gaagggcagggaagugagcc

SEQ ID NO: 23547 - RNA, 20 nt, Artificial Sequence
  spacer sequence CTCN PAM
agcggggccucgugcagcca

SEQ ID NO: 23548 - RNA, 20 nt, Artificial Sequence
  spacer sequence CTCN PAM
ugcagccagagggagcccug

SEQ ID NO: 23549 - RNA, 20 nt, Artificial Sequence
  spacer sequence CTCN PAM
ggcugcacgaggccccgcua

SEQ ID NO: 23550 - RNA, 20 nt, Artificial Sequence
  spacer sequence CTCN PAM
cucuggcugcacgaggcccc

SEQ ID NO: 23551 - RNA, 20 nt, Artificial Sequence
  spacer sequence CTCN PAM
gcagggcucccucuggcugc

SEQ ID NO: 23552 - RNA, 20 nt, Artificial Sequence
  spacer sequence CTCN PAM
ccuggcccggggacagcugg

SEQ ID NO: 23553 - RNA, 20 nt, Artificial Sequence
  spacer sequence CTCN PAM
uggcccggggacagcugggu

SEQ ID NO: 23554 - RNA, 20 nt, Artificial Sequence
  spacer sequence CTCN PAM
ugcugcugaguggccaccag

SEQ ID NO: 23555 - RNA, 20 nt, Artificial Sequence
  spacer sequence CTCN PAM
gcagcaggagcacccagcug

SEQ ID NO: 23556 - RNA, 20 nt, Artificial Sequence
  spacer sequence CTCN PAM
uuucuuucucucuacagcau

SEQ ID NO: 23557 - RNA, 20 nt, Artificial Sequence
  spacer sequence CTCN PAM
cuacagcauugucccagaua

SEQ ID NO: 23558 - RNA, 20 nt, Artificial Sequence
  spacer sequence CTCN PAM
acagcauugucccagauaua

SEQ ID NO: 23559 - RNA, 20 nt, Artificial Sequence
  spacer sequence CTCN PAM
cuuugcuucuccgugacgcu

SEQ ID NO: 23560 - RNA, 20 nt, Artificial Sequence
  spacer sequence CTCN PAM
gugacgcuccucugaccuug

SEQ ID NO: 23561 - RNA, 20 nt, Artificial Sequence
  spacer sequence CTCN PAM
ucugaccuugugccgacccc

SEQ ID NO: 23562 - RNA, 20 nt, Artificial Sequence
  spacer sequence CTCN PAM
gaccuugugccgaccccggg

SEQ ID NO: 23563 - RNA, 20 nt, Artificial Sequence
  spacer sequence CTCN PAM
agccaacgcaacagcgcugg

SEQ ID NO: 23564 - RNA, 20 nt, Artificial Sequence
  spacer sequence CTCN PAM
agauuccagaccaaggguag

SEQ ID NO: 23565 - RNA, 20 nt, Artificial Sequence
  spacer sequence CTCN PAM
agugcccgugaguuuugggg

SEQ ID NO: 23566 - RNA, 20 nt, Artificial Sequence
  spacer sequence CTCN PAM
cgggcacuggagcccggggu

SEQ ID NO: 23567 - RNA, 20 nt, Artificial Sequence
  spacer sequence CTCN PAM
ggucuggaaucugagcugcu

SEQ ID NO: 23568 - RNA, 20 nt, Artificial Sequence
  spacer sequence CTCN PAM
gauuccagaccugaggggcg

SEQ ID NO: 23569 - RNA, 20 nt, Artificial Sequence
  spacer sequence CTCN PAM
ucgguucuugcugucagcag

SEQ ID NO: 23570 - RNA, 20 nt, Artificial Sequence
  spacer sequence CTCN PAM
cugcugacagcaagaaccga

SEQ ID NO: 23571 - RNA, 20 nt, Artificial Sequence
  spacer sequence CTCN PAM
gugugccccaggccugccuu

SEQ ID NO: 23572 - RNA, 20 nt, Artificial Sequence
  spacer sequence CTCN PAM
agaggcuggaaucgugccgu

SEQ ID NO: 23573 - RNA, 20 nt, Artificial Sequence
  spacer sequence CTCN PAM
agaggcagaaguuccaaagg

SEQ ID NO: 23574 - RNA, 20 nt, Artificial Sequence
  spacer sequence CTCN PAM
uguuguggcugccugggaga

SEQ ID NO: 23575 - RNA, 20 nt, Artificial Sequence
  spacer sequence CTCN PAM
caggcagccacaacaugagg

SEQ ID NO: 23576 - RNA, 20 nt, Artificial Sequence
  spacer sequence CTCN PAM
ugguuuugauaggaaaagag

SEQ ID NO: 23577 - RNA, 20 nt, Artificial Sequence
  spacer sequence CTCN PAM
uuuccuaucaaaaccaagag

SEQ ID NO: 23578 - RNA, 20 nt, Artificial Sequence
  spacer sequence CTCN PAM
acagccagguggcucuuuuc

SEQ ID NO: 23579 - RNA, 20 nt, Artificial Sequence
  spacer sequence CTCN PAM
aauaggcuggauucuaucca

SEQ ID NO: 23580 - RNA, 20 nt, Artificial Sequence
  spacer sequence CTCN PAM
aaaauaaaaaacaaaaacaa

SEQ ID NO: 23581 - RNA, 20 nt, Artificial Sequence
  spacer sequence CTCN PAM
aucucaaaaauaaaaaacaa

SEQ ID NO: 23582 - RNA, 20 nt, Artificial Sequence
  spacer sequence CTCN PAM
agccuggugacaaagcaaga

SEQ ID NO: 23583 - RNA, 20 nt, Artificial Sequence
  spacer sequence CTCN PAM
cugcaaccuccaccucucag

SEQ ID NO: 23584 - RNA, 20 nt, Artificial Sequence
  spacer sequence CTCN PAM
accucucagguucaagcgau

SEQ ID NO: 23585 - RNA, 20 nt, Artificial Sequence
  spacer sequence CTCN PAM
cagguucaagcgauucuccu

SEQ ID NO: 23586 - RNA, 20 nt, Artificial Sequence
  spacer sequence CTCN PAM
gguucaagcgauucuccugc

SEQ ID NO: 23587 - RNA, 20 nt, Artificial Sequence
  spacer sequence CTCN PAM
ugccucaaccuccugaguag

SEQ ID NO: 23588 - RNA, 20 nt, Artificial Sequence
  spacer sequence CTCN PAM
accuccugaguagccgggau

SEQ ID NO: 23589 - RNA, 20 nt, Artificial Sequence
  spacer sequence CTCN PAM
ugaguagccgggauuacagg

SEQ ID NO: 23590 - RNA, 20 nt, Artificial Sequence
  spacer sequence CTCN PAM
ggagguugaggcaggagaau

SEQ ID NO: 23591 - RNA, 20 nt, Artificial Sequence
  spacer sequence CTCN PAM
cacagugcugggauuacagu

SEQ ID NO: 23592 - RNA, 20 nt, Artificial Sequence
  spacer sequence CTCN PAM
caacuguaaucccagcacug

SEQ ID NO: 23593 - RNA, 20 nt, Artificial Sequence
  spacer sequence CTCN PAM
ugccccaaacaccaccuuug

SEQ ID NO: 23594 - RNA, 20 nt, Artificial Sequence
  spacer sequence CTCN PAM
ggggugugcgaaucuugcag

SEQ ID NO: 23595 - RNA, 20 nt, Artificial Sequence
  spacer sequence CTCN PAM
auggggcugcaagauucgca

SEQ ID NO: 23596 - RNA, 20 nt, Artificial Sequence
  spacer sequence CTCN PAM
cccuccauggggcugcaaga

SEQ ID NO: 23597 - RNA, 20 nt, Artificial Sequence
  spacer sequence CTCN PAM
gcaugugaggaaaggggguc

SEQ ID NO: 23598 - RNA, 20 nt, Artificial Sequence
  spacer sequence CTCN PAM
caugcugagcccuggccuca

SEQ ID NO: 23599 - RNA, 20 nt, Artificial Sequence
  spacer sequence CTCN PAM
agguucugacccccuuuccu

SEQ ID NO: 23600 - RNA, 20 nt, Artificial Sequence
  spacer sequence CTCN PAM
ccaggaccuucuucuucucc

SEQ ID NO: 23601 - RNA, 20 nt, Artificial Sequence
  spacer sequence CTCN PAM
agggagcuguaguccucgcu

SEQ ID NO: 23602 - RNA, 20 nt, Artificial Sequence
  spacer sequence CTCN PAM
agaaucgccuccccaggacc

SEQ ID NO: 23603 - RNA, 20 nt, Artificial Sequence
  spacer sequence CTCN PAM
cucgagaaucgccuccccag

SEQ ID NO: 23604 - RNA, 20 nt, Artificial Sequence
  spacer sequence CTCN PAM
cuuagcugggguaguugguu

SEQ ID NO: 23605 - RNA, 20 nt, Artificial Sequence
  spacer sequence CTCN PAM
acccacaaugaccagcagaa

SEQ ID NO: 23606 - RNA, 20 nt, Artificial Sequence
  spacer sequence CTCN PAM
cgacuucagggcuugugccc

SEQ ID NO: 23607 - RNA, 20 nt, Artificial Sequence
  spacer sequence CTCN PAM
gggcacaagcccugaagucg

SEQ ID NO: 23608 - RNA, 20 nt, Artificial Sequence
  spacer sequence CTCN PAM
cggggcacaagcccugaagu

SEQ ID NO: 23609 - RNA, 20 nt, Artificial Sequence
  spacer sequence CTCN PAM
cgcagggcgagcccacagug

SEQ ID NO: 23610 - RNA, 20 nt, Artificial Sequence
  spacer sequence CTCN PAM
cccugcgggaggcucucggg

SEQ ID NO: 23611 - RNA, 20 nt, Artificial Sequence
  spacer sequence CTCN PAM
ggacgccaccacugugggcu

SEQ ID NO: 23612 - RNA, 20 nt, Artificial Sequence
  spacer sequence CTCN PAM
aggaagaucggggcaggcag

SEQ ID NO: 23613 - RNA, 20 nt, Artificial Sequence
  spacer sequence CTCN PAM
cacacugaacaaacagguuu

SEQ ID NO: 23614 - RNA, 20 nt, Artificial Sequence
  spacer sequence CTCN PAM
ucccacacugaacaaacagg

SEQ ID NO: 23615 - RNA, 20 nt, Artificial Sequence
  spacer sequence CTCN PAM
cuccucccacacugaacaaa

SEQ ID NO: 23616 - RNA, 20 nt, Artificial Sequence
  spacer sequence CTCN PAM
cccuccucccacacugaaca

SEQ ID NO: 23617 - RNA, 20 nt, Artificial Sequence
  spacer sequence CTCN PAM
ucccugcuucugugggccug

SEQ ID NO: 23618 - RNA, 20 nt, Artificial Sequence
  spacer sequence CTCN PAM
agcuggaaagcaggcccaca

SEQ ID NO: 23619 - RNA, 20 nt, Artificial Sequence
  spacer sequence CTCN PAM
gcuuccaucgggugguccuu

SEQ ID NO: 23620 - RNA, 20 nt, Artificial Sequence
  spacer sequence CTCN PAM
aggaccacccgauggaagcu

SEQ ID NO: 23621 - RNA, 20 nt, Artificial Sequence
  spacer sequence CTCN PAM
ucugcaguuccuagggggcu

SEQ ID NO: 23622 - RNA, 20 nt, Artificial Sequence
  spacer sequence CTCN PAM
gcaguuccuagggggcuccu

SEQ ID NO: 23623 - RNA, 20 nt, Artificial Sequence
  spacer sequence CTCN PAM
ugggcugggacguugaagcc

SEQ ID NO: 23624 - RNA, 20 nt, Artificial Sequence
  spacer sequence CTCN PAM
cgcaggcuucaaguccuggc

SEQ ID NO: 23625 - RNA, 20 nt, Artificial Sequence
  spacer sequence CTCN PAM
ugcugggugcaggcccuggu

SEQ ID NO: 23626 - RNA, 20 nt, Artificial Sequence
  spacer sequence CTCN PAM
uaccagggccugcacccagc

SEQ ID NO: 23627 - RNA, 20 nt, Artificial Sequence
  spacer sequence CTCN PAM
cccccaccaccagggagccc

SEQ ID NO: 23628 - RNA, 20 nt, Artificial Sequence
  spacer sequence CTCN PAM
cugguggugggggggagggg

SEQ ID NO: 23629 - RNA, 20 nt, Artificial Sequence
  spacer sequence CTCN PAM
gcugaccugggcccacaccu

SEQ ID NO: 23630 - RNA, 20 nt, Artificial Sequence
  spacer sequence CTCN PAM
guccugggcuaaaggacagc

SEQ ID NO: 23631 - RNA, 20 nt, Artificial Sequence
  spacer sequence CTCN PAM
uguucagugugggguuaaag

SEQ ID NO: 23632 - RNA, 20 nt, Artificial Sequence
  spacer sequence CTCN PAM
ugggguaccuggcagcugcu

SEQ ID NO: 23633 - RNA, 20 nt, Artificial Sequence
  spacer sequence CTCN PAM
acugccuucacagcagcugc

SEQ ID NO: 23634 - RNA, 20 nt, Artificial Sequence
  spacer sequence CTCN PAM
ugucuccugguugcugcccu

SEQ ID NO: 23635 - RNA, 20 nt, Artificial Sequence
  spacer sequence CTCN PAM
ugguugcugcccuguggagc

SEQ ID NO: 23636 - RNA, 20 nt, Artificial Sequence
  spacer sequence CTCN PAM
acagggcagcaaccaggaga

SEQ ID NO: 23637 - RNA, 20 nt, Artificial Sequence
  spacer sequence CTCN PAM
gagccuccaggugucccuuc

SEQ ID NO: 23638 - RNA, 20 nt, Artificial Sequence
  spacer sequence CTCN PAM
gaggcuccacagggcagcaa

SEQ ID NO: 23639 - RNA, 20 nt, Artificial Sequence
  spacer sequence CTCN PAM
aggugucccuuccguucugc

SEQ ID NO: 23640 - RNA, 20 nt, Artificial Sequence
  spacer sequence CTCN PAM
acggcgccccagcagaacgg

SEQ ID NO: 23641 - RNA, 20 nt, Artificial Sequence
  spacer sequence CTCN PAM
gcucaacggcgccccagcag

SEQ ID NO: 23642 - RNA, 20 nt, Artificial Sequence
  spacer sequence CTCN PAM
augccugcccaggcggcaca

SEQ ID NO: 23643 - RNA, 20 nt, Artificial Sequence
  spacer sequence CTCN PAM
uucccaugggcaaguggccu

SEQ ID NO: 23644 - RNA, 20 nt, Artificial Sequence
  spacer sequence CTCN PAM
uggccgccugccugaagccc

SEQ ID NO: 23645 - RNA, 20 nt, Artificial Sequence
  spacer sequence CTCN PAM
gaggaagcggccccgcccac

SEQ ID NO: 23646 - RNA, 20 nt, Artificial Sequence
  spacer sequence CTCN PAM
gagcgguccucuuggccgcc

SEQ ID NO: 23647 - RNA, 20 nt, Artificial Sequence
  spacer sequence CTCN PAM
agucaaagacaggguccaag

SEQ ID NO: 23648 - RNA, 20 nt, Artificial Sequence
  spacer sequence CTCN PAM
caugugcuggcugcacaaac

SEQ ID NO: 23649 - RNA, 20 nt, Artificial Sequence
  spacer sequence CTCN PAM
ccagcuugggggaggaccag

SEQ ID NO: 23650 - RNA, 20 nt, Artificial Sequence
  spacer sequence CTCN PAM
agcuugggggaggaccagcc

SEQ ID NO: 23651 - RNA, 20 nt, Artificial Sequence
  spacer sequence CTCN PAM
cccaagcuggagaguggcca

SEQ ID NO: 23652 - RNA, 20 nt, Artificial Sequence
  spacer sequence CTCN PAM
ugggcucccccagccucuga

SEQ ID NO: 23653 - RNA, 20 nt, Artificial Sequence
  spacer sequence CTCN PAM
cccagccucugagcuggagg

SEQ ID NO: 23654 - RNA, 20 nt, Artificial Sequence
  spacer sequence CTCN PAM
gagcuggaggggagagcaga

SEQ ID NO: 23655 - RNA, 20 nt, Artificial Sequence
  spacer sequence CTCN PAM
gaggcugggggagcccagga

SEQ ID NO: 23656 - RNA, 20 nt, Artificial Sequence
  spacer sequence CTCN PAM
agcucagaggcugggggagc

SEQ ID NO: 23657 - RNA, 20 nt, Artificial Sequence
  spacer sequence CTCN PAM
ccuccagcucagaggcuggg

SEQ ID NO: 23658 - RNA, 20 nt, Artificial Sequence
  spacer sequence CTCN PAM
ccccuccagcucagaggcug

SEQ ID NO: 23659 - RNA, 20 nt, Artificial Sequence
  spacer sequence CTCN PAM
cacaggaagucgcuuccugu

SEQ ID NO: 23660 - RNA, 20 nt, Artificial Sequence
  spacer sequence CTCN PAM
aaccuucgccucccacagga

SEQ ID NO: 23661 - RNA, 20 nt, Artificial Sequence
  spacer sequence CTCN PAM
ggugcacccauccucccuuc

SEQ ID NO: 23662 - RNA, 20 nt, Artificial Sequence
  spacer sequence CTCN PAM
cuuccucccguccucccuuc

SEQ ID NO: 23663 - RNA, 20 nt, Artificial Sequence
  spacer sequence CTCN PAM
cguccucccuuccuccgguc

SEQ ID NO: 23664 - RNA, 20 nt, Artificial Sequence
  spacer sequence CTCN PAM
cuuccuccgguccuggcacu

SEQ ID NO: 23665 - RNA, 20 nt, Artificial Sequence
  spacer sequence CTCN PAM
gguccuggcacugcuguguu

SEQ ID NO: 23666 - RNA, 20 nt, Artificial Sequence
  spacer sequence CTCN PAM
gguggaaaccacgcgaucag

SEQ ID NO: 23667 - RNA, 20 nt, Artificial Sequence
  spacer sequence CTCN PAM
gaccccuuuccccugggccu

SEQ ID NO: 23668 - RNA, 20 nt, Artificial Sequence
  spacer sequence CTCN PAM
uagggggccccagacucuga

SEQ ID NO: 23669 - RNA, 20 nt, Artificial Sequence
  spacer sequence CTCN PAM
gaaagcgagaggacucgagg

SEQ ID NO: 23670 - RNA, 20 nt, Artificial Sequence
  spacer sequence CTCN PAM
cuuucagagucuggggcccc

SEQ ID NO: 23671 - RNA, 20 nt, Artificial Sequence
  spacer sequence CTCN PAM
cgcuuucagagucuggggcc

SEQ ID NO: 23672 - RNA, 20 nt, Artificial Sequence
  spacer sequence CTCN PAM
agggucuguuuucaguauuu

SEQ ID NO: 23673 - RNA, 20 nt, Artificial Sequence
  spacer sequence CTCN PAM
aguccucucgcuuucagagu

SEQ ID NO: 23674 - RNA, 20 nt, Artificial Sequence
  spacer sequence CTCN PAM
gggccgccgugacacuggac

SEQ ID NO: 23675 - RNA, 20 nt, Artificial Sequence
  spacer sequence CTCN PAM
gacccuaaagucuuggggac

SEQ ID NO: 23676 - RNA, 20 nt, Artificial Sequence
  spacer sequence CTCN PAM
ggguccacaggcccggcgcc

SEQ ID NO: 23677 - RNA, 20 nt, Artificial Sequence
  spacer sequence CTCN PAM
auugcuuguuuggugacgcc

SEQ ID NO: 23678 - RNA, 20 nt, Artificial Sequence
  spacer sequence CTCN PAM
gggcgucaccaaacaagcaa

SEQ ID NO: 23679 - RNA, 20 nt, Artificial Sequence
  spacer sequence CTCN PAM
caccaaucccacaagcacuc

SEQ ID NO: 23680 - RNA, 20 nt, Artificial Sequence
  spacer sequence CTCN PAM
gggcugcaguuagaggucuc

SEQ ID NO: 23681 - RNA, 20 nt, Artificial Sequence
  spacer sequence CTCN PAM
aacugcagcccugagucucc

SEQ ID NO: 23682 - RNA, 20 nt, Artificial Sequence
  spacer sequence CTCN PAM
uuggcaagggccagucccug

SEQ ID NO: 23683 - RNA, 20 nt, Artificial Sequence
  spacer sequence CTCN PAM
uugagcaggugccggagucu

SEQ ID NO: 23684 - RNA, 20 nt, Artificial Sequence
  spacer sequence CTCN PAM
aggaggauggggaacaggga

SEQ ID NO: 23685 - RNA, 20 nt, Artificial Sequence
  spacer sequence CTCN PAM
ggcaccugcucaaggaggau

SEQ ID NO: 23686 - RNA, 20 nt, Artificial Sequence
  spacer sequence CTCN PAM
cgaggcucuugccguccgcg

SEQ ID NO: 23687 - RNA, 20 nt, Artificial Sequence
  spacer sequence CTCN PAM
ggagacuccggcaccugcuc

SEQ ID NO: 23688 - RNA, 20 nt, Artificial Sequence
  spacer sequence CTCN PAM
ugccguccgcgucgggagga

SEQ ID NO: 23689 - RNA, 20 nt, Artificial Sequence
  spacer sequence CTCN PAM
cgacgcggacggcaagagcc

SEQ ID NO: 23690 - RNA, 20 nt, Artificial Sequence
  spacer sequence CTCN PAM
ucccgacgcggacggcaaga

SEQ ID NO: 23691 - RNA, 20 nt, Artificial Sequence
  spacer sequence CTCN PAM
aaagccccacagcugccucc

SEQ ID NO: 23692 - RNA, 20 nt, Artificial Sequence
  spacer sequence CTCN PAM
ggcagucuuccuuccaggaa

SEQ ID NO: 23693 - RNA, 20 nt, Artificial Sequence
  spacer sequence CTCN PAM
ugagccagggccagggcagg

SEQ ID NO: 23694 - RNA, 20 nt, Artificial Sequence
  spacer sequence CTCN PAM
agagcuuccuggaaggaaga

SEQ ID NO: 23695 - RNA, 20 nt, Artificial Sequence
  spacer sequence CTCN PAM
ugcccuggcccuggcucaag

SEQ ID NO: 23696 - RNA, 20 nt, Artificial Sequence
  spacer sequence CTCN PAM
acuccugcccuggcccuggc

SEQ ID NO: 23697 - RNA, 20 nt, Artificial Sequence
  spacer sequence CTCN PAM
acccacguucagcuccacuc

SEQ ID NO: 23698 - RNA, 20 nt, Artificial Sequence
  spacer sequence CTCN PAM
ccuccacccacguucagcuc

SEQ ID NO: 23699 - RNA, 20 nt, Artificial Sequence
  spacer sequence CTCN PAM
uaaggccgccuccccuccac

SEQ ID NO: 23700 - RNA, 20 nt, Artificial Sequence
  spacer sequence CTCN PAM
gggaggccagcguugguggg

SEQ ID NO: 23701 - RNA, 20 nt, Artificial Sequence
  spacer sequence CTCN PAM
ccgagccugcgcuuggucuu

SEQ ID NO: 23702 - RNA, 20 nt, Artificial Sequence
  spacer sequence CTCN PAM
uuggccaggugugggggcag

SEQ ID NO: 23703 - RNA, 20 nt, Artificial Sequence
  spacer sequence CTCN PAM
uugaccaggcaugggggugu

SEQ ID NO: 23704 - RNA, 20 nt, Artificial Sequence
  spacer sequence CTCN PAM
acacacccccaugccugguc

SEQ ID NO: 23705 - RNA, 20 nt, Artificial Sequence
  spacer sequence CTCN PAM
gacaacccccagcuccacac

SEQ ID NO: 23706 - RNA, 20 nt, Artificial Sequence
  spacer sequence CTCN PAM
uggccucaauccugauacgg

SEQ ID NO: 23707 - RNA, 20 nt, Artificial Sequence
  spacer sequence CTCN PAM
auccugauacgggagaugga

SEQ ID NO: 23708 - RNA, 20 nt, Artificial Sequence
  spacer sequence CTCN PAM
cguaucaggauugaggccaa

SEQ ID NO: 23709 - RNA, 20 nt, Artificial Sequence
  spacer sequence CTCN PAM
aucucccguaucaggauuga

SEQ ID NO: 23710 - RNA, 20 nt, Artificial Sequence
  spacer sequence CTCN PAM
uuuguucccugggauggccc

SEQ ID NO: 23711 - RNA, 20 nt, Artificial Sequence
  spacer sequence CTCN PAM
gcgccugcagaggcucgcuu

SEQ ID NO: 23712 - RNA, 20 nt, Artificial Sequence
  spacer sequence CTCN PAM
gcaggcgcugagggcagcaa

SEQ ID NO: 23713 - RNA, 20 nt, Artificial Sequence
  spacer sequence CTCN PAM
cuuugcagaccaagcgccug

SEQ ID NO: 23714 - RNA, 20 nt, Artificial Sequence
  spacer sequence CTCN PAM
aagguccucagacccgagcu

SEQ ID NO: 23715 - RNA, 20 nt, Artificial Sequence
  spacer sequence CTCN PAM
gacccgagcuuuguuuucug

SEQ ID NO: 23716 - RNA, 20 nt, Artificial Sequence
  spacer sequence CTCN PAM
ggucugaggaccuuggagca

SEQ ID NO: 23717 - RNA, 20 nt, Artificial Sequence
  spacer sequence CTCN PAM
uccaauuucacucuuugaau

SEQ ID NO: 23718 - RNA, 20 nt, Artificial Sequence
  spacer sequence CTCN PAM
aauuucacucuuugaauaaa

SEQ ID NO: 23719 - RNA, 20 nt, Artificial Sequence
  spacer sequence CTCN PAM
uugaauaaacgugugucuuc

SEQ ID NO: 23720 - RNA, 20 nt, Artificial Sequence
  spacer sequence CTCN PAM
ggacggcagacauccccccc

SEQ ID NO: 23721 - RNA, 20 nt, Artificial Sequence
  spacer sequence CTCN PAM
agaaacaaucuauucacugg

SEQ ID NO: 23722 - RNA, 20 nt, Artificial Sequence
  spacer sequence CTCN PAM
ccagaaacaaucuauucacu

SEQ ID NO: 23723 - RNA, 20 nt, Artificial Sequence
  spacer sequence CTCN PAM
aucacuucugaccuguccau

SEQ ID NO: 23724 - RNA, 20 nt, Artificial Sequence
  spacer sequence CTCN PAM
acagcggcuccaucacuucu

SEQ ID NO: 23725 - RNA, 20 nt, Artificial Sequence
  spacer sequence CTCN PAM
cccggcccuagucacggccg

SEQ ID NO: 23726 - RNA, 20 nt, Artificial Sequence
  spacer sequence CTCN PAM
cgcccagugauccgcuggua

SEQ ID NO: 23727 - RNA, 20 nt, Artificial Sequence
  spacer sequence CTCN PAM
aguccucagucucgcgugug

SEQ ID NO: 23728 - RNA, 20 nt, Artificial Sequence
  spacer sequence CTCN PAM
gucucgcgugugcagagacg

SEQ ID NO: 23729 - RNA, 20 nt, Artificial Sequence
  spacer sequence CTCN PAM
cgugugcagagacggagguc

SEQ ID NO: 23730 - RNA, 20 nt, Artificial Sequence
  spacer sequence CTCN PAM
gcacacgcgagacugaggac

SEQ ID NO: 23731 - RNA, 20 nt, Artificial Sequence
  spacer sequence CTCN PAM
gucucugcacacgcgagacu

SEQ ID NO: 23732 - RNA, 20 nt, Artificial Sequence
  spacer sequence CTCN PAM
uguuuuccagcccggaaaag

SEQ ID NO: 23733 - RNA, 20 nt, Artificial Sequence
  spacer sequence CTCN PAM
ccuguuuuccagcccggaaa

SEQ ID NO: 23734 - RNA, 20 nt, Artificial Sequence
  spacer sequence CTCN PAM
ucuccuguuuuccagcccgg

SEQ ID NO: 23735 - RNA, 20 nt, Artificial Sequence
  spacer sequence CTCN PAM
ugcgagagugagggaggcag

SEQ ID NO: 23736 - RNA, 20 nt, Artificial Sequence
  spacer sequence CTCN PAM
caggagccccuccucuccug

SEQ ID NO: 23737 - RNA, 20 nt, Artificial Sequence
  spacer sequence CTCN PAM
cgcaggagccccuccucucc

SEQ ID NO: 23738 - RNA, 20 nt, Artificial Sequence
  spacer sequence CTCN PAM
cucucgcaggagccccuccu

SEQ ID NO: 23739 - RNA, 20 nt, Artificial Sequence
  spacer sequence CTCN PAM
cucacucucgcaggagcccc

SEQ ID NO: 23740 - RNA, 20 nt, Artificial Sequence
  spacer sequence CTCN PAM
ugcgaggccaccagaaguga

SEQ ID NO: 23741 - RNA, 20 nt, Artificial Sequence
  spacer sequence CTCN PAM
caagagaaccaaauuauagc

SEQ ID NO: 23742 - RNA, 20 nt, Artificial Sequence
  spacer sequence CTCN PAM
cuucugguggccucgcaaga

SEQ ID NO: 23743 - RNA, 20 nt, Artificial Sequence
  spacer sequence CTCN PAM
auggaggggguccucugccc

SEQ ID NO: 23744 - RNA, 20 nt, Artificial Sequence
  spacer sequence CTCN PAM
auggagccagcccccccagc

SEQ ID NO: 23745 - RNA, 20 nt, Artificial Sequence
  spacer sequence CTCN PAM
gcccugcuggcugguggcug

SEQ ID NO: 23746 - RNA, 20 nt, Artificial Sequence
  spacer sequence CTCN PAM
gccaccagccagcagggcag

SEQ ID NO: 23747 - RNA, 20 nt, Artificial Sequence
  spacer sequence CTCN PAM
cugugcugccagcggcccug

SEQ ID NO: 23748 - RNA, 20 nt, Artificial Sequence
  spacer sequence CTCN PAM
gcuguggacguggccucacu

SEQ ID NO: 23749 - RNA, 20 nt, Artificial Sequence
  spacer sequence CTCN PAM
acggccaacucugcugugga

SEQ ID NO: 23750 - RNA, 20 nt, Artificial Sequence
  spacer sequence CTCN PAM
guagcugagagccucccagc

SEQ ID NO: 23751 - RNA, 20 nt, Artificial Sequence
  spacer sequence CTCN PAM
gcuacggagggcaccacgua

SEQ ID NO: 23752 - RNA, 20 nt, Artificial Sequence
  spacer sequence CTCN PAM
cagcuacggagggcaccacg

SEQ ID NO: 23753 - RNA, 20 nt, Artificial Sequence
  spacer sequence CTCN PAM
cagccccacacuggcugagu

SEQ ID NO: 23754 - RNA, 20 nt, Artificial Sequence
  spacer sequence CTCN PAM
gccaguguggggcugggagg

SEQ ID NO: 23755 - RNA, 20 nt, Artificial Sequence
  spacer sequence CTCN PAM
uuuuuccaaauucuggaagc

SEQ ID NO: 23756 - RNA, 20 nt, Artificial Sequence
  spacer sequence CTCN PAM
acgaccaaaacacugcuccu

SEQ ID NO: 23757 - RNA, 20 nt, Artificial Sequence
  spacer sequence CTCN PAM
ggcugcccugccguggaagu

SEQ ID NO: 23758 - RNA, 20 nt, Artificial Sequence
  spacer sequence CTCN PAM
cacuugggcugccugggguc

SEQ ID NO: 23759 - RNA, 20 nt, Artificial Sequence
  spacer sequence CTCN PAM
cuuccccaccggccggcccu

SEQ ID NO: 23760 - RNA, 20 nt, Artificial Sequence
  spacer sequence CTCN PAM
ggccuggugggaagugcagc

SEQ ID NO: 23761 - RNA, 20 nt, Artificial Sequence
  spacer sequence CTCN PAM
gcguugucccuucucuugca

SEQ ID NO: 23762 - RNA, 20 nt, Artificial Sequence
  spacer sequence CTCN PAM
ugcagcggggaucugacgag

SEQ ID NO: 23763 - RNA, 20 nt, Artificial Sequence
  spacer sequence CTCN PAM
ucagauccccgcugcaagag

SEQ ID NO: 23764 - RNA, 20 nt, Artificial Sequence
  spacer sequence CTCN PAM
acuugugucacuaacggacc

SEQ ID NO: 23765 - RNA, 20 nt, Artificial Sequence
  spacer sequence CTCN PAM
ugauaaacgguccguuagug

SEQ ID NO: 23766 - RNA, 20 nt, Artificial Sequence
  spacer sequence CTCN PAM
gcuucugcagguaaggccgg

SEQ ID NO: 23767 - RNA, 20 nt, Artificial Sequence
  spacer sequence CTCN PAM
gcccagggcaagacccgugg

SEQ ID NO: 23768 - RNA, 20 nt, Artificial Sequence
  spacer sequence CTCN PAM
acuuuccaucuccaacugca

SEQ ID NO: 23769 - RNA, 20 nt, Artificial Sequence
  spacer sequence CTCN PAM
aacugcaggggcccaugguc

SEQ ID NO: 23770 - RNA, 20 nt, Artificial Sequence
  spacer sequence CTCN PAM
cugcagagaauuuccaggga

SEQ ID NO: 23771 - RNA, 20 nt, Artificial Sequence
  spacer sequence CTCN PAM
gcagcgagaacuuggaccug

SEQ ID NO: 23772 - RNA, 20 nt, Artificial Sequence
  spacer sequence CTCN PAM
cuggaaauucucugcagcga

SEQ ID NO: 23773 - RNA, 20 nt, Artificial Sequence
  spacer sequence CTCN PAM
ugacaacccgcccacagguc

SEQ ID NO: 23774 - RNA, 20 nt, Artificial Sequence
  spacer sequence CTCN PAM
cgacagcuccugacaacccg

SEQ ID NO: 23775 - RNA, 20 nt, Artificial Sequence
  spacer sequence CTCN PAM
cgcgcugcugguucacaugc

SEQ ID NO: 23776 - RNA, 20 nt, Artificial Sequence
  spacer sequence CTCN PAM
cgcugcugguucacaugcac

SEQ ID NO: 23777 - RNA, 20 nt, Artificial Sequence
  spacer sequence CTCN PAM
uggggcucaggguuggucuc

SEQ ID NO: 23778 - RNA, 20 nt, Artificial Sequence
  spacer sequence CTCN PAM
ggguuggucuccguagcagg

SEQ ID NO: 23779 - RNA, 20 nt, Artificial Sequence
  spacer sequence CTCN PAM
guagcaggcagggcucuagg

SEQ ID NO: 23780 - RNA, 20 nt, Artificial Sequence
  spacer sequence CTCN PAM
agggggauagcagggaccuu

SEQ ID NO: 23781 - RNA, 20 nt, Artificial Sequence
  spacer sequence CTCN PAM
gugggcuccugcgaguuggu

SEQ ID NO: 23782 - RNA, 20 nt, Artificial Sequence
  spacer sequence CTCN PAM
ugcgaguuggugccugcauc

SEQ ID NO: 23783 - RNA, 20 nt, Artificial Sequence
  spacer sequence CTCN PAM
caggagcccacagaggaagg

SEQ ID NO: 23784 - RNA, 20 nt, Artificial Sequence
  spacer sequence CTCN PAM
uggcacccccuuuucagcaa

SEQ ID NO: 23785 - RNA, 20 nt, Artificial Sequence
  spacer sequence CTCN PAM
agagugauccacauccggaa

SEQ ID NO: 23786 - RNA, 20 nt, Artificial Sequence
  spacer sequence CTCN PAM
agaggggacgccugcacuuc

SEQ ID NO: 23787 - RNA, 20 nt, Artificial Sequence
  spacer sequence CTCN PAM
ccaucgacgucacggagggg

SEQ ID NO: 23788 - RNA, 20 nt, Artificial Sequence
  spacer sequence CTCN PAM
gugacgucgauggggagcuu

SEQ ID NO: 23789 - RNA, 20 nt, Artificial Sequence
  spacer sequence CTCN PAM
cuggggcugcccuuugggaa

SEQ ID NO: 23790 - RNA, 20 nt, Artificial Sequence
  spacer sequence CTCN PAM
ugaugcugaaggggaaaaac

SEQ ID NO: 23791 - RNA, 20 nt, Artificial Sequence
  spacer sequence CTCN PAM
gguaccugguuuuuccccuu

SEQ ID NO: 23792 - RNA, 20 nt, Artificial Sequence
  spacer sequence CTCN PAM
ggggugcucacaccgugcag

SEQ ID NO: 23793 - RNA, 20 nt, Artificial Sequence
  spacer sequence CTCN PAM
caccgugcaggcggggacga

SEQ ID NO: 23794 - RNA, 20 nt, Artificial Sequence
  spacer sequence CTCN PAM
uccccgccugcacgguguga

SEQ ID NO: 23795 - RNA, 20 nt, Artificial Sequence
  spacer sequence CTCN PAM
ucguccccgccugcacggug

SEQ ID NO: 23796 - RNA, 20 nt, Artificial Sequence
  spacer sequence CTCN PAM
cugccuccccaacaggccuu

SEQ ID NO: 23797 - RNA, 20 nt, Artificial Sequence
  spacer sequence CTCN PAM
ccaacaggccuucaucgaga

SEQ ID NO: 23798 - RNA, 20 nt, Artificial Sequence
  spacer sequence CTCN PAM
augaaggccuguuggggagg

SEQ ID NO: 23799 - RNA, 20 nt, Artificial Sequence
  spacer sequence CTCN PAM
guguucaucucgaugaaggc

SEQ ID NO: 23800 - RNA, 20 nt, Artificial Sequence
  spacer sequence CTCN PAM
uccguguucaucucgaugaa

SEQ ID NO: 23801 - RNA, 20 nt, Artificial Sequence
  spacer sequence CTCN PAM
gugaccccugugcugcgcgg

SEQ ID NO: 23802 - RNA, 20 nt, Artificial Sequence
  spacer sequence CTCN PAM
aaccacaaggagcugaagac

SEQ ID NO: 23803 - RNA, 20 nt, Artificial Sequence
  spacer sequence CTCN PAM
uugugguuggagaacuggau

SEQ ID NO: 23804 - RNA, 20 nt, Artificial Sequence
  spacer sequence CTCN PAM
cccaaccaggcggugcgugg

SEQ ID NO: 23805 - RNA, 20 nt, Artificial Sequence
  spacer sequence CTCN PAM
caaccaggcggugcguggcc

SEQ ID NO: 23806 - RNA, 20 nt, Artificial Sequence
  spacer sequence CTCN PAM
ggggugggcccagccgcagg

SEQ ID NO: 23807 - RNA, 20 nt, Artificial Sequence
  spacer sequence CTCN PAM
cggcugugccucccacagcg

SEQ ID NO: 23808 - RNA, 20 nt, Artificial Sequence
  spacer sequence CTCN PAM
cacagcgggcccaggcggcc

SEQ ID NO: 23809 - RNA, 20 nt, Artificial Sequence
  spacer sequence CTCN PAM
guccagucggggaaccuggc

SEQ ID NO: 23810 - RNA, 20 nt, Artificial Sequence
  spacer sequence CTCN PAM
gcggcggccguggacgcagg

SEQ ID NO: 23811 - RNA, 20 nt, Artificial Sequence
  spacer sequence CTCN PAM
gcccggccaucgccaucccu

SEQ ID NO: 23812 - RNA, 20 nt, Artificial Sequence
  spacer sequence CTCN PAM
ggaucaucguggagaaccuc

SEQ ID NO: 23813 - RNA, 20 nt, Artificial Sequence
  spacer sequence CTCN PAM
acgaugauccugagcacggg

SEQ ID NO: 23814 - RNA, 20 nt, Artificial Sequence
  spacer sequence CTCN PAM
ucuacccugugacccuggau

SEQ ID NO: 23815 - RNA, 20 nt, Artificial Sequence
  spacer sequence CTCN PAM
ccuggugcagcacauccagg

SEQ ID NO: 23816 - RNA, 20 nt, Artificial Sequence
  spacer sequence CTCN PAM
cgugugccugugcccacagc

SEQ ID NO: 23817 - RNA, 20 nt, Artificial Sequence
  spacer sequence CTCN PAM
ugcccggugcccaccagccc

SEQ ID NO: 23818 - RNA, 20 nt, Artificial Sequence
  spacer sequence CTCN PAM
ugcuguggcccgggaccugc

SEQ ID NO: 23819 - RNA, 20 nt, Artificial Sequence
  spacer sequence CTCN PAM
aaguucggcacaguguugaa

SEQ ID NO: 23820 - RNA, 20 nt, Artificial Sequence
  spacer sequence CTCN PAM
cgggguccgcauacugcagc

SEQ ID NO: 23821 - RNA, 20 nt, Artificial Sequence
  spacer sequence CTCN PAM
ccagcuuggcgugcugggcg

SEQ ID NO: 23822 - RNA, 20 nt, Artificial Sequence
  spacer sequence CTCN PAM
cgggacggcgcccgcccugg

SEQ ID NO: 23823 - RNA, 20 nt, Artificial Sequence
  spacer sequence CTCN PAM
cggucccucuccccucaguc

SEQ ID NO: 23824 - RNA, 20 nt, Artificial Sequence
  spacer sequence CTCN PAM
ccccucagucgcuggacggg

SEQ ID NO: 23825 - RNA, 20 nt, Artificial Sequence
  spacer sequence CTCN PAM
ccucagucgcuggacgggca

SEQ ID NO: 23826 - RNA, 20 nt, Artificial Sequence
  spacer sequence CTCN PAM
gucgcuggacgggcagaaca

SEQ ID NO: 23827 - RNA, 20 nt, Artificial Sequence
  spacer sequence CTCN PAM
ccagccucaacgucaaguac

SEQ ID NO: 23828 - RNA, 20 nt, Artificial Sequence
  spacer sequence CTCN PAM
acgucaaguacaacaaugac

SEQ ID NO: 23829 - RNA, 20 nt, Artificial Sequence
  spacer sequence CTCN PAM
ugucauuguuguacuugacg

SEQ ID NO: 23830 - RNA, 20 nt, Artificial Sequence
  spacer sequence CTCN PAM
cuggaccagaccauggccgc

SEQ ID NO: 23831 - RNA, 20 nt, Artificial Sequence
  spacer sequence CTCN PAM
uaccgaaggccgcggccaug

SEQ ID NO: 23832 - RNA, 20 nt, Artificial Sequence
  spacer sequence CTCN PAM
gcacacuggcgccgcgucgg

SEQ ID NO: 23833 - RNA, 20 nt, Artificial Sequence
  spacer sequence CTCN PAM
guccggagccccggcggcac

SEQ ID NO: 23834 - RNA, 20 nt, Artificial Sequence
  spacer sequence CTCN PAM
ggacugagcggcccuaauag

SEQ ID NO: 23835 - RNA, 20 nt, Artificial Sequence
  spacer sequence CTCN PAM
cugcacggccagcacagcac

SEQ ID NO: 23836 - RNA, 20 nt, Artificial Sequence
  spacer sequence CTCN PAM
gcacggccagcacagcacgg

SEQ ID NO: 23837 - RNA, 20 nt, Artificial Sequence
  spacer sequence CTCN PAM
agggggggccguggucccga

SEQ ID NO: 23838 - RNA, 20 nt, Artificial Sequence
  spacer sequence CTCN PAM
gccggggccgcccgccggcc

SEQ ID NO: 23839 - RNA, 20 nt, Artificial Sequence
  spacer sequence CTCN PAM
cgguggagguugugggugcg

SEQ ID NO: 23840 - RNA, 20 nt, Artificial Sequence
  spacer sequence CTCN PAM
accgcgagcgggcgcugugc

SEQ ID NO: 23841 - RNA, 20 nt, Artificial Sequence
  spacer sequence CTCN PAM
uuuauuucuaggugcaccug

SEQ ID NO: 23842 - RNA, 20 nt, Artificial Sequence
  spacer sequence CTCN PAM
gccucuccguaugcaggagc

SEQ ID NO: 23843 - RNA, 20 nt, Artificial Sequence
  spacer sequence CTCN PAM
ccguaugcaggagcugguuu

SEQ ID NO: 23844 - RNA, 20 nt, Artificial Sequence
  spacer sequence CTCN PAM
guaugcaggagcugguuucc

SEQ ID NO: 23845 - RNA, 20 nt, Artificial Sequence
  spacer sequence CTCN PAM
ugcauacggagaggcugaga

SEQ ID NO: 23846 - RNA, 20 nt, Artificial Sequence
  spacer sequence CTCN PAM
caccuuugccauuccucaag

SEQ ID NO: 23847 - RNA, 20 nt, Artificial Sequence
  spacer sequence CTCN PAM
agcugcagguauucaaacgc

SEQ ID NO: 23848 - RNA, 20 nt, Artificial Sequence
  spacer sequence CTCN PAM
gcauccacggcggcagccug

SEQ ID NO: 23849 - RNA, 20 nt, Artificial Sequence
  spacer sequence CTCN PAM
agugccaggucaggggcccu

SEQ ID NO: 23850 - RNA, 20 nt, Artificial Sequence
  spacer sequence CTCN PAM
agugcccaguccgcccaggc

SEQ ID NO: 23851 - RNA, 20 nt, Artificial Sequence
  spacer sequence CTCN PAM
cgggaagggccccugaccug

SEQ ID NO: 23852 - RNA, 20 nt, Artificial Sequence
  spacer sequence CTCN PAM
cccgggaagggccccugacc

SEQ ID NO: 23853 - RNA, 20 nt, Artificial Sequence
  spacer sequence CTCN PAM
guggacguggcguccccucu

SEQ ID NO: 23854 - RNA, 20 nt, Artificial Sequence
  spacer sequence CTCN PAM
acagcccuguccuaccacug

SEQ ID NO: 23855 - RNA, 20 nt, Artificial Sequence
  spacer sequence CTCN PAM
gggcgagcgcgaggaccgcc

SEQ ID NO: 23856 - RNA, 20 nt, Artificial Sequence
  spacer sequence CTCN PAM
cccggaggugcuugaaggga

SEQ ID NO: 23857 - RNA, 20 nt, Artificial Sequence
  spacer sequence CTCN PAM
cgcucgcccggaggugcuug

SEQ ID NO: 23858 - RNA, 20 nt, Artificial Sequence
  spacer sequence CTCN PAM
aaccacuggcgguccucgcg

SEQ ID NO: 23859 - RNA, 20 nt, Artificial Sequence
  spacer sequence CTCN PAM
aguaguugaauuugaguggc

SEQ ID NO: 23860 - RNA, 20 nt, Artificial Sequence
  spacer sequence CTCN PAM
aauucaacuacuagagacau

SEQ ID NO: 23861 - RNA, 20 nt, Artificial Sequence
  spacer sequence CTCN PAM
ggccgcgcgcuuaccaggcc

SEQ ID NO: 23862 - RNA, 20 nt, Artificial Sequence
  spacer sequence CTCN PAM
gccucgggccgcgcgcuuac

SEQ ID NO: 23863 - RNA, 20 nt, Artificial Sequence
  spacer sequence CTCN PAM
cgcuucccuucugggaccgg

SEQ ID NO: 23864 - RNA, 20 nt, Artificial Sequence
  spacer sequence CTCN PAM
guccacggccagcacugggg

SEQ ID NO: 23865 - RNA, 20 nt, Artificial Sequence
  spacer sequence CTCN PAM
ucugcauggaggcaugggcg

SEQ ID NO: 23866 - RNA, 20 nt, Artificial Sequence
  spacer sequence CTCN PAM
augcagacgaggcggccgcc

SEQ ID NO: 23867 - RNA, 20 nt, Artificial Sequence
  spacer sequence CTCN PAM
gcaagcagggcccgucccgg

SEQ ID NO: 23868 - RNA, 20 nt, Artificial Sequence
  spacer sequence CTCN PAM
gccagcacagacacggggcc

SEQ ID NO: 23869 - RNA, 20 nt, Artificial Sequence
  spacer sequence CTCN PAM
ggcuccgccagcacagacac

SEQ ID NO: 23870 - RNA, 20 nt, Artificial Sequence
  spacer sequence CTCN PAM
ucugcaugcgccccgcccac

SEQ ID NO: 23871 - RNA, 20 nt, Artificial Sequence
  spacer sequence CTCN PAM
cagcacgggccgggccgggc

SEQ ID NO: 23872 - RNA, 20 nt, Artificial Sequence
  spacer sequence CTCN PAM
ucacagcacgggccgggccg

SEQ ID NO: 23873 - RNA, 20 nt, Artificial Sequence
  spacer sequence CTCN PAM
ccucacagcacgggccgggc

SEQ ID NO: 23874 - RNA, 20 nt, Artificial Sequence
  spacer sequence CTCN PAM
ugcaccagcgcccgccucuc

SEQ ID NO: 23875 - RNA, 20 nt, Artificial Sequence
  spacer sequence CTCN PAM
ggcccuacccugggugccug

SEQ ID NO: 23876 - RNA, 20 nt, Artificial Sequence
  spacer sequence CTCN PAM
cgcgcggcucggcuccucgg

SEQ ID NO: 23877 - RNA, 20 nt, Artificial Sequence
  spacer sequence CTCN PAM
gcuccucggugcaugaggac

SEQ ID NO: 23878 - RNA, 20 nt, Artificial Sequence
  spacer sequence CTCN PAM
ucggugcaugaggacgggga

SEQ ID NO: 23879 - RNA, 20 nt, Artificial Sequence
  spacer sequence CTCN PAM
gugcaugaggacggggagcg

SEQ ID NO: 23880 - RNA, 20 nt, Artificial Sequence
  spacer sequence CTCN PAM
ugcaccgaggagccgagccg

SEQ ID NO: 23881 - RNA, 20 nt, Artificial Sequence
  spacer sequence CTCN PAM
ccguccucaugcaccgagga

SEQ ID NO: 23882 - RNA, 20 nt, Artificial Sequence
  spacer sequence CTCN PAM
cccacucugcgguggagucg

SEQ ID NO: 23883 - RNA, 20 nt, Artificial Sequence
  spacer sequence CTCN PAM
cacucugcgguggagucggg

SEQ ID NO: 23884 - RNA, 20 nt, Artificial Sequence
  spacer sequence CTCN PAM
gcgguggagucgggggcgcc

SEQ ID NO: 23885 - RNA, 20 nt, Artificial Sequence
  spacer sequence CTCN PAM
accgcagagugggagaggcc

SEQ ID NO: 23886 - RNA, 20 nt, Artificial Sequence
  spacer sequence CTCN PAM
ucucaccuccugcuuuucca

SEQ ID NO: 23887 - RNA, 20 nt, Artificial Sequence
  spacer sequence CTCN PAM
ccuccugcuuuuccaggccu

SEQ ID NO: 23888 - RNA, 20 nt, Artificial Sequence
  spacer sequence CTCN PAM
ugcuuuuccaggccuuuccg

SEQ ID NO: 23889 - RNA, 20 nt, Artificial Sequence
  spacer sequence CTCN PAM
gcggcggcggcagcugcggc

SEQ ID NO: 23890 - RNA, 20 nt, Artificial Sequence
  spacer sequence CTCN PAM
acccagagguacgugggcuu

SEQ ID NO: 23891 - RNA, 20 nt, Artificial Sequence
  spacer sequence CTCN PAM
ggguugagguugcugaccag

SEQ ID NO: 23892 - RNA, 20 nt, Artificial Sequence
  spacer sequence CTCN PAM
gcgccgccguuccucccgga

SEQ ID NO: 23893 - RNA, 20 nt, Artificial Sequence
  spacer sequence CTCN PAM
cggaagagcgagcaggggau

SEQ ID NO: 23894 - RNA, 20 nt, Artificial Sequence
  spacer sequence CTCN PAM
uccgggaggaacggcggcgc

SEQ ID NO: 23895 - RNA, 20 nt, Artificial Sequence
  spacer sequence CTCN PAM
cucuuccgggaggaacggcg

SEQ ID NO: 23896 - RNA, 20 nt, Artificial Sequence
  spacer sequence CTCN PAM
ggcucgggucccggagcagc

SEQ ID NO: 23897 - RNA, 20 nt, Artificial Sequence
  spacer sequence CTCN PAM
ggucccggagcagcgccgcc

SEQ ID NO: 23898 - RNA, 20 nt, Artificial Sequence
  spacer sequence CTCN PAM
gggacccgagcccgagcaca

SEQ ID NO: 23899 - RNA, 20 nt, Artificial Sequence
  spacer sequence CTCN PAM
cugugucugcgccucugccc

SEQ ID NO: 23900 - RNA, 20 nt, Artificial Sequence
  spacer sequence CTCN PAM
gcccuggcagccccucugcu

SEQ ID NO: 23901 - RNA, 20 nt, Artificial Sequence
  spacer sequence CTCN PAM
gcugcagcgcugagacccuc

SEQ ID NO: 23902 - RNA, 20 nt, Artificial Sequence
  spacer sequence CTCN PAM
gcgcugcagcagaggggcug

SEQ ID NO: 23903 - RNA, 20 nt, Artificial Sequence
  spacer sequence CTCN PAM
uuuuccaagauggcuugagu

SEQ ID NO: 23904 - RNA, 20 nt, Artificial Sequence
  spacer sequence CTCN PAM
agccaucuuggaaaaggagg

SEQ ID NO: 23905 - RNA, 20 nt, Artificial Sequence
  spacer sequence CTCN PAM
uuuccugaauucacaucuug

SEQ ID NO: 23906 - RNA, 20 nt, Artificial Sequence
  spacer sequence CTCN PAM
ugcaugauacgcagaaugaa

SEQ ID NO: 23907 - RNA, 20 nt, Artificial Sequence
  spacer sequence CTCN PAM
aaguaauuuuuagauugccu

SEQ ID NO: 23908 - RNA, 20 nt, Artificial Sequence
  spacer sequence CTCN PAM
gcuccaaguaauuuuuagau

SEQ ID NO: 23909 - RNA, 20 nt, Artificial Sequence
  spacer sequence CTCN PAM
gaacugcgcgcccugcucag

SEQ ID NO: 23910 - RNA, 20 nt, Artificial Sequence
  spacer sequence CTCN PAM
agagccugucacuuaacugg

SEQ ID NO: 23911 - RNA, 20 nt, Artificial Sequence
  spacer sequence CTCN PAM
agccacaggggcugcccaca

SEQ ID NO: 23912 - RNA, 20 nt, Artificial Sequence
  spacer sequence CTCN PAM
cgagccacaggggcugccca

SEQ ID NO: 23913 - RNA, 20 nt, Artificial Sequence
  spacer sequence CTCN PAM
gggagagcuugggugaaaca

SEQ ID NO: 23914 - RNA, 20 nt, Artificial Sequence
  spacer sequence CTCN PAM
ccgaggggaauuuaaccauu

SEQ ID NO: 23915 - RNA, 20 nt, Artificial Sequence
  spacer sequence CTCN PAM
ccccgaggggaauuuaacca

SEQ ID NO: 23916 - RNA, 20 nt, Artificial Sequence
  spacer sequence CTCN PAM
uguuucacccaagcucuccc

SEQ ID NO: 23917 - RNA, 20 nt, Artificial Sequence
  spacer sequence CTCN PAM
ugauggaugggauccuccug

SEQ ID NO: 23918 - RNA, 20 nt, Artificial Sequence
  spacer sequence CTCN PAM
uggaaucagcauuucaggcu

SEQ ID NO: 23919 - RNA, 20 nt, Artificial Sequence
  spacer sequence CTCN PAM
ugugacuuccucaaggcggu

SEQ ID NO: 23920 - RNA, 20 nt, Artificial Sequence
  spacer sequence CTCN PAM
aggcggugcccagccuggcc

SEQ ID NO: 23921 - RNA, 20 nt, Artificial Sequence
  spacer sequence CTCN PAM
cucgcgggggcccaggacgc

SEQ ID NO: 23922 - RNA, 20 nt, Artificial Sequence
  spacer sequence CTCN PAM
cgggggcccaggacgcacuc

SEQ ID NO: 23923 - RNA, 20 nt, Artificial Sequence
  spacer sequence CTCN PAM
cugccugugccucuuaccac

SEQ ID NO: 23924 - RNA, 20 nt, Artificial Sequence
  spacer sequence CTCN PAM
uaccacgagccgggugcugu

SEQ ID NO: 23925 - RNA, 20 nt, Artificial Sequence
  spacer sequence CTCN PAM
ugguaagaggcacaggcagg

SEQ ID NO: 23926 - RNA, 20 nt, Artificial Sequence
  spacer sequence CTCN PAM
agcuccuccugagcgaggcc

SEQ ID NO: 23927 - RNA, 20 nt, Artificial Sequence
  spacer sequence CTCN PAM
uccugagcgaggccgugcac

SEQ ID NO: 23928 - RNA, 20 nt, Artificial Sequence
  spacer sequence CTCN PAM
ugagcgaggccgugcacuaa

SEQ ID NO: 23929 - RNA, 20 nt, Artificial Sequence
  spacer sequence CTCN PAM
ggaggagcuggagggacagc

SEQ ID NO: 23930 - RNA, 20 nt, Artificial Sequence
  spacer sequence CTCN PAM
cucaggaggagcuggaggga

SEQ ID NO: 23931 - RNA, 20 nt, Artificial Sequence
  spacer sequence CTCN PAM
aucucccuucacgccuguaa

SEQ ID NO: 23932 - RNA, 20 nt, Artificial Sequence
  spacer sequence CTCN PAM
cuucacgccuguaaucgucc

SEQ ID NO: 23933 - RNA, 20 nt, Artificial Sequence
  spacer sequence CTCN PAM
aaggacgauuacaggcguga

SEQ ID NO: 23934 - RNA, 20 nt, Artificial Sequence
  spacer sequence CTCN PAM
cgcagcuguggcacaaguca

SEQ ID NO: 23935 - RNA, 20 nt, Artificial Sequence
  spacer sequence CTCN PAM
gccaagcccugcagcagcgc

SEQ ID NO: 23936 - RNA, 20 nt, Artificial Sequence
  spacer sequence CTCN PAM
cggccaccucagccaagccc

SEQ ID NO: 23937 - RNA, 20 nt, Artificial Sequence
  spacer sequence CTCN PAM
gcucgcggccaccucagcca

SEQ ID NO: 23938 - RNA, 20 nt, Artificial Sequence
  spacer sequence CTCN PAM
uggggggcgugguugggauc

SEQ ID NO: 23939 - RNA, 20 nt, Artificial Sequence
  spacer sequence CTCN PAM
cagaagccgaucccaaccac

SEQ ID NO: 23940 - RNA, 20 nt, Artificial Sequence
  spacer sequence CTCN PAM
agcagcgcugucucugccgg

SEQ ID NO: 23941 - RNA, 20 nt, Artificial Sequence
  spacer sequence CTCN PAM
gccggcaugugagugaaggu

SEQ ID NO: 23942 - RNA, 20 nt, Artificial Sequence
  spacer sequence CTCN PAM
caugccggcagagacagcgc

SEQ ID NO: 23943 - RNA, 20 nt, Artificial Sequence
  spacer sequence CTCN PAM
uaccgugugcccgucgaggu

SEQ ID NO: 23944 - RNA, 20 nt, Artificial Sequence
  spacer sequence CTCN PAM
acgggcacacgguaagagaa

SEQ ID NO: 23945 - RNA, 20 nt, Artificial Sequence
  spacer sequence CTCN PAM
acacacauuccaguuacagg

SEQ ID NO: 23946 - RNA, 20 nt, Artificial Sequence
  spacer sequence CTCN PAM
ccuuccccuuucccuauuuu

SEQ ID NO: 23947 - RNA, 20 nt, Artificial Sequence
  spacer sequence CTCN PAM
aacccugcucuccggaaacc

SEQ ID NO: 23948 - RNA, 20 nt, Artificial Sequence
  spacer sequence CTCN PAM
ccggaaaccaaccugcccuu

SEQ ID NO: 23949 - RNA, 20 nt, Artificial Sequence
  spacer sequence CTCN PAM
ggaaaccaaccugcccuuga

SEQ ID NO: 23950 - RNA, 20 nt, Artificial Sequence
  spacer sequence CTCN PAM
uguggacgauuggcaacucg

SEQ ID NO: 23951 - RNA, 20 nt, Artificial Sequence
  spacer sequence CTCN PAM
ccccccuugaccucucccuc

SEQ ID NO: 23952 - RNA, 20 nt, Artificial Sequence
  spacer sequence CTCN PAM
cccucuccccugucccuccg

SEQ ID NO: 23953 - RNA, 20 nt, Artificial Sequence
  spacer sequence CTCN PAM
cucuccccugucccuccgcu

SEQ ID NO: 23954 - RNA, 20 nt, Artificial Sequence
  spacer sequence CTCN PAM
ccccugucccuccgcugccu

SEQ ID NO: 23955 - RNA, 20 nt, Artificial Sequence
  spacer sequence CTCN PAM
ccugucccuccgcugccuug

SEQ ID NO: 23956 - RNA, 20 nt, Artificial Sequence
  spacer sequence CTCN PAM
gcugccuugcucugcugucu

SEQ ID NO: 23957 - RNA, 20 nt, Artificial Sequence
  spacer sequence CTCN PAM
gcugucucuaaagagaguca

SEQ ID NO: 23958 - RNA, 20 nt, Artificial Sequence
  spacer sequence CTCN PAM
aaagagagucacaccccaaa

SEQ ID NO: 23959 - RNA, 20 nt, Artificial Sequence
  spacer sequence CTCN PAM
uuagagacagcagagcaagg

SEQ ID NO: 23960 - RNA, 20 nt, Artificial Sequence
  spacer sequence CTCN PAM
cuuuagagacagcagagcaa

SEQ ID NO: 23961 - RNA, 20 nt, Artificial Sequence
  spacer sequence CTCN PAM
uuauucuuuucgguauguua

SEQ ID NO: 23962 - RNA, 20 nt, Artificial Sequence
  spacer sequence CTCN PAM
auuaaugaaaacaagguaau

SEQ ID NO: 23963 - RNA, 20 nt, Artificial Sequence
  spacer sequence CTCN PAM
gggcaucaaaaucaucucaa

SEQ ID NO: 23964 - RNA, 20 nt, Artificial Sequence
  spacer sequence CTCN PAM
uaauacgucucagggcauca

SEQ ID NO: 23965 - RNA, 20 nt, Artificial Sequence
  spacer sequence CTCN PAM
gaugcuccguggcauccgcc

SEQ ID NO: 23966 - RNA, 20 nt, Artificial Sequence
  spacer sequence CTCN PAM
guggcauccgccucguuuua

SEQ ID NO: 23967 - RNA, 20 nt, Artificial Sequence
  spacer sequence CTCN PAM
uuuuaugguuugcuuucggu

SEQ ID NO: 23968 - RNA, 20 nt, Artificial Sequence
  spacer sequence CTCN PAM
gaaaagcaugcagggcgaua

SEQ ID NO: 23969 - RNA, 20 nt, Artificial Sequence
  spacer sequence CTCN PAM
guucagcaaagucauagcau

SEQ ID NO: 23970 - RNA, 20 nt, Artificial Sequence
  spacer sequence CTCN PAM
uguuagcgcgcccuguggcu

SEQ ID NO: 23971 - RNA, 20 nt, Artificial Sequence
  spacer sequence CTCN PAM
cagccacagggcgcgcuaac

SEQ ID NO: 23972 - RNA, 20 nt, Artificial Sequence
  spacer sequence CTCN PAM
gcaguggccgauaaagcaaa

SEQ ID NO: 23973 - RNA, 20 nt, Artificial Sequence
  spacer sequence CTCN PAM
gcccggccggguuugcuuua

SEQ ID NO: 23974 - RNA, 20 nt, Artificial Sequence
  spacer sequence CTCN PAM
ccgucagccccggccccgcg

SEQ ID NO: 23975 - RNA, 20 nt, Artificial Sequence
  spacer sequence CTCN PAM
ugcugccugccccgcccauc

SEQ ID NO: 23976 - RNA, 20 nt, Artificial Sequence
  spacer sequence CTCN PAM
ggccccaucccugggcuuuu

SEQ ID NO: 23977 - RNA, 20 nt, Artificial Sequence
  spacer sequence CTCN PAM
uucuuauugaacaggaucuu

SEQ ID NO: 23978 - RNA, 20 nt, Artificial Sequence
  spacer sequence CTCN PAM
uacccagcugggccugguug

SEQ ID NO: 23979 - RNA, 20 nt, Artificial Sequence
  spacer sequence CTCN PAM
accccggggccgccccggcc

SEQ ID NO: 23980 - RNA, 20 nt, Artificial Sequence
  spacer sequence CTCN PAM
cgggcgccuggucacgcggg

SEQ ID NO: 23981 - RNA, 20 nt, Artificial Sequence
  spacer sequence CTCN PAM
ggcgccuggucacgcgggug

SEQ ID NO: 23982 - RNA, 20 nt, Artificial Sequence
  spacer sequence CTCN PAM
cccagccaugagccaccuga

SEQ ID NO: 23983 - RNA, 20 nt, Artificial Sequence
  spacer sequence CTCN PAM
uggcugggggagcagcaccc

SEQ ID NO: 23984 - RNA, 20 nt, Artificial Sequence
  spacer sequence CTCN PAM
cgaagcaccagaacgugcag

SEQ ID NO: 23985 - RNA, 20 nt, Artificial Sequence
  spacer sequence CTCN PAM
aagcaccagaacgugcagcu

SEQ ID NO: 23986 - RNA, 20 nt, Artificial Sequence
  spacer sequence CTCN PAM
cggggcagcugcacguucug

SEQ ID NO: 23987 - RNA, 20 nt, Artificial Sequence
  spacer sequence CTCN PAM
uggcccucgcggggcagcug

SEQ ID NO: 23988 - RNA, 20 nt, Artificial Sequence
  spacer sequence CTCN PAM
ccccugcaccgcuucaagaa

(The sequence listing continues in the following parts.)

What is claimed is:

1. A system comprising a Class 2, Type V CRISPR protein and a first guide ribonucleic acid (gRNA), wherein the gRNA comprises a targeting sequence complementary to a polypyrimidine tract-binding protein 1 (PTBP1) gene target nucleic acid sequence.

2. The system of claim 1, wherein the gRNA comprises a targeting sequence complementary to a target nucleic acid sequence selected from the group consisting of:
a. a PTBP1 intron;
b. a PTBP1 exon;
c. a PTBP1 intron-exon junction;
d. a PTBP1 regulatory element; and
e. an intergenic region.

3. The system of claim 1 or claim 2, wherein the PTBP1 gene comprises a wild-type sequence.

4. The system of any one of claims 1-3, wherein the gRNA is a guide RNA (gRNA).

5. The system of any one of claims 1-3, wherein the gRNA is a chimera comprising DNA and RNA.

6. The system of any one of claims 1-5, wherein the gRNA is a single-molecule gRNA (sgRNA).

7. The system of any one of claims 1-5, wherein the gRNA is a dual-molecule gRNA (dgRNA).

8. The system of any one of claims 1-7, wherein the targeting sequence of the gRNA comprises a sequence selected from the group consisting of the sequences of SEQ ID NOS: 492-2100 and 2286-43569, or a sequence having at least about 65%, at least about 75%, at least about 85%, or at least about 95% identity thereto.

9. The system of any one of claims 1-7, wherein the targeting sequence of the gRNA comprises a sequence selected from the group consisting of the sequences of SEQ ID NOS: 492-2100 and 2286-43569.

10. The system of any one of claims 1-7, wherein the targeting sequence of the gRNA comprises a sequence of SEQ ID NOS: 492-2100 and 2286-43569 with a single nucleotide removed from the 3′ end of the sequence.

11. The system of any one of claims 1-7, wherein the targeting sequence of the gRNA comprises a sequence of SEQ ID NOS: 492-2100 and 2286-43569 with two nucleotides removed from the 3′ end of the sequence.

12. The system of any one of claims 1-7, wherein the targeting sequence of the gRNA comprises a sequence of SEQ ID NOS: 492-2100 and 2286-43569 with three nucleotides removed from the 3′ end of the sequence.

13. The system of any one of claims 1-7, wherein the targeting sequence of the gRNA comprises a sequence of SEQ ID NOS: 492-2100 and 2286-43569 with four nucleotides removed from the 3′ end of the sequence.

14. The system of any one of claims 1-7, wherein the targeting sequence of the gRNA comprises a sequence of SEQ ID NOS: 492-2100 and 2286-43569 with five nucleotides removed from the 3′ end of the sequence.

15. The system of any one of claims 1-7, wherein the targeting sequence of the gRNA comprises a sequence of SEQ ID NOS: 37971-37979, 38027, 38136, 38137, 38152-38158, 38160, 38162-38174, 38176, 38177, 38181, 38195, 38196, 38198, 38199, 38253-38256, 38259-38267, 38306 and 38311-38353.

16. The system of claim 15, wherein the targeting sequence of the gRNA is complementary to a sequence selected from the group consisting of PTBP1 exon 1, PTBP1 exon 2, PTBP1 exon 3, PTBP1 exon 4, PTBP1 exon 5, PTBP1 exon 6, PTBP1 exon 7, PTBP1 exon 8, PTBP1 exon 9, PTBP1 exon 10, PTBP1 exon 11, PTBP1 exon 12, PTBP1 exon 13, PTBP1 exon 14, PTBP1 exon 15, and PTBP1 exon 16.

17. The system of claim 16, wherein the targeting sequence of the gRNA is complementary to a sequence selected from the group consisting of PTBP1 exon 1, PTBP1 exon 2, and PTBP1 exon 3.

18. The system of any one of claims 1-17, further comprising a second gRNA, wherein the second gRNA has a targeting sequence complementary to a different or overlapping portion of the PTBP1 target nucleic acid compared to the targeting sequence of the gRNA of the first gRNA.

19. The system of claim 18, wherein the second gRNA has a targeting sequence complementary to the same exon targeted by the first gRNA.

20. The system of claim 18 or claim 19, wherein the first or second gRNA scaffold comprises a sequence having at least one modification relative to a reference gRNA sequence selected from the group consisting of SEQ ID NOS: 4-16.

21. The system of claim 20, wherein the at least one modification of the reference gRNA comprises;
a. at least one nucleotide substitution in a region of the gRNA variant;
b. at least one nucleotide deletion in a region of the gRNA variant;
c. at least one nucleotide insertion in a region of the gRNA variant;
d. a substitution of all or a portion of a region of the gRNA variant;
e. a deletion of all or a portion of a region of the gRNA variant; or
f. any combination of (a)-(e).

22. The system of claim 21, wherein the modified region of the gRNA variant is selected from the group consisting of extended stem loop, scaffold stem loop, triplex, and pseudoknot.

23. The gRNA variant of claim 22, wherein the scaffold stem further comprises a bubble.

24. The gRNA variant of claim 22 or claim 23, wherein the triplex further comprises a loop region.

25. The gRNA variant of any one of claims 21-24, wherein the scaffold further comprises a 5′ unstructured region.

26. The gRNA variant of any one of claims 21-25, wherein the at least one modification comprises:
a. a substitution of 1 to 15 consecutive or non-consecutive nucleotides in the gRNA variant in one or more regions;
b. a deletion of 1 to 10 consecutive or non-consecutive nucleotides in the gRNA variant in one or more regions;
c. an insertion of 1 to 10 consecutive or non-consecutive nucleotides in the gRNA variant in one or more regions;
d. a substitution of the scaffold stem loop or the extended stem loop with an RNA stem loop sequence from a heterologous RNA source; or
e. any combination of (a)-(d).

27. The gRNA variant of any one of claims 21-26, wherein the heterologous extended stem loop region comprises at least 10, at least 20, at least 100, at least 500, at least 1000, or at least 10,000 nucleotides.

28. The gRNA variant of claim 27, wherein the heterologous extended stem loop sequence increases the stability of the gRNA.

29. The gRNA variant of claim 27 or claim 28, wherein the heterologous RNA stem loop sequence is selected from one or more of MS2 hairpin, Qβ hairpin, U1 hairpin II, Uvsx, PP7 stem loop, or Rev Response Element (RRE), or a sequence variant thereof.

30. The gRNA variant of claim 29, wherein the heterologous RNA stem loop is capable of binding a protein, an RNA structure, a DNA sequence, or a small molecule.

31. The system of any one of claims 1-30, wherein the first or second gRNA has a scaffold comprising a sequence having at least about 50%, at least about 60%, at least about 70%, at least about 80%, at least about 90%, at least about 95%, at least about 96%, at least about 97%, at least about 98%, at least about 99%, or 100% sequence identity to a sequence selected from the group consisting of SEQ ID NOS: 2238-2285, 43571-43661, 44045, and 44047.

32. The system of any one of claims 1-30, wherein the first or second gRNA has a scaffold comprising a sequence selected from the group consisting of SEQ ID NOs: 2238-2285, 43571-43661, 44045, and 44047.

33. The system of any one of claims 1-30, wherein the first or second gRNA has a scaffold consisting of a sequence selected from the group consisting of SEQ ID NOs: 2238-2285, 43571-43661, 44045, and 44047.

34. The system of any one of claims 1-33, wherein the Class 2, Type V CRISPR protein is a CasX variant protein having at least one modification relative to a reference CasX protein having a sequence selected from the group consisting of SEQ ID NOS: 1-3 wherein the CasX variant exhibits at least one improved characteristic as compared to the reference CasX protein.

35. The system of claim 34, wherein the at least one modification comprises at least one amino acid substitution, deletion, or substitution in a domain of the CasX variant protein relative to the reference CasX protein.

36. The system of claim 35, wherein the domain is selected from the group consisting of a non-target strand binding (NTSB) domain, a target strand loading (TSL) domain, a helical I domain, a helical II domain, an oligonucleotide binding domain (OBD), and a RuvC DNA cleavage domain.

37. The system of any one of claims 34-36, wherein the CasX variant comprises an NTSB domain derived from SEQ ID NO: 1 and TSL, helical I, helical II domain, OBD, and RuvC domains derived from SEQ ID NO: 2.

38. The system of claim 37, wherein the CasX variant comprises the sequence of SEQ ID NO: 127.

39. The system of claim 37, wherein the CasX variant comprises a helical 1B domain derived from SEQ ID NO: 1

40. The system of claim 39, wherein the CasX variant comprises the sequence of SEQ ID NOS: 132-148 or 43662-43907.

41. The system of any one of claims 34-36, wherein the Class 2, Type V CRISPR protein is a CasX variant protein comprising a sequence selected from the group consisting of SEQ ID NOS: 59, 72-99, 101-148, and 43662-43907, or a sequence having at least about 50%, at least about 60%, at least about 70%, at least about 80%, at least about 90%, or at least about 95%, or at least about 95%, or at least about 96%, or at least about 97%, or at least about 98%, or at least about 99% sequence identity thereto.

42. The system of any one of claims 34-36, wherein the Class 2, Type V CRISPR protein is a CasX variant protein comprising a sequence selected from the group consisting of SEQ ID NOS: 59, 72-99, 101-148, and 43662-43907.

43. The system of any one of claims 34-36, wherein the CasX variant protein consists of a sequence selected from the group consisting of SEQ ID NOS: 59, 72-99, 101-148, and 43662-43907.

44. The system of any one of claims 34-43, wherein the CasX variant protein further comprises one or more nuclear localization signals (NLS).

45. The system of claim 44, wherein the one or more NLS are selected from the group of sequences consisting of PKKKRKV (SEQ ID NO: 149), KRPAATKKAGQAKKKK (SEQ ID NO: 150), PAAKRVKLD (SEQ ID NO: 151), RQRRNELKRSP (SEQ ID NO: 152), NQSSNFGPMKGGNFGGRSSGPYGGGGQYFAKPRNQGGY (SEQ ID NO: 153), RMRIZFKNKGKDTAELRRRRVEVSVELRKAKKDEQILKRRNV (SEQ ID NO: 154), VSRKRPRP (SEQ ID NO: 155), PPKKARED (SEQ ID NO: 156), PQPKKKPL (SEQ ID NO: 185), SALIKKKKKMAP (SEQ ID NO: 157), DRLRR (SEQ ID NO: 158), PKQKKRK (SEQ ID NO: 159), RKLKKKIKKL (SEQ ID NO: 160), REKKKFLKRR (SEQ ID NO: 161), KRKGDEVDGVDEVAKKKSKK (SEQ ID NO: 162), RKCLQAGMNLEARKTKK (SEQ ID NO: 163), PRPRKIPR (SEQ ID NO: 164), PPRKKRTVV (SEQ ID NO: 165), NLSKKKKRKREK (SEQ ID NO: 166), RRPSRPFRKP (SEQ ID NO: 167), KRPRSPSS (SEQ ID NO: 168), KRGINDRNFWRGENERKTR (SEQ ID NO: 169), PRPPKMARYDN (SEQ ID NO: 170), KRSFSKAF (SEQ ID NO: 186), KLKIKRPVK (SEQ ID NO: 171), PKTRRRPRRSQRKRPPT (SEQ ID NO: 173), RRKKRRPRRKKRR (SEQ ID NO: 176), PKKKSRKPKKKSRK (SEQ ID NO: 177), HKKKHPDASVNFSEFSK (SEQ ID NO: 178), QRPGPYDRPQRPGPYDRP (SEQ ID NO: 179), LSPSLSPLLSPSLSPL (SEQ ID NO: 180), RGKGGKGLGKGGAKRHRK (SEQ ID NO: 181), PKRGRGRPKRGRGR (SEQ ID NO: 182), MSRRRKANPTKLSENAKKLAKEVEN (SEQ ID NO: 174), PKKKRKVPPPPAAKRVKLD (SEQ ID NO: 172), and PKKKRKVPPPPKKKRKV (SEQ ID NO: 184).

46. The system of claim 44 or claim 45, wherein the one or more NLS are located at or near the C-terminus of the CasX variant protein.

47. The system of claim 44 or claim 45, wherein the one or more NLS are located at or near the N-terminus of the CasX variant protein.

48. The system of claim 44 or claim 45, comprising one or more NLS located at or near the N-terminus and at or near the C-terminus of the CasX variant protein.

49. The system of any one of claims 34-48, wherein the CasX variant is capable of forming a ribonuclear protein complex (RNP) with a gRNA.

50. The system of claim 49, wherein an RNP of the CasX variant protein and the gRNA variant exhibit at least one or more improved characteristics as compared to an RNP of a reference CasX protein of SEQ ID NO: 1, SEQ ID NO: 2, or SEQ ID NO: 3 and a gRNA comprising a sequence of SEQ ID NOs: 4-16.

51. The system of claim 50, wherein the improved characteristic is selected from one or more of the group consisting of improved folding of the CasX variant; improved binding affinity to a guide ribonucleic acid (gRNA); improved binding affinity to a target DNA; improved ability to utilize a greater spectrum of one or more PAM sequences, including ATC, CTC, GTC, or TTC, in the editing of target DNA; improved unwinding of the target DNA; increased editing activity; improved editing efficiency; improved editing specificity; increased nuclease activity; increased target strand loading for double strand cleavage; decreased target strand loading for single strand nicking; decreased off-target cleavage; improved binding of non-target DNA strand; improved protein stability; improved protein solubility; improved protein:gRNA complex (RNP) stability; and improved fusion characteristics.

52. The system of claim 50 or claim 51, wherein the improved characteristic of the RNP of the CasX variant protein and the gRNA variant is at least about 1.1 to about 100-fold or more improved relative to the RNP of the reference CasX protein of SEQ ID NO: 1, SEQ ID NO: 2, or SEQ ID NO: 3 and the gRNA comprising a sequence of SEQ ID NOs: 4-16.

53. The system of claim 50 or claim 51, wherein the improved characteristic of the CasX variant protein is at least about 1.1, at least about 2, at least about 10, at least about 100-fold or more improved relative to the reference CasX protein of SEQ ID NO: 1, SEQ ID NO: 2, or SEQ ID NO: 3 and the gRNA comprising a sequence of SEQ ID NOs: 4-16.

54. The system of any one of claims 50-53, wherein the improved characteristic comprises editing efficiency, and the RNP of the CasX variant protein and the gRNA variant comprises a 1.1 to 100-fold improvement in editing efficiency compared to the RNP of the reference CasX protein of SEQ ID NO: 2 and the gRNA of SEQ ID NOs: 4-16.

55. The system of any one of claims 49-54, wherein the RNP comprising the CasX variant and the gRNA variant exhibits greater editing efficiency and/or binding of a target sequence in the target DNA when any one of the PAM sequences TTC, ATC, GTC, or CTC is located 1 nucleotide 5′ to the non-target strand of the protospacer having identity with the targeting sequence of the gRNA in a cellular assay system compared to the editing efficiency and/or binding of an RNP comprising a reference CasX protein and a reference gRNA in a comparable assay system.

56. The system of claim 55, wherein the PAM sequence is TTC.

57. The system of claim 55, wherein the PAM sequence is ATC.

58. The system of claim 55, wherein the PAM sequence is CTC.

59. The system of claim 55, wherein the PAM sequence is GTC.

60. The system of any one of claims 55-59, wherein the increased binding affinity for the one or more PAM sequences is at least 1.5-fold greater compared to the binding affinity of any one of the reference CasX proteins of SEQ ID NOS: 1-3 for the PAM sequences.

61. The system of any one of claims 49-60, wherein the CasX variant and the gRNA variant are able to form RNP having at least about a 5%, at least about a 10%, at least about a 15%, or at least about a 20% higher percentage of cleavage-competent conformation compared to an RNP of any one of the reference CasX proteins of SEQ ID NOS: 1-3 and the gRNA of SEQ ID NOs: 4-16.

62. The system of any one of claims 49-61, wherein the RNP comprising the CasX variant and the gRNA variant exhibit a cleavage rate for the target nucleic acid in a timed in vitro assay that is at least about 5-fold, at least about 10-fold, or at least about 20-fold higher compared to an RNP of any one of the reference CasX proteins of SEQ ID NOS: 1-3 and the gRNA of SEQ ID NOs: 4-16 in a comparable assay.

63. The system of any one of claims 49-62, wherein the RNP comprising the CasX variant and the gRNA variant exhibit higher percent editing of the target nucleic acid in a timed in vitro assay that is at least about 5-fold, at least about 10-fold, at least about 20-fold, or at least about 100-fold higher compared to an RNP of any one of the reference CasX proteins of SEQ ID NOS: 1-3 and the gRNA of SEQ ID NOs: 4-16 in a comparable assay.

64. The system of any one of claims 34-63, wherein the CasX variant protein comprises a RuvC DNA cleavage domain having nickase activity.

65. The system of any one of claims 34-63, wherein the CasX variant protein comprises a RuvC DNA cleavage domain having double-stranded cleavage activity.

66. The system of any one of claims 34-49, wherein the CasX variant protein is a catalytically inactive CasX variant protein (dCasX), and wherein the dCasX and the gRNA retain the ability to bind to the PTBP1 target nucleic acid.

67. The system of claim 66, wherein the dCasX comprises a mutation at residues:
a. D672, E769, and/or D935 corresponding to the CasX protein of SEQ ID NO:1; or
b. D659, E756 and/or D922 corresponding to the CasX protein of SEQ ID NO: 2.

68. The system of claim 67, wherein the mutation is a substitution of alanine for the residue.

69. The system of any one of claims 1-65, further comprising a donor template nucleic acid.

70. The system of claim 69, wherein the donor template comprises a nucleic acid comprising at least a portion of a PTBP1 gene selected from the group consisting of a PTBP1 exon, a PTBP1 intron, a PTBP1 intron-exon junction, and a PTBP1 regulatory element.

71. The system of claim 70, wherein the donor template sequence comprises one or more mutations relative to a corresponding portion of a wild-type PTBP1 gene.

72. The system of claim 70 or claim 71, wherein the donor template comprises a nucleic acid comprising at least a portion of a PTBP1 exon selected from the group consisting of PTBP1 exon 1, PTBP1 exon 2, PTBP1 exon 3, PTBP1 exon 4, PTBP1 exon 5, PTBP1 exon 6, PTBP1 exon 7, PTBP1 exon 8, PTBP1 exon 9, PTBP1 exon 10, PTBP1 exon 11, PTBP1 exon 12, PTBP1 exon 13, PTBP1 exon 14, PTBP1 exon 15, and PTBP1 exon 16.

73. The system of claim 72, wherein the donor template comprises a nucleic acid comprising at least a portion of a PTBP1 exon selected from the group consisting of PTBP1 exon 1, PTBP1 exon 2, and PTBP1 exon 3.

74. The system of any one of claims 69-73, wherein the donor template ranges in size from 10-15,000 nucleotides.

75. The system of any one of claims 69-74, wherein the donor template is a single-stranded DNA template or a single stranded RNA template.

76. The system of any one of claims 69-74, wherein the donor template is a double-stranded DNA template.

77. The system of any one of claims 69-76, wherein the donor template comprises homologous arms at or near the 5′ and 3′ ends of the donor template that are complementary to sequences flanking cleavage sites in the PTBP1 target nucleic acid introduced by the Class 2, Type V CRISPR protein.

78. A nucleic acid comprising the donor template of any one of claims 69-77.

79. A nucleic acid comprising a sequence that encodes the CasX variant of any one of claims 34-68.

80. A nucleic acid comprising a sequence that encodes the gRNA of any one of claims 1-33.

81. The nucleic acid of claim 79, wherein the sequence that encodes the CasX variant protein is codon optimized for expression in a eukaryotic cell.

82. A vector comprising the gRNA of any one of claims 1-33, the CasX variant protein of any one of claims 34-68, or the nucleic acid of any one of claims 78-81.

83. The vector of claim 82, wherein the vector further comprises a promoter.

84. The vector of claim 82, wherein the vector is selected from the group consisting of a retroviral vector, a lentiviral vector, an adenoviral vector, an adeno-associated viral (AAV) vector, a herpes simplex virus (HSV) vector, a CasX delivery particle (XDP), a plasmid, a minicircle, a nanoplasmid, a DNA vector, and an RNA vector.

85. The vector of claim 84, wherein the vector is an AAV vector.

86. The vector of claim 85, wherein the AAV vector is selected from AAV1, AAV2, AAV3, AAV4, AAV5, AAV6, AAV7, AAV8, AAV9, AAV10, AAV11, AAV12, AAV-Rh74, or AAVRh10.

87. The vector of claim 84, wherein the vector is a retroviral vector.

88. The vector of claim 84, wherein the vector is a XDP comprising one or more components of a gag polyprotein.

89. The vector of claim 88, wherein the one or more components of the gag polyprotein are selected from the group consisting of matrix protein (MA), a nucleocapsid protein (NC), a capsid protein (CA), a p1 peptide, a p6 peptide, a P2A peptide, a P2B peptide, a P10 peptide, a p12 peptide, a PP21/24 peptide, a P12/P3/P8 peptide, a P20 peptide, a protease cleavage site.

90. The vector of claim 88 or claim 89, comprising the CasX variant protein and the gRNA.

91. The vector of claim 90, wherein the CasX variant protein and the gRNA are associated together in an RNP.

92. The vector of any one of claims 88-91, further comprising a glycoprotein tropism factor.

93. The vector of any one of claims 88-92, wherein the glycoprotein tropism factor has binding affinity for a cell surface marker of a target cell and facilitates entry of the XDP into the target cell.

94. The vector of any one of claims 82-93, further comprising the donor template.

95. A host cell comprising the vector of any one of claims 82-94.

96. The host cell of claim 95, wherein the host cell is selected from the group consisting of Baby Hamster Kidney fibroblast (BHK) cells, human embryonic kidney 293 (HEK293), human embryonic kidney 293T (HEK293T) cells, NS0 cells, SP2/0 cells, YO myeloma cells, P3X63 mouse myeloma cells, PER cells, PER.C6 cells, hybridoma cells, NIH3T3 cells, CV-1 (simian) in Origin with SV40 genetic material (COS) cells, HeLa cells, Chinese hamster ovary (CHO) cells, or yeast cells.

97. A method of modifying a PTBP1 target nucleic acid sequence in a population of cells, the method comprising introducing into cells of the population:
a. the system of any one of claims 1-77;
b. the nucleic acid of any one of claims 78-81;
c. the vector as in any one of claims 82-87;
d. the XDP of any one of claims 89-93; or
e. combinations of two or more of (a)-(d),
wherein the PTBP1 gene target nucleic acid sequence of the cells targeted by the first gRNA is modified by the CasX variant protein.

98. The method of claim 97, wherein the modifying comprises introducing a single-stranded break in the PTBP1 gene target nucleic acid sequence of the cells of the population.

99. The method of claim 97, wherein the modifying comprises introducing a double-stranded break in the PTBP1 gene target nucleic acid sequence of the cells of the population.

100. The method of any one of claims 97-99, further comprising introducing into the cells of the population a second gRNA or a nucleic acid encoding the second gRNA, wherein the second gRNA has a targeting sequence complementary to a different or overlapping portion of the PTBP1 gene target nucleic acid compared to the first gRNA, and wherein introducing the second gRNA results in an additional break in the PTBP1 target nucleic acid of the cells of the population.

101. The method of any one of claims 97-100, wherein the modifying comprises introducing an insertion, deletion, substitution, duplication, or inversion of one or more nucleotides in the PTBP1 gene of the cells of the population.

102. The method of any one of claims 97-101, wherein the modifying comprises insertion of the donor template into the break site(s) of the PTBP1 gene target nucleic acid sequence of the cells of the population.

103. The method of claim 102, wherein the insertion of the donor template is mediated by homology-directed repair (HDR) or homology-independent targeted integration (HITI).

104. The method of any one of claims 97-102, wherein the modifying results in at least about 10%, at least about 20%, at least about 30%, at least about 40%, at least about 50%, at least about 60%, at least about 70%, at least about 80%, or at least about 90% edits in the PTBP1 gene in the modified cells of the population.

105. The method of any one of claims 97-104, wherein the modifying results in a knock-down or knock-out of the PTBP1 gene in the cells of the population.

106. The method of any one of claims 97-105, wherein the PTBP1 gene of the cells of the population is modified such that expression of the PTBP1 protein is reduced by at least about 10%, at least about 20%, at least about 30%, at least about 40%, at least about 50%, at least about 60%, at least about 70%, at least about 80%, or at least about 90% in comparison to cells in which the PTBP1 gene has not been modified.

107. The method of any one of claims 97-105, wherein the PTBP1 gene of the cells of the population is modified such that at least about 10%, at least about 20%, at least about 30%, at least about 40%, at least about 50%, at least about 60%, at least about 70%, at least about 80%, or at least about 90% of the cells do not express a detectable level of PTBP1 protein.

108. The method of any one of claims 97-107, wherein the cells are eukaryotic.

109. The method of claim 108, wherein the eukaryotic cells are selected from the group consisting of rodent cells, mouse cells, rat cells, and non-human primate cells.

110. The method of claim 108, wherein the eukaryotic cells are human cells.

111. The method of any one of claims 108-110, wherein the eukaryotic cells are selected from the group consisting of microglial cells, astrocytes, oligodendrocytes, and fibroblasts.

112. The method of claim 111, wherein the modification of the PTBP1 target nucleic acid sequence results in reprogramming of the eukaryotic cells into neurons.

113. The method of claim 112, wherein the modification of the PTBP1 target nucleic acid sequence results in an increase in expression of nPTB in the modified cells by at least about 10%, at least about 20%, at least about 30%, at least about 40%, at least about 50%, at least about 60%, at least about 70%, at least about 80%, or at least about 90% in comparison to cells in which the PTBP1 gene has not been modified.

114. The method of claim 112 or claim 113, wherein the PTBP1 gene of the cells of the population is modified such that at least about 10%, at least about 20%, at least about 30%, at least about 40%, at least about 50%, at least about 60%, at least about 70%, at least about 80%, or at least about 90% of the cells express a detectable level of nPTB protein.

115. The method of any one of claim 97-114, wherein the modification of the PTBP1 gene target nucleic acid sequence of the population of cells occurs in vitro or ex vivo.

116. The method of any one of claim 97-114, wherein the modification of the PTBP1 gene target nucleic acid sequence of the population of cells occurs in vivo in a subject.

117. The method of claim 116, wherein the subject is selected from the group consisting of a rodent, a mouse, a rat, and a non-human primate.

118. The method of claim 116, wherein the subject is a human.

119. The method of any one of claims 116-118, wherein the method comprises administering a therapeutically effective dose of an AAV vector to the subject.

120. The method of claim 119, wherein the AAV vector is administered to the subject at a dose of at least about 1×10⁵ vector genomes/kg (vg/kg), at least about 1×10⁶ vg/kg, at least about 1×10⁷ vg/kg, at least about 1×10⁸ vg/kg, at least about 1×10⁹ vg/kg, at least about 1×10¹⁰ vg/kg, at least about 1×10¹¹ vg/kg, at least about 1×10¹² vg/kg, at least about 1×10¹³ vg/kg, at least about 1×10¹⁴ vg/kg, at least about 1×10¹⁵ vg/kg, or at least about 1×10¹⁶ vg/kg.

121. The method of claim 119, wherein the AAV vector is administered to the subject at a dose of at least about 1×10⁵ vg/kg to about 1×10¹⁶ vg/kg, at least about 1×10⁶ vg/kg to about 1×10¹⁵ vg/kg, or at least about 1×10⁷ vg/kg to about 1×10¹⁴ vg/kg.

122. The method of any one of claims 116-118, wherein the method comprises administering a therapeutically effective dose of a CasX delivery particle (XDP) to the subject.

123. The method of claim 122, wherein the XDP is administered to the subject at a dose of at least about 1×10⁵ particles/kg, at least about 1×10⁶ particles/kg, at least about 1×10⁷ particles/kg at least about 1×10⁸ particles/kg, at least about 1×10⁸ particles/kg, at least about 1×10¹⁰ particles/kg, at least about 1×10¹¹ particles/kg, at least about 1×10¹² particles/kg, at least about 1×10¹³ particles/kg, at least about 1×10¹⁴ particles/kg, at least about 1×10¹⁵ particles/kg, at least about 1×10¹⁶ particles/kg.

124. The method of claim 122, wherein the XDP is administered to the subject at a dose of at least about 1×10⁵ particles/kg to about 1×10¹⁶ particles/kg, or at least about 1×10⁶ particles/kg to about 1×10¹⁵ particles/kg, or at least about 1×10⁷ particles/kg to about 1×10¹⁴ particles/kg.

125. The method of any one of claims 116-124, wherein the vector or XDP is administered to the subject by a route of administration selected from intraparenchymal, intravenous, intra-arterial, intracerebroventricular, intracisternal, intrathecal, intracranial, lumbar, intraperitoneal, or combinations thereof.

126. The method of any one of claims 97-125, further comprising contacting the PTBP1 gene target nucleic acid sequence of the population of cells with:
a. an additional CRISPR nuclease and a gRNA targeting a different or overlapping portion of the PTBP1 target nucleic acid compared to the first gRNA;
b. a polynucleotide encoding the additional CRISPR nuclease and the gRNA of (a);
c. a vector comprising the polynucleotide of (b); or
d. a XDP comprising the additional CRISPR nuclease and the gRNA of (a),
wherein the contacting results in modification of the PTBP1 gene at a different location in the sequence compared to the sequence targeted by the first gRNA.

127. The method of claim 126, wherein the additional CRISPR nuclease is a CasX variant protein having a sequence different from the CasX variant protein of any of the preceding claims.

128. The method of claim 126, wherein the additional CRISPR nuclease is not a CasX protein.

129. The method of claim 128, wherein the additional CRISPR nuclease is selected from the group consisting of Cas9, Cas12a, Cas12b, Cas12c, Cas12d (CasY), Cas12J, Cas12k, Cas13a, Cas13b, Cas13c, Cas13d, Cas12j, Cas12k, CasY, Cas14, Cpf1, C2c1, Csn2, and sequence variants thereof.

130. A population of cells modified by the method of any one of claims 97-129, wherein the cells have been modified such that at least 70%, at least 75%, at least 80%, at least 85%, at least 90%, or at least 95% of the modified cells do not express a detectable level of PTBP1 protein.

131. A population of cells modified by the method of any one of claims 97-129, wherein the cells have been modified such that the expression of PTBP1 protein is reduced by at least 70%, at least 75%, at least 80%, at least 85%, at least 90%, or at least 95% compared to cells where the PTBP1 gene has not been modified.

132. A population of cells modified by the method of any one of claims 97-129, wherein the cells have been modified such that the expression of nPTB protein is increased by at least about 10%, at least about 20%, at least about 30%, at least about 40%, at least about 50%, at least about 60%, at least about 70%, at least about 80%, or at least about 90% in comparison to cells in which the PTBP1 gene has not been modified.

133. A method of treating a PTBP1-related disease in a subject in need thereof, the method comprising administering to the subject a therapeutically effective amount of the cells of any one of claims 130-132.

134. The method of claim 133, wherein the PTBP1-related disease is a neurologic disease or neurologic injury.

135. The method of claim 134, wherein the neurologic disease or neurologic injury is selected from the group consisting of Parkinson's disease, Huntington's disease, Alzheimer's, amyotrophic lateral sclerosis (ALS), traumatic brain injury, and traumatic spinal cord injury.

136. The method of any one of claims 133-135, wherein the cells are autologous with respect to the subject to be administered the cells.

137. The method of any one of claims 133-135, wherein the cells are allogeneic with respect to the subject to be administered the cells.

138. The method of any one of claims 133-137, wherein the cells or their progeny persist in the subject for at least one month, two month, three months, four months, five months, six months, seven months, eight months, nine months, ten months, eleven months, twelve months, thirteen months, fourteen month, fifteen months, sixteen months, seventeen months, eighteen months, nineteen months, twenty months, twenty-one months, twenty-two months, twenty-three months, two years, three years, four years, or five years after administration of the modified cells to the subject.

139. The method of any one of claims 133-138, wherein the method further comprises administering a chemotherapeutic agent.

140. The method of any one of claims 133-139, wherein the subject is selected from the group consisting of a rodent, a mouse, a rat, and a non-human primate.

141. The method of any one of claims 133-139, wherein the subject is a human.

142. A method of treating a PTBP1-related disease in a subject in need thereof, comprising modifying a PTBP1 gene in cells of the subject, the modifying comprising contacting said cells with a therapeutically effective dose of:
a. the system of any one of claims 1-77;
b. the nucleic acid of any one of claims 78-81;
c. the vector as in any one of claims 82-87;
d. the XDP of any one of claims 88-93; or
e. combinations of two or more of (a)-(d),
wherein the PTBP1 gene of the cells targeted by the first gRNA is modified by the CasX variant protein.

143. The method of claim 142, wherein the modifying comprises introducing a single-stranded break in the PTBP1 gene of the cells.

144. The method of claim 142, wherein the modifying comprises introducing a double-stranded break in the PTBP1 gene of the cells.

145. The method of any one of claims 142-144, further comprising introducing into the cells of the subject a second gRNA or a nucleic acid encoding the second gRNA, wherein the second gRNA has a targeting sequence complementary to a different or overlapping portion of the target nucleic acid compared to the first gRNA, resulting in an additional break in the PTBP1 target nucleic acid of the cells of the subject.

146. The method of any one of claims 142-145, wherein the modifying comprises introducing an insertion, deletion, substitution, duplication, or inversion of one or more nucleotides in the PTBP1 gene of the cells.

147. The method of any one of claims 142-145, wherein the modifying comprises insertion of the donor template into the break site(s) of the PTBP1 gene target nucleic acid sequence of the cells.

148. The method of claim 147, wherein the insertion of the donor template is mediated by homology-directed repair (HDR) or homology-independent targeted integration (HITI).

149. The method of any one of claims 142-148, wherein the modifying results in edits in the PTBP1 gene in at least about 10%, at least about 20%, at least about 30%, at least about 40%, at least about 50%, at least about 60%, at least about 70%, at least about 80%, or at least about 90% edits of the modified cells of the subject.

150. The method of any one of claims 142-149, wherein the modifying results in a knock-down or knock-out of the PTBP1 gene in the modified cells of the subject.

151. The method of any one of claims 142-149, wherein the PTBP1 gene of the cells of the subject are modified such that expression of the PTBP1 protein by the modified cells is reduced by at least about 10%, at least about 20%, at least about 30%, at least about 40%, at least about 50%, at least about 60%, at least about 70%, at least about 80%, or at least about 90% in comparison to cells that have not been modified.

152. The method of any one of claims 142-149, wherein the PTBP1 gene of the cells of the subject are modified such that at least 50%, at least 60%, at least 70%, at least 75%, at least 80%, at least 85%, at least 90%, or at least 95% of the modified cells do not express a detectable level of PTBP1 protein.

153. The method of any one of claims 142-152, wherein the cells modified by the method are selected from the group consisting of microglial cells, astrocytes, oligodendrocytes, and fibroblasts.

154. The method of claim 153, wherein the modification results in reprogramming of the modified cells into neurons.

155. The method of any one of claims 142-154, wherein the modification results in an increase in expression of nPTB in the modified cells by at least about 10%, at least about 20%, at least about 30%, at least about 40%, at least about 50%, at least about 60%, at least about 70%, at least about 80%, or at least about 90% in comparison to cells in which the PTBP1 gene has not been modified.

156. The method of any one of claims 142-155, wherein at least about 10%, at least about 20%, at least about 30%, at least about 40%, at least about 50%, at least about 60%, at least about 70%, at least about 80%, or at least about 90% of the modified cells express a detectable level of nPTB protein.

157. The method of any one of claims 142-156, wherein the PTBP1-related disease is a neurologic disease or neurologic injury.

158. The method of claim 157, wherein the neurologic disease or neurologic injury is selected from the group consisting of Parkinson's disease, Huntington's disease, Alzheimer's, amyotrophic lateral sclerosis (ALS), traumatic brain injury, and traumatic spinal cord injury.

159. The method of any one of claims 142-152, wherein the PTBP1-related disease is a cancer.

160. The method of claim 159, wherein the cancer is selected from the group consisting of ovarian cancer, glioblastoma, bladder cancer, colon cancer and breast cancer.

161. The method of claim 159 or claim 160, wherein the modification of the PTBP1 gene results in prevention or reduction of tumorigenesis of the cells.

162. The method of claim 159 or claim 160, wherein the modification of the PTBP1 target nucleic acid sequence results in stasis of an existing tumor in a subject.

163. The method of any one of claims 142-162, wherein the subject is selected from the group consisting of rodent, mouse, rat, and non-human primate.

164. The method of any one of claims 142-162, wherein the subject is a human.

165. The method of any one of claims 142-164, wherein the vector is AAV and is administered to the subject at a dose of at least about 1×10⁵ vector genomes/kg (vg/kg), at least about 1×10⁶ vg/kg, at least about 1×10⁷ vg/kg, at least about 1×10⁸ vg/kg, at least about 1×10⁹ vg/kg, at least about 1×10¹⁰ vg/kg, at least about 1×10¹¹ vg/kg, at least about 1×10¹² vg/kg, at least about 1×10¹³ vg/kg, at least about 1×10¹⁴ vg/kg, at least about 1×10¹⁵ vg/kg, or at least about 1×10¹⁶ vg/kg.

166. The method of any one of claims 142-164, wherein the vector is AAV and is administered to the subject at a dose of at least about 1×10⁵ vg/kg to about 1×10¹⁶ vg/kg, at least about 1×10⁶ vg/kg to about 1×10¹⁵ vg/kg, or at least about 1×10⁷ vg/kg to about 1×10¹⁴ vg/kg.

167. The method of any one of claims 142-164, wherein the XDP is administered to the subject at a dose of at least about 1×10⁵ particles/kg, at least about 1×10⁶ particles/kg, at least about 1×10⁷ particles/kg at least about 1×10⁸ particles/kg, at least about 1×10⁹ particles/kg, at least about 1×10¹⁰ particles/kg, at least about 1×10¹¹ particles/kg, at least about 1×10¹² particles/kg, at least about 1×10¹³ particles/kg, at least about 1×10¹⁴ particles/kg, at least about 1×10¹⁵ particles/kg, at least about 1×10¹⁶ particles/kg.

168. The method of any one of claims 142-164, wherein the XDP is administered to the subject at a dose of at least about 1×10⁵ particles/kg to about 1×10¹⁶ particles/kg, or at least about 1×10⁶ particles/kg to about 1×10¹⁵ particles/kg, or at least about 1×10⁷ particles/kg to about 1×10¹⁴ particles/kg.

169. The method of any one of claims 142-168, wherein the vector or XDP is administered to the subject by a route of administration selected from intraparenchymal, intravenous, intra-arterial, intracerebroventricular, intracisternal, intrathecal, intracranial, lumbar, intraperitoneal, or combinations thereof.

170. The method of any one of claims 142-169, wherein the method results in improvement in at least one clinically-relevant endpoint in the subject.

171. The method of claim 170, wherein the disease is Parkinson's disease and the clinically-relevant endpoint is selected from the group consisting of disease progression, Unified Parkinson's Disease Rating Scale (UPDRS), Unified Dyskinesia Rating Scale (UDysRS), Parkinson's Disease Quality of Life Questionnaire (PDQ-39) score, Movement Disorder Society-Sponsored Unified Parkinson's Disease Rating Scale (MDS-UPDRS), changes from baseline of motor score as measured by Inertial Measurement Unit (IMU) on Finger taping (FT) and Pronation-supination movement of the hands (PSH), delay in time to clinically meaningful worsening of motor progression, levodopa's duration of effect (“on time”), Clinical Global Impression—Improvement (CGI-I), change from baseline in Zarit Burden Interview score (ZBI), EQ-5D summary index, total disease duration, patient cognitive status (MMSE), and change from baseline in fatigue.

172. The method of claim 170, wherein the disease is Huntington's disease and the clinically-relevant endpoint is selected from the group consisting of Unified Huntington's Disease Rating Scale (UHDRS), cognitive decline, psychiatric abnormalities, motor impairment, changes in baseline in striatal volume, Stroop word test, total motor score (TMS), bradykinesia, dystonia, Symbol Digit Modalities Test, University of Pennsylvania Smell Identification Test, emotion recognition, speeded tapping, paced tapping, the Trail Making Test, intracranial-corrected volumes (ICV), and the Everyday Cognition Rating Scale (ECOG).

173. The method of claim 170, wherein the disease is ALS and the clinically-relevant endpoint is selected from the group consisting of ALS Functional Rating Scale (ALSFRS-(R)), combined assessment of function and survival, time to death, time to tracheostomy, time to persistent assisted ventilation (DTP), forced vital capacity (% FVC), manual muscle test, maximum voluntary isometric contraction, duration of response, progression-free survival, time to progression of disease, and time-to-treatment failure.

174. The method of claim 170, wherein the disease is Alzheimer's disease and the clinically-relevant endpoint is selected from the group consisting of change in Alzheimer's Disease Assessment Scale-Cognitive subscale (ADAS-Cog₁₄) score, change in the Cohen-Mansfield Agitation Inventory (CMAI) score, change in the Alzheimer's Disease Cooperative Study-Instrumental Activities of Daily Living (ADCS-iADL) score, Clinical Dementia Rating Scale-Sum of Boxes (CDR-SB) score, DIAN Multivariate Cognitive Endpoint, Preclinical Alzheimer Cognitive Composite 5 (PACC5) score, Mini-Mental State Exam (MMSE) score, cognitive impairment, functional impairment, brain amyloid levels measured by amyloid positron emission tomography (PET), brain tau levels measured by PET, spinal fluid amyloid-β levels, and spinal fluid tau levels.

175. The method of claim 170, wherein the disease is cancer and the clinically-relevant endpoint is selected from the group consisting of tumor shrinkage as a complete, partial or incomplete response; time-to-progression; time to treatment failure; biomarker response; progression-free survival; disease free-survival; time to recurrence; time to metastasis; time of overall survival; improvement of quality of life; and improvement of symptoms.

176. The system of any one of claims 1-77, the nucleic acid of any one of claims 78-81, the vector of any one of 82-87, the XDP of any one of claims 88-93, the host cell of claim 95 or claim 96, or the population of cells of any one of claims 130-132, for use as a medicament for the treatment of a PTBP1 related disease.

177. The system of any one of claims 1-77, wherein the target nucleic acid sequence is complementary to a non-target strand sequence located 1 nucleotide 3′ of a protospacer adjacent motif (PAM) sequence.

178. The system of claim 177, wherein the PAM sequence comprises a TC motif.

179. The system of claim 178, wherein the PAM sequence comprises ATC, GTC, CTC or TTC.

180. The system of any one of claims 177-179, wherein the Class 2 Type V CRISPR protein comprises a RuvC domain.

181. The system of claim 180, wherein the RuvC domain generates a staggered double-stranded break in the target nucleic acid sequence.

182. The system of any one of claims 177-181, wherein the Class 2 Type V CRISPR protein does not comprise an HNH nuclease domain.

183. A composition of the Class 2, type V CRISPR protein of any one of claims 34-65 and the gRNA of any one of claims 1-33 as gene editing pairs for use as a medicament for the treatment of a subject having a PTBP1-related disease.
